United States Patent Application Publication US 2007/0054278 A1 - sequence listing, part 124

SEQ ID NO: 252376 - DNA, 201 bp, Homo sapiens
gctctgtcgcccaggctggagtgcagtggcgcgatctcggttcaccgcaagctccgcctcctgggttcacgccattctcctgcctcagcctccggagtagytgagactacaggcccctgcgaccacgcccggcgaattttttgttatttttagtagagacggggcttcaccatgttagccaggatggtctcgatctcctga

SEQ ID NO: 252377 - DNA, 201 bp, Homo sapiens
cacaagttagtaaaaaccactgccctgcgtgatgatgatgaggaggcagaactcacgcgtccttcctttccctgcacgtgggtggaggcagcaggaccctscctggaaagcagagacgccctcgccaagcatggggggccttgggaacgaactgtgctccttgtctctctagggaaagaattgagacctaaaggatttgac

SEQ ID NO: 252378 - DNA, 201 bp, Homo sapiens
ctctcaccctgtaaactatatggcccctctttttttccttaagaggggacttctcatttgagagacggtgtgaaatgtttattttatttctttaaaattcrgtttaaaatattgtattttattaagaacctctaacagctttgcacaaacaaaccttatcgattgcagcagcagcagccccgtttcagacctctcaggctt

SEQ ID NO: 252379 - DNA, 201 bp, Homo sapiens
gagacggggtttcgccatgttagccaggatgatctcgatctgctgaccttgtgatccacccacctcggcctcccaaagtgctgggattacaggtgtgagcygccacgcccggcctgctgtgggattatttctaattaataaatgttgaaacgtgtcaaaggtttcccaacattttccaagaatactaactcctgtgttttg

SEQ ID NO: 252380 - DNA, 201 bp, Homo sapiens
cgggaagaacatttagattcaagtatcaaccattgggaaataagtctttaaacctgttgttcagttgtagccggaaggtagtacctttttgagttgggggmaaatgaccacatctgagttatgttttttcaaaaaaagtgttttaagcaacgctaagttttactttttttttttttaaacagtaaatgttatagattgacg

SEQ ID NO: 252381 - DNA, 201 bp, Homo sapiens
gatgtccgcctcagtacctcgaacagcatggcaggtcctcagcagctgtgtgtcacccaccttccatgagggacagagggtagatggccttttcttgacayggagcaagataccttgtctcttagtgtgtcgtcatccactgtcggtgatgggttgccactttcctcacagtaactgaactttgcattgatttttttgtgt

SEQ ID NO: 252382 - DNA, 201 bp, Homo sapiens
gcgcccaccaccatgcccagctaattttttttttttttttttttttttttttgcatttctagtagagatgggttttcaccctgttgtccaggctggtctcraactcctgacctcatgtgatccacccacctcagcctcccaaagtgctgggattacaggcatgtgccactgcacccagctgatttctgctatttttgttgt

SEQ ID NO: 252383 - DNA, 201 bp, Homo sapiens
tgggatcatttgctccctgtgtttttgtttagggctcaaggaacacccacagcagcccccgcagcctccttcccccaccttcctcgacagcagcctcagcrgctaccttcccccaccttcctcgacagcagcctcagcggctaccttccctcaccttcctcgacagcagcctcagcggctgcctccccgccacccccccac

SEQ ID NO: 252384 - DNA, 201 bp, Homo sapiens
aggctcctgtgaattctcaagtgatgttactgaattcttattttaaaacacacattttctaataaaataaatgaaactggacttacgactgccacaatctwtttttgtattttttatgtccttctgcaagtcttcctgggcattagaattgctcacttgtgtcttgagaaatacttcccatcttggcaaagaagagaacgc

SEQ ID NO: 252385 - DNA, 201 bp, Homo sapiens
tggccactctgtctaactcattaagcggacctagaaaatctgctcctgcctgcctttctggagttgggacagtcgatggtgagggtgggactatgtccatrtgccgtttggattgaatgcttcgtgtttctttctccacgggcagcactcaggaggccttgaagagcgggcactttgtcaacgtcctgagcatccttgtgc

SEQ ID NO: 252386 - DNA, 201 bp, Homo sapiens
atgggggcagtctgcgtttttgtgataaagcctgcagtcttgggctgctttcatatgggcagtagacgagggtgggagaggtcacgtgtagcagttaggckgagagggacaagcttgagcgctggggccctgcaggctgtgaggtccctgcagccaccagtctgcagccctgtgtttgagagtcactgcccagcccttagc

SEQ ID NO: 252387 - DNA, 201 bp, Homo sapiens
agctgctcgtgcctccgtctgtcttgcacaggggatgcacctcagctgtggctgccctctgaggtgcttcatgccgtggaggggctctgggcattgtttcrgggttagcgtgagtcaccaccacggttacttctagagcggtcgctcgctcacttgctttccttttttgaaattttaattcttacctcaccacctaataga

SEQ ID NO: 252388 - DNA, 201 bp, Homo sapiens; identical to SEQ ID NO: 49789

SEQ ID NO: 252389 - DNA, 201 bp, Homo sapiens
taggagggttgacagcattccgtatgttggcctgaagaaggtctgccatgtgtggaaaaaccagggctgtcattcacagcctgaagtggaaggggaaatayacttccagtttcctgcccatttaattaaatttaacctgagaagtttaaaagctcagtttcaatttctgtaatagctatgcaaaataatttcgaagcctta

SEQ ID NO: 252390 - DNA, 201 bp, Homo sapiens
taaaaacacacatgtttttttctactacttctctggttttatttttacatcaaactgcaccttttttgaaaattattctagagcagtctaagaggcctcgycttgaagtgggtcaccaaggggtagttttccagcacccaggggcggacgcaggcgttcctctccagcaactaatgccgaccgcacaaggtaaggcccagc

SEQ ID NO: 252391 - DNA, 201 bp, Homo sapiens
tttcttgcaacactttcaagggaacatgatggatttcttagctttcaagaagaaacattatgccccattacaagcatatcttaggcagaatgatttggacrttgaagaagaggaggaggaggaggaagaggaggaagaaaaatctgaggttatcaatgacgaggtaagaaacaggagttaatttgtttagtacaaatcttc

SEQ ID NO: 252392 - DNA, 201 bp, Homo sapiens
cccttgaccccacaaggtagggtgctctgagcaggagggagacttggcttggatgcttctttctcttccatctaaggcgagtggaaagcattcatgtgtctttgactgtatctcagaacagcacagtctagtgtgtggccatctctgatttctatagatgtgtcctagtgtcagcctgatttattttctttttcttgtgct

SEQ ID NO: 252393 - DNA, 201 bp, Homo sapiens
tctgaattcaccttttcctctacgtttcaacaggtggagaggtagtgaaaatagctcagctggcatccatcacaggaccacagagccgcgtggctcagccrgagacgccggtgacactgcagttccagggcagcaagttcaccctgtcacacagccagctccggcagctcacagcgggccagccgctgcagctgcaaggta

SEQ ID NO: 252394 - DNA, 201 bp, Homo sapiens
ggcttcatttccatctctatttcctgtagctctcggcttcatttctatctctatttcctgtaacacaagaccggggatattgaagtggatctcatatgtgrgaaatcacgggctgggtggggggttggtgaagacaggaacttgtcattctgtttctcaagtaactgtttttcatcactttttgataaaggaggaaaagac

SEQ ID NO: 252395 - DNA, 201 bp, Homo sapiens
gaggaagaggaggaagaaaaatctgaggttatcaatgacgaggtaagaaacaggagttaatttgtttagtacaaatcttctagatgatcagagtctatgcracaatgaattaagtaataatttattgagcctgcggtatttctaaggtatttctaaggtgttggggcaaggatttgacccataagtaaaagtgaagaatgt

SEQ ID NO: 252396 - DNA, 201 bp, Homo sapiens
atcagatggttttgttatctgggtctcagtgccaggtgcggcttctgaaggaagttggcagccctgggggcagagccgcagcactgagctcacactgtgcytggggacagatcactgtgttgctaaggactttctccatttgactctttcaaaaaatgattgcattaaaagagccccatgagtgagtgaacattacatgat

SEQ ID NO: 252397 - DNA, 201 bp, Homo sapiens
gcttaggcaactgtttttttttttttactttttagtagagatgggcttttgccatgttggccaggctggtctgaaactcctaacctcaactaatccacccmccttgggctcccaaaatgctgggattacaggcgtgagccgccacacccagcctggaaaatgattttaaagaagcgctttacaaagtctgtaggaacctgt

SEQ ID NO: 252398 - DNA, 201 bp, Homo sapiens
gactctcagatgcattttgcagctaagtgaacagtttcagaaagcttcatatgctgtatgactccgtttcaataacagaaaacagatgaatgattgccagrtgcgggaggggctccactacggagaggaattcgagaacgttgggagtggtggggtcatggcagtagctacgtgatgataatgtgtccgtcaggaattcgt

SEQ ID NO: 252399 - DNA, 201 bp, Homo sapiens
gaccacggctccacgcctgctgcagttccctgagctgaggctggtgcagttcgactcaggtatgcggcagttgggggcgtggcccgtgcgggagctgcacyggccctggatgatgaggcgctcttgatgtgattcgtttcccagggaagttggaagctttagctatcttgcttcagaaattgaaatctgaaggacgtcggg

SEQ ID NO: 252400 - DNA, 201 bp, Homo sapiens; identical to SEQ ID NO: 49790

SEQ ID NO: 252401 - DNA, 201 bp, Homo sapiens
tgagagggagccccttgcccttcttaccgtggttctcctggctgctgctccttcccaatttaaattacagttgttgttataaagtaacagcccttctgccygcaaccctctgcagctgagctgcccctcctggacctgatgaagctgtacgaaggcgccttcctgccgagttctcagtggccccggccgaagcctgatggg

SEQ ID NO: 252402 - DNA, 201 bp, Homo sapiens
ttcatcaggcacagtgagtcagacactctcatatcctcccgtgaaagcataaactagtatagttctagaaggcagcctggcagtatggatttgaaccttamtagtgatgtatgcttgacctagtaattctgtatttaggaccctttacttacatgacaacaaacacaccacttaagatctgtctacatagttgttgttgaa

SEQ ID NO: 252403 - DNA, 201 bp, Homo sapiens
cctgctagtttttgtatttttagtagaaacggggtttcaccatgttggccaggctgatcttggaactcccgacctcaggtgatcgcccgccttggcctccyaaagtgctgggattataggtgtgagccaccgcgcctggcctattattatctgtaaagataaaaactataactgtcaaaacacaattgggggaaatgggga

SEQ ID NO: 252404 - DNA, 201 bp, Homo sapiens
aaaaaaaaaaaagaaaaactaggaatcagatttctgggtatgttgaactttattaagaacccgtccggccgggtgcagtggcacacacctgtaatcccagsactttgggatgctgaggcgggaggattgcttgaggccagaaatttaagaccaacctgggccaggcactgtggttcacgcctgaaatcccagcactttggg

SEQ ID NO: 252405 - DNA, 201 bp, Homo sapiens
ctggaggaaggggatgctttctttgcagcctttgggtacctttgtgggtacagtgtctccctccaggatggcagctggcagtagcacggggctcttttgcragctccccaccgagaactggcctatacctggtgtctggtcagctgtgtcctgtgcgaccctggagatcacggggtgcgtctccatgtggccagcgatccc

SEQ ID NO: 252406 - DNA, 201 bp, Homo sapiens
tatttataattgtttaagtgacagtaaactagtaaatgccttctgattgattttaattttagtaaggactaacatttatttcgacctttgttcatgtgtgrgtaaatcatgtaatttcacatatttcgcagaataatcttgggaaatattattttcatccgttttctgtaagtaacaggacccagcaagagaccagggtcc

SEQ ID NO: 252407 - DNA, 201 bp, Homo sapiens
tggggaggcagtcagttgactcaccatgcagtggaacgacttgctctctcactgctgcaggtgggcacactacgagaattgctcttctgtgtcacctggtyattgtgttttttgcattaactgaggacagaaagggaggaaaaatctctttttgtgcacatactcctttgaattgtatgtttggctttttttgttttgtca

SEQ ID NO: 252408 - DNA, 201 bp, Homo sapiens
catagtgagaccctgtctcaaaaaaataaaaaggtggctaggtgcggtggctcatgcctgtaattccagcactttgggaggccgaaggggggcggatcacytgaggtcaggagttcgagaccagcctggccaacgtagtgaaaccccgtctctactaaaaatgcaaaaatcagctgggcgtggtagtgggcgcctgtaatc

SEQ ID NO: 252409 - DNA, 201 bp, Homo sapiens
ggccacagggccacatagtgagaccctgtctcaaaaaaataaaaaggtggctaggtgcggtggctcatgcctgtaattccagcactttgggaggccgaagkggggcggatcacttgaggtcaggagttcgagaccagcctggccaacgtagtgaaaccccgtctctactaaaaatgcaaaaatcagctgggcgtggtagtg

SEQ ID NO: 252410 - DNA, 201 bp, Homo sapiens
gaggttacagtgagccgagttcaccccattgcactccagcctgggtgacaagagtgagacttgtctcaaaaaaaaaaaaaaaaaaaaaacctatgtgtagygatacacacctgtagtagtcccagctacttggaggctgaggtggaaggattgcttgagtcctggagttcgagggtgcagtgagtcgtggacatgccagtg

SEQ ID NO: 252411 - DNA, 201 bp, Homo sapiens
gtgaagagagccaggattactaccataaagtggtcataaggttacacagggtaggttgggttctgccatttcagttaattaattaaacatgcgtatgcctygttataaacgtgttacagcagcatttttggaaagaaaacagtaaacagtttttattttcaggtgacacagccatttattttgaggagaactaagagagat

SEQ ID NO: 252412 - DNA, 201 bp, Homo sapiens
tggaagtgcctggtcattgatgagatgcagcgcgtgaagggcatgaccgagaggcactgggaagcggttttcaccctgcagaggtctgtgtgttacgcgcytgtcattgagtgttctttgctgttgatgtagaagattctcttgaagaaatctgcataattgcagacacaaacaatggcctttgagctagagaattgcttt

SEQ ID NO: 252413 - DNA, 201 bp, Homo sapiens
gggtggggagggtgtgaccaggtgaggcctgactgtagggagcccttggaagggtttgagtcaagctgtggcacggggtctggcatcacctaagagagtckctctgactcctttgttgagactcagttgtagcaaggcaagggggatcctggggaccagttaagagtcccagagcagtaacactggtgagcaaggctggtg

SEQ ID NO: 252414 - DNA, 201 bp, Homo sapiens
caaagcggccatttcagaggcctaccctcagagacgcattctctttctcaggatgttccttgctgagaaaaagaattcaacgaattcagcaatatttctcscatttgcttttgaaagaagagaaatacggctctgttccgcctggctcaccggcagtcagagtttaaggttatctctcttgttccctgaacattgctgtta

SEQ ID NO: 252415 - DNA, 201 bp, Homo sapiens
gcagcagcgccctgggggccaaggagcagcttctgggcagtgtgctggctccagatgaatgcacttgttcccccccaagtctgcctcagtcgtgcgatggytcatgtgacacatactcatactgatgaagcgtctctggtcagacacagtgctaggtgcctggacatgacagatactttgacgtggaaaattctgtttttt

SEQ ID NO: 252416 - DNA, 201 bp, Homo sapiens
tcagccaggtgtggtggcacgcgtgtgtagtcccagctactcgggaggctgaggcaggagaattgcttgaacccgggaggcggaggttgcagtgagccaaratcacaccattgctctccagcctgggtgacagagcgagactccgttaaaaaaaaaaaaaagttatgctttctattttaaggaaatagaagattgagagta

SEQ ID NO: 252417 - DNA, 201 bp, Homo sapiens
taaacataccaacatagaatttcttactcagtttttagaaaatgatgactgcttgtgtttataactggtggaatgtggctttatgatgtttttaagtgagkatctatttttaaaatagttgactttttttgtttgtttgtttgagatggagtctctctctgttgcccaggctggagtgcaatggcatgatctcagctcact

SEQ ID NO: 252418 - DNA, 201 bp, Homo sapiens
cgtgatccgcccgcctcggcctcccaaagtgctaggattacaggcgtgagccaccgtgcccgggtcctgttttttttttttttttttgagacagagtctcrccctgtcacccaggctggagtgcagtggcatgatcttggctcattgcaacctccaccttccgggttcaaaccattctcctgcctcagcctcccaagtagc

SEQ ID NO: 252419 - DNA, 201 bp, Homo sapiens
gctataaggaggtgctgaggcagtgcccattagcccttgatgccattctaggtagagatatttcctgcctgttttcatggcatgtttactgtcaaagatartagttctcaatcttgcctgtacattagaataactttattttttttaaaagttcccctgaagagagtgatttagtaggattcctgttgtcacatattcaat

SEQ ID NO: 252420 - DNA, 201 bp, Homo sapiens
gcaccaccatgcctggctaatttttgtgttttctttttttttgagacagagtttcacttgtcacccaggctggagtgcagtggcacgatcttggctcaccscaacctctgcctcctgggttcaagtcattctcctgcctcagcctcccaggtagctgggattacaggcactcgccaccgcacctggctaatttttgtattt

SEQ ID NO: 252421 - DNA, 201 bp, Homo sapiens
aacctgggaggcggaggttgcagtgagccaagattgcgccactgcactccagcctggcgacagagcaagactccatctattaaaacaacaacaacaacaamaaaaaaacatcatccggggaagcttttcaatatcctgacgttgggtctctccagtgtagatggaaatacatggaattgggaatagacatcgatatttttg

SEQ ID NO: 252422 - DNA, 201 bp, Homo sapiens
gaggctgagggaggagaatcgcttgaacccgggaggcggagattgcagtgagccgagatggcgccattgcgctccagcctgggcaacgagagtgaaactcygtcgcaaaaaaaataaataataaaataaagaccctaggagtcttccatcttaaacctagccctacaggtgaccgaatgcagctggagaataactgcttgt

SEQ ID NO: 252423 - DNA, 201 bp, Homo sapiens
gataaggttccactgtgttgcccaggttggtctcaaactcctgggctcaaactgtcctcccactttggcctcccaaagtgctgggattacaggtgtgagaygccactccaagcctattttttatttttgttttgttttttttgttttgagacagagtcttgctctgttgcccaggctggagtgcagtggtgcgatctcggc

SEQ ID NO: 252424 - DNA, 201 bp, Homo sapiens
ccagttgtcagtagattaagagataatggttgctcttgaagagaatataaattgaaagcacaggtttaagaggtaatcacctggacaggcatggtggctcrtgcctgtaatctcaacactttgggagactgagacaggtggattgcttgaacccaggaggcagaggttgcagtgagccaagatcgtgccactgcactccag

SEQ ID NO: 252425 - DNA, 201 bp, Homo sapiens
tcctgacctcaggtgatccgcccacctcggcctcccaaagtgttgggattacaggcgggagccaccgcacctggccaattttttttatttttggtagagayaaggttccactgtgttgcccaggttggtctcaaactcctgggctcaaactgtcctcccactttggcctcccaaagtgctgggattacaggtgtgagatgc

SEQ ID NO: 252426 - DNA, 201 bp, Homo sapiens
tgtacttcagagctggagacaataaaaactctgtcctcaagtttgaacaggcacagatgttggatccttatctgataaaaggtaagtaattcttggggcargaagacagtggctgttgttgggggggatcagagataatagggagaatatgcagcattaatactcgataccaagtttcatagaaatggtgtataaaactta

SEQ ID NO: 252427 - DNA, 201 bp, Homo sapiens
tatttgcacagggttgtgggtagattttccagtaaaaagtaaataactggtaatgaaaattaggactttttcatggtgagagattttctttgcaatatacrcttattttgctatctgttatttgtgtttgtacagataaacatgatgctggcaaacctgtacaagaaggctggtcaggagcgcccttcagtcaccagctat

SEQ ID NO: 252428 - DNA, 201 bp, Homo sapiens
attgtcaaagaaaagccaagtattatacttctttatctgtctttctgtatcatttccttattaggaaaaactgagctgatccttcttaactagctatgtcragagtttctcactttcttatgtgagatagttcatcttctgttttaagatcaagaaagaatcaagttaactagcgttctctaccatttcttaaatgaatgt

SEQ ID NO: 252429 - DNA, 201 bp, Homo sapiens
catttgtgttatctggtagccgcctctagcagaatgctaggggtaataggtatgaaaaagtttaagaaatttgtggagaaaaactcaaattgagaactctraaaattaggaagagactcctttttgcacttctggtggtggactccctcaacccagccttggaagcctgagttgtttggagaggccaggctttagcacatt

SEQ ID NO: 252430 - DNA, 201 bp, Homo sapiens
ctgacctaggtgtttacaagtctgttccatggtacagcgtgatgtttttggttggctcctgaaatgctgctatgtttaattacatcataagaacatgggayacctatactcagagaaattcctattttttgtaaccctgtagctctaaaacccaactttctgggaattccatttgaatttacctggtaatgtttgtttgcc

SEQ ID NO: 252431 - DNA, 201 bp, Homo sapiens
atttcctgcctgttttcatggcatgtttactgtcaaagatagtagttctcaatcttgcctgtacattagaataactttattttttttaaaagttcccctgmagagagtgatttagtaggattcctgttgtcacatattcaatcaagaaatacttaattatggtttttggccgggcatggtggcttacacctgtaattctag

SEQ ID NO: 252432 - DNA, 201 bp, Homo sapiens
tatttcctgcctgttttcatggcatgtttactgtcaaagatagtagttctcaatcttgcctgtacattagaataactttattttttttaaaagttcccctsaagagagtgatttagtaggattcctgttgtcacatattcaatcaagaaatacttaattatggtttttggccgggcatggtggcttacacctgtaattcta

SEQ ID NO: 252433 - DNA, 201 bp, Homo sapiens
gattatgttcagggccttcaatatgatttttggatcaactttctttgtagtcttctcttggataacttctggggtttttgtgttttttttttttttttttyctccagctgtcacagcttctatagcaaacgctactcccgggccctctatttaggagccaaggccattcagctgaacagtaatagtgttcaagctctgcta

SEQ ID NO: 252434 - DNA, 201 bp, Homo sapiens
tgtccctttctgtaaaaggggcagaggtggcatccatgacaatgaatgtgatccaaaccgtgcctaacttggactggctctctgtgtggatcaaagcgtaygcttttgtgcacactggtgacaactcaagagcaatcagtaccatctggtgagagccacaaagttaattcagtgttcttgaggccctttgcttgtctggaa

SEQ ID NO: 252435 - DNA, 201 bp, Homo sapiens
gcctgagctcagcaggtcgagaccagcctgggcaacatggcacaaccccgtctctactaaaaatacaaaaattagccaggcatggtggcgcgtgcctgtaktcccagcttctcggaaggctggggcatgagtatcgcttgaacccaggaggcagaggttgcagtgagctgagattgtgccactgcattccagcccaggggg

SEQ ID NO: 252436 - DNA, 201 bp, Homo sapiens
gagtatcaggaggcaatggaccagtatagtatagcactaaggtaggcactagcctcccttgggggaaggccactgaggagggtagaggaggcagtgagctktgtcacaggagttatggaaacacacacacactttgtgtccatggttgaaagcagaataataatagtaatggtagaagagttatttgtgaattcatgactt

SEQ ID NO: 252437 - DNA, 201 bp, Homo sapiens
atcttccaggacacaccatgtgctccttatcctcctagtatctcatgggttcccccagccccttgggtggtttacagctgtctggtttttagggggaggcyggttggggttgagataccgtctgaagaggcaactggctgaggaggcctctttcccaataatgactctcttcgcccaacaatgcgcctccctcacctgtgt

SEQ ID NO: 252438 - DNA, 201 bp, Homo sapiens
tatctacacatttccacagccaccccagagccagcgatcagatccggccaaggatgtctgcagaaacgcctaacatagagactctccctctccaagccgcrgctctcgccagacccgagaaggtcctcaagcgagggtgacctcagggccggattggaccctgcttcgtgggaggcgggactcagggcttagcgggcggag

SEQ ID NO: 252439 - DNA, 201 bp, Homo sapiens
ttttgtttgtttgttttttgttctttttgagatggagtcttgctctgtcgcccaggcttgaatgcagtggctccatctcggcttactgcaacctccacctsctgggttcaagcgattatcctgcttcagcctcctgagtagctggaattacaggcacctgccaccataaccagctaatttttgtatattttagtaaagaca

SEQ ID NO: 252440 - DNA, 201 bp, Homo sapiens
ggagatagggcaagaaactggaggcccgatgctcttctgccccagccctagcattcaggaggtccttatggggagttgtcttctcctggggctgaccccayggttggttgggcatgtcaggcgaggaagggaggagcagagaattgtcctttttcttgttctttttccaaggccactatccttttggtttcagggcaaact

SEQ ID NO: 252441 - DNA, 201 bp, Homo sapiens
ggtgccgaagattcttgtgaatgggggtgggggatcatggcaaacagcaggattctggagttagaacctttatatttctttaggaaccatagggacacatragcggggtggctgacccctttgaacttagtttgaccacatatgtgcttttgaatgcctactttgtgaacagcatttgttttttgtttgtttgttttttgt

SEQ ID NO: 252442 - DNA, 201 bp, Homo sapiens
ccaccctcactgcaccccaccccccgggctttggggtcgtggactgggggaccagaggatcatggggaggggtgccgaagattcttgtgaatgggggtggrggatcatggcaaacagcaggattctggagttagaacctttatatttctttaggaaccatagggacacatgagcggggtggctgacccctttgaacttagt

SEQ ID NO: 252443 - DNA, 201 bp, Homo sapiens
ccagcattgcagtcacccattgagtaccagagacgggagagccagaccaacagcctggggcggccaagagggcctggagtggggagccctggaagaattcrgcttggagatcaggcccagggcagcacacacacacccatcaatggctctctcccctctctgctgctgtcacccaaaggggaggtggccagagccctcttg

SEQ ID NO: 252444 - DNA, 201 bp, Homo sapiens
ttccctatgggatgaaaatggacaggggctgttatttcccttcttcctaatttccctcttcacctctcctaccttcacctccctccttgcccaaccctgcsaggaaactgacctaggcaatgcttgctagagtgggtgcaaagaggtgggagtttacctgaacttttttcccctatgaaatttggttaaaatgaacatctc

SEQ ID NO: 252445 - DNA, 201 bp, Homo sapiens
aaggacttttttctgcccaaggaacacagtttccttcagctcccatccctatgcatgcatcatggtccccccaaaaggaggatatgtgggtgggtgggagkgctggggcaggggccagatagaaattattggttttgttttttaattttgtttttcctgttttctgagaataaaggttttgttatatcaccgaggctgctg

SEQ ID NO: 252446 - DNA, 201 bp, Homo sapiens
ggagagccgctggaacagagcgagccaaacattcacacagccatgtccagatgccctgtcctgggtccttaatgcatctccgagtccactgtatccattcrtcccttgggctcagtcacgtgcacttgggcttcctcaacagacaatagactgctggggtgggagggtgaggaggagacctggagcctccctgtgggcccg

SEQ ID NO: 252447 - DNA, 201 bp, Homo sapiens
aactctgacagctaggtgctggagaggggccctcatctggttgtcctgtatcctaacatcagcccattgcgacttaaggaatgtttggagaagttttgtarggcacactaccagggcagacagctcgaaactgctgggagtgggcgaggtgggggttgtgaaatgtatttgacctgctgcttctctaccaacccctccagc

SEQ ID NO: 252448 - DNA, 201 bp, Homo sapiens
agggcctcgctctgggggtcccgcgccggggcgcatgagccctggcacggggccctctgctcatcgcccctgccctcagacgctggcctccttgctgactrcgctgcctcggagcagtccggccgaactgaccatctccgcgctcagcctggcgctgctcgtgccggtcaaggaattgaacgtgagattccgagaccggct

SEQ ID NO: 252449 - DNA, 201 bp, Homo sapiens; identical to SEQ ID NO: 49826

SEQ ID NO: 252450 - DNA, 201 bp, Homo sapiens; identical to SEQ ID NO: 49827

SEQ ID NO: 252451 - DNA, 201 bp, Homo sapiens
ttggttttgttttttaattttgtttttcctgttttctgagaataaaggttttgttatatcaccgaggctgctgtcttggcagagggaaggggaggctgtartgggggtaggtggggtgaagtgatatggaagagatcggttggccccagccattggaggagggggtctggtgaaaggagaaggggacagggtgtaagataa

SEQ ID NO: 252452 - DNA, 201 bp, Homo sapiens
tttggtttcagggcaaactgactgctcaggggaagctcttgggccaggacactttctgggtcaccgagcctgaggctggagggctgctgtcttcccgaggycgagagaggcgcgtcttcctctttgagcaaatcatcatcttcagtgaagccctgggaggaggagtgagaggtggaacacagcctggatatgtatacaaga

SEQ ID NO: 252453 - DNA, 201 bp, Homo sapiens
actgaagaagggagacccaccctcactgcaccccaccccccgggctttggggtcgtggactgggggaccagaggatcatggggaggggtgccgaagattcytgtgaatgggggtgggggatcatggcaaacagcaggattctggagttagaacctttatatttctttaggaaccatagggacacatgagcggggtggctga

SEQ ID NO: 252454 - DNA, 201 bp, Homo sapiens
cttgatgtatcctctttacccagcccttctttttccctacccaccctctggtctagaccccaccagaaagcccaatgcagtgtgacttctcaccattcccycaacacccagatacgaaagcacaaaatgccaatgtacctttccttctgaggctaccatgttcagctgagggaggatgggaaggtggagaggatcctgggg

SEQ ID NO: 252455 - DNA, 201 bp, Homo sapiens
tatctcatgggttcccccagccccttgggtggtttacagctgtctggtttttagggggaggctggttggggttgagataccgtctgaagaggcaactggcygaggaggcctctttcccaataatgactctcttcgcccaacaatgcgcctccctcacctgtgtcccagcaagctgtggaggtcatgtgctttgtgcccaag

SEQ ID NO: 252456 - DNA, 201 bp, Homo sapiens
tgcaggtgagggagagggtaggttgaggagaaaccccttagcatctcactcataccctctgatctgggacttaacccctttgccccatccctgcagctggycagccgatgtcgagatgctaggatccgcctcctcctggctcagtgtaatggtgagatgtgtggagaagagcggggcccagtgcctgggcaatgactggac

SEQ ID NO: 252457 - DNA, 201 bp, Homo sapiens
ggtgcaggtgagggagagggtaggttgaggagaaaccccttagcatctcactcataccctctgatctgggacttaacccctttgccccatccctgcagctsgccagccgatgtcgagatgctaggatccgcctcctcctggctcagtgtaatggtgagatgtgtggagaagagcggggcccagtgcctgggcaatgactgg

SEQ ID NO: 252458 - DNA, 201 bp, Homo sapiens
ttggggcagattgtggaggtagctccctttaccccttcccagcccctcctgcctgcttttccatctgcccagggctattttcaggaggtgcctgggcgctyctctgtcccacctctcaagcctccccactcctggaccttcctactctgggggcagggcggctcccaccagggagggggaggtggaacacaccctggattt

SEQ ID NO: 252459 - DNA, 201 bp, Homo sapiens
gcccggtaagaagctgggggtggggtggggcacagtttgctatcctgcgccaagtggcgaattcaaaaatattctattcttattagcataaagttcgcatstaatttgcatgagacccatttaatcgcagagacctccactcttcttgccttcgagtccaatgtgtgtcccccatcccagtcgatcccgagccctcgcagg

SEQ ID NO: 252460 - DNA, 201 bp, Homo sapiens
gtgctccttatcctcctagtatctcatgggttcccccagccccttgggtggtttacagctgtctggtttttagggggaggctggttggggttgagataccrtctgaagaggcaactggctgaggaggcctctttcccaataatgactctcttcgcccaacaatgcgcctccctcacctgtgtcccagcaagctgtggaggt

SEQ ID NO: 252461 - DNA, 201 bp, Homo sapiens
ctgcttttccatctgcccagggctattttcaggaggtgcctgggcgctcctctgtcccacctctcaagcctccccactcctggaccttcctactctggggrcagggcggctcccaccagggagggggaggtggaacacaccctggatttgtgtacaggagcaccattaaggtggggagagggccaccacatgctcatgacc

SEQ ID NO: 252462 - DNA, 201 bp, Homo sapiens
gccgcagaggccccgcctcgtggcggccccgcggccaggcctgttattcagctctccgctccgctgggacccgcacagcgccagtggctcgggggtcggcsctcgcctcctccccggcccgggcctagagccacccctaaccagaggccggagacagctggagcggctgccgcatcccggcccagcctcccctaccatccc

SEQ ID NO: 252463 - DNA, 201 bp, Homo sapiens
tagagactctccctctccaagccgcggctctcgccagacccgagaaggtcctcaagcgagggtgacctcagggccggattggaccctgcttcgtgggaggsgggactcagggcttagcgggcggaggagtatttaagaccgggcggagttggaggtggccaagggcagaatgagcgggattcagggcaccaggacctaccc

SEQ ID NO: 252464 - DNA, 201 bp, Homo sapiens; identical to SEQ ID NO: 49828

SEQ ID NO: 252465 - DNA, 201 bp, Homo sapiens; identical to SEQ ID NO: 49830

SEQ ID NO: 252466 - DNA, 201 bp, Homo sapiens
gactcctggacagggtgactccagatcagctgtttgtgagtgtgcaggatgcagctgcttatgccctggggagcctggtaaggggcagtagcaccaggagygggagccaggaggcactgggctgcggcaagtgaggcaggggtaagtggctggagacccagggagaggggtttgggaaagggtctgaggaagatcaagaag

SEQ ID NO: 252467 - DNA, 201 bp, Homo sapiens
ggccactatccttttggtttcagggcaaactgactgctcaggggaagctcttgggccaggacactttctgggtcaccgagcctgaggctggagggctgctrtcttcccgaggtcgagagaggcgcgtcttcctctttgagcaaatcatcatcttcagtgaagccctgggaggaggagtgagaggtggaacacagcctggat

SEQ ID NO: 252468 - DNA, 201 bp, Homo sapiens; identical to SEQ ID NO: 49832

SEQ ID NO: 252469 - DNA, 201 bp, Homo sapiens
gcaggggacactgacccgggtaggactcctggacagggtgactccagatcagctgtttgtgagtgtgcaggatgcagctgcttatgccctggggagcctgktaaggggcagtagcaccaggagcgggagccaggaggcactgggctgcggcaagtgaggcaggggtaagtggctggagacccagggagaggggtttgggaa

SEQ ID NO: 252470 - DNA, 201 bp, Homo sapiens
gaacccctcgtggggaatctgagcggaatcgagaaggagcagctggacgctcaacgggttggggtagccgcggccgtggccttcgggagcggggcgttgayggtgagggaggacccggggaggaacccggggggatccctgctgaggggccagggaaattgggccggggaagagggagggaccagctttcggcttgggttc

SEQ ID NO: 252471 - DNA, 201 bp, Homo sapiens
ccggctagcgcagctcttcgcgccccacagtcttgacggggcagcagccttcttggagagccgagtctggcagcaggatctcggacccaaggcatggaccytgagctgctgccctgcccagggctgcacagctggtgatgtctgcatttgtcccccggcggcaggaactttcgccatactcagcctcatgacaggctcggc

SEQ ID NO: 252472 - DNA, 201 bp, Homo sapiens
gcgcccagataagacttctgcggaacaataggaggaactgaagaagggagacccaccctcactgcaccccaccccccgggctttggggtcgtggactgggrgaccagaggatcatggggaggggtgccgaagattcttgtgaatgggggtgggggatcatggcaaacagcaggattctggagttagaacctttatatttct

SEQ ID NO: 252473 - DNA, 201 bp, Homo sapiens
gtggtgactgcccttctttacttataggagacttcaaagccagatggcccaatggttgcaggtgagatggggtgacaagaaggaagatttgggcatgttgyatggtgacacctgggtactcctgtcttctcccattctagttgctgagcctgtcagggtggtggtcctagacttcagtggtgtcacctttgcagatgctgc

SEQ ID NO: 252474 - DNA, 201 bp, Homo sapiens
aaatttgcctaatgcaaatttacttaggttgtaaaagtaggcaagaatcacttagccaaagctttcttctaggagatatggatatttaccagagaagatgktttgtatatgtgtcatactttttaaaaagtattaaatataaatataattaaaaggtgaggaaaacatactttggtgatgattaaaatagtttaaataagt

SEQ ID NO: 252475 - DNA, 201 bp, Homo sapiens
cctactgatattcacagaaatttatgattacacaataaacactagatttctgacatctcatcatccaaaaatattgatttattcattgttttgtaagtaamgtggaaaaaacgataaaaatatattcatcagaaagggctacgaccagggacctttgtactcttcttcctttgtctaacaacaagaaacaaatattggtaa

SEQ ID NO: 252476 - DNA, 201 bp, Homo sapiens
cacctgctggacgcccgggggccaagaaggtgagtttcgtcccctcgatcctcgcggagctcctggccgctgggctgcgagcgactccgttcacacccggygtccatccctagccaagccctggggcctcggcaaaacacttggacgggatggccctgagcctcaattttcccctgtcacgggttggttagcgtttatgga

SEQ ID NO: 252477 - DNA, 201 bp, Homo sapiens
cacagaaatttatgattacacaataaacactagatttctgacatctcatcatccaaaaatattgatttattcattgttttgtaagtaacgtggaaaaaacrataaaaatatattcatcagaaagggctacgaccagggacctttgtactcttcttcctttgtctaacaacaagaaacaaatattggtaaagtaatttgtat

SEQ ID NO: 252478 - DNA, 201 bp, Homo sapiens
ttcacaattatccccatttcacaggtgaggaaactgaggctcggcgagtcaggcgactagctcagggtcacgggtccagccccgcggggagcgaggatcaraagtctagctttcggacgcatgtcgcgcacacattttcttccctcaaccgaccctcgcccgcagctctttgggctaatccgtccgggaactcttcggact

SEQ ID NO: 252479 - DNA, 201 bp, Homo sapiens
cacactcatactctgtctctctctatctttccatatagataatcttttgtgtatgtatgtgtgtgtgtgtatatatatatatatatatatatatatatatwcatatgtatgtatatctgttgatataattccatcccccttccatcttctagaactagtcacaatctctgctgtcttccctctgttcagtactctcatgta

SEQ ID NO: 252480 - DNA, 201 bp, Homo sapiens
tgttatggatcattgtatttcacacacacacactcatactctgtctctctctatctttccatatagataatcttttgtgtatgtatgtgtgtgtgtgtatrtatatatatatatatatatatatatatacatatgtatgtatatctgttgatataattccatcccccttccatcttctagaactagtcacaatctctgctg

SEQ ID NO: 252481 - DNA, 201 bp, Homo sapiens
ttctgttatggatcattgtatttcacacacacacactcatactctgtctctctctatctttccatatagataatcttttgtgtatgtatgtgtgtgtgtgwatatatatatatatatatatatatatatatacatatgtatgtatatctgttgatataattccatcccccttccatcttctagaactagtcacaatctctg

SEQ ID NO: 252482 - DNA, 201 bp, Homo sapiens
atatatatatatatatatatatacatatgtatgtatatctgttgatataattccatcccccttccatcttctagaactagtcacaatctctgctgtcttcyctctgttcagtactctcatgtacttcacccattttgtgcttatttattcatttcagtgggatttgaaagtcttcatttttgaactggaaaaatttgccta

SEQ ID NO: 252483 - DNA, 201 bp, Homo sapiens
gattaatggtagtcacagtgtaacagagcacagacagccaggttccagggttgggagggcaaggaagtcaacacagttttatatcatcctcctggctgggraaaaaaaaaaaaaaaaagagctagaggtaaagaactatgatgggattagatagttacctgaaatgaaaactttaattctcttctaactctttttttgtgt

SEQ ID NO: 252484 - DNA, 201 bp, Homo sapiens
ggacgggatggccctgagcctcaattttcccctgtcacgggttggttagcgtttatggagcccttactcggtgcctggcgctgcacagagtgctgtgctcragttatctcctcatcttcacaattatccccatttcacaggtgaggaaactgaggctcggcgagtcaggcgactagctcagggtcacgggtccagccccgc

SEQ ID NO: 252485 - DNA, 201 bp, Homo sapiens
cttggcaatgttaagttgcaaaaggaaatatatcacaaactgatcccaaccatatacaaatatttatatacacactgtaaggaaggacacaataatggtartagttacacaagatgtggaatattggtttaaaaagcatgttttaggatattttttcaggttataaaagcaaaatgtgagcattgaaagaatacagttaat

SEQ ID NO: 252486 - DNA, 201 bp, Homo sapiens
ggtgttaatgggaaggaactaatctcacctctctcctcagctagcaggtacattttaagaattcatttaattgccacagacaagacctccaattaggtctyaaatccaaaagagcagttctgctggcaaatctaggaaaaggggaaggtattttagacagactgggtttttctgatcacctcctactacatacacagtgaa

SEQ ID NO: 252487 - DNA, 201 bp, Homo sapiens
gtacattttaagaattcatttaattgccacagacaagacctccaattaggtctcaaatccaaaagagcagttctgctggcaaatctaggaaaaggggaagktattttagacagactgggtttttctgatcacctcctactacatacacagtgaagttgatccccactgagtatgaatagagatgtcttgaagccagatctt

SEQ ID NO: 252488 - DNA, 201 bp, Homo sapiens
tccgtctgtatgttaaaacaaaagttctgctttagcctgattatccaccaagttttgactgtgtgtgtgtgtgtgtgtgtgtgtgtgtgtgtgtgtgtgtktggttatatacatatacatacatatatacatatatgacatattggacttataggtaagacttttaattaattaattatgtatatattgaaacacagggct

SEQ ID NO: 252489 - DNA, 201 bp, Homo sapiens
gccaaactgatggggaggagggaatgaaaatataaatgtactgcaaaattaatttacagggttccttattttacatgttcctgtctttataattttacagytgactttagatcgtactagtataatggtgaggaacaacagacactggggcctatcgaagggtggagggtggaaggagggagaggatcaggaaaaataact

SEQ ID NO: 252490 - DNA, 201 bp, Homo sapiens
gctacctggggggctgaggcaggaggattgcttgaatccaggaggtctaggctgcagtgagccaagattgtgccactgcactccagcctgggcaacagagyaagaccctgtctcaaaataaaaagtatatgaaattgaaatacgttgtctttttctgaaaggtggtatgaaacctaatgattgttattgaaatgtaagaaa

SEQ ID NO: 252491 - DNA, 201 bp, Homo sapiens
aaagacacagtcaaaatatatactacaattttcttaaaacctacctaattgtctgctaaagagtaacattttttcttcttcaggacaaaaattctagcatrtgcaatacatctgacattttcaaaacagtcctgtttatttgctaattcttggcatagtttcttaagtgtctactcattttagttgttatatgtggtggta

SEQ ID NO: 252492 - DNA, 201 bp, Homo sapiens
ttgtggagggcagagaccttgtcttattctgatgtttatcccacttgcccacaactatacctgacatgtggaaggtctcaataaacgtccaaaatttaagrccttttttatatttcaaaagtacaaattgaaaagagtgaattgcatttgatgcagggaggagaaagaaagagatgagaatcagtaaatattaacatttct

SEQ ID NO: 252493 - DNA, 201 bp, Homo sapiens
gccaagccctggggcctcggcaaaacacttggacgggatggccctgagcctcaattttcccctgtcacgggttggttagcgtttatggagcccttactcgrtgcctggcgctgcacagagtgctgtgctcaagttatctcctcatcttcacaattatccccatttcacaggtgaggaaactgaggctcggcgagtcaggcg

SEQ ID NO: 252494 - DNA, 201 bp, Homo sapiens
agatgcaccagtatgagtctgggaaggtggaagcatagcaaatgtggccatagtgcagcattccagggtcacgtgaggggcagctgaggtcgctggagcascctccttctccctatatgacagctgtgtcctgaagccagcagttcaatagtggcttctcttagttgtggcagagggtgcagccccagccggccaattcag

SEQ ID NO: 252495 - DNA, 201 bp, Homo sapiens
ctgcaaaattaatttacagggttccttattttacatgttcctgtctttataattttacagctgactttagatcgtactagtataatggtgaggaacaacasacactggggcctatcgaagggtggagggtggaaggagggagaggatcaggaaaaataactaatggatactaggcttaatacctgggtgaggaaataaccc

SEQ ID NO: 252496 - DNA, 201 bp, Homo sapiens
ggaggccaaggcagacggatcactggagctcaggagtttgagactagcctgggcaacatggggagaccctgtctctactaaaaatacaaaaattagcctgrtgtggtggtgcacgccagtagtcccagctacctggggggctgaggcaggaggattgcttgaatccaggaggtctaggctgcagtgagccaagattgtgcc

SEQ ID NO: 252497 - DNA, 201 bp, Homo sapiens
gcataaccctgtgataggttggatgtgggaggtgagaagctaacctacaacatctgaattctgtgccaatgttttccctcgacaattgtttgagtaaattwgattcttttttttttttttttttgagacagagtctcactctgttgcccaggctggaatgcagtggcacaatctcaactcactgtaacttccaactcccag

SEQ ID NO: 252498 - DNA, 201 bp, Homo sapiens
tagcaaacctccaatgatgcacatttacctgtgtaacaaacctgcacatcctgcacatgtacccctgaacttaaaagtaaaaaaaaaaaaaaaaaaaaaawctaaagaagggatcatactggtatagtaattaattgaggtagttagaatagcagtgaaggaagggctaaaagatgctctgatctcaaatcttgataactt

SEQ ID NO: 252499 - DNA, 201 bp, Homo sapiens
ggagataatggcagtatacaggcggaagtatatggaagaaaatgacctctctctctctcatacacacacctacccacatcacacacccacccatccacacrcccacacacactcccacacacacacatccatgcactcacaccccaaccccacatccacacacaccccacatccacacccacatacaccacaaacacacat

SEQ ID NO: 252500 - DNA, 201 bp, Homo sapiens
tgaaacttgaagcttctccctttgtccagcaacagccttccacagacaggaaaccaggagaggccagcgcgctgcttctctttctctgttatgctcccaamcttcccttcccatcttgctaccatggtttctggcctcctcagattcaaagtaagaagaaagaggatggataaaggagtaagactgttgttgcttgcctgg

SEQ ID NO: 252501 - DNA, 201 bp, Homo sapiens
actaaaaatacaaaagttagcctggcgtggtggcgggagcctataatcccaactactcgggaggctgaggcaggagaatcgcttgaattcagtggggtggwggttgcagtgagccaagattgtgccacttaactctagcctgggcaatagagcgaaactccatttcaaaatgaacaaacaaaaaaaccccaaaaataaaaa

SEQ ID NO: 252502 - DNA, 201 bp, Homo sapiens
aatctaatactctgttgcaggaataatagaaaattgttgcatttagaaaaacgttcactgcagaacaaagtagtatgcatgggaccatggataaagagaartaatcctatttacaaaacttgagctacttgttggagaatgttccaagcatcaaggtcaaatgaattttcttctcttgcattcccgtggatatattgtcca

SEQ ID NO: 252503 - DNA, 201 bp, Homo sapiens
cgccccactgcaatccagcctgggagacataattcaaatctattttggtcttatatcttcttatgtttgtgttatttcatgtgtgccagtttctctttttktcacaacaatttatcaatttgtggcaataaaaatgatttaccttttatagtgtttgaatgtcgaaaatgtcatgaacattctttggaataatactagcaa

SEQ ID NO: 252504 - DNA, 201 bp, Homo sapiens
ggccgctgggctgcgagcgactccgttcacacccggcgtccatccctagccaagccctggggcctcggcaaaacacttggacgggatggccctgagcctcrattttcccctgtcacgggttggttagcgtttatggagcccttactcggtgcctggcgctgcacagagtgctgtgctcaagttatctcctcatcttcacaa

SEQ ID NO: 252505 - DNA, 201 bp, Homo sapiens
ctgactctgatatgggtgccacccacatgcattctgctttctatgagaagctcctcactttactttaagggctgccaatgctgactatagtagaccagctmtgtcctttacaacacaggtatagaataaacctctctagaccaagagaccaagggttaattggccagtcaggccttaatctctgcatgtgactgcaccaag

SEQ ID NO: 252506 - DNA, 201 bp, Homo sapiens
cacccggtggtccccagctcctggcccctttcctggtctggtcaccagatgttggctttatgcccagccatttctacgtcgagtatgtgtgggggtgggakgaaggagtgactaagcaaaattaggaagggcatgagcttggacgaaagacatccccaggacccttcagagacccccacccgctccagccctgtcattcag

SEQ ID NO: 252507 - DNA, 201 bp, Homo sapiens
aaattacaaaattatgattttaaatactcaattactttgaaaacctctgggtgtgttttcttcttttttactaataggcatcatctcactgaatcaatgawccctgaatgaaaaactatatgttattgttataggaatgaaaatgtttactcagaaaggtattctttagtcagtctgatagacacacattccttagcaagt

SEQ ID NO: 252508 - DNA, 201 bp, Homo sapiens
aaatgtggccatagtgcagcattccagggtcacgtgaggggcagctgaggtcgctggagcagcctccttctccctatatgacagctgtgtcctgaagccarcagttcaatagtggcttctcttagttgtggcagagggtgcagccccagccggccaattcagtcatgtttttctaggggtcatttctggaagcccagtgta

SEQ ID NO: 252509 - DNA, 201 bp, Homo sapiens
tgttttcttcttttttactaataggcatcatctcactgaatcaatgatccctgaatgaaaaactatatgttattgttataggaatgaaaatgtttactcaraaaggtattctttagtcagtctgatagacacacattccttagcaagttttattatgcatatgtttatattctatttggtaatttttataactgttttgct

SEQ ID NO: 252510 - DNA, 201 bp, Homo sapiens
ccctctctagtcatgccattcgatggagattaagagattattcaagccatatttgacctctcatgtttggttccatactgttaacaggactgtcctgggargctctgtgggaagatcctcacgtctgctttaatttctggttgcttttattagatccaggattgacccagctaaggacaaagactcctgtaaccaagatca

SEQ ID NO: 252511 - DNA, 201 bp, Homo sapiens
ggtgtggcgggccagggtggtcttggaaaatgcaacatttgggcgcaaaaacaggagtgcctatcctcaccagggtctgtgggcacaggcctgaggccttyctgtatcaaaaggaaactgcaccccatggctaactgctctgaatggaaccttttaaataagttatgagtgggctaaataggaaggtggtaaaatagaagg

SEQ ID NO: 252512 - DNA, 201 bp, Homo sapiens
aggttgtgattggagatggcagctttctcattactctggagaagagaggctatgtgaaggctgggctctggactccagaggcagtgatagaacacccagaygcaggttggtgtccacatccccaagagtgtctacctgagtggtattttatttaaatctgattgagagaagatcaagaaaaaaataacaactgtttcaaag

SEQ ID NO: 252513 - DNA, 201 bp, Homo sapiens
caccccaaccccacatccacacacaccccacatccacacccacatacaccacaaacacacatacacacccacacaacacactctcacacacacacacactytcatacacacacacatctgcatcttaatgtacaggcagtgctaaaatagacatcttaatatttgttccatgaatatttaccttgtagatatacagagttt

SEQ ID NO: 252514 - DNA, 201 bp, Homo sapiens
gtacaggcagtgctaaaatagacatcttaatatttgttccatgaatatttaccttgtagatatacagagtttccttaaaacagcaaaactgttcctgcttytgattcaccctgctgacaatgtgcatggttaagtgtaacagcgtttatagtgagggtgattaatggtagtcacagtgtaacagagcacagacagccaggt

SEQ ID NO: 252515 - DNA, 201 bp, Homo sapiens
aaagaatcagtaagaattggtcattgattggacatgaaggcccagaacattctctttcctccacttccaaaacgaaagtcctcattccccatttcccaacrtaactgctactgcctggggtcatgccttcaacccacaactttactccaaacaagagaatatcccctggcttggcgcggtagctcacacctgtaatcccag

SEQ ID NO: 252516 - DNA, 201 bp, Homo sapiens
gaccattgcttagtccttctacttttctttttagaatttgaaagacatattggctgacctgatacctaaggagcaggccagaattaagactttcaggcagsaacatggcaagacggtggtgggccaaatcactgtggacatggtaagggttgtgtggctttggctgggaaaagtagctctgtaatgtgcttcaacaaaagt

SEQ ID NO: 252517 - DNA, 201 bp, Homo sapiens
acacagcaagaccccattctctaaaaaacagttttaaataggttgagtgtggtggctcacgcttataatcttagcactttgggagtccagggtggatggayctcgtgagcccaggagtttgagaccagcctgagcaacacagaccctatctttttttttttttttttttttaaagacagtcttgctcttgttgcccaggct

SEQ ID NO: 252518 - DNA, 201 bp, Homo sapiens
aggcagcggtattggggccattgactctaacctggactggtctcacaatttcaccaacatgttaggctatactgatcatcagttcactgagctcacgcgcytgtacctcaccatccacaggtaagctagacccagcaaccacagccactaggtgcctcaattggtgggaaatttttttaaaagctcctttatgttctcatc

SEQ ID NO: 252519 - DNA, 201 bp, Homo sapiens
gaaagagtgacctttctgaagggcctcttttcattcctcctctccgtcccaacagaaataggggaactaaattttaaaaattctaaaaatctgggaggccraggtaggcgtatcaccagatgtcaggagtttgagaccagcctggacaacatgatgaaactctgtctctactgaaaatacaaaaattagccaagcatggtg

SEQ ID NO: 252520 - DNA, 201 bp, Homo sapiens
aagcttgttggcttgtcagcattgctagcacctgcctgtgctttctagattagcctgtggataatgctagtcataattggtaattttacttttgctagtarggtagactttgggaggcagtaatttcctaccagggagaactgactcttaccactttgagtctcagcgtcaggtgtagttttacttttctgagaagaaatt

SEQ ID NO: 252521 - DNA, 201 bp, Homo sapiens
cacttgatggtaggtgataggccaacacatttgtaagaaacaaatatttactgaattcagctatgcacaaagcactgttctagatgcttttatgaaaattrttttatttagtttacttaactactctgaaattggcttttattattaccattttagaaatgtaaaaactgagacttagaaattaggttacatagccaagat

SEQ ID NO: 252522 - DNA, 201 bp, Homo sapiens
agaccagatgattctgtcctgagatccctgctgcaactgaccttctgaaaaagtctataaatagacaagggggtgggtactaggtcctggcttgtagaatrtgctactatagttagcagggacactgtgtccaagaggccttcttataccttcactcccccaggaaaagaagccataacttcgttctactctactatatct

SEQ ID NO: 252523 - DNA, 201 bp, Homo sapiens
taacatgatgctattttaaaaggtctgtaaactcacagtgggcattgtcacctgtaatgcttgcttatgttgcagtttcctggatcctaccttcagattayaattctgcaaagtaggatgggatctggaaaagtttcttgtaaatccctaaagtgtcagggagttaaaacttgtaagaacttctttttttttttttttttt

SEQ ID NO: 252524 - DNA, 201 bp, Homo sapiens
taaacttttagaccattgcttagtccttctacttttctttttagaatttgaaagacatattggctgacctgatacctaaggagcaggccagaattaagacyttcaggcagcaacatggcaagacggtggtgggccaaatcactgtggacatggtaagggttgtgtggctttggctgggaaaagtagctctgtaatgtgctt

SEQ ID NO: 252525 - DNA, 201 bp, Homo sapiens
ctactatatctacattattgccccaagaaacaatataataaagccaaattcacactgtcacaatttattgaaattttataaaaactcaggccaagtggaaraataaggtacaactcaagagtacaaagacaactccgtttccgttcagtacttttctcctcagcactggtggtaagaaagccccttgctctctagtagcca

SEQ ID NO: 252526 - DNA, 201 bp, Homo sapiens
tgccctctgcctgtggtctttcccagattagagaggttgaagtgctgtcgaaagaccaggtgcaggagagatcttaccagcagtgttaagtaattgctcartttcctcatttgttttccttggggtcactcaaaaatattgataaccgccctgctctggagcccagatgatgggaaagagtctgtcttcaaggaatgctag

SEQ ID NO: 252527 - DNA, 201 bp, Homo sapiens
caggggcgacgggaggcggcagcacctctcgccttgctcccgtccaggctgccgggtaggctagaactgaagccgggaccgctgctcccgcagatctcggyacccccacgtcacgctgttgccatggctcgggcctgggagaggaaggaaggaaggaaggggacaacgccgcctgtcgggagatgtagtttcacacctgtg

SEQ ID NO: 252528 - DNA, 201 bp, Homo sapiens
tggtgcaagacacagaagagcatgacccactgctctgatgcaaccaccttgggtccttggcaaatctagattgatttagttggtcaatattaatttggcaycaactgtgtgtagagaattgtgtttgcagttgaggaagacagagagcatttaaaattgatattaacttggttggcattggggagttggtatcagaatgat

SEQ ID NO: 252529 - DNA, 201 bp, Homo sapiens
gaaaaaaagcagttaaacctcctgctgtctccatagtggtaactccttccaaactgtttggggacttttacagctttcttatgtcaaactgccctaagagrctgagatgaagagagagaggttgagtcactgtaattccttcttgttaatataaaagagggaggggtaacagttacataaggttctcttttttgctttgca

SEQ ID NO: 252530 - DNA, 201 bp, Homo sapiens
tttgttttccttggggtcactcaaaaatattgataaccgccctgctctggagcccagatgatgggaaagagtctgtcttcaaggaatgctagtgaagctayggatgaaaaaaagcagttaaacctcctgctgtctccatagtggtaactccttccaaactgtttggggacttttacagctttcttatgtcaaactgcccta

SEQ ID NO: 252531 - DNA, 201 bp, Homo sapiens
acttggggctggaggtttgtagataagatgctcttgtccttggggtcaatgactacgacaggcttagggaggcacaaaagtcctgaagcctcgtctacccrgaggatttagaaagtggtgcggaatatcacttcagggtcgtgtcatggtctctggggagcacaagataagagagcatagaagactgccaagtaggagaag

SEQ ID NO: 252532 - DNA, 201 bp, Homo sapiens
gtgtagggaagtggggtagaagggaggtcagggagcaatcccttgcctcaagtctggtgcacctcatggaacatcagttcacgggggatggctgtttctgraccaaacttggtggctgcccgacgctcaaaggcagcaacattctgtttgacaacctcatcaaaaaacatggtggccagctgggagtgcagcagagaacga

SEQ ID NO: 252533 - DNA, 201 bp, Homo sapiens
ccatgtttaagttggttgctcagctgtacaagattgtgcccaatgtcctcttagagcagggtaaagccaagaatccttggcccaatgtagatgctcacagkggggtgctgctccaggtaagtcctcctttccctcttttccctctaatttgtaccaaaccctattgttatctgccatgcacaaagtcaattaactcctagt

SEQ ID NO: 252534 - DNA, 201 bp, Homo sapiens
gaagtggggtagaagggaggtcagggagcaatcccttgcctcaagtctggtgcacctcatggaacatcagttcacgggggatggctgtttctggaccaaayttggtggctgcccgacgctcaaaggcagcaacattctgtttgacaacctcatcaaaaaacatggtggccagctgggagtgcagcagagaacgaaattcaa

SEQ ID NO: 252535 - DNA, 201 bp, Homo sapiens
agatgctcacagtggggtgctgctccaggtaagtcctcctttccctcttttccctctaatttgtaccaaaccctattgttatctgccatgcacaaagtcarttaactcctagtcagagcagggacttccctcacagagcattttgataaagttgactatgagagggttgggggttggggttgctctgttttcagaatccca

SEQ ID NO: 252536 - DNA, 201 bp, Homo sapiens
tatagcttccctgaaggaggtcccaaaaataacaagaggtggtcctgagggcatcacatatatgggaggtccaagaccagatgattctgtcctgagatccctgctgcaactgaccttctgaaaaagtctataaatagacaagggggtgggtactaggtcctggcttgtagaatgtgctactatagttagcagggacactgt

SEQ ID NO: 252537 - DNA, 201 bp, Homo sapiens
tctgtcactcaagctggagtcttgtggtgtgaccaaggctccctgcagcctccacctcctgggctcaagcaatcctcccacttcagcttcccgagtagctrggaccacaggtgtgcaccgccacgcctggctaatcttttttgatttttagtagaggcagcgtctccttatgttgcccaggctggtcttgaactcctgagc

SEQ ID NO: 252538 - DNA, 201 bp, Homo sapiens
cacacctactttgcaggaaatctaataaacttttagaccattgcttagtccttctacttttctttttagaatttgaaagacatattggctgacctgatacytaaggagcaggccagaattaagactttcaggcagcaacatggcaagacggtggtgggccaaatcactgtggacatggtaagggttgtgtggctttggctg

SEQ ID NO: 252539 - DNA, 201 bp, Homo sapiens
tcccaagtaacaaggactacaggcacatgccaccatgtctagctggcattacaggcgcacaccaccactcctggctaatttttgttgtttttttttttttkttttttttttgagacggtgtcttgcactgtcacccaggttggagtgcaatggcacgatctcagctcactgcaacctccacctcctgggttcacacaattc

SEQ ID NO: 252540 - DNA, 201 bp, Homo sapiens
catttgtaggtgaaggagaagaagagtgcatcccagacgaaggtcgtccaaacaagctttccccccagcacctgctgcagcccgctaggctctctctggcyagggagtcacgagtgcaaaaggtcgagggcagctaaggacagggctgggggcggggtgagggggatgagaaaaaggggtgtgtgggaagcgccagttgcc

SEQ ID NO: 252541 - DNA, 201 bp, Homo sapiens
gaggctgaggcaggagaatggcgtgaacccaggaggcggagtttgcagtgagccgagatcgcaccactgcactccagcctgggcgacagtgtgagactccrtctcaaaaaaaaagaaaattaaaaattgtattctgggctaggcatgatggcttgcccctgtaatcctagcacttttggaggccaaggtggagcattgcgt

SEQ ID NO: 252542 - DNA, 201 bp, Homo sapiens
cacctatttagccacccgcacttccccgcccgccacccatccacccttaattagccctaatccgggcggtccaatcctccccgtcacaactgctgtcaagkgctaaggtcccgccccgcttccataccggaccaatggccgggcccggggagagtcccttgagaggggcgggctcgggttccggccagtgggcggggcctc

SEQ ID NO: 252543 - DNA, 201 bp, Homo sapiens; identical to SEQ ID NO: 49868

SEQ ID NO: 252544 - DNA, 201 bp, Homo sapiens
catgccactgcgttccagcctgggttacagagcaagaccttctctcaaaaaaaaaaaaaaaatcataatcatcatgtaagacatacagcttagggccaggygcagtggccaacctggccaacatagtgaaaccttgtctctactaaaaatacaaaaattagctgagtgtggtggcatgcgcccgtaatcccagctacttgg

SEQ ID NO: 252545 - DNA, 201 bp, Homo sapiens
ccaattgctatacttttctcagtgtcatttctatttaaggttgactgggctaagtccttggagaaaaatggaaaatttagcttttaaggtttctatcaccyaggacttgtacatgccactgcctctgccttaaatgaaatatttttctcttctaccttacagtattatggcatgacggagatgaattactacacggtcctg

SEQ ID NO: 252546 - DNA, 201 bp, Homo sapiens
taaaatagttttaataaaaagatttacattgaaggcctgcttatatttgagtgaggccacatgagagataatggaatggacaaatacaatggaaaggaacrgcaagaggtataaatgagccataagatgccatggtcaaagtaggtagagagataaggaaacagagaagggggaaggaaatgtagaccacacacatataat

SEQ ID NO: 252547 - DNA, 201 bp, Homo sapiens
tcctttgcccactttttgatagggttgttttttttcttgtaagtttgtttgagttctttgtagattctggatattagccctttgtcagatgggcagattgyaaaaactttctcccattctgtagactttgccttcttgctatttgaatcttacttgtgccctcatccccaaacaaagccttattttagccaacgagagctt

SEQ ID NO: 252548 - DNA, 201 bp, Homo sapiens
aaatcttggagggtcaaattttcacagaccacccagcactttgggaggccgagacggcagatcacgaggtcaggagatcgagaccatcctggctaacaccrtgaaaccccgtctctactaaaaatacaaaaaattagccgggtgtggtggcgggcgcctgtagtcccagctactctggaggctgaggcaggagaatggcat

SEQ ID NO: 252549 - DNA, 201 bp, Homo sapiens
cattcttcttaattggttttctaattaggaattggtttaaatttagacataccaataaaattatatgaacatataactacaatttttcatatttgtatggwaattatttttaaaatactactccaatgtaagaaatttttactttgcatatatcttctgcatatatttatacatttaagatgattttttaaccagtattca

SEQ ID NO: 252550 - DNA, 201 bp, Homo sapiens
ttttttctttcattgatgtgttttttagtgtgatatctaagaactcaatgagaaacccaaggttatgaagattttcccccaaagtttttgtggaagagttwtatattatagttttagctcttccttttagatctttgatcaattttgattttatatatggtatgaagtaacagtccaagttaattttttgcttgtggatat

SEQ ID NO: 252551 - DNA, 201 bp, Homo sapiens
gtttccataatgacgagtgatgctggttgaacatttttaatacgtttgttagccatccatatatcttctctgaagacacttctactcagattttttttgcytattattacattgtgttattgtctcttttattattgggttatatattttggatacaagttccttatcaaatattcaatattacatgaaattgtatttttt

SEQ ID NO: 252552 - DNA, 201 bp, Homo sapiens
ggaggaaagaaacccttcctcatgagaaaacaaggtgaatcaaagcattcaaatggaaatataataggtacatttgagaaaaactgagtagtttgatttcrctggagcacataagcggaaaaagaaaccagatataagataaagagagtgaccacagtgagatgcctttattattataatttgaatgttatgtcataaatg

SEQ ID NO: 252553 - DNA, 201 bp, Homo sapiens
ttgagtgcaatttacctagtattatctgatctcagcataaaagtctttactgcagtaaactgacatgggccacccagtccagatatctaccacaagcttaraagtattttcccttttttaaatagagattttattaagaaaagtaaggagttagtttagcatgacacaacctatgttgtgacgagatctgtccacatttta

SEQ ID NO: 252554 - DNA, 201 bp, Homo sapiens
tttactgctacacttgacaaaactctgtactaatctacattcccaggaacaatataaaagaatttcacttactccacattcaggccaatacatggtattgkctattttttttttttttttttttttttttttttttagccattctaatgggtacatgttggtgcctccttaaggtttttaatttttattttcctgataact

SEQ ID NO: 252555 - DNA, 201 bp, Homo sapiens
tgcttcttccccagcatcctacttctccagcccccctaccattctagctgtgtgggctaccccatcctgctaactggaagatggatttctattatcaaacrtaatttatttcaaggaagatagggtaccatttagaaacctatctttttggttatactgcaaatctcaatttgttgtctattaactgccaggagtatactc

SEQ ID NO: 252556 - DNA, 201 bp, Homo sapiens
tgcaacaatctgaagataattttttatggagctgatcttgttctctttctcttaatttaaagccttctttctctttcccgtaaagtactgaaaagtatgtrgtaagctggtattgtgcgtttactattcagcaagatgcaaaaaatataaaaatattattttacatattttaaaaattttacttagaattactctacaatg

SEQ ID NO: 252557 - DNA, 201 bp, Homo sapiens
gatcaatatacaagaatcaatttcatttctatatactaataatacacatgtggaatccaaaatcaaaatcacaattatttataatttacaattgccccaaraaaattatatactttatatactccaaatataaattttaagacaatataacccagtatgctgaaaattacaaaatgctgatgaaaaaattcaaagacctag

SEQ ID NO: 252558 - DNA, 201 bp, Homo sapiens
ggtaaaatggtattgctccctcaaagtagctctccttcccatcgtgatcttaaccacaaacaaatttctcaacctattatgtatagcctaaaatgccatawacctagagtgccttttcgtgccacccatggtcaagctccagccctgatctgggaccttttaatcctcagttcatttaattatatttctctttggcacttt

SEQ ID NO: 252559 - DNA, 201 bp, Homo sapiens
tttccatatcaccctttggcttaccttattacagcagcaacagtgttttgcttattttagttgcagttagaagggtttcttctaatcagattacattttcrtttgacaaatttatgaaaagaagccttaaaaatacttgccaggagaatctgataatttatgtcaaaattacatcagctgatttttaaaaatttttatttc

SEQ ID NO: 252560 - DNA, 201 bp, Homo sapiens
agggctagacagaaaccagctctttcaaaagtcatgccaggtacagaacaaagacaaaacgagattcatccttccttcatccctccctgagatgtccactycctctatttccttttcttcaaatgttcactttatcttacgtaaaaagtagatttaccaaacaccaactcaagtctcgccagtatgtttttattcctttca

SEQ ID NO: 252561 - DNA, 201 bp, Homo sapiens
attttttgtgagacagagtctcattctgttgcccagactggagtgcagtggcaggatctcagctcactgcaacctctgcccaccgggttcaagagattctkctgcctcagcctcccaagtagttcagattacagacatgtgtcaccataccaggctaatttctttgtatttttagtagagatggggtttcaccatgttcct

SEQ ID NO: 252562 - DNA, 201 bp, Homo sapiens
atgccaagctgtagccaatccagctgtttttgtacttcattccaatttctgtacttcactttgcttttcttgtctataaatttgttctgtccacaaggtacccctggagtccctctgaatctgctgtgattctggaggctgcctgatttgtgaattgttttttttttattattatactttaagttttagggtacatgtaca

SEQ ID NO: 252563 - DNA, 201 bp, Homo sapiens
ctgctctgctctggtttttgtaagcagtgttccttgtgcggcctgtattttggaacctctgctcatgtaatggtgtttgccacacagttgaactgttgaaytaattcttctatattttgaccacacagttttcttagatacattttgtacctggttctcaatttccccttgctttgacccttcatgtgtatatcctgtaac

SEQ ID NO: 252564 - DNA, 201 bp, Homo sapiens
gtggcaggatctcagctcactgcaacctctgcccaccgggttcaagagattctgctgcctcagcctcccaagtagttcagattacagacatgtgtcaccayaccaggctaatttctttgtatttttagtagagatggggtttcaccatgttcctgcccaggctggtcttgaactcctgacctcaggtgatcctcccatctc

SEQ ID NO: 252565 - DNA, 201 bp, Homo sapiens
tgatggggttgtttgttgttttcttgtaaattttttggagttcatcatagattctggatattagccctttatcagatgagtagattgcaaaaattttctcycattttgtaggttgcctgttcactctgatggtagtttcttttgctgtgcagaagctctttagtttaattagatcccatttgtcaatttgggcttttgttg

SEQ ID NO: 252566 - DNA, 201 bp, Homo sapiens
ttatggaaattctgaaactaggtttgttatttacccaaaaaagacactagctaactaattgatagagaaattttctgcaatattatctctcagccttcagrcaactgcatcttttttgctacctcacctctatattcttaactgctctgctctggtttttgtaagcagtgttccttgtgcggcctgtattttggaacctct

SEQ ID NO: 252567 - DNA, 201 bp, Homo sapiens
gaattgctatgctataatgtcgaaggtagaaaagggagttatttttttactttttatcctaaacaaaagtcacaagaaactccagaatgtttctttaataraaatacggaatcactattaaacagaaactcagttgtcatggcatgttccatgttaagcctttaaatacggtttgacaaaggaccttgctatttaattatt

SEQ ID NO: 252568 - DNA, 201 bp, Homo sapiens
tgtgttttagtcatgaagtccttgcctatgcctatgtcctgaatggtattgcctatgttttcatctagggtttttatggttttaggtctaacacgtaagtstttaatccatcttgaattaatttttgtataaggtgtaaggaagggatccagtttcagctttctacatatggctagccagttttcccagcaccatttatca

SEQ ID NO: 252569 - DNA, 201 bp, Homo sapiens
aacagagactatgacatcaggaagttcatggttggtgtcacttatttaacaagcatttattgagcactacctatgtgataggcaccttgctaaatataccmtggggattaaatagaacatatgacatagtccttgtgctcaagatttacctaaccactccacgtactgatttatggaaattctgaaactaggtttgttatt

SEQ ID NO: 252570 - DNA, 201 bp, Homo sapiens
agacaaagttttataaaatgactttcccaaggtttactcatttcttcatataagagaatgtgcttccaatgtactgtgaagatctacagcattatttactkatgtaaaagaaaacatttttcattaattattttgcccatcttctgagtcctcctgtatttcatattgtaccaaggtctatcaataaattgataagctcag

SEQ ID NO: 252571 - DNA, 201 bp, Homo sapiens
gccccatattttaaagagaaggatctgaaacacagtagagtgcctaaatcacttagccaaaatcatgtggctgataaataatgaagctacactatgaacayaagcagttcagctgtatggtgttaaccaccccaacatattgcttagtgttgttgcaggaaagagtagatactttcaacttttggattttgactaatacaa

SEQ ID NO: 252572 - DNA, 201 bp, Homo sapiens
ttagtttataaaaatttaaactcaaaagactggattatgtttctaaaagagaataataaatgtggtactgtcatataacacatttttagaatttttaagtyctttaggtagatttctttttgccctcaaatatattttaatattgaaaattaataaaagcagactacaatctcacctaccagataatctctggtgatttta

SEQ ID NO: 252573 - DNA, 201 bp, Homo sapiens
attcttgagctatctatatcattttagatgtataagtaagatataaataattttgagtgctctttacataatctcttgtttgcaaaaattaacattatctrtctatttatttatttattttagagacagggtctcattctgtcaccgaggctgaagtacagtggtgtaatcacagcttactgcagccttggagtcctgggc

SEQ ID NO: 252574 - DNA, 201 bp, Homo sapiens
gtttttgctcctgataaaattactgaattaagtttgaaaataaagaacccacagagctcgcttctagtctaattgacaattgctgtttcccgaaccactgmctttgtgcctatcttaccctaccacagaaagtgttctttttggctcccccagtaggttatactgtgaagtctttccattgcagtttgaattccctcatct

SEQ ID NO: 252575 - DNA, 201 bp, Homo sapiens
acattctatgggttttgacaaccgcataatggatctgccattatagaatagtttcactgtcctaaaagtccctgttctccacctatttatccttccctccmtacagccttcattgtttttttccattctcattgtcagtctctaatacaaaggtattctaatcccagaacaaaagacaaaccattaaaccaagtattttga

SEQ ID NO: 252576 - DNA, 201 bp, Homo sapiens
ctttctcacccagtaagtgagaaaatataagttaagaataaacccatcatatttaaaaatgtctctcttctttcattccaaagaaatattttagtactgcrcaaaaacacaaacacacatttagttggggatggctgaataaaacttttctaccaaagagaaagaagaatggaatgaaaactgaaaaaccttgattatagt

SEQ ID NO: 252577 - DNA, 201 bp, Homo sapiens
ttttcactttaaaacagtaccagtcaagtaagaactttctctccttttacctcctcttcttctcaccaacctccttccacccttgaaaatataggaatgaygacctagaagcaccagagcaaatgtaggagtgttggaacatggagagtaaaaaggcccccacttcccactttttgttacaggttttctagcaatggcgtc

SEQ ID NO: 252578 - DNA, 201 bp, Homo sapiens
agaatcattcaccttttcaaaatcaaaagtagtattttgaaaatcattgctacattttggctgttctggggtttttacctcctagagtaatgaaagatggyaaaatctaggaggcatgaaataagatgtaaattggggaagaaaaaagaagaaaagttaggaaaagaggcagaactcaactacatgttccttcttcagcag

SEQ ID NO: 252579 - DNA, 201 bp, Homo sapiens
gcactctttaaaatattttattacataaaacttgtacaggaaagggaagtgaaataatccccttcccaccgtgcctggccaaaaaaaatcaaaacaaaacaaaaaaaaaaaaaacaacaataataagggcttaaaactatttgttaattgaacaaatgttagctattattagatattctttggtagaaaaacataattctc

SEQ ID NO: 252580 - DNA, 201 bp, Homo sapiens
tctttaaaatattttattacataaaacttgtacaggaaagggaagtgaaataatccccttcccaccgtgcctggccaaaaaaaatcaaaacaaaacaaaamaaaaaaaaacaacaataataagggcttaaaactatttgttaattgaacaaatgttagctattattagatattctttggtagaaaaacataattctctatt

SEQ ID NO: 252581 - DNA, 201 bp, Homo sapiens
cagcttaattatgtgctcctgtaacttttgttatatgcaaatagttggaaaacactgaatcacaaaatatttatcatttctttcccattcatcagaatcaytcaccttttcaaaatcaaaagtagtattttgaaaatcattgctacattttggctgttctggggtttttacctcctagagtaatgaaagatggtaaaatct

SEQ ID NO: 252582 - DNA, 201 bp, Homo sapiens
gtacatatatacatatattattgaatatatacagacatttttttatatacaaatattataaaatatatatacaatattcaattgttccagaatatgtgacyatctttaggtctaagaaaaataaaatgttctaaaatttgaattataaaacatgcctctgaatgccatagaagaatagcaaatgtatatattacaaaaatt

SEQ ID NO: 252583 - DNA, 201 bp, Homo sapiens
ttgcatcaaattcatccaaagtgcacaagaaattataatccccatgacatttaggtaatttagtgtgttaaaagaagaactcaagcctttataagaaagaygattattttgtattgtgttggtaagagatcatagattgttcttctatgccaaatttattttttatattgttgctttcttgaagaataattccaagcatat

SEQ ID NO: 252584 - DNA, 201 bp, Homo sapiens
gaatatgaattaaatacctactatgtttaataatttaaaaagactttgggacaatgtcaacatatttaaaggggaaaaggttttgaggttttggggtatgkactttattttgaactaattgcttttctactaacatatcatttcatttaatgctttagaaaatcttgtgagaaaggcttaatgtccctccattcacacatg

SEQ ID NO: 252585 - DNA, 201 bp, Homo sapiens
atgaaaatatatatagaggcacagagaagctatgggctaaccaaccctcaagtgccttaataactaggtccatggatgatatactgggttgaatgttgccrctgcaaaatttcatgtggatgtgaaacctgtgaatgtgacttatttgaaataggttctttgcatatataatcaaataagaataaggtcatactggatttg

SEQ ID NO: 252586 - DNA, 201 bp, Homo sapiens
agatagatgcatggattggagtgatacatctacaagctaggtaatgccaaatgttgctagcagtcatcagaagctataagatgcaagacgggattctaccytggagcctttagagggagcgtggctttgctgacaccttgatttcagacttccagtcttcagaaccatgaaacagtagatttctggggttgtttcttgaga

SEQ ID NO: 252587 - DNA, 201 bp, Homo sapiens
tggctagagcatctggatttctcttcaaatttgcagaaagtttatattttttttctcatccaatccatctcatcttcagcaagcttatcaaattgccaagmaatttttggaataggtgttttgttttaaaaaaattagtttactgttgctattgatccaagatgactccactttatgcttcttgaatataaaagagatata

SEQ ID NO: 252588 - DNA, 201 bp, Homo sapiens
tatatatatagtagtctctctactatatatatatatagtagtctctctactatatatatatagtagtctctctactatatatatatatagtagtctctactatatatatatatatagtagtctctactatatatatactatactatatatattaagattatcagatggttggaactatctaacatggatactgaatgatag

SEQ ID NO: 252589 - DNA, 201 bp, Homo sapiens
ggtgtgcattcaaggggtggggtatgaatggcaaaatcattgacaactgtttcactggctagagcatctggatttctcttcaaatttgcagaaagtttatmttttttttctcatccaatccatctcatcttcagcaagcttatcaaattgccaagaaatttttggaataggtgttttgttttaaaaaaattagtttactgt

SEQ ID NO: 252590 - DNA, 201 bp, Homo sapiens
atatatatagtagtctctctactatatatatatatagtagtctctctactatatatatatagtagtctctctactatatatatatatagtagtctctactatatatatatatatagtagtctctactatatatatactatactatatatattaagattatcagatggttggaactatctaacatggatactgaatgatagt

SEQ ID NO: 252591 - DNA, 201 bp, Homo sapiens
ttatatacacttgtgtgttattaattgtatatataattatatataattaataagtgacacagaatgaaacaagagatgttgatgtcatttattgaccatamgttattcacagagagtcatggatagaagctttgcttaatacgtttctttgtattgatgttaaattcaaaacccatatgaagacaatcattgccaggtttc

SEQ ID NO: 252592 - DNA, 201 bp, Homo sapiens
ttattgttataaaaactaccaaaagctgagaatcttttgagaaaacaatcaataaagagactttgtctgtgtccagtattcccaccccacatactcctttrctttgccttcagtgaatgcaggaactgagaccatcattactgaaaatgtggccgtcactactgacactcagcatatctacacattctttaccttccccat

SEQ ID NO: 252593 - DNA, 201 bp, Homo sapiens
tactcttttttcccatcaggctgtgtgacaaaaaaaagtacacatttctccaaatgcttcatttgctcagcacgtggaatataaagaataaggagcctaaygtataaaagtgatcattggctgtaacaattcaacttctgcagtcttaccctcatatggaacttgaatttccatttaatgtgccaggtttctaggaaaatt

SEQ ID NO: 252594 - DNA, 201 bp, Homo sapiens
gatgtggtgtttttagttgaggaaatctatttagtgaagtctgtaggctttagtttctgtacttaagacaatgcaatcaactgcattttaggttgtgttcwttagtgttctttaacttcctttattgttataaaaactaccaaaagctgagaatcttttgagaaaacaatcaataaagagactttgtctgtgtccagtatt

SEQ ID NO: 252595 - DNA, 201 bp, Homo sapiens
gctctgagaaacccttctcaaaaagaaagaagagaaagaaataaagaaaaagagaaggaaggaaggaaggaagatactaatctttatttaaaaaatatctrtggatgtggtgtttttagttgaggaaatctatttagtgaagtctgtaggctttagtttctgtacttaagacaatgcaatcaactgcattttaggttgtgt

SEQ ID NO: 252596 - DNA, 201 bp, Homo sapiens
attcaaggctgcagtgagctatgattgtgccactccagcatgggtgacagagtatagatgtatgtccaaaatagcaatataagcatattagttctgaatayggagattaaacacaataaaagtctacacccatgctctgagaaacccttctcaaaaagaaagaagagaaagaaataaagaaaaagagaaggaaggaaggaa

SEQ ID NO: 252597 - DNA, 201 bp, Homo sapiens
ctcttagatgccacaggtttctctgagacaaattaggctatctaatgacattttttaaagaacaattttgttttgtactgtgtaagagggagccattagtrtagaaattgcatcaaataattctagataaatatatttaaatatttgttattacttttaagctttccttgcattaattaaattttgatagctatatggatg

SEQ ID NO: 252598 - DNA, 201 bp, Homo sapiens
cacgtcttccatcttttcacatcctacaccttgcattttgctactcctcagatcctgtttcaggaggatatgccactcttatttacagagaggaactggaktcttggcttagaccaaatgtaaaggagtctccccttatctgtggggtcacttttctgagttttcacttacctgtggtcaacacaatccgaaaatagggag

SEQ ID NO: 252599 - DNA, 201 bp, Homo sapiens
cctacaccttgcattttgctactcctcagatcctgtttcaggaggatatgccactcttatttacagagaggaactggattcttggcttagaccaaatgtaraggagtctccccttatctgtggggtcacttttctgagttttcacttacctgtggtcaacacaatccgaaaatagggagaacagtacaacaagatattttg

SEQ ID NO: 252600 - DNA, 201 bp, Homo sapiens
gttataattttctattttcttctttgatattgttaatctcttactgtgcttaatttataaattaaaccttatcatatgtatgtacatttagggaaaacatrgtgtatctagggttcggtactacttgcagtttcaggcatccactggagatcttagaaggtatcccctgtggataaggggggattactatactatcatttc

SEQ ID NO: 252601 - DNA, 201 bp, Homo sapiens
tccctgttcaatgttctgattggtggaaatttcaaattcctgaaacagagtcaacaaacatgtatactaactattcttttttggcttaataaaatgatgascagccaattataatttttatttcagtatgtcaccctttataatagaaattatatgcatatttttgaaatattgattgtgatattatcatattatgctttc

SEQ ID NO: 252602 - DNA, 201 bp, Homo sapiens
gtttcaccatgttggccaggctgatctcaaactcctgacctcaagtgatccactcatctcggcctcccaaagtgctgggaatacaggcatgagccacctcrcctggccgagcaactcttcttagtgatttcttttaagaaaatatttgtcaaagtttataaataatgtaatttatttatggtctttttaaatatttggaga

SEQ ID NO: 252603 - DNA, 201 bp, Homo sapiens
caagatcgcaccactgcactccagcctgggcgacagagcgagactccatctcaaaaaaaaaaaaaaaaattcacagaccaacacatgcagtgaagaattcrcagccaacttaagagcacctggagggaacaccacagaaagactccaaacagccctcagacaacaaccctatcacggatttttctcccctcccctcccctc

SEQ ID NO: 252604 - DNA, 201 bp, Homo sapiens
ttagacaccatccctgtagtgctgttccatgatagagttctcacaagatctggttgtttgaaagtttgtagcatttcctccttcattctctctctctctttctctctctctctctctctcctgctggccaggtgaagatgtgccttgtttccccttcaacttctgccataattgtaaatatcctgaggcctccctagccat

SEQ ID NO: 252605 - DNA, 201 bp, Homo sapiens
tagacaccatccctgtagtgctgttccatgatagagttctcacaagatctggttgtttgaaagtttgtagcatttcctccttcattctctctctctctttctctctctctctctctctcctgctggccaggtgaagatgtgccttgtttccccttcaacttctgccataattgtaaatatcctgaggcctccctagccatg

SEQ ID NO: 252606 - DNA, 201 bp, Homo sapiens
gtgtggatcggagtcacatatcagtttcaaggattcttaacagaccgttggaaagctataatagacgactgatgctacataaagaatatctaaacagtatragaatcgctaaatcaaaatcccacatgggggaggtaagaagagaaaagaaaataaattgctttatttacaataaaaagctatcttgtttgcagattacaa

SEQ ID NO: 252607 - DNA, 201 bp, Homo sapiens
ttttggacttctgacttccagaactgtaagatagtaagtttgtgttgttttaagccactaaatgtgtagtaatatgttacagtaataatagaaaaaaatgyatcttttattgaattcaacttattaattacataaaatatatttcaccttagttagttgctacttacatgttcttatctttttagttatattataaattag

SEQ ID NO: 252608 - DNA, 201 bp, Homo sapiens
cacttgacaaaactctgtactaatctacattcccaggaacaatataaaagaatttcacttactccacattcaggccaatacatggtattgtctattttttwtttttttttttttttttttttttttagccattctaatgggtacatgttggtgcctccttaaggtttttaatttttattttcctgataactagtaatgttg

SEQ ID NO: 252609 - DNA, 201 bp, Homo sapiens
ttctattttcttctttgatattgttaatctcttactgtgcttaatttataaattaaaccttatcatatgtatgtacatttagggaaaacatggtgtatctrgggttcggtactacttgcagtttcaggcatccactggagatcttagaaggtatcccctgtggataaggggggattactatactatcatttcttatcagtt

SEQ ID NO: 252610 - DNA, 201 bp, Homo sapiens
ttgatattgttaatctcttactgtgcttaatttataaattaaaccttatcatatgtatgtacatttagggaaaacatggtgtatctagggttcggtactasttgcagtttcaggcatccactggagatcttagaaggtatcccctgtggataaggggggattactatactatcatttcttatcagtttgatattcaatggt

SEQ ID NO: 252611 - DNA, 201 bp, Homo sapiens
gaaggtatcccctgtggataaggggggattactatactatcatttcttatcagtttgatattcaatggtttctctttgagatgctaaaatgttaaatgagyttttgcatattaattaagtctagccacacaaatcagaagaaactaggaatgggacacatggaaataggtgacacctgccccagctttctatctggtatat

SEQ ID NO: 252612 - DNA, 201 bp, Homo sapiens
tatctctagcctttgtgttaaattcttgagctatctatatcattttagatgtataagtaagatataaataattttgagtgctctttacataatctcttgtwtgcaaaaattaacattatctatctatttatttatttattttagagacagggtctcattctgtcaccgaggctgaagtacagtggtgtaatcacagcttac

SEQ ID NO: 252613 - DNA, 201 bp, Homo sapiens
ccccagtgaatttggggagggatggtcccttctgtccgtttgtttaataccccacatttctctgagaagtcctatcattttgatcatttctaatttaaacsgaaggacaccctttgtgcattcttttctcgttgctgtttccaacagcagtggtttaaatgggaaggctgagactatagattccaccacatcacttgaaat

SEQ ID NO: 252614 - DNA, 201 bp, Homo sapiens
cagaaaaccaatgctcctcatgaccaacctcagactttgtggctctgattgtcttctggactgtgaaacagtgcttaggcctgaatatgtatgccacgggmacacacacacacacacacacatcacatgatcaacaaatgatcacctgttttctgggttgtgtttcaaaatatcttgattgtattttgttggtatctattt

SEQ ID NO: 252615 - DNA, 201 bp, Homo sapiens
caggaccctgcacatattaaatgctatataagtgcataagtgctttttcatttggtagggtctttccaatatattccctcatagccacccctgaaaaatgtttttccaccacaaaatcttacctttgtttgcctattaccccttcggtaatttctcttaacattaaactctatcaaacttagagttaactaatcttgaaac

SEQ ID NO: 252616 - DNA, 201 bp, Homo sapiens
ttggtttaaatttagacataccaataaaattatatgaacatataactacaatttttcatatttgtatggtaattatttttaaaatactactccaatgtaakaaatttttactttgcatatatcttctgcatatatttatacatttaagatgattttttaaccagtattcattttttaacatgaatattccatttagtcata

SEQ ID NO: 252617 - DNA, 201 bp, Homo sapiens
ctccttggcccatgagccttcctagtttcccagtagaactgggtctcagccctgagtcctttgcagtacaaataccttttgtttacagaaggcctctcctsggacagcaaatctccttcactcatgccttgttctactcttttttcccatcaggctgtgtgacaaaaaaaagtacacatttctccaaatgcttcatttgct

SEQ ID NO: 252618 - DNA, 201 bp, Homo sapiens
aaactttttgaacctagacctaaccagtgttctttgacttgacatcaaaagcacaaaccatttaattaataaattagacctaatcaaaattacgaacttgscaagttacaaactgtgataatccatgtgaagtggaggaaaaaaataagctatagactgggggaaaatattttaaatctatatatccaactatgaactaat

SEQ ID NO: 252619 - DNA, 201 bp, Homo sapiens
ttgggcaggatataatcatacatgtgagttgaatacgtaattagaagattagaatctttgaaaaagaaggaagcgttagtattctttagttagcaaaatgyactgttttatagaatgtaaaacaaacagcaccaaagaagacaaagttttataaaatgactttcccaaggtttactcatttcttcatataagagaatgtgc

SEQ ID NO: 252620 - DNA, 201 bp, Homo sapiens
agatgagttggtactcctaaagtcacctggaaaacctttacaaacacccatgccagaattcaatgttatagcagaatttctgcaagtgcacctgtgcttgmgtgcatcttaatagttcccaaaggattctaaacgtgcaggttagagagtcactgagcttgaagatagaagacataatttttatacaaccaatcggctccc

SEQ ID NO: 252621 - DNA, 201 bp, Homo sapiens
acaggggaaaaaaatcagaatgatatatagaattaaaggataatggaactggaataatgttgagcatcttaattagagactttgggcaggatataatcatrcatgtgagttgaatacgtaattagaagattagaatctttgaaaaagaaggaagcgttagtattctttagttagcaaaatgcactgttttatagaatgtaa

SEQ ID NO: 252622 - DNA, 201 bp, Homo sapiens
tacacaatctgttgctagcatcttaatctttagttatgcacacacaaatttcatgccgtcttgttaatctcatcactttctcattagtacaaaacattttycaacttcattcttttctgggtgagggccaataaaactacagaaaaaatctcccatttaagaaaatatctctaatgtctttttcaaaattaaagaatgccc

SEQ ID NO: 252623 - DNA, 201 bp, Homo sapiens
ctcttttgtcagatctggacatatttctttttaacattgtattttttaacagtatgtttcttgtgaaatgctgcaatagtttgttaataagtctgtaatcygctattacaaagccactgatgaattgtataaggttagttaagtttatgttaaatataaaggaagcagacattcaagaaatatgagggtaggatggggaaa

SEQ ID NO: 252624 - DNA, 201 bp, Homo sapiens
atctcacaagctcttgggaattgtgtggttaggagaactaatccgagggtgattttcaaggatctctaagataacttcatcatctcttccctctgaggtamccccacccccaacacacacacaattttcatttttttctgacatacattgtctttacatgcaaaacgattatcaacagcaaaatgataatatgttttaagt

SEQ ID NO: 252625 - DNA, 201 bp, Homo sapiens
tatcttttgcagcaacttggatggagatggaggccattattctaagtgaaataattaaagaatagaaaaccaaatattgtatgttttcagttacaagtgcragctaactatgaggatgcaaatgcataaggaacatttaatagactttggatacttggcagggaaggttgtgaggcaggtgagggataaaagacaacatac

SEQ ID NO: 252626 - DNA, 201 bp, Homo sapiens
tttccattcctgaaacatgcatatctgcctgttcttaagctaagcaccagtctttccatttcatactcaaaaatcacctatgcaccgatagtggatgagtrttacttcatggactcagagtgattgatgccatagcctgcctaggtccctctgtcaagagtgattccatgactaaactctgacacactgggaaagagcact

SEQ ID NO: 252627 - DNA, 201 bp, Homo sapiens
tcgctctttgtacctccattggttatttcttttcctactttcaagtttgagtgtttttgtttttgaatgtatgaccaaaatgtccacatgttgggagtgagtgtgtgtgtgtgtgtgtgtgtgtgtgtgtgtgtgtaaaggtaaatttctgcatctgacttgcccaccatcatgattaaaagtcactgccatttcagactt

SEQ ID NO: 252628 - DNA, 201 bp, Homo sapiens
cgctctttgtacctccattggttatttcttttcctactttcaagtttgagtgtttttgtttttgaatgtatgaccaaaatgtccacatgttgggagtgagtgtgtgtgtgtgtgtgtgtgtgtgtgtgtgtgtgtaaaggtaaatttctgcatctgacttgcccaccatcatgattaaaagtcactgccatttcagacttt

SEQ ID NO: 252629 - DNA, 201 bp, Homo sapiens
gctctttgtacctccattggttatttcttttcctactttcaagtttgagtgtttttgtttttgaatgtatgaccaaaatgtccacatgttgggagtgagtgtgtgtgtgtgtgtgtgtgtgtgtgtgtgtgtgtaaaggtaaatttctgcatctgacttgcccaccatcatgattaaaagtcactgccatttcagactttt

SEQ ID NO: 252630 - DNA, 201 bp, Homo sapiens
ctctttgtacctccattggttatttcttttcctactttcaagtttgagtgtttttgtttttgaatgtatgaccaaaatgtccacatgttgggagtgagtgtgtgtgtgtgtgtgtgtgtgtgtgtgtgtgtgtaaaggtaaatttctgcatctgacttgcccaccatcatgattaaaagtcactgccatttcagacttttt

SEQ ID NO: 252631 - DNA, 201 bp, Homo sapiens
aaccctctgtaaactgcaagtgtaacaaaggtattttattttattgatttttattattatatttctgatcactgtccccagccaggcaacatcagtaagamaaagaatcattgtgacaggtcctagattttagttgcattggccaatgtttacttttccagggctgaatatagcagccctatgatgctgagatccaatagc

SEQ ID NO: 252632 - DNA, 201 bp, Homo sapiens
tatttccagtgtttgctggaaaaagatatgagtttttccttagattaagaggttgttgagtaatgtaggcaagctggagcctggatggcgtgactccaagrtctgtgtgggacatttgcaagaagagagcagctggagaggagaatgtgggagatatttgaagaaatttcaagagagaatattgatatttaggcaccggcc

SEQ ID NO: 252633 - DNA, 201 bp, Homo sapiens
ctgcaaggcagcagcgaggctgggtgtggggtgcccaccattgccaaggcttgagtagataaacaaagcggctgggaagctcgaactgggtggagcccacygcagctcaaagaggcctgcctgcctctgtagactccacctctgtgggcagggcatagccaaacaaaaggcagcagaaacctctgcagacttgaatgtccc

SEQ ID NO: 252634 - DNA, 201 bp, Homo sapiens
tgtgtttaataaggtttttgttcttttgtgttcactgtaatgtggaagtaatttcagtctttctacacagaggtcccgactgactcccatcacagtatcgkcagagctccagctacacagtggaatacatcatctctggttgcacatggctggcagcctctgaagattgggtttaaactgatggggcaggtctttctcttt

SEQ ID NO: 252635 - DNA, 201 bp, Homo sapiens
ctgatgtattttaatagtatttttgtgggttgtattcgttgtcctttttactgattgaaacctaactagtatgaaaaaagagctttatccccctttctagaaaaaaaaaatattaaacaggtacagattttgctgcaagataatatcttctttccttggttaagaaaacaatttatttttttttcatttctcttccaaatt

SEQ ID NO: 252636 - DNA, 201 bp, Homo sapiens
ccagttatcaggcctatttcaggttttgtacttgattgccagtaattcatcattttggaatatatgttcttactctgctttgagttttaaatcccatgatmtactactactactactactactactactactactactactactaccactgatgtattttaatagtatttttgtgggttgtattcgttgtcctttttactg

SEQ ID NO: 252637 - DNA, 201 bp, Homo sapiens
tatcattttagatgtataagtaagatataaataattttgagtgctctttacataatctcttgtttgcaaaaattaacattatctatctatttatttatttrttttagagacagggtctcattctgtcaccgaggctgaagtacagtggtgtaatcacagcttactgcagccttggagtcctgggctcaagtgatcctccac

SEQ ID NO: 252638 - DNA, 201 bp, Homo sapiens
tacagtggtgtaatcacagcttactgcagccttggagtcctgggctcaagtgatcctccacctcagcctcctgagtagctgggactacaggtccatgccaycatgctcagctaatttaatatttttttttagagacagagaattgctgtggtgcccaggctgctctggaactcttggcctcaagcaatcctcctgcctcag

SEQ ID NO: 252639 - DNA, 201 bp, Homo sapiens
ttcaccaaagttgaaatgaaggaaaaaatgttaagggcagccagagagaaaggtcgggttacccacaaagggaagcccatcagactaacagctgaactctyggcagaaactctacaagccagaagagagtgggaccaatattcaacattcttaaagaaaagaattttcaacccagaatttcatatccagccaaactaagct

SEQ ID NO: 252640 - DNA, 201 bp, Homo sapiens
agatcaaactgcaaggtggcagtgaggctgggggaggggtgtctgccattgcccaggcttgattaggttaacaaagcagccctgaaactcaaactgggtgsagcacaccacagctcaaggacgcctgcctgcctctaggctccacctctgggggcagggcacagacaaacaaagggcagcagtaacctttgcagacttaaa

SEQ ID NO: 252641 - DNA, 201 bp, Homo sapiens
agagtgggaccaatattcaacattcttaaagaaaagaattttcaacccagaatttcatatccagccaaactaagcttcataagtgaaggagaaataaaatmctttacagacaagcaaatgctgagagattttgtcaccaccaggcctgccctaaaagagctcctgaaggaagcactaaacatggaaaggaacaatcggtac

SEQ ID NO: 252642 - DNA, 201 bp, Homo sapiens
aaaactgggtcactcccaccctaatactgcgcctttccaactggcttaaaaaatggcacaccaggagattatatcctgcacctgcctcagagggtcctacrcccacggagtctcgctgattgctagcacagcagtctgagatcaaactgcaaggtggcagtgaggctgggggaggggtgtctgccattgcccaggcttgat

SEQ ID NO: 252643 - DNA, 201 bp, Homo sapiens
acaagagctaatgatcctaaatatatatgcacccaatacaggagcacccagattcataaagcaagtccttagaaacttacaaagagacttagactcccacrcaataataatgggagactttaacaccccactgtcaacattagacagatcaacgagacagaaagttaacaaggatatccaggaattgaactcagctctgca

SEQ ID NO: 252644 - DNA, 201 bp, Homo sapiens
cactcaggaagtgcaaggggtcagggagttccctttcctagtcaaagaaaggggtgacggatggcacctggaaaactgggtcactcccaccctaatactgygcctttccaactggcttaaaaaatggcacaccaggagattatatcctgcacctgcctcagagggtcctacgcccacggagtctcgctgattgctagcaca

SEQ ID NO: 252645 - DNA, 201 bp, Homo sapiens
ccccaaatatggtgaaggccaccaagcatggattattgggattgtggagaagggcaactgcacagccagaatcatagacaaacccaggatcatcgaggtcrcaccacaagtggccactcaaaatgcgaatccctcacctggggccacctcttaatctagacagaaatagctgtttggttttgtttttaaatagatctatgt

SEQ ID NO: 252646 - DNA, 201 bp, Homo sapiens
taccgggttcatctcactagggagtgccagacagtgggcgcaggacagtgggtgcgtacaccgtgcgcgaaccaaagcagggcaaggcattgcctcactcrggaagtgcaaggggtcagggagttccctttcctagtcaaagaaaggggtgacggatggcacctggaaaactgggtcactcccaccctaatactgcgcctt

SEQ ID NO: 252647 - DNA, 201 bp, Homo sapiens
tatgcttattcgatgtcactctgagacttttcgtgaaaaccaaattctcgggtggagccaagatggctgaataggaacagctcccctctacagctcccagygtgagcgacgcagaagccgggtgatttctgcatctccatctgaggtaccgggttcatctcactagggagtgccagacagtgggcgcaggacagtgggtgc

SEQ ID NO: 252648 - DNA, 201 bp, Homo sapiens
cctatttaaacaatgtatgcttattcgatgtcactctgagacttttcgtgaaaaccaaattctcgggtggagccaagatggctgaataggaacagctcccstctacagctcccagtgtgagcgacgcagaagccgggtgatttctgcatctccatctgaggtaccgggttcatctcactagggagtgccagacagtgggcg

SEQ ID NO: 252649 - DNA, 201 bp, Homo sapiens
tgctatactgctcacagtgtctcaacagcttgtggttccaaactaaggtcatactgacagagctgaagtttttcagatcaagtgttccctcctatacctaycaaaaaaaaagtgtcctcaaccttcatctgagattcctttcctcatctagaagagctcaggatttcctctgggtagaagatggtatcacctaaaatagac

SEQ ID NO: 252650 - DNA, 201 bp, Homo sapiens
taaaaatactagaagtaggacttaaaatcctgatctcctatttaaacaatgtatgcttattcgatgtcactctgagacttttcgtgaaaaccaaattctcrggtggagccaagatggctgaataggaacagctcccctctacagctcccagtgtgagcgacgcagaagccgggtgatttctgcatctccatctgaggtacc

SEQ ID NO: 252651 - DNA, 201 bp, Homo sapiens
tccacctctgtgggcagggcatagccaaacaaaaggcagcagaaacctctgcagacttgaatgtccctgtctgacagctttgaagagagtagtggttcttycagcatgcagcttgagatctgagaacagacagactgcatcctcaagtgggtccctgaaccccaagtagcctaactgggaggcaccctccagtagggacag

SEQ ID NO: 252652 - DNA, 201 bp, Homo sapiens
atgactttggcgagttgagagaagaaggcttcagatgatcaaactactctgagctaaaggaggaagcttgaacccatggcaaagaagttaaaaaccttgaraaaagattagatgaatggctaactagaataaccaatgcagagaagtccttaaaggacctgatggagctgaaaaccactgcacgagaactacatgattaat

SEQ ID NO: 252653 - DNA, 201 bp, Homo sapiens
attcgatcaactggaagaaagggtatctatcagtaatggaagatcaaatgaatgaaatgaaatgagaagagaagtttagagaaaaaagaataaaaagaaaygaacaaagtctccaagaaatatgggactatgtgaaaagaccaaatcgacgtctaattggtgtacctgaaagtgaaggggagaatggaaccaagttggaaa

SEQ ID NO: 252654 - DNA, 201 bp, Homo sapiens
acactctgcaggacattatccaggagaacttccccaatctagcaaggcaggccaacattcaaattcaggaaatacagagaatgccacaaagatactcctcsagaagagcaactccaagacacataattgtcagattcaccaaagttgaaatgaaggaaaaaatgttaagggcagccagagagaaaggttgggttacccaca

SEQ ID NO: 252655 - DNA, 201 bp, Homo sapiens
tcatcctgataccaaagccgggcagagacacaaccaaaaaagagaattttagaccaatatccctggtgaacattgatgcaaaaatcttcaataaaatactrgcaaacccaatccagcagcacatcaaaaagcttatccaccatgatcaagtgggcttcatccctgggatgcaagactggttcaacatatgcaaatcaataa

SEQ ID NO: 252656 - DNA, 201 bp, Homo sapiens
tcaagtgggcttcatccctgggatgcaagactggttcaacatatgcaaatcaataaatgtaatccagtatataaacagaaccaaagacaaaaagcacatgmttatctcaatagatgcagaaaaggcctttgacaaaattcaacagtcctttatgctaaaaactctcaataaattaggtattgatgggacatatctcaaaat

SEQ ID NO: 252657 - DNA, 201 bp, Homo sapiens
ggctacagtaaccaaaacagcatggtactggtaacaaaacagagatatagaccaatggaacagaacagagccctcagaaataatgctgcatatctacaacyatctgatctttgacaaacctgacaaaaacaagaaacggggaaaggattccctatttaataaatggtcctgggaaaactggctagccatatgtagaaagct

SEQ ID NO: 252658 - DNA, 201 bp, Homo sapiens
gagccctcagaaataatgctgcatatctacaaccatctgatctttgacaaacctgacaaaaacaagaaacggggaaaggattccctatttaataaatggtsctgggaaaactggctagccatatgtagaaagctgaaactggatcccttccttacaccttatataaaaattaattcaagatggattaaagacttacatgtt

SEQ ID NO: 252659 - DNA, 201 bp, Homo sapiens
catgttagacctaaaaccataaaaaccctagaagaaaacataggcaataccattcaggacataggcatgggcaaggacttcatgtctaaaacaccaaaagsaatggcaacaaaagccaaaattgaagggatctaattaaagagcttctgcacagcaaaagaaactaccatcagagtgaacaggcaacctacagaatgggag

SEQ ID NO: 252660 - DNA, 201 bp, Homo sapiens
cttggatccaacccaaatgtccaccaatgagagattggattaagaaaatgtggcacatatacaccatggaatactatgcagccataaaaaatgatgagttmatgtcctttgcagggacatggataaagctggaaaccatcattctcagcaaactatcgcaaggacaaaaaaccaaacacctcatgttctcactcataaatg

SEQ ID NO: 252661 - DNA, 201 bp, Homo sapiens
gacctcttcaaggggaactacaaatcactgctcaatgaaataaaagaggatacaaacaaatggaagaacattccatgctcatggtaggaagaatcaatatygttaaaatggtcatactgcccaagggaatttatacattcaatgccatccccatcaagctacaaatgactttcttcacagaattgaaaaaactactttaaa

SEQ ID NO: 252662 - DNA, 201 bp, Homo sapiens
attattcttgcttaatttgctgaaataatgttacataacaaagagatgactttaagatgttattgatatatacatttagtatgtacccataaaaagtaaatttttttttttaaaaaaagatgctattgagtaaagtcctaagaaatacctcaatcttgttagttcattcagcaaggtagtagaggtgaagaaaacagatgt

SEQ ID NO: 252663 - DNA, 201 bp, Homo sapiens
ccatactcattcaaagtgggtatgactcttagttttgtttcagaggccagcctttatcctctgtggctcatcttacctgaaatggaaatgcaatagaactscattgtttggctctctgatattcagaacatctgaaatacatggccataattcttatatgtatgcatacatatgcatttatgttttcttgtcttacttgaa

SEQ ID NO: 252664 - DNA, 201 bp, Homo sapiens
cagtgggcgcaggacagtgggtgcgtacaccgtgcgcgaaccaaagcagggcaaggcattgcctcactcaggaagtgcaaggggtcagggagttccctttcctagtcaaagaaaggggtgacggatggcacctggaaaactgggtcactcccaccctaatactgcgcctttccaactggcttaaaaaatggcacaccagga

SEQ ID NO: 252665 - DNA, 201 bp, Homo sapiens
tttggggggtaaaattaacctgttattttaatgtataatacttataacaccttgaggtttaaattttagaaattaaaaaactgggacccagaaatattaamtgagcagtccaaattacagaaataaaaatactagaagtaggacttaaaatcctgatctcctatttaaacaatgtatgcttattcgatgtcactctgagac

SEQ ID NO: 252666 - DNA, 201 bp, Homo sapiens
ccttgtgtgcatggtattttactgtggtacatggtaacctaagttccttagtccacaccccagcctgctttccattaaataagttcaatatttaatgctckgtctgcaaacctggacccacttttggtccctttctcacttgaattctctacataccaaagggtatttcaggaaacacacctcaaaagtcataacttccct

SEQ ID NO: 252667 - DNA, 201 bp, Homo sapiens
taattgggtaatatgaagagcatctctgaggggttgctacctcaatttactaaattaggagagtagacctagtgatgcaaaaggatttgcacataagtaartagttacacagaggaagaacacaagcttatattgatcacatatgtctgactctaatttgctatcttgatttccaaagtgcttgcttacaagatgaaatga

SEQ ID NO: 252668 - DNA, 201 bp, Homo sapiens
tggcaactgagagtggatctcccctttattaactaaagtccacagtttatattagggtttactctttgtgttatacattctatgggttttgacaaccgcayaatggatctgccattatagaatagtttcactgtcctaaaagtccctgttctccacctatttatccttccctccctacagccttcattgtttttttccatt

SEQ ID NO: 252669 - DNA, 201 bp, Homo sapiens
gttagcatgaggtcatactggattagaatgggccctaaatccagtgactggtgcccttataacacaaggagagaacacagaaagacatacacaaaaggcayatggaaattggagtgatgcagctataagccaagcaaggccaaggactatgagcaaccccagaaactacacagagttaggggaaggattcttctagagctt

SEQ ID NO: 252670 - DNA, 201 bp, Homo sapiens
tttaagtatgaattaacttgtttaagcattttctttcttaatagattattttaatagaagagtattaattgctgagtcaaattcacaatacaggactattyttataataaattttaaagttatcatttgtagctaaaatagttttaataaaaagatttacattgaaggcctgcttatatttgagtgaggccacatgagaga

SEQ ID NO: 252671 - DNA, 201 bp, Homo sapiens
ataacttctattgttggtatcattgttattctcatttaaagatgtttcagtagaggcacagaaaagctgaataacttttattgctggtaagtgtagggccwgaatttgaatccaggcatcttgctctagagccctaacattttccaatctcattataaactgcctataaaagaaacttgcttttccattccaggttgacag

SEQ ID NO: 252672 - DNA, 201 bp, Homo sapiens
gtctctgaaataatcttccttcaagagcaaagaaagtttgtctcgtctacttaattaaattctccagaataactcctggtgctttccaaatatatgtaagyaataaaaccttgtggaatgggtgagtgaaagttacggagaataaatgtgatgcataaacacctagttcaaatttggtcagctttctgttcatctgccagt

SEQ ID NO: 252673 - DNA, 201 bp, Homo sapiens
aatttgcagaaagtttatattttttttctcatccaatccatctcatcttcagcaagcttatcaaattgccaagaaatttttggaataggtgttttgttttaaaaaaattagtttactgttgctattgatccaagatgactccactttatgcttcttgaatataaaagagatataagttctacaggatcccttaattctatc

SEQ ID NO: 252674 - DNA, 201 bp, Homo sapiens
taaaaagtattcaaagtgagaaaaaaaattgaagttttagaagtttaagtcttgaaagattaagagaaatagctaagtttgacaggtcccagaacacctgwtctcatcaccagatgagatcttcactgtagaaggggtgctggaggaagaagggtaggatgtcaaaaagctgagagtggatcctccgctgtttcagatctc

SEQ ID NO: 252675 - DNA, 201 bp, Homo sapiens
gaagtttaattttcctatctgtgaaaaaagggcaagaacagatgatttttgaggtccttctcctctcaaaaattatggggttttaagttaaaatgaggtgttttttttttttttttaaagattattgcttgatgttttgtgtggagaggtaaaggaaggggaataaatctagcagatcttcgacactcttaggaatgtcct

SEQ ID NO: 252676 - DNA, 201 bp, Homo sapiens
atttttaaaaatttttatttccatgcttttgggaatatagttggtttttggttacatggataagttctttagtggtgatttctgagattttagtgcacccrtcacctgaacagtgtacaccatacccaatatgtagtttttttatccctcatacccccaacattccccctgagtccccaaagtcctttacattaattattc

SEQ ID NO: 252677 - DNA, 201 bp, Homo sapiens
attttggttgtcaccaccatattttaggctgttgtttgttactggaatactccttcattcccagaaatcctgaaaattcttccaaacatataagtttaatkagcattttaatactaattatctacatagggtattatgagtatatgtttttccatatcaccctttggcttaccttattacagcagcaacagtgttttgctt

SEQ ID NO: 252678 - DNA, 201 bp, Homo sapiens
gaaaccatcattctcagcaaactatcgcaaggacaaaaaaccaaacacctcatgttctcactcataaatgggaattgagcaatgagaatacatggacacargaaggggaacatcacacaccggggcctgttgtggggtgtggggggtggggagggatagcattaggagataaacttaatgttaaatgacgagttaatggat

SEQ ID NO: 252679 - DNA, 201 bp, Homo sapiens
aggaaggggaacatcacacaccggggcctgttgtggggtgtggggggtggggagggatagcattaggagataaacttaatgttaaatgacgagttaatggrtgcagcacaccaacatggcacatatgtatatatatgtaacgaacctgcacgttgtgcacatgtaccctaaaacttaaaagtataataaaaaaaaagagag

SEQ ID NO: 252680 - DNA, 201 bp, Homo sapiens
gagttaatggatgcagcacaccaacatggcacatatgtatatatatgtaacgaacctgcacgttgtgcacatgtaccctaaaacttaaaagtataataaaraaaaagagagagagagaaaaaagaaaaagcatggaaaaaaaaaaaaaagcttgagaaagtgagggaatgagaatctaatctgtggttatctaccagcttc

SEQ ID NO: 252681 - DNA, 201 bp, Homo sapiens
cactgcattacagtaaagggtctctgaaataatcttccttcaagagcaaagaaagtttgtctcgtctacttaattaaattctccagaataactcctggtgstttccaaatatatgtaagtaataaaaccttgtggaatgggtgagtgaaagttacggagaataaatgtgatgcataaacacctagttcaaatttggtcagc

SEQ ID NO: 252682 - DNA, 201 bp, Homo sapiens
ccagatttatcttttgctgacacatagcagatagctaatgacttacctaaataaggtcatctaaggacaacaagtctgctacctcttcctttcattgcccwcttatttccagcttaaatcctaatgataactacggtttttgggacttctccccttttcatcattccaaataataatcataatcatgatcaaaatcttatc

SEQ ID NO: 252683 - DNA, 201 bp, Homo sapiens
tttgaagtttgaagggggccatgaataaagttgtgacaaagcttttagaagctagaaaaggcaggtggtccattagagtgtctagaagaaacactgctgtrctgacaccttgatttttagccttgtaaaattgattttagagctttgatctctagaactgaaaggaatgcattttattgttttatgccactagattcatag

SEQ ID NO: 252684 - DNA, 201 bp, Homo sapiens
agctaaggatctccagataaattatcctgaatcatccaagtgagaatcctatttagtggagtgatccaggaaggaaacgtgatgatggaaccagaggttgrggtaatacagttgctggctttgaagtttgaagggggccatgaataaagttgtgacaaagcttttagaagctagaaaaggcaggtggtccattagagtgtc

SEQ ID NO: 252685 - DNA, 201 bp, Homo sapiens
actctttggtaacgggaaattggtaagtctcagtttggtgatattatcatttatttaaatcagcaaaaatcttaaaattcattgtggtaaaattactcaakggactaaactcagaagagaatttgctttcttagtgtagaaattcactcaaagaaagatgactagttttcttttagttcttctagaaacagattcttaaaa

SEQ ID NO: 252686 - DNA, 201 bp, Homo sapiens
actcttggcctcaagcaatcctcctgcctcagcttcccaaagtttagggattacaggtgtgagccacctcgcttggcctgcagatttaacattttgagtgycatggatctagatattcctgtaatctatatttgaaataagttcattgctttcagatggagttatgaccttttaaagcaacattctgtgttgagtgcaatt

SEQ ID NO: 252687 - DNA, 201 bp, Homo sapiens
aaattacattggaataattggcaaagatcatggatagaaacactgttactcagcaagggacctagctgaacagccttgtcaaagtaggttaggaaatttcygatgactatagccagtgtggccacatttttaaagatagcaatccattatcacttctcttctgccacgtgaaaaaagaagtcagccctcagaatctgattt

SEQ ID NO: 252688 - DNA, 201 bp, Homo sapiens
aggaagggaaactaagtattaattaacccattggataaaatattctttaactctgggagagataaaatgcttatgacaggactgtcttcataaataccaaraatattgctgcttaggaagaagactcttgctctgtgttctttgttttctgagacaagacaaccctgaatatgttttaagtgaataaattaaattgttaag

SEQ ID NO: 252689 - DNA, 201 bp, Homo sapiens
ataagagatgccatgtatattaattttataaaggaagaaatgttttacaaagaaaaataccaattttttaaggtcagagagttcatagatgttaacaatayacaaactggcacaatgaccatagcaaaatgaaattgaagtcaacacaaagttcccttgtgtgcatggtattttactgtggtacatggtaacctaagttcc

SEQ ID NO: 252690 - DNA, 201 bp, Homo sapiens
ctttatgccaaggctcagatgtcactaaatagtgatcctcttttttgttttaaagacagggtctcacactgttgctcaggctggtcttaaactcctggccwcaagcaatcctccaacttgtctcccaaagtactgaaattacagtgtaagccaccatgcctggtcccccacccaccttttttaaacagcataactaatttc

SEQ ID NO: 252691 - DNA, 201 bp, Homo sapiens
ttgtgttggtaagagatcatagattgttcttctatgccaaatttattttttatattgttgctttcttgaagaataattccaagcatatttttgtagtaaaygaggagcaagccaattaagcctcccatgcttgcaactcaaacagcaatctggattgctataatggagagagactcaatataaattaaaagcagagagggt

SEQ ID NO: 252692 - DNA, 201 bp, Homo sapiens
tgttctatagatgaatggtgtgtaagtaggtatgtcttccatactcattcaaagtgggtatgactcttagttttgtttcagaggccagcctttatcctctrtggctcatcttacctgaaatggaaatgcaatagaactgcattgtttggctctctgatattcagaacatctgaaatacatggccataattcttatatgtat

SEQ ID NO: 252693 - DNA, 201 bp, Homo sapiens
attataaattgattttttcttcttaatttcatttttgtgttgtccattattactatattgatatgcaattgcttttgtatgttaattattttttctttacttttttttttttttttgagacagagtgtcactctattgcacaggctagaatgcagggacacaagcatagctcactgcagccttgacctgctgggatcaagc

SEQ ID NO: 252694 - DNA, 201 bp, Homo sapiens
ttcctcccagtgtcattggcacccccttctatgtgatggagtactgcccaggtctcatctacaaagacccttccctgccaggcttggagcccagccacagrcgagccatatacactgccatgaacacagtcctgtgcaaaattcacagtgtggatctgcaggctgtgggacttgaagactatgggaagcaaggtgagcagg

SEQ ID NO: 252695 - DNA, 201 bp, Homo sapiens
tcctggagatacacagtcatgagaaaaactgtccggagaaaaaccagtacccagagaatttctagtttaactgtacctggtctgataagcaggggatgctrgaagcaggaatttctggaaacaatattttccctcttttaggaaaatacagtatcagctgtaagccactatttcccattttttttatagttttccaataaa

SEQ ID NO: 252696 - DNA, 201 bp, Homo sapiens; identical to SEQ ID NO: 49898

SEQ ID NO: 252697 - DNA, 201 bp, Homo sapiens
tatgtttgggttttcatcgtcgagctgatgggcctgtagggtaagagcaaacgttgtaacataatcttctttcttcttggcacaagagggtattgtgaaatttttttttttttttgaaacagagtttcactttgtcacccaggctggaatacagtggcatgatcttggctcactgtaacctctgcctccctggttcaagca

SEQ ID NO: 252698 - DNA, 201 bp, Homo sapiens
ggaacataactcactgcagccaccaactcctgggctcagtgatgctcccaccttagcctcctgagtagctgggactacaggcgtgcactaccacgctcagmtaatttttaaatttttttttgtagagataggatcttgttatgttgcccgggctggtcttgaactcctgagcttaagcagtcctccgaaaatgtggggatt

SEQ ID NO: 252699 - DNA, 201 bp, Homo sapiens; identical to SEQ ID NO: 49889

SEQ ID NO: 252700 - DNA, 201 bp, Homo sapiens
aatgagctgagatggcgccactgcactcgagcctaggcaacagagcaagactccatctcaaaaaaaaaaaaagaattaagggaagacatttgggttaattyctatttagatatttaatttgtttccaattttttagtattacttcccctacttccatgaaaaaaaggcagtgaacatccttgtagtaatatatttgcctat

SEQ ID NO: 252701 - DNA, 201 bp, Homo sapiens
tgtttgttcaggcctttattcctcttatcttactgtgcactcctttccctccctctgggaagccagccagacacactgaggaaatggcttagttttctcaygtaaaaacaacaaaatccattttttgaaagaataatataaaaacgtatgatgaatggggaaaaaaccaactatacaaacataaatattacttctgtacat

SEQ ID NO: 252702 - DNA, 201 bp, Homo sapiens; identical to SEQ ID NO: 49891

SEQ ID NO: 252703 - DNA, 201 bp, Homo sapiens
ggaatccctgctgcagaggagtatttcaggatgtactgtctccaaatggggctccctcccactgagaactggaacttctatatggctttttcctttttccrtgtggctgcaatcctacagggagtctacaagcgatcactcacaggtaatgggatggctgccctgaagagccactgcggggtgagtcacagcaaggaccgt

SEQ ID NO: 252704 - DNA, 201 bp, Homo sapiens
tgagcagggagaaccacttgaacccgggaaacagaggttgcagtgagctgagatcataccattgcgctgcagcttgggagacagagcaagactctgtctcaaaaaaaaaaaagtatatatatatatacactagaattactgtactatactatttttttttttcttgagatgggatcgcgctctgtttcttaggctggagtg

SEQ ID NO: 252705 - DNA, 201 bp, Homo sapiens
gagatcaagagcagggagcaggcagacctaagttggactctggcccccagccccctaacttccagctcgtccaagtcacctccttctctaagactcagttktcttgcgtgcaaagtgcaggtgaaagcagttgtattgctttggggattcagtgagctatagtggctcttagcacagtgtttggtacttagcaagtgctca

SEQ ID NO: 252706 - DNA, 201 bp, Homo sapiens
ctggaagccagagggcaagggagcctttggagcacacagcccagggagctcaggcacccgggcacagaggggatgggagggtggggagccaagcctaaagrgcaaacagaccacgcagaatccaccctagccggcagttttcttagtgctgtctctattcctcctgcgacttttcaggctcgacaacctggtgtttcatcc

SEQ ID NO: 252707 - DNA, 201 bp, Homo sapiens
cgagactccgtctcaaaaaaaaaaaaaaattgggcatggtagtccatgcctgtaatcccagatactcgggagactgaggcaggagaattgctggaactcgsgaggcagaggttgcagtgagccaagatagcaccactgcactccagcctgggtgacagatcaagactccgtcttgggagaaaaaaaaaattgaattcagag

SEQ ID NO: 252708 - DNA, 201 bp, Homo sapiens
ccaggctggtctcaaactcttgacctcaagtgatccatccgcctcggcctcccaaagtgctggattacaggtatgagccactgcacccggccgacattgtytttcataaccacaacaccagtatacctaactaacaattatttaataataatactgaatatctaacccatgttcaaatttccccaatccaaaacatctttt

SEQ ID NO: 252709 - DNA, 201 bp, Homo sapiens
aaaacccaatttgctcttatttctggtcagcagtctgcagatgctcatctgattacatggagccttaaagagctctgtctgcttccttactgtgcctttcktgggccaggaccacgtgtgtagagatttgatggccctggtgtcagatgatggggtctgtctctctcctttcctggcaggcatcctggatcctcgttgcca

SEQ ID NO: 252710 - DNA, 201 bp, Homo sapiens
caatcctcctgcctctccctcttgagtagctgggactacaggtacgcaccaccatgcccagctaatttttgtatttttagcagagacaggtttttgccacrttgcccaggctctacccaaactcctgcgctcaagtgatttggcctcccaaagtgttgggattacaggcatgagcctctgcagccagccctcatgtagttc

SEQ ID NO: 252711 - DNA, 201 bp, Homo sapiens
gcaccacccagtgcagagcatgacaaagggtttcactgcactggtttttttttccgctactttcagaggttgctgaaattgcacaccaagttctaatcctrtttcccgcaggggactatattccacgccaggtacgaacctgggttaagcagtatcgagcttccgaaactagcaccatcccagccatggagaggctgatcg

SEQ ID NO: 252712 - DNA, 201 bp, Homo sapiens
gcatgtcctcagccgcacatctcctgtgtcgacaggtgaagtcccgcttggcttttgggaagcccctggtggagcagggcacagtgctggcggacatcgcrcagtcgcgcgtggagattgagcaggcacggctgctggtgctgagagctgcccacctcatggacctggcaggaaacaaggtaggggcaggggcacgagggg

SEQ ID NO: 252713 - DNA, 201 bp, Homo sapiens
ttcaagcagtagaaaacctaacaaaacagtgactgaaacaagctagaagtttctttctcttgcacataaaagcccaggtatgtggtctggggcactgtgtkatgcgactctgtggtatcagggactccgactctttatagcatgttgctctgctgtgacttttcatttccactcttacattgtggtctgtcttggctgtgt

SEQ ID NO: 252714 - DNA, 201 bp, Homo sapiens
cccagccatggagaggctgatcgaatggctgcccctccatcttccccgtcagcagaggaccacagtggtgcacggggacttcaggtagatgtggtggcagrgagagctgaaaaatgacagcaaggatgctccaagggggaattgagcaattggtcttggtgcaatttacagctgggaattattcctattacaaagcacctg

SEQ ID NO: 252715 - DNA, 201 bp, Homo sapiens
aggaaaaaggaagtatccagtgctctgggtctgaactcttcaccagctctcaacctgtatacccagggaaagtgacaaagaatagggtcatgactaacagyctgccacattatgactctgatccctgaaaccccttctgtgttcctcccagtgtcattggcacccccttctatgtgatggagtactgcccaggtctcatct

SEQ ID NO: 252716 - DNA, 201 bp, Homo sapiens
ctttaaagttttcctcagtgtgtgggaacatcctgatcttcataagaactcaatcctaaacagataaaccagattcagaagcactggcatgaacttgaacttttttttttttttgagatggagtctcgctctgtcacccaggctggagtgtagtggcgaaatcttggcgcactgcaacccctgcctcctgggttcaagtgg

SEQ ID NO: 252717 - DNA, 201 bp, Homo sapiens
gttggtcaggctgctctcgaactccctaccttaggtgattgcccgccttggcctcccaaaatgctgggattacaggcatgagccactgcgcccggccggtmataaccgtttatctgttacatgatttgcaaatattttctcccttttatgccttgtcttttgattttattgataatgcttttagctgtaccaaagttttct

SEQ ID NO: 252718 - DNA, 201 bp, Homo sapiens
agctaatttttgtatttttagtagagacagggtttcaccatgttggccaggaaggtctcgatcccttgacctcgtgatctgcccgcctcgggctcccaaartgctgggattacaggtgtgagccaccgtgcccggcaaaaaaaagaaaaagttttttttgttttttttttttttgagacggaatctcactctgttgcctag

SEQ ID NO: 252719 - DNA, 201 bp, Homo sapiens
gggaggcagaggttgcagtgagccgagatcgcgccactgcactccagcctgggcaacaaaagcgaaactctgtctcaaacaaacaaaaaggctacaaaacmatatatagagtgtggctcccgtttttggaaaaaataagtatatataaaaaaactatagaaggatagaggagaatatccaccaaatattaactagtggtga

SEQ ID NO: 252720 - DNA, 201 bp, Homo sapiens
gtgggattctaggtgctcttactgtcttctctttttttgttctgaaaacaggtagtttttctgccatgagataaattatttgtgtagattgtttttagtgaaaaaaaaaaaaaaaaactaggctgggtgtggtggttcatgcctgtaatcccaacacttggggagaccaaggcaggaggattgcctgagtctaagagtttg

SEQ ID NO: 252721 - DNA, 201 bp, Homo sapiens
aggccctttcccatctcctgcttttgattggctgagtccagctggaagccagagggcaagggagcctttggagcacacagcccagggagctcaggcacccrggcacagaggggatgggagggtggggagccaagcctaaagggcaaacagaccacgcagaatccaccctagccggcagttttcttagtgctgtctctattc

SEQ ID NO: 252722 - DNA, 201 bp, Homo sapiens; identical to SEQ ID NO: 49897

SEQ ID NO: 252723 - DNA, 201 bp, Homo sapiens
ggcccccccaaaggcatttttcgtctctactaagccctcacacaaaatatacaagtgtgtaagtaaatttctctttctatcataaacattggccttggcayaggaacgttaagtaaaactgaaaatgcaaatgaaccttgacatttttagtttcaaatattgcccccaaattcagcaaatttccaattactgtcgttgcat

SEQ ID NO: 252724 - DNA, 201 bp, Homo sapiens
tgagctgagattgcaccactgcactccagcctgggtgacaaagtgagaccctgtcacaaaataataaataaaataaaaataaagcatagatcttgttcctytcatccctggcttgaaaatcttgaatgcctgcatgtggtcccctagattaagtctagaagctttcacctgggattcagggctcctctcagttttagcttt

SEQ ID NO: 252725 - DNA, 201 bp, Homo sapiens
aaaaaaagtatatatatatatacactagaattactgtactatactatttttttttttcttgagatgggatcgcgctctgtttcttaggctggagtgcagtrgtacaatcatggctcactgcagcctgaaactcctgggctcaagcaatcctgcctcaggctcccaagtagctgggactacaggtgtttgccactatgccta

SEQ ID NO: 252726 - DNA, 201 bp, Homo sapiens; identical to SEQ ID NO: 49888

SEQ ID NO: 252727 - DNA, 201 bp, Homo sapiens
aggctttctgccttcgggtcttttttgtggtttagtttttcgttttgtttttgagagacagagtctcactcggtggcccaggctggagtagagtggcacartcttggctcactgcaacctccgcctcccgggttcaagcagctctcttgcctcagtttcccaagtagctgggactacaggtgtgcaccatcacgcccagct

SEQ ID NO: 252728 - DNA, 201 bp, Homo sapiens
ccaagattgtgccactgcactccagcctgggtaacagagtgagactccatctcaaaaaaaaaaaggaaaagaaaaaaaaaaagggctgggcgcagtggctyatgcctgtaatcccagcactttgggaggctgaggcaggcggatcacctgaagtcaggagttcgaggtcagcctggccaacatggcaaaaccccatctcta

SEQ ID NO: 252729 - DNA, 201 bp, Homo sapiens
attctcctgcctcagcctcctcagtagctcggactacaggcacataccaccatgcctggctaatttttgtatttttagtaggtatggggtttcaccacttyggccaggatggtctcaatctcctgacctcatgatccacctgcctcggcctcccggagtgctgggattacaggcatgagtcactgcgcccggccttttgtt

SEQ ID NO: 252730 - DNA, 201 bp, Homo sapiens
ctcctcacttcccagtaggggtggccgggcagaggcgcccctcacctcccggacggggcgggtggccgggcggggggctgacccccccccacctccctccyggacggggcggctggccgggcagaggggctcctcacttcccagtaggggcggccgggcagaggcgcccctcacctcccagacggggcggctagccgggcg

SEQ ID NO: 252731 - DNA, 201 bp, Homo sapiens
gcacacagcccagggagctcaggcacccgggcacagaggggatgggagggtggggagccaagcctaaagggcaaacagaccacgcagaatccaccctagcyggcagttttcttagtgctgtctctattcctcctgcgacttttcaggctcgacaacctggtgtttcatccagaagagccagaggtgcttgctgtccttgac

SEQ ID NO: 252732 - DNA, 201 bp, Homo sapiens
gacggggcggctagccgggcggggggctgacccccccacctccctcccggacggggcggctggccgggtggggggctgaccccccctcctccctcccggayggggcggctggccgggcagaggggctcctcacttcccagtaggggcggccgggcagaggcgcccctcacctcccagacggggcggctggccaggcggggg

SEQ ID NO: 252733 - DNA, 201 bp, Homo sapiens
ctcccggatggggcggctggccgggcagaggggctcctcacttcccagtaggggcggccgggcagaggcgcccctcacctcccagacggggcggctggccrggcgggggggctgacccccccacctccctcccagacggggcggctgtccaggcggggggctgacccccccacctccctcccggacggggcggctggccgg

SEQ ID NO: 252734 - DNA, 201 bp, Homo sapiens
ccaggcggggggctgacccccccacctccctcccggacggggcggctggccgggcggggggctgacccccccgcctccctcctggacggggcagctggccrggcggggggctgacccccccgcctccctcccggacggggcggctggccgggcagaggggctcctcacttcccagtaggggcggccaggcagaggcgcccc

SEQ ID NO: 252735 - DNA, 201 bp, Homo sapiens
ctcacttcccagtaggggcggccaggcagaggcgcccctcacctcccggacggggtggctggccgggtggggggctgacccccccacctccctcccggacrgggcggctggccgggcggggggctgaccccccgacctccctcccggacggggcggggggctgacccccccccccacctccctcccggacggggtggctgc

SEQ ID NO: 252736 - DNA, 201 bp, Homo sapiens
ccccccacctccctcccggacggggtggctgcccggcggagacgctcctcacttcccagatggggtggctgccgggcagagaggctcctcacttctcagayggggcggctgccgggcggagggcctcctcacttctcagacggggcggttgccaggcagagggtctcctcacttctcagacagggcggccgggcagggacg

SEQ ID NO: 252737 - DNA, 201 bp, Homo sapiens
aatcccagcactttgggaggtcaagaggttgagaccatcctggctcacatggtgaaaccctgtctctaccaaaaatacaaaaattagctgggtgtagtagygtgcacctgtagtcccagctacttgggaggctgagagaggaaggagaattgcttgaaaccaggaggtggagttgcagtaagccgagatcatgccactgca

SEQ ID NO: 252738 - DNA, 201 bp, Homo sapiens
catggaagggatctgtaagccagaccctaggatctacaagctgtgcttggagcagctcggcctgcagccctctgagtccatctttcttgatgaccttggamcaaatctaaaagaagctgccagacttggtattcacaccattaaggtaatagtcactaatttttgaactccctcccatgcaccagccactaatgcaatgtt

SEQ ID NO: 252739 - DNA, 201 bp, Homo sapiens
tagtagaggtggggtttctccatgttggtcaggctggtctcgaactcgcaacctcaggtgatccacccgccttggcctcccatagtggtgggattacaggmgtgagccaccacacctggcccagatttacaatttttaaagaatactctgactggagggtgaagaaagaattggagagaggtctgagaagaggcaaggggg

SEQ ID NO: 252740 - DNA, 201 bp, Homo sapiens
gatccatccactgccttagctctttgtggacagaaatttccttcttggccaggcacagtggctcacacctgtaatcacacacagtaccttgggaggcccgaggcaggcaggcagatcacctgaggtcaggagtttgagatcagcgtggccaacatggcaaaaccctgtctctactgaaaatacagaaattagccaggcttg

SEQ ID NO: 252741 - DNA, 201 bp, Homo sapiens
tgactggagggtgaagaaagaattggagagaggtctgagaagaggcaagggggccagttaggatccatgggcaagatggtggcagtgagaatgcaaagagstagatgagattttcaggagaaagacttgacagcacagaactagatagggcgaggtgaggtagagattgcagaaagtcagaggcgagtcccagctttctag

SEQ ID NO: 252742 - DNA, 201 bp, Homo sapiens
atccatccactgccttagctctttgtggacagaaatttccttcttggccaggcacagtggctcacacctgtaatcacacacagtaccttgggaggcccgaggcaggcaggcagatcacctgaggtcaggagtttgagatcagcgtggccaacatggcaaaaccctgtctctactgaaaatacagaaattagccaggcttgg

SEQ ID NO: 252743 - DNA, 201 bp, Homo sapiens
tccatccactgccttagctctttgtggacagaaatttccttcttggccaggcacagtggctcacacctgtaatcacacacagtaccttgggaggcccgaggcaggcaggcagatcacctgaggtcaggagtttgagatcagcgtggccaacatggcaaaaccctgtctctactgaaaatacagaaattagccaggcttggt

SEQ ID NO: 252744 - DNA, 201 bp, Homo sapiens
ccatccactgccttagctctttgtggacagaaatttccttcttggccaggcacagtggctcacacctgtaatcacacacagtaccttgggaggcccgaggcaggcaggcagatcacctgaggtcaggagtttgagatcagcgtggccaacatggcaaaaccctgtctctactgaaaatacagaaattagccaggcttggtg

SEQ ID NO: 252745 - DNA, 201 bp, Homo sapiens
ggcagatcacctgaggtcaggagtttgagatcagcgtggccaacatggcaaaaccctgtctctactgaaaatacagaaattagccaggcttggtggtgcaygcctataatctcagctacctggggggctgaggcacgagaatcagttgtacctgtgaggtggaggttgcaatgagctgagattgtaccactgcactctagc

SEQ ID NO: 252746 - DNA, 201 bp, Homo sapiens
gctgcagaggagtatttcaggatgtactgtctccaaatggggctccctcccactgagaactggaacttctatatggctttttcctttttccgtgtggctgsaatcctacagggagtctacaagcgatcactcacaggtaatgggatggctgccctgaagagccactgcggggtgagtcacagcaaggaccgtgcctccacc

SEQ ID NO: 252747 - DNA, 201 bp, Homo sapiens
ggatcacctgaggtcaggagttcgagaccagcctggctaacatggtgaaaccccgtttctactaaaaatacaaaaaattagctggctgtggtggcgcacayctgtaatcccagctatttgggaggctgaggcaggagaattgcttgaacctcaggggtggaggttgcagtgagctgagatcatgccattgcactccaactt

SEQ ID NO: 252748 - DNA, 201 bp, Homo sapiens
tggcaagtcagagatttagttctgttcttagggcagatcagagggtattggttataggctatgtggctataggagattgggcccactctataggagattamgccctggggacactgtaaaaggactttcggggaatcagtggatcagagacagcctgacactgagaaggctttcccgtgttctcctgaactctcaccagca

SEQ ID NO: 252749 - DNA, 201 bp, Homo sapiens
ccactgagaactggaacttctatatggctttttcctttttccgtgtggctgcaatcctacagggagtctacaagcgatcactcacaggtaatgggatggcwgccctgaagagccactgcggggtgagtcacagcaaggaccgtgcctccacctggaaaccctctcagggccacagaggctttggagagaccgatttggcca

SEQ ID NO: 252750 - DNA, 201 bp, Homo sapiens
cgtatttattttatacctgtaatagtgtcttctttctgcaaaaaaaaaaaaaaatggcgaaatgctttccgtcaaactgacatgtacagcttttcttctgytctgtttagccccaagatgtgacattagccaaatgctttgtcattttggaacccacttaagtttcatttaagtttcacaacttactgagctaagataggt

SEQ ID NO: 252751 - DNA, 201 bp, Homo sapiens
aggcacagccaccatgcccagctcctcatatcatttttttgggcacacgtgcatgtttggttgtctgccttgtttcctccaatccctttcattgttttccrcggttcaaaataaaatgaaatcttccactgtggtttcctgacttattttccccatgataggagaaagccaaagctgaaggactttggaaccttttcctac

SEQ ID NO: 252752 - DNA, 201 bp, Homo sapiens
atggcgaaatgctttccgtcaaactgacatgtacagcttttcttctgctctgtttagccccaagatgtgacattagccaaatgctttgtcattttggaacycacttaagtttcatttaagtttcacaacttactgagctaagataggtacgatgactattaatattattcccattttattgatgatggcactgaggcccat

SEQ ID NO: 252753 - DNA, 201 bp, Homo sapiens
caggagccaccatgcatggccaacttctgtcttttaattggaatctattcatcttttgagtttaatgtaattattgatatgtttgatttaggtctacaatytcaccattggttttttgtttgtcccatcatttttttgttcttacctacttttgggtcaattgaatattttttagaatttcattttaatttatgtaccatt

SEQ ID NO: 252754 - DNA, 201 bp, Homo sapiens
atccagccaaagagctggtgacttccaccttggggcagcaggagcatcatgtgggaaattctccagtcataggaacgtgttcaaagacactgcaccacccrgtgcagagcatgacaaagggtttcactgcactggtttttttttccgctactttcagaggttgctgaaattgcacaccaagttctaatcctatttcccgca

SEQ ID NO: 252755 - DNA, 201 bp, Homo sapiens; identical to SEQ ID NO: 49894

SEQ ID NO: 252756 - DNA, 201 bp, Homo sapiens
tcgagcttccgaaactagcaccatcccagccatggagaggctgatcgaatggctgcccctccatcttccccgtcagcagaggaccacagtggtgcacgggracttcaggtagatgtggtggcagggagagctgaaaaatgacagcaaggatgctccaagggggaattgagcaattggtcttggtgcaatttacagctggga

SEQ ID NO: 252757 - DNA, 201 bp, Homo sapiens
gcaagggtggtctaggatgcaggacttcttatagcccactggcaacggcagaggtgatctggggtgttactgattaaatgtagtcttttaggaaagcagaratcaagagcagggagcaggcagacctaagttggactctggcccccagccccctaacttccagctcgtccaagtcacctccttctctaagactcagttttc

SEQ ID NO: 252758 - DNA, 201 bp, Homo sapiens
agcggtggtgggagcataaactgctgcagctactttgaaaagtagtaggcagtggccaggcacggtgactcaagcgtgtaatcccagcactttgggaggcsaaagcgggcagatcacttgaggtcaggagttcgagaccagcctggccaacatgccaaaatcccatgtctattaaaaatataaaaattacctgagtgtggt

SEQ ID NO: 252759 - DNA, 201 bp, Homo sapiens
gaagaataagtaaacacatctcggaggctttgtggactttctgtgtcatacaaagagaatcgagtggagaggttcccttcagcgccttcatgcctcctccygcctgtgtttcctcgaggtccaggccatcatctcagccccatacatgctgggagcacagaggccacgggtccgataagtcccgagttggctgccttccct

SEQ ID NO: 252760 - DNA, 201 bp, Homo sapiens
ctcccaggttcacaccattctcctgcctcagcctcctaagtagctgggactacaggcacccaccaccacgcccggctaaatttttgtttttgtagtagacrtggggtttcaccgtgttagccaggatggtctcgatctcctgacctcatgatccgcccgccttggcctcccaaagtgctaggattacaggcgtgagccact

SEQ ID NO: 252761 - DNA, 201 bp, Homo sapiens
gacattcatctctcattcctgtccctccatcagattgtggagtcctgcatggaagggatctgtaagccagaccctaggatctacaagctgtgcttggagcrgctcggcctgcagccctctgagtccatctttcttgatgaccttggaacaaatctaaaagaagctgccagacttggtattcacaccattaaggtaatagtc

SEQ ID NO: 252762 - DNA, 201 bp, Homo sapiens
ctgggattataggcacgtgccaccatgcccagctaatttttgtatttttaatggagatggagtttcaccatgttgttcaggctggtcttgaactcctgacyttgtgatccgcccgcctcggcctcccaaagtgctgggattacaggcgtgagccaccatctctctcttttttttttttttttttttttttgagacagggtc

SEQ ID NO: 252763 - DNA, 201 bp, Homo sapiens
cgatcttggttcactgcaacctccacctcaccagctcaagcaattctcatgcctcagcctcccaagaagctgggattataggcacataccaccatacccgsgtcatttttttgtttgtttttagtagagatggggttttgccatgttggccaggctggtttcgaactcctgacctcagatgatccatccacctcggcctcc

SEQ ID NO: 252764 - DNA, 201 bp, Homo sapiens
ctttttttttgagacggagtcttgctctgtgcaacttccgcctcccaggttcaagcgattctcctgcctcagcctcccgagtaactgggattataggcacrtgccaccatgcccagctaatttttgtatttttaatggagatggagtttcaccatgttgttcaggctggtcttgaactcctgactttgtgatccgcccgcc

SEQ ID NO: 252765 - DNA, 201 bp, Homo sapiens
cttgctcgctagtatgacaaaatgttccaggttcatcttgtctatccagcctacccaacatggtgaaactgtgtctctactaaaaatacaaaaattagccrggcatggtggcgggtgcctgtaatcccagctacttgggagactgaggcaggagactcacttgaacctgggacggggaggttgcagtgagccgagatcgtg

SEQ ID NO: 252766 - DNA, 201 bp, Homo sapiens
accgatggacacaccttggaggcagcacctacagagcggtgattttcgacatgggcggagttctcattccttctccagggagagtcgctgcaggtgagctrttgattctgtttcactttgtgggactagagtggtggtgggagaatggagggtgatcgggaaggcagaggggaacacttgggcagcagtgtgtcccagcag

SEQ ID NO: 252767 - DNA, 201 bp, Homo sapiens
catgcaccaagacaccggcagcagtctgtgctcttggttcccatggataccccagggataaaaatcatccggcctctgacggtgtatggactggaagatgyaccaggtgagacctccaggggcgggtcacccctgggtgtgggtctggtccccaggaaacaccactgaggggcccctgctcttgttcaggacttgccacat

SEQ ID NO: 252768 - DNA, 201 bp, Homo sapiens
ccagggagtcagaggttgcagtgagccgagattgcttcactgttcactccagcctggtgacagagcgagactccatctcaaaaaaaaaaaaaaaaaaaagwaaagaaaaagaaattttccaaaagcaaaacttaaaaacaaaaggcaaggagaaagaaggagaaaggaattcatcatgggatttgctagtgctgatggagt

SEQ ID NO: 252769 - DNA, 201 bp, Homo sapiens
cctggagatacacagtcatgagaaaaactgtccggagaaaaaccagtacccagagaatttctagtttaactgtacctggtctgataagcaggggatgctgkaagcaggaatttctggaaacaatattttccctcttttaggaaaatacagtatcagctgtaagccactatttcccattttttttatagttttccaataaac

SEQ ID NO: 252770 - DNA, 201 bp, Homo sapiens
tgcagatagctgaatctgttcttctacaaagaacataaagactaaacctgagcaacacagtgagaccctatggtgagctaggattgcaccactgcaccccrgactggcacaacagtcttttttagagaacctgtctctaaaaaaaaaggcagcagggaagaacataaagatcactggacagaaagtttcttgactttctct

SEQ ID NO: 252771 - DNA, 201 bp, Homo sapiens
aaaacatggatcgtgcttctgcgcttagcagctcacacctgtaatctcagcaatttaggaggccgaggtgggcagatcgcttgagcacaggagttcaagaycagcctggccaacctggtgaaaccttgtctctacgaaaaatacaaaaagcgtacctgggcatggtggtgcatggatgtagtcccagctacttgaggggct

SEQ ID NO: 252772 - DNA, 201 bp, Homo sapiens
aagagaatagcttgaacctgggaggcggttgcagtgagccgagatcacaccattgcactccagcctgggcgacagagcaagactccgtctcaaaacaaaamaaaaaaaagaaagcaaaaaaagtgcagctcgctgccagcacagtattctcagggcaagcaagatatgagttaagtaatccctagattgcttataatactg

SEQ ID NO: 252773 - DNA, 201 bp, Homo sapiens
taatggctttgataaaaaagcttttttaaagcaataataatattgaacattttttctgtactgtgcactgttctaagctctttatataactcatgtaaccrcaatagctctactaaaatataatttaaaatatagtaagaaaagttctgtaggtagatggtgatgatggtgatggttgcacgacaacacgactgtacttaa

SEQ ID NO: 252774 - DNA, 201 bp, Homo sapiens
tctcgtgcctcagcctcctagtagctgagactacaggtgcatgccaccacgcctggctagtttttgtgttttttatgaatattagagactgggtttcaccmtgttggccagggtggtctcaaacttcagacctcaagtgaccaacccacctcagcctcccaaagtgctgagattacaggcatgagccactgtgcctggccc

SEQ ID NO: 252775 - DNA, 201 bp, Homo sapiens
agtccagctggaagccagagggcaagggagcctttggagcacacagcccagggagctcaggcacccgggcacagaggggatgggagggtggggagccaagyctaaagggcaaacagaccacgcagaatccaccctagccggcagttttcttagtgctgtctctattcctcctgcgacttttcaggctcgacaacctggtgt

SEQ ID NO: 252776 - DNA, 201 bp, Homo sapiens
catctctactaaaaatacaaaatttagccaggcgtggtggtgggcatctgtaatcccagctacttgggaggctgaggcaggagaattgcttgaatctgggrggcagaggttacagtgagccaggatcaagatcacaccactgcactccagcctgggtgacagagtgagactccatctcaaaaacaaaaacaaaaaaaggtt

SEQ ID NO: 252777 - DNA, 201 bp, Homo sapiens
gaagcaggagaattgcttgaacctgggagactgaggttacggtgagctaagatagtgccactgcaggcctgggtgacagagcaagactccgtccccccccmaaaaaaaaaaggaaaaataatgttgctgggtgtggtagctcacccctgtaatccccagtactttgggaggccgagatgggcggatcatctgaggtcagga

SEQ ID NO: 252778 - DNA, 201 bp, Homo sapiens
agatcgtaccactgcacttcagcctaggcaacagagcgagactccatctcaacaacaaagctcagagaggtttaataagtctctcagggtcactcttcaastaagagcagagttgggatttaaacctggttccaaccaggtgcagtggctcacacacgtaatcccaacactttgggaggctgaggcagtcagattacctga

SEQ ID NO: 252779 - DNA, 201 bp, Homo sapiens
atctcggctcactgcaacctctgcctcccgggttcaagcgattctcctgcctcagcctcccgagtagctgggactacaggcgtgtgccaccagctccagcyaatttttgtatttttagtagagacggggtttcaccatgttggccaggatggtctcgatctcttgaccttgtgatccgcccaccttggcctcccaaagtgc

SEQ ID NO: 252780 - DNA, 201 bp, Homo sapiens
tggtgggagctactgtgcattgcaggatgtcaggcatcatccctggcctcaacccactcgatgacagtagcacccctccccacagagtgtgacaaccaaaratcttcgcagacctggtccagtgttcccagggagggcagcattcctctgttgagacccactgtttgaaagtaaggcagagtctatggccataccaccctg

SEQ ID NO: 252781 - DNA, 201 bp, Homo sapiens
cctcaagtgatccacccacctcagcctctcaaagtgctgggattacaagtatgagccaccgtgcctggcctatttatttttttatatatatatatatatatatttttttttttgagaccatctcactctgttgcccaggctaaagtacagtggcaccatctcggctcactgcagcctccaccttccaggctcaagcagttc

SEQ ID NO: 252782 - DNA, 201 bp, Homo sapiens
ctcaagtgatccacccacctcagcctctcaaagtgctgggattacaagtatgagccaccgtgcctggcctatttatttttttatatatatatatatatatwtttttttttttgagaccatctcactctgttgcccaggctaaagtacagtggcaccatctcggctcactgcagcctccaccttccaggctcaagcagttct

SEQ ID NO: 252783 - DNA, 201 bp, Homo sapiens
cttggaacaaatctaaaagaagctgccagacttggtattcacaccattaaggtaatagtcactaatttttgaactccctcccatgcaccagccactaatgmaatgtttctctgtaatctttttacatttgtagctctagctttccttagggtttccccctgtgtttccatagtcatcttattttgtgttaattatgaaatc

SEQ ID NO: 252784 - DNA, 201 bp, Homo sapiens
ggtggggcccgagtcgcgggcactgcgcggggaggagagcggggcccgtcctgagcacatcagctgacctgggctggggcctctccctgacttgaagacgycaacaccccagatttctagtgggcaggctccttttggggtgaaaagcttttgttttgggcaaagagttccacaacttttcccagcctccgagcatttaat

SEQ ID NO: 252785 - DNA, 201 bp, Homo sapiens
ggatgggctggggcagccaccctcaccaggagacccccgccttcctggacctgtcagagccttggaggaggtggggccccagagacaccccttctctagtmcctcccctctccagtaagcatctcgttttgtggttctttctctcaggattcaaagaagattaagaaagttgccaaaaaaggtgagtgccgatggtggtga

SEQ ID NO: 252786 - DNA, 201 bp, Homo sapiens; identical to SEQ ID NO: 49924

SEQ ID NO: 252787 - DNA, 201 bp, Homo sapiens
gctacttgggaggctgaggcaggagaattgctagaacctgggacgtggagattgtaatgagccgagattgcatcattgcactctaacctgggcaacaaagrcaaaactctgtctcaaaaaaaaaaaaaaagaggtgggttctcaccatgttgggatctcgccatgttgcccaggctggtctcgagctgatcactcaagtga

SEQ ID NO: 252788 - DNA, 201 bp, Homo sapiens
catcaataacagatttgttgtctagctgtctgattgtcttgagatatgcccggatggctgggctgtggatgttgtttggcggctgggcgtcagggctgagmcacggcagcgtgtaattctgggacacgagcacgcccttctcttcctccacctgtggaatgaggagaaatggtcagtgttgggtttgcaatgacagctgca

SEQ ID NO: 252789 - DNA, 201 bp, Homo sapiens
ggagcagggggtgggaagggaggggaagtaactctgatggaggagccgctgtcttcctaatgtggacatgggttctgtgcccgtgctccctctcctgctayagccctcagcttcctctcccctcttccaggtcaccctggtggataaagacctcctgaaatttctaaagctggaggagttggtactgagcgccaatcgaat

SEQ ID NO: 252790 - DNA, 201 bp, Homo sapiens
ccatttttatagatgagggcagaagagaaaacgcaggtggttggggccaggctgtctgatccggatgggggacttttccctcggggcaggtgagagcgcckggagaggcccctgcccccgcgcacgcgtcctagcggttgccgggcaacgcggcccgggccatggaggcgtcgtacgagtccgagtccgagtccgagtctg

SEQ ID NO: 252791 - DNA, 201 bp, Homo sapiens
cttagatccagtgttattatttcttctctgcagccctcagaccacagggcctgtgtgggtggtgaccagggtggggaaggcacctgtggtagagccatagsggggcaagagcttggagctggggctgcctggggctcatctggttccgaggtgtctgcctccagcttcaggccatcggcccttatttgctgtaagaggggc

SEQ ID NO: 252792 - DNA, 201 bp, Homo sapiens
agacagtctccagctgccgttcatgcttcctccccagccttccgcagcccaccagggaaggggcggtaggagtggccttttaccaaaggtcagattctttyaccgcctctgccagacccccttgtcccccacccccgcatagatctccagggggctcagaaaactctggccggtggctcacgcctgtagtcccaacgcttt

SEQ ID NO: 252793 - DNA, 201 bp, Homo sapiens
tctttcaaaagcatcttcgagagggactgtaattcctcgactattttctgtacatcatcacttggtcgtagtaaacggacgggcaacgtgtgggaggccarccagcctcccaggcagcagaacagaaagagcacagacgtcgaggggcctggagagagaacgatgccgtgagcgcatacatcacacacccctgcccaccct

SEQ ID NO: 252794 - DNA, 201 bp, Homo sapiens; identical to SEQ ID NO: 49930

SEQ ID NO: 252795 - DNA, 201 bp, Homo sapiens
gtgcccacccacccgccggcctgcagcacttggggttaggccacaacaaacttctaggccccttggaaagtctctacgtcaccgctaatcactggtaactygggagcccagatggaaagtgagagggagggattaagtatcaggttggggcgattctaccccagtggcttgagaactcagctttggtcttttttgtaactc

SEQ ID NO: 252796 - DNA, 201 bp, Homo sapiens
gctgccgtcagcccttcggagactgtcgcgttgaaagaatgaaccagagttcgccccctgcccgcgccagggcgttttgggtcaccgagtcctgtggggayccgaggcggctgccgcccaaggccgagcgcagcctcaggacccgcgccccaccagacggggtcgtgcgctccgcggcgggtggagagccgggctctgggg

SEQ ID NO: 252797 - DNA, 201 bp, Homo sapiens
ggtcctgctcaccttccaggcccaacctcgtctccctggacctgggcttcaacgacctgacagacctgcagagcatggtcaccagcctgaggaccctccgrcacctgcgactcctggtgctgcagggaaacccactggccttggtgccctactaccgcggcctcaccatcgacagcctggcccagctctgcgtgctggacg

SEQ ID NO: 252798 - DNA, 201 bp, Homo sapiens
gtgaccccaggcagcccgcctgggcctctgctcactcgaggattctctcctgcccctagattctctcctggcctgtggtgctacctgctgttgacagtccyctgtctgccaagaaaggaaagggggagaaagacaagaaagggaaggagaaagacaggacggggaaaggagagaaagagccggccaaggtaccgggccttg

SEQ ID NO: 252799 - DNA, 201 bp, Homo sapiens
ttccaggcccaacctcgtctccctggacctgggcttcaacgacctgacagacctgcagagcatggtcaccagcctgaggaccctccgacacctgcgactcytggtgctgcagggaaacccactggccttggtgccctactaccgcggcctcaccatcgacagcctggcccagctctgcgtgctggacgacatcaccgtgtc

SEQ ID NO: 252800 - DNA, 201 bp, Homo sapiens
acaagccctgggctgaggtcatcccctgcagttacgagatgcagcactctctcagggacctggtcccactgaaggccttcctgctggcggggaccaccgtraccatcgtggaggagaaggtgggcaggcggaggcagtgcccggccatccacaggctgcacttctgtccttgttcctgttcccatcgggctgtcccccatg

SEQ ID NO: 252801 - DNA, 201 bp, Homo sapiens
gcacacctgagactcatctcgcttcgaccccgccgccgccgccgcccggcatcctgagcacggagacagtctccagctgccgttcatgcttcctccccagscttccgcagcccaccagggaaggggcggtaggagtggccttttaccaaaggtcagattctttcaccgcctctgccagacccccttgtcccccacccccgc

SEQ ID NO: 252802 - DNA, 201 bp, Homo sapiens
gtccacagcccgcggtgctcgcacacctgagactcatctcgcttcgaccccgccgccgccgccgcccggcatcctgagcacggagacagtctccagctgcsgttcatgcttcctccccagccttccgcagcccaccagggaaggggcggtaggagtggccttttaccaaaggtcagattctttcaccgcctctgccagacc

SEQ ID NO: 252803 - DNA, 201 bp, Homo sapiens
ctgattgtcttgagatatgcccggatggctgggctgtggatgttgtttggcggctgggcgtcagggctgagacacggcagcgtgtaattctgggacacgakcacgcccttctcttcctccacctgtggaatgaggagaaatggtcagtgttgggtttgcaatgacagctgcaagtcttaacagtgaatgtttgcatgcttc

SEQ ID NO: 252804 - DNA, 201 bp, Homo sapiens; identical to SEQ ID NO: 49929

SEQ ID NO: 252805 - DNA, 201 bp, Homo sapiens
tcctggcatagctacagccctggtttcaggtccggagagaggagcctctttggagggcaatggaaggcatttttaagaaatcgtttagaaaagaaatctcyagggcactcacatctttcaaaagcatcttcgagagggactgtaattcctcgactattttctgtacatcatcacttggtcgtagtaaacggacgggcaacg

SEQ ID NO: 252806 - DNA, 201 bp, Homo sapiens
gtaatagacaagaaggtcagtgctgggcacgtggtaggtgatgttagggtggccgctcccctaagggaggttgtggggagggcacccttccccacagcgcrtcagggatcctgctttcagggctgaaacgaaggccagcctgccctccatctgcttcatctccctggcttgtgtgccaggcagggccggctactcggtcag

SEQ ID NO: 252807 - DNA, 201 bp, Homo sapiens
ttgtcttgagatatgcccggatggctgggctgtggatgttgtttggcggctgggcgtcagggctgagacacggcagcgtgtaattctgggacacgagcacscccttctcttcctccacctgtggaatgaggagaaatggtcagtgttgggtttgcaatgacagctgcaagtcttaacagtgaatgtttgcatgcttcctcc

SEQ ID NO: 252808 - DNA, 201 bp, Homo sapiens
agtataattgacccagggcccccagctgctgtgcccggaaatccatcacccagcacatggagaccccgcttcccgcaggcttctcccatctagagacagcrtggcagggatgctgaggctggctcgttcctgggagacccaggcttctcttaggattttcccacattcgtgctgaagtctcccaggatggcaccgtaggct

SEQ ID NO: 252809 - DNA, 201 bp, Homo sapiens
aagttttgcgggacagaggggaggggcctgatcctcagcgctgacttggggccccatcgtcccgggccttccgtgtggtctcccaggtgctggagctctayggcaatgagatcagcagcatggagtgtctgtgtgcccacccacccgccggcctgcagcacttggggttaggccacaacaaacttctaggccccttggaaa

SEQ ID NO: 252810 - DNA, 201 bp, Homo sapiens
ctagagtgcagtggcatgatctcggctcactgcaacctccacctcccggattcaaacgattctcccgcctcagcctcctgagtagctgggattacaagcamccgccatcaagactggctaatttttgtatttttagtagagacagggtttcaccatgttggccaggctggtcttgaactcctgacagcaagtgatccaacc

SEQ ID NO: 252811 - DNA, 201 bp, Homo sapiens; identical to SEQ ID NO: 49934

SEQ ID NO: 252812 - DNA, 201 bp, Homo sapiens
gctcggcctttttttaatttttgtttttttgagacagagtcctgctcagtcacccaggctggagtgtagtggcacgatctctcctgactgcaacctccgcytcccgggctcaagccattctcctgcttcagcctcccaagtagctgggattacaggtgcctgccaccatgcccggctaatttttgtatttttattagagac

SEQ ID NO: 252813 - DNA, 201 bp, Homo sapiens
tccggagagaggagcctctttggagggcaatggaaggcatttttaagaaatcgtttagaaaagaaatctctagggcactcacatctttcaaaagcatcttygagagggactgtaattcctcgactattttctgtacatcatcacttggtcgtagtaaacggacgggcaacgtgtgggaggccagccagcctcccaggcagc

SEQ ID NO: 252814 - DNA, 201 bp, Homo sapiens
tgaagtgcgtgtctcagagtcctaaccacatccctccttacatatggacttgtgcaaaccacacctcttcggtcctcagtttcccccgagataagatgaakatataggtgctggtagactcaagattagtggttctcaaacttgagggtgtattagaatcccctggagggccccataaagcccagatttctgtctccaccc

SEQ ID NO: 252815 - DNA, 201 bp, Homo sapiens
ctagaaactttattgcttttctttctttctttctttctttctttttttttgagacagagtcttgctctgtcgcctgggctggagtgcagtagcgcaatctyggctcactgcaacctccacttcccaggttcaagcaattctcttgcctcagcctcctgagtggctgggattacaggcgcccaccaccacgcacagctaatt

SEQ ID NO: 252816 - DNA, 201 bp, Homo sapiens; identical to SEQ ID NO: 49928

SEQ ID NO: 252817 - DNA, 201 bp, Homo sapiens
attcagtttacctaaaatagagagattttcctgcattccctgggcctccccaatgcaatcccatgagcccataaagcagaagaggaagtcagagagattaygagcaagagaagggctcacctgctgttgctggcttgaagatggtggggggcagcgtggaaagcacgagaaggaaataatttggtcaataaccactgagct

SEQ ID NO: 252818 - DNA, 201 bp, Homo sapiens; identical to SEQ ID NO: 49943

SEQ ID NO: 252819 - DNA, 201 bp, Homo sapiens
cgatgctcgtggtctcctcggatgtcccctcacagtcctgtcccgggtccctggccacagcccctgggtgacggcacccccgtcttcatccctccctcccsaaggactgtcctcttcagcactgcccacaagccctgggctgaggtcatcccctgcagttacgagatgcagcactctctcagggacctggtcccactgaag

SEQ ID NO: 252820 - DNA, 201 bp, Homo sapiens
ccctgggcagggtggcatctgcccctgctttccccactgagtggggagacagggcagtgtgctcaggccctcaatcctcacgcaggtaggcctcctgctcygactcagcccgctcctccccttcctcctgtgttttctgacggagctcttctatctgtgcttctgccagcttggtttctgctttccgggagagctggtgca

SEQ ID NO: 252821 - DNA, 201 bp, Homo sapiens
ccccttagatccagtgttattatttcttctctgcagccctcagaccacagggcctgtgtgggtggtgaccagggtggggaaggcacctgtggtagagccayaggggggcaagagcttggagctggggctgcctggggctcatctggttccgaggtgtctgcctccagcttcaggccatcggcccttatttgctgtaagagg

SEQ ID NO: 252822 - DNA, 201 bp, Homo sapiens
gattgtcaggaggacctgctgagggccagccctgggggaggccaaaggaaccaaagggtggggaatggtagcttctggcctggggagaggccacatccccscttagatccagtgttattatttcttctctgcagccctcagaccacagggcctgtgtgggtggtgaccagggtggggaaggcacctgtggtagagccatag

SEQ ID NO: 252823 - DNA, 201 bp, Homo sapiens
gtggaggagaaggtgggcaggcggaggcagtgcccggccatccacaggctgcacttctgtccttgttcctgttcccatcgggctgtcccccatgggagccscactccctggttagatgagttctcagcgccattccagaaagggtgagggagaggtgaccccaggcagcccgcctgggcctctgctcactcgaggattctc

SEQ ID NO: 252824 - DNA, 201 bp, Homo sapiens
gaggtggggccccagagacaccccttctctagtacctcccctctccagtaagcatctcgttttgtggttctttctctcaggattcaaagaagattaagaargttgccaaaaaaggtgagtgccgatggtggtgaccaaaggcagggattgtcaggaggacctgctgagggccagccctgggggaggccaaaggaaccaaag

SEQ ID NO: 252825 - DNA, 201 bp, Homo sapiens
tgacaggctgacgttggccagggtacagccgggccctagccacatcctccacctctgccttcgccctccccatgggaaccccgcgggcaagcaagggctgkgggcccaggtcacgggatggggaggaggtggtggggagggcctttccctggggcatgcagctgggctgctggtgctgccgcctgcacagagggcgcctcc

SEQ ID NO: 252826 - DNA, 201 bp, Homo sapiens
cgccctcctgggtccgtgtacccgtctgtcctgcaactccccatttgacccagaccctattcaggtatagcctctcttctgggtcagagctttccaccagrctttgattcctgtgattgggatttggagacagaagtgatagggggaggccgggcgcggtggctaacgcctgtaatcccagcattttgggaggctgaagca

SEQ ID NO: 252827 - DNA, 201 bp, Homo sapiens
agctgtgcttagcccatcctcaggggagggaggactctggaaagagcctgaggatacgctgagaataaaaagtccagaggccagcagggacttagcggctrgggtgcaggttaactcctgcccaactcttggggacagggacccggggctgggccctgctcaggtggctctctccttgcagggaccggcgatgctctgcag

SEQ ID NO: 252828 - DNA, 201 bp, Homo sapiens
agggctggcaaagcagctgtgcttagcccatcctcaggggagggaggactctggaaagagcctgaggatacgctgagaataaaaagtccagaggccagcarggacttagcggctggggtgcaggttaactcctgcccaactcttggggacagggacccggggctgggccctgctcaggtggctctctccttgcagggaccg

SEQ ID NO: 252829 - DNA, 201 bp, Homo sapiens; identical to SEQ ID NO: 49950

SEQ ID NO: 252830 - DNA, 201 bp, Homo sapiens; identical to SEQ ID NO: 49951

SEQ ID NO: 252831 - DNA, 201 bp, Homo sapiens
ggggttttgccatgttggccagcctggtgttgaactcctgacctcaagtgatctgcctgcctcggcctctcaaagtgctgggattacaggtgtgagccacygtccccggcctgcaacctctctgacctcctcctcttcctcactctgtttcacccacaccgtcctcctggctgttccttgaacaccccaggtatattctct

SEQ ID NO: 252832 - DNA, 201 bp, Homo sapiens
agttcttaccatggctgacagggtcctatatgatctgactacccttcttctttaacccacaacctcttttttttttttttttttttttgagatggagattmgttcttggaaactccctggctggagtgcaatggcgcaatctcagctcactgtaacctcctcctcccaggttcaagcaattctcttatctcagcctcccaa

SEQ ID NO: 252833 - DNA, 201 bp, Homo sapiens
ccaacatggtgaatccgtgtctcacttatttatttatttgtctttttttttcttcctttttgtggagaacggggtctcgctatattgcccaagcaggcctygaactcctgggctcaagctatctcccacctctgcctccctgagagctgggattacaggcgtgagctaccgcacctggcaagtgaatccccatctctacca

SEQ ID NO: 252834 - DNA, 201 bp, Homo sapiens; identical to SEQ ID NO: 49957

SEQ ID NO: 252835 - DNA, 201 bp, Homo sapiens; identical to SEQ ID NO: 49958

SEQ ID NO: 252836 - DNA, 201 bp, Homo sapiens; identical to SEQ ID NO: 49952

SEQ ID NO: 252837 - DNA, 201 bp, Homo sapiens; identical to SEQ ID NO: 49953

SEQ ID NO: 252838 - DNA, 201 bp, Homo sapiens
ccctctgagctttgtgaccttgaccaagtaagttaattctttgggtctctctgagcctcagatatctcagctgtaaaatgggtataagaatatcttatggsggggctgggcgcagtggctcacgcctgtaacccagcagtttgggaggccgaggcgcgctgatcacttgaggtcaggagtttgagaccagcctggccaaca

SEQ ID NO: 252839 - DNA, 201 bp, Homo sapiens; identical to SEQ ID NO: 49954

SEQ ID NO: 252840 - DNA, 201 bp, Homo sapiens
aattacgggaccattctaattttctgaaaagaaaaacagtatctcatggggttgtttcttatcactagattccaggatatgtgtacagcacttagagcctrcaagtaggaaatacgatgtcaatgttagcctttattggttttttttatttttttattttttttttcctctctcaaatcatgggagcctttgttattattt

SEQ ID NO: 252841 - DNA, 201 bp, Homo sapiens; identical to SEQ ID NO: 49955

SEQ ID NO: 252842 - DNA, 201 bp, Homo sapiens
agacctggttttaagatctcgcgttttctttttctttccttttttttttttttttttttttttttttgagacggtgtctcgctctgtcgcccaggctggaktgcactggcgcgatctcggctcactgcaagctccgcctcccaggttcacgccattctcctgcctcagcctcctcagtagctgggactacaggcgcccgcc

SEQ ID NO: 252843 - DNA, 201 bp, Homo sapiens
ccacgcccggctaattttttggattagaaaacgcgaggtcttggccgggcgcggtggctcacgcctgtaatcccggcactttggcaggctgaggcgggcgratcacgaggtcaggagttcgaggccagctaaccaacatggtgaaacctcgtctctactgaaaatacaaaaattagctgggcttggtggcgtgcatctgta

SEQ ID NO: 252844 - DNA, 201 bp, Homo sapiens
tttagtagagacagggtttcactgtgttagccaggatggtctcaatctcctgacctcatgatccgcccgcctcggcttcccaaagtgctgggattacaggygtgatccaccacgcccagccccacctggcccatttttgtatttttttagtagagatgggatttcaccatattggccaaggtggtcttgaactcctgacct

SEQ ID NO: 252845 - DNA, 201 bp, Homo sapiens; identical to SEQ ID NO: 49956

SEQ ID NO: 252846 - DNA, 201 bp, Homo sapiens
tcatgacaatggccatacgcatcattgacagagcattgaagggcaagtatcagcagtttctgaatggggtcaagtgtaagaatcggttttcctctgactaytattaactattagtctctgtattttgtgatcaaatctcattaatgtgtgtgtgtgtgtgtgtgtgtgtgtgtgtgtgtgtgtgtgtgtgtgacgagtctc

SEQ ID NO: 252847 - DNA, 201 bp, Homo sapiens
cgcctggctaattttttgtatttttagtagagacggggtttcaccatgttagccaggttggtctcgatctcctgacctcgtgatctgcccgcctcagcctyccaaagtgctgagattacagtcgtgagccactgcgcccagccctgttcagattatttagagagaaatcttctagcttcctgcctgagttggtagtggaag

SEQ ID NO: 252848 - DNA, 201 bp, Homo sapiens
cttactatgatcttgataaaatattgacaaaatattgctgcctccatttccttatctctatgatggggagaacagcatgcactctacctgtctcacagttrtatcaatgattaagtgaaagagtaaatgtgatgcatatttgtaaactgcaaacattatatgattgttgagatattaatacaagcaattcacagtggaaag

SEQ ID NO: 252849 - DNA, 201 bp, Homo sapiens
atgtctaattattcccctaatatcaatttgtaatatcaatacaacacactcttcaattgtacttgttgtccaagtccagggaccttctgttttatgctctstggaaaataattcaggtgtcttctgccagggaaatgaaagagcagtcacctagctctgcaagctaagtgtacgaatctgggtagctaactgcttcttaac

SEQ ID NO: 252850 - DNA, 201 bp, Homo sapiens
taaataaaaattttaaccaaaaataacctgtaggagatgactataatgatttatagtccacaatcatcagtttataacttttgtgtcttacaggtcgcatmtctgtgcctattgatttgcagaaagtggaccagtttgatccatttactgttccgaccataaggtatgtttcagatcattgatcactccttgtttgtaatt

SEQ ID NO: 252851 - DNA, 201 bp, Homo sapiens
ggagacatatgagcatatgtataagccaatatgaaaaaaatcagcagattgaatattattcaagagatgaaggctactctagaaaactgtgacaatgttayagcaatacaaattatcttgccacttcattttttatttaaatatgtgatagtttaagcagtagtgcctaagataatgctctactcagtagacactcatatg

SEQ ID NO: 252852 - DNA, 201 bp, Homo sapiens
taagcgcctgcgcagtcgcggggccgccggccgtgctgttcccgccaattcctgtggtaatccttaccgtggcgagttccgcgctcaatggagacgtttgmccccaccgagctgcccgagctgcttaaactttattaccggaggctctttccctactctcagtactatcgctggctcaactacggtggaggtgatggaggc

SEQ ID NO: 252853 - DNA, 201 bp, Homo sapiens
gggagcggagtgtgaggaggttggaggcggggtgtccttagaatgacaatatgaagcgccttctgtgcaccaggctttgtgccgcgcgccttcatttgctytctcgagcccgccccaccacttcataggtgtaaatgggccgagagaggatataataagccagcctgcggccacgctgtaaaaaaaaaaaaaaaaaaaaaa

SEQ ID NO: 252854 - DNA, 201 bp, Homo sapiens
aaattagctgggtgtggtggtgggagcctgtaatcccagctactagggaggctgaggcaggagaatcacttgaacccaggaggcagaggttgcagtgagcygaaattgtgccatcgcactccagcctgggcaacaagagcaaaactccgtctcaaaaaaaaaaaaaaaccctaggccggacacggtggctcacacctgtaa

SEQ ID NO: 252855 - DNA, 201 bp, Homo sapiens
ttttaatgatttatttttcagggtggtcaagacgttaaaaagaaagttcacctaagtgaaaaaattcacccttttatcaggtctgttggaaaagtctccawgcactttaaggtgtctgatttaccggcatgtgcctttagagttaccttgctatcaattttcactgctgggtagcattttataataataatagctatggtt

SEQ ID NO: 252856 - DNA, 201 bp, Homo sapiens
agcgcgtggatcacaaggtcaagagatcgagaccatcctggccaacatggtgaaaccctgtctctactaaaaatacaaaaattagctgcgcttggtggcayatgcctgtagtcccagctacttgggaggctgaggcagaagaatcacttgaacctgggaggcggaggttgcagtgagccaagatcgcaccaccacactccg

SEQ ID NO: 252857 - DNA, 201 bp, Homo sapiens
caactacggtggaggtgatggaggcgaggaatgggttcgggagcggagtgtgaggaggttggaggcggggtgtccttagaatgacaatatgaagcgccttytgtgcaccaggctttgtgccgcgcgccttcatttgctctctcgagcccgccccaccacttcataggtgtaaatgggccgagagaggatataataagccag

SEQ ID NO: 252858 - DNA, 201 bp, Homo sapiens
actgcgctattgccactagaacagtagcactggagatctccgaaaggtgcaaatactggaaccatccttgagacttgctaatgatttagaagtgaagagakgaaagatggaagggaaaatgttatagaagccaggggaaagaaaagtgcaagattatcaagtgtcaggtacagtaggaaactaataaaatcctgctgcata

SEQ ID NO: 252859 - DNA, 201 bp, Homo sapiens
agtatcagcagtttctgaatggggtcaagtgtaagaatcggttttcctctgactattattaactattagtctctgtattttgtgatcaaatctcattaatktgtgtgtgtgtgtgtgtgtgtgtgtgtgtgtgtgtgtgtgtgtgtgacgagtctcactctgtcagccaggctggagtgcagtggtacaatgtcggctcac

SEQ ID NO: 252860 - DNA, 201 bp, Homo sapiens
gagtgaattggttgcatttttactaggacaaaaaaaattgagtatctagctactaggaagaggaagtcgacatgatttaggaaagggaaataattagccgsgcgtggtggtacgcgcctgtaatcccagctactgaggaggctgaggcaggagaatcgcttgaacccgggaggtggaggttgcagtgagccaagatcgcgc

SEQ ID NO: 252861 - DNA, 201 bp, Homo sapiens
aaactaaaaacagctttattattatccttattgaccaacaaacatttatgatggatatgtattcattaaaccctgctttaagttggtgaaagttaagactytcatcaatagtgtatgtgtaagatccaaaataatgaactttcactgtcataaagttggcattatatagtctctttatttctgtttggcaactttttccat

SEQ ID NO: 252862 - DNA, 201 bp, Homo sapiens
taatgccctgagccaaataaagtagcaaattaactttaaaatgtacatttattttgcagtgataaagaattactttcaacaccgtgaattttcattcacaytgaaagatgatatttacattcgctaccaatccttcaacaaccagagtgatctggaaaaggagatgcagaaaatgaatccatacaagattgatataggcgc

SEQ ID NO: 252863 - DNA, 201 bp, Homo sapiens
tcgacatgtaagtctgggcacactgggtggggctgaggaagacagatactcattcatcaccatctattgaagcatccatttaaagtgctaacctagatctyactttcctttcagtccatcccttcagagatggagtttgatcctaactccaacccaccatgttacaagacaatggatgaggtgagtggacagaaagaagtc

SEQ ID NO: 252864 - DNA, 201 bp, Homo sapiens
tctggctgctgttgtggaggcaaggaaggcaactcatcccagaaggcatctggtgcttcttgtagcttaactactgcctcctcatttttcagtatgtgttytaagtataaaaagtccttggttctcatggaagtgttatcttctttttttttttttagcaggaacaataactctttaaagaggctgtggagttggctgctt

SEQ ID NO: 252865 - DNA, 201 bp, Homo sapiens
tgaggagtacatggttgtggctaccctaaattccggttctaactgatatgctttttctggtttcgcagggcttgtaagctgagcctggtggcctcctaccmttggtcctactctaggaagtgtgattgtcacacttatcatgttgtccagaggtccagtctggctgctgttgtggaggcaaggaaggcaactcatcccaga

SEQ ID NO: 252866 - DNA, 201 bp, Homo sapiens
tacctgcaacccctccccaactcctactcgtcctgccacccactctggggacccctctcctctctcaggcagccagttgcttcctgctttgggttcccagrgcgccctctgcaatgctggacaataagacttccttctctcagctgagatgggtcattcattgactcctcaaacattttaaaaacccttggtgtgtgccag

SEQ ID NO: 252867 - DNA, 201 bp, Homo sapiens
gctttttctggtttcgcagggcttgtaagctgagcctggtggcctcctacccttggtcctactctaggaagtgtgattgtcacacttatcatgttgtccaraggtccagtctggctgctgttgtggaggcaaggaaggcaactcatcccagaaggcatctggtgcttcttgtagcttaactactgcctcctcatttttcag

SEQ ID NO: 252868 - DNA, 201 bp, Homo sapiens
ctgacctcgtgatccacccgcctcggcctcccaaagtgctgggattgcaggcttgagccaccgcgcccggcctgcactttcaaattatatggtaatcttgycctgcctaactcagagggcaagagagtcagtattaatagtcataacaataaaagcctgtgttgattgagtagttactatgggctaggtgatgtgcagaga

SEQ ID NO: 252869 - DNA, 201 bp, Homo sapiens
ctttccaaggcgcccgccgactggctgtattggggagggcggggccggggccccgggagagggaatgagtgtgagctcgtgagtgggcgccgccgccaccrcccccgccgccgtcgtctcggtagcagccttcgccacgccggggtcttcaggtgagcaggccttgctctggtccaaggactccccattcccgacgccgac

SEQ ID NO: 252870 - DNA, 201 bp, Homo sapiens
tgatctgcctggctcagccacccaaagtgctgggattataggcgtgagccaccgtgcccggccagtgggtgctttttacagaagctgaagcttggaagaarttaagtgtactggccaagatcatgtggccaacaggtgttcaaatcttggactaacacgtcccaggcctaagctctttaatactttaaaatgaaagcttag

SEQ ID NO: 252871 - DNA, 201 bp, Homo sapiens
ctactctaggaagtgtgattgtcacacttatcatgttgtccagaggtccagtctggctgctgttgtggaggcaaggaaggcaactcatcccagaaggcatytggtgcttcttgtagcttaactactgcctcctcatttttcagtatgtgttctaagtataaaaagtccttggttctcatggaagtgttatcttcttttttt

SEQ ID NO: 252872 - DNA, 201 bp, Homo sapiens
gaatcacttgaacctgggaggtggaggttgcagtgagctgagattgcatcactgcactccagagtggagaacagagtgagattctgtctcaaagtaaatawgtaaataaatacaaatgaaagcttaaaaaaaaagagaaaagggctgggtgcgctggctcacacctataatcccagtgctttggggggcagaagtgggaag

SEQ ID NO: 252873 - DNA, 201 bp, Homo sapiens
gaagtgtgattgtcacacttatcatgttgtccagaggtccagtctggctgctgttgtggaggcaaggaaggcaactcatcccagaaggcatctggtgcttyttgtagcttaactactgcctcctcatttttcagtatgtgttctaagtataaaaagtccttggttctcatggaagtgttatcttctttttttttttttagc

SEQ ID NO: 252874 - DNA, 201 bp, Homo sapiens
aggtggaggttgcagtgagctgagattgcatcactgcactccagagtggagaacagagtgagattctgtctcaaagtaaatatgtaaataaatacaaatgraagcttaaaaaaaaagagaaaagggctgggtgcgctggctcacacctataatcccagtgctttggggggcagaagtgggaagattgcttgagcctaggag

SEQ ID NO: 252875 - DNA, 201 bp, Homo sapiens
tatcccaacactttgggagacaaaagcaagaggatcacttgaggccagaagttcaagactagcctggtcaacagagtaagacccacatctctgcaaaaaawaaaaaattacccgcgcatggtgacccatacctgtagctggggaatgcaatgagcactccagcctggcagcctgggtgacagaatgagaccctttctcaag

SEQ ID NO: 252876 - DNA, 201 bp, Homo sapiens
cctactctaggaagtgtgattgtcacacttatcatgttgtccagaggtccagtctggctgctgttgtggaggcaaggaaggcaactcatcccagaaggcawctggtgcttcttgtagcttaactactgcctcctcatttttcagtatgtgttctaagtataaaaagtccttggttctcatggaagtgttatcttctttttt

SEQ ID NO: 252877 - DNA, 201 bp, Homo sapiens
ccatgaggcaacgtggccagttctcagcaaatcccctgtgacacatctctcagtaaagatgaacatgagcgtgtggggaaactgaggcagcccgaagctcrgagagcccagcccaccaccatgtcacatagtctcctcaagccaccttcatactcttttctttttacctgaatgcgattgtttattgcattggggggaacg

SEQ ID NO: 252878 - DNA, 201 bp, Homo sapiens
gctatggggtcctcctttttcagaacggtgggatttacttgctggccaaccagaagggttgcgacggggaccgcctgtactacgacggctgtgccatgatygccatgaacggaagcgtctttgctcaaggatcccagttttctctggatgacgtggtaatgagcgggcctggacatgcctgggggagggttctctgtgcag

SEQ ID NO: 252879 - DNA, 201 bp, Homo sapiens
aagtactccatgaacagacacaagatgaccacgctcacacccgcgtaccacgccgagaactacagccctgaggacaacaggtttgatctgcgaccatttckgtacaacacaagctggccttggcagtttcggtgcatagaaaatcaggtaaatccagcagaaatgtttctctctccatgtttcatgtctgtagaagaaacg

SEQ ID NO: 252880 - DNA, 201 bp, Homo sapiens
tccactttctgtctatcattaacaattctgctacaaacatacatgtacttctgttggaggggacacatgttttcatttctcttgggtgtgtctatccaggdgtggaattggctgggtcttatggtaactctgttaactgttttttgctttttggttttttgtttgttttttgagacggagtttcacccttgctgtgaacta

SEQ ID NO: 252881 - DNA, 201 bp, Homo sapiens
ctcctacccctcctcctttctcttcccccgccctcactgcctcttccacgggcagttctctatgtgaggacagtggaaggagggcacctttccggagaagraagactgggttctatctagaatattccatccataatggctcctaggagaaaatgagcagctccccatcctgtttgttgagctcagctaaaagctgtcccc

SEQ ID NO: 252882 - DNA, 201 bp, Homo sapiens
atgttgggatcattattacgagtcggacaccctcttgcactcgtttcaagtcctagcggcccttgtggagtctcccgtcactcaggacatcatctgcgacrtggggatgtaagtgccagtgtgagtgtggaagggcaaacctgggacaaaggcaagctcaagggcatgacccacccaaccggcctccatccagggtgtgga

SEQ ID NO: 252883 - DNA, 201 bp, Homo sapiens
tgcatccagcgcttccagcttcctgccctgcagaggtgagtgtgctcacgggctgtggctccacagccacggggctcctctcccagcacggccccggccaycctggcccacactcaggctccttcgtagctcctgttgcctgctgaatggtcctgcccctgagctggcacttgaggcctgcaaccaagcctccctttcttc

SEQ ID NO: 252884 - DNA, 201 bp, Homo sapiens
ttcatccacccatctgtctgtccatccattcatccatccatccacccatccacccatctgtctgtccatccacccacccactcacccactcatccatccaktcattcacccatctgtctatgcattcatccatccattcatctacccacacatccctccacccacctgtccatccatgcattcatccacccacccatctat

SEQ ID NO: 252885 - DNA, 201 bp, Homo sapiens
tgtgctcaccagggtgtgcagcaggtcctgggagttggctgcaggctggctcctacccctcctcctttctcttcccccgccctcactgcctcttccacggrcagttctctatgtgaggacagtggaaggagggcacctttccggagaagaaagactgggttctatctagaatattccatccataatggctcctaggagaaa

SEQ ID NO: 252886 - DNA, 201 bp, Homo sapiens
aacaattcctgttctctgcaagtgggaggagacagtgatagcccagcagataacatgtgtattgtaggaaacgtccgccgagagagctcaaggaggggaagggagagctgggagtttgtaagcagcttgcccagggagggccctactgagaagtgggtttcataaaggcctgcgggaggcgagggtgggtggagaagagcc

SEQ ID NO: 252887 - DNA, 201 bp, Homo sapiens
cagagctgttttggaaagtgtgcggcgtgtcgggcagagggaggtgtgagacgtcagagacagctgtttccagaaatttcactttgaaggggaggggaggygcaggataggcgctgcagagatcactgggaacaggaaaaggagtttgctttattattagagacagggtcttgctctgtcacccaggctggagtgcagtgg

SEQ ID NO: 252888 - DNA, 201 bp, Homo sapiens
ggagtggaagtaggtgacatctgttggcttgagggaggctccagggtccagcccttgggctgcctgagttagggacctaggagggggcagaggaaacaccygtgccatggacatcggggtgaagggggctttgtggccacgcacaaatgtcacagcatcacatcccagtcctgcagctaaggcagcaaggccatcagtagc

SEQ ID NO: 252889 - DNA, 201 bp, Homo sapiens
ggaaagtgtgcggcgtgtcgggcagagggaggtgtgagacgtcagagacagctgtttccagaaatttcactttgaaggggaggggaggcgcaggataggcrctgcagagatcactgggaacaggaaaaggagtttgctttattattagagacagggtcttgctctgtcacccaggctggagtgcagtggcaccgtcacagc

SEQ ID NO: 252890 - DNA, 201 bp, Homo sapiens
gagtcccccacacttcagggcacgggctcaggaggacagcagacaggctgcatctgctccatgagccacaccttccatggatgatttgtggagctactgtsactaatgacccagtggcgtaaaacaacaggaattgcttccctcacagttccagaggccagggtctgaaatcaaggtgttggcagagtcctggtccctccg

SEQ ID NO: 252891 - DNA, 201 bp, Homo sapiens
catttcggtgcagcagcatcgccgtcaacaggctacagagggtgaatggagtgctcaatatgggatggcgaggcagcctgcagttctgtaggatatcttcmtgtccccgttccctacgtgaatgagggggaaagacatcattgactcagtttctcaacctttaacatttcttaagtagagagaactactaaaaccatgccc

SEQ ID NO: 252892 - DNA, 201 bp, Homo sapiens
ctgcatcactccatcctttgcttccttcttcccgcagtttcctccctttctccacgtgtcctcctccctttctccacgtgtcctcctggccctcgtaagakatgtcattggatgcagggcccaccccacattcagagtcatctcaccttcagattctttacttaattacatctgcaaagacgttttatccttttctctttt

SEQ ID NO: 252893 - DNA, 201 bp, Homo sapiens
gtcactggcaagtgtctgaatgaagtggaggttccggtggcaacagtgacggggaagggctatgggtccgcctcaatgtcatctgccccatccctgggccyccaggaatccagggtctcagcccctgctttagaaggtgtgacaacacctttgacagtggccaaattacacgtgggagttgaacaaacgggaaatcacggg

SEQ ID NO: 252894 - DNA, 201 bp, Homo sapiens
gatggaagtgaccagcctgggggaaaggtccatgcagagtgcgagaggaggggacagctgctggaactcggtggtcctgtattgaaatttatggccacacytgttgctggcttcaaagtctcaccagtccgccagttcagtcttgatttcaccagaaaaagtctgcctcaattttccccctataaccgtgcctccccatcc

SEQ ID NO: 252895 - DNA, 201 bp, Homo sapiens
aaggtttcaccatggtggccatgctggcctcgaactcctgacctcaagtgatccacctgccttggcctcccaaagtgctgggattccaggcatgagccacygcagccagtggttttttatttttattttttaaatatcaacctgctttcacctcatttgctcagagcaaatctagttgaactgaagaaggcttggccaaaa

SEQ ID NO: 252896 - DNA, 201 bp, Homo sapiens
ctccatggtgctaagggtcagacctgcaagccctccctgtttctcatttcctgcagatataagcaggtatatgcaagtataagcaggtgcaggcgtactcatgtgtatacaggtgtatacaggtgtatgctgccctctgctgccatgctgtcaacaggaagcctgactgcatcccgtctgggaaggcacagagcatttttg

SEQ ID NO: 252897 - DNA, 201 bp, Homo sapiens
aggcctctggtcgctggatgccatgcagcgggacgtgtggtgttataacgttatttggtttcacatgtgggccaggacgccaacagggcatgaaaacccaygaaacggatccgttggaggagaaaggacatctcagaactccattccctactgggacatctcctggatgccttttctatctgagaactgggcttttcctct

SEQ ID NO: 252898 - DNA, 201 bp, Homo sapiens
tccatggtgctaagggtcagacctgcaagccctccctgtttctcatttcctgcagatataagcaggtatatgcaagtataagcaggtgcaggcgtactcatgtgtatacaggtgtatacaggtgtatgctgccctctgctgccatgctgtcaacaggaagcctgactgcatcccgtctgggaaggcacagagcatttttgt

SEQ ID NO: 252899 - DNA, 201 bp, Homo sapiens
aagcaagcataggttatcgtttcttatatgcctttttgtaaaaatcaggaaaactgattgcttatttcccttcttgtcccttcaaaaacaaaaacaaaaaygaaaacaaaacaatgagtagccacgttgtaagtctcttgtaagcgatagtcctttctcattttggatgtcagctgccatctgtgctctgctagtttcccg

SEQ ID NO: 252900 - DNA, 201 bp, Homo sapiens
tcattaatttccctctgatctctgtcatttccttcctcgtgctggctttgggtttcatttgctcttctttttctagtatctcaaggtggaaagttaggttrttgatttgagatcttttttcttttttaaggtaggtgtttatagctacaaatttccctcctagcactgcattcagtgcctcccacatgttttggtctgttg

SEQ ID NO: 252901 - DNA, 201 bp, Homo sapiens
gtgtcttcatttcatttatcaaagtattttctgattcccttggtgacttcctccttgatccattgattatttaggagtatgctctttaatttccacgtatscgtgaatttccaaaatttctgttactgaatttgtacttttattccaatgtggtgagaaagcaactttgtatgacttcaacatttaaagttgtctgaggct

SEQ ID NO: 252902 - DNA, 201 bp, Homo sapiens
gtcttcatttcatttatcaaagtattttctgattcccttggtgacttcctccttgatccattgattatttaggagtatgctctttaatttccacgtatgcrtgaatttccaaaatttctgttactgaatttgtacttttattccaatgtggtgagaaagcaactttgtatgacttcaacatttaaagttgtctgaggcttc

SEQ ID NO: 252903 - DNA, 201 bp, Homo sapiens
atttccaaaatttctgttactgaatttgtacttttattccaatgtggtgagaaagcaactttgtatgacttcaacatttaaagttgtctgaggcttctctmgtggctcagcagatggtctgacctgggaagcgtcccgtgtgcccttgggaggaaggtgggttccgctgccgctgggtgcagtgccctgcaggtgtgtgcc

SEQ ID NO: 252904 - DNA, 201 bp, Homo sapiens
ggtgagtcgggtgcctgaccactcctgggatgtgcgttaagcacctccgctgtgtgtagccttgggtcctgatcatgggagtgttaccggtggagggtgtycaggtttttgacattttgaacaaagaatgggacaaaaagcacaaagaaagccaaaaaagaatgaagcaaccaaaggagagagtgattgaaaatgaaagcc

SEQ ID NO: 252905 - DNA, 201 bp, Homo sapiens
ggcgtctgtgtggccacgcccctggggtggggactcctggaggtcacgcagtgggttttcagaacctgcctgggtggggacttgcagaaggcaactgtgcmtcccctgggttgagggcgtggatgctagagccagaacccctgggtgtgacccccagccctgctgcttccccgtgctgtgaccttgggccccaaggtgctg

SEQ ID NO: 252906 - DNA, 201 bp, Homo sapiens
agcaacagacctgccgatcacccccgtcgggcccgcgtttctcagggtcttcctaatcccctgggctttccggcttgtcgtgtgcctggagtcaggccgcygtgcggcaggctgttaacctagcctcggggagagtgggatggagccaccttctcatggaacgatcctcgccttccctcatctccattgttttatggcttc

SEQ ID NO: 252907 - DNA, 201 bp, Homo sapiens
gtggaaagtggccccattcgtgcgggcctggtggaggccgtgagggtgcagtgcctgaaaagtctgacagggaagttccggacttcccgagcgtggaaagrggctggtgccgcagacagaacctgcttccatctgttccccgtcatcctctgcttgggccaggccctgagctggggtgagctggggacaggcaggcagaga

SEQ ID NO: 252908 - DNA, 201 bp, Homo sapiens
gggtgctgtcactttgggaagcagccagagaaccacaggatgcgtgaatcggtctccttgtcttcatgggcatctccggccaggtatggccccctgttacrgcggtaggagcaaggggcgcgcaaggtggccacggccatcctgtgaaccgccgcagtggtgcaggtgctgttcccgctgtcccacactcgtgtttagcaa

SEQ ID NO: 252909 - DNA, 201 bp, Homo sapiens
ttaactacagtcaccatgtcatgcactggagctgttgaacttacttcttttgtggcctttgaccaacaatctccccacccaccagcccctggtagccaccrtcgcactctctgcttccacaagatcaccttttcaagattccacagacgaatcagaccatgcggtatttgtctttctctgcctggcttatttccctttaag

SEQ ID NO: 252910 - DNA, 201 bp, Homo sapiens
gggctgcctgagttagggacctaggagggggcagaggaaacacccgtgccatggacatcggggtgaagggggctttgtggccacgcacaaatgtcacagcrtcacatcccagtcctgcagctaaggcagcaaggccatcagtagcttcctggggcttcgggcccatgtggctgagtctccagagctgtacctgcctgctct

SEQ ID NO: 252911 - DNA, 201 bp, Homo sapiens
ggaggagctgcagtggtgacagcccagtccccctggcctgatgttgcccagatgcttagagtttacgtcttcttttctttcttcgtcctagtctctctctyctataaatgttacatccacctctctctttcctccaaatatggacctgtttcattttaaaagtgggaggatgtctaactaaaggcccccgggatggaatat

SEQ ID NO: 252912 - DNA, 201 bp, Homo sapiens
tgggctgcctgagttagggacctaggagggggcagaggaaacacccgtgccatggacatcggggtgaagggggctttgtggccacgcacaaatgtcacagyatcacatcccagtcctgcagctaaggcagcaaggccatcagtagcttcctggggcttcgggcccatgtggctgagtctccagagctgtacctgcctgctc

SEQ ID NO: 252913 - DNA, 201 bp, Homo sapiens
caacacaagctggccttggcagtttcggtgcatagaaaatcaggtaaatccagcagaaatgtttctctctccatgtttcatgtctgtagaagaaacgtgakgttatttccatgaaggattgaaaaactttcttatatacacagtaacttttttactgtcctcctttctgcaaagggacaagtatgtttaaagcgtttttta

SEQ ID NO: 252914 - DNA, 201 bp, Homo sapiens
tagtctctctcttctataaatgttacatccacctctctctttcctccaaatatggacctgtttcattttaaaagtgggaggatgtctaactaaaggccccygggatggaatatttgcatccagcagggacaggggcccagctgagcaggtctccacgtagcttacaacctgctgagcaggctcctgtgaaatattccaaca

SEQ ID NO: 252915 - DNA, 201 bp, Homo sapiens
cttgccttggggctgcttttcctcccttcccccgctcacactggcttcctcctcttcatttcctccttgtggcagaagacagccttctccatccccagggrctatgttctgacatttaagtgttatctagaccaacagcaaaatgccctactctcaattttgaattctaagggaaggcaccctggtgtcccctctcagcca

SEQ ID NO: 252916 - DNA, 201 bp, Homo sapiens
agggaaggcaccctggtgtcccctctcagccactgccttgtggctgggagtgggggcctagcttcatcagcacagggcagcagctgcttcagtgtgatcasaggacagggtcgcttcagaagctgctggccccaattggcagccccatcgatgtccgtgacattctgccccttggctgctcagagtacaggcgtccccttc

SEQ ID NO: 252917 - DNA, 201 bp, Homo sapiens
tagtagagacagggtttcactgtgttgccccggctggtcgcaaactcctgagctcaggcaatccacgcacctcagcctcccaaagtgctgggattacaggkgtgagccaccgcacccggcctctctttctgtttttgaagcaaacaagaaaaaatgggctattattgccacaaatggaaacaaatcccaagtgcacaaata

SEQ ID NO: 252918 - DNA, 201 bp, Homo sapiens
tgttgccccggctggtcgcaaactcctgagctcaggcaatccacgcacctcagcctcccaaagtgctgggattacaggtgtgagccaccgcacccggcctstctttctgtttttgaagcaaacaagaaaaaatgggctattattgccacaaatggaaacaaatcccaagtgcacaaatacaacaaaaagtaacttttagtt

SEQ ID NO: 252919 - DNA, 201 bp, Homo sapiens
tataagcaggtgcaggcgtactcatgtgtatacaggtgtatacaggtgtatgctgccctctgctgccatgctgtcaacaggaagcctgactgcatcccgtytgggaaggcacagagcatttttgtttgttgtttgttttttgtttttatcctacctactgcagcaggttgtttcatctgtctttgagtgtataggtgctga

SEQ ID NO: 252920 - DNA, 201 bp, Homo sapiens
agctgcatgggcacctgggggtgtagaccggggtggagtcacacgggcacctgggggtgtagaccggggtggagccgcacaggcacctgggggtgtagacyggggtggagccgcacaggcacctgggggtgtagaccggggtggagccgcacaggcacctgggggtgtagaccggggtggagccgcatgggcacctggggg

SEQ ID NO: 252921 - DNA, 201 bp, Homo sapiens
tttgtttctcctgtcatcagcaattgcttaaatgtgcacctaggagcttatcagggctccactttctcttggtttgagccagatttcagggaagctgtgtrtgagtcctccctatctgacccaccccagtctcagatggtgcctgcaatttctgcccttctgtcccctcactcctggcattcccagtgcaggctgcaggtc

SEQ ID NO: 252922 - DNA, 201 bp, Homo sapiens
gagtcctgcttgtctgtcggtcctggggacccagagggtttccgtgaagctgggagtcattctgtcttgaatctccattgccaggccagcagggcgagccyctaccccagagtgaaggtggactttgccctctcgtgccacgaggacttgctggcacccatctctgagcccatcgagtggaaataccacagccctgaggag

SEQ ID NO: 252923 - DNA, 201 bp, Homo sapiens
agatgtgggtctagctgagccgcgtttgagtcttggcttcatcatgcagagctttctttggcttgtctgaacctcatcatgcctgagggaggtgatggggyctgccttgtagggttgttgtgaaggaaaaacaaatgttttgtgtagagcctggcacctagcaaggcggggctcgccgcagcttcacaggtctgtgcttcc

SEQ ID NO: 252924 - DNA, 201 bp, Homo sapiens
aaaaaagacgtgtgttagtccgttttcatgctgctgataaagacatacccaagactgggtaatttgtaaagaaaaagaactttaataaactcacagttccrtgtggctggggaggcctcacaatcacggcagaaggcgaaagccatgtcttacatagcggcagacaagagagaatgagagccaagcaaaaagggaaaccca

SEQ ID NO: 252925 - DNA, 201 bp, Homo sapiens
caaggcggggctcgccgcagcttcacaggtctgtgcttccccacacatatgcgttatctctgcggtggtgggaccactcaggatgacctagcgggactcgrcggaggttcctgtacttgggcaggtggcaggtgagggtggtggacacagctgaccactccgctatggggtcctcctttttcagaacggtgggatttactt

SEQ ID NO: 252926 - DNA, 201 bp, Homo sapiens
aagtgggaggatcacttgagcccatgaggttgagcctgcagcaaactgtgattgtgccactactctctagcccagaagacagaacaagagcctgtctcagaaaaaaaaaaaaaaaaaagacgtgtgttagtccgttttcatgctgctgataaagacatacccaagactgggtaatttgtaaagaaaaagaactttaataaa

SEQ ID NO: 252927 - DNA, 201 bp, Homo sapiens
aggcggggctcgccgcagcttcacaggtctgtgcttccccacacatatgcgttatctctgcggtggtgggaccactcaggatgacctagcgggactcggcrgaggttcctgtacttgggcaggtggcaggtgagggtggtggacacagctgaccactccgctatggggtcctcctttttcagaacggtgggatttacttgc

SEQ ID NO: 252928 - DNA, 201 bp, Homo sapiens
cgctcttgtctgccactcactcctttgctgctttgccatttctgactccagggcagttccagaaccggaatgaccctcataactgaagccattagtatgtyggatacaatatgtatgcatttatgtctcattttcaaatgtgcaccactgagctggcaggaaagtacagaatacattgagcctaaaaacagtgaaactgga

SEQ ID NO: 252929 - DNA, 201 bp, Homo sapiens
ggcctgggaggtggtccaggtatcgtttgcttctggctctgcctcaccccgccctctagagcctggtgctgccagacacgggctgcaagatctccgtgggyggatggctttgcttctcatggccactctcttctgcaggctccaaggctgtaatttcactctctctgccagcagaggtggagagatgtctgttgctgctcc

SEQ ID NO: 252930 - DNA, 201 bp, Homo sapiens
accgggcagacacgcatgtacctcccctctctcctgcaggcctgtaatgcaccgaaacgtccgctacaactgcagagtgatattcctcaacaggtaggccycctgcccccaccccgggagggtgactggggcctctccctggctctcagccgagggctgccaggacccgtgctggtgccctggggacccgttgctgggagg

SEQ ID NO: 252931 - DNA, 201 bp, Homo sapiens
cggggaccgcctgtactacgacggctgtgccatgatcgccatgaacggaagcgtctttgctcaaggatcccagttttctctggatgacgtggtaatgagcrggcctggacatgcctgggggagggttctctgtgcagagaccgagctcctggctctcccctgtaagccgggtgcttagtgagggcccctgtggagaagccc

SEQ ID NO: 252932 - DNA, 201 bp, Homo sapiens
gctgagcacctacactcagccacttggactttcacttaacatgcccccatcctcagcctctagacctcaagaccacccctttccctgtcccctgtctcccrggcctagtgttctggtgcccagggtctgtctggtgcactctggttcccagtgggatgatgtgctgggcctgggaggtggtccaggtatcgtttgcttctg

SEQ ID NO: 252933 - DNA, 201 bp, Homo sapiens
ctttccttggaaagctcttcatgtttctgcatttgatttggggcttatatctatctctagctagtcttacttcaggtttttaaaaattgagaatggatgtygagtttatcccatgtctttttagcatatgttgaggtgaagataaagtaaatctttgctttctaatgtctccagaaaaaaaaagcgccatcttttgatctc

SEQ ID NO: 252934 - DNA, 201 bp, Homo sapiens
ctgcaagtagaagatgcacagaaacatggactagggtctccatcccctggtgccagtcccttatatgcctgatttgatgctgctgattaaattgtagccaygttcagcgcagatcacatggaactctcagtcatcaatcagggatatcagtcatgttaggtgaagtgccacttccatcttgaatgatactgaatttccatc

SEQ ID NO: 252935 - DNA, 201 bp, Homo sapiens
cgaagggatcggaggaagcttcgtagtaaagtaaaatgcatgattccagagctgcagccgctgcctccatgtgctctgtgtttcataaccgggcagacacrcatgtacctcccctctctcctgcaggcctgtaatgcaccgaaacgtccgctacaactgcagagtgatattcctcaacaggtaggccccctgcccccaccc

SEQ ID NO: 252936 - DNA, 201 bp, Homo sapiens
ggcaaaataaatgttctaaatggactgagacctgtctcagatacttttgggttcacaccggttacttagccagtggcaaggctggaattggaactccacascatccacatttggtttttcttcccctgaaacacttttgctgtcgggtcacacctctggcaggcgcctgtgcttttcttcgacactgtgtcctctcagtgc

SEQ ID NO: 252937 - DNA, 201 bp, Homo sapiens
tccaaggttaacctgaaagaccggttcaggccatgactgggagtggggggtgatcgggggtcggacaggcctcatttaccctcctcccttttggaaaagcygaccagcatgagcatcaacacagaccttaagtctcataagaaacatttacagtctgttctctctgaagcctgctacttggaggtttcatttacatcataa

SEQ ID NO: 252938 - DNA, 201 bp, Homo sapiens
ctgtggtgcctccacagccccccggctccggccagatcacggagctgtggcctcctgcctcccccgcctgccctgcctcccttccctgccgtccccatgcygatgcttggcaggccgaggctcgccacatctgagcagagcgcctgtgctttagcagtgactgcagatggatcagtgtccggacctttcttcggcctttgc

SEQ ID NO: 252939 - DNA, 201 bp, Homo sapiens
cctggggtcgtcagctagcgataccagcatcagttttccccagctgagaaggcaaggaaggagcagggacagtcctgagagctgtggacacgccacacccrctgttgggcctggttaatgccattgaacacctgagcaagggcaggcccagggaggctgaataagtctagattcccatgttgagtaattaaaagaactgac

SEQ ID NO: 252940 - DNA, 201 bp, Homo sapiens
tgggattccaggcatgagccaccgcagccagtggttttttatttttattttttaaatatcaacctgctttcacctcatttgctcagagcaaatctagttgractgaagaaggcttggccaaaactaagtttccactctgccagcctctcctccctaggtgcttgttggaagctgctgcccaagaccagtaagccgatggtg

SEQ ID NO: 252941 - DNA, 201 bp, Homo sapiens
gtcctgattattataactctgtaggaaggattttgggtactctgagtctcttgaacatccatatgaattttgagatcagcttgtcaatctctggagaaaamaaagcttttgcgttttgacggggactgcatgacactatagatcagtttggagttcggggagtttcgccatcttaatcataagaactcttctgatccatga

SEQ ID NO: 252942 - DNA, 201 bp, Homo sapiens
gacactatgcagccaaaagagtgacgcatgtgggagcatcagagacagctgcaggtaaaggtggagacgctgctgtcatctgcagtgacagctatgcgtgwtctggacccgcccctccaggcttttccagcacacacgcccagcatctggtggggactctggtaatttactttttcacctctgggacttgtgacccgcttt

SEQ ID NO: 252943 - DNA, 201 bp, Homo sapiens
aagcccagcaccgcaagccttggtgacgtcctacccacggtgaacggagtggccgggaccagcgtactcgggaaacttagtctggggattctctcccagakctcacaccaccctcgcagctgcactgaccgacctctgtgtgttttggctgcagcatcctgttggcgccggccaccgcagagctggagcccttggctgatg

SEQ ID NO: 252944 - DNA, 201 bp, Homo sapiens
tcaaggctgatgtcaaccagaaataaaattctaaggccctcccaaccttttgaatgaaccgcttctctcagaggggccctccaaggttaacctgaaagacsggttcaggccatgactgggagtggggggtgatcgggggtcggacaggcctcatttaccctcctcccttttggaaaagccgaccagcatgagcatcaacac

SEQ ID NO: 252945 - DNA, 201 bp, Homo sapiens
tggagtctcccgtcactcaggacatcatctgcgacgtggggatgtaagtgccagtgtgagtgtggaagggcaaacctgggacaaaggcaagctcaagggcrtgacccacccaaccggcctccatccagggtgtggaacatccatgtgtccagggatacgaaaggccttatgcttgaaaagtgggttttgttcctatctcag

SEQ ID NO: 252946 - DNA, 201 bp, Homo sapiens
gagctcaccttctcactgtctctgcagcggctacggatgttgggatcattattacgagtcggacaccctcttgcactcgtttcaagtcctagcggcccttstggagtctcccgtcactcaggacatcatctgcgacgtggggatgtaagtgccagtgtgagtgtggaagggcaaacctgggacaaaggcaagctcaagggc

SEQ ID NO: 252947 - DNA, 201 bp, Homo sapiens
cccagtggccctagagcaggctgactcatggaccagagaccctctcacctagaaaagtcagcggtttcctttgagctggtgctggaagctttggaaagggraggctaccacccaaatggccccaggaccagctcctgctgctgactcaccgaaggggtgagaggcctctggtcgctggatgccatgcagcgggacgtgtgg

SEQ ID NO: 252948 - DNA, 201 bp, Homo sapiens
cattggaatcacctggaaggctttgagaaaacacctgagccccggcccccagacacgttcagactggactggcccacaggccctgcccctccccgctcacmtgagttgtttctggagctcaccttctcactgtctctgcagcggctacggatgttgggatcattattacgagtcggacaccctcttgcactcgtttcaagt

SEQ ID NO: 252949 - DNA, 201 bp, Homo sapiens
tactggttagaggtccagcacctgatacacagggagggcccagtggccctagagcaggctgactcatggaccagagaccctctcacctagaaaagtcagcrgtttcctttgagctggtgctggaagctttggaaaggggaggctaccacccaaatggccccaggaccagctcctgctgctgactcaccgaaggggtgagag

SEQ ID NO: 252950 - DNA, 201 bp, Homo sapiens
ggggtgtggggacacaggtccttgtggcctggaagccagtccaggtgagcaagttcccttggagcgcctggtcaccagctgctggggaggcgcacaccttytggggcttagctgcttcatcgttgacggtcacgaatggatgcagccatggggacccgagtcatagaaagcggaagcccagagaaggagagagatttgctc

SEQ ID NO: 252951 - DNA, 201 bp, Homo sapiens
acaggtgtatgctgccctctgctgccatgctgtcaacaggaagcctgactgcatcccgtctgggaaggcacagagcatttttgtttgttgtttgttttttktttttatcctacctactgcagcaggttgtttcatctgtctttgagtgtataggtgctgaaattgctccattttctttttctctctgtacttacaggtatt

SEQ ID NO: 252952 - DNA, 201 bp, Homo sapiens
ttggtctctggttcccatctccaaaagaagctttaggctctccccccgctgtgacttgctgtcatcatggaacagatttttgttgtgcacaggaagatatrgggatgacatatgcggagctctcggtctatgggaaactcaggaaggtggccaagatggggccctacagcatgttctgcaaactcctcggcatgtggagac

SEQ ID NO: 252953 - DNA, 201 bp, Homo sapiens
ccttggcagttactggggatggaagagaaaaagtgctaagatggagactgtcatctcccctggcccatctggcccgtatcccagctcctgctgaaggagcyttggacgggacaggacagggagcgatggggtgactggggtagccctcactgaaggcagcacagggtctcacctgtccctctgttgggaccctgggggtct

SEQ ID NO: 252954 - DNA, 201 bp, Homo sapiens
tgcggggagtaacccattagtcatttgcttgtatgatccagcatgggaattccggcctggggtctctccagttttggtaacatgaagctcgtgtgttgcaygcccaccaggtcgctgacaaagtgaagcggtttttctccaagtactccatgaacagacacaagatgaccacgctcacacccgcgtaccacgccgagaact

SEQ ID NO: 252955 - DNA, 201 bp, Homo sapiens
acctgtttcattttaaaagtgggaggatgtctaactaaaggcccccgggatggaatatttgcatccagcagggacaggggcccagctgagcaggtctccamgtagcttacaacctgctgagcaggctcctgtgaaatattccaacaacttacagagaggaaaccgaggcaggagaggagggacatcacttcactgagcaca

SEQ ID NO: 252956 - DNA, 201 bp, Homo sapiens
catgtacctcccctctctcctgcaggcctgtaatgcaccgaaacgtccgctacaactgcagagtgatattcctcaacaggtaggccccctgcccccacccygggagggtgactggggcctctccctggctctcagccgagggctgccaggacccgtgctggtgccctggggacccgttgctgggaggctgcttctggaagt

SEQ ID NO: 252957 - DNA, 201 bp, Homo sapiens
accgaaacgtccgctacaactgcagagtgatattcctcaacaggtaggccccctgcccccaccccgggagggtgactggggcctctccctggctctcagcygagggctgccaggacccgtgctggtgccctggggacccgttgctgggaggctgcttctggaagtgcccgggcttagtgagggccgatgcaccaggcaggt

SEQ ID NO: 252958 - DNA, 201 bp, Homo sapiens
ggccaatggtgcaggcagtaaaggaatttaccaagacagttgtaggtaaagagaggcagatttattagagaaggtatgaaagtatgttacaatatcgcaayaggcagcacagcagagaaggggctgtctgcagagaggcaggggctggagggaagttttatagcattgtgctggagggggctacattggggatgaggtaga

SEQ ID NO: 252959 - DNA, 201 bp, Homo sapiens
cgcagatcacatggaactctcagtcatcaatcagggatatcagtcatgttaggtgaagtgccacttccatcttgaatgatactgaatttccatcttcaccyggttgacatttgggtcattctttgtcatggggcgtcggccatgtgcatcctcaggcatttactggcatagctggtctccccacagatgctcccagttgtg

SEQ ID NO: 252960 - DNA, 201 bp, Homo sapiens
accaaaccagtttcatagtggaccaagtgaacttcaccctgaacaagaattccacggtcttttcaggggtttcttgcacgggggcaggcaagggtgtggcygtctcgactccaggccctgctttccacatgacagtgtccccagaggcctccttgcgcttcatcattaaccgcgacagagctggaagggctttgaagagaa

SEQ ID NO: 252961 - DNA, 201 bp, Homo sapiens
gtccctgccttctctagcttccctggcctgtggcccctcccagctgtgatgtcaccccgacccccacgtctgttgtcgcagtcctcctctgaccctccctyttatggggacccttgctggctggcccagattgtccagaatcatctcccatctcaaggcctgtcacctcatcacccctgcagcgcctcaggtaacataaca

SEQ ID NO: 252962 - DNA, 201 bp, Homo sapiens
tggactctttaatattatatttttaagtggttaattttttatataggaaaacttgatttttatgttgcttttgtaattgactacctcattaaattctcctrttgtgtctgttggttagtctgttgatttttgtagtttttcttttaagttgaacttatataatatacaatgaattttccttttcctttccagtatttgcac

SEQ ID NO: 252963 - DNA, 201 bp, Homo sapiens
ggtcttttcaggggtttcttgcacgggggcaggcaagggtgtggccgtctcgactccaggccctgctttccacatgacagtgtccccagaggcctccttgygcttcatcattaaccgcgacagagctggaagggctttgaagagaaggattaagttcctgctgatgggaagtgtggtcctctccccgttcacgtcagagcc

SEQ ID NO: 252964 - DNA, 201 bp, Homo sapiens
ttactctagtcacttcaccaagttttctattcattaggttttcttttttttgtttgtttttgtttttgtttgtttgagacagattctcactctgttgtccrggctggagtgccatggtgccatcctggctcactgcagcctcgacctcctgggcttgagtgatccgtccatctcagcctcctgagtacccgggactacagg

SEQ ID NO: 252965 - DNA, 201 bp, Homo sapiens
ggcacaatctcagctcactgcaacctccacctccctggctcaagcgattctcctacctcagcctccggagtagctgggattatgggtgtgcatcaccatgyctcgctaagttttttgtatttgtagtagagatggggttccaccatgttggccagaacatgaggcctcggactcctggcctcaagtaacccgcccgccttg

SEQ ID NO: 252966 - DNA, 201 bp, Homo sapiens
gcaggtgtgttggcaatcaatcacctgccccaggacccccgcaggttcccggccccacatcaagccaccaaatcggagtcctcgggggtctgtatatttartgagcaccaggcagttgtttcgtgcattagaatccgggagccgttgccttacacgtctctagagttcctgatgttgcctgagagctccgtcgtaggctgt

SEQ ID NO: 252967 - DNA, 201 bp, Homo sapiens
cgggcccgcgtttctcagggtcttcctaatcccctgggctttccggcttgtcgtgtgcctggagtcaggccgccgtgcggcaggctgttaacctagcctcrgggagagtgggatggagccaccttctcatggaacgatcctcgccttccctcatctccattgttttatggcttcacacggaccgtggctttctgcatggaa

SEQ ID NO: 252968 - DNA, 201 bp, Homo sapiens
ccaggtaacggaaggcaccacagtgctcacaggtctgaaacagacaaaggaggcaggttcctatagtgaggggggctgcgtggccagacagcagccagggyggctcctccttgccttggggctgcttttcctcccttcccccgctcacactggcttcctcctcttcatttcctccttgtggcagaagacagccttctccat

SEQ ID NO: 252969 - DNA, 201 bp, Homo sapiens
ctttctcttggtttgagccagatttcagggaagctgtgtgtgagtcctccctatctgacccaccccagtctcagatggtgcctgcaatttctgcccttctrtcccctcactcctggcattcccagtgcaggctgcaggtcgtatgtgctcaccagggtgtgcagcaggtcctgggagttggctgcaggctggctcctaccc

SEQ ID NO: 252970 - DNA, 201 bp, Homo sapiens
gtatctcacacagtaacacttttcagttatttttacccactctgatcttctgctggcccaaagttaatctgagtgaggctcacccacagccaggtaaacaygacatgaaacaagcctccctttttttgaggatagaatgtaaacttcagggtcagaatagtattgcttttctgcctgttgtgagtcttgctggggctgaag

SEQ ID NO: 252971 - DNA, 201 bp, Homo sapiens
aggtaaacacgacatgaaacaagcctccctttttttgaggatagaatgtaaacttcagggtcagaatagtattgcttttctgcctgttgtgagtcttgctrgggctgaagcccacaagcattgtagtccaatggaacctcctggaagccttgtgaaataaatcttcgcaggatttatcttagatctcccaaggcagcatgc

SEQ ID NO: 252972 - DNA, 201 bp, Homo sapiens
atcatggaacagatttttgttgtgcacaggaagatatggggatgacatatgcggagctctcggtctatgggaaactcaggaaggtggccaagatggggccytacagcatgttctgcaaactcctcggcatgtggagacacatctgcaccccgagacaggtaaagcctgtgagacgcatcacagagggaggccagttaggta

SEQ ID NO: 252973 - DNA, 201 bp, Homo sapiens
cccagtgcaggctgcaggtcgtatgtgctcaccagggtgtgcagcaggtcctgggagttggctgcaggctggctcctacccctcctcctttctcttccccygccctcactgcctcttccacgggcagttctctatgtgaggacagtggaaggagggcacctttccggagaagaaagactgggttctatctagaatattcca

SEQ ID NO: 252974 - DNA, 201 bp, Homo sapiens
ggctgagcacctacactcagccacttggactttcacttaacatgcccccatcctcagcctctagacctcaagaccacccctttccctgtcccctgtctccyaggcctagtgttctggtgcccagggtctgtctggtgcactctggttcccagtgggatgatgtgctgggcctgggaggtggtccaggtatcgtttgcttct

SEQ ID NO: 252975 - DNA, 201 bp, Homo sapiens
atagaaattcacatctagaaacattcttgtgaaaccgcagaacactaaagacacagagaaattctcaaaagtagccaaaagggaaaaagacaaattgcccrcagagattcagcagctagagcaactcctgcttcgtagtggtgaagcctggagccaggagacggtggctggaaaaaatccgaggagagagtcaccggcagc

SEQ ID NO: 252976 - DNA, 201 bp, Homo sapiens
attagcacagggcaaggcttcccaggtaatcgttatcgccatggaggcaaacttcctccacagagaagggaccacagttggaaagtccttggggaggtttrggccactctccctttcggttgtttgtttgtttttgagatggagtcttgctctgtcacccaggctggagtgcagtggcgcaatcttggctcgctgcaacct

SEQ ID NO: 252977 - DNA, 201 bp, Homo sapiens
ctcgaaatttcaaaaggattggtgaaaaaggatattgataaatttgtggatacgtgtcaacaaatgggactgtatgaaacataatgtctagtgtgtagtaraaagtaggccagccctaaatcactgcatagctgtgcgtgtaaattagggcaatgctctgtaggagggtaaagataaagatactgatcaatttttgacttt

SEQ ID NO: 252978 - DNA, 201 bp, Homo sapiens
cagaagtcttgtgacacgtggaatcatttcagagtcaccccttctgcctcctgctcaagcaacagacctgccgatcacccccgtcgggcccgcgtttctcwgggtcttcctaatcccctgggctttccggcttgtcgtgtgcctggagtcaggccgccgtgcggcaggctgttaacctagcctcggggagagtgggatgga

SEQ ID NO: 252979 - DNA, 201 bp, Homo sapiens
ctcagagtcactggaagctccgcctgtgagtgcattggtgactggcttcattcattccgcatcgtgtcatccactatgtggataaacgtgtaagtgctccrtccctttttgtgggtgaataatattccactgtacggatagaccagtttgtttctcctgtcatcagcaattgcttaaatgtgcacctaggagcttatcagg

SEQ ID NO: 252980 - DNA, 201 bp, Homo sapiens
gacaaaggaggcaggttcctatagtgaggggggctgcgtggccagacagcagccagggcggctcctccttgccttggggctgcttttcctcccttcccccrctcacactggcttcctcctcttcatttcctccttgtggcagaagacagccttctccatccccaggggctatgttctgacatttaagtgttatctagacca

SEQ ID NO: 252981 - DNA, 201 bp, Homo sapiens
tgccgctttatacctcatgatcggtgacagcatctctgagcaggtggcctgtaaaacgagggtggatcagtggcaggggttctacatctgggaccgttgaccccccgaggagacattaggcgatgactggagatgattttggttatcatgactgggctggggtctgtgctcccagcatcccgtgggtggagcccagggatg

SEQ ID NO: 252982 - DNA, 201 bp, Homo sapiens
ctagcaatggggagtaaagcccacctctgctcctgcctctctgggaaagtattgcctccttggtctctggttcccatctccaaaagaagctttaggctctycccccgctgtgacttgctgtcatcatggaacagatttttgttgtgcacaggaagatatggggatgacatatgcggagctctcggtctatgggaaactcag

SEQ ID NO: 252983 - DNA, 201 bp, Homo sapiens
gcagttcctttgccagttcatcagttcggagggttcagtttgagttttgtttaaatgtagccgccattcctcatttgtcctgagatgctcatcctcagctyctcggtgttttcctctccaggcacacagaggagtactttctgcctcggatgatacaggacctgacaaagcaggtgagtccctgggtgtggagcccgtttt

SEQ ID NO: 252984 - DNA, 201 bp, Homo sapiens
ccatcttgccagcattgtaatcatgcgtatctgcagttcgtcggtggagtcagcctctgacacgccccgcagtgaagtgtcttttttccctctgaaaaatycattcatcctgccacgtgcgggtatttgtcctgaccccatggaaagtgctaacacccacgtgcatttctgtggacgcctccttgaggtctatgggtggag

SEQ ID NO: 252985 - DNA, 201 bp, Homo sapiens
ttttttgaggatagaatgtaaacttcagggtcagaatagtattgcttttctgcctgttgtgagtcttgctggggctgaagcccacaagcattgtagtccartggaacctcctggaagccttgtgaaataaatcttcgcaggatttatcttagatctcccaaggcagcatgccacagcatcagaggcagggagaccccagtt

SEQ ID NO: 252986 - DNA, 201 bp, Homo sapiens
agcctctgacacgccccgcagtgaagtgtcttttttccctctgaaaaatccattcatcctgccacgtgcgggtatttgtcctgaccccatggaaagtgctracacccacgtgcatttctgtggacgcctccttgaggtctatgggtggagcttggctgatccatgggcatgctgcttctccgaggctctgctcacgctgtc

SEQ ID NO: 252987 - DNA, 201 bp, Homo sapiens
atagaatgtaaacttcagggtcagaatagtattgcttttctgcctgttgtgagtcttgctggggctgaagcccacaagcattgtagtccaatggaacctcytggaagccttgtgaaataaatcttcgcaggatttatcttagatctcccaaggcagcatgccacagcatcagaggcagggagaccccagtttcacagcatc

SEQ ID NO: 252988 - DNA, 201 bp, Homo sapiens
atcagaggcagggagaccccagtttcacagcatcaaaggcagggggaccccggtttcatagcatcagaggcgggggaccccagtttcatagcatcagaggygggggaccccggtttcatagcatcagaggcagggggaccccggtttcatagctcggccagtgtccccggcctgagcacgggcatcccccacacctgccat

SEQ ID NO: 252989 - DNA, 201 bp, Homo sapiens
atgtgctgccaggtctgcgaggccgtgaggagtggaagtaggtgacatctgttggcttgagggaggctccagggtccagcccttgggctgcctgagttagsgacctaggagggggcagaggaaacacccgtgccatggacatcggggtgaagggggctttgtggccacgcacaaatgtcacagcatcacatcccagtcctg

SEQ ID NO: 252990 - DNA, 201 bp, Homo sapiens
gttctctttgaaatttccttctccaggaagtcctgacggccacgctggatctggaggacgtccggagctacagggcggagatttcatctcgaaacctggcrgtgagtgctccagtagacacctgtgtgggatgctcatcaaagacgtggaaagtggccccattcgtgcgggcctggtggaggccgtgagggtgcagtgcct

SEQ ID NO: 252991 - DNA, 201 bp, Homo sapiens
ctggttttattctggggcagggtagggatttttttttttttttttagtgcaaacaacaaaaagcatttcatcactctgcctccatggggagcttagtctgygctagccagaggcaaggtgggcacagtggctggtgggtcagctccacctttggaggctcagcggaacccagcccatcagcattcagggtcacgctcacca

SEQ ID NO: 252992 - DNA, 201 bp, Homo sapiens
ttcagacatgagcgctccttggtgagccaccgttcacccgttacggtcctccaaaccaaatgcctggttcttcgttgctgttttccaaatgctacctcctkactggctgactagcaatggggagtaaagcccacctctgctcctgcctctctgggaaagtattgcctccttggtctctggttcccatctccaaaagaagct

SEQ ID NO: 252993 - DNA, 201 bp, Homo sapiens
ggatgggcccctcccaaccccacacccagcagagaattctttgttccacgtgttggtggtgccaaggttgaggaatgctgaacatttgggactagaagacrtttggggctgcatggttgtaaggaagagatactgtatctggctgatttccgtggaaaggaacttgctcaaagagtgacttagagggtggaagggagggca

SEQ ID NO: 252994 - DNA, 201 bp, Homo sapiens
gttcctttgccagttcatcagttcggagggttcagtttgagttttgtttaaatgtagccgccattcctcatttgtcctgagatgctcatcctcagctcctyggtgttttcctctccaggcacacagaggagtactttctgcctcggatgatacaggacctgacaaagcaggtgagtccctgggtgtggagcccgtttttca

SEQ ID NO: 252995 - DNA, 201 bp, Homo sapiens
atgcgtgatctggacccgcccctccaggcttttccagcacacacgcccagcatctggtggggactctggtaatttactttttcacctctgggacttgtgayccgcttttggtgcgtgccagtgtttcaacagccccacagtccgtctttgcggggctgtggtgtcacaggcctctctttccaggtgctacagctcgagagg

SEQ ID NO: 252996 - DNA, 201 bp, Homo sapiens
aggtgagtccctgggtgtggagcccgtttttcagtcggttgtcgctgttctcggccaacagtggaccaggtggggcgggaacgctttgggatccaggtaayggaaggcaccacagtgctcacaggtctgaaacagacaaaggaggcaggttcctatagtgaggggggctgcgtggccagacagcagccagggcggctcctc

SEQ ID NO: 252997 - DNA, 201 bp, Homo sapiens
cccctgctttagaaggtgtgacaacacctttgacagtggccaaattacacgtgggagttgaacaaacgggaaatcacgggttctctttgaaatttccttcyccaggaagtcctgacggccacgctggatctggaggacgtccggagctacagggcggagatttcatctcgaaacctggcggtgagtgctccagtagacacc

SEQ ID NO: 252998 - DNA, 201 bp, Homo sapiens
atctgtgccttaaggacatgttcctgtgttgaagtacaaagataggcaagatttgatgcggggagcacttccaaggagagagcagcgcacgctgggggctyggaggtccaggcgatgctctgctccttcacctgggtactgtgtgcactgggcttattttaatatcctttaattacacatgtgtgccttggtactcttttg

SEQ ID NO: 252999 - DNA, 201 bp, Homo sapiens
aggacatgttcctgtgttgaagtacaaagataggcaagatttgatgcggggagcacttccaaggagagagcagcgcacgctgggggctcggaggtccaggygatgctctgctccttcacctgggtactgtgtgcactgggcttattttaatatcctttaattacacatgtgtgccttggtactcttttgcataatatattt

SEQ ID NO: 253000 - DNA, 201 bp, Homo sapiens
gtaatcatgcgtatctgcagttcgtcggtggagtcagcctctgacacgccccgcagtgaagtgtcttttttccctctgaaaaatccattcatcctgccacrtgcgggtatttgtcctgaccccatggaaagtgctaacacccacgtgcatttctgtggacgcctccttgaggtctatgggtggagcttggctgatccatgg

SEQ ID NO: 253001 - DNA, 201 bp, Homo sapiens
ctcaccagcaactgagctgccgcttggaatggggttcaggaccttgttggggccccagattcctttgggaagctgatgaaagctctgcacattctgcggcyaaagatgcgcattagcacagggcaaggcttcccaggtaatcgttatcgccatggaggcaaacttcctccacagagaagggaccacagttggaaagtcctt

SEQ ID NO: 253002 - DNA, 201 bp, Homo sapiens
ttctgtaggacacaggtccagtatgggtcccctggctcaagtgaaggtgtggacacagtgggttccttctggagaccctggagagaatctgtttcccgccwtttccagcctctggagtcccgccttctttggctcacgacgcctcctccgtcttcaccaccagcggcctcgcgtctctgcctttcccctgcagtcagggct

SEQ ID NO: 253003 - DNA, 201 bp, Homo sapiens
ccccgtgctgtgaccttgggccccaaggtgctgtccgtccattctgtggttcagtgtccccattttaaaatgaggacgatgataatacccacgtcctgggkctgtcttcagaatcacatgtgtcccttctcacgaggtgcctaaagcagagacgggcgtcctgagagcccagcgttgactctggcactgcagcctcctggg

SEQ ID NO: 253004 - DNA, 201 bp, Homo sapiens
tgttctcggccaacagtggaccaggtggggcgggaacgctttgggatccaggtaacggaaggcaccacagtgctcacaggtctgaaacagacaaaggaggmaggttcctatagtgaggggggctgcgtggccagacagcagccagggcggctcctccttgccttggggctgcttttcctcccttcccccgctcacactggc

SEQ ID NO: 253005 - DNA, 201 bp, Homo sapiens
aggtggcaggtgagggtggtggacacagctgaccactccgctatggggtcctcctttttcagaacggtgggatttacttgctggccaaccagaagggttgygacggggaccgcctgtactacgacggctgtgccatgatcgccatgaacggaagcgtctttgctcaaggatcccagttttctctggatgacgtggtaatga

SEQ ID NO: 253006 - DNA, 201 bp, Homo sapiens
cccagtggactggcccttcactgtgcctccatctctgcctctcctcctggggtcgtgaggccacaccagtgcccacactcctcagcccaggatgctcaccyccgctggaaagcccagcaccgcaagccttggtgacgtcctacccacggtgaacggagtggccgggaccagcgtactcgggaaacttagtctggggattct

SEQ ID NO: 253007 - DNA, 201 bp, Homo sapiens
gggtcctgatcatgggagtgttaccggtggagggtgtccaggtttttgacattttgaacaaagaatgggacaaaaagcacaaagaaagccaaaaaagaatraagcaaccaaaggagagagtgattgaaaatgaaagccccctccacagggtgggagcagccccggcaggggctcagggcgcggttacacaatgtcccgggg

SEQ ID NO: 253008 - DNA, 201 bp, Homo sapiens
ctgcaccgatcccctgcagggatgcctgtgtcccacagtgccccctgcaaaactcactgatatgaagagtcggccctctgtatccatgggcttcagatccygtgattactgtatcttctgtctgtgtgcagttgaatctgcgggtgtagaacccacagacacagggagtggctgtagcttatccctttgtatggtcagaga

SEQ ID NO: 253009 - DNA, 201 bp, Homo sapiens
ctgctcagagtacaggcgtccccttcttccacacataggctcctaagggcgtctctgcctggcaccacccggtgtcccatgcgcagccgcagggcacccamctcttcggaatgtgcgagagcccagagccaactccagctcttgtggctgcaggatgtccgtggccctaggtagtgcgtggcccagacagggcatggctag

SEQ ID NO: 253010 - DNA, 201 bp, Homo sapiens
ctggacaccccacaggtcagccccatgcccctgtgctgtctgatcgcccacctcatatgggccagctgggaggacctgggactgcagacgtcctggggccrtggccgtggccgtggccgtgggctgggagctgccgtgggagagtgcaaggggctgccagggaggctggtttggaggagtctggtggcctgttctcttcac

SEQ ID NO: 253011 - DNA, 201 bp, Homo sapiens
tgagcacacagcggccagctgcgtgagggagggccctgggggagctgtgagttacaggtcggaagcgccattgctatcccgaagcgacacagatatgtggrtgctccgaggaaggagatgacagagaacaaagctaagaaccctgcttggcacattcctcaccagcaactgagctgccgcttggaatggggttcaggacct

SEQ ID NO: 253012 - DNA, 201 bp, Homo sapiens
cactctcgggctcagaccacacgcgggtccacagcactgcctcccacacacagcattgcctgactcgtctttggacccgacggccttccactctgctcttkttgggaatgggcattaaagcagcggattcaccgaggcaggcggtagcaccggaggcgagttctgcagctggctttgcaggagcagggcgagcttgtgtcc

SEQ ID NO: 253013 - DNA, 201 bp, Homo sapiens
ctgtcatgagacagtgatttttgcaaacattgaagaagtgtgatgctcataacagagcggactcttctgctgttgattgattgagacagggtctcattccrtcgcccaggcttgagtgcagtggtaccatcacagctcaccgcagcctggacctctggggctcaagtgatcctcccacctcagcctcctgagtagctgaga

SEQ ID NO: 253014 - DNA, 201 bp, Homo sapiens
atggagttatgcagccacaatcttagcgcattttcattaccccaaaaagaaactgtacccattatgcaccccgttcccctcctccggtcctggcaaccacragtctactgtctgtcttcatggatttgcctattctcgacgtttcattgggatgaaatcacacagtgtatggcttccacactttactgtgctgttgtcaag

SEQ ID NO: 253015 - DNA, 201 bp, Homo sapiens
aaccatcactgtcttcgtttatttgtattttttttctggcagtttcattcccctgaatttgtcttctctgcagtgctcttcacagggctctatcctgtgcyttgttttcttatctgcaagtattttaagacttcaaattcttttcttagttgtaaacttatctcctgtcatttatttgtgcttttgttgagaaattttatc

SEQ ID NO: 253016 - DNA, 201 bp, Homo sapiens
ctcctgtcatttatttgtgcttttgttgagaaattttatcagttgatgttgtctttaggatttcagagcataagtgtggggctcctgttccttcttccccrttcgtttcatgaacgcctcggtgtcaggtgtcacactgggccctctgggatggtattcctttcatccccgtggaagaggtggcaggaaggtgaggctgga

SEQ ID NO: 253017 - DNA, 201 bp, Homo sapiens
gccatcctcaaggtgtgcgctggctgtggagcacagctgcagtgaggagcaaggccgggtacatgcctgtcccgctgggtctttgttccggtgtccagggygtctttgcatgagtcgagggaaaggtgcagatgaagggagagatgtttggacggttcctgcatttaaaatgcatttcggtgcagcagcatcgccgtcaac

SEQ ID NO: 253018 - DNA, 201 bp, Homo sapiens
gcacccacctcttcggaatgtgcgagagcccagagccaactccagctcttgtggctgcaggatgtccgtggccctaggtagtgcgtggcccagacagggcrtggctagtgaatctcatgcactcttctcttccgactgcaggaaaccgtacccttcggagatgcggtgctggtgacatgggacacctgcattggaagtgag

SEQ ID NO: 253019 - DNA, 201 bp, Homo sapiens
cggagctctcggtctatgggaaactcaggaaggtggccaagatggggccctacagcatgttctgcaaactcctcggcatgtggagacacatctgcaccccragacaggtaaagcctgtgagacgcatcacagagggaggccagttaggtaatgtcccctttgcagaggccggtttgacctgtaggaacaagtagataacag

SEQ ID NO: 253020 - DNA, 201 bp, Homo sapiens
gtccagggtgtctttgcatgagtcgagggaaaggtgcagatgaagggagagatgtttggacggttcctgcatttaaaatgcatttcggtgcagcagcatcrccgtcaacaggctacagagggtgaatggagtgctcaatatgggatggcgaggcagcctgcagttctgtaggatatcttcctgtccccgttccctacgtga

SEQ ID NO: 253021 - DNA, 201 bp, Homo sapiens
cctccaagcccaggctgatgcagctggctgggcccctctttccggcaggttctccatggtggtacaggatggcatagtgaaggccctgaatgtggaaccaratggcacaggcctcacctgcagcctggcacccaatatcatctcacagctctgaggccctgggccagattacttcctccacccctccctatctcacctgcc

SEQ ID NO: 253022 - DNA, 201 bp, Homo sapiens
atgcgagctcagcagattgtgggtaagcagtttcatgtcgccgcacaaactctcgccaggccggaaccggaaaaaggtcgtcctccgctgcctcacttccsgggatgctccactcgatgctattggatagccaggagaaccggaagtggcgaacttgctggaacttctcgtgtttgtgggagctgaggtaggtaggtgaaa

SEQ ID NO: 253023 - DNA, 201 bp, Homo sapiens
ctgagggttcaaggggttaggtatgggacttgcccaaggtcataaaggtatgtggtagccagagtccctgttcggcacagacctgttctttgctgtcctgrccagtgttccaggccttggggacatagctggggctgaagcagggctgtttctgccctcaggcagtttacatcctggcagaggggagagctgggcaacagt

SEQ ID NO: 253024 - DNA, 201 bp, Homo sapiens
ttgcagactctgtgcacatcgaagatgccgaggctgtggagcagctgcgagaagctctgcacgaggccctgctggagtatgaagccggccgggctggcccyggagggggtgctgagcggcggcgggcgggcaggctgctgctcacgctaccgctcctccgccagacagcgggcaaagtgctggcccatttctatggggtga

SEQ ID NO: 253025 - DNA, 201 bp, Homo sapiens
agagctccaggcagggcctgtttgaggaacatggaggaggcgagagcaaggagtagaggtcaaaaggaggcaagaagcaggggcgtaggcctaggaggacrtaggttcgctttggcttggactcagagaagggaaatccccagagggttttgagaagaggaggtacaggatgtaatggaggcttaataggaccctcttggc

SEQ ID NO: 253026 - DNA, 201 bp, Homo sapiens
ggcacgatcttggctcactgcagcctctgcctcccgggttcaagcgattctcctgcctcagcctccggagcagctgggattacagacatgcaccaccatgyccggctaatttttttttttcgagatggagtctcactgtgtcacccaggctggagtgcagtggcacaatctcggctcactgcaacctctgcctcccgggtt

SEQ ID NO: 253027 - DNA, 201 bp, Homo sapiens
ctgtgacctctttgaccgagagattgtggtcaccatcagctgggccaagagcatcccaggtaaagggcccaggtgacccggggctgccctgaacgggcccrgctctggtgcgtttgctcagccaggcccgctccccgctgccccctaggcttctcatcgctgtcgctgtctgaccagatgtcagtactgcagagcgtgtgg

SEQ ID NO: 253028 - DNA, 201 bp, Homo sapiens
gcagattgtgggtaagcagtttcatgtcgccgcacaaactctcgccaggccggaaccggaaaaaggtcgtcctccgctgcctcacttccggggatgctccwctcgatgctattggatagccaggagaaccggaagtggcgaacttgctggaacttctcgtgtttgtgggagctgaggtaggtaggtgaaagacctgtcggg

SEQ ID NO: 253029 - DNA, 201 bp, Homo sapiens
ctcccagccgtggctaccctctgtgacctctttgaccgagagattgtggtcaccatcagctgggccaagagcatcccaggtaaagggcccaggtgacccgsggctgccctgaacgggcccggctctggtgcgtttgctcagccaggcccgctccccgctgccccctaggcttctcatcgctgtcgctgtctgaccagatgt

SEQ ID NO: 253030 - DNA, 201 bp, Homo sapiens
aggttcggctcctggctgatcccactggggcctttgggaaggtgagtgttcccctgaccgccacagggacatggcagtgcggggagcagtgggggcccttrgcctcttcaaggatttctgacacttttctctgtctcttcttaggagacagacttattactagatgattcgctggtgtccatctttgggaatcgacgtctc

SEQ ID NO: 253031 - DNA, 201 bp, Homo sapiens
tacaagcggcggccggaggtggacccactgcccttcccgggccccttccctgctgggcccctggcagtcgctggaggcccccggaagacaggtgagagcaytgtgggtacctggggctacgaaaccggaggcctatgtgtggcatcatagttaccttgggcactgggacctgtatttccccttcgtctcttcactcactca

SEQ ID NO: 253032 - DNA, 201 bp, Homo sapiens
ttcaccaagtgcctgcgggtgggcatgctcaaggagggtgagcgctgggcaggggctgggcgagggctgggggagtcggggacccgggccaggtgggggtraggcctgggagttctggtgagtggactcggggaggacagctctggagagcaagccccaccctgcccacagcaccacagtcacagtcctatctgtcccaca

SEQ ID NO: 253033 - DNA, 201 bp, Homo sapiens
tgccgaagtccctggggctggccggggtggaagacggggagggctctatgtctgggaaggggctctgaagaccacgtgggggcgctcgaaggggcctgggrccaccctcctctctgggtcaaaggtcatcgcaccggcaggggagaacttcctcctccttggctctccccacttacttcctgataacctggtagaggtctc

SEQ ID NO: 253034 - DNA, 201 bp, Homo sapiens
aaagtgctgggattataggtgtgagccactgcaccccgccaatccagcaagttttaacttggccaaaatccaccaatcttaaactttgtgcacccttcccrctctgaagaacagtgagccagccggccagggtgcgggtatctcctacctaccctggggcccctcactgtatgttgactattgacaaatatttattgtgtg

SEQ ID NO: 253035 - DNA, 201 bp, Homo sapiens
tggcccggccgggcctgacatcccccactacccccatggcaatccccgtcccgctagtctgagagtatcgccttatttcctgcctgccagacccctcccckccgcccgcccggctcatcccttcagaaggccctcgtggctgcccacctttctcgccaatcgtgggggcctcacctcccgggacagtcccgaggcattgtg

SEQ ID NO: 253036 - DNA, 201 bp, Homo sapiens; identical to SEQ ID NO: 50005

SEQ ID NO: 253037 - DNA, 201 bp, Homo sapiens
cacgcacggctaattttggtatttttagtagagactgggtttcaccatgttagccaggatggtctcgatctcctgacctcgtgatccacccgcctcggcctcccaaagtgctgggattacgctcccggcctctttttttttttagacagagtctcactctgttgccaggctatagtacagtggcacgatctcagcttactg

SEQ ID NO: 253038 - DNA, 201 bp, Homo sapiens
atgttctactaaaggccttggcccttgccaattcaggtgagtctggggcaggcactgacaggtgaggtgtctccgtaaggtcttcaggttaactcagtgayggtagcacagccccattttgcagataacgaaaactgaggcttagggaagaacaatgacttgctagaagtcaaaaagcaagccaagtgcaggctccaaact

SEQ ID NO: 253039 - DNA, 201 bp, Homo sapiens
tgtgcaggaaggggaggtgctggttctgaggctccagagggcttgtcttttttttttttttttgagacggagtctcgctttgttgcccaggctagagtccrgtggcgcgatctcggctcagtgcaagctccgcctcccgggttcaagcgattctcctgcctcagcctccccaatagctgggattacaggcgcatggcacca

SEQ ID NO: 253040 - DNA, 201 bp, Homo sapiens; identical to SEQ ID NO: 50015

SEQ ID NO: 253041 - DNA, 201 bp, Homo sapiens
cgctgcctcacttccggggatgctccactcgatgctattggatagccaggagaaccggaagtggcgaacttgctggaacttctcgtgtttgtgggagctgmggtaggtaggtgaaagacctgtcgggtcacgcgccgctaccggaagcgtctcagcaggaggttcctacggcgcacgcccagcttttttttgccacaaatt

SEQ ID NO: 253042 - DNA, 201 bp, Homo sapiens
acaggcctcacctgcagcctggcacccaatatcatctcacagctctgaggccctgggccagattacttcctccacccctccctatctcacctgcccagccstgtgctggggccctgcaattggaatgttggccagatttctgcaataaacacttgtggtttgcggccatctccttggttatgaatggctgtttcgctgagc

SEQ ID NO: 253043 - DNA, 201 bp, Homo sapiens
ctcagcaggaggttcctacggcgcacgcccagcttttttttgccacaaattcttcgtaagatgcaaatcatatgcaaaatagctgcaatgcaggagctctygttgaatgcaaaataaacacattttactcctacacaggcgcctaacaccgtcgtcctctgtatcccactttcggttaaggggcagaaataccgccctatc

SEQ ID NO: 253044 - DNA, 201 bp, Homo sapiens
cccgcacatgcgagctcagcagattgtgggtaagcagtttcatgtcgccgcacaaactctcgccaggccggaaccggaaaaaggtcgtcctccgctgcctmacttccggggatgctccactcgatgctattggatagccaggagaaccggaagtggcgaacttgctggaacttctcgtgtttgtgggagctgaggtaggta

SEQ ID NO: 253045 - DNA, 201 bp, Homo sapiens
cttggcccttgccaattcaggtgagtctggggcaggcactgacaggtgaggtgtctccgtaaggtcttcaggttaactcagtgacggtagcacagccccaytttgcagataacgaaaactgaggcttagggaagaacaatgacttgctagaagtcaaaaagcaagccaagtgcaggctccaaactgcacacaggattttga

SEQ ID NO: 253046 - DNA, 201 bp, Homo sapiens; identical to SEQ ID NO: 50017

SEQ ID NO: 253047 - DNA, 201 bp, Homo sapiens; identical to SEQ ID NO: 50010

SEQ ID NO: 253048 - DNA, 201 bp, Homo sapiens
cacttgctgggcttggaagcctggccctaggcccgaggttgggcaacccgtgtggcagggtgtctcccatcccccataccagtgctttcctgcgaacctaygggtctctccgtgcaggtgaccagcgccatgtccagccaggtggtgggcattgagcctctctacatcaaggcagagccggccagccctgacagtccaaag

SEQ ID NO: 253049 - DNA, 201 bp, Homo sapiens
  misc_feature (1)...(201): n = A,T,C or G
tgaccgagagattgtggtcaccatcagctgggccaagagcatcccaggtaaagggcccaggtgacccggggctgccctgaacgggcccggctctggtgcgnttgctcagccaggcccgctccccgctgccccctaggcttctcatcgctgtcgctgtctgaccagatgtcagtactgcagagcgtgtggatggaggtgctg

SEQ ID NO: 253050 - DNA, 201 bp, Homo sapiens; identical to SEQ ID NO: 50013

SEQ ID NO: 253051 - DNA, 201 bp, Homo sapiens
gagtcagggctctcctgtcagctgggtcccctcccagccccgggaggccgccactggagccctgcctcttcctggcagggagcatcgagtacagctgtccrgcctccaacgagtgtgagatcaccaagcggagacgcaaggcctgccaggcctgccgcttcaccaagtgcctgcgggtgggcatgctcaaggagggtgagc

SEQ ID NO: 253052 - DNA, 201 bp, Homo sapiens
tgaaagagtccaaggcagcctctgtctgttcctaagctttgttcttgtttctggcagcttctgacctctccccagcatagaacatgtcccctttttgttawttttcccaaagcagcaccaacacaaggcagattttaatttttttttttttgagacagagtctcactctgttgttcaggctagagtgcagtggcacaatct

SEQ ID NO: 253053 - DNA, 201 bp, Homo sapiens
gtggaaccagatggcacaggcctcacctgcagcctggcacccaatatcatctcacagctctgaggccctgggccagattacttcctccacccctccctatytcacctgcccagccctgtgctggggccctgcaattggaatgttggccagatttctgcaataaacacttgtggtttgcggccatctccttggttatgaatg

SEQ ID NO: 253054 - DNA, 201 bp, Homo sapiens
gtccaaggcagcctctgtctgttcctaagctttgttcttgtttctggcagcttctgacctctccccagcatagaacatgtcccctttttgttaattttccmaaagcagcaccaacacaaggcagattttaatttttttttttttgagacagagtctcactctgttgttcaggctagagtgcagtggcacaatctctgctca

SEQ ID NO: 253055 - DNA, 201 bp, Homo sapiens
ggtatgggactagctggcgtgtgcgccctgagacgctcagcgggctatatactcgtcggtggggccggcggtcagtctgcggcagcggcagcaagacggtrcagtgaaggagagtgggcgtctggcggggtccgcagtttcagcagagccgctgcagccatggccccaatcaaggtgaccgctggcccggccgggcctgac

SEQ ID NO: 253056 - DNA, 201 bp, Homo sapiens
gccgccggcgggtacctggaggcgcagggggaagccacgggaccccaccccccgcacatgcgagctcagcagattgtgggtaagcagtttcatgtcgccgmacaaactctcgccaggccggaaccggaaaaaggtcgtcctccgctgcctcacttccggggatgctccactcgatgctattggatagccaggagaaccgga

SEQ ID NO: 253057 - DNA, 201 bp, Homo sapiens; identical to SEQ ID NO: 50050

SEQ ID NO: 253058 - DNA, 201 bp, Homo sapiens
cagtggtgtgatctcagctcactgcaagctccgtctcctgggttcatgccattctcctgcctcagcctcccgagtagctgggactacaggcgcccggctarttttttgtattttttttagtagagacggggtttcactgtgttagccaggatggtctctgtctcctgatctcgtgatccgcccatctcggcctcccaaagt

SEQ ID NO: 253059 - DNA, 201 bp, Homo sapiens
ctgaaggtctttgcaccaagctacatgttgtattttataatttgtctgtagtcgcatgtgtaatttaaaaacaaataataaggccgggcacggtggctcargcctgtaatcccagcacttttggaggccgaggcaagcagatcacttgagcccaggaatttgtgaccaacctgggcaacatggtgaaaccctgtctctatc

SEQ ID NO: 253060 - DNA, 201 bp, Homo sapiens
gggcagatgcggtggctcacacctgtattcccaacactttgggaggccaaggtgggaggatcacctgaggccaggagttggaaactagcctgggcaacatrgggagaccctgtctctactaaaaattaaaaaaaatattagctgggcttgtggtgcatgcctgtagtcctagctaatcagaggctgagacaggaggattgc

SEQ ID NO: 253061 - DNA, 201 bp, Homo sapiens
ggatcacctgaggtcaggagttcaagaccagcctgatcaatatggtgaaaccctatctctactaaaattacaaaattagctgggcgtggtggcacatgcckgtaatcccaactactgcggaggctgaggcaggagaatctcttgaacccaggaggcagatgttgcagtgagccgagaccacaccattgcactccagcctgg

SEQ ID NO: 253062 - DNA, 201 bp, Homo sapiens
aacttgttgccaccaaactctacgaggtacacagcagtacccccacttgcctcttggtttgcttcagacaaagtatgtctggaagctgtctgttctagaarctggtcctttttaggagcccatttatttgttagtcagttctccatctgtaagtgggaacccacccctaggccaggggtcagcaaaccctttctataaagg

SEQ ID NO: 253063 - DNA, 201 bp, Homo sapiens
ctcgaagttcccgaaaggcggaattgggatgtgctagatagagactaggcactggtggcacctgagtttggaaattgttgaagccccggtaacaaagcaasagatgtgggggttttgaaatgtagctttttattcttggctcctccctttccagcctacaccttaaacctctgctgatccatcagttattttatcatagct

SEQ ID NO: 253064 - DNA, 201 bp, Homo sapiens
tttgtaagtgctgtctggttttgtggccagagagtgattttcttcccacttggattagagtcttgcacataagcagagactcaaggccttgtttcccttgrtggtgagtcaggtagctccccggggatttcccacaaatagaagcattcacgtatcgagataaaaggacagcagcgacggtggggttttcagaatcttgtt

SEQ ID NO: 253065 - DNA, 201 bp, Homo sapiens; identical to SEQ ID NO: 50048

SEQ ID NO: 253066 - DNA, 201 bp, Homo sapiens
tgtttacaaccagaggattagaagacctcactgtcatctaagcagatcagcaatatccatgtgttcttagaggtataatttaccagtcagggagtggaaaygtgagaacttggcagttgagcctagaaaaatgggaatgtttgcacatcaccagactgttaattcattacttacccacctccatagacactggggaaaatt

SEQ ID NO: 253067 - DNA, 201 bp, Homo sapiens
atcttgctgcattaaagggcctgctgtaatggatggctcatggagcttcccagggaagagcttggagaagctggcaaaatgctgcctagtcattttttaakgcacactaataaagctgacagcagaaactggttttgtaatgtatgaaagtaacttctaaactattcacgtagaggtggcactggagattgagataattaa

SEQ ID NO: 253068 - DNA, 201 bp, Homo sapiens
acaaagaccatgtctttttcatctttgcgtctccttcagctcctagcccaacagctgacttctatgggtcacctaacaatgttaaacaagtgaataaacascaaacatctgccgtctaaatctgtctcctttcctttcttgcagaattgtctactgacaagtccatttgaagacattttcaagcagtgtctacgaacaatt

SEQ ID NO: 253069 - DNA, 201 bp, Homo sapiens
aggctgatcttgcactcctgacctcaggtgatccacccgccttggcctcccaaagtgtaggatgtcaagcatgtgccactgctctcggccttttcagctcyatcactttagaaaggtggtgatagaagctctgcagtcattcaaggtgagtggtcattggattttttttttcttttctttcttttttttttttttttaaga

SEQ ID NO: 253070 - DNA, 201 bp, Homo sapiens
ctgggattacaggcatgagccaccacccctggcctagaaaaatattaaaataccattaaggaatattcaaaactggttattatatcagggtagtagaatamgggattttttttttaatctattttccattgcagctggttttgatggttttgaatctgttctctggcattctgtcctgcagttgccaccagctgaccactc

SEQ ID NO: 253071 - DNA, 201 bp, Homo sapiens
tggcagttgagcctagaaaaatgggaatgtttgcacatcaccagactgttaattcattacttacccacctccatagacactggggaaaattgattaatttkaatttcattttattgttgtttctaccttgaaccatattgtgagtttttatatatgctcagcaagttttagcttatccacagttgcaggctcagatgatgt

SEQ ID NO: 253072 - DNA, 201 bp, Homo sapiens
agaagctgctgaagagcaatgtgaccaagcagtgagggcgccaccatcatgagttcgtaggttttttgtcacaagacccctggtctgagcccagtgagcgytggtcgtgctgtcgcctgagttctgcctacatgaagcatgttgtttaaagactaatgtttaacaggtatttttgaaggttgccttggaaaggaaaagatg

SEQ ID NO: 253073 - DNA, 201 bp, Homo sapiens
ttctcttctatacttagttccttttctcactcccttttgtataaactaatattccacgggaatcttcccaggatggttttgagaagtgtttgatgacttaygcagtgaaatcctgtgagaccccaaacatcttgttgtgtaagtgattgtattgggtaagcccaagttcctcccaagtcagtgcttccccagggtgcgtgg

SEQ ID NO: 253074 - DNA, 201 bp, Homo sapiens
tttttttttgacagtcttgttttatcacccaggctggagtgcagtggtgcaatctcggctcacttcagcctccgcctcccaggttcaagcgattctcctgyctcagcctcccaagtagctgggattacaggcgcccgccaccaggcccgactaatttttttttgtacttttagtagagaaggggtttcaccatgtaggcca

SEQ ID NO: 253075 - DNA, 201 bp, Homo sapiens
tcactctcagctgacaaatttctattatttgctgaaaaatgtagaagcattagaaaacttcgatcagctaccaccattatgtctcactgacccatatctgkggcatatacctagccttctttcctattataatgaataagctttccgtattcctagcaaaatccaagtcctccacttgagtcctaaaccccattccttctg

SEQ ID NO: 253076 - DNA, 201 bp, Homo sapiens
atttcaaggtggccaggtgtgatggctgacttctgtaacccagcactttgggaggccaaggtgagagaattgcttgagcccagtttaagtttagcctcccrgcacatagtgggtctgcatctctacaaaaaataaaaacaaaaaaaatcagcttggtgtggttgtgcacacctgtatagtccccactacttgcgaggctga

SEQ ID NO: 253077 - DNA, 201 bp, Homo sapiens
cccaagaagacatggccattgactatgagtcgttctatgtttacgcacagctgcctgtcaccccagatgtcctcatcatcccgtcagagctgaggtacttygtgaaggtaggtttgaactctgctttttcccagaaacaccagaacccagtctttgactttcccttctagaccacccggcactcacccctcatgggtcagc

SEQ ID NO: 253078 - DNA, 201 bp, Homo sapiens
gaatcgcttgaatcggggaggtggaggttgcaatgagccgagatcgtgccactgcattccagcctggcaacagagtgcaactctgtctccaaaaaaaaaagggggggggccttgccatctttaaatatttcctccttaaatccatttcagtaagttcttttgttgccaccacttcaccaaagctgctctactcaaggtcac

SEQ ID NO: 253079 - DNA, 201 bp, Homo sapiens
ggcaagcagatcacttgagcccaggaatttgtgaccaacctgggcaacatggtgaaaccctgtctctatcaaaagtacaaatttttttttttttttgagtkggagtttcgctctttttgcccaggctgaagtgcaatggtgcaatctcagctcactgcaacctctgcctcccaatctcaagtgattctcctgcctcagcct

SEQ ID NO: 253080 - DNA, 201 bp, Homo sapiens
accccatctcaataataataatagtaaaaattgcctaatattgagatttcttctagcaatcagcccttgccttatatgaaagtttattattattattattwttttttttttttgagatggagtctcgctgtgtcgcccatgctggagtgcagtggtgtgatctcagctcactgcaagctccgtctcctgggttcatgccat

SEQ ID NO: 253081 - DNA, 201 bp, Homo sapiens
caagaggcatccttcttgcttcctttttcacttcttgtctgtgttctagtttgaacatctgtcttggttgaatttgggaaaatgggcccttctgaagaaaratttgtaagtgctgtctggttttgtggccagagagtgattttcttcccacttggattagagtcttgcacataagcagagactcaaggccttgtttccctt

SEQ ID NO: 253082 - DNA, 201 bp, Homo sapiens
taaagctcaaaatactattattagtatggtgatcaatttaccttgctagatttagaaagtcagaaaacccagtgtgcatttttattgttcgtttgtttttkgtttttttttttttttttgggacagagtttcactctgtcacctaggctggagtgctgtggtgcgatctcggctcactatagcctccacctcctgggctca

SEQ ID NO: 253083 - DNA, 201 bp, Homo sapiens
tgccaggagtcattacctctactttggatcacttctagatgaaccagagcttaagattgttcaactctatcactttttttttttttttttttgagatggastctcactctgtcacccaggctggagtgcagtggcaccatcttggcttactgaagcctctgcctcccggttcaagcgattctcctgcctcagcttcccgag

SEQ ID NO: 253084 - DNA, 201 bp, Homo sapiens
aggctgccatgagccatgatcataccactactgcactccagcctaggagtgagagtgagatcctatctcaaaaaaaaaaaaaaaagaaaaagaaaaaaaaraaaatacaaatttatagggggcaagggtggcatgctggtattaggtcaacttcaggtaatgaaatcaacctggctgagataccaggagcctgagctgtgt

SEQ ID NO: 253085 - DNA, 201 bp, Homo sapiens
cgaggtcaggagatcgagaccatcctggttaacatggtgaaactctgtctctaccataaatacaaaaaaagaaattagccgggcgtggtggtgggcgcctrtagtcccagctacttgggaggctgaggcaggagaatggcgggaacctgggaggcagagcttgcagtgagccgagatcgcgctactgcactccagcctggg

SEQ ID NO: 253086 - DNA, 201 bp, Homo sapiens
agctgggcatggtggtggtgcctataatcccagccactcaggaggctgaggcaggagaatcgcttgaacccgggaggtggaagttgcagtgagccaagatyacaccactgccctccaggctggatgacagaaccagactccgtctgaaaaaaaaaaaaaaaaaaaagtttgtgactgtgaattccacgctaaatgagttgg

SEQ ID NO: 253087 - DNA, 201 bp, Homo sapiens
tgaggcaggagaatcgcttgaacccgggaggtggaagttgcagtgagccaagattacaccactgccctccaggctggatgacagaaccagactccgtctgaaaaaaaaaaaaaaaaaaaagtttgtgactgtgaattccacgctaaatgagttggagtgaaatgttgagcaaacaatatgtccaggctagagatacgtaaa

SEQ ID NO: 253088 - DNA, 201 bp, Homo sapiens
aatctcggctcacttcagcctccgcctcccaggttcaagcgattctcctgcctcagcctcccaagtagctgggattacaggcgcccgccaccaggcccgamtaatttttttttgtacttttagtagagaaggggtttcaccatgtaggccagactgctctcgaactcctgacctcaagtgatccacccaccttggccttcc

SEQ ID NO: 253089 - DNA, 201 bp, Homo sapiens; identical to SEQ ID NO: 50051

SEQ ID NO: 253090 - DNA, 201 bp, Homo sapiens
tcgcactccagcctgggcaacaagagcgaagtgaaattccgtctcggaaaaaaaaaaagggaaaaagattgggtcaggtgcagtagctcatgggtgtaatyccagcattttgggaggccgaggcaggtggatcaattgaggtcaggagtttgagaccagcctggccaacatgacaaaaccccatctctactaaagatacaa

SEQ ID NO: 253091 - DNA, 201 bp, Homo sapiens
attacagtcgattatcctagactttagggagcaataggtctctggactgtaggtttcagcctccgttctgggcttatctttggattcttgttgatgagtcaaaaaaaaaaaaaaaaaaaaggagtgaccatcagatgtttgctaactcttcaagtatgagctcaaccttgttatctgcctggagtcatttcctttgaaaat

SEQ ID NO: 253092 - DNA, 201 bp, Homo sapiens
ccttcctcacatcacaaataagattaattctaggtggattagcgaactaaaggcaaaacgtaagtaaaattaataaaacaaaaattggaagaatatttgcrtaagcttaggtcgaggagaccttattaaacaaagcaggaaacctaaaacccatacaggaaaagaattgcacagtgttgtgtggtagaaaaaaaaacccac

SEQ ID NO: 253093 - DNA, 201 bp, Homo sapiens
tgacaaactttgcttctaaatatttcaacataatttcagcacttcacagggctgaggtgggaagatcacttgagcccaggagtttgagaccagcctgggcmatatggcgaaaacctgtctctacaaaaaaaaaaaaaaaattagctcggcatggtggcatgtgcctgtggtcccagctgctcaggaggctgaggtgcgggg

SEQ ID NO: 253094 - DNA, 201 bp, Homo sapiens
cagtgagccatgattgtgccattgcactccagcctgggtgtcagagtgagaccctgtctcaaaaaaatatatgtatgtatttctgtatttcaaggcattgktttttttttcttttttttttttttagacagagtttcactcgttgcccaggttgtagtgcaaggcgccatctcggctcaccgcaacctccacctcccgggt

SEQ ID NO: 253095 - DNA, 201 bp, Homo sapiens
ggctgaggcaggagaatcgcttgaacctgggaggtagaagttgcagtgagccgagatcgccaatgaactccagcctggcgacagagctagactctgtctcaaaaaaaaaaattagctgggtgtgggcatggtggcatgtgcctatagtcccagcaacctggaaggctaaggtgggaggatcactctcctgagtccaggagt

SEQ ID NO: 253096 - DNA, 201 bp, Homo sapiens
gagtccaggagttcaaggctgccatgagccatgatcataccactactgcactccagcctaggagtgagagtgagatcctatctcaaaaaaaaaaaaaaaaraaaaagaaaaaaaagaaaatacaaatttatagggggcaagggtggcatgctggtattaggtcaacttcaggtaatgaaatcaacctggctgagataccag

SEQ ID NO: 253097 - DNA, 201 bp, Homo sapiens
gttttatcacccaggctggagtgcagtggtgcaatctcggctcacttcagcctccgcctcccaggttcaagcgattctcctgcctcagcctcccaagtagmtgggattacaggcgcccgccaccaggcccgactaatttttttttgtacttttagtagagaaggggtttcaccatgtaggccagactgctctcgaactcct

SEQ ID NO: 253098 - DNA, 201 bp, Homo sapiens
caccaccttgatccaagccaccatcatctctcacctgggcttttccatgattctttaattggtccccctgattctgcccttatcctcttttgtctcccctsagtggtgagctttgtaaggacaaggatgcttctgttttctcattgcccaaaacagtgcctggcactaatagattctgaataaacattgatggagtaaacc

SEQ ID NO: 253099 - DNA, 201 bp, Homo sapiens
gcattaaacaaagcctgttttaaatagacctctctgtacggcgtgtttacaaccagaggattagaagacctcactgtcatctaagcagatcagcaatatcyatgtgttcttagaggtataatttaccagtcagggagtggaaatgtgagaacttggcagttgagcctagaaaaatgggaatgtttgcacatcaccagactg

SEQ ID NO: 253100 - DNA, 201 bp, Homo sapiens
caatctgcctgccttagcctcccaaagtactgggattacaggcatgagccagcatgcctggcagtaattggattttgaaggacagttttactttagggtartctactgctgctttggggagttctcaggctttttggaagaaagctttctagacttaagagcatctttgcaacctggtatgtagggatggttcttatagac

SEQ ID NO: 253101 - DNA, 201 bp, Homo sapiens
ccaccaccttgatccaagccaccatcatctctcacctgggcttttccatgattctttaattggtccccctgattctgcccttatcctcttttgtctccccycagtggtgagctttgtaaggacaaggatgcttctgttttctcattgcccaaaacagtgcctggcactaatagattctgaataaacattgatggagtaaac

SEQ ID NO: 253102 - DNA, 201 bp, Homo sapiens
actccatctctactcaaaaaattagctgggcatggtggtggtgcctataatcccagccactcaggaggctgaggcaggagaatcgcttgaacccgggaggyggaagttgcagtgagccaagattacaccactgccctccaggctggatgacagaaccagactccgtctgaaaaaaaaaaaaaaaaaaaagtttgtgactgt

SEQ ID NO: 253103 - DNA, 201 bp, Homo sapiens
aggagttcaaggctgccatgagccatgatcataccactactgcactccagcctaggagtgagagtgagatcctatctcaaaaaaaaaaaaaaaagaaaaaraaaaaaaagaaaatacaaatttatagggggcaagggtggcatgctggtattaggtcaacttcaggtaatgaaatcaacctggctgagataccaggagcct

SEQ ID NO: 253104 - DNA, 201 bp, Homo sapiens
aagctcaaaatactattattagtatggtgatcaatttaccttgctagatttagaaagtcagaaaacccagtgtgcatttttattgttcgtttgttttttgtttttttttttttttttgggacagagtttcactctgtcacctaggctggagtgctgtggtgcgatctcggctcactatagcctccacctcctgggctcaag

SEQ ID NO: 253105 - DNA, 201 bp, Homo sapiens
gaaccagactccgtctgaaaaaaaaaaaaaaaaaaaagtttgtgactgtgaattccacgctaaatgagttggagtgaaatgttgagcaaacaatatgtccrggctagagatacgtaaaatgcttagaacagtacttatcacatggaaattgttcagtcactgttaggccatgcatcaatggcagcatgataaaatagtcaa

SEQ ID NO: 253106 - DNA, 201 bp, Homo sapiens
ccatctcaaaaaaaaaaaaaaaaaaaagctgggcgtggtggctcacgcactttgggaggccaaagcaggcggatcacctgaggtcaggagttcaagaccakcctgatcaatatggtgaaaccctatctctactaaaattacaaaattagctgggcgtggtggcacatgcctgtaatcccaactactgcggaggctgaggca

SEQ ID NO: 253107 - DNA, 201 bp, Homo sapiens
aaaaaaaaaaaaaaaaagctgggcgtggtggctcacgcactttgggaggccaaagcaggcggatcacctgaggtcaggagttcaagaccagcctgatcaayatggtgaaaccctatctctactaaaattacaaaattagctgggcgtggtggcacatgcctgtaatcccaactactgcggaggctgaggcaggagaatctc

SEQ ID NO: 253108 - DNA, 201 bp, Homo sapiens
gtggctcacgcactttgggaggccaaagcaggcggatcacctgaggtcaggagttcaagaccagcctgatcaatatggtgaaaccctatctctactaaaawtacaaaattagctgggcgtggtggcacatgcctgtaatcccaactactgcggaggctgaggcaggagaatctcttgaacccaggaggcagatgttgcagt

SEQ ID NO: 253109 - DNA, 201 bp, Homo sapiens
cttggaaccaagatgagagcccaggaactctagcatccaggtagcaggaattccccagctgtctcatctgggcacctcagctggaataggttagctctaaycttttttctctccttggatcgttcacctcaagattgcagaccctgggaggagagtgtgaatggccttgtgccattctgggtcatgtgcctgcccttggct

SEQ ID NO: 253110 - DNA, 201 bp, Homo sapiens
cacctgaggtcaggagttcaagaccagcctgatcaatatggtgaaaccctatctctactaaaattacaaaattagctgggcgtggtggcacatgcctgtartcccaactactgcggaggctgaggcaggagaatctcttgaacccaggaggcagatgttgcagtgagccgagaccacaccattgcactccagcctgggcaa

SEQ ID NO: 253111 - DNA, 201 bp, Homo sapiens; identical to SEQ ID NO: 50049

SEQ ID NO: 253112 - DNA, 201 bp, Homo sapiens
aggtcaggagttcaagaccagcctgatcaatatggtgaaaccctatctctactaaaattacaaaattagctgggcgtggtggcacatgcctgtaatcccarctactgcggaggctgaggcaggagaatctcttgaacccaggaggcagatgttgcagtgagccgagaccacaccattgcactccagcctgggcaacaagaa

SEQ ID NO: 253113 - DNA, 201 bp, Homo sapiens
atatggtgaaaccctatctctactaaaattacaaaattagctgggcgtggtggcacatgcctgtaatcccaactactgcggaggctgaggcaggagaatcwcttgaacccaggaggcagatgttgcagtgagccgagaccacaccattgcactccagcctgggcaacaagaacaaaactccttttccaaaaaaaaatcatg

SEQ ID NO: 253114 - DNA, 201 bp, Homo sapiens
caggctaagcacggggctcacgcctataatcccagcactttaggagactgaggcgggcagatcacttgaggtcaggaattcaagaccaacctggccaacayggcgaaaccccatctctactaaaaatacaaaaattagccagatgtggtggtgggtgcttgtagtctcagctactcgggaggctgaggcagaattgcttga

SEQ ID NO: 253115 - DNA, 201 bp, Homo sapiens
atccttttctgctgaaggtctttgcaccaagctacatgttgtattttataatttgtctgtagtcgcatgtgtaatttaaaaacaaataataaggccgggcrcggtggctcaggcctgtaatcccagcacttttggaggccgaggcaagcagatcacttgagcccaggaatttgtgaccaacctgggcaacatggtgaaacc

SEQ ID NO: 253116 - DNA, 201 bp, Homo sapiens
gtctttgtttctccccttgcagtttggccctttcctggatgctaagcatgaacaggtggaggtgagtgggctggggtgggaaggggtcctgggtacttgartccagtcaggctctcacttttcattttttagtgtttatcccacatctgtaacaaacacattaagtcctgtggctaatcagaaaatcattttagcagagca

SEQ ID NO: 253117 - DNA, 201 bp, Homo sapiens
ttcgtgaaggtaggtttgaactctgctttttcccagaaacaccagaacccagtctttgactttcccttctagaccacccggcactcacccctcatgggtcwgctgatggggatggggcctctagcaccctgccctgtggccttgtttctttggggaggtggtgggaccagaaaacaaacaactctgtcagtaaaatgcttg

SEQ ID NO: 253118 - DNA, 201 bp, Homo sapiens
ggctctgaattcctccatcctgccccgcctcttcccggggctctaggctcctccccacccagagcctgcctgacagctgaggccctgcagctgcccaggcmaaggggcccctgggaggtctcagggacagctgctgcccataaccttgctgaccctggcccctgcacactgctccctgagatcccaggcttctgcccagca

SEQ ID NO: 253119 - DNA, 201 bp, Homo sapiens
tattggtggattttaaacatgcccgcaaagtaataccttatgcctatttgatttataaacggcccctctgccaaggtcatcttaagggaaccaaggaaacrgggctttcttcctcttttgtgtggctgggaaaaataaatagttggcccccagagttacaactttcttcttcacttgtatgttgtaaccctagagattctc

SEQ ID NO: 253120 - DNA, 201 bp, Homo sapiens
acctcagctggaataggttagctctaatcttttttctctccttggatcgttcacctcaagattgcagaccctgggaggagagtgtgaatggccttgtgccrttctgggtcatgtgcctgcccttggctagaggaagacagagcacccaatttacagccccatgtagactgccttgtggagggatgggctgattctccaaaa

SEQ ID NO: 253121 - DNA, 201 bp, Homo sapiens; identical to SEQ ID NO: 50046

SEQ ID NO: 253122 - DNA, 201 bp, Homo sapiens
ggcgcccggctaattttttgtattttttttagtagagacggggtttcactgtgttagccaggatggtctctgtctcctgatctcgtgatccgcccatctcrgcctcccaaagtgctgggattacaggcatgagctaccgtgcccagccattattgtttttcttaaccagtgttcttagaattgaagtggaagaagaagagg

SEQ ID NO: 253123 - DNA, 201 bp, Homo sapiens; identical to SEQ ID NO: 50047

SEQ ID NO: 253124 - DNA, 201 bp, Homo sapiens
agccaagaaaatcaaggggctgcttaacggtcttgaccagagagagctgaaagcagcaagctgtgccagaccctctagccatctgagtttctctgtacccmaggggaggggttggatgcattagtttctgttaccacctctctaaactgcgtttgagaccccaaagaaccacgtccattctgtctttgcacttaaaggcat

SEQ ID NO: 253125 - DNA, 201 bp, Homo sapiens
tttttttaatctattttccattgcagctggttttgatggttttgaatctgttctctggcattctgtcctgcagttgccaccagctgaccactctgcaatayaacttcttaaacttgcagccaggaggagccctagggcagggaaagctgcagactagctggcttcctggctgctatccaggcaaggattttgttttctcta

SEQ ID NO: 253126 - DNA, 201 bp, Homo sapiens
ttagccgggcgtggcagcgggcgcctgtaatcccagctactcgggaggctgaggcaggagaattgcttgaacagaggcggaggttgcagtgagctgagatygtgccactgcactccagcctgggcaatcagagcaaaactccatctcaaaaaaaaaaaagaaaagatgaaactagccaggcgcagtggcttatgcctgtaa

SEQ ID NO: 253127 - DNA, 201 bp, Homo sapiens
aaaaaaaaaaaaaaaaaggagtgaccatcagatgtttgctaactcttcaagtatgagctcaaccttgttatctgcctggagtcatttcctttgaaaatgtrtggtagactttgccaaagtaagtagtaatgtcccattccttctcaggaaaatgtgtacacatagatcaaaactatgcattgtaaaactcatatctgtttg

SEQ ID NO: 253128 - DNA, 201 bp, Homo sapiens
ccaaaaatgtgccccatgaagttgctaacacaaaaccaggtgcatataatattaaaagaaataattaggtgtttgttagagtttcttaaaattggagagastataactcatttgattttcctcctaaagtggttttctgagtccatatcccagtgaaggacacctccgttcttccattgactcaggccaagaaccttggag

SEQ ID NO: 253129 - DNA, 201 bp, Homo sapiens
ggagttgcagtgagctgaggttgcagtgagccgagatcgcacatcgcactccagcctgggcaacaagagcgaagtgaaattccgtctcggaaaaaaaaaargggaaaaagattgggtcaggtgcagtagctcatgggtgtaattccagcattttgggaggccgaggcaggtggatcaattgaggtcaggagtttgagacca

SEQ ID NO: 253130 - DNA, 201 bp, Homo sapiens
caccatccctggccaaattcataaaatctttttctatcatttgacccagtaattctccctagggggaaaaaaaaaactcttctgaagaaataattcaaatyatgggaaaagctgtatgcatgaagatacgcattttagcatttttttaatttaaaatcttaatttgccaaatcacttttcacctgagactcagcattactt

SEQ ID NO: 253131 - DNA, 201 bp, Homo sapiens; identical to SEQ ID NO: 50052

SEQ ID NO: 253132 - DNA, 201 bp, Homo sapiens
agtgggtgcagatggagccctccgtgggctccttcaggtaccaggagccctgcctgagattcaggacacatccaagggtgacagcttgaggttgggttttwatttttttatttgtatagtacaatctctgtggtagcagaaatatatgcacaaaaaacaattcaaataagagttcagagtaaaaaaaagtcagctaagact

SEQ ID NO: 253133 - DNA, 201 bp, Homo sapiens; identical to SEQ ID NO: 50055

SEQ ID NO: 253134 - DNA, 201 bp, Homo sapiens
gactgcccctcctgccacctctattttatagatgaggaaaccgaggcccaagggcttagggaaccctgctctgaagcacacagtagggctgctgggctcaratcctccctccctgtgctgagctgccctcctcctgccacaatccccccacgacccgagcccacccttctcaccggcctctgccctagttccccgcatggt

SEQ ID NO: 253135 - DNA, 201 bp, Homo sapiens
aaagggcctctgagggagtattacagtcgcctcatccaccagaagcatttccagcacatccaggtctgcaccccttggctggagggccgaggactacccccgcttctaggtgagaggccagcaggaggctcagggaggaggtggggccttaagcagggggagcaggggtgggcaggatgtactttttctgaaaaggtggct

SEQ ID NO: 253136 - DNA, 201 bp, Homo sapiens
catgttcctaacactttgattcctgtcttgaaaaaagcacctgctgcatcataaacccagggatgtggcagctgcagccggcttggctttttgaggaaccragtgtgtccagggatgtggcagctgcagcgggcttggctttgtgaggaaacgagtgtgtccagggatgtggcagctgcagcgggcttggctttgtgagga

SEQ ID NO: 253137 - DNA, 201 bp, Homo sapiens
cagtgtgtgctcttctctgtgaaggcaaagggcctctgagggagtattacagtcgcctcatccaccagaagcatttccagcacatccaggtctgcaccccytggctggagggccgaggactacccccgcttctaggtgagaggccagcaggaggctcagggaggaggtggggccttaagcagggggagcaggggtgggcag

SEQ ID NO: 253138 - DNA, 201 bp, Homo sapiens
aaatttaaatacctttgagacaaacgtgaattgtgatgggatttaaaaatgtcagtgaaaaatggaattaacaataaaaatataaatataaactttatttytcaatttaagctctactgaggtccagacactccattaagcgatgatcccagccattcattccattgctaaagaactgagggtaatgggaatttaaccgtg

SEQ ID NO: 253139 - DNA, 201 bp, Homo sapiens
attgaagtttaaagtcactttcctgcgtggatggtgaagaggcaggctgttcaggcataactgccctcaggcctggagggctgtggaggtcaccgttggcrgtgggtggatctggaacctctgtggctctagactttcaactatttcattttttcttttgtagtttttgtttgttgcttgcttttttacaatgggaactag

SEQ ID NO: 253140 - DNA, 201 bp, Homo sapiens
tcattacctcaggtttattgttattgccattaacagtgttggtggcattatcactaagatcatcattgttgttattattgtcatttatgattattagcagrtgtgttcattttgtcttactatgcatttttttttgggggggggattggttttgtatgacgttgaattgagcttctttaatcttgaccagtgtcagatttc

SEQ ID NO: 253141 - DNA, 201 bp, Homo sapiens
ccattaacagtgttggtggcattatcactaagatcatcattgttgttattattgtcatttatgattattagcaggtgtgttcattttgtcttactatgcayttttttttgggggggggattggttttgtatgacgttgaattgagcttctttaatcttgaccagtgtcagatttctgaagagcattccggaggacaactcc

SEQ ID NO: 253142 - DNA, 201 bp, Homo sapiens
actatccttgatgttccaagaggggtgagaatccatctcctgagtaaaaacttcacatggggtgaggaggggagaagagaacagaaaggaagcagggaagrccaagacagccaccagccttacagcaattttaaccagaaatggacacagaccctggaccccatcacaggagtgcaggcctaggactgtctccaggtgatg

SEQ ID NO: 253143 - DNA, 201 bp, Homo sapiens
cattaacagtgttggtggcattatcactaagatcatcattgttgttattattgtcatttatgattattagcaggtgtgttcattttgtcttactatgcatwtttttttgggggggggattggttttgtatgacgttgaattgagcttctttaatcttgaccagtgtcagatttctgaagagcattccggaggacaactcct

SEQ ID NO: 253144 - DNA, 201 bp, Homo sapiens
aacagtgttggtggcattatcactaagatcatcattgttgttattattgtcatttatgattattagcaggtgtgttcattttgtcttactatgcatttttwtttgggggggggattggttttgtatgacgttgaattgagcttctttaatcttgaccagtgtcagatttctgaagagcattccggaggacaactcctacct

SEQ ID NO: 253145 - DNA, 201 bp, Homo sapiens
ttaacagtgttggtggcattatcactaagatcatcattgttgttattattgtcatttatgattattagcaggtgtgttcattttgtcttactatgcatttwtttttgggggggggattggttttgtatgacgttgaattgagcttctttaatcttgaccagtgtcagatttctgaagagcattccggaggacaactcctac

SEQ ID NO: 253146 - DNA, 201 bp, Homo sapiens
aaagggccgtggctgcccttcctgggacttcctgggaacctttaaagcttctgtggtttctggagtaggtaggttgccaagtctgtgcctcatatggtagyaccagtctttgctgggccaacaaggacatttagaatgtttccagaagctcaggcatgctgtttctgttcctcccttctgttcaatggcaattcactgggt

SEQ ID NO: 253147 - DNA, 201 bp, Homo sapiens
tcaaagaggccattcactggtatttcatgactgcaggtggggtttctggatccttgagtttacttagcatatttgaatggctctgaatggccaagaaaccytccctggtcttagaagctgccaaaagctattactgggcctctgaagagacttttaaatttttccaagtacatttgagcataggaaacttttccaggtcta

SEQ ID NO: 253148 - DNA, 201 bp, Homo sapiens; identical to SEQ ID NO: 50057

SEQ ID NO: 253149 - DNA, 201 bp, Homo sapiens
aatgaaacccatctttccggccatgcagggcgcatgagcagtctgcctccctcggcgggccgggtctccagggaggacctgatttttcttcacccatagtyagggaggcgcaatcgccctggctttggggctggggcctccggggaggttccggtaggggcgttggagaggccgctctttttgcaaggcccgagacggcgg

SEQ ID NO: 253150 - DNA, 201 bp, Homo sapiens
tcttagaagctgccaaaagctattactgggcctctgaagagacttttaaatttttccaagtacatttgagcataggaaacttttccaggtctagttgagcyagctcaggtcgagtcctgaaaaactagtgggtattgggggatcctatcttacgaaagagcaattggtggcaaagctgtgtctccaggacagctgtgtgtg

SEQ ID NO: 253151 - DNA, 201 bp, Homo sapiens
tttttttgggggggggattggttttgtatgacgttgaattgagcttctttaatcttgaccagtgtcagatttctgaagagcattccggaggacaactcctrcctttcagcgcagccacagaatttcgtgggcacaggagagcacttagaatattcccctttcattgcacagcagctttgggaaatagtggctgcctggctc

SEQ ID NO: 253152 - DNA, 201 bp, Homo sapiens
ttctgccatgttcctaacactttgattcctgtcttgaaaaaagcacctgctgcatcataaacccagggatgtggcagctgcagccggcttggctttttgargaaccgagtgtgtccagggatgtggcagctgcagcgggcttggctttgtgaggaaacgagtgtgtccagggatgtggcagctgcagcgggcttggctttg

SEQ ID NO: 253153 - DNA, 201 bp, Homo sapiens
acctttctgccatgttcctaacactttgattcctgtcttgaaaaaagcacctgctgcatcataaacccagggatgtggcagctgcagccggcttggctttktgaggaaccgagtgtgtccagggatgtggcagctgcagcgggcttggctttgtgaggaaacgagtgtgtccagggatgtggcagctgcagcgggcttggc

SEQ ID NO: 253154 - DNA, 201 bp, Homo sapiens
tttcaaaatcacctcaggagccacagaaccacttcatcctacctgaaattgcaggatgacttcttttgaccagaatctcaaaaatatattcgttgatagtwttgattcctgggagccgccattgcttgcaaaagatgtgccagagactagacattttctgtctcctcacttgtctggggaagactgaagttttacagaaac

SEQ ID NO: 253155 - DNA, 201 bp, Homo sapiens
tggggcctgactggagctgccaaggggtggagcttctgggaaaaggatccctcctaggggggagtgtcttgagcctggggtcatgtggcagggacagagaygggtccatggcagtgtgtgctcttctctgtgaaggcaaagggcctctgagggagtattacagtcgcctcatccaccagaagcatttccagcacatccagg

SEQ ID NO: 253156 - DNA, 201 bp, Homo sapiens
tctcaagtccaagtgagggagttagggacttgggaggggttgttgttgggtcggggacctgggttcagccaggtggtgacctgggatggggtggggacagrcaatgaagtaagctctgctctttagtattttgcagatgcttttctcaaactttcctgatcctgcaggcaagctaaaccagttctggaagaacctgcggga

SEQ ID NO: 253157 - DNA, 201 bp, Homo sapiens
gtctccaggtgtcacctttctgccatgttcctaacactttgattcctgtcttgaaaaaagcacctgctgcatcataaacccagggatgtggcagctgcagycggcttggctttttgaggaaccgagtgtgtccagggatgtggcagctgcagcgggcttggctttgtgaggaaacgagtgtgtccagggatgtggcagctg

SEQ ID NO: 253158 - DNA, 201 bp, Homo sapiens
gtttccagaaagcatgatgtcaagttggaggcggagcgctgctgggttgtgaagggtctcaagtccaagtgagggagttagggacttgggaggggttgttkttgggtcggggacctgggttcagccaggtggtgacctgggatggggtggggacaggcaatgaagtaagctctgctctttagtattttgcagatgcttttc

SEQ ID NO: 253159 - DNA, 201 bp, Homo sapiens
gggaagggtatctgggctgtgagggggaggagggtgtccttctcataccagcaaatagctccggtggccctgggtggactccttggccatcagggtctccrccagcacctcgtacagctcatccaaaggctctgtgtggacagcctcgtgctgggggcagacagagtgagagcttgtttgctttcgttctaatctgtaaaa

SEQ ID NO: 253160 - DNA, 201 bp, Homo sapiens
ttgttccaataaagctttatttacaaacacaggctgtgggctggatttggcctgcaggctgtagtttgtgatccttgattcagacagtttagcaaggctgmaaagaacacccacacccccttgttacccacagatgggtgggactgtgttggccagaggctgagaggagggtgctcacaggggaacgtacagcatgtagag

SEQ ID NO: 253161 - DNA, 201 bp, Homo sapiens
cagcacagaaggtacaaaccttccttaaggctccctcctcaaatcggtttggccattttgatgtgcacccccaggcctttatacccttcagatgccaaatmtaagaaccagctcccagaaaccacacatcctgttccaacccccagcctggcttgagcgtgggtgggtgggagacaagctggacaccccaggggtctggtg

SEQ ID NO: 253162 - DNA, 201 bp, Homo sapiens
gtttttctctcccaccatgtcctttttggccaagctcacatggtgggtttgaatcagttaaatgaatgtcatgctgtggcctcactccacccagcatagaygggtgtttggaagggtggcgttagaggagattctagaagcagtagccccagcacaagttgagcccttggcccctgctcaggagccggctcctggatggga

SEQ ID NO: 253163 - DNA, 201 bp, Homo sapiens
cctgcggttactgtggctgggctgagactcactgaagtagtcgcttccatttagagctcatgttatatttaggttggtacaaaagtaatcacggtttttgycattaaaaatgcaataacttttgcaccagcctaatgtgaaaaaagaaagcaccttaaatactagaactccactcagggcttttgctcctagagtagaatt

SEQ ID NO: 253164 - DNA, 201 bp, Homo sapiens
cacagtgaggccctgcccctcggtcagtccagcacacactggaggccatgaggaggagccctgcggttactgtggctgggctgagactcactgaagtagtygcttccatttagagctcatgttatatttaggttggtacaaaagtaatcacggtttttgccattaaaaatgcaataacttttgcaccagcctaatgtgaaa

SEQ ID NO: 253165 - DNA, 201 bp, Homo sapiens
tgagattgtgccactgcactccagcctgggtgacagagtgagactctgtctcaaaacaaaacaaaacaaaacaaaacaaaacaaaacaaaacaacgacaamaaaaaacaaattgtggttatgtagaaaatgtgtcaacttacattttcagatgtcccagccaggccgtgtggctgcgtggccagcttaagccacttgtgct

SEQ ID NO: 253166 - DNA, 201 bp, Homo sapiens
tcgggaccctaacactcattacctcaggtttattgttattgccattaacagtgttggtggcattatcactaagatcatcattgttgttattattgtcattyatgattattagcaggtgtgttcattttgtcttactatgcatttttttttgggggggggattggttttgtatgacgttgaattgagcttctttaatcttga

SEQ ID NO: 253167 - DNA, 201 bp, Homo sapiens
tgcatttttttttgggggggggattggttttgtatgacgttgaattgagcttctttaatcttgaccagtgtcagatttctgaagagcattccggaggacawctcctacctttcagcgcagccacagaatttcgtgggcacaggagagcacttagaatattcccctttcattgcacagcagctttgggaaatagtggctgcc

SEQ ID NO: 253168 - DNA, 201 bp, Homo sapiens
gagatacattttctgagatattccaaggaggagggacacaactggaccagatgttagaaggacagctgagcattaagtgcctatgtagtgtttgcagcttrgtgtcccatgcagaaggggaatctgggccctggtgttagaattcagtgtaattctgggttcctgctttccttccaggaaatcccacttccaactggatgt

SEQ ID NO: 253169 - DNA, 201 bp, Homo sapiens
ttgcaccccctgatggtctggaatcacataggatgatgctttcaaacaactgtaggtggagatacattttctgagatattccaaggaggagggacacaacyggaccagatgttagaaggacagctgagcattaagtgcctatgtagtgtttgcagcttagtgtcccatgcagaaggggaatctgggccctggtgttagaat

SEQ ID NO: 253170 - DNA, 201 bp, Homo sapiens
attcctgatgtttccaggacagattggactgcttaggcctttgggaatattctaagtcctctcaggtttccatgggaggctgtaactctactcctagaacwcacaccacccccgagcaagctcattgttttctaaatattccaaggaagcccatccagggtatgcctgtattggtgagtttcactttggactggcaggaga

SEQ ID NO: 253171 - DNA, 201 bp, Homo sapiens
ttgcctgacacacgtcgtacaaaagccttcagtagttcacctcaagaaatagggtgtccaggctgtaaatgagaggcactgggcagacagatccacacccrcctcctgagtctcagaagtctggtgtgcatcgaacattaagcccctagcctactgagacttcacctcccagctggtcttctaccatctgattcttgagcc

SEQ ID NO: 253172 - DNA, 201 bp, Homo sapiens
cagtgttggtggcattatcactaagatcatcattgttgttattattgtcatttatgattattagcaggtgtgttcattttgtcttactatgcatttttttwtgggggggggattggttttgtatgacgttgaattgagcttctttaatcttgaccagtgtcagatttctgaagagcattccggaggacaactcctaccttt

SEQ ID NO: 253173 - DNA, 201 bp, Homo sapiens; identical to SEQ ID NO: 50056

SEQ ID NO: 253174 - DNA, 201 bp, Homo sapiens
gtggaaatacattacaaatggactatggcaaagggtctggccagagtcttgcctgacacacgtcgtacaaaagccttcagtagttcacctcaagaaatagsgtgtccaggctgtaaatgagaggcactgggcagacagatccacacccacctcctgagtctcagaagtctggtgtgcatcgaacattaagcccctagccta

SEQ ID NO: 253175 - DNA, 201 bp, Homo sapiens
ttggtggcattatcactaagatcatcattgttgttattattgtcatttatgattattagcaggtgtgttcattttgtcttactatgcatttttttttgggkgggggattggttttgtatgacgttgaattgagcttctttaatcttgaccagtgtcagatttctgaagagcattccggaggacaactcctacctttcagcg

SEQ ID NO: 253176 - DNA, 201 bp, Homo sapiens
ttgttattgccattaacagtgttggtggcattatcactaagatcatcattgttgttattattgtcatttatgattattagcaggtgtgttcattttgtctyactatgcatttttttttgggggggggattggttttgtatgacgttgaattgagcttctttaatcttgaccagtgtcagatttctgaagagcattccggag

SEQ ID NO: 253177 - DNA, 201 bp, Homo sapiens
tggtggcattatcactaagatcatcattgttgttattattgtcatttatgattattagcaggtgtgttcattttgtcttactatgcatttttttttggggkggggattggttttgtatgacgttgaattgagcttctttaatcttgaccagtgtcagatttctgaagagcattccggaggacaactcctacctttcagcgc

SEQ ID NO: 253178 - DNA, 201 bp, Homo sapiens
gtgttggtggcattatcactaagatcatcattgttgttattattgtcatttatgattattagcaggtgtgttcattttgtcttactatgcatttttttttkggggggggattggttttgtatgacgttgaattgagcttctttaatcttgaccagtgtcagatttctgaagagcattccggaggacaactcctacctttca

SEQ ID NO: 253179 - DNA, 201 bp, Homo sapiens
caggtaaaagtttcttggccacaaacctgatttagcaatatcccttcatcttaggtgggtaacagaaagctattcatgacctatccaagcatggagagggkatttgacttagaaaactgttaggtggactagttgctgaaagaaagtgcattctagggctcacaggcctacacatagagttgctatcacataaagcatatg

SEQ ID NO: 253180 - DNA, 201 bp, Homo sapiens
ggtggcattatcactaagatcatcattgttgttattattgtcatttatgattattagcaggtgtgttcattttgtcttactatgcatttttttttgggggkgggattggttttgtatgacgttgaattgagcttctttaatcttgaccagtgtcagatttctgaagagcattccggaggacaactcctacctttcagcgca

SEQ ID NO: 253181 - DNA, 201 bp, Homo sapiens
tgttggtggcattatcactaagatcatcattgttgttattattgtcatttatgattattagcaggtgtgttcattttgtcttactatgcatttttttttgkgggggggattggttttgtatgacgttgaattgagcttctttaatcttgaccagtgtcagatttctgaagagcattccggaggacaactcctacctttcag

SEQ ID NO: 253182 - DNA, 201 bp, Homo sapiens
gtgacactggactccagcctgagcgacggagcgagactctatctcaaaaataaaataaaaataaaaataaaataaataaataaataaataaataaataaataaataaataaataaaaaggaagacaaaagaaagtgttgcagacactggtgaacaggtaggccctctcctgccactccaggtaaaagtttcttggccacaa

SEQ ID NO: 253183 - DNA, 201 bp, Homo sapiens
tctgcagtactccttaccctgcatttggtctccaggtgtcacctttctgccatgttcctaacactttgattcctgtcttgaaaaaagcacctgctgcatcrtaaacccagggatgtggcagctgcagccggcttggctttttgaggaaccgagtgtgtccagggatgtggcagctgcagcgggcttggctttgtgaggaaa

SEQ ID NO: 253184 - DNA, 201 bp, Homo sapiens
cttttagtcatctttggtaactgaacaccatttgtgaatggataaactatattcattgctgtacaataatgaaaaatccatattaacaatggcagtaatamaaatattgatggatattaacaggaataatgatcatcatgatactagtactaatggttttaatactgataataatactaaccctatgggcttgggacatat

SEQ ID NO: 253185 - DNA, 201 bp, Homo sapiens
tcagtcactcttcctggtctggaaatgccagaaatgtcctccttggtccttctgagagtcaagatcttttcaaaatcacctcaggagccacagaaccactycatcctacctgaaattgcaggatgacttcttttgaccagaatctcaaaaatatattcgttgatagttttgattcctgggagccgccattgcttgcaaaag

SEQ ID NO: 253186 - DNA, 201 bp, Homo sapiens
tttaaatttttccaagtacatttgagcataggaaacttttccaggtctagttgagctagctcaggtcgagtcctgaaaaactagtgggtattgggggatcytatcttacgaaagagcaattggtggcaaagctgtgtctccaggacagctgtgtgtgtatatgtctgtagaacatgccttttagtcatctttggtaactga

SEQ ID NO: 253187 - DNA, 201 bp, Homo sapiens
tggctgcctggctctgagatgaggtagaaaagactggatactggggcaagtgttagcacctccactggtgtttttatgaagctaagcgcactgtctcccamgtagacttagaataaaatctgatggctctaaagggccgtggctgcccttcctgggacttcctgggaacctttaaagcttctgtggtttctggagtaggta

SEQ ID NO: 253188 - DNA, 201 bp, Homo sapiens
acatggctgaataaaccatgacaggacaaatcgccactcagcaatgagaagcagctaactgttgacatgccaacagcttgcacaggcctcaagggtgtcaygtggcatgaaagacactcatctcaggccacacaggattccattcattgaacattcctgagacaatggaattctggcgatggagcacaggtcagttgtggc

SEQ ID NO: 253189 - DNA, 201 bp, Homo sapiens
ggagctgagattgtgccactgcactccagcctgggtgacagagtgagactctgtctcaaaacaaaacaaaacaaaacaaaacaaaacaaaacaaaacaacracaacaaaaaacaaattgtggttatgtagaaaatgtgtcaacttacattttcagatgtcccagccaggccgtgtggctgcgtggccagcttaagccactt

SEQ ID NO: 253190 - DNA, 201 bp, Homo sapiens
agggagctgagattgtgccactgcactccagcctgggtgacagagtgagactctgtctcaaaacaaaacaaaacaaaacaaaacaaaacaaaacaaaacaacgacaacaaaaaacaaattgtggttatgtagaaaatgtgtcaacttacattttcagatgtcccagccaggccgtgtggctgcgtggccagcttaagccac

SEQ ID NO: 253191 - DNA, 201 bp, Homo sapiens
ttagtagagatgcggtttcaccatgttggccaggctggtcttgaactcctgacctcaggtgatccacccgccttggcctcccaaaatgctgggattacagrcaggaggtaaacctgggaggtggaggttgcagggagctgagattgtgccactgcactccagcctgggtgacagagtgagactctgtctcaaaacaaaaca

SEQ ID NO: 253192 - DNA, 201 bp, Homo sapiens
ctccgcaggaccccgaccagcgacacgatggcttctgggcaatacagcacgtctacggtgaaagcttcaggttactgaaagggaccagcggacagttccakgtcatgctgacctcagcagaagggcgaggccagagaggcagcggtcatatgagactagtagatgccatttgatcatttgggccattagatggaaaggcaa

SEQ ID NO: 253193 - DNA, 201 bp, Homo sapiens
gtgggcaggatgtactttttctgaaaaggtggctctggaggccacttggggacaggacctgggctctggctcaactcccgggaggaggccacttcctggtstgccagcccctcttagccaggtggccccagaggccctttaccaatgggtttgaggaggccacgtcctttcatcctgccacgccctccattcagtcctctt

SEQ ID NO: 253194 - DNA, 201 bp, Homo sapiens
tggggcaggtggttgtaaagccctgagcactgagaatccgtggaagaggaggagggggatggaacttgcttcaccctggggaacatcctttctgaatgttyggtggcttctccagccttggcaagaatgcagctgaagatggccaggtcagctgtggtggccaagtcattgcctttagggctggcgtgggggtaaggaagc

SEQ ID NO: 253195 - DNA, 201 bp, Homo sapiens
cccagggcagatgggccccagtgtgactgcctgcatccgtcctcgcagggaggtggactggttttcactggcgagcgtcatcttcctactgctgttcgccyccttcatcgtctactacttcatcatggcttgtgaccaatacagctgcgccctgaccggccctgtggtggacatcgtcaccggacatgctcggctctcgga

SEQ ID NO: 253196 - DNA, 201 bp, Homo sapiens
gcttgtgaccaatacagctgcgccctgaccggccctgtggtggacatcgtcaccggacatgctcggctctcggacatctgggccaagactccacctataaygaggaaagccgcccagctctataccttgtgggtcaccttccaggtcagcagcccctgccctggggttgggacacagcaggtggggagcgtgccctcctgc

SEQ ID NO: 253197 - DNA, 201 bp, Homo sapiens; identical to SEQ ID NO: 50066

SEQ ID NO: 253198 - DNA, 201 bp, Homo sapiens; identical to SEQ ID NO: 50067

SEQ ID NO: 253199 - DNA, 201 bp, Homo sapiens; identical to SEQ ID NO: 50068

SEQ ID NO: 253200 - DNA, 201 bp, Homo sapiens; identical to SEQ ID NO: 50069

SEQ ID NO: 253201 - DNA, 201 bp, Homo sapiens; identical to SEQ ID NO: 50070

SEQ ID NO: 253202 - DNA, 201 bp, Homo sapiens; identical to SEQ ID NO: 50071

SEQ ID NO: 253203 - DNA, 201 bp, Homo sapiens; identical to SEQ ID NO: 50072

SEQ ID NO: 253204 - DNA, 201 bp, Homo sapiens; identical to SEQ ID NO: 50073

SEQ ID NO: 253205 - DNA, 201 bp, Homo sapiens; identical to SEQ ID NO: 50074

SEQ ID NO: 253206 - DNA, 201 bp, Homo sapiens
tgtgaaagacctacctccgctcatattctgagctctgggccttccatgggggccacagatagtgccaccagttaatcaactacagtagagcaggcatgttragtggcttccctggccgcaaggagggcccgtgctaggagctaatgccttctgtcatggggtactggtgggtttgagcaacagttctcccacacagagcct

SEQ ID NO: 253207 - DNA, 201 bp, Homo sapiens
taaagtaaggaattataaaaagaaactagaaatcatggtcagtcaacaacttagaaaaaaagataaaggcttaaagggcagctggggccttcccaccatcygggggtatgacctattgtcacagctcccatttcgccatagaaccatggggacttcgtgcagggtgagtatcctctccgacctggaactggggaaaccact

SEQ ID NO: 253208 - DNA, 201 bp, Homo sapiens
ctgggcaaagcaccgcttgaccccttccccctcgccccccagggtctgtacttggtgtaccaccccgtgcagctgtccaccccgcacgccgtgggcgtccygctgctgggcctggtgggctactacatcttccgggtggccaaccaccagaaggacctgttccgccgcacggatgggcgctgcctcatctggggcaggaag

SEQ ID NO: 253209 - DNA, 201 bp, Homo sapiens
ggcatgcttcagcccagccaagctcctcactgcgggttgggaaagcgccttcatttctgaatccttcatctgcaggggttgtgaacaagtatcagatcaayggcctgcaagcctggctcctcacgcacctgctctggtttgcaaacgctcatctcctgtcctggttctcgcccaccatcatcttcgacaactggatcccac

SEQ ID NO: 253210 - DNA, 201 bp, Homo sapiens
gcagagcaggtgcccctgggcttctgcctaaggaagtctctgctgagcagcagctgaatgcaaagcaaagtgaatgagggcgccaggaaccagccgacaarcattccagccgtgggggtcccagcggctcatggccagcttctgcctgcgccgtctcacgttaccctttaggaccctgggccagtgctgggctctcgctaa

SEQ ID NO: 253211 - DNA, 201 bp, Homo sapiens
ccaatgccatggtcctggtcaacgtcctgcaggtgcctgtcatggctggagagggtgaaacgccgatgccggcaggctctgggggaacccgcaagccagarcgtattcccatgaccttaatctactgcttgtaaaagagagtcagctgccctccccaggtgtcaccaggaagcagccggcgagcacttggtgaaggaagcc

SEQ ID NO: 253212 - DNA, 201 bp, Homo sapiens
atccgtcctcgcagggaggtggactggttttcactggcgagcgtcatcttcctactgctgttcgcccccttcatcgtctactacttcatcatggcttgtgwccaatacagctgcgccctgaccggccctgtggtggacatcgtcaccggacatgctcggctctcggacatctgggccaagactccacctataacgaggaaa

SEQ ID NO: 253213 - DNA, 201 bp, Homo sapiens
aagcctggctcctcacgcacctgctctggtttgcaaacgctcatctcctgtcctggttctcgcccaccatcatcttcgacaactggatcccactgctgtgstgcgccaacatccttggctatgccgtctccaccttcgccatggtcaagggctacttcttccccaccagcgccagagactggtatgttcttagcagcgggt

SEQ ID NO: 253214 - DNA, 201 bp, Homo sapiens
actgcctgcatccgtcctcgcagggaggtggactggttttcactggcgagcgtcatcttcctactgctgttcgcccccttcatcgtctactacttcatcakggcttgtgaccaatacagctgcgccctgaccggccctgtggtggacatcgtcaccggacatgctcggctctcggacatctgggccaagactccacctata

SEQ ID NO: 253215 - DNA, 201 bp, Homo sapiens
acctgggctgggagagatgccagggccatgggctcggggtggttctgaggacaaggaagcccttagccctgcccatgacccaggcaggaacagccccagcygcagggaaggaacagccccagcattgaggaagttgctgagcagctcccgagcaccccctgctgcatccgcgtggagtgtgatttccccgaggtccatggg

SEQ ID NO: 253216 - DNA, 201 bp, Homo sapiens
aacggcctgcaagcctggctcctcacgcacctgctctggtttgcaaacgctcatctcctgtcctggttctcgcccaccatcatcttcgacaactggatccyactgctgtggtgcgccaacatccttggctatgccgtctccaccttcgccatggtcaagggctacttcttccccaccagcgccagagactggtatgttctt

SEQ ID NO: 253217 - DNA, 201 bp, Homo sapiens
ctgcccatgacccaggcaggaacagccccagctgcagggaaggaacagccccagcattgaggaagttgctgagcagctcccgagcaccccctgctgcatcygcgtggagtgtgatttccccgaggtccatgggggccccaggagggccgggggtggtcagcggctgcttctgtcttgcaggccatctacgtgattgacttc

SEQ ID NO: 253218 - DNA, 201 bp, Homo sapiens
ctggtgggtttgagcaacagttctcccacacagagcctcttagggtcctggtggggcccagggcagatgggccccagtgtgactgcctgcatccgtcctcrcagggaggtggactggttttcactggcgagcgtcatcttcctactgctgttcgcccccttcatcgtctactacttcatcatggcttgtgaccaatacagc

SEQ ID NO: 253219 - DNA, 201 bp, Homo sapiens
tgggactggcttgtccgccgtcctccctgacatgcggctgttgaagccctgagcactggaccttctgcctcttgcttgactcctactgtgggccttgagcktctgccctctcctgaaatgtcagctgcctgcggtcttattcatttttgtgttccttgcaggactttagccggttgagaaggatcaagcaggcatttggag

SEQ ID NO: 253220 - DNA, 201 bp, Homo sapiens
atcaacggcctgcaagcctggctcctcacgcacctgctctggtttgcaaacgctcatctcctgtcctggttctcgcccaccatcatcttcgacaactggawcccactgctgtggtgcgccaacatccttggctatgccgtctccaccttcgccatggtcaagggctacttcttccccaccagcgccagagactggtatgtt

SEQ ID NO: 253221 - DNA, 201 bp, Homo sapiens
caagcctggctcctcacgcacctgctctggtttgcaaacgctcatctcctgtcctggttctcgcccaccatcatcttcgacaactggatcccactgctgtkgtgcgccaacatccttggctatgccgtctccaccttcgccatggtcaagggctacttcttccccaccagcgccagagactggtatgttcttagcagcggg

SEQ ID NO: 253222 - DNA, 201 bp, Homo sapiens
gtcttattgtccctgtggctttaattaacagcttcccaggagagccctgctggcttgtacccattcccatggctggacagtggtgagccactcatctctgyccactcatccattcacctgcccatctccccacccacccatccacccccctacccattcatctacctactcacccatcatccacctacccattgccccatc

SEQ ID NO: 253223 - DNA, 201 bp, Homo sapiens
agatggccaggtcagctgtggtggccaagtcattgcctttagggctggcgtgggggtaaggaagccaggaaaaacttctggcttggggcacaggcagcccrttgcctctttctttggataagctggtgaggcccaaaacaaccttagtgaagagtcttattgtccctgtggctttaattaacagcttcccaggagagccct

SEQ ID NO: 253224 - DNA, 201 bp, Homo sapiens
tacttctcagttcagatctcttggtccctttgagtgaaaaatgacaggggcagtgtgaatcacaaatagccacaaagcaggaacccccacctgtccatcartagatgaatggacccacagaacagaacactgtgcccactgtgggacactatttggcagcggaagggaatgaagctctgatgccagtaggcggatgaccct

SEQ ID NO: 253225 - DNA, 201 bp, Homo sapiens
cacagcatggtgggtgaccatagttcggaatgtattatatatttcaaaattgctaagagtaaattttcagtgttctcactatgcccacaaaaatacacagrtgaagttatggatatgttaattagcttgatttactcattctgcaatttacacatgtatcaaaacatcacattgtaccccataaatataaacaattattgt

SEQ ID NO: 253226 - DNA, 201 bp, Homo sapiens
cagccaagctcctcactgcgggttgggaaagcgccttcatttctgaatccttcatctgcaggggttgtgaacaagtatcagatcaacggcctgcaagcctrgctcctcacgcacctgctctggtttgcaaacgctcatctcctgtcctggttctcgcccaccatcatcttcgacaactggatcccactgctgtggtgcgcc

SEQ ID NO: 253227 - DNA, 201 bp, Homo sapiens
agccaagctcctcactgcgggttgggaaagcgccttcatttctgaatccttcatctgcaggggttgtgaacaagtatcagatcaacggcctgcaagcctgrctcctcacgcacctgctctggtttgcaaacgctcatctcctgtcctggttctcgcccaccatcatcttcgacaactggatcccactgctgtggtgcgcca

SEQ ID NO: 253228 - DNA, 201 bp, Homo sapiens
tcctcactgcgggttgggaaagcgccttcatttctgaatccttcatctgcaggggttgtgaacaagtatcagatcaacggcctgcaagcctggctcctcabgcacctgctctggtttgcaaacgctcatctcctgtcctggttctcgcccaccatcatcttcgacaactggatcccactgctgtggtgcgccaacatcctt

SEQ ID NO: 253229 - DNA, 201 bp, Homo sapiens
cgggttgggaaagcgccttcatttctgaatccttcatctgcaggggttgtgaacaagtatcagatcaacggcctgcaagcctggctcctcacgcacctgcyctggtttgcaaacgctcatctcctgtcctggttctcgcccaccatcatcttcgacaactggatcccactgctgtggtgcgccaacatccttggctatgcc

SEQ ID NO: 253230 - DNA, 201 bp, Homo sapiens
caggcaatttcttttacaactacatgatgggcatcgagtttaaccctcggatcgggaagtggtttgacttcaagctgttcttcaatgggcgccccgggatygtcgcctggaccctcatcaacctgtccttcgcagcgaagcagcgggagctccacagccatgtgaccaatgccatggtcctggtcaacgtcctgcaggtgc

SEQ ID NO: 253231 - DNA, 201 bp, Homo sapiens
tcacggggcgcggagccgccgggcgtgcagggtccgcctccgattggcaggcaatcgctgacatcatccgggggcgggcgcccctgccctgcgggtgactycgacccctggctagagggtaggcggcgtggagcagcgcgcgcaagcgaggccaggggaaggtgggcgcaggtgaggggccgaggtgtgcgcaggtgagtg

SEQ ID NO: 253232 - DNA, 201 bp, Homo sapiens
aagcaaattcacaggcaatttcttttacaactacatgatgggcatcgagtttaaccctcggatcgggaagtggtttgacttcaagctgttcttcaatgggygccccgggatcgtcgcctggaccctcatcaacctgtccttcgcagcgaagcagcgggagctccacagccatgtgaccaatgccatggtcctggtcaacgt

SEQ ID NO: 253233 - DNA, 201 bp, Homo sapiens
tcagatcaacggcctgcaagcctggctcctcacgcacctgctctggtttgcaaacgctcatctcctgtcctggttctcgcccaccatcatcttcgacaacyggatcccactgctgtggtgcgccaacatccttggctatgccgtctccaccttcgccatggtcaagggctacttcttccccaccagcgccagagactggta

SEQ ID NO: 253234 - DNA, 201 bp, Homo sapiens; identical to SEQ ID NO: 50091

SEQ ID NO: 253235 - DNA, 201 bp, Homo sapiens; identical to SEQ ID NO: 50092

SEQ ID NO: 253236 - DNA, 201 bp, Homo sapiens
gcctggctcctcacgcacctgctctggtttgcaaacgctcatctcctgtcctggttctcgcccaccatcatcttcgacaactggatcccactgctgtggtrcgccaacatccttggctatgccgtctccaccttcgccatggtcaagggctacttcttccccaccagcgccagagactggtatgttcttagcagcgggtcc

SEQ ID NO: 253237 - DNA, 201 bp, Homo sapiens
gtgtgtgtctcgagatgtacattttttatactatatattaggcttctcccaagaagcagaatcaatagaggggtggagggtatacgtgtaagaaagagatrtatttttcaactcatgtgattgaagagtgacaagtccaagatcttcagggcagcctggagccccagggaagagttgatgctgtgcttaaatagaaggtca

SEQ ID NO: 253238 - DNA, 201 bp, Homo sapiens
gcatcgagtttaaccctcggatcgggaagtggtttgacttcaagctgttcttcaatgggcgccccgggatcgtcgcctggaccctcatcaacctgtccttmgcagcgaagcagcgggagctccacagccatgtgaccaatgccatggtcctggtcaacgtcctgcaggtgcctgtcatggctggagagggtgaaacgccga

SEQ ID NO: 253239 - DNA, 201 bp, Homo sapiens
gtagaacaatgaagaggacacacaattcctgcccttgggaagcttacattctagtgaggggagacagacaatacacacacacaaatgaatacttctaggcratggggagagttactaagaaaataaagtacccagtggagggccttggcagggaagctggggagcagctgcttcagattggctgagagggaagatctcccc

SEQ ID NO: 253240 - DNA, 201 bp, Homo sapiens
atgtgaaaacgtagcaataggtcccactatataatagctcttacttgctttagcctctgtgtgtgtctcgagatgtacattttttatactatatattaggyttctcccaagaagcagaatcaatagaggggtggagggtatacgtgtaagaaagagatgtatttttcaactcatgtgattgaagagtgacaagtccaagat

SEQ ID NO: 253241 - DNA, 201 bp, Homo sapiens
gcagctgaatgcaaagcaaagtgaatgagggcgccaggaaccagccgacaaacattccagccgtgggggtcccagcggctcatggccagcttctgcctgcrccgtctcacgttaccctttaggaccctgggccagtgctgggctctcgctaagtaaggtggcttcatcttgtgagatatgctcatccactaaatgtatctt

SEQ ID NO: 253242 - DNA, 201 bp, Homo sapiens
tcttcctactgctgttcgcccccttcatcgtctactacttcatcatggcttgtgaccaatacagctgcgccctgaccggccctgtggtggacatcgtcacyggacatgctcggctctcggacatctgggccaagactccacctataacgaggaaagccgcccagctctataccttgtgggtcaccttccaggtcagcagcc

SEQ ID NO: 253243 - DNA, 201 bp, Homo sapiens
gcgtttgtcattctctacgttggcgtgatttataatgtcactcacccatgagggcccacgtgccctgcgtcggcttcaaaccgtgtgcttgggccccagamcgtaatctcagtgcaatcaagccagttcttcagctcacctgtgccatgcgtcaagggcatctggagaagggtagagagaaacccaggtaccagcccaggg

SEQ ID NO: 253244 - DNA, 201 bp, Homo sapiens; identical to SEQ ID NO: 50096

SEQ ID NO: 253245 - DNA, 201 bp, Homo sapiens
tctgcaggggttgtgaacaagtatcagatcaacggcctgcaagcctggctcctcacgcacctgctctggtttgcaaacgctcatctcctgtcctggttctygcccaccatcatcttcgacaactggatcccactgctgtggtgcgccaacatccttggctatgccgtctccaccttcgccatggtcaagggctacttcttc

SEQ ID NO: 253246 - DNA, 201 bp, Homo sapiens
ttcatctgcaggggttgtgaacaagtatcagatcaacggcctgcaagcctggctcctcacgcacctgctctggtttgcaaacgctcatctcctgtcctggwtctcgcccaccatcatcttcgacaactggatcccactgctgtggtgcgccaacatccttggctatgccgtctccaccttcgccatggtcaagggctactt

SEQ ID NO: 253247 - DNA, 201 bp, Homo sapiens
gctctcggacatctgggccaagactccacctataacgaggaaagccgcccagctctataccttgtgggtcaccttccaggtcagcagcccctgccctgggrttgggacacagcaggtggggagcgtgccctcctgctggggtagtccttccatttgtctgggacatggatcctggctcaggttgacatctgggttcccggg

SEQ ID NO: 253248 - DNA, 201 bp, Homo sapiens; identical to SEQ ID NO: 50099

SEQ ID NO: 253249 - DNA, 201 bp, Homo sapiens
caggtaaggtggctgcttgaccagatgccacctgcccatttcaagagcaacgagccccctggggacagaaataactcaccccagggcacttgcttagcagmacggtggggtggcctgccccaagaggctgtgcccaagtggagagaaccaacgtggagaggctgtcacctattcaggatgtgacaggcccggcatcacctg

SEQ ID NO: 253250 - DNA, 201 bp, Homo sapiens
aatttcttttacaactacatgatgggcatcgagtttaaccctcggatcgggaagtggtttgacttcaagctgttcttcaatgggcgccccgggatcgtcgyctggaccctcatcaacctgtccttcgcagcgaagcagcgggagctccacagccatgtgaccaatgccatggtcctggtcaacgtcctgcaggtgcctgtc

SEQ ID NO: 253251 - DNA, 201 bp, Homo sapiens
gggccagtaccaggtggagggtgcagagccccagctggccccatgctcacaccaggtccttggagccccccgcatggcccacccggccccatttctccacytggctggctgcaggtctgctggttccctggttttataaactccattttccaaggatgtgaaaacgtagcaataggtcccactatataatagctcttactt

SEQ ID NO: 253252 - DNA, 201 bp, Homo sapiens
tcttttacaactacatgatgggcatcgagtttaaccctcggatcgggaagtggtttgacttcaagctgttcttcaatgggcgccccgggatcgtcgcctgkaccctcatcaacctgtccttcgcagcgaagcagcgggagctccacagccatgtgaccaatgccatggtcctggtcaacgtcctgcaggtgcctgtcatgg

SEQ ID NO: 253253 - DNA, 201 bp, Homo sapiens
aacagccctcaaggttggtgcttttattcacagaagagaacacggaggcaaggcgtgtgtcagaggcagagctggggtttgaccccaggccgctgggcccycgagcccacactcctgtcctctccctgggcaaagcaccgcttgaccccttccccctcgccccccagggtctgtacttggtgtaccaccccgtgcagctgt

SEQ ID NO: 253254 - DNA, 201 bp, Homo sapiens; identical to SEQ ID NO: 50102

SEQ ID NO: 253255 - DNA, 201 bp, Homo sapiens
cctgccaggcccaggagcagtggtggatgcaacagggaaaggtggtgtctgttatttgagggataatgtaagcaaggttctctttcttgcagggcccaatrgctgcaaaatcgcaacccaacattcccaaagccaagagtctagatggcgtcaccaatgacagaaccgcatctcaagggcagtggggccgtgcctggtaag

SEQ ID NO: 253256 - DNA, 201 bp, Homo sapiens; identical to SEQ ID NO: 50104

SEQ ID NO: 253257 - DNA, 201 bp, Homo sapiens
acagttctcccacacagagcctcttagggtcctggtggggcccagggcagatgggccccagtgtgactgcctgcatccgtcctcgcagggaggtggactgrttttcactggcgagcgtcatcttcctactgctgttcgcccccttcatcgtctactacttcatcatggcttgtgaccaatacagctgcgccctgaccggcc

SEQ ID NO: 253258 - DNA, 201 bp, Homo sapiens; identical to SEQ ID NO: 50106

SEQ ID NO: 253259 - DNA, 201 bp, Homo sapiens; identical to SEQ ID NO: 50107

SEQ ID NO: 253260 - DNA, 201 bp, Homo sapiens
acatcgtcaccggacatgctcggctctcggacatctgggccaagactccacctataacgaggaaagccgcccagctctataccttgtgggtcaccttccasgtcagcagcccctgccctggggttgggacacagcaggtggggagcgtgccctcctgctggggtagtccttccatttgtctgggacatggatcctggctca

SEQ ID NO: 253261 - DNA, 201 bp, Homo sapiens
gcattctgttcccagtgaagccacagtgcctgatccctgggaagctggcctggcctttgcccccttccagaatgaaggacggctcggaccaattgccaggrccatctgaactgtgctttacagggcatggcactgccctctgataaggggcaggcatccagtaccccaggacagggtcagggcaggaatccagtgggcaca

SEQ ID NO: 253262 - DNA, 201 bp, Homo sapiens
aaaagactatgattgtgattctcatgttcctgctatgcgtccccctttgcaggtgccctccaggcggggggtgatcaggctgcttgtgtgtttcaggtgcytctgtacacgtctctccctgacttctgccataagtttctacccggctacgtaggaggcatccaggagggggccgtgactcctgcaggtagcctcctccct

SEQ ID NO: 253263 - DNA, 201 bp, Homo sapiens
tgtccaggatctgaccgctttccatctaccgggtgcccccgtcccaggctctgtcctctcttagcctcatcgcatgtctccctgcctcctgcccccgcccmcagtctgttctcggctcaacagccagactatcccatcaaaatgtgagtcacatgctgtcactccactgctcagaactttccaaggtcttctcatgttgct

SEQ ID NO: 253264 - DNA, 201 bp, Homo sapiens
ctgggccaagactccacctataacgaggaaagccgcccagctctataccttgtgggtcaccttccaggtcagcagcccctgccctggggttgggacacagmaggtggggagcgtgccctcctgctggggtagtccttccatttgtctgggacatggatcctggctcaggttgacatctgggttcccgggacccagcagggc

SEQ ID NO: 253265 - DNA, 201 bp, Homo sapiens
atcggaactgtgacccgcccaggctgactgctgagccctagtgttcgtgcactggtgccccaccactacctgtttgaggatatgggcctgaggggtcccgygcatctgtgctggacacacaccacaagagtgattcaaatgccggggagacgggagcacactgccctgcatggctctgagcggagtggaccctgccttttc

SEQ ID NO: 253266 - DNA, 201 bp, Homo sapiens; identical to SEQ ID NO: 50110

SEQ ID NO: 253267 - DNA, 201 bp, Homo sapiens; identical to SEQ ID NO: 50111

SEQ ID NO: 253268 - DNA, 201 bp, Homo sapiens
tttcttttacaactacatgatgggcatcgagtttaaccctcggatcgggaagtggtttgacttcaagctgttcttcaatgggcgccccgggatcgtcgccyggaccctcatcaacctgtccttcgcagcgaagcagcgggagctccacagccatgtgaccaatgccatggtcctggtcaacgtcctgcaggtgcctgtcat

SEQ ID NO: 253269 - DNA, 201 bp, Homo sapiens; identical to SEQ ID NO: 50112

SEQ ID NO: 253270 - DNA, 201 bp, Homo sapiens
ctcctggaaatcatcctcgctaccttataatcatgtagactttgtgtgttttgcttctttctacttaccctacctgagggaactggacatgaaaataggaktttctagttaacacagaaattgttgtgtgtcctcagccagctagacctagtcagggtctccacaggggttatctcggctgatgctctggccctccgggga

SEQ ID NO: 253271 - DNA, 201 bp, Homo sapiens; identical to SEQ ID NO: 50114

SEQ ID NO: 253272 - DNA, 201 bp, Homo sapiens
ggtggtgcacacctgtaatcccagctacttgggaggctgaggtggaaggatcacttgagctcaggaggacaacgctgcggtgagctatgattgcaccactrcactccagcctgggtggtagaacaagacctcatctcaaagatagatttatatatatatataaaaagttgaattttatgggattctccattttaaaaaggt

SEQ ID NO: 253273 - DNA, 201 bp, Homo sapiens
gaagagtgacaagtccaagatcttcagggcagcctggagccccagggaagagttgatgctgtgcttaaatagaaggtcacttttttttttttttgagacgsagtctcgctctgtcacacaggctagagtgcagtggtgtgatcttggctcactgcaacctccacctcctgggttcaagtgattctcctgcctcagcctccc

SEQ ID NO: 253274 - DNA, 201 bp, Homo sapiens; identical to SEQ ID NO: 50115

SEQ ID NO: 253275 - DNA, 201 bp, Homo sapiens
tgaagagtgacaagtccaagatcttcagggcagcctggagccccagggaagagttgatgctgtgcttaaatagaaggtcacttttttttttttttgagacrgagtctcgctctgtcacacaggctagagtgcagtggtgtgatcttggctcactgcaacctccacctcctgggttcaagtgattctcctgcctcagcctcc

SEQ ID NO: 253276 - DNA, 201 bp, Homo sapiens
cccaagtggagagaaccaacgtggagaggctgtcacctattcaggatgtgacaggcccggcatcacctgtgacagccagtcctgtgggatggaggtgcggrtgtcctggaaaaccaggattcccacagcagagggggccagtaccaggtggagggtgcagagccccagctggccccatgctcacaccaggtccttggagcc

SEQ ID NO: 253277 - DNA, 201 bp, Homo sapiens
accaaagctgccccctgtttctaggaagaagggaaggcctcgtgtattagccagctcagccagcttgggccagcagccagggaggtggccttgagtatgtycctaacatctgcaaagtagggcagatgccggctcagggctggatggggcagtggaggtggaggtgggtcagtgcgggcactggcaggaggggtcctcttc

SEQ ID NO: 253278 - DNA, 201 bp, Homo sapiens
tctgtcttgcaggccatctacgtgattgacttcttctggaacgaaacctggtacctgaagaccattgacatctgccatgaccacttcgggtggtacctggrctggggcgactgtgtctggctgccttatctttacacgctgcaggtgaggaggtgggcagagctggcccagcggggcatttggcagacacatgctaagctt

SEQ ID NO: 253279 - DNA, 201 bp, Homo sapiens
ccctggggttgggacacagcaggtggggagcgtgccctcctgctggggtagtccttccatttgtctgggacatggatcctggctcaggttgacatctgggytcccgggacccagcagggcattccctggactctgacatgttcagattcatcctcagctgtaaggcaggaggcacctgtcacatcagcgtttgatacacct

SEQ ID NO: 253280 - DNA, 201 bp, Homo sapiens
ggtcagcggctgcttctgtcttgcaggccatctacgtgattgacttcttctggaacgaaacctggtacctgaagaccattgacatctgccatgaccacttsgggtggtacctgggctggggcgactgtgtctggctgccttatctttacacgctgcaggtgaggaggtgggcagagctggcccagcggggcatttggcaga

SEQ ID NO: 253281 - DNA, 201 bp, Homo sapiens
cggacatgctcggctctcggacatctgggccaagactccacctataacgaggaaagccgcccagctctataccttgtgggtcaccttccaggtcagcagcycctgccctggggttgggacacagcaggtggggagcgtgccctcctgctggggtagtccttccatttgtctgggacatggatcctggctcaggttgacatc

SEQ ID NO: 253282 - DNA, 201 bp, Homo sapiens
gctgttcttcaatgggcgccccgggatcgtcgcctggaccctcatcaacctgtccttcgcagcgaagcagcgggagctccacagccatgtgaccaatgccrtggtcctggtcaacgtcctgcaggtgcctgtcatggctggagagggtgaaacgccgatgccggcaggctctgggggaacccgcaagccagaacgtattcc

SEQ ID NO: 253283 - DNA, 201 bp, Homo sapiens
cccctgctgcatccgcgtggagtgtgatttccccgaggtccatgggggccccaggagggccgggggtggtcagcggctgcttctgtcttgcaggccatctrcgtgattgacttcttctggaacgaaacctggtacctgaagaccattgacatctgccatgaccacttcgggtggtacctgggctggggcgactgtgtctgg

SEQ ID NO: 253284 - DNA, 201 bp, Homo sapiens
cctgctgcatccgcgtggagtgtgatttccccgaggtccatgggggccccaggagggccgggggtggtcagcggctgcttctgtcttgcaggccatctacrtgattgacttcttctggaacgaaacctggtacctgaagaccattgacatctgccatgaccacttcgggtggtacctgggctggggcgactgtgtctggct

SEQ ID NO: 253285 - DNA, 201 bp, Homo sapiens; identical to SEQ ID NO: 50121

SEQ ID NO: 253286 - DNA, 201 bp, Homo sapiens
cgccccccagggtctgtacttggtgtaccaccccgtgcagctgtccaccccgcacgccgtgggcgtcctgctgctgggcctggtgggctactacatcttcygggtggccaaccaccagaaggacctgttccgccgcacggatgggcgctgcctcatctggggcaggaagcccaaggtcatcgagtgctcctacacatccgc

SEQ ID NO: 253287 - DNA, 201 bp, Homo sapiens
cgcgtggagtgtgatttccccgaggtccatgggggccccaggagggccgggggtggtcagcggctgcttctgtcttgcaggccatctacgtgattgacttmttctggaacgaaacctggtacctgaagaccattgacatctgccatgaccacttcgggtggtacctgggctggggcgactgtgtctggctgccttatcttt

SEQ ID NO: 253288 - DNA, 201 bp, Homo sapiens
gccccccagggtctgtacttggtgtaccaccccgtgcagctgtccaccccgcacgccgtgggcgtcctgctgctgggcctggtgggctactacatcttccrggtggccaaccaccagaaggacctgttccgccgcacggatgggcgctgcctcatctggggcaggaagcccaaggtcatcgagtgctcctacacatccgcc

SEQ ID NO: 253289 - DNA, 201 bp, Homo sapiens
cttctggaacgaaacctggtacctgaagaccattgacatctgccatgaccacttcgggtggtacctgggctggggcgactgtgtctggctgccttatcttwacacgctgcaggtgaggaggtgggcagagctggcccagcggggcatttggcagacacatgctaagctttctccttgcagaagcgtctgtccttgggggca

SEQ ID NO: 253290 - DNA, 201 bp, Homo sapiens
ccccagggtctgtacttggtgtaccaccccgtgcagctgtccaccccgcacgccgtgggcgtcctgctgctgggcctggtgggctactacatcttccgggyggccaaccaccagaaggacctgttccgccgcacggatgggcgctgcctcatctggggcaggaagcccaaggtcatcgagtgctcctacacatccgccgat

SEQ ID NO: 253291 - DNA, 201 bp, Homo sapiens
gcccgccacctccctgggcctctggcactgctccacctcagtcaaagcccagttagaactactgatgcaaatccccacagccaggatcatcaagacatcgrccgccaagctttctggccagggatttcagttgcagaactgtttgcaacacttagctgcaatggaagtgccaattctggaactggtttccttgttgttggc

SEQ ID NO: 253292 - DNA, 201 bp, Homo sapiens
tggaacgaaacctggtacctgaagaccattgacatctgccatgaccacttcgggtggtacctgggctggggcgactgtgtctggctgccttatctttacaygctgcaggtgaggaggtgggcagagctggcccagcggggcatttggcagacacatgctaagctttctccttgcagaagcgtctgtccttgggggcaccaa

SEQ ID NO: 253293 - DNA, 201 bp, Homo sapiens; identical to SEQ ID NO: 50127

SEQ ID NO: 253294 - DNA, 201 bp, Homo sapiens
ggggtttgaccccaggccgctgggccctcgagcccacactcctgtcctctccctgggcaaagcaccgcttgaccccttccccctcgccccccagggtctgyacttggtgtaccaccccgtgcagctgtccaccccgcacgccgtgggcgtcctgctgctgggcctggtgggctactacatcttccgggtggccaaccacca

SEQ ID NO: 253295 - DNA, 201 bp, Homo sapiens; identical to SEQ ID NO: 50129

SEQ ID NO: 253296 - DNA, 201 bp, Homo sapiens
tgaccccaggccgctgggccctcgagcccacactcctgtcctctccctgggcaaagcaccgcttgaccccttccccctcgccccccagggtctgtacttgktgtaccaccccgtgcagctgtccaccccgcacgccgtgggcgtcctgctgctgggcctggtgggctactacatcttccgggtggccaaccaccagaagga

SEQ ID NO: 253297 - DNA, 201 bp, Homo sapiens; identical to SEQ ID NO: 50132

SEQ ID NO: 253298 - DNA, 201 bp, Homo sapiens; identical to SEQ ID NO: 50133

SEQ ID NO: 253299 - DNA, 201 bp, Homo sapiens; identical to SEQ ID NO: 50134

SEQ ID NO: 253300 - DNA, 201 bp, Homo sapiens
acccccttcaaaacccacagcccagcagtttgagcttccaggagccataagtgcttcaggaagaaaaagactatgattgtgattctcatgttcctgctatkcgtccccctttgcaggtgccctccaggcggggggtgatcaggctgcttgtgtgtttcaggtgcttctgtacacgtctctccctgacttctgccataagtt

SEQ ID NO: 253301 - DNA, 201 bp, Homo sapiens
gttggataccgaagtatttgggaggggggtatcacggtatctgcagctaatggtgggggctgagtggggaggaaaaaagaaaaatacacatatataaacasagagggagagaaatgaaacgtggccagctgctcacccctgctgaacctaggaatctgcgtgctcactttacgttcaacttgtttgtatgctgaacatttt

SEQ ID NO: 253302 - DNA, 201 bp, Homo sapiens
gttcaaggatgagtgaagacccctgtgttcctggagccaaaggagaataggggagagtggtgtgtaggagggaggcaggagccagcttgtgctgtaagagkgggggcattctgccatgtttggagaatgaactgagactagcaagagcagccatagcaaggtcacgtgggaggtgattgcagggtccaaggaagagagtct

SEQ ID NO: 253303 - DNA, 201 bp, Homo sapiens; identical to SEQ ID NO: 50135

SEQ ID NO: 253304 - DNA, 201 bp, Homo sapiens; identical to SEQ ID NO: 50216

SEQ ID NO: 253305 - DNA, 201 bp, Homo sapiens; identical to SEQ ID NO: 50217

SEQ ID NO: 253306 - DNA, 201 bp, Homo sapiens; identical to SEQ ID NO: 50138

SEQ ID NO: 253307 - DNA, 201 bp, Homo sapiens
agagccaggtgaggctggaggcctcatggaagtcttcctctttatcttaaaagcagcaagacccagaaagtgtgtgctgagctggggtgcagggtggcagygatcaggtgcattcggaagcgtcacccagggagccagcgggagctggctaggagaacccgagagggtgagggaggcctgtcaggagctgtggacgttgct

SEQ ID NO: 253308 - DNA, 201 bp, Homo sapiens
gtcctcgcagggaggtggactggttttcactggcgagcgtcatcttcctactgctgttcgcccccttcatcgtctactacttcatcatggcttgtgaccartacagctgcgccctgaccggccctgtggtggacatcgtcaccggacatgctcggctctcggacatctgggccaagactccacctataacgaggaaagccg

SEQ ID NO: 253309 - DNA, 201 bp, Homo sapiens
gtcatggctggagagggtgaaacgccgatgccggcaggctctgggggaacccgcaagccagaacgtattcccatgaccttaatctactgcttgtaaaagaragtcagctgccctccccaggtgtcaccaggaagcagccggcgagcacttggtgaaggaagccatccttgggtgcctgtctctgccagccctgggagggga

SEQ ID NO: 253310 - DNA, 201 bp, Homo sapiens
cctggaccctcatcaacctgtccttcgcagcgaagcagcgggagctccacagccatgtgaccaatgccatggtcctggtcaacgtcctgcaggtgcctgtyatggctggagagggtgaaacgccgatgccggcaggctctgggggaacccgcaagccagaacgtattcccatgaccttaatctactgcttgtaaaagagag

SEQ ID NO: 253311 - DNA, 201 bp, Homo sapiens
tacatgatgggcatcgagtttaaccctcggatcgggaagtggtttgacttcaagctgttcttcaatgggcgccccgggatcgtcgcctggaccctcatcarcctgtccttcgcagcgaagcagcgggagctccacagccatgtgaccaatgccatggtcctggtcaacgtcctgcaggtgcctgtcatggctggagagggt

SEQ ID NO: 253312 - DNA, 201 bp, Homo sapiens
agcaaattcacaggcaatttcttttacaactacatgatgggcatcgagtttaaccctcggatcgggaagtggtttgacttcaagctgttcttcaatgggcrccccgggatcgtcgcctggaccctcatcaacctgtccttcgcagcgaagcagcgggagctccacagccatgtgaccaatgccatggtcctggtcaacgtc

SEQ ID NO: 253313 - DNA, 201 bp, Homo sapiens
actacatgatgggcatcgagtttaaccctcggatcgggaagtggtttgacttcaagctgttcttcaatgggcgccccgggatcgtcgcctggaccctcatsaacctgtccttcgcagcgaagcagcgggagctccacagccatgtgaccaatgccatggtcctggtcaacgtcctgcaggtgcctgtcatggctggagagg

SEQ ID NO: 253314 - DNA, 201 bp, Homo sapiens; identical to SEQ ID NO: 50143

SEQ ID NO: 253315 - DNA, 201 bp, Homo sapiens
gcgccaggaaccagccgacaaacattccagccgtgggggtcccagcggctcatggccagcttctgcctgcgccgtctcacgttaccctttaggaccctggrccagtgctgggctctcgctaagtaaggtggcttcatcttgtgagatatgctcatccactaaatgtatcttttatttatatttttaagcaaattcacaggc

SEQ ID NO: 253316 - DNA, 201 bp, Homo sapiens
ctgtggtgcgccaacatccttggctatgccgtctccaccttcgccatggtcaagggctacttcttccccaccagcgccagagactggtatgttcttagcarcgggtccagcctgatgtagaaagtgcaaacttcacccctggcctttcttgctgcctggggcaggtggttgtaaagccctgagcactgagaatccgtggaa

SEQ ID NO: 253317 - DNA, 201 bp, Homo sapiens
cctccggggattgggggattcaggtaactggtcaaagaacttgtcctgcacatgctggaagccgggcccagggtgcgtttgtcattctctacgttggcgtratttataatgtcactcacccatgagggcccacgtgccctgcgtcggcttcaaaccgtgtgcttgggccccagaacgtaatctcagtgcaatcaagccagt

SEQ ID NO: 253318 - DNA, 201 bp, Homo sapiens
ttcttgctgcctggggcaggtggttgtaaagccctgagcactgagaatccgtggaagaggaggagggggatggaacttgcttcaccctggggaacatcctytctgaatgtttggtggcttctccagccttggcaagaatgcagctgaagatggccaggtcagctgtggtggccaagtcattgcctttagggctggcgtggg

SEQ ID NO: 253319 - DNA, 201 bp, Homo sapiens
aatgacaggggcagtgtgaatcacaaatagccacaaagcaggaacccccacctgtccatcagtagatgaatggacccacagaacagaacactgtgcccacygtgggacactatttggcagcggaagggaatgaagctctgatgccagtaggcggatgacccttgaagacactgctgagcgagagaagccagtcacagaggc

SEQ ID NO: 253320 - DNA, 201 bp, Homo sapiens
tcttgctgcctggggcaggtggttgtaaagccctgagcactgagaatccgtggaagaggaggagggggatggaacttgcttcaccctggggaacatccttyctgaatgtttggtggcttctccagccttggcaagaatgcagctgaagatggccaggtcagctgtggtggccaagtcattgcctttagggctggcgtgggg

SEQ ID NO: 253321 - DNA, 201 bp, Homo sapiens
cgggacccagcagggcattccctggactctgacatgttcagattcatcctcagctgtaaggcaggaggcacctgtcacatcagcgtttgatacaccttcayggcatgcctgcatgcagttgctgggcacgcccagctctgcagggacaagctgaggataggagcaaaaccccgtgggagggcagtgctgtcctgaggaagc

SEQ ID NO: 253322 - DNA, 201 bp, Homo sapiens
tcctccccagagctagcccttactggcctcttgtcccagagatggatgatgaggactatgagcgacgccgcagcgagtgtgtcagtgagatgctggacctrgagaagcagttctcggagctaaaggagaagtgagcgtggggacaccttgggctgggtctgcgaggatctgggatgaggaggtggtgggcctggtactggg

SEQ ID NO: 253323 - DNA, 201 bp, Homo sapiens; identical to SEQ ID NO: 50225

SEQ ID NO: 253324 - DNA, 201 bp, Homo sapiens
gtggtgtgcacctatagtcccagctactctgaaggctgaggtaagaggattgcttgagcctgagagatcaaggctgcagtgagccgtgatggtgccactgyacttgagcctgagtgaggtttggcctttgaggcctttccatctcccggggttgtccgagcgggtccccagctttccctggggagcctttgctcatatccc

SEQ ID NO: 253325 - DNA, 201 bp, Homo sapiens
ccaggccggcccatggtggaggcagaggctacagaaaagggagtatcctgtgggccagcaccccaattctaactctgggtctcggggcagaatggtgggaygacaaactgcacgccagaggcagctccaggtcttgggactccctgccgcccagcaagaggaagaaggcacctctggtttctggtatcctttcacccaagg

SEQ ID NO: 253326 - DNA, 201 bp, Homo sapiens
acaggtatcagtgtgacatgcagtcacatgcaatagctctagtcccctccatgttcatagtacctgtgttcatgtggagtcctggggtggcaggaattgtygtcatcccactctccactaaacagatgaggctcacagaagtgcagtgacctcttcccagggttgtgcagctgtgcaggcaggacctgaacagccctaagg

SEQ ID NO: 253327 - DNA, 201 bp, Homo sapiens; identical to SEQ ID NO: 50231

SEQ ID NO: 253328 - DNA, 201 bp, Homo sapiens
tggagaccggcccgcggtatcccagcatgcctcgggaccaaactgtccaactgtgagcatccccgacggtcgcctcctgatgacgcacacggaagcaccgmtaggctctgcctcccgaagaaaagggagccgcgcagcgcctacgggagtccggcggcagcagccggtaccggcaaccacgggcagctctcagggaatctc

SEQ ID NO: 253329 - DNA, 201 bp, Homo sapiens
gcccaccttcgacgagcgctttcggcagtacggcttcaaccgaatcagccaggtgctcataagggagagggcaggggtaatggggcaggaggggtggtggratcagggagttatgaggagtggccctggatggaaaggaggcaatgaagcaggagggatcatagttcaggaggtgggtggatggtgtggaagatccaggat

SEQ ID NO: 253330 - DNA, 201 bp, Homo sapiens; identical to SEQ ID NO: 50232

SEQ ID NO: 253331 - DNA, 201 bp, Homo sapiens
caggcatggtggtgcactcctgtaatcccagctactcaggaggctgaggcaggagaatcacttgaacctaggaggcaaggttgcagtgagccaagatcgcrtcattgcactccagcctgagcaagaagaacaaaattctgtctcaaataataataataataataaataaaaaataaaacactgaggaggtcaaagaaaatc

SEQ ID NO: 253332 - DNA, 201 bp, Homo sapiens; identical to SEQ ID NO: 50233

SEQ ID NO: 253333 - DNA, 201 bp, Homo sapiens; identical to SEQ ID NO: 50229

SEQ ID NO: 253334 - DNA, 201 bp, Homo sapiens
aggcacccaccaactattcccgctgggtcaacctgccggaagagagcttgctgcggcccgcctacgtggtaccttggcaggacccctgggagccattctaygtggcaggaggcaaggtgcccaccttcgacgagcgctttcggcagtacggcttcaaccgaatcagccaggtgctcataagggagagggcaggggtaatgg

SEQ ID NO: 253335 - DNA, 201 bp, Homo sapiens
gccaggcatggtggtgcactcctgtaatcccagctactcaggaggctgaggcaggagaatcacttgaacctaggaggcaaggttgcagtgagccaagatcrcgtcattgcactccagcctgagcaagaagaacaaaattctgtctcaaataataataataataataaataaaaaataaaacactgaggaggtcaaagaaaa

SEQ ID NO: 253336 - DNA, 201 bp, Homo sapiens
gaggcaggagaatctgttgaacccggaaggcagaggttgcagtgagtggagattgcgccactgtactccaacctggcgacagagctagactctgtcccccmaaaaaaaaaaaggaattagaaaatgatgacactattggctaaaataacaaagtttaaagaggaagataatggtgttgcagcagatgaacaatttgggata

SEQ ID NO: 253337 - DNA, 201 bp, Homo sapiens
caaggaagcgcgcctgccggggtgtggcgaggcggaggcgggacctggcgcgcgccgccgcagtgcgactgcgcacagtctaatccgcggggagagagaawtgcgcatgcgcgcctgtctcccgggacgctagagcaggcggttcctgggctgctccggtaggtttggcgtgcgcgggtttctgcagatctagggcgagct

SEQ ID NO: 253338 - DNA, 201 bp, Homo sapiens
cacacagcacaacacctggcatggagtacgtgcccaatagagaataatttcttctgtttcttgaggcttcctaacagctccggaattaccctacaacgtgstggtagtcggcaagaagcctgactggttgctttctatctcttgccagttaaggcctaaacctgtttctgcttaagaagacaaaagaattcttacagtggt

SEQ ID NO: 253339 - DNA, 201 bp, Homo sapiens
ctgaggcaggagaatctgttgaacccggaaggcagaggttgcagtgagtggagattgcgccactgtactccaacctggcgacagagctagactctgtcccmcaaaaaaaaaaaaggaattagaaaatgatgacactattggctaaaataacaaagtttaaagaggaagataatggtgttgcagcagatgaacaatttggga

SEQ ID NO: 253340 - DNA, 201 bp, Homo sapiens
tgaggcaggagaatctgttgaacccggaaggcagaggttgcagtgagtggagattgcgccactgtactccaacctggcgacagagctagactctgtccccmaaaaaaaaaaaaggaattagaaaatgatgacactattggctaaaataacaaagtttaaagaggaagataatggtgttgcagcagatgaacaatttgggat

SEQ ID NO: 253341 - DNA, 201 bp, Homo sapiens
aggcaggagaatctgttgaacccggaaggcagaggttgcagtgagtggagattgcgccactgtactccaacctggcgacagagctagactctgtcccccamaaaaaaaaaaggaattagaaaatgatgacactattggctaaaataacaaagtttaaagaggaagataatggtgttgcagcagatgaacaatttgggataa

SEQ ID NO: 253342 - DNA, 201 bp, Homo sapiens
agatttatatgctcctggtcccaggccaggatcccacaaccatacctacaggagttgtttctaacctgttattaaacagaggtcctgagacaacttacttstggattttattccagtcctatgaacagggctggtatgtccctgccagtgatgctggaccaagacccatggtggagtgtagagtaccagaagctatgttgg

SEQ ID NO: 253343 - DNA, 201 bp, Homo sapiens
gcatgcttttctgggaggaccccaaaagaaggcttacagtttcagcctgctttgcagtcagggcctgaggtatggtacagaaggtagtagcatgctggtaytactgaacagtgctgggcctaggggctgatctggcccagatgactcagtaggcacccttaggaatcaggggttggccaccaatactgatcttctcacagg

SEQ ID NO: 253344 - DNA, 201 bp, Homo sapiens
atttgtcttttcccctagagagctctttattgtgtcacctttatttaaactgattttccaaagttgtagtagaatctcagcattgaacagtccattacaamagtgtctgatccagccagtcatgtttcctatgagttcaggagtaactaaaccctacagctgctgaaagattgcatctgaaagaagattctgtgttaattc

SEQ ID NO: 253345 - DNA, 201 bp, Homo sapiens
acactaacccattgttaactgcatacctggaaataggtatgactgttgccacatgcctttgtgctctggtcttgatgcctctccagctgcattaataattwgaggactgcgtgtttcatttaaattttattatcctttagacagatctatattggcagaaaaacacactggcaatgttagaagtgtagactggcaatggtt

SEQ ID NO: 253346 - DNA, 201 bp, Homo sapiens; identical to SEQ ID NO: 50237

SEQ ID NO: 253347 - DNA, 201 bp, Homo sapiens
ggcgcgcgccgccgcagtgcgactgcgcacagtctaatccgcggggagagagaattgcgcatgcgcgcctgtctcccgggacgctagagcaggcggttccygggctgctccggtaggtttggcgtgcgcgggtttctgcagatctagggcgagcttgcacgttacatcaccgatgcatctcttcttgcttgcttaatttgc

SEQ ID NO: 253348 - DNA, 201 bp, Homo sapiens
tttcagcctgctttgcagtcagggcctgaggtatggtacagaaggtagtagcatgctggtattactgaacagtgctgggcctaggggctgatctggcccaratgactcagtaggcacccttaggaatcaggggttggccaccaatactgatcttctcacaggcctacacctcacagaagagctgggtttgtttcattctag

SEQ ID NO: 253349 - DNA, 201 bp, Homo sapiens
ctcatgtttgaggaaaaaggtaacaggttctgaaacatggagttatctccagggtgaagctggtggggaaatgcccctgccggtatcccatcccagagtcyactactctgccagtcagcttctgcaggcgtcatcttcaacaagccttccccccagggtagctgagaattggttcaccccatggtgagaggaatgtgagtt

SEQ ID NO: 253350 - DNA, 201 bp, Homo sapiens
ttgtcttttcccctagagagctctttattgtgtcacctttatttaaactgattttccaaagttgtagtagaatctcagcattgaacagtccattacaacaktgtctgatccagccagtcatgtttcctatgagttcaggagtaactaaaccctacagctgctgaaagattgcatctgaaagaagattctgtgttaattcac

SEQ ID NO: 253351 - DNA, 201 bp, Homo sapiens
tagagagctctttattgtgtcacctttatttaaactgattttccaaagttgtagtagaatctcagcattgaacagtccattacaacagtgtctgatccagycagtcatgtttcctatgagttcaggagtaactaaaccctacagctgctgaaagattgcatctgaaagaagattctgtgttaattcactcaacaatttttt

SEQ ID NO: 253352 - DNA, 201 bp, Homo sapiens
cagaagggaaaaggacctgcccaggaggagaagggaccgtgtgactatgtgaccataatccctacaaaaaaacacaaagtgttaagggaagacactgtggstggcatgctcttgtgatgtagtcgtaggtcggtaaaagaccacttatgaatcaagtatattctgacaagtggaaaaggatatgaatgctctcctgggtaa

SEQ ID NO: 253353 - DNA, 201 bp, Homo sapiens; identical to SEQ ID NO: 50240

SEQ ID NO: 253354 - DNA, 201 bp, Homo sapiens; identical to SEQ ID NO: 50244

SEQ ID NO: 253355 - DNA, 201 bp, Homo sapiens; identical to SEQ ID NO: 50245

SEQ ID NO: 253356 - DNA, 201 bp, Homo sapiens; identical to SEQ ID NO: 50246

SEQ ID NO: 253357 - DNA, 201 bp, Homo sapiens
tacaattgaataaaaatccaataaaaatggacaaaacatttgtttgttttctggtgtttgtttttgtttttgagatggagtcccgctccatcacccaggtkggaatgcagtggcgcgatcctggctcactgcaacctccacctcctgggttcaagcaattctcctgcctcagcctccccagtagctgggattacaggcgcc

SEQ ID NO: 253358 - DNA, 201 bp, Homo sapiens; identical to SEQ ID NO: 50241

SEQ ID NO: 253359 - DNA, 201 bp, Homo sapiens; identical to SEQ ID NO: 50253

SEQ ID NO: 253360 - DNA, 201 bp, Homo sapiens
aagtgctggaattgcaggcgtgagccaccatgcccagctgactgggtaatttataaaggaaagaggtttaatttactcacagtttcacatggctggggagrcctcaggaaacttacagtcgtggcagatggtgaaggggaaacaggcacctaggttcttcatgaggcagcaggacagagaagagcaggggaaactgccact

SEQ ID NO: 253361 - DNA, 201 bp, Homo sapiens
cgacccttacatgatggtaagcgtgagccgatgtgtttttgtgactggaagggcttatttgtttggtttgggttgtggctggggttttgtatgtatctgtsgggttttggttttatttctgttatatcccgactatactgccccaccctgcccagactcctgcagttgctgaagtcaggcctgtcccctgcccacacttgg

SEQ ID NO: 253362 - DNA, 201 bp, Homo sapiens
tatctagtgtgataaaaatcagcctgtcttcacagactatggctttttattgagtgagatttcatttttgcagcaggaaagatctggtgcctccatgaccygcctctgtgaggtctgctgctgtcatgagaccgagtgaggcagtgcttcacggccctttcacttacgcagaatattaaaggtcgttttagtgcgattcag

SEQ ID NO: 253363 - DNA, 201 bp, Homo sapiens
attcagtcacctcccaccaggtccctctcttgacatgtggggattacaattcgagatgagatttaggtggggacacagagccagaccatattgatgattcrtagacctaaataaaacacaacaatataaaactggaagaaggtaacatcagagaaaattgaggtggctttgggtttggtgatgactttataacaccaaaag

SEQ ID NO: 253364 - DNA, 201 bp, Homo sapiens
gtgagaccctgtctcaaaaaaaagctgcttagttgaatgggaagagctacttgcatataggtggcagcaagttgttgatggaagttggatctctgcagaarcagcagaggcagagaagctgctgtcatgtcaacactaacagtcattcttgttttcttttgccaggcggccttctgatctgtttaccacgtgagcaagcag

SEQ ID NO: 253365 - DNA, 201 bp, Homo sapiens
gttttttgaggaaaggactttgttgtttttgttgaaaacgccttccaagtcaaagtggtattcaaactttcccataactctaagatggcttcaaaattctsgtctcttgtcacttgcggccagcgcctgctctttttgggcagggagacttcttggaatcgtgttcgaaggctgactcctgctcagttgttacgtttccca

SEQ ID NO: 253366 - DNA, 201 bp, Homo sapiens
ctgaatttatagggtagattcaggcacataatttgcttccttttgtcctaattctggctttttccctgcttttggctattgggctgcaaagtagaagtacrgcatccccctctgtatctgcagaatcctcgtgggggattcaaccaaccacagactgaaaatatgcagggaaagaagtggatggttgcatctcaacatgca

SEQ ID NO: 253367 - DNA, 201 bp, Homo sapiens
caccgaaatcattgctcatcccaaaccgtgtttttgtgaagacggtttggattactgcccaaactcgggcttcgtgagatttatatgagcgatgtgcgtcycaagggatggaaaactctataaatgggaattatgttcttaatcataaattttataggggaaaccgaccttaaaacttggggtgtttgtaattctagtccc

SEQ ID NO: 253368 - DNA, 201 bp, Homo sapiens
gtagcaggttgcaaggctctgtcccatacatgctggtagttggcttcaatttaagtaaatgcaaaggcagatatatttttgacagattattccttctcttktgttaataacaatgagctcatctccttggttagtttgactagaacatgcccttttcttttcttcaggccagacaatgcagtgccaggggacgtgctggtg

SEQ ID NO: 253369 - DNA, 201 bp, Homo sapiens
ctcatgtttccctctcttcccagggcaggatagcgtgtgccaatgtcctcagtgacctctatgcaatgggggtcacggaatgtgacaatatgctgatgctscttggagtcagtaataaaatgaccgacagggtaagtaggagctacccggctgctgcctggtccgtgttgtcccggtggcatctctggccttggttagact

SEQ ID NO: 253370 - DNA, 201 bp, Homo sapiens
gtatctgcagaatcctcgtgggggattcaaccaaccacagactgaaaatatgcagggaaagaagtggatggttgcatctcaacatgcacagactttttttkgtcttgtcattattccctaaacagtacagcataacaaatatttacatcgcattcacatcgtattgggtgtcataggtgatctagagatgatttaaggtat

SEQ ID NO: 253371 - DNA, 201 bp, Homo sapiens
cccaggaggcacaggttgcagtgagccaagatcgccccactgcactacagcctgggcgacagagtgagactctgtctcaaaaaaaaaaagaaaaatacacrtgcctagccccagcctcccaaaaacggtgggatccatctcgggtgggcctgggcctcagcatctgtgaaggctgcctgggagattccgtagtaggccggg

SEQ ID NO: 253372 - DNA, 201 bp, Homo sapiens
cagatggaaagtccccggtcgtcctttctcatgtttccctctcttcccagggcaggatagcgtgtgccaatgtcctcagtgacctctatgcaatgggggtyacggaatgtgacaatatgctgatgctccttggagtcagtaataaaatgaccgacagggtaagtaggagctacccggctgctgcctggtccgtgttgtccc

SEQ ID NO: 253373 - DNA, 201 bp, Homo sapiens
attttacatggtttctgatgggacaatacgataatgtctgtaaagatgtacgcacaataactatacttaagataacccaagttccatttataggattctcrtcttcaaagaaattgtatacggtaccagtcacacgctacagtaatacagtaaaataataaaagtcatacagtgaaaaagatttttattcaaggcatcatt

SEQ ID NO: 253374 - DNA, 201 bp, Homo sapiens
ccggggcaagggaccacagtgctgggaccacaaagccctggtcacgtcgacctgtgctgtggcgagggggcttcaggactctgccaggcctctcaccgccwttatagaggacgcttcagcctcccgtttaaaaaaacaaaccattttctagaagtaagctccaacagggcagggtttttttcccctgctggttcaggctct

SEQ ID NO: 253375 - DNA, 201 bp, Homo sapiens
tgactcctgctcagttgttacgtttcccaccgaaatcattgctcatcccaaaccgtgtttttgtgaagacggtttggattactgcccaaactcgggcttcrtgagatttatatgagcgatgtgcgtcccaagggatggaaaactctataaatgggaattatgttcttaatcataaattttataggggaaaccgaccttaaa

SEQ ID NO: 253376 - DNA, 201 bp, Homo sapiens
tacaactatcatctgaaactaccagtcctgagaaacagttgaaagagaataatcaataattacacgtctttcatcaacctggtatatcttagcttgatgtmgcagggtagagaaattctctaaggctgccacgttctttagcagtttttccctcctccccctgtgatggggagcagagcagaaggccactgcggggatgtt

SEQ ID NO: 253377 - DNA, 201 bp, Homo sapiens
ccaccgtgtgatgtgccgctgtacatagtaggtttctgaccactgagttaaagttcctggctactgatgatacactgctgaggtgtgttccccagttgttyactgcgtagttgcagccagccaccctttgatccacccaacctttaaccccaatttgctaccacccaggaggagccagtggagagactaggaaaatctggt

SEQ ID NO: 253378 - DNA, 201 bp, Homo sapiens
aacgaatggcctagtgactctgtgatgcaggaaaggttgccagtctgcaaatcatagaaactgaggaccccatcctagtagctgctactcctggaaagtcyccacgttctctgtggagtccactccatggctcactcagtttctgcagatggaaagtccccggtcgtcctttctcatgtttccctctcttcccagggcagg

SEQ ID NO: 253379 - DNA, 201 bp, Homo sapiens
ctgatgctccttggagtcagtaataaaatgaccgacagggtaagtaggagctacccggctgctgcctggtccgtgttgtcccggtggcatctctggccttsgttagacttggtttcccatctagaaagcgaggagcccaggccatatggctccctgcactccttctggctctccactttttggcagttaccagtaaattaa

SEQ ID NO: 253380 - DNA, 201 bp, Homo sapiens
agaaggccactgcggggatgttgcgcagaggtgccttccagccccacctcccaggcctgagctagcagggagctggaagcaggtgaggcagggagtgtcasggatgggggagcccttctccactagcaggacactacactgcatgtacagcagtgccgccgtgtgtcccgctagactacacatacccaataaatcacagca

SEQ ID NO: 253381 - DNA, 201 bp, Homo sapiens; identical to SEQ ID NO: 50259

SEQ ID NO: 253382 - DNA, 201 bp, Homo sapiens
gcaggagaattgcttgaacctgggaggcggaggttgtgccgagctgagattgcgccattgcactccagcctgggcaacaagagcgaaactccgtctcaaaacaaacaaacaaacaaacaaacaaacaaaaacagaaaactcactctattagtgatctgattgcagaaaagccagtgtgttttctactattatatttttaga

SEQ ID NO: 253383 - DNA, 201 bp, Homo sapiens
ttcccatctagaaagcgaggagcccaggccatatggctccctgcactccttctggctctccactttttggcagttaccagtaaattaaaatgaggaagcckggcctagtcatctctgcacttctgccacctgctccctttctctcttcccagtagactgaaaccaagacttttttttttttttttttttgagacaggagtc

SEQ ID NO: 253384 - DNA, 201 bp, Homo sapiens
gcagttaccagtaaattaaaatgaggaagcctggcctagtcatctctgcacttctgccacctgctccctttctctcttcccagtagactgaaaccaagacttttttttttttttttttttgagacaggagtctcactctgtcgcccaggctggagtgtagtggcgcaatctcagtccactgcaacctccgcctcccgggtt

SEQ ID NO: 253385 - DNA, 201 bp, Homo sapiens
ccgccactgacatcacgggcttcgggattttgggccatgcgcagaacctggccaagcagcagaggaacgaggtgtcgtttgtaattcacaacctcccggtsctggccaagatggctgcggtgagcaaggcctgcggaaacatgttcggcctcatgcacgggacctgcccggagacttcaggtacaggatgctgggcgcatc

SEQ ID NO: 253386 - DNA, 201 bp, Homo sapiens
accagttgtcatcttttagaggtgcctttttagtattgccttctgtctctaagacagggaccaccaaggcgtctgggtgccaggtaggaaactcaccatcrgtcagtctgagtttgagaacctggaggcagaaatcaccaagacattagacccacagattgcctgcaaatccaccaaacccctgggccgaaaaatccgtcc

SEQ ID NO: 253387 - DNA, 201 bp, Homo sapiens
attagagacggggttttatcacgttggccaggctgttcctgaactcctgacctcaggtaatccacctatctcggcatcccaaagtgctgggattgcaggcrtgaaacaccgtgcccggcccaaggcatttgtgtatatttttttttgttttattgagacagagtctcactctgtcacccaggctagagtgtagtggcacaa

SEQ ID NO: 253388 - DNA, 201 bp, Homo sapiens
ttttttctcagagccgccccctctctctcccagctgcaggactcatgcacacgttcaatgcccacgccgccactgacatcacgggcttcgggattttgggycatgcgcagaacctggccaagcagcagaggaacgaggtgtcgtttgtaattcacaacctcccggtgctggccaagatggctgcggtgagcaaggcctgcg

SEQ ID NO: 253389 - DNA, 201 bp, Homo sapiens
ccaagaagatgtagagctggcctaccaggaggcgatgatgaacatggcgaggctcaacaggacaggtatgacaggtgggaagggcgcttcggtcccagggrtccaagacagtaaatgtcttaggcttttctggccacatactgtctcagggtaggtggccagatttttggccagtgactacagaccgtcttctcctggtac

SEQ ID NO: 253390 - DNA, 201 bp, Homo sapiens
tcctggtaccaggttggcattccatagatcactgcagatggtccctgacttacagtgctttataattaagaaggaagtcctaacttctgacataccagagraactatttctagaaagcgtttgtgtgggttacctatgtaagatttggaagcaaaccattcagaatggaaatttagaaagtttaagatactggagctattt

SEQ ID NO: 253391 - DNA, 201 bp, Homo sapiens; identical to SEQ ID NO: 50257

SEQ ID NO: 253392 - DNA, 201 bp, Homo sapiens
ctttgactttttatttgtacctttttcaaccttaggaaagggataaagtgatgcctctgattatccaaggttttaaagacgcagctgaggaagcaggaacrtctgtaacaggcggccaaacagtactaaacccctggattgtcctgggaggagtggctaccactgtctgccaacccaatgaatttatcatgtaagttgatt

SEQ ID NO: 253393 - DNA, 201 bp, Homo sapiens
tggggcaagcctgtagtttcagctactctggaggctgaggcaggagaatcgcttgaaccccaggggtggaggttgcagtgagctgagatcatgcccctgcrctctagcctgggcaacagaacaagattctgtctccaaaaaaaaaaaagacaagaacgcaaggctgggcgcggtggctcatgcctgtaatcccagcgcttt

SEQ ID NO: 253394 - DNA, 201 bp, Homo sapiens
gcgtactataccattcacccatttaaagagtcagtggtttggagtatactcagagttgtacagccattaccggagttgatgttaggatgttttcattgctrcaggaagaaaccccatcctcctcggctctcactgttcactcctgctccatcctggattttgtcacttagcatagtattagcatacttttaagggtcatct

SEQ ID NO: 253395 - DNA, 201 bp, Homo sapiens
tgaattttgtgtttattttcttgcattttagaatatttttattgcacagcccttgtgttcttaagcagcaaattagttttgcattttttttacttgttttrttcaccattgttcctgagagtctccttgttatatgtagctgtagtagattccttttggctgtgttgatttttccactggcttctctgctctcctgtttca

SEQ ID NO: 253396 - DNA, 201 bp, Homo sapiens
gcttctctgctctcctgtttcacactggggcgactgctatggacttccttggcccagccctctgaggcacgtgtaagagatcagtactggctcagcttttrtagatagtgccaaactgtcttccaaagtgttcaccacagtttacaatggcacactatgtttagaaagcgttttttaatatgtcttctcttcccatttatt

SEQ ID NO: 253397 - DNA, 201 bp, Homo sapiens
tagaaagcgttttttaatatgtcttctcttcccatttattttatacattttttctactataaaagaattacatgcttattatagaaaagtttttagaaaayggaaaatagtacagaaaaaagttgtccatagtccctccacccaaaacagctccggctagcatttttatgtattcttccaggactttttttcatgtttggc

SEQ ID NO: 253398 - DNA, 201 bp, Homo sapiens
aaataccagattattggaaacctatatttcttccgcacatctgtccgttttctcctctggagcaatactcttgagactgggcaggtaagccacagcccagrtcccacatgaccaggtggcagggatggctaaaaccacagtccattgttttccagcatctcctaaaatgagagcacccagaacagaaggggcgctaaatca

SEQ ID NO: 253399 - DNA, 201 bp, Homo sapiens
ttttgtatttttggtagagacagggtttcactatgttggccaggctggtctcgaactcctgacctcaggtgatctaccctccttggcctcccaaggtgctrggattataggcgtgagccatagtacacataatttttaatgactagataatgttctaccagagaaatgtaccacaattatcttttacctattgttttacaa

SEQ ID NO: 253400 - DNA, 201 bp, Homo sapiens
gatctcggctcactgcaaccgctacctaccaggttcaagcagttctgttgcctcagccttcccagtagctgggactacaggcacgcatcatcaccatgccyggcggatttttgtatttttggtagagacagggtttcactatgttggccaggctggtctcgaactcctgacctcaggtgatctaccctccttggcctccca

SEQ ID NO: 253401 - DNA, 201 bp, Homo sapiens
taaaaaagaatgcaataggatattatgtctttaaaatgccatttttcttttttcttagatgtgcagtaatttattagaggaaacataaatggaggataaaygggagatggagcaagcgtaggtagagagagccatcagacagcagtgcaggtctgacaccatacgccccagtagtttgactcctagggagcttttatatcc

SEQ ID NO: 253402 - DNA, 201 bp, Homo sapiens
ccagcatggcctgccggccgccgaggccgccacccacagcctacaggctcgccatcgctcattcccactcccgcagccccagctggagccagatggcgcgycctcctgaagtaccatttctcttttgccccctttgttccctttacctttactgttttcatcttttaagtctccctgtttttccctttttttcggtttctc

SEQ ID NO: 253403 - DNA, 201 bp, Homo sapiens
gctggagccagatggcgcgtcctcctgaagtaccatttctcttttgccccctttgttccctttacctttactgttttcatcttttaagtctccctgttttyccctttttttcggtttctctctttttctatttcctttcctctagaactctagttttctacccgcaaaagagtggaatcaccttaggattttaaatataca

SEQ ID NO: 253404 - DNA, 201 bp, Homo sapiens
tggcgcgtcctcctgaagtaccatttctcttttgccccctttgttccctttacctttactgttttcatcttttaagtctccctgtttttccctttttttcrgtttctctctttttctatttcctttcctctagaactctagttttctacccgcaaaagagtggaatcaccttaggattttaaatatacacatgccggccag

SEQ ID NO: 253405 - DNA, 201 bp, Homo sapiens
atacacatgccggccaggcctggtggctcacgcctgtaattccagcactttgggaggtcgaggtcaggagttcgagaccagcctgaccaacatggtgaaaycctgtctctactaaaaatacaaaaattagcggggcgtcgtggcgtgtgccctgtaatcccagctactccagaggctgaggcaggagaatcgcttgaaccc

SEQ ID NO: 253406 - DNA, 201 bp, Homo sapiens
gcatacactgtttcatgagtcttaaattttctaaaaatacaaaaaagcattctcggtaaaatgagagagtcgatgtagagaatcaaaagttcccttttgtytgtcaatatttgtttcagtgtagcttggaaaaaatagctaccacatgggttattgaagccccaaacaccttacccctacacagtgttatgtggttcacga

SEQ ID NO: 253407 - DNA, 201 bp, Homo sapiens
cttatcatttttctaagattaagctccttttgtttcctgattaatttggtggccacatctgtccggaacttgtgggacgtcctcctcttcatcatggcagrtactccagcatggcctgccggccgccgaggccgccacccacagcctacaggctcgccatcgctcattcccactcccgcagccccagctggagccagatgg

SEQ ID NO: 253408 - DNA, 201 bp, Homo sapiens
cccggaaagttacgaattggacaaaagcttccggctaaccagattcactgaactgaagggcacaggctgcaaagtgccccaagatgtcctgcaaaaattgytggaatctttacaggagaaccacttccaagaagatgagcagtttctgggagccgttatgccaaggcttggtaggtaacccagtgtttctttgatggtctg

SEQ ID NO: 253409 - DNA, 201 bp, Homo sapiens
ttcctgattaatttggtggccacatctgtccggaacttgtgggacgtcctcctcttcatcatggcagatactccagcatggcctgccggccgccgaggccrccacccacagcctacaggctcgccatcgctcattcccactcccgcagccccagctggagccagatggcgcgtcctcctgaagtaccatttctcttttgcc

SEQ ID NO: 253410 - DNA, 201 bp, Homo sapiens
ggtgacagggtgagatcatgtctcaaaaaaaaaaaaaaagttatagatcagaggaacagaatagagaatccagaggtaggtccatattatagtcaactgattttttttttttttttgagatggagttttgctctttcgcccaggctgaagtgcagtggcaggatcttggctcaccgcaacctccgccttccgacttcaagt

SEQ ID NO: 253411 - DNA, 201 bp, Homo sapiens
agttgaaaacttacattcacacaaaagcctgcagacaaatgttcatagcagcattattcataattgccagaacttggaagcagccattcatttcttcagtrggtgagtggatgaatggataaacaaaatgtagtgtatctgtatgatggaatataattgagcagtaaaaagaaatgagctatcaagccatgaaaagatgtg

SEQ ID NO: 253412 - DNA, 201 bp, Homo sapiens
atcgtgttcgaaggctgactcctgctcagttgttacgtttcccaccgaaatcattgctcatcccaaaccgtgtttttgtgaagacggtttggattactgcmcaaactcgggcttcgtgagatttatatgagcgatgtgcgtcccaagggatggaaaactctataaatgggaattatgttcttaatcataaattttataggg

SEQ ID NO: 253413 - DNA, 201 bp, Homo sapiens
ttggcctcccaaagtgccgagattgtaggcatgagccaccacgcccatccttgtgttgtatattctttgggctcagagggaaaacgtgtttttctaaaatwaggatttagcatcgtgaagaattttgtccaatgcatttacattaatgcccttttctgacaagtttgtatcgggcgtttcattcttctgtgtgataaagca

SEQ ID NO: 253414 - DNA, 201 bp, Homo sapiens
ccgagtagctgggactacaggcgcccgccaccatgcctggctaattttttgtatttttagtagagacggggtttcacagtggtctcgatctcctgacctcrtgatccgcctgcctcggcctcccaaagtgctgggattacaggcgtgagacaccgcgccccgccatcttttttttttttttttccttgagatagagtctca

SEQ ID NO: 253415 - DNA, 201 bp, Homo sapiens
aatctgtttgggatatgtggctgtttccaacttttctttaggagagttgtttgcaggctttttcgctccatagctcttcccccaagactgtcggttctaamcttgcttctcctcctcattcgctgcacatataccccttcccctatctaaataaattgcagacttctaaaatttagaatggagaaaaactggtacattctt

SEQ ID NO: 253416 - DNA, 201 bp, Homo sapiens
agctgggactacaggcgcccgccaccatgcctggctaattttttgtatttttagtagagacggggtttcacagtggtctcgatctcctgacctcgtgatcygcctgcctcggcctcccaaagtgctgggattacaggcgtgagacaccgcgccccgccatcttttttttttttttttccttgagatagagtctcactccat

SEQ ID NO: 253417 - DNA, 201 bp, Homo sapiens
tgaggcaggagaatcgcttgaacccaggaggcacaggttgcagtgagccaagatcgccccactgcactacagcctgggcgacagagtgagactctgtctcaaaaaaaaaaagaaaaatacacatgcctagccccagcctcccaaaaacggtgggatccatctcgggtgggcctgggcctcagcatctgtgaaggctgcctg

SEQ ID NO: 253418 - DNA, 201 bp, Homo sapiens
ccgcctgcctcggcctcccaaagtgctgggattacaggcgtgagacaccgcgccccgccatcttttttttttttttttccttgagatagagtctcactccrtcacccaggcttgagtacagtggtgcaatctcagctcactgcaacctctgcctcccgggttcaaggccctcccaggcctgattctcatgcctcagcctcc

SEQ ID NO: 253419 - DNA, 201 bp, Homo sapiens
aaacagcttttaaatgtacacacgattactaaatgtatcctaattaaagaaatggtaaaagaagtgtgccttagaaccagagacatttgttgcctggtgcytaggagctatcaagtaatgattgctgctgctggcgggggcggtgcgggggttgggggtgggtagtggtgtgataacttaggttgtctttctgatggagga

SEQ ID NO: 253420 - DNA, 201 bp, Homo sapiens
ggcacatgccaccacaccaagcaatattttttttttttgtttttgagatgaagtctcactcttgtgcccagggctggagtgcagtgatgcgatcttggctwactacaacctctgcctcccaggttcaagcgattctcctgcctcagcctcccaagtagctgggattacaggcgcatgctaccacacccggctaatttttgt

SEQ ID NO: 253421 - DNA, 201 bp, Homo sapiens
gagtcttactccgtcgcccaggctggagtgcagtggtatgatctcggctcactgcaagctccatctcccgggttcatgccattctcctgcctcagcttccygagtagctgggactacaggcacctgccaccatgcccggctaattttttgtatttttagtagagatggggtttcaccatgttaggcaggatggtctcgatc

SEQ ID NO: 253422 - DNA, 201 bp, Homo sapiens
agactgaggagagtggtttgaacccaggaggcggaggttgcagtgagccaagatcgtgccactgtactccagcctgggtgacagagtgaaactcagtttcaaaaaaaaaaagatctagaattagaaataccatttgacccagcaatcccattactgggtatatacccaaaggattataaatcatgctgctgtaaagacgca

SEQ ID NO: 253423 - DNA, 201 bp, Homo sapiens
acttctgacataccagaggaactatttctagaaagcgtttgtgtgggttacctatgtaagatttggaagcaaaccattcagaatggaaatttagaaagtttaagatactggagctatttccagaacataaccttggaagtctagaagtgcccccactcccacccatcccctgcattcctgcttaggtgtaaccactgaatt

SEQ ID NO: 253424 - DNA, 201 bp, Homo sapiens
cttctgacataccagaggaactatttctagaaagcgtttgtgtgggttacctatgtaagatttggaagcaaaccattcagaatggaaatttagaaagtttaagatactggagctatttccagaacataaccttggaagtctagaagtgcccccactcccacccatcccctgcattcctgcttaggtgtaaccactgaattt

SEQ ID NO: 253425 - DNA, 201 bp, Homo sapiens
ttctgacataccagaggaactatttctagaaagcgtttgtgtgggttacctatgtaagatttggaagcaaaccattcagaatggaaatttagaaagtttaagatactggagctatttccagaacataaccttggaagtctagaagtgcccccactcccacccatcccctgcattcctgcttaggtgtaaccactgaatttt

SEQ ID NO: 253426 - DNA, 201 bp, Homo sapiens
tgaattttctgttagctgaagattaagcagaaatactttattcccttttcctaaaaggactcctaaaatgctcacattcccttcattgccctaggaaaggyggttccagccttagggttcttgtgctgtacttggatggcagtgactgtgtcaggagggcattggggttctctgcagggtgcatcgggcgaaaagcgtgtt

SEQ ID NO: 253427 - DNA, 201 bp, Homo sapiens
ggaggagccagtggagagactaggaaaatctggtttgctataaaatgccaggtgttcttcgtgtgtggcaaggacagtgggatcaggctgcactgtagggrctttatcatgaggcagccacgtggggggtgttcaccctcaggtaccagtgacaaataccagattattggaaacctatatttcttccgcacatctgtccgt

SEQ ID NO: 253428 - DNA, 201 bp, Homo sapiens
ggattttttctttttcttttttttttcctggtaggggtgaggctgtgttaaatgcgaggtgttttttgaggaaaggactttgttgtttttgttgaaaacgscttccaagtcaaagtggtattcaaactttcccataactctaagatggcttcaaaattctcgtctcttgtcacttgcggccagcgcctgctctttttgggc

SEQ ID NO: 253429 - DNA, 201 bp, Homo sapiens
ttagggagaatccattgagttaaagagtggtatttctatttaggtgctaaagagtgtgatgaaacaaatttctgagaggttgtgcccatgggctgtttacrtgaattatctcacacgttctcctctgacagatgaaaactgatccagtgcctgacattgttgaaacttgccattctgaacttcacttctccattccctaag

SEQ ID NO: 253430 - DNA, 201 bp, Homo sapiens
tgaggaaaggactttgttgtttttgttgaaaacgccttccaagtcaaagtggtattcaaactttcccataactctaagatggcttcaaaattctcgtctcytgtcacttgcggccagcgcctgctctttttgggcagggagacttcttggaatcgtgttcgaaggctgactcctgctcagttgttacgtttcccaccgaaa

SEQ ID NO: 253431 - DNA, 201 bp, Homo sapiens
gcagtggcgtgatcttggctcactgcaacctctgcctcctgggttcatgcgattcttctgcctcagcctcttgagtagctgggattataggcccctgccacatgcccggctaatttttgtatttttagtagagatgggagttttaccatgttggccaggctgttctcgaactcctgacctcaggtgatctgcctgcctcag

SEQ ID NO: 253432 - DNA, 201 bp, Homo sapiens
tgaaccacagtgcttccaggttgacacatgaagtgcccagaggtgctgttctaatgctgagtcctagaagaacctttgggatttgctgttcaaggtggcayggtgtcatgtgaacctgcaggctggccctcttgccacagttaaaaccacagtccagatgtcagattttacatagatgtctgtgctgacgcagtcccgtta

SEQ ID NO: 253433 - DNA, 201 bp, Homo sapiens
attacaggcgtgagacaccgcgccccgccatcttttttttttttttttccttgagatagagtctcactccatcacccaggcttgagtacagtggtgcaatytcagctcactgcaacctctgcctcccgggttcaaggccctcccaggcctgattctcatgcctcagcctccctccaagtagctggaatgacagacgtgcac

SEQ ID NO: 253434 - DNA, 201 bp, Homo sapiens
aagaaatggtaaaagaagtgtgccttagaaccagagacatttgttgcctggtgcctaggagctatcaagtaatgattgctgctgctggcgggggcggtgcrggggttgggggtgggtagtggtgtgataacttaggttgtctttctgatggaggatgtcagtattgctgaaaaccttccagcaagtttgcccattgcctcc

SEQ ID NO: 253435 - DNA, 201 bp, Homo sapiens
acagcaccagaccctattctagtagactgtggtggcacaggtgtgaaagagaaaccgtggataacggagctgcttttcagccctaggggcgtgctcaagartcccccgttactctgatcaaaggacttgctaagtttagaaataaagcgctttacaaatcaaatgtatgtaattcaaatttaagattattcaaattaagaa

SEQ ID NO: 253436 - DNA, 201 bp, Homo sapiens
tctgacataccagaggaactatttctagaaagcgtttgtgtgggttacctatgtaagatttggaagcaaaccattcagaatggaaatttagaaagtttaagatactggagctatttccagaacataaccttggaagtctagaagtgcccccactcccacccatcccctgcattcctgcttaggtgtaaccactgaattttg

SEQ ID NO: 253437 - DNA, 201 bp, Homo sapiens
ctgacataccagaggaactatttctagaaagcgtttgtgtgggttacctatgtaagatttggaagcaaaccattcagaatggaaatttagaaagtttaagatactggagctatttccagaacataaccttggaagtctagaagtgcccccactcccacccatcccctgcattcctgcttaggtgtaaccactgaattttgt

SEQ ID NO: 253438 - DNA, 201 bp, Homo sapiens
tacttgggaagctgaggttgggaggatcccttgagcccaggaggtcgaggctgcagtaagctgtgatcgcaccacctcactccagcctgggtgacaaagcragaccctgtctcaaaaaaaacccaaaaacactgataataccaactgctggcaaggatgtagagaaacaggaaggaactctcatttattactggtaggact

SEQ ID NO: 253439 - DNA, 201 bp, Homo sapiens
gtaggtgagtggatgaatggataaacaaaatgtagtgtatctgtatgatggaatataattgagcagtaaaaagaaatgagctatcaagccatgaaaagatrtggaggaatcttaagtgcatattactaagtgaaagaagccagtctgaaaaagctccatacagaaggattccaactgcatgacattctgcaaaactgtaga

SEQ ID NO: 253440 - DNA, 201 bp, Homo sapiens
ctgaagtgggagggtcacctgagccaggacattgaggctgcagtgagctgtgattgtaccactgcactccagcttgggccacagagtgagaccctgtctcaaaaaaaagctgcttagttgaatgggaagagctacttgcatataggtggcagcaagttgttgatggaagttggatctctgcagaagcagcagaggcagaga

SEQ ID NO: 253441 - DNA, 201 bp, Homo sapiens
agtgatctcctgcctctgcctcccaagtagctgggactacaggcgcatgccaccacacccagctaaatttttttgtgtttttagtagagacggggtttcamggtgttggccaggctggtctcaagctcctgagctcaggttatccacccacctcagcctcccaaagtgctgggattacaggcgtgagccaccgcacccggc

SEQ ID NO: 253442 - DNA, 201 bp, Homo sapiens
tgaagtgggagggtcacctgagccaggacattgaggctgcagtgagctgtgattgtaccactgcactccagcttgggccacagagtgagaccctgtctcaaaaaaaagctgcttagttgaatgggaagagctacttgcatataggtggcagcaagttgttgatggaagttggatctctgcagaagcagcagaggcagagaa

SEQ ID NO: 253443 - DNA, 201 bp, Homo sapiens
ctgggactacaggcgcatgccaccacacccagctaaatttttttgtgtttttagtagagacggggtttcaaggtgttggccaggctggtctcaagctcctsagctcaggttatccacccacctcagcctcccaaagtgctgggattacaggcgtgagccaccgcacccggctgtatgtttatttttttaactttttttttt

SEQ ID NO: 253444 - DNA, 201 bp, Homo sapiens
gaagtgggagggtcacctgagccaggacattgaggctgcagtgagctgtgattgtaccactgcactccagcttgggccacagagtgagaccctgtctcaaaaaaaagctgcttagttgaatgggaagagctacttgcatataggtggcagcaagttgttgatggaagttggatctctgcagaagcagcagaggcagagaag

SEQ ID NO: 253445 - DNA, 201 bp, Homo sapiens
cctgatgactgatgaggccgagcatcttttcatgtgcttactacccatttgtgtatcttctttggagaagtttctctcctaaccaagttgtcactttccaygtttgatgtcttgttaagaaaagtcagtcttttggccgggcgtggtggctcatgcctgtaatcccagcactttgggaagccaagacgggtggatcatctg

SEQ ID NO: 253446 - DNA, 201 bp, Homo sapiens
aagtgggagggtcacctgagccaggacattgaggctgcagtgagctgtgattgtaccactgcactccagcttgggccacagagtgagaccctgtctcaaaaaaaagctgcttagttgaatgggaagagctacttgcatataggtggcagcaagttgttgatggaagttggatctctgcagaagcagcagaggcagagaagc

SEQ ID NO: 253447 - DNA, 201 bp, Homo sapiens
aaaagcagctaagtttgtaagcttaaatatatagatactacagggaaggaatttttatagataccttttattcaggcagtatactttagaagtgtgttcartgactttttggtattacagttggttttaagtaacttgttacacatttaaccagcatcaaataaattgacattatacataggagatgctcaaatactttga

SEQ ID NO: 253448 - DNA, 201 bp, Homo sapiens
ggtggtggtggtttttcctttgtggttttttttgttttgttttgtttttgtttttgagacggagtcttgctctgtcgcctaggctggagtgcagtggcgcratcttggctcactgcaagctccacctcccgggttcatgccattctcctgcctcagcctcctgagtagcccggactacagcgcccaccaccaagcctggct

SEQ ID NO: 253449 - DNA, 201 bp, Homo sapiens
ctgagggctgtaaagactcgtttgaaaatggagagccaagaaccaacggaatcttctcagaatggcaaacagtatatcatttcagaggaggtataacttgyttttcactttcccttccctcccccacataaatctgagtttagcagaaatatatagactgttgttacaatggtggtctttcattcttgaagacagttgtaa

SEQ ID NO: 253450 - DNA, 201 bp, Homo sapiens
aaaattaatcaggcatggtggcaggtacctgtaatcccagctacttgggaggctgaggcaggagaatggcatgaacccaggaggcggagcttgcagtgagyggagatcgcgccactgcactccagcctgggcgacaaggcaagactctgtctcaaaaaaaaaaaaaaaattgtagaacactcaacatcgtgtacatgtatc

SEQ ID NO: 253451 - DNA, 201 bp, Homo sapiens
tcacttgaacccaggaggcggaggttgcagtgagctgagatcgcgccattgcactccaccctgggcaacagagtgagactctctcaaaaaaaacaaaaaaraaaaaaaaaaaaagaaaaatctgatgaagaagggtggcctctaagtgcctagaacaggcatggcaggagcttggctgttgtggctgagggtgactaggac

SEQ ID NO: 253452 - DNA, 201 bp, Homo sapiens
caccaatgatttggacttgcaggtctcatagatgatggtgaaaccccagaagcagctgctctccgggagcttgaagaagaaactggctacaaaggggacaytgccgaatgttctccaggttggtattgcttgaaaattcaccaagtgatggattcctccgtctgggaagggattgattatttgggtgttctttacgctcag

SEQ ID NO: 253453 - DNA, 201 bp, Homo sapiens
tggctgttgtggctgagggtgactaggactgctgtcacttccttcctggctaatccccgggcctccctgttcacatttccacctgcggcagttccctcacrtactgagacaggcagcgttgatggtagatgaattttttgccgtttaagtactttgactagtgtcctgtggacgaatgtttaattcagaaaaataatttta

SEQ ID NO: 253454 - DNA, 201 bp, Homo sapiens
agaggtgggcatggagagtggtaaatctttcttctgtcttcccttggaaagagtttaagattcggagtcagaaaaatcaggctgggcgcggtagctcacgyctgtaatcccagcactttgggaggccaaggagggcagatcacttgatgtcaggaggttgagagcagcatggccaacgtggtgaaaccctgtctctactaa

SEQ ID NO: 253455 - DNA, 201 bp, Homo sapiens
aagttagcacttgtgatcgtaagagggttttcaatggaaccaagttaacttctattaggatgttgtgtctttaaatctccgcttaggttttgccatactaygtaacgaaattaagctttctttataagtaacttctggcttctgttatctaagcccaaaacattgtttttgaggggaagttgttctaatgtttataactaa

SEQ ID NO: 253456 - DNA, 201 bp, Homo sapiens
aacgtagcgcagcagcaggtgtgttacaagaatgaggggttcagccgggcgcagtggctcacacctgtaatcccagcactttgggaggctgacgtgggtgratcatgagatcaagaattcaagaccagcctggctaagatggtgaaaccccatctctactaaaaatacaaaaaattagctgggcgtggtggcacgcgcctg

SEQ ID NO: 253457 - DNA, 201 bp, Homo sapiens
aagtcttccgatgttaccactccaggccttgctgaaatgttttccttctgtttatttccaggggatggaggtatgttctgcaactcctggtggccgagcgygtatgacttagtgtagtggtgatggctgcagacattttgggttgttttggtaggctcttgacgttagctttgttttcacttgcactttgtctgtttagag

SEQ ID NO: 253458 - DNA, 201 bp, Homo sapiens
gtttcacttttgttgcccaagctagagtgcagtggcacgatttcagctcactgcaacctccgcctaacagggtcaagcgattctcctgcctcagcctcccrcgtagctggaatacaggtgcgtaccaccacacctggctaattttttgtatttttagtggagacagggtttcaccatgttggccaggctggtctcgaaccc

SEQ ID NO: 253459 - DNA, 201 bp, Homo sapiens
tcccaaagtgttgggattacaggcgtgagccaccacacccagcctgagtttttcattattttattttattttatttatttattttttgagatgcagtttcrcttttgttgcccaagctagagtgcagtggcacgatttcagctcactgcaacctccgcctaacagggtcaagcgattctcctgcctcagcctcccgcgtag

SEQ ID NO: 253460 - DNA, 201 bp, Homo sapiens
tttccccacagtccgccttcctgtgtcatcactgacaggaaaaataccagtgtctagaaatggccatttctacatatgaaactcacctgtgttgtatgcasccaggtcaggggacagaccatcaggagcgtcccaggacaccctcaccccatgtgctcccttccagttacctccatgccccaccccttcccccagccccca

SEQ ID NO: 253461 - DNA, 201 bp, Homo sapiens
aattagctgggcgtggtggcacgcgcctgtaatcccagctactctggaggctgaagcagagaattgcttaaacctggacgggcggaggttgcagtgggccragatcgcaccactgcactccagcctgggcgacagagtgagactccatctcaaaaaaaaaaaaggagggtttaaagaaccggatttcccgctcccatcaca

SEQ ID NO: 253462 - DNA, 201 bp, Homo sapiens
gaaatttcaaaaagaagcagaagtgccctttaaaaaaacaaccctgaatacctacctactctgaactgaaaaacgtgcccacagattattgggaaggaaasatgattattgggagtctggggaaagacagaggaaatgtgaaagaaaaacccttttagataaaaacaacttggtttgaaagtttcccaacttattatctga

SEQ ID NO: 253463 - DNA, 201 bp, Homo sapiens
accagccgcttttaacccctagtcgtgtcgcttaccacacgagctttaggcttgcgcgaggcatctgcgtctaaaagtatctccttaaatgtacattcttyctggttcacctaagtagttttaaattagaaacagccccaccgactgcaggcctcttcagaagggtgttccttagaataataaacaattatctgcgtattt

SEQ ID NO: 253464 - DNA, 201 bp, Homo sapiens
aattcttaatccttcctgtatttccctagatagaagaagaaagaatatatgcatttgcggactcagatatttcatatgtagttgtcacaacttggctgttkatggcctaacatgagtgtttaagaacaataaaaacctacgttgttaattgtagtctaaattccagtgaattctagaaccaatgtatgtctctgtgttatt

SEQ ID NO: 253465 - DNA, 201 bp, Homo sapiens
ctcacaggccctttgaagttgttggagctctcactgggcaatcttattccgagatttcttatcaatgcgtttctgttttattgctggtgatttatggctcrttactgcttgtttccttcaccttaaccacgataatgatgctcctctttttgtttcccttattcctagtgtttgggatgggaccttcagtgcttttcccag

SEQ ID NO: 253466 - DNA, 201 bp, Homo sapiens
aagatcacgccagtgcactccatcctgggcaataagagcaaagtgaaactctgtctcaaaaaatcaattgcctttaggaatttcctaccccctgagttttrttgctcacccatctcatgcatgtgctaccctcatcactggaagatttttttgagtttgatgtggtgaagggattttatgacttgacagtaccatctaacc

SEQ ID NO: 253467 - DNA, 201 bp, Homo sapiens
cgcggaaggagatgttagcatcgatgggggatttatttaggtcagatgttttctaatgaagataggaatgaatgtacggaagagaatagatcccgggaacrtagcccttctgcgaggagcagtactttaacagcccaagaaacatttgagcataggccgggcgcggtgcctcatgcctgtgatcccagcactctgggaggc

SEQ ID NO: 253468 - DNA, 201 bp, Homo sapiens
taattaaagctctccaaaatttattgccctatattattgtaggactttattggattgttcccatctaaagagattaaatctcatctatttgttattagtgrtatacgttttattattattatttgagacggagtcctgctctgttgcccaggctggagtgcagtggcacgatctcagctcactgcagcctccacctcccgg

SEQ ID NO: 253469 - DNA, 201 bp, Homo sapiens
atcacttgaggccaggagttcgaaagcagcctggccaacatggtgagactaaatacaaattagcctctactacaaatacaaaaattagccgagcatggtgstgtgtacctgtggtcccagatactcaggaggctgaggcaggagaatcgtttaaacccaggaggcagaggttgcagtgagccaagatcacaccactgcact

SEQ ID NO: 253470 - DNA, 201 bp, Homo sapiens
ttaagcccaggagttggaggagctatgatggtgccactctgtgacagaatgagaccatgtctctcttaaaaaaaaaaaaatggcctaagtaattgttaacsggcagcagattattcactatttctctttgctctataatatttcttagcaactttggattcaaaagctgtgatgtctctgtcaattccgtgttgtctctcc

SEQ ID NO: 253471 - DNA, 201 bp, Homo sapiens
tttccctttgaggctgattgcattccaaagaaatactctcttttagcggccaggcacggtggttcacgcctgtaatcccagcactttgggaggctgaggckggtggatcacctgaggtcaggagttcgaggccagcctgcccaacatggcaaaaccccatctctactaaaaatgtaaaaattagccgggtgcagtggtagg

SEQ ID NO: 253472 - DNA, 201 bp, Homo sapiens
aatacttgaggtatttcctgtatactccgtgtgatatgcttttcacataataaaccaaaccagctgtgtggcccttagaaatcactggtcatgtagatgcwttgtataattcttggccacccatcttttagagactttgtaaacagtaagcttatggggagaaaagtcctttgataaaaccacgagaggagatactgtatg

SEQ ID NO: 253473 - DNA, 201 bp, Homo sapiens
tctttccatgttgtctgtgaacagatctgctgaaaatgattaggttgctgctggcaagaagtgaaagataggatagtaggagaaaggctactgctttataygcagtgacgctttcctctcagttcagtatagtgccgtaggtaagttagtctccaacaccagaactccccagtgtctaggcagaacgaacctggggtgtcc

SEQ ID NO: 253474 - DNA, 201 bp, Homo sapiens
actgtgtggagacgaggagatactgtatggagacataccatgggcccttcaaggagcacctctgtatgggctggcaaatccctttcactcatctagaaagmagcagacacttgtcatcatgggaatattttattgggtataagtgttttaggtaattgataactgatttttctactgtttttaagtgattacttcaaatgt

SEQ ID NO: 253475 - DNA, 201 bp, Homo sapiens
caacttattatctgatatccttttagttaatttcagaaggaaaatgggtcaagcttgaaaaaacaacgtacatggatcctactggtaaaactaggtaaactttttttttttcttacaaaatgttcgttatttgggttctcaggttatctgttgagtgttttgcataaactttgatgttttcttttttgtaaactctgtttt

SEQ ID NO: 253476 - DNA, 201 bp, Homo sapiens
gcattgtttggcctgaagctttaagaccagtttcttaagcttttccctgagtttcagcagcttacggtttcagtgaataagcagagcgcctggttttgaawtgtctgttgtttgtttgaaaatctgaatgtgtctttcaaaggctgctgtgatttctttggataaaatcagatttcgtatcccttagagagcttccactcc

SEQ ID NO: 253477 - DNA, 201 bp, Homo sapiens
atttcgtatcccttagagagcttccactcctgcttcacctttccaaaaactagacctaaggtagaagccacctcgacagctcaaagccagagttagaacartcatactgaatagatacaatagtttatctggtgcgtatttggagaaaggcatgacaatcaatacgaggcagcgcagctcggagtcacaggcccgactcgg

SEQ ID NO: 253478 - DNA, 201 bp, Homo sapiens
gaggcaggagaatcgcttaaacccaggaggcagaggttgcagtgagccgagatcacgccattgccctctagcttgggcaacagagcgagactgtctcaccaaaaaaaaaaaaaatcattatccctgatgttcttgtctcatgctaggaatgtaatcttgcctttatagtctttattctttaagatccttatagaccaaaaa

SEQ ID NO: 253479 - DNA, 201 bp, Homo sapiens
cagcactttgggaggccgaggtaggctgatcacttgaggtcaggagctccagaccagcctggccaacatagtaaaaccccatctctactaaaaatacaaamattagccaggcatggtggtacatgccggtagtcccagctactcaggaggctggggcaggagaatcgcttgaacccgggaggcgcaggttgcagtgagcca

SEQ ID NO: 253480 - DNA, 201 bp, Homo sapiens
caccaaaaaaaaaaaaaatcattatccctgatgttcttgtctcatgctaggaatgtaatcttgcctttatagtctttattctttaagatccttatagaccaaaaaaaacgttatcaccagcatctagcataggaagtgacatatagtagtacctgctgcgcaaacactgattgaataagatgttttgtccttccttaacgg

SEQ ID NO: 253481 - DNA, 201 bp, Homo sapiens
ccttaacggcatgatctaagttgttttctttgctttccacagctctggtagctgaagaacatctcacagtggacgccagggtctattcctacgctctagcrctgaaacatgcaaatgcaaagccatttgaagtgcccttcttgaaattttaagcccaaatatgacactggccatttttgtaaacgagaccaccaggccttc

SEQ ID NO: 253482 - DNA, 201 bp, Homo sapiens
tgtcctgtggacgaatgtttaattcagaaaaataattttagcctgaacaaatctcattatcttgcagggtgaacttctcacctgagggctgtaaagactcrtttgaaaatggagagccaagaaccaacggaatcttctcagaatggcaaacagtatatcatttcagaggaggtataacttgtttttcactttcccttccct

SEQ ID NO: 253483 - DNA, 201 bp, Homo sapiens
ttcctggctaatccccgggcctccctgttcacatttccacctgcggcagttccctcacatactgagacaggcagcgttgatggtagatgaattttttgccrtttaagtactttgactagtgtcctgtggacgaatgtttaattcagaaaaataattttagcctgaacaaatctcattatcttgcagggtgaacttctcacc

SEQ ID NO: 253484 - DNA, 201 bp, Homo sapiens; identical to SEQ ID NO: 50297

SEQ ID NO: 253485 - DNA, 201 bp, Homo sapiens
gattataggcatgagccaccacacccggctaatttttgtatttttagtagagatgggctctcaccatgttcaccagattggtctcgaactcctgacctcargtgatccacccaccttggcctctcaaagtgctgggattacaggcctaaactaccacacccagccaaagttttatattttaaaaggctagctgctggtaac

SEQ ID NO: 253486 - DNA, 201 bp, Homo sapiens
agggttcactgtattttaaccaccgtggttgtcttcactaagccatgaagtcattgtattcatcaagtttctccaataaaacctttcaacagtggaaatayttgctttttctcctgcatgctgaaaagtcagtagtcatgtgattatgggggaggagatttattgtgcaattcctaatgaagtaatgaaaaaacacatttc

SEQ ID NO: 253487 - DNA, 201 bp, Homo sapiens
tttaacttgccgggggaacatatgtatcccctagcagcagaaaagatggaatccctaagatcctacataatcatcaccatctggtttcagaaaagcaaagycctaccccagctataaatgaggtatagcgattggctctatacacttccaactttgctgttttaacacataaaatcatccctggctgggtgcggtagctca

SEQ ID NO: 253488 - DNA, 201 bp, Homo sapiens
ctagaaccaatgtatgtctctgtgttattcaatttagctttaaaagtctcttcctgcaggaaccattgcagtggataaattttaaatccttcatcttggawctctgatcttgacacctttctggaattccttttggtttaaaatctttccatgttgtctgtgaacagatctgctgaaaatgattaggttgctgctggcaag

SEQ ID NO: 253489 - DNA, 201 bp, Homo sapiens
tacataatcatcaccatctggtttcagaaaagcaaagccctaccccagctataaatgaggtatagcgattggctctatacacttccaactttgctgttttmacacataaaatcatccctggctgggtgcggtagctcacgcctgtaatcccagcactttgggaggctgaggcgggtggatcacgaggtcaggagatcgaaa

SEQ ID NO: 253490 - DNA, 201 bp, Homo sapiens
ctggaatgcagtggtgcaatcttggctcactgcaactgctgcctcctaggttcaggcttttctcgtgcctcagtctcccaagtagctgggactactggcgygtgccacctcacccagctaattttttgtatttttagcagagatgggggtttcactatgttggttaggctcgaactcctgacctcaagtgatccacctgcc

SEQ ID NO: 253491 - DNA, 201 bp, Homo sapiens
ttcactcttgctcaaccagcattaaatgtgaggattttaaaccacctgctaaatgattcctggagatcaccaagtagcataatttcagtaaacgttaattmctccctgcccacccaactgccacacctgaagagaatgaaaaaaaaacccataagtgaattcaattgtgggtacccaaattttttaccataaatggcacaa

SEQ ID NO: 253492 - DNA, 201 bp, Homo sapiens
agaaggtgaggtgtagggtggcaagagttttcgttgttaattttcagaagctataggaaagcagaattagcttctttaatgcagacgtttattgctgtggycttcttgaccagtatcatgagtacatttgcatgcattgcatttaagaagttctggttgtacagagaaaacctaagaaaattctcttctgtagcactaatg

SEQ ID NO: 253493 - DNA, 201 bp, Homo sapiens
aaaagatcagtttgctacaaagagtagcatctgccagttaccaagcacctgctgtgcccaggtgagtaggacatgcttcctgcctgcaaatgtccccaggyttgttcccaaacaagcggctaggaaaacaagaggctgattttacatctggcaacctccatctgagtgaaacaaattttaatgaaagcctgtggtaataag

SEQ ID NO: 253494 - DNA, 201 bp, Homo sapiens
aaccaattcaccttcccaagggtcattacagtcagttcactcttgctcaaccagcattaaatgtgaggattttaaaccacctgctaaatgattcctggagmtcaccaagtagcataatttcagtaaacgttaattactccctgcccacccaactgccacacctgaagagaatgaaaaaaaaacccataagtgaattcaatt

SEQ ID NO: 253495 - DNA, 201 bp, Homo sapiens
tgaggcgggtggatcacgaggtcaggagatcgaaaccatcctggccaacatggcaaaaaccccgtctctactaaaaatacaaaaattagctgggcgtggtrgcgtgcgcctatagtcccagctactggggaggctgaggcaggagaatcgcttaaacccaggaggcagaggttgcagtgagccgagatcacgccattgccc

SEQ ID NO: 253496 - DNA, 201 bp, Homo sapiens
gaactcctaaccttaggtgatctgcccgcctcagcctcccaaagtgctgggtttacaggcgtgagccacggccccgggcctaccaaccagccgcttttaayccctagtcgtgtcgcttaccacacgagctttaggcttgcgcgaggcatctgcgtctaaaagtatctccttaaatgtacattcttcctggttcacctaagt

SEQ ID NO: 253497 - DNA, 201 bp, Homo sapiens
agcagagagagctatgccaaaaggtgttcatctcttgcaatctgtatgatttacttaccagcattgcttgttggtcagctccttgctactaacaggaatgytgggctgctgtgagttgtcatagaagtctgtttgattttcctgtgttcattttgacatatttggccttcggaatttgggtacaatgctgaaagacctaca

SEQ ID NO: 253498 - DNA, 201 bp, Homo sapiens
tctctttgttgacagatgtgggatctgttgttgagagatgtagagaaacatgtttgaacatttcactttgtgtgttttatgtgttaagttccaggcagggkaatagaattaaattattctttattttgaaaatacagatatgataaagtcacgttcattaaacaaagaaacacagattctagagcagtcagaaaatgaact

SEQ ID NO: 253499 - DNA, 201 bp, Homo sapiens
atgataaagtcacgttcattaaacaaagaaacacagattctagagcagtcagaaaatgaacttcttaacatctacactagcggcagcttcctagaaatcaytgcgctacggactagtaacggagtcattgccattcagagtgtgcatttttttttctctttccagttttgctggcccccctaattatccattttctgatga

SEQ ID NO: 253500 - DNA, 201 bp, Homo sapiens
gtcacgttcattaaacaaagaaacacagattctagagcagtcagaaaatgaacttcttaacatctacactagcggcagcttcctagaaatcactgcgctacggactagtaacggagtcattgccattcagagtgtgcatttttttttctctttccagttttgctggcccccctaattatccattttctgatgaatattaac

SEQ ID NO: 253501 - DNA, 201 bp, Homo sapiens
acgttcattaaacaaagaaacacagattctagagcagtcagaaaatgaacttcttaacatctacactagcggcagcttcctagaaatcactgcgctacggrctagtaacggagtcattgccattcagagtgtgcatttttttttctctttccagttttgctggcccccctaattatccattttctgatgaatattaacatg

SEQ ID NO: 253502 - DNA, 201 bp, Homo sapiens
atgaacttcttaacatctacactagcggcagcttcctagaaatcactgcgctacggactagtaacggagtcattgccattcagagtgtgcatttttttttctctttccagttttgctggcccccctaattatccattttctgatgaatattaacatggagggcattgcatgaggtctgccagaaggccctgcgtgtggatg

SEQ ID NO: 253503 - DNA, 201 bp, Homo sapiens
attcctttaaattgtgtgtgtgagagagagaaaatgaaatagtcattcaatgctgcagatgcagaggactcatcatcatggcacaacaaaagagctgtgcrctagagttctatatctatgtaagtcacaatttgttctacaaatctctttgagtaatttatgtctcatatatagagatctggaatagcaaaaatacttcag

SEQ ID NO: 253504 - DNA, 201 bp, Homo sapiens
ttttttttctctttccagttttgctggcccccctaattatccattttctgatgaatattaacatggagggcattgcatgaggtctgccagaaggccctgcrtgtggatggtgacacagaggatggctctatgctggtgactggacacatcgcctctggttaaatctctcctgcttggcgacttcagtaagctacagctaag

SEQ ID NO: 253505 - DNA, 201 bp, Homo sapiens; identical to SEQ ID NO: 50338

SEQ ID NO: 253506 - DNA, 201 bp, Homo sapiens
ggatcacaaggtcaagaaatagagaccatcctggctaccatagtgaaaccctgtctctactaaaaatacaaaaatcagctgggcatggttgtgcacgcctrtagtcccagctactcaggaggctgaggcaggagaattgcttgaaccgggagaaagagattgcagtgagctgagatgtaccactgcactccagcctggtga

SEQ ID NO: 253507 - DNA, 201 bp, Homo sapiens; identical to SEQ ID NO: 50339

SEQ ID NO: 253508 - DNA, 201 bp, Homo sapiens
ccagaaggccctgcgtgtggatggtgacacagaggatggctctatgctggtgactggacacatcgcctctggttaaatctctcctgcttggcgacttcagyaagctacagctaagcccatcggccggaaaagaaagacaataattttgtttttcattttgaaaaaattaaatgctctctcctaaagattcttcacctactt

SEQ ID NO: 253509 - DNA, 201 bp, Homo sapiens
tgcgtgtggatggtgacacagaggatggctctatgctggtgactggacacatcgcctctggttaaatctctcctgcttggcgacttcagtaagctacagcwaagcccatcggccggaaaagaaagacaataattttgtttttcattttgaaaaaattaaatgctctctcctaaagattcttcacctactttggtctccata

SEQ ID NO: 253510 - DNA, 201 bp, Homo sapiens
ttgtgtgtgtgagagagagaaaatgaaatagtcattcaatgctgcagatgcagaggactcatcatcatggcacaacaaaagagctgtgcactagagttctrtatctatgtaagtcacaatttgttctacaaatctctttgagtaatttatgtctcatatatagagatctggaatagcaaaaatacttcagaggaaattaat

SEQ ID NO: 253511 - DNA, 201 bp, Homo sapiens
ttcatttcaaagtgaatgactctcttaagcatttcttgtagagcagttctaatggcaatgaactcctgcagcttctacatcacatagtcttactaactttstaatttttaagaaataatttggctgggtgcagtggctaatgcctgtaatcccagcacactgggaggccaaggtgggcggatcacaaggtcaagaaataga

SEQ ID NO: 253512 - DNA, 201 bp, Homo sapiens
cttgaatttatggagctgaaccccattttgctaatcacttactccctgcagcctatttcttacatacacaaatcaatatccttagagtatacatctttacwcctagtatttggttctgttatgcagacagaatggccaaaacctgggtagaaaagatctaacataatagactgctatccatagatgtgcctatttccaata

SEQ ID NO: 253513 - DNA, 201 bp, Homo sapiens
atggagctgaaccccattttgctaatcacttactccctgcagcctatttcttacatacacaaatcaatatccttagagtatacatctttactcctagtatktggttctgttatgcagacagaatggccaaaacctgggtagaaaagatctaacataatagactgctatccatagatgtgcctatttccaatataaacctgc

SEQ ID NO: 253514 - DNA, 201 bp, Homo sapiens
ctgaaccccattttgctaatcacttactccctgcagcctatttcttacatacacaaatcaatatccttagagtatacatctttactcctagtatttggttstgttatgcagacagaatggccaaaacctgggtagaaaagatctaacataatagactgctatccatagatgtgcctatttccaatataaacctgctggcat

SEQ ID NO: 253515 - DNA, 201 bp, Homo sapiens
gactgctatccatagatgtgcctatttccaatataaacctgctggcatctgagaaagtggagttctccctgtttcctaactgataagaatggtggctctasgtaactgtttgtgtaaactgtggggtttctgtgcacctgctttgcttttggagactggaagatttgtgtctgctaggcagagtgagtcaatgtatccagt

SEQ ID NO: 253516 - DNA, 201 bp, Homo sapiens
cccagtatcctcttgaggataaaaaggctaccaaggacagaggatgtattcaagataagaaaggttgaaaactaaatgatgaaggcgtggtttggatgccracacaccttgttcaaccaatgccaaaatatacacatgatagcatgcatttcggatgagatgcctcattaactttcttgcaaaaatatataaaaggaaaag

SEQ ID NO: 253517 - DNA, 201 bp, Homo sapiens
actgctatccatagatgtgcctatttccaatataaacctgctggcatctgagaaagtggagttctccctgtttcctaactgataagaatggtggctctacstaactgtttgtgtaaactgtggggtttctgtgcacctgctttgcttttggagactggaagatttgtgtctgctaggcagagtgagtcaatgtatccagtc

SEQ ID NO: 253518 - DNA, 201 bp, Homo sapiens
tccttgtgttaatttcaccatactaaaaataattaagattatgtctgtaactatagttgcgtcctgttgatttttccaaaaaatcactgaaagtgaaattrttttggggacacttccaagctagtggtcaagcagtgatttttctgggactgcagaagttcctgctatgcccaacctttattactaaatgggaaagaccca

SEQ ID NO: 253519 - DNA, 201 bp, Homo sapiens
caagaaaggaggaaaagctgatttttgtgaacgttgctgcttgtgcccgaactaactctcaggcacattagtcagaaaatattacgtttggttgctccccsaggttcctaaaagtaaagctctagaggccgtcaaattggcaatagaagccgggttccaccatattgattctgcacatgtttacaataatgaggagcaggt

SEQ ID NO: 253520 - DNA, 201 bp, Homo sapiens
tttttgtgaacgttgctgcttgtgcccgaactaactctcaggcacattagtcagaaaatattacgtttggttgctcccccaggttcctaaaagtaaagctytagaggccgtcaaattggcaatagaagccgggttccaccatattgattctgcacatgtttacaataatgaggagcaggttggactggccatccgaagcaa

SEQ ID NO: 253521 - DNA, 201 bp, Homo sapiens
gcccgaactaactctcaggcacattagtcagaaaatattacgtttggttgctcccccaggttcctaaaagtaaagctctagaggccgtcaaattggcaatwgaagccgggttccaccatattgattctgcacatgtttacaataatgaggagcaggttggactggccatccgaagcaagattgcagatggcagtgtgaaga

SEQ ID NO: 253522 - DNA, 201 bp, Homo sapiens
ctctcaggcacattagtcagaaaatattacgtttggttgctcccccaggttcctaaaagtaaagctctagaggccgtcaaattggcaatagaagccgggtwccaccatattgattctgcacatgtttacaataatgaggagcaggttggactggccatccgaagcaagattgcagatggcagtgtgaagagagaagacata

SEQ ID NO: 253523 - DNA, 201 bp, Homo sapiens
gacacagaggatggctctatgctggtgactggacacatcgcctctggttaaatctctcctgcttggcgacttcagtaagctacagctaagcccatcggccrgaaaagaaagacaataattttgtttttcattttgaaaaaattaaatgctctctcctaaagattcttcacctactttggtctccataacttctatgttttc

SEQ ID NO: 253524 - DNA, 201 bp, Homo sapiens
agaggatggctctatgctggtgactggacacatcgcctctggttaaatctctcctgcttggcgacttcagtaagctacagctaagcccatcggccggaaargaaagacaataattttgtttttcattttgaaaaaattaaatgctctctcctaaagattcttcacctactttggtctccataacttctatgttttctctcc

SEQ ID NO: 253525 - DNA, 201 bp, Homo sapiens
aaatgctcattagtcattcctttaaattgtgtgtgtgagagagagaaaatgaaatagtcattcaatgctgcagatgcagaggactcatcatcatggcacamcaaaagagctgtgcactagagttctatatctatgtaagtcacaatttgttctacaaatctctttgagtaatttatgtctcatatatagagatctggaata

SEQ ID NO: 253526 - DNA, 201 bp, Homo sapiens
taaagaaatgctcattagtcattcctttaaattgtgtgtgtgagagagagaaaatgaaatagtcattcaatgctgcagatgcagaggactcatcatcatgrcacaacaaaagagctgtgcactagagttctatatctatgtaagtcacaatttgttctacaaatctctttgagtaatttatgtctcatatatagagatctg

SEQ ID NO: 253527 - DNA, 201 bp, Homo sapiens
ttatgctatatgcagttctttaagttacttgaatttgtagatttttgtctttaaccaatttgaaaaattttgatgattttattctccaaataatttctctrctaccatgggtttgcacttccccttctgggaatccaatactatcatactggttggcttgaaggtgtcccataagtcccttaggacctgttcacatttctt

SEQ ID NO: 253528 - DNA, 201 bp, Homo sapiens
tctgcttcacattattgatgtcactaattacaactttatatatggtgtacatgttaacagaaagttattcttattgtaatgtaaatcttgaagaaaatgaragtaaaagcaaatttcacaaatacatgtttccacgtttttcatacacctacctttacgagaggtctttatacctctatatgacttcacgttgctgtctaa

SEQ ID NO: 253529 - DNA, 201 bp, Homo sapiens
ccattggaatgacatactgcatcctatagttataccatccactctgaaatcaatgtgaatttaacttcagttccatacagaaacttcttttccacagctamgtttctgcttcacattattgatgtcactaattacaactttatatatggtgtacatgttaacagaaagttattcttattgtaatgtaaatcttgaagaaaa

SEQ ID NO: 253530 - DNA, 201 bp, Homo sapiens
atttctcttgtgcataatctgtaattattttctctgtagttaccattggaatgacatactgcatcctatagttataccatccactctgaaatcaatgtgamtttaacttcagttccatacagaaacttcttttccacagctacgtttctgcttcacattattgatgtcactaattacaactttatatatggtgtacatgtt

SEQ ID NO: 253531 - DNA, 201 bp, Homo sapiens
tccccaaatagatctgacagctttcaaatcccagtatcctcttgaggataaaaaggctaccaaggacagaggatgtattcaagataagaaaggttgaaaastaaatgatgaaggcgtggtttggatgccgacacaccttgttcaaccaatgccaaaatatacacatgatagcatgcatttcggatgagatgcctcattaac

SEQ ID NO: 253532 - DNA, 201 bp, Homo sapiens
cgtctcaaacagtaggaaatctcacgttttccactcaagatattttctgcatcatgccttataacagttccacagatgccatccaatctacaggcccctcygaggaactgactcagccccacaatgcagttaccacatccttaggctttcatagtccacaccctggccagtcagcaccccgccctgctcctcagccccctg

SEQ ID NO: 253533 - DNA, 201 bp, Homo sapiens
ttatcatgctgtgtttttcaaattgcaccacactagactgcatacaatcacagaatgccccactagtggtgaaggtagttttaaaaacttggttaagctamcagtggtcagatctgttgtttttaactcatgttttctctttaacaattactagtaatctgctgggggataattctcaacagaagaagtcatattcccatg

SEQ ID NO: 253534 - DNA, 201 bp, Homo sapiens
gaaaatattacgtttggttgctcccccaggttcctaaaagtaaagctctagaggccgtcaaattggcaatagaagccgggttccaccatattgattctgcwcatgtttacaataatgaggagcaggttggactggccatccgaagcaagattgcagatggcagtgtgaagagagaagacatattctacacttcaaaggtac

SEQ ID NO: 253535 - DNA, 201 bp, Homo sapiens
cctatgatgagcttgtgtgcacatgtatttattgtgattgtgtggaggtggcagttctatgactggatccatagttgagggtgaattgtgcttatttattwcgatttattcacacttactcatgtattaaaactaatatcaaaggcaggaagtgaagatggctttctcatctttgcagtgttccaattcatgccttcaaag

SEQ ID NO: 253536 - DNA, 201 bp, Homo sapiens
cttactcatgtattaaaactaatatcaaaggcaggaagtgaagatggctttctcatctttgcagtgttccaattcatgccttcaaagtgcctttactcttygagctcagcacagatcaatatggtttaacatagactatagaatgagagataatcttaatcatattatgttatctgttacctcctgggtgagtttcttaca

SEQ ID NO: 253537 - DNA, 201 bp, Homo sapiens
gatcaatatggtttaacatagactatagaatgagagataatcttaatcatattatgttatctgttacctcctgggtgagtttcttacatttgttatgattytgagtttccattgtcattttgatcagagagagagagaaagcgatataagagagctcagtgagtataaaagagtgatacctacattgttttaaattgcatc

SEQ ID NO: 253538 - DNA, 201 bp, Homo sapiens
tctgggccattccaggttccagagaatgtgttccttggctcatggcacttattctatcttgaaagccaactgcatggcatcttaggatctcttccctatgsgtctttccttacacatcctctttgattgtggccctcctgggtgccacttgtaaggattttgagatgacattgcccatccagatgattcaggaaatgcttc

SEQ ID NO: 253539 - DNA, 201 bp, Homo sapiens
gttccagagaatgtgttccttggctcatggcacttattctatcttgaaagccaactgcatggcatcttaggatctcttccctatgggtctttccttacacrtcctctttgattgtggccctcctgggtgccacttgtaaggattttgagatgacattgcccatccagatgattcaggaaatgcttctatcttaggatcctt

SEQ ID NO: 253540 - DNA, 201 bp, Homo sapiens
caacttcgtttctctaacctctgcagctttggagcaattcccatcgaccagagttggtccgaccagccttggaaaggtcactgaaaaatcttcaattggaytatgttgacctctatcttattcattttccagtgtctgtaaaggtaggcagcttgtgtgatcaaattaatttcacttttgttctcagcataaatattgttt

SEQ ID NO: 253541 - DNA, 201 bp, Homo sapiens
ccagagaatgtgttccttggctcatggcacttattctatcttgaaagccaactgcatggcatcttaggatctcttccctatgggtctttccttacacatcstctttgattgtggccctcctgggtgccacttgtaaggattttgagatgacattgcccatccagatgattcaggaaatgcttctatcttaggatccttaac

SEQ ID NO: 253542 - DNA, 201 bp, Homo sapiens; identical to SEQ ID NO: 50323

SEQ ID NO: 253543 - DNA, 201 bp, Homo sapiens; identical to SEQ ID NO: 50326

SEQ ID NO: 253544 - DNA, 201 bp, Homo sapiens
tgaaattcctatgttatttagaaaacatgttgaggaaaatattggactggagagaaaaataactcacaaagagtcctgtactcttccggtgacctacttcrcatttggaagtttggttactttttatgccaatcaaaacatcctgccatgtaactatggagcatgttcagtaaaatcaaatgttttacccacacagaaaat

SEQ ID NO: 253545 - DNA, 201 bp, Homo sapiens
aactttcttgcaaaaatatataaaaggaaaaggcctgaaggctcacttggaaaggataacacaacagtgagacctttgtgctaaaaacgagcccagtaacsatagcagaggacagcctggacaataggagagaggttttgctttggaaaaataaatttctaaattgactggggcatgtctcagatatttggggctcacaat

SEQ ID NO: 253546 - DNA, 201 bp, Homo sapiens; identical to SEQ ID NO: 50330

SEQ ID NO: 253547 - DNA, 201 bp, Homo sapiens; identical to SEQ ID NO: 50303

SEQ ID NO: 253548 - DNA, 201 bp, Homo sapiens
aagttgttgtttaatgagcagagttttaggttgggatgattaaaattgtaatatatgtatactggtgatgcttgctcaataaggttgatggacttaatgcyaataaactatatgttttaaaatggttaaatgatgaattgtatgttatacatattttaccacactaaagaaaaggtttaatgacaaataacaaagccagga

SEQ ID NO: 253549 - DNA, 201 bp, Homo sapiens; identical to SEQ ID NO: 50305

SEQ ID NO: 253550 - DNA, 201 bp, Homo sapiens
gggagggagcagtattgagcctactgtactagctttgtggagaacttgaagcaagtaagccttaattttctagccttgctaatagaaagtactatatcacyagccactaggtcctgaaaaatctagatttcatctcagatataatgaaataaaaacctgttccttagctctgatatcatttataccctatcatatgtcccc

SEQ ID NO: 253551 - DNA, 201 bp, Homo sapiens
taggtcctgaaaaatctagatttcatctcagatataatgaaataaaaacctgttccttagctctgatatcatttataccctatcatatgtccccttctagwtatagtccctttattcccttagtttaccatttctcccaggatttgtgaatatcttttttcgctgtacatgcagagaactccagcattgctgttctttaca

SEQ ID NO: 253552 - DNA, 201 bp, Homo sapiens
aggtcctgaaaaatctagatttcatctcagatataatgaaataaaaacctgttccttagctctgatatcatttataccctatcatatgtccccttctagayatagtccctttattcccttagtttaccatttctcccaggatttgtgaatatcttttttcgctgtacatgcagagaactccagcattgctgttctttacat

SEQ ID NO: 253553 - DNA, 201 bp, Homo sapiens
ctgtacatgcagagaactccagcattgctgttctttacattctcaacaactgaaagtttctactcatacttagattatacttcaggcaactacttccatgytataacttatacagacaaagaagtacttataactgctctatgaacctttaactttaacacacttcatactaatgaagcctcttacgcttcgattttcact

SEQ ID NO: 253554 - DNA, 201 bp, Homo sapiens
ttcctgtaaattaaaagttagatgtgagtattttattacattggcttaaaactttggggcaagaaaatgtttttatcatgctgtgtttttcaaattgcacsacactagactgcatacaatcacagaatgccccactagtggtgaaggtagttttaaaaacttggttaagctaacagtggtcagatctgttgtttttaactc

SEQ ID NO: 253555 - DNA, 201 bp, Homo sapiens; identical to SEQ ID NO: 50319

SEQ ID NO: 253556 - DNA, 201 bp, Homo sapiens; identical to SEQ ID NO: 50320

SEQ ID NO: 253557 - DNA, 201 bp, Homo sapiens; identical to SEQ ID NO: 50322

SEQ ID NO: 253558 - DNA, 201 bp, Homo sapiens; identical to SEQ ID NO: 50325

SEQ ID NO: 253559 - DNA, 201 bp, Homo sapiens
acacaggtttacatattcagatttgcttacataataaagtaaattgaaatcctcagactacactcattctctctaaatttctcctttaggttttctgctgrttggggtctcttgtccttgtacctattgatctgtgcttatagcaaacaaactggatcaatgtgcgtgcagccagatcaaattgccctgcttgtgtttttg

SEQ ID NO: 253560 - DNA, 201 bp, Homo sapiens; identical to SEQ ID NO: 50327

SEQ ID NO: 253561 - DNA, 201 bp, Homo sapiens
attctctctaaatttctcctttaggttttctgctggttggggtctcttgtccttgtacctattgatctgtgcttatagcaaacaaactggatcaatgtgcktgcagccagatcaaattgccctgcttgtgtttttgtagaccatcttgccaaaagctaaaatcctacaccagagattcttattcattagatctgtagtgaa

SEQ ID NO: 253562 - DNA, 201 bp, Homo sapiens
cgactacacaaatgatacctcacaattcctttttcccaggccatggagaagtgtaaagatgcaggattggccaagtccatcggggtgtccaacttcaaccrcaggctgctggagatgatcctcaacaagccagggctcaagtacaagcctgtctgcaaccaggtgagcgccctcagcctcctctcctttctgttcttcatg

SEQ ID NO: 253563 - DNA, 201 bp, Homo sapiens
tctctctaaatttctcctttaggttttctgctggttggggtctcttgtccttgtacctattgatctgtgcttatagcaaacaaactggatcaatgtgcgtrcagccagatcaaattgccctgcttgtgtttttgtagaccatcttgccaaaagctaaaatcctacaccagagattcttattcattagatctgtagtgaagt

SEQ ID NO: 253564 - DNA, 201 bp, Homo sapiens
gttttctgctggttggggtctcttgtccttgtacctattgatctgtgcttatagcaaacaaactggatcaatgtgcgtgcagccagatcaaattgccctgmttgtgtttttgtagaccatcttgccaaaagctaaaatcctacaccagagattcttattcattagatctgtagtgaagtctaggtattactatgttttatt

SEQ ID NO: 253565 - DNA, 201 bp, Homo sapiens
tcctttttcccaggccatggagaagtgtaaagatgcaggattggccaagtccatcggggtgtccaacttcaaccacaggctgctggagatgatcctcaacragccagggctcaagtacaagcctgtctgcaaccaggtgagcgccctcagcctcctctcctttctgttcttcatgcccctctttctgtcctattgccaagt

SEQ ID NO: 253566 - DNA, 201 bp, Homo sapiens
ctgctggttggggtctcttgtccttgtacctattgatctgtgcttatagcaaacaaactggatcaatgtgcgtgcagccagatcaaattgccctgcttgtrtttttgtagaccatcttgccaaaagctaaaatcctacaccagagattcttattcattagatctgtagtgaagtctaggtattactatgttttatttattt

SEQ ID NO: 253567 - DNA, 201 bp, Homo sapiens
ggagaagtgtaaagatgcaggattggccaagtccatcggggtgtccaacttcaaccacaggctgctggagatgatcctcaacaagccagggctcaagtacragcctgtctgcaaccaggtgagcgccctcagcctcctctcctttctgttcttcatgcccctctttctgtcctattgccaagtatccattcatttagtccc

SEQ ID NO: 253568 - DNA, 201 bp, Homo sapiens
ggtctcttgtccttgtacctattgatctgtgcttatagcaaacaaactggatcaatgtgcgtgcagccagatcaaattgccctgcttgtgtttttgtagaycatcttgccaaaagctaaaatcctacaccagagattcttattcattagatctgtagtgaagtctaggtattactatgttttatttattttatttttggat

SEQ ID NO: 253569 - DNA, 201 bp, Homo sapiens
tacaagcctgtctgcaaccaggtgagcgccctcagcctcctctcctttctgttcttcatgcccctctttctgtcctattgccaagtatccattcatttagwcccacttatctttgtaaaagagaagattctagagaacaaagcctcttcctagaagggcatggagtcctcttacttgtaccctgcttagaaaagtcttacg

SEQ ID NO: 253570 - DNA, 201 bp, Homo sapiens
tggatcaatgtgcgtgcagccagatcaaattgccctgcttgtgtttttgtagaccatcttgccaaaagctaaaatcctacaccagagattcttattcattwgatctgtagtgaagtctaggtattactatgttttatttattttatttttggatttgtataaaattaaagtttacaagtgcagtttgctacatagatacat

SEQ ID NO: 253571 - DNA, 201 bp, Homo sapiens
ctttctgtcctattgccaagtatccattcatttagtcccacttatctttgtaaaagagaagattctagagaacaaagcctcttcctagaagggcatggagkcctcttacttgtaccctgcttagaaaagtcttacgaaaaggtgttgtaactttgatgctgaattgtgtgttacatttataggaggtcaattcgatcaaga

SEQ ID NO: 253572 - DNA, 201 bp, Homo sapiens
tgcgtgcagccagatcaaattgccctgcttgtgtttttgtagaccatcttgccaaaagctaaaatcctacaccagagattcttattcattagatctgtagwgaagtctaggtattactatgttttatttattttatttttggatttgtataaaattaaagtttacaagtgcagtttgctacatagatacattgcacagtgg

SEQ ID NO: 253573 - DNA, 201 bp, Homo sapiens
gcgtgcagccagatcaaattgccctgcttgtgtttttgtagaccatcttgccaaaagctaaaatcctacaccagagattcttattcattagatctgtagtraagtctaggtattactatgttttatttattttatttttggatttgtataaaattaaagtttacaagtgcagtttgctacatagatacattgcacagtggt

SEQ ID NO: 253574 - DNA, 201 bp, Homo sapiens
cagccagatcaaattgccctgcttgtgtttttgtagaccatcttgccaaaagctaaaatcctacaccagagattcttattcattagatctgtagtgaagtytaggtattactatgttttatttattttatttttggatttgtataaaattaaagtttacaagtgcagtttgctacatagatacattgcacagtggtgaggt

SEQ ID NO: 253575 - DNA, 201 bp, Homo sapiens
ctgcaccctgcaaagccacaggtacagtgcttcccaaagcccccagaagcctacccctgtcaccagtgtgcccagaatgaagaatatagagtcaaggaagwtgattttgcagctttaagatttaatttctgccctgtcagctttatgacttgcatgaagcctcttcctcttctctttaagctgacatttcccttttgaaat

SEQ ID NO: 253576 - DNA, 201 bp, Homo sapiens
actaactctcaggcacattagtcagaaaatattacgtttggttgctcccccaggttcctaaaagtaaagctctagaggccgtcaaattggcaatagaagcygggttccaccatattgattctgcacatgtttacaataatgaggagcaggttggactggccatccgaagcaagattgcagatggcagtgtgaagagagaag

SEQ ID NO: 253577 - DNA, 201 bp, Homo sapiens
tcaggcacattagtcagaaaatattacgtttggttgctcccccaggttcctaaaagtaaagctctagaggccgtcaaattggcaatagaagccgggttccrccatattgattctgcacatgtttacaataatgaggagcaggttggactggccatccgaagcaagattgcagatggcagtgtgaagagagaagacatattc

SEQ ID NO: 253578 - DNA, 201 bp, Homo sapiens
tcccacttatctttgtaaaagagaagattctagagaacaaagcctcttcctagaagggcatggagtcctcttacttgtaccctgcttagaaaagtcttacraaaaggtgttgtaactttgatgctgaattgtgtgttacatttataggaggtcaattcgatcaagaagtccaaggattgccaattagactcagggaaaggt

SEQ ID NO: 253579 - DNA, 201 bp, Homo sapiens
gatgctgaattgtgtgttacatttataggaggtcaattcgatcaagaagtccaaggattgccaattagactcagggaaaggtggacttacccctaagctaygaaagatgaccagagagtggacgggtgaaggtgatttggagggaactgtgcatagatatgaagccatgaagagatggaatgaacagtacataaggagaga

SEQ ID NO: 253580 - DNA, 201 bp, Homo sapiens
agactcagggaaaggtggacttacccctaagctatgaaagatgaccagagagtggacgggtgaaggtgatttggagggaactgtgcatagatatgaagccrtgaagagatggaatgaacagtacataaggagagagtgagagcaagagaagagaaatactagggattcacatgggcttcggatgtctcagtgtctcttgat

SEQ ID NO: 253581 - DNA, 201 bp, Homo sapiens
tcaaattgccctgcttgtgtttttgtagaccatcttgccaaaagctaaaatcctacaccagagattcttattcattagatctgtagtgaagtctaggtatyactatgttttatttattttatttttggatttgtataaaattaaagtttacaagtgcagtttgctacatagatacattgcacagtggtgaggtctgggctt

SEQ ID NO: 253582 - DNA, 201 bp, Homo sapiens
aaggtggacttacccctaagctatgaaagatgaccagagagtggacgggtgaaggtgatttggagggaactgtgcatagatatgaagccatgaagagatgraatgaacagtacataaggagagagtgagagcaagagaagagaaatactagggattcacatgggcttcggatgtctcagtgtctcttgatatctctgcttt

SEQ ID NO: 253583 - DNA, 201 bp, Homo sapiens
ctgcttgtgtttttgtagaccatcttgccaaaagctaaaatcctacaccagagattcttattcattagatctgtagtgaagtctaggtattactatgtttyatttattttatttttggatttgtataaaattaaagtttacaagtgcagtttgctacatagatacattgcacagtggtgaggtctgggcttttagtgtagc

SEQ ID NO: 253584 - DNA, 201 bp, Homo sapiens
atgaagccatgaagagatggaatgaacagtacataaggagagagtgagagcaagagaagagaaatactagggattcacatgggcttcggatgtctcagtgyctcttgatatctctgctttcacacttcttgaccaagggcatagatacactaaaaattatctgcagacagtgaaggtcatccatggtagaaagagaaaatg

SEQ ID NO: 253585 - DNA, 201 bp, Homo sapiens
tgcttgtgtttttgtagaccatcttgccaaaagctaaaatcctacaccagagattcttattcattagatctgtagtgaagtctaggtattactatgttttmtttattttatttttggatttgtataaaattaaagtttacaagtgcagtttgctacatagatacattgcacagtggtgaggtctgggcttttagtgtagct

SEQ ID NO: 253586 - DNA, 201 bp, Homo sapiens
catgaagagatggaatgaacagtacataaggagagagtgagagcaagagaagagaaatactagggattcacatgggcttcggatgtctcagtgtctcttgrtatctctgctttcacacttcttgaccaagggcatagatacactaaaaattatctgcagacagtgaaggtcatccatggtagaaagagaaaatgacctgtt

SEQ ID NO: 253587 - DNA, 201 bp, Homo sapiens
tgaagagatggaatgaacagtacataaggagagagtgagagcaagagaagagaaatactagggattcacatgggcttcggatgtctcagtgtctcttgatrtctctgctttcacacttcttgaccaagggcatagatacactaaaaattatctgcagacagtgaaggtcatccatggtagaaagagaaaatgacctgttta

SEQ ID NO: 253588 - DNA, 201 bp, Homo sapiens
ttagatctgtagtgaagtctaggtattactatgttttatttattttatttttggatttgtataaaattaaagtttacaagtgcagtttgctacatagatayattgcacagtggtgaggtctgggcttttagtgtagctatcaccagaataatgtccattgtatttacccaataatttcccagcctcccagccttctgagtc

SEQ ID NO: 253589 - DNA, 201 bp, Homo sapiens
cactaaaaattatctgcagacagtgaaggtcatccatggtagaaagagaaaatgacctgtttatggagatatctgttcacagtggatgaaatccacactgrggaaggttcagcagaacatggagctgacctatgactgccccgctcctagtcggctgctttttggagtctgtcatgcaatcagctgcttaaacacatctat

SEQ ID NO: 253590 - DNA, 201 bp, Homo sapiens
ttatttttggatttgtataaaattaaagtttacaagtgcagtttgctacatagatacattgcacagtggtgaggtctgggcttttagtgtagctatcaccwgaataatgtccattgtatttacccaataatttcccagcctcccagccttctgagtctccaccagtgggagacagaagatccagtgggcagataccaagtg

SEQ ID NO: 253591 - DNA, 201 bp, Homo sapiens
acatggagctgacctatgactgccccgctcctagtcggctgctttttggagtctgtcatgcaatcagctgcttaaacacatctattctatgcatggttctytcatagcctagagataattccatcttttccttgagtcctgactggtgattccaggcctccttgatcaaattgactgcccccaaatgttacacacatttca

SEQ ID NO: 253592 - DNA, 201 bp, Homo sapiens
aaaattaaagtttacaagtgcagtttgctacatagatacattgcacagtggtgaggtctgggcttttagtgtagctatcaccagaataatgtccattgtayttacccaataatttcccagcctcccagccttctgagtctccaccagtgggagacagaagatccagtgggcagataccaagtgcctgtaggtgtgcctagg

SEQ ID NO: 253593 - DNA, 201 bp, Homo sapiens
agtggtcgcaaggtgtgcaagctgctgagtcaccctgactgcatcaaccccaggagcttgaggggtgaacaatagtattgagcaatagtaaaataacaaayagtgcagacaaggcagacgtctcaaaaagtgctcggtgcaattgtcactcatccagagtcaacattggtgacacagttgtttcttcaaacagagttcact

SEQ ID NO: 253594 - DNA, 201 bp, Homo sapiens
cctctcaaagcatgtcacaggaatgaagatattctcccagttccagtgtcattactgtatctaagaacatcatttatagtgcccttatgtcatttggtatycggtccatattttaatttttcattgcttaatcaaaatatcttttgtagctcttctttttttaaccagaattcaattgtttttatattgttgtatttgata

SEQ ID NO: 253595 - DNA, 201 bp, Homo sapiens
gtttacaagtgcagtttgctacatagatacattgcacagtggtgaggtctgggcttttagtgtagctatcaccagaataatgtccattgtatttacccaawaatttcccagcctcccagccttctgagtctccaccagtgggagacagaagatccagtgggcagataccaagtgcctgtaggtgtgcctaggcatggagtt

SEQ ID NO: 253596 - DNA, 201 bp, Homo sapiens
ttgggctctggctccatggtagtgtctagtggtgggtgcctgcaaccacagtgttgtaaagctctttcagctttgccatctgcagacggcttgagtctgcrgctccatggaccctctgacttatctcaaaggcagagggccagtgtgacagctttctatatcccaagctcttgccaggcatcccagaagagtcagatcaca

SEQ ID NO: 253597 - DNA, 201 bp, Homo sapiens
gtgaggtctgggcttttagtgtagctatcaccagaataatgtccattgtatttacccaataatttcccagcctcccagccttctgagtctccaccagtggragacagaagatccagtgggcagataccaagtgcctgtaggtgtgcctaggcatggagttgggaaacctctgctctttgatgaattttaaagaggttattt

SEQ ID NO: 253598 - DNA, 201 bp, Homo sapiens
tgggcttttagtgtagctatcaccagaataatgtccattgtatttacccaataatttcccagcctcccagccttctgagtctccaccagtgggagacagargatccagtgggcagataccaagtgcctgtaggtgtgcctaggcatggagttgggaaacctctgctctttgatgaattttaaagaggttatttgggttttc

SEQ ID NO: 253599 - DNA, 201 bp, Homo sapiens
ccagggcgagcgctttgggctctggctccatggtagtgtctagtggtgggtgcctgcaaccacagtgttgtaaagctctttcagctttgccatctgcagayggcttgagtctgcagctccatggaccctctgacttatctcaaaggcagagggccagtgtgacagctttctatatcccaagctcttgccaggcatcccaga

SEQ ID NO: 253600 - DNA, 201 bp, Homo sapiens
cccaataatttcccagcctcccagccttctgagtctccaccagtgggagacagaagatccagtgggcagataccaagtgcctgtaggtgtgcctaggcatrgagttgggaaacctctgctctttgatgaattttaaagaggttatttgggttttcttgttattgttgttgttgggttgagttccttataaattttggatat

SEQ ID NO: 253601 - DNA, 201 bp, Homo sapiens
cacatctagaaagaagcgcttaagatgtggcagcccctcttcttcaagtggctcttgtcctgttgccctgggagttctcaaattgctgcagcagcctccayccagcctgaggatgacatcaatacacagaggaagaagagtcaggaaaagatgagagaagttacagactctcctgggcgaccccgagagcttaccattcct

SEQ ID NO: 253602 - DNA, 201 bp, Homo sapiens
attcctcagacttcttcacatggtgctaacagatttgtatgtgaaatgagacagtttcctgattccccttgcaggacttgcgacaggggtgtggctcaccrgttcaaactgcttgagggagggggagcatggagatgggcaggtgcacaggccagggcgagcgctttgggctctggctccatggtagtgtctagtggtggg

SEQ ID NO: 253603 - DNA, 201 bp, Homo sapiens
actctcctgggcgaccccgagagcttaccattcctcagacttcttcacatggtgctaacagatttgtatgtgaaatgagacagtttcctgattccccttgsaggacttgcgacaggggtgtggctcaccggttcaaactgcttgagggagggggagcatggagatgggcaggtgcacaggccagggcgagcgctttgggct

SEQ ID NO: 253604 - DNA, 201 bp, Homo sapiens
agtcaggaaaagatgagagaagttacagactctcctgggcgaccccgagagcttaccattcctcagacttcttcacatggtgctaacagatttgtatgtgwaatgagacagtttcctgattccccttgcaggacttgcgacaggggtgtggctcaccggttcaaactgcttgagggagggggagcatggagatgggcaggt

SEQ ID NO: 253605 - DNA, 201 bp, Homo sapiens
aagagtcaggaaaagatgagagaagttacagactctcctgggcgaccccgagagcttaccattcctcagacttcttcacatggtgctaacagatttgtatrtgaaatgagacagtttcctgattccccttgcaggacttgcgacaggggtgtggctcaccggttcaaactgcttgagggagggggagcatggagatgggca

SEQ ID NO: 253606 - DNA, 201 bp, Homo sapiens
taaactcagtccattccttctgttcctggctgggctctcatgtgtgttcagggcagtgaggcagctctgcttcaggatgtccctggggcatctgtgtgagygcccccctctcccatgcagttctttatcctccagccatccagcccagggttcacctcagcacagggcatgaccccagcatagtgaatggacatgtgcaaa

SEQ ID NO: 253607 - DNA, 201 bp, Homo sapiens
ttacaggacaggtcagactcaaggggtggggaaacacacaccacctcttactggaaggaactggaaattcatatagccaagcaagtggacacagggacatrtgattgttagagggcatgttcctaattaatctatcatttatatgatatgtgtgaaataatatatcaatagttatatgtatgaatatgaatatatataaat

SEQ ID NO: 253608 - DNA, 201 bp, Homo sapiens
tataaattgatatattatttcatatattctcaagaattcatacaagtctctaaagaattaacatccagaatacatacatatgtgtatgttttctaattagktagatacataaaatatacatcacgtatgatatatattataaaacctatgtcatatatatgacatatatcatgtatatgtatatacgtcactatttactaa

SEQ ID NO: 253609 - DNA, 201 bp, Homo sapiens
ttgggttgagttccttataaattttggatatcagtgccctattagattcacaatttgcaattatttttcccaattgtgtaggtcatctgttctctgttgattttttttttttttgctttacagaagcttattggtctaattaagtcatatgcatctcttcctattctctcatttgtgtttttgaaatcttagtctgagttc

SEQ ID NO: 253610 - DNA, 201 bp, Homo sapiens
ctttgggggtttatataagggcagaatggaggtgtggtgggccaaaaggcaaattttggggacgtgaaaacagaaatgcctgttctcatttaggggcacgrgtatccaggcttaaaggtgggggcctttgctgggaaaccaccctcttctacccagtatttccctgtctcctgtccatatcacatggagtttaaaccattc

SEQ ID NO: 253611 - DNA, 201 bp, Homo sapiens
atattctcaagaattcatacaagtctctaaagaattaacatccagaatacatacatatgtgtatgttttctaattagttagatacataaaatatacatcaygtatgatatatattataaaacctatgtcatatatatgacatatatcatgtatatgtatatacgtcactatttactaaaacattaagtaaaataagtgaag

SEQ ID NO: 253612 - DNA, 201 bp, Homo sapiens
ttctcccaggatttgtgaatatcttttttcgctgtacatgcagagaactccagcattgctgttctttacattctcaacaactgaaagtttctactcatacytagattatacttcaggcaactacttccatgttataacttatacagacaaagaagtacttataactgctctatgaacctttaactttaacacacttcatac

SEQ ID NO: 253613 - DNA, 201 bp, Homo sapiens
tttgggggtttatataagggcagaatggaggtgtggtgggccaaaaggcaaattttggggacgtgaaaacagaaatgcctgttctcatttaggggcacgastatccaggcttaaaggtgggggcctttgctgggaaaccaccctcttctacccagtatttccctgtctcctgtccatatcacatggagtttaaaccattca

SEQ ID NO: 253614 - DNA, 201 bp, Homo sapiens
tttataccctatcatatgtccccttctagatatagtccctttattcccttagtttaccatttctcccaggatttgtgaatatcttttttcgctgtacatgyagagaactccagcattgctgttctttacattctcaacaactgaaagtttctactcatacttagattatacttcaggcaactacttccatgttataactta

SEQ ID NO: 253615 - DNA, 201 bp, Homo sapiens
tatataagggcagaatggaggtgtggtgggccaaaaggcaaattttggggacgtgaaaacagaaatgcctgttctcatttaggggcacgagtatccaggcytaaaggtgggggcctttgctgggaaaccaccctcttctacccagtatttccctgtctcctgtccatatcacatggagtttaaaccattcagaaataggtt

SEQ ID NO: 253616 - DNA, 201 bp, Homo sapiens
tctgatatcatttataccctatcatatgtccccttctagatatagtccctttattcccttagtttaccatttctcccaggatttgtgaatatcttttttcrctgtacatgcagagaactccagcattgctgttctttacattctcaacaactgaaagtttctactcatacttagattatacttcaggcaactacttccatg

SEQ ID NO: 253617 - DNA, 201 bp, Homo sapiens
tataagggcagaatggaggtgtggtgggccaaaaggcaaattttggggacgtgaaaacagaaatgcctgttctcatttaggggcacgagtatccaggcttraaggtgggggcctttgctgggaaaccaccctcttctacccagtatttccctgtctcctgtccatatcacatggagtttaaaccattcagaaataggtttt

SEQ ID NO: 253618 - DNA, 201 bp, Homo sapiens
agatataatgaaataaaaacctgttccttagctctgatatcatttataccctatcatatgtccccttctagatatagtccctttattcccttagtttaccmtttctcccaggatttgtgaatatcttttttcgctgtacatgcagagaactccagcattgctgttctttacattctcaacaactgaaagtttctactcata

SEQ ID NO: 253619 - DNA, 201 bp, Homo sapiens
ggcagaatggaggtgtggtgggccaaaaggcaaattttggggacgtgaaaacagaaatgcctgttctcatttaggggcacgagtatccaggcttaaaggtgggggcctttgctgggaaaccaccctcttctacccagtatttccctgtctcctgtccatatcacatggagtttaaaccattcagaaataggtttttctcac

SEQ ID NO: 253620 - DNA, 201 bp, Homo sapiens
gcttaaaggtgggggcctttgctgggaaaccaccctcttctacccagtatttccctgtctcctgtccatatcacatggagtttaaaccattcagaaatagktttttctcacctggttttatgctaaccaaaacaactataatattaataattttctctttacaacctcccctgcttgttgacctatctaggagtggtcgca

SEQ ID NO: 253621 - DNA, 201 bp, Homo sapiens
ctatgggtctttccttacacatcctctttgattgtggccctcctgggtgccacttgtaaggattttgagatgacattgcccatccagatgattcaggaaaygcttctatcttaggatccttaacataatcacatctgcaaagtttgttttgccaggtaaggtaacatagtcacagcttccaaagataaaggcatgagttat

SEQ ID NO: 253622 - DNA, 201 bp, Homo sapiens
ggacatcccacttctgtcctccctgatcttccatcttccatctgctttcctccctcttcccatctccctttcctcatattcctctccctctccctcacctrtaggactgagaatccctgtggtcctctgagatcagtttctttccaccacattgtaaacaagctgtggaaagttttagttcttagcgactccacgacccac

SEQ ID NO: 253623 - DNA, 201 bp, Homo sapiens
ggcatcttaggatctcttccctatgggtctttccttacacatcctctttgattgtggccctcctgggtgccacttgtaaggattttgagatgacattgccyatccagatgattcaggaaatgcttctatcttaggatccttaacataatcacatctgcaaagtttgttttgccaggtaaggtaacatagtcacagcttcca

SEQ ID NO: 253624 - DNA, 201 bp, Homo sapiens
tttgtatgtaagaaagacctgaaatttatgtctgcagctttttctcctttatatcctcaactaacaatatttgggggtttctatgattctttgctaaaatytggattcccgtttcaatttctcttgtgcataatctgtaattattttctctgtagttaccattggaatgacatactgcatcctatagttataccatccact

SEQ ID NO: 253625 - DNA, 201 bp, Homo sapiens
atatttggggctcacaatacctaaataaattaaaagcagaaactaaaatagatatttttgaagcaatgttattattctcaataaccttattcataataatyctattcacaataatcaaaaggtgaaaatgcaagtgagcatcagcaaatgaaaggataaacagagtttagtgtctacaaagggacattatttagttttaaa

SEQ ID NO: 253626 - DNA, 201 bp, Homo sapiens
gcagagatgcaggtttaaccaggtccatcagggtgtccagtttcaatcactaactgctggaactgatcctcagacaagccaggactcaagtacaagcccayctacaaccagatgagcccttagggccactggggccatttctgactttgtgctcttcacatacttccttacattagaataatgtaattgttcagtatgttg

SEQ ID NO: 253627 - DNA, 201 bp, Homo sapiens
tgtagagcagttctaatggcaatgaactcctgcagcttctacatcacatagtcttactaactttctaatttttaagaaataatttggctgggtgcagtggytaatgcctgtaatcccagcacactgggaggccaaggtgggcggatcacaaggtcaagaaatagagaccatcctggctaccatagtgaaaccctgtctcta

SEQ ID NO: 253628 - DNA, 201 bp, Homo sapiens
atttctaaattgactggggcatgtctcagatatttggggctcacaatacctaaataaattaaaagcagaaactaaaatagatatttttgaagcaatgttaktattctcaataaccttattcataataatcctattcacaataatcaaaaggtgaaaatgcaagtgagcatcagcaaatgaaaggataaacagagtttagtg

SEQ ID NO: 253629 - DNA, 201 bp, Homo sapiens
aaaacgagcccagtaaccatagcagaggacagcctggacaataggagagaggttttgctttggaaaaataaatttctaaattgactggggcatgtctcagrtatttggggctcacaatacctaaataaattaaaagcagaaactaaaatagatatttttgaagcaatgttattattctcaataaccttattcataataatc

SEQ ID NO: 253630 - DNA, 201 bp, Homo sapiens
gggtttgcaacaccttacattgtctggggacccagggctggaattgctccctcagtgaatcactgggggtgggattgacagagatagggggtccatatgcytaggaaagtggatgtaattgggctgtaccaatgaggagtctgtgttagggagggtagttctgtgtctacagaacacagagggaatttatgctactacagg

SEQ ID NO: 253631 - DNA, 201 bp, Homo sapiens
ggttctttcatagcctagagataattccatcttttccttgagtcctgactggtgattccaggcctccttgatcaaattgactgcccccaaatgttacacayatttcagcattaaaatcactacacctttcccagtaacttacattttttgttataattttgttataatttggtataatgatatggtgctgtgataatttaa

SEQ ID NO: 253632 - DNA, 201 bp, Homo sapiens
ttggctgggtgcagtggctaatgcctgtaatcccagcacactgggaggccaaggtgggcggatcacaaggtcaagaaatagagaccatcctggctaccatrgtgaaaccctgtctctactaaaaatacaaaaatcagctgggcatggttgtgcacgcctatagtcccagctactcaggaggctgaggcaggagaattgctt

SEQ ID NO: 253633 - DNA, 201 bp, Homo sapiens
tgccttgttattttatttaactgggcatttgaaaaaataaacatcttttttactgtatatagatttgttctatgtcatgacagtcattaacttatatgtgyggcaggttctcagtcaaggcatcagccctacgtaaaactcaagtccttcttagtttgtttctgaacatgtacctatgtggactgtgtttgcccttttata

SEQ ID NO: 253634 - DNA, 201 bp, Homo sapiens
aatcagctgggcatggttgtgcacgcctatagtcccagctactcaggaggctgaggcaggagaattgcttgaaccgggagaaagagattgcagtgagctgrgatgtaccactgcactccagcctggtgacagagcaaaactccgaaaaaaaaaaaaagaggctgaaataatttttttgccaaatatggattcggtgaaatt

SEQ ID NO: 253635 - DNA, 201 bp, Homo sapiens
tgcagtgagctgagatgtaccactgcactccagcctggtgacagagcaaaactccgaaaaaaaaaaaaagaggctgaaataatttttttgccaaatatggwttcggtgaaatttttttttattgatcacattaaatatatcacctactatatcctccaaagactctcataagaaatctgtggatcaccttgtccaggatcc

SEQ ID NO: 253636 - DNA, 201 bp, Homo sapiens
agactctcataagaaatctgtggatcaccttgtccaggatcccttgtaccccatgagtcatgtttatcttcgtactttttatttttgttgttgtttttttcagatggagtttaagcccaagctggagtgcgatggtgcaatcccaactcactgcaacctctgcctcccaggttcaagctattttcctggcttagcctccgg

SEQ ID NO: 253637 - DNA, 201 bp, Homo sapiens
tcattactgtatctaagaacatcatttatagtgcccttatgtcatttggtatccggtccatattttaatttttcattgcttaatcaaaatatcttttgtarctcttctttttttaaccagaattcaattgtttttatattgttgtatttgatatcagttaacttgtttttcccagttgaaggttcctgtaaattaaaagtt

SEQ ID NO: 253638 - DNA, 201 bp, Homo sapiens
ccaactcactgcaacctctgcctcccaggttcaagctattttcctggcttagcctccggagtagctggaattacagatgtgcgcccccatgaccagctaaktttttctatttttagtagaaatagggtttcaccatgttagccaggctggtctcgaactcctgacctcaggtgatccgcctgcctcggctcccaaaatctc

SEQ ID NO: 253639 - DNA, 201 bp, Homo sapiens
taacacatataggtctgagtctctttgactttatgctatatgcagttctttaagttacttgaatttgtagatttttgtctttaaccaatttgaaaaatttkgatgattttattctccaaataatttctctactaccatgggtttgcacttccccttctgggaatccaatactatcatactggttggcttgaaggtgtccca

SEQ ID NO: 253640 - DNA, 201 bp, Homo sapiens
aacacatataggtctgagtctctttgactttatgctatatgcagttctttaagttacttgaatttgtagatttttgtctttaaccaatttgaaaaattttratgattttattctccaaataatttctctactaccatgggtttgcacttccccttctgggaatccaatactatcatactggttggcttgaaggtgtcccat

SEQ ID NO: 253641 - DNA, 201 bp, Homo sapiens
ttctttttataatttctgtattaatactatattgtgattttcttattttttcagattttctgtagttcttaatccatatttttcattagcaattttagcayatttaagacagctgtttaaatgcttctctactaattctaatgcctgtgattcttcaggaatgatttctactgatttatttcttcctcataatggactgtg

SEQ ID NO: 253642 - DNA, 201 bp, Homo sapiens
taataagaaatcttccaataaaaccacatcatattttcttttttatttacacccacatcaggattacaactttatcaggactgcaccttgatcaggaaggsctgtttctcttacaaggctaataagaaaggaacaataaatttgctgatgaaaaaaagtcatgtatttaaaaattttaactttaatttttaattgagggca

SEQ ID NO: 253643 - DNA, 201 bp, Homo sapiens
aataagaaatcttccaataaaaccacatcatattttcttttttatttacacccacatcaggattacaactttatcaggactgcaccttgatcaggaaggcmtgtttctcttacaaggctaataagaaaggaacaataaatttgctgatgaaaaaaagtcatgtatttaaaaattttaactttaatttttaattgagggcaa

SEQ ID NO: 253644 - DNA, 201 bp, Homo sapiens
ggtttatgcattgtagctctttgaatattgggccctataacataaacaataatttacgtttctaatctaaccaagtgtgttgcgtatgataggcaggtagyaagtaatatgtaaagtaataaaataaagtacaattactaccagtataattatcacactcaaaattgtttattagtgatgagcatatatcttccttattcc

SEQ ID NO: 253645 - DNA, 201 bp, Homo sapiens
ttacaactttatcaggactgcaccttgatcaggaaggcctgtttctcttacaaggctaataagaaaggaacaataaatttgctgatgaaaaaaagtcatgyatttaaaaattttaactttaatttttaattgagggcaatattttaaagaaatgctcattagtcattcctttaaattgtgtgtgtgagagagagaaaatga

SEQ ID NO: 253646 - DNA, 201 bp, Homo sapiens
agtgtgctcaggggcgttgcagctcattgctcttatagcctgtgagggcacggaagaaacatttgctaaccaggccagtgacagaaatggattcgaaataycagtgtgtgaagctgaatgatggtcacttcatgcctgtcctgggatttggcacctatgcgcctgcagaggtaacaattaatattttagtgttgagagttc

SEQ ID NO: 253647 - DNA, 201 bp, Homo sapiens
aataccagtgtgtgaagctgaatgatggtcacttcatgcctgtcctgggatttggcacctatgcgcctgcagaggtaacaattaatattttagtgttgagrgttcaaaggagctagagtaagtggaagctgaccaggttgtcaggcttgtgttccatgttactctgcatgactccctttaaacgtcagtctttgtctgcaa

SEQ ID NO: 253648 - DNA, 201 bp, Homo sapiens
actcagcagaaagaacacggcttgcctgctccctctcttgaagattgattgtaatgggagtggtttctctgtttctttgtatagtcgaacagatatttacktcttccaagaagatacaattcagaggaatttttatggcaaaagttagtggagacaggtggatgaaatctgtgaggagagtatcactgttctgatgggcgg

SEQ ID NO: 253649 - DNA, 201 bp, Homo sapiens
ttctttgtatagtcgaacagatatttacgtcttccaagaagatacaattcagaggaatttttatggcaaaagttagtggagacaggtggatgaaatctgtkaggagagtatcactgttctgatgggcggccgtttgagccacccacactgtaatactagacctgcctaaagagaattttcccatgtactattctcacctct

SEQ ID NO: 253650 - DNA, 201 bp, Homo sapiens
atatgtccctcattttaagaaaaaaaaaactagaaccaaacaaggaaagtttaaattctttgtctttgttaatatgggtcagatttgtatcaaaatattgkaacagaaaaatttcttgtttctctgacaagaaaattaatggaatatattttattttctagatttagaaatagctaaatgctatttctacactggaagaaa

SEQ ID NO: 253651 - DNA, 201 bp, Homo sapiens
gaaaaaaaaaactagaaccaaacaaggaaagtttaaattctttgtctttgttaatatgggtcagatttgtatcaaaatattgtaacagaaaaatttcttgkttctctgacaagaaaattaatggaatatattttattttctagatttagaaatagctaaatgctatttctacactggaagaaaacttgtatctcaagactg

SEQ ID NO: 253652 - DNA, 201 bp, Homo sapiens
tcactattctcacatttcctcggtactaatcaaatatgtccatgctctgctcttggccgtctatgggaaggtggggtttgcaacaccttacattgtctggsgacccagggctggaattgctccctcagtgaatcactgggggtgggattgacagagatagggggtccatatgcttaggaaagtggatgtaattgggctgta

SEQ ID NO: 253653 - DNA, 201 bp, Homo sapiens
tgattgcttgcacagcgaagagaagatcaaagatggtatgaggagagggctgtgagacccggtatctagttccttgtaatttcacaggaaaaagcctctgraatactttcaaggtgggaagatagtttgctttgtttctgtttttgtcatttaaaagatatactgtcaaatctgtatccaaatttgttacataagtcaata

SEQ ID NO: 253654 - DNA, 201 bp, Homo sapiens
ccaatttctccattttggaacagaagcatttactcaataccccatttccattgtatctagaaagtaactaacctatttttgattttatgactcatagttgraagggacttgccttgtctcagatgagactttagaattggacttttgagctaatgctgaaataagttaagactttgggggactgttaggaaggcataatta

SEQ ID NO: 253655 - DNA, 201 bp, Homo sapiens
aaattttactgcaatcatatgtttcctgacagagttgccttgaatttatggagctgaaccccattttgctaatcacttactccctgcagcctatttcttasatacacaaatcaatatccttagagtatacatctttactcctagtatttggttctgttatgcagacagaatggccaaaacctgggtagaaaagatctaaca

SEQ ID NO: 253656 - DNA, 201 bp, Homo sapiens
tgtttgggccaatttctccattttggaacagaagcatttactcaataccccatttccattgtatctagaaagtaactaacctatttttgattttatgactyatagttggaagggacttgccttgtctcagatgagactttagaattggacttttgagctaatgctgaaataagttaagactttgggggactgttaggaagg

SEQ ID NO: 253657 - DNA, 201 bp, Homo sapiens
ctttgtttgggccaatttctccattttggaacagaagcatttactcaataccccatttccattgtatctagaaagtaactaacctatttttgattttatgrctcatagttggaagggacttgccttgtctcagatgagactttagaattggacttttgagctaatgctgaaataagttaagactttgggggactgttagga

SEQ ID NO: 253658 - DNA, 201 bp, Homo sapiens
aactctcaggcacattagtcagaaaatattacgtttggttgctcccccaggttcctaaaagtaaagctctagaggccgtcaaattggcaatagaagccggsttccaccatattgattctgcacatgtttacaataatgaggagcaggttggactggccatccgaagcaagattgcagatggcagtgtgaagagagaagaca

SEQ ID NO: 253659 - DNA, 201 bp, Homo sapiens; identical to SEQ ID NO: 50370

SEQ ID NO: 253660 - DNA, 201 bp, Homo sapiens
ttcctgactgatacaggatggattttattttttacttatttatttttttgagacagggtctcactgtgttgcccaggctggattaccgtggcacagtctcrgctccctgaaacctctgcctcctgggttcaagcaactctcatgcctagcctcctaagaagctgggactacaggcacacgccaccatgcctggctaatttt

SEQ ID NO: 253661 - DNA, 201 bp, Homo sapiens; identical to SEQ ID NO: 50371

SEQ ID NO: 253662 - DNA, 201 bp, Homo sapiens
ctgtgaagcatcctgtgtgtgtgaagcaccggccatcagtcaagtatgcctggtgctttctctcagaactcatcaaaaaggtcagttatgggcagtgtccrcccagtagctggacagcatagccacctgcgtgctggagcccccatccttcccaggccctgggcctgctttgcaaaccccagcatggcaggggcctaacca

SEQ ID NO: 253663 - DNA, 201 bp, Homo sapiens
caagtgggccttccctcctcttccatagagccagacagttggcgactgtctttactgcaaaccctggttcacactggctcccctgggagggaggtggtttrggcccacgtgccctgcgttcttgctcagaatgggcattagaaatgctgccatagcctgtgacactgcagtggaagcatttttaggaaatggcttatatca

SEQ ID NO: 253664 - DNA, 201 bp, Homo sapiens
gcagtggcacaatctcggctcactgcaacctccgcctcctgggttcaagcaattctcctgcctcagcctcccaagtagctgggattacatgcacccaccaycgtgcctgcctaatttttgtatttttgtagagatgaggttttaccatgttggccaggctggtttcgaactcctgatctcaagtgatccacccgccttggc

SEQ ID NO: 253665 - DNA, 201 bp, Homo sapiens
accctcaacacccacgaggtgggtactattatcatcactcacatttgaccagagggattgtttgattaggtgcagtagttgagggttcagacccaggagayagcctgcctgcttcgaatcctggcccaacccctggccctgtgtgaccttgggcaagtgcatctctctgtgctgttgttttcttattaataaaatggggga

SEQ ID NO: 253666 - DNA, 201 bp, Homo sapiens
acctgggatgcattgcagtgagctgagattgcaccactgcactccagccttgggaacagagtaaatctctgtttaaaaaaaaataataaatgaggctgagrcaggaccatcacttgaggccatgcattcaggaccccatctctacaaaataaaaaaattactagcatggtggcacgcacctgtcatcccagctactcagga

SEQ ID NO: 253667 - DNA, 201 bp, Homo sapiens
ccttgtctcctgccttagactacacctaacactaccctctcaacacctctcgttgaagggcctcccatccaggtttccctaccaagtgaatttttttttttagagacaaggtctcttgcccaggctgtcctcgaactcctgggctcaagcagtcctcccatgtcagcctctagagtagctgggactattcggcacacacca

SEQ ID NO: 253668 - DNA, 201 bp, Homo sapiens
aaagctaacttgggctcaccctcaacacccacgaggtgggtactattatcatcactcacatttgaccagagggattgtttgattaggtgcagtagttgagrgttcagacccaggagacagcctgcctgcttcgaatcctggcccaacccctggccctgtgtgaccttgggcaagtgcatctctctgtgctgttgttttctt

SEQ ID NO: 253669 - DNA, 201 bp, Homo sapiens
ctgtcatcccagcactttaggaggctaaggcaggaggacttcttgacaccaggagttcaagacttacctgggcaatatagtgggaccccatctccacaaawcatacagaaactagtcaggcatggttgtgcacacctgtagtcccagctactcgggaggctgaggtgggaggatggcttgagcccaggaggtggaggctgc

SEQ ID NO: 253670 - DNA, 201 bp, Homo sapiens
tcctcctctctgtcatggtcatgtggcagctctcacggaatccttgtctcctgccttagactacacctaacactaccctctcaacacctctcgttgaaggscctcccatccaggtttccctaccaagtgaatttttttttttagagacaaggtctcttgcccaggctgtcctcgaactcctgggctcaagcagtcctccca

SEQ ID NO: 253671 - DNA, 201 bp, Homo sapiens
ctgagcgtggtgaccaggtcacaggctgtccctcgtgcctcagtgttctcatctgtatgtcgagcactgcacagaattggctcatgctctgaggctctcamgcctgtgatggaagagacagagaagggggtggcctctcgtctccctggggacctgccattctcagcacaggcgcatggcaggcagcagcctcccttctgc

SEQ ID NO: 253672 - DNA, 201 bp, Homo sapiens; identical to SEQ ID NO: 50372

SEQ ID NO: 253673 - DNA, 201 bp, Homo sapiens
ctgtgtggcctgagatgagtgtctttcatgccatgtgacacccttgaggcctgtgcaagctgttggcatgtcaacagttagctgcttctctttgctgagtrgcgattggtcctgtcatggtttattcagccatgtggtggatggctacttgtcttctaagccacttgccttctgatcgctggactgactctctctccctct

SEQ ID NO: 253674 - DNA, 201 bp, Homo sapiens; identical to SEQ ID NO: 50373

SEQ ID NO: 253675 - DNA, 201 bp, Homo sapiens
cacttctgggatgaggacagggcccttgagagaaggtggtgtttggctgggccaccgaaaacccctcgcccctgccagcacactcagtctcctctctggtygaacagagctctgcctgtggtcctgggtcccagccctgaaaaccacaggtccagcggtggccagggacacaggcccacccctgcaagccagcagacaaat

SEQ ID NO: 253676 - DNA, 201 bp, Homo sapiens
tttttagtagagacagagtttcaccatgttggccaggctggtctcgaactcctgacctcaggtgatccgcctgcctcggcctcccaatgtgctgggattasaggcatgagccaccgcacctggcctaggatggattttaaagatgggcccgaacatgcagggtttgacataaggatgtcgagaggctgttgctcagtaggc

SEQ ID NO: 253677 - DNA, 201 bp, Homo sapiens
ggtctcactgtgttgcccaggctggattaccgtggcacagtctcagctccctgaaacctctgcctcctgggttcaagcaactctcatgcctagcctcctargaagctgggactacaggcacacgccaccatgcctggctaatttttgtatttttagtagagacagagtttcaccatgttggccaggctggtctcgaactcc

SEQ ID NO: 253678 - DNA, 201 bp, Homo sapiens
tcgtcatctgtcaaatgggccagcagagtagtccttcccctcatggggtgtgggaaggaggaaatgggatgagatagaactcatttgagccagtgcctgcrgtgtggagtggggtggagggggtgagatgtctattcccagctgttatctgctctcgccctcccagccatccgtcctgagggcaagaacaaccggctcttc

SEQ ID NO: 253679 - DNA, 201 bp, Homo sapiens
cagaagtccggccacagggaacaaggctttgtgctgaagaccaaaatgcaaatgggtgctagaaaaccaggaatcaagaccttgtcaggaggcatctacargcctttggcaacctccctgacttccacaaaggctgccctcagtaaaactcaatgaacaatggccagcaggggagaaaggaaggtgggcgtgttttctctt

SEQ ID NO: 253680 - DNA, 201 bp, Homo sapiens
ggggcttccttctcctgggcagggctgtagcctggggctacagggccttgtgtgtgtcaccagctcactgaagggaagataatggaacggaggaagaagaytgccctggagctctctgaacttgtcgtctactgccggcctgttccctttgatgaagagagtaagggccagggcccaggcggggtgtgcatgtgcctggag

SEQ ID NO: 253681 - DNA, 201 bp, Homo sapiens
caaatgtgtcctctgggacagaaaagaggaaagatgatttcaggatgaggctgaggacagagctccctcatttactgttgggtgtggtgtctggaaggtayaggggaaggtgggagaggggcccagagcacctgcagtgtgggcatgcccaaggttggcaggggcttccttctcctgggcagggctgtagcctggggctac

SEQ ID NO: 253682 - DNA, 201 bp, Homo sapiens
tgacggctccttcctcgtgcgagagagtgagaccttcgtgggcgactacacgctctctttctggtaacacttcccatgcagatgcgtatgttcagtcagcrtgtgtacacagacatcacatcacccagagataatcagttaacatttgagcctttgatccaggacaataattaggctttacatggaacataatttcaccta

SEQ ID NO: 253683 - DNA, 201 bp, Homo sapiens
catgctcttctcatcttcagaaaacatgccctggtttctttaggccagtgtcctgccaactcctttgccctcacagcccagaagattgtctctgttccctrtgtcccattccttcaattctgtttactgcttaaactgtggtcactggtctcccttagctcaccagggctctaacagctaactttggaggcttctcctctc

SEQ ID NO: 253684 - DNA, 201 bp, Homo sapiens
gcaggggaagccaagagcccttcagctgggggcctgactgcctgactggcactcctgctctataccatgcaggacctggagcagcgcagcggggacatcamctacgggcagtttgctcagctgtaccgcagcctcatgtacagcgcccagaagacggtgcatgagccacctgccctccctcaacccctgcccctgctcttc

SEQ ID NO: 253685 - DNA, 201 bp, Homo sapiens
atgaacagccttgggtccctatttcttcttctggagtctagctcttttgcaggtcaaaatgtctcagtgagggaacaaagatagggaagggacaccccacwgaaccacctttcccccatatagccctctctgacatctcagcccttacttagcaaaggcctatccctagactcaacccagccctcttattaccagagtgac

SEQ ID NO: 253686 - DNA, 201 bp, Homo sapiens
cttgacctacccagccctgcctctgggactttatgatttgatttgtgtgtaccttgtgtcaggaagtggtcctcatgaacagccttgggtccctatttctycttctggagtctagctcttttgcaggtcaaaatgtctcagtgagggaacaaagatagggaagggacaccccacagaaccacctttcccccatatagccct

SEQ ID NO: 253687 - DNA, 201 bp, Homo sapiens
tgaagaaaggaaagggaacagtgaggccgggcctgaggcctctgaagccgtctctactgaggtcgaaggatccctgtggatcaggtgcaagtttgctgcamtgggggaaagggaagctgctccagaaaccagtagctgctttctacctctgggctctggggcattaacatatcccattgtgtcctgtttccaggagcctga

SEQ ID NO: 253688 - DNA, 201 bp, Homo sapiens
acccattttttgtcaagagaatgagtaggggtgaccaggaccccacccgggctccaggagctagacgctccttagggatgccaccttgtttctacctactrtgcaccttgcccacccccagttgggacagagcactctctctcctacccccaacctaccatcttgggttggacagggcagggactcactgtctcttccctt

SEQ ID NO: 253689 - DNA, 201 bp, Homo sapiens
ctagacgctccttagggatgccaccttgtttctacctactgtgcaccttgcccacccccagttgggacagagcactctctctcctacccccaacctaccaycttgggttggacagggcagggactcactgtctcttcccttccacatgtttctggacagtttgtcaccttcctgttctccaaagagaacagtgtgtggaac

SEQ ID NO: 253690 - DNA, 201 bp, Homo sapiens
aagggactaacctcaccccatgggttctgatccagtcttgccctcaggcctccaggttcccagaatagtgttgtttacctgtccagccccaggtgggctcracccacaggtcagaggtcatgagaagctggatgagaccactggggatgtccctgttttctcagtatatcagccaaggacctgaagaacatgctgtcccag

SEQ ID NO: 253691 - DNA, 201 bp, Homo sapiens
ttgactaccagggggtatggctgggctgacattggcccaggctggtaggttgtggggggctgggctcatccctgactggaggcttctctcatcccctgccytccctaccccatcaggagctgtgggctgttgatcgcctccaggtgcaggagttcatgctcagcttcctccgagaccccttacgagagatcgaggagccat

SEQ ID NO: 253692 - DNA, 201 bp, Homo sapiens
  misc_feature (1)...(201): n = A,T,C or G
gaagcagttttactcagtggatcggaatcgtgaggatcggtaagtactgagctgtggctgtagcccagcagggtggggatgggcatccagaaccttagccnggcctctaagtagctgcccggagagccagaggacccaggggaccttaagtggggccaggagggtgggcagaaggttctgccacgtgtagctttctgcaca

SEQ ID NO: 253693 - DNA, 201 bp, Homo sapiens
agaagtgcagaggagtcattgaccctcttgtgcacctggcttcgttgaagcaggagaatggtgacctcagtcccttcagtggtacgtccctgcgggagcgkggctcagatgcctcaggccagctgtttcatggccgagcccgggaaggctcctttgaatcccgctaccagcagccgtttgaggacttccgcatctcccagg

SEQ ID NO: 253694 - DNA, 201 bp, Homo sapiens
aggacacaggttccaacaagaaacttaggtctaatttagggtcttggatttgatgattgggctccctctcccccttctagggcctgccatgtgtctgcccmctagggcaggattggctggctctcactggctgtgctctgaggagccctgcctttgctcttctctttctcttccctagggttcctgctgtccttgaactct

SEQ ID NO: 253695 - DNA, 201 bp, Homo sapiens
gcagtgcctttgaagaacaactacagtgaggacctggagttggcctccctgctgatcaagattgacattttccctgccaaggtatctgcagcaggggtggrctggcctggggtaggtgggaggagagccaggcagcagcctctagaagtgcagaggagtcattgaccctcttgtgcacctggcttcgttgaagcaggagaa

SEQ ID NO: 253696 - DNA, 201 bp, Homo sapiens
accttgccagtgcttttgttcataatacctctctacaccctttttgcctgctgagcggttaacaggcttataaatttgggggacctctgtctgttgggctrtttggaagtggcttttttgagcacaggggatactaggacacaggttccaacaagaaacttaggtctaatttagggtcttggatttgatgattgggctccc

SEQ ID NO: 253697 - DNA, 201 bp, Homo sapiens
cagagcagtgcctttgaagaacaactacagtgaggacctggagttggcctccctgctgatcaagattgacattttccctgccaaggtatctgcagcagggstgggctggcctggggtaggtgggaggagagccaggcagcagcctctagaagtgcagaggagtcattgaccctcttgtgcacctggcttcgttgaagcagg

SEQ ID NO: 253698 - DNA, 201 bp, Homo sapiens
ggcttagtgtggatggagcagagagggtgagagggcaaaagctggggaggtaaattcctgagccctgtcacaaagagccttcaaggccatagaaggtgtttgttgtttgttctccttagactggcagtgggcagcctcgggaggggcttgaatgaggtctaggggggtcagaataatgttttatgaagagccagaagactg

SEQ ID NO: 253699 - DNA, 201 bp, Homo sapiens
gggactcatctgtttgccacagactacatgtggagagggtgattggtgagaggtcattttggagatctacacacctcttctgacccctgggaccactctcytgaatctcctcatggtcttggcttcgggcccagcagggcgtgggtgctcggcatcctgctgcttttactgtttttcccaaagctctgttagcttcccgtg

SEQ ID NO: 253700 - DNA, 201 bp, Homo sapiens
aggtctgtgtgaaggagggagatcaggaagtgacaccccaagggggggtcccacaaaccttcttgggtatggtgtgcatgtgtgtagatagttgaggagaytgggaggaaggaaggtcttgtggtgaggcagccaaccatcctcagctacaaactccagatctgacacagatctaatgcagctgctcaacttagaaatggc

SEQ ID NO: 253701 - DNA, 201 bp, Homo sapiens
ggagagcctttctgctctgactggtgcttctcacctctgcagtgtgcagtcaaagccctctttgactacaaggcccagagggaggacgagctgaccttcaycaagagcgccatcatccagaatgtggagaagcaagagggaggctggtaagccagtggtgtggtaggcccagagtccaagggccccagtggagctggggcc

SEQ ID NO: 253702 - DNA, 201 bp, Homo sapiens
tctttcccactactggatctcctcctcgcacaacacgtgagtgtggctccttcaggcccacccagcttcttccccaggagggcccatctgaccatacctayctgcctctccttgcctatccaggtacctgaccggggaccagttctccagtgagtcctccttggaagcctatgctcgctgcctgcggatgggctgtcgctg

SEQ ID NO: 253703 - DNA, 201 bp, Homo sapiens
aggccccaggcttctgtctttggctgatccttcactagatacttttctagatgccaggccctctgaggtgaaggagtatgggtgcttgcttttagggaaaygaaaacaggcaatgacaattgtgagcagtacctttgatgaagagggtgagggtggcggaagaaaacagctaactgccttgatgaggcaggcgggctcaga

SEQ ID NO: 253704 - DNA, 201 bp, Homo sapiens
aaaatgcaaatgggtgctagaaaaccaggaatcaagaccttgtcaggaggcatctacaggcctttggcaacctccctgacttccacaaaggctgccctcartaaaactcaatgaacaatggccagcaggggagaaaggaaggtgggcgtgttttctctttaataacaattatggcacaatctgaccctcctaacacttctg

SEQ ID NO: 253705 - DNA, 201 bp, Homo sapiens
catccactggagtttaagatccacagaagtgggcaagaacaagtgaaatgtttttggcttttttcctgactcccccacaaaataagtcagcagatgtgaawtatatttatgtttttatttaggaataatcaaaaggtttgaagtaccattgaggcccatttcaaattgtacaagcaatttgtccgtgttcccctcccttat

SEQ ID NO: 253706 - DNA, 201 bp, Homo sapiens
tctttgaaataggtatatttgtgtggcccttgcctaattgtcatctctgccatagctgcccccgccttccccaccaacccatggccctacttgagctgccygctgagcctactctgttgtggccacagtatcctcctgctgcccagagtttgagtttctcgctacttctgccactcatcacacttgcttcccagagctttg

SEQ ID NO: 253707 - DNA, 201 bp, Homo sapiens
cgagaccggagcccctgacggctccttcctcgtgcgagagagtgagaccttcgtgggcgactacacgctctctttctggtaacacttcccatgcagatgcrtatgttcagtcagcgtgtgtacacagacatcacatcacccagagataatcagttaacatttgagcctttgatccaggacaataattaggctttacatgga

SEQ ID NO: 253708 - DNA, 201 bp, Homo sapiens
tctgaggtgaaggagtatgggtgcttgcttttagggaaatgaaaacaggcaatgacaattgtgagcagtacctttgatgaagagggtgagggtggcggaakaaaacagctaactgccttgatgaggcaggcgggctcagaagggaggtagtagtggaaccagctggctggggcttgacccctgtggctggggagcagacca

SEQ ID NO: 253709 - DNA, 201 bp, Homo sapiens
aatggtgagggggtgaggtgtggctataggtgaggatgaaggtgcaggaagggaggaggacggtgaccaaattcacatttcacttagattgctactcagaraaaggcaggaaacagttttgttttgccccaacccatgtgcccactcacccacccaccatgtagaacagtgtttctgtagagaaagtgtttgcagttgtgc

SEQ ID NO: 253710 - DNA, 201 bp, Homo sapiens
cagtgaaacacagagcattccctccagtgagaacagaatgtctgttgccagactgatcacaagaggatggcctggttctggcctgagaactggtctacachggaagcatgaagctccatacaatcatgtgtgctagtaaagtttgggcaagcagctgtcctaagcaggtaaaacgataggttattcaacttcaacttcaga

SEQ ID NO: 253711 - DNA, 201 bp, Homo sapiens
ccttcttacggaagacagtacaagggatcaggtgtggccaacaggaacttgggagcattggatgcctggcgtggagctgcgctatgcttacctggttcctrtctcaggcacctgttctgccttcaactgatctcaatggaaatatgtgcaggagtgcaggcctgttgactctgtgtgtgtgtgtgtgtgtgtgtgtgtgtg

SEQ ID NO: 253712 - DNA, 201 bp, Homo sapiens
acctttggttcatgtgactgcccacacctgagctcctcaggagattggcctccctccttgaggctccctccttgagttccaccctcatttggggtggaacktggtctttggggccctggcctgttttccccagcctccctcactctgtgtcttccacaggcggaacgggaaagtccagcactgccgtatccactcccggca

SEQ ID NO: 253713 - DNA, 201 bp, Homo sapiens
gcccatggtaggagtcgggtattgaccacactgggttctggctgtgtaggtgtggatgtgtggtgggagaattccaaccccaccttgacttcagcctaagrcccagagagtgtgggcctgagttcacagggtgactaaccctaggaaggagtgaaggagagctccagttggccataggtcccacaggtttctcagcttact

SEQ ID NO: 253714 - DNA, 201 bp, Homo sapiens
ccctggacagaaggaaggggtctaggaccagaagatcagttgagagactgctgtcgtcagtagacagggctggctggggagagagaggcctgttgtccackggcacctgggactcaagtgatggagaggagcggcaggaggaatgtggggagtgggaaggcttttcctgactttgggctcagcagtgaaccaacgagccac

SEQ ID NO: 253715 - DNA, 201 bp, Homo sapiens; identical to SEQ ID NO: 50386

SEQ ID NO: 253716 - DNA, 201 bp, Homo sapiens
agggcagtaacaagaactataactagggcctgttgatggcagtgtcatctcccactggcctgaccccaggcagggaagcccaagcacatgtgtgtgtgcayatgaagccccaggttggcagtggcagggagagcctttctgctctgactggtgcttctcacctctgcagtgtgcagtcaaagccctctttgactacaaggc

SEQ ID NO: 253717 - DNA, 201 bp, Homo sapiens
accctgggctccctttgtcactgtcagctttgacccctgcatgtttacctatgccaggcactggggaacccgtcagaatcagcagaacaaagttgatgctsctggttggctgacatccccaggcctaatgggttgtaccacagggatgtgacagaggcttggagatggggtggagagggagacacggcctgaggaagaagc

SEQ ID NO: 253718 - DNA, 201 bp, Homo sapiens
gtgaaacatttttcttgcactgctgagcagcctccataattgggccagctcgggactgcatcagttgccaccctttggtttccactgctgccacagctgtmgaacccctctctgccccaccagtggctatggcctgcctcttttctgggatagtttttacagacaagaagcccccaggcccttggcttccaacagctcact

SEQ ID NO: 253719 - DNA, 201 bp, Homo sapiens; identical to SEQ ID NO: 50394

SEQ ID NO: 253720 - DNA, 201 bp, Homo sapiens
cagcctcgatgtggtagggcctgcctctgctgtcactgttctgtgtcagtctccgttaactcacagcatctcttcttactctgtgccttttcctgtgggaygtggcttcaaggagaccacagatgataagttggaggaagggagtgaggcctgagattgcaaaggtgtgatattaggagactgatttttccccctttccac

SEQ ID NO: 253721 - DNA, 201 bp, Homo sapiens
acagagaagtattctcaagggttagggaattcctacttggtggccctttcaccaagtgcatttggtagatgggtctgtagctgctttggagagggcacccrcaagccaaatagagaagggatagggtgcttgccaggctgtcccctagaaggaaaaggtgctggcataccaggtggttgaaggactggatctgggggtcta

SEQ ID NO: 253722 - DNA, 201 bp, Homo sapiens
agttaacatttgagcctttgatccaggacaataattaggctttacatggaacataatttcacctacatacacacacacactctctgtctcaccccccccccatacccctcccttttcggttcatttgaagcccacacctttggttcatgtgactgcccacacctgagctcctcaggagattggcctccctccttgaggctc

SEQ ID NO: 253723 - DNA, 201 bp, Homo sapiens
tggagtggggaggtggggttttccctgggcccccttcatctctccactgggcgattcttgatccaggtgggaggcagtgggagtagggaaccatgctggaycattctgggaagctgtgctggctgggagttgggttctgccttccgtggggcaccttgttgtctgttgaccatactagctagcttaccttctctccctgca

SEQ ID NO: 253724 - DNA, 201 bp, Homo sapiens
  misc_feature (1)...(201): n = A,T,C or G
gccccagtggagctggggccccaaagacatgcatttgtgatgtgcttgtctcctgtgtgcaccagcagtgcctgcctcaccctggcttaggcatgggaacncctaccaaaggataccctcctcatgggagttcggggtggttgctggaggtcagcaccctgtggctcccacaggtggcgaggggactacggagggaagaag

SEQ ID NO: 253725 - DNA, 201 bp, Homo sapiens
cccctgcccctgctcttccaccccacaccccagctctgcctgcctcagccctgctgccctgcttaggggcttttgggtgccatttctccagttcttctcckcttgaggcctgcccccatctgctgctctagcctgccttcttactagcccatttcccacatggcctcccaggggtcttgccctgaccaggttctgtttcct

SEQ ID NO: 253726 - DNA, 201 bp, Homo sapiens
gggctcatccctgactggaggcttctctcatcccctgccctccctaccccatcaggagctgtgggctgttgatcgcctccaggtgcaggagttcatgctcrgcttcctccgagaccccttacgagagatcgaggagccatacttcttcctggatgaggtgagcccgatgtttcacccattttttgtcaagagaatgagtag

SEQ ID NO: 253727 - DNA, 201 bp, Homo sapiens
gaagggactaacctcaccccatgggttctgatccagtcttgccctcaggcctccaggttcccagaatagtgttgtttacctgtccagccccaggtgggctygacccacaggtcagaggtcatgagaagctggatgagaccactggggatgtccctgttttctcagtatatcagccaaggacctgaagaacatgctgtccca

SEQ ID NO: 253728 - DNA, 201 bp, Homo sapiens
gggctctgtaagtgttttccctgtttggcccagagattggcacagaacgtgcttgctaccgggacatgtcatccttcccggaaaccaaggctgagaaataygtgaacaaggccaaaggcaagaagttccttcagtacaatcgactgcagctctcccgcatctaccccaagggccagcgactggattcctccaactacgatc

SEQ ID NO: 253729 - DNA, 201 bp, Homo sapiens
ttgaggcccatttcaaattgtacaagcaatttgtccgtgttcccctcccttatccaaatccacagatacaaaatctaggaaatgtgcaatttgcatcttaraaatagcagcatccccacaggggacctcgtgaggcctggagattcagccccaagagggcaaccccactcctgcctcagcacgaccacagtccaaaccgaa

SEQ ID NO: 253730 - DNA, 201 bp, Homo sapiens; identical to SEQ ID NO: 50410

SEQ ID NO: 253731 - DNA, 201 bp, Homo sapiens
tgggtcctggccacccggtctctgaagctgggttgcacgcgtgtccaggtccacggaaggctgcagtacccgcgcagccccggcatcacctggcgtcaccyggcgccacctggcgcatcgctccccacggcactggcccggcgctccccgctccgctcgttcggctcatgcggcccgcggccgccagggggcacgccccgc

SEQ ID NO: 253732 - DNA, 201 bp, Homo sapiens; identical to SEQ ID NO: 50411

SEQ ID NO: 253733 - DNA, 201 bp, Homo sapiens
ggtggatcgcttgagctcaggagtttgagaacagctgggacgacatggtgagaccccgtctctactaaaaatacaaaaattagccgggcgtgttgacgcamacttgtagccctggctactgggaaggctgaggcagggagaatcgcttgaacccgggaggcagaggttgcagtgagctgagatcgtgccactgcactccag

SEQ ID NO: 253734 - DNA, 201 bp, Homo sapiens
tggaggttgcagtgacccgagatcgtgccattgcattccagcctgggcaataagagcaaaactccatctcaatttaaaaaaaaaaaaaaaaaagaaaaaagaacttgagttagtctactattcgcctttatcttgcagatattactaataacctactgcaactaaatgttaaaatgattgtgttatgtagaagattaaaat

SEQ ID NO: 253735 - DNA, 201 bp, Homo sapiens
gtgtatattttacaaaaatttaaaaaattaaatctggtatacatgtaaaaaaattcatatgagaaacttaaactgagcttctataacaagtaggattacarttgtaggataattaataatactacaataggataaaaattattccttataaaaaagtttttggctgaggcaaaacagttatactacaggctagaaacattc

SEQ ID NO: 253736 - DNA, 201 bp, Homo sapiens
tgggaggtggaggttgcagtgacccgagatcgtgccattgcattccagcctgggcaataagagcaaaactccatctcaatttaaaaaaaaaaaaaaaaaagaaaaaagaacttgagttagtctactattcgcctttatcttgcagatattactaataacctactgcaactaaatgttaaaatgattgtgttatgtagaaga

SEQ ID NO: 253737 - DNA, 201 bp, Homo sapiens
ctgacctcaggatccacccacctcggcctcccaaagtacagggattacaggcgtgagccaccgcgtccggcctgtaagtctttatatgtgaaccatttgtrctagctagaatgagtcactggattttcctcagatgtgtatgtatttctatcacacaatgaaaacctcagtctctctccctttaatttgatagcatttatt

SEQ ID NO: 253738 - DNA, 201 bp, Homo sapiens
cttttgtgtcttctttgggcagactgttttcaaagttcatccatgttgtagcatgtatcattacttaattcctttttttgctaaataatattttattgtawgagtatacgaaattttaaaaatccattcttcagttgagggatgtttgggttgtttccactttttggattttatgaaaaatgctataaacatttgtgtaca

SEQ ID NO: 253739 - DNA, 201 bp, Homo sapiens
ccacagaatagatagtggtttatgacaaaagtctctccaggtccaggtctgttaaaagacttcagtcagccaggcacggtggctcacacctgtaatcctarcactttgggaggtcgaggtgggcagatcacctgagattaggagtttgagaccagcctggccaacatggtgaaaccccgtctctattaaaaataaaaaaaa

SEQ ID NO: 253740 - DNA, 201 bp, Homo sapiens
cccttacagtgtaagcttggaagtatttttctgtagtatgttttgtttagtagatgattggaaatacaatttaaaaaaatgtttctcactttggttttttkttgttgttgttcctcctttctctcttctttttttttttttctttttcctaggactccttctggtttgcttttttgtttctctttagatagctgtttttat

SEQ ID NO: 253741 - DNA, 201 bp, Homo sapiens
tctcaaaaaaaaaaaaaaaaaaaaaaagatgtaaaaaaaaaaaaagaatatctgagatatagcaaagtttttctcatggatgaataaaaatactgaactgkgcctttaaaaaagtacagaaaattgcctgtcatagaaatgcagcagtagggtcaaatgagctaaatctaaatctcatttaatgaaaaaggcactttcctt

SEQ ID NO: 253742 - DNA, 201 bp, Homo sapiens
aaaatactgcaaatagaccgcagacataaatatctaccaaatgctatcttaaattttggtccaaactgaacatatggaaatagatttattgtaagtatttrcttagagctttttcttaaatctgaactaacttgcttttagaagtctttttctttgtaagcattgtaaatgctaataaatcctgttaattttttttttttt

SEQ ID NO: 253743 - DNA, 201 bp, Homo sapiens
taagcccaggaggttgagactgcagtgagctcatgtcgctgcactgatatcatgtcactgatatgtcactgcactctagtctgggcaacagagtgtgaccstgtctcaaaaataaatacataaataaataaataaataaaacagttcaaacaatacctcaaagcagtctagtactgaatgagaggtatgtagaataattat

SEQ ID NO: 253744 - DNA, 201 bp, Homo sapiens
gggaggccgaggtgggcagatcacttgagctcaggagttcaggaccagtctgggcaacatattgaggccttacctctgtaaatatatatatatatatatatttcttttttttaaagaagaaaattaaacttgaaaccatctgaataagcaaacattgtcactttttcctcagtagccattactttcagattgcaggaatct

SEQ ID NO: 253745 - DNA, 201 bp, Homo sapiens
cacaacagtgtgaatgtacttaatgtcattgaattacactcaaaatggttaaaatcgagaatttatgttgtgtatattttacaaaaatttaaaaaattaaatctggtatacatgtaaaaaaattcatatgagaaacttaaactgagcttctataacaagtaggattacagttgtaggataattaataatactacaatagga

SEQ ID NO: 253746 - DNA, 201 bp, Homo sapiens
ggggaggccgaggtgggcagatcacttgagctcaggagttcaggaccagtctgggcaacatattgaggccttacctctgtaaatatatatatatatatatatttcttttttttaaagaagaaaattaaacttgaaaccatctgaataagcaaacattgtcactttttcctcagtagccattactttcagattgcaggaatc

SEQ ID NO: 253747 - DNA, 201 bp, Homo sapiens
atctgggctgggcgtggtggttcgtgcctgtaatcccagcactttgggagaaggcaggcagaacacttaaggtcaggagttcaagaccagcctggccaacrtgatgaaacccccgtctctactaaaaacacaaaaatcagttgggtgtggtggcgcacgcctgtaatgccagctactcgggaggctgatgcacaagaactg

SEQ ID NO: 253748 - DNA, 201 bp, Homo sapiens
cttcagcctaggggacaagagcgagacttcgtctcaaaaaaaaagaaaagaagctcataataatataattccatttacctcactccagctctttgtggtgktgttgtcatatattatttctacgtgtcacaaatataatactttgttactgttattcttgctttaatttttaactattttcaaaaataatcttatatttac

SEQ ID NO: 253749 - DNA, 201 bp, Homo sapiens
atgttcgggacttcaaagcaaaggttcagtatttccggttctggtgtcaggttagtattggaactgtatctctgtactgccttaactttgttgtgttgcttatattacacagtgattgtgaaaatacttaactcacagaaaaacaggtaaaatgggaagcattagaatctctttcatctatttttagagcaaataaataga

SEQ ID NO: 253750 - DNA, 201 bp, Homo sapiens
ggattagaggcacctgccaccacacccggctaatttttataatttttagtagagacagagtttcaacatgttggtcaggctggtctcaaactcctgacctsagatgatccacccgcctcagcctcccaaagtgctgggatttataggtgtgaaccactgcacctggccaaaaagatccttcttgaacgtttcatatgccac

SEQ ID NO: 253751 - DNA, 201 bp, Homo sapiens
aatcatgccttctcaacagtccccaaagtcttaacttatttcagcattaactcaaaagtccacagtccaaagtctcatctgggacaagggaagtcccttcygcctatgagcctgtaaaattaaaagcaacttagttacttcctacatacactcagggatacaggcattgggtaaatacagccattcaagatgggagaaatt

SEQ ID NO: 253752 - DNA, 201 bp, Homo sapiens
ggtctgtgacagctgctgaaacttaagctatcagggtcacactccaggctggaatttggaggaagggcaaattataaacacacacacacacacacacacamtcacacactttttagctattttagctgtcttttagaaaatccttcctttttttttttagacggagtctagctttgtcacccttgctggagtgcagtggtg

SEQ ID NO: 253753 - DNA, 201 bp, Homo sapiens
aaagatttctcatgaagaaaattctggcctagatggtgtcactggtaaggttcatcaaacttataagttataaattaatcagtcctattcaaattcattcataaaatacaagtgatggaaatgttttctttttcatttttttttttttttttttttgagacggagtttcactcttgttgcccaggctggagtgcaatagcc

SEQ ID NO: 253754 - DNA, 201 bp, Homo sapiens
agtgtttcctatccctgttgtggagtgttttatcatgaaagtgtattaaattttgtaaaatccttttttggtatcaattgagatgatcatgtgatttttttccccccctcattctgttaatgtggtatattatgttgatttttcataggttgaaccttttttgcattccaggaataaatcctacttagtcaaaaggattaa

SEQ ID NO: 253755 - DNA, 201 bp, Homo sapiens
ttcatattagacatttgttaaaaggaatttttttttaacttttatggatttatttatagtaaagataaggatacaaatgtcttccacacatatgtggtaawctgtggtgctcgccactccctccctcctgggactgacacactgcagcccacgctgctcaccctggagccccatccttgcatgagagaatggcgccacctg

SEQ ID NO: 253756 - DNA, 201 bp, Homo sapiens
gaggcaggagaatcgcttgaacctgggaggtggaggttgcagtgagccaagatatcgtgcccctgcactccagcctgggcgacagtgagactccatctataaaaaaaaaaaaaaaaaaaaaagcaggagagaaacaaagccagagaaaggatggtgttggggattggaaatagagatgaacgtgaagatttctaaggcaga

SEQ ID NO: 253757 - DNA, 201 bp, Homo sapiens
ctagttctatctaatttattttcaagacaacaacttgttactgagcctatcttgcaagtataacaattgagaatcctcttttttacatttttggtagtctrttttatctgacatttgtattcagttaagtgaatacaggtttgttgttgttgttgttgttgtttgagacaaggtctcagtctgtcacccaggctggagtga

SEQ ID NO: 253758 - DNA, 201 bp, Homo sapiens
gatgttgggatagacagcattctcagatagaaacccctttacttagccctcttagatttggcagcatagaaaagaaaatcccacaacagtagtttcaacaraatcaaagttttttgtttgttttttctgttacttaaaagtattcttggggaaatatctctcaaaaagcaaagaatggttttgttaggaatatgctatatt

SEQ ID NO: 253759 - DNA, 201 bp, Homo sapiens
ccagttgctgtggctcacttctataatcccagcactttgggaggccaaggtgataggattgcttgagcctcggagtttgagaccagcttgagcaacatagygagatcccgtcattatatttttcaaaattaaaaaggaaagttttcagaaggttaaaaaaaaaattgaggcaaaattcactactttaaagtgtacaattca

SEQ ID NO: 253760 - DNA, 201 bp, Homo sapiens
ttccaaataaggtcacattctgagttattgagggccaggatataaacgtgcatttggagggaggacacagttcaacccataacagtctgtaatactatgcrtttatcagactgccagagggttccattctgcaaggaatttggcagactgtacagtcggagggcacagtcctccacaaaactgctgccctcacttcagaca

SEQ ID NO: 253761 - DNA, 201 bp, Homo sapiens
gggaggtcaaggctgtagtgagctgagatcacgccactgcactccagccagggtgacaaagtgagaccttgtctccaaaaaaaaaaaaatatatatatgtrtgtgtgtgtgtgtgtatttatatatacaaatgtatatttaatatatatcaaatatatatattagtgggctgccagcacggcccactaatttttttgtatt

SEQ ID NO: 253762 - DNA, 201 bp, Homo sapiens
ctgggaggtcaaggctgtagtgagctgagatcacgccactgcactccagccagggtgacaaagtgagaccttgtctccaaaaaaaaaaaaatatatatatrtgtgtgtgtgtgtgtgtatttatatatacaaatgtatatttaatatatatcaaatatatatattagtgggctgccagcacggcccactaatttttttgta

SEQ ID NO: 253763 - DNA, 201 bp, Homo sapiens
tcacctgaacctgggaggtcaaggctgtagtgagctgagatcacgccactgcactccagccagggtgacaaagtgagaccttgtctccaaaaaaaaaaaaatatatatatgtgtgtgtgtgtgtgtgtatttatatatacaaatgtatatttaatatatatcaaatatatatattagtgggctgccagcacggcccactaa

SEQ ID NO: 253764 - DNA, 201 bp, Homo sapiens
gctgacactacagatgcacttcaccacacctggctaatttttagtagagacagggtccccttatgttgcccaggctggttttgaactcctggattcaaatkatcctcctgcctcatcttccccaagtgctgggattacaggcataaaccagcatgcccggacaccagccatttttatatctatcgtttgatataactgact

SEQ ID NO: 253765 - DNA, 201 bp, Homo sapiens
atcacctgaacctgggaggtcaaggctgtagtgagctgagatcacgccactgcactccagccagggtgacaaagtgagaccttgtctccaaaaaaaaaaawatatatatatgtgtgtgtgtgtgtgtgtatttatatatacaaatgtatatttaatatatatcaaatatatatattagtgggctgccagcacggcccacta

SEQ ID NO: 253766 - DNA, 201 bp, Homo sapiens
gacaatggacctcagatagcctatgttcgggacttcaaagcaaaggttcagtatttccggttctggtgtcaggttagtattggaactgtatctctgtactsccttaactttgttgtgttgcttatattacacagtgattgtgaaaatacttaactcacagaaaaacaggtaaaatgggaagcattagaatctctttcatct

SEQ ID NO: 253767 - DNA, 201 bp, Homo sapiens
gagagatttagcagatttctggagcaccaacggtgtgttttgactactgtaatcctgaccgatttagtactcagagtctttggaattttttttttttttttaagtacagcttctccttcatcatcctgtccccccgcccaatccaatataatctgaacaattttctgaaatttttactctttgtacttgatgtggagtggt

SEQ ID NO: 253768 - DNA, 201 bp, Homo sapiens
cataaaagactccagataaatcaaaagtagtttctcaaggtaaaatattctatctgtttcacaagtatttgttgaattagcttgtttttttttttttttttctgatttagctgggaacggcgggttgacaacatgggacgtatttattatgttgaccatttcacaagaacaacaacgtggcagaggccaacactggaatcc

SEQ ID NO: 253769 - DNA, 201 bp, Homo sapiens
ggccctaggccattaaatcctgtaactcaagctcccttgccacctgggtgagtaactttttaaattaacatatgttgtctttaggattcttcataagcctrcttattaataaggaaaataacagtaaacaacagtaaactccattgttttgatgactgttttttaatttcttttttttttgagatggagtgctctgtctcc

SEQ ID NO: 253770 - DNA, 201 bp, Homo sapiens
attgataacttatccaaactgtaggcacataattggtttattgtatttaaatgatctatatatcaaacctgtctttttattcaatatgataaattttacaraaatacacccaagatcttcggcaataatatgaccttagaacagaatcttatttcttcttattttgatgttatagcttaatattaattatttaagaacatg

SEQ ID NO: 253771 - DNA, 201 bp, Homo sapiens
cctcacatgcaccaaagccatcaatatctggattattttcaaccacaacgtctagcagagaatcaccaacttttcctttggttgttaatgtttcaccatcwcagtttataaagtggactgtcactttatcttctgagctgctccgcgcccctgccgacacgctcagcggccggctcgcctccgcgctccggcccggtcccc

SEQ ID NO: 253772 - DNA, 201 bp, Homo sapiens
agatggttaaaacactaggtttaaattagagttagacatatttcaaaaaaaaggcaggaatagtagtgcatgagtaatatacctttagtaattaacatccygtatccattaattattaagcatttgcacaaaattttggcagactttttttgcagtcatgaaaatcacatttttccttttaaagtcatgttggaatttaag

SEQ ID NO: 253773 - DNA, 201 bp, Homo sapiens
ttttgcttaccaaattggcaaagattttaaaactttatggtgaaatgggtgtttttattttgcggtacataatttgaaaatgtccagcaaatgggagaacrggtcaattattacctttaaaactattttttagggccaggcacagtggctcatgcctgtaatcccagtacctttgggaggccaaggcaggtggattgcttg

SEQ ID NO: 253774 - DNA, 201 bp, Homo sapiens
ggaggtggagattgcagtgagctgagatcatgccactgcactccagcctgggcgacagagcaagattagattctatgtcaaaaaaaaaaaaaaaaaaaaaagatgggacatttaacactatcaaacgctgcaaaagagaattaagtcttagattaataagctagggaaaactggctgtttggaaaaagaaaagaaaaatca

SEQ ID NO: 253775 - DNA, 201 bp, Homo sapiens
gggaggtggagattgcagtgagctgagatcatgccactgcactccagcctgggcgacagagcaagattagattctatgtcaaaaaaaaaaaaaaaaaaaaaagatgggacatttaacactatcaaacgctgcaaaagagaattaagtcttagattaataagctagggaaaactggctgtttggaaaaagaaaagaaaaatc

SEQ ID NO: 253776 - DNA, 201 bp, Homo sapiens
tgctttgaatcttgttttttttgaactgttgtttttatgtttattattagaaaataatacgattgttttaaaagatgtaaattaaatagtgtgtaaagtaraatgtataaagccttaatagaagaaataatatttgacctaagaccttaaaacagagctataaactgtatatgcatgtcttagaggaattggagggaagaa

SEQ ID NO: 253777 - DNA, 201 bp, Homo sapiens
cccttttgagagctgctttgaatcttgttttttttgaactgttgtttttatgtttattattagaaaataatacgattgttttaaaagatgtaaattaaatagtgtgtaaagtaaaatgtataaagccttaatagaagaaataatatttgacctaagaccttaaaacagagctataaactgtatatgcatgtcttagaggaa

SEQ ID NO: 253778 - DNA, 201 bp, Homo sapiens
acccttttgagagctgctttgaatcttgttttttttgaactgttgtttttatgtttattattagaaaataatacgattgttttaaaagatgtaaattaaatagtgtgtaaagtaaaatgtataaagccttaatagaagaaataatatttgacctaagaccttaaaacagagctataaactgtatatgcatgtcttagagga

SEQ ID NO: 253779 - DNA, 201 bp, Homo sapiens
tacccttttgagagctgctttgaatcttgttttttttgaactgttgtttttatgtttattattagaaaataatacgattgttttaaaagatgtaaattaaatagtgtgtaaagtaaaatgtataaagccttaatagaagaaataatatttgacctaagaccttaaaacagagctataaactgtatatgcatgtcttagagg

SEQ ID NO: 253780 - DNA, 201 bp, Homo sapiens
agtgtcagaaagaattcagaactcaagaagggaaatatttgcaaaagattgaagactcttagcttatcggattagagctatctggagtgggctagggaaarccaaattgttgatacttcttcagcttgtagaaaataaatatactggcaccttttcagaggcagggtgttctaaactccagagccatcattgggctgttaa

SEQ ID NO: 253781 - DNA, 201 bp, Homo sapiens
cctgtttacaggagcttcccttctcactgtcagccacaggcaaccaccactaatctgtatttttttttttttgagacggagtttcactctgtcgcccaggstggagtgcagtggtgtgatctctgctcactgcaacctctgcctcccaggttcaagtgattctcttgcctcagactcctgagtggttgggactacaggcgc

SEQ ID NO: 253782 - DNA, 201 bp, Homo sapiens
gtttgtaaaatgcagtggttaagaacaaccattgttctcttcttggacgttcattgtataagtgttagatttttgttgttgttgttgttgttgttgttgttaactattctctggttgtaagcagaggataagatctaaataatttatgccatacatttcatagttatggcttcactttatattggagtgaaataaaagagt

SEQ ID NO: 253783 - DNA, 201 bp, Homo sapiens
agctaatggggaacataagccaagtagacggcagaagacttgagttgtgtttgatggactttgagtttaacctgtttgtaggatgtccacatagagatgtmtagtatacaactgaattactgaactgaatggttttctaaaagatttctgctatgtttattgacatttgtagcttctgtacttggcaaacaagcaactctt

SEQ ID NO: 253784 - DNA, 201 bp, Homo sapiens
gctgaggtgggaggatcacaaggtcaggagttcaaacccagcctggccaacatggtgaaaccctgtctctactaaaaatacaaaaattagctgggcgtggkcgtggtggcaggcgcctgtagtcccagctgaggctgaggcaggagaatcgcttgaacctgggaggtggaggttgcagtgagccaagatatcgtgcccctg

SEQ ID NO: 253785 - DNA, 201 bp, Homo sapiens
atctcatctctgctacttaattgtgaggtttcaggtagattatttaacctatctgagttttcttatcttaaggataaagatgaattcacctaccctatggractattaagaataaaatgaaggtcctgtgtaaaaaactaaataactgttcattattcttgctgctgttggttggattgagtagaaaggtcctatggttag

SEQ ID NO: 253786 - DNA, 201 bp, Homo sapiens
gcaccttactatattttaatgaatgaaatgatgtagtatggaaaaaaaaaaaatccctaaatggagacctgagtttccatctcatctctgctacttaattstgaggtttcaggtagattatttaacctatctgagttttcttatcttaaggataaagatgaattcacctaccctatggaactattaagaataaaatgaagg

SEQ ID NO: 253787 - DNA, 201 bp, Homo sapiens
gtgagcctggggaggtcagggctgcagcgagcagtgattgtgcctatgcactccagcctgggcaacagagtgaaacaatgtctcaaaaaaaaaaaaaaaaacccaaaaagaccaatgaaaagaaagcgattaaattgtagtatgtctatatataattttctgcagtcattcaaaatgattttcagtaatttgggggaaatg

SEQ ID NO: 253788 - DNA, 201 bp, Homo sapiens
cgtttgtaaaatgcagtggttaagaacaaccattgttctcttcttggacgttcattgtataagtgttagatttttgttgttgttgttgttgttgttgttgttaactattctctggttgtaagcagaggataagatctaaataatttatgccatacatttcatagttatggcttcactttatattggagtgaaataaaagag

SEQ ID NO: 253789 - DNA, 201 bp, Homo sapiens
acgtttgtaaaatgcagtggttaagaacaaccattgttctcttcttggacgttcattgtataagtgttagatttttgttgttgttgttgttgttgttgttgttaactattctctggttgtaagcagaggataagatctaaataatttatgccatacatttcatagttatggcttcactttatattggagtgaaataaaaga

SEQ ID NO: 253790 - DNA, 201 bp, Homo sapiens
gttgaacctggtaggcggaggttgcaggttgcagtgaactgagatcgtgccattgcgttccagccagggtgacaagtgaaactctgtctcaaaaaagagagaaaaaaaaaaaagaatttatggaagatcatcttgaggcccgtatcattcggatgttcctcatctgtgtttatttcaacataaatgtttcttaggctttct

SEQ ID NO: 253791 - DNA, 201 bp, Homo sapiens
tcttgcaactcttctttttcttcagtcagtcattctgtggctagcttgaatgccagcaaaaaggcacataagcctaaaaggatggaagtatttgatatatrtaaagtcagagtttcagggccaccacctgggactatgcctgcttagatatccagactttggactatatattaagctgctgcttctttttttttttttttt

SEQ ID NO: 253792 - DNA, 201 bp, Homo sapiens
aacaagagcgaaactcctatctcaaaaaaaaaaaaaagtttgaatcctagaaagccccaacaggggcagatcatttccttcctgtcagccttgcgttgctstttgttctaggtttaatcagtttcagagtgccacaagaggccctgaaatataatgagtgtatgtataattgtttgggctatttcaccttttcttagacca

SEQ ID NO: 253793 - DNA, 201 bp, Homo sapiens
cagaccctgtctcaaaaaaaaaaaaaaaaaaaaaaaggtttcagtggggtttggtaggattatgtagcaaaattgctttcacaaatttgaatccagctggrcacagtggctcacgcctgtaattccaacactttgaggggccgaggcaagtggatcacctgaggtcaggagtttgacaccagcctgaccaacatggtgaaa

SEQ ID NO: 253794 - DNA, 201 bp, Homo sapiens
gtggagatgagcgactgttgatggagatgagtacctttatcatgcagaatatcagcagccagatattggacttttctcactgccccttaatttactttttwaaatattgtcgttctatggcaatcaggcttttggatattgaggaggaagtaataactacataatgtgataatgatgtctttgaggacccttgtccataac

SEQ ID NO: 253795 - DNA, 201 bp, Homo sapiens
tcttaaaaatgtttgcagtctgtgctttcattaatcttttctacatgaagttaattttagtttttaaaatatacttaatttttgtagagatttaaaatttkttgcaactttgtaattaatgttaatttatatttagaataatttatactgtactattagggcattttcttgcaataaattattagtggagatgagcgactg

SEQ ID NO: 253796 - DNA, 201 bp, Homo sapiens
ggaacaaagaaatctgtaactggttgtgatcagttagttgtaaataccagtgcagttggaccagccgaggcctgtaattctttttttttttttttttttttgagatagagtcttgctctgtcgcccaggctggagtgcagtggcgtgatcttgtctcactgcaacctccgccttccggcttcaagcaattctcttcctcag

SEQ ID NO: 253797 - DNA, 201 bp, Homo sapiens
tttttttttttttttttaagtcaagtgaagcagtgggagtggagaaggaacaaagaaatctgtaactggttgtgatcagttagttgtaaataccagtgcavttggaccagccgaggcctgtaattctttttttttttttttttttttgagatagagtcttgctctgtcgcccaggctggagtgcagtggcgtgatcttgtc

SEQ ID NO: 253798 - DNA, 201 bp, Homo sapiens
actcctgacctcaggtgatccacctgcctcagcctcccaaagtgtttttggattacaggcgtgagccactgtgtccggcctcttttttttttttttttttttaagtcaagtgaagcagtgggagtggagaaggaacaaagaaatctgtaactggttgtgatcagttagttgtaaataccagtgcagttggaccagccgagg

SEQ ID NO: 253799 - DNA, 201 bp, Homo sapiens
cttgaacaaaccagttggactcaaggatttagaatctattgatccagaattttacaattctctcatctgggttaagtaagtttctttttccatgtaatttwttaaaatatagttatatgcattccgtgtagtattgataacttatccaaactgtaggcacataattggtttattgtatttaaatgatctatatatcaaacc

SEQ ID NO: 253800 - DNA, 201 bp, Homo sapiens
accatcggagaaaaatgaagtatatgtgagactttttgtgcaattttttacatcctgtgagtaataattaattcaaaataaaaagctttttaaaaaattgyaatcacattggttctcctaaaacaaggttcagagtttggttaagttggcattatctgatagaagagtggaaggagcacatgtgaaggtgtcaacttcatg

SEQ ID NO: 253801 - DNA, 201 bp, Homo sapiens
ccagcaataaaaaaggaatgggctattgatacaccagtaggtctgggtggacttcaagagtaatttgcttgatgaagaaagtcagtctcaaaagatcacawcctgtgtgattcaattcatataacattctcaaaatgacaaaactagagatggagaacatattagtacttgtcaggaaacagggtaggtgggaagtggatt

SEQ ID NO: 253802 - DNA, 201 bp, Homo sapiens
atcacaaagtaaagaatttgatcctcttggtccattgccacctggatggggtaagtcacatgagtttcttcatggagttctgtcatttcatttttgttctyttccaattgtgtcattttaaaacagatatttatgtctgatactgtgctcttgcttgagtgaatgtctgggaagtttttttttaatatatatatcagttta

SEQ ID NO: 253803 - DNA, 201 bp, Homo sapiens
tttttttcttccccatagtgaaattatttttaatgcagttagactcttgtttatcttactgaagaagaaagggtttaaccaagtcttactgggtgaccatrtaattatctctacttaattatacatttaaatcaaaacagacttaatatctctacacagagtcggtgtgacttttgttttctttttccaaaggttgactct

SEQ ID NO: 253804 - DNA, 201 bp, Homo sapiens
agtaacaaatcaggtgtgggcagttcatatctgccagaggttctcattcatctttttttttcttttcgtgggatggtttttttggtgagttgtttagtacyagtcttcccatttatgacctctaacaagaaacacagaaaagtattattgccaaagactaatactagttttcctaaagagaaagaaaaatgcattttactt

SEQ ID NO: 253805 - DNA, 201 bp, Homo sapiens
agtaaaaacaacattgaaaagaaactcaaaacttaatgactgtttgagacttactcactaaatatgtattgcattttaagaacctgactaatgcatcttaygaactttcaagaaataaatttttagaaacatttctcttaagttcacttacaaactatttaaaaatacataaaagactccagataaatcaaaagtagtttc

SEQ ID NO: 253806 - DNA, 201 bp, Homo sapiens
aaggttgacttattcttatagcccacagatctgaagtaacaaatcaggtgtgggcagttcatatctgccagaggttctcattcatctttttttttcttttygtgggatggtttttttggtgagttgtttagtaccagtcttcccatttatgacctctaacaagaaacacagaaaagtattattgccaaagactaatactag

SEQ ID NO: 253807 - DNA, 201 bp, Homo sapiens; identical to SEQ ID NO: 50421

SEQ ID NO: 253808 - DNA, 201 bp, Homo sapiens
ctctactaaaaatacaaaaagttagctgggcgtggtggcgcgtgcctgtgatcccagctactcaggaggctgaggcaggagaatcacttgaacctgggagscggaggctacagtgagccgagatcgtgccactgtactccagcctgggcgacagagtgagactccatctcaaaaaaaaaaagaaaagaaaatgtccacaaa

SEQ ID NO: 253809 - DNA, 201 bp, Homo sapiens
caggtagaataaataggaagttgtagttagagggattttagagttcaagatctaggaagaggaacaattctaagtatcaaggaaatttaaggagttgtacrggttatcagatgactccattgaaaaattgagatcaaaatgttataagggtgtacagcattgatgttaaaattccccaaattttaatccccagcaacaaat

SEQ ID NO: 253810 - DNA, 201 bp, Homo sapiens
atacccttttgagagctgctttgaatcttgttttttttgaactgttgtttttatgtttattattagaaaataatacgattgttttaaaagatgtaaattaaatagtgtgtaaagtaaaatgtataaagccttaatagaagaaataatatttgacctaagaccttaaaacagagctataaactgtatatgcatgtcttagag

SEQ ID NO: 253811 - DNA, 201 bp, Homo sapiens
tctctagatgaactctgggggttatataggattctacccaaaggctctttatgtatttaataaggctgaccagaaattaaaaagcttttttgaagctcttraaaacttagaagttttcatcctcctgctgttttttttcttaaattcaaggagtattcattatttccctctcccccttccttttcccctcttcttacccag

SEQ ID NO: 253812 - DNA, 201 bp, Homo sapiens
caggaggtcttgcccacatcaatggattgtctggcatcagccactgtttcaggcactcgaacagtcatattgtccatagattttgtcaaacagatttggcmgcccaactgtgatctgttagtccatatgccagatcgagcatgtgattctcctcatcagtgattgcatctaacttctcatatatgtgatcttcaaagatga

SEQ ID NO: 253813 - DNA, 201 bp, Homo sapiens
ttgcttttagttttaatcgcctggacctgccaccatacaagagctatgagcaactgaaggaaaagctgttgtttgccatagaagaaacagaaggatttggwcaagagtaacttctgagaacttgcaccatgaatgggcaagaacttatttgcaatgtttgtccttctctgcctgttgcacatcttgtaaaattggacaatg

SEQ ID NO: 253814 - DNA, 201 bp, Homo sapiens
tagagacgggatttattcatgttggtcaggctgctcttgaactcctgacctcaggtgatccacctgcctcagcctcccaaagtgtttttggattacaggcrtgagccactgtgtccggcctcttttttttttttttttttttaagtcaagtgaagcagtgggagtggagaaggaacaaagaaatctgtaactggttgtgat

SEQ ID NO: 253815 - DNA, 201 bp, Homo sapiens
acgcccagctaattttgtattatcagtagagacagggtttctccatgttagtcaggctggtctcgaactcctgacctcaggtgatctgcctgcctcggctwcccaaagtgctgggattacaggcatgagccactgtcactgtgcctggctgatatatatatgtgtgtatttattattattttttttaatagaaatggggtt

SEQ ID NO: 253816 - DNA, 201 bp, Homo sapiens
aaatacaatttagtcgttcatcaaataaaggtgcaatgttgtcttagattttttgaaatgtaataatgtatatattaccatctaccaaagatggtgtataytaccaactctgtgaaacagatgtgagtttgaacagaagcaataaaaatcaacatgagattagaaaactatcactagctgaggggtatagatccctgagaa

SEQ ID NO: 253817 - DNA, 201 bp, Homo sapiens
tcagttgtaagagtttattgtaaattctggatacaactcctttatcagatatgtgttttgcagattttatctcctagcctattgcttgtctttccattttyttaatgatgtcttttttttttttttttttttttgcaaaaatagagatggggtcttgcattgttgcccaggctggtcaaactcctgggctcaggtgatttt

SEQ ID NO: 253818 - DNA, 201 bp, Homo sapiens
cattgaactatgctagagatactagttttgggccacatcttctgttctgaccttaggtaatccactttgcttgggttgtttgtcttactcagttgtaagaktttattgtaaattctggatacaactcctttatcagatatgtgttttgcagattttatctcctagcctattgcttgtctttccattttcttaatgatgtct

SEQ ID NO: 253819 - DNA, 201 bp, Homo sapiens
gccaggatggtctcaatctcctgacctcgtgatctgcctgccttggcctcccaaagtgctgggattacaggcgtgaaccactgcacccggccccccccccctttttttttgagacagagtctcgctctgtcaccaagctggaatgcagtggtgcgatgttggctcactgcaacctccgcctcccaggttcaagcaattctc

SEQ ID NO: 253820 - DNA, 201 bp, Homo sapiens
acccaggaggcagaggttgcagtgagcagagattgcgccattgtactccagcctgggcgatgagcgaaactctgtctcaaaaaaaaaaaaaaaaaaaaaaagatgtaaaaaaaaaaaaagaatatctgagatatagcaaagtttttctcatggatgaataaaaatactgaactgggcctttaaaaaagtacagaaaattgc

SEQ ID NO: 253821 - DNA, 201 bp, Homo sapiens
actgcagtgagctcatgtcgctgcactgatatcatgtcactgatatgtcactgcactctagtctgggcaacagagtgtgaccgtgtctcaaaaataaatamataaataaataaataaataaaacagttcaaacaatacctcaaagcagtctagtactgaatgagaggtatgtagaataattattaaggcagatagaaggag

SEQ ID NO: 253822 - DNA, 201 bp, Homo sapiens
tgtcagccaccacgcctggcgtgatttttttttttttttgagacagaatctcgctcttgttgccccagctggagtgcaatggcgcaatcttggcttaccayaacctccgctttccgggttcaagcaattctcctgcctcagcctcccaagtagctgggtttacaggtgtgtgccaccacgcctggctaattttgtattttt

SEQ ID NO: 253823 - DNA, 201 bp, Homo sapiens
actggtaaaatagaactaaaatatgatccagcattgccacttttgggtatatatccaaaggaaataaaatcacttcttcttcttttttttttttttttttwtgagatggagccttccccaggctagagtgcaatggcacgatcttggctcactgcagcttctgccccctgggttcaagtgattctcttgtctcagcctcct

SEQ ID NO: 253824 - DNA, 201 bp, Homo sapiens
aggtttgctgctggcccaaggctttctaatccatctgaggattgaaaatggccctctggataacccagtttttcacatttgctcactgcatacttgtgtcygttcactttgtttttttatttttgagacaggatctcgctgtgttgccagactagagctcagtggctattcacaggaacggtcatagcacactgcaccttt

SEQ ID NO: 253825 - DNA, 201 bp, Homo sapiens
gctacagttagagtctgaagttgttaccaatggtgaaactacatgttcagaaagtaagtgactacctttttaaggtctttaatgattcttcttaaataaartagccattgtagtatgctgtatgtaattattttgattttttttttcagattaataaaatgtttttttctggccggtgtggtggctcacgcctctaatccc

SEQ ID NO: 253826 - DNA, 201 bp, Homo sapiens
taatatgagctctcttgaaagtagcatctgagaattttgaaaagaatgaatacattgtatcccctaagaagaggagcagtgtggaatttttagtttgtttwatctacccattgccgttgaaatggtgctggttaataggtacaggtagacttcaaaggaggaaagtgtttctttgtcccctcaaacttgatcacattagag

SEQ ID NO: 253827 - DNA, 201 bp, Homo sapiens
ccattgcgcctggccgagaaatattttcctaatacaatatataatatgagctctcttgaaagtagcatctgagaattttgaaaagaatgaatacattgtaycccctaagaagaggagcagtgtggaatttttagtttgttttatctacccattgccgttgaaatggtgctggttaataggtacaggtagacttcaaaggag

SEQ ID NO: 253828 - DNA, 201 bp, Homo sapiens
gggaggctgaagtgggcagatagcctgaaccctggagtttgaaactagcatgggcaacatggcaggaccttgtctctacaaaaacatacaaaaattagctsggtatggtggtgcatgcctgtattcccagctactcaggagactgaggcgggaggatcatatgagcctgggaggtgaggcgggaggatcatgtgagtctgg

SEQ ID NO: 253829 - DNA, 201 bp, Homo sapiens
aagtctgttttaaaaattaaaatgggggctaggcgcagtggctcatgcctataatcacagcactttgggaggctgaagtgggcagatagcctgaaccctgragtttgaaactagcatgggcaacatggcaggaccttgtctctacaaaaacatacaaaaattagctgggtatggtggtgcatgcctgtattcccagctact

SEQ ID NO: 253830 - DNA, 201 bp, Homo sapiens
atagacactatgctcaacatgtctattcttccttcagttagtccttaaacgtttatgagttaggtactattgtctcatttttataggtgatgagaaaacargcttagaaagggaaaggaacttgcttgagttaatagcgttaagtgggacagttgaacctggaacagccttaccttcagagcctgagctcgtaactatcat

SEQ ID NO: 253831 - DNA, 201 bp, Homo sapiens
aaattaaactaaaacctctagaagaaaatatgaatagttaattcattgctgaataaatttagctatatagaaatataaaactcttataatttaaaaatgtrttatcaaaagcaaaggaaatatttaaccaatatgagatgctcagtattctcaggttgtaaagatctcttaaaaataggcaaaattattcccttgtaatag

SEQ ID NO: 253832 - DNA, 201 bp, Homo sapiens
acagagcaagactcttgtctttaaaaaaaggaagaaagggagggccttgggatgggagagttattctagatctcctgcatttagttgataatttgatactrgaggatgggagtgagataaagagtagagattgatttgggaatcattctctgagataaccttagaaatcatggaatttgagatcctagggaaaaatctgtg

SEQ ID NO: 253833 - DNA, 201 bp, Homo sapiens
catgtctggatgttttatgtttctcagtgttgtcttctgtttatttgtttatttttatgaagtaccaagattattggtgcctgattttcaagattttgtcrttagatgtgcgttctttttttttgtttttaagtttattattatattttaaagacaggctctcgctctgttgcccaggctggtctcaaacttttcacctga

SEQ ID NO: 253834 - DNA, 201 bp, Homo sapiens
ttctgcttttaaagtagtgagtggcatgtcttaaccacagagtgcagtgattataaaattccatttgattctttgtttttctcaaattgcataagcagtgwgtaggaagaagatgatgaaccacaggaggagtagtcagaaggggagaagaacgagaaaagtaatgtcacagactgtgagggaaaattatccacaaagatg

SEQ ID NO: 253835 - DNA, 201 bp, Homo sapiens
tgaactctgggggttatataggattctacccaaaggctctttatgtatttaataaggctgaccagaaattaaaaagcttttttgaagctcttaaaaacttmgaagttttcatcctcctgctgttttttttcttaaattcaaggagtattcattatttccctctcccccttccttttcccctcttcttacccagagtgagca

SEQ ID NO: 253836 - DNA, 201 bp, Homo sapiens
tggtgtgggtcctcacacgttgagcgccggtctcctgggcccactgttctttctctgtactttgtgtctgtgtcttatttcttttctcagtctctcgtctscacctgacgagaaatacccacaggtatggaggggcaggcccccttcatctaaaaggtgttgaaagccttggactatgtgaattaacttagactgcttatt

SEQ ID NO: 253837 - DNA, 201 bp, Homo sapiens
tcattttctgtttaaactttgatgttaaaggtgcttctcagaatgatgatggctccagatccaaggatgaaacaaggtaagcattcactgattgcttaccrcagaatgcggagagatagatttcctaaatattcattttagtgtaaacttcaggttcatgatataagaataaatgagtgtcagaaagaattcagaactcaa

SEQ ID NO: 253838 - DNA, 201 bp, Homo sapiens
tgagtgtcagaaagaattcagaactcaagaagggaaatatttgcaaaagattgaagactcttagcttatcggattagagctatctggagtgggctagggawagccaaattgttgatacttcttcagcttgtagaaaataaatatactggcaccttttcagaggcagggtgttctaaactccagagccatcattgggctgtt

SEQ ID NO: 253839 - DNA, 201 bp, Homo sapiens
atgttcagttgaattagatggtcacctaatttcctccaactgctttgagtgcgtacttgatatgcacttggaggctcttaagctgttaatgtcatgaactycttagtgatttaaaagttaagaaaaaaactctctttgtagttctatgtggtagtgctgttcttgattacaaacatttgggaaacttacaattcaagttat

SEQ ID NO: 253840 - DNA, 201 bp, Homo sapiens
gaaattacgatgtatctcaggtaaaattggaaaatacaatttagtcgttcatcaaataaaggtgcaatgttgtcttagattttttgaaatgtaataatgtrtatattaccatctaccaaagatggtgtatactaccaactctgtgaaacagatgtgagtttgaacagaagcaataaaaatcaacatgagattagaaaacta

SEQ ID NO: 253841 - DNA, 201 bp, Homo sapiens
gttcctagcagcacacatatgcagctcttcttcggttctggaggttccagggcagccaatattgcttcgtcaaatacattctttaggcctttctttgtgaktgcagaacactccacgtacttgacagtcttcaggtcatgggccagcttattcagcagtctctggagtgataggcttctgtttgttcttggcaagtttctc

SEQ ID NO: 253842 - DNA, 201 bp, Homo sapiens
gataggcagctagagctgtccgttttgacagaaacctttgcgcaggcgcagaaaggcacaggactcgctaagtgttcgctacgcggggctaccggatcggwcggaaatggtgagcgtgcgccggggtcttgtggctggcggccgcccaccaccccacgccaggccttcagtcttccgaggatgaggggatctcagagctcc

SEQ ID NO: 253843 - DNA, 201 bp, Homo sapiens
aatgctaatgctttgctttcccctgcccctgcccttcccaaagagaagagaacagacagcaatggcagagtatatttcgtcaaccacaacacacgaattayacaatgggaagaccccagaagtcaagggtaagaatagttacttgtgtatatttaatctcttaaagattataccttatttctaacaactgaagaagatcaa

SEQ ID NO: 253844 - DNA, 201 bp, Homo sapiens
agcacatattgctgagcctgacccctagagtttcttttttgtttgttggttgcttttgggttttttgggttttttttttttgtttgtttgtttttttttgktttttttttttttttgagatagggtctcgttctgtcacccgggcgagagtgtagtggcgcaatcttgagtcactgcaactttgctgcacagattcaagca

SEQ ID NO: 253845 - DNA, 201 bp, Homo sapiens
caggcgtgagccaccgcacccggctatattaagcttcttaagtagttactatataaactcctctgacaactccaagggttccttaactttgatgagcattrgcattctctgaactttgctgctacagtagataacctgggtggtggagtagataacctgggtggtgggtacttccttggttgtagttacctcatctatgag

SEQ ID NO: 253846 - DNA, 201 bp, Homo sapiens
gattctcctcatcagtgattgcatctaacttctcatatatgtgatcttcaaagatgagatgacaggttaaacaagccagagttccctcacatgcaccaaarccatcaatatctggattattttcaaccacaacgtctagcagagaatcaccaacttttcctttggttgttaatgtttcaccatcacagtttataaagtgga

SEQ ID NO: 253847 - DNA, 201 bp, Homo sapiens
aagcttgttaaagcacatattgctgagcctgacccctagagtttcttttttgtttgttggttgcttttgggttttttgggttttttttttttgtttgtttktttttttttgttttttttttttttttgagatagggtctcgttctgtcacccgggcgagagtgtagtggcgcaatcttgagtcactgcaactttgctgcac

SEQ ID NO: 253848 - DNA, 201 bp, Homo sapiens
gaatactgaaataatttctcctgtccaggttttgcagtgtgacccttgggcaaatttttaaatttcacagagcttctgtcttttttttttttttttttttkgagatggagtttcacccttgtcacccaggctggagtgcaatggcatgatctcagctcactacaacctctgcctcccgggttgcagtgattctcctgcctc

SEQ ID NO: 253849 - DNA, 201 bp, Homo sapiens
ccggaagcttgttaaagcacatattgctgagcctgacccctagagtttcttttttgtttgttggttgcttttgggttttttgggttttttttttttgtttgtttgtttttttttgttttttttttttttttgagatagggtctcgttctgtcacccgggcgagagtgtagtggcgcaatcttgagtcactgcaactttgct

SEQ ID NO: 253850 - DNA, 201 bp, Homo sapiens
tcacccggaagcttgttaaagcacatattgctgagcctgacccctagagtttcttttttgtttgttggttgcttttgggttttttgggttttttttttttgtttgtttgtttttttttgttttttttttttttttgagatagggtctcgttctgtcacccgggcgagagtgtagtggcgcaatcttgagtcactgcaactt

SEQ ID NO: 253851 - DNA, 201 bp, Homo sapiens
ctcctgacctcaggtgatccacctgcctcagcctcccaaagtgtttttggattacaggcgtgagccactgtgtccggcctcttttttttttttttttttttaagtcaagtgaagcagtgggagtggagaaggaacaaagaaatctgtaactggttgtgatcagttagttgtaaataccagtgcagttggaccagccgaggc

SEQ ID NO: 253852 - DNA, 201 bp, Homo sapiens
gtttatcattatggtttttgtggttttctatagtgctaaggtttggttcttttttcccttagtgtatctgctctaccagagtgttatattaatactttttrtgtattttcatgagagtgattatcatcttttcacttccagatgtgggagtccgttgagcatttttcataaggtgatgaattccttctatttccccatgtc

SEQ ID NO: 253853 - DNA, 201 bp, Homo sapiens
atgtagtcccagctatttgggggagaatgaggcagtaggatcccttgagcccaggagttccaggctatagtgagccatgatcacaccactgtaccctagcyctgtcaacagagcaagtccctgtctctaaaaaaaaaaaaaaaaatggaaagaaatactcaaaacactcaatttctcaattgttttctttaatgaataacg

SEQ ID NO: 253854 - DNA, 201 bp, Homo sapiens
tcctacaactttacttaatgtgtttatcagttccaataattttttattggtggagtttttaaggttttctgtatataaggtcatgttgtctgcgaacaggkatagttcaacttcttcctaattctgatgccctttatttctttctcttatctaattgctttggctgggacttccagcagtttgttgaataaatgtggtgaa

SEQ ID NO: 253855 - DNA, 201 bp, Homo sapiens
gcagtggcacaatcgtggctcactgtaatctccacctcccgggttcaggagattctcctgcctcagcctcctgagtagctgggattacacgtatgtgtcastgcacctgggtaatttttgtatttttagtggagatggagtttcaccatgttggccaggctggtcttgaactcctggtctcaagtaatctacctgcctcag

SEQ ID NO: 253856 - DNA, 201 bp, Homo sapiens
cgagattatgccactacattccagcctgggcgacaagaacaaaactccaactcaaaaataaataaataaataaaatatatatatatatatatatatatatwcacacacacgcacacacacacacggtaaattgttgttgattatagtcattgtatagtgctatagaacactagaacttattcttcctgccgatctgtactt

SEQ ID NO: 253857 - DNA, 201 bp, Homo sapiens
tgaacgagactccgtctgcaatcccggcacctcgggaggccaaggctggcggatcactcgcggttaggagctggagaccggcccggccaacacatcgaaaycccgtctccaccaaaaaaatacgaaaaccagtcaggcgtggcggcgcgtgcctgcaatcgtaggcactgggcaggctgaggcaggagaatcaggcaggga

SEQ ID NO: 253858 - DNA, 201 bp, Homo sapiens
ttttataggactgtctgtagtatgttttttatcatttatacttcattaattatataatgttcagaaggcaaaatttaagagacttggtttagaatcataayggtatctctctaaaaatgtctgccttaagcatggtatatgatgttcaacatcattagtcattagagaaatgcaaatcaaaaccacagtgaggctgggtgc

SEQ ID NO: 253859 - DNA, 201 bp, Homo sapiens
ttaaatatttcagatcattgattttagaaactcttctctttcccttcttccctccctcttcttaccttttcttacgatacgtctagatttcgttcttctttgacggagtcttgctctgttgccgaggctgaaatacagtggcacgatcagagctcactgcagtcttaaactcctgggatcaaaggatccccctgcctcatc

SEQ ID NO: 253860 - DNA, 201 bp, Homo sapiens; identical to SEQ ID NO: 50418

SEQ ID NO: 253861 - DNA, 201 bp, Homo sapiens
cttaaatatttcagatcattgattttagaaactcttctctttcccttcttccctccctcttcttaccttttcttacgatacgtctagatttcgttcttctttgacggagtcttgctctgttgccgaggctgaaatacagtggcacgatcagagctcactgcagtcttaaactcctgggatcaaaggatccccctgcctcat

SEQ ID NO: 253862 - DNA, 201 bp, Homo sapiens
ccccacttgaatattttttattctgaaaaagactttctatttcatgtttccacttagatgtctcagcatctggcatctgaaacaatttttttttttttttwaaagacagttttgctctgttgcccaggctggattgcagtggtgcaatcacagctcactgcagccttgacctcccaggcttaagcgatcctcctgcctcag

SEQ ID NO: 253863 - DNA, 201 bp, Homo sapiens
ttgtaagtatttacttagagctttttcttaaatctgaactaacttgcttttagaagtctttttctttgtaagcattgtaaatgctaataaatcctgttaawttttttttttttttttttttttttttactgcatgttacattgaaataaaaacaaagtaaaatgagcaattgccttattgttctgctcttttgcagggggt

SEQ ID NO: 253864 - DNA, 201 bp, Homo sapiens
ttggcattataatctaagatattgacagccattgaaggttaattttaatttttaaaattaaaatagaagaaaacacatggagccaggtgtggtggctcacrcctgtaatctcaactctttgggagactgagccaggaggattgtgtgaggccaggagttcaaaggtgcagtttgatatgattgctcctgtgaattgctact

SEQ ID NO: 253865 - DNA, 201 bp, Homo sapiens
atttgaaatgagctagatacagtggcttgctcctatagtcccagctactctggaggccgaggcaggaggactgcctgctgcccaggagttagaggctgcartcagctatgattgcatcactgcaccccagcctgggccacagagcctgggacacctcacctctaaaaaaaataaaagatttgaaatcattatttttctttc

SEQ ID NO: 253866 - DNA, 201 bp, Homo sapiens
agagcaagactccatctcaaaaacaaacaaacaaacaaaaaaatatagaagtaatgtgttaatggactctccttcctttctcaggtaccatgcatttcacrgtggccttgtggagacaacgccttaacccaaggaagtgactcaaactgtgagaacttcaggtatggtgtcatcctgtgagagaaattgggggcaagagtg

SEQ ID NO: 253867 - DNA, 201 bp, Homo sapiens
gaactctgggggttatataggattctacccaaaggctctttatgtatttaataaggctgaccagaaattaaaaagcttttttgaagctcttaaaaacttakaagttttcatcctcctgctgttttttttcttaaattcaaggagtattcattatttccctctcccccttccttttcccctcttcttacccagagtgagcac

SEQ ID NO: 253868 - DNA, 201 bp, Homo sapiens
ttcttaaatatttcagatcattgattttagaaactcttctctttcccttcttccctccctcttcttaccttttcttacgatacgtctagatttcgttcttctttgacggagtcttgctctgttgccgaggctgaaatacagtggcacgatcagagctcactgcagtcttaaactcctgggatcaaaggatccccctgcctc

SEQ ID NO: 253869 - DNA, 201 bp, Homo sapiens
ttggtaaccactaatctactttctgtctctatgaattttcctgttctggacatttcatataaaatgaatcatacgataaatatataactttttttttttttggagacagtctctctctgtcacccaggctggagtgcagtggcgtgatctcagctcattgcaacctctgcctcctgggttcaagtgattctcctgcctcag

SEQ ID NO: 253870 - DNA, 201 bp, Homo sapiens
gtcagttctcccgcctcagcctcccaagtagctaggattacaggtgtgcgccaccatgcctggctaatttttgtatttttagtagagaaggggttttgctrtgttggccaggctggtcttgaactcctgacctcaggtaatccacctgcctcagccttccaaagtgctgggattacaggtataagtcaccgtgcccagcca

SEQ ID NO: 253871 - DNA, 201 bp, Homo sapiens
gcctgacccctagagtttcttttttgtttgttggttgcttttgggttttttgggttttttttttttgtttgtttgtttttttttgttttttttttttttttgagatagggtctcgttctgtcacccgggcgagagtgtagtggcgcaatcttgagtcactgcaactttgctgcacagattcaagcaattctcctgcctcag

SEQ ID NO: 253872 - DNA, 201 bp, Homo sapiens
atgataatatatcacaccaggttaaaaatttgcgtagagctggcattgtgcaaagacaaggactttggggtcaagacgggatttgaatctttttctgctcycaatagtgtgatgttgggcaaatattttcatctgtaaaataagaatattaatatctacatttctaggattattgtgaagagtagaaatattgtttattaa

SEQ ID NO: 253873 - DNA, 201 bp, Homo sapiens
catctttgagaaattagaaagaactatgtcaggtgtaatttggaagagaacttgaagtttgttattgttactatttttgagatggagtcttgctcggccaygcaggctggagtgcagtgatgtgatctcggctcactgcaacctccacctcccgggttcaagcgattcgtgtgcctcagcctcccaagtagctgcctccca

SEQ ID NO: 253874 - DNA, 201 bp, Homo sapiens
gagatgctcctcacctcccagacggggtcgcggctgggcagaggcgctcctcacatcccagacggggcggcggggcagaggcgctccccacatcccagacsatgggcggccgggcagagacgctcctcacttcctagatgtgatggcggccgggaagaggcgctcctcactcctagatgggatggcggccgggcagagacg

SEQ ID NO: 253875 - DNA, 201 bp, Homo sapiens
tcatattagacatttgttaaaaggaatttttttttaacttttatggatttatttatagtaaagataaggatacaaatgtcttccacacatatgtggtaatytgtggtgctcgccactccctccctcctgggactgacacactgcagcccacgctgctcaccctggagccccatccttgcatgagagaatggcgccacctgg

SEQ ID NO: 253876 - DNA, 201 bp, Homo sapiens
tctcaatttaaaaaaaaaaaaaaaaaagaaaaaagaacttgagttagtctactattcgcctttatcttgcagatattactaataacctactgcaactaaatgttaaaatgattgtgttatgtagaagattaaaataactagtgaaaaaatgtcttaaaatgaaaacatctggttagtccttgttttatagccagatgtgga

SEQ ID NO: 253877 - DNA, 201 bp, Homo sapiens
ggaggttgcagtgacccgagatcgtgccattgcattccagcctgggcaataagagcaaaactccatctcaatttaaaaaaaaaaaaaaaaaagaaaaaagaacttgagttagtctactattcgcctttatcttgcagatattactaataacctactgcaactaaatgttaaaatgattgtgttatgtagaagattaaaata

SEQ ID NO: 253878 - DNA, 201 bp, Homo sapiens
acaaaagacttgacttgtaaggatacacatagactcaaagtgaagggatggaaaaagacattccatgcaaatagaaacctccagcagattgcatatagtgaaaaaaaaaaaaaatcatctgctttaattgaaaatgctttgttgagagatttgcagtcagaggcaacctgcttatatactggcaagtgtagaaggggacaa

SEQ ID NO: 253879 - DNA, 201 bp, Homo sapiens
ataactgccttcatatgccttgcccctcagagttttaaaatttttatttttcctgtttaatcttttaattttgatttctataagctctaaattaaagaaaktaactatcatacaaccgatctcgttcagggcttgtattctaattttgcaatttttttttttgctgttttaatttttttatgtagtacaatttatgtttcc

SEQ ID NO: 253880 - DNA, 201 bp, Homo sapiens
acagatcactgcagcctgaacctccctggctcaagccatcctcccattgcagcctcccaaatagctgagactaaaggcatgtgccactgtgcccgactaattttttttttttttttgagatggagtctcactcttgttgcccaggctagagtgcagtggcgtgatctcagctcactgcaacctgcctcctgggttcaagtg

SEQ ID NO: 253881 - DNA, 201 bp, Homo sapiens; identical to SEQ ID NO: 50434

SEQ ID NO: 253882 - DNA, 201 bp, Homo sapiens
tatgtatatgaatatatataatacgaatatatatgaatatataatatgaatatacatattatatgaatgtgtatatatattatatgaatgtattttatttatatatatatatatatatatatatatatatatatattcacttttttttttgtagtgatggagttttgccatgttgcccaggctggtcactcctgggctcaa

SEQ ID NO: 253883 - DNA, 201 bp, Homo sapiens
aagtcaggagttttaagaccagcctgggcaacgtggcgaaatcctgtctactaaaaatacaaaaattagccaggtatggtggcgtacgcttgtaatcccakctactcaggaggctgaggcaggagaatcacttgagacccagaggcagaggttgcagtgagccgagattgcgccactgcactccagcctggcgacagagga

SEQ ID NO: 253884 - DNA, 201 bp, Homo sapiens
acttgcttgttcctcatgaaagccaagtgagagggggctttgtcacgcctctttatattctcaagatcacatggcaaatgagtagtggccaggattcaaayccaggcattgtggttccagggttcatcttcctgtctgtaatgctatcctgcctcacatagaaaggggccatcagattgatatgaagaggcaaaaaaggat

SEQ ID NO: 253885 - DNA, 201 bp, Homo sapiens
gaacaaagttacaccaaactgcctcttcttgctttctcccctctccccacaaaaaaaggtagaaattgctgcctccctatgaactgagacactgatctttaaaaaaaaaaaaaaaaaagtgtgactctgaaaatacggagctccctgctatttagttactgaagaaagtgcttgggtctacccactggactgcccaactcc

SEQ ID NO: 253886 - DNA, 201 bp, Homo sapiens
tattctaagttatttagcaaatatttaatggcctttcttgcttaggacaaatgtatcataatcatcaagtgtgcgagcttttctgtttaccaatggccagygaaagttttaggctttatacataccagtgaactctttgaaaggtcaggatacataggcatgtgtatttatccagaagttgatatatatttttaatttctt

SEQ ID NO: 253887 - DNA, 201 bp, Homo sapiens
gggaaaataattctataaaaagataactgagaattcattttcacaattattctaagttatttagcaaatatttaatggcctttcttgcttaggacaaatgyatcataatcatcaagtgtgcgagcttttctgtttaccaatggccagtgaaagttttaggctttatacataccagtgaactctttgaaaggtcaggataca

SEQ ID NO: 253888 - DNA, 201 bp, Homo sapiens
aaaggattgcacacactaagctgtcaggtttttctaagggctgtgctgtcctatacccacttcatagtcaaaagataaggtcgccttagaagtctgagggraaaaaaatgtggattcagggtgaaaccctgaggcacagtaggtccagatggccttaactttgaagagaacaaagttacaccaaactgcctcttcttgctt

SEQ ID NO: 253889 - DNA, 201 bp, Homo sapiens
cgacagaaatgtgcttaaaatggacagttactgccaaattgctctaaagaaaaaaaaggttgtacaagtttggactctccattcttcagagtgcctgtttycctatcaaccagcccgcctgagcattagacttaacattgttggaagtactcatttgtgaaaaccattgctgttttgattgtatttccttgaataactgcc

SEQ ID NO: 253890 - DNA, 201 bp, Homo sapiens
attcatgcacaaagggtaaaaattcatattagtacatttgaacagtaagatttaaaacattaacagtcagcattctcttttaaataattaaaagttcctgrtactttctcaatcctagccctttcttctaactaatcagcattatggactgagtctctttgcttcttttccttttgtcaccgccaatggccaccatacttt

SEQ ID NO: 253891 - DNA, 201 bp, Homo sapiens
atatgtatatgaatatatataatacgaatatatatgaatatataatatgaatatacatattatatgaatgtgtatatatattatatgaatgtattttatttatatatatatatatatatatatatatatatatatattcacttttttttttgtagtgatggagttttgccatgttgcccaggctggtcactcctgggctca

SEQ ID NO: 253892 - DNA, 201 bp, Homo sapiens; identical to SEQ ID NO: 50435

SEQ ID NO: 253893 - DNA, 201 bp, Homo sapiens; identical to SEQ ID NO: 50436

SEQ ID NO: 253894 - DNA, 201 bp, Homo sapiens; identical to SEQ ID NO: 50433

SEQ ID NO: 253895 - DNA, 201 bp, Homo sapiens
atatgaattgtgattatgtaggggaaagatgagacatgaacaatgcttaaattcaatctatttgtttagaaactgaaaagataaagagcaacttacgcatktgggatttaaatgcatttttgttgtccgtaaaattttacatatctttggtatgttgggtcagtggtcattttacagcaaagagtgagcttttggatgaac

SEQ ID NO: 253896 - DNA, 201 bp, Homo sapiens
cctgcatacggtaagtgctttgtatttgtttttgctgtggttccgatgatatcggtgaaggtttttgtttgtgtgtttttgtccctatgcccttccatacyacactgcttttcaggtgaaaagaggctatgtattttacatgttctacattacaagaaaactcagaagaattctttttacaaaaggcccaattcaattgta

SEQ ID NO: 253897 - DNA, 201 bp, Homo sapiens
cagttgagaaaagggtatatattattgttaattttaggttaaattattttatttatatttccacgttaagaaagtcacccttgctttggtggttaatgacracacccacaccctgggcctgggaagcgtgggttgcagacaggccagtaggccccacaagtcccaacctcccattcatggggggcttcggtgttgggactt

SEQ ID NO: 253898 - DNA, 201 bp, Homo sapiens
cctgtgtctgagtgcatttcttcatctgtcatgcagccagggtctgcaggttggacccagcaagttattgacagagtttgaaaattatacaggattggtcrttgagttggatattttagtcaacatttattaagcccatgcctcagcagtagttgacttttgtctaaagggagacaaagaaattctagttttcccaaatgt

SEQ ID NO: 253899 - DNA, 201 bp, Homo sapiens
aaaagtttgagaaataccggttcaatgctcattgctagttgacaatgcagtagggtgactatagttaacaagacattgtatatgtcaaaataactagaagraaatatttgaaatgttgccaacacaaatacatgataaatgttcaagctgatggagatcctaaataccctgacctgattatttcacattctatgcatgtat

SEQ ID NO: 253900 - DNA, 201 bp, Homo sapiens
agtccaggagttggaggctacagtgagttctgatcacacccactgcactccaacgtgacagagtgagcccgtctctcaaaaaaaaaaaaaaaatgaagctkgtatttttaaaataaaaatgggttgttaattctgagttcaacacatgtaaacattcatttttcaattttgatatttcataatatagtaaaatatcttgat

SEQ ID NO: 253901 - DNA, 201 bp, Homo sapiens
cagtcttcagagcccttgtagtgcaaaaataacaccgtagcatctcccaggaaacaccacttactgtccctgctagtgttggcaaagaaaggaggacactytttagaagtgtcgtttacaatgagactgataatggactgtgtcttagagccatgaaaggaaaggagaagttgtaggatttcctgggaatgtcagctaacc

SEQ ID NO: 253902 - DNA, 201 bp, Homo sapiens
ggtagcgttagtattcccatcttactgatgagagtcctgagtgcgaaatgctgagtgacctgccaaagcccacctgactccccccatgctgtgcagaccasggcctcagcagaggggcccctcagccaggccaccaggactgcccagctgttctctcggggatgagatcttcaacaaggctgtgagtgttagtcctcaatg

SEQ ID NO: 253903 - DNA, 201 bp, Homo sapiens
aacataaactcaggtgtggttgaagcatcctgttaggaataacaaatacatacatttcttatgtctgtagggaagttcagactttccctctgaagtttccrtgtttggtctataaaataatccaacgatagattaacaggggaagagacatgcagatgtcgttacgtgtgcatgagccacatgagactcaaagaagggcca

SEQ ID NO: 253904 - DNA, 201 bp, Homo sapiens
gtacttctagacagctgctttttacaaataaaatgtgatacaacagacaacagtatcccgtgccttctggaggtaatagaggaggatgagatagtgtgcayacagcactggcaggatgctgtgccttggactgaactcttcagtctacagacagaggtatgtgtcttatttctccttaaatctgtggttagctggcttcat

SEQ ID NO: 253905 - DNA, 201 bp, Homo sapiens
ttcgtattttaacttgatcatcagcaatgggagtttgaaacccgattgcagctgcaggtcccacacaactgaattcggttccttgtgcatagtagtgttcrctggagatgcctggaggtctgaaggtgtgcccttttataggcaggaattccaccaggatgggtatagcttgttttttttaaaaggcttgggactggatac

SEQ ID NO: 253906 - DNA, 201 bp, Homo sapiens
catttagagaccttgactccttccatactgtggctccaccatcttcaatatatgtctttaaaattatcctggtaagagagaagaacaaagattaccctggyatcatccccctgctagacaagaggaagaatactagtcacatagccccatccatgtacgaaggcctgagaaatgtactgttaagctgcgtgtccaggagga

SEQ ID NO: 253907 - DNA, 201 bp, Homo sapiens
gcccttttataggcaggaattccaccaggatgggtatagcttgttttttttaaaaggcttgggactggatacgattgcccaagaagacagtgtagacagcraggagggctgagcatgaatgggatgacctaccagcacaaaaagggcaggcaggaaggcagtaaagaaatgagcagggcccaaaccaggagagtgtggcat

SEQ ID NO: 253908 - DNA, 201 bp, Homo sapiens
aagattaccctggcatcatccccctgctagacaagaggaagaatactagtcacatagccccatccatgtacgaaggcctgagaaatgtactgttaagctgmgtgtccaggaggagaaaagagctctgatgagctcctagccagcctctgccagaggcagttgttcaacctctggacctgtttcctatcatgacaacaaggg

SEQ ID NO: 253909 - DNA, 201 bp, Homo sapiens
acaattctttagggctctaggatttttggaatggtaagtgagtactggcttcagcttatagtcaccagctgcattaccccctgacaagagtcagcctgtcrtctggaactttgaagctagccattgactcctctccagctgtggaagtcctagatggcattttcttccaatagaaggctgttatgtctacatggaaagtct

SEQ ID NO: 253910 - DNA, 201 bp, Homo sapiens
gatgagctcctagccagcctctgccagaggcagttgttcaacctctggacctgtttcctatcatgacaacaaggggatagatgaggaagtcctgagcatcsttgacccagcaagtggtttgaaggtcaaatgctagccctaggacaggagctgtttgtttgtttgtttgttttgagacaaggtctggctcccttgcccagg

SEQ ID NO: 253911 - DNA, 201 bp, Homo sapiens
ggagggcacaggccttccgtggcccttgctctccaccccacaacctgggctttggagcaagcaaaccttgttcagccctagttctgccacctgccacaggmcctcacctctttgaccttcagtctcctcatctgtgtcctggtcttttaggttgtcatggaaattagccagagcaggtaccccagggcccagcaggtttcc

SEQ ID NO: 253912 - DNA, 201 bp, Homo sapiens
gacatttaagtttttgtttctttatgaatgaagaggagcatgttttatattcttacagccctacgtatcacttcctgtgtgttatctgttcatgtcttttrtcttttttattgagattttagtcgttttcttatttatcttaggaaaactttttatgttagggaaattagccctttgtgatatgagttgtgaaaatttgtt

SEQ ID NO: 253913 - DNA, 201 bp, Homo sapiens
tttatttatatttccacgttaagaaagtcacccttgctttggtggttaatgacaacacccacaccctgggcctgggaagcgtgggttgcagacaggccagyaggccccacaagtcccaacctcccattcatggggggcttcggtgttgggacttagggtgatctttctaaatgagttgagtatgttatcatttttaatgtt

SEQ ID NO: 253914 - DNA, 201 bp, Homo sapiens
aagcctcctgagtagctgggactacaggcacctgccaccatgcctgactaatttttgtattttttggtagagatggggtttcgccatgttgtccagtgtgstctcgaacttgtgagctcaagcaatctgcctaccttggcctcccaaagtgttgggattacaggcatgagccaccatactcagcctggagatttttttaat

SEQ ID NO: 253915 - DNA, 201 bp, Homo sapiens
ctgccaccatgcctgactaatttttgtattttttggtagagatggggtttcgccatgttgtccagtgtggtctcgaacttgtgagctcaagcaatctgccyaccttggcctcccaaagtgttgggattacaggcatgagccaccatactcagcctggagatttttttaataaaatacacattattaaacaactagccaata

SEQ ID NO: 253916 - DNA, 201 bp, Homo sapiens
tttccacgttaagaaagtcacccttgctttggtggttaatgacaacacccacaccctgggcctgggaagcgtgggttgcagacaggccagtaggccccacragtcccaacctcccattcatggggggcttcggtgttgggacttagggtgatctttctaaatgagttgagtatgttatcatttttaatgttataattatta

SEQ ID NO: 253917 - DNA, 201 bp, Homo sapiens
tagccaatattcatgaatagatagaacagcagtgtctcactggccaccatcacctctaaaatgccagagttttcagattccaggctgggtgggtgggcaartgcatagcctgtttgacctgcactaggccaaaaaggggtgatgacaatttacgtgaggagtgagtgcttgatcctggaataatagaagagcctctatctg

SEQ ID NO: 253918 - DNA, 201 bp, Homo sapiens
actggccaccatcacctctaaaatgccagagttttcagattccaggctgggtgggtgggcaagtgcatagcctgtttgacctgcactaggccaaaaagggrtgatgacaatttacgtgaggagtgagtgcttgatcctggaataatagaagagcctctatctgactaactctcctgccaataacagttattaactttgaat

SEQ ID NO: 253919 - DNA, 201 bp, Homo sapiens
ccccatccatatactaagagttaaccaagcatggaattggggtatgttacatgagcatcagtcagttttgccaggagacctgatacttgtccttgtttctrttggtctatttagggaaagctgggaatgcgtccttctatgacttgttggtttttagcactcttgtctggatttgcatgtgtaaatattcctgtactatgc

SEQ ID NO: 253920 - DNA, 201 bp, Homo sapiens
gccccacaagtcccaacctcccattcatggggggcttcggtgttgggacttagggtgatctttctaaatgagttgagtatgttatcatttttaatgttatwattattaataattagctaatgtgtattttttggatatactataattttgttacagttttggcatttattgtctttttttaatccaagaccctcaaaaaat

SEQ ID NO: 253921 - DNA, 201 bp, Homo sapiens
tatgttatcatttttaatgttataattattaataattagctaatgtgtattttttggatatactataattttgttacagttttggcatttattgtcttttwttaatccaagaccctcaaaaaatagaaaaggcctgggttccctgagagcccctttcccctacataagtttaaggggaaaattcacataacgtgcccagca

SEQ ID NO: 253922 - DNA, 201 bp, Homo sapiens
ccactccagacaccggtagcaagtagcgggtccccaggttacccatacttctggtcagctccaagtcagtgttcccacaaccctttctcaggttcagtaayttcctgtaacagctcacagaactcaggaaaagtttgccttagtattactgatttattgcaaagaatattataaaggatacgaatgaacagccagatgaag

SEQ ID NO: 253923 - DNA, 201 bp, Homo sapiens
gcccaggaggttgtagtgagccatggtcaggccactgcactccagcctgagtgactgagcaagaccccatctttaaaaataaacaaaattttgaaaaaagkaaggcatgtgatggagagtctgggtgtgcagtgggggagcctgctccaagaagagactgtgccagttagcaccgcccatgcctggaggggctgggatccg

SEQ ID NO: 253924 - DNA, 201 bp, Homo sapiens
cactccagcctgggcaacagagtgacactccatctcagaaaaaaaataaaaagaaaagtttaagagaggcacattggaaaattggtgaagcccttatatakttttgtaaaacctgatccccggcatcctgctataaaagtcaagctgaaatgaaaactattgtaactttctaaaaaaaaagaaaaaagaaagaaaagaaac

SEQ ID NO: 253925 - DNA, 201 bp, Homo sapiens
ttccagctgtagaggccaaaggggccacactgcaggtagagcaggcattcaccaaggcgtttgtgatcctggggtgcagctcccacccttggctgcctggrtgcttctttccacacctactgtcttgtgacatccccttaggcacccaacacaggctgctgtctgatttagaactgagcctgttcagttgatggctcagtg

SEQ ID NO: 253926 - DNA, 201 bp, Homo sapiens
tcaccaaggcgtttgtgatcctggggtgcagctcccacccttggctgcctgggtgcttctttccacacctactgtcttgtgacatccccttaggcacccarcacaggctgctgtctgatttagaactgagcctgttcagttgatggctcagtgcaggcctctaaaaaagcaagcctgatgtgggttagtacatctgtggtt

SEQ ID NO: 253927 - DNA, 201 bp, Homo sapiens
cttaatttcctagattctagaactaatggattgtaatccacataaatttcccactgtgaagtagagcacaagcacttgcacctgtactctaaatattttcwtataaggtcatgggagtacagatattattcaacatgtagattgtgttagagcttatcactccatttgttaagctgataaacaccctgtagatttggcccc

SEQ ID NO: 253928 - DNA, 201 bp, Homo sapiens
acttcacagagtgggtttggggtttaaacaggataatcacagctgcccagtttccctacttgagacagtgcacccaaaagcctgccaggagcatactgcaratggtcaggagtgtggatcccacggccactcctggctctgctgcttgttagctgtgagactttagacaaattgcttaacctttctctgcctccgtgttct

SEQ ID NO: 253929 - DNA, 201 bp, Homo sapiens
tttagattaccagttaccagatgccaaaacttccagcagcaccaaggccagcctccaggatgcctctgggaacttggttcctctggaggatgtccacatcraggagaatcatagacactgtagcccaggtatgttgtctgtggctttatgacacttaaactacatggatgtaaaccatacatgagaatttgattgcagttg

SEQ ID NO: 253930 - DNA, 201 bp, Homo sapiens
gatctttgcaaatcttacaggtgaaaaatgtattggtgacatttaagtttttgtttctttatgaatgaagaggagcatgttttatattcttacagccctaygtatcacttcctgtgtgttatctgttcatgtcttttatcttttttattgagattttagtcgttttcttatttatcttaggaaaactttttatgttaggga

SEQ ID NO: 253931 - DNA, 201 bp, Homo sapiens
aggaggccaaggctgcagtgagttgtgattgtgccactgcactccagccagggcaacaaagtgagaccctgtctaaaaaaaaaaaggagaatcataatttmctatatgtaatttatacttccattttttaaaaagcaataccttctcattagtttgccaaggaagatgagaatttattcttttttctatttggggggcttt

SEQ ID NO: 253932 - DNA, 201 bp, Homo sapiens
tgagactttagacaaattgcttaacctttctctgcctccgtgttctcatctgcaatgtgggtgtgacaaatcatgctccacaggaagtggctaaacatatmaaagaacagcacctggtaccagttctctatgggttggtacacattatcactgctgtcatttttcaaattattgccatagatccttcaacctgtgcacctg

SEQ ID NO: 253933 - DNA, 201 bp, Homo sapiens
catatatccagcttgtcacctaaaggcatttctcagctcatgagacacagtgggaggtttgaactaaaacagaaagtcttaatgggatgaggacacggggwtggagtttgaggttgcctacgtggctggaagttaaggattaaaatcctataaagtagggaaccacagagcagggagctctgaaatctgcatccaaatacc

SEQ ID NO: 253934 - DNA, 201 bp, Homo sapiens
attaaatatcttaatttttggcagaatcattttgtctgatataatgtgatgggtttagtaccacattacatttcacatgttatattctgaaatctgaaacttttttttttaatctaggaatattccctgggcttttgaggcaataaagcaagcaagtgaatgggtaagaagaactgaaggacagtacccatctatctgccc

SEQ ID NO: 253935 - DNA, 201 bp, Homo sapiens
cacacactgccattacagctataataaaaatgaaaaggtttgaaacattgtgagaattaccaaaatgagacacagagacacaaaggaagcacatgctgttaaaaaaaaaaatggcaccagtagacctgctcaacacagagttgccacaaaccttcaatctgtaaaaaaaaaaaaaaaaaaagcaatatctgcaaagtgcaa

SEQ ID NO: 253936 - DNA, 201 bp, Homo sapiens
ctgtgagactttagacaaattgcttaacctttctctgcctccgtgttctcatctgcaatgtgggtgtgacaaatcatgctccacaggaagtggctaaacayatcaaagaacagcacctggtaccagttctctatgggttggtacacattatcactgctgtcatttttcaaattattgccatagatccttcaacctgtgcac

SEQ ID NO: 253937 - DNA, 201 bp, Homo sapiens
ctctaaaatgccagagttttcagattccaggctgggtgggtgggcaagtgcatagcctgtttgacctgcactaggccaaaaaggggtgatgacaatttacktgaggagtgagtgcttgatcctggaataatagaagagcctctatctgactaactctcctgccaataacagttattaactttgaataaaatgtttaaaacc

SEQ ID NO: 253938 - DNA, 201 bp, Homo sapiens
ttaaatatcttaatttttggcagaatcattttgtctgatataatgtgatgggtttagtaccacattacatttcacatgttatattctgaaatctgaaacttttttttttaatctaggaatattccctgggcttttgaggcaataaagcaagcaagtgaatgggtaagaagaactgaaggacagtacccatctatctgccca

SEQ ID NO: 253939 - DNA, 201 bp, Homo sapiens
tgaggagtgagtgcttgatcctggaataatagaagagcctctatctgactaactctcctgccaataacagttattaactttgaataaaatgtttaaaaccrttctttgaaggctaggagaataatcaaaaacaggcagaaactagagtgaatacaatctttgaaagaaagcaagccaactaggtgggctccacatatatcc

SEQ ID NO: 253940 - DNA, 201 bp, Homo sapiens; identical to SEQ ID NO: 50469

SEQ ID NO: 253941 - DNA, 201 bp, Homo sapiens
aaaaccattctttgaaggctaggagaataatcaaaaacaggcagaaactagagtgaatacaatctttgaaagaaagcaagccaactaggtgggctccacayatatccagcttgtcacctaaaggcatttctcagctcatgagacacagtgggaggtttgaactaaaacagaaagtcttaatgggatgaggacacggggatg

SEQ ID NO: 253942 - DNA, 201 bp, Homo sapiens
taaggattaaaatcctataaagtagggaaccacagagcagggagctctgaaatctgcatccaaatacccctcagattcttggctgtctcctaacctctacrtatacagggtgcaacctcaaggaatccagaaaaaagccacagctgggaagctacagagctaagcagagatttcagctgctgcctagtactggccagagtt

SEQ ID NO: 253943 - DNA, 201 bp, Homo sapiens
atttattgtctttttttaatccaagaccctcaaaaaatagaaaaggcctgggttccctgagagcccctttcccctacataagtttaaggggaaaattcacrtaacgtgcccagcacagtggccagcacctgccagtgctccgtaaagaggaaagtcactccacctccccacttcccctcacgcttgtggcccacggcacaa

SEQ ID NO: 253944 - DNA, 201 bp, Homo sapiens
ccctgagagcccctttcccctacataagtttaaggggaaaattcacataacgtgcccagcacagtggccagcacctgccagtgctccgtaaagaggaaagycactccacctccccacttcccctcacgcttgtggcccacggcacaagctccagtcccacacaccagcgtatcccaaaccaacaccccataggctttagaa

SEQ ID NO: 253945 - DNA, 201 bp, Homo sapiens
ctacataagtttaaggggaaaattcacataacgtgcccagcacagtggccagcacctgccagtgctccgtaaagaggaaagtcactccacctccccacttyccctcacgcttgtggcccacggcacaagctccagtcccacacaccagcgtatcccaaaccaacaccccataggctttagaatgtgtaatcatcatttaat

SEQ ID NO: 253946 - DNA, 201 bp, Homo sapiens
taaccagataagtaatcattatttttaaatctgtcttttcatatgttctataatattaattattcaggtatatacttaaaatttgactgagttgggaaagractactcctgttttaaatagcttatattcacaggtaaaattacaggctatttatttcaaaaatatcaaggacttgtcgtccatataaaactggatttgct

SEQ ID NO: 253947 - DNA, 201 bp, Homo sapiens
aattcacataacgtgcccagcacagtggccagcacctgccagtgctccgtaaagaggaaagtcactccacctccccacttcccctcacgcttgtggcccayggcacaagctccagtcccacacaccagcgtatcccaaaccaacaccccataggctttagaatgtgtaatcatcatttaattggataacgtctatttgatt

SEQ ID NO: 253948 - DNA, 201 bp, Homo sapiens
aattacaggctatttatttcaaaaatatcaaggacttgtcgtccatataaaactggatttgctacaggcaactttttgaggaacactctttccatttagawtgaaacagtaatagtaatatagcatccctcaaaatttgttttgcatgcatattattcatattccggtataactatatgttcatttaattaccttaaaact

SEQ ID NO: 253949 - DNA, 201 bp, Homo sapiens
gatatcgtgctttcgtttgttcatgaagatgaagggaaccctttgctaaaatagctcccttcttacctgtacatgaagaagttgttgtatccctgatgatrgaaaatattcatgcatttataaaatgttgagttacatcatgttgcattacagagacttcacattgtatgaatggagctgtatagtacaaaaagagaacac

SEQ ID NO: 253950 - DNA, 201 bp, Homo sapiens
catcagcaatgggagtttgaaacccgattgcagctgcaggtcccacacaactgaattcggttccttgtgcatagtagtgttcactggagatgcctggaggwctgaaggtgtgcccttttataggcaggaattccaccaggatgggtatagcttgttttttttaaaaggcttgggactggatacgattgcccaagaagacag

SEQ ID NO: 253951 - DNA, 201 bp, Homo sapiens
aagggaaccctttgctaaaatagctcccttcttacctgtacatgaagaagttgttgtatccctgatgatggaaaatattcatgcatttataaaatgttgarttacatcatgttgcattacagagacttcacattgtatgaatggagctgtatagtacaaaaagagaacacctgtggctgtgcttctatcatgggcaaatag

SEQ ID NO: 253952 - DNA, 201 bp, Homo sapiens
agtacatctgtggttggcttacttatttggtgttcattttttcagttttcagaaaggtcagttgaagtgctgctggtggctgtagaattgatacgcagggraagtttttgatctgtgcgctttctaagggacaattgctaagccgcactgataccttgagcccctttcctttggaacaatgtagagcccagttcatggctc

SEQ ID NO: 253953 - DNA, 201 bp, Homo sapiens
tccctagtagctgggactacaggtgcctgccaccacgcccggctaatttttttgtatttttagtagagacagggtttcaccgtgttaaccaggatggtctygatctcctgacctcgtgatccacccgtctcggcctcccaaagtgctgggattacaggcatgagccactgctcccagccgctacaaaattgtttttaaaaa

SEQ ID NO: 253954 - DNA, 201 bp, Homo sapiens
cttacttatttggtgttcattttttcagttttcagaaaggtcagttgaagtgctgctggtggctgtagaattgatacgcaggggaagtttttgatctgtgygctttctaagggacaattgctaagccgcactgataccttgagcccctttcctttggaacaatgtagagcccagttcatggctcccagaagtttaggtcca

SEQ ID NO: 253955 - DNA, 201 bp, Homo sapiens
aaagtagtttagtgaaacggaaagggcttgatgtagtataaaagtaaggctgagtcccagcccactttgtgatttggggcaagtcaggtaacctgtctgarcctcagcttcctcatccatatagtagagataatgatagtgtctacttcacagagtgggtttggggtttaaacaggataatcacagctgcccagtttccct

SEQ ID NO: 253956 - DNA, 201 bp, Homo sapiens
gaaaataacacacacaaaaatcaagacagtgatcaaattacctctgggtgggagagaaggtgagctgtggggcagcatagaagttttagggatgttctagytcttaagctaagtggtagctatgtggatatttatcttattattctgtaaatatgtatatcataaatgttttttcctatgcacaatatatcaaagtaaaaa

SEQ ID NO: 253957 - DNA, 201 bp, Homo sapiens
attacactctagcctgggtggcagagcgagaatccgtctaaaaaaaaaaaaaagagtttaccttttcctgtttatgtgcatacaggtatttgggtaccacrtttgtaattcacagttagtttgaaagatagaaattgaaacagtatggttgggagcctggtatgtaagccgtttgctggtgggcatgtgtgtattgggccc

SEQ ID NO: 253958 - DNA, 201 bp, Homo sapiens; identical to SEQ ID NO: 50456

SEQ ID NO: 253959 - DNA, 201 bp, Homo sapiens; identical to SEQ ID NO: 50458

SEQ ID NO: 253960 - DNA, 201 bp, Homo sapiens
cagggaagccaaaagattggatcctctgctgtctgtacttcctttgttgctttcctgtgttgaaatttcattacacgatgtggagatgggccatctgtacmaatgagtatactttccttcggtttctaacgcagcacttcttcatctgaggtagttgggtctaggtgtgtctatatgggcatcagtgggaggcaatatctg

SEQ ID NO: 253961 - DNA, 201 bp, Homo sapiens
ctttaaagctgctattaaaaatatagtgaaggattgatttaccagaaaaggatggaatgggtgaataaatggcagaatctcagcaaatagatggaaactawaaagaagaaccaaatgaaaatcctagaactggaaaatatagtatctgcaatgaaaaggtcattgaatgagcttaacaacagaatggacacaacaggaaaa

SEQ ID NO: 253962 - DNA, 201 bp, Homo sapiens
gtagtgaaggaaggggcttgtgcactggggtgtaaatcatactgcttccttcactgaggaactcttgctacagaacaaaacagacagctgaacaaaacagwgtgcttgatgctggctggtgtttccctaccaacattagaccagaacctcatgctggggaatgttactattcctcacatgaaaatgaacatctctgaacag

SEQ ID NO: 253963 - DNA, 201 bp, Homo sapiens
cagaatggacacaacaggaaaaaaatcatttaattcaatttgcaatgtactcaataaacttctctaaactgaaatatagaaagaaaaaaatagaatgaaaraagaacagaggagccaagactgtggaatgatatcaaaagatttaacatttgtgtaactagggtttcagaaagtgaaagggtaaacagaaaaatatttgaa

SEQ ID NO: 253964 - DNA, 201 bp, Homo sapiens
ctgaaatatagaaagaaaaaaatagaatgaaagaagaacagaggagccaagactgtggaatgatatcaaaagatttaacatttgtgtaactagggtttcaraaagtgaaagggtaaacagaaaaatatttgaacagttttgtaaaattgatcaaagacagcaccttccagatccaagaaactcagcagaactccaagcacg

SEQ ID NO: 253965 - DNA, 201 bp, Homo sapiens
aaaattagctgggtgtggtggcacatgctcacagtcccagctactggggaggctgaggtgagaggatcgcttgagcccaggagtttgaggctatagtgagwtgtgattgtgccattgtactccagcctcaggcaacagagcaagaccctgtctcaaaaaataaataagtaaaaaactaaataaagcttttaagactgtttt

SEQ ID NO: 253966 - DNA, 201 bp, Homo sapiens
aaaaaaatagaatgaaagaagaacagaggagccaagactgtggaatgatatcaaaagatttaacatttgtgtaactagggtttcagaaagtgaaagggtaracagaaaaatatttgaacagttttgtaaaattgatcaaagacagcaccttccagatccaagaaactcagcagaactccaagcacgataaatacaaaaatg

SEQ ID NO: 253967 - DNA, 201 bp, Homo sapiens
ataactagaaggatcatgtttgcatttactagaatgggcaaagtcacaggagggcaggttgggggccatcaggagtttatctttggccacgtaggtcttgyggctacatagggccagggaggagacccaagccggacttataagtggggagtcagcagcattcagatagtgtttaaagtcatgagcccagattaaacaccc

SEQ ID NO: 253968 - DNA, 201 bp, Homo sapiens
gcacccaggaggcagaggttgcagtgagccaaaatggcacccctaccctccagcctggttgacagagcaaggatttgatcataaataagaaaataatataygaaagatgtgcaaccttgttgctaaaagaagttaaaatataaaaactgccatgagattcctttttattttttaactctgtcaggttggcaaagatcacaa

SEQ ID NO: 253969 - DNA, 201 bp, Homo sapiens
actgttgaaaaccaaagataagctgggcacggtggctcacaccagtaatgcctgcactgtgggaggccaaagggggcagatcacttgagcccaggatttcragaccagcctgaccaacatggtaaaaccccatctctacaaaaatacaaaaattagccaggcatggtgacatgcacctatggtcccagctacttgggaggc

SEQ ID NO: 253970 - DNA, 201 bp, Homo sapiens
tgggcacggtggctcacaccagtaatgcctgcactgtgggaggccaaagggggcagatcacttgagcccaggatttcaagaccagcctgaccaacatggtraaaccccatctctacaaaaatacaaaaattagccaggcatggtgacatgcacctatggtcccagctacttgggaggctgaggtgggaggatcacctgagc

SEQ ID NO: 253971 - DNA, 201 bp, Homo sapiens
tgtagaatgaggggtgtttaaaattccacaattctgagaactaagaaagaaggtctttcaatctattgattgctgatattctctccaggtctcagcttccrtgtctagaaaaaaagggccttgtactgaaatgatcttgaatgtctctagtggcattattttctttcctttttatcttttttgagacagagtattgccctc

SEQ ID NO: 253972 - DNA, 201 bp, Homo sapiens
caacagagagagctccagggagaagtccagggtggggcttaatgaaaaggaaggaagcatgcttgtaagttgcaggaaaagagccttccaaaggggagagstttatagaaggaatggggggactgatttttttttttttttttagtgggggaaacaaagaagggtcgtctggccatacttctgcattttgaacttaatctt

SEQ ID NO: 253973 - DNA, 201 bp, Homo sapiens
gcatgtcttccccccaccgtaagggattgccagtcagctggaggcctgctggttcatgtgggccagccctcgacacctcagtgaccaaacgaaatacaacmctcactagagcttcttgtacttggcaagacccagacatagacctgggctaccaaacaaaaccttgtgttcttagagcctgagaacaagagctttgacagt

SEQ ID NO: 253974 - DNA, 201 bp, Homo sapiens
aaggaaggaagcatgcttgtaagttgcaggaaaagagccttccaaaggggagaggtttatagaaggaatggggggactgatttttttttttttttttagtkggggaaacaaagaagggtcgtctggccatacttctgcattttgaacttaatctttaaaaaataaggccgggtgcggtggtttacgcctgtaatcccagaa

SEQ ID NO: 253975 - DNA, 201 bp, Homo sapiens
tgacctaccagcacaaaaagggcaggcaggaaggcagtaaagaaatgagcagggcccaaaccaggagagtgtggcatgccacaatggagactgaacagaarcaaaacgatgggcgactgtagtgttgttccctgttgaaggagagacactctgttacagaagacctggacttcagttcagttcagtttccttagcaaagga

SEQ ID NO: 253976 - DNA, 201 bp, Homo sapiens
ccaggtgctgctgggctaggataaaatgagatctgaattacattaaaataattaagtattccaagagaagaggtgacagaatgttttaagtgggtgtgtartttagataacctagatgcagataagctgaatgaagcatttaatccagcacattcgtattttaacttgatcatcagcaatgggagtttgaaacccgattgc

SEQ ID NO: 253977 - DNA, 201 bp, Homo sapiens
ccctgcagtggggaggccagaaggagtgttgcccaatgctgtcctcatccagtccaccccccacccaccaccaacagatgagtatggtcatgagtgtggtyacctcatcagtcatttgctcagctgtgaaaaagaaattgttcagagaagagcaaagtgtttttccatgagccagaggtcagccaaggtatgctaatgagg

SEQ ID NO: 253978 - DNA, 201 bp, Homo sapiens
ctctggaatgtgtccagacttgctggctccttgcttcttgctctcccaggatcataaattgattgtatcttgaggtagaaggaaatgttcaacattatctygagtagcagaacatgttccatatgcttcaaagaaaatgctagactgacacagctataaactaaacacttgatgtgactgcttcctttcaaccagcacatc

SEQ ID NO: 253979 - DNA, 201 bp, Homo sapiens
atgtgtccagacttgctggctccttgcttcttgctctcccaggatcataaattgattgtatcttgaggtagaaggaaatgttcaacattatctcgagtagsagaacatgttccatatgcttcaaagaaaatgctagactgacacagctataaactaaacacttgatgtgactgcttcctttcaaccagcacatcctcgcca

SEQ ID NO: 253980 - DNA, 201 bp, Homo sapiens
aaattgattgtatcttgaggtagaaggaaatgttcaacattatctcgagtagcagaacatgttccatatgcttcaaagaaaatgctagactgacacagctrtaaactaaacacttgatgtgactgcttcctttcaaccagcacatcctcgccacctgcttctttgtttaatcaccaataaatggtgtgggctcccagagtt

SEQ ID NO: 253981 - DNA, 201 bp, Homo sapiens
gtagcccccacggcctggtgttgggtttgatcacctcaacaccaatgtggatatttgtgactgcctttgttttataatatttttattattcaccttgtacrgatgaagacttccagctgtagaggccaaaggggccacactgcaggtagagcaggcattcaccaaggcgtttgtgatcctggggtgcagctcccacccttg

SEQ ID NO: 253982 - DNA, 201 bp, Homo sapiens; identical to SEQ ID NO: 50475

SEQ ID NO: 253983 - DNA, 201 bp, Homo sapiens
taaaagaaaaatgaaattatctaagccagaagtttctgaagattttgaagaggatggcttaggtgtactactagctttcacatcaactttagaacgtggasgtgtggaaaagctattggatttaaattggacagagtcatgtaaaccaacagcaactgaaccactatttaagaaagttaagaaagtccactggaaatatct

SEQ ID NO: 253984 - DNA, 201 bp, Homo sapiens
gggtttctttcattgcacttcatggctcactggtcattgaagatggcaagcgaggggcactctggatacaggtcagtttcctgacaaccatcaggatagtrtgataggcacacggttccaactgtcctcatttgtttaaatagcaagctaattaaggaccttgaagagtattagagagtttcacgatctgctcatgtcctg

SEQ ID NO: 253985 - DNA, 201 bp, Homo sapiens
tgctgcagtgcagtggagcgatctcggctcactgcaagctccgcctcccgggttcacgccattctcctgcctcagcctcctgagtagctgggactacaggygcccgccaccacgcccggctaatttgttgcattttttgtagagacggggtttcaccgtgttagccaggatggtctcgatctcctgacctcgtgatccgcc

SEQ ID NO: 253986 - DNA, 201 bp, Homo sapiens
cagtgcagtggagcgatctcggctcactgcaagctccgcctcccgggttcacgccattctcctgcctcagcctcctgagtagctgggactacaggtgcccrccaccacgcccggctaatttgttgcattttttgtagagacggggtttcaccgtgttagccaggatggtctcgatctcctgacctcgtgatccgcccgccg

SEQ ID NO: 253987 - DNA, 201 bp, Homo sapiens; identical to SEQ ID NO: 50449

SEQ ID NO: 253988 - DNA, 201 bp, Homo sapiens
gaggctgaggcagaagaatggtgtgaacccgggaggtggggcttgcagtgagcggagatagcgccactgcagtctggcctgggggaaagagcgagactccstctcaaaaaaaaaaaaaaaagaaaagaaaaaaaataggccgggcgcggtggctcacgcttgtaatcccagcactttgggaggccgaggcaggccgatcac

SEQ ID NO: 253989 - DNA, 201 bp, Homo sapiens
aatagcaagagttgccttattaaagctgctgattccccaagaaagataaaacaacatttctcatttggatatcatttgaaatgtttgtttttccactcagraggctttgtgagagcttgtctttccctttgaccggttcttactcacttggtacccacagttcttactcctttccgagctttagtgcagagaattaaatct

SEQ ID NO: 253990 - DNA, 201 bp, Homo sapiens
taatcctagcactttgggaggctgaggagggaggatcacttgagcccgggagtttgagaccagcctgggaaacatagtgagaccccatctttgcaaaaaaytttaaaagttagctaggtgtggtgcacacctgtagtcccagctactcaggaggctgaggcaggaggatcacttaagcccaggagttcgagactgcaatga

SEQ ID NO: 253991 - DNA, 201 bp, Homo sapiens
actgaagtttgaacccctcaaagtcacccaagatagaataaacttcttccaaaccccttttaatactgatatgctgacttgctcccataactcatcaaatrgtcttaagggcaaggagaatagcgaatcctttctggaaggttttcaatttactttgttcagatccatcagaggaatcactgtctaaggcagctatagcct

SEQ ID NO: 253992 - DNA, 201 bp, Homo sapiens
catccctcagggtgccttcctcccttagcgagcccgagtctgtgtagagatgatagaatgtgtcgttgttttcttcattgagaaagaaaaccgtagcatcrtgtaggccaggacatccctcagggtgccttcctcccttagcaagcccgagtctgtgtagagcaccccctgggtgagcctggtttgctgagcagagaagcc

SEQ ID NO: 253993 - DNA, 201 bp, Homo sapiens
gatcctggggtgcagctcccacccttggctgcctgggtgcttctttccacacctactgtcttgtgacatccccttaggcacccaacacaggctgctgtctsatttagaactgagcctgttcagttgatggctcagtgcaggcctctaaaaaagcaagcctgatgtgggttagtacatctgtggttggcttacttatttggt

SEQ ID NO: 253994 - DNA, 201 bp, Homo sapiens
acagaaacaaaacgatgggcgactgtagtgttgttccctgttgaaggagagacactctgttacagaagacctggacttcagttcagttcagtttccttagyaaaggacaaaatggggagagaagacagggaatcagggaagaaaaactcactcacttaatgtgacgcaaacatcgcatgcagtcgtaccaaccaagtaaac

SEQ ID NO: 253995 - DNA, 201 bp, Homo sapiens
ttagcaaaggacaaaatggggagagaagacagggaatcagggaagaaaaactcactcacttaatgtgacgcaaacatcgcatgcagtcgtaccaaccaagwaaacatgataagctacaaagaactatggttttcgctgctctcaaaatgccactgagattaccaagttttaagcttatttcaagattatttataggtgatt

SEQ ID NO: 253996 - DNA, 201 bp, Homo sapiens
aatcagggaagaaaaactcactcacttaatgtgacgcaaacatcgcatgcagtcgtaccaaccaagtaaacatgataagctacaaagaactatggttttcrctgctctcaaaatgccactgagattaccaagttttaagcttatttcaagattatttataggtgattccccaactgggaaagtcatttctgaatttcttct

SEQ ID NO: 253997 - DNA, 201 bp, Homo sapiens
ggccaaaggggccacactgcaggtagagcaggcattcaccaaggcgtttgtgatcctggggtgcagctcccacccttggctgcctgggtgcttctttccasacctactgtcttgtgacatccccttaggcacccaacacaggctgctgtctgatttagaactgagcctgttcagttgatggctcagtgcaggcctctaaaa

SEQ ID NO: 253998 - DNA, 201 bp, Homo sapiens
gtgacgcaaacatcgcatgcagtcgtaccaaccaagtaaacatgataagctacaaagaactatggttttcgctgctctcaaaatgccactgagattaccargttttaagcttatttcaagattatttataggtgattccccaactgggaaagtcatttctgaatttcttctcttctaaaatagatctagaaaaattaacaa

SEQ ID NO: 253999 - DNA, 201 bp, Homo sapiens
tcattgaagatggcaagcgaggggcactctggatacaggtcagtttcctgacaaccatcaggatagtatgataggcacacggttccaactgtcctcatttrtttaaatagcaagctaattaaggaccttgaagagtattagagagtttcacgatctgctcatgtcctgtgatttaaccgtattataattctttaatgggaa

SEQ ID NO: 254000 - DNA, 201 bp, Homo sapiens
cattcaccaaggcgtttgtgatcctggggtgcagctcccacccttggctgcctgggtgcttctttccacacctactgtcttgtgacatccccttaggcacscaacacaggctgctgtctgatttagaactgagcctgttcagttgatggctcagtgcaggcctctaaaaaagcaagcctgatgtgggttagtacatctgtg

SEQ ID NO: 254001 - DNA, 201 bp, Homo sapiens
ctcccagacttacctgctatgtttaataaaaacacggtaaaggaagaatcggggctattaaaatacttaagaatgagaaagttgaaaaaagaaaaaaagasgtagattgtgtttggcatgtcttccccccaccgtaagggattgccagtcagctggaggcctgctggttcatgtgggccagccctcgacacctcagtgacc

SEQ ID NO: 254002 - DNA, 201 bp, Homo sapiens
ttgtgatcctggggtgcagctcccacccttggctgcctgggtgcttctttccacacctactgtcttgtgacatccccttaggcacccaacacaggctgctktctgatttagaactgagcctgttcagttgatggctcagtgcaggcctctaaaaaagcaagcctgatgtgggttagtacatctgtggttggcttacttatt

SEQ ID NO: 254003 - DNA, 201 bp, Homo sapiens
agaatgagaaagttgaaaaaagaaaaaaagacgtagattgtgtttggcatgtcttccccccaccgtaagggattgccagtcagctggaggcctgctggttyatgtgggccagccctcgacacctcagtgaccaaacgaaatacaaccctcactagagcttcttgtacttggcaagacccagacatagacctgggctaccaa

SEQ ID NO: 254004 - DNA, 201 bp, Homo sapiens
gtgcagctcccacccttggctgcctgggtgcttctttccacacctactgtcttgtgacatccccttaggcacccaacacaggctgctgtctgatttagaastgagcctgttcagttgatggctcagtgcaggcctctaaaaaagcaagcctgatgtgggttagtacatctgtggttggcttacttatttggtgttcatttt

SEQ ID NO: 254005 - DNA, 201 bp, Homo sapiens
ggtgcttctttccacacctactgtcttgtgacatccccttaggcacccaacacaggctgctgtctgatttagaactgagcctgttcagttgatggctcagygcaggcctctaaaaaagcaagcctgatgtgggttagtacatctgtggttggcttacttatttggtgttcattttttcagttttcagaaaggtcagttgaa

SEQ ID NO: 254006 - DNA, 201 bp, Homo sapiens; identical to SEQ ID NO: 50445

SEQ ID NO: 254007 - DNA, 201 bp, Homo sapiens
acaggctgctgtctgatttagaactgagcctgttcagttgatggctcagtgcaggcctctaaaaaagcaagcctgatgtgggttagtacatctgtggttgrcttacttatttggtgttcattttttcagttttcagaaaggtcagttgaagtgctgctggtggctgtagaattgatacgcaggggaagtttttgatctgtg

SEQ ID NO: 254008 - DNA, 201 bp, Homo sapiens
caaactattagattaagtgtgtcctaatctcctcccttggcaaatacaacttcataaccacctggaaggccaggttcaaattcagcccttggctgaccccyagcaccctaagaggccttgcctgcacacgtgaataccccaccccacccatcaaaatgccatccagaccccatgccagtgccccctcacaccagccacctt

SEQ ID NO: 254009 - DNA, 201 bp, Homo sapiens; identical to SEQ ID NO: 50484

SEQ ID NO: 254010 - DNA, 201 bp, Homo sapiens
agctatgagaagtacttctagacagctgctttttacaaataaaatgtgatacaacagacaacagtatcccgtgccttctggaggtaatagaggaggatgaratagtgtgcacacagcactggcaggatgctgtgccttggactgaactcttcagtctacagacagaggtatgtgtcttatttctccttaaatctgtggtta

SEQ ID NO: 254011 - DNA, 201 bp, Homo sapiens
aaacagacagctgaacaaaacagtgtgcttgatgctggctggtgtttccctaccaacattagaccagaacctcatgctggggaatgttactattcctcacrtgaaaatgaacatctctgaacagatgatggggtgagatcttaatttcctagattctagaactaatggattgtaatccacataaatttcccactgtgaagt

SEQ ID NO: 254012 - DNA, 201 bp, Homo sapiens
gtgagttcaagagagaatgggaggaagaatggggagacagaggagaggatgagacagcagctgaagagaagtggggttgtgttttctttctccttttaagrtgcaagaaacaacagcatatgtgggagtcagcgcaggagggaaacctggcgacctgggagaggggaattgctggagctacttccttctctacacccttct

SEQ ID NO: 254013 - DNA, 201 bp, Homo sapiens
ggaggaagaatggggagacagaggagaggatgagacagcagctgaagagaagtggggttgtgttttctttctccttttaaggtgcaagaaacaacagcatrtgtgggagtcagcgcaggagggaaacctggcgacctgggagaggggaattgctggagctacttccttctctacacccttctctatgttttattgcataaa

SEQ ID NO: 254014 - DNA, 201 bp, Homo sapiens
catcgctggtactaagacccagtcctgcatctgtgattacttgttttgttgtaaagtagtttagtgaaacggaaagggcttgatgtagtataaaagtaagsctgagtcccagcccactttgtgatttggggcaagtcaggtaacctgtctgagcctcagcttcctcatccatatagtagagataatgatagtgtctacttc

SEQ ID NO: 254015 - DNA, 201 bp, Homo sapiens
tggcgacctgggagaggggaattgctggagctacttccttctctacacccttctctatgttttattgcataaataggaaatattgttgaaaagactttcckggtaaactgttctgaattttacttttatcaaaaagactcaatttagaactttcttatgcccttatttatttaacatttctatgtaacaaacatgtatatt

SEQ ID NO: 254016 - DNA, 201 bp, Homo sapiens
gctggagctacttccttctctacacccttctctatgttttattgcataaataggaaatattgttgaaaagactttccgggtaaactgttctgaattttacktttatcaaaaagactcaatttagaactttcttatgcccttatttatttaacatttctatgtaacaaacatgtatattgcccttatgttgtgccaggcagt

SEQ ID NO: 254017 - DNA, 201 bp, Homo sapiens
aacagagagagctccagggagaagtccagggtggggcttaatgaaaaggaaggaagcatgcttgtaagttgcaggaaaagagccttccaaaggggagaggkttatagaaggaatggggggactgatttttttttttttttttagtgggggaaacaaagaagggtcgtctggccatacttctgcattttgaacttaatcttt

SEQ ID NO: 254018 - DNA, 201 bp, Homo sapiens
tctatgttttattgcataaataggaaatattgttgaaaagactttccgggtaaactgttctgaattttacttttatcaaaaagactcaatttagaactttmttatgcccttatttatttaacatttctatgtaacaaacatgtatattgcccttatgttgtgccaggcagtgctcaaagcactttcttcccagagagagat

SEQ ID NO: 254019 - DNA, 201 bp, Homo sapiens
aggaaaatttagaacagtttaccaggaaagtcttttcaatagtatgttattgacaagtcactctaagctataaatatgtgtttatttccttttgcatgtaktacaagtatcaagtactcacacctgggagagacagatggcaccagactcctgctcatttgtgacgtagccctcagaaagtgtatggacttacacgagaag

SEQ ID NO: 254020 - DNA, 201 bp, Homo sapiens
ctcagtctcctgagtagctgagattacagttgtgcaccaccacacccagctaatttttgtatttttagtagagacagggtttcaccatgttggccaggctrgtctcgaactcctgacctcaagtgatccacccgccttggccttccaaagtgctgggatttcaggcgtgaaccaccgcccccggccttactttcttacagt

SEQ ID NO: 254021 - DNA, 201 bp, Homo sapiens
attgttgaaaagactttccgggtaaactgttctgaattttacttttatcaaaaagactcaatttagaactttcttatgcccttatttatttaacatttctwtgtaacaaacatgtatattgcccttatgttgtgccaggcagtgctcaaagcactttcttcccagagagagatgaattctactgttctcccaaatctttgt

SEQ ID NO: 254022 - DNA, 201 bp, Homo sapiens
caggaaagtcttttcaatagtatgttattgacaagtcactctaagctataaatatgtgtttatttccttttgcatgtattacaagtatcaagtactcacamctgggagagacagatggcaccagactcctgctcatttgtgacgtagccctcagaaagtgtatggacttacacgagaagaacttttccttgactgaagcac

SEQ ID NO: 254023 - DNA, 201 bp, Homo sapiens
ggaaagtcttttcaatagtatgttattgacaagtcactctaagctataaatatgtgtttatttccttttgcatgtattacaagtatcaagtactcacaccygggagagacagatggcaccagactcctgctcatttgtgacgtagccctcagaaagtgtatggacttacacgagaagaacttttccttgactgaagcacca

SEQ ID NO: 254024 - DNA, 201 bp, Homo sapiens
tgaggcccacaagtccctgctggtagccctctcctgaggactcagatggccccgtgctggccctgctggccttgctgcggctggggagaggctgcttctaygatgccaacccaggtgggctgcagagggcaggtagcagcgggactcttctctgaggagggcacaggccttccgtggcccttgctctccaccccacaacct

SEQ ID NO: 254025 - DNA, 201 bp, Homo sapiens
tatgtgtttatttccttttgcatgtattacaagtatcaagtactcacacctgggagagacagatggcaccagactcctgctcatttgtgacgtagccctcrgaaagtgtatggacttacacgagaagaacttttccttgactgaagcaccaccaggctacgacagtgtgcatggagtttcacaaacagcctctgtcaccac

SEQ ID NO: 254026 - DNA, 201 bp, Homo sapiens
tttcctctaggccctgtccctttgatgttaagtggtggagggagttggcgggatttgctctggcttgcggtatatccagtggattgtatcaaatccagaaytcaagttctttccatgtctggaaaacaggcagaatttatcagaacctttataaatgttgtgaaaaatgaagctgaataaacacctgtttttccagcatct

SEQ ID NO: 254027 - DNA, 201 bp, Homo sapiens
accaagcatggaattggggtatgttacatgagcatcagtcagttttgccaggagacctgatacttgtccttgtttctgttggtctatttagggaaagctgsgaatgcgtccttctatgacttgttggtttttagcactcttgtctggatttgcatgtgtaaatattcctgtactatgcagctgcatgggtgtccccaaagg

SEQ ID NO: 254028 - DNA, 201 bp, Homo sapiens
tccagtacagtaacgtgctgtacaggtgtgtagacttgagcaacaggccatactgtacagcctaggtgtggagtaggctacgccatctagggtcgggtgtrtatgctctatgatagcacaatgatgaaattgtgtaatgacacatttttcagaacatgtcccagtcattaagaaatgcctaagtataatcccagagaaaac

SEQ ID NO: 254029 - DNA, 201 bp, Homo sapiens
tacagcctaggtgtggagtaggctacgccatctagggtcgggtgtgtatgctctatgatagcacaatgatgaaattgtgtaatgacacatttttcagaacrtgtcccagtcattaagaaatgcctaagtataatcccagagaaaacccagtcttctctattcctcaagtaccttctaaatgagatcaaatgaaagtggtat

SEQ ID NO: 254030 - DNA, 201 bp, Homo sapiens
ccacagacttagaggtatttttatatcaaggaacaagcaaagagggtcttgaatgctcaaagaagagcctcagttttttgctcctattttcattaaatatrcttaagtttaaataattgttaaatatttactgcatgaattcaacattttctaaattagcaaacatgattttatgaaaacatctgcccatacaggtttttt

SEQ ID NO: 254031 - DNA, 201 bp, Homo sapiens
taagtttttggttttctaaaattgaattggtttgctaagatttggcctcatgatcagcttctgactctgaagattgcattgaacaaccataaaggcctttkaggagattaagaatgttcaagtacagtgccatgatgttctgatccctgtagagggaaattagctccatttcagtgatcaccttaatctggggatatgcgg

SEQ ID NO: 254032 - DNA, 201 bp, Homo sapiens
tctaaaattgaattggtttgctaagatttggcctcatgatcagcttctgactctgaagattgcattgaacaaccataaaggccttttaggagattaagaaygttcaagtacagtgccatgatgttctgatccctgtagagggaaattagctccatttcagtgatcaccttaatctggggatatgcggtgttgggtgagaag

SEQ ID NO: 254033 - DNA, 201 bp, Homo sapiens
gatgaatttgttgtctataaaaccaatcaggttaaaatgaaatatattattaaatttcccatgcctggagatcaaataaaggactttcatcctagtgatcmtactgaattagaggaatacagacctgagttttcaaatttttcaaaggatgaaggtaggacaattttcttgaatgcggttttatgttattatatttataga

SEQ ID NO: 254034 - DNA, 201 bp, Homo sapiens
agcttctgactctgaagattgcattgaacaaccataaaggccttttaggagattaagaatgttcaagtacagtgccatgatgttctgatccctgtagaggraaattagctccatttcagtgatcaccttaatctggggatatgcggtgttgggtgagaagagcagtttggatatagctgacctccacccctgggcccactc

SEQ ID NO: 254035 - DNA, 201 bp, Homo sapiens
actctgaagattgcattgaacaaccataaaggccttttaggagattaagaatgttcaagtacagtgccatgatgttctgatccctgtagagggaaattagytccatttcagtgatcaccttaatctggggatatgcggtgttgggtgagaagagcagtttggatatagctgacctccacccctgggcccactctgacccat

SEQ ID NO: 254036 - DNA, 201 bp, Homo sapiens
catcagtcaaacccctctgcctaatatcaaaatagagcacttaattttaaaaaaaaaaatatatatatatatatatattttttttttttttttttttgagrcagggtctcactctgtcccccaggctgcagtacaatgtgtgatcaaagtgcactgcagcctcaaactcctgggttcaaatgatcctcctgactcaacctc

SEQ ID NO: 254037 - DNA, 201 bp, Homo sapiens
gccttttaggagattaagaatgttcaagtacagtgccatgatgttctgatccctgtagagggaaattagctccatttcagtgatcaccttaatctggggakatgcggtgttgggtgagaagagcagtttggatatagctgacctccacccctgggcccactctgacccatacgcacatcttcaaggcagctcagagcaaca

SEQ ID NO: 254038 - DNA, 201 bp, Homo sapiens
aaaatagagcacttaattttaaaaaaaaaaatatatatatatatatatattttttttttttttttttttgaggcagggtctcactctgtcccccaggctgsagtacaatgtgtgatcaaagtgcactgcagcctcaaactcctgggttcaaatgatcctcctgactcaacctcccaagtagctaggactaccatccgtgac

SEQ ID NO: 254039 - DNA, 201 bp, Homo sapiens
ctcctgggttcaaatgatcctcctgactcaacctcccaagtagctaggactaccatccgtgaccttttttttttttttttttttgaaacggagtctcgctytgtcgcccaggctggactacagtggcgcgatctcggctcactgcaagctccgcctccggggttcacgccattctcctgccttagcctcccaagtagctgg

SEQ ID NO: 254040 - DNA, 201 bp, Homo sapiens
cttttaggagattaagaatgttcaagtacagtgccatgatgttctgatccctgtagagggaaattagctccatttcagtgatcaccttaatctggggataygcggtgttgggtgagaagagcagtttggatatagctgacctccacccctgggcccactctgacccatacgcacatcttcaaggcagctcagagcaacagc

SEQ ID NO: 254041 - DNA, 201 bp, Homo sapiens
aacctcccaagtagctaggactaccatccgtgaccttttttttttttttttttttgaaacggagtctcgctttgtcgcccaggctggactacagtggcgcsatctcggctcactgcaagctccgcctccggggttcacgccattctcctgccttagcctcccaagtagctgggactacaggcacccaccaccgcacccggc

SEQ ID NO: 254042 - DNA, 201 bp, Homo sapiens
gtgaccttttttttttttttttttttgaaacggagtctcgctttgtcgcccaggctggactacagtggcgcgatctcggctcactgcaagctccgcctccrgggttcacgccattctcctgccttagcctcccaagtagctgggactacaggcacccaccaccgcacccggctaattttttgtatttttagtagagacggg

SEQ ID NO: 254043 - DNA, 201 bp, Homo sapiens
gactacagtggcgcgatctcggctcactgcaagctccgcctccggggttcacgccattctcctgccttagcctcccaagtagctgggactacaggcacccrccaccgcacccggctaattttttgtatttttagtagagacgggatttcactgtgttagccaggagggtctcaatctcctgacctcatgaaccgcccgcct

SEQ ID NO: 254044 - DNA, 201 bp, Homo sapiens
cttgttggtttttagcactcttgtctggatttgcatgtgtaaatattcctgtactatgcagctgcatgggtgtccccaaaggagggattgttgcagtcttygcttgcccttttgtcttctaggaataatggccttatattctggactgaaacctacatgattcgagcattccctgacaatggagcactctttttggcctat

SEQ ID NO: 254045 - DNA, 201 bp, Homo sapiens
cacaatgatgaaattgtgtaatgacacatttttcagaacatgtcccagtcattaagaaatgcctaagtataatcccagagaaaacccagtcttctctattmctcaagtaccttctaaatgagatcaaatgaaagtggtatgaaaacattgcctttctccctctagaagtgatgggctttacctttgggatgaatccatttg

SEQ ID NO: 254046 - DNA, 201 bp, Homo sapiens
ccaggtccttttgtctttactcaaaaaaagtaattgcatattcttaattataagacaaagatttggttttttttttcttccctaaaaccattttttggctrtgtgctgtggctcatgcctataatctcaacactttgggaggccaaagtaggaggatcacttgagtccaggagttggaggctacagtgagttctgatcaca

SEQ ID NO: 254047 - DNA, 201 bp, Homo sapiens
ctgcatttaaaaaagtgagacaggaaaaattaaacactacctggatattttatgatatttagagaaatattgataactattttttattttttgagacagaktctcgcctgtcgcccaggctggagtgcagtgatgcaattttggctcattgcaagctctgcctcccaggttcacaccattctcctgcctcagcctcccaag

SEQ ID NO: 254048 - DNA, 201 bp, Homo sapiens
acactacctggatattttatgatatttagagaaatattgataactattttttattttttgagacagattctcgcctgtcgcccaggctggagtgcagtgaygcaattttggctcattgcaagctctgcctcccaggttcacaccattctcctgcctcagcctcccaagtagctgggactacaggcacccaccaccatgcct

SEQ ID NO: 254049 - DNA, 201 bp, Homo sapiens; identical to SEQ ID NO: 50450

SEQ ID NO: 254050 - DNA, 201 bp, Homo sapiens
tttaggagattaagaatgttcaagtacagtgccatgatgttctgatccctgtagagggaaattagctccatttcagtgatcaccttaatctggggatatgsggtgttgggtgagaagagcagtttggatatagctgacctccacccctgggcccactctgacccatacgcacatcttcaaggcagctcagagcaacagcat

SEQ ID NO: 254051 - DNA, 201 bp, Homo sapiens
catttcagtgatcaccttaatctggggatatgcggtgttgggtgagaagagcagtttggatatagctgacctccacccctgggcccactctgacccatacrcacatcttcaaggcagctcagagcaacagcatacactttgaaagacccagctgtgggctcatgggacatgttccatttccgccaatccctttggcaccac

SEQ ID NO: 254052 - DNA, 201 bp, Homo sapiens
cgcgatctcggctcactgcaagctccgcctccggggttcacgccattctcctgccttagcctcccaagtagctgggactacaggcacccaccaccgcaccyggctaattttttgtatttttagtagagacgggatttcactgtgttagccaggagggtctcaatctcctgacctcatgaaccgcccgcctcagcctcccaa

SEQ ID NO: 254053 - DNA, 201 bp, Homo sapiens
acactttgaaagacccagctgtgggctcatgggacatgttccatttccgccaatccctttggcaccacttaggatctgtaaacataatggttaccatttcytaagagtcaggccctcagccgagttttccacatgcagtacttaattctctcagactcagatcattctgattccagcgtccaggttcttaaccagtacacc

SEQ ID NO: 254054 - DNA, 201 bp, Homo sapiens
cttagcctcccaagtagctgggactacaggcacccaccaccgcacccggctaattttttgtatttttagtagagacgggatttcactgtgttagccaggakggtctcaatctcctgacctcatgaaccgcccgcctcagcctcccaaagtgctgagattacaggcatgagccacggtgccctgccaacattttttaatttg

SEQ ID NO: 254055 - DNA, 201 bp, Homo sapiens
ataatggttaccatttcttaagagtcaggccctcagccgagttttccacatgcagtacttaattctctcagactcagatcattctgattccagcgtccagrttcttaaccagtacaccatagtgcagcatggtagatcatacaaagcaaaggatccggagtttgtaaggcttagctttgaattcttgcttattctttctag

SEQ ID NO: 254056 - DNA, 201 bp, Homo sapiens
ctgacctcatgaaccgcccgcctcagcctcccaaagtgctgagattacaggcatgagccacggtgccctgccaacattttttaatttgttttttttttttwagagacgagatctcactacgttgcccaggctggtctgaaattcctggcctcaagcgatcctcctgccttggtatcccaaagtgctgggattacagatgtg

SEQ ID NO: 254057 - DNA, 201 bp, Homo sapiens
gcctcagcctcccaaagtgctgagattacaggcatgagccacggtgccctgccaacattttttaatttgtttttttttttttagagacgagatctcactaygttgcccaggctggtctgaaattcctggcctcaagcgatcctcctgccttggtatcccaaagtgctgggattacagatgtgagccaccatggccagcctc

SEQ ID NO: 254058 - DNA, 201 bp, Homo sapiens
tttttttagagacgagatctcactacgttgcccaggctggtctgaaattcctggcctcaagcgatcctcctgccttggtatcccaaagtgctgggattacrgatgtgagccaccatggccagcctcatttccttttttatcttgcatacataaaaaccaggatgcttgagaaaggttaagcgatctcaaaattccatgtga

SEQ ID NO: 254059 - DNA, 201 bp, Homo sapiens
gcaagcatacatgcctttaagggtttcgtaaaactgaggaaatccaagagaggatgagaaggagttccgtgcacagtcaaggggacagtgtctgacgtccycccagtcagtactaggtgggccccagtcctggtgtctcccagccaggcacactctaaccattcattgcaggcagcgtagcccagattgctgagaaactcc

SEQ ID NO: 254060 - DNA, 201 bp, Homo sapiens
ccttcaaagtgatgttccatttgtatttttaggtatgttaataaaacataatttgaaaataacatttccctcattgataaagaaaacatgaaaaatggtayggcataaacatatacagatctatttatgggatggtaaaaatacaggagggaaatgtaccaaaatattaatagtgattgtattgctgtcataggattttag

SEQ ID NO: 254061 - DNA, 201 bp, Homo sapiens
tttaggtatgttaataaaacataatttgaaaataacatttccctcattgataaagaaaacatgaaaaatggtacggcataaacatatacagatctatttaygggatggtaaaaatacaggagggaaatgtaccaaaatattaatagtgattgtattgctgtcataggattttaggtgattttaattttcttcttgatactt

SEQ ID NO: 254062 - DNA, 201 bp, Homo sapiens
ctggggccagaagtaggaggagcggttggaaagctgattgcccaaagggaaaccctggactaccctggcctcccacaggactctcatagtaattgtggctycctgcagtggggaggccagaaggagtgttgcccaatgctgtcctcatccagtccaccccccacccaccaccaacagatgagtatggtcatgagtgtggtc

SEQ ID NO: 254063 - DNA, 201 bp, Homo sapiens
tgtgtcctcatctcttcacatgaggatagcagtcatattggatcagggcccacccctatgatctcacttaattaattaattacctctttaagggctctatytccaaacacagtcccattgttgaggtcctgggagttaggacttcaggatatgcattttgtaggggtacagttcagccctaacacctggtaaataattttg

SEQ ID NO: 254064 - DNA, 201 bp, Homo sapiens
ctctgcggagcctgtcgaaccccttgtccgggtcgtggcgcctgggctgggaggaggcgtggtcctcactctcactcccggcgcccgcgcccaccttcccsgggctgctgaccgagccccagggcagctcgcccttccccctcctgaagcccgaggtcttcttcatggctccgtctaccggcttcggagacccgctggact

SEQ ID NO: 254065 - DNA, 201 bp, Homo sapiens
atgccactgagattaccaagttttaagcttatttcaagattatttataggtgattccccaactgggaaagtcatttctgaatttcttctcttctaaaatakatctagaaaaattaacaaactttattccagtaagagagtttgggatgtactgcttcagcccctgtcctaaggaaattatcaagcctggagggtggggtgc

SEQ ID NO: 254066 - DNA, 201 bp, Homo sapiens
ctcatagtaattgtggctccctgcagtggggaggccagaaggagtgttgcccaatgctgtcctcatccagtccaccccccacccaccaccaacagatgagyatggtcatgagtgtggtcacctcatcagtcatttgctcagctgtgaaaaagaaattgttcagagaagagcaaagtgtttttccatgagccagaggtcagc

SEQ ID NO: 254067 - DNA, 201 bp, Homo sapiens
aggaggaaaggccaagtcctgagagccgataggatagaaggactattctggaatcgtttccagccaacatggcacgaaggaggcatcaaagcccacaacaygaaaggggcgattttccagccgtcttaacaacagctatattgcctctgctaagtcagtgttggtaagacttcaggtggcttctattccagttggacatga

SEQ ID NO: 254068 - DNA, 201 bp, Homo sapiens
gctccctgcagtggggaggccagaaggagtgttgcccaatgctgtcctcatccagtccaccccccacccaccaccaacagatgagtatggtcatgagtgtrgtcacctcatcagtcatttgctcagctgtgaaaaagaaattgttcagagaagagcaaagtgtttttccatgagccagaggtcagccaaggtatgctaatg

SEQ ID NO: 254069 - DNA, 201 bp, Homo sapiens
ccaggaggaaaggccaagtcctgagagccgataggatagaaggactattctggaatcgtttccagccaacatggcacgaaggaggcatcaaagcccacaamatgaaaggggcgattttccagccgtcttaacaacagctatattgcctctgctaagtcagtgttggtaagacttcaggtggcttctattccagttggacat

SEQ ID NO: 254070 - DNA, 201 bp, Homo sapiens
gctaatttttgtatttttagtagagatgaggtttcgccatggtggccaggctggtctcaaactcccggcctcaagtgaaaataaaccagtgccacttgccragagaattaattaaataaatatcaaagaaaaaacactttgaacagctaggggatgggactaaaaaattagtatttgacttaataggcacatccaaagagg

SEQ ID NO: 254071 - DNA, 201 bp, Homo sapiens
aggtcagccaaggtatgctaatgaggaggactggagacagcgcatcacagacactgataaggagcactgggcaagggcacttctcccagggcagagcccayaaggagcgtcctggcaccagatgctcagggaactgaaggctggcaggggcccgcccagtagtctcttgcccactgtgtgcctttaggctacagcctccca

SEQ ID NO: 254072 - DNA, 201 bp, Homo sapiens
aacaccaatgtggatatttgtgactgcctttgttttataatatttttattattcaccttgtacggatgaagacttccagctgtagaggccaaaggggccamactgcaggtagagcaggcattcaccaaggcgtttgtgatcctggggtgcagctcccacccttggctgcctgggtgcttctttccacacctactgtcttgt

SEQ ID NO: 254073 - DNA, 201 bp, Homo sapiens
agtatttgacttaataggcacatccaaagaggtagttattctatttatattgttcctaattagtaatattatagctgttagaacaagtataaactttgaayctgcttttgaactgtaataccacaaagtattaaagcaagattttcaaaattgatcaagtatattccagcatatagctcttgctacattactgctatggtg

SEQ ID NO: 254074 - DNA, 201 bp, Homo sapiens
atgaggaggactggagacagcgcatcacagacactgataaggagcactgggcaagggcacttctcccagggcagagcccacaaggagcgtcctggcaccasatgctcagggaactgaaggctggcaggggcccgcccagtagtctcttgcccactgtgtgcctttaggctacagcctcccaggccccgtgccccctccctt

SEQ ID NO: 254075 - DNA, 201 bp, Homo sapiens
agtgttgaatagacttgaatattcaacagtctcaaatatttgacaccatttagtggacacagacttgactcgatatgcttattctaccaagttgttcctgrtttacgtgacacaactgaatgtatgccagtttcatgggggactctcagatattctgaaggtacctaatcaagtcagtatagtgggaaggagagagaaaca

SEQ ID NO: 254076 - DNA, 201 bp, Homo sapiens
agtgctgtgagtttgggaaagttacttaactcctttgcctcgttttcctcatgtgtaaaatggaaataataatatctgcccatcagtgttgtggctattcratctaataaatataaagaacttagggattgtccttacgtgcaaaacaaattatgacgaggttacagggagaggcgtgtgtcctccatgccttacttggta

SEQ ID NO: 254077 - DNA, 201 bp, Homo sapiens
ctgacccatacgcacatcttcaaggcagctcagagcaacagcatacactttgaaagacccagctgtgggctcatgggacatgttccatttccgccaatccytttggcaccacttaggatctgtaaacataatggttaccatttcttaagagtcaggccctcagccgagttttccacatgcagtacttaattctctcagact

SEQ ID NO: 254078 - DNA, 201 bp, Homo sapiens
ggtgggccccagtcctggtgtctcccagccaggcacactctaaccattcattgcaggcagcgtagcccagattgctgagaaactccaggacgcacctttgmctcatcttgggtggctggccagaccgggattccaggaatcctacccactggctagcgaggtattcatttgcaggatgccaagagattctgtctccaggac

SEQ ID NO: 254079 - DNA, 201 bp, Homo sapiens
tcttcttccctccccttctcaccagcagattttcttcttctgggaacacagctggtggttagccagggctttggggaggcttctagtttttattgaaaggkgagaggaaatcaccaaaagaatttctgttaaaccaagacactgcagagtggaaaggctaatgaggaatttatttttttttcccatttcaggcaagtttgt

SEQ ID NO: 254080 - DNA, 201 bp, Homo sapiens
acaccctaggggcagccaagcttgcagcaaatccaggtgtagacaatgttttcaaataagttagattttttttttaatttttcattttggtctcttccccrgattattgattacagatcattaaatatttttgccttattattgtcacatgttagaatcttactgtttattatatgtctgggggtttttttcttaattttc

SEQ ID NO: 254081 - DNA, 201 bp, Homo sapiens
gcgctccaccttctctccgatgggaatgagagaaattgaaggcactgagtaaattgccatgtgtggtgcgtgtgttagccatagtaatgcgagcatacaasagtatattcacttctcagagtatcatgagcccaaacaattacagtattaattagtaggactgtaagaacacattaacatttttgaccgtgctcaaattat

SEQ ID NO: 254082 - DNA, 201 bp, Homo sapiens
ttttggtctcttccccagattattgattacagatcattaaatatttttgccttattattgtcacatgttagaatcttactgtttattatatgtctgggggkttttttcttaattttcaaacatttaaagcctcctgccttttcctgagtgagggagtgatgaaaacagtctgttggaaacattaattagataatagagaca

SEQ ID NO: 254083 - DNA, 201 bp, Homo sapiens
aaccaacgcacacagagatgaggagctagatgagggctgggtagagagagggggaaagccacagaggggtccccaggaggaaaggccaagtcctgagagcygataggatagaaggactattctggaatcgtttccagccaacatggcacgaaggaggcatcaaagcccacaacatgaaaggggcgattttccagccgtctt

SEQ ID NO: 254084 - DNA, 201 bp, Homo sapiens
aatgctctatgtcaagcttgtccaacccacagcccagggcagctttgaatgcggcccaacacaaattcgtaaactttcttaaaacattacgaaaatttttygcaagttttttttcagctcatcagctatcattagttagtgtattttatgtgtcgcacaagacaattcttcttccattgtggcccagggaagccaaaagat

SEQ ID NO: 254085 - DNA, 201 bp, Homo sapiens
ggctcaaggtcacagagccctgggaacaataagggaggctttgcagaggccatgacctttgccttaggtcagtatcagtttaagagcacagttccaatctraaataatcatgaaacaaaaataaatttagaattaatgcctgaagttcaaataaaattctgtaacattcaccaggatgccttctcaagtagacattcagag

SEQ ID NO: 254086 - DNA, 201 bp, Homo sapiens
cttagcaaaggacaaaatggggagagaagacagggaatcagggaagaaaaactcactcacttaatgtgacgcaaacatcgcatgcagtcgtaccaaccaastaaacatgataagctacaaagaactatggttttcgctgctctcaaaatgccactgagattaccaagttttaagcttatttcaagattatttataggtgat

SEQ ID NO: 254087 - DNA, 201 bp, Homo sapiens
taaaataatcatgaaacaaaaataaatttagaattaatgcctgaagttcaaataaaattctgtaacattcaccaggatgccttctcaagtagacattcagmgttacaggtttatttttttttttttcctcaagacagagtctcgctctgttgcccatgctggagtgcagtggtgcgatctcggctcactgcaatctctgcc

SEQ ID NO: 254088 - DNA, 201 bp, Homo sapiens
ttaggttccagatgccctcaagggacatacccaattatatgagtcactgctctctgacaagcccaaagcttgggtttcccaccattgaaccccctgtctcmatgcaatttatcaatgagaggccacaattacataagcaattttgcctactattacagctgacatgccatctttatcagatttccatgggaacagagctag

SEQ ID NO: 254089 - DNA, 201 bp, Homo sapiens
aaagctaatccatggtcaaatgtgtccaagaaggagaaagggttttgttacccttgtaccctgaaatgcatactggattttgtggaggatttagttgtttrggtaagaagtaagtaaaaacgaaggtgaaaaacatgatagaatgtgtgattgttttcttcattgagaaagaaaaccgtagcatcgtgtaggccaggacat

SEQ ID NO: 254090 - DNA, 201 bp, Homo sapiens
gtcctggcaccagatgctcagggaactgaaggctggcaggggcccgcccagtagtctcttgcccactgtgtgcctttaggctacagcctcccaggccccgkgccccctcccttcccccatgccacactggggaagatgctgaccctgagagtggtgcaaccatctgcctgcccctggccacctctcaccagcacgtgaatg

SEQ ID NO: 254091 - DNA, 201 bp, Homo sapiens
cctcagggtgccttcctcccttagcgagcccgagtctgtgtagagatgatagaatgtgtcgttgttttcttcattgagaaagaaaaccgtagcatcgtgtrggccaggacatccctcagggtgccttcctcccttagcgagcccgagtctgtgtagagatgatagaatgtgtcgttgttttcttcattgagaaagaaaacc

SEQ ID NO: 254092 - DNA, 201 bp, Homo sapiens
accagatgctcagggaactgaaggctggcaggggcccgcccagtagtctcttgcccactgtgtgcctttaggctacagcctcccaggccccgtgcccccthccttcccccatgccacactggggaagatgctgaccctgagagtggtgcaaccatctgcctgcccctggccacctctcaccagcacgtgaatgctcttggg

SEQ ID NO: 254093 - DNA, 201 bp, Homo sapiens
atgaaaaattttccctggcaccctacacaccctaggggcagccaagcttgcagcaaatccaggtgtagacaatgttttcaaataagttagatttttttttwaatttttcattttggtctcttccccagattattgattacagatcattaaatatttttgccttattattgtcacatgttagaatcttactgtttattatat

SEQ ID NO: 254094 - DNA, 201 bp, Homo sapiens
ctgccttcttgctgtgtcctcacatgatcttctacctgtgggtgtctgtgtcctcatctcttcacatgaggatagcagtcatattggatcagggcccaccsctatgatctcacttaattaattaattacctctttaagggctctatctccaaacacagtcccattgttgaggtcctgggagttaggacttcaggatatgca

SEQ ID NO: 254095 - DNA, 201 bp, Homo sapiens
ttaataaatgcaacaggctggggagcttaaacaacagacatttatttctcacagtgctaaaggctggaagccaaggtcaaagcgcagcagggttgatttcytctgaggtgaggcctctctctttggcttacagacggctgccttcttgctgtgtcctcacatgatcttctacctgtgggtgtctgtgtcctcatctcttca

SEQ ID NO: 254096 - DNA, 201 bp, Homo sapiens
tgggcaaggttgctcaagcctgtaatctcagcactttcggaggctgaggcaggtggatcacttgaggtcaggagttcaagaccagcctggccaatatggtraaacaccgtccctactaaaaatacaaaaattagcaagatgtggtggtgcacgcctgtaatcccagttactcgggaggctgaggcaagagaattgctctaa

SEQ ID NO: 254097 - DNA, 201 bp, Homo sapiens; identical to SEQ ID NO: 50451

SEQ ID NO: 254098 - DNA, 201 bp, Homo sapiens
tatattataaaagaaatgcatgctcatagcaaaaattttaaatagtataaaatatcaatatggcattaaaaataaaagtcctcttccctgttattaacatyttcttgtatttgggaagggaaggtttgacactaagtatttacgctatgttgcatttccattccttttgcattagaaagaaaaacaaaatccctttttttt

SEQ ID NO: 254099 - DNA, 201 bp, Homo sapiens
ccccacaacctgggctttggagcaagcaaaccttgttcagccctagttctgccacctgccacaggccctcacctctttgaccttcagtctcctcatctgtrtcctggtcttttaggttgtcatggaaattagccagagcaggtaccccagggcccagcaggtttcctgcatacggtaagtgctttgtatttgtttttgctg

SEQ ID NO: 254100 - DNA, 201 bp, Homo sapiens
gagggcacaggccttccgtggcccttgctctccaccccacaacctgggctttggagcaagcaaaccttgttcagccctagttctgccacctgccacaggcyctcacctctttgaccttcagtctcctcatctgtgtcctggtcttttaggttgtcatggaaattagccagagcaggtaccccagggcccagcaggtttcct

SEQ ID NO: 254101 - DNA, 201 bp, Homo sapiens; identical to SEQ ID NO: 50452

SEQ ID NO: 254102 - DNA, 201 bp, Homo sapiens
tgcatacggtaagtgctttgtatttgtttttgctgtggttccgatgatatcggtgaaggtttttgtttgtgtgtttttgtccctatgcccttccataccayactgcttttcaggtgaaaagaggctatgtattttacatgttctacattacaagaaaactcagaagaattctttttacaaaaggcccaattcaattgtatg

SEQ ID NO: 254103 - DNA, 201 bp, Homo sapiens; identical to SEQ ID NO: 50454

SEQ ID NO: 254104 - DNA, 201 bp, Homo sapiens
tgagtatccaagcagaggctggggtgtagattcttatatgtgcatggctgatacattttgacccttcttggaagagattaatgatgttaagcttagttacwtcatggttttatctaatggaagaaaattaagatgtcaaaatttgttacattatattagtttctgttctaaggcctggtaaaaatacttttattatagtct

SEQ ID NO: 254105 - DNA, 201 bp, Homo sapiens; identical to SEQ ID NO: 50455

SEQ ID NO: 254106 - DNA, 201 bp, Homo sapiens
ttgtaactttctaaaaaaaaagaaaaaagaaagaaaagaaacaacagtttattaattctttgtatattgtaaggattagaccacagttacaattataaacyataatttactaaatttaaagtaattattattttttgttcaacataaactcccaaccaaaaaaaatttttttcactattgattctgaaatattttgatccc

SEQ ID NO: 254107 - DNA, 201 bp, Homo sapiens; identical to SEQ ID NO: 50493

SEQ ID NO: 254108 - DNA, 201 bp, Homo sapiens
gtaactttctaaaaaaaaagaaaaaagaaagaaaagaaacaacagtttattaattctttgtatattgtaaggattagaccacagttacaattataaactayaatttactaaatttaaagtaattattattttttgttcaacataaactcccaaccaaaaaaaatttttttcactattgattctgaaatattttgatcccaa

SEQ ID NO: 254109 - DNA, 201 bp, Homo sapiens; identical to SEQ ID NO: 50494

SEQ ID NO: 254110 - DNA, 201 bp, Homo sapiens
gcccaggtatgttgtctgtggctttatgacacttaaactacatggatgtaaaccatacatgagaatttgattgcagttgcctgaactgaagggaatagatrgatttctaaaatgtatttattcaagagatattcactgagcactccatgccagggactagctaggctctgggcatccagcagtgcacaacacaaaagctct

SEQ ID NO: 254111 - DNA, 201 bp, Homo sapiens
agtttcagaggtgtcctgcagcccccctatctgggagggtggtttatgggtatcccgagtagtgtggcttcccagggctatgatttctttttaatggaaamttataagtgttggtgaggatatagagagactgaaagcctcatacattgctgatgggagggaaaaatgatgcagcctctgatgattcctcaacaaattaaa

SEQ ID NO: 254112 - DNA, 201 bp, Homo sapiens
cagggaagaaaaactcactcacttaatgtgacgcaaacatcgcatgcagtcgtaccaaccaagtaaacatgataagctacaaagaactatggttttcgctrctctcaaaatgccactgagattaccaagttttaagcttatttcaagattatttataggtgattccccaactgggaaagtcatttctgaatttcttctctt

SEQ ID NO: 254113 - DNA, 201 bp, Homo sapiens
aaactcactcacttaatgtgacgcaaacatcgcatgcagtcgtaccaaccaagtaaacatgataagctacaaagaactatggttttcgctgctctcaaaaygccactgagattaccaagttttaagcttatttcaagattatttataggtgattccccaactgggaaagtcatttctgaatttcttctcttctaaaataga

SEQ ID NO: 254114 - DNA, 201 bp, Homo sapiens
aaggttgctcaagcctgtaatctcagcactttcggaggctgaggcaggtggatcacttgaggtcaggagttcaagaccagcctggccaatatggtaaaacmccgtccctactaaaaatacaaaaattagcaagatgtggtggtgcacgcctgtaatcccagttactcgggaggctgaggcaagagaattgctctaacccag

SEQ ID NO: 254115 - DNA, 201 bp, Homo sapiens
gctcaagcctgtaatctcagcactttcggaggctgaggcaggtggatcacttgaggtcaggagttcaagaccagcctggccaatatggtaaaacaccgtcyctactaaaaatacaaaaattagcaagatgtggtggtgcacgcctgtaatcccagttactcgggaggctgaggcaagagaattgctctaacccagaaggca

SEQ ID NO: 254116 - DNA, 201 bp, Homo sapiens
aatggataaacaaaatgtgataaatatatgtaatagaatattattcagccatgaaaaaggaatgaagtactgacacatactcaaaaatatttttttttgartgaacctcaaaaatattatgctgagtgaaagaagccacatattgtatgattctgtttatatgaaatatctagaatagataaatccacagagacagcaaat

SEQ ID NO: 254117 - DNA, 201 bp, Homo sapiens
atcccagttactcgggaggctgaggcaagagaattgctctaacccagaaggcagaggttgaagtgagcgaagattgtgtcattacactctagcctgggtgrcagagcgagaatccgtctaaaaaaaaaaaaaagagtttaccttttcctgtttatgtgcatacaggtatttgggtaccacgtttgtaattcacagttagtt

SEQ ID NO: 254118 - DNA, 201 bp, Homo sapiens
ttcagggtcattctctcccaggtgctgctgggctaggataaaatgagatctgaattacattaaaataattaagtattccaagagaagaggtgacagaatgktttaagtgggtgtgtaatttagataacctagatgcagataagctgaatgaagcatttaatccagcacattcgtattttaacttgatcatcagcaatggga

SEQ ID NO: 254119 - DNA, 201 bp, Homo sapiens
ctagatgcagataagctgaatgaagcatttaatccagcacattcgtattttaacttgatcatcagcaatgggagtttgaaacccgattgcagctgcaggtyccacacaactgaattcggttccttgtgcatagtagtgttcactggagatgcctggaggtctgaaggtgtgcccttttataggcaggaattccaccaggat

SEQ ID NO: 254120 - DNA, 201 bp, Homo sapiens
tgttcactggagatgcctggaggtctgaaggtgtgcccttttataggcaggaattccaccaggatgggtatagcttgttttttttaaaaggcttgggactrgatacgattgcccaagaagacagtgtagacagcaaggagggctgagcatgaatgggatgacctaccagcacaaaaagggcaggcaggaaggcagtaaaga

SEQ ID NO: 254121 - DNA, 201 bp, Homo sapiens
gcaaatgcatttacctgttcttaccatctccctcagcatgttgaatctattctgggattagacaagctcccagacttacctgctatgtttaataaaaacayggtaaaggaagaatcggggctattaaaatacttaagaatgagaaagttgaaaaaagaaaaaaagacgtagattgtgtttggcatgtcttccccccaccgt

SEQ ID NO: 254122 - DNA, 201 bp, Homo sapiens; identical to SEQ ID NO: 50498

SEQ ID NO: 254123 - DNA, 201 bp, Homo sapiens; identical to SEQ ID NO: 50489

SEQ ID NO: 254124 - DNA, 201 bp, Homo sapiens
agagcttatcactccatttgttaagctgataaacaccctgtagatttggccccatcgctggtactaagacccagtcctgcatctgtgattacttgttttgktgtaaagtagtttagtgaaacggaaagggcttgatgtagtataaaagtaaggctgagtcccagcccactttgtgatttggggcaagtcaggtaacctgtc

SEQ ID NO: 254125 - DNA, 201 bp, Homo sapiens
gagaatccacagaaaccatacctgcagggagcaaacaccatcacaccccactgctgtgaatgcaaatgcatttacctgttcttaccatctccctcagcatkttgaatctattctgggattagacaagctcccagacttacctgctatgtttaataaaaacacggtaaaggaagaatcggggctattaaaatacttaagaat

SEQ ID NO: 254126 - DNA, 201 bp, Homo sapiens
taagctgataaacaccctgtagatttggccccatcgctggtactaagacccagtcctgcatctgtgattacttgttttgttgtaaagtagtttagtgaaayggaaagggcttgatgtagtataaaagtaaggctgagtcccagcccactttgtgatttggggcaagtcaggtaacctgtctgagcctcagcttcctcatcc

SEQ ID NO: 254127 - DNA, 201 bp, Homo sapiens
tctctttagttggcctttcctggttcaaattcttatcagataagtacatttcgatgatcactttatttaagtttccattcatcttagactcagtttttagkttttgcctgggttttaataaacattgatgttgttttcttcattaaagcctgaagtcactcttcatgtaaggaatgatttaaaaatcatcttttccagatt

SEQ ID NO: 254128 - DNA, 201 bp, Homo sapiens
gggcagggctgatgtggtatttgtgccttggcctgcacaggaaatgggctcaaagaatttcagtgcagctccccctggagcccggcgcttctggctctggwtgtggtactcttcacagcagtctgctgatcctgggtgcctccagaagacccacagtgtgactgttgggccctgccctgttcccaacaatggcagggcctg

SEQ ID NO: 254129 - DNA, 201 bp, Homo sapiens
tatgtgtttttcccaaccaattctctgacaccagttgcatgtcctacaatttaattcagttctgacactagctgcctgggtttggcacagacctcacaggrtgagggctcagtcccacaagactgttccccactccagacaccggtagcaagtagcgggtccccaggttacccatacttctggtcagctccaagtcagtgt

SEQ ID NO: 254130 - DNA, 201 bp, Homo sapiens
ccctggagcccggcgcttctggctctggatgtggtactcttcacagcagtctgctgatcctgggtgcctccagaagacccacagtgtgactgttgggcccwgccctgttcccaacaatggcagggcctgggacaagaatacaatacaagtatttaaagtttataactttatagtttataacaatacaagtatttaaaaagt

SEQ ID NO: 254131 - DNA, 201 bp, Homo sapiens
ttaattcagttctgacactagctgcctgggtttggcacagacctcacagggtgagggctcagtcccacaagactgttccccactccagacaccggtagcargtagcgggtccccaggttacccatacttctggtcagctccaagtcagtgttcccacaaccctttctcaggttcagtaatttcctgtaacagctcacagaa

SEQ ID NO: 254132 - DNA, 201 bp, Homo sapiens
gctctgggccagagtggtccttgagagaaggtctgaatcaaggcaagggggccgggctttgtagccccactggggccagtcctgggatgtgggctgctccrgggaggggtcagaaccttggctaaggcagtttgtctttggctgaggacggttcctggggaggcgccccacaggtgacactcctagcagtctcagtactga

SEQ ID NO: 254133 - DNA, 201 bp, Homo sapiens
gggccgggctttgtagccccactggggccagtcctgggatgtgggctgctccggggaggggtcagaaccttggctaaggcagtttgtctttggctgaggayggttcctggggaggcgccccacaggtgacactcctagcagtctcagtactgaaggggacacagcaggcccaacgtcacatcacatagaggagacgattga

SEQ ID NO: 254134 - DNA, 201 bp, Homo sapiens
aggggtcagaaccttggctaaggcagtttgtctttggctgaggacggttcctggggaggcgccccacaggtgacactcctagcagtctcagtactgaaggkgacacagcaggcccaacgtcacatcacatagaggagacgattgacaattcagttaagggacctggtgatgtggagaagaatgtttgcagtgggggtatag

SEQ ID NO: 254135 - DNA, 201 bp, Homo sapiens
gaggacggttcctggggaggcgccccacaggtgacactcctagcagtctcagtactgaaggggacacagcaggcccaacgtcacatcacatagaggagacrattgacaattcagttaagggacctggtgatgtggagaagaatgtttgcagtgggggtataggaagtgatggagtctgccaaggcctgagggcagagccaa

SEQ ID NO: 254136 - DNA, 201 bp, Homo sapiens
gttcctggggaggcgccccacaggtgacactcctagcagtctcagtactgaaggggacacagcaggcccaacgtcacatcacatagaggagacgattgacrattcagttaagggacctggtgatgtggagaagaatgtttgcagtgggggtataggaagtgatggagtctgccaaggcctgagggcagagccaatcagatt

SEQ ID NO: 254137 - DNA, 201 bp, Homo sapiens; identical to SEQ ID NO: 50447

SEQ ID NO: 254138 - DNA, 201 bp, Homo sapiens
ctcactcacttaatgtgacgcaaacatcgcatgcagtcgtaccaaccaagtaaacatgataagctacaaagaactatggttttcgctgctctcaaaatgcyactgagattaccaagttttaagcttatttcaagattatttataggtgattccccaactgggaaagtcatttctgaatttcttctcttctaaaatagatct

SEQ ID NO: 254139 - DNA, 201 bp, Homo sapiens
tacaaagaactatggttttcgctgctctcaaaatgccactgagattaccaagttttaagcttatttcaagattatttataggtgattccccaactgggaargtcatttctgaatttcttctcttctaaaatagatctagaaaaattaacaaactttattccagtaagagagtttgggatgtactgcttcagcccctgtcct

SEQ ID NO: 254140 - DNA, 201 bp, Homo sapiens
actggagatgcctggaggtctgaaggtgtgcccttttataggcaggaattccaccaggatgggtatagcttgttttttttaaaaggcttgggactggataygattgcccaagaagacagtgtagacagcaaggagggctgagcatgaatgggatgacctaccagcacaaaaagggcaggcaggaaggcagtaaagaaatga

SEQ ID NO: 254141 - DNA, 201 bp, Homo sapiens
gcatggtggctcacacgtgtaatcccagcactttgggaggccaaggtgggcagatcacttgaggtcaggagtttgagaccagcctgggcaacatggtgaarccctgtctctactaaaaatgcaaaaattagcagggcatggtgatacacgtttgtggtcccagttactcagggggctgaggcacaagaatcacttgaaccc

SEQ ID NO: 254142 - DNA, 201 bp, Homo sapiens
ggctgagcatgaatgggatgacctaccagcacaaaaagggcaggcaggaaggcagtaaagaaatgagcagggcccaaaccaggagagtgtggcatgccacratggagactgaacagaaacaaaacgatgggcgactgtagtgttgttccctgttgaaggagagacactctgttacagaagacctggacttcagttcagttc

SEQ ID NO: 254143 - DNA, 201 bp, Homo sapiens
tcacacgtgtaatcccagcactttgggaggccaaggtgggcagatcacttgaggtcaggagtttgagaccagcctgggcaacatggtgaagccctgtctcwactaaaaatgcaaaaattagcagggcatggtgatacacgtttgtggtcccagttactcagggggctgaggcacaagaatcacttgaacccgggaggtgga

SEQ ID NO: 254144 - DNA, 201 bp, Homo sapiens
gctgagcatgaatgggatgacctaccagcacaaaaagggcaggcaggaaggcagtaaagaaatgagcagggcccaaaccaggagagtgtggcatgccacartggagactgaacagaaacaaaacgatgggcgactgtagtgttgttccctgttgaaggagagacactctgttacagaagacctggacttcagttcagttca

SEQ ID NO: 254145 - DNA, 201 bp, Homo sapiens
agggcatggtgatacacgtttgtggtcccagttactcagggggctgaggcacaagaatcacttgaacccgggaggtggaggttgcagtgagccaggatcaygccattgcactctagcctggaagacagagcaagactctgtctcaaaaacattcgtttccacaggccttctccagattttgtttttatatgtaatcaaatt

SEQ ID NO: 254146 - DNA, 201 bp, Homo sapiens
tttgaggccattatatttgtatctggaaattgttaaaattgaggctctgtctccttttcccagtgagaattcatgagcattcccaacattcccacgtggasacagacacatgccacttgtagcccctgtgttaccttgttctgcctacaaacacacccgtgggtccagagaccagcaaggccatattgctaatccaaattt

SEQ ID NO: 254147 - DNA, 201 bp, Homo sapiens
ccagcacaaaaagggcaggcaggaaggcagtaaagaaatgagcagggcccaaaccaggagagtgtggcatgccacaatggagactgaacagaaacaaaacsatgggcgactgtagtgttgttccctgttgaaggagagacactctgttacagaagacctggacttcagttcagttcagtttccttagcaaaggacaaaatg

SEQ ID NO: 254148 - DNA, 201 bp, Homo sapiens
agcacaaaaagggcaggcaggaaggcagtaaagaaatgagcagggcccaaaccaggagagtgtggcatgccacaatggagactgaacagaaacaaaacgaygggcgactgtagtgttgttccctgttgaaggagagacactctgttacagaagacctggacttcagttcagttcagtttccttagcaaaggacaaaatggg

SEQ ID NO: 254149 - DNA, 201 bp, Homo sapiens
ggcccaaaccaggagagtgtggcatgccacaatggagactgaacagaaacaaaacgatgggcgactgtagtgttgttccctgttgaaggagagacactctrttacagaagacctggacttcagttcagttcagtttccttagcaaaggacaaaatggggagagaagacagggaatcagggaagaaaaactcactcacttaa

SEQ ID NO: 254150 - DNA, 201 bp, Homo sapiens
caaaccaggagagtgtggcatgccacaatggagactgaacagaaacaaaacgatgggcgactgtagtgttgttccctgttgaaggagagacactctgttayagaagacctggacttcagttcagttcagtttccttagcaaaggacaaaatggggagagaagacagggaatcagggaagaaaaactcactcacttaatgtg

SEQ ID NO: 254151 - DNA, 201 bp, Homo sapiens
tatgaatggagctgtatagtacaaaaagagaacacctgtggctgtgcttctatcatgggcaaatagattgtcatccaggaagctaaagtcatttaggtagkataataggtttgtcatgaaattatcaatagaagtgctatctaataatctaaattcaccaccaatatttcttaaagtttatagtgctttataccgtggccc

SEQ ID NO: 254152 - DNA, 201 bp, Homo sapiens
ggagctgtatagtacaaaaagagaacacctgtggctgtgcttctatcatgggcaaatagattgtcatccaggaagctaaagtcatttaggtagtataatargtttgtcatgaaattatcaatagaagtgctatctaataatctaaattcaccaccaatatttcttaaagtttatagtgctttataccgtggcccttataac

SEQ ID NO: 254153 - DNA, 201 bp, Homo sapiens
cagccctctaatcatatggttggttccccagcaaccagccctcattctagggactttctaaaagtcacctcattaacataaactcaggtgtggttgaagcrtcctgttaggaataacaaatacatacatttcttatgtctgtagggaagttcagactttccctctgaagtttccatgtttggtctataaaataatccaacg

SEQ ID NO: 254154 - DNA, 201 bp, Homo sapiens
acataaactcaggtgtggttgaagcatcctgttaggaataacaaatacatacatttcttatgtctgtagggaagttcagactttccctctgaagtttccakgtttggtctataaaataatccaacgatagattaacaggggaagagacatgcagatgtcgttacgtgtgcatgagccacatgagactcaaagaagggccag

SEQ ID NO: 254155 - DNA, 201 bp, Homo sapiens
ggagagcacaaagagcagagaatccacagaaaccatacctgcagggagcaaacaccatcacaccccactgctgtgaatgcaaatgcatttacctgttcttrccatctccctcagcatgttgaatctattctgggattagacaagctcccagacttacctgctatgtttaataaaaacacggtaaaggaagaatcggggcta

SEQ ID NO: 254156 - DNA, 201 bp, Homo sapiens
acataagcaattttgcctactattacagctgacatgccatctttatcagatttccatgggaacagagctagaaagctaatccatggtcaaatgtgtccaaraaggagaaagggttttgttacccttgtaccctgaaatgcatactggattttgtggaggatttagttgtttaggtaagaagtaagtaaaaacgaaggtgaa

SEQ ID NO: 254157 - DNA, 201 bp, Homo sapiens
atagaagtgctatctaataatctaaattcaccaccaatatttcttaaagtttatagtgctttataccgtggcccttataaccagaaacataatagaaatgraaagatgtggcttaaataaaaattggaagacaaattcaaaagcaaagaaactgttttgttaacagtgctgataacactcttaggtctctaggttaaaaaa

SEQ ID NO: 254158 - DNA, 201 bp, Homo sapiens
aagtgctatctaataatctaaattcaccaccaatatttcttaaagtttatagtgctttataccgtggcccttataaccagaaacataatagaaatggaaaratgtggcttaaataaaaattggaagacaaattcaaaagcaaagaaactgttttgttaacagtgctgataacactcttaggtctctaggttaaaaaaacta

SEQ ID NO: 254159 - DNA, 201 bp, Homo sapiens
gcagtctcagtactgaaggggacacagcaggcccaacgtcacatcacatagaggagacgattgacaattcagttaagggacctggtgatgtggagaagaakgtttgcagtgggggtataggaagtgatggagtctgccaaggcctgagggcagagccaatcagatttgctggtggggacgggacaggatgacagcaggatg

SEQ ID NO: 254160 - DNA, 201 bp, Homo sapiens
cctttttacatatcacaatatcacaaattattaccaagaagcaacatttggactggtactgaatccactatagtttagcctatacatgctatttatgtagttttttttattcaaaggagtattagtataaccagataaatcatttcccagacattgctgggttttttctcaaaaatgtatagcttacttttcagcactaaa

SEQ ID NO: 254161 - DNA, 201 bp, Homo sapiens
ttgagtatcacctctgagggagacaaatggccatggtgttttgaaaatttaatgtttgctggggctaggggcacattcaagattaatatagatcgaagggktaaattattgctcttgacatctaagatatccacttgcaggatgggaataggcaatgaagaggtgattattgaacagttaacaatgctaactctatgtatg

SEQ ID NO: 254162 - DNA, 201 bp, Homo sapiens
tccttttaaggtgcaagaaacaacagcatatgtgggagtcagcgcaggagggaaacctggcgacctgggagaggggaattgctggagctacttccttctcyacacccttctctatgttttattgcataaataggaaatattgttgaaaagactttccgggtaaactgttctgaattttacttttatcaaaaagactcaatt

SEQ ID NO: 254163 - DNA, 201 bp, Homo sapiens
tttttattcaaaggagtattagtataaccagataaatcatttcccagacattgctgggttttttctcaaaaatgtatagcttacttttcagcactaaatcrgtatcattgacttattagttgccagtgacttatgtatagaacttaggctcaatattgctttaaaaattagatctttgtgggtactgataagggagaataa

SEQ ID NO: 254164 - DNA, 201 bp, Homo sapiens
tgctaacccaagacttcaggtctctcagaatgtatttgacatcttgtgactataatgttctcatatcataatatatggtattcactttgggaggccaaagmaggaggatcacttcttcagcccaggaggttgtagtgagccatggtcaggccactgcactccagcctgagtgactgagcaagaccccatctttaaaaataa

SEQ ID NO: 254165 - DNA, 201 bp, Homo sapiens
gtggggacgggacaggatgacagcaggatgtttgccctgaataactagaaggatcatgtttgcatttactagaatgggcaaagtcacaggagggcaggttrggggccatcaggagtttatctttggccacgtaggtcttgtggctacatagggccagggaggagacccaagccggacttataagtggggagtcagcagcat

SEQ ID NO: 254166 - DNA, 201 bp, Homo sapiens
caggaggttgtagtgagccatggtcaggccactgcactccagcctgagtgactgagcaagaccccatctttaaaaataaacaaaattttgaaaaaagtaargcatgtgatggagagtctgggtgtgcagtgggggagcctgctccaagaagagactgtgccagttagcaccgcccatgcctggaggggctgggatccgttc

SEQ ID NO: 254167 - DNA, 201 bp, Homo sapiens
ccatggtcaggccactgcactccagcctgagtgactgagcaagaccccatctttaaaaataaacaaaattttgaaaaaagtaaggcatgtgatggagagtytgggtgtgcagtgggggagcctgctccaagaagagactgtgccagttagcaccgcccatgcctggaggggctgggatccgttctgcttttctgtcgagtt

SEQ ID NO: 254168 - DNA, 201 bp, Homo sapiens
tcaatagagcacagaagccaacatggggatgtaggggaggaggctgagtcagccacggagaccaagagggagcggctgtagaaacacacgaggacagctgracagggagggcaggaaaggctgctggtggtctcatgaataatgaccagccctaaccattggatttagcaatgagattgttggtgacctttgccttttgat

SEQ ID NO: 254169 - DNA, 201 bp, Homo sapiens
gacactctgttacagaagacctggacttcagttcagttcagtttccttagcaaaggacaaaatggggagagaagacagggaatcagggaagaaaaactcaytcacttaatgtgacgcaaacatcgcatgcagtcgtaccaaccaagtaaacatgataagctacaaagaactatggttttcgctgctctcaaaatgccactg

SEQ ID NO: 254170 - DNA, 201 bp, Homo sapiens
gtggtcccagttactcagggggctgaggcacaagaatcacttgaacccgggaggtggaggttgcagtgagccaggatcatgccattgcactctagcctggragacagagcaagactctgtctcaaaaacattcgtttccacaggccttctccagattttgtttttatatgtaatcaaattcttttggtttgacttttgacc

SEQ ID NO: 254171 - DNA, 201 bp, Homo sapiens
gaagacctggacttcagttcagttcagtttccttagcaaaggacaaaatggggagagaagacagggaatcagggaagaaaaactcactcacttaatgtgasgcaaacatcgcatgcagtcgtaccaaccaagtaaacatgataagctacaaagaactatggttttcgctgctctcaaaatgccactgagattaccaagttt

SEQ ID NO: 254172 - DNA, 201 bp, Homo sapiens
tttaagcttatttcaagattatttataggtgattccccaactgggaaagtcatttctgaatttcttctcttctaaaatagatctagaaaaattaacaaacyttattccagtaagagagtttgggatgtactgcttcagcccctgtcctaaggaaattatcaagcctggagggtggggtgctatcaactgcctgccaacatg

SEQ ID NO: 254173 - DNA, 201 bp, Homo sapiens
atcacaccccactgctgtgaatgcaaatgcatttacctgttcttaccatctccctcagcatgttgaatctattctgggattagacaagctcccagacttamctgctatgtttaataaaaacacggtaaaggaagaatcggggctattaaaatacttaagaatgagaaagttgaaaaaagaaaaaaagacgtagattgtgtt

SEQ ID NO: 254174 - DNA, 201 bp, Homo sapiens
aaccttggctaaggcagtttgtctttggctgaggacggttcctggggaggcgccccacaggtgacactcctagcagtctcagtactgaaggggacacagcrggcccaacgtcacatcacatagaggagacgattgacaattcagttaagggacctggtgatgtggagaagaatgtttgcagtgggggtataggaagtgatg

SEQ ID NO: 254175 - DNA, 201 bp, Homo sapiens
aaatactcccaccacagctaatgtcaaggtgctgacctgaggccactggacatggggttgggaagatgtgcccttcctcccaccacagctgccctcagccrtacccccgtctcccccaacaactgccccatcttagctacccactcagagccagtgtggggtctctctgtccctcatccccacatacccacgttctgtcaa

SEQ ID NO: 254176 - DNA, 201 bp, Homo sapiens
catctgggtagttgaggggttgtggggaaggggccagcccatcctgagcaactctccccacagggaagccccacggcatgcaccagctggccacactgccratgagttggatgtggaggacgtatcgcaccttctggtggccaacaccctggtggccacctggatgaggcccacaagtccctgctggtagccctctcctga

SEQ ID NO: 254177 - DNA, 201 bp, Homo sapiens
ggctttggagcaagcaaaccttgttcagccctagttctgccacctgccacaggccctcacctctttgaccttcagtctcctcatctgtgtcctggtctttyaggttgtcatggaaattagccagagcaggtaccccagggcccagcaggtttcctgcatacggtaagtgctttgtatttgtttttgctgtggttccgatga

SEQ ID NO: 254178 - DNA, 201 bp, Homo sapiens
gctttggagcaagcaaaccttgttcagccctagttctgccacctgccacaggccctcacctctttgaccttcagtctcctcatctgtgtcctggtcttttrggttgtcatggaaattagccagagcaggtaccccagggcccagcaggtttcctgcatacggtaagtgctttgtatttgtttttgctgtggttccgatgat

SEQ ID NO: 254179 - DNA, 201 bp, Homo sapiens
tctttgaccttcagtctcctcatctgtgtcctggtcttttaggttgtcatggaaattagccagagcaggtaccccagggcccagcaggtttcctgcatacrgtaagtgctttgtatttgtttttgctgtggttccgatgatatcggtgaaggtttttgtttgtgtgtttttgtccctatgcccttccataccacactgctt

SEQ ID NO: 254180 - DNA, 201 bp, Homo sapiens
gacattgctgggttttttctcaaaaatgtatagcttacttttcagcactaaatcggtatcattgacttattagttgccagtgacttatgtatagaacttargctcaatattgctttaaaaattagatctttgtgggtactgataagggagaataaattaaaagtgtatttttaaaagttagatctaagggggaaagaaggt

SEQ ID NO: 254181 - DNA, 201 bp, Homo sapiens
cactgcactccagcctgagtgactgagcaagaccccatctttaaaaataaacaaaattttgaaaaaagtaaggcatgtgatggagagtctgggtgtgcagygggggagcctgctccaagaagagactgtgccagttagcaccgcccatgcctggaggggctgggatccgttctgcttttctgtcgagtttttgggatcttt

SEQ ID NO: 254182 - DNA, 201 bp, Homo sapiens
cccgcgcttcactctctgggacttgaccttcccagtgccccagtcctaatgcccaagtggggagagtggtaaaatccacctcaggtggttgtgaagagttytgagaccattataacatgtctagctcgtggatatttgataaatattagctgtagttattaatttgcaaaggtgtctgaaacagacactgttgcccaacag

SEQ ID NO: 254183 - DNA, 201 bp, Homo sapiens
gagtctgggtgtgcagtgggggagcctgctccaagaagagactgtgccagttagcaccgcccatgcctggaggggctgggatccgttctgcttttctgtcragtttttgggatctttctaactgtttctccctcatcttccaagcatgtgtttgcaattataaactctagtaaagtgagcttcccaggggtagagaccatc

SEQ ID NO: 254184 - DNA, 201 bp, Homo sapiens
ggccaaggtggctcttcctatggtagaaaagaagttttcaattttttaaataaaatgaattgacaaaatggccttttatagaaaaagcaaaactctagggmcagaaaacagatgagctgccagagctggaggaagctacacaggggcacacaggaacctttcagggtaaagagaatgttctgtgtcttcacttcaacagtg

SEQ ID NO: 254185 - DNA, 201 bp, Homo sapiens
gggggagcctgctccaagaagagactgtgccagttagcaccgcccatgcctggaggggctgggatccgttctgcttttctgtcgagtttttgggatctttctaactgtttctccctcatcttccaagcatgtgtttgcaattataaactctagtaaagtgagcttcccaggggtagagaccatcaggcctcctccttggcg

SEQ ID NO: 254186 - DNA, 201 bp, Homo sapiens
ttcacttcaacagtggtcacacaactgtatacatcccttaagactcatcaaactgtatatttaagaggagtgcattttactgtatgcaggttatacctccrtttttaaaatgatgttctttgcaagtcttgtattagaagccaagtgaatctttttttttcctttgctacttaaacacagatgatccacaagctggcaacc

SEQ ID NO: 254187 - DNA, 201 bp, Homo sapiens
ggggagcctgctccaagaagagactgtgccagttagcaccgcccatgcctggaggggctgggatccgttctgcttttctgtcgagtttttgggatctttctaactgtttctccctcatcttccaagcatgtgtttgcaattataaactctagtaaagtgagcttcccaggggtagagaccatcaggcctcctccttggcgt

SEQ ID NO: 254188 - DNA, 201 bp, Homo sapiens
gggagcctgctccaagaagagactgtgccagttagcaccgcccatgcctggaggggctgggatccgttctgcttttctgtcgagtttttgggatctttctaactgtttctccctcatcttccaagcatgtgtttgcaattataaactctagtaaagtgagcttcccaggggtagagaccatcaggcctcctccttggcgtg

SEQ ID NO: 254189 - DNA, 201 bp, Homo sapiens
ggagcctgctccaagaagagactgtgccagttagcaccgcccatgcctggaggggctgggatccgttctgcttttctgtcgagtttttgggatctttctaactgtttctccctcatcttccaagcatgtgtttgcaattataaactctagtaaagtgagcttcccaggggtagagaccatcaggcctcctccttggcgtga

SEQ ID NO: 254190 - DNA, 201 bp, Homo sapiens
cgtttttaaaatgatgttctttgcaagtcttgtattagaagccaagtgaatctttttttttcctttgctacttaaacacagatgatccacaagctggcaayccgagctctaatcggagattacgaagatggcattcttcacgaaaatgaaaccagtcatgaggtttgttcttttcattgtaaaaactattagacattcttc

SEQ ID NO: 254191 - DNA, 201 bp, Homo sapiens
agcatagtgatcattattttaaattctcagtattaaatgagattgggtgcaattattagattaattgatttttgaaaagaaaaaccagtgggttttttttwaaaaaaaaaaaaacatctattttcatcccattactttactgagcagcccttagagtaaagacagtttgttacttttgcctgatattttcaaaaatggaaa

SEQ ID NO: 254192 - DNA, 201 bp, Homo sapiens
gcaattataaactctagtaaagtgagcttcccaggggtagagaccatcaggcctcctccttggcgtgagtcctggtcctctgagagcctccctgaaggagmacaggaagactccagcctgcctcgctaacggacggaagctgtaactaccaataacccatgttagggatcttctagtcaatgttatgatcatcaccaatta

SEQ ID NO: 254193 - DNA, 201 bp, Homo sapiens
gatttctgccttaaaaatcatggactgattttttaaaagtgaattattaaatatgttttgctgaaattaattttctttattataaaatttaccattttaaycttttttaagtgtacaatttagtgctgttagctacattcacaattctgtgcaaccatcaccatcttcaaactatttcatcagcccagagactatgtatcc

SEQ ID NO: 254194 - DNA, 201 bp, Homo sapiens
tcactccatttgttaagctgataaacaccctgtagatttggccccatcgctggtactaagacccagtcctgcatctgtgattacttgttttgttgtaaagyagtttagtgaaacggaaagggcttgatgtagtataaaagtaaggctgagtcccagcccactttgtgatttggggcaagtcaggtaacctgtctgagcctc

SEQ ID NO: 254195 - DNA, 201 bp, Homo sapiens
tatgcctattaaaatagaattagagtatgttctcactatcttataatgttatatcttcctcttaaaatgttataccttcctcttataatattataccttcyttttttcccactggattatccttagatcaccaaaattataactaatttaaggatatatttatgagtcttaacaattccagcacttaggttaactaattat

SEQ ID NO: 254196 - DNA, 201 bp, Homo sapiens
gatgatatcggtgaaggtttttgtttgtgtgtttttgtccctatgcccttccataccacactgcttttcaggtgaaaagaggctatgtattttacatgttstacattacaagaaaactcagaagaattctttttacaaaaggcccaattcaattgtatgaaaagcatctaagaagacagtataaattattgtgacagtata

SEQ ID NO: 254197 - DNA, 201 bp, Homo sapiens
aaactggaaagaagtcctcacattaagagttattcctatatatcacaatgctatagatagtgatactgtttctctgtacaaaaagtatgaggcaaaagctyatgcagagcccttgactttcccgcctctaagctagaacatctccagctccttcgctcgtgatgtgccgactctcagaaactcattctgatcctgtgcact

SEQ ID NO: 254198 - DNA, 201 bp, Homo sapiens
gcctcccaaagtgctgggattacaggcgtgagccactgcgcccggcaaactttctttcttttgagacagagtcttgttctgtcgcccaggctctagtgcastggcgcgatctcggctcattgcaacctttaccgcccccatcccccgccaggttcaagtgattctcctgcctcagccttctgagtagctggaactataggt

SEQ ID NO: 254199 - DNA, 201 bp, Homo sapiens
tatgtttaataaaaacacggtaaaggaagaatcggggctattaaaatacttaagaatgagaaagttgaaaaaagaaaaaaagacgtagattgtgtttggcmtgtcttccccccaccgtaagggattgccagtcagctggaggcctgctggttcatgtgggccagccctcgacacctcagtgaccaaacgaaatacaaccct

SEQ ID NO: 254200 - DNA, 201 bp, Homo sapiens
ggctggtctcaaacttctgggctcaagtgatccagcagccttggccttccaaagtgctgggattacaggcctgagccaccacaaccggccagaagttacatttttttttttttttttttcagagacatggtcttgctctgttgcccagagcaagaactatatattccatatattatcatatatttgacaaaattgggatca

SEQ ID NO: 254201 - DNA, 201 bp, Homo sapiens
ataaaaacacggtaaaggaagaatcggggctattaaaatacttaagaatgagaaagttgaaaaaagaaaaaaagacgtagattgtgtttggcatgtcttcyccccaccgtaagggattgccagtcagctggaggcctgctggttcatgtgggccagccctcgacacctcagtgaccaaacgaaatacaaccctcactagag

SEQ ID NO: 254202 - DNA, 201 bp, Homo sapiens
ttttagagaggaatggactgtggtctgagaggagtgacatagcttctaagagtcagatccaaagcaaacacaagtagcccatccccagagtgtgcggcccrcttctttctgcctctgccgcgtggagaccatcttccagtgcagatgctacagtcctgggtatctgagctagagattatgcagaggaggcatccagctcat

SEQ ID NO: 254203 - DNA, 201 bp, Homo sapiens
tggtctgagaggagtgacatagcttctaagagtcagatccaaagcaaacacaagtagcccatccccagagtgtgcggcccgcttctttctgcctctgccgygtggagaccatcttccagtgcagatgctacagtcctgggtatctgagctagagattatgcagaggaggcatccagctcatttcaaatgatcttttaacaa

SEQ ID NO: 254204 - DNA, 201 bp, Homo sapiens
accatcttccagtgcagatgctacagtcctgggtatctgagctagagattatgcagaggaggcatccagctcatttcaaatgatcttttaacaatttctgraacagctaaggaggccttagggacttaccatgtggacttaccatgtgttttgtaaggaatctatcatgtattttgtaaagatgtacaagaaaaaatttat

SEQ ID NO: 254205 - DNA, 201 bp, Homo sapiens
ctggcaacccgagctctaatcggagattacgaagatggcattcttcacgaaaatgaaaccagtcatgaggtttgttcttttcattgtaaaaactattagayattcttcttgagcattcttacattgatttatctgtggaaatagaaagtgaggtcagctgcgtggagaaagagactgtggtgtcagggcattcatcactgt

SEQ ID NO: 254206 - DNA, 201 bp, Homo sapiens
atctgtggaaatagaaagtgaggtcagctgcgtggagaaagagactgtggtgtcagggcattcatcactgtatctgtgacactgtgcctgggatgtggggygtgtggtaaatgtttgttgaatgaattaacaaaagagtggatgtcagtggtttctggaaaattctgtaatgttttacttatcagaaaaagcccaaggagg

SEQ ID NO: 254207 - DNA, 201 bp, Homo sapiens
ttagcttctaaaatatacacattttgctatcataaataccagggtggtggctgggtacggtggttcatgcctgtaatcccaggactttggaggggaggcgraggcaggaggattgcttgagctcaggagttccagaccagcctggggaacatggagaaaccccatctctacaaaaattggctgagcgcagtggcgtgcacc

SEQ ID NO: 254208 - DNA, 201 bp, Homo sapiens
gagacagggtttcaccatgttggccaggctggtctcgaactcctgacctcaagtgatccacccgccttggccttccaaagtgctgggatttcaggcgtgarccaccgcccccggccttactttcttacagtgcacccttttgtatattttgaattttgaaccattggcatggattgcccatgaaagaaaaataatacttta

SEQ ID NO: 254209 - DNA, 201 bp, Homo sapiens
caaagataagctgggcacggtggctcacaccagtaatgcctgcactgtgggaggccaaagggggcagatcacttgagcccaggatttcaagaccagcctgrccaacatggtaaaaccccatctctacaaaaatacaaaaattagccaggcatggtgacatgcacctatggtcccagctacttgggaggctgaggtgggagg

SEQ ID NO: 254210 - DNA, 201 bp, Homo sapiens
gacctgccaaagcccacctgactccccccatgctgtgcagaccacggcctcagcagaggggcccctcagccaggccaccaggactgcccagctgttctctsggggatgagatcttcaacaaggctgtgagtgttagtcctcaatgccatcccacaagaaggtgacagcaggccctggagacccccacagtcagttctagtg

SEQ ID NO: 254211 - DNA, 201 bp, Homo sapiens
acctgccaaagcccacctgactccccccatgctgtgcagaccacggcctcagcagaggggcccctcagccaggccaccaggactgcccagctgttctctcrgggatgagatcttcaacaaggctgtgagtgttagtcctcaatgccatcccacaagaaggtgacagcaggccctggagacccccacagtcagttctagtga

SEQ ID NO: 254212 - DNA, 201 bp, Homo sapiens
gtgaataatgctgctatgagcattggtatacaagcgtctgtttgagtctgctttcaattctggatgtatgcgcagcgtgggattgctggatcatatgctcrttctatgtttagtttttttgggaattgccatgctgtcttccatagcagctgcatcattttacattcccagcaccagtgcaccaggattccagtttttcca

SEQ ID NO: 254213 - DNA, 201 bp, Homo sapiens
tccaggaagacaggaagagccacgtcaagccccgggagtggcagctgcagttcagccctccagggctacctgagcaagcccttggcgagccaccccacccsctaagtacaaaagcagtcacacagctaaagtgggcttcttcttagggaaagatcctgctgctgtgaaaagttagatttccttcatttcactaatcatgat

SEQ ID NO: 254214 - DNA, 201 bp, Homo sapiens
agcccctgtcctaaggaaattatcaagcctggagggtggggtgctatcaactgcctgccaacatgttaccttctggcatccagaagcttccctgtgccagrtggagccaccaatgtggggaggagagcacaaagagcagagaatccacagaaaccatacctgcagggagcaaacaccatcacaccccactgctgtgaatgc

SEQ ID NO: 254215 - DNA, 201 bp, Homo sapiens
gagattggcttctagtcacatttttaccactaactagggtattgtctgtgcaaacttattagcataaatagcaccaattgctgtaaaaaagacatttcagwagcttaacataaccaaagattactttcttgtccatatcacagtcaaatattggtcaggaagaaagttccacttatgtggtcatttagagaccttgactcc

SEQ ID NO: 254216 - DNA, 201 bp, Homo sapiens
caggcagcagccctgagagaatagaggcacctctggtaacagtttctctatcatccctttaaagtatcagacttcagcctcctcttcctgggagttcatckttcctaaatctggataaggcagataagggggtctcagagaaagcctgtttgcatctgctgtttccttcaccgacataggattcctctgcagatgcaaata

SEQ ID NO: 254217 - DNA, 201 bp, Homo sapiens
tccaacgatagattaacaggggaagagacatgcagatgtcgttacgtgtgcatgagccacatgagactcaaagaagggccagatgactgaagtttcatacmgtacagaggcgggtgggattgtggggctcctgggggaggtggggacaggttgtgggagggtgaggggaggaaacacgtggtgagcaaaggctttcttgtg

SEQ ID NO: 254218 - DNA, 201 bp, Homo sapiens
gcaataaacatgatgaaagagtgaaacacataacatgttagatggtgacaggtgctaaagagaaaaatgaaagcaggaggggatagaagctgtgaaagacrggggctttgaacctgtaaacagaatggccacggaggcctccctgagaaggtgacatctgcatacagacctgaaggaaatgggggctaaactgtgtggaca

SEQ ID NO: 254219 - DNA, 201 bp, Homo sapiens
ttacttgtgtgagcctctgcacccagccagtgtttcagagctttatggtgatgagagatgcttctggatggtcctgggagcctgtgttctcctcacattcrggagtccagtggaaagctggctcagctggactgagcaagctgagaagaaacatggtcttttgtaggggatctgtcagggtggtgggagaaattataaaaa

SEQ ID NO: 254220 - DNA, 201 bp, Homo sapiens
gataatagagacaacagagagtagtggagaagacttgattctggaagaaccaacgcacacagagatgaggagctagatgagggctgggtagagagaggggraaagccacagaggggtccccaggaggaaaggccaagtcctgagagccgataggatagaaggactattctggaatcgtttccagccaacatggcacgaagg

SEQ ID NO: 254221 - DNA, 201 bp, Homo sapiens
gcaggtagagcaggcattcaccaaggcgtttgtgatcctggggtgcagctcccacccttggctgcctgggtgcttctttccacacctactgtcttgtgacrtccccttaggcacccaacacaggctgctgtctgatttagaactgagcctgttcagttgatggctcagtgcaggcctctaaaaaagcaagcctgatgtggg

SEQ ID NO: 254222 - DNA, 201 bp, Homo sapiens
gtggctcacgcctggaatcccagcactttgggaggccaaggcaggaggattgcttgcttccaggagctcaagaccagccttgaccacatagcaagaccctrtctctacaaaaaaaattaaaaattagccgagtgtggtagtgtgtgactactcaggaagctgaggtgagggggattgcttgagcccaggaggccaaggctg

SEQ ID NO: 254223 - DNA, 201 bp, Homo sapiens
aggtagagcaggcattcaccaaggcgtttgtgatcctggggtgcagctcccacccttggctgcctgggtgcttctttccacacctactgtcttgtgacatycccttaggcacccaacacaggctgctgtctgatttagaactgagcctgttcagttgatggctcagtgcaggcctctaaaaaagcaagcctgatgtgggtt

SEQ ID NO: 254224 - DNA, 201 bp, Homo sapiens
agttttcagaaaggtcagttgaagtgctgctggtggctgtagaattgatacgcaggggaagtttttgatctgtgcgctttctaagggacaattgctaagcygcactgataccttgagcccctttcctttggaacaatgtagagcccagttcatggctcccagaagtttaggtccagtaatttggctgcaggcctagagaat

SEQ ID NO: 254225 - DNA, 201 bp, Homo sapiens
agtatggtcatgagtgtggtcacctcatcagtcatttgctcagctgtgaaaaagaaattgttcagagaagagcaaagtgtttttccatgagccagaggtcrgccaaggtatgctaatgaggaggactggagacagcgcatcacagacactgataaggagcactgggcaagggcacttctcccagggcagagcccacaagga

SEQ ID NO: 254226 - DNA, 201 bp, Homo sapiens
gtttttcctatttgatattttctcattgttttgaaaaattacgcatatcctgaatatcatatattccttaaaatatgagttgattttatttatttatttatttatttatttatttatttatttttgtggagacaaagtctcactatgttgctggtctcgaactcctgggctcaagccatcctccctccttagcctcccaaa

SEQ ID NO: 254227 - DNA, 201 bp, Homo sapiens
tatgttctcactatcttataatgttatatcttcctcttaaaatgttataccttcctcttataatattataccttccttttttcccactggattatccttaratcaccaaaattataactaatttaaggatatatttatgagtcttaacaattccagcacttaggttaactaattataataagcctttgggcagtaaacaag

SEQ ID NO: 254228 - DNA, 201 bp, Homo sapiens
ttctctcccaggtgctgctgggctaggataaaatgagatctgaattacattaaaataattaagtattccaagagaagaggtgacagaatgttttaagtggstgtgtaatttagataacctagatgcagataagctgaatgaagcatttaatccagcacattcgtattttaacttgatcatcagcaatgggagtttgaaacc

SEQ ID NO: 254229 - DNA, 201 bp, Homo sapiens
tttttcctatttgatattttctcattgttttgaaaaattacgcatatcctgaatatcatatattccttaaaatatgagttgattttatttatttatttatttatttatttatttatttatttttgtggagacaaagtctcactatgttgctggtctcgaactcctgggctcaagccatcctccctccttagcctcccaaag

SEQ ID NO: 254230 - DNA, 201 bp, Homo sapiens
caaacatgtatattgcccttatgttgtgccaggcagtgctcaaagcactttcttcccagagagagatgaattctactgttctcccaaatctttgttagctwctaaaatatacacattttgctatcataaataccagggtggtggctgggtacggtggttcatgcctgtaatcccaggactttggaggggaggcgaaggcag

SEQ ID NO: 254231 - DNA, 201 bp, Homo sapiens
gcttgatgtagtataaaagtaaggctgagtcccagcccactttgtgatttggggcaagtcaggtaacctgtctgagcctcagcttcctcatccatatagtrgagataatgatagtgtctacttcacagagtgggtttggggtttaaacaggataatcacagctgcccagtttccctacttgagacagtgcacccaaaagcc

SEQ ID NO: 254232 - DNA, 201 bp, Homo sapiens
atgtgttttcttctgtctttccttggtgagggagtttctcaaccaaaacacagatttatctattatatatgacctcaatatgcctggaatactatttcatmttcaacatccttgataatatttaaatctgcccttgggccagacatggtggcttatgcctgtaatcccagctctttgggatgccagggcaggaggatcact

SEQ ID NO: 254233 - DNA, 201 bp, Homo sapiens
ttttcctatttgatattttctcattgttttgaaaaattacgcatatcctgaatatcatatattccttaaaatatgagttgattttatttatttatttatttatttatttatttatttatttttgtggagacaaagtctcactatgttgctggtctcgaactcctgggctcaagccatcctccctccttagcctcccaaagt

SEQ ID NO: 254234 - DNA, 201 bp, Homo sapiens
gtcagcgcaggagggaaacctggcgacctgggagaggggaattgctggagctacttccttctctacacccttctctatgttttattgcataaataggaaayattgttgaaaagactttccgggtaaactgttctgaattttacttttatcaaaaagactcaatttagaactttcttatgcccttatttatttaacatttct

SEQ ID NO: 254235 - DNA, 201 bp, Homo sapiens
attatccatgttatttttctgtaagcgtgtgcttttctttcttcctctacgtagagtctcaagctgatttttttctctgacttgtttttatatctctgtayccaactttgtcttttatcctcttcttcatttctcttttatcgtcccttcttctgaatttgttttttaaatgacgctgatacacattaggtatttcatcag

SEQ ID NO: 254236 - DNA, 201 bp, Homo sapiens
tttcctatttgatattttctcattgttttgaaaaattacgcatatcctgaatatcatatattccttaaaatatgagttgattttatttatttatttatttatttatttatttatttatttttgtggagacaaagtctcactatgttgctggtctcgaactcctgggctcaagccatcctccctccttagcctcccaaagtg

SEQ ID NO: 254237 - DNA, 201 bp, Homo sapiens
atgtgatggggcaggcagatgatggggggtgcagggaaggtagttttaaagtgcatgtttaatataacaattttgtacttagaaaaaactgtcattttcaygtttcagactacatcagggtacatttttatgttaaacaaaaggaatcatgctggagatctactgtacaatacacggcctatgattgacaatccgatatgg

SEQ ID NO: 254238 - DNA, 201 bp, Homo sapiens
agattatttataggtgattccccaactgggaaagtcatttctgaatttcttctcttctaaaatagatctagaaaaattaacaaactttattccagtaagaragtttgggatgtactgcttcagcccctgtcctaaggaaattatcaagcctggagggtggggtgctatcaactgcctgccaacatgttaccttctggcatc

SEQ ID NO: 254239 - DNA, 201 bp, Homo sapiens
tacttagaaaaaactgtcattttcacgtttcagactacatcagggtacatttttatgttaaacaaaaggaatcatgctggagatctactgtacaatacacsgcctatgattgacaatccgatatggtatactgaagcatttgctaagaggtctatcttatgttaagtactctttccacaaaagggaacaaaacaaaacaaa

SEQ ID NO: 254240 - DNA, 201 bp, Homo sapiens
cttttattttcttctttgtgtctgtctacttgtgtctacttgtattttctaattttctcatagtgcacatgtattgtttttagatttttgttttttttgaracagggtctcactctgttgcccaggctggagtgcagtggcaccatcatagttcactgcagcctcgacctcctgggctctagagattctcctacctcggac

SEQ ID NO: 254241 - DNA, 201 bp, Homo sapiens
tccacaaaagggaacaaaacaaaacaaaaggggtggaagaaaagttctgggagtggtggctaagttcatggcattgataagtgatggtttgatggtttcaygggtgtatacttatctccaaacacatcaagttgtatacattaaatattggtgactttttgtatgccaatcatatttcaataaagtggggtttttttaaag

SEQ ID NO: 254242 - DNA, 201 bp, Homo sapiens; identical to SEQ ID NO: 50457

SEQ ID NO: 254243 - DNA, 201 bp, Homo sapiens
ggtggaagaaaagttctgggagtggtggctaagttcatggcattgataagtgatggtttgatggtttcacgggtgtatacttatctccaaacacatcaagytgtatacattaaatattggtgactttttgtatgccaatcatatttcaataaagtggggtttttttaaagagggaatcatgctatttaaaagtttgagaaa

SEQ ID NO: 254244 - DNA, 201 bp, Homo sapiens
ggattacaggagtgagccaccatgcctggactgtttatagagatttttgaagttattttcaaaattagttataaattaatttaggttttaatacagtgtgstgataaattatttcatactaaatttgcaaatactttggatctgaatacttccagatccaaacatatcagatgaaaaatattatccattagcttgatgact

SEQ ID NO: 254245 - DNA, 201 bp, Homo sapiens
attacaggagtgagccaccatgcctggactgtttatagagatttttgaagttattttcaaaattagttataaattaatttaggttttaatacagtgtggtrataaattatttcatactaaatttgcaaatactttggatctgaatacttccagatccaaacatatcagatgaaaaatattatccattagcttgatgacttg

SEQ ID NO: 254246 - DNA, 201 bp, Homo sapiens
taggttttaatacagtgtggtgataaattatttcatactaaatttgcaaatactttggatctgaatacttccagatccaaacatatcagatgaaaaatatyatccattagcttgatgacttgaaagtttatatttatgttagctgcaataaattttttgaatggaccatgtaatttagcaaaaatgtcaagcctctgttac

SEQ ID NO: 254247 - DNA, 201 bp, Homo sapiens
ttgccatgctgtcttccatagcagctgcatcattttacattcccagcaccagtgcaccaggattccagtttttccacatcctcaccaacactcatcattcyggttttttccatattgattgaaatcaatcagcttttctttggtttgttttggtttttgagacacagtgtcgctcggtcatctaggctggagtgcagtggt

SEQ ID NO: 254248 - DNA, 201 bp, Homo sapiens
caatcagcttttctttggtttgttttggtttttgagacacagtgtcgctcggtcatctaggctggagtgcagtggtgcaatcatagctcaccacagcctcracttcctgagcccaagcaatcctcccacctcagcctccagagtagctggaactacaggtatatgccaccactttttttcctattgttttttatttgtctg

SEQ ID NO: 254249 - DNA, 201 bp, Homo sapiens
taaattttttgaatggaccatgtaatttagcaaaaatgtcaagcctctgttactctccctcggtatctgttttaccaaaatgtggcacctgccgcattccrcacggagtcattccactgaattcagtaacaagccagccgcaatagagcccggacatccgggtctgtttggtccttcccgactcgctgaagcttggggcat

SEQ ID NO: 254250 - DNA, 201 bp, Homo sapiens
tatatgccaccactttttttcctattgttttttatttgtctgtttggtttttgtttgctgttggtgttttttgagacagcgtatcactttgtcacccaggstggaatggagtagcgcaatcttggctcactgcagccctgacatccgggtctcaagccatcctcctgcctcagccctccaagtaggtgggactacaggccc

SEQ ID NO: 254251 - DNA, 201 bp, Homo sapiens
aatcttggctcactgcagccctgacatccgggtctcaagccatcctcctgcctcagccctccaagtaggtgggactacaggcccacaccaccacacccagmtaattttttgtagagacagcatttcaccatggacccaggctggtctggaatcccaagctcaagcaatctgcctgccttggcctcccaaactgctgggatt

SEQ ID NO: 254252 - DNA, 201 bp, Homo sapiens
ccaccaatttagatgggacctacaattcaatatttagtctgaaatacgaatcttaaaatgatttactgacatagctaaatagaaataaaacaggacatgayttatgttttattctatcctagatgaagaaacaaaccttgaaatctctgattattaaactcagtaaagaaaactctctcataatacaatttacaagctttg

SEQ ID NO: 254253 - DNA, 201 bp, Homo sapiens
tgagccactctgcccagccaccacttgttttttaataacagccatcccactgggtgtgaaatgggatctcactgtggttctgatttgcacttccctaatgrctaatgacatcaagcatctttgcatgcacttgctggcttttgtgtatcttctttggagaaatatcaagtactggaatctactcataccaaggctgcatat

SEQ ID NO: 254254 - DNA, 201 bp, Homo sapiens
tttaaaattctagctgggcgtggtggctcatgcctataaccccagcactttgggaggctgaggcgggtggatcacctgaggtcaggagttcaagaccagcytgggcaacatggtgaaaccccatctctactagaaatacaaaaattagccaggtgtggtggcacatgcctttagtcccagctacttgggaggctgaggcag

SEQ ID NO: 254255 - DNA, 201 bp, Homo sapiens
tagctgggcgtggtggctcatgcctataaccccagcactttgggaggctgaggcgggtggatcacctgaggtcaggagttcaagaccagcctgggcaacayggtgaaaccccatctctactagaaatacaaaaattagccaggtgtggtggcacatgcctttagtcccagctacttgggaggctgaggcaggaaaatcact

SEQ ID NO: 254256 - DNA, 201 bp, Homo sapiens
ttgcactccagcctgggtgacaagagcgaaactccgtctcaaaaaaaaaaaaaaaaaaaagaagagtgtgatatatttacaatttccctggaagtaagctyacctagcagatggtccaaacataaagaagggaggcatttctgccaggtcttgtgcgggcccagctcctgtgcttttaggtgattagctttagcagggatg

SEQ ID NO: 254257 - DNA, 201 bp, Homo sapiens
agagagtttgggatgtactgcttcagcccctgtcctaaggaaattatcaagcctggagggtggggtgctatcaactgcctgccaacatgttaccttctggmatccagaagcttccctgtgccagatggagccaccaatgtggggaggagagcacaaagagcagagaatccacagaaaccatacctgcagggagcaaacacc

SEQ ID NO: 254258 - DNA, 201 bp, Homo sapiens
ccctgtcctaaggaaattatcaagcctggagggtggggtgctatcaactgcctgccaacatgttaccttctggcatccagaagcttccctgtgccagatgkagccaccaatgtggggaggagagcacaaagagcagagaatccacagaaaccatacctgcagggagcaaacaccatcacaccccactgctgtgaatgcaaa

SEQ ID NO: 254259 - DNA, 201 bp, Homo sapiens
atgcctgtaatcccagctctttgggatgccagggcaggaggatcacttgagcccaggagtttaagaccagtctaggcaacatagcaagaccccatctctayaaaaaattttaaaaattagctgtgcatggtggcgctaatagaacccatagttccagctactagggaggctgaggcaggaggatcacttgagtccaggaat

SEQ ID NO: 254260 - DNA, 201 bp, Homo sapiens
atggagccaccaatgtggggaggagagcacaaagagcagagaatccacagaaaccatacctgcagggagcaaacaccatcacaccccactgctgtgaatgsaaatgcatttacctgttcttaccatctccctcagcatgttgaatctattctgggattagacaagctcccagacttacctgctatgtttaataaaaacacg

SEQ ID NO: 254261 - DNA, 201 bp, Homo sapiens
aagttgttctgaaacagaaagtcatgagctatgagaagtacttctagacagctgctttttacaaataaaatgtgatacaacagacaacagtatcccgtgcyttctggaggtaatagaggaggatgagatagtgtgcacacagcactggcaggatgctgtgccttggactgaactcttcagtctacagacagaggtatgtgt

SEQ ID NO: 254262 - DNA, 201 bp, Homo sapiens
cactctttagagtaagatagcatagctgagagtctctacaaggtgtcatttttaatgttcagtatggaatgaaaatttaataacatatgaagaagcaggayatgacttgtgatcaaagggaaaatgggctacaaatgctgacccacagatgacccagatgttagaattagcagacacagactttaaagctgctattaaaaa

SEQ ID NO: 254263 - DNA, 201 bp, Homo sapiens
ttacagttcaagtggcaccaaattagagagactttatgaatatctttccattgaagccataaaagggtcataaggatcatatctcatgatcaaggactatrccccaggacaaaaggataaaccaaaatagacccatcctaataaagcctaaaacaaagcctacacaggacccaccagaacaaaactgaacactctttagag

SEQ ID NO: 254264 - DNA, 201 bp, Homo sapiens
atcgctggtactaagacccagtcctgcatctgtgattacttgttttgttgtaaagtagtttagtgaaacggaaagggcttgatgtagtataaaagtaaggstgagtcccagcccactttgtgatttggggcaagtcaggtaacctgtctgagcctcagcttcctcatccatatagtagagataatgatagtgtctacttca

SEQ ID NO: 254265 - DNA, 201 bp, Homo sapiens
acacacacacacacacacacaaaagagaaaactgttataaaaagggggacacagtaaaacctctcccacctacccagggtctcctctgtggctccttatgraataaattccacatgggaaaaaagagaaaataacacacacaaaaatcaagacagtgatcaaattacctctgggtgggagagaaggtgagctgtggggcag

SEQ ID NO: 254266 - DNA, 201 bp, Homo sapiens
aggccaaggcaggtagatcacttgaggccaggagttcgagaccatcctggccaatgtgatgaaacccgatctctactaaaaatacaaaaattagctgtgcrtggtggtatgcacctgtagtcccagctactcaggagtttgaggcagagagatttctcaagtccaggagtttgagattagcctgggcaacacagcaaggcc

SEQ ID NO: 254267 - DNA, 201 bp, Homo sapiens
tctcccaggtgctgctgggctaggataaaatgagatctgaattacattaaaataattaagtattccaagagaagaggtgacagaatgttttaagtgggtgygtaatttagataacctagatgcagataagctgaatgaagcatttaatccagcacattcgtattttaacttgatcatcagcaatgggagtttgaaacccga

SEQ ID NO: 254268 - DNA, 201 bp, Homo sapiens
caagagaagaggtgacagaatgttttaagtgggtgtgtaatttagataacctagatgcagataagctgaatgaagcatttaatccagcacattcgtatttyaacttgatcatcagcaatgggagtttgaaacccgattgcagctgcaggtcccacacaactgaattcggttccttgtgcatagtagtgttcactggagatg

SEQ ID NO: 254269 - DNA, 201 bp, Homo sapiens
aggatgagacagcagctgaagagaagtggggttgtgttttctttctccttttaaggtgcaagaaacaacagcatatgtgggagtcagcgcaggagggaaamctggcgacctgggagaggggaattgctggagctacttccttctctacacccttctctatgttttattgcataaataggaaatattgttgaaaagactttc

SEQ ID NO: 254270 - DNA, 201 bp, Homo sapiens
agcatttaatccagcacattcgtattttaacttgatcatcagcaatgggagtttgaaacccgattgcagctgcaggtcccacacaactgaattcggttccktgtgcatagtagtgttcactggagatgcctggaggtctgaaggtgtgcccttttataggcaggaattccaccaggatgggtatagcttgttttttttaaa

SEQ ID NO: 254271 - DNA, 201 bp, Homo sapiens
tacattaaatattggtgactttttgtatgccaatcatatttcaataaagtggggtttttttaaagagggaatcatgctatttaaaagtttgagaaataccrgttcaatgctcattgctagttgacaatgcagtagggtgactatagttaacaagacattgtatatgtcaaaataactagaagaaaatatttgaaatgttgc

SEQ ID NO: 254272 - DNA, 201 bp, Homo sapiens
agggtgactatagttaacaagacattgtatatgtcaaaataactagaagaaaatatttgaaatgttgccaacacaaatacatgataaatgttcaagctgakggagatcctaaataccctgacctgattatttcacattctatgcatgtatcaaaatatcatgtgaaccccaaaatatgtacgagtattatgtatcaataaa

SEQ ID NO: 254273 - DNA, 201 bp, Homo sapiens
ttctatgcatgtatcaaaatatcatgtgaaccccaaaatatgtacgagtattatgtatcaataaaaaatgaaataaagcattgctagaagaaaaaaagtaygatttaaaaaaatctctacacatgagcctctttccacactttttataaatgccaccagatatgtagtgttcatagcatttatgaggttccaaacaatact

SEQ ID NO: 254274 - DNA, 201 bp, Homo sapiens
ccgcattccgcacggagtcattccactgaattcagtaacaagccagccgcaatagagcccggacatccgggtctgtttggtccttcccgactcgctgaagyttggggcatttccttatttgatacgtcttcattgtgaaatgagaccctccagggagcgcaacaccttttctgctgggacgcgctcaggaaggacagcgct

SEQ ID NO: 254275 - DNA, 201 bp, Homo sapiens
caatatttagtctgaaatacgaatcttaaaatgatttactgacatagctaaatagaaataaaacaggacatgacttatgttttattctatcctagatgaaraaacaaaccttgaaatctctgattattaaactcagtaaagaaaactctctcataatacaatttacaagctttgtggcagttgagaaaagggtatatatta

SEQ ID NO: 254276 - DNA, 201 bp, Homo sapiens
aattttattttagatgcagaggtacacgtacaggtttattacatgggcataccgtgtggtgctgaggtttgggcttctaattgtcttgttgcccaagtagygaaaatatgtttttcaaccttgcccctctctctcccctactacataacttcttatgtcataaaatgtcaataacataacttacctttgttttcttaattt

SEQ ID NO: 254277 - DNA, 201 bp, Homo sapiens
tagatgcagaggtacacgtacaggtttattacatgggcataccgtgtggtgctgaggtttgggcttctaattgtcttgttgcccaagtagtgaaaatatgwttttcaaccttgcccctctctctcccctactacataacttcttatgtcataaaatgtcaataacataacttacctttgttttcttaattttgtaggatgg

SEQ ID NO: 254278 - DNA, 201 bp, Homo sapiens
ttacatgggcataccgtgtggtgctgaggtttgggcttctaattgtcttgttgcccaagtagtgaaaatatgtttttcaaccttgcccctctctctccccyactacataacttcttatgtcataaaatgtcaataacataacttacctttgttttcttaattttgtaggatggcttctggaaacttacaccagaactggga

SEQ ID NO: 254279 - DNA, 201 bp, Homo sapiens
ggacagcgctcagtgctgggtgctcgctcccccgcgcagccacacctgggcttaggcgcagtgtcttctgcaccaaccccaagtccacttcgttccctccygctcatgaaagcacattgagaacaagcgagaggcagacatttttaaaacatacctcctaatccaagtttttaaagtaaatcatttgaaaaattcaatgct

SEQ ID NO: 254280 - DNA, 201 bp, Homo sapiens
gcattcaatctctaggtaagtcactatgtttccatttattaagtcattattttcattcattcataagcatgctcctaactgttataaactattttgtaaaytagtgtactaatgtaataattatgaaagttatatttgaatggaattgtatttaagcattaaaggaaatgggagattggcttctagtcacatttttaccac

SEQ ID NO: 254281 - DNA, 201 bp, Homo sapiens
cttagcaagaaattgagggcacggaagctaggggtccagagcccacactgttccttaaatcaggggtccccaaccctcagtccctggtctgtcaggaacckggctgcacaacagaaggtggggggcagtgagtgagcattaccacctgagctcgcctcctgtcacatcagcagtgacagtagattctcatgggagccccga

SEQ ID NO: 254282 - DNA, 201 bp, Homo sapiens
accagcctggccaacatggcaaaaccctgtctctactaaaaaatacaaaaatactatccaagaagcaatttcataaaataacccatatttctcagtatgattttttttttttttttttttgagatggagtctcactgtcacccaggctggggtgcagtgactattcacaggctctatcacagaccactacagctttgaact

SEQ ID NO: 254283 - DNA, 201 bp, Homo sapiens
aaaactctctcataatacaatttacaagctttgtggcagttgagaaaagggtatatattattgttaattttaggttaaattattttatttatatttccacrttaagaaagtcacccttgctttggtggttaatgacaacacccacaccctgggcctgggaagcgtgggttgcagacaggccagtaggccccacaagtccca

SEQ ID NO: 254284 - DNA, 201 bp, Homo sapiens
ccagcctggccaacatggcaaaaccctgtctctactaaaaaatacaaaaatactatccaagaagcaatttcataaaataacccatatttctcagtatgattttttttttttttttttttgagatggagtctcactgtcacccaggctggggtgcagtgactattcacaggctctatcacagaccactacagctttgaactc

SEQ ID NO: 254285 - DNA, 201 bp, Homo sapiens
caagctttgtggcagttgagaaaagggtatatattattgttaattttaggttaaattattttatttatatttccacgttaagaaagtcacccttgctttgrtggttaatgacaacacccacaccctgggcctgggaagcgtgggttgcagacaggccagtaggccccacaagtcccaacctcccattcatggggggcttcg

SEQ ID NO: 254286 - DNA, 201 bp, Homo sapiens
gttagcttctaaaatatacacattttgctatcataaataccagggtggtggctgggtacggtggttcatgcctgtaatcccaggactttggaggggaggcsaaggcaggaggattgcttgagctcaggagttccagaccagcctggggaacatggagaaaccccatctctacaaaaattggctgagcgcagtggcgtgcac

SEQ ID NO: 254287 - DNA, 201 bp, Homo sapiens
tcctggggtccccgttcatcttgtcaatttcaattcctctgctccagcagagcttcttcattcacgtcttcaaagtccctgtgttcagatgccacgtgtcygacatccttggagtccctgttctgggtcgccacttgtcacctgcacagaccttgggggactgaacaaagggggcaaacatgggaataaaagacaaagaca

SEQ ID NO: 254288 - DNA, 201 bp, Homo sapiens
acaaacactgcttccaccttctcccccaggctgacaacttagggccatagataagtggcctgttcctccccactggggaagccctccttctccttgtcctrtagcttgtgccagttgtgtgacacccacttaatcacataccaccccacccatttcgggggattattgtttagctttcggactcgattatgggaaatcctc

SEQ ID NO: 254289 - DNA, 201 bp, Homo sapiens; identical to SEQ ID NO: 50548

SEQ ID NO: 254290 - DNA, 201 bp, Homo sapiens
caccacccaacccccacccgtttcttactttgttaaagtccacatagtccagtagctgtgataacactgccaattcatctctgcctccccatcctacttamaaatgttgacactgttttttaggttgggatttttgtcaggattttctttttttcctaaactcttacacaacagaactgtaatgtttttatggatcttctg

SEQ ID NO: 254291 - DNA, 201 bp, Homo sapiens; identical to SEQ ID NO: 50550

SEQ ID NO: 254292 - DNA, 201 bp, Homo sapiens
gggatggtggagcctcgttggtttttataaaaacgttgcctttttctaactcaggtgagagccactggctggcttggcttttaatgcccgcccccgcccccccaacccacgctccttctggctactgtgtggacaatgggcttttgggggcaaaggcagaaacaggacactggttgtatcccaggtgtgtggagtgccagc

SEQ ID NO: 254293 - DNA, 201 bp, Homo sapiens
tgctcactaagtgtcagaggtttacctcacgccagttgtgttcatttggctgcaggtaactgaagacccaacctaaggcaaagcagacttctttatttttktaagacttcattaagagcagtttcagattctcagcaaaattgagaggcatgtacagagatttcccatatatcccctggtcccacacatgcatagcctcct

SEQ ID NO: 254294 - DNA, 201 bp, Homo sapiens
gtgtacttgtgcggtcatagctcactgcaacctcaaacctctgggctcaagtgatcttcccacttgatccactcaagtagctaggaccatgtctggctaawttttttttttttttttttttaattttttgcagaaacaggattggggacatgagtcttgctgtgttgcccaggctggttgcaaactcatgccagtctcaaa

SEQ ID NO: 254295 - DNA, 201 bp, Homo sapiens
atgagccaccgtgcccagcctttaattaccaatttttaaaatgaaaaatgaatgttaactgatggggtattgccattcccagtgggggcaagtgacttttyccccctctatttgctttgactgtactgtgggctgaaattttttgtcagggccttaagatcaatgatacccattattctttttgatgctaatatcatccta

SEQ ID NO: 254296 - DNA, 201 bp, Homo sapiens
gcaaacagctaaaccattagaccttgagccatacgcccatctgggaatgttctgagtggcttcaaatgcaaagctgcagaaaaatactggctccccctacytccacccattcaaccattacacctttttttttttttttaagagacagagtctcgttctgttgcccagtctggagtgtacttgtgcggtcatagctcactg

SEQ ID NO: 254297 - DNA, 201 bp, Homo sapiens
ggcaagctctgattggtgactgacagtggtaagtaaaactagtattaggttatggcgggttgtttcagcagttactagctgaatctggtctcagggggacrgcaggccatttccgcagcagttagtggaaatattggttcttggagcaggcgctgcgtgcctccagtgcttttcccctggcccctggattctgattccgtt

SEQ ID NO: 254298 - DNA, 201 bp, Homo sapiens; identical to SEQ ID NO: 50552

SEQ ID NO: 254299 - DNA, 201 bp, Homo sapiens
atgtgtcccactcccacgtctgcccctcatgctcgcccatgttctggtgctgccaacaggactggaccccagcatgtaggcagtgccgcacttcaccatgyctctttgtgaaatatccccacacagcatgtctggagccttttcctatgagaacagatggtcatgagacccagaacaccatcagggtttccagtgcctctt

SEQ ID NO: 254300 - DNA, 201 bp, Homo sapiens
gctgtcttgaggcacacaggctgtaactgttgggcagggctgcaacaagtccctttgccttcccacagcagatgttttttgagcaacagcagcaagccagrctctagggacatggctagtgaactaaatagacaaagacctgatctggtggggctttgcttatgatgaggagactgatagtatggccatggagcacatcag

SEQ ID NO: 254301 - DNA, 201 bp, Homo sapiens
cacagcagatgttttttgagcaacagcagcaagccaggctctagggacatggctagtgaactaaatagacaaagacctgatctggtggggctttgcttatsatgaggagactgatagtatggccatggagcacatcaggtagtaagaagcgctggagagattaaagcagagtgagggatgggaagggaagttggctgcttt

SEQ ID NO: 254302 - DNA, 201 bp, Homo sapiens
gtggattgtgtgaaagggtatgtggcaggagatgaggggatggtggagcctcgttggtttttataaaaacgttgcctttttctaactcaggtgagagccaytggctggcttggcttttaatgcccgcccccgcccccccaacccacgctccttctggctactgtgtggacaatgggcttttgggggcaaaggcagaaacag

SEQ ID NO: 254303 - DNA, 201 bp, Homo sapiens
gatggtggagcctcgttggtttttataaaaacgttgcctttttctaactcaggtgagagccactggctggcttggcttttaatgcccgcccccgcccccccaacccacgctccttctggctactgtgtggacaatgggcttttgggggcaaaggcagaaacaggacactggttgtatcccaggtgtgtggagtgccagctc

SEQ ID NO: 254304 - DNA, 201 bp, Homo sapiens
ccagctcaggcagtgggcagaagtggtgccaggtggacagtgatccccaaagagcatgtgggttcttcgctgtgttctgatcttgaccctgccatacaacrggctatgagagcttgaacaaattgtcccacagttcccagcttccacatgctgtctataaaatgggagtaacgatgcctgctgtgaagcaaatgcctatcg

SEQ ID NO: 254305 - DNA, 201 bp, Homo sapiens
ctcaaactcctggcctcaagtgattctcctgccttggccttccaaagcactgggattacaggcatgagcctcctccgcagctggcctcattgtactttttstcattaagaaactcacctgcgtgttgaaagtagaaatccttttccctctccaaactgtaaatggcaaggactttattttattttgaaggtttggggctta

SEQ ID NO: 254306 - DNA, 201 bp, Homo sapiens
ggatggtggagcctcgttggtttttataaaaacgttgcctttttctaactcaggtgagagccactggctggcttggcttttaatgcccgcccccgcccccccaacccacgctccttctggctactgtgtggacaatgggcttttgggggcaaaggcagaaacaggacactggttgtatcccaggtgtgtggagtgccagct

SEQ ID NO: 254307 - DNA, 201 bp, Homo sapiens
aaggtatatggcactctgcccttccccaaagcagagtgccttggaagtgactccatttctattgggttattagtgaaatagtatcccagtggtccttgtgmatctccaggtcctggtcttgagtcttaaccaccgcttcagtggcttgagccaaccaccaggaacacagtctggggatactttgctgcccaggagctgctg

SEQ ID NO: 254308 - DNA, 201 bp, Homo sapiens
ataaccttccctccccctcctccttcccctttctcaaccttcccaccctttcctctgttccccctcctcctccctcttttttcccactccctctcctcctyttcctcctcctgggtagtaggctgtgggcagttctggccaagttgctcacgaataagctccacctttctcttccaaatcatggaaacatggagggatccc

SEQ ID NO: 254309 - DNA, 201 bp, Homo sapiens
gctggccaggtctccctctgctgattccttgaaaagcaacaggaaagagcaggctgctgtggagtagacagacttgagactctctgcaccgtcttgttttktaaacccttttgctccctttccaaggatttcagttcaggaggagacccaggcgaagatgacgtcaacagcctctgcatgcagtcagtcatagctttggct

SEQ ID NO: 254310 - DNA, 201 bp, Homo sapiens
agagcagtttcagattctcagcaaaattgagaggcatgtacagagatttcccatatatcccctggtcccacacatgcatagcctcctgttatcaacacccyccactagaatggtacgtgtgttgcaattgacgaacctgcattgacacatcatgatcacccaaagtccatagtttacattagggttcactcttggtggtgt

SEQ ID NO: 254311 - DNA, 201 bp, Homo sapiens
atctcagtttcctggcttttcctccctcagccccttctcacccctttgctgtcctgtgtagtgatttggtgagaaatcgttgctgcacccttcccccagcmccatttatgagtctcaagttttattattgcaataaaagtgctttatgccggcttttctcagctctgtgtcatggtggttattttcaggtgcctcccctgc

SEQ ID NO: 254312 - DNA, 201 bp, Homo sapiens; identical to SEQ ID NO: 50553

SEQ ID NO: 254313 - DNA, 201 bp, Homo sapiens
gctccctctgctgatctcagtttcctggcttttcctccctcagccccttctcacccctttgctgtcctgtgtagtgatttggtgagaaatcgttgctgcayccttcccccagcaccatttatgagtctcaagttttattattgcaataaaagtgctttatgccggcttttctcagctctgtgtcatggtggttattttcag

SEQ ID NO: 254314 - DNA, 201 bp, Homo sapiens; identical to SEQ ID NO: 50554

SEQ ID NO: 254315 - DNA, 201 bp, Homo sapiens
ctctgagaaggagagtttgagtaaggtgaacactcttgatccagtcagctcttgccaggtgtccactcagctgatttgggcacgggtccagagaaagaggsgtggaagtaaggtggccaaaatctccccttagccatcacaggtgtgcagagcacagactgacctttaccacatggatgctttaaatgccactaatggctg

SEQ ID NO: 254316 - DNA, 201 bp, Homo sapiens
tgttaaatctttggcctctggacaataagagtaaaacatgatatcagtggttttaatttgtatttatctattacccatattgtgtgagaccacttctgagwcgtcatacttatggagaaagtcatttcgtttgtcttgagtgtgtttcctaatctctttcctccccatttgtggaaacagcttttgttctgccaacactac

SEQ ID NO: 254317 - DNA, 201 bp, Homo sapiens
gttctttttattgccgttggatcctgcatattcttcccatcatgggccctgcctttgaaaatacacttttggttataggatctaaagggatttagccaaasgttagaagcatttccatactgcgtatgggaaatgtgcttgcactgttggtgatctcaggaaaatgatagtgagagtgagctggttccctctttgggttgg

SEQ ID NO: 254318 - DNA, 201 bp, Homo sapiens
acattttcacatttttcttactgattagtaactaaaggtgcttaaagtaaagtttaccattctgggattacccctcatattcttgttaccatatagggaakaaggtctaaatatgaaggcctcatgcttgtccttctggttcttaaaaatcatgcaagtaaagcaaatccaagagtgctcttgagtaccagcaccatacgt

SEQ ID NO: 254319 - DNA, 201 bp, Homo sapiens
ctgcacacaaagaacactgagttgctggaaactcacagattttctgtccccaacagatctgccatggagggatctggtgcctccagacatgtgcacatgartccatatggagcttttcctgatgttccactccactttgtatagacatctgccctgactgaatgtgttctgtcactcagctttgcttccgacacctctgtt

SEQ ID NO: 254320 - DNA, 201 bp, Homo sapiens
cagttcctgccagactcttcagcactggcatctctgatgagtgctctgctgctggtttctgacttgtcttgtgtcattactctgctgctcatgttacagtsgtctttttcacagggatgcttgaagatggaaagaaatttgattcctcccgggacagaaacaagccctttaagtttatgctaggcaagcaggaggtgatcc

SEQ ID NO: 254321 - DNA, 201 bp, Homo sapiens
tcacagcaaacttgagctgggttggaatggggcaggacctgtcgggagggacacagatgagcaatggatttggaagggacagaatttctgggcggaagccmgcaggtgggcccaaagggcacctggcctgagctccatcctgtgctcagggggtagacgagggccccaatgggctgaagctcatctcggaagtgattgggg

SEQ ID NO: 254322 - DNA, 201 bp, Homo sapiens
aactcctgccactgttccctcctcctgtactttcctgtgctccccctcccaccaggggctcagccatcgccaagatcgtgggtggcaatgcagcccagctsgcacagtttgacccacgggtgaccatgtgggtatttgaggaagacattggaggcaaaaagctgactgagatcatcaacacgcagcatgagaatgtcaaat

SEQ ID NO: 254323 - DNA, 201 bp, Homo sapiens
aagctgagcctttccctctccaatctaggtttcccttgttcatggctgtgtacaaggtgtgctacgagggccagccagtgggtgaattcattcactgcctrcagaatcatccagaacatatgtgagtggggccagggcccaggccaggccgcttttttaccccagtggagaccagcagaagcctggggtacctagtcacca

SEQ ID NO: 254324 - DNA, 201 bp, Homo sapiens
tcccgggcatttgggtgggggaatcttgcctttccctttcagagccccagggatctcatctggggaactgtcattgccagcagaggctgttccttcctgcwgtttggagatgtgactcattcattcactcactccaccctgcctctgcatcccttaatggagaaacgggcctaaaaccaaacgggtaaaaagccctgggcc

SEQ ID NO: 254325 - DNA, 201 bp, Homo sapiens
gatcgtgggtggcaatgcagcccagctggcacagtttgacccacgggtgaccatgtgggtatttgaggaagacattggaggcaaaaagctgactgagatcrtcaacacgcagcatgagaatgtcaaatacctgccagggcacaagttgcccccaaatgtggtgagccccaacaccctgcgaagaacagggagaggaaggga

SEQ ID NO: 254326 - DNA, 201 bp, Homo sapiens
gacacagatgagcaatggatttggaagggacagaatttctgggcggaagcccgcaggtgggcccaaagggcacctggcctgagctccatcctgtgctcagrgggtagacgagggccccaatgggctgaagctcatctcggaagtgattggggagcgcctcggcatccccatgagtgtgctgatgggggccaacattgccag

SEQ ID NO: 254327 - DNA, 201 bp, Homo sapiens
cccgccctcctgggcagctgcacctgttcaccatgggaaggcgtctccagagctctctatgtgaagagccgcttgagtttgggggtgggaagatgagaagkggggctcccttctctagtagcaaagggtgaggagactgagtctcctttctactgccaggtcactggggactatttgtcatgggagtggaggtgataagga

SEQ ID NO: 254328 - DNA, 201 bp, Homo sapiens
gagcaatggatttggaagggacagaatttctgggcggaagcccgcaggtgggcccaaagggcacctggcctgagctccatcctgtgctcagggggtagacragggccccaatgggctgaagctcatctcggaagtgattggggagcgcctcggcatccccatgagtgtgctgatgggggccaacattgccagcgaggtggc

SEQ ID NO: 254329 - DNA, 201 bp, Homo sapiens
ccttggagaagtagactggttgagggtatgtggcaggacagttggtcacatgctgtctggcctcctcacagcaaacttgagctgggttggaatggggcagracctgtcgggagggacacagatgagcaatggatttggaagggacagaatttctgggcggaagcccgcaggtgggcccaaagggcacctggcctgagctcc

SEQ ID NO: 254330 - DNA, 201 bp, Homo sapiens
tatctaaaatgattgtaggggcaaaatgagagagggaagcatttaggcaaaaacaagggggttattttatgcataaacatccattctttggggctcccatmatttgtgccagggacagaagcatcctttctcttccatcacccgtaatcagtgctcccagctggcagcctggcactggagccttcatctcagtgccagtgc

SEQ ID NO: 254331 - DNA, 201 bp, Homo sapiens
ggtgaccatgtgggtatttgaggaagacattggaggcaaaaagctgactgagatcatcaacacgcagcatgagaatgtcaaatacctgccagggcacaagytgcccccaaatgtggtgagccccaacaccctgcgaagaacagggagaggaagggagggccaggagttggagccgaccttactcaacaggtgcctcctgct

SEQ ID NO: 254332 - DNA, 201 bp, Homo sapiens
ttggtcacatgctgtctggcctcctcacagcaaacttgagctgggttggaatggggcaggacctgtcgggagggacacagatgagcaatggatttggaagrgacagaatttctgggcggaagcccgcaggtgggcccaaagggcacctggcctgagctccatcctgtgctcagggggtagacgagggccccaatgggctga

SEQ ID NO: 254333 - DNA, 201 bp, Homo sapiens
ggcctcctcacagcaaacttgagctgggttggaatggggcaggacctgtcgggagggacacagatgagcaatggatttggaagggacagaatttctgggcrgaagcccgcaggtgggcccaaagggcacctggcctgagctccatcctgtgctcagggggtagacgagggccccaatgggctgaagctcatctcggaagtg

SEQ ID NO: 254334 - DNA, 201 bp, Homo sapiens
cagtggcacacctgtggtcccagctacttaagaggctgaggtgggaggatcgcttaagcccaggagtttgagtccagcctgggcaacagagagagactccyatctctataaaataaatattttttaaaaagagtccttccctcaaagccttgccccctcctcactttaggctgcaaggacccggcccagggacaactcctg

SEQ ID NO: 254335 - DNA, 201 bp, Homo sapiens
caggcgtggtggcgggtgcctgtaatcccagctacccgggaggctgaggcaggagaatcgcttgaacctgggaggtagaggctgcagtgagccgagattgygccactgcactcccagcctggctgacagagtgagactccatctcaaaaaaaaaaaaaaaaaaaaagacattattagactgaccaggaccaataagatgat

SEQ ID NO: 254336 - DNA, 201 bp, Homo sapiens
ctcactttaggctgcaaggacccggcccagggacaactcctgaaagagctgatgcagacaccaaacttccgtatcacagtggtgcaagaggtggacacagyagagatctgtggagccttaaaggtgagaggggcacagaggcagctatggggtgaggagaaggccccaaaggaggtctggctgagctctgcaaggctgcag

SEQ ID NO: 254337 - DNA, 201 bp, Homo sapiens
tgggaggctaagctgagcctttccctctccaatctaggtttcccttgttcatggctgtgtacaaggtgtgctacgagggccagccagtgggtgaattcatycactgcctgcagaatcatccagaacatatgtgagtggggccagggcccaggccaggccgcttttttaccccagtggagaccagcagaagcctggggtacc

SEQ ID NO: 254338 - DNA, 201 bp, Homo sapiens
aggagggagtatggggcagggcttaagaaagggggtgcagcaaggggggaaaccaagaggcggaagtaggcttctaaaaggccacacactatacctctctyctgcagtgggtgtcacggctgatgaaatgagtatgagggggctccacatggggcctataggagggggtcttttctcacctatgacctccactccttcaag

SEQ ID NO: 254339 - DNA, 201 bp, Homo sapiens
attctcagaaggtagaaactcacggccatccttcctgagctccaaggtgggagggcaagggacaggagggttaggcagtgagtgggggtgggggtagagtrgaccaggagtgggaggctaagctgagcctttccctctccaatctaggtttcccttgttcatggctgtgtacaaggtgtgctacgagggccagccagtggg

SEQ ID NO: 254340 - DNA, 201 bp, Homo sapiens
ctagatagtgttagagagagaacatgtagtggtaatgagtgcttggaatggattgggcctcaggccaggtggtcttcaaggggaccagctaactgatcctrcccttcagagacccaggagttgggagctttcgctccttctccaagactcaggcctgtgggcactctataagctagttgatcttggctctcctgataacag

SEQ ID NO: 254341 - DNA, 201 bp, Homo sapiens
tcatgcaggccagttcaacatggtagggagcagggcaattagcaatctgaccttaaacctagggctagggagttcacattctcagaaggtagaaactcacrgccatccttcctgagctccaaggtgggagggcaagggacaggagggttaggcagtgagtgggggtgggggtagagtggaccaggagtgggaggctaagct

SEQ ID NO: 254342 - DNA, 201 bp, Homo sapiens
tctcacctatgacctccactccttcaagaatgtagtggccgtgggggctggcttctgtgatggcctgggctttggcgacaacaccaaggcggcagtgatcyggctgggactcatggagatgatagccttcgccaagctcttctgcagtggccctgtgtcctctgccaccttcttggagagctgtggtgttgctgacctgat

SEQ ID NO: 254343 - DNA, 201 bp, Homo sapiens
cggcccagggacaactcctgaaagagctgatgcagacaccaaacttccgtatcacagtggtgcaagaggtggacacagtagagatctgtggagccttaaargtgagaggggcacagaggcagctatggggtgaggagaaggccccaaaggaggtctggctgagctctgcaaggctgcaggtactccaggctctcactattg

SEQ ID NO: 254344 - DNA, 201 bp, Homo sapiens; identical to SEQ ID NO: 50575

SEQ ID NO: 254345 - DNA, 201 bp, Homo sapiens; identical to SEQ ID NO: 50576

SEQ ID NO: 254346 - DNA, 201 bp, Homo sapiens
aatttattattgtaatgtcatgagcacttgcttgttaaaaaattccttttttgagacggagtctagctctatcacccaggctggagcgcagtggcgcaatytcagctcactgaaacctctagctcccgggttcaagcgatttctcctgcctcagcctcctgagtagctgggattacaggcacctgccaccacgcccagcta

SEQ ID NO: 254347 - DNA, 201 bp, Homo sapiens
ggcgaaaggttgccgaggcgggggctgggcgcctgggaacaaaggtgagggcgggttccgcaggtgaggaggtttgaggagccactggggagaaagggaamaggaagtctacagccggagaggacgcgctctgggggtagaaggaatcctaggacggaaaggataaggtgggaaacagttttctcccaaactctcactccc

SEQ ID NO: 254348 - DNA, 201 bp, Homo sapiens; identical to SEQ ID NO: 50577

SEQ ID NO: 254349 - DNA, 201 bp, Homo sapiens; identical to SEQ ID NO: 50578

SEQ ID NO: 254350 - DNA, 201 bp, Homo sapiens
cctggtacaaacgaacgtctggattcataaacttaacgtaaactgaaatactagaagaaacactacatgagtcaaaagtccttgtttaaaacgtggcatamagctttgaaaagcgagtgatgtatttcctgaatgatgctttgtgtgcaactgcttccaaatcaagattcatatttttaaattaccccctggaagatgtca

SEQ ID NO: 254351 - DNA, 201 bp, Homo sapiens
gataaggtgggaaacagttttctcccaaactctcactcccccaaaagagacatttctttcttgccctattttgacccagttgaaaatgcaactgcaagctycccggtgaaacaaatatcgccttcaaccttcgtattctgtggtgactcatctcgcacgtgacccccctccctcttcaaggtgtgttgaccgactacagtt

SEQ ID NO: 254352 - DNA, 201 bp, Homo sapiens
ccccatgggaaaactcacatgtgggactcggacaagctaaaaagccaaaactttgttattcatggctcaacaaagctttgacaagccaaaaaggataccasattcccgcttccttctttacctgccaaagtccattttctaaagaggtgtgggggtgggaatcaaatctagcaaagtaaataaaattgatctactgagatc

SEQ ID NO: 254353 - DNA, 201 bp, Homo sapiens
ttttctcccaaactctcactcccccaaaagagacatttctttcttgccctattttgacccagttgaaaatgcaactgcaagcttcccggtgaaacaaataycgccttcaaccttcgtattctgtggtgactcatctcgcacgtgacccccctccctcttcaaggtgtgttgaccgactacagtttaagcctgtcgtcccac

SEQ ID NO: 254354 - DNA, 201 bp, Homo sapiens; identical to SEQ ID NO: 50580

SEQ ID NO: 254355 - DNA, 201 bp, Homo sapiens
ggtgaggaggtttgaggagccactggggagaaagggaaaaggaagtctacagccggagaggacgcgctctgggggtagaaggaatcctaggacggaaaggwtaaggtgggaaacagttttctcccaaactctcactcccccaaaagagacatttctttcttgccctattttgacccagttgaaaatgcaactgcaagcttc

SEQ ID NO: 254356 - DNA, 201 bp, Homo sapiens
ctcactcccccaaaagagacatttctttcttgccctattttgacccagttgaaaatgcaactgcaagcttcccggtgaaacaaatatcgccttcaaccttygtattctgtggtgactcatctcgcacgtgacccccctccctcttcaaggtgtgttgaccgactacagtttaagcctgtcgtcccacaaaaggcccgggag

SEQ ID NO: 254357 - DNA, 201 bp, Homo sapiens; identical to SEQ ID NO: 50583

SEQ ID NO: 254358 - DNA, 201 bp, Homo sapiens
gcctggcagccggggcctgactcggggcgcagagaagaagcatggagagagaagtggggaggagacatgaatgtgtttcagttgagaggctgagaggtacrctagctatcaaggagggaagacaagttgggagaccagagttaagtatccgaactgcccacccccgttacaacagcagtgtgtaaaaatcacgccccgggc

SEQ ID NO: 254359 - DNA, 201 bp, Homo sapiens; identical to SEQ ID NO: 50584

SEQ ID NO: 254360 - DNA, 201 bp, Homo sapiens
actgcccacccccgttacaacagcagtgtgtaaaaatcacgccccgggcctctgctcctgaggacggtactcgtgcctctgtccctgtaactacggctcaycttctttctatgtgcagactgctcctaaagccactctgtgcgctgagctctttttctccctgctgcttgactcctgaaccttccattctcctagtttcct

SEQ ID NO: 254361 - DNA, 201 bp, Homo sapiens; identical to SEQ ID NO: 50586

SEQ ID NO: 254362 - DNA, 201 bp, Homo sapiens; identical to SEQ ID NO: 50585

SEQ ID NO: 254363 - DNA, 201 bp, Homo sapiens; identical to SEQ ID NO: 50587

SEQ ID NO: 254364 - DNA, 201 bp, Homo sapiens
tccgtcctccgcgccttccgtcggtcggtccttgcttcctgcttcgcctccgcgcctcgcgctatgggacagagcccccgatccgccagcaccacctgagratccagaaaccgccccagcgatggaagaggatcaggagctggagaggtaacggccgaggaggaggcgggcggagcgggccgcgcccaaggggagcgggtg

SEQ ID NO: 254365 - DNA, 201 bp, Homo sapiens; identical to SEQ ID NO: 50589

SEQ ID NO: 254366 - DNA, 201 bp, Homo sapiens
tgggacagagcccccgatccgccagcaccacctgaggatccagaaaccgccccagcgatggaagaggatcaggagctggagaggtaacggccgaggaggargcgggcggagcgggccgcgcccaaggggagcgggtggccgaggggcacgctgcctggcctggcagccggggcctgactcggggcgcagagaagaagcatg

SEQ ID NO: 254367 - DNA, 201 bp, Homo sapiens
gattcgagaggaagcgcacctgagggagcacagcgaaggccgggacgcagggagctggatggagagcgagcctgggcggcgaaaggttgccgaggcggggrctgggcgcctgggaacaaaggtgagggcgggttccgcaggtgaggaggtttgaggagccactggggagaaagggaaaaggaagtctacagccggagagga

SEQ ID NO: 254368 - DNA, 201 bp, Homo sapiens
gcttctttaaaagcatactaactagaggacaatttattattgtaatgtcatgagcacttgcttgttaaaaaattccttttttgagacggagtctagctctrtcacccaggctggagcgcagtggcgcaatctcagctcactgaaacctctagctcccgggttcaagcgatttctcctgcctcagcctcctgagtagctggg

SEQ ID NO: 254369 - DNA, 201 bp, Homo sapiens
ggagagcgagcctgggcggcgaaaggttgccgaggcgggggctgggcgcctgggaacaaaggtgagggcgggttccgcaggtgaggaggtttgaggagccwctggggagaaagggaaaaggaagtctacagccggagaggacgcgctctgggggtagaaggaatcctaggacggaaaggataaggtgggaaacagttttct

SEQ ID NO: 254370 - DNA, 201 bp, Homo sapiens
cagaaaccgccccagcgatggaagaggatcaggagctggagaggtaacggccgaggaggaggcgggcggagcgggccgcgcccaaggggagcgggtggcckaggggcacgctgcctggcctggcagccggggcctgactcggggcgcagagaagaagcatggagagagaagtggggaggagacatgaatgtgtttcagttg

SEQ ID NO: 254371 - DNA, 201 bp, Homo sapiens
tcagttgagaggctgagaggtacactagctatcaaggagggaagacaagttgggagaccagagttaagtatccgaactgcccacccccgttacaacagcartgtgtaaaaatcacgccccgggcctctgctcctgaggacggtactcgtgcctctgtccctgtaactacggctcaccttctttctatgtgcagactgctcc

SEQ ID NO: 254372 - DNA, 201 bp, Homo sapiens; identical to SEQ ID NO: 50591

SEQ ID NO: 254373 - DNA, 201 bp, Homo sapiens
tagatggacttttgggacccagcagttttgaaacgtgtttatggagtttaagaaatttattttccaggtgcagcccctgtctaactgaaatttctcttcaycttgtacatttgacagctgaaaaaaaataacatgggagtaataatcggtcaaaatttgcaaaataaagtactgttttggtgtggggaaaaagaaaaaaaa

SEQ ID NO: 254374 - DNA, 201 bp, Homo sapiens
attattatatacattgaaaaattaatctcatttagcaaaacagatccatttcctcagccagaataagaaaaaagatggctctgtaatgaagctattaaagscttttctatcagcattcaacatttaaaataagttgctttacagattgaagaaatcaaaagatggcttcaggccctcagtcatgagaagcaatccagactt

SEQ ID NO: 254375 - DNA, 201 bp, Homo sapiens; identical to SEQ ID NO: 50595

SEQ ID NO: 254376 - DNA, 201 bp, Homo sapiens
tcccaaccctttgggaggccaaagtgggagaattacttgaggctgggagtttgaagccagcctgctcaacatagtgagacctcatctctatttttaaaatraataaataaataaatagaaatgtttaaaatatgatgagatgtgatggaaatgtgatggcagaagcggaagttggaatgttatgctttgaaagagccacaa

SEQ ID NO: 254377 - DNA, 201 bp, Homo sapiens; identical to SEQ ID NO: 50597

SEQ ID NO: 254378 - DNA, 201 bp, Homo sapiens; identical to SEQ ID NO: 50598

SEQ ID NO: 254379 - DNA, 201 bp, Homo sapiens; identical to SEQ ID NO: 50599

SEQ ID NO: 254380 - DNA, 201 bp, Homo sapiens
tagaaactggaattgtcacacaggaattcagtccttctagattcagtccttctagaatggtgcttgaaacaaaaagaagttggtatgtcctcactgtggayagtacagagacgtgtcattgatataacatatggtagccctttatatcagcagctttgctatttgtgactttgtgagcaatctcaaagatccatgatgtgg

SEQ ID NO: 254381 - DNA, 201 bp, Homo sapiens; identical to SEQ ID NO: 50602

SEQ ID NO: 254382 - DNA, 201 bp, Homo sapiens
tgaggtacaccaaccagggacacatcacctcctgggattgctgatgccgtctttttataattttaatttttgtgggtacacagtagatgtttggcgccctttttttttttttgagatgaagtctcgctctgtcacctgggctggagtgcagcggcacgatcttgactcactgcaacctcagcctcctgggttcaagagatt

SEQ ID NO: 254383 - DNA, 201 bp, Homo sapiens; identical to SEQ ID NO: 50605

SEQ ID NO: 254384 - DNA, 201 bp, Homo sapiens; identical to SEQ ID NO: 50596

SEQ ID NO: 254385 - DNA, 201 bp, Homo sapiens; identical to SEQ ID NO: 50600

SEQ ID NO: 254386 - DNA, 201 bp, Homo sapiens; identical to SEQ ID NO: 50601

SEQ ID NO: 254387 - DNA, 201 bp, Homo sapiens
tttacagattgaagaaatcaaaagatggcttcaggccctcagtcatgagaagcaatccagacttaaagaggaagaaagaatgtgacatgtaggaggtaatyagaaaacttaaagtgagttctatttctacaggaaaaatgatggctttgaaacatatccttccaatttaacagctgtctctcctttggctcaagaggatgg

SEQ ID NO: 254388 - DNA, 201 bp, Homo sapiens
attaatctcatttagcaaaacagatccatttcctcagccagaataagaaaaaagatggctctgtaatgaagctattaaaggcttttctatcagcattcaamatttaaaataagttgctttacagattgaagaaatcaaaagatggcttcaggccctcagtcatgagaagcaatccagacttaaagaggaagaaagaatgtg

SEQ ID NO: 254389 - DNA, 201 bp, Homo sapiens; identical to SEQ ID NO: 50603

SEQ ID NO: 254390 - DNA, 201 bp, Homo sapiens; identical to SEQ ID NO: 50604

SEQ ID NO: 254391 - DNA, 201 bp, Homo sapiens
ctgcctgaaagctggtggatggctggcatggccagtggccctcttcagggcaaggttgccattcagcaggacagtcctggcctccaaagacactctccagstctggacaggccttggaaggtggtatgaggcctctgtccacccaatcccttacacagctgaaagccaccacctaccagaaggccaaacaccacagtagca

SEQ ID NO: 254392 - DNA, 201 bp, Homo sapiens
gaagggggagaaaggcagaagatgggtgagggagtgagatgagaggaacgtaagacggttttcctactttgattttaaaggctcgtttgaatccacttgcraagaatcctccaaaggggccaatgagcgaggcaaaggtggagagagcgatgctgtgaatctggaaggggtacatccggaccgttttctgagaagagtaaa

SEQ ID NO: 254393 - DNA, 201 bp, Homo sapiens
gtccagcaatctgtgctataatgaaccctgcagaggattctgatgtggctcaaggtgagggccactggcttagaggggggtatctgtacacgagaaacacycacaaaataaaagggaaaatccaactcccaattctcaccagatcattccttcaaataggttgtggataacaagatgtgactgtgttacaacaatcagcaa

SEQ ID NO: 254394 - DNA, 201 bp, Homo sapiens
gcccataccctgacctggcgtgagcaattctccttcatcctggggcttacagctttgggaaggaggaagctagcttttttcagagggcaggtgatggaggrggatctctctttgtagccactgtccatggaggccgctcaccccctgtgagtggcacatacccagccaatgactgactggatcaccccaggaatgttgtac

SEQ ID NO: 254395 - DNA, 201 bp, Homo sapiens
cctttcttttttcaagacacgatcttgccccatcacccaggctggagtatagtggcactatcacagctccttgaagcctcaacctcctgggctcaagagakcctcccatctcagcctcccaaggagctgggactacaggtgcatgctaccaccatgcctggctaatttttaaatgttttagtaaaggcaaggcctcactaa

SEQ ID NO: 254396 - DNA, 201 bp, Homo sapiens
ttctctttccagatatggaatcttacataattttcaaagctcatttacagttactgatctattcacgttttcttcttcatgacttttagtatatattttgycaggaaatcatgaatatttcctctaggttttcaaatctgttgccatacatgttgcattgtctttgagtctttaaatattcctgtacctattagtctagaa

SEQ ID NO: 254397 - DNA, 201 bp, Homo sapiens
attaacagatgacaggaggcctcagaaaatctgtaagcagaaacaactgaaaactgcattatttgggatgcttttcactggaacttagatgccgctaaaaytctagaattgcaccgtacttaaaaatccaccaacttggttcagatggaaaggtactatacctgataaaactggcgatgtatacattgacaaaggtggcca

SEQ ID NO: 254398 - DNA, 201 bp, Homo sapiens
ggcgatgtatacattgacaaaggtggccatcagatactggcagtcaaagcgatccatgatgcctccatggccaggaatggtattggcaaagtcctgttagmggcaggggaaggatgggtgaacttgggctcagccactaaccaatcccagcctaatggtcccaccccaatgtcaggcttctgtgctgagtagctgagggca

SEQ ID NO: 254399 - DNA, 201 bp, Homo sapiens
gcctctgtccacccaatcccttacacagctgaaagccaccacctaccagaaggccaaacaccacagtagcaaagaagcccccaatgaagccttcccaggtyttcttcggggacagctgtggacagagagcaagttctcagcaaagggtgttttgataactatagctttgcgaacaatgattacttgttaagaacctttctt

SEQ ID NO: 254400 - DNA, 201 bp, Homo sapiens
aaccactgctgcttttgcgccgtatcacagcaaatgtcaacacattgaaaaaggaaaataatgtcatagtctaattatgaaacagttgtgacctcacagacccccccaccctacccccgcaactaaaaggatcccagggccctccagggatccacagaacacactttgaaaaccactggtctaaacaatctgatgttgggg

SEQ ID NO: 254401 - DNA, 201 bp, Homo sapiens
tcagtttgcttgggttagggcctctggaacagaatgtgaagaaacagcactgagctagggcccggaagcttccagggcctgattatctgagtggctgctcygatctctggatcagagagttatctattaacagatgacaggaggcctcagaaaatctgtaagcagaaacaactgaaaactgcattatttgggatgcttttc

SEQ ID NO: 254402 - DNA, 201 bp, Homo sapiens
tcacctaaattcagtgcatgggtcaagatcacacattaaatgccagggtgtacagcctagtattttggagggggcagggaagggggagaaaggcagaagaygggtgagggagtgagatgagaggaacgtaagacggttttcctactttgattttaaaggctcgtttgaatccacttgcgaagaatcctccaaaggggccaa

SEQ ID NO: 254403 - DNA, 201 bp, Homo sapiens
aactgactttattgcctgtgatcccagcactttgtgaggctgaggtgggcggatcacgaggtcaggagtttgagaccagcctgaccaacatggtgaaaccctgtctctactaaaaatacaaaaattagccacgcgtggtggcacgcgcctgtaatcccagctactcagggggctgaggcaggagaatcccttgaacctggg

SEQ ID NO: 254404 - DNA, 201 bp, Homo sapiens
ctgacctcaagtgatctgcccgccttggcctcccaaagtgctgagattacagacatgagccaccacacctgacctttctacctatttaagtcttattttttcaaaaattatctcagagcatctctggctagaagagacgtaagcatgtattattaaaaattacagaagtaggtctctacaaaaatattttttaaaatttgc

SEQ ID NO: 254405 - DNA, 201 bp, Homo sapiens
gtacaacattcctggggtgatccagtcagtcattggctgggtatgtgccactcacagggggtgagcggcctccatggacagtggctacaaagagagatccycctccatcacctgccctctgaaaaaagctagcttcctccttcccaaagctgtaagccccaggatgaaggagaattgctcacgccaggtcagggtatgggc

SEQ ID NO: 254406 - DNA, 201 bp, Homo sapiens
tggttcgtattatgaaggtcttctatttatttattttttgagacgaagtttcgctgttgttggcccaggctggagtgtaatggtataatctcagctgaccrcaacctctgcctcctgggttcaagcaattctcctgcctcagcctcctgagtaactgggattacgggcatgccaccacgcccagctaattttgtattttta

SEQ ID NO: 254407 - DNA, 201 bp, Homo sapiens
tggccacctttgtcaatgtatacatcgccagttttatcaggtatagtacctttccatctgaaccaagttggtggatttttaagtacggtgcaattctagarttttagcggcatctaagttccagtgaaaagcatcccaaataatgcagttttcagttgtttctgcttacagattttctgaggcctcctgtcatctgttaat

SEQ ID NO: 254408 - DNA, 201 bp, Homo sapiens
agaagaaagaaaaagagaagaaaagctgaatgatggtactgcttattttctttccctagtttttagttcctcttaggcaaatatgaacagaatattaatatgttttctttagtgtagtccagagctgagtcattatctggtaaagaaatagagtatggagctgggtacggtagctcacgcctgtattcccagcactttggg

SEQ ID NO: 254409 - DNA, 201 bp, Homo sapiens
ttttgagacaggttctcactctgttgcccggttggagtgcagtggctcaccaaagcctcaaactgctgggatcaagggatcctcctgcctttgcctccctratagctggaaatacaggcaaacaccaccatgtctggctaatttttgtatttttttgtagaaacagagtctcactatgttgaccaggctggtcttgaactc

SEQ ID NO: 254410 - DNA, 201 bp, Homo sapiens
ctccaggctccattgagtgtaatctagtgcttagcagtggcagtgagcacagtgaccaggaggggagggcaaccaaggctggaaggatctggccccggaarggtgcttcagactggactaggaagtgcagttcaaagaggaagaggggacaggagggatggaggtgggtgaggtcagctgacactgcacagcacaggaaac

SEQ ID NO: 254411 - DNA, 201 bp, Homo sapiens
tgggatcaagggatcctcctgcctttgcctccctaatagctggaaatacaggcaaacaccaccatgtctggctaatttttgtatttttttgtagaaacagrgtctcactatgttgaccaggctggtcttgaactcctgggctcaagcattcctcctgcctcagcctcccacagtgctggtattattggtgtgagctaccat

SEQ ID NO: 254412 - DNA, 201 bp, Homo sapiens
accaaatccaagaattgggagagttccattctagcgctcaatattcatgctggaagcttaaattaacccagatggtctgtttggtttatttaaagataaamctagttttgagcctggaggaatagccacgttctctgcaggtgagtctgggaatagagcttgtaatttgcatagttgtttcagtgtacagaccttcaattt

SEQ ID NO: 254413 - DNA, 201 bp, Homo sapiens
agatctctcatgacaggcatagacttctcaatggtctactcggcacttttgacctttttctcttctgtatttctgccacttaggagtcagagtcagaagcmaaggtagatggagagactgcatcggacagtgagagccgggcagaatccgcacccctgccagtctctgcagatgataccccggaggtcctcaatagggccc

SEQ ID NO: 254414 - DNA, 201 bp, Homo sapiens
tcaagtatgtccaggcccacttctttctttttatttttgtaggggctccctatgttgcccaggctggtctcgaactcctggcctcaggtgatctaccctcyataacctaccaaagtgctggaattacaggtgtgagccaccctgtctggccacatttttttttttcttttttctttctttttttgtttctttggtgacaga

SEQ ID NO: 254415 - DNA, 201 bp, Homo sapiens
cataaatctgcttccagtgtgagggtggcatgtagatgccctgcaatccctcctcattgctgatcttttggcactttgagtagaatctccccctacaatgyggtttgcaccgtggttgggtcaatatctgtcccctcttgtgattttgggagcgtaaaagccgcctgagctttgttttctcacagggatgtcagccaaaca

SEQ ID NO: 254416 - DNA, 201 bp, Homo sapiens
gcaagtttctcagggtcagccagcagggccatgaggagtggggcagcccttgccttactttgtacccagtctcggagagaaggggaggtgacaggggccastgggttccatggggcctgcaggccgaaagcaagggcaccctggagcagtgcaggcctgtgtggcacagtgccctcatcccgaggcccaactcagccccag

SEQ ID NO: 254417 - DNA, 201 bp, Homo sapiens
ctgatgcaagtgtaccaagtttggacacattagagaatatcaagtaaaaatcaaatttgatacaaattaaacgcacaacataaattaccattcctgtgtargttagtagataaaaattaatgtttactaagatgtactaaattacatttacttcatttactacatttaattcaaagttaaaactaagatttaaaatgcagt

SEQ ID NO: 254418 - DNA, 201 bp, Homo sapiens
aagctgctgtctgtttctagataaatttctcacctacggtgtcaccagagagcaggaaaccatggtctgcctgttgctctgtgagctgtcccgggggactyaagggtggggggtattctgctgccctctgtcccttcctctgggatgtctgactgccttgctgtgaaggcaagggtgctccccacggcaatgacctgtctt

SEQ ID NO: 254419 - DNA, 201 bp, Homo sapiens
gacctaatcaccttccagtagctccatcttctaataccattgagatgggggttaggatttcagcgtatgaattttggggagacataaatatgcagaccacmgtaggccaagacttcagattggggtaggtggcaggcacttatttcacttctttctgaaggagcttgttactgacagattatcattttaggtcctttagtt

SEQ ID NO: 254420 - DNA, 201 bp, Homo sapiens
agtttcgccatgttggccaggctggttccgaactcccgagtttaacttatccgcctgccttggcctcccaaagtgctgggattacaggtgtgagccaccaygcccggccttgtaggagctcttttaagagaagcagagtgtaggggcaggactgtggcctgtgccacctgcccctgtgtttcagccaccattgaggaacag

SEQ ID NO: 254421 - DNA, 201 bp, Homo sapiens
ttgctgattgttgtaacacagtcacatcttgttatccacaacctatttgaaggaatgatctggtgagaattgggagttggattttcccttttattttgtgrgtgtttctcgtgtacagatacccccctctaagccagtggccctcaccttgagccacatcagaatcctctgcagggttcattatagcacagattgctggac

SEQ ID NO: 254422 - DNA, 201 bp, Homo sapiens
attttatatgtggcccaagacagttattcttcttccagtgtgggccagggaagccaaaagattggctcctgctttaggtctttttttttttttttttttttaagacagagttttgctcttggttgcccaggctggagtgcaatggcacagtctcggctcactgcaacttctgcctctcgagatcaagtgattctcttgcct

SEQ ID NO: 254423 - DNA, 201 bp, Homo sapiens
ttctagactaataggtacaggaatatttaaagactcaaagacaatgcaacatgtatggcaacagatttgaaaacctagaggaaatattcatgatttcctgrcaaaatatatactaaaagtcatgaagaagaaaacgtgaatagatcagtaactgtaaatgagctttgaaaattatgtaagattccatatctggaaagagaa

SEQ ID NO: 254424 - DNA, 201 bp, Homo sapiens; identical to SEQ ID NO: 50612

SEQ ID NO: 254425 - DNA, 201 bp, Homo sapiens
ggtgggctccttgagaggagggagtctcagctggggcctggctgcagagacctgctcttgaatagggctgcctttgggatcagggagccgagcatactggscaaggctcatcatgttcctttgtggaagtggttacttggtgggggtggggtggggaaggggggtctaggaagccgaagctgagtgcgcactagagctgct

SEQ ID NO: 254426 - DNA, 201 bp, Homo sapiens
gaaaagcatcccaaataatgcagttttcagttgtttctgcttacagattttctgaggcctcctgtcatctgttaatagataactctctgatccagagatcrgagcagccactcagataatcaggccctggaagcttccgggccctagctcagtgctgtttcttcacattctgttccagaggccctaacccaagcaaactga

SEQ ID NO: 254427 - DNA, 201 bp, Homo sapiens
ttggcccctttggaggattcttcgcaagtggattcaaacgagcctttaaaatcaaagtaggaaaaccgtcttacgttcctctcatctcactccctcacccrtcttctgcctttctcccccttccctgccccctccaaaatactaggctgtacaccctggcatttaatgtgtgatcttgacccatgcactgaatttaggtga

SEQ ID NO: 254428 - DNA, 201 bp, Homo sapiens
gggagaggaggtgaaagattattttctcatataaccaattattttatgtttcttatttttgttgctcaaacagtatgattttattttaaaaactcaattastgcatgatttttgactatttaaaattagtttttccaaaatctatttttaaaaaatgttttgtgtttgcccaggttaacatggtatttcattagaagaatt

SEQ ID NO: 254429 - DNA, 201 bp, Homo sapiens
taactacttcaggtataagagaaatgcttaatttttttcaagaaaatttttttatgttgagaaataatttaggaattaaaaaaatcagtaaaccttaactrtgattcccaggcttaacagggagaggaggtgaaagattattttctcatataaccaattattttatgtttcttatttttgttgctcaaacagtatgatttt

SEQ ID NO: 254430 - DNA, 201 bp, Homo sapiens
aagaagaaagaaaaagagaagaaaagctgaatgatggtactgcttattttctttccctagtttttagttcctcttaggcaaatatgaacagaatattaatatgttttctttagtgtagtccagagctgagtcattatctggtaaagaaatagagtatggagctgggtacggtagctcacgcctgtattcccagcactttgg

SEQ ID NO: 254431 - DNA, 201 bp, Homo sapiens
gggggtacagtggtgaggaagtcaacatggctcccccacagagatgatggtctcgaggcggagactatgcggtgtgggaagccgtctttttttgtttttttgtttttttgagacagggtcttgctctgtcatctaggctggaatgcagtggcatgatcaggtctcactgcagcctcaatctcctaggcttaggcgatcctc

SEQ ID NO: 254432 - DNA, 201 bp, Homo sapiens
gtgcaggtttgttacatatgtatacatgtgccatgttggtgtgctgcacccattaactcgtcatttacattaggtatttctcctaatgctttccctccccctccccccaccccacaacaggccccagtgtgtgacataaattttatgtcagataatgtagaacagagaagcatcaaaaaatgactcaatggtcttgataaa

SEQ ID NO: 254433 - DNA, 201 bp, Homo sapiens
tatatttagcatctgagaatggaattttcaaagccaattgctaataaaggaaatgttctcctctgggaactgtgcttataattttaaagtcccaaagcacmgtatagttgccaaactaagaaacttggagtttaggctttgggaatgatcctcttcctacccaaccatatttttctgatggagcttaggaaagcaaaggat

SEQ ID NO: 254434 - DNA, 201 bp, Homo sapiens
cttactgacattcatttcattgggatattggggcccaaagcatgggctttatctcctatcttctgcaggaagttccaagttgtgtgttttgctttttgtgkttttttttttttttttttgagacaaagtctcgctctgttgcccaggctagagttcagtggtgtaattatggcttactacagccttgacctcccacactca

SEQ ID NO: 254435 - DNA, 201 bp, Homo sapiens
tgctactgatttttgtatgttgtttttgtgtcctacaactttagtgaattagtttatcagttccaagagttttttggtgtttttcagtttttctatatgtragaccatgccatttgcaaagaaggatagtctgacttcttcctttctaatttggatgctctttatttctttctcttgcctaatttccctggctatgatttc

SEQ ID NO: 254436 - DNA, 201 bp, Homo sapiens
aaaagtcagaaggtattttgttatatttagcatctgagaatggaattttcaaagccaattgctaataaaggaaatgttctcctctgggaactgtgcttatrattttaaagtcccaaagcacagtatagttgccaaactaagaaacttggagtttaggctttgggaatgatcctcttcctacccaaccatatttttctgatg

SEQ ID NO: 254437 - DNA, 201 bp, Homo sapiens
gggcgcctgtagtcccagctactcggaaggctgagaggcaggagaatggcgtgaacctgggaggcggagcttgcagtgagccgagatggcgccactgcackccagcctgggcgacagagcaagactctgtcttaaaaaaaaaaaaaaaaaaagctctggagtaaacttgaaagattcctcaaaatgttacagttgcttaac

SEQ ID NO: 254438 - DNA, 201 bp, Homo sapiens
aggtgatactcccgccttggcctaccaaagtgatgggattacaggcgtgagccaccgcgcctggcctatgaaggtcttctaattcccggttgttgtttttyatttttttctcatagaattaatttacagactttaaaagcttctttattgattaacattgatagatatgatacccaaatattacctatttttcttatttgg

SEQ ID NO: 254439 - DNA, 201 bp, Homo sapiens
ccccaacatcagattgtttagaccagtggttttcaaagtgtgttctgtggatccctggagggccctgggatccttttagttgcgggggtagggtgggggggtctgtgaggtcacaactgtttcataattagactatgacattattttcctttttcaatgtgttgacatttgctgtgatacggcgcaaaagcagcagtggtt

SEQ ID NO: 254440 - DNA, 201 bp, Homo sapiens
tcacgcctgtaatcccagcactttgggaggacgaggcgggtggatcacgaggttaggagatcgagaccatcctggctaacatggtgaaaccccatctctastaaaaatacaaaaaattagccgggcgtggtggtgggcgcctgtagtcccagctactcggaaggctgagaggcaggagaatggcgtgaacctgggaggcgg

SEQ ID NO: 254441 - DNA, 201 bp, Homo sapiens
tagtatacagttttgtgacattaactgtgaccatgcaggggagcagagctgatgctctatgttaagctgtagcagctgttaccttttttttttttttttttgagccagggtctcactctgtcacccaggccagagtgcagtggcaccatctcggctgactgcaacctccacctcccaagttgaagcgatcctcccacctca

SEQ ID NO: 254442 - DNA, 201 bp, Homo sapiens
aggcagaggttccggtgagccgagattgcgccgttgcactccatccagcctgggcaacaagagccaaacaacgtcttaaaagaaaagaaaagctctggagkctgggcgtggtagctcacgcctgtaatcccagcactttgggaggacgaggcgggtggatcacgaggttaggagatcgagaccatcctggctaacatggtg

SEQ ID NO: 254443 - DNA, 201 bp, Homo sapiens
tagcagttttcttcctggttgcaggttggggtggatacagctgttagactgtctgcattgtccagtatagtagccactagccacatgtggccaattaaacyttttcttactgtggctaaatattatatatatcataaaattgataattttaaccattttcaagtgtatggttctatggcattgagtacgttaacattgttt

SEQ ID NO: 254444 - DNA, 201 bp, Homo sapiens
gtacaaatatctctttgagtccctgccctcagttcttttgggtatatacccagaagtggaattgctgagtcatgtggtaattctatatttgattttttgakgaactgccaggctgtttactatagcagctgcattattttacattctgaccaacagtgcacaagggtttcagttttttcacatcttctccagtacttgtta

SEQ ID NO: 254445 - DNA, 201 bp, Homo sapiens
aatggcatgaacctgggcggagcttgcagtgagctgagattgtgccactgcactccaacctgggctacagaggaaactctgtctcaaaaaaaaaaaaaaaattatgcatatttatggtagctgttattatcattgcataatgttactattattcccataattattcagggcagtgcagtgtaggatcctgctgctggaaaa

SEQ ID NO: 254446 - DNA, 201 bp, Homo sapiens
gataagtatggtatggaggtagctgagaggagaatgtttcaaggaggaaatggtcaactagatctgacattgccaagatatatgataagatgaaggcaggrgaatctgtctgatttggcagcatggaggttgttttatttacttatgtttgaagatgcactttagtctccagagcctagggagatcatactgaggccacat

SEQ ID NO: 254447 - DNA, 201 bp, Homo sapiens
tcttactagatcttttggcagtattagacatactccctccttgggagagctttatcttaataaactgaaaaaaaaaaaaaattccttccttccccagtagsgctgaaaactcattttcccttaaatactaaatagagatgcccgactaaggaactgataatagaaggacccgttggactccagtggggcttctgatttttg

SEQ ID NO: 254448 - DNA, 201 bp, Homo sapiens
tgctactgtggtgtttggccttctggtaggtggtggctttcagctgtgtaagggattgggtggacagaggcctcataccaccttccaaggcctgtccagasctggagagtgtctttggaggccaggactgtcctgctgaatggcaaccttgccctgaagagggccactggccatgccagccatccaccagctttcaggcag

SEQ ID NO: 254449 - DNA, 201 bp, Homo sapiens
tttatagtcatatgcttgctgttagtaaacagatgcatctactccagaaggaggcttcaatgggcaaggtgggagagagtgttgggagaaaggattcctgrtcattccttgtcacaaaaattatgggtttaatgtatgagactggcagtcatgcagaggttgggactcagtacaactgtacgtatttgagttagaaagcct

SEQ ID NO: 254450 - DNA, 201 bp, Homo sapiens
gatttttctcaatttgtcatttttagtgttgttccatttgaagtattattttggctaaacctatgagtcttcctttgtttctgcttgtgatgacatgcttrgaagggccttagtcctcctctccttgcttcccccaccatataggtacttaatttatatgtttagtttatttttagaaatggggtctcactatgttgctca

SEQ ID NO: 254451 - DNA, 201 bp, Homo sapiens
ttcatgctttctgtgacaaatcaaaactcaggaacatggtctgatatgtatgcatctagagcatgaaggaagaatgcccatttaggtttaatggctctacrttgacttagacccagtcactgttacttacaccttaagcagcctctccactaggaccctgaggtgggctccagagaaggcacaagctgaagcttcagacac

SEQ ID NO: 254452 - DNA, 201 bp, Homo sapiens
gaaccacggtggggagcactcctaaggaaggacaggggccgctgggacacacaggcagttggggaagatttggagagaaagggaactcttaaaagatcaakgaaaatttgctggaagagaagtgggttttagtagagggtggtttgcagactgtttaagtaggaacacaggagcaaaagtcctaaaggtaagaaagtacaa

SEQ ID NO: 254453 - DNA, 201 bp, Homo sapiens
tctacatggtaaaggaaatgcatgcgtgtgtgtcagaattcttgatttaaatgaagtttttcaggaactcaacaagcctttcatgctttctgtgacaaatsaaaactcaggaacatggtctgatatgtatgcatctagagcatgaaggaagaatgcccatttaggtttaatggctctacgttgacttagacccagtcactg

SEQ ID NO: 254454 - DNA, 201 bp, Homo sapiens
tattggtcagaaataaaatgtgactgcaactgtgtgccctcccttgtcgtgaattccctgtttatcacttccatgcatggttttatgcttctcatttgttyatgtattcatgaatactgcatagtcctgattcagagacttttgctttgctttccaacttgtatccctacattctcacaacagccttcttacctcgggtga

SEQ ID NO: 254455 - DNA, 201 bp, Homo sapiens
tctggttcgttgtccacactgactgtgattgacctcctcacagagtgctctagtgaagtccggaaataacactctggacttgggacatgttgacattaacrggtctacaggggcaacagcctcaccacctggcttcccctgagagagcctggtcagtgccattggctgccctagcaggctcagggataacctcctgttaaa

SEQ ID NO: 254456 - DNA, 201 bp, Homo sapiens
catgaatgaagggagaacaggcacaggacttaatgaaaagagtttcttgaacttagttttctgaatgggggtggggagttggggcacgtgtgtgtaagggkaggctgcctcactttgaaggaatggtgttggctaacaggatccatgaaattcctaggtcagttgaataataactgaactactggtttgactgtggattat

SEQ ID NO: 254457 - DNA, 201 bp, Homo sapiens
tcgcggcgacgtcgggccgattttcccaggatgacagagctgaggcagagggtggcccatgagccggttgcgccacccgaggacaaggtagcggcagcgtmggggtgggcgcggccgggacagcggcgcatccgggaggcctgcgggggacgcgcgcagaggggtcgtcttgttctctgaccctttgtcgcagccgacggc

SEQ ID NO: 254458 - DNA, 201 bp, Homo sapiens
ggcccacatattgccttaaaaatcagaaagtttctcctaacaatctaaatttcttgcctgtcttagataattggagggtccaccatcactttgtcacctgmtcaatggttggctggagctgaggatcatcggttcccaccaatccctgttgccttacaccaggctcacggcttcccctaatgcagcctgtaactttttgat

SEQ ID NO: 254459 - DNA, 201 bp, Homo sapiens
tgtgtcatactgcctctggttcagaaaagagacggacactgactcttcactattaattttgccaaagtctccttgaaagaatgctaatttgttcctggcaytgggcagggttcctgccttccaagtcttgtcatgtggtggttacttggctggggtaatagtgaggcaccccctccccacccccacgtatggtccccaccg

SEQ ID NO: 254460 - DNA, 201 bp, Homo sapiens
ggctgtgaggatgctggagaacagtgtgtggggcttgacagtcagcagttaatctttcaggaaacggttttctgacacagtgtaggctgaagccagactcrggaagtttggggacatatggtaggtgcagactttgtaaaatagtttggaagtaaagagggggagaagtggattggtggctccaggccaaatggagttgaa

SEQ ID NO: 254461 - DNA, 201 bp, Homo sapiens
tttggaggctctgtagctctgtttaagggtgagatcatgcttgatgttagtgggactttgtggacctagaaggtgtgaggagagagagaagaaagaaggcrtgatagctggtgggccatgtttttgaaaagctaactatgtacaataattagaatgtcaaaaaacaaccttgggattatgagatgcaacataaagattcta

SEQ ID NO: 254462 - DNA, 201 bp, Homo sapiens
cttgcagagacaagatactttgaagtctctaatttttcatttggctatcctggttcagcctgaaagaattctgacttaccttgtactactagttggtgagyatgcagatgtttggaggctctgtagctctgtttaagggtgagatcatgcttgatgttagtgggactttgtggacctagaaggtgtgaggagagagagaag

SEQ ID NO: 254463 - DNA, 201 bp, Homo sapiens
agaaccacttaacatagctaaaggagggcaaagataaatgcagaacataattcatttttcttttctcctcccacctcaaactaggattctgcatgtttgtrctgagtctggtcaagaagcattatcgactgcagttctacatggtaaaggaaatgcatgcgtgtgtgtcagaattcttgatttaaatgaagtttttcagga

SEQ ID NO: 254464 - DNA, 201 bp, Homo sapiens
tgctcgcctgtaatcctagcttctagggaggctgaggcaggaggatcgcttgagcccaggagtttgagaccctgtctcaaaaaacaaaaacaaaaacataytttggagaacatttagggctggggctgaggatttagcagtcgcttgcagagacaagatactttgaagtctctaatttttcatttggctatcctggttcag

SEQ ID NO: 254465 - DNA, 201 bp, Homo sapiens
atgaaacaagaactttttaatttcatagtagaagaatccagtgaacaattttcaagtcagtgctttaaaagctctggaataggctgggcgcggtggctcaygcctgtaatcccagcactttgggaggctgaggtgggcagatcacctgaggtcaggagttcgagaccagcctgaccaacggggttttagtagaaaccccgt

SEQ ID NO: 254466 - DNA, 201 bp, Homo sapiens
tttagtagagacgaggtttcaccatgttggccaggttggtctcgaactcctgacctcaggtgatctacccactttggcctcccaaagtgctgggattacargtgtgagccaccgtgcccggcccatagtaaacttttaaaaaatcctgatttattctgtttcatagtttgggaaacacctacttccatgactttggctttg

SEQ ID NO: 254467 - DNA, 201 bp, Homo sapiens
ttttgtttttttttgagacagagtttcgctcttgttgcccaggctggagtgcaatggcacaatctcggctcactgcaacctccacctcccgtgttcaagcrattctcctgccttagcttccccagtacctgggattacaggtgcctgccatcacgactggctaatttttttgtgtttttagtagagacgaggtttcaccat

SEQ ID NO: 254468 - DNA, 201 bp, Homo sapiens
tcaccccattattcagaacttctcaattgtcactgaattgtcatgtatgggattttattattattatttttttagacggagtctctctctgtcgcccaggmtggagtgcagtggcacgatctcagctcactgcaacctctgcctcccaggttcaagctagtctcctgcctcagcctcctgagtagctgggactataggcat

SEQ ID NO: 254469 - DNA, 201 bp, Homo sapiens; identical to SEQ ID NO: 50611

SEQ ID NO: 254470 - DNA, 201 bp, Homo sapiens
taatcctagcttctagggaggctgaggcaggaggatcgcttgagcccaggagtttgagaccctgtctcaaaaaacaaaaacaaaaacatattttggagaamatttagggctggggctgaggatttagcagtcgcttgcagagacaagatactttgaagtctctaatttttcatttggctatcctggttcagcctgaaagaa

SEQ ID NO: 254471 - DNA, 201 bp, Homo sapiens
aagaaaggttcttaacaagtaatcattgttcgcaaagctatagttatcaaaacaccctttgctgagaacttgctctctgtccacagctgtccccgaagaaracctgggaaggcttcattgggggcttctttgctactgtggtgtttggccttctggtaggtggtggctttcagctgtgtaagggattgggtggacagaggc

SEQ ID NO: 254472 - DNA, 201 bp, Homo sapiens
gtttgcgcccgggaggcagaggttgcagtgagtcgagatcatgccactgcactccagcctgggcgacagagcgagactccgtcacaaaacaaacaaacaaacgaacaaacaaacaaaccactgaggaagatcttaactgtaaaattcaaatcatacccacttccaagccatgtgtggattaaacgagataagccaactaaa

SEQ ID NO: 254473 - DNA, 201 bp, Homo sapiens
taaattaatttagaaagagctgtctccctgagggcaggggctgggtttttctttacacacctggacctaattcttctcttcttccatccattagtaagtgytttgctgtgtgccgtgcatggggataatgagaacaagaagttatgttcttgtctttaaggagtttgtcgtcagccaaggagacatttacaaaagtccccg

SEQ ID NO: 254474 - DNA, 201 bp, Homo sapiens
tgtttgcgcccgggaggcagaggttgcagtgagtcgagatcatgccactgcactccagcctgggcgacagagcgagactccgtcacaaaacaaacaaacaaacgaacaaacaaacaaaccactgaggaagatcttaactgtaaaattcaaatcatacccacttccaagccatgtgtggattaaacgagataagccaactaa

SEQ ID NO: 254475 - DNA, 201 bp, Homo sapiens
ttgtttgcgcccgggaggcagaggttgcagtgagtcgagatcatgccactgcactccagcctgggcgacagagcgagactccgtcacaaaacaaacaaacaaacgaacaaacaaacaaaccactgaggaagatcttaactgtaaaattcaaatcatacccacttccaagccatgtgtggattaaacgagataagccaacta

SEQ ID NO: 254476 - DNA, 201 bp, Homo sapiens
aagaaagtacaacctgttctagaaactgactctagttcagaatggctgtaagagataaggctggatgagtagataagaccctgatctcaaggggcttgtaygccattttgaagacctgtcatctaggtactggggagctgtggaaggggttcaggatggagagtgacacaatcagaatttctgggaaggtcctcgtgttgc

SEQ ID NO: 254477 - DNA, 201 bp, Homo sapiens
cagtgcaaaaaattgtgtaggttatgaagttagtcagtgaaacttgtgaatttgaatgcagtgtcagtgggaaaggcagagttgttggaggcataacccaycagtgccttgaagtctgccttttaatgaaatttccttgaagaagaaagaaaaagagaagaaaagctgaatgatggtactgcttattttctttccctagtt

SEQ ID NO: 254478 - DNA, 201 bp, Homo sapiens
atgttcacatttttcttattgacttgtaaggtttttaaatagttgaagaagttggaccctttgttacatgctgcagatttttctcaatttgtcatttttartgttgttccatttgaagtattattttggctaaacctatgagtcttcctttgtttctgcttgtgatgacatgcttagaagggccttagtcctcctctcctt

SEQ ID NO: 254479 - DNA, 201 bp, Homo sapiens
gtaggttatgaagttagtcagtgaaacttgtgaatttgaatgcagtgtcagtgggaaaggcagagttgttggaggcataacccaccagtgccttgaagtcygccttttaatgaaatttccttgaagaagaaagaaaaagagaagaaaagctgaatgatggtactgcttattttctttccctagtttttagttcctcttagg

SEQ ID NO: 254480 - DNA, 201 bp, Homo sapiens
ccatctcttaaaaaaaaaataaataaaatttttgtagaggtggggtcttgctgtgttgctcaggttggtctcgaactcctgcctcaagcagtccttctgtytgcacctcccaaagtgctgggattttaggcatgagccaccatgcctggcctagactccatgtctttttttttttttttttttttttttttttttgagacg

SEQ ID NO: 254481 - DNA, 201 bp, Homo sapiens
gtaactgctttgttctgttcctcttttcccccaaaacagatttgtaaaaattgtatttgttacattattcacaaaccttttctacaaaatatataccaaaytgggttcttttgaaagatttttctagtaatttttaggtcatttccatatatattatgtgcagtttaaaaagcaaaccaaccctagtttgttaaataatta

SEQ ID NO: 254482 - DNA, 201 bp, Homo sapiens
aacagaatattaatatgttttctttagtgtagtccagagctgagtcattatctggtaaagaaatagagtatggagctgggtacggtagctcacgcctgtawtcccagcactttgggaggccgaggcaggtggatcacctgaggtcaggagttcaagaccagcctggccaatgtggcaaaaccccatctctactaaaaatat

SEQ ID NO: 254483 - DNA, 201 bp, Homo sapiens
cccttgagaacctggttcttttaacacagctatgtgagtagatcaaaaacacattataagaccccaaagcattatctcagtgttcctatgtgtgcctccarctgtcctcttgggagtctgaattgtgcagtggttaagggcgtggactttgcagccagacccttggattcagatcccagctttactgtttgccagctgttt

SEQ ID NO: 254484 - DNA, 201 bp, Homo sapiens
agtggaaattggactaagatctctgggcgcgtagatggagtcttttgcccggtagacctcattttagggcgaatgggtagaaaggaaagacccccccccccgcccccgccaccaaatccaagaattgggagagttccattctagcgctcaatattcatgctggaagcttaaattaacccagatggtctgtttggtttattt

SEQ ID NO: 254485 - DNA, 201 bp, Homo sapiens
gaacctggttcttttaacacagctatgtgagtagatcaaaaacacattataagaccccaaagcattatctcagtgttcctatgtgtgcctccagctgtccycttgggagtctgaattgtgcagtggttaagggcgtggactttgcagccagacccttggattcagatcccagctttactgtttgccagctgtttgacctgt

SEQ ID NO: 254486 - DNA, 201 bp, Homo sapiens
attgtttttgtatgtctgtcaggtaggaattggggaatttcttggttagtatacagttttgtgacattaactgtgaccatgcaggggagcagagctgatgstctatgttaagctgtagcagctgttaccttttttttttttttttttgagccagggtctcactctgtcacccaggccagagtgcagtggcaccatctcggc

SEQ ID NO: 254487 - DNA, 201 bp, Homo sapiens
gctcttaactgagcccctggtacacaggacactccatgtgtccttcatcctaagtgcttctgcctttctctagagggtctgtgtaaaccaaaaggggtggrccctcagaggagcttcccccttcctttaaagcagcactcttgtttcctgtttataccagcactacaacccccttgggaaatggctgaggaactgtgggag

SEQ ID NO: 254488 - DNA, 201 bp, Homo sapiens
tctggaaaagcgacatgcttatttctgggcagaactgcttttgaggatctccgcatgtttatggataaaggttcctttccttcctggagaaggggtctgcrgacatgttgtgctaccatctaggtcactgtgagagagataaaaaggtggtcttgaccctataccatgtggatccctcttctcccagccctatgaatacta

SEQ ID NO: 254489 - DNA, 201 bp, Homo sapiens
acactgtggttctcatgagcactgctgtctgtgtggaaggacctgacctgtcctaccaaagtcagacatctttttgatttgttgtctttggcagaagctcytttgtattaaggtctccatagggccagcttggggcttctctgtaaagactttgctgaggttttgagagttcctgggacttgggatttacgggcaacactc

SEQ ID NO: 254490 - DNA, 201 bp, Homo sapiens
cctttctctagagggtctgtgtaaaccaaaaggggtggaccctcagaggagcttcccccttcctttaaagcagcactcttgtttcctgtttataccagcaytacaacccccttgggaaatggctgaggaactgtgggaggcggtggttgagagagaacctgagagggtctgccccacctggcctctgttcccggccctcgg

SEQ ID NO: 254491 - DNA, 201 bp, Homo sapiens
gtgatagaattctggctctttttcataatgcttaaactttaagatcctttgtagtcttctgtctctcatttccttccaattcttgttttaggttcaggggrtacatgtgcaggtttggtacacgggcaaattgcacattgctgaggtttggtgtacaaatgattttgtcacctaggtagtgagcatagtactagatgggta

SEQ ID NO: 254492 - DNA, 201 bp, Homo sapiens
agggctggtacagcgtgagccaccgtgcccggccattgtaactaatttcacagggcagataatcatcctttaaactgtttgaaaagatttgagtgttactrtttctggttttcacacttttccatcttttctaggatccacgtaggtggaggagattcctctccacagtttgttaagctacattctatgttgttaaggtct

SEQ ID NO: 254493 - DNA, 201 bp, Homo sapiens
ctgggtctctgatgtggagaggatgtctgccattgacaccgaacccctgagtgggcaactctcagagccatatctccacagtccatgcctggctagtcctrtggtttcagtggtctacaagacattcctaggtgcatgcccttcagtccacacaaactgactttgtctcaaatctgaattctctcattctactcttaccac

SEQ ID NO: 254494 - DNA, 201 bp, Homo sapiens
gacattcctaggtgcatgcccttcagtccacacaaactgactttgtctcaaatctgaattctctcattctactcttaccaccctccttcagtttctttctyctgcgataaaatcccagatgactcggttactcaggcttgaaatctcctattcctttgttcccgtgcccagggcaggatgcagattctaaccaggtgtgac

SEQ ID NO: 254495 - DNA, 201 bp, Homo sapiens
tctgtttgttgctcttggagacttcaacatttcaggactgcagtattgtaaatgcctgcagtatcctaaatccgaattccttacctctcctggaatccttrtctgtcttttactctttgagatttcccaaatttcaggatttattgcttgccttattgtaaaccctgtgaattgagctccctcctgttaggatttgctcta

SEQ ID NO: 254496 - DNA, 201 bp, Homo sapiens
agtctcgccctgtcgcccaggctggagtgcagtagcgtgatctcggctcactgcagcctccgcctcccaggttcaagcaattctcctgcctcagcctcccyagtagctgggacaacaggtgcttgctaccacacttggctaatttttgtatttttagtagagttgggtttcaccatgttagccaggctggtgtcgaaggcc

SEQ ID NO: 254497 - DNA, 201 bp, Homo sapiens
gtacctcctgatggagaaatcttgtcataaaatcatatttgagcttgatcaagactctagttctaagtgctggtttataggaaattcaagagactgaagawcacatggacctggttgctttagtaaataagtgtgtgtgtgtaaatttctttttccatgtctgtgatttcctggcttataattctgaaagcccttattaaa

SEQ ID NO: 254498 - DNA, 201 bp, Homo sapiens
gactgaagatcacatggacctggttgctttagtaaataagtgtgtgtgtgtaaatttctttttccatgtctgtgatttcctggcttataattctgaaagcycttattaaagtctcttgttataactttggggcacttggaaactcagaagcaggcctccaaaaataaaatctccctctctgaccatctcctcctccccttt

SEQ ID NO: 254499 - DNA, 201 bp, Homo sapiens
gagtttgagaccaccctggccagcatggtgaaaccccatctctactaaaaatagaaaaattagcctggcatgatggtgcatgcctgtaatcccagctgctygggaggttgaggcaggataatcgcttgaacccaggaggtggaggttgcagtgagccaagatcacgccactgcattccgacctgggtaacagagcaagact

SEQ ID NO: 254500 - DNA, 201 bp, Homo sapiens
gtgcatgcctgtaatcccagctgctcgggaggttgaggcaggataatcgcttgaacccaggaggtggaggttgcagtgagccaagatcacgccactgcatkccgacctgggtaacagagcaagactccatctaaaaaaaaaaacttaaggcatattaatgatttctggatctaatttggatcctgatccaatcaaactgca

SEQ ID NO: 254501 - DNA, 201 bp, Homo sapiens
agggctgcctttgggatcagggagccgagcatactgggcaaggctcatcatgttcctttgtggaagtggttacttggtgggggtggggtggggaaggggggtctaggaagccgaagctgagtgcgcactagagctgctagcaggcaggccagagggtcagcttgtgttttattttctgatttctcctgcatgctttctgga

SEQ ID NO: 254502 - DNA, 201 bp, Homo sapiens
ttagtgaggccttgcctttactaaaacatttaaaaattagccaggcatggtggtagcatgcacctgtagtcccagctccttgggaggctgagatgggaggmtctcttgagcccaggaggttgaggcttcaaggagctgtgatagtgccactatactccagcctgggtgatggggcaagatcgtgtcttgaaaaaagaaagg

SEQ ID NO: 254503 - DNA, 201 bp, Homo sapiens
taccagcactacaacccccttgggaaatggctgaggaactgtgggaggcggtggttgagagagaacctgagagggtctgccccacctggcctctgttcccrgccctcgggattgaaagggaaggaaggaggaggggtgcctgggagctgggtggatatgagtcagaagaggcagggcagcctctccctgctgtgctggtct

SEQ ID NO: 254504 - DNA, 201 bp, Homo sapiens
ttgagagagaacctgagagggtctgccccacctggcctctgttcccggccctcgggattgaaagggaaggaaggaggaggggtgcctgggagctgggtggrtatgagtcagaagaggcagggcagcctctccctgctgtgctggtctcagtacccaccaggagtgaggcaggagtggatgctggtctggtcctgctgccag

SEQ ID NO: 254505 - DNA, 201 bp, Homo sapiens
gaatatatttttcttctccatcttactagatcttttggcagtattagacatactccctccttgggagagctttatcttaataaactgaaaaaaaaaaaaaattccttccttccccagtagcgctgaaaactcattttcccttaaatactaaatagagatgcccgactaaggaactgataatagaaggacccgttggactcc

SEQ ID NO: 254506 - DNA, 201 bp, Homo sapiens
ccctgctgtgctggtctcagtacccaccaggagtgaggcaggagtggatgctggtctggtcctgctgccagggctgctgcaggggcaccagtcaggcacaygagcaggaaagtgggtactatcatatctcagtgtagtctggacactttggtccatcataggtcaagtagaattaattagctcattagttcaacaaatctt

SEQ ID NO: 254507 - DNA, 201 bp, Homo sapiens
aaattaccttactcaggccgggtatggtggctcacgcctgtaattccagcactttgggaggccgaggcgggtggatcaggaggtcaggagatcgagaccayggtgaaaccccgtctctactaaaaatacaaaaaaattagctgggtgtggtggcaggcgcctgtagtcccagctactcgggaggctgaggcaagagaatgg

SEQ ID NO: 254508 - DNA, 201 bp, Homo sapiens
gggaggccaaggtgggtggatcacttgaggccaggagttcgaaaccagcctggccaaaatggtgaaacctcatctttgctaaaagtacaaaaattagcccrgtgtgggagcctgcacctgtaatcctagctacttgggtggctgaggctagaacttggatttgctagaattgcattgctagaacttgggaggtggaggctg

SEQ ID NO: 254509 - DNA, 201 bp, Homo sapiens
tttactcttctcagaaaacggtccggatgtaccccttccagattcacagcatcgctctctccacctttgcctcgctcattggcccctttggaggattcttygcaagtggattcaaacgagcctttaaaatcaaagtaggaaaaccgtcttacgttcctctcatctcactccctcacccatcttctgcctttctcccccttc

SEQ ID NO: 254510 - DNA, 201 bp, Homo sapiens
cgagaccacggtgaaaccccgtctctactaaaaatacaaaaaaattagctgggtgtggtggcaggcgcctgtagtcccagctactcgggaggctgaggcargagaatggcatgaacctgggcggagcttgcagtgagctgagattgtgccactgcactccaacctgggctacagaggaaactctgtctcaaaaaaaaaaaa

SEQ ID NO: 254511 - DNA, 201 bp, Homo sapiens
gtttttagtagagacggagtttcaccatgtcggccaggctggtcttgaactcctgacctcaggtgattgcccaccttggcctcctgaagtgctgggattasaggcacgagccaccgcacccaccccataatttcttctataactaatatgacacatttgggattgagaacactgttaattccatgttcttcaagggagaaa

SEQ ID NO: 254512 - DNA, 201 bp, Homo sapiens
gtacttcataatttaaaaaaaagaatgggaaagaaaagctctccactttcttctctatctcaggatccttgctgggggtttgcagtgatggctgcatggtsccatactcagcagtactgtggaggctgcaagggatggcttctcttctcatgaacgccagttgaggagagagaatacacaagtgaagagttaacgctaatg

SEQ ID NO: 254513 - DNA, 201 bp, Homo sapiens
ttaggtcatgcaaagttttatgaataaaatggcatttgagcaaggagtgaagaaatggagaagcaaagagaatgtcaggagcaggaaaaaggcaggagaayagcagacaggtgtggcaaagccggaagaaaccattttgataggagtgaaggagttcctgttgggaagagtggaaacgagactggggaagcaggatgaggc

SEQ ID NO: 254514 - DNA, 201 bp, Homo sapiens
tgccctcagctactcagcacagaagcctgacattggggtgggaccattaggctgggattggttagtggctgagcccaagttcacccatccttcccctgcckctaacaggactttgccaataccattcctggccatggaggcatcatggatcgctttgactgccagtatctgatggccacctttgtcaatgtatacatcgcc

SEQ ID NO: 254515 - DNA, 201 bp, Homo sapiens
agtgaatgaaagctgctgtctgtttctagataaatttctcacctacggtgtcaccagagagcaggaaaccatggtctgcctgttgctctgtgagctgtccygggggactcaagggtggggggtattctgctgccctctgtcccttcctctgggatgtctgactgccttgctgtgaaggcaagggtgctccccacggcaatg

SEQ ID NO: 254516 - DNA, 201 bp, Homo sapiens
actgactttattgcctgtgatcccagcactttgtgaggctgaggtgggcggatcacgaggtcaggagtttgagaccagcctgaccaacatggtgaaacccygtctctactaaaaatacaaaaattagccacgcgtggtggcacgcgcctgtaatcccagctactcagggggctgaggcaggagaatcccttgaacctggga

SEQ ID NO: 254517 - DNA, 201 bp, Homo sapiens
agagtgcagtggcgcgatctcggctcactgtgacctctgcctcctggttcaagtgattctcctgcctcagcctccagagtagctgggattacaggcgcgcracaccacacctcgctaatttttgtatttttggtagagacagggtttcaccatcttggccagactggcctcgaactcctgaccttgtgatccacctgcttc

SEQ ID NO: 254518 - DNA, 201 bp, Homo sapiens
aatatatgacatatatatgttatatattgttatatataatatgtgtaattatatattataatatatgatatatatataatctatcatatatcatatatataatctatcatatatcatatataatctatcatatatcatatcatatataatatatatcatatcatatataatatatatgatgtatagtatatatgatatata

SEQ ID NO: 254519 - DNA, 201 bp, Homo sapiens
tgagcccttcaattaatatggccctttgttttcaaggaaagaagttatagcaagtaggtatctgttgtcccgggacaccattttagtggttttcattttcrtgcttgctccctggcctgaatctagaaagtaaaactttgctggaatgaagttggggttgaaacagtttcggtttgtaaccatactgtctctgtctcatct

SEQ ID NO: 254520 - DNA, 201 bp, Homo sapiens
tataatatatgacatatatatgttatatattgttatatataatatgtgtaattatatattataatatatgatatatatataatctatcatatatcatatatataatctatcatatatcatatataatctatcatatatcatatcatatataatatatatcatatcatatataatatatatgatgtatagtatatatgatat

SEQ ID NO: 254521 - DNA, 201 bp, Homo sapiens
tgcctgcctcggccttccaaagtgctgggattacaggcatgaaccaccgcgcctggccaatgagcagtaatgtttttaaaggaatcttgttttttttttttgagcagtgggtctcagcagtgggcttaaaacgtttagtaaaccatgctgtaaacaatgtgctgtcatctaggctttgttatcccgtttctagagcacaga

SEQ ID NO: 254522 - DNA, 201 bp, Homo sapiens
aatataattaaaatatattaattataatatataatatatgacatatatatgttatatattgttatatataatatgtgtaattatatattataatatatgatatatatataatctatcatatatcatatatataatctatcatatatcatatataatctatcatatatcatatcatatataatatatatcatatcatatata

SEQ ID NO: 254523 - DNA, 201 bp, Homo sapiens
taatataattaaaatatattaattataatatataatatatgacatatatatgttatatattgttatatataatatgtgtaattatatattataatatatgatatatatataatctatcatatatcatatatataatctatcatatatcatatataatctatcatatatcatatcatatataatatatatcatatcatatat

SEQ ID NO: 254524 - DNA, 201 bp, Homo sapiens
taatatatattataagataatataatatatattagataatatatataatataagataatatatattagataatatatataatataagataatatatattakataatataattaaaatatattaattataatatataatatatgacatatatatgttatatattgttatatataatatgtgtaattatatattataatatat

SEQ ID NO: 254525 - DNA, 201 bp, Homo sapiens
ccagctactcgggaggctgagctggaagaatcacttgaacccaggaggcagagttgcagtgagccgagatcacaccactgcattctagcctggctagagarcaagactccgtctcaaaaaaaaaaaaaaaaaaagaataggcaaataactagagaaaaatagtccagaaacagacctgaatatatataggaatttagaata

SEQ ID NO: 254526 - DNA, 201 bp, Homo sapiens
aggagatcgagaccatcctggccaacatggtgaaactccgtctctactaaaatacaaaaaattagccgggcatggtagcggatgcctgcggtcccagctaytcgggaggctgagctggaagaatcacttgaacccaggaggcagagttgcagtgagccgagatcacaccactgcattctagcctggctagagagcaagact

SEQ ID NO: 254527 - DNA, 201 bp, Homo sapiens
gatcgtgaggtcaggagatcgagaccatcctggccaacatggtgaaactccgtctctactaaaatacaaaaaattagccgggcatggtagcggatgcctgyggtcccagctactcgggaggctgagctggaagaatcacttgaacccaggaggcagagttgcagtgagccgagatcacaccactgcattctagcctggcta

SEQ ID NO: 254528 - DNA, 201 bp, Homo sapiens
ccagactggcctcgaactcctgaccttgtgatccacctgcttcggcctcccaaattgctgggattacaggcatgagccaccgcacccagcctttttttttyccttgaggagaattacagtctgcactgctctcagctgaactttacacagcttttacatttccctctgtcagttcctcttgtaatggtgggtgggtagctg

SEQ ID NO: 254529 - DNA, 201 bp, Homo sapiens
ttcagttttgtccagatccatcagagaaattactagctatggcagctatagccttataaaatgtatttctaggccaagcatggtcgtgcacacctgtaagmccagcactttgggaggccaaggtataagaatcacttgaggccaggatttcaagaccagcctggcaacagagaccccgtctctacacacacacacacacac

SEQ ID NO: 254530 - DNA, 201 bp, Homo sapiens
tttcagttttgtccagatccatcagagaaattactagctatggcagctatagccttataaaatgtatttctaggccaagcatggtcgtgcacacctgtaakaccagcactttgggaggccaaggtataagaatcacttgaggccaggatttcaagaccagcctggcaacagagaccccgtctctacacacacacacacaca

SEQ ID NO: 254531 - DNA, 201 bp, Homo sapiens
ttgagatggagtcttgctctgttgcccaggctagagtgcagtggcgcgatctcggctcactgtgacctctgcctcctggttcaagtgattctcctgcctcmgcctccagagtagctgggattacaggcgcgcgacaccacacctcgctaatttttgtatttttggtagagacagggtttcaccatcttggccagactggcc

SEQ ID NO: 254532 - DNA, 201 bp, Homo sapiens
agatgggatttcacagtgttagccaggatggtctcgacctcgtgatccgcccgcctcggcctcccaaagtgctgggattacaggcacaagccactgcgccyggtttgaggaaccactgactttgttgaggaacaaaaagaacgcctgcacctttttacaatcccagcagcagtgtatgagtgtatcagtttctccatatcc

SEQ ID NO: 254533 - DNA, 201 bp, Homo sapiens
cgacctcgtgatccgcccgcctcggcctcccaaagtgctgggattacaggcacaagccactgcgcccggtttgaggaaccactgactttgttgaggaacaraaagaacgcctgcacctttttacaatcccagcagcagtgtatgagtgtatcagtttctccatatccttgtcaacacttgttgttttttttaactgtagcc

SEQ ID NO: 254534 - DNA, 201 bp, Homo sapiens
tataaatttttcacagaccaaatactgtcttcagaaaaacccacagattcatcagacatattatagaattaatatgacatattatattatagaattaatawatatgacatatttataatttattatattatatatgacatatttataattaataaatatgacatagaattaatatgacatattatagaattaatattcatc

SEQ ID NO: 254535 - DNA, 201 bp, Homo sapiens
cagagccccagagtgtgccacttctggccagatccccaagcaccaacaggaaatacccacccctgcccgtggacaagctggaagaggaaattaaccggagratggcagacgacaataagctcttcagggaggaattcaacgtgagtactttgttgaggctggtgtatcagcagggaagaaggcagacctaaagtcagacct

SEQ ID NO: 254536 - DNA, 201 bp, Homo sapiens
aatgagagatttactccaatagaaccatactaaagatcttacacttatggattacagttgatagctttgtagagtgaactggtattccctttaaatgagaygacatgacctgagtataaagtataatcaactacatgactccagcaagaataccatgtgtccctcagatagcatagctggcagatggagttatgcacatca

SEQ ID NO: 254537 - DNA, 201 bp, Homo sapiens
tagttatataatcaaacagcagaataattttatatgaggtttattgatacagaaatgtttggttcagtgtttgtcttccagttttgcagattttcttttcrattttaaaactggagaatacattaaaaccagaaactttcagcctctataatgccctcaaaactcagcaggttttgaaaatgcctcttccttctcttctcc

SEQ ID NO: 254538 - DNA, 201 bp, Homo sapiens
ggagaatacattaaaaccagaaactttcagcctctataatgccctcaaaactcagcaggttttgaaaatgcctcttccttctcttctcctccccataatcytgcttatttttggcattaagtgagtcaggggttccaaacccaaatacgtttttcaaggctatgtagtcagtgtgaatgagagaagtaaatctgttgggtc

SEQ ID NO: 254539 - DNA, 201 bp, Homo sapiens
attacaggcacccgccaccacacctggctaatttttatatttttagtagagacagggtttcaccgtgttggccaggctggtcttgaactcctgacctcagkcgatctgcctgcctcagcctcccaaaatgcagggattacaggtgtgagccaccgtgcccagccatgaatcataagtgttcttaatggcatctacaatggt

SEQ ID NO: 254540 - DNA, 201 bp, Homo sapiens
ctggcaacagagtgagacgccatctccaaagaaaagaaaaagaaaaagaaaaaaattatttaactgtgataaaggagtatatgatatggttggacatggtrgctcacgcctgtaatcccaatactttgggaggccgtggcaggcagatcacacaagcccaggagtttgagaccagcctgggcaacatggtgaaaccccatc

SEQ ID NO: 254541 - DNA, 201 bp, Homo sapiens
caaaaaacaaaacaaaacaaaaaggccggatgcagtggctcatgcctgtaatcccagcactttgagaggccgaggtgagcagatcatgaggtcaagaaatygagactatctggccaacgtggtgaaaccccatctctgataaaaatacaaaaattatctgggtgtggtggtgtgcacctgtagttccagctacttgggagg

SEQ ID NO: 254542 - DNA, 201 bp, Homo sapiens
cttatgattgatatttaggtctatgattcatttttagttaaatttttgtgaaagataataaggtctgatatggattaatttttctatatgtagctgtccckttccagtatcatttgttgaaaagactatcttgctccattttattgcctttgctcctttgtcagttgactatatttatgtgggtctgtttatgatctctgt

SEQ ID NO: 254543 - DNA, 201 bp, Homo sapiens
ggggctgcagtgagctgagatagcgccactgcactctagcctgggcgacagagtgagactccatctcaaaaacaaaacaaaacaaaacgaaaaatctgccycctttttttttttcattcattcattaattctttagatggggtcttgccctgtcacccaggcggtagcgcagtgacacgattatagctcactgttgcctca

SEQ ID NO: 254544 - DNA, 201 bp, Homo sapiens
ttggtgatttgtgcctgaatcagttattatagtggttgctagatggtaaatttaaaaaatttcattatttcttctgaattcatcacttggcatttcttttyttttttttttttttttgagacggagtctcgctttgtcacccaggctggagtgcaatggcgtgatctcgtctcactgcaacctctgcctcccaggttcacg

SEQ ID NO: 254545 - DNA, 201 bp, Homo sapiens
acttgggaaatctttcactctgccttttgaaggacagcccagaaccatttccttcttggcacatgaccttctaacccagtgaccaaagagtatgtaaaagyatggtacacactgcttttgaagattacgtgtgtctattctagatgtgtcttatttcttgcagatatattgcctacaaagattttgatatatatatataca

SEQ ID NO: 254546 - DNA, 201 bp, Homo sapiens
tgagttgtggttgctgaaggttagggtggctatcataatttcttaaaacaacaatgaagttgccacaacagtgggctcttcctttcatgaaagatttcttrgtagcatgcaatgctgtctgatagcattttatccaaaatagaactttcaaaattggagttaatcctttcaaaccacgccgctgctttattaactaagtat

SEQ ID NO: 254547 - DNA, 201 bp, Homo sapiens
ctttagataggccacagctctcctgaagggattaagactttctgtgtgaaaaatggtattcagaaggaagccagcattaattctgtttttatacatttatsaagatttgaaggaatttcactgtcaattctgtcttaattgtattctgtataataaatcataatggtatccaacggctcttgaaaggtttggtttttgtga

SEQ ID NO: 254548 - DNA, 201 bp, Homo sapiens
tctaattctgtctttattttctgctttagataggccacagctctcctgaagggattaagactttctgtgtgaaaaatggtattcagaaggaagccagcatkaattctgtttttatacatttatcaagatttgaaggaatttcactgtcaattctgtcttaattgtattctgtataataaatcataatggtatccaacggct

SEQ ID NO: 254549 - DNA, 201 bp, Homo sapiens
cttaaacgatattttcagtttatggtgggtatattggaatatagccccattgtagggcaaggagcatctttatttacccagttgagtttagtggcagcagractaagttcggtttagctgttcagtgagccaagcctcacttagcatctaattctgtctttattttctgctttagataggccacagctctcctgaagggat

SEQ ID NO: 254550 - DNA, 201 bp, Homo sapiens
cattcattatgtgggtcaagaatttggacaggttgtaacagggatggtttgtgtctgtttcatagtgtctgaggcatcagctggaagactaaaaggttgayagctaggggctgaaatcatgtgaaagcttgctaactcacacacttggtgagtgacgctggttcttcactgggaccttagctggggtggtctgccagaaca

SEQ ID NO: 254551 - DNA, 201 bp, Homo sapiens
aacccgggagttgaaggttgcagtgagccaagatcctgccatagcactccagcctgggcaacagaatgagactctgtctcaaaaaaaaaaaaaaaaaaaaagaagagagggccaactgtatgtaatttactgaagcatggattcacattatagatggtccctgatttatgatggttcaacttatgatttttatactatgat

SEQ ID NO: 254552 - DNA, 201 bp, Homo sapiens
atttcaagatacataattttcttgggtgaaagtttcttttgtttctggtttctaggtatttgtgagatatttctctcacaaaacgtgttcttttcttctgktttttttttgggggttttttttgtttctttggttttttgagacagtctcgctctgtcacccaggctggagttcagtggcgcgatctcaactcactgcaac

SEQ ID NO: 254553 - DNA, 201 bp, Homo sapiens
accgtgtctctactaaaaatacaaaaattagccaggcatggtggcaggtgcctgtaatcctagctactctggaggctgaggcaggacaattgcttgaaccygggagttgaaggttgcagtgagccaagatcctgccatagcactccagcctgggcaacagaatgagactctgtctcaaaaaaaaaaaaaaaaaaaaagaag

SEQ ID NO: 254554 - DNA, 201 bp, Homo sapiens
gtgagtgacgctggttcttcactgggaccttagctggggtggtctgccagaacacctgcaacatggtggctgggtcccaaggacaagcatcccaagagggygccaggtagaatctggactgccttcctaacctagatttggaagttacgtggtgtcacatctgctagagtatttgtcacagcagtaatacaggcccacccc

SEQ ID NO: 254555 - DNA, 201 bp, Homo sapiens
ttaaaaaacacataccctaaacttaacgcaaaagtactactagtaccatgagtttgatataccatacctcattttattgctcatgtcttttctttctgggrttgtgatgccacttacccaattaaggaggacagttttatcatctcagaaagccatggttatcagattaaaaatacagaatcatgatacagttattattgg

SEQ ID NO: 254556 - DNA, 201 bp, Homo sapiens
ctgagttgtggttgctgaaggttagggtggctatcataatttcttaaaacaacaatgaagttgccacaacagtgggctcttcctttcatgaaagatttctyggtagcatgcaatgctgtctgatagcattttatccaaaatagaactttcaaaattggagttaatcctttcaaaccacgccgctgctttattaactaagta

SEQ ID NO: 254557 - DNA, 201 bp, Homo sapiens
agcgcccagcggagcgcaagggcggggcccgcgcgggccggagacgcccgttcgctgtcggccaaccagcgcctgtctctgaacagccaatgaacacgcgycttacagccaaggccgggtcgggagcgaggctgcggcgagtgcggcgctgacagagacgcgcgcgcgcgcgatcgcgctcggaccccggccgctgccgcc

SEQ ID NO: 254558 - DNA, 201 bp, Homo sapiens
gtgcctctagcctgtgagacccataaaaacagaagctgtggctagagacccatagaaacagaaacggtgggccttggtcatcctaacactgtccttttccytggccataggtctgcaaagtgcaccctcctgctggactgtgctgtgccaggaccgagtggcacacattcttctggctgtggggcctgacctttacctctt

SEQ ID NO: 254559 - DNA, 201 bp, Homo sapiens
accctcctgctggactgtgctgtgccaggaccgagtggcacacattcttctggctgtggggcctgacctttacctcttggaccatgcagcctgctccgcartggtaagggccctgagtgggaatgaagtggacgggctgggttaggcaatagggaggttctgaaaagtcagtatgtatctgtcccacccctaccctggctc

SEQ ID NO: 254560 - DNA, 201 bp, Homo sapiens
cctcctgagtagttgggactacaggcatgcgtcaccacacccagctaatttttgtatttttggtagagatggggcttcaccatattggccaggctggtctrgaactcctgacctcaagtgatccacccacctcagcctcccaaagtgcataagtgctgggattacaggtgtgagccaccacacccagcctactacatattc

SEQ ID NO: 254561 - DNA, 201 bp, Homo sapiens
tgtttacttaaaaactccctcgcttttctttttcccatgggatgaatgaagcctaaaatgccttatcaggtcatacaaagcccttgacaatcttgcctcartttactcctttacttttagcctaatcggatcctccaattctccttcccctcatcccgcttgctggctagtattcagagctgcttgactgccccctcacat

SEQ ID NO: 254562 - DNA, 201 bp, Homo sapiens
ggcctacatgcactttcagtcctttggaaattgttggtatttatttgccatttggcctagtttacccagattccacaggttgttaatgttgtacaattgcrtcttctctttctcacttcacccatctatgtaatttttctgaatcatttgagaaataagttgcaaacataatgctgtattacccataaatcagggtgtgtt

SEQ ID NO: 254563 - DNA, 201 bp, Homo sapiens
cacttaacatctgggtgaaatacagaaccagaaaaaccacccctctgacttcagtacattcatgtgtcttccctttgccaggtgaattgcttgggatacamaagtgaggaagtcagtccttaacctttgaggaactcagagtctaatgtaggacaggtggatataaatacatcacaggtgctataagattgtgataataat

SEQ ID NO: 254564 - DNA, 201 bp, Homo sapiens
gttcagtctcttttaatctagaatagttctcagtctttccttattttcagtgatcctaatatttttgaagagtagagaattattttgtagcaagtcccacwatttgggttagtctgatgtttccttttgaatagatttaggttatgcatttgtggcaggaataccaaagacacgatattatgttcttctcactgcatcgta

SEQ ID NO: 254565 - DNA, 201 bp, Homo sapiens
tttcaggctggctcctgtgtcctttttccatgtcctcatcattctttttttttttttttttttttttgagacagagttttgctcttgttgcccaggctggrgtgcaatggcgtgctctttgttcactgcaacctccacctcccaggttcaagcgatcctcctgcctcagccacccaagtagctgggattgtaggcacctgc

SEQ ID NO: 254566 - DNA, 201 bp, Homo sapiens
caagtcctgaatcagtaggtttggggtgggacttgggattctgtgttactaaccagctcctgggtgaggcagatgctgctggtgggtggatcacacttggygtagcaaggcctaattgagagcttggtgagcacctaaaactggctgaccatggtgagcaggaaggggcaggtggcttgcagtgacagagtaattctctgc

SEQ ID NO: 254567 - DNA, 201 bp, Homo sapiens
aattgtgatttttttaaagattgaaaccaaaatattttatacagatcataagatattcttggtaaacactaagcacctcataactttaccacaattttgaytgcacaactttcacctgtggttatcatgtgcaatgggcacattcaacacaaatcaaattattctgaagcttgctttctttcttttttccctactcccttt

SEQ ID NO: 254568 - DNA, 201 bp, Homo sapiens
gggcaacaagagcgaaactctgtctcaaaaaacaaaacaaaacaaaaaggccggatgcagtggctcatgcctgtaatcccagcactttgagaggccgaggygagcagatcatgaggtcaagaaatcgagactatctggccaacgtggtgaaaccccatctctgataaaaatacaaaaattatctgggtgtggtggtgtgca

SEQ ID NO: 254569 - DNA, 201 bp, Homo sapiens
tagtgcaatggcacgattttggctcactgcaacctctgcctcctgggttcaagcgattcttttgtgtcagcctcctgagtagctgggattacaggcatgcrccaccacgcccagctaattttgtatttttagtaaagacaggtttctccatgttggccaggctggtcttgaactcctgacctcaggtgatctgcccgcctc

SEQ ID NO: 254570 - DNA, 201 bp, Homo sapiens
ccctgacaagaggtaggtgagggcccaggctgcatgtgggtcccaggaccacctgcctctcctgcaacacctccaagcccagctttcctgcaggctctggyggctgaagctgactgccctggcagatttggaagattgggaagagctagagaagttttccaagagcaagaaatcacccattggctacctggtgaggcaggg

SEQ ID NO: 254571 - DNA, 201 bp, Homo sapiens
gttttgctcttattgtccagactgtagtgcaatggcacgattttggctcactgcaacctctgcctcctgggttcaagcgattcttttgtgtcagcctcctragtagctgggattacaggcatgcgccaccacgcccagctaattttgtatttttagtaaagacaggtttctccatgttggccaggctggtcttgaactcct

SEQ ID NO: 254572 - DNA, 201 bp, Homo sapiens
cagaggagctagccatccctctaggacatcagagtggtgcacctagcaggcaaggctgaccctggcgaccctgggcacagggatgggggagaagactgtakcctgggtgaggagggcgagggtcctgcatgctgtgagttcaggccttccttcttgtctttatagcgtattgaggggcgagtagcagctctgcagacagcc

SEQ ID NO: 254573 - DNA, 201 bp, Homo sapiens
agttttgctcttattgtccagactgtagtgcaatggcacgattttggctcactgcaacctctgcctcctgggttcaagcgattcttttgtgtcagcctccygagtagctgggattacaggcatgcgccaccacgcccagctaattttgtatttttagtaaagacaggtttctccatgttggccaggctggtcttgaactcc

SEQ ID NO: 254574 - DNA, 201 bp, Homo sapiens
tcctatcagtaccctaattttcacatgagaaatggtgtgttgggggaattcagctgttgtaattcaacaactcacacaaatttgtgtttgattttcagcartagcagctatgtggctacaaggaataagattctttttttttttttttttgaggcggagttttgctcttattgtccagactgtagtgcaatggcacgattt

SEQ ID NO: 254575 - DNA, 201 bp, Homo sapiens
gtggatctaaccagatatccctcttccaagtttcaggatctcattgtttcctatcagtaccctaattttcacatgagaaatggtgtgttgggggaattcarctgttgtaattcaacaactcacacaaatttgtgtttgattttcagcagtagcagctatgtggctacaaggaataagattctttttttttttttttttgag

SEQ ID NO: 254576 - DNA, 201 bp, Homo sapiens
gcaacatttttgtaaggttgttatcaggtgtaatagtgagcggagccactcccacttccacctcttgaatctaggccccaaatggaggagataacaccatrtaatcatctctgattaaaagcctaggctgcatcttataagaaagaaccccacccttttgaggacattgtcttgcaattggtgctataaccaagttgtcag

SEQ ID NO: 254577 - DNA, 201 bp, Homo sapiens
aggctggagatcatctattttcactcaagggtcttctcacaccccagtagaccatgcttctccagcagttcagctgccctgccacagaaatttcttcactrtttccagcaggggactgcaattgaggctaccggtacctcactacatccttaggtttaacgatttcctggtattcgattcgattccaaggtccatttactg

SEQ ID NO: 254578 - DNA, 201 bp, Homo sapiens
tcgagaccatcctggctaacacggtgaaaccccgtctctactaaaaatacaaaaaaaattagctgggcgtgatggcaggctcctgtagtctcagctactcrggaggctgaggtaggaggatggcgtgaagtcgggaggcggagcttgcaggagccgagatcgtgccactgtactccagcctgggcgacagagcgagacgct

SEQ ID NO: 254579 - DNA, 201 bp, Homo sapiens
tacgcctgtaatcctaacactttgggaggccgaggtgggcagatcacctgaggttgggggttcgagatcagcctgaccaacgtggagaaaccccgtctctrctaacgataccagtttgagaccagcctggccaacatggtgaaaccccatctctactaaaactacaaaattagctgggcatggtggtgcgtgcctgtaatc

SEQ ID NO: 254580 - DNA, 201 bp, Homo sapiens
gaataatagactgaatgtaaattaatggaacagctgctttgactgaacaaaagaatgaaattcattcattacttctctatgggcaggctgttgagtccacytatttgttaattatcttgtggtagagttgttgatgagttttgcatttttcttttttaaaaaaatgccaactttttgttatggtaagtggctacagtttga

SEQ ID NO: 254581 - DNA, 201 bp, Homo sapiens
ctggggtgttaggtggacggtgtgaatgggagtgctggtgcaggcaggaggcctgcaacacacagtgtcaatatggcaaggtaggccgggcatggtggctyacgcctgtaatcctaacactttgggaggccgaggtgggcagatcacctgaggttgggggttcgagatcagcctgaccaacgtggagaaaccccgtctctg

SEQ ID NO: 254582 - DNA, 201 bp, Homo sapiens
gatttccagccagtatttctctctccccagtttggggtgttagctagaatggtccctcaaagccctcaaacacggatgagaaatagaagaagctcagggaractatacctgggctaggttcttgctaccagctggtggaagacaaagaaaaccccttttcttcctgtatttcatgcccagtgagcagtagtgccatcagca

SEQ ID NO: 254583 - DNA, 201 bp, Homo sapiens
ttttgtatagaaataagaatagtaattttcacctgcttgtcaattaagttaatataaatttaacagatttaattgctccaggccccttacttagtgaattraatttccttagatgtttaaaatacatttacacagtcagtctgtcaggcacagtcagtccttgacaggtcagagttaccaccttaaacagaaacttcttaa

SEQ ID NO: 254584 - DNA, 201 bp, Homo sapiens
attccttgtcaggccctacagttattttaattttgggtgttggatagactagggttcatattccatgcctgccatgctttttgtgaacttgggcaaaatasttagctcttctgagactcacttttgtcacctagtaaatgggttcagctgtagtactctatgtatttgtttgttttaagcattagatagtgcgtggtaaat

SEQ ID NO: 254585 - DNA, 201 bp, Homo sapiens
aagacaataaaaagaggaaaaaagatttttgaagaaaacagtcctagttcttacaggcttggtccatgaggtagaaccccgtttagcctccagaagagggrctaggttctcagggtacctgactgaccttctcccttgtgtactgcagagccccagagtgtgccacttctggccagatccccaagcaccaacaggaaatac

SEQ ID NO: 254586 - DNA, 201 bp, Homo sapiens
aactgtatgctaatgtgagtgttctgaacacatttaaggtaggctaggctaactatggcattcggtaggtaaagtgtgttaaatgcatttcctacttaaaygatattttcagtttatggtgggtatattggaatatagccccattgtagggcaaggagcatctttatttacccagttgagtttagtggcagcaggactaag

SEQ ID NO: 254587 - DNA, 201 bp, Homo sapiens
ttctcacctcacagctgctggagtatgagccacgctcaggggagcaggtaccccttctcctaaagatgaagaggagcaaactggcactaagcaaggccatygagagcggggacactgacctgggtgagggcaaggctggggggcccctgggctaagtgggagcctggctggaattcccactccaccttactctcctgcagt

SEQ ID NO: 254588 - DNA, 201 bp, Homo sapiens
ggcaaggctggggggcccctgggctaagtgggagcctggctggaattcccactccaccttactctcctgcagtgttcacggtgttgctgcacctgaagaaygagctgaaccgaggagattttttcatgacccttcggaatcagcccatggccctcagtttgtaccgacaggtgtgtgtagtgggcagggttgtggtgtagc

SEQ ID NO: 254589 - DNA, 201 bp, Homo sapiens
taaagtataatcaactacatgactccagcaagaataccatgtgtccctcagatagcatagctggcagatggagttatgcacatcaactggacatttaagasagctggagatttcttacatttagatgacagtttagattagaaatatttaatcttagctgtacttaatatattatgtagctatatgatacatcatgtatat

SEQ ID NO: 254590 - DNA, 201 bp, Homo sapiens
tttgtctacaaggaggaaaccacagccagagggagtgcaggcctcactggagcttcaggcctctccctatttaacacccctagggccgaccatgcttttakaaagacagtgagagactcagggcctgagaaggtatttctttttttccttttcctacctgacttgtaaatgaaagtttgtgaaagtccttcaaggagatat

SEQ ID NO: 254591 - DNA, 201 bp, Homo sapiens
tgtagtgggcagggttgtggtgtagccttctgagcacttgagttggccttgctgactgattgcctgcctgtggccccagttctgtaagcatcaggagctaragacgctgaaggacctttacaatcaggatgacaatcaccaggaattgggcagcttccacatccgagccagctatgctgcagaagaggtctgagatccatg

SEQ ID NO: 254592 - DNA, 201 bp, Homo sapiens
cagtggctgattaccaattatggataaccagaacacatcaaaaagcagttcaacaaggatcagaataataacatgtaagtaccatttattaagtagttatrtgtaaggcactgtgtcagactgtataatgtacattatttaaccttcaaaagattgagagggaagatcccttgagtctgggaggtcgaggttgcagttagc

SEQ ID NO: 254593 - DNA, 201 bp, Homo sapiens
acttttgatagcatgtaaagtgtataaagcagctcaacgttgcttatgattcaaaagttagttgtctaaataacaacagtttaagtttcatatataagtgytgttctgtcctgtaattttaagttgaatttactattataaaattagcaaaagctaattctcaaagccatttattgtttgatcatagtgtctgaaagcagt

SEQ ID NO: 254594 - DNA, 201 bp, Homo sapiens
tttagaacatttccaacatcacaaaagttctattgcagaatgctatgaaaatgagatacactttcattagaaaagctagtaaaaataagtaggggtaatgrggtactttgactatccagaaattttactaaggaagaattagatttttataatactgggacattagtgtgcactttttttgtcgtaattgcattttgtttt

SEQ ID NO: 254595 - DNA, 201 bp, Homo sapiens
ctatcttttgaaaatcttttcatgtgcttgttggccattagtatatattctttggagaaatgtctcttaaattctttgcctattttttaaattggggggargttgtctttttttgttactgaattgtaagagttctttatctattctgataactagacccttatcagatacatgatatctgattaacacatagtttcttgc

SEQ ID NO: 254596 - DNA, 201 bp, Homo sapiens
cagcctgggtgacagagtgagacactgtctctaaaaaatagaataataaaaatcagttgactatagatttgtggatttatttctgaactcatttaaaactrttccattgatctatatatcactccttataccattaccacacagctttggttaccggtgctttgcaataagttttgaaatcaggaagtatgagttctccaa

SEQ ID NO: 254597 - DNA, 201 bp, Homo sapiens
caccatgttggccaggctgctttcgaactcctgacctcaggtgatctgcctgcctcggcctcccaaagtgctgggattacaggcataagccattgcacccrgcctctgtactccgcttttaattattttgggtatatatccagaagtggaattgctagatcatatggtaattctatgtttacttttttccatagcagctga

SEQ ID NO: 254598 - DNA, 201 bp, Homo sapiens
agctcctctttacaaaatagatcaggagagcgattttcctgtctgcttcctgaggaagcaaaaaggcagaaacatggtgagcagcaagaccagtggttgcygtagtaagcatgggacttcctatgaatggctctgttaacagtaggggatggtaatgttctttgatttgtggactctgtttgatttgtggacaaggtttta

SEQ ID NO: 254599 - DNA, 201 bp, Homo sapiens
cccgcatcccttgcaggtgcaacagaaggatgtctcagatgaggatgtggctcgagccattaaccagaagctgggggacacgcctggtgtctcttactccracattgctgcacgagcctatggttgtggccgcacggagctggccatcaaggtgtgggtgcccagccctccacagacactctgatgtggttgttcagggcc

SEQ ID NO: 254600 - DNA, 201 bp, Homo sapiens
ggctgggatggggggcattgggaatgtagtttgttctagagaggtttttttaagatgttaaagccttgaggctatttatgtgctgagggagtgagtactcrgaaagaaagcctggaatggcagtatcagatgccaccattcagttttcatgatggagtgaagggctagattttgaatagttcttggaataatcttaatatt

SEQ ID NO: 254601 - DNA, 201 bp, Homo sapiens
tcattttggatattgctccatgttttctatatccttggaaaatatttaattttgtaaaattttcattagatgtatcatttgatatcttacagttttatcgycataattattaggatctcttaaaagttgtatttctttcttttttttttttttgagacggagtctcactctgtcgcccaggcagctggagtgcagtggcac

SEQ ID NO: 254602 - DNA, 201 bp, Homo sapiens
aagaagaaggaagggagggaggaagggaactgaaggggtgggtcctaagggcttgcaggagtggagagtgaggaatggcatccagatgtttgtgacacccygcatcccttgcaggtgcaacagaaggatgtctcagatgaggatgtggctcgagccattaaccagaagctgggggacacgcctggtgtctcttactccgac

SEQ ID NO: 254603 - DNA, 201 bp, Homo sapiens
aagaagcctatggaacactgtccattgagcccaagtccataaggctggccttcccgatgcaacatccctgttccacaccctgccagttgactgtacccccrccccccagctgtgggcttctttgcttctgccacactgcctggatggcccttcctccctgtctttccactcctcacacccatgccccatttctttcctgtt

SEQ ID NO: 254604 - DNA, 201 bp, Homo sapiens
aagggtgaagtgaggaggaattaaggatggcacccactcatgactcattgaatttatagtcaaacatttaaaatacaaagtatgttttacattagttgtcycaagtcactagttgttccccatctgtacttgtgttaactttggtacaaggctttacacatattttctcaccctgatgtttcattacatcagggttttttt

SEQ ID NO: 254605 - DNA, 201 bp, Homo sapiens
ggctggacagggtttcctcacctgaggacagccttaggaacctctctcccctgcagtggaagagtggacccgtggtgtccctgggctggtcagctgaggargagctgctctgtgtgcaggaagatggtgctgtactggtttatgggcttcatggtgacttccggagacacttcagcatgggcaatgtaggggtcacagagg

SEQ ID NO: 254606 - DNA, 201 bp, Homo sapiens
gcctggcttaccctgctcgcccgccggctggagtctcccggcggcgttcgcccctgtcactactggcgctggggtccgccccgcgccggctctccccgagygtctgccacttagcgcacagccgcctttgggcagggagccgggccttcccctgctccagaaaaggaaactgaggcaagcacagtggtcaccccgaagccc

SEQ ID NO: 254607 - DNA, 201 bp, Homo sapiens
aaggtgtgggactggaagcgtcaccctagaagaggcactcactggagtcccccaagatgaccacgaacttgttgtgtagcagctgctggacttccgaggcmtggaagtggaccatgtcgcttcgcagcgggcggcgcggctcctcgctcgacagacagaagaccatgccgccaccagcaacgacaggctgcagggagaggc

SEQ ID NO: 254608 - DNA, 201 bp, Homo sapiens
actagtgtggccagaccacagaccttgcagatagtcatgagagaagtggcaagccatagagcagccagatttacatcttgaaaaaatgactcagctgggcrcggtggctcacgcctgtaatcccagcactttgggaggccaaggcgggcggatcacaaggtcaggagatcgagaccatcctggctaacacggtgaaaccct

SEQ ID NO: 254609 - DNA, 201 bp, Homo sapiens
aagcaacaaccatcaaaaattggctcacaattctgtgaatatcaatcaatgctgggtagctgtttggttcctctactggtcttttttttttttttttttttagacagggtctcactctgccacccaggctggagtgcagtggcatgatctcggctcactgtaacctccgcctcccaggctcaagcaattgtcctgtctcaa

SEQ ID NO: 254610 - DNA, 201 bp, Homo sapiens
ctggtgggtcagctggggtcaggagttcgagaccagcctggccaacatggcaaaaccccatctctaataaaaatacaaaaaattagccaggcgtggtggcrggcgcctgtaatccccagctacttgggaggatgaggcaggagaactccttgaaccttggaggcagaggttgcagtgagcccagatcgtgccactgcactc

SEQ ID NO: 254611 - DNA, 201 bp, Homo sapiens
cacctggtctttgtcgctgcagacatccttgaccaactgcactgctccctgattgttgttttagcccacggcctcctaggcatcccagctcttgccaccttctagggagacttaagtggccacctggcttcatggttctatgacctctactcaagtgattttatccatctcacccaccccctccctggatcccatcccacc

SEQ ID NO: 254612 - DNA, 201 bp, Homo sapiens
agcagacacagatggggttggaggggcaaagggcttattagaggagtaatgcctgtgaagaaaaggggaacggaacatgtttgggtatagggagccatcaractgcagtgcacacctgacgaagtctctgcccacccagattgcctgatagaggaataccacaagaggtagaaatggctaggctcttgtactaccactttg

SEQ ID NO: 254613 - DNA, 201 bp, Homo sapiens
agagattttcagccttggcattgttgacatttgggactggatactttgttatagggggttgtcctgtgatttgtaagatgcttagcagcatcctaggcctstatcccctagatgccagtagcccagcctccctgctattagttgtgacagtcaaaactatctttagacactgccatatgttccctagggaagggcctaatg

SEQ ID NO: 254614 - DNA, 201 bp, Homo sapiens
aagaacgatgggaagcctcaattaaaggatcttaacaaaaggttgatgtaattggatttgcaaggggtgtgtgtgtgtgtgtgtgtgtgtgtgtgtgtgtkttttaagttccttttgtaggcaatgctggggaaaagttggaaggaacaagcaaaatggaagcaagggagatggttaggagcctgatggaacagaacagga

SEQ ID NO: 254615 - DNA, 201 bp, Homo sapiens
tacacaaaagtgcacatacaaatgttcactgcagctttatgtattatagccagaaaaactgtaacccaatcaggtgtccaaaaacaggagaatagttaaayaaattgtgatatatggtcaggtgtggtggcttacacctgtaatctaagcacttgggaggctaaggcgggcagatcagttgaccagcctggtcaacatggt

SEQ ID NO: 254616 - DNA, 201 bp, Homo sapiens
atgggaatttaccttacactatccccccatttaatatttgtattatttcctgttctgctgctgtttattagtttcctcagacttctgtaacaaaactccaygaactgggtggcttaaacaatagaaatttattgtctcagagttttggaggctagaagtcttgcgggctgtgcgggagaatctgttctatgattttcttct

SEQ ID NO: 254617 - DNA, 201 bp, Homo sapiens
aaattagctgggcgtgatggcaggctcctgtagtctcagctactcaggaggctgaggtaggaggatggcgtgaagtcgggaggcggagcttgcaggagccragatcgtgccactgtactccagcctgggcgacagagcgagacgctgtctcaaaaaacctgtggctgggcatacaggtgtgcagaggacattggtggaaac

SEQ ID NO: 254618 - DNA, 201 bp, Homo sapiens
gcttaaacaatagaaatttattgtctcagagttttggaggctagaagtcttgcgggctgtgcgggagaatctgttctatgattttcttctagcttctggtwgcctcaggcatcccttacattgtagatggcattctctctgtatcttcagattgtcttccctctatgcatatctgtctcttgtgtccaaatttcctttttc

SEQ ID NO: 254619 - DNA, 201 bp, Homo sapiens
ttatatttttgacagccttccacccagccccatccttgtgcagtgcctggcacatacatggtagaaacatggaaaatactcaattagtaacggggtggatrgatacatgggttagatatttagctggggacatttgggcacaagcttccaaaagtcaggaatggatgttcccagcctcccagcatctttcttcttggtgta

SEQ ID NO: 254620 - DNA, 201 bp, Homo sapiens
tacgtaacttaaaaatactttattgctaaaatatgctagtgattatcagagtcttaagcaacgtgtagtatttgtgctggtggagggtcttgcctcagtgrtgatgactactaattaatctgagttgtggttgctgaaggttagggtggctatcataatttcttaaaacaacaatgaagttgccacaacagtgggctcttc

SEQ ID NO: 254621 - DNA, 201 bp, Homo sapiens
gatcggcatgctcaagttcctcaagaaggtgaaggcctgtaaccctcagtatgcaggggccatcgtggtccactgcaggtcagtgtggcctgacccttgtmcccccacccccacatttcgcccccatggccagagcaggggaacagcacaagggccctggctgaggaggctggcacagagtagatgacctactggggcacc

SEQ ID NO: 254622 - DNA, 201 bp, Homo sapiens
tgtccaaagtttctccccactgagatagcctgagatatgccctcgtgggaagggaagggtctgtgctgaggaggattagtgaaagaggaaggcttctttgsagttaagataagaggaaggcatctgtctcctgctcgtccctgggaatggaatgtcttggtgtaaaacccgatcgtacattctatttactgagataggaga

SEQ ID NO: 254623 - DNA, 201 bp, Homo sapiens
tgggcaagagcacaagggtggactgcctcagccgtacttccagccccaaccagtattcccctttccctcgccccaacctggagagatcccagaggcaggarttgatgatcaccaggtccggggcaggtccatatgtcagctcttccagaacatcctcaaggtactcggagtaaacacgagtgaggaagtagaagcgcacaa

SEQ ID NO: 254624 - DNA, 201 bp, Homo sapiens
attaattttatatagtgtgtgtatctggtatacatctgttctcatattttcaaaatgttcttaaatattttgtggtatttcctctttcagatgatcttttycccctatatgaacttttttttctttttctttttctttttttttgagacagagtctccctcagtcgcccaagctggagtgcagtggcacaattttggctca

SEQ ID NO: 254625 - DNA, 201 bp, Homo sapiens
aggggctgttaggaacatagcgtggcatcccccggtggaccactgggccccagtgctgaccatggggattagggccagggattggaggtggcagagggccrggcacaaagttcactccagggccacatcctacaaaagaaccagtcattataagagcaggcttctggccagagtgagtgcagctctgccttgaagcaactc

SEQ ID NO: 254626 - DNA, 201 bp, Homo sapiens; identical to SEQ ID NO: 50627

SEQ ID NO: 254627 - DNA, 201 bp, Homo sapiens
aatctggggaacatgggatgcctgactgtgcatttgccaacagtaaatccccttgtgaggcatgccagtggttaaggagatggtcctttcctcgtactctrgtaactctcaactcatcctgcacgttggaatcactttggttgtgttagagtagggagaagcaggcaacagtattttaaggcccctagccctccgaggtga

SEQ ID NO: 254628 - DNA, 201 bp, Homo sapiens; identical to SEQ ID NO: 50628

SEQ ID NO: 254629 - DNA, 201 bp, Homo sapiens
ggtttacagctaacagccttcatcttgatgacttagtatccagggatccattaaaagaagtctttttgtgtatgtatattaaaaagactggaaaaggctgyatacacaaaacacagtctaataaggccctctgtccttggggctagttaaccttaggttccagccaggctgctcagagtttgaattaggaatcagtttcca

SEQ ID NO: 254630 - DNA, 201 bp, Homo sapiens
gaggcagtgcagtctcctaggtgcttgactcacctttctcctcctttcctactccaaagactcctgacatcaaggatgtgatgggcctgcccctggccctycaggcaaccctggagacctgagcaaaggtcaccttcagccaaggggcagtgtggtactgcgaaaagaggacttagctgggagcactgcattttagttctg

SEQ ID NO: 254631 - DNA, 201 bp, Homo sapiens
tgcaaaactgaaattctgtaccctcaaacaactccccatttcctcctccccccagcccatggcaaccaccattctgttttctgtctcagaatttgactacyctagactccttatgtaagtggagtcatatagcacttacttcctgtgactggcttatttcacttagcataatatcttcaagatttatccatgttatagcat

SEQ ID NO: 254632 - DNA, 201 bp, Homo sapiens
gtgatggccgcggcggcggcctcgccacgtgacccggacgggcggaagcggaagtgccggcctggagcccgctctaggtgggtgtcccctcggtgcttccyagctgccgtctgcaccagccatggactgctacacggcgaactggaacccactcggggactctgccttttaccggtgagctgccccgccctcccgcccacg

SEQ ID NO: 254633 - DNA, 201 bp, Homo sapiens
cgccttgttagccaggctggtctcgaactcctgacctcaggtgatccacccgcctcagcctcccaaagtgctgggattacaggcgtgagccacttcacccrgccccaattttacagatgaggaaactggacctagaaattttaacagatgtgctcaagttcatacaaacacagactatctcatgtcagatcattgtgtgat

SEQ ID NO: 254634 - DNA, 201 bp, Homo sapiens
aaggcactgtggtagcaaaatccattccacccaccagtgccataaaaactaatataatgcctgatcgaggtgagccttaatgagaatttttttttttttttggctgttctggttgaagagaggcccagggcaccgatccctgaggcatccccagggcttctagagaacatgggtggaaaagcactagtccagggcatgttc

SEQ ID NO: 254635 - DNA, 201 bp, Homo sapiens
tatagttgaagaattcatggggtgggaagggctggcctgggaaaaaaggggtatcctggggcaggggtgggaagaggggaggtggcgagggctgaggaagygggtagggaaaaggcatgggaggaggcaaagaagaaggtgggggtgggagcaaggccaggtgctccccgaagtctggggtctgcctatggcttccctgga

SEQ ID NO: 254636 - DNA, 201 bp, Homo sapiens
actttgtcacccaggctggagtgcagtggcacgatcttggctcactgcagcctcaacctcccaggttcaagtgatcctcccacatagccctccaagtagcyaggactaaaggcacgtgccaccatgcccagctagtttttgtatttttttgtagagacagggtttcaccatgttgcccaggctggtcttgaactcctgggc

SEQ ID NO: 254637 - DNA, 201 bp, Homo sapiens
acaaagcccagaggcaacctcccccaatcttaagatcatggtttgggatacccactgcacacaggaatttgtcactctgttcttccatgcctttattggtracagcaatggacaagaacaataccaggcatagcagacaccctagcccagtacctgaggtgccaggcaggccctgaagggccattggcacatccagtccca

SEQ ID NO: 254638 - DNA, 201 bp, Homo sapiens
ccagggccctacctgtggttccttctgcacccctgcccttcagatctgtgatgggcaggaccaaagagcaggccgaagagctggaaccacgagcacaaggrccatctcggcccactgccctgtgataaaatgtggcccagtgaacatctccgcctctgtccagtcagatgcaggctcttccatccttgaaaaggacctagt

SEQ ID NO: 254639 - DNA, 201 bp, Homo sapiens
ccagtgctgaccatggggattagggccagggattggaggtggcagagggccaggcacaaagttcactccagggccacatcctacaaaagaaccagtcattrtaagagcaggcttctggccagagtgagtgcagctctgccttgaagcaactcttgtcctccaggtgagcttctctgtttccctatctacaaaaaagggata

SEQ ID NO: 254640 - DNA, 201 bp, Homo sapiens
acaaaattccaagccaggagaatctcaagagagtccacaggagcctggaaggtagcatttcccaaacagtctcttggcttcagggttccagctgaacatawgggaacagaggtcagggccctggtgagaagagcaatatggagccagagtggcctggaggtgcaggccaagggacaggcataatcttgtcaagttcagtta

SEQ ID NO: 254641 - DNA, 201 bp, Homo sapiens
cacaggagcctggaaggtagcatttcccaaacagtctcttggcttcagggttccagctgaacatatgggaacagaggtcagggccctggtgagaagagcartatggagccagagtggcctggaggtgcaggccaagggacaggcataatcttgtcaagttcagttactgggatcagtaatgtttcccctccccttcccaat

SEQ ID NO: 254642 - DNA, 201 bp, Homo sapiens
catgaagaagaaccgtgttttacagatcattccatgtaagagccctcccgccactccaaagccttattgccccatccctcaattccctccaccccttccayttctcaggtactagttaatgattggcgtatagacaagaatcatggcattgcctcttgttgcacccacttaacaacatggcgttgccttttgttgcacctt

SEQ ID NO: 254643 - DNA, 201 bp, Homo sapiens
acaaggcctcactggcccccaagttcactttctgttccattcatgttgtcaagtgtagctcccagaagtaattaacgcactaagcctaaatgatgcaatgraaggtgcctacatttatacagtgacactaccatcctcacctacaatattaagttcccagagaaaaaaattcgatcccataatataaattctgtacttaca

SEQ ID NO: 254644 - DNA, 201 bp, Homo sapiens
ggcccccaagttcactttctgttccattcatgttgtcaagtgtagctcccagaagtaattaacgcactaagcctaaatgatgcaatggaaggtgcctacayttatacagtgacactaccatcctcacctacaatattaagttcccagagaaaaaaattcgatcccataatataaattctgtacttacaaattaaaatctcg

SEQ ID NO: 254645 - DNA, 201 bp, Homo sapiens
atacaaaaattagctgggcgcgatggtgcatgcctgtgatcccagctactcgggaggctgaggcaggagaatcgtttgaaccagggagctgaaggttgcartgagccaagatcgcgccactgcattccagcctggtggcagagtgagactccatctcaaaaaaaaaaaaaaaagagttggctttctccctgcaagttctct

SEQ ID NO: 254646 - DNA, 201 bp, Homo sapiens
gagcacattccctgtatttggtagtcaaacaactcaccctggttccagaacagcctgaaagagactgacttgggccatcagctaaggaaaagccacagagrggttttttttgttgttgttttgttttgttttgttttgtttttttattgatcattcttgggtgtttctcatagagggggatttggcagggtcacaggacaa

SEQ ID NO: 254647 - DNA, 201 bp, Homo sapiens
gggcatgactcatatgcgcagcctcgtctgcagtggcctggcaactggtcctcctgctctcatcctaacccacttttagtttttcaaatggcagctgctgktccttttgaaaatataaatcattgtcactccttgtcttacaaatcctgtttgaggccaggtgcggcagctcacgcctgtaatcccagcactttgggaggc

SEQ ID NO: 254648 - DNA, 201 bp, Homo sapiens
cccagccccatccttgtgcagtgcctggcacatacatggtagaaacatggaaaatactcaattagtaacggggtggatggatacatgggttagatatttarctggggacatttgggcacaagcttccaaaagtcaggaatggatgttcccagcctcccagcatctttcttcttggtgtatattctcttcatttttgctgtt

SEQ ID NO: 254649 - DNA, 201 bp, Homo sapiens
acaaatgaggaagctgagcttacgagatgtctgtgaagcccattgtctgatcttttatttccttagtacctgggaatgcgcttttttttttttttttttttgaagaacaccaacagttgttcacccttccttgaatttgggtacactgtatatacagagtataccaatttagcctgccattagaacatgtcttcacgagca

SEQ ID NO: 254650 - DNA, 201 bp, Homo sapiens
ttttgaattctagcctgaacaagtcatccaacctttctggggctgatgacacccacctcagagcataataggaaggagtaaatgccatatgaagcacttasctcactgtcaggtccataatgtaggtattctgtgagcagtcatgatttctaattcccaactgtaatatccttgggagacatcattcgtgttctgtttata

SEQ ID NO: 254651 - DNA, 201 bp, Homo sapiens
tccagggttttaatctgaaaggaaatctcttgagtaggtgagggcagatggattttgaggtcctaatttccctatctttgggtctttcactttaatttctyctatcactgtcatgctggtttccagtaaatatatttgctcctttcttaaagctcttgcttcccagcctgggcaacatagcaagatccacctctacaaaaa

SEQ ID NO: 254652 - DNA, 201 bp, Homo sapiens
gatgagttgtcccaaaataagtgaatcagagtcacagtcctgtgggaattagcaggaactgtgacaagggctttggaattccactgtccagagagttgggrgtttgcgttttgcaaggggcagaaaagatgcccgctgacatctgggttttacattgcttagtacgagggaaatgcaaaagaaattgtgtgtctgggtgtt

SEQ ID NO: 254653 - DNA, 201 bp, Homo sapiens
acgtgctgcaggcctttgactttcagaaaatttggctgaggtggcaggccactgtatttttatgtctgacatgtacatctaagatacataacttcctgctyttcatgtctcacattgatgtcattagcatagttgtcaaggtaatgtcctgtgaaacagacaaaatcttgatgaaccagatcacaacacagaaaggtcaag

SEQ ID NO: 254654 - DNA, 201 bp, Homo sapiens
ggtttcaccatgttggccaggctggtctcgaactcctgacttctcaggtgatccgcctgcctcggcctcccaaagtgctgggattataggcatgagccacygcacctggccttatttttctttttgagatggagtctgactttgtcgcctgagctggagtgcagtggcgcgatctgggctcactgcagcctctgcctcccg

SEQ ID NO: 254655 - DNA, 201 bp, Homo sapiens
gccagtcggttctgcaaagctcccgccccgcagagaccgtgggtccaggttagccgtcggtgcacagcccagcgcccagcgctctccatgcgagcgtcgckgtggccccgacggcgcctcaggcctcggcgcctcgggctgcgacgctcacagcttccacttccgttcacccatgtctcgccctgagcgacccccagtgcc

SEQ ID NO: 254656 - DNA, 201 bp, Homo sapiens
taatgttcagatagtgggcaggagagcagcaggggagactggcagtggagaccccggttgtgctatgaacagagggtgaaagagaagaggagtcaagggtrtctcccaggtttgagcctgggttggtgtgaccagcagaagagagacagtaaagaggtttgtttgaggggaaaagttgaattttgtatggggcatgttgct

SEQ ID NO: 254657 - DNA, 201 bp, Homo sapiens
gatagtgggcaggagagcagcaggggagactggcagtggagaccccggttgtgctatgaacagagggtgaaagagaagaggagtcaagggtgtctcccagstttgagcctgggttggtgtgaccagcagaagagagacagtaaagaggtttgtttgaggggaaaagttgaattttgtatggggcatgttgctggaggttac

SEQ ID NO: 254658 - DNA, 201 bp, Homo sapiens
aaaaatgcactcctttacttagaatcctaacaacagcttacaaggcccaatatgttctgaggggtccctggccagggccgggagaggatggtgtgcaccaygggctggctctgagcacactcctgccatgggcctgagatgccagtttcccaggcagccacagggctttgcccaagccttccctgagtaccctgccagaac

SEQ ID NO: 254659 - DNA, 201 bp, Homo sapiens
tcccccacggtccaacaggtgagtccctccacagcacatggggccatgcaggaagggcacagggtacactgcctcccgacccagaacccctccaggctggkgggtccacagggcaaaggcgagcaccagctgcctgcccccacctcttctgccactcaccactgtcactcacccccttgcacagagggccatcacaggtgt

SEQ ID NO: 254660 - DNA, 201 bp, Homo sapiens
aaaccgtagtcctttggaggaggtaggaaaggtccagcatgagataaaaacgtagggggtgggtggtgttgagggggattggtctttgcttggtctccatrtgtttgagagtttattaaggcttgctgctttgtgtctcacagctttttagcctcacattcttcatgtgctatttccttgttttttggtgtttgtagttgc

SEQ ID NO: 254661 - DNA, 201 bp, Homo sapiens
gagtaaaacaaagtgtctgcctttaaacagcttttattctaatgcagggagacagagtaaataaatgtatgatagtcagagatggggtgagcatgtcatcytgggccccatgctctctccccacctcacctcaatagccctggcatggcagtgggaggtgcacactcatactttcttctctgtttccatttcctggcatct

SEQ ID NO: 254662 - DNA, 201 bp, Homo sapiens
gtaatgtcttccatctctaaaaacgaaaccaaaaaaaacccatctgtccacctcactcacatctccctccatctgtcattcctttcctctgcatcccttartgttaaaagtccccacgaaaggacccagtgtctcactgtcctttttctatctttatttcactccatttaggctttctcacccatattcaactgaaaatac

SEQ ID NO: 254663 - DNA, 201 bp, Homo sapiens
agaaggaaaatcagaggagtgtttcgttgtggaaagctaagagaggaaagtgcttcagagaggaaggagtgatcagccagtctgaacactcattttaaggygagagccacataccacagtatgtttgaaacttaccattaacaaagaagcgtcatgtaatgtcttccatctctaaaaacgaaaccaaaaaaaacccatctg

SEQ ID NO: 254664 - DNA, 201 bp, Homo sapiens
atcaacaaagtcaaatatgtaattataaagtgtgagaggtattatcaaggaaaataataaggtccttgccttacaaaaatagtataggaaataacagcaawtttttttttttttttgagacagagtctcgctctattgcccaggctgaagtgcagtggcgcaatctcggctcactacaacctctgccccccaggttcaagc

SEQ ID NO: 254665 - DNA, 201 bp, Homo sapiens
ctggagtacagtggtgtgatcttgggtcactgcaacctctaccctcccaggtttaagcaattcttgtgcctcagcctcccaaagtgctgggattaaagacrtgagccactgtgcccagcccattttggttttgatttttttttttctttgaaatagagtctcgctctgttacctaggctggagtacagtggcatgatctcg

SEQ ID NO: 254666 - DNA, 201 bp, Homo sapiens
tattatggatacttaataggccctttagagccttgatcttgcatttctgaaaattttctcccatttctttgaaaccttctccccctcttcctttttttttkttctcaaattcttaatatttggatattggatgtatcctgaattaattctttaatctttaaaatttttcctttctgttgatctttgctttgagtctttttc

SEQ ID NO: 254667 - DNA, 201 bp, Homo sapiens
ttaaccactgtcaattcttcagactctgacaatgggaccacaagaacagcaagcaccaattctataggcattacaatttcaccaaatggaacgtggcttcyagataaccagttcacggatgccagaacagaaccctgggaggggaattccagcaccgcagcaaccactccagaaactttccctccttcaggtactagagat

SEQ ID NO: 254668 - DNA, 201 bp, Homo sapiens
atatggtaagagcttatttatttttttgagagactaccaagctgccttccaaagtggatgtaccattttgcattcccaccagcagtgaatgagagttcctrctgctccatattcttacaaacatgtagtattgtcaaatgttttggattttaaaaccaaaatccattttcatagatgtgtagtggtatcccgttttaattt

SEQ ID NO: 254669 - DNA, 201 bp, Homo sapiens
tcacttagtaatatatgtttaagtttcttctacgtattttcatgtttttagcttatttctttttagcagtgagtaatatttcattgtctggatgtgccatsacttatttatccattcgcctgctgaaggatatcttgattgctcccagtcgtggcaattataaataaagttgctgtaaacatccatgtgcaggtttttttt

SEQ ID NO: 254670 - DNA, 201 bp, Homo sapiens
gctttaaataaatcaaagagattatgtgttctttcctgaaaagtaaaataaattgttgacatttacaactctatatatggtttctgaggaactaagtgaakaatcttgtgtctttctcccttaaaccgtagtcctttggaggaggtaggaaaggtccagcatgagataaaaacgtagggggtgggtggtgttgagggggat

SEQ ID NO: 254671 - DNA, 201 bp, Homo sapiens
ttgggattacaggcatgagtcaccgcacctggccttttttattttctttttttttttttaaccagtgatcttttactgtctccatggtttttcacattggyttctgtcacttagtaatatatgtttaagtttcttctacgtattttcatgtttttagcttatttctttttagcagtgagtaatatttcattgtctggatgt

SEQ ID NO: 254672 - DNA, 201 bp, Homo sapiens
tgagcatttttctgtatattaacacagaagtaaaataatgaaatagcatttattgtggttcttcctatatggcccatagtctcgtttcaagtatcaatttscaccaatttgaaatgctagctttattatttgctcaattctgagatcttttcctagactccatcctcttccattgatctatttgcacattcctgtgccaaa

SEQ ID NO: 254673 - DNA, 201 bp, Homo sapiens
agcgctctccatgcgagcgtcgcggtggccccgacggcgcctcaggcctcggcgcctcgggctgcgacgctcacagcttccacttccgttcacccatgtcycgccctgagcgacccccagtgcccgaagggaaagcaaggcgatggaggtggccgccacagggcgcaggagccagggctgggcccacttggcgggcgcgaa

SEQ ID NO: 254674 - DNA, 201 bp, Homo sapiens
tcttcatcctagctctaatccctgttccacttccctgtctcttacagaaagcaaccagcttgtcagatagggtttcgtccttggccacaggggagctctgyatgggctgagtttgcctccgagcagtccccattcccttctagtggtctgtcttctccactagtccctctgtgattaaaccatctcacccttgcaattaac

SEQ ID NO: 254675 - DNA, 201 bp, Homo sapiens
ttactcaccttattgctgtctgagaaaggaaatgggtgattcacaatccttaaatcaagtggctttctcttacctagaacttctgaattgaacatacatttaaacaatgacgttgaaaagatgtataactggagcaataaagactgaaaaagaaagctgcggccagttgttagtttttccgaggctccttatctgttgagt

SEQ ID NO: 254676 - DNA, 201 bp, Homo sapiens
tggccccagttctgtaagcatcaggagctagagacgctgaaggacctttacaatcaggatgacaatcaccaggaattgggcagcttccacatccgagccakctatgctgcagaagaggtctgagatccatggggcgtgtggggcgtgtggggcatgtgggctggggctgttggtccggttccttcaggaatctaggccttc

SEQ ID NO: 254677 - DNA, 201 bp, Homo sapiens; identical to SEQ ID NO: 50622

SEQ ID NO: 254678 - DNA, 201 bp, Homo sapiens; identical to SEQ ID NO: 50624

SEQ ID NO: 254679 - DNA, 201 bp, Homo sapiens; identical to SEQ ID NO: 50625

SEQ ID NO: 254680 - DNA, 201 bp, Homo sapiens
aaaaaaaatcctctttggtcttccagagatcttgagagaaaatccgcccatgtatacaaaatttagagacttttgatcagatgtggtggctcacgcctgtrtaatcctaccactttgggaggctgaggcaggtggatcacctgaggtcaagagtttgagaccagcctggccgacatggtgaaaccctgtctctactaaaaa

SEQ ID NO: 254681 - DNA, 201 bp, Homo sapiens
ctgtctcccaagctgtagtgcagtggcaccattcgtatctcactgtaacctcaaactcctggacccaagcaatcctcctgcctcagccttccatgtagctwcgtctacaggcatgtgccaccatacccggctaactttttttttttttttttttttgagagttttgctcttgttgcccaggctggagtgcaatggcatgat

SEQ ID NO: 254682 - DNA, 201 bp, Homo sapiens
acaaaaaatctgctaatctcactttcccttccacctactatcctatttctctgcaccccttcccagcaaaactcctttaaagagttggctttcggccaggygcggtggctcacgcctgtaatcccagcactttgggaggccaaggtgggcggatcacaaagtcaggagatcgagaccagcctggccaacatggcaaaaccc

SEQ ID NO: 254683 - DNA, 201 bp, Homo sapiens
catgtggtagcatgtgtcagaatttccttcctttttaaggctaacattccatcctatgtatataccacattttatccattcatctgttgatggacatttawgttgcttcctccttttggctattgtgaataatgctgctgtgaatgttgttgtataaatatctgttcgagttcctgctttcaattcttttgagtatgttcc

SEQ ID NO: 254684 - DNA, 201 bp, Homo sapiens
aaaacaaaaaatctgctaatctcactttcccttccacctactatcctatttctctgcaccccttcccagcaaaactcctttaaagagttggctttcggccrggcgcggtggctcacgcctgtaatcccagcactttgggaggccaaggtgggcggatcacaaagtcaggagatcgagaccagcctggccaacatggcaaaa

SEQ ID NO: 254685 - DNA, 201 bp, Homo sapiens
tgtgattttctttcttgtaatgtttctgtccagttttggtgcctggttttgctctctccttagaatgagctgggaactagtcactcttgttttctcacctrtaatagcatctgggtccagtgttttttatgtgggacaaatttgaacttgtggtcaacctctttaattgtaagaatattcaggtcttttgttcttcctggg

SEQ ID NO: 254686 - DNA, 201 bp, Homo sapiens; identical to SEQ ID NO: 50630

SEQ ID NO: 254687 - DNA, 201 bp, Homo sapiens
taactttggtacaaggctttacacatattttctcaccctgatgtttcattacatcagggtttttttttttttttggttttgtttgtttgtttgtttgtttktttgagagagggtctcactttgtcacccaggctggagtgcagtggcacgatcttggctcactgcagcctcaacctcccaggttcaagtgatcctcccaca

SEQ ID NO: 254688 - DNA, 201 bp, Homo sapiens
ctcagggaataggaaggcctgaagagagagagagagagagacgatcggggaacggctcgttggtggagcagtcagaacacatacaacatttatccgttaarctcaccatcatgtatgggtgcagtttgtggcaccccaaaacaattatagtagtaacatcactgatcacagatcaccatatcagatataataataatgaaa

SEQ ID NO: 254689 - DNA, 201 bp, Homo sapiens
tggaaataacgtaaaagccaaaggctttctccctaatgagctaggaacagacatgtccttgcccagctgggattctgtctgcccagggcctgaggtggtgggagcaatgcaaggagagggagaggacaaatgatattggctagccataagccgctattcttcttacagatgaattcaacagagtgatcattccagttaagc

SEQ ID NO: 254690 - DNA, 201 bp, Homo sapiens
acttaaaactttaaaccattttggaatattgcatgaaatagagacctaatttttgctgagtagttcagcagtttctagtactgtttactaaataatctatkaaaattttctgcggattcctaaatgattttgtccaggctggagtacagtggcacaatcatggctcactgcggcatctacctccccaggctcaggtgattg

SEQ ID NO: 254691 - DNA, 201 bp, Homo sapiens
tgaacagttagagggtttttaattagcctaatttctacactgtgtgtctcagggaataggaaggcctgaagagagagagagagagagacgatcggggaacrgctcgttggtggagcagtcagaacacatacaacatttatccgttaaactcaccatcatgtatgggtgcagtttgtggcaccccaaaacaattatagtagt

SEQ ID NO: 254692 - DNA, 201 bp, Homo sapiens
ctggaaataacgtaaaagccaaaggctttctccctaatgagctaggaacagacatgtccttgcccagctgggattctgtctgcccagggcctgaggtggtgggagcaatgcaaggagagggagaggacaaatgatattggctagccataagccgctattcttcttacagatgaattcaacagagtgatcattccagttaag

SEQ ID NO: 254693 - DNA, 201 bp, Homo sapiens
ccactcaagatatcccaaacccaaatcttcagactggagacccaggactgttttttaaaagctccctctctctccctgtgagtcagatgatttagcctagsttggatgtaacactgggtgtgaggtgatagaggcatgaaatgggttggtggttatgcaagtagaaagaccagagagaacctgggaaaagagacatttcga

SEQ ID NO: 254694 - DNA, 201 bp, Homo sapiens
caaaaaggctactttgctttcttatcattcctgtattcactggagtagcacttttaatttccttcaagaacttttcctttgcattcacaagttggctaacwggcacacgaggcctagcttttgtcctgtcttggctttcaacgtgccttcctcactaaggttagtcgtttctagcttttgatttaaagtgagagatttgcc

SEQ ID NO: 254695 - DNA, 201 bp, Homo sapiens
taaatttctgttgttgaacccaccgagtctgtgatacttttatggcagccctaccaaatgaatatagacatttaagaaggcttggtgcattgcagcatttsgtaaattattatgcatttcgttgtattgtgcatgtagtgccattactgagaatagcaggatggatgggaagcatcgagacaaagtaaaatacgagctggc

SEQ ID NO: 254696 - DNA, 201 bp, Homo sapiens
cttgtgcttaataagaaatgtgggccatgtctgcctgagcctttatttaatgcattttaaaatttgctgggttttttcctccctttaaaccttactatcargttcagtaataagttaaactaaaaagaaacggatgccttagaataaagaaagattcaaattaataggatatataatggcctttcatggtggtggaatttc

SEQ ID NO: 254697 - DNA, 201 bp, Homo sapiens
gagtgcagtggtgcaatctcggctcaccgcaacctccgcctcctgggttcaagtgactcctctgcctcaatctcccgagtagctgggaccacaggcgcackccaccatgcccggctaatttttgtatttttagtagaggcggggtttcaccatattggccaggctggtctcaactcctgaccttgtgaactgcctgcctcg

SEQ ID NO: 254698 - DNA, 201 bp, Homo sapiens
gaatctcgctgtgtcacccaggctggagtgcagtggtgcaatctcggctcaccgcaacctccgcctcctgggttcaagtgactcctctgcctcaatctccygagtagctgggaccacaggcgcactccaccatgcccggctaatttttgtatttttagtagaggcggggtttcaccatattggccaggctggtctcaactc

SEQ ID NO: 254699 - DNA, 201 bp, Homo sapiens
ccccgtctctacacacacacacacacacacacacacaaattttttagccaagtgcactagcatgcgccagtagtcccagctactcaggaggctgaggttgsagcatcacttgagtccaggagtttgaggcttcaaggctacagtgagccatgatcacatcactgcactccatcctgggcaacagagcaagacaatgtcttt

SEQ ID NO: 254700 - DNA, 201 bp, Homo sapiens
tagtcccagctactcaggaggctgaggcgagagaattgcttgaacccggaaggcagaggttgcagtgagccgaaatcatgccactgcactccagcctgggygacagagcgagactccatctcaaaaaaaaaaaaaaaaaaagtgctttctcagaagcaggagattctgggttggggtggggaggaccacttagagaagttc

SEQ ID NO: 254701 - DNA, 201 bp, Homo sapiens
ttgttaaaaatgtgtttgcaggcagtatgcttggtaaaagtcatcgccgttctccagtctcaagcacccagggacacaatgcactgcggaaggccgcaggracctctgcccaagaaagcctgggtgttgtccaaagtttctccccactgagatagcctgagatatgccctcgtgggaagggaagggtctgtgctgaggagg

SEQ ID NO: 254702 - DNA, 201 bp, Homo sapiens
tgtcttagaacattttctaacaactttattgagatgtaattcaaataccatgtatttcacccagagtttacaattcagtgtttttttaagtatattcacakataactgcagcccatcaccaattttagaacattgtcatcccctcaaaagaagaaccttacactctagctgttgcccccttagttttagaacacattgctc

SEQ ID NO: 254703 - DNA, 201 bp, Homo sapiens
aggaggtctaaggtcagggaatgtatgtctttttctttccagtgcaagtgcgcccagtactggccagaccaaggctgctggacctatgggaatattcgggygtctgtagaggatgtgactgtcctggtggactacacagtacggaagttctgcatccagcaggtagtgtctcctctgtcctttctcagttcttatgttgga

SEQ ID NO: 254704 - DNA, 201 bp, Homo sapiens
gtgcatgcctggcctaaccagctctatcactgggccacagccagagccaattctgggtcctggggtcgagccccagcgaggaatacctatttgttaccgtstttctcaaggatggcccttgagtcaccttgatcctagggtatcgggtgtcatgatcaacagctccacagtggcatgggaagacagtgctagggctgggct

SEQ ID NO: 254705 - DNA, 201 bp, Homo sapiens
gggtttcactgtgttaggcaggatggtctcgatctcctgacctcgtgatccacccacctcggcctcccaaagtgctgggattataggcgtgagccaccacrcccggcccacagaggagcttttttcccctggtttctctagttccttatttccctggttttctgccccacctgctgaggcctttggtatatcctggatcag

SEQ ID NO: 254706 - DNA, 201 bp, Homo sapiens
gaagggcagtggtgccatctcggctcactgcaagctccgcctcccgggttcacgccattcttctgcctcagcctcccgagtaccacccgccaccacgcccrgctaattttttgtgttttttttagtagagacggggtttcactgtgttaggcaggatggtctcgatctcctgacctcgtgatccacccacctcggcctccc

SEQ ID NO: 254707 - DNA, 201 bp, Homo sapiens
gagtctcgctctgtcgcccaggctgaagggcagtggtgccatctcggctcactgcaagctccgcctcccgggttcacgccattcttctgcctcagcctccygagtaccacccgccaccacgcccggctaattttttgtgttttttttagtagagacggggtttcactgtgttaggcaggatggtctcgatctcctgacctc

SEQ ID NO: 254708 - DNA, 201 bp, Homo sapiens
cagtctttataaagactcaattagttattggatatctgaggaagcatgcatatcaggctcccaaaagatcattggtttaggcacacattttaatagcttgraaatccagaatactcttctggtgaccagctcagacatagtcctgataatataggacctcatctaacatgactccctattttccagataagcatggattcc

SEQ ID NO: 254709 - DNA, 201 bp, Homo sapiens
ttgcctgtcccatcatactcacaccttagcttgtgacctggcctcattcttctccaagaaatcagacaagaacactgtcatcctcccacccccaaacaacyagcctcttcaaatctgtaccaactctattctctcttgttacagtggaaaagggtttctgcatctctcaatccacctgtccactgtgctcttggccccatt

SEQ ID NO: 254710 - DNA, 201 bp, Homo sapiens
gttttgttttgttttttgagacggagtctcgctctgtcgcccaggctgaagggcagtggtgccatctcggctcactgcaagctccgcctcccgggttcacrccattcttctgcctcagcctcccgagtaccacccgccaccacgcccggctaattttttgtgttttttttagtagagacggggtttcactgtgttaggcag

SEQ ID NO: 254711 - DNA, 201 bp, Homo sapiens
ttcccagacggggtggcggctgggcagaggctgcaatctcggcgctttgggaggccaaagcaggctgctgggaggtggaggttgtagcgagccaagatcaygccactgcactccagcctgggcaccattgagcactgagtgaacgagactccgtctgcaatcccggcacctcgggaggccgaggctggcagatcacttgcg

SEQ ID NO: 254712 - DNA, 201 bp, Homo sapiens
tggatccttaaccgaggaaaatacagatataagcagctcaccatccaggtgctgctggacaggtagggtaagcccaagggtgcagtgagcgggctgtcagsggggtgggcattacagccttgggtggggtcttatggtcactgctcctgacctatctaggatgtgggaggcctgatgtgcaggctgaggccactctgctcc

SEQ ID NO: 254713 - DNA, 201 bp, Homo sapiens
ccgtggtggtggcctgggaaaggcggctgatggtggtgggcgatgcacccgagagcatccagtatccttggagggctgcctgtgtgtggagagaggggagrggagggttcacctgccccgtcccatctgtaggtgctcttaggagccttaaccaagctcaggtttgtgctggatgaggactcctacctggtgcctgagctc

SEQ ID NO: 254714 - DNA, 201 bp, Homo sapiens
gattcctggttcattcttgttctgctcggcagtggtctgatatgtgtcagtgccaacaatgctaccacaggtaaattgtcatttgataaggctgctatttraaatgaaattttgctttcacatttaatgagccacatttgaaaaccgagatggtatttgaagaaaggaatataaaaattttattcaaagtgatggtaaaat

SEQ ID NO: 254715 - DNA, 201 bp, Homo sapiens
gcagccatagatggtatgtaaatgaatgaacatggccatgttctgatagcattttatttacaaaaacaggcagtgggctaaatttgggctatagtttgccracccctcttctaggcaaagaactgcctgagcgtaggaagctggactgaggttctctgctagtgtgtgaacttgtggatgccaaagccaatctcttccctt

SEQ ID NO: 254716 - DNA, 201 bp, Homo sapiens
gcattaatcctaaaagccaggtgggagcactccaagtgtccattgacggatgagtgaataaattaaatgtggtacatgcatacagtggaatgttattcagmctttaaaaggaaggaaattctaatacatgctacaacatggatgaacctggaagacatcatggtaagtgaaataagccagtcacaaaaggacaaatattgt

SEQ ID NO: 254717 - DNA, 201 bp, Homo sapiens
ccccacctccctcccggacgaggtggctgccgggcagagacgctcctcacttcccagacggggtggctgctgggcggaggggctcctcacttctcagaccsggcggctgctgggcggaggggctcctcacttctcagacggggcggttgccaggcagagggtctcctcacttctcagacggggcggccaggcagagatgct

SEQ ID NO: 254718 - DNA, 201 bp, Homo sapiens
tctcagcactttgggaggccaaggcggtggatcacttgaggtcagaagtttgagaccagcctgaccaagatggtgaaacctcatctctactaaaaaaaaamaaaaaacaaaaaaaaaaaaaacaacttagccgggcgtggtggcaggcgcctgtaatcccagctacttgggagattgaggcagagaattgcttgaacccgg

SEQ ID NO: 254719 - DNA, 201 bp, Homo sapiens
ccgggcggggggctgatcccccaacctccctcccggacggggcggccggccgggcgtggggctgacccccccacctccctcccggacggggcggctggccrggcggggggctgacccccccacctccctcccggacgaggtggctgccgggcagagacgctcctcacttcccagacggggtggctgctgggcggaggggct

SEQ ID NO: 254720 - DNA, 201 bp, Homo sapiens
gctgctgggcacacctcccagacggggtggtggccgggcagaggggctcctcacttcccagtaggggcggccgggcagaggcgcccctcacctcccggacrgggcggctggccgggcggggggctgatccccccacctccctcccggacggggtggctggccgggcagaggggctcctcacttcccagtaggggcggccgg

SEQ ID NO: 254721 - DNA, 201 bp, Homo sapiens
ggtaaggtcacagatctacaggatcccaaggcagaagattttttcttagtatagaacaaaatgaaaagtctcccatgtctacttctttccacacagacacrgcaaccatccgatttctcaatcttttccccacctttcccccctttctattccacaaaaccgccattgtcatcatggcccgttctcaatgagctgctgggc

SEQ ID NO: 254722 - DNA, 201 bp, Homo sapiens
taatcactggctaggacattgagaatgatcatgatttacccctctgagcctggggaatgggcaccttccaagccagtgaaaggttaatgtccaaacaaaaytgtggctctaatggcaaagaagaaagggaggaatggatttgagttagtaaccagcagcatctgccaccgtaaccagtttggtcccttcccacattgaagg

SEQ ID NO: 254723 - DNA, 201 bp, Homo sapiens
cgcccttaatccattcaaccctgagtggatacagcacatgtttcagagagcacagggttgggggtaaggtcacagatctacaggatcccaaggcagaagawtttttcttagtatagaacaaaatgaaaagtctcccatgtctacttctttccacacagacacggcaaccatccgatttctcaatcttttccccacctttcc

SEQ ID NO: 254724 - DNA, 201 bp, Homo sapiens
ggctaggacattgagaatgatcatgatttacccctctgagcctggggaatgggcaccttccaagccagtgaaaggttaatgtccaaacaaaattgtggctytaatggcaaagaagaaagggaggaatggatttgagttagtaaccagcagcatctgccaccgtaaccagtttggtcccttcccacattgaaggtgaaaact

SEQ ID NO: 254725 - DNA, 201 bp, Homo sapiens
aaggtctctggttttcctaggcagaggaccctgcggccttctgcagtgtttgtgtccctgggtacttgagattagggagtggtgatgactcttaacgagcmtgctgccttcaagcatctgtttaacaaagcacatcttgcaccgcccttaatccattcaaccctgagtggatacagcacatgtttcagagagcacagggtt

SEQ ID NO: 254726 - DNA, 201 bp, Homo sapiens
tggatgtcaagtgtgtccattggagttcttacttgcagactatagagtgtacttttcatccactcttttaagcagaaaggggtttattataagatactggktaccttaacaaaacctgtggaagagccagtgagccaagctcagatgctgctcagcaaagagcagagcagctatagatctatgcagcatgtgactgtcata

SEQ ID NO: 254727 - DNA, 201 bp, Homo sapiens
agccaccctagtagctggaattacaggagtgcaccaccacgcccggctaatttttgtattttagtagagatggggtttcaccatgttggccccatgctctcacactcttgaccttagatgatccgcccaccttggcctctcaaagttctgggattacaggtgtgagctaccacgcctggcctggatttcttattctagtat

SEQ ID NO: 254728 - DNA, 201 bp, Homo sapiens
attggagttcttacttgcagactatagagtgtacttttcatccactcttttaagcagaaaggggtttattataagatactgggtaccttaacaaaacctgkggaagagccagtgagccaagctcagatgctgctcagcaaagagcagagcagctatagatctatgcagcatgtgactgtcatagtgaaacctctgcacagt

SEQ ID NO: 254729 - DNA, 201 bp, Homo sapiens
ccgtggggtaccattgaaaagtgttcaaggcagggagtagtgtgaccacatttacatattgatcactggggctatcatgtacaacatggatttaggagggkccaattgggggctattgcaatagcaggtagatcacaaatgatgagggttgacaaggaagcggcgacaaagtgaaaactacgtggaggtagaatttagcag

SEQ ID NO: 254730 - DNA, 201 bp, Homo sapiens
ggaggctgaggcaggagaacggcgtgaacctgggaggcggagcttgcagtgagccgagatcacgccaccgcactccagcctgggcgacagagcgagactcygtctcaaaaaaaataaataaataaaaaataaaaaaaataaacacagcatccagcacagaagaggaacatatctgcctatgcttttctctctgttagggag

SEQ ID NO: 254731 - DNA, 201 bp, Homo sapiens
cgggtaagagaatactcaactaaaagttgtctagatgggaacattttttttttttctggagacagtctcaccccgacacccaggctggattgcactggtaygatcttggcttactacgacctctgcctcccgggctcaagcgattctcatgccttagcctccctagtagccaggattacagacatgtgccaccatgcccag

SEQ ID NO: 254732 - DNA, 201 bp, Homo sapiens
caacttagccgggcgtggtggcaggcgcctgtaatcccagctacttgggagattgaggcagagaattgcttgaacccgggaggcggaggttgcagtgagcygagatggcgccactgcactccagcctgggcgacagggtgagactgtctcaaaaaaaaagaagagtcaaaatggctaaaatcgtaaattttatgttgtatt

SEQ ID NO: 254733 - DNA, 201 bp, Homo sapiens
ctgaggattcttgtgttgttgaactctaaggagcttgtggctgtttcgggggagaggagcattctctgtgttaggctgcaggtattcacctgggcccatgkttttccccccaggaaaaggtagaacatgctaccaggtcagggtttggtgcagcagtttgcatgtttgatgtttatccctgctaataattcctctaatttc

SEQ ID NO: 254734 - DNA, 201 bp, Homo sapiens
tgtgctttgggggaagatgaagtaaattcatggatttagcccagtgtcttaagccaaaggtgcctaattactttcttcttcttctttttttttttttttttgaggcagagtctcgctccgtcacccaggctggagtgcagtggcacgatcttggctcactgaaacctccgcctcctgggtacaagcgattctcctgcctca

SEQ ID NO: 254735 - DNA, 201 bp, Homo sapiens
tctctaattcctagctctaaagctaatcccttgtgaatatctagactggaaatccccgttaagtacctgcacattttcaggttttgttaactggttggagwcagactggagaatttcatttctattcatttttggttttctctttctttttctttccttccccacaccccagggctaccaagaaaagaacaaattcattgc

SEQ ID NO: 254736 - DNA, 201 bp, Homo sapiens
tttcaggttttgttaactggttggagtcagactggagaatttcatttctattcatttttggttttctctttctttttctttccttccccacaccccagggytaccaagaaaagaacaaattcattgctgcacaaggtaaagtaatgacaacttttttctgttagatttaaccatgatcacataatgggtttggtttttttc

SEQ ID NO: 254737 - DNA, 201 bp, Homo sapiens
aaaaataagggagaacaggacaagaatacctgacatgacaccagctatattatatatgtgtgtgtatgtatatatgtgtgtgtgtgtgtctgtgtgtgtgtatatatatatatatatgactatctggttagccatatatgaaccaaggcctgagggaagagctgatactaagaggaggtttttaaagatgatttagagaat

SEQ ID NO: 254738 - DNA, 201 bp, Homo sapiens
ccccagggctaccaagaaaagaacaaattcattgctgcacaaggtaaagtaatgacaacttttttctgttagatttaaccatgatcacataatgggtttgktttttttctcccaaatgctgagtggattaaccagaatgctgtagcttttctgtactttttaccacctgaaagaattataatccattatacaggtttacag

SEQ ID NO: 254739 - DNA, 201 bp, Homo sapiens
taaaaataagggagaacaggacaagaatacctgacatgacaccagctatattatatatgtgtgtgtatgtatatatgtgtgtgtgtgtgtctgtgtgtgtgtatatatatatatatatgactatctggttagccatatatgaaccaaggcctgagggaagagctgatactaagaggaggtttttaaagatgatttagagaa

SEQ ID NO: 254740 - DNA, 201 bp, Homo sapiens
tttgctacacatgagattatttccttatgtggcagatgttgttgttccaattttatgtatttatttattatttatttttgagacggagtctcgctctgtcrcctaggctggagtacaatggcgtgatcttggctcactgcaacctccacctcccaggttcaagcgattctcctgcctcagcctcctgagtagctggggtta

SEQ ID NO: 254741 - DNA, 201 bp, Homo sapiens
ggctgcaatgagctatgatggcgccactgcactccagcctgggtgacagagcgagaccctgtctccaaaaaaaaacaacaaaaaactcttgcttccatctracaaaaattggttccctttgggttggcatttcctttattcagtctttttttaaattattatcaaagacagaaacgttcattcttcatttctgcctcttgc

SEQ ID NO: 254742 - DNA, 201 bp, Homo sapiens
cagtagtagaatggataagtaaattttaacaccgtctcaaatggagcactacaaagtagctgaagtaagcagccaggatgaatcttaggaacgtaatgttragccaaagaaaaaagcaactcaccacttaatcatgattccattttcctcaaaaactagactagcaataataatacattgttttggatgtaaaaaatatga

SEQ ID NO: 254743 - DNA, 201 bp, Homo sapiens
agaaaaacccacagattcatcagacatattatagaattaatatgacatattatattatagaattaataaatatgacatatttataatttattatattatatatgacatatttataattaataaatatgacatagaattaatatgacatattatagaattaatattcatcagacatattatggaattagcaaggttgctaga

SEQ ID NO: 254744 - DNA, 201 bp, Homo sapiens
cagaaaaacccacagattcatcagacatattatagaattaatatgacatattatattatagaattaataaatatgacatatttataatttattatattatatatgacatatttataattaataaatatgacatagaattaatatgacatattatagaattaatattcatcagacatattatggaattagcaaggttgctag

SEQ ID NO: 254745 - DNA, 201 bp, Homo sapiens
tcagaaaaacccacagattcatcagacatattatagaattaatatgacatattatattatagaattaataaatatgacatatttataatttattatattatatatgacatatttataattaataaatatgacatagaattaatatgacatattatagaattaatattcatcagacatattatggaattagcaaggttgcta

SEQ ID NO: 254746 - DNA, 201 bp, Homo sapiens
ttcagaaaaacccacagattcatcagacatattatagaattaatatgacatattatattatagaattaataaatatgacatatttataatttattatattatatatgacatatttataattaataaatatgacatagaattaatatgacatattatagaattaatattcatcagacatattatggaattagcaaggttgct

SEQ ID NO: 254747 - DNA, 201 bp, Homo sapiens
cttcagaaaaacccacagattcatcagacatattatagaattaatatgacatattatattatagaattaataaatatgacatatttataatttattatattatatatgacatatttataattaataaatatgacatagaattaatatgacatattatagaattaatattcatcagacatattatggaattagcaaggttgc

SEQ ID NO: 254748 - DNA, 201 bp, Homo sapiens
actttaaaaaaccaccaggcacggtggctcacgcctggaatcccagcactttgggaggccaaggtgggcggatcacaaggtcaggagatcaagaccatccyggctaacacggtgaaaccctgtctgtactaaaaatagaaaaaaattagctgggcgtggtggcatgcacctgtagtcccagctgctggggaggctgaggca

SEQ ID NO: 254749 - DNA, 201 bp, Homo sapiens
cacaatctcagctcactggaaactccaccttctgggctcaagcagtcctcccacctcagcctgctaagtagctgggattataggcatgtgccaccctgccyggctactttttgtggagatgggattttgcatgttgcctaggctgggcttgaattcctaagctagaacaatctgctcagggatgttgtatatttctaaagg

SEQ ID NO: 254750 - DNA, 201 bp, Homo sapiens
tattatatataatttttatatatactttttttttttttttttttttagactggatcttgctctgtcacccaggctggaatggagtggctgggactacaggygtgtgctatcatgcccagctagttttttttttgtttttttttttttttttttaattttttttttttttttaagacggagtctcgctgtcacccaggctgg

SEQ ID NO: 254751 - DNA, 201 bp, Homo sapiens
tataatcccagctactcgggaggctgaggcaggagaattgcttcaacccaggaggcggaggttgcagtgagccaagatcatgccactgcactccagcctgratgagagtgagactccatctccaaaaaaaaccaaaacaaaacaaacgaaaactacaaaagattgtctgaagccagccacagacaatagtaaatgaatgag

SEQ ID NO: 254752 - DNA, 201 bp, Homo sapiens
tgcagggctaccggcagaaggactcctatatcgccagccagggccctcttctccacacaattgaggacttctggcgaatgatctgggagtggaaatcctgytctatcgtgatgctaacagaactggaggagagaggccaggtgagttcaaaaggtcctgggtggtgagagacagagacagcatgaaaagatgtgtgtgtaa

SEQ ID NO: 254753 - DNA, 201 bp, Homo sapiens
cgtttagcctccagaagaggggctaggttctcagggtacctgactgaccttctcccttgtgtactgcagagccccagagtgtgccacttctggccagatcsccaagcaccaacaggaaatacccacccctgcccgtggacaagctggaagaggaaattaaccggagaatggcagacgacaataagctcttcagggaggaat

SEQ ID NO: 254754 - DNA, 201 bp, Homo sapiens
atttgtgggatactgagcagcagtggaaagctatataagccactccactctgccagtcagtacagtggctgattaccaattatggataaccagaacacatsaaaaagcagttcaacaaggatcagaataataacatgtaagtaccatttattaagtagttatgtgtaaggcactgtgtcagactgtataatgtacattatt

SEQ ID NO: 254755 - DNA, 201 bp, Homo sapiens
tcccaggttcatgccattctcctgcctcagcctcccgagtagctgggactacaggcgccccccaccacatccagctaattttttgtatttttagtagagaygggatttcacagtgttagccaggatggtctcgacctcgtgatccgcccgcctcggcctcccaaagtgctgggattacaggcacaagccactgcgcccggt

SEQ ID NO: 254756 - DNA, 201 bp, Homo sapiens
agtatcaggaaatttataagaaacatgaactttcgtgctctgtcattaataggaatcttgctttaagattccttttaatcgtatgtagaacccagctgcayggtggctcacacccataatcccactgttttgggagcctgaggtgcaggaggccaggagctcaagacaaacctgggcaacatagcgagaccccatctctac

SEQ ID NO: 254757 - DNA, 201 bp, Homo sapiens
tcagctgggcacggtggctcacgcctgtaatcccagcactttgggaggccaaggcgggcggatcacaaggtcaggagatcgagaccatcctggctaacacrgtgaaaccctgtctctactaaaaatacaaaaaattagctgggcatggtggtgggcacctatagttgcagctactctggaggctgaggcaggagaatggtc

SEQ ID NO: 254758 - DNA, 201 bp, Homo sapiens
cactgtactccagcctggcgacagagcgagactccgtctcaaaaaaaagaaaaaaaaatcacagtatagtattccatgcatcgacagctgtagttttttttaaatttgtttttgtttttttgagacagggtctcactctgccaccctggctggagtgcagtggcatgatcacagctcactgcagccttgacctcctgggct

SEQ ID NO: 254759 - DNA, 201 bp, Homo sapiens
gattggcaggggcagaggcttactgtgatccaggtgagagaggatggaggttgggactacactggtggcaataaaaaaaatgcaaaaaaaaaaaaaaaaaaggcagacagatttgaagttttagatatatctccaaaatatattatttgcagctgtgctagatatagaagataagtgtgaggaagaaatcaagggggtttc

SEQ ID NO: 254760 - DNA, 201 bp, Homo sapiens
agttttgctcttgttgcccaggctggaatgcaatggcgctatcttggctcacgcaacttttgcctcctgggttcaagcgattctcctgcctcagcctcccragtagctgggattacaggcatgtgtcactgtacctggctaattttgtatttttagtaaagacggggtttctccatgttggtaaggctggtcttgaactcc

SEQ ID NO: 254761 - DNA, 201 bp, Homo sapiens
ccaggagaagtgtgcccagtactggccatctgatggactggtgtcctatggagatattacagtggaactgaagaaggaggaggaatgtgagagctacaccstccgagacctcctggtcaccaacaccagggtaagatgggtcgtgggtggactctgcccacaggaaaagcagggttacccctgcctccctgatcccctttt

SEQ ID NO: 254762 - DNA, 201 bp, Homo sapiens
gcctaattactttcttcttcttctttttttttttttttttgaggcagagtctcgctccgtcacccaggctggagtgcagtggcacgatcttggctcactgmaacctccgcctcctgggtacaagcgattctcctgcctcagcctcctgagtagctgggaccagaggggtgtgccaccacacccgctaattttgtattttta

SEQ ID NO: 254763 - DNA, 201 bp, Homo sapiens
cctgcacctcctgggctcaggtgatcctctcacctcagcctcccaagtagctgggattacaggtgtgttccaccatgcccagctaattttttgtatttttktgtagagatggggtttcgccatgttgcccaggctggtcttgaactcctgggctcacatgattctcctgtcttagcctcccaaagtgctaggattacaggt

SEQ ID NO: 254764 - DNA, 201 bp, Homo sapiens
tgagaggctgagacaggcggattgcctgagctcaggatttcaagatcagcctcagcaagatggtgcccatctctactcaaatacaaaaaattagcctatgrcgtgtgcctgttcagctactcgggaagttgaggcaggaaaattacttgaaccatggaggcagaggttgcagtgagccgagattgcatcactgcactccag

SEQ ID NO: 254765 - DNA, 201 bp, Homo sapiens
tctccattttcacatggaaaaaaatgagatgcaggggaagtttgagttatgagagggaaactggccaaatatagaatcttgtcattttacttccagtgcartaataaatgtttccaaatgacaaagctgaagagatgttttttgtttgtttgtttgtttgtttgttttttgagatggagttttgctcttgttgcccaggct

SEQ ID NO: 254766 - DNA, 201 bp, Homo sapiens
agcgcaagggcggggcccgcgcgggccggagacgcccgttcgctgtcggccaaccagcgcctgtctctgaacagccaatgaacacgcgccttacagccaargccgggtcgggagcgaggctgcggcgagtgcggcgctgacagagacgcgcgcgcgcgcgatcgcgctcggaccccggccgctgccgccatcactgtcgcc

SEQ ID NO: 254767 - DNA, 201 bp, Homo sapiens
ctaggaattgggtcatatctaggaaggctttccttactccaagattataaaaataattttcttctggacttctatggtttcgtgtgtgtgtgtgtgtgtgtacacgcacttaagtctgtctcgaatttattctgatgcagagtgagctatggatctgtttttccccaaatatctaacttgtcccaataccccttaataatt

SEQ ID NO: 254768 - DNA, 201 bp, Homo sapiens
tatatatatatatatcgagcaaaggctcctacaactcaccttctcagggtaaggggctgtatgtccagtctcttagatacaaagttccagtgaaagactcttggggttggccaggcgcagtggttcacccctgtaatcccagcattttgggaggctgaggcaggcagatcgcctgaggtcaggagttcaagaccagcctgg

SEQ ID NO: 254769 - DNA, 201 bp, Homo sapiens
tctaggaattgggtcatatctaggaaggctttccttactccaagattataaaaataattttcttctggacttctatggtttcgtgtgtgtgtgtgtgtgtgtacacgcacttaagtctgtctcgaatttattctgatgcagagtgagctatggatctgtttttccccaaatatctaacttgtcccaataccccttaataat

SEQ ID NO: 254770 - DNA, 201 bp, Homo sapiens
tctctacaaaaaatacaaaaattagctgggcatggtggctcacgcccgtagtcccagctcctttgcaggctgaggcgggaggatcacttaagtccaggagktggaggttgaagtgagctgagatcgcacctctgcactccagcctgggtgacagagtgagaccctgtctcaaaaacagacaacgacaaaaaaccctaatgt

SEQ ID NO: 254771 - DNA, 201 bp, Homo sapiens
ccagctaggcacagtggcttatatctgtaattccagcactttgggaggctgaagcaggaggatcgcttaagcccgggagtttgagaccagcctaagcatcrcagcaaaacctcatctctacaaatgatttagaaattagcagggcctaatggctcatgcctgtggtcccagctactcagggctgaggcaggaggattactt

SEQ ID NO: 254772 - DNA, 201 bp, Homo sapiens
gagagttcctactgctccatattcttacaaacatgtagtattgtcaaatgttttggattttaaaaccaaaatccattttcatagatgtgtagtggtatccmgttttaatttgcaattacctaatgacttgatgttctgtgtcttttcagatgcttatttgccgtactgtttatcttctttggtgaggtgtctattcaggtc

SEQ ID NO: 254773 - DNA, 201 bp, Homo sapiens
acctcatgatccacctgccttggcctcccaaagtgctgggatcacaggtgtgagccaccgcacccggcctactttttattttaacttttttttttttttttgtagagatgtggtctcactgtgttgcccaggctggtctcaatctcctggggtcaaacagtgctcctgcctcggcttcccaaaatgttggtattacaggta

SEQ ID NO: 254774 - DNA, 201 bp, Homo sapiens
aatattagaacaaattttgcagtgtgggaagtttggtatacggttataaaagtacagaagcttctagcatgtctcagtatcgctagatactcttttttttyttttctttctttctttctttttttttttttgagacagttttgttctgtcacccaggctggagtgcagtggcaccatcatggttcactgcagcattgacct

SEQ ID NO: 254775 - DNA, 201 bp, Homo sapiens
attacatgtaggttagatcatttcattgtatcctttatacctcttaccttctctttggtatttttttataaatctttttgcttctctctgcttcattctakatacttccttttgacctatttaccagctcactaattctctcttcaggtatattttacctgttcttaaatttatccattaagatctttttttcagatctgc

SEQ ID NO: 254776 - DNA, 201 bp, Homo sapiens
ccggaaagatgctcagatctcgctgagggaggcagctcgcgggtgacagcgagtgcccagtctcctgccggaaagtgctgctgaagtcagaccacaggggygctccgaggggggcgggatcgcacggcgggcggggtaacagtgctgaccaaggctgggaaaagggggcgagtcgtccgtgaatcccggaacagcggaagt

SEQ ID NO: 254777 - DNA, 201 bp, Homo sapiens
atatatatatatatatcgagcaaaggctcctacaactcaccttctcagggtaaggggctgtatgtccagtctcttagatacaaagttccagtgaaagactcttggggttggccaggcgcagtggttcacccctgtaatcccagcattttgggaggctgaggcaggcagatcgcctgaggtcaggagttcaagaccagcctg

SEQ ID NO: 254778 - DNA, 201 bp, Homo sapiens
gtgtcacatctgctagagtatttgtcacagcagtaatacaggcccaccccaccaatttcaaggggaaatagactccacctcttttttttttttttttttttgcgtggtagagatggggtctcgggggtctccttatgttgcccaagctggttttaaactcctgagctcaagcagtcctccctcctcagcatctcaaagtgc

SEQ ID NO: 254779 - DNA, 201 bp, Homo sapiens
attgatcaaaaagtatggagagttccggccaggcgcggtggctcacacctgtaatcccagcactttggaaggccaaggtgggcagatcacaaggtcaggartttaagaccagcctggccaatatgatgaaaccccatgtctactaacaatacacaaattagctgggtgtggtggtgcacacctgtaactgtacctactcag

SEQ ID NO: 254780 - DNA, 201 bp, Homo sapiens
agcctcattgtgtgcatttccccgccccaccctttcctcacccaccctagtctttcatgtctgccatttttacattcatttagcagatatttattgaagcsccctgtgatgtccttacctaggtctttcttgttgccaggaccagacaggctttttcaagcttccaagtcatctcagtttgaaagactatgtctgaccctt

SEQ ID NO: 254781 - DNA, 201 bp, Homo sapiens
aaatagaaagtttcatataggaaattaatttttcttcttttctggaagcttttatgttctatatagtctggaattccatagaggtgtacttggtgggcccyttaatagatctgcagactcatagctctccattttttggttcttttctgtcagcagctttctgatattgagcttcctgggttgttcatataatgttcttat

SEQ ID NO: 254782 - DNA, 201 bp, Homo sapiens
cactgcaacctcctcttcctgggttcaagtgattttcctgcctcagcctcctgagtagctgggattacaggcgcccgccaccacgcctggctaattttttktatttttagtagagatggggtttcaccatgttggccaggctgggctcgaactcctgacctcaggtgatccacccaccttgacctcccaaagggctgggat

SEQ ID NO: 254783 - DNA, 201 bp, Homo sapiens
cagagcaagactctgtctcaaaaaaaaagaaagaagtggcgggggcggaggaggagggaaagagagagaaagaagaaagagagaaagaaagaaagaaagaagaaggaagggagggaggaagggaactgaaggggtgggtcctaagggcttgcaggagtggagagtgaggaatggcatccagatgtttgtgacaccccgcat

SEQ ID NO: 254784 - DNA, 201 bp, Homo sapiens
gcaaaaagttggtttccagggatatgtcttctctcttatgctggtcccagattgatgcagtcatggaaactaggcagtaaactcattcttggcagctgccrgcactggtctgattctttcttttaaaagcatgagattctttaataacacatattggaaagattgatgccaagtgattccaggtcatcctagaggaggctt

SEQ ID NO: 254785 - DNA, 201 bp, Homo sapiens
tcagcagctttctgatattgagcttcctgggttgttcatataatgttcttatctattctgtcctttttaaaaactctttgcttttggttgttttcctggarattgtcataactttatctcctaatctttttttctctctttttttttttttttttgagacagggtctcaccctgtggcccagactggagttcagtggtgcc

SEQ ID NO: 254786 - DNA, 201 bp, Homo sapiens
tcttggctcactgcaacctcctcttcctgggttcaagtgattttcctgcctcagcctcctgagtagctgggattacaggcgcccgccaccacgcctggctrattttttgtatttttagtagagatggggtttcaccatgttggccaggctgggctcgaactcctgacctcaggtgatccacccaccttgacctcccaaagg

SEQ ID NO: 254787 - DNA, 201 bp, Homo sapiens
tttgtacttactaatttgtaaatacctcatttaataaggttatttaaccttttgcctgtaacattttgcaaatgttttttctagcttgttttttggggttytttcttttggttggttggttggttggttggttggttgggttttttttttgagacagatcatcactctgttacccaggctggaatgcagtggtgccatctc

SEQ ID NO: 254788 - DNA, 201 bp, Homo sapiens
acagagcaagactctgtctcaaaaaaaaagaaagaagtggcgggggcggaggaggagggaaagagagagaaagaagaaagagagaaagaaagaaagaaagaagaaggaagggagggaggaagggaactgaaggggtgggtcctaagggcttgcaggagtggagagtgaggaatggcatccagatgtttgtgacaccccgca

SEQ ID NO: 254789 - DNA, 201 bp, Homo sapiens
atactgaatagaagtgatagtagattactttatttctgattttcaaaggaatgctttccgtttctctctgttgaagataattgcgtattgtttttttttttaaatagtaacttttatcaggttaaggaaggtttcttctatttctatttaaaaggattttttaaaatcttgaattcatatgtttttatctaatgcattttc

SEQ ID NO: 254790 - DNA, 201 bp, Homo sapiens
gacagagcaagactctgtctcaaaaaaaaagaaagaagtggcgggggcggaggaggagggaaagagagagaaagaagaaagagagaaagaaagaaagaaagaagaaggaagggagggaggaagggaactgaaggggtgggtcctaagggcttgcaggagtggagagtgaggaatggcatccagatgtttgtgacaccccgc

SEQ ID NO: 254791 - DNA, 201 bp, Homo sapiens
tttttttttttttttttttttgagatggagtctcgctctgtcaccaggctggagtgcagtggcgccatctcagcacactgcaacctctgactccctgattsgagcaattctcctgtctcagcctcccgagtagctggaattacaggcatacgccaccacacccagctaatttttgtatttttagtcaagacggtgtttcgc

SEQ ID NO: 254792 - DNA, 201 bp, Homo sapiens
tgggcggatcacaaggtcaggagatcaagaccatcctggctaacacggtgaaaccctgtctgtactaaaaatagaaaaaaattagctgggcgtggtggcakgcacctgtagtcccagctgctggggaggctgaggcaggagaatggcgtgaacccgggaggcggagcttgcagtgagccgagattgcaccactgcactcca

SEQ ID NO: 254793 - DNA, 201 bp, Homo sapiens
cgacagagcaagactctgtctcaaaaaaaaagaaagaagtggcgggggcggaggaggagggaaagagagagaaagaagaaagagagaaagaaagaaagaaagaagaaggaagggagggaggaagggaactgaaggggtgggtcctaagggcttgcaggagtggagagtgaggaatggcatccagatgtttgtgacaccccg

SEQ ID NO: 254794 - DNA, 201 bp, Homo sapiens
catacgccaccacacccagctaatttttgtatttttagtcaagacggtgtttcgccatgttggtcaggctgatctcaaactcctgacctcaggtgatctgyttgccttagcctcccaaagtgctgggattagagtggtgagccactgtgcccggcccctgaaatcaccttttctgtaatgctactttgttcaataaaaata

SEQ ID NO: 254795 - DNA, 201 bp, Homo sapiens
gtgggcggatcacaaggtcaggagatcaagaccatcctggctaacacggtgaaaccctgtctgtactaaaaatagaaaaaaattagctgggcgtggtggcrtgcacctgtagtcccagctgctggggaggctgaggcaggagaatggcgtgaacccgggaggcggagcttgcagtgagccgagattgcaccactgcactcc

SEQ ID NO: 254796 - DNA, 201 bp, Homo sapiens
ttcttcctatatggcccatagtctcgtttcaagtatcaatttccaccaatttgaaatgctagctttattatttgctcaattctgagatcttttcctagackccatcctcttccattgatctatttgcacattcctgtgccaaaataatagttttaattaattttatatagtgtgtgtatctggtatacatctgttctcata

SEQ ID NO: 254797 - DNA, 201 bp, Homo sapiens
accaccaggcacggtggctcacgcctggaatcccagcactttgggaggccaaggtgggcggatcacaaggtcaggagatcaagaccatcctggctaacacrgtgaaaccctgtctgtactaaaaatagaaaaaaattagctgggcgtggtggcatgcacctgtagtcccagctgctggggaggctgaggcaggagaatggc

SEQ ID NO: 254798 - DNA, 201 bp, Homo sapiens
attgctttttctttacttctatttgaggttttcttctgttatcatttacttcctttctgatagagtttctttagccattcttttcaaagctgatctgttgrtgacacatttttagttttgttcatctgccagtatttgtatttcatttttatttctgaaggatattttcactgtctatagaattttagcttgatagttatt

SEQ ID NO: 254799 - DNA, 201 bp, Homo sapiens
cttaattctgtatgtttgccataccattagtgcttagagcattttttcagaaaagaatcctggaaaaatggatcttatctcacctgggccctcaggactgmtgggctgcctggtgtcagcacttcccgccattttctatagcaccagtattattcttaatactttaaaaaaccaccaggcacggtggctcacgcctggaat

SEQ ID NO: 254800 - DNA, 201 bp, Homo sapiens
aatcgcttgaacccgggaggcagaggttgcagtgagccgagatcacgccactgcactccagcctgggcaacagagcgagactccttctcagaaaaaaaaawaataataataataaaataaataaaagaaagagtaaatgaatcaaaatgaagagaagccattttatctgcctcctggatgaagagtttcattgatgaacct

SEQ ID NO: 254801 - DNA, 201 bp, Homo sapiens
ggtgacagcaatggacaagaacaataccaggcatagcagacaccctagcccagtacctgaggtgccaggcaggccctgaagggccattggcacatccagtyccagcccaagatccagtctacccaggccatgtccccgaatgggcaggaggccgtctgtccagtttgtatgtgtggatcagtctctctgagtgtctgagcc

SEQ ID NO: 254802 - DNA, 201 bp, Homo sapiens
gacagaaggtctcttctcaaactgcagcactgctgaggaacccctggcggaaggagaaagctgctagtgtgaggccagtgctcgatatatactctgcttcyggcatgcctctggccagcctgctggtgagcacttctgatggtccctggggctcagggctggacagggtttcctcacctgaggacagccttaggaacctct

SEQ ID NO: 254803 - DNA, 201 bp, Homo sapiens
gtaatcatggaaagagcatgctatacttacataacagaaagggcattctgccccctgaggattcttgtgttgttgaactctaaggagcttgtggctgtttmgggggagaggagcattctctgtgttaggctgcaggtattcacctgggcccatgtttttccccccaggaaaaggtagaacatgctaccaggtcagggtttg

SEQ ID NO: 254804 - DNA, 201 bp, Homo sapiens
tggtgcaatctcggctcaccgcaacctccgcctcctgggttcaagtgactcctctgcctcaatctcccgagtagctgggaccacaggcgcactccaccatscccggctaatttttgtatttttagtagaggcggggtttcaccatattggccaggctggtctcaactcctgaccttgtgaactgcctgcctcggccttcca

SEQ ID NO: 254805 - DNA, 201 bp, Homo sapiens
ttttttagccaagtgcactagcatgcgccagtagtcccagctactcaggaggctgaggttgcagcatcacttgagtccaggagtttgaggcttcaaggctrcagtgagccatgatcacatcactgcactccatcctgggcaacagagcaagacaatgtctttctaaaaacaaaacaaaacaaaacaaaaaaaacgagagag

SEQ ID NO: 254806 - DNA, 201 bp, Homo sapiens
atgtaatactccgaatcctttgttgtcatttcaacagtgttcacaatagtagatgccatctcaagaaaccactttcagccgggcatggtggctcacacttrtagtcccagcactttaggaggccaaggtgggcagagcacttgaggccaggagttcaaaaccagcctggccaacatggtgaaaccgtgtctctactaaaaa

SEQ ID NO: 254807 - DNA, 201 bp, Homo sapiens
aggcaggcggatcacaaggtcaggagtttgacaccagcctgaccaacatggtgaaaccccatctctactaaaattacaaaaattagccgggcgtggtggckcatgcctgtaatcccagctacttgggaggctgaggcaggagaatcgcttgaacccgggaggcagaggttgcagtgagccgagatcacgccactgcactcc

SEQ ID NO: 254808 - DNA, 201 bp, Homo sapiens
gggaacagcacaagggccctggctgaggaggctggcacagagtagatgacctactggggcaccagcgcaacagccagagactccaagttctagtgcagggyggagaatatgacttgaggaaggagggtagggcagtcctccaagattaggagttgggagaccctgctatgaagccaaaagactgggtcaagtgctggccat

SEQ ID NO: 254809 - DNA, 201 bp, Homo sapiens
cccaccaccacgcccagctaatttgttttgtatttttagtagagacggggttttaccatgttggccaggctggtctcgaactcctgacctcaggtgatccrctgcacccggcctcattttggttttgatttttattttcaaatgttttcttactttgtcaatttctaattttattgcattgggacaaaagaatattgtact

SEQ ID NO: 254810 - DNA, 201 bp, Homo sapiens
gaggctgaggtgggagagtcacctgagccctgggaggtcatggctacagtgagccaatcacaccactgcactgtagctgggcgatagagtaagactgtcamaaaaaaaaaaaaaaaagaaaaagaatatgagatataagaaaattttatgatagcctggggccaaggaagagtacccaaggaatgacaaacttggaagagg

SEQ ID NO: 254811 - DNA, 201 bp, Homo sapiens
acatagcctgcatgtataggaatgaaatacagtttacgtagggttcagtaccatctgtggtttcaggcatctactgggagtcttggaacatatcccccccmccccccccccagataagggggtagtactgaaattatattaaatatatgcttattatattaaatattagtcatatattacatacatattatatagatttat

SEQ ID NO: 254812 - DNA, 201 bp, Homo sapiens
tttgaatgaggaaaagttctcccttgtgattatttattataatagcctacagagctattaatttttaaattttgtttactttatgtctcctttttttttttgtttaggctgaataaccatttatttcataggtttattgccttttttcttccaaagaacttgctattgtgcatttatagtccttttatgtttacgttttct

SEQ ID NO: 254813 - DNA, 201 bp, Homo sapiens
ggaggctgaggtgggagagtcacctgagccctgggaggtcatggctacagtgagccaatcacaccactgcactgtagctgggcgatagagtaagactgtcwaaaaaaaaaaaaaaaaagaaaaagaatatgagatataagaaaattttatgatagcctggggccaaggaagagtacccaaggaatgacaaacttggaagag

SEQ ID NO: 254814 - DNA, 201 bp, Homo sapiens
tacataattttcttgggtgaaagtttcttttgtttctggtttctaggtatttgtgagatatttctctcacaaaacgtgttcttttcttctgtttttttttkgggggttttttttgtttctttggttttttgagacagtctcgctctgtcacccaggctggagttcagtggcgcgatctcaactcactgcaacctctgcctc

SEQ ID NO: 254815 - DNA, 201 bp, Homo sapiens
ttttaattggaacatttagtttgtttaatatagttaatatattctttgctttctattttcctcaaagatttgaatagaacaaaaggctgacctcccccaarcaagagggaattctctggcagtctgcctttgcacttgaaatgcaactcctccctgaatctccagcctgccagcctcttctattatgagtcaattccttaa

SEQ ID NO: 254816 - DNA, 201 bp, Homo sapiens
accccctccctggatcccatcccacccttgtgctcatccagaactgctctacctctgaaatgctaaaatcaaaccgccccctctattttttttttttttttaagacggactcttgctctgtcgccaggctggagtgcaatggcatgatctcggctcactgcaacctctgccttccgggttcaagcaaatctcctgcctcag

SEQ ID NO: 254817 - DNA, 201 bp, Homo sapiens
ttaataaggttatttaaccttttgcctgtaacattttgcaaatgttttttctagcttgttttttggggttttttcttttggttggttggttggttggttgkttggttgggttttttttttgagacagatcatcactctgttacccaggctggaatgcagtggtgccatctctgctcactgcaacctccaccttctggggtc

SEQ ID NO: 254818 - DNA, 201 bp, Homo sapiens
tgcaaacactgaatacatgaacaacccccctggaaagataagagatttcagtattgcttggtgtcatagccgcagaagttagtgtctgccagtatctgatraatatggtgacttgcagcctaatttttgtgaaattatgaggccaaagtttaagaagtgttcatgttaaagttacttatatataaaatttgcctatcgata

SEQ ID NO: 254819 - DNA, 201 bp, Homo sapiens
ctggtagcccttggctattgtgaataatctgctgtgaatgtgggtctacaaatatctattcaatattttctgtactccgctttttttttttttttttttttgagatggagtctcgctctgtcgcccaggctggagtgcagtggcgcgatctcagctcactgcaacatctgcctcccgggttcaagtgattctcctgcctca

SEQ ID NO: 254820 - DNA, 201 bp, Homo sapiens
gtcaatcaatctatcttaccagagttcattctcaagtcacttactgagagaaaaggtacctggcagataaattttgactctttctggtatccgttttttgktgttgttgttgttgttgtttgtttgttttggagacggagtctcgctctgttgcccaggctggagtgcagtggcgcgatcttggctcactgcaagcttcgc

SEQ ID NO: 254821 - DNA, 201 bp, Homo sapiens
tccatggacacttgggttgctggtagcccttggctattgtgaataatctgctgtgaatgtgggtctacaaatatctattcaatattttctgtactccgctytttttttttttttttttttgagatggagtctcgctctgtcgcccaggctggagtgcagtggcgcgatctcagctcactgcaacatctgcctcccgggttc

SEQ ID NO: 254822 - DNA, 201 bp, Homo sapiens
agtagcttatttttttattattataaacattgtaattatcctttaagatacttcttaacctgattatgaatcagaatcacttgaagagctttttttttttwaaaaaaaagaccaaagtcaggctgggcatggtggatcacgcctgtaatcccagcactttgggaggccgaggcgggcagatcacttgaggtcaggagttca

SEQ ID NO: 254823 - DNA, 201 bp, Homo sapiens
tgggattacaggcatgagtcaccgcacctggccttttttattttctttttttttttttaaccagtgatcttttactgtctccatggtttttcacattggcytctgtcacttagtaatatatgtttaagtttcttctacgtattttcatgtttttagcttatttctttttagcagtgagtaatatttcattgtctggatgtg

SEQ ID NO: 254824 - DNA, 201 bp, Homo sapiens
caagtgcatgcctggcctaaccagctctatcactgggccacagccagagccaattctgggtcctggggtcgagccccagcgaggaatacctatttgttacygtctttctcaaggatggcccttgagtcaccttgatcctagggtatcgggtgtcatgatcaacagctccacagtggcatgggaagacagtgctagggctgg

SEQ ID NO: 254825 - DNA, 201 bp, Homo sapiens
aagtcagctgtgtgtagtggcacgcacatgtaatcccagcaacttgggaggctgaaaaaaaaaaagaacattttaaaaaattgtggttaaatatacatgayataaaatttactctcttaaccatttttgagtgtaccctttaatagtgttaagtatattcacgttgttgtgcaaccagtctccaggactttttcatcttgc

SEQ ID NO: 254826 - DNA, 201 bp, Homo sapiens
atagggctgttttattgattgattgattgattgattgagatggagtctcactctgttgcccaggctggagtacactgtcacgatctcggctcactgcaacctccccctcctgggttcaagcaattctcctgcctcagcctcccaagtaactgggattacagacacccaccaccgtgcctggctaatttttgtatttttggt

SEQ ID NO: 254827 - DNA, 201 bp, Homo sapiens
ttattttctttttttttttttaaccagtgatcttttactgtctccatggtttttcacattggcttctgtcacttagtaatatatgtttaagtttcttctaygtattttcatgtttttagcttatttctttttagcagtgagtaatatttcattgtctggatgtgccatcacttatttatccattcgcctgctgaaggatat

SEQ ID NO: 254828 - DNA, 201 bp, Homo sapiens
tttgttcttccttttcaagattgttttggccattcggagtcccttgcaattccatataaattttaggatcagtttttttatttctttttttttttttttttgagacagagtctccctctattgcccaggctggagtgcagtggcgtggtcttggctcactgcaacctccatctcccaggttcaagcaattctcctgcctca

SEQ ID NO: 254829 - DNA, 201 bp, Homo sapiens
tatatgcatgtatatacatacacaaacatacatccacacacatagactcatttttttatttcttgctctgtgtgtgtgtgtgtgtgtgtgtgtgtgtgtgkactgtgagttcacactggtacctagtacctcaacacctcagagttcattttatttttcttcctttttgtatttgtaactcccttctctgacagagaaact

SEQ ID NO: 254830 - DNA, 201 bp, Homo sapiens
tggtatcccgttttaatttgcaattacctaatgacttgatgttctgtgtcttttcagatgcttatttgccgtactgtttatcttctttggtgaggtgtctmttcaggtcttttgcccatttttaatctggttgttatttttcttgttgagtttaagaattctctgtcctttgtcagatctatcttttgcaaatattttctc

SEQ ID NO: 254831 - DNA, 201 bp, Homo sapiens
atatatgcatgtatatacatacacaaacatacatccacacacatagactcatttttttatttcttgctctgtgtgtgtgtgtgtgtgtgtgtgtgtgtgtgtactgtgagttcacactggtacctagtacctcaacacctcagagttcattttatttttcttcctttttgtatttgtaactcccttctctgacagagaaac

SEQ ID NO: 254832 - DNA, 201 bp, Homo sapiens
tgaccaagcactgtggaaagggagcatggggaggcagtgcagtctcctaggtgcttgactcacctttctcctcctttcctactccaaagactcctgacatsaaggatgtgatgggcctgcccctggccctccaggcaaccctggagacctgagcaaaggtcaccttcagccaaggggcagtgtggtactgcgaaaagagga

SEQ ID NO: 254833 - DNA, 201 bp, Homo sapiens
attaatatcaactttttaccaccttaagtagaatgtagttagttttagtagaaggaatcttttagttccttctacctttcttcttctttttttttttttttgagacggagtcttgctctgtcatcaggttggagtgcagtggcgtgatctcagctcattgcaatctccacctcccgggttcaagccattctcctgcctcag

SEQ ID NO: 254834 - DNA, 201 bp, Homo sapiens
agcaaccagcttgtcagatagggtttcgtccttggccacaggggagctctgtatgggctgagtttgcctccgagcagtccccattcccttctagtggtctstcttctccactagtccctctgtgattaaaccatctcacccttgcaattaacctggcctgtgcagggctaccggcagaaggactcctatatcgccagccag

SEQ ID NO: 254835 - DNA, 201 bp, Homo sapiens
ttcatattttattcaataagttatctattagtgtactttggtactttgatgctgagtttgtcccagatttggtcagtggaaaccctgtcaagctggcttcygtatccttttgacattgtcctatcattctttgatcactttcctctttctgggaccagatatgatcaaagcccttcttatacttttcctgccctacctctg

SEQ ID NO: 254836 - DNA, 201 bp, Homo sapiens
gaggaagtcattaacatggacctgatgtttcttcatctttagattcagattatgcattttatcagaattgccacataaattgtgctgtgttcttattttatccatccaggtactacataatttccatgtgtcccatttttcttgatgttaaccttggtcacttgattaagattgtgtctgccagttttctctaccatacat

SEQ ID NO: 254837 - DNA, 201 bp, Homo sapiens
tggctgtgttgtttgtttactttcccttaagttatttccatgttaatctcatggagaagagcaatagaaacaagtactgtattcagtatgttttttaatayagactatggattctaacagctatgatgtattttaacaagtaacaaaatatatcttactttgacatgtcactttgttaacattactttttggtgatattag

SEQ ID NO: 254838 - DNA, 201 bp, Homo sapiens
taaagggcagggggcaggaagcatttcatgtgtgtggcggtggggagaagagtcgtgcgcacacaaattctgctgcctgttgagtgaggcctctccctctrccttccactgtagcttatgctctgtcttcctaggccagtgaagcagacagtagtgcttgccctcaaaagcttctgagtggattggaacaggatgttagtg

SEQ ID NO: 254839 - DNA, 201 bp, Homo sapiens
aaatggttttctaaggctggcctgtggttcgttggttgatttcaattagaatttaagaattttttcagaatacatctaggtgtaaagatttttttgtcaayattactccacaaactagattatttcttttggcctgataactcaggaactttcttgtattacttctctcccttcttactggtttcttctttggactctcct

SEQ ID NO: 254840 - DNA, 201 bp, Homo sapiens
tgaggaagtcattaacatggacctgatgtttcttcatctttagattcagattatgcattttatcagaattgccacataaattgtgctgtgttcttattttatccatccaggtactacataatttccatgtgtcccatttttcttgatgttaaccttggtcacttgattaagattgtgtctgccagttttctctaccataca

SEQ ID NO: 254841 - DNA, 201 bp, Homo sapiens
tgtcatatttttcatctcttattgctctgtgttctgggagcttccaggacagttgctctttcacacaactaatttggttttcagttatatcagttctcctrtttagcctttctttttttggaggcagggctggggcagactcatgctctgtcgcccaggctggagtgcagtggcctgatcacagctcactgcagccttgac

SEQ ID NO: 254842 - DNA, 201 bp, Homo sapiens
ttgaggaagtcattaacatggacctgatgtttcttcatctttagattcagattatgcattttatcagaattgccacataaattgtgctgtgttcttattttatccatccaggtactacataatttccatgtgtcccatttttcttgatgttaaccttggtcacttgattaagattgtgtctgccagttttctctaccatac

SEQ ID NO: 254843 - DNA, 201 bp, Homo sapiens
tttgaggaagtcattaacatggacctgatgtttcttcatctttagattcagattatgcattttatcagaattgccacataaattgtgctgtgttcttattttatccatccaggtactacataatttccatgtgtcccatttttcttgatgttaaccttggtcacttgattaagattgtgtctgccagttttctctaccata

SEQ ID NO: 254844 - DNA, 201 bp, Homo sapiens
tgttaagaatcttgatctcttggtgatacatacctaagtaattgcatttgaaatgctaggtctcggatttgccttaaaagaattcagttagaatggcgtgrgtatagaccagtggttccttactgggggctatttcccccacaaaggcatttagcaatgcttggagatacttttggtcatcaaaattgggaatttgctaca

SEQ ID NO: 254845 - DNA, 201 bp, Homo sapiens
ttttgaggaagtcattaacatggacctgatgtttcttcatctttagattcagattatgcattttatcagaattgccacataaattgtgctgtgttcttattttatccatccaggtactacataatttccatgtgtcccatttttcttgatgttaaccttggtcacttgattaagattgtgtctgccagttttctctaccat

SEQ ID NO: 254846 - DNA, 201 bp, Homo sapiens
ggtatagaccagtggttccttactgggggctatttcccccacaaaggcatttagcaatgcttggagatacttttggtcatcaaaattgggaatttgctacwgacatctaataattagaggctagggatattgttaaatgtcctacagtgcacatgacagacccacataacagagaattgtatagcccaaaatgtcattagt

SEQ ID NO: 254847 - DNA, 201 bp, Homo sapiens
cactaaaaatacaaaaaaatgagccgagcttggtggtgcacacctgtaatcccagctactcaggaggctgaggcatgagaatcacttgaacctaggaggcrgaggttgcagtgagctgagattgtgtcactgcattccagcctgggtgacagagtgagaccctgtctccaaaaataaaataaaataaatctggagtttaat

SEQ ID NO: 254848 - DNA, 201 bp, Homo sapiens
catatgttttgtaaaaaagaagcccttaccagtctctgtgacaaactctctactctgtgtagagcactgtttttccagctgagtctagatgggaagccccrcttgtcatttgggctgtgggtgtactggtgctgggttggcaggcctttgcttaagtaccatcctggtacctcaaggtccactttcaaccccagtcccaat

SEQ ID NO: 254849 - DNA, 201 bp, Homo sapiens
cctgggcaacgtggcgaaactccgtctctacaaaaaatacaaaaattagctgggcatggtggctcacgcccgtagtcccagctcctttgcaggctgaggcrggaggatcacttaagtccaggaggtggaggttgaagtgagctgagatcgcacctctgcactccagcctgggtgacagagtgagaccctgtctcaaaaaca

SEQ ID NO: 254850 - DNA, 201 bp, Homo sapiens
tatatatgatgtatagtatatatgatatataacatatatataatatatgatgtatagtatatatgatatataacatcatatatactatacgtcatatataatatgacgtatagtatatatgatatatgatatatatactatattgtatatgatatataatatgtattgtatattatatataatatatatataaggcacagt

SEQ ID NO: 254851 - DNA, 201 bp, Homo sapiens
aatatatatgatgtatagtatatatgatatataacatatatataatatatgatgtatagtatatatgatatataacatcatatatactatacgtcatatataatatgacgtatagtatatatgatatatgatatatatactatattgtatatgatatataatatgtattgtatattatatataatatatatataaggcaca

SEQ ID NO: 254852 - DNA, 201 bp, Homo sapiens
acctccgcctcctgggtacaagcgattctcctgcctcagcctcctgagtagctgggaccagaggggtgtgccaccacacccgctaattttgtatttttagyagagacggggtttcaccatattggccaggctggtcttgaactcctgaccttgtgatccacccgcctcggcctcccaaagtgctgggatgtgcctaattac

SEQ ID NO: 254853 - DNA, 201 bp, Homo sapiens
gtggcatgatcctggctcactgtaacttctgcctcctgggctcaagcaattctcctgcctcagcctcccgagtagctgggattacaggtgcccaccaccaygcctggctaatttttgtatttttagtagagacagggtttcaccgtgttggctagactggcctcatactcctgacttcaagtgatctgcccacctcacctc

SEQ ID NO: 254854 - DNA, 201 bp, Homo sapiens
gactcctcggcaccccagctgccctgggccagtgccacagagcaggaatagggtgttgaggcagggctgagggtttccctgcctttctccctcactcaccmactcccttccccagcggccagcgaggaaatcttcaaaattgcctcaatggcccccggggcgctgctcctggaggctcagaaggagtatgaggtaaagccc

SEQ ID NO: 254855 - DNA, 201 bp, Homo sapiens
gatagggacgggcagagcatccccactatccccacccagtctgggttactattgggaggagttctcaaggcccccctaaaggcagctgtgggctgatacgrgatgatgtctgtgggcacctcaggtggattgagtgggctgagggagttggggctccagcctgtgcagctcctccaacccagcttatttgaaccacaaccc

SEQ ID NO: 254856 - DNA, 201 bp, Homo sapiens
aggctgaggcgggcgaatcacctgaggtcaggtattcgagactagcctggctaacatggtgaaaccccgtctctactaaaaatacaaaattagccgggcayggtggcgcatgcctgtaatcccagctacccgggaggctgaggcaggagaattgctttcacctgggaggcagaggttgcagtgagctgagattgcactgct

SEQ ID NO: 254857 - DNA, 201 bp, Homo sapiens
cctcccaaagtgttggtattataggcatgagccaccatgcctggcctaggtcttttttttttgagacagggtctcacttttgtcacccaagctggagtgcygtggtgcaatcatggctcactgcagcctcaacctcctaggctcaatcagccctccacctcagcctcctgagtagctgggattacagatgcatgccatcat

SEQ ID NO: 254858 - DNA, 201 bp, Homo sapiens
ataatatgtgtaattatatattataatatatgatatatatataatctatcatatatcatatatataatctatcatatatcatatataatctatcatatatcatatcatatataatatatatcatatcatatataatatatatgatgtatagtatatatgatatataacatatatataatatatgatgtatagtatatatga

SEQ ID NO: 254859 - DNA, 201 bp, Homo sapiens
tataatatgtgtaattatatattataatatatgatatatatataatctatcatatatcatatatataatctatcatatatcatatataatctatcatatatcatatcatatataatatatatcatatcatatataatatatatgatgtatagtatatatgatatataacatatatataatatatgatgtatagtatatatg

SEQ ID NO: 254860 - DNA, 201 bp, Homo sapiens
aacacagaaagcttgtgttgcctatgaaatttaaagtggaggtggcaaataggcagttgagaatctggaactcagaaaagaggtctgatcaagcaaagcamctgtgggaattgctagcatggcatttatatttacagtcatctctctgatcagattaactagatatagagaagagtgccaaggacagagccctgaggaatt

SEQ ID NO: 254861 - DNA, 201 bp, Homo sapiens
atataatatgtgtaattatatattataatatatgatatatatataatctatcatatatcatatatataatctatcatatatcatatataatctatcatatatcatatcatatataatatatatcatatcatatataatatatatgatgtatagtatatatgatatataacatatatataatatatgatgtatagtatatat

SEQ ID NO: 254862 - DNA, 201 bp, Homo sapiens
gtctgaacactcattttaaggtgagagccacataccacagtatgtttgaaacttaccattaacaaagaagcgtcatgtaatgtcttccatctctaaaaacraaaccaaaaaaaacccatctgtccacctcactcacatctccctccatctgtcattcctttcctctgcatcccttaatgttaaaagtccccacgaaaggac

SEQ ID NO: 254863 - DNA, 201 bp, Homo sapiens
ttatatataatatgtgtaattatatattataatatatgatatatatataatctatcatatatcatatatataatctatcatatatcatatataatctatcatatatcatatcatatataatatatatcatatcatatataatatatatgatgtatagtatatatgatatataacatatatataatatatgatgtatagtat

SEQ ID NO: 254864 - DNA, 201 bp, Homo sapiens
caggcatggtggcaaatgcctgtaatcccagctactcgggaggttgaggcaggagaatcgcttgaacccgggaggcagaggttgcattgagccgagaccaygccattgcactgtagcctgggcgacaagagcgaaactccatctcaaaaaaacaaaacaaacaaaaaaacccctagtttacgatggggagttgaagtcatt

SEQ ID NO: 254865 - DNA, 201 bp, Homo sapiens
acatgacagggctgtgtgcagctgaagaccagagcttcaaaggaggataagaggtgaaactagtgtggccagaccacagaccttgcagatagtcatgagaraagtggcaagccatagagcagccagatttacatcttgaaaaaatgactcagctgggcacggtggctcacgcctgtaatcccagcactttgggaggccaag

SEQ ID NO: 254866 - DNA, 201 bp, Homo sapiens
gttatatataatatgtgtaattatatattataatatatgatatatatataatctatcatatatcatatatataatctatcatatatcatatataatctatcatatatcatatcatatataatatatatcatatcatatataatatatatgatgtatagtatatatgatatataacatatatataatatatgatgtatagta

SEQ ID NO: 254867 - DNA, 201 bp, Homo sapiens
gttgcattgagccgagaccacgccattgcactgtagcctgggcgacaagagcgaaactccatctcaaaaaaacaaaacaaacaaaaaaacccctagtttaygatggggagttgaagtcatttggatacctgtctgtgatcaggcttgcagtctctaccctagagcccagtactaggctaggagcatggtcttaccaatagg

SEQ ID NO: 254868 - DNA, 201 bp, Homo sapiens
attgttatatataatatgtgtaattatatattataatatatgatatatatataatctatcatatatcatatatataatctatcatatatcatatataatctatcatatatcatatcatatataatatatatcatatcatatataatatatatgatgtatagtatatatgatatataacatatatataatatatgatgtata

SEQ ID NO: 254869 - DNA, 201 bp, Homo sapiens
tttccctacctttcactctccaggaacagtatgagttctgctacaaggtggtgcaggagtatattgatgcattctcagattatgccaacttcaagtaagcrgcaacaagggtccgtggaccaggaggattgcctttaatattttgtaatattctgttttgttaatataccccaaattgtgtatatatcttataactgtttt

SEQ ID NO: 254870 - DNA, 201 bp, Homo sapiens
tggtattgcattggagggatgattctggcagtaccaatcattatttaaatgtttgagttttctgaccaagcttctgagattcttaacagaaaaagccatgwacaaagatgtttatgacagcattatttataatagcaaagaagataaaaacgcaaatatctgtcaaatagaatggccagatgatttcttatatccattatg

SEQ ID NO: 254871 - DNA, 201 bp, Homo sapiens
gagagcatccagtatccttggagggctgcctgtgtgtggagagaggggaggggagggttcacctgccccgtcccatctgtaggtgctcttaggagccttaaccaagctcaggtttgtgctggatgaggactcctacctggtgcctgagctcgatggggtccgcatcttctcccgcagcacccacgagttcctgcatgaggt

SEQ ID NO: 254872 - DNA, 201 bp, Homo sapiens
tattgttatatataatatgtgtaattatatattataatatatgatatatatataatctatcatatatcatatatataatctatcatatatcatatataatctatcatatatcatatcatatataatatatatcatatcatatataatatatatgatgtatagtatatatgatatataacatatatataatatatgatgtat

SEQ ID NO: 254873 - DNA, 201 bp, Homo sapiens
aggacctttaactgtaaacaacccaaatattcatcagtagtagaatggataagtaaattttaacaccgtctcaaatggagcactacaaagtagctgaagtwagcagccaggatgaatcttaggaacgtaatgttaagccaaagaaaaaagcaactcaccacttaatcatgattccattttcctcaaaaactagactagcaa

SEQ ID NO: 254874 - DNA, 201 bp, Homo sapiens
tatatattgttatatataatatgtgtaattatatattataatatatgatatatatataatctatcatatatcatatatataatctatcatatatcatatawaatctatcatatatcatatcatatataatatatatcatatcatatataatatatatgatgtatagtatatatgatatataacatatatataatatatgat

SEQ ID NO: 254875 - DNA, 201 bp, Homo sapiens
tatatgacatatatatgttatatattgttatatataatatgtgtaattatatattataatatatgatatatatataatctatcatatatcatatatataatctatcatatatcatatataatctatcatatatcatatcatatataatatatatcatatcatatataatatatatgatgtatagtatatatgatatataac

SEQ ID NO: 254876 - DNA, 201 bp, Homo sapiens
tctggaaataacgtaaaagccaaaggctttctccctaatgagctaggaacagacatgtccttgcccagctgggattctgtctgcccagggcctgaggtggtgggagcaatgcaaggagagggagaggacaaatgatattggctagccataagccgctattcttcttacagatgaattcaacagagtgatcattccagttaa

SEQ ID NO: 254877 - DNA, 201 bp, Homo sapiens
tttttttttaaccgacatgtctttaaaaaatgaatgagtacttagccttggttccagttaaggcttaaacaagagatgaaacggtcttcgatgccacctartgtttctagagagtttaacattttatagacttctgctctagctgctccttcctagctctgtgagctaggtttttcagagtagaaaccaaaaggagtagga

SEQ ID NO: 254878 - DNA, 201 bp, Homo sapiens
atatatgacatatatatgttatatattgttatatataatatgtgtaattatatattataatatatgatatatatataatctatcatatatcatatatataatctatcatatatcatatataatctatcatatatcatatcatatataatatatatcatatcatatataatatatatgatgtatagtatatatgatatataa

SEQ ID NO: 254879 - DNA, 201 bp, Homo sapiens
cctgaagaacgagctgaaccgaggagattttttcatgacccttcggaatcagcccatggccctcagtttgtaccgacaggtgtgtgtagtgggcagggttrtggtgtagccttctgagcacttgagttggccttgctgactgattgcctgcctgtggccccagttctgtaagcatcaggagctagagacgctgaaggacct

SEQ ID NO: 254880 - DNA, 201 bp, Homo sapiens
gtcctccctccagcccacttccagtgagggtagtcttcgggagagagggctaggcagggagacagataggatggcccgttcatgctcctgttcagctgccygcatagttagcgagtgcttcctgtatacacatttgtaggcaggcatcatctgctgtgttgggtgcactggaggatgggtccaagtttgcctgcagatgtt

SEQ ID NO: 254881 - DNA, 201 bp, Homo sapiens
cgggagagagggctaggcagggagacagataggatggcccgttcatgctcctgttcagctgcccgcatagttagcgagtgcttcctgtatacacatttgtrggcaggcatcatctgctgtgttgggtgcactggaggatgggtccaagtttgcctgcagatgttacggggagagagaatgagctgctttccccagggaggg

SEQ ID NO: 254882 - DNA, 201 bp, Homo sapiens
atcatctgctgtgttgggtgcactggaggatgggtccaagtttgcctgcagatgttacggggagagagaatgagctgctttccccagggagggccacaggrggcactatgtgctagagggaaagtcttgtctgaggagggtggagggggcacagggagggtgcatatgggaggcagtggagatactgagggctgttttctg

SEQ ID NO: 254883 - DNA, 201 bp, Homo sapiens
tgggtccaagtttgcctgcagatgttacggggagagagaatgagctgctttccccagggagggccacagggggcactatgtgctagagggaaagtcttgtytgaggagggtggagggggcacagggagggtgcatatgggaggcagtggagatactgagggctgttttctgtggtgggtagttcagaggtgtatagggcag

SEQ ID NO: 254884 - DNA, 201 bp, Homo sapiens
gtagcaaagttctggaaatactgtggctaggttttggaatcacaatctggcacagcccatcagctttcccttttggaatcagcagacaagaggaaaggaartaatccccaatgctgggctcatcattctgggctttttttttttttttttttttttttttgtccccagtcttggccccacaattcctcactgccctggtag

SEQ ID NO: 254885 - DNA, 201 bp, Homo sapiens
aaaaattagccgtgtggtgtcacgtgcctgtagtcccacttacttgggaggctgaggcagaggattgcttgaacccaggagttcaaggctgcattgagccrtgattgcaccactgtactccagcctgggggacagagggagactctgtgtctcaaaaaaaaaaagaggaggaccgggcatagtgggtcacacctgtaatcc

SEQ ID NO: 254886 - DNA, 201 bp, Homo sapiens
agttgtcccaagtcactagttgttccccatctgtacttgtgttaactttggtacaaggctttacacatattttctcaccctgatgtttcattacatcaggrtttttttttttttttggttttgtttgtttgtttgtttgtttgtttgagagagggtctcactttgtcacccaggctggagtgcagtggcacgatcttggct

SEQ ID NO: 254887 - DNA, 201 bp, Homo sapiens
ttggtcttcctaaagcaattgaagagcccttgacaacatcccatttgtgttttttaaaaaatccctctggcagcagtgagaaggactcattagaaatgcgraagctgtggcagtaatgctggtggcctggactcgggtggtgagagggtgctgtcccagaaagggtgaagtgaggaggaattaaggatggcacccactcat

SEQ ID NO: 254888 - DNA, 201 bp, Homo sapiens
gcccagcccgttggtgtctaagcagtcattagcttctcccaagactagaaaagcaatgtgatctgagcctccatgttattcccagacagctcacacccttkcactttctcctgaatacagtccccctagcctagcctttgcacagtgccccaggcggggggggcaccctctccttcccagtgccccaggcagggcagatag

SEQ ID NO: 254889 - DNA, 201 bp, Homo sapiens
gtgtccttgtaagaaaaggaaatttgtacacgcagacatcagaaacaaatacacagaggaatgaccaggtgaggatacagtaagatggtggccatctgcargccaaggagagaggtctcataggaaaccaaacttgctgacactttcatcttggacttctagcctgtacagctgtgagaaaataaatttctgttgttgaac

SEQ ID NO: 254890 - DNA, 201 bp, Homo sapiens; identical to SEQ ID NO: 50802

SEQ ID NO: 254891 - DNA, 201 bp, Homo sapiens; identical to SEQ ID NO: 50803

SEQ ID NO: 254892 - DNA, 201 bp, Homo sapiens; identical to SEQ ID NO: 50804

SEQ ID NO: 254893 - DNA, 201 bp, Homo sapiens; identical to SEQ ID NO: 50805

SEQ ID NO: 254894 - DNA, 201 bp, Homo sapiens; identical to SEQ ID NO: 50806

SEQ ID NO: 254895 - DNA, 201 bp, Homo sapiens; identical to SEQ ID NO: 50807

SEQ ID NO: 254896 - DNA, 201 bp, Homo sapiens; identical to SEQ ID NO: 50808

SEQ ID NO: 254897 - DNA, 201 bp, Homo sapiens; identical to SEQ ID NO: 50809

SEQ ID NO: 254898 - DNA, 201 bp, Homo sapiens; identical to SEQ ID NO: 50810

SEQ ID NO: 254899 - DNA, 201 bp, Homo sapiens; identical to SEQ ID NO: 50811

SEQ ID NO: 254900 - DNA, 201 bp, Homo sapiens; identical to SEQ ID NO: 50812

SEQ ID NO: 254901 - DNA, 201 bp, Homo sapiens; identical to SEQ ID NO: 50813

SEQ ID NO: 254902 - DNA, 201 bp, Homo sapiens; identical to SEQ ID NO: 50814

SEQ ID NO: 254903 - DNA, 201 bp, Homo sapiens; identical to SEQ ID NO: 38914

SEQ ID NO: 254904 - DNA, 201 bp, Homo sapiens; identical to SEQ ID NO: 50816

SEQ ID NO: 254905 - DNA, 201 bp, Homo sapiens; identical to SEQ ID NO: 50817

SEQ ID NO: 254906 - DNA, 201 bp, Homo sapiens; identical to SEQ ID NO: 50818

SEQ ID NO: 254907 - DNA, 201 bp, Homo sapiens; identical to SEQ ID NO: 50819

SEQ ID NO: 254908 - DNA, 201 bp, Homo sapiens; identical to SEQ ID NO: 50820

SEQ ID NO: 254909 - DNA, 201 bp, Homo sapiens; identical to SEQ ID NO: 50821

SEQ ID NO: 254910 - DNA, 201 bp, Homo sapiens; identical to SEQ ID NO: 50822

SEQ ID NO: 254911 - DNA, 201 bp, Homo sapiens; identical to SEQ ID NO: 50823

SEQ ID NO: 254912 - DNA, 201 bp, Homo sapiens
cttttagcaatgtttgcagtgtacaggttttacaacttttgttagttttatttctatgtagttgataagtttttgtgctattttaaatgatatttgaagaycttcattttctaaatatttgctcttggtatgtaggaacataactaatttttgtatattgacttttgtttatttgtttgtcttaagacagggccttgctct

SEQ ID NO: 254913 - DNA, 201 bp, Homo sapiens
tggaagcagcctaagtgtccatcaacagatgaatggataaagaaaatatagtacatatacacaagagagtattatttagccataaaaaacaataagatccyggccaagtgcaatggctcatgcctgtaatcccagcactttgggaggctgaggtgggcagatcacctgaagtcgggagttcgagactagcctgaccaacat

SEQ ID NO: 254914 - DNA, 201 bp, Homo sapiens
aggccaggagttcaagacaagcctgatgaacatggcaaaatcctgtctctaaaaaatacaaaaattgggtttggtggtgcatgcttgccatccaagctacktgggaggctgagacacgagaattgcttgaatccaggaggtagaggttgcagtgagccaagattgtgccactgcactccagcctgggtggcagagtgatac

SEQ ID NO: 254915 - DNA, 201 bp, Homo sapiens
ctcaaagattgtttgtgaccccaagtaattagcagccaaaaccttaggaaactatcagaatgcctgtgtatgatactctctcaagagtggtccaagagagkagagaatcctgcttggagaaagaaggtggtagcattggacaggcagcaaaggagccctcagcagcaagaaaggagctaagagaccctgtatctgtccctc

SEQ ID NO: 254916 - DNA, 201 bp, Homo sapiens
tctcttagattttttgaatttccatataaattttagaatcatcttggcaatttacatacacacacacacactcaaacccacacaaacacacccccacaccytgttagtattttgacttgggcattgactacacagcttaatttggagagacttgacatgtaaaaatattaagatttccaactcatgaacataatacatctc

SEQ ID NO: 254917 - DNA, 201 bp, Homo sapiens
ctctatgaaagctctctaacattggaagaggcaacagtttccccagatgtgcaaaaatcagtttagggccacaagaaacatgaaaagcaaggaaacattayacctccaaagaaatacaataattccccattaacagaccctaaatttaaagagtatatcaaatggctaagaaggaattcaaaataatgatcttcaggaaac

SEQ ID NO: 254918 - DNA, 201 bp, Homo sapiens
tctgtttctgggctttttgtccttttgttatgactgtctatacttaagtccagaccatagttttaattattatggccttatagtgactcttgagaacttgkgtataagtcctccaactttgtacttctttgtttaaaaactatcttggctctcttagattttttgaatttccatataaattttagaatcatcttggcaatt

SEQ ID NO: 254919 - DNA, 201 bp, Homo sapiens
cccacccccttcaccagcagagccaccatatgctgcatgcacttctaaggcactgaggactggcctacctggtgcccaccctgctgttggcaataccccayagctagcaaagccactgcagctagcatgcatatgcctaaggcctgagaactaatctgaatgatggctctcataccaagaaaagccataccactgtctcca

SEQ ID NO: 254920 - DNA, 201 bp, Homo sapiens
atataatgaataggctgctagaaagttaaaaattatacctattaaacaaaaataagttgagtttaggttacatgagatggataaaccactaccatccttaygtttttgaaatgcttgcgtttattttagagtggcaggagcaacttggaaagctctttttgaagatagataaggaattctaataagatatgttaacttatt

SEQ ID NO: 254921 - DNA, 201 bp, Homo sapiens
tggctcatgatactgtggtttgtgaatttggtatgggcttaactgtccaattcaggtgcttgcagaaaggatttcctgtctcaactaagctcattcatgtrtctgtgggcagctactgggtcatctgaggactggctagtctaaaatggcttggctaccctcaactgacagagccactgcatgctacgtgcacccccccga

SEQ ID NO: 254922 - DNA, 201 bp, Homo sapiens
actgtgtagtcataagtttaatattgacccagatatggcagtattcttttaaaaatgtactctttcaagtaaaaaaatcataatggattgataccagttayaattgtgccagtggttacaaaccaccccaaaacttactggcttataacagcaactatttatttggctcatgatactgtggtttgtgaatttggtatgggc

SEQ ID NO: 254923 - DNA, 201 bp, Homo sapiens
ctttgaagtatatcttactaaaatgtcttacctctgaagttcatttgcaacctcatatgtgactcttgctcatgtgtatctgttcactaggtgtctagttkgaggagatgacaagagcatcatttactctccctatgctcattcctgaaacaccttattttattgcagtggaaactgagatctggccaaagtttgatgatt

SEQ ID NO: 254924 - DNA, 201 bp, Homo sapiens
cagaagaaaacatacagatggtaaacaggcatatcaagagatgcttaacatcattgatcattagagaaattcgcagtgtagaaaactaccatgagatatcrtctcaccccagctaaaatggtttatatccaaaagtcaggcaataacaaatcctgccaaagatgtgaagataagagaaccctcatacactgttcatggaaa

SEQ ID NO: 254925 - DNA, 201 bp, Homo sapiens
atatgtaaggagctcaaacaactctctaggaaaaaatctaataatctaattttttaaatgagcataagatttgaataggcatttctcagaagaaaacatamagatggtaaacaggcatatcaagagatgcttaacatcattgatcattagagaaattcgcagtgtagaaaactaccatgagatatcatctcaccccagcta

SEQ ID NO: 254926 - DNA, 201 bp, Homo sapiens
ttctcagtgaatgtagactgtgtagtcataagtttaatattgacccagatatggcagtattcttttaaaaatgtactctttcaagtaaaaaaatcataatrgattgataccagttacaattgtgccagtggttacaaaccaccccaaaacttactggcttataacagcaactatttatttggctcatgatactgtggtttg

SEQ ID NO: 254927 - DNA, 201 bp, Homo sapiens
actaccgatctgaaaagggattaataaccagaatatgtaaggagctcaaacaactctctaggaaaaaatctaataatctaattttttaaatgagcataagrtttgaataggcatttctcagaagaaaacatacagatggtaaacaggcatatcaagagatgcttaacatcattgatcattagagaaattcgcagtgtagaa

SEQ ID NO: 254928 - DNA, 201 bp, Homo sapiens
ctgatcatgtataaattaattttttttgtgttatatgaaatctataataatgtttgtaatagtgatgattttgactttcagaacgtattattgctatgtcrtttccatcttctggaaggcagtctttctatagaaatccaattgaggtaagggtctttatctgacaaatactcatttctcagtgaatgtagactgtgtagt

SEQ ID NO: 254929 - DNA, 201 bp, Homo sapiens
aatgggagaaaatatttgcaaactaccgatctgaaaagggattaataaccagaatatgtaaggagctcaaacaactctctaggaaaaaatctaataatctwattttttaaatgagcataagatttgaataggcatttctcagaagaaaacatacagatggtaaacaggcatatcaagagatgcttaacatcattgatcatt

SEQ ID NO: 254930 - DNA, 201 bp, Homo sapiens
ctcaaaaaaaaaaaaaatgtttcctgtgcagattatctattcaccacttgcagatttgaagtttactaagcatgtgtgatatctaaaagttcatttgaagrataagtttcaatgccaaaaatgtttaaaagtgggatataggaagatgatgtaaagatggaatctcccaacatttccattttcaccaggaggacttaatag

SEQ ID NO: 254931 - DNA, 201 bp, Homo sapiens
atttgattatcctgagtattagctcttttctgtcaacctcaattttaaaagttttttttctgtgaaaatggagtctgatcatgtataaattaattttttttgtgttatatgaaatctataataatgtttgtaatagtgatgattttgactttcagaacgtattattgctatgtcatttccatcttctggaaggcagtcttt

SEQ ID NO: 254932 - DNA, 201 bp, Homo sapiens
ataaaaacagacacatagaccactggaacagaatagagaacccagaaacaaatccacacacacttacagtgaactcatttttagtaaatgtgccaagagcrtacattgaacaaaagacgtctcttcaacaaacggttctggggaaaactggatatacacatacagaagaatgcacctagacccctacctctcaccgtatac

SEQ ID NO: 254933 - DNA, 201 bp, Homo sapiens
ccgtccttatgatttagctaccactgataggtgagaacattcagtatttggttttctgtttctgcactagtttgctaaggataagagcctccagatccatycatgttcccacaaaatacatgatctcattctttttttatggctgcatagtattccatggtatatatgtaccacattttctttatccagtctgtcattgat

SEQ ID NO: 254934 - DNA, 201 bp, Homo sapiens
aatatgttatttgattatcctgagtattagctcttttctgtcaacctcaattttaaaagttttttttctgtgaaaatggagtctgatcatgtataaattawttttttttgtgttatatgaaatctataataatgtttgtaatagtgatgattttgactttcagaacgtattattgctatgtcatttccatcttctggaagg

SEQ ID NO: 254935 - DNA, 201 bp, Homo sapiens
gtcattgtgttggataatttaatatgttatttgattatcctgagtattagctcttttctgtcaacctcaattttaaaagttttttttctgtgaaaatggartctgatcatgtataaattaattttttttgtgttatatgaaatctataataatgtttgtaatagtgatgattttgactttcagaacgtattattgctatgt

SEQ ID NO: 254936 - DNA, 201 bp, Homo sapiens
gatgcttggtactcaaagattgtttgtgaccccaagtaattagcagccaaaaccttaggaaactatcagaatgcctgtgtatgatactctctcaagagtgrtccaagagaggagagaatcctgcttggagaaagaaggtggtagcattggacaggcagcaaaggagccctcagcagcaagaaaggagctaagagaccctgt

SEQ ID NO: 254937 - DNA, 201 bp, Homo sapiens
gtggagacttaagaactccatgccagtttaatggtcattgtgttggataatttaatatgttatttgattatcctgagtattagctcttttctgtcaacctyaattttaaaagttttttttctgtgaaaatggagtctgatcatgtataaattaattttttttgtgttatatgaaatctataataatgtttgtaatagtgat

SEQ ID NO: 254938 - DNA, 201 bp, Homo sapiens
aatagctaatggatgctgggcttaatacctagggatgggatgatctgtgcagcaaaccaccatggcacacatttacctgtgtaacacacctgcacatcctmcacatgtaccactgaacctaaaataaaagttgaagtaaattatctgtatatacatatgccctgatgtacatacgtatacattatatatgcatgcatctat

SEQ ID NO: 254939 - DNA, 201 bp, Homo sapiens
tggtcttgacctcctgacctcaggtgatctgtctgccttggcctcccaaagtgctgggattacaggtgtgagccactgcacctggcttactttttttttttaactaaatacctaattgttatgttattattttgtctattattgctctccttaacacatgtaaaaatagaccaaactgacatgatcatattttagaaaaat

SEQ ID NO: 254940 - DNA, 201 bp, Homo sapiens
atgggggaaggagagcatcaggaagaatagctaatggatgctgggcttaatacctagggatgggatgatctgtgcagcaaaccaccatggcacacatttamctgtgtaacacacctgcacatcctccacatgtaccactgaacctaaaataaaagttgaagtaaattatctgtatatacatatgccctgatgtacatacgt

SEQ ID NO: 254941 - DNA, 201 bp, Homo sapiens
cacacaatggggaacaacacacactggggcctgtggggagggaggggatgggggaaggagagcatcaggaagaatagctaatggatgctgggcttaatacmtagggatgggatgatctgtgcagcaaaccaccatggcacacatttacctgtgtaacacacctgcacatcctccacatgtaccactgaacctaaaataaaa

SEQ ID NO: 254942 - DNA, 201 bp, Homo sapiens
tctgtgaaaatggagtctgatcatgtataaattaattttttttgtgttatatgaaatctataataatgtttgtaatagtgatgattttgactttcagaacrtattattgctatgtcatttccatcttctggaaggcagtctttctatagaaatccaattgaggtaagggtctttatctgacaaatactcatttctcagtga

SEQ ID NO: 254943 - DNA, 201 bp, Homo sapiens
agatggggtttcgctatgttgcccaggttggtctcaaactcctgcgctcaagttatctgccagcctcagcctccgcctcccaaagtgctaggactgcaggyctgagccaccgtgcccagcctaaactcacttattagttctactaatttatctatagattcttttggattttatggtacatgattacatcatatgaaaata

SEQ ID NO: 254944 - DNA, 201 bp, Homo sapiens
aaatcaatatacaaaaatcagtagcatttctatatgtcaaccgtgaaccatttggaaaggacatttaaaaagtggtcctatatgcaatagccacaaataarattaaatacctagaaattaacctaaccaaagaagtgtaagatctttataatgaaaatgataaaacactgatgaaagaaattgaagaggacaccaagaaat

SEQ ID NO: 254945 - DNA, 201 bp, Homo sapiens
agataagaaataaattctaagaacagggggaacttcagactgaggccatcataagtacatggcatacagttagaactagtggagacttaagaactccatgscagtttaatggtcattgtgttggataatttaatatgttatttgattatcctgagtattagctcttttctgtcaacctcaattttaaaagttttttttctg

SEQ ID NO: 254946 - DNA, 201 bp, Homo sapiens
gtcactggtgcccagaaatcttggattttctctggtatttaagataagaaataaattctaagaacagggggaacttcagactgaggccatcataagtacayggcatacagttagaactagtggagacttaagaactccatgccagtttaatggtcattgtgttggataatttaatatgttatttgattatcctgagtatta

SEQ ID NO: 254947 - DNA, 201 bp, Homo sapiens
ctgagtcccaaggatcccacagagacctcttctcatcctagaaccccagagaatgaggtcagtgttttgtagatctcaggttttctgagtcagagggctgyaaagcaccttgggagttcccaccgtcactggtgcccagaaatcttggattttctctggtatttaagataagaaataaattctaagaacagggggaacttc

SEQ ID NO: 254948 - DNA, 201 bp, Homo sapiens
tttgagtttcaatttattaacctctcgtagttatttctgagtcccaaggatcccacagagacctcttctcatcctagaaccccagagaatgaggtcagtgytttgtagatctcaggttttctgagtcagagggctgcaaagcaccttgggagttcccaccgtcactggtgcccagaaatcttggattttctctggtattta

SEQ ID NO: 254949 - DNA, 201 bp, Homo sapiens
gtcagtaccgtactgaatggggaaaaaatgaaaagcttttctctgtgatctagaacacaatgaggatgcccacttttaccactgttgttcaacatagtacyggaagtcctagctagagccattatagaagagaaagaaagggaataaaaaaagaaatccaaattgggatggaagaagtaaaattatccttgtgtttgcaga

SEQ ID NO: 254950 - DNA, 201 bp, Homo sapiens
aggaacttgaatggattttcagctgactccatttgagtttcaatttattaacctctcgtagttatttctgagtcccaaggatcccacagagacctcttctyatcctagaaccccagagaatgaggtcagtgttttgtagatctcaggttttctgagtcagagggctgcaaagcaccttgggagttcccaccgtcactggtg

SEQ ID NO: 254951 - DNA, 201 bp, Homo sapiens
agatctgcatgtcttctcaattcaggactactcagttgcagcataggaacttgaatggattttcagctgactccatttgagtttcaatttattaacctctygtagttatttctgagtcccaaggatcccacagagacctcttctcatcctagaaccccagagaatgaggtcagtgttttgtagatctcaggttttctgagt

SEQ ID NO: 254952 - DNA, 201 bp, Homo sapiens
atctaagacacattcattcaaaatattctttattcatgagaatatatgccactgtgatagtgtgacatatttgtggtttagccctggcaatggaagatctrcatgtcttctcaattcaggactactcagttgcagcataggaacttgaatggattttcagctgactccatttgagtttcaatttattaacctctcgtagtt

SEQ ID NO: 254953 - DNA, 201 bp, Homo sapiens
tgatttacttgtattacttcactttttcttgtaattgtatttttttgcctcatctaagacacattcattcaaaatattctttattcatgagaatatatgcyactgtgatagtgtgacatatttgtggtttagccctggcaatggaagatctgcatgtcttctcaattcaggactactcagttgcagcataggaacttgaat

SEQ ID NO: 254954 - DNA, 201 bp, Homo sapiens
cttaatggttgatttacttgtattacttcactttttcttgtaattgtatttttttgcctcatctaagacacattcattcaaaatattctttattcatgagratatatgccactgtgatagtgtgacatatttgtggtttagccctggcaatggaagatctgcatgtcttctcaattcaggactactcagttgcagcatagg

SEQ ID NO: 254955 - DNA, 201 bp, Homo sapiens
tttttttaaccaaaaaagtctcaattgtgtatttacttggtatagtttcagggaacactgaaacagattaaggggctaaagccacccaagccacttcttcrtgccttcataatctgtcagacttggttctgtatggtgacattgtcaagtgagttcagatttatgacatttccttgatacctggagatccagtagactgtg

SEQ ID NO: 254956 - DNA, 201 bp, Homo sapiens
taaaaaccgtaagatcatttcagttgatgccaaaaatgcatttgataaaattcaacatcccttcatagtaaacaccctaaaaaaactgggtatagaagtarcacacctaaacataataaaaaccatatatgacagacccacagtcagtaccgtactgaatggggaaaaaatgaaaagcttttctctgtgatctagaacaca

SEQ ID NO: 254957 - DNA, 201 bp, Homo sapiens
acacttaatggttgatttacttgtattacttcactttttcttgtaattgtatttttttgcctcatctaagacacattcattcaaaatattctttattcatragaatatatgccactgtgatagtgtgacatatttgtggtttagccctggcaatggaagatctgcatgtcttctcaattcaggactactcagttgcagcat

SEQ ID NO: 254958 - DNA, 201 bp, Homo sapiens
tgacacttaatggttgatttacttgtattacttcactttttcttgtaattgtatttttttgcctcatctaagacacattcattcaaaatattctttattcwtgagaatatatgccactgtgatagtgtgacatatttgtggtttagccctggcaatggaagatctgcatgtcttctcaattcaggactactcagttgcagc

SEQ ID NO: 254959 - DNA, 201 bp, Homo sapiens
gttgcagtgagctgagatggtgccactgcactccagcctggtgacagagcaagactccatctcaaaaataaataaataaataaataaataaataaataaawaaaataaaaagatccattgatctgttgcctacaggaaatactcttctcccataaagacacaggtaggctggaagtggtggctcacttctataatcccagc

SEQ ID NO: 254960 - DNA, 201 bp, Homo sapiens
ggttgatatctatactgtataatgttttttatttttatgttgatgaatgtttcacaaactaatgatgattttaaactctcaggtttcagaaaacaaaaggygatacacaagggatggatttgacctagacctcacttacgttacaggtttgtgacacttaatggttgatttacttgtattacttcactttttcttgtaatt

SEQ ID NO: 254961 - DNA, 201 bp, Homo sapiens
atatcaccagagaaaattaccttcactattggaagacaggaaggaaagaaggaagagaagaccccaaaacaaccagaaaacaaataacaaaatagcaggaktgagttcttacttatcaatgataacactgagtgtcagcagactaagcttttcagtcaaaagacagagtggatgaatggatgaaagaacaagacacatcca

SEQ ID NO: 254962 - DNA, 201 bp, Homo sapiens
aaattctgtttctgaagcaaaaatggatcttttaaatttattgttagatggacacatttagttcgacttctacgacttattattctgataagaatttttcrtctgcttcatcaaaaaagacaacttgaaaagctgatgagaaggctggtaagtgggcaaaacatgcttatgattcagaaaaatattttgtgttttgggacc

SEQ ID NO: 254963 - DNA, 201 bp, Homo sapiens
taacaactgctgctctagacatagtttatattgataaaattctgtttctgaagcaaaaatggatcttttaaatttattgttagatggacacatttagttcracttctacgacttattattctgataagaatttttcatctgcttcatcaaaaaagacaacttgaaaagctgatgagaaggctggtaagtgggcaaaacatg

SEQ ID NO: 254964 - DNA, 201 bp, Homo sapiens
ggtaattggggagaggagggaaaattgcctctggttaacaactgctgctctagacatagtttatattgataaaattctgtttctgaagcaaaaatggatcktttaaatttattgttagatggacacatttagttcgacttctacgacttattattctgataagaatttttcatctgcttcatcaaaaaagacaacttgaaa

SEQ ID NO: 254965 - DNA, 201 bp, Homo sapiens
actagatgtaagtaacacacagacacaaacacacatgcacacacgcaagttgtgaaaacctaaatgcctccagacattgccaaatatcccccaggtaggtrattggggagaggagggaaaattgcctctggttaacaactgctgctctagacatagtttatattgataaaattctgtttctgaagcaaaaatggatctttt

SEQ ID NO: 254966 - DNA, 201 bp, Homo sapiens
atccacctgctttagcctcccaaagtgctgggattacaggcatgagccaccacgcccggcctttttttaatgtttattccacattgtgtcagtcctcacaygtcttctgggatccatctgacatgtaatctgttggttttccagcagtaataatttcacgtaaaatcctaaatctgacctgaaatattttctcttctctta

SEQ ID NO: 254967 - DNA, 201 bp, Homo sapiens
agcagttatattaattgtagggtgtttagcaaaattcctggcctctattcactagatgtaagtaacacacagacacaaacacacatgcacacacgcaagtkgtgaaaacctaaatgcctccagacattgccaaatatcccccaggtaggtaattggggagaggagggaaaattgcctctggttaacaactgctgctctaga

SEQ ID NO: 254968 - DNA, 201 bp, Homo sapiens
ggtgagcagttatattaattgtagggtgtttagcaaaattcctggcctctattcactagatgtaagtaacacacagacacaaacacacatgcacacacgcmagttgtgaaaacctaaatgcctccagacattgccaaatatcccccaggtaggtaattggggagaggagggaaaattgcctctggttaacaactgctgctc

SEQ ID NO: 254969 - DNA, 201 bp, Homo sapiens
gagggtggtgagcagttatattaattgtagggtgtttagcaaaattcctggcctctattcactagatgtaagtaacacacagacacaaacacacatgcacrcacgcaagttgtgaaaacctaaatgcctccagacattgccaaatatcccccaggtaggtaattggggagaggagggaaaattgcctctggttaacaactg

SEQ ID NO: 254970 - DNA, 201 bp, Homo sapiens
aaatgagagcataaaacttcctaactcttgagagagagctagacatctagttccaggaagatcaaagaaccccaaatacattcaacccagacattatagtyaaattgtgaaaaatcaaagacaaagattttttaaaatagcaagagaaaagtaacacatttataatggaatccccattagactaacagctgatttcccagc

SEQ ID NO: 254971 - DNA, 201 bp, Homo sapiens
tagccaaaatgtggaaacaactcaaatgttcatccatggatgaatggataaacaaaatgaggtatagatgtacaatggaatatgattcagccttgaaagargtacaattcttatatatgctacaacacagatgaaccttgaggacattatactaagtgaaataagccagtcacagaagaacaaatattatatgaatccact

SEQ ID NO: 254972 - DNA, 201 bp, Homo sapiens
ctcagtgagatataaggtaatacagatagacaagtcaatgaaatcaggaaaacatgatttgaaagagaaattcagtaaagatacagatatcataaaaatamccaaacagaagccctaagagctaaacagttcaatggatgaaatgaaaaaatacaatcaatggctttacagacaagaacaagcagaagaaataatttctga

SEQ ID NO: 254973 - DNA, 201 bp, Homo sapiens
tcttaaggaaactcagtgagatataaggtaatacagatagacaagtcaatgaaatcaggaaaacatgatttgaaagagaaattcagtaaagatacagataycataaaaataaccaaacagaagccctaagagctaaacagttcaatggatgaaatgaaaaaatacaatcaatggctttacagacaagaacaagcagaagaa

SEQ ID NO: 254974 - DNA, 201 bp, Homo sapiens
cccaatcataaacataagagatgacagaaaaaagaataatcttaaggaaactcagtgagatataaggtaatacagatagacaagtcaatgaaatcaggaamacatgatttgaaagagaaattcagtaaagatacagatatcataaaaataaccaaacagaagccctaagagctaaacagttcaatggatgaaatgaaaaaa

SEQ ID NO: 254975 - DNA, 201 bp, Homo sapiens
aaaataatggattataagatagtatttacaagcctcatggtaacctcaaaccaaaaaacataacagtggatacatgaaaaataaaaaacaagaaactaaaycatatcaccagagaaaattaccttcactattggaagacaggaaggaaagaaggaagagaagaccccaaaacaaccagaaaacaaataacaaaatagcagg

SEQ ID NO: 254976 - DNA, 201 bp, Homo sapiens
gtataccccaatgaactgacatccgagacctattcatagaaataaattcatacaagtaaacctactccataaaattggaaaaggtgactttttcaccagaygcatagaaatcaatttagaaacacagcaaccgtgaaaatgcaagaaaacatgtcatctacaaagggaaataataattatccagtaatagaacccaatcat

SEQ ID NO: 254977 - DNA, 201 bp, Homo sapiens
cacagctgaataaactacatggagactacacttactgcatccatgtagaaccaaggccagtataccccaatgaactgacatccgagacctattcatagaartaaattcatacaagtaaacctactccataaaattggaaaaggtgactttttcaccagatgcatagaaatcaatttagaaacacagcaaccgtgaaaatgc

SEQ ID NO: 254978 - DNA, 201 bp, Homo sapiens
cattaccaacattttgggccagatcattgtcataagagggtggtgagcagttatattaattgtagggtgtttagcaaaattcctggcctctattcactagwtgtaagtaacacacagacacaaacacacatgcacacacgcaagttgtgaaaacctaaatgcctccagacattgccaaatatcccccaggtaggtaattgg

SEQ ID NO: 254979 - DNA, 201 bp, Homo sapiens
atcccaaaattaaatttacaaatgctaagagtctatcgtatcactatttctctagaccagaatttctcagcctcagcattaccaacattttgggccagatsattgtcataagagggtggtgagcagttatattaattgtagggtgtttagcaaaattcctggcctctattcactagatgtaagtaacacacagacacaaac

SEQ ID NO: 254980 - DNA, 201 bp, Homo sapiens
ggttctctgactagaaacctcagcatcacttgacagcttgctagaaatataagaagaaaaataccttaggccccaccctggacccactgaatcagtatctstgggacccagcaatctgcagcttaacaagcttttccaggtggctcttattgacatgtgcccaaatcagagaagcactagtccagaccatcagttctctgc

SEQ ID NO: 254981 - DNA, 201 bp, Homo sapiens
taatagtaggtatacagaaaaatgcagaatgttataacattgtaactatgatgtataaactactcttattctaagtagagagactaaactatgagccaatsaaaaatattaactacaacttttcaagacatagatggtataataagatataaatagaaataacaaaaagttaaataatagcgagacaaatttaagttgtag

SEQ ID NO: 254982 - DNA, 201 bp, Homo sapiens
gtcccaccaacagtgtaaaagtgttcaatttctccacatcctctccagcacctgttgtttcttgactttttaattatcgccattctaactggtgtgagatrgtatgtcattgtggttttgatttgcattgctctgatggccagtgatggtgagcaatttttcatgtgtctgttggctgcataaatgtcttcttttgagaag

SEQ ID NO: 254983 - DNA, 201 bp, Homo sapiens
tgacacatgtagcaacacaatagtagagttttgcagtatagttgtggtagaaacaaagaaagcttaggcaaagttagaactgttagggattaggaaaactwaacagtgtatgaggccctggtgactctttttctttttttactgtgacaatgaggaaaatgaaagagcaaatgtatactgggatgtagatggtggcttcct

SEQ ID NO: 254984 - DNA, 201 bp, Homo sapiens
atttcaatcagaaagataaggacattaatgagcaataagtaacaacctgaaggtataaaactcactggtaatagtaggtatacagaaaaatgcagaatgtyataacattgtaactatgatgtataaactactcttattctaagtagagagactaaactatgagccaatcaaaaatattaactacaacttttcaagacatag

SEQ ID NO: 254985 - DNA, 201 bp, Homo sapiens
aaaagcagcaagagaaaagaaaccaataatatacgatggagctacaatatatctggcagcagactctttagtagaaacgtttcaggccaggagagagtggyatgacatattgaaagtgctgaaggaaaaaaacatttaccctagaacagtgtatccagtgaaaatatccttcaaagtgaaggggaaataaagacttttcca

SEQ ID NO: 254986 - DNA, 201 bp, Homo sapiens
ccttttggctaagatcaagtataatattcttatcagtttaatatctgctatatcaaaaaaacttatattgaaaacaattcccctctgtgcttcaactacaratcccttacacataatgttctgtctggatttttcctacagccaagagggaatttatttgagcatatgcaaaatttgagtgatttcaatcatgagtttcta

SEQ ID NO: 254987 - DNA, 201 bp, Homo sapiens
agactacctcaaggaatttaataatcacagtcccaaagatcaaggataaagaaaggatcttaaaagcagcaagagaaaagaaaccaataatatacgatggygctacaatatatctggcagcagactctttagtagaaacgtttcaggccaggagagagtggcatgacatattgaaagtgctgaaggaaaaaaacatttacc

SEQ ID NO: 254988 - DNA, 201 bp, Homo sapiens
ttctgttccattggtctatatgtctgtttttgttccagtaatatttaaggttgttcttaaactttgtgagaaccttttagattaagggagccaacagagaygctatttcaaaaattatgctggaatttttatagtgtaatgatacgaagaagttgacattggtggggttaaaatggggaaaaaaagccatttgtaaatcca

SEQ ID NO: 254989 - DNA, 201 bp, Homo sapiens
agattaagggagccaacagagatgctatttcaaaaattatgctggaatttttatagtgtaatgatacgaagaagttgacattggtggggttaaaatggggraaaaaagccatttgtaaatccaaccaatttaagtttagttagattttctctcattcaggtttaggctttaaataatcatctaagcatatttcacaaattt

SEQ ID NO: 254990 - DNA, 201 bp, Homo sapiens
tgtagtaatccaaggattggtgatttaggccgctgaactctggctctgagtacatctctaatccctaaaccttcaccaagagggatcaggagaagaaagtrggggaagggagtcaggtatgccacatatctgctactgaaaaatgcctggatgggaaaggagtttgaaatgttgtcctaaaatgaagtttctgagttcgat

SEQ ID NO: 254991 - DNA, 201 bp, Homo sapiens
tagaagcagtcccctgggcttcccctggcaggcaccacccaggccagctgagcagcagtgtgcccacatcctgagctagaatagctctatggactaccccyagcagaaacacatccaggacagctgagaagtcatttgactgtatcccaggcctgagaaacaccccctcttggccagccctggcaaagatatcttcagtcc

SEQ ID NO: 254992 - DNA, 201 bp, Homo sapiens
gaagactacctcaaggaatttaataatcacagtcccaaagatcaaggataaagaaaggatcttaaaagcagcaagagaaaagaaaccaataatatacgatrgagctacaatatatctggcagcagactctttagtagaaacgtttcaggccaggagagagtggcatgacatattgaaagtgctgaaggaaaaaaacattta

SEQ ID NO: 254993 - DNA, 201 bp, Homo sapiens
tttaatagcagaattgataaaccagaagaaagaattaatgagcttgaagacaggctatttcaaaatacatagaggagacaaaggaaagaataaaaaacaaygatgcatgcctacaggatctagaaaatagcctcaaaaggacaaatctaagtggtattggccttaaagaggaggtggggagtgtagaaagtttattcaaag

SEQ ID NO: 254994 - DNA, 201 bp, Homo sapiens
tgggagcttactctggccagcagactgtcaggccaactaagcagccacatacctatgtcccagcttgaggaacagccctttaggccaccccccacagaaayactcccaggccaactaagcagctgtgcaaccttgcacgagcctgagaaatagtcctgtatccattcccagcagatgcacctccagactagccaatcagcc

SEQ ID NO: 254995 - DNA, 201 bp, Homo sapiens
gaattatcctggatcttgtccaagaccattaaggcagtaccactataagtctgcaagaaccacagagtttaggaggcttggggtgccgcctagagcagatrgagcttagatcacaatatccaagttctttcaaatatctggaaagccttcccaagaaagatgggtacaaacaagccctgacagtgaaaactacaataaata

SEQ ID NO: 254996 - DNA, 201 bp, Homo sapiens
ggtgtatctcctaatgctatccctccccaatccccccaccccatgacaggccccggtgtgtgatgttccccttcctttgtccaagggttctcattgttcarttcccacctatgagtgagaacatgcagtgtttggttttctgaccttgcgatagtttgcgagaatgatggtttccagcttcatccatgtccctacaaagga

SEQ ID NO: 254997 - DNA, 201 bp, Homo sapiens
tgcaggtttgttacatatttatgcatgtgccatgttggtgtgctgtacccattaattcgtcatttacattaggtgtatctcctaatgctatccctccccawtccccccaccccatgacaggccccggtgtgtgatgttccccttcctttgtccaagggttctcattgttcaattcccacctatgagtgagaacatgcagtg

SEQ ID NO: 254998 - DNA, 201 bp, Homo sapiens
gtctgcacctccttttgtgtttttcacagggcctagcatagacctttcttattgtgggtgccattatttctatgagaatgagtcaaagaactagtacggcktcaaagtcattcattccaaaacttgagctatctttggtcactccatcctgcagcctgcactggtcaagttcaaagatcccattgacaaacacaagagttc

SEQ ID NO: 254999 - DNA, 201 bp, Homo sapiens
tttgctaccctgaagaacatgaatctgtttctgacctttctattctgttcattgatttttcatctgtgtgccaatagcacaactatcttactgtagctttytaatacgtcctcatcatcttcttctttctcacaattgtttgggtattttaggtcatctatatttccatataaatttgggaatcaactagtcaaattacac

SEQ ID NO: 255000 - DNA, 201 bp, Homo sapiens
tatttatgatttctggtatgtttggttttatttatcatctttttctttattaaaaatactttgatattttctttgtaaatttgtctatattttgctattawttgatttgtttttatcccttgcattttttattgatatgcaagtcagaagcccatttctagtctatcaatgtttatatttaaatgcttagaaaacataatt

SEQ ID NO: 255001 - DNA, 201 bp, Homo sapiens
cgattctcctgcctcagcctcctgagtagctgggactacagtcacgcaccaccacgcccagctaattttttgtatttttagtagagatggagtttcaccaygttggccaggatggtctcaatctcttgacctcatgatccgcccaccttggccacccaaagtgctgggattacaggcgtgagccaccgcgcctggcctcta

SEQ ID NO: 255002 - DNA, 201 bp, Homo sapiens
agcattttaaaataattaacaggagaattcaccacaaactgacttaagagcctttgggccttatgagaacattggtggtagtctggcagtaccccccatgkcctgtgtttgaggtggccatggattgatgctcctctgcctttggacaggggtggaaagagtgggagggactgcatcttgtggtttgagtgacagctcagc

SEQ ID NO: 255003 - DNA, 201 bp, Homo sapiens
aaaaagcattttaaaataattaacaggagaattcaccacaaactgacttaagagcctttgggccttatgagaacattggtggtagtctggcagtaccccchatggcctgtgtttgaggtggccatggattgatgctcctctgcctttggacaggggtggaaagagtgggagggactgcatcttgtggtttgagtgacagct

SEQ ID NO: 255004 - DNA, 201 bp, Homo sapiens
gtgtccagtgggagagatagcacctgccttcaatacaaatcccatttcattaaacatggtcttgttagtgtcatgtagcttccaccttctattgataaaaratgagtcatgttcatagttaatatttgtgcttttaattcaactttgatattaatattggaacttttagtgttttaaggtttagtatctcatatctttttc

SEQ ID NO: 255005 - DNA, 201 bp, Homo sapiens
caatcccagctgtgtggaggttggtcccaggactggctgtaactcaagtaatgcagagcagggaaatcaacccccaccaccacacttccagacagaggaayaatctgcagtcccatccagggtaaactcactcttaagacagccaaaccactgcaagccctctcccaagtgggagaggcccctaagcctctgagcagctga

SEQ ID NO: 255006 - DNA, 201 bp, Homo sapiens
aaaaaaaagcattttaaaataattaacaggagaattcaccacaaactgacttaagagcctttgggccttatgagaacattggtggtagtctggcagtaccscccatggcctgtgtttgaggtggccatggattgatgctcctctgcctttggacaggggtggaaagagtgggagggactgcatcttgtggtttgagtgaca

SEQ ID NO: 255007 - DNA, 201 bp, Homo sapiens
ccccagagtctgtaccagagaaaaacgtgtccagtgggagagatagcacctgccttcaatacaaatcccatttcattaaacatggtcttgttagtgtcatrtagcttccaccttctattgataaaaaatgagtcatgttcatagttaatatttgtgcttttaattcaactttgatattaatattggaacttttagtgtttt

SEQ ID NO: 255008 - DNA, 201 bp, Homo sapiens
cacagcaccatcttgagaccagagtcatctcttgagtgtgccctcctctgggggccagtagccactgtgcctctccagcactggagctttatcttcagtawaccaagcccacatgggtgggttaaagccacaatcccagctgtgtggaggttggtcccaggactggctgtaactcaagtaatgcagagcagggaaatcaac

SEQ ID NO: 255009 - DNA, 201 bp, Homo sapiens
gagatcacgccattgcactctagcctgggtgacagggcgagactccatctcaaaaaaaaaaaaaaaaagcattttaaaataattaacaggagaattcaccrcaaactgacttaagagcctttgggccttatgagaacattggtggtagtctggcagtaccccccatggcctgtgtttgaggtggccatggattgatgctcc

SEQ ID NO: 255010 - DNA, 201 bp, Homo sapiens
aagtgtagaaatttacttttctcctaagtgactcatagttttctcagcatgaaaatgtcatccccctatattgtccttaccctgttttagtgatctagagygagcaggaagaccagagtcactacagtgtttttcatgctttacatcatggccacctccctacccccagagtctgtaccagagaaaaacgtgtccagtggg

SEQ ID NO: 255011 - DNA, 201 bp, Homo sapiens
ggcaggagaattgtttgaacctgggaggcagaagttgcgttgagctgagatcacgccattgcactctagcctgggtgacagggcgagactccatctcaaaraaaaaaaaaaaaagcattttaaaataattaacaggagaattcaccacaaactgacttaagagcctttgggccttatgagaacattggtggtagtctggca

SEQ ID NO: 255012 - DNA, 201 bp, Homo sapiens
atcctcatgtaatcaaatgtatctgttcctttctttgtgattttgcctttaatgttattctcagaaagtccttcttaccccaagattttaaatatattcaycaaaatttctgttttgaatttattttcttcatttaaataaaatatctgccctgaatttactttgtcttaaggtataaagtgtagaaatttacttttctcc

SEQ ID NO: 255013 - DNA, 201 bp, Homo sapiens
agtttgattatttttataatgcattaagctattttgtacttttataagaagcactttgggaggctgaggtgggaggatcccaaggtcaggagttcgacacratcctggccaacatggtgaaaccccgtctctattaaaaatacaaaaattagctgggcatggtggtggttgcctgtaatcccagctacttgggaggctgag

SEQ ID NO: 255014 - DNA, 201 bp, Homo sapiens
tctatgtttttagtaattactgtaaagatttcaacctgcatccttgatttagctattaatttttgtttatgttgagcctgcatctagaaatcttcctaaawtctctcattagattaaggagttattctaaagatttacttactacactgactttctacactggttaggctctgcagtatactgttaaatggaaacagtgaa

SEQ ID NO: 255015 - DNA, 201 bp, Homo sapiens
atattttattaaacttggatgtcattaattccatataaagcaatgctaagagagtcagcatgtgttactgatgtgttgctgaagattaaagtatttttaaktctcactaaaaaggtggaaggagccaactgaaatgcaaaaaagggtctggggttctattcatggtgaggtttttttttgtttcttccagctctaacgtgg

SEQ ID NO: 255016 - DNA, 201 bp, Homo sapiens
gtctcactgtgttgcccagactggtcttgaactcctggactcaagtgatccacccacctcagcttcccaaagtgctgggattacaggcatgagccatcatkcccggagagaagtttgtaattttgaatatagtaaaatttgtttttctatgtgtgtgtatgtatttcatgcttttctgtcatgtttatgaaattcacccct

SEQ ID NO: 255017 - DNA, 201 bp, Homo sapiens
tcacctttcctgaattttttttctttttctttttctttttttttttttggagacagagtcatgttctgtcacccaggctggagtgcagtggtgtgatctcrgctcactgcagcctctgcctcctgggttcaagcaattctcctgtctcagcctcccaagtagctaggattacaggcatgtgccaccacgcctggctaattt

SEQ ID NO: 255018 - DNA, 201 bp, Homo sapiens
atggggaggaactcacagagggaggctttttatgttagtgtttgtcacattaccattcagtgagaatgagactgtgctagtagtgtggaccaagggagaarcgaatcctgcttgcagcgagaaggagataggagtggacaaagatcagaaaaatcccagccaaaacaaagaacagagctaataaccctggaattatttcac

SEQ ID NO: 255019 - DNA, 201 bp, Homo sapiens
tttttggatggaggtaggaaaatggggaggaactcacagagggaggctttttatgttagtgtttgtcacattaccattcagtgagaatgagactgtgctaktagtgtggaccaagggagaagcgaatcctgcttgcagcgagaaggagataggagtggacaaagatcagaaaaatcccagccaaaacaaagaacagagcta

SEQ ID NO: 255020 - DNA, 201 bp, Homo sapiens
tcatacacacaagagagagttgggctattgagtgtgacaagcatccatgggaacaaggagttcccttgaaactatttctagagtcctctcagaatgagctytgtatgcaatgttcttttgttttttggatggaggtaggaaaatggggaggaactcacagagggaggctttttatgttagtgtttgtcacattaccattca

SEQ ID NO: 255021 - DNA, 201 bp, Homo sapiens
cccatctggattgaattggcccagagacaggagggacttctcattgcagggtgaaggtaagcagaagatccctgtcaccccactgccatcacaaacacaamgtctttacaacaggagaatctcacagtctttgcaagccctgaggccagtttggagtactgccaagaattgacaaagctgcatgtcctggactaggagtac

SEQ ID NO: 255022 - DNA, 201 bp, Homo sapiens
aaagggaatgattgtgacgctattgatattgatatgtgctttaacatcaagatgcaaagtgtacatttctcccccccacacttaacactagccatcattgrtttctctgatattagtaaatatatttgttctaatgcacattctttgacacaccttcatttatccttttctgtctttggactgaaaagttaaatctattga

SEQ ID NO: 255023 - DNA, 201 bp, Homo sapiens
ctccctagtgagatgaacccagtacctcagatggaaatgcagaaatcactgtcttccgcgtcgctcacgctgggagctgtagaacggagctgttcctgttyggccatcttggctcctcctccgagatttcgcagcttcttaaaggactcagatttcctgagtttgagagcgtaccagattgacagaagggaggagaaaatc

SEQ ID NO: 255024 - DNA, 201 bp, Homo sapiens
cactcagcctgtgcagccccttctgccccatctggattgaattggcccagagacaggagggacttctcattgcagggtgaaggtaagcagaagatccctgycaccccactgccatcacaaacacaaagtctttacaacaggagaatctcacagtctttgcaagccctgaggccagtttggagtactgccaagaattgacaa

SEQ ID NO: 255025 - DNA, 201 bp, Homo sapiens
cgcccactgtctggcactccctagtgagatgaacccagtacctcagatggaaatgcagaaatcactgtcttccgcgtcgctcacgctgggagctgtagaayggagctgttcctgttcggccatcttggctcctcctccgagatttcgcagcttcttaaaggactcagatttcctgagtttgagagcgtaccagattgacag

SEQ ID NO: 255026 - DNA, 201 bp, Homo sapiens
cggtgcgcgcacccactgacctgcgcccactgtctggcactccctagtgagatgaacccagtacctcagatggaaatgcagaaatcactgtcttccgcgtmgctcacgctgggagctgtagaacggagctgttcctgttcggccatcttggctcctcctccgagatttcgcagcttcttaaaggactcagatttcctgagt

SEQ ID NO: 255027 - DNA, 201 bp, Homo sapiens
gcactcagcctgtgcagccccttctgccccatctggattgaattggcccagagacaggagggacttctcattgcagggtgaaggtaagcagaagatccctrtcaccccactgccatcacaaacacaaagtctttacaacaggagaatctcacagtctttgcaagccctgaggccagtttggagtactgccaagaattgaca

SEQ ID NO: 255028 - DNA, 201 bp, Homo sapiens
ggttatttgcttgttataaattctcagaagtggaaattctgtgtcaaagggaatgattgtgacgctattgatattgatatgtgctttaacatcaagatgcraagtgtacatttctcccccccacacttaacactagccatcattgatttctctgatattagtaaatatatttgttctaatgcacattctttgacacacctt

SEQ ID NO: 255029 - DNA, 201 bp, Homo sapiens
cttgcacttcccaagtgaggcaatgcctcgccctgcttcggctcgcgcacggtgcgcgcacccactgacctgcgcccactgtctggcactccctagtgagwtgaacccagtacctcagatggaaatgcagaaatcactgtcttccgcgtcgctcacgctgggagctgtagaacggagctgttcctgttcggccatcttggc

SEQ ID NO: 255030 - DNA, 201 bp, Homo sapiens
agcactcagcctgtgcagccccttctgccccatctggattgaattggcccagagacaggagggacttctcattgcagggtgaaggtaagcagaagatcccygtcaccccactgccatcacaaacacaaagtctttacaacaggagaatctcacagtctttgcaagccctgaggccagtttggagtactgccaagaattgac

SEQ ID NO: 255031 - DNA, 201 bp, Homo sapiens
gcatgcacttctaagttctttaggcatatacttttttgtttacagatatgagaccatacttattcttttgtaaataaccttattacttaatgacatcatgrctatatttttttgttaatatatattcatgtgcacttacaacattatttgcaacagttgtgtaatatttcatggtgtagatgagctataattcatttaata

SEQ ID NO: 255032 - DNA, 201 bp, Homo sapiens
ccctttctttgactcggaaagggaactccctgaccccttgcacttcccaagtgaggcaatgcctcgccctgcttcggctcgcgcacggtgcgcgcacccastgacctgcgcccactgtctggcactccctagtgagatgaacccagtacctcagatggaaatgcagaaatcactgtcttccgcgtcgctcacgctgggagc

SEQ ID NO: 255033 - DNA, 201 bp, Homo sapiens
aagatttgattagagtatcaaaggcatagtcctggagtgcagcaaaggagtgcagacacatctgtggtgactggaagttgccacagcatggaagcactcakcctgtgcagccccttctgccccatctggattgaattggcccagagacaggagggacttctcattgcagggtgaaggtaagcagaagatccctgtcacccc

SEQ ID NO: 255034 - DNA, 201 bp, Homo sapiens
tttaagagcttatgttactcatgctttcatttggtttttattaataaattctttagaattatccagattaatgagggtttattttttatgagaaattggtrtaaacttcttatgaaattctgaaattttaggaagagtttgtaaacagacacaggtgattttaattcagttttgcttttctctcttgaggtgttggtctga

SEQ ID NO: 255035 - DNA, 201 bp, Homo sapiens
gaaaatctgaaaatacaatcaacaaatctaaccacatatagtcattcttaaactttgatgcatgcacttctaagttctttaggcatatacttttttgtttrcagatatgagaccatacttattcttttgtaaataaccttattacttaatgacatcatgactatatttttttgttaatatatattcatgtgcacttacaac

SEQ ID NO: 255036 - DNA, 201 bp, Homo sapiens
acaaatacacgtctaagatttgattagagtatcaaaggcatagtcctggagtgcagcaaaggagtgcagacacatctgtggtgactggaagttgccacagyatggaagcactcagcctgtgcagccccttctgccccatctggattgaattggcccagagacaggagggacttctcattgcagggtgaaggtaagcagaag

SEQ ID NO: 255037 - DNA, 201 bp, Homo sapiens
tctgtagttctgtaaataggttttattctaaaaactgaaaataatgtaagagttcattaaaggaaaatctgaaaatacaatcaacaaatctaaccacatayagtcattcttaaactttgatgcatgcacttctaagttctttaggcatatacttttttgtttacagatatgagaccatacttattcttttgtaaataacct

SEQ ID NO: 255038 - DNA, 201 bp, Homo sapiens
atgctaaatcaagcaagatgggtgaatagagatgcctggtgctcatctcccctacgagaaaaaaccgaggcaacaaatacacgtctaagatttgattagartatcaaaggcatagtcctggagtgcagcaaaggagtgcagacacatctgtggtgactggaagttgccacagcatggaagcactcagcctgtgcagcccct

SEQ ID NO: 255039 - DNA, 201 bp, Homo sapiens
gctgaaattgcaccattgcactgcagccttggcgacacagcaagactccatgtaaaaaaaaaaaagaaaaaaaaatatatgagtctcatatgcatctatayatacatatatatgagacttaatacttcaatgagaaacactgaaataaaataacaaaagagcatttccactgtccatcagttgctaagtagccatgtgccc

SEQ ID NO: 255040 - DNA, 201 bp, Homo sapiens
gtgagctgaaattgcaccattgcactgcagccttggcgacacagcaagactccatgtaaaaaaaaaaaagaaaaaaaaatatatgagtctcatatgcatcyatacatacatatatatgagacttaatacttcaatgagaaacactgaaataaaataacaaaagagcatttccactgtccatcagttgctaagtagccatgt

SEQ ID NO: 255041 - DNA, 201 bp, Homo sapiens
tccttctttccccactccaaacaaaataaagcaggttttcattttattttatttttaaattacaaagtctcattacatagatataggaggaatttgcagtrgtccctgtgagaaatgctggtgtttcataccagggggatgatattggatttatagtaaaagctggaatcagtgcttggctttgacatcatatattcattc

SEQ ID NO: 255042 - DNA, 201 bp, Homo sapiens
gaaaacaccatgtattaaatatatctgagacttggctgggtgcagtggctcacgcctgtaatcccagcactctggggggctgaggcgggcagatcacatgragtcaggagttcaagaccagcctggctaacatggtgaaaccccatctctactaaaaatacaaaaattagccaagcataatggcaggtgcctgtaatccca

SEQ ID NO: 255043 - DNA, 201 bp, Homo sapiens
accaaacacggagacagatggacatttgtggaatttactctcaggagccttcatggccatacagagtattttttaacaaggtttccaattcttctcattgyagcatttgcaggtaactttgcatccttttttgaaggagttgtataaggaggtcagttcgtaggagagctgcttcttcctgttagtgtatttgtcaccctc

SEQ ID NO: 255044 - DNA, 201 bp, Homo sapiens
tcatgtgtatctgttcactaggtgtctagtttgaggagatgacaagagcatcatttactctccctatgctcattcctgaaacaccttattttattgcagtkgaaactgagatctggccaaagtttgatgatttgcccaggctggcattaaaatacggttctcttctaccaaccttttctgtcttcatgctatactccttga

SEQ ID NO: 255045 - DNA, 201 bp, Homo sapiens
ttcatttgcaacctcatatgtgactcttgctcatgtgtatctgttcactaggtgtctagtttgaggagatgacaagagcatcatttactctccctatgctyattcctgaaacaccttattttattgcagtggaaactgagatctggccaaagtttgatgatttgcccaggctggcattaaaatacggttctcttctaccaa

SEQ ID NO: 255046 - DNA, 201 bp, Homo sapiens
ttaaaattgagcttcttaatgtattctcaaaaaaggccctaacacatgaaaatcaaatgagacacattaaataataatatttaattgattaaagtctaatrgaaaattcaatactttttaaaagtgcagcacttttgaaaagtgcctcacggccgggcacggtggctcatgcctgtaatcccagcacttcgggaggccagg

SEQ ID NO: 255047 - DNA, 201 bp, Homo sapiens
cctccttgagctgtggtgggctccgcccagttcgagcttcccggctgctttgtttacctaatcaagcctgggcaatggcgggcgcccctcccccagcctcrctgccgccttgcagtttgatctcagactgctgtgctagcaatcagcgagactccgtgggcgtaggaccctccaagacaggtgcgggatataatctcgcgg

SEQ ID NO: 255048 - DNA, 201 bp, Homo sapiens
cgatgtgggctcttttttggttccatatgaactttaaagtagttttttccaattctgtgaagaaaggcattggtagcttgatggggatggcattgaatctstaaattaccttgggcagtatggccattttcacgatattgattcttcctacccatgagcatggaatgttcttccatttgtttgtatcctcttttatttcct

SEQ ID NO: 255049 - DNA, 201 bp, Homo sapiens
catatgtatacatgtgccatgctggtgcgctgcacccactaactcatcatctagcattaggtatatctcccagtgctatccctcccccctccccctacccyacaacagtccccagagtgtgatattccccttcctgtgtccatgtgatctcattgttcaattcccacctatgagtgagaatatgtggtgtttggttttttg

SEQ ID NO: 255050 - DNA, 201 bp, Homo sapiens
agaagaaaagcttgaagctaaaagcttggttcatgaggtttaaggaaagaagccatctctataacataaaagtgcaaggcaaacagcaagtgctgatgcasaagcagcagcaagttatccagaagatctagctgagataattgatgaaggtggccaaactaaacaacagattttcaatgtagacaagatagtcttttattg

SEQ ID NO: 255051 - DNA, 201 bp, Homo sapiens
ttcagaccaaatagtgctatacacatgaatagtcaaaacttaactggtttatgtgcagagtaatgaaagctagttttacgagaaaagtaaattttgaattrtgtctcctgtctgactgtattcttttgtcatcctctagtccacccacaaatgaattatcaggagtgaacccagaggcacgtatgaatgaaaggtgagtta

SEQ ID NO: 255052 - DNA, 201 bp, Homo sapiens
gttactttaccctacttgtggaccaagagagacaatcaaatgaagaagtaatggagggctttcaaggcagcacatttagtggaataagagggctgactacctccacacaaaagtttagtttgaaataactgccaccacaaaggctgtcacgcattgggactgaggtcataataaagaggtttatttaaatctgaaagtatt

SEQ ID NO: 255053 - DNA, 201 bp, Homo sapiens
tccaggacaaggccctcactctcttcgattcaatgaagcctgggagaggtaaggaagctgcagaagaaaagcttgaagctaaaagcttggttcatgaggtwtaaggaaagaagccatctctataacataaaagtgcaaggcaaacagcaagtgctgatgcagaagcagcagcaagttatccagaagatctagctgagataa

SEQ ID NO: 255054 - DNA, 201 bp, Homo sapiens
agttactttaccctacttgtggaccaagagagacaatcaaatgaagaagtaatggagggctttcaaggcagcacatttagtggaataagagggctgactacctccacacaaaagtttagtttgaaataactgccaccacaaaggctgtcacgcattgggactgaggtcataataaagaggtttatttaaatctgaaagtat

SEQ ID NO: 255055 - DNA, 201 bp, Homo sapiens
gtgaaaagaaggcactgatgaagggattttagtgtcaggaaatgagatgaggtcaaggggatttgtacatagaaactgcagctgaatttgaaataaaccaycaaatgcttagtttgtgcttccttcaattgtaaagaactaaacatcgcttgtgagtaattcaaaccagaaagtgaagtctaggatgtcatattggtgttg

SEQ ID NO: 255056 - DNA, 201 bp, Homo sapiens
tcaaaccagccacagcattcccttaagccaaagcctaatccaggacaaggccctcactctcttcgattcaatgaagcctgggagaggtaaggaagctgcasaagaaaagcttgaagctaaaagcttggttcatgaggtttaaggaaagaagccatctctataacataaaagtgcaaggcaaacagcaagtgctgatgcaga

SEQ ID NO: 255057 - DNA, 201 bp, Homo sapiens
tgtgtatgagacatactagagtggaccaagggaagaaaaccctatgcagagcaacaagcgagtagcagtggacagggagcagtggagccctcggggaaaamaaacagagctaatggccctggcagggttcctcacacccagagctctaccaccatgtgaggctaacactacaagcccacacccatcatcacattgtatggg

SEQ ID NO: 255058 - DNA, 201 bp, Homo sapiens
aaaagccaaaaaacttcttgaagaaaattaagactgctgctccactgaacatacaaatgatgagaaagcaaaacagtctgattgctaatctggagaatgtkttagtggtctggataaatgatcaaaccagccacagcattcccttaagccaaagcctaatccaggacaaggccctcactctcttcgattcaatgaagcctg

SEQ ID NO: 255059 - DNA, 201 bp, Homo sapiens
tctatttaaggattcaatctctttctaattcaatcttgggagattgtatgtttccaggaatttatccgtttcctctagattatctaatttgtgtgcatagrgttgtttatagtattctctgaggatcttttgtatttctgtgggattgtttgtaatgtcatctttgtcatttatgattgtacttatttggctcttctcttt

SEQ ID NO: 255060 - DNA, 201 bp, Homo sapiens
taggaaagtcagatttcctgtgtatgagacatactagagtggaccaagggaagaaaaccctatgcagagcaacaagcgagtagcagtggacagggagcagyggagccctcggggaaaaaaaacagagctaatggccctggcagggttcctcacacccagagctctaccaccatgtgaggctaacactacaagcccacaccc

SEQ ID NO: 255061 - DNA, 201 bp, Homo sapiens
caaaagctagaaatgattgtgagcaaggctagacttcttgtagcagttcagccaagttgtgaatgtaaaacaaaaacaaaaacaaaacaaaacagaaaagmcaaaaaacttcttgaagaaaattaagactgctgctccactgaacatacaaatgatgagaaagcaaaacagtctgattgctaatctggagaatgttttagt

SEQ ID NO: 255062 - DNA, 201 bp, Homo sapiens
tttatttttccaacagcatgttctcaccttgtgtctctgtcacattttaataattcttgcaatattccaaactttttattatcatatctgttatgctgatmtgtgatcagtgatctttgttgttactattgtaattgttttggggcaacacgaaccatgcccatattaaggtgacaagcctaatcaatgacatgtttgttc

SEQ ID NO: 255063 - DNA, 201 bp, Homo sapiens
tgagcaagtctcctgattttatttttccaacagcatgttctcaccttgtgtctctgtcacattttaataattcttgcaatattccaaactttttattatcrtatctgttatgctgatctgtgatcagtgatctttgttgttactattgtaattgttttggggcaacacgaaccatgcccatattaaggtgacaagcctaat

SEQ ID NO: 255064 - DNA, 201 bp, Homo sapiens
aggaaagagtttctggttaatgattgtaattttctttcttaaatattaggtcttccagtgagctaagtcatgtttactatatcctttagattcatgggatycttgttattcaaatatatttttcatcactattttgtgtagcaaatatctaatgatatatttttgcatttttttttggtggctaaagtatgttagaacgac

SEQ ID NO: 255065 - DNA, 201 bp, Homo sapiens
tgattctttgaagaactcaagaaacttagatcagaatgatactcatgtcttaaaattttagctttaattttaaatatagggggtatgtgtgcaagtttgtyacatcagtatattgcaccccggtagtgagcatagtacccaataggtagtttttcaacccgcagccctctccctccaccccctctagtagtccacagtgtc

SEQ ID NO: 255066 - DNA, 201 bp, Homo sapiens
tacttaccgtcatcttcgtagccaccactgacagggtcctgcttgacagactgactctgtgctgtgtatatcacatacattatcactgaatttttgaaacmccttataaagtagacattattccaatttataggaatttaatacctttctgaaatttgctaagtggtgcagccagcacttaaaccctagatcagcagactc

SEQ ID NO: 255067 - DNA, 201 bp, Homo sapiens
agatgaaggcactggcaggttcatttatctggtgagggtctagtctctgcttccaagatggcatcttgactgttgcatccttgaggagtgggggaagaatrctttgtcctcataacagaaggcagaagaaaaagagggatgaactccctctttcaagcccttttataagggcacctaatcccattcacaagataggagccc

SEQ ID NO: 255068 - DNA, 201 bp, Homo sapiens
agtgtgacaagcatccatgggaacaaggagttcccttgaaactatttctagagtcctctcagaatgagctttgtatgcaatgttcttttgttttttggatrgaggtaggaaaatggggaggaactcacagagggaggctttttatgttagtgtttgtcacattaccattcagtgagaatgagactgtgctagtagtgtgga

SEQ ID NO: 255069 - DNA, 201 bp, Homo sapiens
tgccactgcactccaacctggacaacagagtgagaccctgcctcaaaaaaaaattaatatgataaagcacataccatgtatataataaagatacttcaacyatttgaaggagtgttctgttctcgagccaaagagagaagcacatattatccccaaaaaatgcacagttagcaaagcatccagggaagctggaagggctgg

SEQ ID NO: 255070 - DNA, 201 bp, Homo sapiens
gtttttaagtctctgcagtcttgggccaagctcgttctattccccactctacaacaatcacaaaagcaccaggattctgtttggggttgccatggacgcasagttcttattacagaactgacttattctcaatacgaggtaaaaacctagaggtgaggtctctgagcaagggagtcccatcccatcctctgccctctctgt

SEQ ID NO: 255071 - DNA, 201 bp, Homo sapiens
gaggagtgaagcactcagcaaaaagaacagagttcatgaaaccttaatgggttcctcaccctctagagttctaccaccatgtgaggctggtgccccaaacsaaacccaaacccacaatcattttgtagggagttctgactcagggctacagctacatggtcatatcttctgggcaggaaagacagccatgatgggtgaaag

SEQ ID NO: 255072 - DNA, 201 bp, Homo sapiens
tgctacctgagcaggtttcctgaggggaagtctaatttggtttaacgcaagcagccatgagtctctgctgtgactgagaggtggtcactgatatatccacrtggtccctgcggagtatgggggcctctggggggagtcaagtaggttatatctagctgtcccatagtgaagtggtcatcaggagaaggttgtgtaaggcag

SEQ ID NO: 255073 - DNA, 201 bp, Homo sapiens
tttttttttttttttttagaacagctagtttattagttgtagggttattgtagctaatttgaataaaaattaagcctacaaattcacatggtatttgattrtgtacaatttagtttaattctttagctctgacccaaatgaagtgatatcactatcacatgatggagtcctcagtgatagtgaaatgatatcactagccta

SEQ ID NO: 255074 - DNA, 201 bp, Homo sapiens
tatgtgcatatttaaatgtgtgtatatatatatctatatatacatatctatgtatagatatattctttagcactgacccaaattaataacatcagtagtcwtatatatatcctctaatatatatatgagcatgtgtatatatatgtaaacatatatgtatatatcctttagcatatatatgtatatatacacatatatagt

SEQ ID NO: 255075 - DNA, 201 bp, Homo sapiens
ttatttgaatcagtcagccacccgcaattgactgaagctcagctgctgtaattgactgagacacagctatctgttacaagtgtatattctattcataattrtgctgttagtttacacactgggttagcttgcagtttgttgcataaggactcaagcacagaggcaacctcagggaaaatttcgtttaattaaacaactata

SEQ ID NO: 255076 - DNA, 201 bp, Homo sapiens
ttgtgtatatagatatacacatatctatatacatatgtctacatatgtgcatatttaaatgtgtgtatatatatatctatatatacatatctatgtatagrtatattctttagcactgacccaaattaataacatcagtagtcatatatatatcctctaatatatatatgagcatgtgtatatatatgtaaacatatatgt

SEQ ID NO: 255077 - DNA, 201 bp, Homo sapiens
cttatttgaatcagtcagccacccgcaattgactgaagctcagctgctgtaattgactgagacacagctatctgttacaagtgtatattctattcataatyatgctgttagtttacacactgggttagcttgcagtttgttgcataaggactcaagcacagaggcaacctcagggaaaatttcgtttaattaaacaactat

SEQ ID NO: 255078 - DNA, 201 bp, Homo sapiens
acagtcatacttttacagttaaggctttctcttttattttttcttacgactcccattctcatttcatgtttcaacatcttcctttgtgtcctcttatcctkaagaatatttgtcatgcttactttaaaatcttggtcagtgtgttccagtagttttgctacagttggtatgctgttgttcagcttgttgtatttctttttc

SEQ ID NO: 255079 - DNA, 201 bp, Homo sapiens
tgtgccctcataggtcttttgctctttctagaaggtgttagaattttctctttgtctccattagatacttaaagctgatttatttcttctttcttgaattytgggaaatttatcatcataaattttcacattttgcagttttagttttcatttcttcttagatttccatattctagatgttagatagctgtttttatcctc

SEQ ID NO: 255080 - DNA, 201 bp, Homo sapiens
tatgatattgatcctgtggactttatcctgtggaagctttctttatggtacggagagctatgatgttggtctgtccttgtgccctcataggtcttttgctstttctagaaggtgttagaattttctctttgtctccattagatacttaaagctgatttatttcttctttcttgaattctgggaaatttatcatcataaatt

SEQ ID NO: 255081 - DNA, 201 bp, Homo sapiens
tttttggtgagccccaatataaaatgtaattttttttttctattcttaggctttgtctaccaagaaatgaattggataatccacataaacaaaaagcatgraaaatttatccaccagaatttgctgtggagatactttttggcgagaaatgacttccaatgatgttgtagctggatccgactaagtatagctcccccttcc

SEQ ID NO: 255082 - DNA, 201 bp, Homo sapiens
gtaggcttttggcagagtctttcgttttctggatatagaatcatatcatcagcaaagagagataatttgacttcttttcctatttggatgcctattctttstttttcctgcctgagttctctaggtagtacttccagtactatgttgaataggagtggtgagagtcggcatcattgtcttgctccatttctcatggggatt

SEQ ID NO: 255083 - DNA, 201 bp, Homo sapiens
tctttgatataactcacctttcagtggtggtgtcactgaaaactactgatgttattaatttgagtcagtgctaaaggatatatctacacacacacacacatataacacacatgtatatatgtgtgtgtgtatatatatatacagatatatcttttagctatatatgtagtatatatagatatataaatatgtatttgtgta

SEQ ID NO: 255084 - DNA, 201 bp, Homo sapiens
atctttgatataactcacctttcagtggtggtgtcactgaaaactactgatgttattaatttgagtcagtgctaaaggatatatctacacacacacacacatataacacacatgtatatatgtgtgtgtgtatatatatatacagatatatcttttagctatatatgtagtatatatagatatataaatatgtatttgtgt

SEQ ID NO: 255085 - DNA, 201 bp, Homo sapiens
gatagacaagtcaatgaaatcaggaaaacatgatttgaaagagaaattcagtaaagatacagatatcataaaaataaccaaacagaagccctaagagctamacagttcaatggatgaaatgaaaaaatacaatcaatggctttacagacaagaacaagcagaagaaataatttctgaacttgaagacaagtcttttgaaat

SEQ ID NO: 255086 - DNA, 201 bp, Homo sapiens
taagatctaattagctttctgagatattgaaaactaagaacccagctgggcatggtggctcacgcctgtaatctcagcactttgggaggctgaggcgggcrgatcacctgaggtcaggagttggagaccagcctggctaacatggtgaaactctgtctctcttatcagtgggaaccaaacctgagtctgcaggcttagggc

SEQ ID NO: 255087 - DNA, 201 bp, Homo sapiens
tcttctagtagttttccaatttcacgtttcacagttaagcatttactttgagttgatttttgtatattgggtgagataggttgcaatttcatttttctgcmagtggatattcagtttccccagtatcgtttattgaagagactgtcctttccccatcttggattcttggcacctttgttgaacatcagctgagtataaatg

SEQ ID NO: 255088 - DNA, 201 bp, Homo sapiens
tcagtagggctttttggagctgattgagggggcaaaaattaaagccagaaagctcagtggagcaaatgtcatagtggccacagagaaacaaagtttcaaartgagatgctaagtgagaaacagcaactgaggagagaagtaatgtttccaggatcacaaagggcataaggagaattgttcttttagactctaggtgagctt

SEQ ID NO: 255089 - DNA, 201 bp, Homo sapiens
taaagagtggaatagcaatgtgagtttctggggctacttcagtagggctttttggagctgattgagggggcaaaaattaaagccagaaagctcagtggagyaaatgtcatagtggccacagagaaacaaagtttcaaaatgagatgctaagtgagaaacagcaactgaggagagaagtaatgtttccaggatcacaaaggg

SEQ ID NO: 255090 - DNA, 201 bp, Homo sapiens
ttatatgtgataattatcaggcctctttgtcacataggaaatgccccaccatatttttcaacaacttctctcttatttccttggctcgagctctgaagatrtaatagccctaacataatacctgagcttttttccatcagtagcttgaccagcagacttcattccaaataaactgggtcatcccttttggctcttggaaca

SEQ ID NO: 255091 - DNA, 201 bp, Homo sapiens
tttggatattcactctgtttgttcttgattattattgccacaggtctattgtagtaatcttttcaaagagacacacttttgttttgttaatcttctccacrgttttttcttctccagttcagtgacttatgcttacctccttatgttttgcttccttattactccatagactttgccctgtgcttcttttccaacctttct

SEQ ID NO: 255092 - DNA, 201 bp, Homo sapiens
agaagcacatattatccccaaaaaatgcacagttagcaaagcatccagggaagctggaagggctggtgtttggtggctgaggtcagtagatgtgactgctyggttttcggcaccccatgggtacttaccgtcatcttcgtagccaccactgacagggtcctgcttgacagactgactctgtgctgtgtatatcacatacat

SEQ ID NO: 255093 - DNA, 201 bp, Homo sapiens
ttttagctattagtaaaaagcattttgttatacaacttctgaataattttcttttaaaattatatttataaaggcctttgttttttggttaaatttacaayataagaagaaatctggttaattttatttttacttctttttgcagcagcaagattaagaaaattgtgcattcaattgtatcatcctttgcatttgggtatg

SEQ ID NO: 255094 - DNA, 201 bp, Homo sapiens
tcagtgagaatgagactgtgctagtagtgtggaccaagggagaagcgaatcctgcttgcagcgagaaggagataggagtggacaaagatcagaaaaatccyagccaaaacaaagaacagagctaataaccctggaattatttcaccccctccagagctctgcctttatgtgaggctgactgcctttgcccatacccaccct

SEQ ID NO: 255095 - DNA, 201 bp, Homo sapiens
ttgcactaatgttagtgttttatatttgtctaggaatttttccattccatccaagttttcacatttattaacatataattgaataatctcattttaaaaamttttagttgtgttatagttatgctcccttcttgtacattgtatttggatattcactctgtttgttcttgattattattgccacaggtctattgtagtaat

SEQ ID NO: 255096 - DNA, 201 bp, Homo sapiens
tacttcaactatttgaaggagtgttctgttctcgagccaaagagagaagcacatattatccccaaaaaatgcacagttagcaaagcatccagggaagctgraagggctggtgtttggtggctgaggtcagtagatgtgactgctcggttttcggcaccccatgggtacttaccgtcatcttcgtagccaccactgacaggg

SEQ ID NO: 255097 - DNA, 201 bp, Homo sapiens
ataatcatcatcaatgacatatatctacataggtttatctctgagctcaatattttgctccattgatacttatggcatccctacacctttttttattaccrcaattagttattaatggagcctttatatgttgacatagattttgtagtaagtatgtcaatattctaaaaaattttgaaaaatacctatgtgggccctgtg

SEQ ID NO: 255098 - DNA, 201 bp, Homo sapiens
ataaagatacttcaactatttgaaggagtgttctgttctcgagccaaagagagaagcacatattatccccaaaaaatgcacagttagcaaagcatccaggraagctggaagggctggtgtttggtggctgaggtcagtagatgtgactgctcggttttcggcaccccatgggtacttaccgtcatcttcgtagccaccact

SEQ ID NO: 255099 - DNA, 201 bp, Homo sapiens
cacactgtgtgcccatggtcagagccagttaacacctttgtctcaacatctttatctgtaaaataaataacacatccaagtgtaatgggaattcaattagwtaatatatatgaagtttctttgtgaactataaatcactaaataagtgttatatgtgataattatcaggcctctttgtcacataggaaatgccccaccata

SEQ ID NO: 255100 - DNA, 201 bp, Homo sapiens
attttacttttgaagtttgaaattttcccactttcagtctacaaaggtaatttctaatcctcatagttttaatttacacatttaatgcttttaatctactyagagtttacccttaaatatggtgttaggtagggatttggtttcatttttctcccaatggtaggctgattttccaaataccacctatgaaacagttcatcc

SEQ ID NO: 255101 - DNA, 201 bp, Homo sapiens
cctggacaacagagtgagaccctgcctcaaaaaaaaattaatatgataaagcacataccatgtatataataaagatacttcaactatttgaaggagtgttstgttctcgagccaaagagagaagcacatattatccccaaaaaatgcacagttagcaaagcatccagggaagctggaagggctggtgtttggtggctgagg

SEQ ID NO: 255102 - DNA, 201 bp, Homo sapiens
attcgccagtctcagttatcaaggagctttctctctgcctctgcaaatggcaccagcattcttccactcacgccttgggctttgattctctttgcctcagscccctaaatccagttagtcatccatctctgttgattatgcctttgacagttttctatgttctccttcctttctgttctcactgccactaattgtccagaa

SEQ ID NO: 255103 - DNA, 201 bp, Homo sapiens
ataagcttttcttctaggaaaaaatgatatattaatagtagattccaaatcattgacatatacattttcagagttcaaccagtttataaatgtagagcaawtgtacataacttcaaccagaaaagtatgtctctgaagtcacttgacctgatgtgtacatttttaatccttagcactggcccggataaaatgacatcagta

SEQ ID NO: 255104 - DNA, 201 bp, Homo sapiens
tgggagcagcctcagaagcagatgttggcatcaggcttcttgtgcagcacacaactgtgagccaaataaacctcttttctttataaattacccagcctcakgtatcccttatggcaacactaaacagactcagatgcatggaatcccattcaaaagtttggactatcgctttatgtattcaaatcatccttcatgtcagtt

SEQ ID NO: 255105 - DNA, 201 bp, Homo sapiens
agcccatgagttcaaggcggcagtgatctgcgatcatgccactgcactccaacctggacaacagagtgagaccctgcctcaaaaaaaaattaatatgataragcacataccatgtatataataaagatacttcaactatttgaaggagtgttctgttctcgagccaaagagagaagcacatattatccccaaaaaatgcac

SEQ ID NO: 255106 - DNA, 201 bp, Homo sapiens
gggaaatctggaatggggcccaggaatctatagacttagcaatgtcccaagtgattctaagtcagacgttctgtgggatgaccctgtgagaaacaacgcamgggtgaatgaactggggaggaacctctttatccaaagcaaaagggacctggtagtcaatgttttgctacaatgaagaaatgcctaaaactatataccttt

SEQ ID NO: 255107 - DNA, 201 bp, Homo sapiens
ggaagatgaatagattaattccctccctgggagtgagggtgagtgagtactcagtctattagttcttgcaagagctgttggtttaaaaagagaccagtggyttcccccaccttgctttccctcttgccatttgatctctgcacgtgtcagttccccttcgtctatcttccaccataaatgggagcagcctcagaagcagat

SEQ ID NO: 255108 - DNA, 201 bp, Homo sapiens
tcacttgagcccaggagtttgagaccagcctgggcaacatagtgagaccccatctcttaaaaacaaatggtgtgcgcctatggtcccagctactcaggagrctgaggtgggaagatcacttgagcccatgagttcaaggcggcagtgatctgcgatcatgccactgcactccaacctggacaacagagtgagaccctgcct

SEQ ID NO: 255109 - DNA, 201 bp, Homo sapiens
tgaggagcttgtaaagatttacattcctaggttgtacccccaaagtatgattcgggaaatctggaatggggcccaggaatctatagacttagcaatgtccsaagtgattctaagtcagacgttctgtgggatgaccctgtgagaaacaacgcaagggtgaatgaactggggaggaacctctttatccaaagcaaaagggac

SEQ ID NO: 255110 - DNA, 201 bp, Homo sapiens
gttgggcacttccatatcccactctcagcattgggcaaatcatctagacagaaaatcaacaaagaaacatcagacttaaactccaccatagaccaaatggmcataaataacaaacatatacagaacatctcacctaacagctgcagaatacacattcttttcatcagcacatgaaacattatccaagatagaccatttgtt

SEQ ID NO: 255111 - DNA, 201 bp, Homo sapiens
agagaaaaattaaacaccatgtttcaaagaaataactgattaatgtccatttttcagggtaactagattataaattgtagaataattattgctaatttgtrtcagaaaattaagtctaggataacatgtggagtcttgctatgttcatttttaatcctttagctattgaattaaaaagagcaatgagtggtagagtcatca

SEQ ID NO: 255112 - DNA, 201 bp, Homo sapiens
ggaatatgaaacaggacttgatgggccatgagactgcacattttgaatttgactgaatactgcctattgctctcccaatggttacaccagtctgcatctcrtcagtaatgcatgatggttcctacacatacacattcacaacaacacttgacataatcaaactttccaatttatataatcaatctaatagatggtaacata

SEQ ID NO: 255113 - DNA, 201 bp, Homo sapiens
tgtgttgctgaagattaaagtatttttaagtctcactaaaaaggtggaaggagccaactgaaatgcaaaaaagggtctggggttctattcatggtgaggtytttttttgtttcttccagctctaacgtgggtacccaactgcgtggctttttggtgagccccaatataaaatgtaattttttttttctattcttaggcttt

SEQ ID NO: 255114 - DNA, 201 bp, Homo sapiens
atatctggtcatttttagccatattctcttcttctcagtcatttgatcttttattatatagcactgattctaaaagtttagtgtgcatgaaaaccactgargagcttgtaaagatttacattcctaggttgtacccccaaagtatgattcgggaaatctggaatggggcccaggaatctatagacttagcaatgtcccaag

SEQ ID NO: 255115 - DNA, 201 bp, Homo sapiens
gagttcaagttaaaaaccataaaaatggacaaacaagattattttgtaataataaagggttcaattcagcaagaaatataattgtaatatgtgtataattktaaatatgtatgcactcaaacaccagagcacctagatatataaagtgaatattaatagatctaaagagggagatagaccccattacaataagagttgggc

SEQ ID NO: 255116 - DNA, 201 bp, Homo sapiens
tttttttcacaggctgaaaaattccattacagacatctaaaacctcatttccagagaaaaattaaacaccatgtttcaaagaaataactgattaatgtccrtttttcagggtaactagattataaattgtagaataattattgctaatttgtatcagaaaattaagtctaggataacatgtggagtcttgctatgttcatt

SEQ ID NO: 255117 - DNA, 201 bp, Homo sapiens
atatgtttaatatacagtatatacatttatatgtgttctgtaaactatgtattgttgttttgcctatatgtttttaaatttacttaaatggtattaagttrtatctcattttgttagttttttgcttagtaacataagattattcttcttgtgcataccttttgttgttgcttttaactggtatgaaaaattccacagcat

SEQ ID NO: 255118 - DNA, 201 bp, Homo sapiens
atgctgagcatgttcccaggaatgtattaaggattttaatttacatatctggtcatttttagccatattctcttcttctcagtcatttgatcttttattayatagcactgattctaaaagtttagtgtgcatgaaaaccactgaggagcttgtaaagatttacattcctaggttgtacccccaaagtatgattcgggaaat

SEQ ID NO: 255119 - DNA, 201 bp, Homo sapiens
gtgagcagggatagctatacttgtatcagacaaaacagagttcaagttaaaaaccataaaaatggacaaacaagattattttgtaataataaagggttcarttcagcaagaaatataattgtaatatgtgtataattgtaaatatgtatgcactcaaacaccagagcacctagatatataaagtgaatattaatagatcta

SEQ ID NO: 255120 - DNA, 201 bp, Homo sapiens
ttccccagccctggaatcagccgtttacccaaagaacctgatgccctttagaaaccaatattttgcatttggtatgctcattgccattggctcattgctayttgtaggcctttttaatacctagatgagagtacagatatacatattgacatatacagatatatgcatatatgcaacaattttcatatgtttaatatacag

SEQ ID NO: 255121 - DNA, 201 bp, Homo sapiens
ctatgaacttataaattcttacattatttcaatgaattacaatccttcctgtcattatttattttgatgtttaaaaggtcccatatttggccagtgggacyccctaaaagctagcccctgtgttcctttggcttgacatgttcccatcactttttgagcatttccccagccctggaatcagccgtttacccaaagaacctg

SEQ ID NO: 255122 - DNA, 201 bp, Homo sapiens
gaggaataggtcttaagaggaatgcttcttattcctattccattggtcacccttatttagcagcaccctgaaaccttaggaaaatatgagaatgtgtgtaktgtatgacactctactagagtgagccaaaagaggcaacagtcctatttggtgcaaggaggaggtaacagtgggcagggagctgaggagctctcaacagaa

SEQ ID NO: 255123 - DNA, 201 bp, Homo sapiens
tagaccagccttacaagaaatgctcaagggagtcttacatctggaagtaaaaagatgataaccaccatcataaaaacatgcaaaactttaaaagttactgrtagagtcaatgcataaaggagaaagagaaaggaatgaagccttatcactatagaaaactacccaacttcaaaagtaaacaggaagaaaggaataaaacat

SEQ ID NO: 255124 - DNA, 201 bp, Homo sapiens
tcttagattttttgaatttccatataaattttagaatcatcttggcaatttacatacacacacacacactcaaacccacacaaacacacccccacaccctsttagtattttgacttgggcattgactacacagcttaatttggagagacttgacatgtaaaaatattaagatttccaactcatgaacataatacatctctc

SEQ ID NO: 255125 - DNA, 201 bp, Homo sapiens
cgaagttctgaaagaaaaaaaaaactttcagctgagaatattatacccagcacagctatcctttacaaatgaagaagacataaaatctgtcatagataaasaaaaaccaagataattcatcaccactagaccagccttacaagaaatgctcaagggagtcttacatctggaagtaaaaagatgataaccaccatcataaaa

SEQ ID NO: 255126 - DNA, 201 bp, Homo sapiens
taattgagataattgtaaggtatgacttctttaatcaatgaatatgataaattgcattattatagatttctgataaaggatgattcttgtattttttattrtttgttttttaatgggcaaaatacttttttttctttttgagcttagatttttggtataaattaacttttagatttggaagtacatatgcaggtttattgg

SEQ ID NO: 255127 - DNA, 201 bp, Homo sapiens
cgtctctttccacatgcttgtcagaactccagtgccacaatggacagagtgagccactttcttcactgtccaatatcaatttgggaatggcagcttgctgygtttgtattttcagatttagttaacataaccttccatcagtgaaatagaatacttaatctttattatatattcctctcattttccaatatctttaaagtc

SEQ ID NO: 255128 - DNA, 201 bp, Homo sapiens
ggtaatgtattaatacatactacttgcttcaaaaatagtatccgtctctttccacatgcttgtcagaactccagtgccacaatggacagagtgagccactktcttcactgtccaatatcaatttgggaatggcagcttgctgtgtttgtattttcagatttagttaacataaccttccatcagtgaaatagaatacttaat

SEQ ID NO: 255129 - DNA, 201 bp, Homo sapiens
tccttcataaatgatgggtataatttccatctcacaggatttgtaagtgttagaattgaatgaggtaatgtattaatacatactacttgcttcaaaaatartatccgtctctttccacatgcttgtcagaactccagtgccacaatggacagagtgagccactttcttcactgtccaatatcaatttgggaatggcagctt

SEQ ID NO: 255130 - DNA, 201 bp, Homo sapiens
cccctatttattcactattactatgaacttataaattcttacattatttcaatgaattacaatccttcctgtcattatttattttgatgtttaaaaggtcycatatttggccagtgggaccccctaaaagctagcccctgtgttcctttggcttgacatgttcccatcactttttgagcatttccccagccctggaatcag

SEQ ID NO: 255131 - DNA, 201 bp, Homo sapiens
tcaagaagcacctgtatctgatagaggtctacctttaccaatttaaatagacaaatttaatgttcctgtcttgcttttaaattgaagagcaacagcagatytgaaataaataccgcagttagctttgcattcttgactatttattgaacagttcagagggcaaggaagcaaagagaaacgctctgagtgtgtctttgcttg

SEQ ID NO: 255132 - DNA, 201 bp, Homo sapiens
tccacataaaactttcatgcactagttttagcattcattgatttttatgtgaatcagtttaactgtgatcattacaaaatggtgatttttttttttaaaaagtggtttttctgtgtttaataagtatcattctattataaggagagctattcctacccctatttattcactattactatgaacttataaattcttacatta

SEQ ID NO: 255133 - DNA, 201 bp, Homo sapiens
ttacaatattttcccttcctaataaacccattgtaagtcaagaagcacctgtatctgatagaggtctacctttaccaatttaaatagacaaatttaatgtkcctgtcttgcttttaaattgaagagcaacagcagatctgaaataaataccgcagttagctttgcattcttgactatttattgaacagttcagagggcaag

SEQ ID NO: 255134 - DNA, 201 bp, Homo sapiens
tgttccacataaaactttcatgcactagttttagcattcattgatttttatgtgaatcagtttaactgtgatcattacaaaatggtgatttttttttttawaaagtggtttttctgtgtttaataagtatcattctattataaggagagctattcctacccctatttattcactattactatgaacttataaattcttaca

SEQ ID NO: 255135 - DNA, 201 bp, Homo sapiens
tgttaaaaacatccttcgtttgactatttatacatttggttctaaagaaggtgttatccttagattcttggatctaaagaatatatatatattttttttttgtttgtttgtttttttgagaaggaatctcactctgtcacccaggctagagtgcagtttgtgatctcagctcactgcaacctccgcctcctgggttccagt

SEQ ID NO: 255136 - DNA, 201 bp, Homo sapiens
atgctgctcctcaaaagtggttcttgctaaaggataccgtttttttcctttaaaacactgcgttcattttggagaagtgataagctagatcacttttattmttacttttatataaatttctaaagatttctgtaacatttaaatttacatactacttggtaaagctgtttttgttagttatgagattgttgtttagccaaa

SEQ ID NO: 255137 - DNA, 201 bp, Homo sapiens
ctgttccacataaaactttcatgcactagttttagcattcattgatttttatgtgaatcagtttaactgtgatcattacaaaatggtgatttttttttttwaaaagtggtttttctgtgtttaataagtatcattctattataaggagagctattcctacccctatttattcactattactatgaacttataaattcttac

SEQ ID NO: 255138 - DNA, 201 bp, Homo sapiens
gctgagaattccttaaatttttctaattttcactagccagtgatgacattgtccctttttgtagatagctttggaagatgatgatacctccacagttgggmccatgttgttaaaaacatccttcgtttgactatttatacatttggttctaaagaaggtgttatccttagattcttggatctaaagaatatatatatattt

SEQ ID NO: 255139 - DNA, 201 bp, Homo sapiens
agaggtattgccagatttattcactaacaagtaaatattattcagtttctaattaatatccactttggggggagatactttcagtctatgttagaactatyttcaatgttcagtatcctgttccacataaaactttcatgcactagttttagcattcattgatttttatgtgaatcagtttaactgtgatcattacaaaat

SEQ ID NO: 255140 - DNA, 201 bp, Homo sapiens
tccttgattttataatatctttctatagagttttgttttggttttgctttgtttttagaaaaggcaggtgcatttaccctcttaggggatgaccattggtrttttaaaaaataagacatttgctgagaattccttaaatttttctaattttcactagccagtgatgacattgtccctttttgtagatagctttggaagatg

SEQ ID NO: 255141 - DNA, 201 bp, Homo sapiens
gaataactccttaagtccagcaaggcaacaggaaattaaacctctggtctacacacttgcaatgcaaaacatttaatggattttgatagagtcaactttgkatttgatggaaattttttacaagtattttttttagatgcatacaaacaataagctttttcttctaacatgagcaaagtccctcaaaaagtgagacctggg

SEQ ID NO: 255142 - DNA, 201 bp, Homo sapiens
accagcaatgttcacctccataaactatcactcaccataaagagattccataacgctttctggttaccatacaacttggtgtcactgggtttggatgcaarccagagataaattaacctgtttgttcaaaacagttttttcagggtgctttccagaatgtatttctggtcagtgttgctttgcctttcacacttccacaaa

SEQ ID NO: 255143 - DNA, 201 bp, Homo sapiens
ttgttactattcccttttaacatctccccaaattagtgttttattctgtacactttatgagatgccagcttaacaatacccttaatatggcccaaggattytacaaaaggaaatgctggtgtgtttgtcaaaagtgttttctggctgggcatggtggctgaagcctgtaatcccagcactttgggaggctgaggcaggtgg

SEQ ID NO: 255144 - DNA, 201 bp, Homo sapiens
agaccaacctggccaacatagtgaaacctcatctctactaaaaatacaaaaaatagctgggcatgatggcaggcacctgtatgtagtcccagctacttggsaggctgaggcaggagaatcacttgaacctggtaggtggaagttgcagtgagctgaggtcacaccattgcactccagcctggtgacagagtgagactccgt

SEQ ID NO: 255145 - DNA, 201 bp, Homo sapiens
tgtttgttttaaggctgaatgtcaaaccagcaatgttcacctccataaactatcactcaccataaagagattccataacgctttctggttaccatacaacrtggtgtcactgggtttggatgcaaaccagagataaattaacctgtttgttcaaaacagttttttcagggtgctttccagaatgtatttctggtcagtgtt

SEQ ID NO: 255146 - DNA, 201 bp, Homo sapiens
tgcatttgatgtttgaagtaaaatacagcaaccttacatagagctttataataagcttcatgtgttcaaatataattggtacttttataaccgatgctgtktgtgttatactcagaaagttatttcttatcgtaagattaccaatatagtcaccaaaattttttttatagtttgaattaattttctacatttaaataaaac

SEQ ID NO: 255147 - DNA, 201 bp, Homo sapiens
atcccagcactttgggaggccaaggcaggcagatcacttgaggccaggagttcgagaccaacctggccaacatagtgaaacctcatctctactaaaaatayaaaaaatagctgggcatgatggcaggcacctgtatgtagtcccagctacttgggaggctgaggcaggagaatcacttgaacctggtaggtggaagttgca

SEQ ID NO: 255148 - DNA, 201 bp, Homo sapiens
tccagtacttcattaggaaattgttcggtaagagaaaacatgtgaattgaaaaaatctgatgtttgttttaaggctgaatgtcaaaccagcaatgttcacytccataaactatcactcaccataaagagattccataacgctttctggttaccatacaacttggtgtcactgggtttggatgcaaaccagagataaattaa

SEQ ID NO: 255149 - DNA, 201 bp, Homo sapiens
tctcatcttataaaatctgctttaggagacagaaatgggcttgaagccttgtctttcaaagacaaaatccatgcaagaccaaataagtaactattgatacrttgttagcttggataattttttctctttttaatccatgatgttaagtggtgagacatattgatcttcatgctaaccaacctaactttttaatttcatttt

SEQ ID NO: 255150 - DNA, 201 bp, Homo sapiens
gatgggaggaattcaggtttgtgaaattcagtctcagaattattcatgggaaaatagttttctggacactgattctaaaattctttctaaaaagttaggtyttaagtaagctaagtcatatttaccatatcttttagattcaaggaattttgttgttcaaataaattggtcatatcaccactccatgtggcaaatctctaa

SEQ ID NO: 255151 - DNA, 201 bp, Homo sapiens
gggtttcaccatcttggccacgctggtttagaactcctgacctcaagtaatccacccacctcgccctcccaaagtgctaggattacaggtgtgagccaccrtgcccggcctagcttccctaaatattttttctggaaagataaagtgatgggattctaagtcttggaagctgaactatatgtattcttttctcttctctca

SEQ ID NO: 255152 - DNA, 201 bp, Homo sapiens
gtatgcatttatgttgtttcttgctatttacctttcaatcctttgcactgaccccaatgaattgacatcagaaatctgtgctggagtcaacaatgaaaggkgatgacataatagatactggagatgggaggaattcaggtttgtgaaattcagtctcagaattattcatgggaaaatagttttctggacactgattctaaa

SEQ ID NO: 255153 - DNA, 201 bp, Homo sapiens
caaataatagatttacatgagaatttttagggacaacacattgtaatttgtagcgcaatcatagccaatttgaacaacaacaacaaaaaaagtcgtgtatrcatttatgttgtttcttgctatttacctttcaatcctttgcactgaccccaatgaattgacatcagaaatctgtgctggagtcaacaatgaaaggtgatg

SEQ ID NO: 255154 - DNA, 201 bp, Homo sapiens
gggtttcactatattggccaggctggtcttgaactcctgccctcgtgatccacccgccttagcctcccaaactgctgggtttacagtcatgagccactgcrcctggctaaaatgtatttttaatatgtacataggtttaatttatataaatttaattaatctctgattaactgaccattggtaaatgagtctttgttaact

SEQ ID NO: 255155 - DNA, 201 bp, Homo sapiens
catgggcaaattaaaatgtatttctattattattattattttttgagatgaagtctcgctgttgcccaagctggagtgcagtggcgcgatctcggctccckgtaacctccatctcccgggttcaagcgattttcctgcctcagcctcctgagtagctgggactgcagtcatgtgccaccatgcccgtctaattttttgtat

SEQ ID NO: 255156 - DNA, 201 bp, Homo sapiens
ggacttgtcccacaccctcgagagctctgtccacatgtgaggttggtgcctagacccaacccaaacccaccacctcattggatgccgctttcctcaggtgygcgggtacttcactgtgtctcatgggcaggagagactagcatgatcagtgaaaggaaggagatggtggagggttttcccagtcatgtgaaaacctctcct

SEQ ID NO: 255157 - DNA, 201 bp, Homo sapiens
agagagttgggctattgagtgtgacaagcatccatgggaacaaggagttcccttgaaactatttctagagtcctctcagaatgagctttgtatgcaatgtkcttttgttttttggatggaggtaggaaaatggggaggaactcacagagggaggctttttatgttagtgtttgtcacattaccattcagtgagaatgagac

SEQ ID NO: 255158 - DNA, 201 bp, Homo sapiens
aacaaagagcatgttatctagaatgaaaagaccatccatattctaataaactgagacaatcaaatagggaatccctcttttaaggttggcattcgttataygcttggaagtgatttgaagcagaaattagttgtgaataaatcttctccttattaataaaacagaagcttgtttttgatgtcatattatccctgccaagaa

SEQ ID NO: 255159 - DNA, 201 bp, Homo sapiens
tttttctttttctttttttttttttggagacagagtcatgttctgtcacccaggctggagtgcagtggtgtgatctcggctcactgcagcctctgcctccygggttcaagcaattctcctgtctcagcctcccaagtagctaggattacaggcatgtgccaccacgcctggctaatttttgtatttttagtagagatgggg

SEQ ID NO: 255160 - DNA, 201 bp, Homo sapiens
ctgaacaccacaggaatttttggatataactatcctatatttttatagagattgcatcaggaactggccttaaagtagggccaaagtagttaaatgacagwatttattattaagaatcattatgattagaagtctgaagaaagcaacatattagcaagaaaggttgcaagtcacctttcctgaattttttttctttttctt

SEQ ID NO: 255161 - DNA, 201 bp, Homo sapiens
gtgtatgatactctctcaagagtggtccaagagaggagagaatcctgcttggagaaagaaggtggtagcattggacaggcagcaaaggagccctcagcagmaagaaaggagctaagagaccctgtatctgtccctcacccttcagagctggtgccccaaactcaaagccatcatcacattggatggagcccctgcctcagg

SEQ ID NO: 255162 - DNA, 201 bp, Homo sapiens
atggtgccagtgctgggtgctataggtgccatggggccaggatgctggtgtccacacagacagcctagtatttttagccttctgagtttagttctccattwcactgatttctggtagacatcaatagaaagaagttctgcacctggaatgggaaagagggaactgaggcaagaaactgtgatttctaatgacaaatgaata

SEQ ID NO: 255163 - DNA, 201 bp, Homo sapiens
gcagagagattaaattagccaagccaggggtttcggtgctaggaagtcttgatattgtaaaatatagccatataactttaaaaaaatgaatccagacaaaragaaaacaaaatcattgtaaacacataatccactttaagttcacaaaatgttttaaacataattaaggctatgcttgacttacctacttgtttatttcct

SEQ ID NO: 255164 - DNA, 201 bp, Homo sapiens
aggcttcagctagctgaaaagctgacggacacacttatatctgggagaagttacaagacacagtattaaggaatacagctaagaaatatcattaagtaatrgtctatttaaatagccattcaaatgtggctttctaataactgaattgggaaaactttctgaaaaattactaattgggtttggagattattgttccaaaaa

SEQ ID NO: 255165 - DNA, 201 bp, Homo sapiens
ggcacatcacgaggtcaggagactgagaccatcctggctaacacggtgaaaccctgtctctactaaaaatacaacaaattagccgggggtggtggcgggcrcctgtagtcccagctactcaggaggctgaggcaggagaatggcgtgaacccgggaggcggagcttgcagtgagccgagctggcgccactgcactccagcc

SEQ ID NO: 255166 - DNA, 201 bp, Homo sapiens
ctgagatggtgccagtgctgggtgctataggtgccatggggccaggatgctggtgtccacacagacagcctagtatttttagccttctgagtttagttctvcattacactgatttctggtagacatcaatagaaagaagttctgcacctggaatgggaaagagggaactgaggcaagaaactgtgatttctaatgacaaat

SEQ ID NO: 255167 - DNA, 201 bp, Homo sapiens
tagtgaagccctgggaaaaaaagaacagagctaatggaacgtggacttgtcccacaccctcgagagctctgtccacatgtgaggttggtgcctagacccarcccaaacccaccacctcattggatgccgctttcctcaggtgcgcgggtacttcactgtgtctcatgggcaggagagactagcatgatcagtgaaaggaag

SEQ ID NO: 255168 - DNA, 201 bp, Homo sapiens
tatacggtgtagagagcaggttgtctaaaaaccaatattggcaaaatgctgaatattcagcatggttttatgaagttgacagatgtggagtgtattttgcmtgtgtcttaacttacagatgaagaaataaagttgcagagagattaaattagccaagccaggggtttcggtgctaggaagtcttgatattgtaaaatatag

SEQ ID NO: 255169 - DNA, 201 bp, Homo sapiens
tctccctttcccctctctcctccatctgtaaccctctcactcccagcttacactcaggggaggcgggaaagcaggatgtgtctgtgtggaaggaatggggmctcaccactcccactgccagagaggtagcagggaggtgatgcttcggaacccctaaagcaaacctcttctagcagccagcttgtggacctgagatggtgc

SEQ ID NO: 255170 - DNA, 201 bp, Homo sapiens
ttttgtaacagagtttccaattcgtctcattgtagcatttgttagtaactttgcatccttctttggtggagttgtataaaaaggagcaggtcataggagayttgcttcttcctgttagtgtaattgccacccttagttcctactaagcagtatttttatgggactcagatttctgacagaaattaattggtttctgtctag

SEQ ID NO: 255171 - DNA, 201 bp, Homo sapiens
gcagtatcctcagggtccatgccataggactgtgttatgagttcaaaagtattatcatcagatcttaagtttggtagtaaattcctcccagagaagttcartatgagtctgctcagcaccttcagtatgtcaggtccctgtcagtaggtgctgatttaccaatgacgaaccaccatcaacttttgtgctaaagtaaggcag

SEQ ID NO: 255172 - DNA, 201 bp, Homo sapiens
ttattcatgtattcttcataaacaatccaattattcatcctgctgaaaagtagcggatgcctatagatgcctttcttcttgtaaaaggtattgtttttccygagacctggatgaatttccaggagccattcaaggacatgagaacacccacttagaacttgaaaggttcccctcatggctctcagaccaggctaacgagat

SEQ ID NO: 255173 - DNA, 201 bp, Homo sapiens
cactctgggagagttttgctcatagttatatatacagatgagcctaactcatacctgtctttttacatatcgtcacacaggaactcctccttattaatgcycctcctcctgcaattgcccattgattgccagcccttagatgttcttcactttttcttttccatcaccaacttgggggacttcatcccctacccatctctc

SEQ ID NO: 255174 - DNA, 201 bp, Homo sapiens
taataaagaggtttacttaaatcgggaagcattacaattttccccagcctaagattttggttgtcgtcatatacatcctcatttctaataaagaaaaatasacattccaggttccaatagtgctgtatacatgaatagtcagaaattaattggtttctgtctagagtaatgaaaggtaatttttccaaaatataaattcag

SEQ ID NO: 255175 - DNA, 201 bp, Homo sapiens
atgacattttaagatctgtgaatcaactaaagtgttttggagacagcccacccttgcataaacaggataaaggtgtatggtggtggcctcatatttagagwtgacacccaatgcttgatcctcatatgatcctatctccaggaaggtttaagaagattttggcctctgaaacattaggaatctgttgagaatgaagctttc

SEQ ID NO: 255176 - DNA, 201 bp, Homo sapiens
gattcattatttattcgattcgtggtaagtgctttatgtgtaattgaagaattgggcaggagggccaatgtccccactctgggagagttttgctcatagtyatatatacagatgagcctaactcatacctgtctttttacatatcgtcacacaggaactcctccttattaatgcccctcctcctgcaattgcccattgatt

SEQ ID NO: 255177 - DNA, 201 bp, Homo sapiens
tgaaacattgttaattattacagtgaagatcacaaatgggtttttattagtgaaattggtggcttacaaagcagcatgatggatgttacaattatatgacmttttaagatctgtgaatcaactaaagtgttttggagacagcccacccttgcataaacaggataaaggtgtatggtggtggcctcatatttagagatgaca

SEQ ID NO: 255178 - DNA, 201 bp, Homo sapiens
tcctcatcaggagaattaaaatcatgtaaagttttggcgggggaactagatggtggtctctggggcccatagacaggaaagtttgcttatacccagctggraggaccactaactgacattcctttcccctcccagggaccttacagagtccccttaccctcagggtactgggggacaaccagtgggtgtaaggccaaatag

SEQ ID NO: 255179 - DNA, 201 bp, Homo sapiens
agaggaacattcaaaactatacagacatatggaaattaaacaacatgcccttgagttacaatgagtgaagaaagaaattaacaatgaaatttaagaattcyttgaaacaaatgtaactagaaacacaatataccaaaacaggagacacagcaaaagcagttattgagaagtatgtttttagcttcatccatgtccctacaa

SEQ ID NO: 255180 - DNA, 201 bp, Homo sapiens
tctaccatagggaagaaagatggggatgctataacccaaaatgtgtattcttaggttgagatcctaaattatagtcagggcatatggctttaggctctgtkgatgactaaattaatttcaaacatataatgccgtttactgtgaaatgccagctgaaaggatcattgtttaatttaatataaattacaatacttattatac

SEQ ID NO: 255181 - DNA, 201 bp, Homo sapiens
tcctttggcttgacatgttcccatcactttttgagcatttccccagccctggaatcagccgtttacccaaagaacctgatgccctttagaaaccaatattytgcatttggtatgctcattgccattggctcattgctacttgtaggcctttttaatacctagatgagagtacagatatacatattgacatatacagatata

SEQ ID NO: 255182 - DNA, 201 bp, Homo sapiens
ccctccaagacggatactctttataaaaagattcattatttattcgattcgtggtaagtgctttatgtgtaattgaagaattgggcaggagggccaatgtycccactctgggagagttttgctcatagttatatatacagatgagcctaactcatacctgtctttttacatatcgtcacacaggaactcctccttattaat

SEQ ID NO: 255183 - DNA, 201 bp, Homo sapiens
aaaacctaaactcttagataatctggtaaagattatgaaaaaccaacagctaacattaaacttagtggtgaaagttttacatcttttctcctaagatgagraacaagacaaggatacctgcttgctttttctgttcaacattgtactggagattctagccaggataattagacaaaaaacaaaacaaaacaaaaccaacca

SEQ ID NO: 255184 - DNA, 201 bp, Homo sapiens
agaatagatatgttggatattttgcacaagtgaaacatctctacaactggaatctccctccaagacggatactctttataaaaagattcattatttattcrattcgtggtaagtgctttatgtgtaattgaagaattgggcaggagggccaatgtccccactctgggagagttttgctcatagttatatatacagatgagc

SEQ ID NO: 255185 - DNA, 201 bp, Homo sapiens
atgttgtaccaataacacaaaacctcagacttgtgttattctggcagccgaacagaccccaggctcttctgactggcagtggcgctggaagcagtctgatstgtaggtaagcaggtccagggcttacagggagaaactcccagaaatccagctctgccttgggttgccctggttcacgtccaaagatgtgcttgggccaca

SEQ ID NO: 255186 - DNA, 201 bp, Homo sapiens
agaatgttgtaccaataacacaaaacctcagacttgtgttattctggcagccgaacagaccccaggctcttctgactggcagtggcgctggaagcagtctsatctgtaggtaagcaggtccagggcttacagggagaaactcccagaaatccagctctgccttgggttgccctggttcacgtccaaagatgtgcttgggcc

SEQ ID NO: 255187 - DNA, 201 bp, Homo sapiens
atcttgattaaatttctccctcttagagaatgttgtaccaataacacaaaacctcagacttgtgttattctggcagccgaacagaccccaggctcttctgmctggcagtggcgctggaagcagtctgatctgtaggtaagcaggtccagggcttacagggagaaactcccagaaatccagctctgccttgggttgccctgg

SEQ ID NO: 255188 - DNA, 201 bp, Homo sapiens
gaaactgggaggaggtgaactggaaactgctgagggtgactgaaccccgcttctgagatcagaaaatacaatttataattaaaagggatgctgaggcaacraaaaaattataagaattcactacaatgtagttgggtatatataggcataggtccttagtagcatctgtttggcactatctaaaccagattcaaatagcag

SEQ ID NO: 255189 - DNA, 201 bp, Homo sapiens
tgatgctgaggtttggggtgtgagtgatcgcatcacccaggtactgagcacaggacccaatagttagtttttcaacctgtgcccttttctgctgtgccccstctagaactccccagggtccattattgccaccttgatatccatgagcacccattgtttagctttcacttatgagtgagaacatacggtatttggtttttt

SEQ ID NO: 255190 - DNA, 201 bp, Homo sapiens
aaggacaaggctgagagaattccagggcctccttgagaaaacagaattgaggaaatgcaaagtgaagaaattctagctgtcaggaacaagagaagagtgaygggaaacctgctactgaggtttggaggtattcctctggagttttcacttataccattctctcatgtccaggaagctgctcttcaccaaaccacaagcctt

SEQ ID NO: 255191 - DNA, 201 bp, Homo sapiens
aaaggcaacaagtgagaaaactgctaacaggatcttgattaaatttctccctcttagagaatgttgtaccaataacacaaaacctcagacttgtgttattstggcagccgaacagaccccaggctcttctgactggcagtggcgctggaagcagtctgatctgtaggtaagcaggtccagggcttacagggagaaactccc

SEQ ID NO: 255192 - DNA, 201 bp, Homo sapiens
ccatcactacgcatggcctatttttgtacttttagtagagacagggtttcaccctgttggcgaggctggtctcaaactcctgacgcccagtgatctgcccrcctcggcctcccaaagtgctgggattacaggcgggagccaccatgatggccaacttttgaattctgaaccagttgattgagtaccagagctcttcaatac

SEQ ID NO: 255193 - DNA, 201 bp, Homo sapiens
cataatcttgaaaggcaacaagtgagaaaactgctaacaggatcttgattaaatttctccctcttagagaatgttgtaccaataacacaaaacctcagacktgtgttattctggcagccgaacagaccccaggctcttctgactggcagtggcgctggaagcagtctgatctgtaggtaagcaggtccagggcttacaggg

SEQ ID NO: 255194 - DNA, 201 bp, Homo sapiens
atatccacgtggtccctgcggagtatgggggcctctggggggagtcaagtaggttatatctagctgtcccatagtgaagtggtcatcaggagaaggttgtrtaaggcagatatcaggatcagtcacatggagaaactgggaggaggtgaactggaaactgctgagggtgactgaaccccgcttctgagatcagaaaataca

SEQ ID NO: 255195 - DNA, 201 bp, Homo sapiens
tggaagtacatatgcaggtttattggtaatattgtgtgatgctgaggtttggggtgtgagtgatcgcatcacccaggtactgagcacaggacccaatagtyagtttttcaacctgtgcccttttctgctgtgccccgtctagaactccccagggtccattattgccaccttgatatccatgagcacccattgtttagcttt

SEQ ID NO: 255196 - DNA, 201 bp, Homo sapiens
atctcttctgattcaccgaaaaagcaacacagggactcagctgcatgtttgagagctgtgttggcaagacctcaggacagagtgccctctatgtctggtgrtgattctcagacaccatcacattctgatcctgcattgtgggccattctactgactacatctactcctaagttaaggactttcatgaacctgtctcatgac

SEQ ID NO: 255197 - DNA, 201 bp, Homo sapiens
tgttcacagcctaaaatgctcactgttggcataggaaacctcatttctaataaaaagacaaatgccatcccaggtcaatttagtgatatacgtacatgtgrataattaaagtgtaactagggaatgacacatagactaactgtagctatttattgcaaaacattagaattacgcattgtgtctgactctgcccatatttgt

SEQ ID NO: 255198 - DNA, 201 bp, Homo sapiens
ttggttttgggaactaaaaaatgaaaaaaggaaaagccataatcttgaaaggcaacaagtgagaaaactgctaacaggatcttgattaaatttctccctcwtagagaatgttgtaccaataacacaaaacctcagacttgtgttattctggcagccgaacagaccccaggctcttctgactggcagtggcgctggaagcag

SEQ ID NO: 255199 - DNA, 201 bp, Homo sapiens
acccttacttaatctggatgcatcactatgttcacagcctaaaatgctcactgttggcataggaaacctcatttctaataaaaagacaaatgccatcccasgtcaatttagtgatatacgtacatgtgaataattaaagtgtaactagggaatgacacatagactaactgtagctatttattgcaaaacattagaattacg

SEQ ID NO: 255200 - DNA, 201 bp, Homo sapiens
aaagtttgcttatacccagctgggaggaccactaactgacattcctttcccctcccagggaccttacagagtccccttaccctcagggtactgggggacamccagtgggtgtaaggccaaatagcaataaccttgttacttgccaggaattgggtcaagatttgatttaacaagcttggttttgggaactaaaaaatgaaa

SEQ ID NO: 255201 - DNA, 201 bp, Homo sapiens
tgctcgactgatgggtgggagcaatagcgagagagagggagggacctgagagtggaagcctttattgggatgtaaggtgctacctgagcaggtttcctgargggaagtctaatttggtttaacgcaagcagccatgagtctctgctgtgactgagaggtggtcactgatatatccacgtggtccctgcggagtatgggggc

SEQ ID NO: 255202 - DNA, 201 bp, Homo sapiens
atgctctccaaaaatgctgttacacattgaggtgtagatacccttacttaatctggatgcatcactatgttcacagcctaaaatgctcactgttggcatakgaaacctcatttctaataaaaagacaaatgccatcccaggtcaatttagtgatatacgtacatgtgaataattaaagtgtaactagggaatgacacatag

SEQ ID NO: 255203 - DNA, 201 bp, Homo sapiens
caggaaagtttgcttatacccagctgggaggaccactaactgacattcctttcccctcccagggaccttacagagtccccttaccctcagggtactggggsacaaccagtgggtgtaaggccaaatagcaataaccttgttacttgccaggaattgggtcaagatttgatttaacaagcttggttttgggaactaaaaaat

SEQ ID NO: 255204 - DNA, 201 bp, Homo sapiens
agggggagccatccaggagacctgtgctcgactgatgggtgggagcaatagcgagagagagggagggacctgagagtggaagcctttattgggatgtaagktgctacctgagcaggtttcctgaggggaagtctaatttggtttaacgcaagcagccatgagtctctgctgtgactgagaggtggtcactgatatatccac

SEQ ID NO: 255205 - DNA, 201 bp, Homo sapiens
aaagtaaatttgaactagaattaaatgctctccaaaaatgctgttacacattgaggtgtagatacccttacttaatctggatgcatcactatgttcacagmctaaaatgctcactgttggcataggaaacctcatttctaataaaaagacaaatgccatcccaggtcaatttagtgatatacgtacatgtgaataattaaa

SEQ ID NO: 255206 - DNA, 201 bp, Homo sapiens
tgaggaactcagatgggattatacgaagcgggacttagaaagtaaatttgaactagaattaaatgctctccaaaaatgctgttacacattgaggtgtagayacccttacttaatctggatgcatcactatgttcacagcctaaaatgctcactgttggcataggaaacctcatttctaataaaaagacaaatgccatccca

SEQ ID NO: 255207 - DNA, 201 bp, Homo sapiens
catctttcaaattttagatattctaataggtatctaatggtttcttattgtagttttaatctgcatttctctaacagctagtgatgatgaacattttttcrtttgcttatttgccagttgcaaatcttcattagtgaagtatctgttcacatattttgcccattttttaaaagttgggttgttttcttacaattgaagttt

SEQ ID NO: 255208 - DNA, 201 bp, Homo sapiens
atggagcccttgcttgaggcctccagctacttggccgcaacttttgggcaggaaagacaactaggatgggtgaaaagtgaggaggtgattggaggtgatakagaatgaggaactcagatgggattatacgaagcgggacttagaaagtaaatttgaactagaattaaatgctctccaaaaatgctgttacacattgaggtg

SEQ ID NO: 255209 - DNA, 201 bp, Homo sapiens
ttttttattaattccagagagaagagggcagcacacagggccaactggaagggggagccatccaggagacctgtgctcgactgatgggtgggagcaatagygagagagagggagggacctgagagtggaagcctttattgggatgtaaggtgctacctgagcaggtttcctgaggggaagtctaatttggtttaacgcaag

SEQ ID NO: 255210 - DNA, 201 bp, Homo sapiens
aacacacgaaataaccaaagcagttttttattaattccagagagaagagggcagcacacagggccaactggaagggggagccatccaggagacctgtgctygactgatgggtgggagcaatagcgagagagagggagggacctgagagtggaagcctttattgggatgtaaggtgctacctgagcaggtttcctgagggga

SEQ ID NO: 255211 - DNA, 201 bp, Homo sapiens
ggaagattttattctaagtaaccaaatcttaaggagctaaagcaatcctgctttataaaatacattaattcaaggactaagcaattcctgaaaacagactkatttactgtgcttcttaatatttcctcaaactagtatatgagtgatggtggtagagggaggaagtagctcatacttggaggaacaaacagttgctggaat

SEQ ID NO: 255212 - DNA, 201 bp, Homo sapiens
tgtagccggggatcttcagcacagtgggaaatctgtccatatgtatctctgggaagtgggctgaatccagggagccaggcagcatcattctgcaggccccrtttccatggcacctcacaagttaagacccactggcttggaatactagcctgccaacagcagcaggttggaatccacctcagatgggtctgagttcccggg

SEQ ID NO: 255213 - DNA, 201 bp, Homo sapiens
gaaacagtgaagagagggcatttttgtttaattccaggctttaaagaaaatgctgtcaatattatgtcattaatatgatgttcctggtaggtattttggtrgattctctttgttgagttaaggaagtttcctagttgttgttaatttttaaagtcacaggtgcaggctgaatgttagtgaatgctttttcctgcattaatt

SEQ ID NO: 255214 - DNA, 201 bp, Homo sapiens
tagtaagtagcaggcaaatgctttggaaaagcagattttctgtgtaccagacatagcagagtaggctgagggaagagagaatcctgtttggagtgaggagraagtaggagtacttggggaactgtgcagccttcagcagaaagcaacagagctaagagccttggaggtgttctccaccctccagaactctgccaccacgga

SEQ ID NO: 255215 - DNA, 201 bp, Homo sapiens
attgcttgaacctgggaggtggaggttgcagtgagccaagatcgcatcactgcactccagcctcggtgagagtgagaatccgcctaaaaaaaaggatacayctagtttgaattagtgatatacacatgaatatttaaatatcaaccagatagtacattatagagtaactgtagctgtttgatccaaaaagtaagtttagaa

SEQ ID NO: 255216 - DNA, 201 bp, Homo sapiens
caaaacaaaacaaaacaaaacaaagatagtcatagaccctaagctaaaagtgataggtgaatttactgaagtgcagccctaaacatgccatttccatgctyaaaatccatactatgtccccactgccaatggcaataaactaaacgtttcaacctggcactcaagagccacactttgacttttccaaccttctcttccact

SEQ ID NO: 255217 - DNA, 201 bp, Homo sapiens
tcctggcttatagaagcagtcccctgggcttcccctggcaggcaccacccaggccagctgagcagcagtgtgcccacatcctgagctagaatagctctatrgactacccccagcagaaacacatccaggacagctgagaagtcatttgactgtatcccaggcctgagaaacaccccctcttggccagccctggcaaagata

SEQ ID NO: 255218 - DNA, 201 bp, Homo sapiens
ctgtagctgtttgatccaaaaagtaagtttagaattatatgtgtgtccaactatctacttttatattcctttagcctgcatacagaattgacatcaatgamctgtgatagaaccaccaatgaaatgtgaattataaaatatgtgtacacaaatatgtaaagaaatgtatgtgcagatatactacttctgtctatctagaca

SEQ ID NO: 255219 - DNA, 201 bp, Homo sapiens
gaagaacactctaactaccggccctaaacctttagtttgggccagaagaactcacccttatccactgctacttttctcccacacccaagccccaaacaaaacaaaacaaaacaaaacaaagatagtcatagaccctaagctaaaagtgataggtgaatttactgaagtgcagccctaaacatgccatttccatgctcaaaa

SEQ ID NO: 255220 - DNA, 201 bp, Homo sapiens
cttttcacatgtatccaaactactatttatccctcaacaatttatattttttgacagtcatacttttacagttaaggctttctcttttattttttcttacractcccattctcatttcatgtttcaacatcttcctttgtgtcctcttatccttaagaatatttgtcatgcttactttaaaatcttggtcagtgtgttcca

SEQ ID NO: 255221 - DNA, 201 bp, Homo sapiens
cttcttaagaaactgtcaaactgttttccaaagtggatctagcactttacattcctggcattgtatgagagtttcagtttctctctatctttgtcaacatrccatctttcaaattttagatattctaataggtatctaatggtttcttattgtagttttaatctgcatttctctaacagctagtgatgatgaacatttttt

SEQ ID NO: 255222 - DNA, 201 bp, Homo sapiens
ttcctctaagaattgctttagtttcatcccataaatttttatttgtagtgtttttattttacttagttcaaactatgttccaactttgtgcttttttttttgacccatgagttatgtagaagtgtgcttccttatttccaaacatatgagagttttgtatttatctttaaatttttgatttattacattttgttgtggaca

SEQ ID NO: 255223 - DNA, 201 bp, Homo sapiens
accgaagtgagagcgggttgggaattccgaaatggatttggatgtggctgtaaatgagtttttctttaagtggtgggagctgagtaagtactcttggcccygttagaagaacactctaactaccggccctaaacctttagtttgggccagaagaactcacccttatccactgctacttttctcccacacccaagccccaaa

SEQ ID NO: 255224 - DNA, 201 bp, Homo sapiens
ataacttaggtaaataacaacaacaacaacaaaaaacctaaactcttagataatctggtaaagattatgaaaaaccaacagctaacattaaacttagtggkgaaagttttacatcttttctcctaagatgaggaacaagacaaggatacctgcttgctttttctgttcaacattgtactggagattctagccaggataatt

SEQ ID NO: 255225 - DNA, 201 bp, Homo sapiens
cattttaccattttagtgtctgcagagatgttcccttttttattcccgacattgctttcttggtgccttctccccttttttcttttgattagtctcaccasggatttatcaattttactagtcttttaaaagaaccaaatttttggccttattggtggtctctattttttacttattttttatttcatcaattactatgat

SEQ ID NO: 255226 - DNA, 201 bp, Homo sapiens
gaacctgggaggcagagcttgtagtgagccgagatcacaccactgcacttcagcctgggtgatgtagcgagactccatctaaaagaaaaaaaaaaaaaaaagaaaaaaaaagtaaggaaaacaaaagaaaacaaagaaaaaaacaaatgctgagagtactaaacctgcttgctgtcagaagacatttctgttcatgtcttc

SEQ ID NO: 255227 - DNA, 201 bp, Homo sapiens
ccatggtagccttgaaaaccaacatcctacaatcttggtgaaaaacaagctcctgggagccatagaaaggaacaaaatggggttgggactcattcaaagcyttattcccagagaaacgtcattacgtgacctgactaggaggtccaaggaagaccccatgcacaaggctatctttatttggcctgacttagagctccccca

SEQ ID NO: 255228 - DNA, 201 bp, Homo sapiens
tttcaaaaccccttctgtatcccagacagtattgcacttttacatatctcatttaatacccataacacctatatgaaatatacactgttactctgtttttycttttagaagcattttgttatggaaatttttaatcatatacaaaagtccagagcatcatacaatatatcctcatgtagtcatcacattgctgcaacagtc

SEQ ID NO: 255229 - DNA, 201 bp, Homo sapiens
cttattggttcacttgtcatatccttccaactttgtcttttctactaaatatatagcagattttggtccctggatttatatggaggtctcagactcagttscctactttgtcaggtttaaatcctattagtcagttaaccagaaaaattctagatccccagcattgctgaacagattcccaggaatgtgtcagagcatttc

SEQ ID NO: 255230 - DNA, 201 bp, Homo sapiens
taaaagagaaaataaaaggggaaataaacttttcaaaaccccttctgtatcccagacagtattgcacttttacatatctcatttaatacccataacacctrtatgaaatatacactgttactctgttttttcttttagaagcattttgttatggaaatttttaatcatatacaaaagtccagagcatcatacaatatatcc

SEQ ID NO: 255231 - DNA, 201 bp, Homo sapiens
ttttaaaatctactgcctgcagactgatttgcttattggttcacttgtcatatccttccaactttgtcttttctactaaatatatagcagattttggtccytggatttatatggaggtctcagactcagttgcctactttgtcaggtttaaatcctattagtcagttaaccagaaaaattctagatccccagcattgctga

SEQ ID NO: 255232 - DNA, 201 bp, Homo sapiens
ctgttgactcctgcttatggcagtttgactcttcaactctgttaaattttagaaatagctcatatttgtataaactttaactttgggtatcctgagagacyggaattgagatgatttgcctggtttctgcttggttctggaagtactaccaatcaggaaccattctagtttgatttattggtttgaggtttcttggactat

SEQ ID NO: 255233 - DNA, 201 bp, Homo sapiens
gttttgcatcttttttaaaaaattaagaagttgagacagggtctcactctgtcacccaggctggagtgcagtggcgtgatcatagctaactgtagcttcamcctcctgggctcaagcaatcctcccacctcagcctcccgagtagctgggagcactgactagaatagaaagagttaggtttgggtgactcagttgggtgaa

SEQ ID NO: 255234 - DNA, 201 bp, Homo sapiens
tggtgtgtgtgtgtgtgtgtgtgtgtgtgtgtgtgtgtgtgtcttttctgtgtgttgtgggggagatgtattttaaaagagaaaataaaaggggaaataawcttttcaaaaccccttctgtatcccagacagtattgcacttttacatatctcatttaatacccataacacctatatgaaatatacactgttactctgttt

SEQ ID NO: 255235 - DNA, 201 bp, Homo sapiens
tattgtccttcacgcccaagctcaagcatcatctttttcagaaaacctactttgaagttccagagtggaccaagggccacttttaatgctccccatagtgytgatctctattttttcactttaaacatacttttaaacctgcttcctgagtataaagtttgttataattttaatatttgtatttttctatgtctttttctt

SEQ ID NO: 255236 - DNA, 201 bp, Homo sapiens
tttactgcatagcaatgattacattttgttttgcatcttttttaaaaaattaagaagttgagacagggtctcactctgtcacccaggctggagtgcagtgrcgtgatcatagctaactgtagcttcaccctcctgggctcaagcaatcctcccacctcagcctcccgagtagctgggagcactgactagaatagaaagagt

SEQ ID NO: 255237 - DNA, 201 bp, Homo sapiens
ttacatatccaccagtagtgtataagcattccctttcctctgtaactttgccagcatctattttttggctttttaataatagctattctgactggtatgakatggtatctcattgtagttttgatttgcatttctctagtattagtgatgttgagcattttttcatgtttgttagctgtgtgtatgtcttttgagaagtgt

SEQ ID NO: 255238 - DNA, 201 bp, Homo sapiens
catgtattctcaaatacaaaaaatacaaaataaacacaaaaaaagtaaaagccaagatgctaaaaaaaaaaaacccaaaggtacgttttactgcatagcawtgattacattttgttttgcatcttttttaaaaaattaagaagttgagacagggtctcactctgtcacccaggctggagtgcagtggcgtgatcatagcta

SEQ ID NO: 255239 - DNA, 201 bp, Homo sapiens
tctataacaaatttttttaaaagagcgtatgtaatttaaataatttgtgttcatttgtttttttctaaattgtaaattttctaaatttttctaaatttacmtgtattctcaaatacaaaaaatacaaaataaacacaaaaaaagtaaaagccaagatgctaaaaaaaaaaaacccaaaggtacgttttactgcatagcaat

SEQ ID NO: 255240 - DNA, 201 bp, Homo sapiens
atctataacaaatttttttaaaagagcgtatgtaatttaaataatttgtgttcatttgtttttttctaaattgtaaattttctaaatttttctaaatttayatgtattctcaaatacaaaaaatacaaaataaacacaaaaaaagtaaaagccaagatgctaaaaaaaaaaaacccaaaggtacgttttactgcatagcaa

SEQ ID NO: 255241 - DNA, 201 bp, Homo sapiens
ttgtttcttgctatttacctttcaatcctttgcactgaccccaatgaattgacatcagaaatctgtgctggagtcaacaatgaaaggtgatgacataatakatactggagatgggaggaattcaggtttgtgaaattcagtctcagaattattcatgggaaaatagttttctggacactgattctaaaattctttctaaaa

SEQ ID NO: 255242 - DNA, 201 bp, Homo sapiens
acactaggtagacttttaaagtttttgatctaggccctgattcccagacagcacctttggatccacctggaggctaggacaacttgccatcctgaagggawggacacaggcctggctgtttttaccatgtgatgactgtagagccccagggccttcagcaaacttctgcaatagctaaggagtggttacagcaggtcttgg

SEQ ID NO: 255243 - DNA, 201 bp, Homo sapiens
agtaacattaatgaaaatcaaatgttaaaattctataattattagtaaagtgttttattaagtaccttatacatctggaattactctttagttctggaaayaatttacttagactcttctctacataagagtacgatttcatactatgatatagatttatgcaatataattgtttccttttgaattaataatatttgaatt

SEQ ID NO: 255244 - DNA, 201 bp, Homo sapiens
cttccatctgcaaaagtaacattaatgaaaatcaaatgttaaaattctataattattagtaaagtgttttattaagtaccttatacatctggaattactcyttagttctggaaacaatttacttagactcttctctacataagagtacgatttcatactatgatatagatttatgcaatataattgtttccttttgaatta

SEQ ID NO: 255245 - DNA, 201 bp, Homo sapiens
tgacccagtgtatgcctgcacacacccctaccctgagaaacagcccagtgagcccacccctggcaaggctgcaccaccatcaccacaaacttccttagcckaggccactgagtaacttgcaaatgttactagtgtagatcacagctgaataaactacatggagactacacttactgcatccatgtagaaccaaggccagta

SEQ ID NO: 255246 - DNA, 201 bp, Homo sapiens
tgattaactggtaaaccaacatgtttctggaataaatgtaatttagttgtgctgtattattttgttaaatacttattaaattattttattattatattgcyagattctgtctgttaatattttgtttaggattttcaaattcatgtcatctgggcaattggttataattttcctttctcatagttttttcaaatcttggtt

SEQ ID NO: 255247 - DNA, 201 bp, Homo sapiens
ctgaaaaaatgaaacaaaaaaaaaaaaaagaaagaaagaaagaaaaaagaaattcctttagcttgctaagagtttttttttttttaaatcatgaatggatkttgaattcttaaagatttttctgaatctttgagatgataatttttctactttatcctataaataaatgtggttaattacattgattaactggtaaaccaa

SEQ ID NO: 255248 - DNA, 201 bp, Homo sapiens
ttcaacccttgcagaacatcacaaagactgtttttggatgactcctggtgtgtgtgtgtgtgtgtgtgtgtgtgtgtgtgtgtgtgtcttttctgtgtgtkgtgggggagatgtattttaaaagagaaaataaaaggggaaataaacttttcaaaaccccttctgtatcccagacagtattgcacttttacatatctcatt

SEQ ID NO: 255249 - DNA, 201 bp, Homo sapiens
tgctttccataatggctgaactaatttacatatccaccagtagtgtataagcattccctttcctctgtaactttgccagcatctattttttggctttttawtaatagctattctgactggtatgatatggtatctcattgtagttttgatttgcatttctctagtattagtgatgttgagcattttttcatgtttgttagc

SEQ ID NO: 255250 - DNA, 201 bp, Homo sapiens
atactcagtaatgggattgctgggtcacagggtaattctcaagttctttgagaaatcaccaaactgctttccataatggctgaactaatttacatatccascagtagtgtataagcattccctttcctctgtaactttgccagcatctattttttggctttttaataatagctattctgactggtatgatatggtatctca

SEQ ID NO: 255251 - DNA, 201 bp, Homo sapiens
acggtccacctctgtatgatgatgtgaaagtgcagtttttctcttcggtgagtaatcacaaaatagcctctgccattgttcttgtctggtctaatgatttmatttcagatttgctttactacaattcccaacaagggagggggagggggaggaaaacaataaatcagatctataacaaatttttttaaaagagcgtatgta

SEQ ID NO: 255252 - DNA, 201 bp, Homo sapiens
gtatatactcagtaatgggattgctgggtcacagggtaattctcaagttctttgagaaatcaccaaactgctttccataatggctgaactaatttacatayccaccagtagtgtataagcattccctttcctctgtaactttgccagcatctattttttggctttttaataatagctattctgactggtatgatatggtat

SEQ ID NO: 255253 - DNA, 201 bp, Homo sapiens
tatgtgcagatatactacttctgtctatctagacacacaaacacagggagagagagaaagggagagaaagagaaaagagagagagaaacaacagaaagagrgatgaagattatgtgctttactctcaggatcatccatggccatacagaatgtcttttacaccatttataaatctcctcactataggccctgcaggtctct

SEQ ID NO: 255254 - DNA, 201 bp, Homo sapiens
ggtgccctgcaacaggccttggtccctccctgagtctgagggtcacacttcaggtgctgcccacatgctggggactctggcttctcctcagagaatcctgytttctattctatactggttattgtttatggagctcaggagtcgattattttcccaaagtaggaaggtccagtacccaaggctccaggaccctgaagtgta

SEQ ID NO: 255255 - DNA, 201 bp, Homo sapiens
tgacattgaaacagacaaaatattaattaatgtatatgacggtccacctctgtatgatgatgtgaaagtgcagtttttctcttcggtgagtaatcacaaartagcctctgccattgttcttgtctggtctaatgattttatttcagatttgctttactacaattcccaacaagggagggggagggggaggaaaacaataaa

SEQ ID NO: 255256 - DNA, 201 bp, Homo sapiens
tttattttatggctgcatagtattccatggtatatgtgtgccacattttttaaattcagttcaccattgatgggcacctagctaaattctgtgtctttgcyattgtgaatagtgctgcgatgaacatatgtgtgcatgtgtcttcatggtagaatgatatttatattcctgtgggtatatactcagtaatgggattgctgg

SEQ ID NO: 255257 - DNA, 201 bp, Homo sapiens
gttcattcatagatattgcatgacattgaaacagacaaaatattaattaatgtatatgacggtccacctctgtatgatgatgtgaaagtgcagtttttctmttcggtgagtaatcacaaaatagcctctgccattgttcttgtctggtctaatgattttatttcagatttgctttactacaattcccaacaagggaggggg

SEQ ID NO: 255258 - DNA, 201 bp, Homo sapiens
ttttattttatggctgcatagtattccatggtatatgtgtgccacattttttaaattcagttcaccattgatgggcacctagctaaattctgtgtctttgmcattgtgaatagtgctgcgatgaacatatgtgtgcatgtgtcttcatggtagaatgatatttatattcctgtgggtatatactcagtaatgggattgctg

SEQ ID NO: 255259 - DNA, 201 bp, Homo sapiens
atgaaccatggttggattgtacccttttttgtaggaaagcctatattattttggagaaaggcgaaccaataaaacccacagcaataaatttcagggagtaraaactccttctcaggtaagttttctttttaaaaatgggagtttttttaggggagtgggttaagattgccacctgttatttggtttcattttagactcttc

SEQ ID NO: 255260 - DNA, 201 bp, Homo sapiens
tatcgttatctaggtttgtagttctcaattccatgtgttcattcatagatattgcatgacattgaaacagacaaaatattaattaatgtatatgacggtcyacctctgtatgatgatgtgaaagtgcagtttttctcttcggtgagtaatcacaaaatagcctctgccattgttcttgtctggtctaatgattttatttca

SEQ ID NO: 255261 - DNA, 201 bp, Homo sapiens
caaaggacatgatcttgtttttattttatggctgcatagtattccatggtatatgtgtgccacattttttaaattcagttcaccattgatgggcacctagstaaattctgtgtctttgccattgtgaatagtgctgcgatgaacatatgtgtgcatgtgtcttcatggtagaatgatatttatattcctgtgggtatatac

SEQ ID NO: 255262 - DNA, 201 bp, Homo sapiens
atctctactaaaaatacaaaaaattagctgggcatggtggtacacacctgtagtcccagctactcagaaggctgaggcagtagaatcacttgaacccaggwggcagaggttgcagtgagcttagatcctgccactgtactccagtctgggttgcagagcaagactctaccaaaaaaacaaacaaacaaaatcactgacttt

SEQ ID NO: 255263 - DNA, 201 bp, Homo sapiens
atgataagtgaaaaggaacttttgttatcgttatctaggtttgtagttctcaattccatgtgttcattcatagatattgcatgacattgaaacagacaaartattaattaatgtatatgacggtccacctctgtatgatgatgtgaaagtgcagtttttctcttcggtgagtaatcacaaaatagcctctgccattgttct

SEQ ID NO: 255264 - DNA, 201 bp, Homo sapiens
ggcttttaggcttttaggctggattgctgcaaaggacatgatcttgtttttattttatggctgcatagtattccatggtatatgtgtgccacattttttawattcagttcaccattgatgggcacctagctaaattctgtgtctttgccattgtgaatagtgctgcgatgaacatatgtgtgcatgtgtcttcatggtaga

SEQ ID NO: 255265 - DNA, 201 bp, Homo sapiens
ttttaagctggagctggatggcctccaggcttttaggcttttaggctggattgctgcaaaggacatgatcttgtttttattttatggctgcatagtattcyatggtatatgtgtgccacattttttaaattcagttcaccattgatgggcacctagctaaattctgtgtctttgccattgtgaatagtgctgcgatgaaca

SEQ ID NO: 255266 - DNA, 201 bp, Homo sapiens
ttggtttcctgttcctgtgttagtttgcttagaataatttttaagctggagctggatggcctccaggcttttaggcttttaggctggattgctgcaaaggrcatgatcttgtttttattttatggctgcatagtattccatggtatatgtgtgccacattttttaaattcagttcaccattgatgggcacctagctaaatt

SEQ ID NO: 255267 - DNA, 201 bp, Homo sapiens
agtgagaacatgaggtatttggtttcctgttcctgtgttagtttgcttagaataatttttaagctggagctggatggcctccaggcttttaggcttttagrctggattgctgcaaaggacatgatcttgtttttattttatggctgcatagtattccatggtatatgtgtgccacattttttaaattcagttcaccattga

SEQ ID NO: 255268 - DNA, 201 bp, Homo sapiens
ccatgagccgagatcacgccactgcactccagcctgggtgacagtgagactctgtctcaaaaaacaaaaaacaaatgaaaacacacacacacataaacaayagtattgcaactagaaaagattattaataattatttatgcatgtagtgattgggctgtgagagcaaaagtacttgataaatacaggaagtcatgataagt

SEQ ID NO: 255269 - DNA, 201 bp, Homo sapiens
cctgcaagttcagctacttcccagaaaatgtcctggatccctggcctgagtcatcatcccatgactagagaacatggatggattattttatcaagaaactrgtgataaaccaagggctataggaattaagaactagggctaaaaaagaaatgtttagagtgatgcaagatggccaattagaagcagctgcagtctgccgcg

SEQ ID NO: 255270 - DNA, 201 bp, Homo sapiens
aaacagactgatttactgtgcttcttaatatttcctcaaactagtatatgagtgatggtggtagagggaggaagtagctcatacttggaggaacaaacagytgctggaatatgcttgtggtttagagcttcttttaaaaatcctgttaactgcaaaagaaaggaaggactaatattttccatgatttcagtaacatcttta

SEQ ID NO: 255271 - DNA, 201 bp, Homo sapiens
ctcttaataccatcacattagcaagacctaagttttggaggagacacattcaaaccatagcaggtataaaagacaagcatttaatcagactgtttgtcagytgataatttttccttccctgcaggagacctgtctatgagtggctgggaggcctgtttaattctggggtttagaattaaaatggccatctgcctgcaagta

SEQ ID NO: 255272 - DNA, 201 bp, Homo sapiens
tgataagcatagtacctgataggtagctttttgatactcaccatcctccagcctccaaccctcaagtaggccccaatgtctgttgttcccatatttgtgtycatgtgtactcaatgtttaactcccacttataagtgagaacatgaggtatttggtttcctgttcctgtgttagtttgcttagaataatttttaagctgga

SEQ ID NO: 255273 - DNA, 201 bp, Homo sapiens
gtgataagcatagtacctgataggtagctttttgatactcaccatcctccagcctccaaccctcaagtaggccccaatgtctgttgttcccatatttgtgytcatgtgtactcaatgtttaactcccacttataagtgagaacatgaggtatttggtttcctgttcctgtgttagtttgcttagaataatttttaagctgg

SEQ ID NO: 255274 - DNA, 201 bp, Homo sapiens
gctaatacagtgaaaccccatctctactaaaaattcaaaaattagctgggtgtgatggcttgtgcctatagtcccagctacttgggaggctgaggcacaasaatcacttgaacctgggaggcagaggttgccatgagccgagatcacgccactgcactccagcctgggtgacagtgagactctgtctcaaaaaacaaaaaa

SEQ ID NO: 255275 - DNA, 201 bp, Homo sapiens
acattttatttaattaatttttaacttttattttaggttcaagggtacatgtgcaggtttgttatatatgtaaattttgtgtcatgggggtttgatgcacrgattgttttgtcactcaggtgataagcatagtacctgataggtagctttttgatactcaccatcctccagcctccaaccctcaagtaggccccaatgtct

SEQ ID NO: 255276 - DNA, 201 bp, Homo sapiens
taaacaacaggccgggtgcagtggctcatgcctgtaatccagcactttgggaggcccaggcgggcagatcacttgaagccaggagtttgagaccagcctgsctaatacagtgaaaccccatctctactaaaaattcaaaaattagctgggtgtgatggcttgtgcctatagtcccagctacttgggaggctgaggcacaag

SEQ ID NO: 255277 - DNA, 201 bp, Homo sapiens
taaccattttgatatactgagatataattcagttggttcatgactgtgccaatagctccatttttatatacaaatagacatgcctaaatccagttttttttgtatgcacattttatttaattaatttttaacttttattttaggttcaagggtacatgtgcaggtttgttatatatgtaaattttgtgtcatgggggtttg

SEQ ID NO: 255278 - DNA, 201 bp, Homo sapiens
aaagtctatttttgatactttcttgtttaacgtgcactagttagtagctgactgcagaatctctttgggccaggactagagtgaggtcaatgaggtgcaamatttaagggaatgctaaaaattataataattaaaataaataattttaatgcaatattttaataaaaattaatgcaaaaaatctatgatgtatgcaatatc

SEQ ID NO: 255279 - DNA, 201 bp, Homo sapiens
tgacatgtaatctgttggttttccagcagtaataatttcacgtaaaatcctaaatctgacctgaaatattttctcttctcttattgagaagagattacctwtacatcaatattaaccattttgatatactgagatataattcagttggttcatgactgtgccaatagctccatttttatatacaaatagacatgcctaaat

SEQ ID NO: 255280 - DNA, 201 bp, Homo sapiens
tccattgtgtagatatactatatttttatgtttttaattttatttttaattggtacacaacaaatatttgtacatatttatggggtacagatgatatgttkttacatgcatagaatgtgtaatgaccaatcagggtattaaaggtatctgccactttgagtatttgtcatttctgtatgttgggaacatttcaagtcctct

SEQ ID NO: 255281 - DNA, 201 bp, Homo sapiens
gatctaagtggtgaaaaatactgggagcatcaatggcaataacagctttcaatcagagactttaagcatctttggtaacattgtttttgaaccagagtggrgaaaataagatcaggtcagaagagggatgcttggtactcaaagattgtttgtgaccccaagtaattagcagccaaaaccttaggaaactatcagaatgcc

SEQ ID NO: 255282 - DNA, 201 bp, Homo sapiens
gaaaagtgcctcacggccgggcacggtggctcatgcctgtaatcccagcacttcgggaggccagggtgggtggatcatgaggtcaagagatcgagaccatyctggccaacatggtgaaaccccgtctccactaaaaatacaaaaattagctgggcatggtggcacgtgcctgtagtcccagctacttgggaggctgaggct

SEQ ID NO: 255283 - DNA, 201 bp, Homo sapiens
caaggtttatccaacttgcagtgtattaatgctgaataatactccattgtgtagatatactatatttttatgtttttaattttatttttaattggtacacracaaatatttgtacatatttatggggtacagatgatatgttgttacatgcatagaatgtgtaatgaccaatcagggtattaaaggtatctgccactttga

SEQ ID NO: 255284 - DNA, 201 bp, Homo sapiens
ccctgcttctccacacagattgagggctaagtattccaagctctctgcaggacccataacctggatgtggacaccaagtccttctaggacctgctcccagwagagttgatcccagccatgaaactgccctgatgccttcatcctgtatcagccttgtgagtagccagtagctgggaccacaggggtgcaccaccacacctg

SEQ ID NO: 255285 - DNA, 201 bp, Homo sapiens
agtcctcaaggcgccagcccctgcttctccacacagattgagggctaagtattccaagctctctgcaggacccataacctggatgtggacaccaagtcctkctaggacctgctcccagtagagttgatcccagccatgaaactgccctgatgccttcatcctgtatcagccttgtgagtagccagtagctgggaccacagg

SEQ ID NO: 255286 - DNA, 201 bp, Homo sapiens
ttcttctactgtatttgtgcaattttggaatcagttatattaatgtactaaatgaggtgggaatttttcttttttactattatccaaaaaaattataaaakacatgaattgttgctttcttatagatttagtaaaaacctcatcgtgtccttttgtggagagatggtgagagatatttttactgtaaatgtaatttgcgta

SEQ ID NO: 255287 - DNA, 201 bp, Homo sapiens
ccgcctcttggattcaagcgattctcctgcctcagcctcctcagtagctgggattacaggtgtctgtcaccacgcccagctaattttttatatttttttttagtagagaaggggtttcaccacataggataggctggtctcgaactcctgacctcaggtaatccacctgcctcagcctcccaaagtgctgagagtacaggt

SEQ ID NO: 255288 - DNA, 201 bp, Homo sapiens
aagcgattctcctgcctccgcctcccaagtagctgggattacaggcatgtgctaccacacctggctaattttgtattattagtagagacggggtttctccrtgttggtcaggctggtctcaaactcccgacctcaggtgatctgcccacctcaacctcccaaagtgctgggattacaggcttgagccaccgcacctggccc

SEQ ID NO: 255289 - DNA, 201 bp, Homo sapiens
gatttatgcaatataattgtttccttttgaattaataatatttgaatttgagctgcaagtttttaaaaaagtacttcaaaggctaattcatcttcatggaytaggcaaatagtctaatcaatttatggagaatgtatttggaatatgtaacagcaagtggcaggaagtactttagagttcaagactcatgtgcccatcact

SEQ ID NO: 255290 - DNA, 201 bp, Homo sapiens
gatatagatttatgcaatataattgtttccttttgaattaataatatttgaatttgagctgcaagtttttaaaaaagtacttcaaaggctaattcatcttyatggattaggcaaatagtctaatcaatttatggagaatgtatttggaatatgtaacagcaagtggcaggaagtactttagagttcaagactcatgtgccc

SEQ ID NO: 255291 - DNA, 201 bp, Homo sapiens
taccttatacatctggaattactctttagttctggaaacaatttacttagactcttctctacataagagtacgatttcatactatgatatagatttatgcratataattgtttccttttgaattaataatatttgaatttgagctgcaagtttttaaaaaagtacttcaaaggctaattcatcttcatggattaggcaaat

SEQ ID NO: 255292 - DNA, 201 bp, Homo sapiens
agtaccttatacatctggaattactctttagttctggaaacaatttacttagactcttctctacataagagtacgatttcatactatgatatagatttatrcaatataattgtttccttttgaattaataatatttgaatttgagctgcaagtttttaaaaaagtacttcaaaggctaattcatcttcatggattaggcaa

SEQ ID NO: 255293 - DNA, 201 bp, Homo sapiens
tgactcatccaacccatgaagagaggtattctctcatttagttaggtcctcttcaatttctctttacaatgctttctcattttctgtatagaaagcttgcrtatttttggtgagatttattcttagattttttttgtggctatttaaatgatatccttttaaaatgtctgttttctaaatgttttttgttgttttaaatgc

SEQ ID NO: 255294 - DNA, 201 bp, Homo sapiens
tttttattttcttaaccatttttctcctggattattcatcttttttctcctgattgtaggagttctttatgtattctgatttcaattctgttattggtcayaaatgtatttcaagaaagcttttctgctctgtgatttgccttttctgtctctcaggagtatcttctggttaacagaagttcttaattgtattaccatcat

SEQ ID NO: 255295 - DNA, 201 bp, Homo sapiens
agtatttttatctttagccttttgggtgtgtgatggcatcttatggtggtgatcatttgcatttctataattactaataagtttgaggaagtttttttaakattattaagtatttggatatccttttttgtaaagtaacttttttattttcttaaccatttttctcctggattattcatcttttttctcctgattgtagga

SEQ ID NO: 255296 - DNA, 201 bp, Homo sapiens
gggtagggtcttttggctttgcttctgcagccctatgcacttctgccagcaggttttatattgggtgtgtggtttgacctatgagccagtagatggcgccrtgggtaagagctggctgttgccagtgccgctggctgtgtacttgatccttgtttattgggaggagctctctgctgccccaggcaaagggctgatttcctg

SEQ ID NO: 255297 - DNA, 201 bp, Homo sapiens
gtatacctcagactaaaattgttctgtcttagggtaatgaatcttgaactttacttgataatgtcatctgttttctaaaacagttgtaccaatttttactscactggtattgtagacttcaagcattccgtatcttccccaatacttgcaattctgagtatttttatctttagccttttgggtgtgtgatggcatcttatg

SEQ ID NO: 255298 - DNA, 201 bp, Homo sapiens
cctttcccttctccctagagggtgtgactgtagagcatgctgggtagggtcttttggctttgcttctgcagccctatgcacttctgccagcaggttttatrttgggtgtgtggtttgacctatgagccagtagatggcgccatgggtaagagctggctgttgccagtgccgctggctgtgtacttgatccttgtttattgg

SEQ ID NO: 255299 - DNA, 201 bp, Homo sapiens
ttctttttctttcctttcctataatattattgttatttttttcttctttccctttcccttctccctagagggtgtgactgtagagcatgctgggtagggtmttttggctttgcttctgcagccctatgcacttctgccagcaggttttatattgggtgtgtggtttgacctatgagccagtagatggcgccatgggtaaga

SEQ ID NO: 255300 - DNA, 201 bp, Homo sapiens
gtaggatttttctttttctttcctttcctataatattattgttatttttttcttctttccctttcccttctccctagagggtgtgactgtagagcatgctrggtagggtcttttggctttgcttctgcagccctatgcacttctgccagcaggttttatattgggtgtgtggtttgacctatgagccagtagatggcgcca

SEQ ID NO: 255301 - DNA, 201 bp, Homo sapiens
tctttttcagtagttgtattcctcaggtatctaatcatgttggtttgtgaactcagattttgtgtggttgttggctactctgtctggtcatttgtactggrgaaggactgaaggacaaagtctgctgctgttcttgcaacataattattaatagcacccactttttcctttcaaaagtgtcctggtttgggcaggaattat

SEQ ID NO: 255302 - DNA, 201 bp, Homo sapiens
gtaaagtgttttattaagtaccttatacatctggaattactctttagttctggaaacaatttacttagactcttctctacataagagtacgatttcatacyatgatatagatttatgcaatataattgtttccttttgaattaataatatttgaatttgagctgcaagtttttaaaaaagtacttcaaaggctaattcatc

SEQ ID NO: 255303 - DNA, 201 bp, Homo sapiens
aggtctcactctgtcacccaggctggagtgcagtgacatgatctcagttcattgcaacctccgcctcctgcgttcaagcaattctcatgtctgagcctccrgagtaactgggattacaggcgtccgccaccatacccagctacttttgtatttttagtagagatggggttttgccatgttgtccaggctggtctcaaattc

SEQ ID NO: 255304 - DNA, 201 bp, Homo sapiens
attatttttgtttgggtaggatttttctttttctttcctttcctataatattattgttatttttttcttctttccctttcccttctccctagagggtgtgmctgtagagcatgctgggtagggtcttttggctttgcttctgcagccctatgcacttctgccagcaggttttatattgggtgtgtggtttgacctatgagc

SEQ ID NO: 255305 - DNA, 201 bp, Homo sapiens
tttgtgtaattatttttgtttgggtaggatttttctttttctttcctttcctataatattattgttatttttttcttctttccctttcccttctccctagrgggtgtgactgtagagcatgctgggtagggtcttttggctttgcttctgcagccctatgcacttctgccagcaggttttatattgggtgtgtggtttgac

SEQ ID NO: 255306 - DNA, 201 bp, Homo sapiens
cacttctaatttgtgtaattatttttgtttgggtaggatttttctttttctttcctttcctataatattattgttatttttttcttctttccctttccctyctccctagagggtgtgactgtagagcatgctgggtagggtcttttggctttgcttctgcagccctatgcacttctgccagcaggttttatattgggtgtg

SEQ ID NO: 255307 - DNA, 201 bp, Homo sapiens
cacccctatactgatatagtaaagatattccacatttcctcaaaaatattcaagttccatttttagtatttgggtctttaatctaattggaagttgggggrgaagtattttttttcatatagatagccaattgtcctaacaccatcaattgcatgctattttgttctccattaatttgtagtccctctcagtaatatacca

SEQ ID NO: 255308 - DNA, 201 bp, Homo sapiens
ttgatgtagaagtttctttttgttgatttcaaccttgaatctcattgagcttccttgcaacccaagctttgaattgtttattgtcatctctgagttttcawtttggtaggaagcattgccagagagctagtgtgatcctttggtagtgtcactacattcagatttctcatggtgccagaattcttgcatgggtccttctta

SEQ ID NO: 255309 - DNA, 201 bp, Homo sapiens
catttcctggattgatgtagaagtttctttttgttgatttcaaccttgaatctcattgagcttccttgcaacccaagctttgaattgtttattgtcatctctgagttttcattttggtaggaagcattgccagagagctagtgtgatcctttggtagtgtcactacattcagatttctcatggtgccagaattcttgcatg

SEQ ID NO: 255310 - DNA, 201 bp, Homo sapiens
cctggactcaagtgatccacccacctcagcttcccaaagtgctgggattacaggcatgagccatcatgcccggagagaagtttgtaattttgaatatagtraaatttgtttttctatgtgtgtgtatgtatttcatgcttttctgtcatgtttatgaaattcacccctatactgatatagtaaagatattccacatttcct

SEQ ID NO: 255311 - DNA, 201 bp, Homo sapiens
gattgatttcttattaagatgtttatctcttccttcatttcctggattgatgtagaagtttctttttgttgatttcaaccttgaatctcattgagcttccytgcaacccaagctttgaattgtttattgtcatctctgagttttcattttggtaggaagcattgccagagagctagtgtgatcctttggtagtgtcactac

SEQ ID NO: 255312 - DNA, 201 bp, Homo sapiens
aaagaccagtcttcaagctctgaaattatgttttctactttgtccagtctattgataaagttttcagttgtattttgaaattccttaagtgaatttttttwgttccagaagttctgattgatttcttattaagatgtttatctcttccttcatttcctggattgatgtagaagtttctttttgttgatttcaaccttgaat

SEQ ID NO: 255313 - DNA, 201 bp, Homo sapiens
gtagttttgctacagttggtatgctgttgttcagcttgttgtatttctttttcagtagttgtattcctcaggtatctaatcatgttggtttgtgaactcarattttgtgtggttgttggctactctgtctggtcatttgtactggagaaggactgaaggacaaagtctgctgctgttcttgcaacataattattaatagca

SEQ ID NO: 255314 - DNA, 201 bp, Homo sapiens
ctttcagtctacaaaggtaatttctaatcctcatagttttaatttacacatttaatgcttttaatctactcagagtttacccttaaatatggtgttaggtrgggatttggtttcatttttctcccaatggtaggctgattttccaaataccacctatgaaacagttcatcctttttccttgtttatataatcatcatcaat

SEQ ID NO: 255315 - DNA, 201 bp, Homo sapiens
tgataacacccgtctcggcctcccgaagttctgagattgcaggcatgagccaccgtgcccagcaagagtatattatcttaagattcttgcctcgttactaytcttaaaattgctccaaaacttgcttaagtagtcagctttaaattatgtaaatatagacaacaaaactcttaatcctaaaggtgcttttaaaattcatgc

SEQ ID NO: 255316 - DNA, 201 bp, Homo sapiens
ccagtagtatcatgatagtaaaaatattttatatcgatttataggagttctttaaagaatctgaatgccaatttttcttagtattgtaattatattctccscacatgttgcctttaaatttgatggtgatttattttgttgtacaaaagtttgtaaatttttgttttgttttgagacatgatctcgctctgtcactcaggc

SEQ ID NO: 255317 - DNA, 201 bp, Homo sapiens
tcttgctatcttctggttggttgctgcctgcaggttaccagtagtatcatgatagtaaaaatattttatatcgatttataggagttctttaaagaatctgratgccaatttttcttagtattgtaattatattctccccacatgttgcctttaaatttgatggtgatttattttgttgtacaaaagtttgtaaatttttgt

SEQ ID NO: 255318 - DNA, 201 bp, Homo sapiens
gaagagaagtgatgtgccccagggtagagagtctcaggaaccatgaaacactgaccaggcaactcctctgggttgtgaaaaggaaaaactttagacaaggyaaatttaacagagtttaatagtgcaagaatgattcgtgagttgggaagcttttagaacgagaacaagttctgagaactgcaagctggcaaaagctggcaa

SEQ ID NO: 255319 - DNA, 201 bp, Homo sapiens
cagcctcttttttatgtgttcattcatattagtcttgctatcttctggttggttgctgcctgcaggttaccagtagtatcatgatagtaaaaatattttayatcgatttataggagttctttaaagaatctgaatgccaatttttcttagtattgtaattatattctccccacatgttgcctttaaatttgatggtgattt

SEQ ID NO: 255320 - DNA, 201 bp, Homo sapiens
ctaattccttgcttgaaggaaaacattcatttcaaatttgactttttttcttttttgctgagagggggtttacattattctgtattcacataatattttgwtgattttgttaaagtttgtttagagggctaatattcagctggtatgtaccagagcagcctcttttttatgtgttcattcatattagtcttgctatcttct

SEQ ID NO: 255321 - DNA, 201 bp, Homo sapiens
ttaaagaagttagcatcagctttctattaactaatgctaattccttgcttgaaggaaaacattcatttcaaatttgactttttttcttttttgctgagagrgggtttacattattctgtattcacataatattttgttgattttgttaaagtttgtttagagggctaatattcagctggtatgtaccagagcagcctcttt

SEQ ID NO: 255322 - DNA, 201 bp, Homo sapiens
aatgttattattaaagaagttagcatcagctttctattaactaatgctaattccttgcttgaaggaaaacattcatttcaaatttgactttttttcttttktgctgagagggggtttacattattctgtattcacataatattttgttgattttgttaaagtttgtttagagggctaatattcagctggtatgtaccagag

SEQ ID NO: 255323 - DNA, 201 bp, Homo sapiens
aaatggccatttcacattacccaacctaaaatgttattattaaagaagttagcatcagctttctattaactaatgctaattccttgcttgaaggaaaacawtcatttcaaatttgactttttttcttttttgctgagagggggtttacattattctgtattcacataatattttgttgattttgttaaagtttgtttagag

SEQ ID NO: 255324 - DNA, 201 bp, Homo sapiens
tggcaatttacaataccatagttaagaatatagaggttgaatcatttgaaattgccagtttttaaccatcttttgctttaaaaatggccatttcacattayccaacctaaaatgttattattaaagaagttagcatcagctttctattaactaatgctaattccttgcttgaaggaaaacattcatttcaaatttgacttt

SEQ ID NO: 255325 - DNA, 201 bp, Homo sapiens
ttaatatacaggttctgtgtttagctgtatattagttaatatacaggttctgtgtttagctctacaggttggaatattgtatataaactggcaatttacartaccatagttaagaatatagaggttgaatcatttgaaattgccagtttttaaccatcttttgctttaaaaatggccatttcacattacccaacctaaaat

SEQ ID NO: 255326 - DNA, 201 bp, Homo sapiens
ctgttggatttggctgttatcctgatggggctacctttgtgtgtgatctggcctttttctgcagtgcctttagggctttttctttgacagtgaccttggayagtctggtgagtatatgccttggtaatgctcattttttatagtatctcacaggtgctgtctggctttactgtacttagatgtctatctagcaagattcaa

SEQ ID NO: 255327 - DNA, 201 bp, Homo sapiens
tacataggtttatctctgagctcaatattttgctccattgatacttatggcatccctacacctttttttattaccgcaattagttattaatggagcctttrtatgttgacatagattttgtagtaagtatgtcaatattctaaaaaattttgaaaaatacctatgtgggccctgtggtgtttgggagagggaaagccttta

SEQ ID NO: 255328 - DNA, 201 bp, Homo sapiens
atcctcatagttttaatttacacatttaatgcttttaatctactcagagtttacccttaaatatggtgttaggtagggatttggtttcatttttctcccartggtaggctgattttccaaataccacctatgaaacagttcatcctttttccttgtttatataatcatcatcaatgacatatatctacataggtttatctc

SEQ ID NO: 255329 - DNA, 201 bp, Homo sapiens
ttcatttttctcccaatggtaggctgattttccaaataccacctatgaaacagttcatcctttttccttgtttatataatcatcatcaatgacatatatcyacataggtttatctctgagctcaatattttgctccattgatacttatggcatccctacacctttttttattaccgcaattagttattaatggagccttta

SEQ ID NO: 255330 - DNA, 201 bp, Homo sapiens
aaaagggaaacttcttgttattgtcttgtcacccttagtagcaggcacatacttaggaaagtcagatttcctgtgtatgagacatactagagtggaccaarggaagaaaaccctatgcagagcaacaagcgagtagcagtggacagggagcagtggagccctcggggaaaaaaaacagagctaatggccctggcagggttc

SEQ ID NO: 255331 - DNA, 201 bp, Homo sapiens
cttcttgttattgtcttgtcacccttagtagcaggcacatacttaggaaagtcagatttcctgtgtatgagacatactagagtggaccaagggaagaaaaycctatgcagagcaacaagcgagtagcagtggacagggagcagtggagccctcggggaaaaaaaacagagctaatggccctggcagggttcctcacaccca

SEQ ID NO: 255332 - DNA, 201 bp, Homo sapiens
gcccattagttaatatacaggttctgtgtttagctgtatattagttaatatacaggttctgtgtttagctctacaggttggaatattgtatataaactggmaatttacaataccatagttaagaatatagaggttgaatcatttgaaattgccagtttttaaccatcttttgctttaaaaatggccatttcacattaccca

SEQ ID NO: 255333 - DNA, 201 bp, Homo sapiens
actgacttatataattcagtaaaatcaagttttagtcttattgactagtttcaagcccattagttaatatacaggttctgtgtttagctgtatattagttmatatacaggttctgtgtttagctctacaggttggaatattgtatataaactggcaatttacaataccatagttaagaatatagaggttgaatcatttgaa

SEQ ID NO: 255334 - DNA, 201 bp, Homo sapiens
taaataatcatctaagcatatttcacaaattttgccaaacataaataattacatttttagtgggctctaaatgaatttttatatcaaattccaggaaaacrtagcaccgtaaactgacttatataattcagtaaaatcaagttttagtcttattgactagtttcaagcccattagttaatatacaggttctgtgtttagct

SEQ ID NO: 255335 - DNA, 201 bp, Homo sapiens
ttttcttctagtagttttccaatttcacgtttcacagttaagcatttactttgagttgatttttgtatattgggtgagataggttgcaatttcatttttcygcaagtggatattcagtttccccagtatcgtttattgaagagactgtcctttccccatcttggattcttggcacctttgttgaacatcagctgagtataa

SEQ ID NO: 255336 - DNA, 201 bp, Homo sapiens
accatgttgttaaaaacatccttcgtttgactatttatacatttggttctaaagaaggtgttatccttagattcttggatctaaagaatatatatatattwtttttttgtttgtttgtttttttgagaaggaatctcactctgtcacccaggctagagtgcagtttgtgatctcagctcactgcaacctccgcctcctggg

SEQ ID NO: 255337 - DNA, 201 bp, Homo sapiens
ggagtgtattaccttgaggagaatgtttgtgtatttgaaactaaaaatatgtatgttcatattgccacatactgatttttatggcataatatacggtgtasagagcaggttgtctaaaaaccaatattggcaaaatgctgaatattcagcatggttttatgaagttgacagatgtggagtgtattttgcctgtgtcttaac

SEQ ID NO: 255338 - DNA, 201 bp, Homo sapiens
cctgttccacataaaactttcatgcactagttttagcattcattgatttttatgtgaatcagtttaactgtgatcattacaaaatggtgattttttttttwaaaaagtggtttttctgtgtttaataagtatcattctattataaggagagctattcctacccctatttattcactattactatgaacttataaattctta

SEQ ID NO: 255339 - DNA, 201 bp, Homo sapiens
ttgtacttctttgtttaaaaactatcttggctctcttagattttttgaatttccatataaattttagaatcatcttggcaatttacatacacacacacacwctcaaacccacacaaacacacccccacaccctgttagtattttgacttgggcattgactacacagcttaatttggagagacttgacatgtaaaaatatta

SEQ ID NO: 255340 - DNA, 201 bp, Homo sapiens
gttatactcagaaagttatttcttatcgtaagattaccaatatagtcaccaaaattttttttatagtttgaattaattttctacatttaaataaaacaaghgctgctgctgttgttactattcccttttaacatctccccaaattagtgttttattctgtacactttatgagatgccagcttaacaatacccttaatatgg

SEQ ID NO: 255341 - DNA, 201 bp, Homo sapiens
catttatgttgtttcttgctatttacctttcaatcctttgcactgaccccaatgaattgacatcagaaatctgtgctggagtcaacaatgaaaggtgatgwcataatagatactggagatgggaggaattcaggtttgtgaaattcagtctcagaattattcatgggaaaatagttttctggacactgattctaaaattct

SEQ ID NO: 255342 - DNA, 201 bp, Homo sapiens
gagaatttttagggacaacacattgtaatttgtagcgcaatcatagccaatttgaacaacaacaacaaaaaaagtcgtgtatgcatttatgttgtttcttrctatttacctttcaatcctttgcactgaccccaatgaattgacatcagaaatctgtgctggagtcaacaatgaaaggtgatgacataatagatactggag

SEQ ID NO: 255343 - DNA, 201 bp, Homo sapiens
gtttagaactcctgacctcaagtaatccacccacctcgccctcccaaagtgctaggattacaggtgtgagccaccgtgcccggcctagcttccctaaataytttttctggaaagataaagtgatgggattctaagtcttggaagctgaactatatgtattcttttctcttctctcatcttataaaatctgctttaggagac

SEQ ID NO: 255344 - DNA, 201 bp, Homo sapiens
gcaagatggccaattagaagcagctgcagtctgccgcgctcacaaagaggaatgaaaaggggcgagggaattcagcaccttcaactgagataaccaggttstcacattgggactgactggatgaacaggtcgaccaatggagaatgaagacaagcaggcagagggtgcgatggcccagccgggggcggcatggagccaaag

SEQ ID NO: 255345 - DNA, 201 bp, Homo sapiens
atttatgcaatataattgtttccttttgaattaataatatttgaatttgagctgcaagtttttaaaaaagtacttcaaaggctaattcatcttcatggatwaggcaaatagtctaatcaatttatggagaatgtatttggaatatgtaacagcaagtggcaggaagtactttagagttcaagactcatgtgcccatcacta

SEQ ID NO: 255346 - DNA, 201 bp, Homo sapiens
ctggcaatttacaataccatagttaagaatatagaggttgaatcatttgaaattgccagtttttaaccatcttttgctttaaaaatggccatttcacattrcccaacctaaaatgttattattaaagaagttagcatcagctttctattaactaatgctaattccttgcttgaaggaaaacattcatttcaaatttgactt

SEQ ID NO: 255347 - DNA, 201 bp, Homo sapiens
gacaggatatcctctaaggctgaatagtatgcctttatttatatataccacatattctttattcattcatccactgatgacatttagattgactccatagsttgggtattatgaataatgctgcagtgaacacgggagtgcagatttcatttcctttggatatatacccagaagtggaatctccaaatcatatggtagttc

SEQ ID NO: 255348 - DNA, 201 bp, Homo sapiens
taaggctgatcttttttatttttaaattaacaaaaaaatcaatatatttatggtgtacaacatgatgttttgatatacataaacattgtgaaatggctaartcaagctaattaacatatgtattactccacatatttttgtgtgagaacatttaaaatctactgtctcagcaattttcaagtatacattattattaactgt

SEQ ID NO: 255349 - DNA, 201 bp, Homo sapiens
tatcagagtacttttattttatttaaggctgatcttttttatttttaaattaacaaaaaaatcaatatatttatggtgtacaacatgatgttttgatatasataaacattgtgaaatggctaaatcaagctaattaacatatgtattactccacatatttttgtgtgagaacatttaaaatctactgtctcagcaattttc

SEQ ID NO: 255350 - DNA, 201 bp, Homo sapiens
taggagatagggagaggataaggaatggaagaaagtaggaaaaaagaactaaggaaggttgagcatattttcccttgttttcctagtatttggattttttrtttttggtttgccagtttatatctctcaaaatacaaacagtctttaattttagaatatcagagtacttttattttatttaaggctgatcttttttatttt

SEQ ID NO: 255351 - DNA, 201 bp, Homo sapiens
cttgaaaacatcgtagcgattcactgtaaaggaggcaaaggtaataacattttccttttcatttttccctttctaaagacatgtaaatatagataaagtasaagaacaagatacgtattgctattaatatgtattaataattgttagcatttttaaatattagctccaagactgaaagaagggaaggagaaaggaaagagg

SEQ ID NO: 255352 - DNA, 201 bp, Homo sapiens
ccaaggaagtaaatgagtggatggctcaagatcttgaaaacatcgtagcgattcactgtaaaggaggcaaaggtaataacattttccttttcatttttccmtttctaaagacatgtaaatatagataaagtagaagaacaagatacgtattgctattaatatgtattaataattgttagcatttttaaatattagctccaa

SEQ ID NO: 255353 - DNA, 201 bp, Homo sapiens
tggttttcaccaaggaagtaaatgagtggatggctcaagatcttgaaaacatcgtagcgattcactgtaaaggaggcaaaggtaataacattttccttttyatttttccctttctaaagacatgtaaatatagataaagtagaagaacaagatacgtattgctattaatatgtattaataattgttagcatttttaaatat

SEQ ID NO: 255354 - DNA, 201 bp, Homo sapiens
ggctgctagaaagttaaaaattatacctattaaacaaaaataagttgagtttaggttacatgagatggataaaccactaccatccttacgtttttgaaatrcttgcgtttattttagagtggcaggagcaacttggaaagctctttttgaagatagataaggaattctaataagatatgttaacttattcataacttcatc

SEQ ID NO: 255355 - DNA, 201 bp, Homo sapiens
caatgaggctggagtggaagcaaaccattttagggaagatctgttctggccatattaggtttaggaaaatctttctgtttttcctgccagattgtgttatraggacatagacaatttaacaaatgagccctctgacccatcagcagtggcatgtgatgagagcaaggctctagatgggaaaaaagcaaaagactctgtaga

SEQ ID NO: 255356 - DNA, 201 bp, Homo sapiens
gttagcccagcagcacaaggtaccgtatgaaggatgtggctttggcaggaccaatgaggctggagtggaagcaaaccattttagggaagatctgttctggycatattaggtttaggaaaatctttctgtttttcctgccagattgtgttatgaggacatagacaatttaacaaatgagccctctgacccatcagcagtggc

SEQ ID NO: 255357 - DNA, 201 bp, Homo sapiens
ctttttagattgcatttaatcataagtatttggtagtggcaaggaatgaatttaaaaatccccatcttggactggccccatttagtagagggagttagccyagcagcacaaggtaccgtatgaaggatgtggctttggcaggaccaatgaggctggagtggaagcaaaccattttagggaagatctgttctggccatatta

SEQ ID NO: 255358 - DNA, 201 bp, Homo sapiens
ttggtgccatgtaaatatgtaagatatgtgtttgtcttttttaggaagttgtgcggtttctagataagaaacatcgaaaccactatcgagtctacaatctmtgcagtatgtacattactctatattttgctactgtaggtagaaaacagattactgcacgtaagaagatgattttgctttttagattgcatttaatcataa

SEQ ID NO: 255359 - DNA, 201 bp, Homo sapiens
tgctagtgagagacaaattaataaaagtaataaccattttaggttccccctaggaaatagcttgtgttggtgccatgtaaatatgtaagatatgtgtttgycttttttaggaagttgtgcggtttctagataagaaacatcgaaaccactatcgagtctacaatctatgcagtatgtacattactctatattttgctactg

SEQ ID NO: 255360 - DNA, 201 bp, Homo sapiens
cccattttattggacaatgcaaattacactaccagtctggattcaaggagtagaaaataaactccaactcttgatggaaggaactataaagaattgtggcrgtttttgatagtctaccatagggaagaaagatggggatgctataacccaaaatgtgtattcttaggttgagatcctaaattatagtcagggcatatggct

SEQ ID NO: 255361 - DNA, 201 bp, Homo sapiens
acactaccagtctggattcaaggagtagaaaataaactccaactcttgatggaaggaactataaagaattgtggcagtttttgatagtctaccatagggargaaagatggggatgctataacccaaaatgtgtattcttaggttgagatcctaaattatagtcagggcatatggctttaggctctgtggatgactaaatta

SEQ ID NO: 255362 - DNA, 201 bp, Homo sapiens
ccctcttattccctgaatctcccctagaagatgctagtgagagacaaattaataaaagtaataaccattttaggttccccctaggaaatagcttgtgttgrtgccatgtaaatatgtaagatatgtgtttgtcttttttaggaagttgtgcggtttctagataagaaacatcgaaaccactatcgagtctacaatctatgc

SEQ ID NO: 255363 - DNA, 201 bp, Homo sapiens
gagactcatctgagtagccaaacacactttgtggactatttgaaaaatcacagtggattagaacttgaagtttgcataccctcttattccctgaatctccmctagaagatgctagtgagagacaaattaataaaagtaataaccattttaggttccccctaggaaatagcttgtgttggtgccatgtaaatatgtaagata

SEQ ID NO: 255364 - DNA, 201 bp, Homo sapiens
gaaaaggcaggtgcatttaccctcttaggggatgaccattggtgttttaaaaaataagacatttgctgagaattccttaaatttttctaattttcactagycagtgatgacattgtccctttttgtagatagctttggaagatgatgatacctccacagttgggaccatgttgttaaaaacatccttcgtttgactattta

SEQ ID NO: 255365 - DNA, 201 bp, Homo sapiens
tgcttttaactggtatgaaaaattccacagcatgcatcccctagtgaggaacacatatattgcttcctaccatttgccttcgcaaagactgccgccaaatkattatccttatgccagacccctatagacctgtttgagtagttctgtaggaatatgaaacaggacttgatgggccatgagactgcacattttgaatttgac

SEQ ID NO: 255366 - DNA, 201 bp, Homo sapiens
ttatatttatattggtttatatttagatttatatgactggttatgtgaatatatttaaatactggggaaattccttcactgtctcagaaccaagcaagatrcacctgtattttgtgtttatttgcctcttaaaggcaagggttgaagataaggtagcaatgtcttctttgtatttttggccttaactatgccaatgtaatt

SEQ ID NO: 255367 - DNA, 201 bp, Homo sapiens
tttacaagaaaaaaacagccccattaaaaagtgggcaaaggatctgaacagacacttcccaaaagagacatgcatgcagtcaacaaaaatatgaaaaaaartctcaacatcactgatcattaaagaaatgcaaacaaaaccacaatgagataccatctcatgccagtcagaatggctattattaaaaagccaaaaaataac

SEQ ID NO: 255368 - DNA, 201 bp, Homo sapiens
aaggatcccccacaatgcagcacacctgctctaccccaaagcagccagactgcttctttggatgggtccctgatccaatgcctcctgatggtgggaatgcscaacgggggtctccagccacctcctgcaggtatgtgcgggctggctacaggtcagtatccccctgggatgaagcttccaaaggaaggagctggctgccat

SEQ ID NO: 255369 - DNA, 201 bp, Homo sapiens
atccccgcgggggctttaaccactgcagcaacggttctatggacagagctttgatctctccctgaaatggagctcctggcgggaggggcagctgccatctytgcagtttggtcaactcagccactccaacctgctggctttggagaatacaggtggtccggaggaggaaggatcccccacaatgcagcacacctgctctac

SEQ ID NO: 255370 - DNA, 201 bp, Homo sapiens
gttcccggggaggtggggagaggcagccagcatcactgtggttcatagactcagccactccagcctgccagctatggagaatacagacaatccggacaagkaagagttccccacaacacagcacagctggcttgccagatcatgaccagactgcttctttaagcaggaccccaatccattcctcctcactgggcaggaatc

SEQ ID NO: 255371 - DNA, 201 bp, Homo sapiens
tatcacacatacacacaatcatactatatactttttgcatttatttgtttccatagtgcttagatagactgtaatatgcagatcactctctaaagatgtayctattcagaattaaattgaaataagaaccaatatgaattagatttaaacaagaaccatattaactgtgaattaatgatttagaacaaattacttaaagtt

SEQ ID NO: 255372 - DNA, 201 bp, Homo sapiens
gggtctgagttcccggggaggtggggagaggcagccagcatcactgtggttcatagactcagccactccagcctgccagctatggagaatacagacaatcyggacaaggaagagttccccacaacacagcacagctggcttgccagatcatgaccagactgcttctttaagcaggaccccaatccattcctcctcactggg

SEQ ID NO: 255373 - DNA, 201 bp, Homo sapiens
aaataaagagaacaaatgagccaaaaaagtctccatattgttaccagttatttaaaatttgatatgtttatctttttctatcacacatacacacaatcatrctatatactttttgcatttatttgtttccatagtgcttagatagactgtaatatgcagatcactctctaaagatgtatctattcagaattaaattgaaat

SEQ ID NO: 255374 - DNA, 201 bp, Homo sapiens
agatatatttactgaaagttggattcatatagtggtattgattgtattttaaataataactactatttgtttttcattttaaaggttatacatatatatayacacacacacacacacacacacacacacacacttataggtacacatatatcttcatttaaaaaaataaagagaacaaatgagccaaaaaagtctccatat

SEQ ID NO: 255375 - DNA, 201 bp, Homo sapiens
aatccagggagccaggcagcatcattctgcaggccccatttccatggcacctcacaagttaagacccactggcttggaatactagcctgccaacagcagcrggttggaatccacctcagatgggtctgagttcccggggaggtggggagaggcagccagcatcactgtggttcatagactcagccactccagcctgccagc

SEQ ID NO: 255376 - DNA, 201 bp, Homo sapiens
aaagatatatttactgaaagttggattcatatagtggtattgattgtattttaaataataactactatttgtttttcattttaaaggttatacatatatayacacacacacacacacacacacacacacacacacttataggtacacatatatcttcatttaaaaaaataaagagaacaaatgagccaaaaaagtctccat

SEQ ID NO: 255377 - DNA, 201 bp, Homo sapiens
cccatgtcaccagggctgcgggtctgatacacagacctgtatggagtctgggcacatcagctgctcaggcacacacagaaacccaggagttttacacactstagccggggatcttcagcacagtgggaaatctgtccatatgtatctctgggaagtgggctgaatccagggagccaggcagcatcattctgcaggccccat

SEQ ID NO: 255378 - DNA, 201 bp, Homo sapiens
gaaagatatatttactgaaagttggattcatatagtggtattgattgtattttaaataataactactatttgtttttcattttaaaggttatacatatatwtacacacacacacacacacacacacacacacacacttataggtacacatatatcttcatttaaaaaaataaagagaacaaatgagccaaaaaagtctcca

SEQ ID NO: 255379 - DNA, 201 bp, Homo sapiens
tccagaactctgccaccacggaggcaggtgctccaaacctcaaatcctattggattgtgcccctgtgtcagacctctagttacctgaccctttttgtgggrcatgagaaaccaccatgctgggtgaatgtaaggagctaatggagggccttttaagcaggacattgaatggaataagagggctgcctacctacaaactgga

SEQ ID NO: 255380 - DNA, 201 bp, Homo sapiens
cacaggctgtgagcattgtcttaggattaatggctctcggggtggaatttgagtcctgtgttggaggcttcagtatgacagaaacttcctgaagacttctyctactgaagtctcctgtgttggaggcttctcctcctgaagagcctccaacacaggaggcttcagtaggacaaaaaaaattgttcctcatcagctactttg

SEQ ID NO: 255381 - DNA, 201 bp, Homo sapiens
gccaagggaagcagtgagtgtgcagtcctgcccaggaaaccatgcttctctcatggatctttgcaagccatggatcaagagatccccttgtgagcccatgycaccagggctgcgggtctgatacacagacctgtatggagtctgggcacatcagctgctcaggcacacacagaaacccaggagttttacacactgtagccg

SEQ ID NO: 255382 - DNA, 201 bp, Homo sapiens
atggcccagccgggggcggcatggagccaaaggaaacccgactcccagccaagggaagcagtgagtgtgcagtcctgcccaggaaaccatgcttctctcayggatctttgcaagccatggatcaagagatccccttgtgagcccatgtcaccagggctgcgggtctgatacacagacctgtatggagtctgggcacatcag

SEQ ID NO: 255383 - DNA, 201 bp, Homo sapiens
gagggtgcgatggcccagccgggggcggcatggagccaaaggaaacccgactcccagccaagggaagcagtgagtgtgcagtcctgcccaggaaaccatgyttctctcatggatctttgcaagccatggatcaagagatccccttgtgagcccatgtcaccagggctgcgggtctgatacacagacctgtatggagtctgg

SEQ ID NO: 255384 - DNA, 201 bp, Homo sapiens
tcagtcaatttttctgaaaaatcgtttcccctgttattcattaatagcatttttaagcagaaatttcagatttttatgaagtcaaacctaagcctattgaycttccattgattcaacacctttagttcttcctcatccaaagaattgattaaaatttgcttaaatttctcatagatatttatagtttttatatgtgatttc

SEQ ID NO: 255385 - DNA, 201 bp, Homo sapiens
acaagcaggcagagggtgcgatggcccagccgggggcggcatggagccaaaggaaacccgactcccagccaagggaagcagtgagtgtgcagtcctgcccrggaaaccatgcttctctcatggatctttgcaagccatggatcaagagatccccttgtgagcccatgtcaccagggctgcgggtctgatacacagacctgt

SEQ ID NO: 255386 - DNA, 201 bp, Homo sapiens
cattgggactgactggatgaacaggtcgaccaatggagaatgaagacaagcaggcagagggtgcgatggcccagccgggggcggcatggagccaaaggaamcccgactcccagccaagggaagcagtgagtgtgcagtcctgcccaggaaaccatgcttctctcatggatctttgcaagccatggatcaagagatcccctt

SEQ ID NO: 255387 - DNA, 201 bp, Homo sapiens
ttcaactgagataaccaggttgtcacattgggactgactggatgaacaggtcgaccaatggagaatgaagacaagcaggcagagggtgcgatggcccagcygggggcggcatggagccaaaggaaacccgactcccagccaagggaagcagtgagtgtgcagtcctgcccaggaaaccatgcttctctcatggatctttgc

SEQ ID NO: 255388 - DNA, 201 bp, Homo sapiens
aagggctataggaattaagaactagggctaaaaaagaaatgtttagagtgatgcaagatggccaattagaagcagctgcagtctgccgcgctcacaaagargaatgaaaaggggcgagggaattcagcaccttcaactgagataaccaggttgtcacattgggactgactggatgaacaggtcgaccaatggagaatgaag

SEQ ID NO: 255389 - DNA, 201 bp, Homo sapiens
aactccatctcaaaataaaataaaataaaataacataaaataaaataaaataaaataaaataaataaataaaataaaataaaataaaataaaataaaaaaatatgaaggacaggacagtattctaaatgttgcatgatatttcattagtgctatgattaacctctaatgttggacatttaagtgtcactataatcaacaat

SEQ ID NO: 255390 - DNA, 201 bp, Homo sapiens
aacaggacaggcctgcaagttcagctacttcccagaaaatgtcctggatccctggcctgagtcatcatcccatgactagagaacatggatggattattttrtcaagaaactggtgataaaccaagggctataggaattaagaactagggctaaaaaagaaatgtttagagtgatgcaagatggccaattagaagcagctgc

SEQ ID NO: 255391 - DNA, 201 bp, Homo sapiens
aaactccatctcaaaataaaataaaataaaataacataaaataaaataaaataaaataaaataaataaataaaataaaataaaataaaataaaataaaaaaatatgaaggacaggacagtattctaaatgttgcatgatatttcattagtgctatgattaacctctaatgttggacatttaagtgtcactataatcaacaa

SEQ ID NO: 255392 - DNA, 201 bp, Homo sapiens
caatgaggtgcaaaatttaagggaatgctaaaaattataataattaaaataaataattttaatgcaatattttaataaaaattaatgcaaaaaatctatgmtgtatgcaatatcaacattttaaataaagacaagacctgatggggcaggattaaggtgaggggagtaaagtcatgttacacagaaaaaaacattcagtaa

SEQ ID NO: 255393 - DNA, 201 bp, Homo sapiens
attacaatacttattatacctcaataaaaatataactatcaagggctggcatcagttgccgagaggtggaaggagtacctctctgcagtttgttagctcarttctgaacaggacaggcctgcaagttcagctacttcccagaaaatgtcctggatccctggcctgagtcatcatcccatgactagagaacatggatggatt

SEQ ID NO: 255394 - DNA, 201 bp, Homo sapiens
gaaactccatctcaaaataaaataaaataaaataacataaaataaaataaaataaaataaaataaataaataaaataaaataaaataaaataaaataaaaaaatatgaaggacaggacagtattctaaatgttgcatgatatttcattagtgctatgattaacctctaatgttggacatttaagtgtcactataatcaaca

SEQ ID NO: 255395 - DNA, 201 bp, Homo sapiens
tgaaatgccagctgaaaggatcattgtttaatttaatataaattacaatacttattatacctcaataaaaatataactatcaagggctggcatcagttgcygagaggtggaaggagtacctctctgcagtttgttagctcagttctgaacaggacaggcctgcaagttcagctacttcccagaaaatgtcctggatccctg

SEQ ID NO: 255396 - DNA, 201 bp, Homo sapiens
tgaaactccatctcaaaataaaataaaataaaataacataaaataaaataaaataaaataaaataaataaataaaataaaataaaataaaataaaataaaaaaatatgaaggacaggacagtattctaaatgttgcatgatatttcattagtgctatgattaacctctaatgttggacatttaagtgtcactataatcaac

SEQ ID NO: 255397 - DNA, 201 bp, Homo sapiens
agagtgaaactccatctcaaaataaaataaaataaaataacataaaataaaataaaataaaataaaataaataaataaaataaaataaaataaaataaaataaaaaaatatgaaggacaggacagtattctaaatgttgcatgatatttcattagtgctatgattaacctctaatgttggacatttaagtgtcactataat

SEQ ID NO: 255398 - DNA, 201 bp, Homo sapiens
aagtctgagctagcgagaactggaggaataatttccctctgtaggaattcctgctctacctacttactacgggagtaaagtggtcatgatttaaacagtcytgtctatacctgttatgttataaggatgtgttcatggccctatctgctaagagtgagttgttcttataaataaaataaaaattagtaaatttatacacac

SEQ ID NO: 255399 - DNA, 201 bp, Homo sapiens
cctgccactgggcagcttaatactaaataataacattttggtacctgatcagtggcttaaatatagtatagctatagggacaaatgcccctttatctttgyatttatttatttatttatttatttatttatttatttatttattttagaatatttggagttttcctggtcttactggatgtcactctcctccttgccgacc

SEQ ID NO: 255400 - DNA, 201 bp, Homo sapiens
aagaaatatgagatttaagcttacagataggaaaaagttctggtgttctgtagtgctgtagggtgactatagttaacaataatttattgtatatttttacrtagagaggatgttgagtgttcccaacacaaagaatgataaatatttgaggtgacagatatgctgactatcctgatttgatcattacacattgtatgcaag

SEQ ID NO: 255401 - DNA, 201 bp, Homo sapiens
tagccatacttatcagataaaaacagactttaagtcaaactgtatgaagagacaaagaaagtcattttataataataaagagatcaacttagcaataagayataataattgtaaatatatatgtacccaacactagagcactcagataaacaaggcaaatatttttaggtcaaaagggaaagatagactccaatgcaataa

SEQ ID NO: 255402 - DNA, 201 bp, Homo sapiens
gtataaaactcactggtagtacagatatacacctgagaaagagaaaggaatcaaactttgttgctacagaaaatgaccaaaccacaaagattaaaaaaaaataggtgaagaaaagaacaaaggatatacaaaacaaccagaaaaaaatgaacaaaatgacaggataaagcctcatctattaatagtaaccttgaatgtaat

SEQ ID NO: 255403 - DNA, 201 bp, Homo sapiens
ccactgctaccacctcatgcaagtacggaaggtatacttttgcctccaaatcaaggaatgtactaagataggcagagagaagagtatggtagatttaggaraacccaaaggtggaggttgttgcaagaggctttctaagaggagacagcattttttacttttgcatcacaaggaagagtttcagaaattataaacttagta

SEQ ID NO: 255404 - DNA, 201 bp, Homo sapiens
aggactgctttaaggtggttctacatctggaagcaagaggatgattaccattgtcaaaacacacaaaagtataaaactcactggtagtacagatatacacmtgagaaagagaaaggaatcaaactttgttgctacagaaaatgaccaaaccacaaagattaaaaaaaaataggtgaagaaaagaacaaaggatatacaaaa

SEQ ID NO: 255405 - DNA, 201 bp, Homo sapiens
tgagaggatgctaaacagtcatgtgattcccctttattcttaaaagggaatcaagttgcagggttacattttgaacaacagcgaataagcaaagcagacaytacaatttcataagtggtaaatttgctagtggagaagtgtcagatgctgccttgaagtagcaaaaactttagagaagcaggacccatagagttagtggag

SEQ ID NO: 255406 - DNA, 201 bp, Homo sapiens
cctttcaaggactgctttaaggtggttctacatctggaagcaagaggatgattaccattgtcaaaacacacaaaagtataaaactcactggtagtacagayatacacctgagaaagagaaaggaatcaaactttgttgctacagaaaatgaccaaaccacaaagattaaaaaaaaataggtgaagaaaagaacaaaggata

SEQ ID NO: 255407 - DNA, 201 bp, Homo sapiens
gcatacttaactcctgagaggatgctaaacagtcatgtgattcccctttattcttaaaagggaatcaagttgcagggttacattttgaacaacagcgaatragcaaagcagacattacaatttcataagtggtaaatttgctagtggagaagtgtcagatgctgccttgaagtagcaaaaactttagagaagcaggaccca

SEQ ID NO: 255408 - DNA, 201 bp, Homo sapiens
aaggaattcattcccactagactgacctttcaaggactgctttaaggtggttctacatctggaagcaagaggatgattaccattgtcaaaacacacaaaartataaaactcactggtagtacagatatacacctgagaaagagaaaggaatcaaactttgttgctacagaaaatgaccaaaccacaaagattaaaaaaaaa

SEQ ID NO: 255409 - DNA, 201 bp, Homo sapiens
aagggctggcatcagttgccgagaggtggaaggagtacctctctgcagtttgttagctcagttctgaacaggacaggcctgcaagttcagctacttcccakaaaatgtcctggatccctggcctgagtcatcatcccatgactagagaacatggatggattattttatcaagaaactggtgataaaccaagggctatagga

SEQ ID NO: 255410 - DNA, 201 bp, Homo sapiens
ctagatgttagatagctgtttttatcctccataacattcttcttttctttagtatgttctctttattcttttctactattttctgggtaagttcctcaatyttctcaatctaaccttctaactctaaattaattagcttttcacatgtatccaaactactatttatccctcaacaatttatattttttgacagtcatactt

SEQ ID NO: 255411 - DNA, 201 bp, Homo sapiens
cgccaaatgattatccttatgccagacccctatagacctgtttgagtagttctgtaggaatatgaaacaggacttgatgggccatgagactgcacattttraatttgactgaatactgcctattgctctcccaatggttacaccagtctgcatctcgtcagtaatgcatgatggttcctacacatacacattcacaacaac

SEQ ID NO: 255412 - DNA, 201 bp, Homo sapiens
caaatacattgctttaaaatgaaatgtttgggtaaatgcccacatactttgaaactaaaagattgtgatatttagggaccagtgaagaatatacacgctawgtaccattaatggaataaagaagatggcagtacccaaagaaggacttttactcttgtactaactttaacttctctacattttgaagttctcatcgaattc

SEQ ID NO: 255413 - DNA, 201 bp, Homo sapiens
tttacattttttttgacattaagttgcttaggaatattcccaggtatgaaacataagacttacctctcttaaagtttttcattaattttagcattttctgkggcttttattctatataatcttttcaacttcaaatgttctcatctataccaaatacattgctttaaaatgaaatgtttgggtaaatgcccacatactttg

SEQ ID NO: 255414 - DNA, 201 bp, Homo sapiens
ctgctggttgatgtcatttacattttttttgacattaagttgcttaggaatattcccaggtatgaaacataagacttacctctcttaaagtttttcattamttttagcattttctgtggcttttattctatataatcttttcaacttcaaatgttctcatctataccaaatacattgctttaaaatgaaatgtttgggtaa

SEQ ID NO: 255415 - DNA, 201 bp, Homo sapiens
attcacaaagtactgaaggaaaaaaaaaactgtcaaccaagaatactatacctagtagagctatcccctagaaatgagggagaaataaagtatttcctagrcaagcaaaaactgaaggaattcattcccactagactgacctttcaaggactgctttaaggtggttctacatctggaagcaagaggatgattaccattgtc

SEQ ID NO: 255416 - DNA, 201 bp, Homo sapiens
agaccattgatggaatgattctaccttattctcaggcagggaagcatttttatacatgcagatagttcacaagaaataactgctctatagtcagagactaragacttcagcagttgtataaaaatacatttgtaaatacctaaagaccttgaagagaagggtctgaaccacatctcacccaggttatgctattgatggcta

SEQ ID NO: 255417 - DNA, 201 bp, Homo sapiens
cccagtggaaactttacaggtcagtagacaataagatgggatgatatattcacaaagtactgaaggaaaaaaaaaactgtcaaccaagaatactatacctmgtagagctatcccctagaaatgagggagaaataaagtatttcctagacaagcaaaaactgaaggaattcattcccactagactgacctttcaaggactgc

SEQ ID NO: 255418 - DNA, 201 bp, Homo sapiens
tcactagattctatttgctaatattttatttagaacttttcatctgtgttcatgagggatatgtagttttctttcctgaaatgtctttatcagctggtctrcaattaccttagcttaggtgtcttgggtaactcctatctactcaacttatcttcatcctccatctggatgaatatgatgggtatgtttcaaggtcatggc

SEQ ID NO: 255419 - DNA, 201 bp, Homo sapiens
tggatttcccagtggaaactttacaggtcagtagacaataagatgggatgatatattcacaaagtactgaaggaaaaaaaaaactgtcaaccaagaatacratacctagtagagctatcccctagaaatgagggagaaataaagtatttcctagacaagcaaaaactgaaggaattcattcccactagactgacctttcaa

SEQ ID NO: 255420 - DNA, 201 bp, Homo sapiens
ttgaaaacttcccatgaatgttatgtttttcccttagtctactctagaaaatacattttaaataattcatgatagtagaattcttaatggggatgagtcartagtttgtggtctttaaatattcctgtctcttcttgcagagggaaatgaactttttttttttttttttatattacaggagacagcagtatttttctgact

SEQ ID NO: 255421 - DNA, 201 bp, Homo sapiens
tcacatataagagaaactccatttgattaacagtggatttcccagtggaaactttacaggtcagtagacaataagatgggatgatatattcacaaagtacygaaggaaaaaaaaaactgtcaaccaagaatactatacctagtagagctatcccctagaaatgagggagaaataaagtatttcctagacaagcaaaaactg

SEQ ID NO: 255422 - DNA, 201 bp, Homo sapiens
atggccaacatgaagaaaccacatttctacaaacaatagaaaaaaattagctaggtgtggtggcgtgaacctgtagttccagttacttgggaggctaaatmacgagaattgcttaaacccaggaggtggaggttgcagtgggccaagatcacaccactgcactacagcctgggtgacagagcaagattgtatccaaaaaaa

SEQ ID NO: 255423 - DNA, 201 bp, Homo sapiens
cacttggctaatttttttaattaatttttgtagagaaggagtctctctggtctcactgacccaagctggtcttgaactcctggattcaagcaaccctcccrcctcagcctcccaaagtgctgggattaaaggtgtgagccaccacacctggccttgtatgttgactttacatctagcatccttcataaattcacatattca

SEQ ID NO: 255424 - DNA, 201 bp, Homo sapiens
tagtagtcaaactgtcaaaagtcaaaaagagggaatattcgtcaggtgcagtggctcacacctgtaatcccagcactttgggaggctgaggagggtggatmacttgaggccaggagttcaaggcgagcatggccaacatgaagaaaccacatttctacaaacaatagaaaaaaattagctaggtgtggtggcgtgaacctg

SEQ ID NO: 255425 - DNA, 201 bp, Homo sapiens
gaagttatgaactgtgtgctattttgctcctctctttcctttgactttgaaaatatctgattccttgggccaaagtgctgcggaggatgctggctgtgaarggtgtccttgtatcctgcccacttatgaaaaatttgatatgctacacacagtgtgaaaaacaaattggatggaattgctcaccgggggaaaagtttcctg

SEQ ID NO: 255426 - DNA, 201 bp, Homo sapiens
gcctttccttcaggcttttaaaaaaattatacttggaatacaatttttctaaccctggaatgcctcttttccgttcgtttatggcagtttatttcttttarttttttagaattttttttgctcttccgggtgaagtatttcatcatgagactgaaaaatatctccccctcccgtcttctactggttgtccccttcctccta

SEQ ID NO: 255427 - DNA, 201 bp, Homo sapiens
cttttttaaaaaccctactacaaatgccctggagtatatgagagaatcttgaaatcacccttttattttattttatttatttatttttgttttggtagagracagacagtagcaaatctgtaattttaatgatttaaataagaaagaaaaaatgatgactgggtaaatggatttggcacggagtacatcctgtacctctga

SEQ ID NO: 255428 - DNA, 201 bp, Homo sapiens
cacaaatatctctgtaagtaaccagggagatatttgtgacattacagatgctatatctgtttagtcctcttttaaataaagagttgtgtgtgaagataagyatacctctgatcaatttattccaggaactatatatagtgttttaacagtgacctacaaaatgcttttggaaacaccatgtatgtcagatctttaattgcc

SEQ ID NO: 255429 - DNA, 201 bp, Homo sapiens
gggaaacaccctattcagagtgaatatgaaaaaggtgtttggtgggagatgaagggatacagacattggccatctggggaccagactttctggccagaacytgtctgaggaacacagagatgtgtatgcactacttttgctgtctcgctctgcagacctcagtgaccagctccttgaagtggtggggctagaaggagccat

SEQ ID NO: 255430 - DNA, 201 bp, Homo sapiens
gaggatcactcgagcccaggaggcagaggttgcggtgagctgagattgcaccactgcactccagcttggatgacggagtgaaaccctgtctcaaaaacaamaaacaaacaaacaaacaaagcattttacattctgtaaaggcaataggaattaaaactctacagttgtttcactttttaattcctttagtaaagtcagagt

SEQ ID NO: 255431 - DNA, 201 bp, Homo sapiens
acagcaaagacttagaaccaacccaaatgtccatcaatgatagattggattaagaaaatgtggcacatatataccatagaatactatgcagccataaaaarggatgagttcacgtcctttgtagggacatggatgaagctggaaaccatcattctgagcaaactatcgcaagatcataaaaccaaacaccgcatgttctca

SEQ ID NO: 255432 - DNA, 201 bp, Homo sapiens
ctactgcaacttctgccatatcatgctcatgggcgtccgcaagcaaggcctgtgctgcacttgtgagtaaatttccttcaaacctcttcccccaggcacthtcttgctctgcgcatggttggttgatccattgcagagaaaatgttggtatttctgcttcccagcttgagggaccacccatattgtcccaacagaaggaat

SEQ ID NO: 255433 - DNA, 201 bp, Homo sapiens
atttcattgtctgaattattcatccggctggaagccttggatgggcaaggactgtgaagttacctggtatgttcccagaccccagcagagtgcttgacacrgatataataggcctcaattaacacttcacaagggagcaaggaaggaaagaatgcaaggtcacgcacctaaccagcacggaggagaacttgggtttaaacc

SEQ ID NO: 255434 - DNA, 201 bp, Homo sapiens
tctactttgtgtcttccgtggacttagaagtaacttttaaagattatgttttatgcctacattttcacaaagtagttgttgagggatatgcagcatgtttmatagatggggcccaagaaagtctcagaagaccaaagttgggggtcaagtgattcagcatgttgggtcagaatgctctcccacaatacatttctttctgga

SEQ ID NO: 255435 - DNA, 201 bp, Homo sapiens
gaggcagaagaatcgcttgaacccgggaggcggaggttgcagtgagccaagatggcgccattgcactccagcctgggcgacaagagtgaaactctgtctcaaaaaaaaaaaaaaaaagaaagaaagaaagaatagcaggaaaatgaagaaatgcttatctctgcttcctgccatgctgacttatgagaccacagacaggat

SEQ ID NO: 255436 - DNA, 201 bp, Homo sapiens
tcccgcctttttcttggaagctaccagaaaaaggggcccaccttgctgcatttgtaacacaaaggggaagatggctggcactcatgccttctcctaactgygcagtgagtgagaaggcctcccacgcccatctctaggaagctattggtggtatctttgatagtagcagagggtccgggacaactgtgaaccaggacagga

SEQ ID NO: 255437 - DNA, 201 bp, Homo sapiens
gtaagctgcaggcccggctgcgctgccacccacccagtgtggccctggcggaacagaggcctttcacctgctctctggaaattttcccagccagggccgcyggggacttggccttcctgccacttgccggaaggagggtttccatttccaagaaaaaaaaaagtgtcagaaacttggcgcaggctaactgcctgtcctctc

SEQ ID NO: 255438 - DNA, 201 bp, Homo sapiens
ccactggttattatgtctctttactctcttttaatcttttggatccctctccatcttttgctaattttttcctttatttatttatttatttatttatttawttatttatttattttgagatggagttttgctcttgttgcccaagctagagtgcagtggcgtgatctctgctcactgcaacctccacctcccaggttcaag

SEQ ID NO: 255439 - DNA, 201 bp, Homo sapiens
cggggtgcatgactgaagtcttcatccactgggcccattttcaccctctaggggcacacagagcatcctccacactcctccacatggctgcctttcatagsgctggagatgtatcttcatggtgtctccttttcatcttcactgagctaaacagcctcagttccttagaggacttgatttatagacccacaaatatcctgg

SEQ ID NO: 255440 - DNA, 201 bp, Homo sapiens
tttactaaacagaaaatgtccttggatgttttccttttgttcatcgcagaatcaaatatggctgagaagcaagcaccagctgaagaccaagtggctgcgasccccctggaaccccccgtccctcggtcttcaagctcggaatccccagtggtgtacctgaaggatgttgtgtgctacctgtccctgctggagacggggagg

SEQ ID NO: 255441 - DNA, 201 bp, Homo sapiens
cagagaaggggaagattcatttctagcaagagcattgaggaaagcctcatagaggagaaagcttttgagctggaagggtatgttaacgggcataaaagagytgatgggcagtttaggcagcgtgtacagcagaaaacaatgtaagtagtccgcaactctgtggcctctatgcagaattcaggctactataactgacattta

SEQ ID NO: 255442 - DNA, 201 bp, Homo sapiens
gtgcagtggcacgatcgcagttcactgcaacctctgcctcccgacctctgcctcccgcgttcaagtgattctcctgcctcagcctcctgggtagctgggaattacaggcacccgccaccacgcccagctaatttttgtatttttagtagagacagtgtttcaccatgttggccaggctggtctccaactcctgacctcagg

SEQ ID NO: 255443 - DNA, 201 bp, Homo sapiens
aagagcattgaggaaagcctcatagaggagaaagcttttgagctggaagggtatgttaacgggcataaaagagttgatgggcagtttaggcagcgtgtacrgcagaaaacaatgtaagtagtccgcaactctgtggcctctatgcagaattcaggctactataactgacatttactaaggctcagctaaccctctccctca

SEQ ID NO: 255444 - DNA, 201 bp, Homo sapiens
aatgcaattacatgtgtgtgtgtgtaatctccttgtagatttttctataatttttttacagaattgggatcagactgtattgtatagataatctgggaccsagtttcttctttttttttttgagatggagtctcgctctgttgcccaggctggagtgcagtggcacgatcgcagttcactgcaacctctgcctcccgacct

SEQ ID NO: 255445 - DNA, 201 bp, Homo sapiens
ctgacttacattccaacctgccaagctaattcacagagagaggctgctccccgcccacggtatcagaaatgctctcgctgtaaatgagcaccactgcctcrttcttacctaagtcccacaggccccgggggctgcacagggtggcttattggtgctttctctttccctatttcctgccagtgtcctgttccctcaaaaaag

SEQ ID NO: 255446 - DNA, 201 bp, Homo sapiens
agaacagtgcctggcacacagtaaatgtttgataaatattagcatttattattcaggccaccttccagaagtatactttattcttttctttttttttttttgtctgagataaggtcttgctctgtcccccaggctggagtgcagtggtacaatctcagcctactgcagcctcgagctcccaggttcaagctattcttgtgc

SEQ ID NO: 255447 - DNA, 201 bp, Homo sapiens
gaggctgctccccgcccacggtatcagaaatgctctcgctgtaaatgagcaccactgcctcgttcttacctaagtcccacaggccccgggggctgcacagrgtggcttattggtgctttctctttccctatttcctgccagtgtcctgttccctcaaaaaagaggcagtgtgcggggtggtgggggatttcactcaggtct

SEQ ID NO: 255448 - DNA, 201 bp, Homo sapiens
aagcctgtagatctaaaaataccaatttagtgaaaatacaagggatagactatgtttaaaagacaccccagagatgcagttggcaaaatccagaatctgcrcaacactacagccttactactcaaagtgtggtccacggacctgcaacatcagcatcaccaagaagggggtcagaaatgcagtctcgggccgcacccagac

SEQ ID NO: 255449 - DNA, 201 bp, Homo sapiens
gggcagctgggcctttcctacgtggctattcacaagcacctgccttgactttttttcttttcagactgtaaatacactgtccacgaacgctgtgtgtccaraaacattcctggttgtgtcaaaacgtactcaaaagccaaaaggagtggtgaggttggtgacatctactgccttgttctactgcatgcctcatccaggaaa

SEQ ID NO: 255450 - DNA, 201 bp, Homo sapiens
aagcccaggcaggcacgttctttccaagacactacattggctctcactttccaagtaggtgcattccaagagggagggaggacatcagcgtccagcagacyccaggcttctcccatctcctctacttgccctatctacatgggacccactgcggtaataggggaaggggacaacctagaaagcagagtgaggattgcctgc

SEQ ID NO: 255451 - DNA, 201 bp, Homo sapiens
tccagtgattaaatcagcatgaacaactcctttttgtcccaaccacctgagaaacttaggactaagctattgtgtgatgtgtccttgtcccaaacaggcaragtcaaacaggagcctaccatgtatcgagaggggcccccttaccagaggcgaggttcccttcagctgtggcagttcctggtcacccttcttgatgaccca

SEQ ID NO: 255452 - DNA, 201 bp, Homo sapiens
tcagcggcgctggctccttctgagagctgtggagaagggatccatcccagggctgtgtttttggcttgtggatggccgtattctccctgcatgccctcacrtgacattctccctgtgtgcatatctctgtgtccaaagttccccctttcctaggcgcacaaccttattggcctggatccccccattcggtcatgacttcat

SEQ ID NO: 255453 - DNA, 201 bp, Homo sapiens
ttgcctggacaggtcgaggcatggagttcaagctgatagaaccggaagaggtatgcactggatgctggactcagacgggttttgatttgttgttgttgatkatgttttttgtttagatttccattgaggctttttgtgtcaagtctgctcttgcttctcattcatattctggcctggccagtgggcttggctgtatccctc

SEQ ID NO: 255454 - DNA, 201 bp, Homo sapiens
ctgggccacatcccagattttctggttcagtaagtctggatgccagagagttttcatttctaacaagttccaaggtgatgctgatgctgctggcctatgarccacactttgagaactaatgacgtagttgaacttcccaactcatcaataaatcccacacttcttccccaccctctgcaaaacctgattgtccagttacat

SEQ ID NO: 255455 - DNA, 201 bp, Homo sapiens
gtctcgctctgttgtctaggctggagtgcaatggcacgatctcggctcactgcaacctgtgcctcccaggttcaagtgattctcctgccttggcctcccargtagctggaattccaggcgcccactaccacacctggctaatttttgtattttttagtagagacggggtttcaccatgttggcgaggctggtctcaaactc

SEQ ID NO: 255456 - DNA, 201 bp, Homo sapiens
gttctgggagctagaagtccacaatcaaggagtcagcggcgctggctccttctgagagctgtggagaagggatccatcccagggctgtgtttttggcttgyggatggccgtattctccctgcatgccctcacgtgacattctccctgtgtgcatatctctgtgtccaaagttccccctttcctaggcgcacaaccttattg

SEQ ID NO: 255457 - DNA, 201 bp, Homo sapiens
agtgactagaggtttagacattcattgtttattaggtccaaactccttcagagagcctggagcattctcctaaacaaacattaccctttcctggcttcttwttccaagtccaaatgagatggagtgtttaaggagacagtatcttttcacaaacatgaagaaaggagtactagggcagaatgtgattgtcagtagatgtag

SEQ ID NO: 255458 - DNA, 201 bp, Homo sapiens
ctggccttgtccatttacattcgaaggcctctgatggcaggaaacactgtcaggaagcagcacattctaggatcttggagagcccggaaacaactaagacsggaaagccatgcaaaccttcctcctcccttaggctcaccatatttctttaacttttaaaatatcgcagagactatttgagaccttccagatttgtgcctt

SEQ ID NO: 255459 - DNA, 201 bp, Homo sapiens
ctaaggggagaaccatccttaagaaccattgaacaattgtcccctgtagatctttcagcaaagaacatttggggccttttttttttaacattctcatttayaatgtcttttctgcttctatctaggaagagccaggacttctgaatttaccttgaatacagacaggaggatgttgcctaaggaatagcagagatcttgtct

SEQ ID NO: 255460 - DNA, 201 bp, Homo sapiens
gatcacatgttctttatctttgtgtccccttcaaagcctcccaccctgcctggctcacatgtgttctacagaaacgtttgttggaagaggggagagagggraaagaatcttgcctccagtttgccagtgggcagtagattctggagtaggacaggaacaggtacttagtgaaaaatctttagaaaaaaaaaaatcttagag

SEQ ID NO: 255461 - DNA, 201 bp, Homo sapiens; identical to SEQ ID NO: 50844

SEQ ID NO: 255462 - DNA, 201 bp, Homo sapiens
ccggctgtgcggcgactcgagaaaatcggggcgcaccggaacagcggcctggggatggtggggataacacgggtgtggaggggacagcaccgaaagatgcygcagcctcgcagcggattagggttccggccgcattttcagagggtggagaaaactcgggggggaaccgaactcctggtcgacgagggggtgccagggaga

SEQ ID NO: 255463 - DNA, 201 bp, Homo sapiens
ccagcctgtgaattccctgagcacttaattttgccttctatctcatcagtacactgatcagaagtctgcctgtgtcacgggcatgtgtgttctcatcataygttttccctgccattacctggaaaatgaggatcacatgttctttatctttgtgtccccttcaaagcctcccaccctgcctggctcacatgtgttctacag

SEQ ID NO: 255464 - DNA, 201 bp, Homo sapiens
acgggctgattcagaatcttcaaagtcggggtgcagtagctggggtgaccccccccgggttgaccgccccctccccccgcggcccggtccggtttggttcytgggaggcgtcgggcgggtgcggctaacggttccggagcgcggggagagcggctttccacacgtcgtgggggaggcgccccggagcgcgagtgcgggggc

SEQ ID NO: 255465 - DNA, 201 bp, Homo sapiens
ggtgaataagctgaagtccttcccctcatgggcatgggagatcaggagtgagagaaggctgaccacaggggaacatgccacaaacgtgttccacaggggarcaaagaatgctacattgcatgccacagataagtgctgtccgagtctccagtctccagcctatgcctcgcttccgtgcgtcctgggataaacataatgccc

SEQ ID NO: 255466 - DNA, 201 bp, Homo sapiens
gtcaggggccctgcccctccattcagggttgtttgattccctgggctgctccatggcagccccaagacctgaaccctggtgtgctgatggaaggggaagtrgagtgggggtgggattgagggtagcaaagcatcctcttaagctaaggatatcccacacttcccaaaggcattgcaaaaggcgagtccaaatcaggacacc

SEQ ID NO: 255467 - DNA, 201 bp, Homo sapiens
tcggagcggttcggcccagcctttcgcccaggcgcccaggcccgctgcgcgcgtgcgtgagcgcgcctgcgccgccagggccgctgcaaggggaggagagmggccgcctcaggtgagggggctttgcgggggcaggggggagatcggaaggggcgtccggccactggtccgacaggcccagccggctagagttcacgggct

SEQ ID NO: 255468 - DNA, 201 bp, Homo sapiens
ctctgagattttaaactcccagcaagaaactcagtggtaaaaagcatcctgccccaaattatttacctagagactttttttttttttttttttttgagacrgagtttcactcttgttgcccaggctggagtgcaatggtgcaatctcagctcaccacaacctctgcctcccgagttcaagcaattctcctgtctcagcctc

SEQ ID NO: 255469 - DNA, 201 bp, Homo sapiens
tctttacctctgtgactacagtttttctatcagtggctatttattaagtagtgacaaattcctgtttgcatttctaatgaatcagatgcatacccctcccrgtaagagctcaacatgagcattggctaactagcattacccactgaactgacaggattccagcccaaacaatagcacctaacatctcagcacgccagtgct

SEQ ID NO: 255470 - DNA, 201 bp, Homo sapiens
gggggagacaaagttgtagtttttctactcctttgccttcactcctgtttaattttccactgtggtcagataagtattttttaaacgaccgtactcaaacytctggtactgagcaatgggggaacctcactatggctgtaaacccttccactggacactaatcaaatgcattgcctcccaaaatgaacatccttggaagta

SEQ ID NO: 255471 - DNA, 201 bp, Homo sapiens
agctctcatcccctgccacagccacagactgcattcctagagggtcccctgaacatagtaactgccccaacggtgcgaacatgaaccaagggacagggacrcctttcctcatagtgccttacgggaagccctgatgaacctctcagcaagaggaataaacaggaggcataattcctgccactatggatcaaagagcaggat

SEQ ID NO: 255472 - DNA, 201 bp, Homo sapiens
gagtaaagttcacaggatgtattttgaggacaaggactgaatgacttcactaatctctgcacataaaagacattatcagcagcaagctctgagaatctttsttccaaatatgttggctttgtgacctacccctgagatcccccttggccactcctgctgtctcaagacaaaccagtacggaacaatcccaattatagaatc

SEQ ID NO: 255473 - DNA, 201 bp, Homo sapiens
gctagatgtttatctctgatatgtctgcctgcccagaaaaagtggagagccttctcaggggaagtgtgtgtgtgtgtgtgtgtgtgtgtgtgtgtgtgtgwgagagacagacagacagacagagagaggtggctgtggctgtaaggctgaggtgcagatgactctaccagtggatgtctggagaggaacagagcaagaggg

SEQ ID NO: 255474 - DNA, 201 bp, Homo sapiens
tcacttgaacctgggaggcagaggtttgcagtgagccaagatcatgccactacactccagcctgggtgacagaatgaaactctcatctcaaaaaaaaaaaagaaaagagaaagaaaatctatgctttttccactacattttagtgcctttaacattctattctaatagtttccaaccatactagtatgctacttgaaataa

SEQ ID NO: 255475 - DNA, 201 bp, Homo sapiens
caccggcctgaagagtgcaggcaggaggctggcccagtgcgcctctgtcaccatcaggtatgcctctttgtcacccaacagcctctgcatctccccgcctscgtacacattcatgcagacaactgagaagccatctttggattttagggcagggagagtgcagcacaaaagcttgataatgtttgtaaagaacgtctttgt

SEQ ID NO: 255476 - DNA, 201 bp, Homo sapiens
atggtttcaccatgttggccaggctggtctcgaactcctgacctcagatgatccacccgtcttggcctcccaaagcgctgagattacaggctatttgtcttcaacaaaccaatctaaaatcacttatttcctactcctccgtaagccacatagcacttgttattatggctatcctcattcagaacccttaaaccttataat

SEQ ID NO: 255477 - DNA, 201 bp, Homo sapiens
ctttgtggaatactatttgtcaaggactgtgctggtgatgtacttttttaaaaaacaaacctggtgcggaggcaagatataataatattaatatccaacaytgatgtgccaggcattgctctaagcactctataagatagagcagtagtgggagatctcaattattcaaacagctggaagtttaattttgctataagccta

SEQ ID NO: 255478 - DNA, 201 bp, Homo sapiens
cccaccactatgcccggctaattttttgtatttttagtagagatggtttcaccatgttggccaggctggtctcgaactcctgacctcagatgatccacccrtcttggcctcccaaagcgctgagattacaggctatttgtcttcaacaaaccaatctaaaatcacttatttcctactcctccgtaagccacatagcacttg

SEQ ID NO: 255479 - DNA, 201 bp, Homo sapiens
aaaaatacaaaatttgccaggtgtggtggtgcacgcctgtaatcccagctacttgggaggctgaggcaggaaaatcacttgaacctgggaggcagaggtttgcagtgagccaagatcatgccactacactccagcctgggtgacagaatgaaactctcatctcaaaaaaaaaaaagaaaagagaaagaaaatctatgcttt

SEQ ID NO: 255480 - DNA, 201 bp, Homo sapiens
ggccaggcccggtggctcacccctgtgatcccagcacttccggaggtcaaggcaggtggatcacctgaggtcagttcaagacccggctggccaacatggtraaaccccatctcaactaaaaatagaaaaaaaattagctgggcgtggtgacaggcacctgtaatcccagctacttcaggagtccaaggcaggagaatgact

SEQ ID NO: 255481 - DNA, 201 bp, Homo sapiens
tcaaggaagtggtcagaatggagctagaatgtcagtttcttggaggagcttgctttttttcatctttttttgttgttgttgttgttgagacggagtctcgstctgttgcccaggctggagtgcagtggcatgatctccgctcactgcaagctctgcctcccaggttcacgccattctcctgcctcagcctcccaagtagct

SEQ ID NO: 255482 - DNA, 201 bp, Homo sapiens
gatcacttgaactaaggaggtagatgttgcagtgagctgagatcgtgccactacactccagcctgggtgacagagcaaggctctatctcaaaaaaaaaaaraaagaaagaaagagaaagaaagaaagaaagaaagaaagaaagaaagaaagaaagaaagaaagaaagaaagaaagaaagaaagaaagagaaaagaagaaaa

SEQ ID NO: 255483 - DNA, 201 bp, Homo sapiens
gcaggtggatcacctgaggtcagttcaagacccggctggccaacatggtaaaaccccatctcaactaaaaatagaaaaaaaattagctgggcgtggtgacrggcacctgtaatcccagctacttcaggagtccaaggcaggagaatgacttgaacccgggaggcagaggttgcagtgagccaagatcacactaccgcactc

SEQ ID NO: 255484 - DNA, 201 bp, Homo sapiens
ggtatgttatgtacaaaatgcattattgaaggacacaaatgttttctcattggatttttaaaaaatacctcaaaggagaaacatgagaacagatataaagyagtttacccacaagcctggattatcacatatcctaacatttatttttatgtgaagatgatcgttttatatcaagggtgtatgctgtctgctcaagttctt

SEQ ID NO: 255485 - DNA, 201 bp, Homo sapiens
gatatagatatagatatagatataggtatatacacacacatatatacacataaatatatgtatgtgggtatatatatatacatatgtatatatatatatayatatatatatatatatatagcacatttcccccctttttccaatctgtgtcttcttcagcaaattgtgagtggagatacatatatccattcaatctataca

SEQ ID NO: 255486 - DNA, 201 bp, Homo sapiens
aattatgagacataattgaggttatgttttatgtgtcagaatgagtagctcaattttatccatcaagataaaaaataaaaatcaggtaaaaaaaaaaaaaagggacagagttgtcaagattccagaagtagaagaaactatcttgccatagtgtacaacagtgtttcagcaccaaggacagagccttatggggtttaatgc

SEQ ID NO: 255487 - DNA, 201 bp, Homo sapiens
ccctggcaagattctagaatagattattaacaaagtatttaggctttgcacacagatattggtgacttagttgagttatcttattgcttttctaatagagrttgtagggtggtcacttaggaaatgctgtttgatctcggcacaatgttttatgttttcatggaaagaacgcaggattgaggtctggagacctggatacat

SEQ ID NO: 255488 - DNA, 201 bp, Homo sapiens
gggtttcaccatgttagccaggctggtcttgaactcctgacctcgtgatccgcccgcctcagcctcccaaagtgctgggattacaggcgtgagccaccgcrcccggctgtgttttttttttccatttaatttcaggctattaatcagatattttaaaataaatgtcttttctatttttttcttattaaaacctcagtttat

SEQ ID NO: 255489 - DNA, 201 bp, Homo sapiens
cccaaatgatgggaacgcgatgacaaaaggtcacagaatgaagattggaagtaagctgggtagactagaggaaacacgggctgagagccagatgaaattarttaacataaatgtaaagttttatgtctatgttattttttaaaatctacacaggttcagaatggcgaagaactggatgaaaaatagatcatgagatgatct

SEQ ID NO: 255490 - DNA, 201 bp, Homo sapiens
gtttcagttggtctttatttctcacctttttaggttggtggcttcccaaccatgcttgtaacctcaactgagaataagaaagacacttcacaatatgatcrgtataaccatgggtgtataactgaaggaaaagtcttatgacataatacatccccttactgtggtagatgcactctagtgttttcgactccatctcattct

SEQ ID NO: 255491 - DNA, 201 bp, Homo sapiens
tgaccacccatttaagctgaagtgatgttgtcatctagccactaacaaaatggccagtgcaatctttatcaattggataataaggataaggataatgatartggataacgtgctgaactcttacatgagctttgcacgtcatctcatttctggggcatgatagtatcataaaatttcagccacaagaagtactggtgtggt

SEQ ID NO: 255492 - DNA, 201 bp, Homo sapiens
ttgaacccaggaggtggaggttgcagtgagctgagatcatgccacaacactccagtctgggcggcagagcaaaactccatctcaagaaaaaaaaaaaaaaagaatggtgtagccttttccactgtgaattcaagcactgagctacaatggaacaaccatgataatgataatatgaatatttgttgagttatagcaatgtat

SEQ ID NO: 255493 - DNA, 201 bp, Homo sapiens
aggataattgttttaggtcaatgcccagtagtaggtgccctcaggtggatgtcagcaggcctcgtaaggccccacagcccagcaaggactccatgctctgyggatatgctgactcgtcatccgatgttgcaaagtttacaacttaatccagaagacaaaaattcacaataagggtgtcctcaatgacagtcagttgtcaag

SEQ ID NO: 255494 - DNA, 201 bp, Homo sapiens
tcctccccgctcactggtcactccttctcggtctcatttctctctgacctcttgatgctggaggatccccaggcagggtccttgaccctcttctcttcackgtctgtacttaagcccttgatcaccccatccagtcataagactttatttaaataccatgtgcttactcatgatgcctccagcctgtctccagctttccct

SEQ ID NO: 255495 - DNA, 201 bp, Homo sapiens
ggaagcattgaaggttgtatcaagttcctgcaaattttcctaccctggtgctcctatctcaacccccgctctggtatctagctccctcagagcagagaagrgaatgagcagagctgaatccccaccaccaccctccctgctccccacttcgactctccaccaccctagggctgggggaagctcttgatgagatcatgtgct

SEQ ID NO: 255496 - DNA, 201 bp, Homo sapiens
aatatgctatgacaacgcagcaaggcaactattatcacattttaaaaatgaggcttaggtacattcagtgtctcaaccaaaacttcattgctgaaaactgrtaagagagaagattccaggtcttttagagtgaatttagcttggaacccaataaacagagatttacctaacaggtgctagaagcagtaaagtcttcagcag

SEQ ID NO: 255497 - DNA, 201 bp, Homo sapiens
aaaaccaggccacctgaagaatatctttaatgatggtattcttggtgatgggaccaacaagctccagaattactacaggtactatcttggaagccacttgwttctgaaactgaggcaggttcaggtttggggtcactgattctaagacatttacagaagttcgtgcatgtgtttcagccatgatccccaagattgaggcta

SEQ ID NO: 255498 - DNA, 201 bp, Homo sapiens
tgtgaactgatctcctgccaaaggagagaatgaatgggcttgaggagaattttaaagcattgacaaagggttcctagatgtcattaaaaaaaatgattcarggccaggcgcaatggctcatgcctgtaatccctacactttgcgaagctgagaggggagaattgtttcagcccaggattttggagctacagggaactatta

SEQ ID NO: 255499 - DNA, 201 bp, Homo sapiens
gagatgatgggcagcccgttgattaggacctgctgggctaccgtcacccgtgagaagccagtgcatccacctcatcagtttgctgaaatgcccagttcagyggaggctagaaattgctgaacagcacaggtggacagggagaatggttaaagcagctctgcctcccaattccgggatcattaacagatggcaccgtgatct

SEQ ID NO: 255500 - DNA, 201 bp, Homo sapiens
ttgttttctataagtgaagaatcaaattcacagtgaagatataatggccatggaaatatgtacatcaattaatattgcaccccaaactgatggaaacacgrtagaggtggaagatatcaaaacaccactctcaggctttcacatatcaagtaaacaaacaaaacataatataaatacaggaattgtgtaatataatgaata

SEQ ID NO: 255501 - DNA, 201 bp, Homo sapiens
aagtacaattagaaagacacatccgtcagaaaaaaaaaaaaaaaaagattgtagcgtgcattttaatgcaaagtatgaacaaattcactgtgatctgtagractgtttttccttctcccttccgagatcctataaacaatacttctctctgagggtaggttctcagctcactcttcacctgactgaggtcaaggtagcatg

SEQ ID NO: 255502 - DNA, 201 bp, Homo sapiens
ttagctgtatttgaaacatttctgattcttctggaaacaggaaagcaaacagcccatgaactaaattctcaaaagacactaaatcggaaagtgttataagmactaatgatgccagacagaaaaatgcaaaacagttggaggagtcagaaattcacctgaaagtccgggagcggtggctcacgcctgtaatcccagcacttt

SEQ ID NO: 255503 - DNA, 201 bp, Homo sapiens
ggtgcgcggagcggttcaccgtcttcggagcggttcggcccagcctttcgcccaggcgcccaggcccgctgcgcgcgtgcgtgagcgcgcctgcgccgccrgggccgctgcaaggggaggagagcggccgcctcaggtgagggggctttgcgggggcaggggggagatcggaaggggcgtccggccactggtccgacaggc

SEQ ID NO: 255504 - DNA, 201 bp, Homo sapiens
ataagcactaatgatgccagacagaaaaatgcaaaacagttggaggagtcagaaattcacctgaaagtccgggagcggtggctcacgcctgtaatcccagmactttgggaggccaaggcaggcagatcacttgaggtcaggagttcgagaccaacctggcccaatatggtgaaaccccatctctactgaaaaaacacaaaa

SEQ ID NO: 255505 - DNA, 201 bp, Homo sapiens
atcctgtttctctcctggaggagagggaatgataattagaacacatgcttgttcgacaaaacctcccatgtaagtaatgttcctaggagggaagcctcaaygtaatagacaaagaacttctaaatactacctttaactcttataaaggcaaagataacaaaagaagaggagccggggaggtaaatcataaagagaagaagg

SEQ ID NO: 255506 - DNA, 201 bp, Homo sapiens
ttctcttctagagccaggaagcaaggtaatgtgtgggaagtgatagctgcaaggtaatgtgtgggaagtgataacaacttcggagttaaagccattcaacrggaaaatttgttaaaagaccaagacattgtaaagctgaaacacttgagtctattaagtcccctgcttcttagaacattttgttaccagggaatgttttaa

SEQ ID NO: 255507 - DNA, 201 bp, Homo sapiens
gagaaaataaaaatgttcctaaaaagtttgcatttaacagagatcctctctggcccaggtctctcctgtgggctgagacagagcaagacaggtgacccctrgggagccccagaagtactatgggtgtgtgcactgggactcttcttagctctggggagtaaccatggcaacatacatgtcattcccgttcaacatttgcag

SEQ ID NO: 255508 - DNA, 201 bp, Homo sapiens
atccttttcttcctctacaatcacaggttattaaacagagaatattatatacaaatatgtcttgttggctatagtggatatgtctttgtttttctaacttmtcctgtgaagtcataaacttactaatcttagtcttcactagaagaggaattaagaaggtagaagaactgaatctttaaagaaggtcatagaatctacaag

SEQ ID NO: 255509 - DNA, 201 bp, Homo sapiens
catgctggccagactagcttcgaactcctgacctcaggtgattcgcccacctcggcctccaaaagtgctgggattacaggtgtgagccaccacacccagcmactagagaaggttataaatgggtagcacaaaatctccccaggatctcactagataatactttttgcaattcttggtaaacaaagacagggagacagatac

SEQ ID NO: 255510 - DNA, 201 bp, Homo sapiens
cccccaccacgtgccaggcaccatggtacaacggtgaacaaaaccaaaaacaaacatagtctttatagccactgggtgtgggggagccaggcctcaataarataaccccacagacaggcatataattaggaactatgctaagtactaagaattgcttagctacccagagcccaggcaaggccagcaagccagtgtgtagct

SEQ ID NO: 255511 - DNA, 201 bp, Homo sapiens
cccatctatacagatagactgtgcataaaatatacatacatggaagataagaggctaccacatcattgctttgattttttttttttttttttttttttttttgccacttcctgactcaagagcttcgaaatacacaatgtaattttgggaagagggtaaaatgcccagaaataagcattattaagtactttgcaaataatt

SEQ ID NO: 255512 - DNA, 201 bp, Homo sapiens
tcataatcccttctgtatccctgtgcctggcagagtctcagaggcctcaaaagggcttgtcaatattggttgaccaaatgcacccagtcaggggcacatgragcagtgagttaggggattgtttttgaattggtctctcagcaagagtgaatttgtgtgagtgatgctggcgtgcgctgtgccagggcccctctgccagca

SEQ ID NO: 255513 - DNA, 201 bp, Homo sapiens
gcccatctatacagatagactgtgcataaaatatacatacatggaagataagaggctaccacatcattgctttgattttttttttttttttttttttttttttgccacttcctgactcaagagcttcgaaatacacaatgtaattttgggaagagggtaaaatgcccagaaataagcattattaagtactttgcaaataat

SEQ ID NO: 255514 - DNA, 201 bp, Homo sapiens
gggccatgtagtaactattaaaataattaggctaggtgcattatacagtctctgatgcaacgactcagctctgtccacttagcatgaaaaccaccataggsaatatttaaatgaacgggcacggctgtgttctgataaaactttatttacaaaagcaaacagcaggctggatttgatcctcaaaccatggttagtcaatcc

SEQ ID NO: 255515 - DNA, 201 bp, Homo sapiens
ctcatatattcagatacataatctggcccatctatacagatagactgtgcataaaatatacatacatggaagataagaggctaccacatcattgctttgawtttttttttttttttttttttttttttgccacttcctgactcaagagcttcgaaatacacaatgtaattttgggaagagggtaaaatgcccagaaataag

SEQ ID NO: 255516 - DNA, 201 bp, Homo sapiens
aagtgcagactctcaagtcccactgcaggcctactgaagcagagtctgtatttcaacaagatctgctggtgatcgcacatacgctgaagtttttgagaagmactgcactggtaggtctggtttctcctccaaagaatatcaagaataaattttataaattagaaaaaggaagccaagggaggttaattgacctatcaaagg

SEQ ID NO: 255517 - DNA, 201 bp, Homo sapiens
ttttacttttggttttgtttctggtgttttctgactactgcagattctttccccctggtttgatgtgtttcttttggttttgtttccgatgtctttttaasttatagaaatttatacagtgaggtatatccaggtttatcttgatgatttctgctgttggtatgatacttaggttttccctcactcccaagttttgtaagt

SEQ ID NO: 255518 - DNA, 201 bp, Homo sapiens
ctgcttctccttcctaactcttcccaatgggattatccagactcaaaggccactcaatgccctctggccacttacatgctttgatggggctttacagagcsctgagagtagcagaaacccacaagccagtgtggcaagggcatggcacaaaggagcggggtacccaactggcctaagagtatccaacccatgccttaaagg

SEQ ID NO: 255519 - DNA, 201 bp, Homo sapiens
aattattttcagggcaccactgactttgtgggcccctcttctacaattctgagtttaaactcaaagtttctaattgcagaagatgtttattagctcaaatstcaactttttttttttttttttttttttagcatttcttttcaaacttcctcaagagttcatgatcccttttcaattccaatttgttgccatcctttatag

SEQ ID NO: 255520 - DNA, 201 bp, Homo sapiens
tataacactatcagctgaaactggaatttaggagttatgtcagtgagggtggtttttatatgttttacagttatgtcagtgagggtccaaggatgtcttasagttttaaaaatgtgtctctaggttttttacttagtttgagtgcttgggtgggtaactcttcattgtaattattattatatgataaatggttgccatttt

SEQ ID NO: 255521 - DNA, 201 bp, Homo sapiens
aaggacacatgcccatctccatggaaatttggaggcaggagaggagcccgaggacatgcctgccggcgccttagtgggctaagtctgcaaagaggcctgayagctcccactcacctgtctagactgtggggactgaatctggccccactgtaagcagagctgggcttgtgtcttttctttctgaggaggttaagaggttcc

SEQ ID NO: 255522 - DNA, 201 bp, Homo sapiens
gagcctttacgtggcaagtgactttgagccttgttttcgtgttcgtaaaatgaagacaatggaagcattaatagctttctcattgaattgggaagattgartgaaatgatgtatgtaagagcaactgggcataaaggaaatggtaaggggtctggctggctgcctctttcttggtctgccttctttgttcttttccagagg

SEQ ID NO: 255523 - DNA, 201 bp, Homo sapiens
cttaatgaggtgatcaagttaaaatgaggttatttgggtgggccctaatccagtccaactggtgtccttataagaagagatttggaaacacagagaaacascaaggtccatatgcatggaggaatggccctgtgaagaggcagccagagggcagccagctgccagccaaagggaggggtctcagaggaaacccaccctgct

SEQ ID NO: 255524 - DNA, 201 bp, Homo sapiens
atcctggccactgaccagctgtgagacgtggcaagtgactttgagcctttacgtggcaagtgactttgagccttgttttcgtgttcgtaaaatgaagacartggaagcattaatagctttctcattgaattgggaagattgagtgaaatgatgtatgtaagagcaactgggcataaaggaaatggtaaggggtctggctgg

SEQ ID NO: 255525 - DNA, 201 bp, Homo sapiens
taatgaaaccttatgagttggtttgactcacttaaccaatgaatataagccaaacttagatttgccaggggaaagcaaaccttttttttttttttttttttggagagagagttttgctcgtcacccaggccagagtgcaatggcgcaatctcggcccacttactgggatgtccacgtcccaggttcgagcaattctcctgc

SEQ ID NO: 255526 - DNA, 201 bp, Homo sapiens
agtttctctgggataggggggtagttgtcaacaatattaccaaaggatgcaagatggtggccatggtatttcatatctatctatcttgtgttaggtggatyggtgtgggggccacaatggggcgggagtgggaagaatatatgagtatacctttcccaggcctggtccattccagatgcctaccagtatttacttggaggt

SEQ ID NO: 255527 - DNA, 201 bp, Homo sapiens
gaaaaatgcaaaacagttggaggagtcagaaattcacctgaaagtccgggagcggtggctcacgcctgtaatcccagcactttgggaggccaaggcaggcrgatcacttgaggtcaggagttcgagaccaacctggcccaatatggtgaaaccccatctctactgaaaaaacacaaaaaaattagccgggcgtggtggtgc

SEQ ID NO: 255528 - DNA, 201 bp, Homo sapiens
gcagatcacttgaggtcaggagttcgagaccaacctggcccaatatggtgaaaccccatctctactgaaaaaacacaaaaaaattagccgggcgtggtggygcgtgcctgtaatcccagctactcaggaggctgaggccggagaatcccttgaacccgggaggcggaggttgcagtgagccgagatcgtgccactgcactc

SEQ ID NO: 255529 - DNA, 201 bp, Homo sapiens
agctgctgggatcaggatgggctgactgcacatgttccggacaagatggtgggcaaggtgggtggtgcaaaggtctaccagctcagtgattccgccaaacmaaagaaaagcaggcaaaaatgagtgatagcaggtgccagaatattcagcctgtctcagtcaatgaacgaaacgtgtttcccattttaagcacagcctaag

SEQ ID NO: 255530 - DNA, 201 bp, Homo sapiens
gggaagttgtgggtgctaacagagggtaggggaagcattgaaggttgtatcaagttcctgcaaattttcctaccctggtgctcctatctcaacccccgctstggtatctagctccctcagagcagagaagagaatgagcagagctgaatccccaccaccaccctccctgctccccacttcgactctccaccaccctagggc

SEQ ID NO: 255531 - DNA, 201 bp, Homo sapiens
cttcctatttcccagtgattaaaagtggcccaacttcctaagggggaaaataagaattccaaagacaaagctcacttgaatgtgctgagcccccttcactyggctgttttctgtgatggggccacaccgctgtgggttaccacaggggagcaaggatagaaacagagtgggagctgggggccacgcctgtgtgacatttcg

SEQ ID NO: 255532 - DNA, 201 bp, Homo sapiens
catcagtcgttttgtagtaggaaagaggaagcacaaagtttcttcctatttcccagtgattaaaagtggcccaacttcctaagggggaaaataagaattcmaaagacaaagctcacttgaatgtgctgagcccccttcactcggctgttttctgtgatggggccacaccgctgtgggttaccacaggggagcaaggataga

SEQ ID NO: 255533 - DNA, 201 bp, Homo sapiens
ctaatagaataaactgaaaacctcaaaggataaattacttcaataaaaccctatagaaaaaatggacaaatattaagttttccggcattaatattaatagyataccagcaataatcaattcaaaggatataattaaagcttaaaatatcattatataagcaataaaagacataaaatactaaactgaactgtgtaaaatgc

SEQ ID NO: 255534 - DNA, 201 bp, Homo sapiens
tcctgactctgtggtttactgcaaataaaaatgacagcaggtggctgacctctgacctcctggtcatttcatgccattgcttgtgaaatcaggattggccrttcatgctctggggatgtacgtgctcctccagacacttctgtgaccattccacaggtgcacgctgctagagaggcaccactgatgtgtcaggtttaggag

SEQ ID NO: 255535 - DNA, 201 bp, Homo sapiens
agaaggctttctgtcagtttatctgctatctttctttactgttttacaagcctctaagtgtagaaacatcgagactgaatgagtgcaccgcctcttgaatyggagcttgtgaggaatgaatgtctgccacataaaccccattagcttcgacagattaagaaaagatgcttggggagaaggggcaagggtgcgcaggaaaaa

SEQ ID NO: 255536 - DNA, 201 bp, Homo sapiens
tccagaatgtagatccaagagcaaatccacctgctggtctccaggctgaagctgtcctgagcccagggttcaagggcacaccaaggtggagctaaggcaasaggatgtgggttcaacacagcagcctcagagactgggtctgcaatagggcagcagtctcacaggatgactatggacgctgcagctcctacagattgctgc

SEQ ID NO: 255537 - DNA, 201 bp, Homo sapiens
tgaagctgggcttctcccctgtgcttcccacgtgctgctctgaggcctgactccagctggctgaagaggtgggccttttgatgcagtgctcttggccctgscccttctgttttgacatttttcaggaccctcacaaaactctgctcttgtttttgtgcatctcactgtataacttcctagagtaattagaaaatgtattct

SEQ ID NO: 255538 - DNA, 201 bp, Homo sapiens
cagatcagccttgtagaaaactctcatttatatcaggaaagtggccaatgcaagtttagttttattaatcaagagttttatgcacttatttttaaatatgyactttaaaagtttttaacacttactatttggggttttggagaaagcccccatcaatgtcttaaaagtccattgcttcttgggctttttcaaaacccacat

SEQ ID NO: 255539 - DNA, 201 bp, Homo sapiens
aagagtcctggcttctaacttaccagtgttcaagtatccagtgaatccaataaccatggcctatgatttagaaatgtttaagaagtgtgacttacgagctrtctccttgaaagaatcacttaaattccataagcctcggtttcttctctaaaataaggataattattacattagagggtagttgtggggatttaaataaaa

SEQ ID NO: 255540 - DNA, 201 bp, Homo sapiens
tgaattaggcagcaagtgacctcagccacagaagtcgccttggcagagctgggcccgctgtccacaaagaccaagcatcaacgggctaaagaaggggtccrccaggcctggcgcggtgattcacgccgtaatcccagcactttgggaggccaagacgggtggatcacgaggtcaggagaccaagatcatcttggccaacat

SEQ ID NO: 255541 - DNA, 201 bp, Homo sapiens; identical to SEQ ID NO: 50859

SEQ ID NO: 255542 - DNA, 201 bp, Homo sapiens
gagaacagccactagcatttattgagtacctgtgtgctctccacagtgctagactgtacatattccagccctcacagtagtcctgcaggtatcattatccygctcatctcactctacagatgaggcttcgagacccttgactcgcatggtggtgccttgttctggagccaggttctctcctctctgttcccttgtctttgg

SEQ ID NO: 255543 - DNA, 201 bp, Homo sapiens
cagacttaccatatccgttagctctccctttagcactaggacaggagccatgcatccttccttcttagtttgtcctcagttagaaatgcagctagaatctygtggtgaagagcaatcgtcgtcctggttttcagggcctctgctgggatactacatgcgtaataccctcaataagattgcagctatgcaaatttcaaaaga

SEQ ID NO: 255544 - DNA, 201 bp, Homo sapiens
ggaattgcacttccagtttggtaaccttagtaaatcttgtgttgttgtttaatcgtgccttgcaaatcatcctttaaacactatgactgtggtttcttgtkgtggagtccctcatcatagtgaccctcatagcaacctctgaggttagcagagaaggtattattatctcgatctcaatgaggagaacaaggcttaatgagg

SEQ ID NO: 255545 - DNA, 201 bp, Homo sapiens
aatctttacctcttatttctccccctcccttttaaactccaatgaagatgcctcttttgtcaccttttttttctttcgtctctcaacttgttccttcctgscattttactccctttctctgctttttctcacgtctgactctgactcctggagatactcaggatgcccaggaaggctaactctgtttgagaagtggcctcc

SEQ ID NO: 255546 - DNA, 201 bp, Homo sapiens
ctgaaaagtgagtccacttggatccaggttgccagggaggaacaaacgtacagcacatgcgtggatgggatatccccacacaagaaaacgagcgcctcatkctgcttcccagaggttctctctgacctgaatggaaaagaagttggtctgagatcgaaggtactaaacagatcatcagactgaactctccacatgtcacct

SEQ ID NO: 255547 - DNA, 201 bp, Homo sapiens
aggttcaagtgattctcctgccttggcctcccaagtagctggaattccaggcgcccactaccacacctggctaatttttgtattttttagtagagacgggrtttcaccatgttggcgaggctggtctcaaactcctgacctcaggtgatctgccccacctcggcctcccaaagtgccaggattacaggtgtgagccactgc

SEQ ID NO: 255548 - DNA, 201 bp, Homo sapiens
gagcgaggctaggaggaccccacagcgcctattcaatgccctcagcctaacgatgctccagtgaattaccaagctgcccagagagagggcacccccgaacsaggggagtgaggactgctgaagaagaagctggccagtccactgtctgtgtggcctggcagctgggatcagcagccccgactatgaacttcttttacctgg

SEQ ID NO: 255549 - DNA, 201 bp, Homo sapiens
gtgttccttcatggaacctctttctccagcactttcttgtcttccagggcctctccatatgtcctttcttttcagcagggtaacctggaaatctaacatgkcagctcagggctccaagagcacagaagaagctgctgtcagatctttttagcacctgggatcagagatcctagaacggaactccctccacattccactggt

SEQ ID NO: 255550 - DNA, 201 bp, Homo sapiens
agtttctctctttttgcccaggctggagtgcaatggtgcagtctcggctcactgcaacctctgcctccaaggttcaagtgattctcctgcctcagcctccsaggtagctgggattacaggtgcctgccactgtgcctggctaatttttgtatttttagtaaagactaggtttcgccatgctggccagactagcttcgaact

SEQ ID NO: 255551 - DNA, 201 bp, Homo sapiens
gcctctggcctcccgggcctgggttcagacggactccggcgctgcttccaagcccgacatcgggcacctggccgccggcgcacccaggagcacgatttcawgcgtgtgcacgctctctgctcgggccaggagctctgtttcagccccactccgggctataaatccctggttccgcccagcgcagcctcggctcggagggca

SEQ ID NO: 255552 - DNA, 201 bp, Homo sapiens
tcagatctaatggaagtccttcattgcagagccttttcacctgcctgcccccactgcattatccaacacacacagacctgtagtatgagccaggtgaactracaggaaaacggagcacagggaagcactgcttatcagacaggagccctggggcattctcctaagacgtgtgctggtaaaggagtatgcactggagacctt

SEQ ID NO: 255553 - DNA, 201 bp, Homo sapiens
ctttcccttcccctcgtctcagtgactccccctgcccaccacttatggtctttctactccattgagtatgttcctttgtcctcggcatcgtggtcttttcygggttgtgacaggcaagcctcagcagtcagccccagatccacagggacattgcttagagcctgcgtatcaagtgaggtccgtgaacctgcaaaattggtg

SEQ ID NO: 255554 - DNA, 201 bp, Homo sapiens
gagtatgttcctttgtcctcggcatcgtggtcttttctgggttgtgacaggcaagcctcagcagtcagccccagatccacagggacattgcttagagcctrcgtatcaagtgaggtccgtgaacctgcaaaattggtgtcacttaggatcttattcagaatgtagaatctcaggctgtggcccagtcctacagaatctgca

SEQ ID NO: 255555 - DNA, 201 bp, Homo sapiens
aagacatctgtctctgccactcaagagacttctgcaaagttctgcttctcttttctccccctctctcctatcccaacatcaaccctcaaaccccctcaccyctagacatactctatacctttctctcctcctcctcacccttttcctctccctcctccttctctctgtctttatcttacacacacacacacacacacacat

SEQ ID NO: 255556 - DNA, 201 bp, Homo sapiens
agggagtcggaggttgcggtgagccgagattgcatcactgcactccagcctggtgaaagggtgagattctatctcaaaaaaaaaaaaaaaaaaaaaaaaarggggtacaacagtctccccagcgccagttcaaacccagctcttacccacattttatagatcaatctcattcccattaagttctaggcccgtgggcctctg

SEQ ID NO: 255557 - DNA, 201 bp, Homo sapiens
gtgaggtccgtgaacctgcaaaattggtgtcacttaggatcttattcagaatgtagaatctcaggctgtggcccagtcctacagaatctgcatttttaccrgatcccaatgtgactcatacgcacattacagtttgagaagctcatagagaactttgaggaatgaagagttatcatgtaccttagaattccactctcatat

SEQ ID NO: 255558 - DNA, 201 bp, Homo sapiens
  misc_feature (1)...(201): n = A,T,C or G
ctgatgtccattagtgatcgtcagtaatttagactagcaatgttgacacatttgtggtcagcccaatggtttgtttaactgtcttcactaggaatacatcngtcaagagattgttttttaaacaatagttagccttctaaacaagagtaaagacaaactcaaatatctccttgccaatcttaacactgttatactatacca

SEQ ID NO: 255559 - DNA, 201 bp, Homo sapiens
gcagttgtgtcttgaacacaaattgggaggacttcatgaggcatcgaggaggaccagactctccaggcagaggaagcctcatgtgtaaaggcatgagacayggcttattccgggattcatacttagtttggcatagctggggcagaggatgcttaaagggaagtggcaggagatgcactcagaaagtggtgagatctggcc

SEQ ID NO: 255560 - DNA, 201 bp, Homo sapiens
acagtgagactgtctcaaaaaaacacgtttattcttatttaatacaaacctggacagaatcacgcagatatttcctgggtttttaataccgtgcttgtggytaggcacttcagggtatgtcccccaccttctcccagagtccatatccacttccttctgttatttgtggtaccatagtgaaaatttttgagtgagaatttt

SEQ ID NO: 255561 - DNA, 201 bp, Homo sapiens
attgccatcactgctgaacagtacagccttgtgacggagcagccccccacagacacctttaccagcccactgtcaaaactggcagacagtcctccagcttmacctcgtgtattctaaattgttttcatctgagacgacgagccaggtggctacttcccgggctgatacgccctgagggtctctcatgcgcatgtcactctc

SEQ ID NO: 255562 - DNA, 201 bp, Homo sapiens
gttatgaactgtgtgctattttgctcctctctttcctttgactttgaaaatatctgattccttgggccaaagtgctgcggaggatgctggctgtgaaaggtgtccttgtatcctgcccacttatgaaaaatttgatatgctacacacagtgtgaaaaacaaattggatggaattgctcaccgggggaaaagtttcctgttt

SEQ ID NO: 255563 - DNA, 201 bp, Homo sapiens
tcttgcatcccgctaagggccttgtccagtagaaaattacttttgaaaatctggtcttctgagacctcaggatgaagctttctttccttactttgcagccrcgtttcctaggctccatcttggtttcttcatgaggccctctgtaatatacaaattgtgtcagtgacctttggtttctcctattgtccatctggatgatgg

SEQ ID NO: 255564 - DNA, 201 bp, Homo sapiens
ccgtcccctatgattctttaagtatccaaatgtggcctgaccaggaagacctcaggggaactttttcttttttaaatctgccaactctgcttctattttcrtagcccaagactgagtccaattcttggttcctgaaatacgttttctctttaaatcttggacccaaccagagattcacaagctcttttcttttggaacttc

SEQ ID NO: 255565 - DNA, 201 bp, Homo sapiens
cctcatccctgccaccagtgggctccagaggtgtttgccctaatgtgacttctcacgatgacatattccttctctgtctctctctctccctccttttcttyttttttccatagaattcttcggaaattccactatctgctcaaccccaaacaagttttcaacctggacaatggggggcctactccagggtatggagatcac

SEQ ID NO: 255566 - DNA, 201 bp, Homo sapiens
atggattgttttttaacttaaataaaatacaattttttaaaatccctgctgggttttagcttgctatttggacccggcattctatctggcagaggtaacasttttgaaccttgcttcagtctaccaacatgtcctcccaaagcaatcttactgtgaacatcttaactggtgcctaaatggtgctaactttgacaccaaatg

SEQ ID NO: 255567 - DNA, 201 bp, Homo sapiens
gggcttaggagctggagtctaggttggtagttcagccttgaaccgggagtgataacacgggtgatgccaggtggaacctggacgccagggtcagcaggcartgccctcccctccggggtttaaatgaaccctcatccctgccaccagtgggctccagaggtgtttgccctaatgtgacttctcacgatgacatattccttc

SEQ ID NO: 255568 - DNA, 201 bp, Homo sapiens
tacatttctttatttaggtcagaagccctatgttgaaaacctcgtctccatactacactagctttctgatctctttctttatatcagccgtttgtttttcwtctgatctctttctttgtgttaggcttctttttccaaaagatgcttgtctttcctttcttgtcacaggacaggccaggtgagaagtctgatggctgcgtg

SEQ ID NO: 255569 - DNA, 201 bp, Homo sapiens
gaccaccatcccattgctggtcctcctggggatggatgactctgtaagtcaacaagctggagttcagagatctcttgccattcaggaacattgggcttcaygttaatatcaacatatcactttggcttctgctccagactgcccaacagacgtgccatgaccagccccaaagtcctctctatttacattattttgtatcca

SEQ ID NO: 255570 - DNA, 201 bp, Homo sapiens
gcctctatgattcagatgagaacggtctcctggaccaagcggtaagttctcactctaaatatccctcatggacctgagaaaggctgggggagcagggagcragcagaggaagaatctgaaaatgttcagttccgtctttgtagtaatagcaatgtctcgatgcaggctgaggaaatccgactaggacctctccacccgcta

SEQ ID NO: 255571 - DNA, 201 bp, Homo sapiens
gtgctcagagggagggagagctggctgccataaccttcgtcacagtggtgacagaactaatctaaaaacctggcagcatcaaaacttcagccatccgcgcwtcttagaggacacctcaaggcttacctctgtgtttcttacagtcatgtttcgcctctatgattcagatgagaacggtctcctggaccaagcggtaagttc

SEQ ID NO: 255572 - DNA, 201 bp, Homo sapiens
cagccactgagcactcacctcttcctggccttcagccagaagcccagacacgagacctctgaccacccgacggagggagccagcaacagtgaggccaacarcgcaggtacacagagctttccccaagatgggaagaccttgcgcagctctcatcccctgccacagccacagactgcattcctagagggtcccctgaacata

SEQ ID NO: 255573 - DNA, 201 bp, Homo sapiens
cagagaaccaaaggtccaactccttggtgtttttatatttgcaaattaaaatgttagatagatggcagagggatgccagagggcacactctgataaaaaaragatgtctcttctctgctctactccttctcagacagtgacctgagaaacactatttcctatacacctttgtatgctaagccatcaacatcagcaaaactg

SEQ ID NO: 255574 - DNA, 201 bp, Homo sapiens
ggagaaggcttcctggatcttggttctgctcctggactgtcacacatgcacaggatgtatcctcttgggaccttaagaggtgacccagagcgtagtctctrttgtttctccatcctgttccaaaacacctccatacgctcactcagaaggctccagtggcctgtctagagaatccctggggggctttgggactcagaggcc

SEQ ID NO: 255575 - DNA, 201 bp, Homo sapiens
  misc_feature (1)...(201): n = A,T,C or G
aggtctgggaactggcatttttaacaagaccctgagatcattctgatgcagatggtcctgaccaagttctcagggagtgaagacaacctactagagcaganaagaatggtcaaaggaagtggctcttcgctggcatggaagccggaactgaaataaatggagagggaagcaaggaaggaggggagaactagccctctaagc

SEQ ID NO: 255576 - DNA, 201 bp, Homo sapiens
gttctcagggagtgaagacaacctactagagcagagaagaatggtcaaaggaagtggctcttcgctggcatggaagccggaactgaaataaatggagaggvaagcaaggaaggaggggagaactagccctctaagcaacgggctggaagccagagctgaggagcaagactggcagagctgcctgggaacttctagacagca

SEQ ID NO: 255577 - DNA, 201 bp, Homo sapiens
gaacttcgaactatcatgcaagagtctagtgtatcaattctctctgtgatcaaacagaaaactatgcactaagctgctgatcttagcacttggccaggtgstgtcagtgatgtgaatagtttttaagaaaatcatggagactttagttaatggcctgactcgcccaattaccaaagaagcttgggtgctaactacagaaac

SEQ ID NO: 255578 - DNA, 201 bp, Homo sapiens
tgggccaaaggaaatttcaaaagcaagctttcactgtacttatcaggaaacgcagtaactctcttctgtgaaataatttacttatttcacagtaaattatytcacagaaaccctgaacaaatggctttacaactctgctatgccaggtcgtggtcaccctcatgtgaaatacagacacaaattcctgagtttcattgcatt

SEQ ID NO: 255579 - DNA, 201 bp, Homo sapiens
  misc_feature (1)...(201): n = A,T,C or G
catgctgtcatgattcctgtctgtaatagtaacttatagactcctagctttggatgggactttagatttcaacccccttctcagtgtaagcatcccctctntaaacgctcctccaaagggggtcatcaaatctctactttgaagactgtagatctctattatgaagattgtaggagtgtttaaatttgaaggggttaggag

SEQ ID NO: 255580 - DNA, 201 bp, Homo sapiens
gccctggtatagagtagtaattttacatgtacccttttactatggaatagtgcactatttttattcattctcccactgcctcccaccatgggtgccatatygagtaagacttttttcagccataaagctcttctaagtaatcatttgtttccccattttgattattcaggattcaattgccattcaatccgtgtctctggt

SEQ ID NO: 255581 - DNA, 201 bp, Homo sapiens
tctgggaactggtgttacagggcagcaggggtggggagtataggggctgcagccagacatcccccagctgacctgccttgattttcacatctgcttcagcragctgactcacaggtacccagggtcagttttgtgggtgtgcaacctgtgtggtcacaaaatgtccttgtgcttagaagggcccttgatttcatcctatgc

SEQ ID NO: 255582 - DNA, 201 bp, Homo sapiens
aacctgtgtggtcacaaaatgtccttgtgcttagaagggcccttgatttcatcctatgctgtcactgtcttgaaatccttgataattttctaacaaagaasctggcattttcattttgaactaggccccgcaaattatgtagccaatcctgttggtgcacttgtgtttcactaactcttccggcacttgtaggggcctgcc

SEQ ID NO: 255583 - DNA, 201 bp, Homo sapiens
gtggcaggtgtcataatcacctttccagagaagggggacacaggctgagagaaggtaagaagctcacctgaggtccataacctacaagtgatcagatcagscttcaaatccagatttgccagacacccgagagtttcggggcagtactggcacttgagaagctcagtctagagcagagactctcaaccaggtttgggcata

SEQ ID NO: 255584 - DNA, 201 bp, Homo sapiens
cattagtctccctgggacacgtttgtggtcctgttgctgctgcacaagcacctacttccaccacccccctcccacgttacatcccatgcttgcatttagcrccctttataacattctcctcctcaaacaccagcctcaccttcttgcttgcttgctctgttactctcaccttccccacacagctgctctcattccctcaat

SEQ ID NO: 255585 - DNA, 201 bp, Homo sapiens
agctcacctgaggtccataacctacaagtgatcagatcaggcttcaaatccagatttgccagacacccgagagtttcggggcagtactggcacttgagaakctcagtctagagcagagactctcaaccaggtttgggcatatccaatgtccttattcccagtctttattttgacatttcagataacgtcaaaagcaggaaa

SEQ ID NO: 255586 - DNA, 201 bp, Homo sapiens
atcagcaaaaatcccgatttgcctcactgactcatctccagcgtaggatctggcatctgccttcctaggtttgcatcctggctctgccatcttgtagagtrggaagctgtggagccttgagcaagcatcttaacccctaagaggccctgtcagttgggggtagcaatgctgcctccctcatcatgttcatgtgaagatcgc

SEQ ID NO: 255587 - DNA, 201 bp, Homo sapiens
catgactgtgcatgcagagaaccagtcatctagaacaatgtttcccccaattattttacatcatcatggcatgcatagaaaatgaaaatctatgtgtggcrcactgggaatacaaatgagaatgtttgccatggcattggggctcagcctgtcccagatcccacctggctgctctgcaggctgaggagactgacatcccag

SEQ ID NO: 255588 - DNA, 201 bp, Homo sapiens
ccccaagatgggaagaccttgcgcagctctcatcccctgccacagccacagactgcattcctagagggtcccctgaacatagtaactgccccaacggtgcraacatgaaccaagggacagggacgcctttcctcatagtgccttacgggaagccctgatgaacctctcagcaagaggaataaacaggaggcataattcctg

SEQ ID NO: 255589 - DNA, 201 bp, Homo sapiens
tctgtgaggttttagatggagcctggcctcagtaccaaaaggctcagtcatcaagtaaacatattcctcatgagtttcctgttcacggactcctgggggcygggctaagggctggaccatggtaaaaaggaaacagaggagataacaaaaggaatcaaaatcatggtacctgagctgagacacacacagtaaccctccatg

SEQ ID NO: 255590 - DNA, 201 bp, Homo sapiens
aactgccccaacggtgcgaacatgaaccaagggacagggacgcctttcctcatagtgccttacgggaagccctgatgaacctctcagcaagaggaataaasaggaggcataattcctgccactatggatcaaagagcaggatggggaaagaggagacacaaaataatgtatggtgggggaagagagccttcagcaaaggct

SEQ ID NO: 255591 - DNA, 201 bp, Homo sapiens
tattcagaatgtgagtaaatgcattgacagccctgggacgggatttcttcttggctggagaaatcatttctggaaagcatagcagtatgatcattgcaaarccacaaagaatgatgtcaggcctgacggcttatatttccttataaacacagaattagtgtatttaacataaaaacgcaattatctttaagctcagtaaat

SEQ ID NO: 255592 - DNA, 201 bp, Homo sapiens
ccccgcctccgtacacattcatgcagacaactgagaagccatctttggattttagggcagggagagtgcagcacaaaagcttgataatgtttgtaaagaaygtctttgtagaccatttcccaaacaggatataatgcgcccatctaaaacatcaactggaggacacaccacaaccagtttgctgttctgttaaactgagct

SEQ ID NO: 255593 - DNA, 201 bp, Homo sapiens
ggagatggggcagatctacaccggcctgaagagtgcaggcaggaggctggcccagtgcgcctctgtcaccatcaggtatgcctctttgtcacccaacagcytctgcatctccccgcctccgtacacattcatgcagacaactgagaagccatctttggattttagggcagggagagtgcagcacaaaagcttgataatgtt

SEQ ID NO: 255594 - DNA, 201 bp, Homo sapiens
gactttctggccagaacttgtctgaggaacacagagatgtgtatgcactacttttgctgtctcgctctgcagacctcagtgaccagctccttgaagtggtsgggctagaaggagccatggagatggggcagatctacaccggcctgaagagtgcaggcaggaggctggcccagtgcgcctctgtcaccatcaggtatgcct

SEQ ID NO: 255595 - DNA, 201 bp, Homo sapiens
gtgatggggttggggtggacctgagcaacatcttcctggaaggcattgccattctcaacattcccagcatgtacggaggcaccaatctctggggagaaaamaagaagaaccgggctgtgatccgggaaagcaggaagggtgtcactgaccccaaagaactgaaattctgcgttcaaggtaagccaggaatgaggataattg

SEQ ID NO: 255596 - DNA, 201 bp, Homo sapiens
tccacttggatccaggttgccagggaggaacaaacgtacagcacatgcgtggatgggatatccccacacaagaaaacgagcgcctcatgctgcttcccagmggttctctctgacctgaatggaaaagaagttggtctgagatcgaaggtactaaacagatcatcagactgaactctccacatgtcacctcatcatggtcat

SEQ ID NO: 255597 - DNA, 201 bp, Homo sapiens
aaatcccgatttgcctcactgactcatctccagcgtaggatctggcatctgccttcctaggtttgcatcctggctctgccatcttgtagagtaggaagctrtggagccttgagcaagcatcttaacccctaagaggccctgtcagttgggggtagcaatgctgcctccctcatcatgttcatgtgaagatcgcaagagata

SEQ ID NO: 255598 - DNA, 201 bp, Homo sapiens
tgcctggcattccatggctctgcgtctgtgtgctttgatgttccaggctgttagtgctaaggtgggatgtgatcccaccactagaagaaaacaaaactccrctgacatcaaggcgggggttggggaagttattctcttgtttcacacccgtctatttgacaatcagattgttatattccaggccaggtcatcaggaaacat

SEQ ID NO: 255599 - DNA, 201 bp, Homo sapiens
aagattccttacagttccgcaaaattaaggcatagtcagattttggtctatgtggactctttcttggacagaattatattcaaatttctaccttctctcastgtattttgtcccgggatttataggctactggctgaggaggcagagagctctctctgcagcctcttcatgtgttgcgattcttaactccttggcagtttc

SEQ ID NO: 255600 - DNA, 201 bp, Homo sapiens
aggggtattgggaaaagccccatgcttacagttagataatctgggtttaaattttgcctttatgcttctagttttatagatcttgggaaattacccaaccrccctaagtctcagcttcctcatctgtaaaactggcataataatacatggcttattaggaagatgatggatgtgaaagtgcctggaacatagtataataag

SEQ ID NO: 255601 - DNA, 201 bp, Homo sapiens
tcactggaaattcaagtgaagcaatcattcactctttctcagctgacgtctgaatgaagaagactctgactccagctgtgtctcctcccctctcccactcmcttctgcaagacctgggagggcctggcgaggtggaaatgtgcctcaggaggctgctcagcatctgcagaggaaaaacttgctcacacaggtttgagctgg

SEQ ID NO: 255602 - DNA, 201 bp, Homo sapiens
cactggaaattcaagtgaagcaatcattcactctttctcagctgacgtctgaatgaagaagactctgactccagctgtgtctcctcccctctcccactccsttctgcaagacctgggagggcctggcgaggtggaaatgtgcctcaggaggctgctcagcatctgcagaggaaaaacttgctcacacaggtttgagctgga

SEQ ID NO: 255603 - DNA, 201 bp, Homo sapiens
ccttagtttttccctcttgcacttgcccatcttgacccccaaactagtctctgttcccctgcagaattcatagaccatttcatattgggcaccacctaagstccatcccacagcaaaactccgtcctggccacatgctctgcacagcctgaatgttggtattctctgtgatctgtttctatttggtgcaagaagtgttttt

SEQ ID NO: 255604 - DNA, 201 bp, Homo sapiens
gatagagcctggactcaaacctgtcttcaagtatctaaggtgctccaagtctgcagaggaggagacaagaaaacaatatggtccaggcctcaagtagttgrcaatctactatctacatgtaagaaatatctttagaacaatcgtgttaatattggcataatgagcaagcaccatggagtggaagagatgagtttataagag

SEQ ID NO: 255605 - DNA, 201 bp, Homo sapiens
cgtctggcgccaagagacccaattctggtcggggctttgctggatggagaagtgggggtgagtgggtaagggggaagagtcgtgcctcggtgaaaagtcgrgagagcggcgagaagggaagtaacggcggctcctcctggcctcggcccctttaagtgcttcactgactcagctaagcttccccctcaggtcgcgtttttt

SEQ ID NO: 255606 - DNA, 201 bp, Homo sapiens
ctccataccaccctttagagattacaactcactatgaaaaaatttgtgaaccaatgatttcatagtgtgaggcccagaaatccgtatgtaaaggtatatthgtctgctttgagtgccataatagaataccacagactgacagcttaaacaacagaaatttattttctcacagttctggaggctgacaacacaagaccaagg

SEQ ID NO: 255607 - DNA, 201 bp, Homo sapiens
atgtgacacatggaacatttcccagagctgagtagtatggcccacctattcatacaggccacagcttgcccctcaactctcaccaccagccagacaactgycgttgtgccctcttcagacctctctaaggggagaaccatccttaagaaccattgaacaattgtcccctgtagatctttcagcaaagaacatttggggcct

SEQ ID NO: 255608 - DNA, 201 bp, Homo sapiens
ggagctggctcaggtcatcgcaggctgtactctgacttttaatgctgcagccaagatggctgtgccaagagctgtaccccttgtccagcacaaacctccawattcccagaatcagagactctgagagatggaacaatcctcagagttcttctatcctggaaaatgcattagtccctctaccctatccctaaatctttctgc

SEQ ID NO: 255609 - DNA, 201 bp, Homo sapiens
ccccctgtctgtccttgaggacctgggtatcatcttagacttgatcacatttcttctctctggaaggagtaaagaggtagggcaagtcttgagctcccccyggagtttggagtgccccccacacttgggccggtcaacctgagttgtactgtccaacctgtgggttacaattacatgttagacagtaacctcccaagccga

SEQ ID NO: 255610 - DNA, 201 bp, Homo sapiens
tatagactcctagctttggatgggactttagatttcaacccccttctcagtgtaagcatcccctctataaacgctcctccaaagggggtcatcaaatctcyactttgaagactgtagatctctattatgaagattgtaggagtgtttaaatttgaaggggttaggaggtgcttaccacttcatattttactaagaaggcat

SEQ ID NO: 255611 - DNA, 201 bp, Homo sapiens
gagctgctctgtagctgatctgagaacgactgttcttctggaccatggattttgatgctggaataagaggaccctggcaaggaattgggagcttatcacayaaaccaagcggaatatttttggccagatacttgaggaccaaacagaagagctttaaaatgagatttaagtaggataaagtagagtgttcaaattaaactc

SEQ ID NO: 255612 - DNA, 201 bp, Homo sapiens
aataatccaatctattcatctttccaattatgaacaacttcacaatatctttcttgtaatttttttcatacacctttagcttatccatgtttaatattatrttgcagaagaatgagaaaccagggctgttctcatctcattggtgtgcccttggctttctctcaataaaatgtttgcagggtttgtatgctcgctctttaa

SEQ ID NO: 255613 - DNA, 201 bp, Homo sapiens
aagaagcagggtttgaggtaatgagaagaaaatagcttctctggcccagaggagaaagccagcatttggaaaagaatgtgagctcctctggagatcataamagaagcctgggcacaggctgaggtctggttgcagtgaccagcccaaatgcatacgcaccccagaagtaagaattacatttgagtcccgcatattggacac

SEQ ID NO: 255614 - DNA, 201 bp, Homo sapiens
caggaggcagaggttgcggtgagctgagattgcaccactgcactccagcttggatgacggagtgaaaccctgtctcaaaaacaaaaaacaaacaaacaaamaaagcattttacattctgtaaaggcaataggaattaaaactctacagttgtttcactttttaattcctttagtaaagtcagagtggaaaggtggaaaaaa

SEQ ID NO: 255615 - DNA, 201 bp, Homo sapiens
agaactctttggaacctgtgatcccctggctataataagtccctgaaccctgaagacctcttagttgcaaacagtatgtcatctgtgattttacagttaayttctcacacatggaaatgactcaagaagtgtcttcagaggttattaagaggattccatagttatacaataaaatacatcctactcaagtttctccctcct

SEQ ID NO: 255616 - DNA, 201 bp, Homo sapiens
catagtaggaatattgacaccaccatggaacacaataacaaaggctttttttcctccaagggagtctgctgttaagcactgacagcacaccactgcctctrgtattgacccactggaagtaccttgaggacagggactgtgtcccatttctgctccatccctagagtctagcacagaataagtaggttctcatcattcttg

SEQ ID NO: 255617 - DNA, 201 bp, Homo sapiens
ctggagactgtgtgcagggtgccttggatcaggcagtttccaggccagggaactgggcaggatcctttggaggaaacctagtctgagccaaagagctaagrtggtgagtgtggccatgaacaaatgctaattcgtgggaaactgtggtggaaatatcatcaatgcacgtacaacaaaaggaagccatcaaagataccttgc

SEQ ID NO: 255618 - DNA, 201 bp, Homo sapiens
aatacaaaaattagctgggcatggtggcgcatgcttgtaatcccagctactcgggaggctgaggcaggaaaatcacttgaaccagggagtcggaggttgcrgtgagccgagattgcatcactgcactccagcctggtgaaagggtgagattctatctcaaaaaaaaaaaaaaaaaaaaaaaaaaggggtacaacagtctcc

SEQ ID NO: 255619 - DNA, 201 bp, Homo sapiens
tcaatgcacgtacaacaaaaggaagccatcaaagataccttgcagactgaatctgtagaaaatgacatcaggatgcagggctgatggggaatgtttgggawtgttgatttggagatggtgataacacatccactacgccttcctatgtgccaggctccagggatccagcaataaatgagacacagttcctgccctcaaaga

SEQ ID NO: 255620 - DNA, 201 bp, Homo sapiens
tattattatctcgatctcaatgaggagaacaaggcttaatgaggtttagtgacttctcaaagccacatggttagtcaggggagaacctaatcccttatttyttatcttattctgattctggccatgctacaaacatgttctcacctgccccccatgcttctaccccaacagcaataaaaactgtaaagcaggaactctcta

SEQ ID NO: 255621 - DNA, 201 bp, Homo sapiens
cagcccatcagaacccctattcaagtgtgtcaggatattgtccgcctcttcctcagccctctctcttccttctcactgtaactgaagtgctattttccccrgacatggcccagcatttactacttccatcttcaaaagagctaccccccggccaactctctcactcgctgagaaaggaaggaccctggtatcgtccccaga

SEQ ID NO: 255622 - DNA, 201 bp, Homo sapiens
tggtaaatctcctacatgtgcattacagtttctctaaaactactttaaggtgtcagaaccgaaactggatctgcaccagtcatggtcttgcttgcgtgttrtccctgtttttgtattcaatgggtatttctccatcatgcctgcaaggctcatgaaaactttgtcaagtctcctgcacttacatccactgtctaccacatt

SEQ ID NO: 255623 - DNA, 201 bp, Homo sapiens
aattaggaatatgtgtatgaaggataggagggtagaagacattccaaaataagtttctaagaagtcatgaatcacactgaaaagaaaagaaaaaggagtcrgtttttgtttttcaatcaatgtgacagcaacagagagtgttggttgagcctatgctttcaggaaactgtacacatacacgcaaaggcagagcctgggcat

SEQ ID NO: 255624 - DNA, 201 bp, Homo sapiens
tctaccacatttccctgagttatataactaatgtacctgtcaagaagatgtaagaatcacctgccatgacttcttggtgaaccttggttagttccaagggwtcattcccttctcttttaactgctcacgagtcaccactgaacccagtagttctctaattttcatttgcattagaacttcctagagatttcttttgtaatg

SEQ ID NO: 255625 - DNA, 201 bp, Homo sapiens
agaggaagcctcatgtgtaaaggcatgagacatggcttattccgggattcatacttagtttggcatagctggggcagaggatgcttaaagggaagtggcargagatgcactcagaaagtggtgagatctggcctgaagcaggtcttatgaggccagctgagtgagaaaggtgttttctgtgcagccgggggccactgaaga

SEQ ID NO: 255626 - DNA, 201 bp, Homo sapiens
cagctcaccttgacaacagctgttaaataatttccctcaaactcttttcttttgtgtcatgttattctccagcacagaatgccatctctcatgcttcctcrtttcttcatgtgaacccagtctttctgcctccctttaaaaccccacaccagctgccccacctgtgtccatgaccacatttctcatagtttgccctgaact

SEQ ID NO: 255627 - DNA, 201 bp, Homo sapiens
tgttgtacagattatttcatcacccaggtattaagcccagtacccaatagttatctttcctgctcatctccttcctcccaccctccccactcaagtagaayccgtgtctgttgtttccttctttgtgttcataagttctttaagttcttatcatttagctcccacttgtaagtgagaacatgtagcatttggttttctgtt

SEQ ID NO: 255628 - DNA, 201 bp, Homo sapiens
ccagctacttgggtggctgggctgggaggattgcttgaacctggaggatcgaggctgcagtgagttgtgatcatgccactgcactccagcctgggcgacasagtgagactgtctcaaaaaaacacgtttattcttatttaatacaaacctggacagaatcacgcagatatttcctgggtttttaataccgtgcttgtggtt

SEQ ID NO: 255629 - DNA, 201 bp, Homo sapiens
tctaaccaaatcagtcattgcaatcttaagctgtattcatagactcatagtgcctagtaaggcaaactgatatccacattctagcctaccctgatagaccrtcagacctctctagagaactgaatttatttatggtcactatggtttgcgatggacatggacaacctggaacttgtttgagagttggtgaggggcctcaca

SEQ ID NO: 255630 - DNA, 201 bp, Homo sapiens
ccctgatagaccatcagacctctctagagaactgaatttatttatggtcactatggtttgcgatggacatggacaacctggaacttgtttgagagttggtraggggcctcacaaccacattatggagaaatgaagatactgtgcatatttgttggagaagggaagggaaaggtgaagaagagctcgttgtattaaaatagc

SEQ ID NO: 255631 - DNA, 201 bp, Homo sapiens
aaatgaagatactgtgcatatttgttggagaagggaagggaaaggtgaagaagagctcgttgtattaaaatagctcagtactgttgtgggaagaggtgtgwagttaattctgaatggcttcaagaggtagccctaggactaatgggaggaagttataggaagtctttaaagtgtggaatacattaattactagtggtcaaa

SEQ ID NO: 255632 - DNA, 201 bp, Homo sapiens
tactgtgcatatttgttggagaagggaagggaaaggtgaagaagagctcgttgtattaaaatagctcagtactgttgtgggaagaggtgtgaagttaattytgaatggcttcaagaggtagccctaggactaatgggaggaagttataggaagtctttaaagtgtggaatacattaattactagtggtcaaatctgcccaa

SEQ ID NO: 255633 - DNA, 201 bp, Homo sapiens
cccaccctaacccggtataacctcattttaacttgatgacatctgcgaggaccctatttccaaataaggtcacattcacaggtatagagagtgaggacttyagcatatcatttttgggggggacacaattcagcccacagcatcagtcttcccccagaccttcacacaagaaggaaatacaatgtaatatggtagctttgt

SEQ ID NO: 255634 - DNA, 201 bp, Homo sapiens
gggcatgcaaccaggtaggaatacacaaaagcaattcagacctgtgagcctggcttcaggctaactgaaggcccagctgaatgctagacaacgtttgaagygaaaaagaacatagaaagcatagctcaacaggactgtgccattctggaagagttttcatcttttccaaagagagtggccttaaactaaaaatggaagaaa

SEQ ID NO: 255635 - DNA, 201 bp, Homo sapiens
aacctggacagaatcacgcagatatttcctgggtttttaataccgtgcttgtggttaggcacttcagggtatgtcccccaccttctcccagagtccatatmcacttccttctgttatttgtggtaccatagtgaaaatttttgagtgagaattttggtgagaattccagggggagggaactgagggttcagcctcccagac

SEQ ID NO: 255636 - DNA, 201 bp, Homo sapiens
ccagttttgtctgtggcctacccaagccctccagagttcctctgcaccatgctgccttccagaagagggcgcatacaaacacatcactctgcaaggcgttstgcaagacaaacagatggactgccagacaagatgctgctcagaggcctgccttccagggcgattgagctgttcaaaatgtggcaaagcgagcttttaatc

SEQ ID NO: 255637 - DNA, 201 bp, Homo sapiens
agtgagtactcctgtcttctgcctcttaatgtctctctcatataaaacatgccccatgtgccctactcttgttacctattcaggtgttcaggtatggattwccttcagctgtgatcagaggaccacttgatggagacttggattaaccttccatgtctctccctatcctggaaatttggtccactttatttgttcactata

SEQ ID NO: 255638 - DNA, 201 bp, Homo sapiens
gtgagaaaaccttaataaaataaacattagaaaaacaaacaaaaccaagaaaaatgacaatatcatatcattagatagtgctcagcagaaaagccaagtckacggccaggcgcagtggcttacacctgtaatcccagcactttgggaggctgaggccagcggatcacgaggtcaagggatcgagaccatcctggccaacat

SEQ ID NO: 255639 - DNA, 201 bp, Homo sapiens
taatttatgactctgaatcacatatcaagagtgcaaaattttgctcagggtcttaagagaacctgtccctggatgggtgaaggagggagaaaggaacccayccatagtgtggcctgacctgatttcagcgtgtcttgaaatctagactctcagagatgggagtaactactaagatcatctgttccagctcccccaactgct

SEQ ID NO: 255640 - DNA, 201 bp, Homo sapiens
attggtgctttctctttccctatttcctgccagtgtcctgttccctcaaaaaagaggcagtgtgcggggtggtgggggatttcactcaggtctaggtcagycacccctctgccttttagggtctatctgcggctctgatctggagcccaggcatcaaaggaggccaccgtcatctcctgcccatgcccctctcagcccatc

SEQ ID NO: 255641 - DNA, 201 bp, Homo sapiens
gcgatgacaaaaggtcacagaatgaagattggaagtaagctgggtagactagaggaaacacgggctgagagccagatgaaattagttaacataaatgtaargttttatgtctatgttattttttaaaatctacacaggttcagaatggcgaagaactggatgaaaaatagatcatgagatgatctgggcaatgaagatgac

SEQ ID NO: 255642 - DNA, 201 bp, Homo sapiens
aaatatgatttggattcttagctaagactagtatcatgctcacgctgttgatagtttgtggaatatattttcttccacttttttgataataaaaataagakagtccaggtgcagtggctcacacataatcccagcactttgggaggcaggcagattgcttgaggtcaggaaattgagaccagcctgggcaacatggtgaaa

SEQ ID NO: 255643 - DNA, 201 bp, Homo sapiens
tggtgaaaccccatctctactaaaaatacaagaaaattagcaattagctgggcgtggtggcacgcacctgtagtcccagctactaaggaggccgagacagragaatcacttgaacccaggaggcggagcttgcagtgagccgagatcacaccactgcactccagcctggcaatagagcgagactccgtctcaaaaaaaaaa

SEQ ID NO: 255644 - DNA, 201 bp, Homo sapiens
agcagaattgtacaaactttcatatggagccattgattttagctcaacttgatgttctaccatattagagtgcatgtttcaactttctgctataaagagaraacaggaaagggagataagaaaggaaactcccagctgggcacggtggctcacgcttgtaatcccagcactttgggaggccgaggcaggcaggtcacgagg

SEQ ID NO: 255645 - DNA, 201 bp, Homo sapiens
ttgatagtttgtggaatatattttcttccacttttttgataataaaaataagatagtccaggtgcagtggctcacacataatcccagcactttgggaggcrggcagattgcttgaggtcaggaaattgagaccagcctgggcaacatggtgaaatcccgtctctaccaaaaatacaaaaaaattagcaaggcatggtggtg

SEQ ID NO: 255646 - DNA, 201 bp, Homo sapiens
tgagccgagatcacaccactgcactccagcctggcaatagagcgagactccgtctcaaaaaaaaaaaaaaaaaaaaaaagaaaggaagaaaagccaagtckccaagtctaagaattttcttctcagagctcaagcttctaaatcaaccaagtggaattctgccactttcagtgctccccactatgtcccttgcctcaaagg

SEQ ID NO: 255647 - DNA, 201 bp, Homo sapiens
cagtttccccagtgtaaaaagaggatagtcatagtaactaacttataggattattaggaagataataaatgagatgtgtataaaattgtgtgtggtagatrgcagtgctgaatacatgtgcacaatggtgatcttcatcatcatcatcatctatctagggggtggcctatggaggaggaaggagggtcattctgtatgggt

SEQ ID NO: 255648 - DNA, 201 bp, Homo sapiens
tgagaccagcctgggcaacatggtgaaatcccgtctctaccaaaaatacaaaaaaattagcaaggcatggtggtgcgcatctgtggtcctggctactcagkaggctgaggtgggaggatcacttcaccccgtgaggcagaagttgcagtgagccaagactgcgctactgcactccagcctggatgacagagtgagactttg

SEQ ID NO: 255649 - DNA, 201 bp, Homo sapiens
tggctgcgtgtccgccaagggcgaacttgtcatgcaggtacctcatgagctctaaatccgattgcaccttctaagttgttccagggctgtggcgggcaagrcggggtttgggttctatagaaaagcatctcagcatttgccttctcatctgactaattataccacccaggagggcatttatttgtggcctctggtgttacc

SEQ ID NO: 255650 - DNA, 201 bp, Homo sapiens
acaaatttacaagaaaaaaacaaacaaccccatcaaaaagtgggcgaaggacatgaacagacacttctctagtattctttataattatgtatacatatgtktacgtgtcaccaggtaccttccctctcttgtctttgttttaccagcagttcctggatagattcatggtatcatggtatcatcccaactcttttatatttt

SEQ ID NO: 255651 - DNA, 201 bp, Homo sapiens
agggcgaacttgtcatgcaggtacctcatgagctctaaatccgattgcaccttctaagttgttccagggctgtggcgggcaagacggggtttgggttctayagaaaagcatctcagcatttgccttctcatctgactaattataccacccaggagggcatttatttgtggcctctggtgttacctttgacagccacactgt

SEQ ID NO: 255652 - DNA, 201 bp, Homo sapiens
tgacagaatgaaactctcatctcaaaaaaaaaaaagaaaagagaaagaaaatctatgctttttccactacattttagtgcctttaacattctattctaatwgtttccaaccatactagtatgctacttgaaataatatggcattgacaaattgatatcccatctgttcaacctctgtatagccatctaatcatgttcctac

SEQ ID NO: 255653 - DNA, 201 bp, Homo sapiens
tgcctcacaggggaagacaaacaggactcaagcacgggtgctgcagtatagccggtgctcagaagtgggcagcatgggaggagaaggccccgctcagcctrgtgggaggcctcctgatgcacgcattgtttccagactccaggaactgtagggcagggagggagaagggcattccgggtagaggacgtggcttgggcaagg

SEQ ID NO: 255654 - DNA, 201 bp, Homo sapiens
aagttcactgatggctaaggtaatcctaattcatctttgcctcccccatagctcctagcagagtattttaaacatactaaaagcttgataaatgcacaagyataattgcccattgaacatcattattttaaccaactttataggaaaggataagctaactagaagatagaacaggatttcaaggtagaataagtcctctat

SEQ ID NO: 255655 - DNA, 201 bp, Homo sapiens
gtcttattgggctttattactattttaggaaaaagttacataaaactttaatatgcagatgtcctaaataataacaaagatgtggcctaaaaatagacaaygggtttttcaagattgccaagctgtctccagaacatgatctgccaaaatgaagctaaccagatctaaaagttcttcttaatccttaaatgtatacttaag

SEQ ID NO: 255656 - DNA, 201 bp, Homo sapiens
tcaaaaaaaaaaaagaaaagagaaagaaaatctatgctttttccactacattttagtgcctttaacattctattctaatagtttccaaccatactagtatkctacttgaaataatatggcattgacaaattgatatcccatctgttcaacctctgtatagccatctaatcatgttcctactgaagaacttccagtgcttgt

SEQ ID NO: 255657 - DNA, 201 bp, Homo sapiens
agagtaattagaaaatgtattcttacatcccagccttcactggaagaaggaaaatctagattttatttttttgctcatgcgccaactttcccttcccctcrtctcagtgactccccctgcccaccacttatggtctttctactccattgagtatgttcctttgtcctcggcatcgtggtcttttctgggttgtgacaggca

SEQ ID NO: 255658 - DNA, 201 bp, Homo sapiens
agatttccctattgtcctgctacaaatgcctataggtttctccatttttctccatgaaggtcttgcacattaattgttagattcactccaatgtacattcyacttttccttctttctttttttttttttttttttgagatagggtctcactctgttgcctgggctagagtgcagtggctcgttcttggctcactacaacct

SEQ ID NO: 255659 - DNA, 201 bp, Homo sapiens
ggacagaactgtatgtggatagtcctgacagtctgggtgaatgcaaaacatgctcctaccttgccaagcagctgaacaagttgacctgttgggtagagttmtttggtgttgtccacttaaacaatggataatgtctgccaagcacagcaattttaaatttagaagttataagcttttttttcccttggcaataagtattca

SEQ ID NO: 255660 - DNA, 201 bp, Homo sapiens
ctattgtcctgctacaaatgcctataggtttctccatttttctccatgaaggtcttgcacattaattgttagattcactccaatgtacattctacttttcyttctttctttttttttttttttttttgagatagggtctcactctgttgcctgggctagagtgcagtggctcgttcttggctcactacaacctctgtctcc

SEQ ID NO: 255661 - DNA, 201 bp, Homo sapiens
tcctttaagcattgctctaaccaaattgtaatctactacattgatatttaaaatcttcatatttacattttttttaaacatggagttacttaagaatgcayggatctttttcttaattttcatattgctgccaatgaaatttcctgggatacagattctgagatggagattgtcatgcagaagtgttaatgagttttatta

SEQ ID NO: 255662 - DNA, 201 bp, Homo sapiens
ggcacagttcagcacctactacaaatatgtatagtttaatattttagatgtacatactaaaagctatttaatcctatattgtgtggcatttaaatcgtttygattttttgctattttaaacagtgctgccacaaatgtcctgggaggtgaaatcttgtggaaataatagtagtagttgcgaaagtgatactgttattactg

SEQ ID NO: 255663 - DNA, 201 bp, Homo sapiens
aaattttcactcagatgtttatatactcatctacatattgtttttctgagccctagttacacgtcagaccttagtatgatagacaaagactcaccagccarttaacagctctcaaggtaaagctgaagcaggagatgagcaagataggcaagttaataaataattataacactatatgacaagcactattacatagttgtg

SEQ ID NO: 255664 - DNA, 201 bp, Homo sapiens
ttcttcatctttttcaacattattagaagaatcttatcaaaggtctctgataaactccaaatattcttcatcactggtatttccttgatcttccgtccaayaatcttgtcaaagaagcaattttgttggtctgacataaactaatttcagtgattccatgctggttccttgaaatcacagcttcaatcctaaaagctcatt

SEQ ID NO: 255665 - DNA, 201 bp, Homo sapiens
ggaaagaacccagaagccagcaactctcccctctcctactgatgggagttggtggatgctggccccatctcctcccctggaagagaagggggaaaagggcrgggaagtaccttttctttgtggtaaaactttaaaacttttaaaatgtatatcttattgtattacatcattataatgtactcttttagtataaaagtaatt

SEQ ID NO: 255666 - DNA, 201 bp, Homo sapiens
atgaaggtaaggaacctgcttttctttcctcttctctcctctctcctctcctttcttcctttctttctctcggcttttctttctcctaccttccttccttyctctttctttgcttgactaatacccaagcttaaaattgctcagtttccaggctaagatttgagatcatagtttaaaccttgcttagctcatgaatatgag

SEQ ID NO: 255667 - DNA, 201 bp, Homo sapiens
tgaggaagagaaaaacaaaaattcccagtcgcagaaaattaggaggatatctttgtattttgtttgtctcctactaaggaattcttagaagttcagaaccktccataataagctgtcatcggatacacttgtttccgcatagggcctcgggtttgattgcagggtttttaagcttctggcagaggaatgcaatgtttcaac

SEQ ID NO: 255668 - DNA, 201 bp, Homo sapiens
cactactggctgggcgtggtggctcacgcctgtaatcccagcactttgggaggccgaggcaggcggatcacgaggtcaggagatcgagactatcctggctracacggtgaaaccccatctctactaaaaatacgaaaacaaaattagccaggcgtggtggcgggcgcctgtagtcccagctactcgggaggctgaggcagg

SEQ ID NO: 255669 - DNA, 201 bp, Homo sapiens
gtgcttcatgccccacctccaaccaagatcaaacgggagctgcacagcccctcctctgagctgtcgtcttgtagccatgagcaggctcttggtgctaactrtggagaaaagtgcctctacaactattggtgagtgggcaagaggagtcgaagaaaggctgcccagaaaggctctggaagtagccatcaagctgaatgttcc

SEQ ID NO: 255670 - DNA, 201 bp, Homo sapiens
taactagcaaataaatagctcagctaaagggataaaaaagagaagcaagggtcttgtgtcatctaaataaaaaaaaaaaaaaaaaaaggccgggcgcggcrgctggtgcctgtaatcccagcactttgggaggccgacacgggcggatcatgaggtcaggagatcgagaccatcctggccaacatggtgaaaccccgtctc

SEQ ID NO: 255671 - DNA, 201 bp, Homo sapiens; identical to SEQ ID NO: 50862

SEQ ID NO: 255672 - DNA, 201 bp, Homo sapiens; identical to SEQ ID NO: 50864

SEQ ID NO: 255673 - DNA, 201 bp, Homo sapiens
actcaggaactcagagaaacgaggaaagagaaaaagcaaggaaaagccattcatgaacccaactttcaaattcagtggatattttgcatggctcccaagargagaagggacggttgtatgacaggatttgtttctcctactgccactgacgaaaggaaaggaaacgcatgaggccctttgccgtgcccggctcccttctgc

SEQ ID NO: 255674 - DNA, 201 bp, Homo sapiens
tgccccggcctcccaaagtgttgggattataggcgtgagtgatcatgcccagccaaaaatttttttagtagtctgcaaagaaggaagtgggcatttcgggrcatggaatgggagaagaaacaagcacgagcagacccatgggtgggaatgcaagagacacactctagacttactagaggagcaagagcaggacttggctgc

SEQ ID NO: 255675 - DNA, 201 bp, Homo sapiens
caaatcccagcactgccacctgccactttatgacctggcccaagtgacttaatgtccccgggcctcggtttctccctctgtaaaatggagataattatcaktcctcctctcacaggtgagaacagacacggtgcttagcccacagcctgccacgtgagccattattaagaccactagagttagaccacgctctgagatgcc

SEQ ID NO: 255676 - DNA, 201 bp, Homo sapiens
gatgtacatactaaaagctatttaatcctatattgtgtggcatttaaatcgtttcgattttttgctattttaaacagtgctgccacaaatgtcctgggagrtgaaatcttgtggaaataatagtagtagttgcgaaagtgatactgttattactgtccatagttgctttcttaagataaacttatagaactaaaatgtcat

SEQ ID NO: 255677 - DNA, 201 bp, Homo sapiens
gccctctactggccggccccgggcccggggctgtctgcatactctgggctgggcttgcccagcacgcagccatttgcccaacctccaaaccaggatttctrctccgggttcagctagacccctcagagaggttggagtaaggactctgaaaagagaatttgaccctgtctttggttggctgacaccaaagctattgtttat

SEQ ID NO: 255678 - DNA, 201 bp, Homo sapiens
tttctgctccgggttcagctagacccctcagagaggttggagtaaggactctgaaaagagaatttgaccctgtctttggttggctgacaccaaagctattrtttatggcagcggtagtacaaggcccagttaaaaagagaaagaaacataagtgcggattcagtacacctgccatgatttacctgtaaaagtaatttcaga

SEQ ID NO: 255679 - DNA, 201 bp, Homo sapiens
aaattagccaggtgcagtagtaggcgcctgttgtcccagttacttgggaggctgaggcaggagaatcgcttgaatccaggaggcgaaggttgcagtgagcygagatcgcgccactgcactccagcctgggcaagctaataaataccaggacttgggttagacccaagggctccaggtcttacaacaccttttatttgcttt

SEQ ID NO: 255680 - DNA, 201 bp, Homo sapiens
catctgtcacaaccataatgaaacactaacatggctgtgattttgaccgctgacaaagtcatgggtatggttccaacctctgtggtctgttgcctacatgstgaattgaaggaaatactactaatttcagtttgagcttagggaaaataagaatgtattattttctcctccaagttaatggccctctgaatccaatccata

SEQ ID NO: 255681 - DNA, 201 bp, Homo sapiens
acattgtaaaggttactgaatattaatgaagtatttatttcaaactgggttctagacacctctggggtagaggaggccatccagggacatattgtctgggytaggcatgaggtgtatgcacctctagatgctgttgtccacagtgccgaatcattactacataatcgcccattaggacactgctggttggtggaggaagag

SEQ ID NO: 255682 - DNA, 201 bp, Homo sapiens
ttttagcggttgcagagatttttttttttttttactacatttgtactatttcatctaaccaaatcagtcattgcaatcttaagctgtattcatagactcayagtgcctagtaaggcaaactgatatccacattctagcctaccctgatagaccatcagacctctctagagaactgaatttatttatggtcactatggtttg

SEQ ID NO: 255683 - DNA, 201 bp, Homo sapiens
ccagcaaattcggtgcatcttgcttaccagggcgggtgtcaggacagagcaggcaggagagcccgagaggagtgaaaacactgggggctatttgtattgaygccaaaactctggactcctctgcgtaactagtacagaatttctagaaaaccattttccatttgtgtcgaatgttgagtcagattatccttgcacaaggat

SEQ ID NO: 255684 - DNA, 201 bp, Homo sapiens
cacaaaatgttatagaaggagtatgaaaaacacatccagattggaaagaaaggaaaattctgcagggaatataagtcataacatgacaattttaggagtgyggcatgatgacagttttctggcagtcatgggcctccagcttccctataatgttttactgcctcaggaaagtggaactgatttgacagacccaaaatctgt

SEQ ID NO: 255685 - DNA, 201 bp, Homo sapiens
catctagaaagtacagatcagtgcaagcaaagaaggaccacactgagctgtgtccagtagagtacatctagataaaaaggcccaggccagaaggctggtarcctgagttctacccagctctacctggatctgtgggtcctcggacacatcagccccagtaagtgatggaaactgactgaaattctgggatggaagcagagt

SEQ ID NO: 255686 - DNA, 201 bp, Homo sapiens
tttgggcaagggaggtgggcatgaacactacagtccaaaaatagaaggaagaactgagaaatcctcaaaaaatattttttaagcctaaagtcgagtaaatkataaaatagaaatccccaggtattaatgacgttgttattaaataaaagctatcatttattatctagtccaaagcttactatttttatgaccacttttgaa

SEQ ID NO: 255687 - DNA, 201 bp, Homo sapiens
agcctgtgccctcaaggtacacctaaaaggggctttggataaaatacaccagttgcagagagaatgaagcaggaagaaggttgccagaacaggggcgagaytgagaatgcaccatttcaaagaacattcctgaggagaaaccatgcagagaagatagcagagccagcaaagaactcactgccccacaccccccacccccag

SEQ ID NO: 255688 - DNA, 201 bp, Homo sapiens
taatggtgtacaaagtacctctcaaatgaaaatcctctctgaattcttatggatagaatgcaatcccaagacttttgtgtttatgtttatttaaggactayatgccagtaatatgctaaatgagttattaggtattactcatatttaccactcataaacttaaattagatcattgcaaagttccccaagggctttaattca

SEQ ID NO: 255689 - DNA, 201 bp, Homo sapiens
aagcggggagatcagttcggaggccactgcagcagtccaagtgagagatgtccagggcttggaccacaggagaaacagagtggtggtgagaagtggccagyttctggatatctttagaaggtgaaggcaatacgatttgctgacagactgtatgtgggagatgagaggacgagggaagtcaaggacaagccaggactagac

SEQ ID NO: 255690 - DNA, 201 bp, Homo sapiens
cagcaggccaagactccacaaaattgctggctcgtccatgccctgcccagcacgccactcagccatgctagtccatagccccttggtgaaatggacgtaargcacagataactcttatatcttctatggactagaggaggcatattcaggcatctgtgtaaggcacagataactcttatatcttctatggactagaggagg

SEQ ID NO: 255691 - DNA, 201 bp, Homo sapiens
ttgttgtcattgcatgtcagtcttgctttgagttggttgtggttttcagctactgctattcttgcttattaattagaaattatagttcacttgacttcatmattatcatattagtttgtgaaggatatttggctaaccctacagcaggcagtgatacatatttgcatcgaaggtatttttagcctataattttccaactac

SEQ ID NO: 255692 - DNA, 201 bp, Homo sapiens
tgccagatcagccttgtagaaaactctcatttatatcaggaaagtggccaatgcaagtttagttttattaatcaagagttttatgcacttatttttaaatrtgtactttaaaagtttttaacacttactatttggggttttggagaaagcccccatcaatgtcttaaaagtccattgcttcttgggctttttcaaaaccca

SEQ ID NO: 255693 - DNA, 201 bp, Homo sapiens
ctactttctgtgtattaagcaaataagtatgttgtagatgatggaaacaaagcttgttagagaagatagttaaaaaatatggaaggaagggaaggctacarttgactttgcaatgtcggactggagttggaggtgtaagtatgaactcaaggtatttaacagagagagagagagagagagagagagatgaggggtgtgtgt

SEQ ID NO: 255694 - DNA, 201 bp, Homo sapiens
aaatatgtctagggtgaaatagctcagaagggcagagcccagattcaaattctctgccttctggttttagttcagtgttgttctgtcatgcagtgtgcctmtgcgtcctcttagatctccctctgtgcttctgaaggtgtgcagaatgcccaggccatggaggcattctttttttttttttttttttttgacagactctca

SEQ ID NO: 255695 - DNA, 201 bp, Homo sapiens
ttctggtgcctctgccccacccccagctgggcatttgctttaggttgtgttctagtgacgctgaaatgtgttcatgctccccagggaattacactcatgamctggacttcatcagccacataggtattgcttagacaggtccagaagccaggtggttctcctcccttggcccagcctctctgtaaggaagtcagactctgt

SEQ ID NO: 255696 - DNA, 201 bp, Homo sapiens
cctccatgcaagagaaactggcctcgagctgagagatggatcccaagttgctacagctgtggggatgagtgataagaagtgacaggagaaatctgccttgrtttgtaagtatttgtggaagctataatcacaaagagggataaaaataggagtgctttctatgctttccaagttaaagcacagaataagggaaggaaggtg

SEQ ID NO: 255697 - DNA, 201 bp, Homo sapiens
atacaacctggattcaaatcctggagttctcattaaccactatgtgtgaccttgaccaagttactctccctgaacctcagtcggctcacctgtaaaactgrggtataatattatgtgagtttcctgttgttgctgtcatgaactgccacaaacttagtggcttaaaacaacactactggctgggcgtggtggctcacgcct

SEQ ID NO: 255698 - DNA, 201 bp, Homo sapiens
tcttattgagggtgttcactgaaatttgctcagagagtgggaggtgggtacagtctgggagcatgaagtgctgctgtccagggaagcggtgcaggctggayaggcctcagggacagaggcctctctggggtccgcacatctcacccgtgcacccatgggggtgcctctccaagaccttaaactcttaatatatcttaagct

SEQ ID NO: 255699 - DNA, 201 bp, Homo sapiens
gcattttactatatgtgagaaaaccttaataaaataaacattagaaaaacaaacaaaaccaagaaaaatgacaatatcatatcattagatagtgctcagcmgaaaagccaagtcgacggccaggcgcagtggcttacacctgtaatcccagcactttgggaggctgaggccagcggatcacgaggtcaagggatcgagacc

SEQ ID NO: 255700 - DNA, 201 bp, Homo sapiens
ggtctcgaacttctgacctcaggtgatccgcccgccttggcctcccaaattgctgggattacaggtgtgagccatggcacccggcctgcaattttttgttrcagaaacttggtcatatagagttttcattttggtttgctttttattaaaccatatcaatttatatccttccttaactttaaggactgaaaacaaattaaa

SEQ ID NO: 255701 - DNA, 201 bp, Homo sapiens
aaatttcaaagataaaagtagagagtacagtgaacatctgtggccccatcatccagtttcaacaattatcaactcatggtcaatcttgttgtgtttatacytcccaccattccctctgcctcagagtatcttgaagcaaattccaggcatcatataatctgtaaatatttcagtatgtacctctaaaatcgcagactcttc

SEQ ID NO: 255702 - DNA, 201 bp, Homo sapiens
ttcctgcaaaaatatctatttctcctcttggaattcgcttcttaagtcattgatgcttcagtgaaagttaaagattctttcctggaatcatgatgtgtaasagaaaagaaggaaagagcttaagagctctcattttccaagtgaaaaatggaggcatctagaaaagtctgctgtggcaagaaaagggatggaagagaaaaa

SEQ ID NO: 255703 - DNA, 201 bp, Homo sapiens
acaacatctccaagcctcgtaggaatgataataaccaccactggtatgacgtctcagagatgacaaaaccatttcagaaacatgctcctatttgccgctcrcaacaacccggtgaagttgactgaagaggaggaaactatggttttccaaggcctcatggccagccctcaagccctgagcctgtgattccaaatccatgct

SEQ ID NO: 255704 - DNA, 201 bp, Homo sapiens
gactgcttaggccaaggcaggcagatcacaaggttagtagttcgagaccagcctaaccaatatggtgaaaccccatttctactaaaaacattaaaaaaaaattagccaggtgcagtagtaggcgcctgttgtcccagttacttgggaggctgaggcaggagaatcgcttgaatccaggaggcgaaggttgcagtgagctga

SEQ ID NO: 255705 - DNA, 201 bp, Homo sapiens
ggaaatcagtgcacgatcgcgaggccaggaactctggagaatgggcacgcaggcgtgcgcttgccaaggctcttaccagcctgggtcgggccaagaggccrttaagatgcctccagcaaagcctcaggtagggggagtgaattcaggaagataaatgcctcatggcacagaggttggggaacctgtgatgataacgcagac

SEQ ID NO: 255706 - DNA, 201 bp, Homo sapiens
ctcctccttccccttctctctctctctgtctcatactctgccaaaggattgcctattttattagatttttcaacaatattaacaaccaaaaggacttttgyttttaaccaaaactgtccagttttttgttttgttttgagtgctagttgataatctctgcccttatctttattactgccctctctggcttcacttagattt

SEQ ID NO: 255707 - DNA, 201 bp, Homo sapiens
gagtagatgagcttgaactgaaatttaaaggatgcgtgaagttaagtgaaggaatgagggtaataaattctaggtaaagggaaccatgtatgcaaagccagtttttgttgtctacacttcagtgttgctggagcaaaaactgtgagtcagaaagttatgggagatgagtctggaaatgtggacaggagctgggccatggag

SEQ ID NO: 255708 - DNA, 201 bp, Homo sapiens
gatggggcacaaaacaggaggagactttgggcgagaggagcagaaaagggagcatcttagaaaagaatgggcagggcggaatgacggctgcatgtggaagkgggggatggaaagactgggttccagtcgctgagaaccttggttggctctgttaccctaggcaagccccttagcctctgtgagcttcactttctgagaagg

SEQ ID NO: 255709 - DNA, 201 bp, Homo sapiens
acagtattgttttgctggtattgaggaatgtttagtaacaccaaataatgctcaccatatactgctaagtgaaaaaaagacaaaaagagctaaaacaaatwtgaaatttttttttaaagagatgcctacatatatatggatacattctagaaagaatttacagcaaaatgttaattgtcattatagttggataatgagatg

SEQ ID NO: 255710 - DNA, 201 bp, Homo sapiens
atcacgctgtctaagacaaaaacttggctatcactgtgacccctcttttttgttccgtaagctaaaataactcctaaattttagcttgtgagtctcccccrctcttctcttctaatgctattgtcatgacccttgtccaggcccttcccagttatctcctggatttctacaccacctccaatctattttccaaacttccag

SEQ ID NO: 255711 - DNA, 201 bp, Homo sapiens
tgaaggtgatggtagtggtggtgatgatggtggtaatggtggtggtgatgctggtggtaggacagtgatgctggtgctggtgctggtgctggtgatggtgrtaatggggtaatgatggtagtggtaggacagtgatgctggtggtggtgctggtgatagtggtggcagtagtaggggtgattattgtggtggtggtagtgg

SEQ ID NO: 255712 - DNA, 201 bp, Homo sapiens
taaccagggaaaacagtattgttttgctggtattgaggaatgtttagtaacaccaaataatgctcaccatatactgctaagtgaaaaaaagacaaaaagarctaaaacaaatttgaaatttttttttaaagagatgcctacatatatatggatacattctagaaagaatttacagcaaaatgttaattgtcattatagttg

SEQ ID NO: 255713 - DNA, 201 bp, Homo sapiens
gaccttctgatggtcttaacgtgtgtgcgcgcgtgtgtgtgtgtgtgtgcgtgtatatatatatatttagcctatatatttatatatatatatatatataatatttatttactgatggacttttcctcattggaaaaaaaaaacataggtagtatgagacagaaagtggtaaggaaaaagaaggttctcactcccccactc

SEQ ID NO: 255714 - DNA, 201 bp, Homo sapiens
aggaccttctgatggtcttaacgtgtgtgcgcgcgtgtgtgtgtgtgtgtgcgtgtatatatatatatttagcctatatatttatatatatatatatatataatatttatttactgatggacttttcctcattggaaaaaaaaaacataggtagtatgagacagaaagtggtaaggaaaaagaaggttctcactcccccac

SEQ ID NO: 255715 - DNA, 201 bp, Homo sapiens
aaaattctaaaagcagttctctaaagggtaacagttctcaggcttggggcaaggtactttcttttctattcttctacactgttcccctctagacacactgmaaattgagtttaaagaacaagggtctagttatcgtgctgtgattgagttttgctactgccagaggacaaaggctagattgacattagatgaatgtgccag

SEQ ID NO: 255716 - DNA, 201 bp, Homo sapiens
gacgagggaagtcaaggacaagccaggactagaccgtgaccagggcagagaaagccgtgcctccgggggctgtaagtagaccacctagctgggcgagaagsctgcaggaccgtacacctgccgcccgccactcccccgggcgctttggttgccatggacacagccctgccaagcagccacccacgctctcctgtcaccttg

SEQ ID NO: 255717 - DNA, 201 bp, Homo sapiens
gctcatgcctataaatcaagcacttggggaggccaaggcaggcagtcacttgagcccaggagtttgagaccagcctggccaacatggcaaaaccccacctytactaaaaatacaaaaattagccaggaatggtgatgttcacctggagtcccagctacttgggaggctgaggtggaaggatcacctgagcccaagaggtgc

SEQ ID NO: 255718 - DNA, 201 bp, Homo sapiens
agtgacccaaagagaaaaaagcagaagcaaaagggataactgcgtaagatattcatccgttcactctcatttcagcacttgttcagtgctctgcagcgccyccccatggtcccctctctgatctgttctctccctacacccatagcgatctttcctgcatgtcactgggtgcatggtgtgcataaagcacaccagtggctt

SEQ ID NO: 255719 - DNA, 201 bp, Homo sapiens
tatagatatagacatagacatagatatagatatagatatagatagagagtctatatatatgtgtatgtgtgtgtgtgtatatatatatatatatatatatwcatacataaaagtatatataaaagtgtgtatatatacttttttttttgagatgggatctcactctgtcacccaggctgaagtgcagtgctgtgatcttgg

SEQ ID NO: 255720 - DNA, 201 bp, Homo sapiens
caccagcctcagtcaccttcttatacgacagtgctcctctgtttgttttccaacgtgaatgtgaaatgatgcattatctccatggattcctcattattatytgtctgtcccactggacagtcggtaagcaccatgagaacccaagccacggcttttttgcccactctcagagccggagcacctaacactgcatctgcatat

SEQ ID NO: 255721 - DNA, 201 bp, Homo sapiens
atatagatatagacatagacatagatatagatatagatatagatagagagtctatatatatgtgtatgtgtgtgtgtgtatatatatatatatatatatatacatacataaaagtatatataaaagtgtgtatatatacttttttttttgagatgggatctcactctgtcacccaggctgaagtgcagtgctgtgatcttg

SEQ ID NO: 255722 - DNA, 201 bp, Homo sapiens
gctggagtgcagtggcgcaatctcagatcactgcaaggtctgcatcctgggttcaaaccattcttctgcctcagcctcctgagtagctggaactacaggcrcccaccaccacgcctggctaatttttttgtgtttttagtagagacggggtttcactgtgttagccaggatggtctcgatctcctgaccttgtgatccgcc

SEQ ID NO: 255723 - DNA, 201 bp, Homo sapiens
atacgacagtgctcctctgtttgttttccaacgtgaatgtgaaatgatgcattatctccatggattcctcattattatttgtctgtcccactggacagtcrgtaagcaccatgagaacccaagccacggcttttttgcccactctcagagccggagcacctaacactgcatctgcatatagcaggcttcagtcgatatgta

SEQ ID NO: 255724 - DNA, 201 bp, Homo sapiens
acatctcagcactgccttggcaggaatgaccaggagcaatggaggctgggaatctgaagaactgggctctaattgtgctgctgctctgtttgtgaacttargctactctaatgggctcctgcagaggggtcgattgagtccctgaggtctcctctggctgtgacattctgagagtctgtgaataccaagaacacaagacag

SEQ ID NO: 255725 - DNA, 201 bp, Homo sapiens
catgttggccaggatggtctcgatctcctgacctcatgatccgcccatcttagcctcctaaagtgatgggattacaggcataagccaccgcacccagcagraggcattcttaaacagaagcactagtggctccttctttctcctcaccatgtttactaaatacctaacctcatttttttctcatccgcaaaacagggacag

SEQ ID NO: 255726 - DNA, 201 bp, Homo sapiens
tctgagctgagccacagagagctttgtgctttaaggaagtgaaaacacttgagaacggttgacatgttgcgtgggaggcaggatgtgcagaaggatgaggstagggagaaaggcagagcctgcttcctgggcctactgtggtaggctatggggccatgaggagccacacagccccatcccagaagtgaaagcagtgagcca

SEQ ID NO: 255727 - DNA, 201 bp, Homo sapiens
tatatcgtatgtatttgctcaggtcattaaagctcttcagagcataattttgaagggctgcatgctgcatggctacaatgttactcaatcgtttactgtartatattcctgcatttggacccaaagccttcttgcagtaagatgctgaatgctaatgtgtgtttctttcttgactttgttttgggaaggcttgggctttta

SEQ ID NO: 255728 - DNA, 201 bp, Homo sapiens
aaaacacttgagaacggttgacatgttgcgtgggaggcaggatgtgcagaaggatgaggctagggagaaaggcagagcctgcttcctgggcctactgtggyaggctatggggccatgaggagccacacagccccatcccagaagtgaaagcagtgagccagtgcgagggactgtggttcatggacttcccttcttggtgaa

SEQ ID NO: 255729 - DNA, 201 bp, Homo sapiens
cgccagaaaatggagaagttcagctcaacacatggagcagacagatcaggctgccggccagaaaaggggtggggactccagatggctgctaattcagagartgagtcaagaccaggcagtgcaatggtcagtgttcaatgatcagctatgcttggtgggcagtgtcaaagcaagcaggacctaggcctagcggccatctta

SEQ ID NO: 255730 - DNA, 201 bp, Homo sapiens
acaccagacatagtttccctgccagtggaggcaggcattatccatttgtgttttgtaagaaggaaccatagcttagagaggtacagaaacaagttcaggcyggtgagtggcagagcttggaatcataatatttgaactctagagccaactgagctgtggaccactgagctttgtgcctccttgaagccccctccgtcttca

SEQ ID NO: 255731 - DNA, 201 bp, Homo sapiens
accacataaacaggagctttacaataacaaaataatgaagtgtacagcctgagaattgagaactttctccagtggggttaccaggtaggagaggctcttgktgttttccatttatatagtgtaaagttggcaccttctctggtgaccttctatagggtgagggtggggcatcttaaaactgctcttggagacaagtaactt

SEQ ID NO: 255732 - DNA, 201 bp, Homo sapiens
aggtatcagtgacaggaagtttgggactacaaaataattcccaaagtatgtgtaactctgaactcctcacaagctctgctttcatgagccttaacaggacrggtgaacagctaatcccttgattcagtgaaatctatttctgatgctaggggagcccaagggccaaggagaggccacagtggttgcactgacccacgcacc

SEQ ID NO: 255733 - DNA, 201 bp, Homo sapiens
tatagtgtaaagttggcaccttctctggtgaccttctatagggtgagggtggggcatcttaaaactgctcttggagacaagtaacttaactttgtatgtawacgtacatacatatacacacagacacacacacatatagctgacagtaagtttgttatcaatctacaatgtaaagtacttatcaaaagagctaatgtgata

SEQ ID NO: 255734 - DNA, 201 bp, Homo sapiens
ggggctcacacctgtaatcccaacactttgggaggctgaggtgggtggatcacctgaggtcaggagtttgagaccagcctggccaatgtggtgaaaccccrtctctactaaaagtacaaaaattagccagacgtggtggcaggtgccagtaatcccagctacttgggaggctgaggcaggagaatcacttgaacccaggag

SEQ ID NO: 255735 - DNA, 201 bp, Homo sapiens
taaatataagtataaatatagatatcaaaatatgcaagcacatatacatatatacacatatacaacatacacatgtaaaacaaacttgagaatatgcatgytgtgctattttgtatgctgttttctttcccttaacaatatgtttcagttacctattgcagcatcaaaacaacttcaaaacttgtgtgctgaaacaaccac

SEQ ID NO: 255736 - DNA, 201 bp, Homo sapiens
agctgaagcaggagatgagcaagataggcaagttaataaataattataacactatatgacaagcactattacatagttgtgtacaagtcacgtgggagccratgaagggaatgcttaactctgactggtgcaaaggaagactttacaaaggagttgacatttgagctggatcttgaagaatgagtgaaatttgcaagacag

SEQ ID NO: 255737 - DNA, 201 bp, Homo sapiens
gaggagaaaccatgcagagaagatagcagagccagcaaagaactcactgccccacaccccccacccccagctccaaaaacacgggaacaaagcctggcggsggctgctaatcagcttgtccgccctggggctgatgagtgggagaggaacagtttggtcagggccactgcaggtgtggaggccacaggagctttcagaagc

SEQ ID NO: 255738 - DNA, 201 bp, Homo sapiens
attcagaatcttcaaagtcggggtgcagtagctggggtgaccccccccgggttgaccgccccctccccccgcggcccggtccggtttggttcttgggaggygtcgggcgggtgcggctaacggttccggagcgcggggagagcggctttccacacgtcgtgggggaggcgccccggagcgcgagtgcgggggctcccgagt

SEQ ID NO: 255739 - DNA, 201 bp, Homo sapiens
tagtcccacagacctttgaggagctgagccttgttcctcaccactcacagggcccctcatggctttcctgtcagtgtagatctgtgaaactttccattctygttcctgccatgttttgtcctgcggggaaagtatatgtaactaacattgtacccagccttgtagggtagatgtggtccctgccttcacggttaagaacaa

SEQ ID NO: 255740 - DNA, 201 bp, Homo sapiens
cttccatttcctggagccctttatttttattttatttttttgagatggagtctctctctgtcgcacaggctggagtgcagtggtgcaatcttggctcaccrcaacctccgcctcccgggttcaagtgattctcctacctcagcctcccacgtagctgggattacaggtgcctgccaccacctccaactaatttctgtattt

SEQ ID NO: 255741 - DNA, 201 bp, Homo sapiens
agaggatcacctgaggtcaagtgttcaagaccagcctggccaatgtggtgaaaccctatctctactaaaaatgcaaaaattaggtgggtgtggtgacgcgygcctgtagcctgtaatctcagctactggggaggctgaggcaaggagaatggcgtgaacctgggaggtggagcttgcagtgagccgagattgcaccgctgc

SEQ ID NO: 255742 - DNA, 201 bp, Homo sapiens
gaacagggatcccaaaatcccaatgcaattgtttctttaactctacaaacaatgcaatttctaggatgttttataaaagaacgctgagaaataacttctcrcaagatattaaaataattataaagccacaataatttgaataacatgctattggcatgataatggatagataaatcaatagtacagaagcaagccttgaga

SEQ ID NO: 255743 - DNA, 201 bp, Homo sapiens
ctgtatcccaaacctgagattatattaacaaaggccaaaaacatgcaggagacactgctgaaggaatagtaaagatatgtgaagtttctcattgtctctcttcactttgatgacaaaacgtataaatcagaagataattttaataggtagacaatcactagcgaaactaaaaatagggtgcacacctttcaaatctggaag

SEQ ID NO: 255744 - DNA, 201 bp, Homo sapiens
cctgtatcccaaacctgagattatattaacaaaggccaaaaacatgcaggagacactgctgaaggaatagtaaagatatgtgaagtttctcattgtctctcttcactttgatgacaaaacgtataaatcagaagataattttaataggtagacaatcactagcgaaactaaaaatagggtgcacacctttcaaatctggaa

SEQ ID NO: 255745 - DNA, 201 bp, Homo sapiens
gcatgtgtatatatctatgtaactgtgtatgtagctaaatgtgtaccttaacacatagagcggctaaaccagggaatctgggtcagtgcatagatgtatgyacatatttactacacattttcatagaactaactatgccatggataagattggaactcaagagtgtttcaaagtcggggtaaggtgatgtgttccattcat

SEQ ID NO: 255746 - DNA, 201 bp, Homo sapiens
ggattacaggcgtgagccaccacgcccagccctgaaccattattaaggcccacgaaaatctccctggcttcatttgttcatgtctattcaaaatcagagtyttttttctgttccattttgtcatgttaacttctgcctatcctttaacttgcctatgtctttttttttttttttttttttttttttttttgagatggagtc

SEQ ID NO: 255747 - DNA, 201 bp, Homo sapiens
cgggaggcagaggttgcagtgagccaagatcatgccattgcactccagcctgggcaacaagagcggaactccatctcaaaacacacacacacacacacacmgacacagaaacacagaccactgggcctggcccccagacctgccaagttagactccctgaggtggtctcagaaatctatttttaacaagttctccaaaaga

SEQ ID NO: 255748 - DNA, 201 bp, Homo sapiens
gtaacaacactgcctttgttcttaaatgttcctccttcctactttccgttacactggactatcaatgattacagaaatatttctgaatctaaaaccttaaagcattctcagaaggagcagacagtcaacaaaggcatcaaaaacggtgaaggaagcagatcagcaagaaagatcagagagagcagaagcagacaatcgtgg

SEQ ID NO: 255749 - DNA, 201 bp, Homo sapiens
agctcagtaggattaagtgactgggccaaaatcacacagataacacacgatagagcctggactcaaacctgtcttcaagtatctaaggtgctccaagtctrcagaggaggagacaagaaaacaatatggtccaggcctcaagtagttggcaatctactatctacatgtaagaaatatctttagaacaatcgtgttaatatt

SEQ ID NO: 255750 - DNA, 201 bp, Homo sapiens
ttatccagtgccactaattatttctattggtgtggatggttaagacttaatatctaatagcatctaccaatgtcaggtttctggttttgacaatatcctayagttatataaaatgttatcattgggggaagctgagtgaacgggacctaggaactctatgctatttttgcaacttaattgtgagtcaaaatattccaaaat

SEQ ID NO: 255751 - DNA, 201 bp, Homo sapiens
tcctttcctagacctttcagattccaaggatggaggctggttgttattaatctttgtatccccagtgcctggcctcaagtagttaccccgccccccccaaraaaggttcttagctacatgagaagcatatggaatttgctattttttagtttttgtaacaacaataagaatagtgagaaacagtctcttgtatttctattt

SEQ ID NO: 255752 - DNA, 201 bp, Homo sapiens
tctgttggctccgcggatgtgacctggagccccaccatgcgatagatagagtcccagggttggcatgactcagcgagtgcatgcgtgcgtcccttccctcygcactgcactgtcatgaccactcaccaaggatctgctttgtctctttcactttcaggacgcttccattgcacacagattccatgtgatgagagagaaaca

SEQ ID NO: 255753 - DNA, 201 bp, Homo sapiens
tcctttaagagaggattcaggaattgttgacctctttttttttttttttttttttttgaggcagagtctcactctgtcacccaggctagagtgcagtggcrcatgttggctcactgcaacctcctcctcccaggttcaagtgattctcatgcctcagcctcccgagtagctgggattacaggcgtgcaccatcacgcccgg

SEQ ID NO: 255754 - DNA, 201 bp, Homo sapiens
cctcagcctgggcactctgtgaagtcaccaagttaggttcaaaaatgaaaggaaagaggaaaccagatcatttgcaagagaaagcaaacccttcttccttrtaggatgaaatttgccagaacttagttgtgactgacgtatagctacccctttctccctctttccttctttgtctgtatcttctcattagtcaattttcat

SEQ ID NO: 255755 - DNA, 201 bp, Homo sapiens
cagtgatgactcactgcaaactgttgttgttgagtgtttgctgagtgcagcagccctttctggcatagctgctcccagcctgggaccagaagccaggcggyactgggagagacacagcaggaagagggtctagtttttggcacatctcttggttctaccttctgtccttggcttcctgctcttctcctggtgcctaaaacc

SEQ ID NO: 255756 - DNA, 201 bp, Homo sapiens; identical to SEQ ID NO: 50858

SEQ ID NO: 255757 - DNA, 201 bp, Homo sapiens
agctttccccaagatgggaagaccttgcgcagctctcatcccctgccacagccacagactgcattcctagagggtcccctgaacatagtaactgccccaasggtgcgaacatgaaccaagggacagggacgcctttcctcatagtgccttacgggaagccctgatgaacctctcagcaagaggaataaacaggaggcataa

SEQ ID NO: 255758 - DNA, 201 bp, Homo sapiens
gctttccccaagatgggaagaccttgcgcagctctcatcccctgccacagccacagactgcattcctagagggtcccctgaacatagtaactgccccaacrgtgcgaacatgaaccaagggacagggacgcctttcctcatagtgccttacgggaagccctgatgaacctctcagcaagaggaataaacaggaggcataat

SEQ ID NO: 255759 - DNA, 201 bp, Homo sapiens
agcacattcagcttctgtgtccaggctgggactagcttggaagtgttagaggagagggaagccatgatccctgtcttcctggagcttgggctataatgggrgagacacagccaatcccaataagcgagcatgaacccagctgacacataaccccgagacacagacacaatcaaggcaaaccaggtcccatggggatgtcct

SEQ ID NO: 255760 - DNA, 201 bp, Homo sapiens
gcgagcatgaacccagctgacacataaccccgagacacagacacaatcaaggcaaaccaggtcccatggggatgtcctgtacctgcccttccaagaagctrgagggcctgggttggtctttaaatcttcttttttttcctcagatactaatatacagaatgcagataatgccaccaaagcagacgaggcctgtgcccctga

SEQ ID NO: 255761 - DNA, 201 bp, Homo sapiens
ccagctgacacataaccccgagacacagacacaatcaaggcaaaccaggtcccatggggatgtcctgtacctgcccttccaagaagctagagggcctgggytggtctttaaatcttcttttttttcctcagatactaatatacagaatgcagataatgccaccaaagcagacgaggcctgtgcccctgatactggtaagtc

SEQ ID NO: 255762 - DNA, 201 bp, Homo sapiens
agacacagacacaatcaaggcaaaccaggtcccatggggatgtcctgtacctgcccttccaagaagctagagggcctgggttggtctttaaatcttctttyttttcctcagatactaatatacagaatgcagataatgccaccaaagcagacgaggcctgtgcccctgatactggtaagtctttggaatataagacttgtg

SEQ ID NO: 255763 - DNA, 201 bp, Homo sapiens
gaaagaaggggacacagggagcaggaggagaaggcagaggggctgcagcaagaaggcatggcaggcaccagaatatgtgggtgcacagagccctgccgccmgccccgtgatgtggacagcaacactcagcctgaacccaccagacaccggggagctgctgctgcagggaggcccgctggctgtgctccaggctgaagtgct

SEQ ID NO: 255764 - DNA, 201 bp, Homo sapiens
aaaaaagccctggcctttctattcattttccaatgtcccgggcatgcaatacagtggcactggcatagccaggaggatgatgccgcacactccccttcagsaaaaagcgcctttctggggatgtgttcctgctgtgttcattgcctgcagaggaaggcagtgaagcaggtggaggtgcagccgcagcagataagcagggtc

SEQ ID NO: 255765 - DNA, 201 bp, Homo sapiens
ccaaagttgggggtcaagtgattcagcatgttgggtcagaatgctctcccacaatacatttctttctggaagatcctctcagccaacttctgtcccagccycaggaagcatatgtcttctaccaccaaggtcccttactaaaagaataactttccccaagcaatgtctaccaaacaaatgcatcttttaagtaataataaa

SEQ ID NO: 255766 - DNA, 201 bp, Homo sapiens
gatatagtcttgtcacactttgagaaattgtgatccagctctctctaccctcatccttattccaccctacctttatttaaagcatgtattaccaaattctrttcctactgcctttgtctattaatatggtcatccacgtgatatctatgtgacataaaacgcatcaaaaacgtgacagtgatttttcttctagatactgga

SEQ ID NO: 255767 - DNA, 201 bp, Homo sapiens
gttataactttataaccctgatagcctatacttgtgtaggtcattattttaatataaaatgtgagtgttgatgtatattttatggtaaattaagtgacttrtaagtgatactatcaacaattgtactgcaacttgcatcttctgttcttcttgaattctttttatcacccagttcctcctctatagggacatgtaaataga

SEQ ID NO: 255768 - DNA, 201 bp, Homo sapiens
agcctgggcaacatagtgagacactgtctctacaaaaagttaaaaaaaaaaaaaattagcaggtcatagtggcatacacctctagtcccagctactctacwgggagggctgggagggggctgctgaagtgggaggattgcttaacccaggagttcaaggctgctgtgggctgtgattccactactgctctccagcatgggt

SEQ ID NO: 255769 - DNA, 201 bp, Homo sapiens
agtcagcagtttggaaatctagacagtgactcagagttctgccttggtgttccgttgtggggtcattttaggatcaagacaattacttgttcaatggaatyacttttgttttctaaatcattcgattttgaggttgttttgctcctcctgccacttactcattggctattctcttctcgttagcatggggttgtaaagagg

SEQ ID NO: 255770 - DNA, 201 bp, Homo sapiens
agactatgtttaaaagacaccccagagatgcagttggcaaaatccagaatctgcgcaacactacagccttactactcaaagtgtggtccacggacctgcarcatcagcatcaccaagaagggggtcagaaatgcagtctcgggccgcacccagacctcttgaatcagaatctgcattttaataagaccctggagtgatctg

SEQ ID NO: 255771 - DNA, 201 bp, Homo sapiens
taagtccaaatctggaagctgctcaaaaaaaatatctggttatccagtatattttgggaatctctgcacatcaattactccttttaattgaggattttttwaattttttttttagtatttattgatcattcttgagtgtttgaggatttttttaatacagaaaagtcttgagaatagtatatcaaatactcccaactcccc

SEQ ID NO: 255772 - DNA, 201 bp, Homo sapiens
agccacgtgagtcaaatcactcctggccctgcctgtgactcaggcaggggagaaggtgactctaaatctcctgctcacctgtagacacatggccagggccctgacttggagtcacaaggcctggcagtgagccctggtctgtgcttaggttaagccacttattgaactgtatatctgagcctcagtattctcatctataaa

SEQ ID NO: 255773 - DNA, 201 bp, Homo sapiens
ccaggaggcagaggctgcagtgagctgagatggtgccactgcactccagcctgcgcaagacagagaaagacgccgtcttaaaaaaaaaaaaaaaaaaaaargaagagtaaactgaagggagagaaaagtccagtgggacaggaaaaagtcacgtgctttgactgccgaccataacatgtcctaatatgctatgacaacgca

SEQ ID NO: 255774 - DNA, 201 bp, Homo sapiens
actaagaggataatgacagttgagtgtgacctggaggtcaggcctgcacagctgatttgggaaagatgagtctgggccagatgaaggtaaatgaaactgamgaagggacaaggaaaaccccaaaacagaacgtgaaggatggcaactgctggaaggcggtcaaagcctgtgtgtgaagtaggagaaatctggatgggctta

SEQ ID NO: 255775 - DNA, 201 bp, Homo sapiens
aaatttcagttagacaatcagtgatgaggaactcacggaaaagcttgagtggttttgtgctagtgactttacctctctcagccctaatttccccatttgtmaaatggggacgataccagaaaacctttacctcacaggtaaccacgaaaatgacctgagacaacatgactagtatcttgcaatctttagactttctgtgtt

SEQ ID NO: 255776 - DNA, 201 bp, Homo sapiens
tgcagcctcatggacacgccattcagaagcacgtgtcagtgctctggtcagcttctgtcatgagacacaactttccatgtgaactaagaggataatgacarttgagtgtgacctggaggtcaggcctgcacagctgatttgggaaagatgagtctgggccagatgaaggtaaatgaaactgaagaagggacaaggaaaacc

SEQ ID NO: 255777 - DNA, 201 bp, Homo sapiens
gatctcggctcactgcagcctccacctcctgggttcaagcaatgctcctgcctcagcctcccaagtagctgggactacaggcgcccgccaccacacccggytaatttttttatttttagtagagacgggatttcaccatgttggccaggatggtcttgatctcctgacctcgtgatccgcccgcctcggcctcccaaagtg

SEQ ID NO: 255778 - DNA, 201 bp, Homo sapiens
aaatgaaaactgcaaactgttgatctcagtgaaacttttattggagctctcaacagagtgttgtaattagtcaggttccccctttcctcttctgtaccaccttgcccctgaacttgggtggggagaggggaagcggctgctcataatcacggtttctgtatatgcagggttggggtggagataacaccacgggatgccctc

SEQ ID NO: 255779 - DNA, 201 bp, Homo sapiens
aggagggattttcccagtatgagaaaccaggatcatgatgcttccatatttcccacgatcattttggtgatcagctcaagacagggttgcctgccttatayggtaacttgcttttggcattttaggggaaaattctaaaagcagttctctaaagggtaacagttctcaggcttggggcaaggtactttcttttctattctt

SEQ ID NO: 255780 - DNA, 201 bp, Homo sapiens
ggcgggcgcctgtagtcccagctactcgggaggctgaggcaggagaatggcgtgaacccgggaggcggagcttgcagtgagccgagatcgcgccactgcastccagcctgggcgacagagcgagactccgtctcaaaaaacaacaacaacaacgacaaaaacggcactgctgtgttacagttctggaggttggaagtctga

SEQ ID NO: 255781 - DNA, 201 bp, Homo sapiens
tgcttgaacctgggaggcggagattgcagtgagctgagatggtgccattgcactccagcctgggcaacaagagcaaaactccgtctcaaaaaaaaaaaaaraaaagaaaaaagaagaaaaccaccatcatttagccaaaccatgctgcctcataaacttcaggaagcattatgaaaaaaacatggtctttggtgccaaaaa

SEQ ID NO: 255782 - DNA, 201 bp, Homo sapiens
catatcccaaacatcatttgcaaatggattgttttctttttgggggatgtttttggtcttttttttttttttttttttttttagaaagagtcattctgtcrcctggcctggagtgcagtggtgtgatcttggctcactgcaacctttgcctctcaggttcaggtgattttcctacacagcctcctgagtaggtgggattaa

SEQ ID NO: 255783 - DNA, 201 bp, Homo sapiens
aagaacttattaatggtcatatcccaaacatcatttgcaaatggattgttttctttttgggggatgtttttggtcttttttttttttttttttttttttaraaagagtcattctgtcgcctggcctggagtgcagtggtgtgatcttggctcactgcaacctttgcctctcaggttcaggtgattttcctacacagcctcc

SEQ ID NO: 255784 - DNA, 201 bp, Homo sapiens
tgcagaatggtttgtgttaagtgatgtaactggaggtgacctatgggagcaaaaaccaaggacacgaaacgtggcatggagggttttccaatgacagagaygcctgaaccaagacacggaaaaagaggagggcaacacagggagaaggaagcaaatgtacgaaaagatacgaaggagtgagagggtgcagtatacttgtgg

SEQ ID NO: 255785 - DNA, 201 bp, Homo sapiens
gtgacctgtggagccagggattcaatccagaatcatccaacctcaaaactcctgcagtctttcctatagagagagaggacacagtggtcctggtggtgtgkttggttcctgtggaatgagcaaggctgcactctcagcggagctgctgtagtggtgcctgctgcccataggcccactgttgggctgtgagagatgtggaat

SEQ ID NO: 255786 - DNA, 201 bp, Homo sapiens
ggacacgaaacgtggcatggagggttttccaatgacagagacgcctgaaccaagacacggaaaaagaggagggcaacacagggagaaggaagcaaatgtaygaaaagatacgaaggagtgagagggtgcagtatacttgtggaagagcaagatgttcagtgtgatcagttgtatggtctcggcagaggaaagaaaccaaac

SEQ ID NO: 255787 - DNA, 201 bp, Homo sapiens
cccattacaccagcggctaaacttaggaaaggccgcaaggcataggaagaaagcttgatacccaggatttggaaatgtaaacggcattatcaaacaaggcytattttactcagctgaactgaggttctccaaagagtagttactgcttggccggaagcctttaccattactgcccaggtttggactctcagggataatctt

SEQ ID NO: 255788 - DNA, 201 bp, Homo sapiens
cagatacacacaaaccacttttttaaaaagtactcctcttcaacccattcctcaggcttttaaggtcctcttttcacacaagtatctttttttttttttttcatggagtttcgctctgttgctcagcctggagtgcagtggcgcgatcttggctcactgcaacttccacctcctgggttcaaacaattcttccgtctcagc

SEQ ID NO: 255789 - DNA, 201 bp, Homo sapiens
tgtcccccaggctggagtgcagtggtacaatctcagcctactgcagcctcgagctcccaggttcaagctattcttgtgcgtcagcctcctgagtagctggrattacaagagtgtgctgccacgcctggctaatttttgtacttttttagtacagacagggttttgccatcttggccaggctggtctcgaactcctgacctc

SEQ ID NO: 255790 - DNA, 201 bp, Homo sapiens
attttcctacacagcctcctgagtaggtgggattaaaggcacacaccaccacgcctggctaacttttcttcctatttttagtagagatggggtttcaccaygtcagcaagcctggtcttgaactcctgacctcaagtgatttgcctgccatggcctccgaaagtgctgggattacaggtgtgagccaccactcctggccaa

SEQ ID NO: 255791 - DNA, 201 bp, Homo sapiens
ctcacacacacagactatacacactcactgcacactaggaacacgtgtacttccagcccctgatactatagtcacaaacttacagttcagatgatctcctctaacggtcttttgcactcccagatacacacaaaccacttttttaaaaagtactcctcttcaacccattcctcaggcttttaaggtcctcttttcacacaa

SEQ ID NO: 255792 - DNA, 201 bp, Homo sapiens
cctcttccacagatgtcttaattagatgtccctgttcaccagaaacaagaattataggaccaggcagtcaccacagagaggggcctctgccggcaaggaakagccaagccctggactcaccttcaatcaggccatctgctgaaaagaccagccttttcctgttgcccaggtggaagccagggaaagagcttagattcttat

SEQ ID NO: 255793 - DNA, 201 bp, Homo sapiens
cttttctttctttttttactgttattttaggttagagagtacatgggagggtttgttacacaggcagacacgtcttgcgggagtttgttgtgcagattatyttatcacctgggtttttagcccagtgcccagttgttaatcttttctgctcctctctgttgggtttgtgctttcagtatgtgcttgaaagaggtcagcgct

SEQ ID NO: 255794 - DNA, 201 bp, Homo sapiens
actggaagaaaccaagtcaactaacaaaagtcatgtattttttaggcagtggggctaatttaatttctgacctagctcttcactccagagtccaagctctrtttgccgcaactgctgtctcacatagatttcattgagcaagcactgatgtataccagacactctgataagtactttatacatcatcccactcattgctca

SEQ ID NO: 255795 - DNA, 201 bp, Homo sapiens
tctcacacacacagactatacacactcactgcacactaggaacacgtgtacttccagcccctgatactatagtcacaaacttacagttcagatgatctcctctaacggtcttttgcactcccagatacacacaaaccacttttttaaaaagtactcctcttcaacccattcctcaggcttttaaggtcctcttttcacaca

SEQ ID NO: 255796 - DNA, 201 bp, Homo sapiens
gagcttagattcttatttcatgtggcctgtctaggcctatcagatcagtctccaagctcagatctagcaaagcccacttcattcccagagccataaagacmgaagagcagggctttcagggtccagacttcggctcggaggcctgagcaatctatcactgtcagagtgtcagctcaggaaaggctgagcccacctttccct

SEQ ID NO: 255797 - DNA, 201 bp, Homo sapiens
taatataggcagataaacatctatttaatattaaatagggtgtaagtcatcaatgtagaaatatatggaattatttttctcatcatttatcttgtttaaamgtttttcaataaaatatcaatacatttatcatgtaattaaataatacatcagacagtgttattatatagcacattgcaatatcattataaataatttgga

SEQ ID NO: 255798 - DNA, 201 bp, Homo sapiens
taacttgatagatataccttaaaatatttgtgataatgtgtttttataaagctatacatatcatttttaaactaatttttctttatataagtcattcaggytcattgtaaaaaaaatcatattttgcatcccctcctccaagaaataaacactcagcgctataacatattttctttcagcattttaattgcacaattttat

SEQ ID NO: 255799 - DNA, 201 bp, Homo sapiens
aatgatttctgtaattcaagactttgggtaaacatcagttttaatgcaatcccctctttaaacagatgagaaaactgaggttgagtgtggtggagtaagcytgcttgtgttaaatcacacacacatactttgtgtgttaaatcacacacaactgaacacaaactcagcggtggaatcacggtcttctgctgcctggtctgg

SEQ ID NO: 255800 - DNA, 201 bp, Homo sapiens
ttttccaatgtcccgggcatgcaatacagtggcactggcatagccaggaggatgatgccgcacactccccttcaggaaaaagcgcctttctggggatgtgytcctgctgtgttcattgcctgcagaggaaggcagtgaagcaggtggaggtgcagccgcagcagataagcagggtctctgtcctccaagaacaattagaga

SEQ ID NO: 255801 - DNA, 201 bp, Homo sapiens
aaaaccctggcttgtgaggtagaggagcaggatggaaagagcatgggctctggccagcaaaagacccaagtctgactactcattcagtccctcattatctrtgtgggcttgggctagttaccgaacttctccaaatctctgtttctcatttctagaatgggaacaaatctacctccttccacgtcaacaaacactttttag

SEQ ID NO: 255802 - DNA, 201 bp, Homo sapiens
caccaggacaggacctctgtgatccggaagagggtgttggcattttttactggtggtacctgagggtcgtactcagatggccataggtcagggctatttcwtataaagcagaatgaagaggaaggacactaatgagacagtgtcagtgcctctcagccttcctggacccctgcatctctatgacaggagtgagcagtagac

SEQ ID NO: 255803 - DNA, 201 bp, Homo sapiens
cttattccttagaaccctagaaagtcaagctggaaaagatctttgtggtccctggttgatcccctttcttttacaaactgagacccagagaaatgaaggarcttgcccaaggacatccaccgaactagcaccagagatcatcccccttactcgctcacatcacgcctctcacccaatgatcccttgccaagaagctttatg

SEQ ID NO: 255804 - DNA, 201 bp, Homo sapiens
tgaattgaaggaaatactactaatttcagtttgagcttagggaaaataagaatgtattattttctcctccaagttaatggccctctgaatccaatccataraacccttggaggttggtggaccccaggtataagcaccctgctctccagggttaaggctcctgagaagagaagggcatcactccactcactgtggcccaca

SEQ ID NO: 255805 - DNA, 201 bp, Homo sapiens
tcttccatagaatgggaagaagttttatgcctttatgcttctctgtaccatcaacctcaaagttcggtgggtatctcagagaaagtgttattattagcaarcagtcataattccaagaaaccacttgctaaggggttcctgatggatgattttctctctctgtagaaaacaagtaagaaccttctatcttggggaagtctg

SEQ ID NO: 255806 - DNA, 201 bp, Homo sapiens
ctctcacacacacagactatacacactcactgcacactaggaacacgtgtacttccagcccctgatactatagtcacaaacttacagttcagatgatctcctctaacggtcttttgcactcccagatacacacaaaccacttttttaaaaagtactcctcttcaacccattcctcaggcttttaaggtcctcttttcacac

SEQ ID NO: 255807 - DNA, 201 bp, Homo sapiens
ttcctttccctggaactgtctgggcagagagtttgtttggacactataggggagataacagctttagtcatctggttgattaaatgaccttcattagctcytccaatacttggtttctatatttaaatagatttctaccgcagagggtgtgtgcatgtggggatgccgcctactgaccctcttcctaacaataattgctgg

SEQ ID NO: 255808 - DNA, 201 bp, Homo sapiens
ggcgtgcaccatcatgcctggctaacttttgtatttttagtagagatggggtttcactatgttcaccaggctggtctcaaactcctgacctcaagtgacccgtcctcctcggcctcccaaagtgctgggattacaagcaagaattgtccttaaaagagaggttagagtgttcattgaagacattcatttaaagcccaggac

SEQ ID NO: 255809 - DNA, 201 bp, Homo sapiens
aagtacccactggagctcaaccttcaaacatacattaatgtgtgtgtgtgtgtgtgtgtgtgtgtgtgtgtgtgtgtgtgtgtgcagatatgtatatgtcmattaaattacattaaagcaaaattttaagatgtaattaaagagaatcaatcagtaaattgtgctattaggaaatatatttctttcgaatcagattatgac

SEQ ID NO: 255810 - DNA, 201 bp, Homo sapiens
agaatggataatgatttggactttgtttttgagcctaaaggtgttgacttttatttagcccacagaattgtctttttatttatttatttatttatttatttttgagatggaatctcactctgtcacccaggccagagtgcagtggcgtgatcttgtctcactgcaacctcctcctcccaggttcaagcgattctcctgcct

SEQ ID NO: 255811 - DNA, 201 bp, Homo sapiens
cagtcctgctccaacccataccaacaatagtagccatcatttattgagagctttcaagaatctcatgtacattatttttaagtggcacaactcaccaagtktaagtattattgatccatcttacagatgagaaaagtgaggctcatagagatgatgcaacttgctcaagaccacactagttactagagaagctacgattca

SEQ ID NO: 255812 - DNA, 201 bp, Homo sapiens
aagaatggataatgatttggactttgtttttgagcctaaaggtgttgacttttatttagcccacagaattgtctttttatttatttatttatttatttatttttgagatggaatctcactctgtcacccaggccagagtgcagtggcgtgatcttgtctcactgcaacctcctcctcccaggttcaagcgattctcctgcc

SEQ ID NO: 255813 - DNA, 201 bp, Homo sapiens
ctaggcctgtccactccacatctcctcttagcctgctacaattccctgcctctccatgtgcccagttttgtgccccatgaccaaagatgcacccaaaaaargactagaaaagagccatagatatgattaaagggcccatgagaaaaccacaagttatccaaaatcacttttcctggagagaaacagagaacgtactgggaa

SEQ ID NO: 255814 - DNA, 201 bp, Homo sapiens
gaagaatggataatgatttggactttgtttttgagcctaaaggtgttgacttttatttagcccacagaattgtctttttatttatttatttatttatttatttttgagatggaatctcactctgtcacccaggccagagtgcagtggcgtgatcttgtctcactgcaacctcctcctcccaggttcaagcgattctcctgc

SEQ ID NO: 255815 - DNA, 201 bp, Homo sapiens
acagcctaagggagaagtaacaactagaaaccaaggcctgatagattcccagcctgtgcacggtggagctacacgggcacctacctgacttcctacacatsgagaggaaagctttcttatccataccccaagtgcgcatctgcccgcctttgaatcattaaacaccacccctcccttcgccacccctttcctcacaccatg

SEQ ID NO: 255816 - DNA, 201 bp, Homo sapiens
gagctattataaactcatttgataagtaagatgtgctggccattttcaaataggtaattcaaatatagcttagaggacttgcaattgagagagggtagagkagggactcaccattgaactagaattcagaagacccagagcttctcagcaccagtcatggattagatgagtccctggacatctccagcctccatttcaaca

SEQ ID NO: 255817 - DNA, 201 bp, Homo sapiens
agaagaatggataatgatttggactttgtttttgagcctaaaggtgttgacttttatttagcccacagaattgtctttttatttatttatttatttatttatttttgagatggaatctcactctgtcacccaggccagagtgcagtggcgtgatcttgtctcactgcaacctcctcctcccaggttcaagcgattctcctg

SEQ ID NO: 255818 - DNA, 201 bp, Homo sapiens
tctccaccctccttacccgcccacccttcatccccatacaactactgatctgctttctgccatatatattaaattacattgtctagattttatataaatgwtatcatacactctctactcttttgggtctgccttttttcactccatgtaataattttgagatttatccattttgtatatatcaatagttcacatatttta

SEQ ID NO: 255819 - DNA, 201 bp, Homo sapiens
gagcacatacagaagttaataccaactatatcagtgtcctgggctgccataacaaagcaccacagctgggtggtttagaacagcagaaatgtattcgctcrtagctctaaaagctgcatgtctggcctggcgcagtggctcatgcctgtaatcccagcactttgggaggcagaggcaggcggatcacttgaggtcaggtgt

SEQ ID NO: 255820 - DNA, 201 bp, Homo sapiens
ttacccgcccacccttcatccccatacaactactgatctgctttctgccatatatattaaattacattgtctagattttatataaatgttatcatacactmtctactcttttgggtctgccttttttcactccatgtaataattttgagatttatccattttgtatatatcaatagttcacatattttagttgctgattag

SEQ ID NO: 255821 - DNA, 201 bp, Homo sapiens
gtatttttggaaaattattgcccttttgcataagggtattttggtgatacaacagagtctgtatctgtatttacggctgatgtgattagcatattcagtcrcccatattttctttaaacttttcataattgcatgcgttttattatgaagaaattgaaaaacaaggtgaaaaggtaatagatgttctcaaaaaagattcaa

SEQ ID NO: 255822 - DNA, 201 bp, Homo sapiens
tatcttctcattagtcaattttcattctttctttctttttctttgttgtactatttcaagatgaccactatttcagacactgttcccaccccaaccctaggtaggttgggagaagaatggataatgatttggactttgtttttgagcctaaaggtgttgacttttatttagcccacagaattgtctttttatttatttatt

SEQ ID NO: 255823 - DNA, 201 bp, Homo sapiens
attctttcctggaatcatgatgtgtaagagaaaagaaggaaagagcttaagagctctcattttccaagtgaaaaatggaggcatctagaaaagtctgctgyggcaagaaaagggatggaagagaaaaactcaatggccagacagcagctgacaaaacccagacttgcctgcccagttaatcatttgggtccatcactcctt

SEQ ID NO: 255824 - DNA, 201 bp, Homo sapiens
caaatatggctgagaagcaagcaccagctgaagaccaagtggctgcgacccccctggaaccccccgtccctcggtcttcaagctcggaatccccagtggtrtacctgaaggatgttgtgtgctacctgtccctgctggagacggggaggcctcaggataagctggagtgtaagtgctcaccctgtcaaggggcttcagctt

SEQ ID NO: 255825 - DNA, 201 bp, Homo sapiens
tgcgctgccacccacccagtgtggccctggcggaacagaggcctttcacctgctctctggaaattttcccagccagggccgccggggacttggccttcctgccacttgccggaaggagggtttccatttccaagaaaaaaaaaagtgtcagaaacttggcgcaggctaactgcctgtcctctcccaaaggatctgtgcaga

SEQ ID NO: 255826 - DNA, 201 bp, Homo sapiens
ggccgttctgcatttctgttatacctgatttgctaaattattatttaccttagtaatccaatgctagtctattatcttcagtagtggtagcaataacaccrctaataacccagcaaatcccaaatgggattgagatcatttgttttatattttaattgagatgaacctgatgaaaatttataattcatatacagaaatgtc

SEQ ID NO: 255827 - DNA, 201 bp, Homo sapiens
attgagaaccagaatctggaaagggaaggggtcccatcaagtggtcaagacttccttgctttgctggcaggacttcctgaaagcctttactcagaaaactrctacctcctcttaatagattttttaaagaaagatattcaacatctgtcctccttcccctattctgtgcccaggcaactctttaactatgaggaaatattc

SEQ ID NO: 255828 - DNA, 201 bp, Homo sapiens
ctgcgctgccacccacccagtgtggccctggcggaacagaggcctttcacctgctctctggaaattttcccagccagggccgccggggacttggccttcctgccacttgccggaaggagggtttccatttccaagaaaaaaaaaagtgtcagaaacttggcgcaggctaactgcctgtcctctcccaaaggatctgtgcag

SEQ ID NO: 255829 - DNA, 201 bp, Homo sapiens
ggaactattaatataatcgtaccacttgcactccagcctgggcaatggagtgagaccctgtctcaaaaaaaataagtaaataaaatacattaaaaaaaaaragaaagaaatgattcagaaagaaaagggactcagggggacaaagagaacataaagagaagtcactctgattaataaatagatatggaaataaagaggaaa

SEQ ID NO: 255830 - DNA, 201 bp, Homo sapiens
gaacgagggggccagttaattaaaggagttgagctcagtttcgtggtgctactaaagtaggttttaaaaacatgtcttcaggaggagagtaagagctgggrgcagaaagttcacagtggctgaaacagcctgcagtcttgtagatgattcagtccagtgatggtttccctggcttctgtgagcctacagacatacttctaa

SEQ ID NO: 255831 - DNA, 201 bp, Homo sapiens
ctctggaacctgggaggtgaaggttgcagtgagacaagattgtgccactgcactccagcttgggtgacagagtgagactctatctcaaaaaaaaaaaaaaacatcaatagctaaagtttaaattttaaactctcaaaacatcattttagcaaagaatgtttgccaatcacaaaataagcccatcttctcctcttgccctgc

SEQ ID NO: 255832 - DNA, 201 bp, Homo sapiens
tctggagaagggagacacagcagctaacagacttaccatgaggttcaactcctcatgagcctgcagaggtagctacccagattgtcttcttccagcatgtrttaaagtatgtagcattggttaaaatgccttccacaggatgttaaaaagaaattcacaagaagattggggggcgggggggtgtcaatcattgaatacact

SEQ ID NO: 255833 - DNA, 201 bp, Homo sapiens
ggggaaaaaaatgtacatgttacagccaaagtcaaaattccagttaataataagactagtcaacaaaacttaaacataagcaagggaagtctgccaaaggytaattcctgccaaaaacaaaatgaaacagtttgctcattagctgagcttaaaatctctcccataggtttgaagtgttaacaattgcaagtcttaagtgct

SEQ ID NO: 255834 - DNA, 201 bp, Homo sapiens
tgaaccctagcctctcagctctcagatgccatattcttgtacaatagaagatgaaacagacaaaagctcagtgccacattctgcagcaacggtcctccaayaagggctaagagtaaagtaggaggggagatagcttcaaaagagaagaaggaacattgcactcaggctctctggtagtcagggagagtgggggctgcatct

SEQ ID NO: 255835 - DNA, 201 bp, Homo sapiens
aaaatgtacatgttacagccaaagtcaaaattccagttaataataagactagtcaacaaaacttaaacataagcaagggaagtctgccaaaggctaattcytgccaaaaacaaaatgaaacagtttgctcattagctgagcttaaaatctctcccataggtttgaagtgttaacaattgcaagtcttaagtgctaatttgg

SEQ ID NO: 255836 - DNA, 201 bp, Homo sapiens
ctgccccaccccccaaataatgggggtttggggggtggggcaggggtcttgcttgtcttattcatcacttatctccaagccctacacagcacctggcccayagtaggggtccataaatgtttaatggatggatggatggatgaatgaaaagattaaccaaaaacaaaagtgctgtctttcagttacaaagacgactgccac

SEQ ID NO: 255837 - DNA, 201 bp, Homo sapiens
aatgagtgttaaccctgcaggtgctcccagactcatcttcttataggcagcttctttggagtcctgcactttacctcctacctctctgataggaaaaatgyaggcagcaggaaaacgtgcagacataactgaaataaccatgctaatcttttcaccagaactaaaatgttatagcagaaattcatcagtcaaagaatttag

SEQ ID NO: 255838 - DNA, 201 bp, Homo sapiens
ttgatatcacggatatgcgtcccgcctctttggggaggtttctttgtcctgttaccaaaagtgatatgaacaactcctagaatccaccctgggacatattrccagttgtgtatcacatgggaagggcatctgaaacccaggtattgagaaccagaatctggaaagggaaggggtcccatcaagtggtcaagacttccttgc

SEQ ID NO: 255839 - DNA, 201 bp, Homo sapiens
ctctgtcattttaactaacacaggaaaagacagaaaaattttcaaaagacatattttctccttctgcaatttgtagcagtcgtagaaaagcaacaccaagmaataaccgggggacaaggttggtaggaaactctcacatgagcttcaggaactgggaattctgatcttcaaaggaagaccatgtggtcccaagttgccctg

SEQ ID NO: 255840 - DNA, 201 bp, Homo sapiens
agtggcatgtgacccagctgatcactccctcttcctggaaacgcttggtccacttggcttctaggacttgatttgctcatggttttcctccccgctcactkgtcactccttctcggtctcatttctctctgacctcttgatgctggaggatccccaggcagggtccttgaccctcttctcttcactgtctgtacttaagcc

SEQ ID NO: 255841 - DNA, 201 bp, Homo sapiens
ctggggttctatccattattcctaaacacactggagattgagttgatatcacggatatgcgtcccgcctctttggggaggtttctttgtcctgttaccaamagtgatatgaacaactcctagaatccaccctgggacatattgccagttgtgtatcacatgggaagggcatctgaaacccaggtattgagaaccagaatct

SEQ ID NO: 255842 - DNA, 201 bp, Homo sapiens
taagtaacttgttgggcaccccccagaagtggcagggcagtcctaggatttaaatctgcctaactctacactttctatgctcaatagaagaaaaattctgstgcctctgccccacccccagctgggcatttgctttaggttgtgttctagtgacgctgaaatgtgttcatgctccccagggaattacactcatgacctgga

SEQ ID NO: 255843 - DNA, 201 bp, Homo sapiens
tagtgcctagtaaggcaaactgatatccacattctagcctaccctgatagaccatcagacctctctagagaactgaatttatttatggtcactatggtttrcgatggacatggacaacctggaacttgtttgagagttggtgaggggcctcacaaccacattatggagaaatgaagatactgtgcatatttgttggagaag

SEQ ID NO: 255844 - DNA, 201 bp, Homo sapiens
tctggggttctatccattattcctaaacacactggagattgagttgatatcacggatatgcgtcccgcctctttggggaggtttctttgtcctgttaccaraagtgatatgaacaactcctagaatccaccctgggacatattgccagttgtgtatcacatgggaagggcatctgaaacccaggtattgagaaccagaatc

SEQ ID NO: 255845 - DNA, 201 bp, Homo sapiens
agcattgagctttcttcctaaaacgctggggtgaggggcctgcgtcggaggctgggcgtgcgttggaaatgggggcgggggcgcagctgaaggagttttcrtgaatggggaaggctgagaattgggtggaagtgtgtcttgttttgtgaatggggcccagcgctagagatccagttacagcctctacctgatgtggcggcc

SEQ ID NO: 255846 - DNA, 201 bp, Homo sapiens
acagggacgcctttcctcatagtgccttacgggaagccctgatgaacctctcagcaagaggaataaacaggaggcataattcctgccactatggatcaaaragcaggatggggaaagaggagacacaaaataatgtatggtgggggaagagagccttcagcaaaggctgacggtccacggatggagcacattcagcttctg

SEQ ID NO: 255847 - DNA, 201 bp, Homo sapiens
ctactctgtgttcttaactagacaacagactataaactttggggtctagtcctggcagcacaactaatattctgctgtaaacactgaagtctctgatttgyctgcttgttcagatggaacgcacccctgtcccacactgacaaggcaacaaaggtgtctgtgtgtagggccaaatttttccctttaaaaggctttgaattt

SEQ ID NO: 255848 - DNA, 201 bp, Homo sapiens
caggcggatcacctgaggtcgggagtttgagaccagcttgaccaacatggagaaaccccgtctctactaaaaatacaaaaaattaactgggtgtggtggcrcatgcctgtaatcccatctactcgggaggctgaggaaggagaattgcttgaatccgggaggcagaggttgcagtgagccaagatcatgccattgcactcc

SEQ ID NO: 255849 - DNA, 201 bp, Homo sapiens
tttgaaaggaaaggggagaaggatgggccagtagatctggtagacagcaatttctttggaatagtggacatttaacatacttgcaggtaaatgaaaagaamatgctggagatgcaatcagagccagcgaggatggaatcaaggatcaaggtgggtgggttacaattggagaagaggggctgggcatggtgcctcacgccag

SEQ ID NO: 255850 - DNA, 201 bp, Homo sapiens
gcccagagataaccattaacttgctacatagtctttcaatctttgctgtgcatatgtaaatataggattatacagatcgtataggactcattgttttatartctttttttaaacaatagtcattaactcaaattgaacatttactatgtttcagacactgttatgtgttctttagatgcataaattcagttgtttaattct

SEQ ID NO: 255851 - DNA, 201 bp, Homo sapiens
tcaggggtacatgtgcaggatgtgcaggtctgttatgtgggtaagtgtgtgccatggtgagttgctgcacacatcatcccttcacctaggtactaagcccrgcatccattagctgtttcttcctgatgctctccctcccccaacatccccacaggccccagtgtgtgttggtttccccctcgtgtccatgtgttctcatcg

SEQ ID NO: 255852 - DNA, 201 bp, Homo sapiens
caaggctctgttagctggtgtcttcatactgaatcatcagagaagagaaagttttcttatcattgtcagtcagcagtttggaaatctagacagtgactcasagttctgccttggtgttccgttgtggggtcattttaggatcaagacaattacttgttcaatggaattacttttgttttctaaatcattcgattttgaggt

SEQ ID NO: 255853 - DNA, 201 bp, Homo sapiens
ttggtagtagggttacacacaccccactctgctcccaatgcattttaaatccagttgatgttttgagtcatttatctaagaaagtaaaaaaaaaaaaaaaatacaaatgaacaacaaaagaaactccagaagatagtacatggtgcgtttgtttgcttgcttgcttgcttgcttgcttgcttgttttttgagatggggttt

SEQ ID NO: 255854 - DNA, 201 bp, Homo sapiens
cttggtagtagggttacacacaccccactctgctcccaatgcattttaaatccagttgatgttttgagtcatttatctaagaaagtaaaaaaaaaaaaaaaatacaaatgaacaacaaaagaaactccagaagatagtacatggtgcgtttgtttgcttgcttgcttgcttgcttgcttgcttgttttttgagatggggtt

SEQ ID NO: 255855 - DNA, 201 bp, Homo sapiens
tgccaaaaaggaatgctcagctttgacatttatgacaatctgtgtttttcctgttacttagtcttttgccatcattgactgtggaaaggcactgaccctcrttctgtcctccctggagaattctctccttcaggtttaactggttctgtccttttccatgttttcatttcactgggatctacagcaatgtcctgtccactg

SEQ ID NO: 255856 - DNA, 201 bp, Homo sapiens
aagcatcaaacacttaattttgccatcttcccatcttaaaaatgttgcaagtcccacccattcctcacatctcactctggacttgaccagctacttctttstcattaaaaacctgagaaaaaggccagccacggtggctcatgcctgtaatcccggcactttgggaggctgaggcaggcggatcacctgaggtcaggagtt

SEQ ID NO: 255857 - DNA, 201 bp, Homo sapiens
cagtgctgggagctgaggaaggaggagaggccttggcaggggaaccgagtgtggctaacagggatatgtgtgcattttttccccttggcacagccgtctgrtgaggtctctttaaatataccacaagtgagggacagccctggcctaaccacagccagctgcaggcgcacagcgactgcttgttctccctgcagctggcct

SEQ ID NO: 255858 - DNA, 201 bp, Homo sapiens
gtctggagggagggtgttgttgggagctttcagaagcacttcctgttttccttatctctccataatgagtctttttagtatttattcatgaggattagctrggggagtggggctgagcgtgtcatgtgatgggcagcttctgacagccctcaggattggggcaggcaccatttctgtatccagagaatagcggtgaatggt

SEQ ID NO: 255859 - DNA, 201 bp, Homo sapiens
tgtctcagcctgatttggaaatgaaagcagcaaaattaagctcctttacccccacctggcacgttgtcgcctgtgttgaagactcctctttcaaacaagcrtcaaacacttaattttgccatcttcccatcttaaaaatgttgcaagtcccacccattcctcacatctcactctggacttgaccagctacttctttctcat

SEQ ID NO: 255860 - DNA, 201 bp, Homo sapiens
ttagtatttattcatgaggattagctgggggagtggggctgagcgtgtcatgtgatgggcagcttctgacagccctcaggattggggcaggcaccatttcygtatccagagaatagcggtgaatggtcctgtgccttgtgatctagagggggactaagagagacggacagggcgaggcatgggggtaacaggtgtaaggag

SEQ ID NO: 255861 - DNA, 201 bp, Homo sapiens
ccggggacactgacagagtgggagaaaaattggacaacaggagcatcataggagggggtgcctgccctgaaggcacattcctcagagcagccccactgccygggccaaaggtttggacctgctgccaccagccacagcacatgctagagtccacagccccactagacacccagaatgccactggcagccactgagctggcc

SEQ ID NO: 255862 - DNA, 201 bp, Homo sapiens
cctcactttacggttgagggaacttaggttgacaggttcagtgaccagaggaagggcacagctgtaaggaacttagggaaacagtgaagtctatttaggtwcttcctttttttttcttcttttttttttttgccaatctggtaaaaagttggatggtgaaacttaaagctcaaatgagagactgcagggaaggtttccatt

SEQ ID NO: 255863 - DNA, 201 bp, Homo sapiens
ttgcagtgagccaagattgtgccactgcactccagcctgggcaacacggcaagactctgtctcaaaataataataataataataataataataataataatgtatttgtaccctagaatatagaaaatgaaatgaattttaaaaccccacaatatacctggcaatccggaagaagattccagaaagtttgcattttctgtt

SEQ ID NO: 255864 - DNA, 201 bp, Homo sapiens
cttgcagtgagccaagattgtgccactgcactccagcctgggcaacacggcaagactctgtctcaaaataataataataataataataataataataataatgtatttgtaccctagaatatagaaaatgaaatgaattttaaaaccccacaatatacctggcaatccggaagaagattccagaaagtttgcattttctgt

SEQ ID NO: 255865 - DNA, 201 bp, Homo sapiens
gcttgcagtgagccaagattgtgccactgcactccagcctgggcaacacggcaagactctgtctcaaaataataataataataataataataataataataatgtatttgtaccctagaatatagaaaatgaaatgaattttaaaaccccacaatatacctggcaatccggaagaagattccagaaagtttgcattttctg

SEQ ID NO: 255866 - DNA, 201 bp, Homo sapiens
cttttttttttttgccaatctggtaaaaagttggatggtgaaacttaaagctcaaatgagagactgcagggaaggtttccattaaaagccattcgcgtggygaggcgcggtggctcacgcttgtaatcccagcacattgagaagccaaggtgggtggatcacctgaggtcaggagtttgagaccagcctggccaacatggt

SEQ ID NO: 255867 - DNA, 201 bp, Homo sapiens
gaataggagacttggtctcatctctgaaacgaagcttgtggccaactgggccaactggacaaaagagaaactgaagggagtccacagaacacacaaaagckgttcaatatggcgcttgcttacctagcgctaaggaaactagatgcaaggagtcctgcagagccacgtgagtcaaatcactcctggccctgcctgtgactc

SEQ ID NO: 255868 - DNA, 201 bp, Homo sapiens
attaattactagtggtcaaatctgcccaagatggaatcgaattgacttaaaagtgactgggtttcctttccctggaactgtctgggcagagagtttgtttrgacactataggggagataacagctttagtcatctggttgattaaatgaccttcattagctcctccaatacttggtttctatatttaaatagatttctacc

SEQ ID NO: 255869 - DNA, 201 bp, Homo sapiens
acctcagatgatccacccgtcttggcctcccaaagcgctgagattacaggctatttgtcttcaacaaaccaatctaaaatcacttatttcctactcctccrtaagccacatagcacttgttattatggctatcctcattcagaacccttaaaccttataattgctcatggaattataattgctcaccaccgtgcccagcct

SEQ ID NO: 255870 - DNA, 201 bp, Homo sapiens
ttgctctgtcgccaggctggagtgcagtggcggatctcagctcattgcaacgtctgcctcccgggttcaagtgattctcctgcctcagcctcccaagtagmtggaattacaggcgcgcgccaccacgcccagctaattttttgtatttttagtagagacggggtttcaccatgttggccaggttggtctcagtctcttgac

SEQ ID NO: 255871 - DNA, 201 bp, Homo sapiens
ataacctacttgaaaattccactgaatgagtcaccacgcaggttatctattttgtttatggcactgtcacccagaacgtagaacagtgcctggtttgtaayagttgcacaataatacatgtcaaatgatgaataaaagactgaacaaatgaactaacaaaaatagactatctccattcccagacttaccatatccgttagc

SEQ ID NO: 255872 - DNA, 201 bp, Homo sapiens
ccaccttgctggagttaggacgcatagagggaatttctactatttatcatttgatggaactgagttgagaagaatctatccaagttccttttatctccaasccccctacaaaaaaaaaggtggaagaaatcaaaccctctcctacctggttcagtcctagctgaaaactggattgctattcctataaattcaagcactgga

SEQ ID NO: 255873 - DNA, 201 bp, Homo sapiens
aaattttttgtagagacagggttttgccctgtttcccagcttgtcttgaactcctgggctcaggcaatctgctcacctcggcctccctaagtgctgagatkacaggcatgagccactgtgcccagcccattctactttttattaaaattttgaaaaagatctttttctattatgctatatttcctaattggctgttgctag

SEQ ID NO: 255874 - DNA, 201 bp, Homo sapiens
tgcccacacccacccttcctccataccaccctttagagattacaactcactatgaaaaaatttgtgaaccaatgatttcatagtgtgaggcccagaaatcygtatgtaaaggtatattcgtctgctttgagtgccataatagaataccacagactgacagcttaaacaacagaaatttattttctcacagttctggaggct

SEQ ID NO: 255875 - DNA, 201 bp, Homo sapiens
gacttggaccaggaggaccagaagggtgtctcctttgcctcccccgacagcagagggcagcagcagagaggtacctgcaaaggctggagacccggaacccwctaagtcccagcctcagcctgggcactctgtgaagtcaccaagttaggttcaaaaatgaaaggaaagaggaaaccagatcatttgcaagagaaagcaaac

SEQ ID NO: 255876 - DNA, 201 bp, Homo sapiens
accaaacaaaaacaaaaacaaaacaaaaccaaaataaaacaaaaacagaagcccatatttgtttatatatgtatatacaaacatatatatatatttattcrggaaacttgtctcattattattacactgtaagatgatctctcgtgcttcaccatcacagttaggtggcataatctgagcctcaaaattcagaatcttctc

SEQ ID NO: 255877 - DNA, 201 bp, Homo sapiens
ttgcttctgttttaaataaatgaaagttgtgctggaaaagtgagttttgagcccaacatcaaacattaatcctgctactgctttcacaagaaactggggargcaccatccaagcctcagcaatgctgaagaaaaggacctcatctaggttgtgaatgagaagcaaatcccactgtgggagaccactggtcctgagtgactc

SEQ ID NO: 255878 - DNA, 201 bp, Homo sapiens
tagagctggagtgagtgaaattaatgtttttccaccttttgttgacttaacggtgtttttatttgaagaataaaagtgtttaggaagatggtacctccctraaattgttactttattccactcacgttaggagaagttttctcccttctaaccccaccctttttccccagactcacacacttacccgtcctgaaatgagtt

SEQ ID NO: 255879 - DNA, 201 bp, Homo sapiens
tgtgaagtcaccaagttaggttcaaaaatgaaaggaaagaggaaaccagatcatttgcaagagaaagcaaacccttcttccttgtaggatgaaatttgccrgaacttagttgtgactgacgtatagctacccctttctccctctttccttctttgtctgtatcttctcattagtcaattttcattctttctttctttttct

SEQ ID NO: 255880 - DNA, 201 bp, Homo sapiens
agagatgaagctttttcagccgggagcaataggatctgagagtcatgtgcagtttggatgagaaggaaggggaagaacctggcagtaacaaggccagtgargagactaatgcagaatgcgggcttatggctccaaggcctcaaattgagagtcaacaacccaaaggggaagaatggacaaagccaacagtaagcaagggat

SEQ ID NO: 255881 - DNA, 201 bp, Homo sapiens
aggatgtttcctgcccccgaggtatttataatgtatggaggaagacagtcaaagtaatagcatactgacagtaaatgaagaagggaaagtataggatgccmcgtgtccacattggagccccttccaacctaatattgaggcttccatgaggaagtaacacacaaactgaaaccttaaggatgagaacagatggaaattaaa

SEQ ID NO: 255882 - DNA, 201 bp, Homo sapiens
tttgatgaagtgagggagtttagtatatatctcttaaatttagaaggctaatttgtgtttattaccctgaaattttcagagaggttcgtatctcatctctrgttttagatatttcttctgacttttaaaattatttcttaccagacatttattgcctaaagcacaattatcctgtgtcttcaggggctgggggaaattttg

SEQ ID NO: 255883 - DNA, 201 bp, Homo sapiens
aatcacgtctttataggtgtaaattacatttttaaaaactcccacgcttgtacagtacctagaaaaagaaagacatttaattatttttttctagccacttyttgttcttaatatgttttactggattgcaattttctatttttcaatgaatcggggacaatatataaattgtggtaaaaggcagagttttgagttaaattt

SEQ ID NO: 255884 - DNA, 201 bp, Homo sapiens
tcaagtgtgcaactggtactttatcccccatcttgcagtaatgacgcaatacctcctttcccctgttggaggtatgtcagaggaaaccagataaaacagamagtttaaatgatatccagagtctcataacctaataaccaaaacatctaggtttcaattgaaaatcttcgtcatatatatcaaaaaccaggaagatcttaa

SEQ ID NO: 255885 - DNA, 201 bp, Homo sapiens
accccggccagtccctgcaggacaatagaaagagatgggagcaaagtcaggttaccaatggacagtcagcacaatagctttgtttaatttcccttttaaaytacaatcacgtctttataggtgtaaattacatttttaaaaactcccacgcttgtacagtacctagaaaaagaaagacatttaattatttttttctagcca

SEQ ID NO: 255886 - DNA, 201 bp, Homo sapiens
gctggtggatcacctgaggtcaggaattcaagaccagcctggccaacatggcgaaaccctgtctctactgaaaatacaaaaaattagccaggcgtggtggygggcacctgtagtcccagctactcaggaggctgaggcaggagaatcgcttgaatcccagaggcggaggttgcactgagctgagattgcaccactgcactc

SEQ ID NO: 255887 - DNA, 201 bp, Homo sapiens
cagatcttgcaacgaaattatagagtgaaaactcactcatcactataaggacagcaccaagacattcttgagggatccacccccatgatgcaaacaccacytcctaggcctaccaccaacattggtggtcacagtcctacgtgagatttggaggggacaaaacatccaaaccttaggagtcacatttcatatttaccatta

SEQ ID NO: 255888 - DNA, 201 bp, Homo sapiens
ggcattcaacacagtgtctagtgtatagtaccaacttaattaatgctagtcattataaccagtaattggtagatatactttctaatttctagttaccttgwatagcatcatttgaataatgaattttcagtaagtatttaaaaaggattttgactcctggaaatgtctgttcagagaattacaacagcagccttttgacct

SEQ ID NO: 255889 - DNA, 201 bp, Homo sapiens
taagtatttaaaaaggattttgactcctggaaatgtctgttcagagaattacaacagcagccttttgaccttggagaactaaagatgaaggagggtggaawaatcaaatctccagtacgcttttttttttctttttttttttgaaacagcatcttaccctgtcacccaggccggagtgcagtggcgcaatttcagctcact

SEQ ID NO: 255890 - DNA, 201 bp, Homo sapiens
acagttagcatataatgcaagacgttgtgctgagaccttggggtacagtgagaaacaggatgtttcctgcccccgaggtatttataatgtatggaggaagmcagtcaaagtaatagcatactgacagtaaatgaagaagggaaagtataggatgccacgtgtccacattggagccccttccaacctaatattgaggcttcc

SEQ ID NO: 255891 - DNA, 201 bp, Homo sapiens
aaaattatttcttaccagacatttattgcctaaagcacaattatcctgtgtcttcaggggctgggggaaattttgttttaacttaggttttccttgtttayataagttgagtatattttacatagtccgaaatgaatgattttttgtaaacaatgtgtgtttctttgctttcatttatcaaaaaagttttcatatgaataa

SEQ ID NO: 255892 - DNA, 201 bp, Homo sapiens
gagaaaatttctttggtactttataaatgatatttttgcatttttagccctgttccaattgggcctgatcaggtcttgtttagaggtacacagcttggaartactcagtggatcattggtgtagctgtttagactggatttgaaatgaaactcatgcagttaaaattatctgtgatgataaatagtactgctactcgactt

SEQ ID NO: 255893 - DNA, 201 bp, Homo sapiens
tacatctggggcttcgacagaagaagccagaaacccagaaagatcaatggacactgacaaaaaaactcaaaaaaccaaaaaaaaacaaaaaacaaaaaccycaaccaaagcctgttctctccagtcaaaagaccaggaaaggagcaacttaacaagacaaaatgttgacaccatagtaaaaatgtggcctcacgctcaccc

SEQ ID NO: 255894 - DNA, 201 bp, Homo sapiens
gaaagttaaaaaacatggttaatataattgtatttggaagagcaaatagctaagaataatcaaggcgcttacaaagaagaagaataatttgaggatacccstctgaccagatgtgaagtgatactatttaatttacggtggtttaaaaagcacaatttggcacaagattagaaaaatgaggccaatggaagacagtggaga

SEQ ID NO: 255895 - DNA, 201 bp, Homo sapiens
agtaaacatatgcaaggaaatatttgcaagtccttcataaagaatataataaaactttattaaaagacagcaaggaaggactaaatatatgcagaaatatrccattttcttggacaggaagagtcaatattataaagatgtcaatttccttcaaactgatcttgaggtttattgcaattccaaccgaagtgttaaacaggt

SEQ ID NO: 255896 - DNA, 201 bp, Homo sapiens
atttgaaacagcaagacgaaagggagtttaacatccagcatatatgaataactacaaccctacagaaaaaaaatccagttcaaaactcggcaaaggatttragtagacattttttccaagaagatatacaaatgtccaaggagtacgtgaaaagcttctcagcatcattaatcattaggaaaatgcaaatcagaatcacaa

SEQ ID NO: 255897 - DNA, 201 bp, Homo sapiens
gggcttttcaaccccagagtttctatttgtttttttttttttataatttctatctctttattgatattctcaatttagtgagacatattcttatatattawttctttcaacataattccttctagctctttgaagatactcaacataactgataaaaagttctgtctaataagcccaaagtctagactttgagacaatttc

SEQ ID NO: 255898 - DNA, 201 bp, Homo sapiens
ctttgttcaaaatattgataatgctgcatcatgggtaatactgcatcatgggtaattgacaatactgtatcatgggtaataatattgcctcatggggtagytgataatacagtgttaggttcaagcagaacagatctaatataggttattatgtacttatgaaagaatggaagagctagaggggaagatagtgaaggttat

SEQ ID NO: 255899 - DNA, 201 bp, Homo sapiens
agagagtggtttagcggtaaatgtagagagatagttaatccattaagattgaaaacagtcaataaagaaggggaggagagtccagtagacttacaaatctwggcaagaatgacagacacttaatcattcccgaattacttcacattcaagaaaagatttcttaggggacaactgggtattgactgtcataaatacttaata

SEQ ID NO: 255900 - DNA, 201 bp, Homo sapiens
tacatggctggtgtggaactaatatacattttaaaatatttaatatttgtgtccacttttaatcataattttcatagagaaaattccaaaatttaaaaatrcaatagtgcaaacaaagatgaataaaggcattgccggaagctgtgaggtggtgtctctgatgtttttccagaggttccagctcccatgtcattttgtttg

SEQ ID NO: 255901 - DNA, 201 bp, Homo sapiens
atggaggaagacagtcaaagtaatagcatactgacagtaaatgaagaagggaaagtataggatgccacgtgtccacattggagccccttccaacctaataytgaggcttccatgaggaagtaacacacaaactgaaaccttaaggatgagaacagatggaaattaaaaggagttgggagggaagaatgaaggggagcctca

SEQ ID NO: 255902 - DNA, 201 bp, Homo sapiens
gaggaatttgttcatttattcattcattcattgaccaagttttttgagcctctattttatctgatagttttaatttatattaaggatgagttttcatctarttaagatacttggacatccaaagaatcagctgaaattcatataaataaaaacaaagttaatgtagctttccctgcattgattatcaaacatttattaatt

SEQ ID NO: 255903 - DNA, 201 bp, Homo sapiens
aaggccattcagcacaatgtcttattatgccgagaggacccacttcttggtccctcaactgcttctgatgtttcttctcacctaacaaagtactgtgtacmggaactttttaatcaaaacataacattgtaggtagagactgaaagcctgccattgttgctgtttaacagctgatacaggtgttctggtgatgccactgtg

SEQ ID NO: 255904 - DNA, 201 bp, Homo sapiens
attttcctgtatcagccagagttgaacaaacttttgtttaaaaaaagagccagatagtaaatattctaggctttatgggccataaagtctcttggagctastcatttctacagttttagagcaaaagcagccatagatagataataggtaaatgaatgggtgtggctgtgtttcaagaaaactttaacaaaagctggcagc

SEQ ID NO: 255905 - DNA, 201 bp, Homo sapiens
tgttttctatctttatttctgtttgggttaaagttacaaacagcaagtttttgtgtttaaattcctgaaaatgttgcgatggaattacagtaatgtgttayggcttgggcccctcgcaggagtgtatctcgcagtcagcagtgaaaacaaagttcgaacagcacactatcagagctaaacagatactagctactgtgaaaa

SEQ ID NO: 255906 - DNA, 201 bp, Homo sapiens
ttttaacattgaaaatagtaccctgtttattttttttaatgttagagtcaaaccattgcacattactgtgtaaaaatacacaaagatggtaacttgctgcyaaagccctttttacttttgaatctttgtatttttttcacctttgtaattttaagttgtgcttttatcactcatttgttttctatctttatttctgtttgg

SEQ ID NO: 255907 - DNA, 201 bp, Homo sapiens
tctagtatttggtaccaaaatgggtaacggtagtgaaaaataattgatttttatttatttttttgagacagagtctcactctgtcacctaggctggagtayagtggcgcagtgtcagcttgctgcaacctccccctccggggttcaagccattcttgtgcctcagcctcctgagtagccaccacgcctggctaatctttgt

SEQ ID NO: 255908 - DNA, 201 bp, Homo sapiens
attttcctgatccatgctcttccagtcctcttcacactcttttcctcctccttattttagattcaggggttggttacatgtacaggtttatcacatggatrcattgtgtgatggataggtctgggcttcaactgagcccgtcacccaaatagtgaatgtagcattcagtagtttttcagctcttgtcaccttccaccttta

SEQ ID NO: 255909 - DNA, 201 bp, Homo sapiens
taaaataaagtcaatgcattattttagttattaaaaaataagtagtttacaaatgttcactattatgtaattattggtgattttaaagaagaaaacatccrggtatgttttatctttaggtgtgtacagaacaggaatgctataacttcctacattaattttttcaaaatcagtgaaaataagtgatgcataaatgagctt

SEQ ID NO: 255910 - DNA, 201 bp, Homo sapiens
ccaccacacccagctaatttttgtatttttagtagacatggggtttcaccgtgttggccagactggtctcgaactcctgacctcaagtgatccacctgcctcagcctcccaaagtgttgggattacaggcgtgagccacagcacccaggctgtttaaaatgtttaaaaggcctacagatacccttgtgggtgacattgata

SEQ ID NO: 255911 - DNA, 201 bp, Homo sapiens
tttgtaagcaaaagtcagattgtaaaagaccttgtattaatatatcatggtaaggcgttctgcattcttttattttggaaaatagtcctgagaggattggmtgttacaattataaccttagatataatggggagaatgaattgaatgagaacaggggtaggaggcagttgtgataatgttaccagaaaggggccccactcc

SEQ ID NO: 255912 - DNA, 201 bp, Homo sapiens
caaacttagtcacaattagtttcgtcttcaccaaagggaaattgagtagaaattgcaaccaagattttggctaatagatttcacttattttagtgaaataycattcaaaagtcgtctctaactgtctgactagaacactcccaaaaaagaattacctaaaaacattttgccagcataatttatttcattggggagttgatg

SEQ ID NO: 255913 - DNA, 201 bp, Homo sapiens
tcttagaattttatttcctcactctgcatatccactcctactcacctagagcttcaggttgagaaacttagtaacttccttattgtgtgtgaatttggctycgcctcactaaccctgttccctgatgtactttagagtcacatgcagtgacaaacttagtcacaattagtttcgtcttcaccaaagggaaattgagtagaa

SEQ ID NO: 255914 - DNA, 201 bp, Homo sapiens
agaatccgccttctttatggccactgttcctttccatgtacacaccaggattagaccgtgattgtttgtctttggtgtctttttcttgagaaaccacctaygctttcttaaacttatagtccttgaagtttctggtactttggctggaagcgttaatgccctcttgaagccttacctttctaaatgtcagcctcacattgt

SEQ ID NO: 255915 - DNA, 201 bp, Homo sapiens
accttgccttctgcccttaaggaaaatggcgcctggcatagatgcgcttccggccacggagccaaacagaacagaggaggcaagaggccggaagtgaccgscctttgccactccccctgcctcctctccgcctttaacttctcgggaagatgaggcagtttggcatctgtggccgagttgctgttgccgggtgatagttgg

SEQ ID NO: 255916 - DNA, 201 bp, Homo sapiens
aacttagtcacaattagtttcgtcttcaccaaagggaaattgagtagaaattgcaaccaagattttggctaatagatttcacttattttagtgaaatatcrttcaaaagtcgtctctaactgtctgactagaacactcccaaaaaagaattacctaaaaacattttgccagcataatttatttcattggggagttgatgaa

SEQ ID NO: 255917 - DNA, 201 bp, Homo sapiens
taatccagtctatcattgttggacatttgggttggttccaagtctttgctattatgagtagtgctgcagtaaacatatgtgtgcatgtgtctttatagcascatgatttatattcctttgggtatatacccagtaatgggatggctgggtcagatagtatttctagttctagatccctgaggaatcaccacactgtcttcc

SEQ ID NO: 255918 - DNA, 201 bp, Homo sapiens
gccccggggtgtgatgttccccttcctgtgtccaagtgttctcattgttcaattcccacctatgagtgagaacatgcagtgtttggttttttgtccttgcratagtttgctgagaatgatggtttccagcttcatcgatgtccctacaaaggacatgaactcatcattttttatggctgcatagtattccatggtgtatat

SEQ ID NO: 255919 - DNA, 201 bp, Homo sapiens
ggaagaaatttggctgatcgatgcaccgatgaagtaaacgccttagtgcttcagacccagcaagaaattattggtaatatttatgtctacaaggtcatgtmtggtttgttttttcattcatgactggtgaagagcttattttcctttaggcattccattgaaggtaaaacatttaccattcttatcttaagtgttgtaatt

SEQ ID NO: 255920 - DNA, 201 bp, Homo sapiens
tgttagtgtgctgcacccattaactcatcatttacattaggtatatctcctaatgctatccctcctccttcctcccatcccacaacaggccccggggtgtgatgttccccttcctgtgtccaagtgttctcattgttcaattcccacctatgagtgagaacatgcagtgtttggttttttgtccttgcaatagtttgctga

SEQ ID NO: 255921 - DNA, 201 bp, Homo sapiens
tttgaatctttgtatttttttcacctttgtaattttaagttgtgcttttatcactcatttgttttctatctttatttctgtttgggttaaagttacaaacmgcaagtttttgtgtttaaattcctgaaaatgttgcgatggaattacagtaatgtgttatggcttgggcccctcgcaggagtgtatctcgcagtcagcagt

SEQ ID NO: 255922 - DNA, 201 bp, Homo sapiens
taaggtatgattccactgtctgttatgctcttcattgtttattattaaagtttttgtcttttaataatggatggaatgcatttttctccttgacctttatrgtaattagattggtgttttatttttttaattagaaataaagctgttcaacttgaaaatgagctggagaattttactaagcagtttctaccttcaagcaat

SEQ ID NO: 255923 - DNA, 201 bp, Homo sapiens
ataactgtgctgggatgtgctaatgcagcaggcataaatgtgaacttactgtgataggcaaaagcttgcatcctcactgttttcaaggaatgcatttttttactagtccattattgtactaacaaaaaggcatggatccctagggacatcttttctgattggtttcacaaacattttataccagcttgtgtgcacttgcag

SEQ ID NO: 255924 - DNA, 201 bp, Homo sapiens
agttttttttttccttgagtcatgctaatagatggttcaatacatgaatgagtcccttgctgaaatgctttaggacttcagactaccctgaacgttgattrctctttatactgaaataggcattattcagtggaagagagggaagaccaaattgatagactggactttattcgaaaccagatgaaccttttaacactggat

SEQ ID NO: 255925 - DNA, 201 bp, Homo sapiens; identical to SEQ ID NO: 50878

SEQ ID NO: 255926 - DNA, 201 bp, Homo sapiens
tgatgaattttgttcagagtttcatcctaatccagatgtattaaaaatatataaaagtgtaagttaaagtatagataaaattattcagagacagtttcttmttattctataccctcatttatttcatggtttggcatttcagtgtatcagtacaaaatgaaactgttagatctcttgtgccctcttgtaataaatgtaaac

SEQ ID NO: 255927 - DNA, 201 bp, Homo sapiens
cagcattatcgatacaaagtataattttcacaaacttggtatgcttgaaacacagatcgggatgttattagatgtgacaaaagtaatgatgttaagcctcrataggaccttcagtggacttaagccagttgaaggaaacataaacgcatcaaagcttaagtccaagatgacataacattggaattttaaatgtatttgctc

SEQ ID NO: 255928 - DNA, 201 bp, Homo sapiens
gatgccaaagcaggaagatctcttgagcttaggagattgagatcaggttgggcaaaaacatgaaaagactaaatcacatctctagcaggaaaaaaaaaaaatccagatatgatagctcatgactatagtcacagctaccccagaggctgaggtagaaggccaagaagtttgaggctgtggtgatggtgagctatggaggta

SEQ ID NO: 255929 - DNA, 201 bp, Homo sapiens
tagttcttcttaagtttttaaagtaattactgttgaaaatatataaaagtgcttattctttcaacgttagttattgaacacatgtatagggcattatactrtatactatgagaagtaccataatgaataaaacccctttctaacctccagaaggggaaaattaaatggtattaataacaactaagaactttagtatattaa

SEQ ID NO: 255930 - DNA, 201 bp, Homo sapiens
ggcggaggttgcagcgagccaagattgcgccattgcactccagctctgggcaacagagcaagactctgtctcgggggaaaaagtatatatatatatatatwtttaaaattataaaatcagtagcctaccagaaaacatatcttgctacatactaggtttttaaatctttgcctgtacgttacaggtgtggcacttgctgaa

SEQ ID NO: 255931 - DNA, 201 bp, Homo sapiens
agtaatgacctgtcaaaatgttcaggaaggaaaataatacataagtatatataaaaatatatgcctctctttatatatatgggggtcatacattttatatwttcattgcaagacatgtattatatatattatatatatttattatatattatatattatataatacatatataaatattatatataatgttatatataaat

SEQ ID NO: 255932 - DNA, 201 bp, Homo sapiens
gtttgagaccagcctggccaacatggtgaaaccccatctctactaaaaatacaaaaattagctgggcatggtggtgcacacctgtaatcccagcttcttgsggggctgaggccagaaaattgcttgaacccaggaggcggaggttgcagcgagccaagattgcgccattgcactccagctctgggcaacagagcaagactc

SEQ ID NO: 255933 - DNA, 201 bp, Homo sapiens; identical to SEQ ID NO: 50882

SEQ ID NO: 255934 - DNA, 201 bp, Homo sapiens
tcacaaaagtgcatggaattttttttctgttcttgataatttcttactttgcgcagggccccaagcatgagtaaagtttattgtgcttctgaagaaacacrcccatcttttgtctttatgtagcttattcatgttcacagccatatagcagaggtaatatcgtctcttgagccaggataaaatgcagcccactagtgccat

SEQ ID NO: 255935 - DNA, 201 bp, Homo sapiens
taaaaaacatacatctttaggaatgaactatcaccacctagctggtctttaatacttcctaagcattttcacatcacagcacacaaagaaatatttgtacrttgaggtaataagaaaaccccaggtgccctatctagccttctctgaatatcaaggggatctgtcttaagtattaaatgttatttttagtagtagttctta

SEQ ID NO: 255936 - DNA, 201 bp, Homo sapiens
ggatatagctgcttgaaccctcattgtttagtatctattagcctagttttatatttcagccatctaaagcataaacattaaaaagattgaaatattgagcwtgttatttgctttgtcaaagatcactaagttaaaatttcctagacttcttacagatgacagctggaaatcctggtttttaaacttcaaattatatataaa

SEQ ID NO: 255937 - DNA, 201 bp, Homo sapiens
ttaaattaacacttcccatacttatttggagtaaaatgttcttttttcaaggtacctcttaaatatcctacagatcagtgggaacaccaatgtgggattaytttttaattgattattttcttctctatacttactcatcattatatatttttgaatcagacagtaacttatattgcctaataacttttggagatcttttct

SEQ ID NO: 255938 - DNA, 201 bp, Homo sapiens
aaatgtcagcctcacattgtgatcttagaattttatttcctcactctgcatatccactcctactcacctagagcttcaggttgagaaacttagtaacttcsttattgtgtgtgaatttggcttcgcctcactaaccctgttccctgatgtactttagagtcacatgcagtgacaaacttagtcacaattagtttcgtcttc

SEQ ID NO: 255939 - DNA, 201 bp, Homo sapiens
ggttcagactttctcattaaaataaaatttcaattataaatgtaaattatagtgaatgtactgtggggttttttttgtttttcaggaaaaacacttttttyacaaggtgaatgagcggctttccaagcctaatattttcattctcaataatcgttgggatgcctctgcatcagagccagaatatatggaagacgtaagttg

SEQ ID NO: 255940 - DNA, 201 bp, Homo sapiens
tggaaagatgcctgcatttcttggtggaggagctcaaagttgtaaatgctttagaagcacagaatcgtatcttctttgtttcagcaaaggaagttcttagygctagaaagcaaaaagcacaggggatgccagaaagtggtatgcattacctatagatttcctgtttaaatataaaaatatttaaaattggctgggtgcggt

SEQ ID NO: 255941 - DNA, 201 bp, Homo sapiens
tatatagcaccagagttctccaaagtgcttggtgtcgatttatactcctgccagcagattgagtttcataagatttgcatcctcaacttttttttttttttggcattttagtcacaccaattgtagaaacttaaaaagaagtatctggaatttgaactataaataatatttatttaatttgcttgagactatttctgattt

SEQ ID NO: 255942 - DNA, 201 bp, Homo sapiens
aataaatattttaactttatcagatgagggccaatggcaattccctacctttcataaatttctcaattcagtgccactccttcagccaaaaaaaaaaaaaataaaaggaaaaacaaattaggatgcaaaatgttgactctggactgaaagcagttagttaaggcactgtttctcattgtggttactttctcttgagtctaa

SEQ ID NO: 255943 - DNA, 201 bp, Homo sapiens
tggtccatattgtagataagaatttccaaattatttttattttctacatatatttgtggtgtactcatcatttagggtaatttttccctcatagatgtgcwactataattttagagttttataaagataactttatagttgtttaagtgtaatcttttttcctttctcttttttttttggcagctccctagatctttagct

SEQ ID NO: 255944 - DNA, 201 bp, Homo sapiens
tttcaccaaagggttgatgctctcctcacctcttttttctcttaaagaaatgggatctccctctgttatccaggctggagtgcagttgggcaatcatagcrcattgcagcctcgaactcctgggctcaaatgatcctcccacctcagcctcctctcctcactgttatcagttatttcatccatggggaaaatatgtaggga

SEQ ID NO: 255945 - DNA, 201 bp, Homo sapiens
gggcaaggtggctcacgcctataatcccagcacattgggaggctgaggcaggcggatcacttgaggtcgggagttcgagaacagcctggccaacatggtgraaccccatctctactaaaaacacaaaaattagccgggcatggtagcacatgcctgtaatctcagctagttgggaggctgaggcacaagaatcgcttgacc

SEQ ID NO: 255946 - DNA, 201 bp, Homo sapiens
tgtatattatgaaaatttattgttcatgatatcattggtccatattgtagataagaatttccaaattatttttattttctacatatatttgtggtgtactyatcatttagggtaatttttccctcatagatgtgctactataattttagagttttataaagataactttatagttgtttaagtgtaatcttttttcctttc

SEQ ID NO: 255947 - DNA, 201 bp, Homo sapiens
ctgcacccagccccaaatatatttctcttgcctgtggctgtgtgttttgaagtttaagaggtttttattttgaagtcctttttttttttttttttttttttgagactgagtttcactctgttgtccagactggagtgcagtggtgcaatctcggctcactgcaagctctgcctcctgggttcacgccattctcctgcctca

SEQ ID NO: 255948 - DNA, 201 bp, Homo sapiens
cagttttaagaatggaaatatagataaatgataagcatactttgtgttttactcttttaagtttacttgattatgtgaaagtttcagaagctaggatgaartcacttttgtcatacctagacaggcctagaaggaaagaggctcttgtctgagataactatttccaaggactttctagaaattctttcaaatctcctgctt

SEQ ID NO: 255949 - DNA, 201 bp, Homo sapiens
ctgcctgttagctcacaaaagaaaaggtatacagtatttacttctatttataggatctgtaaaatagtatgaaaatttgcaggttaaaagtagtgaattamatatcacaagtttcatcttaaatttttaaaaaacatacatctttaggaatgaactatcaccacctagctggtctttaatacttcctaagcattttcacat

SEQ ID NO: 255950 - DNA, 201 bp, Homo sapiens; identical to SEQ ID NO: 50880

SEQ ID NO: 255951 - DNA, 201 bp, Homo sapiens
ttcttttgctgtgcagaagctctttagtttaatgagatcccatttgtcaattttggcttttgttgccattgcctttggtgttttagacatgaagtccttgyccatgcctgtgtcctgaatgatattgcctaggttttcttctagggtttttatggttttaggtctaacatttaagtctttaatgcatcttgaattaatttt

SEQ ID NO: 255952 - DNA, 201 bp, Homo sapiens
tgatttgcatttctctgatggccagtgatgatgagcattttttcacgtgtctattggctgcataaatgtcttcttttgagaagtgtctgttcatatccttygcccactttttgatggggttgtttttttcttgtaaatttgtttgagttctctgtagattctcgatattacccctttgtcagatgagtagattgcaaaaat

SEQ ID NO: 255953 - DNA, 201 bp, Homo sapiens
tgtcttccacaatggttgaactagtttacagtcccaccaacagtgtaaaagtgttcctatttctccacatcctctccagcacctgttgtttcctgactttktaatgattgccattctaactggtgtgagatgatatctcattgtggttttgatttgcatttctctgatggccagtgatgatgagcattttttcacgtgtct

SEQ ID NO: 255954 - DNA, 201 bp, Homo sapiens
gaaattgagtagaaattgcaaccaagattttggctaatagatttcacttattttagtgaaatatcattcaaaagtcgtctctaactgtctgactagaacaytcccaaaaaagaattacctaaaaacattttgccagcataatttatttcattggggagttgatgaatgtcactggtgtgtcatcagtttgcatgtctatca

SEQ ID NO: 255955 - DNA, 201 bp, Homo sapiens
tacaaaaatgacaccattctaggaatttgctagacaaaatgtaggactaccagatcagtatctcctagacacttgttagaaatgcacaatcccggggaacrcagtacatttggccacatgtagtttatgtttccttttcatgggagggataaaatttaaagctttttttttctttgaatacagtccttccttttctatgcc

SEQ ID NO: 255956 - DNA, 201 bp, Homo sapiens
ggcccaccgttagagagggggcaatctgctgtactcagcctgctgattccagtgctaattttatccaaaacaacctcattgaaacacccagaatatttgaytaaatatctgggtactctgtggcgcagtccagttgacacataaaatcagccatcaccatcaatttgggggaaaattgacattttaacaaaattgaatctt

SEQ ID NO: 255957 - DNA, 201 bp, Homo sapiens
acaaacacctgcttcctgatcatttgtctttttaaataaaaatatgatatttgagattcttttattctctttaaatatttgaatacagagtctatttgaasgaccagtatattgaatagcagtaatatttgaaggactagtcagctgtagaagccttgacttcagatcttcacccaagaaactctgtgtatttgcttttcc

SEQ ID NO: 255958 - DNA, 201 bp, Homo sapiens
aataagtggctcaatatatgacttctctaaagtcatatatcttttagttaattccttgagtaaaacagaaacaattgtctatcgtgacttttttcttcaarctctttaaaactctccccactcccaaactatatcactgtctaagaagaaaggagtttgaaaatcagtcttgttacatagcttaatttgaatacatccaaa

SEQ ID NO: 255959 - DNA, 201 bp, Homo sapiens
tatcatcaatttcctgacaaccctcaatttatatttccaacccacacctttcccctgagttccatgctcagatattcaaccatctacttgacaagtttccktagacatctaatatacatctcaaatatgacaagcccaaaatcgaactgctgcttttctccctaaaagagccatcctcatttcagtggacaacaatttcat

SEQ ID NO: 255960 - DNA, 201 bp, Homo sapiens
agcttctccccatccctgaacacaatgggccactttcatgactgagcctttgcactgctattctctgttgggcatgccttgctctgcttggtgaactcctrttcaaacttcaaaacccaggatgaactttaccttttctgacttctgacttcctctagtagagttggcaccacctcctcggcccttagtttttaatgcttt

SEQ ID NO: 255961 - DNA, 201 bp, Homo sapiens
gtatataaagtgtgagtcacaggtggccccactttaactgaaatgttaggttaggttgggggaattcagagaaaggagaggtgataccctgaggcctagcrttattgattagttgaccagtgagctatgcactctgcctggagcattactgcaaatgagcctaggacctattgagagaaggtcccaggggtgaagtaacag

SEQ ID NO: 255962 - DNA, 201 bp, Homo sapiens
cactagctgatcaagaacatccgaaaagctctcatgctgataactcccaaatatggatctccagctcacaccttctccctgacctctagactttcctatcrggcttcctactttacgctctgtttgacagtctcatctcaaactcagaatatccaaagctgaactccagatttcctctgcccccaggtctgctcttccttt

SEQ ID NO: 255963 - DNA, 201 bp, Homo sapiens
tacccagtctccggcagttctcacacagaagtgtgagaatggactaatacaatcatgaccttaaaaaataaataaataaataaataaaacatggccgggcrcggtggctcccgcctgtaatcccagcactttgagaggccaaggcgggtggatcatctgaggtcaggagttcaagaccagcctggccaacatggtgaaacc

SEQ ID NO: 255964 - DNA, 201 bp, Homo sapiens
tgagaatggactaatacaatcatgaccttaaaaaataaataaataaataaataaaacatggccgggcgcggtggctcccgcctgtaatcccagcactttgrgaggccaaggcgggtggatcatctgaggtcaggagttcaagaccagcctggccaacatggtgaaaccccgtctctactaaaaatacaaaaaaaattagct

SEQ ID NO: 255965 - DNA, 201 bp, Homo sapiens
tccatctcggaagctctgtgaacagctgcagctcaaagtgcttggagctttgcaaaatgctacactgttcctttcaaaccccaaggtctcttccttgtagygtaagatagcaccagagctgggagcatttatagagtgctatagtgtagtcctctcattcagctgatgccccaggaggtgaggcccagtggtgctgggccc

SEQ ID NO: 255966 - DNA, 201 bp, Homo sapiens
cgagctcctgacctcaggtgatccacatgactcagtctcccaaagtgccgggattacaagtgtgagcgactgcgcctggcccgaacacagagttttaagtrcctaacttgctaactggggaacaaaccagcagatgggggagggagtcagggtctttggaagatacctactgagggacagggctgaggggaggaggcagag

SEQ ID NO: 255967 - DNA, 201 bp, Homo sapiens
catgactcagtctcccaaagtgccgggattacaagtgtgagcgactgcgcctggcccgaacacagagttttaagtacctaacttgctaactggggaacaarccagcagatgggggagggagtcagggtctttggaagatacctactgagggacagggctgaggggaggaggcagagtggcagagggagtgatttggggagg

SEQ ID NO: 255968 - DNA, 201 bp, Homo sapiens
gctagcttcattcttgcattcagacatgactgaacatttcctagttgtggcccaggagctctcaatctggttgggacagatctgcaaacagataaatgtcwcatagtttgatgaggggaagaataggcaccatggagttatgctgatcatctctgtgaggccaaggaagcttgagagtcaaggagcacttgagctggtgtt

SEQ ID NO: 255969 - DNA, 201 bp, Homo sapiens
ctaagaaagagcctcttccatgagtgatgccaggagtaagagctgtgaacccgtcacccatttattcattcaacaaatgcatactgagagcttattaagtsctagacattcatctagtgtctagagatactccctggaaataatagagaagaaggttgacaagattcctatttatgaagcttatatttttagtggaaggag

SEQ ID NO: 255970 - DNA, 201 bp, Homo sapiens
cataatccacttcctccacatgcttgccagcatttggtgttgtcactttttctcaactttagctgttcccttgtttttggacacggagtttcactcttgtsacccagcctggagtgcagtggtgctatcttggctcactgcaacctccacctcccgggttcaagcgattcttctgcctcagcctcctgagtagctgggatt

SEQ ID NO: 255971 - DNA, 201 bp, Homo sapiens
acccacagcattactcagaagatttacaataaaagagaaaacctagcacattacgttatgtaagcgatacttataacaatgatgataatgataataatcatcatcataataacaattgaatggtgggctctctgctgctgcatgtaggtagacatggctctacttcgtcatcagagagggtctctgtggcctgaagcactc

SEQ ID NO: 255972 - DNA, 201 bp, Homo sapiens
ctgtaatctcagctacttaggaagctgaggcaggggaatcgcttgaacccaggaggcggaggttgtagtgagccaagatcacgccactgcacactccagcytgagcagcagagtgagactccctctcaaaaacaaaaaaaaaagagaccctttaaaaataaaaactacaagatactattatcacattcaaataagtaagta

SEQ ID NO: 255973 - DNA, 201 bp, Homo sapiens
atatatatgtgtgtatgtgtatatattagtgtttgagtgtatgtatatagatatgggtgtgtatagttttaaaatagtttgtgtattcaaattaggatccrgataaaatccaagtgcaatagattgataagacctttaagattgttaaaatgggccaggcatggtggctcacgcctgtaatcccagcactttgggaggcct

SEQ ID NO: 255974 - DNA, 201 bp, Homo sapiens
cacagccccggggaacacggatttctccacggcaccgtcagtatggggtggggtggcgggggggcattgcgccttgcagagtctgggttccttcaaatccygccttctgggtttacggatcgacaaattgaggcccgcggcagcggagggggcacaggcaccataacaaacgcacgtgcgccctgcccggagagctggacg

SEQ ID NO: 255975 - DNA, 201 bp, Homo sapiens
caacctccacctcccgggttcaagtgattctcatgtctcagcctcccaagtagctgggactacaggcacgggccaccacacccagctaattttttgtgttkttagtagagacagggttttgccatgttgaccaggctggtctcaaactcctgacctcctgtgatctgcccgccccggcctcccaaagtgttgggattacag

SEQ ID NO: 255976 - DNA, 201 bp, Homo sapiens
ttcactgacgaactggggtaaggcacatactccctgtttgatttcagtgtagcactgccctatagctgggcaaacaccttggtgtctccccttaggagcaygtgggaagaagaggaggatttgccatgagctttctctgggacaggagcagtttgggatgttgagatgggaaatggagtattgagaagtgagtgtatttcc

SEQ ID NO: 255977 - DNA, 201 bp, Homo sapiens
agcagtttgggatgttgagatgggaaatggagtattgagaagtgagtgtatttccagggggaatggagaggtctttggagacctgcattggccatgggctscccagttgtgagtgggctcaggctctggatcaccgctgggaagatacccttctatttatttattcattatttttatttttgagatggagttttgctcttg

SEQ ID NO: 255978 - DNA, 201 bp, Homo sapiens; identical to SEQ ID NO: 50956

SEQ ID NO: 255979 - DNA, 201 bp, Homo sapiens
tgagaagtgagtgtatttccagggggaatggagaggtctttggagacctgcattggccatgggctccccagttgtgagtgggctcaggctctggatcaccrctgggaagatacccttctatttatttattcattatttttatttttgagatggagttttgctcttgttgtccaggctggagtgcaatggtacaatctcagc

SEQ ID NO: 255980 - DNA, 201 bp, Homo sapiens
aagatacccttctatttatttattcattatttttatttttgagatggagttttgctcttgttgtccaggctggagtgcaatggtacaatctcagctcactrcaacctccgcctcctgggttcaagtgattctcccacctcagcctcctgagtagctgggattgcaggcgcccgccatcatgcccagctaatttttatattt

SEQ ID NO: 255981 - DNA, 201 bp, Homo sapiens
ggaggatgacacaggggactggaccttggaggatagcacatgattgcactggccctcagattttcaaccccctgcctgtgcagcagtaaccttgactgcaytgtagagactcccatccacttcatctcacccttgcccatcaggggtgtctgggaaagagaggtttctagcctgacagatctgagttccaattgcaatgcc

SEQ ID NO: 255982 - DNA, 201 bp, Homo sapiens
tgcattgtagagactcccatccacttcatctcacccttgcccatcaggggtgtctgggaaagagaggtttctagcctgacagatctgagttccaattgcartgcctcagttgcctcacctgtagacagagcaataataatagctggtttgtagattgttgtgagggcaaagtggagaagtgtcttagggagtgttggctcc

SEQ ID NO: 255983 - DNA, 201 bp, Homo sapiens
cacaccttacagacccggagcatcttttctgttgtttatttttgggttagctcataactcactttatcactcagccgaacagtgagccaccatggaccatsgtggttttgatcatcatacagatatttaaagacaactttattgaggtacagtttatattccatgaaatcaacccatgttaagtatacaattcagtgattt

SEQ ID NO: 255984 - DNA, 201 bp, Homo sapiens
cagatgattcccatagggtagtcctaaagttgaaattactgggttatactttaaagggtatgaccatttttaaaacttcatggatttagttcaattacctrtaaagtcttaaagtagctaaatatatattgtgggaatgggaaaaactaacagcgcaagcaagtcgggatttgctttcttgcccactatgtatcgcctatg

SEQ ID NO: 255985 - DNA, 201 bp, Homo sapiens
ttcagtgattttttttagtaaacttactgagctgtgcagttgtcaccacaatccagttatagaacatttccgtcattagtggggtcagctttagatgcaamagacaggagaattatttttgtttttatgggattagttctgtgctcccagcaggaagatctcattaattaattaattaattcaattagtatttactgagag

SEQ ID NO: 255986 - DNA, 201 bp, Homo sapiens
aatctagtctcttgcattctctgcttctgccatctattttccagtgtggtgccagaggaatccttgtaaaatacaaagatgcatgtcatgctactgcacakaatcttttaatagcctcctttttttttttccctttttcgaatagggcctaaaatcttcaatgtagcatccttccagaaatagtcttctgaacttggctgc

SEQ ID NO: 255987 - DNA, 201 bp, Homo sapiens
gcgttaacaaagggagccgataccgaccggcgtgggcgcggagcgggcggccgccaccgagcgtgctgagcaaccgcagcctccgcggccgagagtgcagmgagtgagtagggggtgcggtgggcggcggcgcggcccgggctatcccgggaggagtgtgatgcaaaggggcgcgggaggatagcggaggcgcggggcccg

SEQ ID NO: 255988 - DNA, 201 bp, Homo sapiens
gaagctgatcttgggtcgccaagctcaactctcccccaaagcacaggctataggctaggccccaccctgctatccagtgaaacctgcggctggaagagaarcctgtagtctgctgcaagaaaagggctgtgcctcaggagcaacacttgttgatcctttcccctccccatgtccactgatgaagatgactcctggggggag

SEQ ID NO: 255989 - DNA, 201 bp, Homo sapiens
accccatctctactaaacatacaaaaattagccgggtatggtggcttatgcctgtaatcccagctactggggaggctgaggcaggagaatagcttgagccygggaggcagaggctgcagtgagccgagattgtgccactgtgctccagcttgggtgacagattgagactctgtcttgagaaaaaaaaaagattgtttaata

SEQ ID NO: 255990 - DNA, 201 bp, Homo sapiens
cagctgtgctttcacaataaattaagaaacaactacttaattcatcaaattcatgttggtccaggacagaagacctgttctttctcttagaatcgtttcayaactgagcctcctgcttgtagtcttgctcctgtggtatgttctcaaaacagtaaccagagtgatcattttaaaagctgtagtgatgtgtcattcttccgc

SEQ ID NO: 255991 - DNA, 201 bp, Homo sapiens
gcctggaaaggagaaggaactcacccagcctaaagattaagggttttatgctggccacggtggctcatgcctcccaacattttgagaggctgaggtgggargattgcttgagtccaggagtttgagcccagcctgggcaacatagtaagaccctgtctttacaaaaaataaaaaaaaatagccaggtgtggtagcacacac

SEQ ID NO: 255992 - DNA, 201 bp, Homo sapiens
tgcagtttcatttatttgtggtcagctgcaggctggaaatactaaatgaaaaattccagaaataagcaattcagaagttttaaatgacacgttgttctgartagtgggatgaaatcttacacatcttactttgtcccttcctcatcacaggaagaaggatgggtacagtacaataaaatattgaataaataagcaaattca

SEQ ID NO: 255993 - DNA, 201 bp, Homo sapiens
ggtagcaatatgtaatacactagagtcgggagcgagaatgatgtcctgttagcttatacggcactttcgtgctattaagaaaggatgccctttcagccagkaccagatgccattatgcagtgaacaacttgtacagtcatatgtgacatcccagagagaaaacaacaaatacagaaaccttacttattcaggaattaatta

SEQ ID NO: 255994 - DNA, 201 bp, Homo sapiens
aggatttccttgctttgagcattgatttctgccggttcagtgttggccagttctttgaaggtgatgatgcaagtcgctgtgttcttcctctagaagcctcrtgatgattgtaaagattctctgatacaattgcatcagttcaataatctttcattgagtatccgctctggtccaggcactgtgctgggtactagggtttca

SEQ ID NO: 255995 - DNA, 201 bp, Homo sapiens
atggacaaggagaaagagtgcagcagtgcagacacctggaggcttaacacagtctggtgtaattggaaaattcaaagcttagtgtgtttttccaaaacatytgtagagaaaagtttgctactcttttccctcggttgcgccatttagagaaagtttcttcagcctctgccttcttcagacaatttgagagatgagaaaggg

SEQ ID NO: 255996 - DNA, 201 bp, Homo sapiens
cctgaaaggggagatttgagctattcaaggaggtcagaatccctaagtaggtggtacttggctgtgtagaaggaatgtgtggatgttgaaaagggtgggawaagagcttttcaggaagaggcaacagcatgggtacagttttgtgtggaaggaaatgggggactggaaggactcaggaagaggtgagtatatgtgggacta

SEQ ID NO: 255997 - DNA, 201 bp, Homo sapiens
ctccccatccctgaacacaatgggccactttcatgactgagcctttgcactgctattctctgttgggcatgccttgctctgcttggtgaactcctgttcaracttcaaaacccaggatgaactttaccttttctgacttctgacttcctctagtagagttggcaccacctcctcggcccttagtttttaatgctttacatg

SEQ ID NO: 255998 - DNA, 201 bp, Homo sapiens
ctgtctgatggttgcaagactgtcgctagacccagctgtttggaggaactcttctttcctgggaaaccacaccttggagagtaggtactgggcagctgctscctgagcctccactcctgtgacagtgaatcaggcccttcctgccatcttgtttcattcagacatgtgaaagtcaggttctaagtccactatttccaaatc

SEQ ID NO: 255999 - DNA, 201 bp, Homo sapiens
actttaattgctaattgtgtagcactgagcaaaaataatagggatgcagcttttatagcaccaatcaggtcagtgatgttggtgatactgttgagagcttrctatgtgccaggcattatgctaagtggttgatgaccattatctcatttattcctccgtataccctacaggcagatgctgtcatcattctgaaattccaga

SEQ ID NO: 256000 - DNA, 201 bp, Homo sapiens
aagggccaccctggcttctctctggctccgcgagcctgcggatccacaacaaacccacgtgcgcacagccccggggaacacggatttctccacggcaccgwcagtatggggtggggtggcgggggggcattgcgccttgcagagtctgggttccttcaaatcctgccttctgggtttacggatcgacaaattgaggcccgc

SEQ ID NO: 256001 - DNA, 201 bp, Homo sapiens
ctatactctaatactctaaactcaaaactatctgcaagtgggatgtgtgcctttataggtccctgtcactagtggtcaagcaatcagtgccatcacgtgtygggtgtgatggctgagctgttcttcagggacccattcctcagtcagtgtctgctgtatacatgcagctgcagaggacatttgtgcactgaggagggcttt

SEQ ID NO: 256002 - DNA, 201 bp, Homo sapiens
ccgcgctcttcttccttccttctccagtcccttccactgtgcgtcttctgtcccccgttcttccccagcggacccctctttcgagactccctagtggggtycccagctcccgggcgatcctgcccttgccgagcgcgttttctggagtcacctgggggaggggagtcctgggcagggccgggctggggaagacgcctgggg

SEQ ID NO: 256003 - DNA, 201 bp, Homo sapiens
aagtgggatgtgtgcctttataggtccctgtcactagtggtcaagcaatcagtgccatcacgtgttgggtgtgatggctgagctgttcttcagggacccaktcctcagtcagtgtctgctgtatacatgcagctgcagaggacatttgtgcactgaggagggctttgggtgtgttaatattctagaagaggtggagtagag

SEQ ID NO: 256004 - DNA, 201 bp, Homo sapiens
aagactcaacccttatcctggtccattgacctatttccaacctcagctttgatgacaaaactcagcagaagctttcttacagactaagagcactttataaracactgcttaaagctgaaggaaaccctctgaatgaccacccttgaatacctcctttactaagacccatgattatctgggagttagaatccataataatag

SEQ ID NO: 256005 - DNA, 201 bp, Homo sapiens
gccccggggaacacggatttctccacggcaccgtcagtatggggtggggtggcgggggggcattgcgccttgcagagtctgggttccttcaaatcctgccktctgggtttacggatcgacaaattgaggcccgcggcagcggagggggcacaggcaccataacaaacgcacgtgcgccctgcccggagagctggacgcact

SEQ ID NO: 256006 - DNA, 201 bp, Homo sapiens
cgcggcagcggagggggcacaggcaccataacaaacgcacgtgcgccctgcccggagagctggacgcactgcatacccttaggggccgccctgcggtgccrggccattgtctcagcctcgggggagggagtggctctagaggcgccacttgctggaagagggcgagagagacatttaaaaggtaccgcttgggcatcagac

SEQ ID NO: 256007 - DNA, 201 bp, Homo sapiens; identical to SEQ ID NO: 50922

SEQ ID NO: 256008 - DNA, 201 bp, Homo sapiens
gcattttcgcaagcaaggccagccgagacctcgtattctagctggggacgtacaattttcagttctgagtttatttgaaagaaattccgaggtccggaaaragagaactcttgtttgttttgctttttctttgcttacatatgctcagctcagctttgcagatgttaatcggacacgatctgcagcggggagatggtttcg

SEQ ID NO: 256009 - DNA, 201 bp, Homo sapiens
attaatcttgttttatatacccttattgaggtgtaattgacagacaaaaccctgcacatacttaaattgtacaacttggtgagttttgacatatgtatacrgtcatgaaactattcccacaattaagctaatgaacataacgattacccctaaaagtgtccttccgagctttatccctccttcctgcccccttccatctcc

SEQ ID NO: 256010 - DNA, 201 bp, Homo sapiens
ccactatttccaaatcactcatgcaactttgaaaattatttgtatttccaaacctcactatactcagctataaatggagctcataaaatctgctgtgcttwtctcacgggagtataataggtctgtaaaaccttaccaatacggaaagtacctgagtgttaccactcagtgcacagcagggatggcaggtgcagcactgat

SEQ ID NO: 256011 - DNA, 201 bp, Homo sapiens; identical to SEQ ID NO: 50925

SEQ ID NO: 256012 - DNA, 201 bp, Homo sapiens
ttcgcaagcaaggccagccgagacctcgtattctagctggggacgtacaattttcagttctgagtttatttgaaagaaattccgaggtccggaaaaagagractcttgtttgttttgctttttctttgcttacatatgctcagctcagctttgcagatgttaatcggacacgatctgcagcggggagatggtttcgcggtg

SEQ ID NO: 256013 - DNA, 201 bp, Homo sapiens
gttacacttgtttcttttccttagagtttccagcgtgtttcactttcaatgtgattctggtagcaacaggaggcagctggatgcctaggcagatagggtcrggtacccggtgaaacccccacctccaggccaaagacagtttaaagcctgaaagccaagctacgagttaaatcctcagaccagagtgagaacttgtttggc

SEQ ID NO: 256014 - DNA, 201 bp, Homo sapiens
agccaagctacgagttaaatcctcagaccagagtgagaacttgtttggcgtgctttcccctaattgattcctacatttcgcctgttttacatatacccacyttttcctaattggttttctacgctgccgtgcccacctttgagtggtgtctttgctttcatcttttttgcatactcacaaaccggtcagcatgcactccct

SEQ ID NO: 256015 - DNA, 201 bp, Homo sapiens
cctaattgattcctacatttcgcctgttttacatatacccactttttcctaattggttttctacgctgccgtgcccacctttgagtggtgtctttgctttmatcttttttgcatactcacaaaccggtcagcatgcactccctattctgagtccataaaaggcccctgacccagccacattggggaacttttccgtcttca

SEQ ID NO: 256016 - DNA, 201 bp, Homo sapiens
tcgtccgggtgaaaagaaagaacctcgctcccttcaccatccaggctgaggcttcagtctttcagcctgcagcttggggtggaagcctctgggtgcagggrttcgaggacgctcctctccttctgtatttgccatttgagagcgcccagtaggagtcatgcctcaatgttaggaggttaatgccaaacgcagtgaaagatt

SEQ ID NO: 256017 - DNA, 201 bp, Homo sapiens
atgactcctggggggagcagctcactggcccatttctcccttgagaggaccacttctttctttttcagtggtaccagaatccggattataatttctttaayaactacaagacttatcgtaagctgcaccccaatcagcccttttacatcctcaagccccagatgccttgggagctatgggacattcttcaagaaatctccc

SEQ ID NO: 256018 - DNA, 201 bp, Homo sapiens
gcatctgctgagttcctaacatgccttgctcttttcatcctcccagaagtcctgtgaggttgataagattattggtctcattttgctggagagctaaatgyggaggctcaagtggtcacacaactggctaatagcagactgaggtttgaaagcagagtgcttgcttcaaagaccccactcttggcacctctgctgttgtgc

SEQ ID NO: 256019 - DNA, 201 bp, Homo sapiens
cttaggacattaaggcttaattttttgttggatccgcagttgggaagagctggtagcaggaaactgatacaaagtctggcgtttgctttaaattactccargaaaaatcgaagcagtgtagtaaagattaggaggtgagacagttcctctttctgaggagatggcgggcccgttttcttctttgtctggctctctgtagca

SEQ ID NO: 256020 - DNA, 201 bp, Homo sapiens
agggaggaggcagagacaagagtagaagaaaaatgatttatttattttttgagatggagttgtccaggctggagtgcagtggtggtgtaatgcccaacctkgtttttactaaccctgtttttagactctcccttttcctttaatcacctagccttgtttccacctgaattgactctcccttagctaagagagccagacaga

SEQ ID NO: 256021 - DNA, 201 bp, Homo sapiens
agagagaaaaatgatcgttcacatgatgcataaaaaaagaataaaaggtcttttttattagggaaaatttcaaacatacaaaagcacaaagaagagtgtarggaaccctatatcatatcccttggcttcaactatgactgaaacgcatggctgatccgtaaccccatggtcaaccccagattacgtgcaagtacatcccag

SEQ ID NO: 256022 - DNA, 201 bp, Homo sapiens
gttttatatacccttattgaggtgtaattgacagacaaaaccctgcacatacttaaattgtacaacttggtgagttttgacatatgtatacagtcatgaawctattcccacaattaagctaatgaacataacgattacccctaaaagtgtccttccgagctttatccctccttcctgcccccttccatctcctgccctcca

SEQ ID NO: 256023 - DNA, 201 bp, Homo sapiens
tggagtgaaaggaaggatacaagagctggctagggagagatggagagtggagtcttccttcctgttaaggaggcagagcagtcagcccagcagtgcccacyctacctccaccccaggagcactttgctcttgttcccccaggagggctccttgtgggtggctcctagctgaccactagctcagctgtttgcctgtaaagac

SEQ ID NO: 256024 - DNA, 201 bp, Homo sapiens
tggagtgtagggtgcatgagagtgacagggcatgaggctggtcagctggaaaggggcatgagacaggtccccaaggcttttgcctgggtcacagggctgaraaacctagttatctgtgtaggtgaattctccatctctcactgaaagtttggcctggagtgaaaggaaggatacaagagctggctagggagagatggagag

SEQ ID NO: 256025 - DNA, 201 bp, Homo sapiens
tttgagttcaaagtgcttccagtttccattcagttacacaataaattctgagaaaacaaagtaggtgtttactcagaaataaagagactattcagtctctrtttgctcagtgaaatctattttccagagcttcttgcagttctgtgcatgttgtactggaaaggacatgggttatggaatcaaatccacttcgatttgaac

SEQ ID NO: 256026 - DNA, 201 bp, Homo sapiens
tcctgaccttgtgatccatccacctcagcctcccaaagtgctgggattacaggcaagagccacctcgcccagctgcactttttaaggttatttgaacaccragcaattagtgcttctgggcccaggctaacagatgaggccagaaaaccccaccacactctctcagtcctgagcaagggtgctgctgatcgggcacagagc

SEQ ID NO: 256027 - DNA, 201 bp, Homo sapiens
atgaggtgagtcagcttcctgtctcagcagtgctcttcttgcagggcactgcacaaaactgtggtggagataaccctcgatcttctcatgcaggagtccarcatcgcagcccttagagagatacatcagaaatctatggcatcatctataacgagaagtctttttctggccattttgaaggggtgttgggccacttactat

SEQ ID NO: 256028 - DNA, 201 bp, Homo sapiens
ttcaacactcaataaaattcttatctgccttcctctcccttcaatgtccagtgtatcctcattatcctttggtgtggtgcacgagctcggaaccaccgaaygcgggtacaagctataatacagtgagctgggacacacctgcatggccgagcgagcacaggtggggcattgctggcccgaggaccaagaagaaaaatccta

SEQ ID NO: 256029 - DNA, 201 bp, Homo sapiens
tggtttgaatcctagctctgtaccagctccatgaccttgggcaagtggcttagttcttgactgcgtcttgctctgtcgccctggctggagtgcagtggtgygatcttagctcactgcaacctgtgcttcccaggttcaagcgattctcctgccttggcctccccagtggctgggattacaggcacattccaccatgcctgg

SEQ ID NO: 256030 - DNA, 201 bp, Homo sapiens
ggccgagcgagcacaggtggggcattgctggcccgaggaccaagaagaaaaatcctacatcaattcctcttggcactgcagtatagttttctcaccaggaygctgaccctgtaaggaacttcagaaatcatgtgactggacccttttactttccagatgggaaaagtgaggcctagagaagagaaattgcttgcctaatga

SEQ ID NO: 256031 - DNA, 201 bp, Homo sapiens
attccatcctccttgaaatagtttcttctcttggcttctggaacatcactgtctttgcttttcctcttctctcactaggttctccttctcagttccttttsttggctcattttcttttcttttcttttctttttttatttttattgagatggagtctcactctcttacccaggctggagtgcagtggcgcgatctcagctc

SEQ ID NO: 256032 - DNA, 201 bp, Homo sapiens
ccaggttcaagcgattctcctgccttggcctccccagtggctgggattacaggcacattccaccatgcctggctaatttttgtattttcagtagagacagsgtttcaccatattggccaggctggtctcgaactcctgacctcaagtgatctgcccgccttggcctcccaaattgctgggattacaggtgtgagccaccaa

SEQ ID NO: 256033 - DNA, 201 bp, Homo sapiens
ttgtccgcctccccacctcctccacccctgcttccaggctgtctgcagaccgctgggccgggtttcacagtattggcgtgaatcagcttgccaggcttctrccctttgtgcttggtggtagctaactgacttttttctttttctcatgtggtcaggatttttccactgaagcatttcttttatgatgtgggagagacagat

SEQ ID NO: 256034 - DNA, 201 bp, Homo sapiens
gcgtgctctgggggcaacaaacttggtgctaaacttgtttttcttgttttactcacaaacattatgacagcagtaaagatacacttttatttatttatatwttttttagagacagagtcctcctctgttgcccaggctggagtggctattgtagttcactgcagccttgaacttgtgggcttgggatcctcctgtctcagc

SEQ ID NO: 256035 - DNA, 201 bp, Homo sapiens
caggacgctgaccctgtaaggaacttcagaaatcatgtgactggacccttttactttccagatgggaaaagtgaggcctagagaagagaaattgcttgccyaatgatacacaacaatgcgtggtctacttttagtgcacctttttgcgtaaaagggaaatggttgcatcaaaccagtagttgttggtactccagagaaaag

SEQ ID NO: 256036 - DNA, 201 bp, Homo sapiens
gccatgatgaaggcatgcaaaacaaaaaaggcacttttcttattgagaaggtggctttttatagagaatggtgtcatactgttaggtttcaggccagcagmcctagtcaggcatgtgacacttctgtgccaggtgtggctatgagagtcaacaggaaaaatgatatatgtaaatggacaggtctttaaataaatgcagttt

SEQ ID NO: 256037 - DNA, 201 bp, Homo sapiens
gggcgctgtcttggggtctgtacagggtgctgtgggagcacagggaagggttcctaactcacactggggatcagggaggctttggctcctgatactaaatkacctcttatttgatacactttttatgtcagacttgctggttctttccacacattgagtcaaagggtgtctctggttcctccctggatggactgatacagg

SEQ ID NO: 256038 - DNA, 201 bp, Homo sapiens
gagatagatggaagtgtggttgttcccattttacagatggggaaattgaaatgtggagaatgaaagtcccccattccaggacttgatttactaagcagaasgcgcagatctgcaacagcagctctttccggggaaggagacatgagtggcaggcctgctggattctaacctctctggaatagtcctctcactgttaatgca

SEQ ID NO: 256039 - DNA, 201 bp, Homo sapiens
ccagctgacctcccatatggccaaatcgatcctgaggttgggaatccagttcttcaaactgagcccttcagactctgctgtggtacgtgaaaacagtttcrgtatcccgccataaataccttccaaaattctaaatgtagtacatgaccattgatatggtttggctgtgtcccacccagaatctcatcttgaattgtaatc

SEQ ID NO: 256040 - DNA, 201 bp, Homo sapiens
attattattattatttgagatggagtttcgctctgtcacccaggctggagtgcagtggtgtgatcttggcttactgcaacctccttttcctgggttcaagygatcctcttgcctcagcctcctgagtagctgggattacaggcatgcaccaccatacccagctaatttttgtatctttagtagagatggggtttcaccatg

SEQ ID NO: 256041 - DNA, 201 bp, Homo sapiens
tatgcaaagcaaggaagaaggcaggaggtgttaaaagaaaaactttagagaaaataaatgtagcaaagttcatctgagcaaagaaccatgtgtgaattggrcagcactcagaaccagaagaggttcagagagctctgctgccgcagtgaggacagtgagcttttgtaggctgaacgtggaaagaaggctaagaaaatatat

SEQ ID NO: 256042 - DNA, 201 bp, Homo sapiens
cctcccaaagtgctgggattacaggcaagagccacctcgcccagctgcactttttaaggttatttgaacaccaagcaattagtgcttctgggcccaggctmacagatgaggccagaaaaccccaccacactctctcagtcctgagcaagggtgctgctgatcgggcacagagccatttctcctgaaatcaagactgggtgc

SEQ ID NO: 256043 - DNA, 201 bp, Homo sapiens
catgtgtgaattgggcagcactcagaaccagaagaggttcagagagctctgctgccgcagtgaggacagtgagcttttgtaggctgaacgtggaaagaagrctaagaaaatatattttattagagtgggaagaccctagttagaggttagttggtggtttctgattggtgaagcctctagttacattttactgtttacatt

SEQ ID NO: 256044 - DNA, 201 bp, Homo sapiens
acactctctcagtcctgagcaagggtgctgctgatcgggcacagagccatttctcctgaaatcaagactgggtgccaggccgtagggctgccagcctgccygtgatttctctctgggaccatctcagtgatttcctgttttcttcccctgagcacattcagtgcaagaggtctaagcatgagggtgggaggtgcggtgagt

SEQ ID NO: 256045 - DNA, 201 bp, Homo sapiens
cactttgggaagctgaggcaggaggatcacttgagcccaggagttagagaccagcctgggcaacaccctgtctctattgttatttttataaaatttaattktttaaaaaatacgggaagtaaaaagaaacagatgaaattaatttaaacaacatagaactacacaggggttaagggcactagctccctgtgcagttgaaag

SEQ ID NO: 256046 - DNA, 201 bp, Homo sapiens
ctaaaaaggagacagagaagggatataatcttatttttctgactggaaaaataagtttcccacacgcagcacctggagaagagtgcgggagtgcaggagartgtgtgtgcatgtcaggagtgtgagtggaagtcgacactggtggaggactcctcactgcaggatctgagaagcttcctccagggacatgggctggatctg

SEQ ID NO: 256047 - DNA, 201 bp, Homo sapiens
aaggagacatgagtggcaggcctgctggattctaacctctctggaatagtcctctcactgttaatgcatgtcagttgacctctccctgatgcaggctgctstggcctcaggagcatggcctgagaagggcagagagcactaatcttgggacacttaactcttaagttggatctaccaatgcctgacaggctctggcgaccc

SEQ ID NO: 256048 - DNA, 201 bp, Homo sapiens
aacaacaacaaatatttgaggcctacttttttgagaacagaaaagcaaattagacgtggtccttgcccctaaggtgctcacagtccactatctatctaggycagatattttccactgctggtcagtgtttatgaggcaaactgtttactaacttgcctaacactgcctgtcccgtgcagttcttcctggattgacggcagc

SEQ ID NO: 256049 - DNA, 201 bp, Homo sapiens
tttatttatttatttatttatttatttatttatttatttatatgttttagaaaactaagaggcctaggtaaataactgtgccttaaagcccttctttccamccaggagtagcagcatgctagaaaagaaaagggtgggcctgggaaactagatttgaattttggttttgtcactttctagctgtgtggtctttcgaaaatc

SEQ ID NO: 256050 - DNA, 201 bp, Homo sapiens
gaattttggttttgtcactttctagctgtgtggtctttcgaaaatcatttgattcctctgagcttcagcctcttcacctgtaaaataatcaacccacagcrttactcagaagatttacaataaaagagaaaacctagcacattacgttatgtaagcgatacttataacaatgatgataatgataataatcatcatcataat

SEQ ID NO: 256051 - DNA, 201 bp, Homo sapiens
aagcctagtacagcttcaccttggaggagaaaaatatgtcgattcagctctactcagcaacttttttaaagtggagagattgagagagaaagagagagtarttgaaataatgcccacagttctgacagcctcttgatcagctgaaagcccacaagtgcaggtggggagacatgaattcgagttctctcagtctctgtaggg

SEQ ID NO: 256052 - DNA, 201 bp, Homo sapiens
ctcagctacttaggaagctgaggcaggggaatcgcttgaacccaggaggcggaggttgtagtgagccaagatcacgccactgcacactccagcctgagcarcagagtgagactccctctcaaaaacaaaaaaaaaagagaccctttaaaaataaaaactacaagatactattatcacattcaaataagtaagtaagtaagt

SEQ ID NO: 256053 - DNA, 201 bp, Homo sapiens
aggatatgatctcattcttttttatggctgcatagtattccatagtatatatatatgtaccacattttctttatctaggctactgttgatgggtatttagrtctttgctgttgtgaatagtgctgcagtgaacatatgcgcgcatgtgtctttatggtagaacaatttatattccttcgggtatttactcagtaatgggat

SEQ ID NO: 256054 - DNA, 201 bp, Homo sapiens
aacccaggaggcggaggttgtagtgagccaagatcacgccactgcacactccagcctgagcagcagagtgagactccctctcaaaaacaaaaaaaaaagakaccctttaaaaataaaaactacaagatactattatcacattcaaataagtaagtaagtaagtattccttaataccagatatggagtcaatattcaatttt

SEQ ID NO: 256055 - DNA, 201 bp, Homo sapiens
aaaaaacccagaaccttcacacataagtgagtaatatctcaagtcattctatttatgtattctgtatttaccgacaaacaggtggtgggagtggagggggycttgtgcttagcctgggattacaaagagcatggagacccacccattctttgtccgagggaagtccagcctagctccaccacccttgcttaaaacactttt

SEQ ID NO: 256056 - DNA, 201 bp, Homo sapiens
atcccctctgttagttagccccttccctctgctttatggatgaggatgggggacctagagaaggtcccagtccttggtagcaggccctctctcacaccccrtctatgggaagacagggtcccttttctacctctgactttgatgattcttggtctcctctaacttgctgttacacccaagtaggaatttttgactcaaata

SEQ ID NO: 256057 - DNA, 201 bp, Homo sapiens; identical to SEQ ID NO: 50944

SEQ ID NO: 256058 - DNA, 201 bp, Homo sapiens; identical to SEQ ID NO: 50929

SEQ ID NO: 256059 - DNA, 201 bp, Homo sapiens
tgtgccactgtgctccagcttgggtgacagattgagactctgtcttgagaaaaaaaaaagattgtttaataaatgcttttaatcaataacttcccacgggmggggacactgatttgaaatataatctttgggtgaggtgtgtggctgccctgtctctgtataggtagacacaggcccacaggtgcagtggccatattatcg

SEQ ID NO: 256060 - DNA, 201 bp, Homo sapiens
gtaagttttttcattgcagtctttgtaaatctgcatccgtctgttggttgatggagttttccttagtacagtgccgagcttccagctttaattttaggaaygctgtaccctttacaacctctcgatggtcctctgtgctggaatcgagggcacccaccgtgtttaaggctgatccctttctttcctgcaagtgaagaagaa

SEQ ID NO: 256061 - DNA, 201 bp, Homo sapiens
cctctcgatggtcctctgtgctggaatcgagggcacccaccgtgtttaaggctgatccctttctttcctgcaagtgaagaagaatgttttgacttaagtcktaaccaagtctggtgaaggaaacgtggcaaaatttaccatcttctgggcttttgctgtgtgcctggccctgattaggcatgttgtgtgttctctcatcca

SEQ ID NO: 256062 - DNA, 201 bp, Homo sapiens; identical to SEQ ID NO: 50982

SEQ ID NO: 256063 - DNA, 201 bp, Homo sapiens
tcagagtctcacaacatattaaaaaatccaggatacaattcaaatttactcaatatcaaaacaacctggaaaatctaaacagtactcaaaggaaaagacarttcaataggcagtaacactgaaatgacttagatcgtgaaattattagacaaataaagtaggtatgaccattctccactcttgaaattagaaagttcttga

SEQ ID NO: 256064 - DNA, 201 bp, Homo sapiens; identical to SEQ ID NO: 50955

SEQ ID NO: 256065 - DNA, 201 bp, Homo sapiens
gctcattcctctccctggtctgtccaactttccctcaggaaaagtcaatgtagtcattatgtctggaaaatgccaaggacttctttccctcattttttacrtggccttgcactctgtgaggcattgcctgggaggttcattgtggctttcttgccgctaagcatctcctctctgccaacatctcatcaattcctgtctgtg

SEQ ID NO: 256066 - DNA, 201 bp, Homo sapiens
actttccctcaggaaaagtcaatgtagtcattatgtctggaaaatgccaaggacttctttccctcattttttacgtggccttgcactctgtgaggcattgsctgggaggttcattgtggctttcttgccgctaagcatctcctctctgccaacatctcatcaattcctgtctgtgccaattacctttgcttaggatttggg

SEQ ID NO: 256067 - DNA, 201 bp, Homo sapiens
gattgatgtggtttgaatatatgtccccaccaaatctcatgttgaaatgtaacccccagtgctggaggtggggcctgctgggaggtgtttgggtcatgggkgtggatctttcatggcttggagctgtcctcacaacagtgagttctcgtgagatctggttgtttcaaagtgtgtagcaccttccccaccactgcctcttgc

SEQ ID NO: 256068 - DNA, 201 bp, Homo sapiens
tagggagctgtgacgtggcagccaggctgagttatcagttacctaagagtctgcctcagggattgcctttgtggactgcacagtgctggttctgggaggargctggccttgggcctgagctggaggtggtggctgacagtgtgaggaatgaatccccagaagatgattcctgccagagggcttgtgacggctccttttttg

SEQ ID NO: 256069 - DNA, 201 bp, Homo sapiens
ctaggggctgtgaatagaaagagaaatgagatacagcctctccctggaggagctctccatctaggaggagagccaggcctgtggaagggggcacaaaggaragcaagttgcacaagctgtggagggagctggaggcaggggcagagaaggccagaaaaagagatgatatcctcaaaggctttaaaagaatgaagaagaatc

SEQ ID NO: 256070 - DNA, 201 bp, Homo sapiens
tgcagtgctatggcgtgatctcggttcactgcgtgcagcctctgcctcctgggttcaagcgattctcctgcctcagcttcaggcacctgccaacatgaccygctcattttttgtatttttagtagagatagggtttcaccatgttggtcaggctggtctcgaactcctgacctcaggcaatccgcccacatcggcctccca

SEQ ID NO: 256071 - DNA, 201 bp, Homo sapiens; identical to SEQ ID NO: 50933

SEQ ID NO: 256072 - DNA, 201 bp, Homo sapiens
cggcctcccaaagtgctgggattacaggcatgagccactgcgccaggccgtaattcttggccatgactcttaaggggacattggtgttgtaggccatgtcrcttcattttgttggtccgttggttctcaaccctggctgtcattagtgttactggtgggaattataacacgtattgctgcctgaattcctctcaaactaac

SEQ ID NO: 256073 - DNA, 201 bp, Homo sapiens
attggctacaacatggatgaaccctgaagacattatgccaagtgaaataagccagtcacacacacacacacacacacacacacacacacacacacacacacaatactatatgaatgtggttgccagggaatgtgaggtgggagggggaatggggagttactgtttaatgagtatagagtttcaattttgcaagactgaaaa

SEQ ID NO: 256074 - DNA, 201 bp, Homo sapiens
agattggctacaacatggatgaaccctgaagacattatgccaagtgaaataagccagtcacacacacacacacacacacacacacacacacacacacacacacaatactatatgaatgtggttgccagggaatgtgaggtgggagggggaatggggagttactgtttaatgagtatagagtttcaattttgcaagactgaa

SEQ ID NO: 256075 - DNA, 201 bp, Homo sapiens
tagcagtgagcaaggctccgtggtcctgggacctgctgagccaggcacaggatataatctcctggtgtgccattttttaagacagttggaaaagcgcagtrtttgggcgggagtgtcccattttttcaggtaccgtctgtcacgacttcccttggctaggaaagggaagtcccctgaccccttgcgcttcctgggtgaggt

SEQ ID NO: 256076 - DNA, 201 bp, Homo sapiens
gactgtggtagtcgtggcaatctcatgccattcagaacctctgattggcaacagtatctttgttcatttgataacaaataactcaaattttaaattaaagwtagtcgacaacatctttcaaaatcttggaatcgtgtcgggggaaacaaaatacaagagatatgatttgatgtgaaagaatttaggacctcttggctttga

SEQ ID NO: 256077 - DNA, 201 bp, Homo sapiens
attcttgggcagaataaggactgagaagacacctgtgaactgagtagcttggagaacatgatcagttatatcaggggtcagcaagcttttcttaaaaggcyggatagtaaatagttttggctttgagggccatgatgtctgtcacaactactcaactctgctgttgtactgcagaagtaacaatagatagtagtaaatgaa

SEQ ID NO: 256078 - DNA, 201 bp, Homo sapiens
  misc_feature (1)...(201): n = A,T,C or G
cacctcacccactccaagctgtccctatttctcttccctactctaattgtctgcatatcagttatctccttgcaaagcaccacggatttatgttgtttgantctttatttatcctcactataaggtgagtgctggaggggttagggatttctggctggcttctctactgctgtgtctgcagtctggttcacagtaggcaat

SEQ ID NO: 256079 - DNA, 201 bp, Homo sapiens
tgtccctcctcagctcagggtctccgctcatcaggccacagtagacctggggtggtaatgacaccctgcagtcatcaaccctggggctttagcctattccrtgttgatttctttaaactctaccccaacttggtaagtagtccttttatgaatctctcaattactccattggagcttctcatctcttttctactgggattc

SEQ ID NO: 256080 - DNA, 201 bp, Homo sapiens
  misc_feature (1)...(201): n = A,T,C or G
tgttgtttgactctttatttatcctcactataaggtgagtgctggaggggttagggatttctggctggcttctctactgctgtgtctgcagtctggttcanagtaggcaatcagcatttgctgaaagaatgaacctatagcttggaaccaacccaaatgtccaacaatgatagactggattaggaaaatgtgcacatatac

SEQ ID NO: 256081 - DNA, 201 bp, Homo sapiens
caattgtaacttcttttctttactccattatttcttaggtgacaacaggagcttctttgtggtcttcttttttctaaaaacactaattcagaactctagcrtgtttagatcttccttacttaaaaccctttcctggtccccataacctactgaagaaatcctaagctccctggcttggcctctgtctacatttctctgatc

SEQ ID NO: 256082 - DNA, 201 bp, Homo sapiens
aagaccttgcatgtttgtttctagaagagatgagctttttttctggggtctcattcagtcattcgtttgttcatttgttcactaaacaattgctaggattytgctctgcttgtagaccatgccaagttctatctaaaatacagagggaaatcagatagaatcctttttcctgagggcatctattggggaggtcaatcagat

SEQ ID NO: 256083 - DNA, 201 bp, Homo sapiens
cattcagtcattcgtttgttcatttgttcactaaacaattgctaggattctgctctgcttgtagaccatgccaagttctatctaaaatacagagggaaatmagatagaatcctttttcctgagggcatctattggggaggtcaatcagatgtctgaggcaatattcaatttgtgccagaagggagagacaacctggtgtca

SEQ ID NO: 256084 - DNA, 201 bp, Homo sapiens
cgaggctgcagtgagctatgatggcaccactcactgcagcctgggtgatatagcaagactctgtctaaaaaaaaaaaaaaaaaaagatgttgatgattgaytggttgaaagtttgttaaactaacaggaagatacagtattctagaaacacaatactaaccaatttccttgggttctgttattgtcagataaacttcttaa

SEQ ID NO: 256085 - DNA, 201 bp, Homo sapiens
tgtaacccccagtgctggaggtggggcctgctgggaggtgtttgggtcatgggggtggatctttcatggcttggagctgtcctcacaacagtgagttctcrtgagatctggttgtttcaaagtgtgtagcaccttccccaccactgcctcttgcttttgctttcgccatgtgatgtgcctgcttctgcttcaccttccacc

SEQ ID NO: 256086 - DNA, 201 bp, Homo sapiens
atacctccaggtgcccaggaagaatctcctgcttgtagcctccataggcagtgtaggaggaagggaagaaaacagcagagtggaccaaggtagcaatatgyaatacactagagtcgggagcgagaatgatgtcctgttagcttatacggcactttcgtgctattaagaaaggatgccctttcagccagtaccagatgccat

SEQ ID NO: 256087 - DNA, 201 bp, Homo sapiens
tttctttttctttttttttttttttttttttgagacggagtcttcgctgtttcgcccaggctggagtgcagtggcgcgatctcggctcagtgcaagctccrcctcccgggttcatgccattctcttgcctcagcctccccggtagctgggactacaggtgcccgccaccatgcccggctaacttttgtattttttagtaga

SEQ ID NO: 256088 - DNA, 201 bp, Homo sapiens
tcagcaatggcagacgcccctcccccaccaggctgctgtcttgcaggtcgatctcagactgctgcactagcagtgagcaaggctccgtggtcctgggaccygctgagccaggcacaggatataatctcctggtgtgccattttttaagacagttggaaaagcgcagtatttgggcgggagtgtcccattttttcaggtacc

SEQ ID NO: 256089 - DNA, 201 bp, Homo sapiens
aagtcactagtcttctgggacagcctaaggaatttatattttatctgtgtttcagggaaccattggaggataaactgagaaatggcccagttccatttgcmtcttacagagatcattccgtcggctccttgtagatagaccagtctacctctgtggtctgatttagaacataaaacctagacccaaaggagagccagtctg

SEQ ID NO: 256090 - DNA, 201 bp, Homo sapiens
gcaggcctggctcacctgcagtgggctccacctacttcgagcttccagggctgctttgtttacctactcaagcctcagcaatggcagacgcccctcccccrccaggctgctgtcttgcaggtcgatctcagactgctgcactagcagtgagcaaggctccgtggtcctgggacctgctgagccaggcacaggatataatct

SEQ ID NO: 256091 - DNA, 201 bp, Homo sapiens
tgtctaaggtcacacatctagcaattagcagagctggaattttggcaatctggccccaaagtccacttttaaccaccattgtgcttcttgattaagtttgrtttcattccagtcatctccttagactcagatgtttgaacaaagagaatcgtgaaaaaaatttggctttaagttttattctcaagattgccaaatcccttt

SEQ ID NO: 256092 - DNA, 201 bp, Homo sapiens
gtcagacagggacgtttaagtctgcagaagtttctgctgccttttattcagctatgccctgcccccagaggtggagtctacagaggcagcaggcctggctsacctgcagtgggctccacctacttcgagcttccagggctgctttgtttacctactcaagcctcagcaatggcagacgcccctcccccaccaggctgctgt

SEQ ID NO: 256093 - DNA, 201 bp, Homo sapiens
agtactttcagtctgaacctaagtggattaatttcctggtaaaacaaacaaacaaacaaacatttttcagatgatttttaacaggattcagagtctcacarcatattaaaaaatccaggatacaattcaaatttactcaatatcaaaacaacctggaaaatctaaacagtactcaaaggaaaagacaattcaataggcagt

SEQ ID NO: 256094 - DNA, 201 bp, Homo sapiens
gttggcctgccttactaggttggggaagttctcctgggtaatatcctgaagagtgttttccaacttggatccattttccctgtcactttcaggtacaccartgaaacgtagatttggtcttttcacatagtcccatatttcttggaggctttgtttgtttctttttactcttttttctctaaacttctctttttgttttat

SEQ ID NO: 256095 - DNA, 201 bp, Homo sapiens
gaaaaatgaaaagcctttcatggtactgtgggacaatgtcaaaaggctgaaacttcttggtattggcattccatctcagaaggtaaaaagaaaaatactgrtgcagaaaaaaatatttggagaaagagtggctgaaatagtttcaaatttaaagaaaaacgtatcttcacaaattgaagaatctcagtaatttcaaacagg

SEQ ID NO: 256096 - DNA, 201 bp, Homo sapiens
cattaagtggcagctcaggtggcacacattaagaatccaagctcttagagaaatgggagtccttcatgggagagggtttctggcagccaggacacatggascccctctcggaggcactatgccaccctctgggggcaacagggtgtcaagcactctaagtctaagaacagaaagtttgggttctaaggtccagatgagggt

SEQ ID NO: 256097 - DNA, 201 bp, Homo sapiens
gatctgctgttagtctgatgggcttccctttgtgggtaacctgatgtttctctctggctgcccttaatattttttccttcatttcaaccttggtgaatctsacaattatgtgtcttggggttgctcttctcgaggagtatctttgtggtgttctctgtatttcctgaatttgaatgttggcctgccttactaggttgggga

SEQ ID NO: 256098 - DNA, 201 bp, Homo sapiens
gaaggaagaaacctattcgaatgactgtccatttctcatccaaaaccatggtggccaaagacgaagacagtgaaaccccgtctttagaatgctggaagaamaaaaaaactatccacccagaattttatatccagaaaaaatattctttgggagtgaaagcaaaatagagatattttcaggtgatggaaaaccaagaggctt

SEQ ID NO: 256099 - DNA, 201 bp, Homo sapiens
ctcttgtaaggcaggcctggtggtgacaaaatctctcagcatttgcttgtctgtaaaggattttatttctccttcacatatgaaggttagtttggctggayatgaaattctgggttgaaaattcttttctttaagaaagttgaatcttggcccctactctcttctggcttgtagagtttctgctgagagatctgctgttag

SEQ ID NO: 256100 - DNA, 201 bp, Homo sapiens
tgatgttagctggttattttgcccattagctgatgtagtttattcctagcattgatggtttttacaatgtagcatgtttttgcagtggctggtaccagttrttcctttccatgtttagtgcttccttcaggagctcttgtaaggcaggcctggtggtgacaaaatctctcagcatttgcttgtctgtaaaggattttattt

SEQ ID NO: 256101 - DNA, 201 bp, Homo sapiens
catttacatttaaggttaatattatgtgtgcatttgatcctgtcattatgatgttagctggttattttgcccattagctgatgtagtttattcctagcatygatggtttttacaatgtagcatgtttttgcagtggctggtaccagttattcctttccatgtttagtgcttccttcaggagctcttgtaaggcaggcctgg

SEQ ID NO: 256102 - DNA, 201 bp, Homo sapiens
aatttgccagcctgtatctttcaactggggcatttagcccatttacatttaaggttaatattatgtgtgcatttgatcctgtcattatgatgttagctggytattttgcccattagctgatgtagtttattcctagcattgatggtttttacaatgtagcatgtttttgcagtggctggtaccagttattcctttccatgt

SEQ ID NO: 256103 - DNA, 201 bp, Homo sapiens
agataacttaggtaaccactattgacattcaacagggaaatatcctcagaagtgaggctagaagacacgagtaagagacattttatgacttttttttttttgtccatagcaagattttctatcagagagagtgtaataacatactctgcctccagcagtctcacaaaccagccaatggtgggctcagtcattttcaattat

SEQ ID NO: 256104 - DNA, 201 bp, Homo sapiens; identical to SEQ ID NO: 50942

SEQ ID NO: 256105 - DNA, 201 bp, Homo sapiens
tgagcattttcctgttttgttaaaaagtcaataattaaaaaaacttttaagtttttaaattatttttaatggtactatggtcgtatttttttaaaggtacrtaattacatgtttatggatggaatgatatgtctgggatttacttaaaatacttagggataggtggctatgaataaaacattattgaccctgaattgataa

SEQ ID NO: 256106 - DNA, 201 bp, Homo sapiens
tttttaaaggtacgtaattacatgtttatggatggaatgatatgtctgggatttacttaaaatacttagggataggtggctatgaataaaacattattgamcctgaattgataattgttgatgctaggtaacggatacatggtggttcattattgctactttctatagttttctatgagtgcaattttttattttaaaact

SEQ ID NO: 256107 - DNA, 201 bp, Homo sapiens
tcaatattggtcaggctggtcttgaactcctgaccttgtgatccatccacctcagcctcccaaagtgctgggattacaggcaagagccacctcgcccagcygcactttttaaggttatttgaacaccaagcaattagtgcttctgggcccaggctaacagatgaggccagaaaaccccaccacactctctcagtcctgagc

SEQ ID NO: 256108 - DNA, 201 bp, Homo sapiens
tttaaagccttctcccatctattacttcccctgtgctttcccataactctgtgaaatagggactattaagcccttttttcacatgaggaaacagagactcwgagaagataagtgacttttctgaggacacacagtgatttggttggagagctggaggacctcacatctgtgccctggtttcaggctttttctattagttca

SEQ ID NO: 256109 - DNA, 201 bp, Homo sapiens
taattgggtcagtaattcttaactgggggctatggaccaacttcagagggtcatgaatccctgcaattgcgtgcaaaactgtctgtggattaggtgtgtakaatgtatgtgtatgcgtataagtgtgtccgtgcatttttccaggaagggagtttgtagactgcagtttattctctaagggatctgtgacccaaaaaagtt

SEQ ID NO: 256110 - DNA, 201 bp, Homo sapiens
caattctcaaatcaacatccttatggtcattgttgccaggatctcatttattgtgtacagtagcctaagaggaggcattttgttcttgcttgacacatgamaaaatcacacacatgccaccagagcacataattcccccttacaccgtaaatacaatcaagcacacctgaaaatctaagtgatttcttccttattgattcc

SEQ ID NO: 256111 - DNA, 201 bp, Homo sapiens
ctacatgtctgctatcttacccagaattcctagcctctatcatgaggtgagtcagcttcctgtctcagcagtgctcttcttgcagggcactgcacaaaacwgtggtggagataaccctcgatcttctcatgcaggagtccagcatcgcagcccttagagagatacatcagaaatctatggcatcatctataacgagaagtc

SEQ ID NO: 256112 - DNA, 201 bp, Homo sapiens
tttattgtgtacagtagcctaagaggaggcattttgttcttgcttgacacatgacaaaatcacacacatgccaccagagcacataattcccccttacaccrtaaatacaatcaagcacacctgaaaatctaagtgatttcttccttattgattccacgaataaaaggcagtagggatttctaaatttgttaaaggaaattc

SEQ ID NO: 256113 - DNA, 201 bp, Homo sapiens; identical to SEQ ID NO: 50957

SEQ ID NO: 256114 - DNA, 201 bp, Homo sapiens
ttatttattcactcttatttcctagaagtacagtagcctggtccatggtcagaagctcttaattctatggcctgaatacattctagaaaggttacattaayttatatgatcctttgaatatatatcgatttaattataatctgtccagcaatgagtattatcatgtagaaaactgcggacgaatgtaaattctataaacta

SEQ ID NO: 256115 - DNA, 201 bp, Homo sapiens
gatgacttctgtggatctgtcccccaaagaaaaatgtccaaacgttggtcaacatgctccattaagcacccagaaagtgcagatataaaatgttcttcagrtgtggtaaggaggaagcaaatgtgaaaacccccagagaaccagcccctgcctcccaggaggcaatgatgtgggccaagagcagaagttgagttctggcct

SEQ ID NO: 256116 - DNA, 201 bp, Homo sapiens
gtctcaaccatttacattttttctagacagttggatatacatatcttttaagtcaccatctgagtatacaggtaacattttctgttttgcttttttcattwtaagattttaagtattttctcccctattactatataaattcatacacaattatataaattatttcaggtggctataccatgcttttcttatttccttatt

SEQ ID NO: 256117 - DNA, 201 bp, Homo sapiens
gccctgccatttcctcagtaactctgagctgttattgggcaacagacttcctaggttgtggaggaggctgggttaactggggactttaaatgcttgagccrtgtgttgactcattaactatgtctaccctaggctgaactggtgttgcccttcccttcccaggaaaggcctggcctctcccattctgcccaaggaaaccct

SEQ ID NO: 256118 - DNA, 201 bp, Homo sapiens
aatgttttatatatatatatacacacacacatatactctatatatatatacacacacacatatatacacatatatatgtgtatatatatatatatatagakagagagagagagagagagagagagagagtatatgtgtatatattttaacaaaaaaagcctgggagaaccattgaatttgaaaccaccaaatctcaacaag

SEQ ID NO: 256119 - DNA, 201 bp, Homo sapiens
taaatgttttatatatatatatacacacacacatatactctatatatatatacacacacacatatatacacatatatatgtgtatatatatatatatatakagagagagagagagagagagagagagagagtatatgtgtatatattttaacaaaaaaagcctgggagaaccattgaatttgaaaccaccaaatctcaaca

SEQ ID NO: 256120 - DNA, 201 bp, Homo sapiens
ttgagccgtgtgttgactcattaactatgtctaccctaggctgaactggtgttgcccttcccttcccaggaaaggcctggcctctcccattctgcccaaggaaaccctctgtgaacttttacattcttccaaactattttgatgtttattggtctggatccattacatcagaagctactgagggtaatatcaggcatctat

SEQ ID NO: 256121 - DNA, 201 bp, Homo sapiens
aagattatgtagtatatagttttataatattctttatttattcaatctatattgtgagcattttcctgttttgttaaaaagtcaataattaaaaaaacttytaagtttttaaattatttttaatggtactatggtcgtatttttttaaaggtacgtaattacatgtttatggatggaatgatatgtctgggatttacttaa

SEQ ID NO: 256122 - DNA, 201 bp, Homo sapiens
ggctgaactggtgttgcccttcccttcccaggaaaggcctggcctctcccattctgcccaaggaaaccctctgtgaacttttacattcttccaaactattytgatgtttattggtctggatccattacatcagaagctactgagggtaatatcaggcatctatattttaaaaatgcttcctaggtgatattaatgcccagg

SEQ ID NO: 256123 - DNA, 201 bp, Homo sapiens
gcgcgatccccagccctggaattcctggaggacatgatatttaagaagacattagtagacattgtcctcactaaagacagagttaaagtggagtttgaatmatcagacccacgttagtaggatttcagaggaaatccttatcttcggtatttcagtagaaatcgttcctgttttgttgccatttggttctcctttgcaact

SEQ ID NO: 256124 - DNA, 201 bp, Homo sapiens; identical to SEQ ID NO: 50948

SEQ ID NO: 256125 - DNA, 201 bp, Homo sapiens; identical to SEQ ID NO: 50950

SEQ ID NO: 256126 - DNA, 201 bp, Homo sapiens
aaagccaatggcgtagttctagtgcaaatgccagttggcctaaggcctttcagtttgagtccaaaggcagggggaaaaaaaccccaaaaccaaaccaaacmaaaacaacaacagcaaaaacaatgccccagctcaaggcagtcagacaggaggagctccctcttacctgtgggaaggtcagcctgttttactgtattcagg

SEQ ID NO: 256127 - DNA, 201 bp, Homo sapiens
ggcaaagtcttaatcagatgaaagccaaaacccctacacctgtgtaaggcgccacattatctggctgcccctgtgtaggtattttgctgttccctctactygcaaccctcttttctcagaaatctgcatggtagcctccttcatctctgttaacagaaaaaccaaattctgtaaaatattttcaagaagtttatcctgagg

SEQ ID NO: 256128 - DNA, 201 bp, Homo sapiens
cttgaacccgggaggcggaggttgcagtgagccgagatcacgccactgcactccagcctggacaacagagtgagactttgtctcaaaaaaaaaaaaaaaaacccaaaaacaaaacaaacaaacaatgtttttagctttattttctactctaccaaagagagagctttgttgccttatattggtgttgtaattagctgttag

SEQ ID NO: 256129 - DNA, 201 bp, Homo sapiens
tcacttccattgctttctggaggcccactttggtcaaatggctgacctttctggacttcagcttcatctgtaaaatgggattatggcatctacttcagcakcatgttaggggtttaagtgagaaaatgcatttcacacagtgtcctgcacataaagggcccaccatatatgtaatgaaaaacaaacaaacggccgggctca

SEQ ID NO: 256130 - DNA, 201 bp, Homo sapiens
tttaactggagtagaaatgggccatgcatttgtgcgtacttccccagatgctttttagaacagtgcttgtgtaactgaccagagtgtcaggtgaggccatygttggcagaaaggtgccttcctcgggagaaggtgggttacacagcttttctttgcagatgaatggtgagagccaaacccgaagacccacaggtttcaagc

SEQ ID NO: 256131 - DNA, 201 bp, Homo sapiens
agtgatacatgagcacaactgttttgctattaatcaccagcattgggtgtgaaaatttactcaaagttttgctaaatttaactggagtagaaatgggccaygcatttgtgcgtacttccccagatgctttttagaacagtgcttgtgtaactgaccagagtgtcaggtgaggccattgttggcagaaaggtgccttcctcg

SEQ ID NO: 256132 - DNA, 201 bp, Homo sapiens
tattttgtttctataaacattgtttttcatctttatagtgcatgtcttttgttaatggcttcataggcaatcgatggacttctggatcacaattttgcttrttcctatggctagatatttaggttgttccaaattttctcagcattacatttgatgctacagtaggcacccacacatttatgtttcttttctgtttttcaa

SEQ ID NO: 256133 - DNA, 201 bp, Homo sapiens
attatgacagcagtaaagatacacttttatttatttatattttttttagagacagagtcctcctctgttgcccaggctggagtggctattgtagttcactgcagccttgaacttgtgggcttgggatcctcctgtctcagcctcctgagtagctgggactataggcgtgcactatcacactgagctattttaagaacattt

SEQ ID NO: 256134 - DNA, 201 bp, Homo sapiens
cattatgacagcagtaaagatacacttttatttatttatattttttttagagacagagtcctcctctgttgcccaggctggagtggctattgtagttcactgcagccttgaacttgtgggcttgggatcctcctgtctcagcctcctgagtagctgggactataggcgtgcactatcacactgagctattttaagaacatt

SEQ ID NO: 256135 - DNA, 201 bp, Homo sapiens
gtgtataaccctcacacagccctgcatcctaaggaacactgctgggcttggcttgctgaaacttagattgggaatcacagtcataaatagaaactccagarggaaagctctccaaatttggggtcatgagctgctgaacccactgggcagagctctggggtgctggggtgggttgtcaggcatgactcacctctgctcccc

SEQ ID NO: 256136 - DNA, 201 bp, Homo sapiens
gagatggggtttcaccgtgttagccaggatggtctcgatctcctgacctcatgatcctcccgtcttggcctcctaaagcactgggattacagtcatgagccaccgtgtccagccaagactactatattctaatggagggtaagtggagtaggagggccatgtgcgtgctctgggggcaacaaacttggtgctaaacttgtt

SEQ ID NO: 256137 - DNA, 201 bp, Homo sapiens; identical to SEQ ID NO: 50926

SEQ ID NO: 256138 - DNA, 201 bp, Homo sapiens
tttctgtcccctatgctaaggcaagacatccggggaagaagtaggcccggatttgtcgccttgaaggaagactactataatctctttttttttttttttttgagacggagtctcactccgtagcccagactggagtgcagtggcacgatctcggctcactgcaagctccgcctccctggttcaggccattctcctgcctca

SEQ ID NO: 256139 - DNA, 201 bp, Homo sapiens
caagtttataatgggaagaggaattctctttgacccagtgaatacacattaaacagccatcatgtgcctggcactgggaacaggatgaaaacccacagcayctgcctcccaaggaaatggagggccacaggaatgggcctgccctgcctgtggataggtattatcatactaatgtgagattagtggtgttattttctggaa

SEQ ID NO: 256140 - DNA, 201 bp, Homo sapiens
agattttgataaaatccaaaatcctttcatcaaaaaagccttcaagaaactaggcatcaaaggcacatacctcaaaataataagaatcatctataacaaayccacagccaatatcatactgaatgggtaaaaactggaagcattctccttgagaactgaaacaagacaaggatgcccactctcaccacttctattcaacat

SEQ ID NO: 256141 - DNA, 201 bp, Homo sapiens
atgaggtaggacttgttattattactatttctattttatagataaagatgtcttaaatcttgggtcttaaggggttgagtaacttgctcaaagtcaggtasctggtgaaaggcagtttgggctcttgtcttgataaatctgattccaaagcttgtattgttcatccctaagctatagtcagtgcttggcacatagctagtg

SEQ ID NO: 256142 - DNA, 201 bp, Homo sapiens
ctttagagaaaataaatgtagcaaagttcatctgagcaaagaaccatgtgtgaattgggcagcactcagaaccagaagaggttcagagagctctgctgccrcagtgaggacagtgagcttttgtaggctgaacgtggaaagaaggctaagaaaatatattttattagagtgggaagaccctagttagaggttagttggtgg

SEQ ID NO: 256143 - DNA, 201 bp, Homo sapiens
gccacatgacttctcagatctacacagaacacaaattgggctttttcaagtatttatcaaaacaaaaattatggtcactttcaggacataggaagaggtgraaatagagccaattccctgtgtgctcctttccccttttccctgcatagggttctctcatctgtagagttacggcaacctgtgagagattcatagtaatca

SEQ ID NO: 256144 - DNA, 201 bp, Homo sapiens
cactttgaagatgagaggcaaacacagacagatcccagattcaaatcctggctctacaacttactagttactgattttgtacctttatttttctgaccctyagattttttactgaagaaatcagtgcaatcatgaactgtgaagtaatagacatttatagagaaaatgcctggggtgcaatggtcattctgaaaatggtag

SEQ ID NO: 256145 - DNA, 201 bp, Homo sapiens
gagtagctgggattacaggcatatgccaccatgcccggcaaatttttgtatttttagtagggatagggtttcaccatgttggccaggccggtctcgaactmctgacctcaagtgatccgcccacttcggcctcccaaagtgctgggattacaggcgtgagccaccgtgcccggagaaaaaggatttattttctcttcctcg

SEQ ID NO: 256146 - DNA, 201 bp, Homo sapiens
gtcatttcttagtaagatagattgttggttgctcgtgactctcagtgaagacccagtaatgccaagaatcatggcagacagttagggggaatatgtatctkcaactatggggcagtatggcaaagatattgagggccaggaatttgactacttttgaggagcgatgacaactgagtacaggaagtgagaggaagggagcat

SEQ ID NO: 256147 - DNA, 201 bp, Homo sapiens
gcaaagtacctgacttgtccaaggtcatccagtgaggtgtgaccttgtgggtctttcctttgctttcctttgatttctcatcttcagttggtttacgctcyccttttattcacctcccccaaccttcccctcctccgtaagaattggaaacagagagttgatagttgaggtctgatttatagctgaggattgaggtcaaat

SEQ ID NO: 256148 - DNA, 201 bp, Homo sapiens
ttcaaacaccgtgctgggagaaccactgctctcttcagagctgtcagacagggacgtttaagtctgcagaagtttctgctgccttttattcagctatgccytgcccccagaggtggagtctacagaggcagcaggcctggctcacctgcagtgggctccacctacttcgagcttccagggctgctttgtttacctactcaa

SEQ ID NO: 256149 - DNA, 201 bp, Homo sapiens
gtttctgtcccctatgctaaggcaagacatccggggaagaagtaggcccggatttgtcgccttgaaggaagactactataatctctttttttttttttttttgagacggagtctcactccgtagcccagactggagtgcagtggcacgatctcggctcactgcaagctccgcctccctggttcaggccattctcctgcctc

SEQ ID NO: 256150 - DNA, 201 bp, Homo sapiens
cttgagcctgcgagatcgaggctgcagtgagccgcaacggaatcattgcgctccagcctaggacagagtgagactctgtctcaaaaagaaaaaaaaaaaaagattttagacagtgctgaccatattgagacaatgctgactggtgagtggggacggagaaataaagaactaacattgtgcagaactgtgttctcagccagt

SEQ ID NO: 256151 - DNA, 201 bp, Homo sapiens; identical to SEQ ID NO: 50939

SEQ ID NO: 256152 - DNA, 201 bp, Homo sapiens
cttggacccgggaggtggagcttgcagtgagccaagattgcgccactgcactccagcctgggtgacagagtgagacaccatctcaaaaaaaaaataataawaaaataaaaaaaaaataaagaaattgttaaaatgcaggctgtgcatggtggcggctcactcctgtaatcctagcactttgggaggctgaggtgggtggat

SEQ ID NO: 256153 - DNA, 201 bp, Homo sapiens
gaggctgaggcaggagaattgcttggacccgggaggtggagcttgcagtgagccaagattgcgccactgcactccagcctgggtgacagagtgagacaccrtctcaaaaaaaaaataataataaaataaaaaaaaaataaagaaattgttaaaatgcaggctgtgcatggtggcggctcactcctgtaatcctagcacttt

SEQ ID NO: 256154 - DNA, 201 bp, Homo sapiens
ttgaacccaggaggcggaggttgtagtgagccaagatcacgccactgcacactccagcctgagcagcagagtgagactccctctcaaaaacaaaaaaaaaagagaccctttaaaaataaaaactacaagatactattatcacattcaaataagtaagtaagtaagtattccttaataccagatatggagtcaatattcaat

SEQ ID NO: 256155 - DNA, 201 bp, Homo sapiens
tttaactgacttcaaattcagctgtttattttttcatttttgctgtagatatttcagtatgtatatttaaaagatagagaccctttaaaaataggccggggcgcagtgactcacacctgtaatctcagcactttgggtggccaaggcggccaaggagtttgagaccagcctggccaacatgatgaaactccgtttctacta

SEQ ID NO: 256156 - DNA, 201 bp, Homo sapiens
ggcatcacggggtgcagtttttctctgcttctcagttagataacttgacagagttttatttatttatttatttatttatttatttatttatttatttatatgttttagaaaactaagaggcctaggtaaataactgtgccttaaagcccttctttccacccaggagtagcagcatgctagaaaagaaaagggtgggcctgg

SEQ ID NO: 256157 - DNA, 201 bp, Homo sapiens
tggcatcacggggtgcagtttttctctgcttctcagttagataacttgacagagttttatttatttatttatttatttatttatttatttatttatttatatgttttagaaaactaagaggcctaggtaaataactgtgccttaaagcccttctttccacccaggagtagcagcatgctagaaaagaaaagggtgggcctg

SEQ ID NO: 256158 - DNA, 201 bp, Homo sapiens
ccttggcatcacggggtgcagtttttctctgcttctcagttagataacttgacagagttttatttatttatttatttatttatttatttatttatttatttatatgttttagaaaactaagaggcctaggtaaataactgtgccttaaagcccttctttccacccaggagtagcagcatgctagaaaagaaaagggtgggc

SEQ ID NO: 256159 - DNA, 201 bp, Homo sapiens
cccttggcatcacggggtgcagtttttctctgcttctcagttagataacttgacagagttttatttatttatttatttatttatttatttatttatttatttatatgttttagaaaactaagaggcctaggtaaataactgtgccttaaagcccttctttccacccaggagtagcagcatgctagaaaagaaaagggtggg

SEQ ID NO: 256160 - DNA, 201 bp, Homo sapiens
tgggattacaggcgtgagccaccgtgcccggagaaaaaggatttattttctcttcctcgttcttcactttgaagatgagaggcaaacacagacagatcccrgattcaaatcctggctctacaacttactagttactgattttgtacctttatttttctgaccctcagattttttactgaagaaatcagtgcaatcatgaac

SEQ ID NO: 256161 - DNA, 201 bp, Homo sapiens
gtaacagcataaacaacatactataggtcaaaggagactgtgaacaagcttgatgtagttgttgattgaaatccattgtccgcaggccttctctaaacacragacttgggcccgatctgtagctttctaacccttgctttttcttaccacaagtagtgagtagcacaaggattccacgactgtagcagagtttgctttgcc

SEQ ID NO: 256162 - DNA, 201 bp, Homo sapiens; identical to SEQ ID NO: 50931

SEQ ID NO: 256163 - DNA, 201 bp, Homo sapiens
caccaggccctggcctaggtgctggggattcaaaggtgtataaccctcacacagccctgcatcctaaggaacactgctgggcttggcttgctgaaacttakattgggaatcacagtcataaatagaaactccagagggaaagctctccaaatttggggtcatgagctgctgaacccactgggcagagctctggggtgctgg

SEQ ID NO: 256164 - DNA, 201 bp, Homo sapiens
ggagcggggctgcacctcagacgaggggagcaaggcacttttctcaggtgtacaatttaagggcgtaccccttaaaaactcagtcatcaagataaataatrtttcactacagtatcttcagaaaacacaattaatgtaaaaattatgatgagtgaaatatcaagtatttaaataaagataggatcagtaacagtgctgtgc

SEQ ID NO: 256165 - DNA, 201 bp, Homo sapiens
ttcaatttgtgccagaagggagagacaacctggtgtcataggagagaggacaccttctagctggacagttgcttatagcctcatggaggaagtagtgttcrgtaggctttggagaggggagaatttggcagaggaagatggagggaagggaagctatgaacaggggagggaggtgggaaaatgaggagcggggctgcacct

SEQ ID NO: 256166 - DNA, 201 bp, Homo sapiens
acggggtttcaccatgttggccaggatggtctcaatctcttgaccttgtgatccacccgcctcggcctcccaaagtgctgggattacaggtgtgagccacygcacccggcccaacactcgctcactttatggccatcctcatactacctctgttgttgcaccatcacagcgtgttaaccattgttcaattgtccacctttc

SEQ ID NO: 256167 - DNA, 201 bp, Homo sapiens
aaaatgcatttctctctcatgcaaaagaagtccaaaagtagacattccaaacttaatatggtgttccagtgtcagaatccaagttctttctactttgtggktttgccgttctcagcatatgacttccactttatggtccaaaatgactgctcaagctccagccatcacatccacatttcagccaggaggaagaaggaacaa

SEQ ID NO: 256168 - DNA, 201 bp, Homo sapiens
tctcagctactcggaggctgaggcaggagaatcgcttgaacctgggaggcagaggttgcagtgagctgagatctcaccactgtacgctagcttgggcaacmgagtgagactctgtctcaaaaacaacaacaacaaatatttgaggcctacttttttgagaacagaaaagcaaattagacgtggtccttgcccctaaggtgc

SEQ ID NO: 256169 - DNA, 201 bp, Homo sapiens
atgattaaaagctttgtgtatttgacttgctgtcagcatagagaacatatcaatttgagtttatgtaagataattagtattccaaggtgcccaccaggtarcatttactatttgaaaaatagcagaataactgagggcatttgattttgcatgtcttctcccaagggatctcagggaccctgtggacctcctggatgtcct

SEQ ID NO: 256170 - DNA, 201 bp, Homo sapiens
cagctggtcccctcagcagggccttacaaggtggttatgtctaaataaggcacctgaggccaggagatgtgacatggtccatctaataccatggagtgagytagacacagagcaggactggaacccatgcttccaattccccatccagttttaaggcaatcttcttttctttctttctttctttttttttttttttttttt

SEQ ID NO: 256171 - DNA, 201 bp, Homo sapiens
gctactaaaaactaaccagaaactttcagtatttgcatcgtagaggtgtagtcattcctcttgttttacagtaattgggtcacacctggaactgagcttaytgtcattcttttaagagtgaggggggcaaatggaaataggcccagaggacaataaacagaaaagttaggagattcagaaaccatattatctaaagaatga

SEQ ID NO: 256172 - DNA, 201 bp, Homo sapiens
gaggttgcagtgagctgagatcacaccactgcacttcagcctgggcgacagagccagagccagaccctgtgtcaaaacaaaaaaccaaaccaaaccaaacmaaacaaaacaaaaaaaggctagtgcacctgatttcaactaagtgagaatcattaacatgaagctactaaaaactaaccagaaactttcagtatttgcatc

SEQ ID NO: 256173 - DNA, 201 bp, Homo sapiens
cactttagtttttctgtatgcataatatcccatggtgtaaggtaacctcttttccagttggcagtcatgcctagcttctcatacctctgctttagttcctstttgtggtgtcggcacagtaaaatttatatatggccatatagcctatatgttaaagaccatcccaagtatctcctcagtggtcaggcatttttgtatgat

SEQ ID NO: 256174 - DNA, 201 bp, Homo sapiens
caaggcaggtggatcacgagatcaagagatcgagaccatcctggccaacatggtgaaacccattctctactaaaattacaaaaaaaaaaaaaaaaaaaaaattagccaggcaaggtggcaagtgcctgtagtcccagctattagggaggctgaggcaggaaaatcacttgaacctgggaggtggaggttgcagtgaggatc

SEQ ID NO: 256175 - DNA, 201 bp, Homo sapiens
ctcactgcaacctccatctcccgggttcaagcgcttctcctgcttcagcctcccaagtagctggaactacaggcatgtgcccccacacccggctattttttacatttttggtagagacagggtttcaccatgttagccaggctggcctcaaactcctgacctcaagtgatccacctagtttggcttcccaaagtgctgaga

SEQ ID NO: 256176 - DNA, 201 bp, Homo sapiens
ccttgtgggtctttcctttgctttcctttgatttctcatcttcagttggtttacgctccccttttattcacctcccccaaccttcccctcctccgtaagarttggaaacagagagttgatagttgaggtctgatttatagctgaggattgaggtcaaatttgtagctgaagattgaagtccatttactgagtgcctacttc

SEQ ID NO: 256177 - DNA, 201 bp, Homo sapiens
ttgtttttatgggattagttctgtgctcccagcaggaagatctcattaattaattaattaattcaattagtatttactgagagcctggttgggggggggggcgcccacagcagggttgggtgcaaagggaaataaataaataaacaagtggtgggggctgcttcactgtggctgatgagcttccactgtcaagtgtagcct

SEQ ID NO: 256178 - DNA, 201 bp, Homo sapiens
ttttagtagagatggggtttcaccgtgttagccaggatggtctcgatctcctgacctcatgatcctcccgtcttggcctcctaaagcactgggattacagkcatgagccaccgtgtccagccaagactactatattctaatggagggtaagtggagtaggagggccatgtgcgtgctctgggggcaacaaacttggtgcta

SEQ ID NO: 256179 - DNA, 201 bp, Homo sapiens; identical to SEQ ID NO: 50958

SEQ ID NO: 256180 - DNA, 201 bp, Homo sapiens
gctcaactctcccccaaagcacaggctataggctaggccccaccctgctatccagtgaaacctgcggctggaagagaaacctgtagtctgctgcaagaaamgggctgtgcctcaggagcaacacttgttgatcctttcccctccccatgtccactgatgaagatgactcctggggggagcagctcactggcccatttctcc

SEQ ID NO: 256181 - DNA, 201 bp, Homo sapiens
ccaccgcctcccaggttcaagcagttctcctgcctcagcctcccaagtagctgggtttacaggtgcctgccaccacgcccggcaaatttttttttttttttgtatttttagtggagacaaggtttcactgtgttagccaggatggtctctgtctcctgatctcatgctccgcctgcctcagcctcccaaagtgctgggatt

SEQ ID NO: 256182 - DNA, 201 bp, Homo sapiens
tctcttcctgtgttagtttgctgaggataatggcttccagctccatccatgtccctgcaaaggacatgatctctttcctttttatggctgcatagtattcygtggtgtatatgtaccacattttctttatccagtgtatcactgatggacgtttgggttgattccatatctttgctattgtgaatagtgctgcgatgaaca

SEQ ID NO: 256183 - DNA, 201 bp, Homo sapiens
ctactgtatgagtccatgttgccttgctataaaggaaaacctgagactgagtaatttataaagaaaagaggtttatttggctcatgattctgcaggctgtrcaggcatggcacccacatcatcttctggtgaggcttcaggaagcttttactcacggcaggaggtgaaaagggagggggtgtgccaatttttatgctcctg

SEQ ID NO: 256184 - DNA, 201 bp, Homo sapiens
gaacctgggaggcggagcttgcagtgagccgagatcgcgccactgcactccagcttgggtgacagagcaagactccgtcaaaaaaaaaaaaaaaaaaaagragggtaccttttctggccgggcgcggtggctcatgcctgtaatcccagcactttgggaggccaagcgggtggatcacctgaggtcaggagttcgagccca

SEQ ID NO: 256185 - DNA, 201 bp, Homo sapiens
tgaacctgggaggcggagcttgcagtgagccgagatcgcgccactgcactccagcttgggtgacagagcaagactccgtcaaaaaaaaaaaaaaaaaaaaraagggtaccttttctggccgggcgcggtggctcatgcctgtaatcccagcactttgggaggccaagcgggtggatcacctgaggtcaggagttcgagccc

SEQ ID NO: 256186 - DNA, 201 bp, Homo sapiens
cagcctccacttcagtgcctgcagaggcaggctgtgaaagtctggcttgctggctaagacgattgttccctctcttttaatgtttcaaggacaacatcccytgccgaatcctcttctttcaacctgcctcatggtgttacccaactttttgttaaattgggactagtgggtctgatgttgacaggttttctgagtcttggt

SEQ ID NO: 256187 - DNA, 201 bp, Homo sapiens
tggggtttcaccatgttggtcaggctggtctcaaactcctgacctcgtgatccgcccgcctcagcctcccaaagtgctgggattacaggcatgagccaccrtgcccggcctattatctcagattaataggcgaggaaacaaaggttgaaggagattcagtgacttgctcaaagtcagaccgtgagtgtgttgagttgcgtg

SEQ ID NO: 256188 - DNA, 201 bp, Homo sapiens
tttgtcccttcctcatcacaggaagaaggatgggtacagtacaataaaatattgaataaataagcaaattcaataaagtagcaggatccgaagtcaacacmcaaaaaatattcattttttctattatgtgcaataacaatgaatgatctagaaaggaaatttaaaaaacaattccatttacaatagaatagcataaaaaag

SEQ ID NO: 256189 - DNA, 201 bp, Homo sapiens
attacatgtgttatttaatagaattttcataacactgcatacactattattatctcaattttttattttattttatttatttatttttagacggagtctckctcttgctcaggctggagtgcagtggtgcgatctcggctcactgcaacctccgcctcccgggttcaagccattcccctgtctcagcctcctgagtagctg

SEQ ID NO: 256190 - DNA, 201 bp, Homo sapiens
gataagggattaatgtacagaatatatagaacactcttcaaacaacaataaaaaaaatcaaattacccaatttaaaaataggcaaaggacttgaatggacrtttctccaagatatacaaatggttagtaagcacatgaaaagagactcaactcttttttgctagggaaatgcaacccaagaatacaacacagcaccacctc

SEQ ID NO: 256191 - DNA, 201 bp, Homo sapiens
caaaatggatctatgacctaaatgtagaccaaaaactataaaactcttagaagacaacatagggcaaaaactttatgacatcagatttggcaatgatttcrtcattattacaccaaaggcatacatacgtaacaaaggaaaaaatatacaagttggactttatgaaaattaaaaataattgtatatcaaaagatactctca

SEQ ID NO: 256192 - DNA, 201 bp, Homo sapiens
catataataaccaatctatgttccaatatccccatttgtccccaaggtgaatcaaaccaagattcagacaaggtgtacgtattacatattattatatctgygaagccatttgttttttattcccatttacttgttgatgaaaccagttcagttgtcccataggaagtcctaccttctggatttgtctgataattttccttt

SEQ ID NO: 256193 - DNA, 201 bp, Homo sapiens
gtcatagttttttttttttttaactctgatctatagtatgtctgttttcttcaaccggactcagaatgtaattttccataaatggttgtaggatgtattargctaacttgaaaatataaaagcgtttggtgataaattgtgataaaatttctttcataataatttctagctatttagagttaactacacctagaggcagtg

SEQ ID NO: 256194 - DNA, 201 bp, Homo sapiens
gtggtaatatctgaagatgtgcgtgcgtgcgtgtgtgtgtgtgtgtgtgtgtgtgtgtgtttctattcttgcattttctaactgtccccagtgagtatttkttactttctaactgagaaggttactttaaacagtgtcttgagcagcagcactccatgccctggtgtagccttttcctggcagatgttccccagggctctg

SEQ ID NO: 256195 - DNA, 201 bp, Homo sapiens
ggcagatgttccccagggctctgctgctctgccaatgacttattctcagcatgaactcctcccctgccccctaagaggatctccaaacccaggtcacactmcccctgcaggtaagtacaggcgtttgagaacagctttattcttccaggaacagctggtcccctcagcagggccttacaaggtggttatgtctaaataagg

SEQ ID NO: 256196 - DNA, 201 bp, Homo sapiens
ggaggcggaggcaggacaatggcgtgaacccaggaggccgagcttgcagtgagccgagatcatgccactgcactccatcctaggcgacagagcaagactcygtctcaaaaaaaaaaaaaaagttgcaagtaaacttgtttgccatcagaggacttctgcattgcagaggggttgacctcaatggccacttaggccccctgc

SEQ ID NO: 256197 - DNA, 201 bp, Homo sapiens
cagctactcgggaggcggaggcaggacaatggcgtgaacccaggaggccgagcttgcagtgagccgagatcatgccactgcactccatcctaggcgacagrgcaagactccgtctcaaaaaaaaaaaaaaagttgcaagtaaacttgtttgccatcagaggacttctgcattgcagaggggttgacctcaatggccactta

SEQ ID NO: 256198 - DNA, 201 bp, Homo sapiens
gagtcaggagagagacagaaagtcaacctaggacctttagggaggattgggagtgaggagagagacagaaagtcaacctgggaccttttttttttttttttcttttttgagacagggtctcgcactgtcacccaggctggagtgcagtgggatgatcatgacttgctgcagtctctgacctcccaggcacaagcgatcctc

SEQ ID NO: 256199 - DNA, 201 bp, Homo sapiens
tttcaaacatacaaaagcacaaagaagagtgtaaggaaccctatatcatatcccttggcttcaactatgactgaaacgcatggctgatccgtaaccccatsgtcaaccccagattacgtgcaagtacatcccagacatcttatcagccgagccatagctatttcagtcacatgatacatatttgaggcactgagttgtgct

SEQ ID NO: 256200 - DNA, 201 bp, Homo sapiens
gtttgctaaagataatgacctccagctccatccctgttcctgcagaggatatgatctcattcttttttatggctgcatagtattccatagtatatatatawgtaccacattttctttatctaggctactgttgatgggtatttaggtctttgctgttgtgaatagtgctgcagtgaacatatgcgcgcatgtgtctttatg

SEQ ID NO: 256201 - DNA, 201 bp, Homo sapiens
ggaatggaggcgccgccgccccagtgtgtgcctgctgagcgggcgggctgctgcctcaccttggctagtgtggctgaagattaacctgtccccggggggggaactggagagcctccaatcctattccgctgttattgaaaaggtctagagagcatctagggagccttctcattttacaggcaggaagctgaggccggagag

SEQ ID NO: 256202 - DNA, 201 bp, Homo sapiens
acagccatgaaaaagaacaaagccatgccctttgcagcaacatggatgcagctggaagccattatcctaagcaaattaataatgcaggaacagaaaaccamatgccatatgttgtcacttataagtgggaactaaacaatgaatgctgatagacataaagatggcaataataaacactggggactacaagacggggaaggc

SEQ ID NO: 256203 - DNA, 201 bp, Homo sapiens
aatttatattccttcgggtatttactcagtaatgggattgctgggtcaatggtagttctatttttagtttttcgagcaatccccacactgctttctacaayggttgaactaatttacactcccaccaacagtgtatcagcattgccttttctttgcaaccttgccagcatctgttactttttgactttctgataatatcca

SEQ ID NO: 256204 - DNA, 201 bp, Homo sapiens
ttaatccgtaagatgtctgaaatgatgactgagcaatgcattacctaaaaatattatatattggctaaggttgaggtcaagggttgggggagggatggggratgtgttagtctgtttgggctgctataacaaaaacaccataaatcgggtggcttgtaaacaacaggagtttattgcttatggttttagaggctggtaagt

SEQ ID NO: 256205 - DNA, 201 bp, Homo sapiens
gaatagtacacagccatgaaaaagaacaaagccatgccctttgcagcaacatggatgcagctggaagccattatcctaagcaaattaataatgcaggaacrgaaaaccaaatgccatatgttgtcacttataagtgggaactaaacaatgaatgctgatagacataaagatggcaataataaacactggggactacaagac

SEQ ID NO: 256206 - DNA, 201 bp, Homo sapiens
tagccatatgcagaagaatgaaactagatcccttccttataccatatacaaaaattaactcaagatcaattaaagatttaaatgtgagacctcaaactatmagaatcctggaagaaaacctaggaaacaccattctggacatcaaccttgggaaaggatttatgacaaagtacttaaaagcaactgcaacagaaacaaaaa

SEQ ID NO: 256207 - DNA, 201 bp, Homo sapiens
aattaaaaacaaaagccatatgatcatctcaatagatgcagaaaaagattttgataaaatccaaaatcctttcatcaaaaaagccttcaagaaactaggcrtcaaaggcacatacctcaaaataataagaatcatctataacaaatccacagccaatatcatactgaatgggtaaaaactggaagcattctccttgagaac

SEQ ID NO: 256208 - DNA, 201 bp, Homo sapiens
cctgataccaaaacctggcaaagacacagtaaaaaaagaaaaccgcaggccaatatccctgatgaaaataaatgcaaaaatcctcaacaaaacactagcawaccgaatccagcagcacatcaaaaattatttcactgtgatcaagtaggcttcattcctgggatggaaggttggttctacacagacacattaataaatgtg

SEQ ID NO: 256209 - DNA, 201 bp, Homo sapiens
tacggaggcgactcgcttccttcccgcccctccgccgcgctcttcttccttccttctccagtcccttccactgtgcgtcttctgtcccccgttcttccccmgcggacccctctttcgagactccctagtggggttcccagctcccgggcgatcctgcccttgccgagcgcgttttctggagtcacctgggggaggggagtc

SEQ ID NO: 256210 - DNA, 201 bp, Homo sapiens; identical to SEQ ID NO: 50953

SEQ ID NO: 256211 - DNA, 201 bp, Homo sapiens
tttttcctgagggcatctattggggaggtcaatcagatgtctgaggcaatattcaatttgtgccagaagggagagacaacctggtgtcataggagagaggmcaccttctagctggacagttgcttatagcctcatggaggaagtagtgttcggtaggctttggagaggggagaatttggcagaggaagatggagggaaggg

SEQ ID NO: 256212 - DNA, 201 bp, Homo sapiens
cctcagcctcctgagtagctgggattacaggcatatgccaccatgcccggcaaatttttgtatttttagtagggatagggtttcaccatgttggccaggcyggtctcgaactactgacctcaagtgatccgcccacttcggcctcccaaagtgctgggattacaggcgtgagccaccgtgcccggagaaaaaggatttatt

SEQ ID NO: 256213 - DNA, 201 bp, Homo sapiens
tgatttgggtgtgcacagatgatgggaagaagatccagtaagtttgggaaagatttctggaagaggcaacacacaagctgtgtcttagaaagtagtagctrttagcctctgggaaatgagcatttttgaggcaggggaaggctgcaggagcaaagatttgagggtgagaaatggctcattgtatatgtcagggaaacacta

SEQ ID NO: 256214 - DNA, 201 bp, Homo sapiens
ctcattctgtcacctaggctggagtgcagtggcgcggtcactgctcactgtagactcgatctcccgggttcaagtgatcctcccgccggcctccgaaagtrttgggattacaggtctgagccactgctcctgacccaaaacagctattgtgtaaagcaatccccatctatcctttcacgcatgctttcttccatctttcac

SEQ ID NO: 256215 - DNA, 201 bp, Homo sapiens
tgtatctactgggagcatatctaggctgccaattaagtctcttgatcttcctgagttcctgattcctcactggagaagaagacaatgattccatgacccawcctgatgatgtgtttatttaaagaaaaaccctttagtattagtgtctgctaatggaggtgtctggtacccaggaaagtagagttgagctgtccttgctgc

SEQ ID NO: 256216 - DNA, 201 bp, Homo sapiens
ttttttttcttttcttttgagatggagtgtcactcttgtcacccaggctggagtgcagtggtgtgatcttggcttattgcaacctccacctcccgggttcragcgattctcttgcctcagcctcctgagtagttgggactacaggtgcgtgccaccatgcccagctaatttttgtatttttagtagagatgggatttcacc

SEQ ID NO: 256217 - DNA, 201 bp, Homo sapiens
atgaaattcttggctcaatttatgaacttctttgggttccttggttcctggtgagctctccaaatcctggttctgggtctgtggttggtgcctcacacatkgtacacttacttgaaggaaacacttgctggaggcaagaaggagtcactgcgcccaaggcagcctctcatttagccaccctcttccttagaatcatcttct

SEQ ID NO: 256218 - DNA, 201 bp, Homo sapiens; identical to SEQ ID NO: 50951

SEQ ID NO: 256219 - DNA, 201 bp, Homo sapiens; identical to SEQ ID NO: 50952

SEQ ID NO: 256220 - DNA, 201 bp, Homo sapiens
gcctcagcctccgagtagctgggactacaggcatgcaccaccacacccagttaattttatttattttttttgtagagatgggtgtctcaccgtgttgcccrggcttgaactcctgggctcaaccgatcctcctgccttggcctcccaaagtgctgggattacaggcataagccactgtgcccagcttccaacctgggcact

SEQ ID NO: 256221 - DNA, 201 bp, Homo sapiens
acatgatggtccagactccaccatccagcagccgtgtggccccaggctacttaatcagaaccctaatttccttgcctatagaaggggataataattgtgcsactgcctagcctgagattagtttttatgttcaaattagatcatagacgttaaggatgagacagtttgaaagaggcacacagaagggtttgttattgcgga

SEQ ID NO: 256222 - DNA, 201 bp, Homo sapiens
ctagcctgagattagtttttatgttcaaattagatcatagacgttaaggatgagacagtttgaaagaggcacacagaagggtttgttattgcggacacacyccttgctctgctgagagcatacatctgttcaagcacccacaggtgtctgtgaaaatgttcacagtcatagacacagcccctacagggttgacacaaacaa

SEQ ID NO: 256223 - DNA, 201 bp, Homo sapiens
gttaacctgtgctgttaattccaatgaatgatagttgagaagcatgaccattcctctgtcatctagatgactgtttcgcacctttttctctctcttcaagyctctaacaccttccctatccatactctcagttgataccttgttttaaacttacctgaaaaaataatggcagtcggaggaaaactttcataccttttgtct

SEQ ID NO: 256224 - DNA, 201 bp, Homo sapiens
ttctgcaagatttcacagctcataagcaaaagagatacactaaggctgtctgtgacctccacagcttctcaaagctagtgagtgctctttatggcaagcasttgcccacgtggtagttccaaaatgcagttcccacacacagagtctctcccgtcggggaatatcattccatctcggaagctctgtgaacagctgcagctc

SEQ ID NO: 256225 - DNA, 201 bp, Homo sapiens
agctgtgtgtccagggtttccagactcctgaagaggtgtttttttgtttgttcgtttgttttttagacggtgtcttgctctgttgcccaggctggagtgcrgtggcgcaatctcagctcactgcaacctccgcctcctgggttcaagcgagtctcctacttcagcctcccaagtagctgagattacaggcgcctgccacca

SEQ ID NO: 256226 - DNA, 201 bp, Homo sapiens
ttgcattttgtaaccatcactggctttcatctgagcagaggggctgcagtagatgaagacacatagttaggaaggtcttacaagtagtctgggttagataygctgatagcttgcacaagagtaggggtgaaggtgaatgtgagaaaagaatgtatttaagggctgcttgcgatttgcagtcaacaggttttaatgtcgcat

SEQ ID NO: 256227 - DNA, 201 bp, Homo sapiens
tctcaccactgtacgctagcttgggcaacagagtgagactctgtctcaaaaacaacaacaacaaatatttgaggcctacttttttgagaacagaaaagcamattagacgtggtccttgcccctaaggtgctcacagtccactatctatctaggtcagatattttccactgctggtcagtgtttatgaggcaaactgtttac

SEQ ID NO: 256228 - DNA, 201 bp, Homo sapiens
ctcccgagtaactaagattacagacacacgtcaccacgccccgctagttttgtatttttagtagagacgggttttcaccatgttggtcaggctggtcacgrgcttctgacttcaagtcatccacctgcctcagcctcccaaggtgctgggattacaggcatgagccacagtacctggccgagtggattattttacttgatt

SEQ ID NO: 256229 - DNA, 201 bp, Homo sapiens
ctaggtcagatattttccactgctggtcagtgtttatgaggcaaactgtttactaacttgcctaacactgcctgtcccgtgcagttcttcctggattgacrgcagctagatcctgtgacagaggacagctgttccccgctccctcccatcactcccctcctctgtctcctggccatagctgtgggctgcaactctgacttg

SEQ ID NO: 256230 - DNA, 201 bp, Homo sapiens
ggaattagtctgattgataacgcccaaagccccgcgtctatcaccttgtaatagtcttaaagcccctgcacctggaactgtttactttcctgtaaccattyatccttttaacttttttacctattttatttctgtaaaattgttttaactagacccccctcccctttctaaaccaaagtataaaagaaaatctagcccctt

SEQ ID NO: 256231 - DNA, 201 bp, Homo sapiens
cccaggagcagcaatggtgcagttccagtctgagtccaaaggcctgagaaccagggaaagccaatggcgtagttctagtgcaaatgccagttggcctaagkcctttcagtttgagtccaaaggcagggggaaaaaaaccccaaaaccaaaccaaaccaaaacaacaacagcaaaaacaatgccccagctcaaggcagtcag

SEQ ID NO: 256232 - DNA, 201 bp, Homo sapiens
gcctatgctgagaaaaaagataacgcacttaaatcagagatctaaagatcatacaaaggtgggccttcaaaagggtaattggagagtctgcggaggcacgygtcgcttttgctcatattccattggccaagacttagtcacatagatagacacacctggctgtaagtaactctgggaaaaagtctccagctgagaggccat

SEQ ID NO: 256233 - DNA, 201 bp, Homo sapiens
aatttcttttatttccagtgacattgaatccccagcctgtcactgaattggttcccacccgtttagggaggaggcagagacaagagtagaagaaaaatgakttatttattttttgagatggagttgtccaggctggagtgcagtggtggtgtaatgcccaaccttgtttttactaaccctgtttttagactctcccttttc

SEQ ID NO: 256234 - DNA, 201 bp, Homo sapiens
atttgacaggtgaaattggggcgagggtgcgctgagggaggaaaggagtgcaggcaacgtcagggccggtggccagggtgaatccagggaagcgggtgccygtgtgcacggtgggtgttgcttggaggctggggagtgagtgggagtatggccttgtatactagactgagaggcatttgcacttaatggagtaaacatgga

SEQ ID NO: 256235 - DNA, 201 bp, Homo sapiens
atggctttactaattgccattctgactggcatgagatagtatctttttgtggttttgatttgcatttttctaatgatgcatggtgttgagcattttttcayatgtttgttggccacataaatgtcttattttgagaaatgtctgtttatgtcctttgcccactttttaatgggttttttttttcttgcaaatttgtttaaa

SEQ ID NO: 256236 - DNA, 201 bp, Homo sapiens
ggatagccaattttcccagcaccatttattaaatagggaatccttttcccattgctagtttttgtcaggtgtggcaaagatcagatggttatagatgtgtrgtcttatttctgagatctctgtgctgtcccattggtctgtgtgtctgtttctgtactagtaccatgctgttttggttactgtagcgttgtagtatagttt

SEQ ID NO: 256237 - DNA, 201 bp, Homo sapiens
actttcaagtccaaaaatttgtgaaagtcaagctttattcttaacccatttggtggcaaaacctgatttggactgatgtgaggctatttataaatctatgsctgtaaaatgtttgtgtttgtttttttttcttcctggtaaattagtatttcctttaaggctctttccaggaacatgctcagttttaagacccgattaaga

SEQ ID NO: 256238 - DNA, 201 bp, Homo sapiens
gaaactcacaagaaatagagaaaatatagggagcagaagaaaacttcacaaaacctgtaattactagtctaagagagataagagaatatgttgcattaatraaataaaagcaatgtgcaacaaagaggagtttcagagactaagaaagaacttttggaaattaaaagtgtgatagaagaataaatcagtagagggtttgga

SEQ ID NO: 256239 - DNA, 201 bp, Homo sapiens
ggagaaaggggattggctgagctgctgccaggggctctagagttgggggacagtgcagtaagggctgccccaagagataaaacagagaacaggccctgagsagaaggaaggagttgagcacaatcttggctggctgggcctcgagaggaaagtagagagaccaaatctgggtgttaggcccagtgacccttgtgggatagg

SEQ ID NO: 256240 - DNA, 201 bp, Homo sapiens
cagtagatttttgtttcgttttgttttctgttttttttttaaattttttaaatcttttttattttgagatggtacctgccaaccctagtggcccgcggccrctagactcactacatacctgctgtcctgggcctgcatggtgtcctgtctacctctcccagggcctctgccctgctctctttgtaggccagcttcctctcc

SEQ ID NO: 256241 - DNA, 201 bp, Homo sapiens
gcaaagactctttcctcctgaatgtattaacgtatgtgcttctggtgaaactttgctttgttgttgttttttaaccctctgcaggcaaggggagagccagytgcgcagagccctgcaaccagcagtccagggagaagtggtgaatgtcatggagcccagctgaaatggactggcccccttgagcctgtcccaagccctggt

SEQ ID NO: 256242 - DNA, 201 bp, Homo sapiens
agactagtaacccaaccacattgcttttatgggaaaatgtgtcccacattccaaataatcaacttggaaataatctttgggaacatacagcccttttataygtgtgagatcaccattctctgcaaagggacagctctcctcggaggttgcactgagccaagatcatgctactgcactccagcctgggtgacagagtgagac

SEQ ID NO: 256243 - DNA, 201 bp, Homo sapiens
gtaacctcagcggccaggcagtctctgtcctccagccaagttttccctcatcaaaacgatcttcgcagattctgacaggtggattttttattaccttttgkcctgactccctggcactgagcccatgcagagaagaaaggaaagaactttccaggttcccttctactggaatgcccccccactagccctctcacctgctcc

SEQ ID NO: 256244 - DNA, 201 bp, Homo sapiens
ttcagtcctgagaaaagagtccctgccaggaagtggatcttgcctgtgtctatggaaacaaacggcataagaaacttacaggaaatcctggcactgggtargaactagcagggtgatgcccacatgagaagttgcgcctgggagggcaaggcagaccaggcctgccatgtgcaaagactcagccaagagctatgtatgtac

SEQ ID NO: 256245 - DNA, 201 bp, Homo sapiens
ggactacaggcgcccgtcaccacacccggctaattttttgtatttttactagagatggggtttcacatgttggccaggatggtctcgatctcctgacctcrtgagccgcctgcctcggcctcccaaggtgctgagattacagaggtgagccaccgcacccagtgactctggagctatttttggaaaggctgctgcagcagc

SEQ ID NO: 256246 - DNA, 201 bp, Homo sapiens
ggaggaaacagatggcccctcacgccccctcctccaaccctcctgtcctttctctcaccgattgaacaccttgaagacaatagctatttggtcatccaccyggagcaccccaatcttgcagagacagcagaggaaagcagcgaaggctgcctcatgccctggaggagaaaaacaaccagcgttgacagtagtccaggtaaa

SEQ ID NO: 256247 - DNA, 201 bp, Homo sapiens
ccagggcaagtctgagcccctgtcctgactgcagctacactggaacacatggatgagaagcagcaaaggaagtgtcacatttggattcagacaaagaagcwggttctcaactagagcaatctggctcagagaagatctgacaagatctggagacaatgttagttgtgacagctggggaaaggcatgctgccaacatctagt

SEQ ID NO: 256248 - DNA, 201 bp, Homo sapiens
aacagctcagcctttcagccacacccaagaactcagtgtggcatctgcacccttcttcccaccctgctcctccagcttatcctgaggtcccccagggctcygcagacccccacattccactccacagagagcagcgcgtgactggctttcaaggcagtgagccaggctgcccccaagtcctcccgaccttgggcctgccac

SEQ ID NO: 256249 - DNA, 201 bp, Homo sapiens
tacctatcagctgcgaactgccccagatgaagggcagaaactggaagtcatccagaccccacactccctggctgccggctggctccatcctgtatgttttytggagtttccgcataacctcaaggtacctgcacaggaggacagggaaagggaaggtagcaaaaagtaaaaagacagtctcaccctttcggccactgggag

SEQ ID NO: 256250 - DNA, 201 bp, Homo sapiens
ccctgggcaggaagaagggaaggagggagcgcaggaggggcaggggagggccacagaacgcagccttggttgggggtggagggataggcacctcccgctcyagtacctatcagctgcgaactgccccagatgaagggcagaaactggaagtcatccagaccccacactccctggctgccggctggctccatcctgtatgtt

SEQ ID NO: 256251 - DNA, 201 bp, Homo sapiens
catgccagcttgggccctgggccctgctccagctgctggaatctcctcttggtgggtgaccctgtcccatcccaactaaagaggaccccagagttttattygctgcttcatctcccctgtgacaaactgaagcccagagaggggaaaggagggagtttctagatgacttctgaacaggacccatctggggcagaaagcgag

SEQ ID NO: 256252 - DNA, 201 bp, Homo sapiens
gctgcccccaggccttcagtaccccagggtctccctaagtccttcagggaggttacagtcctttgcctgtaactctggcaaaggaaaacagacgagtgggrgaaaaaggaatcggggctggaagacaaagaaaaaattagctcattctagccacaaagggagaagagaaagaaccagaatgagcgagcgagctgcagcccg

SEQ ID NO: 256253 - DNA, 201 bp, Homo sapiens
caggagcctgacgagaactgggccagaggccttccctgagaaattgaaattggctttcttttgctcagtctgtctttccacagcctgtaccacaagcctgrgaggtacaagtagttatcttctgcccatcatttcagctgagcagcagagaaagccagtctgtgcccagtgctctgggtcccagctcccaggtatttgcag

SEQ ID NO: 256254 - DNA, 201 bp, Homo sapiens
cagggagcaagcctattaacggccggcgcgcggcggacgcgcggacccgggcgacggccatgtcagtgcggggcgcgcggggcgcatgcgcgccaacggcygccaagcgctaggaccgctcacggccgcccgaacgtcgggcgccgcgactgccacgattgtgcggggcgtcaagtttgggttgtgctcagccatgttttt

SEQ ID NO: 256255 - DNA, 201 bp, Homo sapiens
gccttcatccagatggctttgcagctggcctactacaggtgcgcctctgtggcccacccatggaggagggaggagacctgggggcaggggagggggtgccygcctccaaggggcgtgcttagccccatttcccaccaggatctacggacaggcatgtgccacctatgaaagtgcctccctgcgcatgtttcacctgggccg

SEQ ID NO: 256256 - DNA, 201 bp, Homo sapiens
gcagccagcctactgcgacccgctaccgggcgacgccccgcccctccgtccccgcccctcctgtccctcctcaaggagactccgccccatcgatgccccgyccccgccccacagccaacctcccgggcaccgttgcccgcccggggcccgctaccggcccaggccccgcctcgcgagtcctcctccccgggtgcctgcccg

SEQ ID NO: 256257 - DNA, 201 bp, Homo sapiens
accgagagttaaagtcaccacagcgaagacggccgccatgtcggtgcggggcgctcagggagcaagcctattaacggccggcgcgcggcggacgcgcggamccgggcgacggccatgtcagtgcggggcgcgcggggcgcatgcgcgccaacggccgccaagcgctaggaccgctcacggccgcccgaacgtcgggcgccg

SEQ ID NO: 256258 - DNA, 201 bp, Homo sapiens
aggctcaaggacaccagacggagttggaaaggtgcacaccactacctccaacagcttagaagacatgtggggacaggggagagacagctggacggtgacckcctccttcctcctccacaggtctcaatgactcgccctcggccctgcccctctgtccccgcccgccgtggtcccgcccccgactcgcagccagcctactgc

SEQ ID NO: 256259 - DNA, 201 bp, Homo sapiens
ataaatctcttatcacatttattttgcaaaaatcgaaaatgttaacccccataagaggaggacaggcatcatttaaaataagagctagctggccaggcacrgtggctcacgtctgtaatcccagcacttacggaggccaagacgggcagatcacctgagttcgggagttcgagaccagcctgaccaacatggaaaaacccc

SEQ ID NO: 256260 - DNA, 201 bp, Homo sapiens
tccttcttagttcaaggtaggtcggcaaacagccttctccttctgcacaaaaagggtctctaagatccttccgtagcacctccatcccagttatttaagawgaactaaaaagaggctacaaggtaaataagagttaccgaaggagatgccggagagactaacctccttgcacaaccagccttttaaaattagggatttaga

SEQ ID NO: 256261 - DNA, 201 bp, Homo sapiens
agaatatcaaatgctttcaaaacattagctgtgtttggtcggccaacctatttgcctctgtcgggaatgtaaaagttatctatggccagtccttcttagtycaaggtaggtcggcaaacagccttctccttctgcacaaaaagggtctctaagatccttccgtagcacctccatcccagttatttaagatgaactaaaaag

SEQ ID NO: 256262 - DNA, 201 bp, Homo sapiens
catgcacccctcctgacaggctctggcacttttcccagctgtctgagtggtggctcaagaccgcctacctccagtaccgccagcctgtggtcatctactcsagcccaggcgtgatgctacccaagcaggacttcgtggacctgcagggtcagctccggtgagtggctggggtttgggggccaggaggcagccgggcccctc

SEQ ID NO: 256263 - DNA, 201 bp, Homo sapiens
ccgttgcggctgtgctcctgtggataacattgctagcgagccgcctctggttccactcagcttggttcctgcccccgccctgctgtatgatattaatgtgsaaggtcatcaataaaggggaattgtgttggtgaagaggtgtttcagctgagaggcaggcagggtgggggcaggcacctggccttgccctcttcagctttc

SEQ ID NO: 256264 - DNA, 201 bp, Homo sapiens
ggaggctgaggcaggagaattgcttgaacccaggaggcagaggttgcgttgagcggagactgtgccactgcactccagcctgggtgacagagcaagactcygtctcaaaaaaaaaaaaaaaattaggccaggtgcagtggctcatgcctgtaatcccagcactttgggaggcggatcacctgaggtcaggagttcaagacc

SEQ ID NO: 256265 - DNA, 201 bp, Homo sapiens
gttcgacaagacgctgcaggtgaggcccggcagggcttcgcccactcacacacacctgaacaggacctctgcagcctcgggacttcctgcccgtccccggctgcgtccccagcctcctagcttgtaaagcaggcaggaagccagcaggctggacgctgccgtaattaccaggcagccagcctgtcatcaccagtcctgcct

SEQ ID NO: 256266 - DNA, 201 bp, Homo sapiens
gatggcaattagtaggctttcctcctccgtggcctcttctggctttccacaacttattgtcccctatttttatggccagtttatacaggcaccccacaagyccttttcccaacattcccccggcatgctgggccccgcacagccatgggcagacatgtttcccgctgcatcctctcaacgtggagcaggcaatgtgggccc

SEQ ID NO: 256267 - DNA, 201 bp, Homo sapiens
tcggcttccccactggggttccccagcacacgtgcccacgtgccccaggaatgggcgcccctggcttctccattgggggcccagggaggccaggaggggcygtgggcctgcccagcccagaagggtgatccaaggacctcctccccctctcacccttggcctgactccatcccctccaaggccaaggccaggaggaggcag

SEQ ID NO: 256268 - DNA, 201 bp, Homo sapiens
ctcttttccacattcagccaggtcacctgccccagcccctattccagtcctaccagagataaaaataccagtgacaaggatctcctgcccaaggaccagcyactggctgccaccacctgcttctcttaaagggaccagggtaccctgggaagggccggggttcaggcccaggaactccagccactggtccccatggtggga

SEQ ID NO: 256269 - DNA, 201 bp, Homo sapiens
caggaatgggcgcccctggcttctccattgggggcccagggaggccaggaggggccgtgggcctgcccagcccagaagggtgatccaaggacctcctcccsctctcacccttggcctgactccatcccctccaaggccaaggccaggaggaggcaggtgtggggaggtggctgctctcagcctgaggtccccactcagctc

SEQ ID NO: 256270 - DNA, 201 bp, Homo sapiens
tccagcgtgggggacagagcgagactccgtctcaaaaaaaaaaaaaaagaccgggcacagtggctcatgcctgtaatcccagcactttgggaggccaaggygggcggatcatgaggtcaggaaatcgagaccatcctggctaacacggtgaaaccccgtctctactaaaaatacaaaaaaatagccaggtgtggtggcggg

SEQ ID NO: 256271 - DNA, 201 bp, Homo sapiens
ccgcaccgacaccatccgctcggcttccatggactcactcacctttgtcaaggccatggatgactccagcgtcacggtgagaggtctggggcgagggtggrtgagctgggcctgagcccctccctcctgctcactcagtcaacacacaataattgagcacctacaggattccagccccatggtgggcacggggaatctaac

SEQ ID NO: 256272 - DNA, 201 bp, Homo sapiens
ggcgtgaacccaggaggtggagcttgcagtgagccgagatcatgccactgcactccagcgtgggggacagagcgagactccgtctcaaaaaaaaaaaaaaagaccgggcacagtggctcatgcctgtaatcccagcactttgggaggccaaggcgggcggatcatgaggtcaggaaatcgagaccatcctggctaacacgg

SEQ ID NO: 256273 - DNA, 201 bp, Homo sapiens
acgcctgtaatcccagcactttgggaggccgaggcgggaggatcacgaggtcaggagatcgagaccatcctggctaacacggtgaaaccccgtctctactraaactacaaaaaaaaaaattagccgggcacagtggcgggcgcctgtagtcccagctactcaggaggctgaggcaggagaatggcgtgaacccaggaggtg

SEQ ID NO: 256274 - DNA, 201 bp, Homo sapiens
ccgccccgaccctttcagacctgctgcagcagtcaccaaggccagttagtgaccaagtcttagaccctcatctcaagactcctgtggtgttcaggagaaaytgaaggagaactgggcggaggacctgacagtcagcagcggctctttcggaagaggcccagtggtgcttccttttcaataacccgctccggccggccctgc

SEQ ID NO: 256275 - DNA, 201 bp, Homo sapiens; identical to SEQ ID NO: 50985

SEQ ID NO: 256276 - DNA, 201 bp, Homo sapiens; identical to SEQ ID NO: 50987

SEQ ID NO: 256277 - DNA, 201 bp, Homo sapiens; identical to SEQ ID NO: 50992

SEQ ID NO: 256278 - DNA, 201 bp, Homo sapiens
ttctacttctcctgaccctgactcccaacccaatagcaggagaagcagaaacgtaatgccaaataccgacccctaccctccagaaaagctggcaagacagygaccacagcaacacgctgatctccagccagagtgaaccaagtactcactattgctgccagcagtttttttacacaatagccctataaggtagacactgct

SEQ ID NO: 256279 - DNA, 201 bp, Homo sapiens
gaaggtgggagccaggggccagttgcaaaatggaggctgcaaaaggcgcagagttctggtctccacactattgagtgcagtcacttagctctaagaagcasatgttcagggcgaaacagtgaaagggaggcagtgcctcataggaggcataatctatagcaatagcagtttaaatgaatctcctttgtgctcaaacagcgt

SEQ ID NO: 256280 - DNA, 201 bp, Homo sapiens
gggcctgcccagcccagaagggtgatccaaggacctcctccccctctcacccttggcctgactccatcccctccaaggccaaggccaggaggaggcaggtrtggggaggtggctgctctcagcctgaggtccccactcagctccctcctcttacctgcctgtgccccaacagttttttgagctggatgtgtaccacagtga

SEQ ID NO: 256281 - DNA, 201 bp, Homo sapiens
cacagccatcgccactgccacctgcctcccgctgaatcttggctcttgtcttctctttccagcccaggcaagtggctgcctctggctaggttctgctcacycactttgtagcacagttaggcttagagatccagccaaggcagacagacagggcccagaacctcagtcctgccatggaggaggacgggcagcagagagaga

SEQ ID NO: 256282 - DNA, 201 bp, Homo sapiens
ccagaactttttcttttttgagatggagtctagctctctcgcccaggctggggtgcagtggctggagtgcagtggagcaatctcggctcactgcaacctcygcctcctgggttcaagtgattctcctgcctcagcctcccgagtagctgcgattacagacgtgtgccaccacacccagctaatttttgtattttgaataca

SEQ ID NO: 256283 - DNA, 201 bp, Homo sapiens
ggagaatcgcttgaactggggaggcagagcttgcagtgagctggaccgttccactgcactccagcctgggtgacagagtgagactgtcttaaaaaaaaaaagaggctgggtgtggtggctcacacctgtaatcccaacactttgggaatccgaggcgggtggatcacttgaggccaggagttcaagaccagcctggccaac

SEQ ID NO: 256284 - DNA, 201 bp, Homo sapiens
agctgtgtaaccagtttcactctctggacagggccctctgagcaagcaaccaggaggcaccctgtcggctttgtcggctttgtctgccaggggcctgcccrgcaagggctccgaggcaaaggcaggcagatgggcactggaagacaagagcccctgcctcctggccagcctcgcctaccagggccaaagaacagatcctca

SEQ ID NO: 256285 - DNA, 201 bp, Homo sapiens
gaacccaggaggcagaggttacagtgagctgagatcgtgccattgcgctccagctctggttgacagagcaagactccatctcgggggaaaaaaaaaaaaaagaaacaactcaaatatcagttgataagacaatgggtaaataatgatatgcccaggtccggcatggtgactcacacctgtaatcccagaactttgggaggc

SEQ ID NO: 256286 - DNA, 201 bp, Homo sapiens
gatgggcccttgctgcagccaccccggctcctgggcacactcctcctagggtctactgttgaacaccatgcccaagagcctagacccaaagtgaaaacccrgacctgtggagaaggtgcggaacagccaacaactctaggcacgccctcccctccctgttccttctgctgcctcaaataaatgtcaccaaaccctctccaa

SEQ ID NO: 256287 - DNA, 201 bp, Homo sapiens
catatacacaatgagtcaacaggtctacttacaggaatctatctttcagatgtgctcacggaaacacaaaggtgtttaatgcatcaaaaaaaaaaaaaaaagctgggcatagtggctcacacctgtaatctcagcactttgggagccccaggtgggaggatcacttgagtccaggagtttgacaccaacctgggcaacaca

SEQ ID NO: 256288 - DNA, 201 bp, Homo sapiens
ccaaactttggaaaagcttttggggtgtttataccaacaaaatcaaccaaccaactaaagacaaaattttaccatggaatcaattcccaaaatcctggagrccaggcctggcatgcctcctagttagaataccgacagggacccagaggcctggccagccgccgggggagcccaaacagctcagcctttcagccacaccca

SEQ ID NO: 256289 - DNA, 201 bp, Homo sapiens
cgtctcaaaaaaaaaaaaaaaacctaattgcagtaaacatttggaataaattgccaacctcctgaataagcacggacacgtaaattatatgtgatttctctttctggataaggttggcaaattaaaaacatctggctaggtgtggtggctcatacctaatcccagcaatttgggaggccaaggcaggcagatcacttgagg

SEQ ID NO: 256290 - DNA, 201 bp, Homo sapiens
tgctggttataacccagctttctccacctcgtcgggggctcagaatacacagcccggacggagagcagcccccgtggccagcatccacaggcctgctaggracctcactgaggcagcagacatccgtgctggtgtcgggaaagggactgaggagggatagaactctcaaaccctctccagatagctgagcgagggcgccct

SEQ ID NO: 256291 - DNA, 201 bp, Homo sapiens
tcgtctcaaaaaaaaaaaaaaaacctaattgcagtaaacatttggaataaattgccaacctcctgaataagcacggacacgtaaattatatgtgatttctctttctggataaggttggcaaattaaaaacatctggctaggtgtggtggctcatacctaatcccagcaatttgggaggccaaggcaggcagatcacttgag

SEQ ID NO: 256292 - DNA, 201 bp, Homo sapiens
gctacctgtgggagagccagagcgggtccggccctgggaaatgctgtgttatagggggtgccatggggaggggaggtagagctctagccctggggcttggyggaggctgtggggctgcacacaggaggtgggagttgtcaacatttgctgagacgcgtcaggtcaggactttggactccagaaccaagatgcttcccccga

SEQ ID NO: 256293 - DNA, 201 bp, Homo sapiens
aagacaaaattttaccatggaatcaattcccaaaatcctggagaccaggcctggcatgcctcctagttagaataccgacagggacccagaggcctggccarccgccgggggagcccaaacagctcagcctttcagccacacccaagaactcagtgtggcatctgcacccttcttcccaccctgctcctccagcttatcctg

SEQ ID NO: 256294 - DNA, 201 bp, Homo sapiens
gtgggagagccagagcgggtccggccctgggaaatgctgtgttatagggggtgccatggggaggggaggtagagctctagccctggggcttggcggaggcygtggggctgcacacaggaggtgggagttgtcaacatttgctgagacgcgtcaggtcaggactttggactccagaaccaagatgcttcccccgaaaggtcc

SEQ ID NO: 256295 - DNA, 201 bp, Homo sapiens
cccacggagcaccaccccatcccctaagcagcgactaataaagacggcagcctccggaatcactttcgcccccctccctggcagcttccccaccgagtcarcagcttacttaagcacgcgctgcccagagatgcaaaaggcccccttatgaccacggcgctgcccacccagcattcgggcagcctggactcccacaaaacc

SEQ ID NO: 256296 - DNA, 201 bp, Homo sapiens
cacaggccaggccctgacctagagaacgcctcccttctctatttttgagagatggggtctcagcatggtggctcgacaggccgtgccctgacacagagaaygcctcccttctatatttttgagagatggggtctcagcatggtggctccacaggccatgccctgacctagagaacacctcccttttatatttttgagagat

SEQ ID NO: 256297 - DNA, 201 bp, Homo sapiens
tgagattgcaccactgcaccctggcctgggagacaaagtgaaactctgtctcaaaaaaaaactaaaaagaagaagttctttccagctgttcccaaaagttytgtttcaaatttcaaaaaaggaccacaaccagggacctggctgtttccagccacggataacctccctgagcacagctctctttcagggcacaggttctct

SEQ ID NO: 256298 - DNA, 201 bp, Homo sapiens
caggaggcagccgggcccctcgagttcacttcgcccagccgcttggaggggccccaaccctgtttatctttctgccccacaagcagccttatgaagtaggsagcatcctccctattttacaaatggggaaattgaggctcggagcagggaagggagctgcccaagaccccattcaggaagcagggtctctccagctctaaa

SEQ ID NO: 256299 - DNA, 201 bp, Homo sapiens; identical to SEQ ID NO: 50986

SEQ ID NO: 256300 - DNA, 201 bp, Homo sapiens; identical to SEQ ID NO: 50989

SEQ ID NO: 256301 - DNA, 201 bp, Homo sapiens
cccgaaggtgctgccattgtctggctctctgtgattctctcttcttcccttctgtttctcaacctggaaagggtgggagaaaaggacgtggggacctccargagggacagtcaccactctgctggctggctcctcttccagggtgagaaaggaggggcctgtgcaacccaacaggtgggcggtccccctcacctctgccac

SEQ ID NO: 256302 - DNA, 201 bp, Homo sapiens
ggagggatagaactctcaaaccctctccagatagctgagcgagggcgccctttggaaactggggcatggggatggcagagaggatgagaagtcctaacacstccctcaagagaggtccagagagcagagggtccccagctttcctgtgcagtcgcctggcacgtgtgtttagatgcaggttcctggctcttgtcccctaag

SEQ ID NO: 256303 - DNA, 201 bp, Homo sapiens
catctctactaaaaaagtacaaaaaaattagccaggcgtggtggcgggcgcctgcggtcccagctacttgggaggctgaggcagaagaatggcgtgaaccygggaggcggagcttgtggtgagccgagattgcaccactgcactccaacccaggcaacagagcgagacttcgtctcaaaaaaaaaaaaaaaacctaattgc

SEQ ID NO: 256304 - DNA, 201 bp, Homo sapiens
ccaggggcctcagtcctgcccgtggtgccctcaacacctcaccttgaaggagcaataagtaactctgggtttgtgtattctaatgtgctaagctctagctrcatggcgttggacgcatgacttcagcctgccaaggttcagtttcctcacctggacactggggacaagaagagcacctcctcctaggggccatgacaacaa

SEQ ID NO: 256305 - DNA, 201 bp, Homo sapiens
aagattcggggaggcaatgcacccgaggccacaactaatggtcatttatgaatatcagtctgtaggcagttcattcttcatcaaaatagagatgatcaccyacgcccatcctgaaaactagcttcaagagttggggagtcaccagagcaggcctctctgagccccacaggaagcaggcccaccacccagcacttggcggct

SEQ ID NO: 256306 - DNA, 201 bp, Homo sapiens
tgacctcatgattcacccgccttggcctcccaaggtgctaggattacagtcatgagccaccgcgcccagccaaaagctagctttctatgcaacaacactaytgaaaattagaactgactaatgcctaatggtaacaatagctaataacaatcgaagtatttatttagtatgtgttaggcgctatgcaaaagacaaccacta

SEQ ID NO: 256307 - DNA, 201 bp, Homo sapiens
ctcctgacagctctcccaccccaacaggccatccgcggggaggcctttgatcgacacctgctgggcctgaagctgcaggccatcgaggacctggtgagcaygcccgacatcttcatggacacctcctacgccatcgccatgcacttccacctctccaccagccaggtgggccactgccccaggtgccccgggggctggagg

SEQ ID NO: 256308 - DNA, 201 bp, Homo sapiens
cgggcagcattggcacataaaatgttactcaatgaagaaatcgggtggctgtctatccaacccaaagatcagttagaaggtgctccttccaggttggcttktagaaatagcccagcaccagggccggtggaaaatacaacgcggaggctatctgcagccattcagtcctgagaaaagagtccctgccaggaagtggatctt

SEQ ID NO: 256309 - DNA, 201 bp, Homo sapiens
aaatagagatgatcacctacgcccatcctgaaaactagcttcaagagttggggagtcaccagagcaggcctctctgagccccacaggaagcaggcccaccrcccagcacttggcggctgctccctaacgggcccctttgcacacagctcgataataacagtggatgacactggtcaccaaatcaaaagggtccctcatttt

SEQ ID NO: 256310 - DNA, 201 bp, Homo sapiens
gctactcggaaggctgaggcaggagaatggcgtgaacccaggaggtggagcttgcagtgagccaagactgcgccactgcactccagcctgggcaacacagmgagactccgtctaaaaaaaaaaaaagataaaataaaaaataaaaaaaattcctttttatagctgcacagtactccatgatattgatggactaatttattt

SEQ ID NO: 256311 - DNA, 201 bp, Homo sapiens
cacctacgcccatcctgaaaactagcttcaagagttggggagtcaccagagcaggcctctctgagccccacaggaagcaggcccaccacccagcacttggyggctgctccctaacgggcccctttgcacacagctcgataataacagtggatgacactggtcaccaaatcaaaagggtccctcattttcaacataaaaccc

SEQ ID NO: 256312 - DNA, 201 bp, Homo sapiens
ttacatgtatgagccaccgtgcccagctatgaaaaaaattcctttttggggccgagcgtggtggctcacacctgtaatcccagcactttgggaggccgagrtgggcggatcacaaggtcaggagatcaagaccatcctggctaacacggtgaaaccccgtctctacgaaaaatacaaaaaattagccgggcgtggtggtgg

SEQ ID NO: 256313 - DNA, 201 bp, Homo sapiens
ctccatccacagccagagcttgattaggacaggacaagagaaccatgagctactcaggagaaccctagagcaccccatttcccagtttgaggaggaaacaratggcccctcacgccccctcctccaaccctcctgtcctttctctcaccgattgaacaccttgaagacaatagctatttggtcatccacccggagcacccc

SEQ ID NO: 256314 - DNA, 201 bp, Homo sapiens
cccacaagactctggagctattttttttttttgagacagagtctcgctctgtcgcccaggctggagtgcagtggcgcgatctcagctcactgcaagctctrcctcctgggttcacaccattctcctgcctcagcctcctgagtagctgggactacaggcgcccgtcaccacacccggctaattttttgtatttttactaga

SEQ ID NO: 256315 - DNA, 201 bp, Homo sapiens
gaggcaggacgattgcttgagcccaggaggtcaaggctgcagggagctgagatcatgccactgcactccagcctgaacaacaggaaaaaaaaaaaaaaaaagatcatgtaccatcttaagagtccagaggcaggcccgggcgtctcttgggaacagcacttcactgggtcctgagtcctcccctctgctctatgtgaaaat

SEQ ID NO: 256316 - DNA, 201 bp, Homo sapiens
tgagtactgcctctgaagggaagagacagccagctcccctgtcacctttctccctagcttctgaaaagtcaggctccaagagcaagaagggccaggaactyaccgcccgtcatgctaggaaaaccactgtctttgaaaagcccaagtttctcaccacagttccaaatggtacctgagaacgcttccatttgcccatgtctg

SEQ ID NO: 256317 - DNA, 201 bp, Homo sapiens
gggaggccaaggtgggtggagaagtgacctcaccagaggtcaggagttcgagaccagcctggccaacatggtgaaaccctgtctctaccaaaaacattaaattagccaggtatggtggtgtgtgcctatagtcccagcagaataatcgcttgaacccaggaggtggaggttgcagtgagccaagatcatgccactgcactc

SEQ ID NO: 256318 - DNA, 201 bp, Homo sapiens
aacacatgatcagattacagggtgaaaaagtatcctccttcctttcccagtcatatcaaacaggaatggtctgcactgtaggaacaactcactggactgtsattgaatcccattgttcacaatgtcacacaaaacctatctggagggaggtgagaagagaatgtgtcagagaatacttctgtcctgtctctggaggacgaa

SEQ ID NO: 256319 - DNA, 201 bp, Homo sapiens
aaggagatcgagaccatcctggctaacatggtgaaatcccatctctactaaaaaagtacaaaaaaattagccaggcgtggtggcgggcgcctgcggtcccrgctacttgggaggctgaggcagaagaatggcgtgaacctgggaggcggagcttgtggtgagccgagattgcaccactgcactccaacccaggcaacagag

SEQ ID NO: 256320 - DNA, 201 bp, Homo sapiens
tttgggaggctgaggtgggagaacagcttgagctcaggagttcaagaccagcccaggcaacatggcaaaaccccatctctacaaaaaatacaaaacaatcrgctgggcgcagtggctcacgcctgtaatcccagtcccagcactttgggaggccaaggtgggtggagaagtgacctcaccagaggtcaggagttcgagacc

SEQ ID NO: 256321 - DNA, 201 bp, Homo sapiens
ggctgagatggaggatctcctgagcccaggaggttgaggctgcagtgagccatgataaggccactgcactccagcctgggtgacaaagtgagactgtctcmaaaaaaaaaaaaaaaaaaaaaaaaaaaagaactaccagtactataattccactcgtaaaagacccgggctggacatttacatttcattacgtaggtttaa

SEQ ID NO: 256322 - DNA, 201 bp, Homo sapiens
ctttgggaggccaaggtgggtggagaagtgacctcaccagaggtcaggagttcgagaccagcctggccaacatggtgaaaccctgtctctaccaaaaacaytaaattagccaggtatggtggtgtgtgcctatagtcccagcagaataatcgcttgaacccaggaggtggaggttgcagtgagccaagatcatgccactgc

SEQ ID NO: 256323 - DNA, 201 bp, Homo sapiens
ggagaatggcatgaacccaggaggcagagcttgcagtgagccgagatctctccactgcactccagcctgggcgacagagcaagaccctgtctcaaaaaaaataaacaaataaataaataaaaaatcactgattaggaaggtgggttttggtgccatcaactcctgacaacttgtaaaaccctgggcagggcctcagcctct

SEQ ID NO: 256324 - DNA, 201 bp, Homo sapiens
cctcaagtgatccgcctgtgtcggcctcccaaagtgctgggattacaggtgtgagccactgtgcccggagtcatcaccagaacttctaaggctagcttgtycaacccacagcccaggacagctttgaatgtagccggacacaaatttgtaaactttcttaaaacataggccaggcacggtggctcatgcctgtaatcccag

SEQ ID NO: 256325 - DNA, 201 bp, Homo sapiens
cctactaggcccttggccaccagcacttccccgagccctcccgaccatgctccctctagaggttatgaagaagcacacacaggctggcaagctgggactcrcaggcccctcccttgcgctcccaggctttctggaagcggtgagagaggctggaagactagacctcccgctccccaagcaggtgtccctagcccggggcct

SEQ ID NO: 256326 - DNA, 201 bp, Homo sapiens
tcacaccttcgttgagggtaaggatgaatccgatgtagtcagcgtatgcctaccaaacagagaggagaatggggatggggagaggggtggcagaccccccygccccacctgccccgagctccaccaggttaccaaagagctccgagctttctacttctcctgaccctgactcccaacccaatagcaggagaagcagaaacg

SEQ ID NO: 256327 - DNA, 201 bp, Homo sapiens
actctacagatgaggaaacagagggtcaaaaatgattcacaagttatgaaactagccagctggactccagaacccaagcatgtaaccacactgcaatcctkccaaagtacagcccttgagctaagacaatacctgggccgggcgcagcagctcacgcctgcaatcccagcactttgggaggacaaagcacctgaggtcagg

SEQ ID NO: 256328 - DNA, 201 bp, Homo sapiens
gagggtgggcgcggggctgcctctaccggctggcggctgtaactcagcgaccttggcccgaaggctctagcaaggacccaccgaccccagccgcggcggcrcggactttgcccggtgtgtggggcggagcggactgcgtgtccgcggacgggcagcgaagatgttagccttcgctgccaggaccgtggtgagtgcggcgga

SEQ ID NO: 256329 - DNA, 201 bp, Homo sapiens
ggaattacaggcgagtgccaccacgcccagctaattcttgtatttttagtagagacggggtttcatcatgttggccaggctggtgtcgaacacctgacctygtgatccgcctgcctgggcctcccaaagtcctgggattacaggcgtgagccaccgcgcccggcctatgtgacaattctttcacttgcttttacttggagg

SEQ ID NO: 256330 - DNA, 201 bp, Homo sapiens
ctcctcatcccagagaggtacaaatgggtcagaagagcccagggcaggaggctgcggaggggctggtccatctctcccacaccatgagaccccattttgcrtctccccgccccatgccacctgcagacaaggtgaaccgggattccgtgcgctccatccagaagagcatcttcaccgtgtgcctagatgcaaccatgccca

SEQ ID NO: 256331 - DNA, 201 bp, Homo sapiens
gcctcagcctcccaagtagctgggactacaggtgcctgccaccatgcccggctaatttttgtatttttagtagaaacgggatttcaccatgttggccaggstggtctcaaactcctgacctcaagggatccacctgcctcggcctcccaaagtgctgggattacaggcgtgagccaccgctcccagccccaatatttcctc

SEQ ID NO: 256332 - DNA, 201 bp, Homo sapiens
tgcaggcccaccgaggctacaccgaccgggtaagtgagcccgcttgtgcctactcacttgtcccttagtgtcagccatctgtctgtccctctgactgtccrtccctgcagccaatggctgccaaccctttgctaggaccacatctcccccaacctgggagcacctggagccaggctgaatagcccccaactttttcttttt

SEQ ID NO: 256333 - DNA, 201 bp, Homo sapiens
tgcccaggcctgcttaattaccacagccacctctgaccccagccctggcccggcatgccagcttgggccctgggccctgctccagctgctggaatctcctyttggtgggtgaccctgtcccatcccaactaaagaggaccccagagttttattcgctgcttcatctcccctgtgacaaactgaagcccagagaggggaaag

SEQ ID NO: 256334 - DNA, 201 bp, Homo sapiens
gggccctggggctgaccggggtctcccttcccttccacagttcatcgtggcagaagatggctcctgtgggcttgtgtacgagcatgctgcagcggaggggycccctattgtcacccttctggactatgtcatcgagtacacgtgagtacagtcacatctctcgcctagttccccagcttctagtgacaggtgacacacagg

SEQ ID NO: 256335 - DNA, 201 bp, Homo sapiens
gcctgcagggtcctgttgagttcgaagctctgaacccacaccctgcacttggtgaatgccctggagggccggcgaggtggggggtctcctcatcccagagrggtacaaatgggtcagaagagcccagggcaggaggctgcggaggggctggtccatctctcccacaccatgagaccccattttgcgtctccccgccccatg

SEQ ID NO: 256336 - DNA, 201 bp, Homo sapiens
gtgcctatagtcccagcagaataatcgcttgaacccaggaggtggaggttgcagtgagccaagatcatgccactgcactccagcctgggcaacagagtgasactctgtctcaaataaataaataaattgccaggctggtggtgcacacctgtagtcccaggtactggggagtggggagatgcagaggtgagaggatcactt

SEQ ID NO: 256337 - DNA, 201 bp, Homo sapiens
caaccatgcccagggtctcagaagacgtgtaccgcagccacgtggcaggccagatgctgcatgggggcggcagcaggctcaacagcggcaaccgctggttygacaagacgctgcaggtgaggcccggcagggcttcgcccactcacacacacctgaacaggacctctgcagcctcgggacttcctgcccgtccccggctgc

SEQ ID NO: 256338 - DNA, 201 bp, Homo sapiens
gcaaattaaaaacatctggctaggtgtggtggctcatacctaatcccagcaatttgggaggccaaggcaggcagatcacttgaggccaggggttcaagacsaggctggccaacttggcaaaacgccatctttacaaaaaaaatttaaaaattagctgggtgtggttgcatacctgtagtcccagctacttgggaggctgaa

SEQ ID NO: 256339 - DNA, 201 bp, Homo sapiens
ctccctgcatgcctacgccctccctgccggtgaagccaccctaaccccagctggccccaataggttgcaggtgcttggcgaattcttgattgctctcactygctcagagggcccagagaccacctgaagcccaaaacagaaagcagtgaagctagataagtacagagccccacaagcagcagatacctgtgccgtagtcaa

SEQ ID NO: 256340 - DNA, 201 bp, Homo sapiens
gctcatctgggagtgggagcaaggacactgtgtgagcccccagcagtacctagcaggtccctgtctaccctgccctcctccccattcacttgcccagtggyggcctcactgcccctctaccccatagcgagaccctgcccgtggagtacctgggggggaagccactgtgcatgaaccagtactatcagatcttgtcctcct

SEQ ID NO: 256341 - DNA, 201 bp, Homo sapiens
catggaaaaaaatcaatttatggaatagaaatcagaataatctgggcgatatcaattgggaaggggagcactccagctagaatgttctattgcttgacatragtggtgaatccatgggtaaaaaacttggcatgagtggtgagtccatgagtaaaaacatgtaaaaatccatcaagctgtaaagctatgatttgtcagctt

SEQ ID NO: 256342 - DNA, 201 bp, Homo sapiens
ccaggtgggaggatcacttgagtccaggagtttgacaccaacctgggcaacacagcgagaccccatctctactttaaaaaaaaaaaaattttaggcggggygcggtggctcatgcctacaatcccagcactttgggaggccaaagtgggtggatcacacctgaggtcaggagttggagatgcgcctgaccaacatagtgaa

SEQ ID NO: 256343 - DNA, 201 bp, Homo sapiens
ggcctgccatgtgcaaagactcagccaagagctatgtatgtacctggggagaggcaggcttaagctaatgaaacaggctggccatgcccccagctgcataygtgaaaccggccctgagtgctgctctctcttatctcccctttatctaggcttggggcatgggaggacagaaaaagtagcctgtaagaggataaatttccc

SEQ ID NO: 256344 - DNA, 201 bp, Homo sapiens
agtgagccaagatcgtgccatcgcactccagcctaggcaacaagagtgaaactctgactcaaataaaaaaattttttattaattagaaacaacccaaatasgctgggcgtggtggctcacacctgtaatcccagcactttgggaggccaagacaggcagatcacgagatcaggagttcgaaaccagcctggccaacaaggt

SEQ ID NO: 256345 - DNA, 201 bp, Homo sapiens
atgcttgtccatgatgctctaccaccaggaattcaaggagtaccaccaagtgtctcacccccagcaatcagcgaccaaaggcgggccaggctgtctagttrgagtgcagatgcctgccacagacaggtctccccacacaaccattcccagctttcaactagacactcttcttccctgctgggctgcagttacacccaacac

SEQ ID NO: 256346 - DNA, 201 bp, Homo sapiens
tccctgctgggctgcagttacacccaacacagggataagaaagcactgagggtcaggtattgtggctcaagtctgtaatcctagcactttgggaggctgakgcaggaggatcacttgaacccaggagcttgagaccagcctgggcaacatagtgagaccccatctctacaaaaaattaaaaagtttgccaggtgtggtggt

SEQ ID NO: 256347 - DNA, 201 bp, Homo sapiens
cagaacccaaaactgctattagtaaattggcacttcaactaagatgccaaataaaaagctttgtaggtcagactagtaacccaaccacattgcttttatgrgaaaatgtgtcccacattccaaataatcaacttggaaataatctttgggaacatacagcccttttatacgtgtgagatcaccattctctgcaaagggaca

SEQ ID NO: 256348 - DNA, 201 bp, Homo sapiens
tcacagtataaaatcaacattcagaattttagaaatgttccttcctaagccccccaacaaagactataatatatagcattatcattggccatttgaaactygtctacatgttcaacctgtacaactttgaaactttgaaaaagataagggcaatcagcatttactgatcgcctactatgtcccatgctttgcacacatctt

SEQ ID NO: 256349 - DNA, 201 bp, Homo sapiens
aggcatggtggcgcacacctgtaatcccagctactcgggaggctgaggcagaagaaccgcttgaacccaggaggcagaggttgcagtgagccaagatcacrccactgcactccagcctgggcaacacagcaagactccgtctcaaatttaaaaaagagaaaaaaaagataggcccacataataaaaattttcatagcttat

SEQ ID NO: 256350 - DNA, 201 bp, Homo sapiens
ccgcggacgggcagcgaagatgttagccttcgctgccaggaccgtggtgagtgcggcggatcccgggcctgagggccctggacggcctgggcgggccgtgyggttgcgtccgggaacggagaccgcgtcctgcggccgctgttcgacccggcctccagctgatggggtggggtcaggcgggcgtcccaggtttggcagagc

SEQ ID NO: 256351 - DNA, 201 bp, Homo sapiens
gcagagcttgcagtgagccgagatcgcgccactgcactccagcctgggcaacagagcgagactccgcctcaaataaaaaataaattagtcaggcgtggtgrcgagtgcctgtaatcccagctactcaggaggctgaggcaggcagaatcgcttgaacccaggaggcagaggttgcagtgagccgaggtcgcgccactgcac

SEQ ID NO: 256352 - DNA, 201 bp, Homo sapiens
cctccaaagcatgtcttgctcaggggcattgaccccaaagtcagaccacctgtgtgggttccccggctgccacaccagctcccatgtgacccctgggcttyggtttcctgtgtctaaagtgggccaggtgttgggccctgcctcgaggagtgctgtgggcctgcagggtcctgttgagttcgaagctctgaacccacaccc

SEQ ID NO: 256353 - DNA, 201 bp, Homo sapiens
ggggtggaaggccagagaaagctgtactggctgtgtgcaggaagggtgggtgttgcagtcagcatagaggacacagggtgacagtcacctgggagtgtgcrcagcgccagacatggagcctttaataccacatccctggctggtgcccagagaccccccaccccccagagagaggacagaccgtcagggcagagagtaagg

SEQ ID NO: 256354 - DNA, 201 bp, Homo sapiens
tggattttttattaccttttggcctgactccctggcactgagcccatgcagagaagaaaggaaagaactttccaggttcccttctactggaatgccccccmactagccctctcacctgctccccattcctctacttctgggagctcgggagggtggagcagcttctagagtccaggagcttcccctgccactgccacaacc

SEQ ID NO: 256355 - DNA, 201 bp, Homo sapiens
gtgacaagtaagtccttgccctcagaaagtttatgatctatcagggacaacagacattataaatatacagtcactactatgattccagctctgaaggagamagacagggtactaactggaggatatcacagaaggaccctgacgtaagggttcaaggtttcccctaaggaagtaacatctaatctgaaatctgaaagatgt

SEQ ID NO: 256356 - DNA, 201 bp, Homo sapiens
aaatagaggggtccaagctacagagcaagtggctcccgcttagccacagagggaagtccactgctgccagacaatgaccccttggcatggcccctactggsaactctcccccatccctctttcttccccactgttctgaatatgaaggagggtcaggagagcatgataggctttccagagagggaagcacactaggctgat

SEQ ID NO: 256357 - DNA, 201 bp, Homo sapiens
tggacctgcagggtcagctccggtgagtggctggggtttgggggccaggaggcagccgggcccctcgagttcacttcgcccagccgcttggaggggccccraccctgtttatctttctgccccacaagcagccttatgaagtagggagcatcctccctattttacaaatggggaaattgaggctcggagcagggaagggag

SEQ ID NO: 256358 - DNA, 201 bp, Homo sapiens
ggcacacacccagaggttttgtacaaaataaatgtctggttttgaatgtcctaagaaacggaacccagctctttgttcacctcttttgtggggcatggagrggatgccttttctgattttcaacatttctccctcctgagaccttcccagggaccccaacattggagacaggatagcaagaatatcaaatgctttcaaaac

SEQ ID NO: 256359 - DNA, 201 bp, Homo sapiens
tcctgagtagctgggactacaggcgcccgtcaccacacccggctaattttttgtatttttactagagatggggtttcacatgttggccaggatggtctcgrtctcctgacctcgtgagccgcctgcctcggcctcccaaggtgctgagattacagaggtgagccaccgcacccagtgactctggagctatttttggaaagg

SEQ ID NO: 256360 - DNA, 201 bp, Homo sapiens
ccatcccaactaaagaggaccccagagttttattcgctgcttcatctcccctgtgacaaactgaagcccagagaggggaaaggagggagtttctagatgayttctgaacaggacccatctggggcagaaagcgagccccctgcccacagcacagccctgaggtgtcctgctcatctgggagtgggagcaaggacactgtgt

SEQ ID NO: 256361 - DNA, 201 bp, Homo sapiens
cagtttgaggaggaaacagatggcccctcacgccccctcctccaaccctcctgtcctttctctcaccgattgaacaccttgaagacaatagctatttggtyatccacccggagcaccccaatcttgcagagacagcagaggaaagcagcgaaggctgcctcatgccctggaggagaaaaacaaccagcgttgacagtagtc

SEQ ID NO: 256362 - DNA, 201 bp, Homo sapiens
ctctgtggcccacccatggaggagggaggagacctgggggcaggggagggggtgcccgcctccaaggggcgtgcttagccccatttcccaccaggatctayggacaggcatgtgccacctatgaaagtgcctccctgcgcatgtttcacctgggccgcaccgacaccatccgctcggcttccatggactcactcacctttg

SEQ ID NO: 256363 - DNA, 201 bp, Homo sapiens
acgtgtaccgcagccacgtggcaggccagatgctgcatgggggcggcagcaggctcaacagcggcaaccgctggttcgacaagacgctgcaggtgaggccyggcagggcttcgcccactcacacacacctgaacaggacctctgcagcctcgggacttcctgcccgtccccggctgcgtccccagcctcctagcttgtaaa

SEQ ID NO: 256364 - DNA, 201 bp, Homo sapiens
cagcttgggccctgggccctgctccagctgctggaatctcctcttggtgggtgaccctgtcccatcccaactaaagaggaccccagagttttattcgctgyttcatctcccctgtgacaaactgaagcccagagaggggaaaggagggagtttctagatgacttctgaacaggacccatctggggcagaaagcgagccccc

SEQ ID NO: 256365 - DNA, 201 bp, Homo sapiens
ggctcaacagcggcaaccgctggttcgacaagacgctgcaggtgaggcccggcagggcttcgcccactcacacacacctgaacaggacctctgcagcctcrggacttcctgcccgtccccggctgcgtccccagcctcctagcttgtaaagcaggcaggaagccagcaggctggacgctgccgtaattaccaggcagccag

SEQ ID NO: 256366 - DNA, 201 bp, Homo sapiens
taatcaatctttccagatttgctgccaaactcattgagggtgtgttggatttcaaggtcatgattgacaagtgagcatccccacccctgcccagccccacmcctgcccaggcctgcttaattaccacagccacctctgaccccagccctggcccggcatgccagcttgggccctgggccctgctccagctgctggaatctc

SEQ ID NO: 256367 - DNA, 201 bp, Homo sapiens
tttctagatgacttctgaacaggacccatctggggcagaaagcgagccccctgcccacagcacagccctgaggtgtcctgctcatctgggagtgggagcarggacactgtgtgagcccccagcagtacctagcaggtccctgtctaccctgccctcctccccattcacttgcccagtggtggcctcactgcccctctaccc

SEQ ID NO: 256368 - DNA, 201 bp, Homo sapiens
aagaggaccccagagttttattcgctgcttcatctcccctgtgacaaactgaagcccagagaggggaaaggagggagtttctagatgacttctgaacaggrcccatctggggcagaaagcgagccccctgcccacagcacagccctgaggtgtcctgctcatctgggagtgggagcaaggacactgtgtgagcccccagca

SEQ ID NO: 256369 - DNA, 201 bp, Homo sapiens
gacaggattgtctggggccgaggggccagggtgtgaggtttcacctccgttgcggctgtgctcctgtggataacattgctagcgagccgcctctggttccmctcagcttggttcctgcccccgccctgctgtatgatattaatgtggaaggtcatcaataaaggggaattgtgttggtgaagaggtgtttcagctgagagg

SEQ ID NO: 256370 - DNA, 201 bp, Homo sapiens
cagatgccttcatccagatggctttgcagctggcctactacaggtgcgcctctgtggcccacccatggaggagggaggagacctgggggcaggggaggggrtgcccgcctccaaggggcgtgcttagccccatttcccaccaggatctacggacaggcatgtgccacctatgaaagtgcctccctgcgcatgtttcacctg

SEQ ID NO: 256371 - DNA, 201 bp, Homo sapiens
gaggccacaggttcctcaggctgctctgataccccagtctcctgcctccttggacagttctctgctggggatggtcaaaaactcacttattgggccagacscggtggctcacgcctggaatcccagcactttgggaagctgaggcaggtggatcatttgaggtcaggagttcaagaccagcctggccaacatggtgaaaac

SEQ ID NO: 256372 - DNA, 201 bp, Homo sapiens
gaaagcagcgaaggctgcctcatgccctggaggagaaaaacaaccagcgttgacagtagtccaggtaaaggactgggattgttttagtctcccagaatccraatcattgataagtgcccctctgaggagggtggtcaacatggagacaatgagacctcttccccattcagaaagacttgctaggccctttcctttcaagaa

SEQ ID NO: 256373 - DNA, 201 bp, Homo sapiens
agctctgccaggggccgggtatgagggtgaggcacacagtgttaatcttggggcaggtggaaaaactgggccagggcagggctacatcttacccaacaggyccaaggctgtggctagagagctgggtaggccaaagtaaagggaggcccttcaggccctggtgtctgagataagagactcaaggtgggacatgaacccaag

SEQ ID NO: 256374 - DNA, 201 bp, Homo sapiens
acacactacggggccagagggcggagggtgcatccaggctcaggcctagaggctcttttaggtgttgcaacaccctgagcctccaccgcacccttgtcacygtctcccaagctgcatccatcccacaaacagcctctagatcatcctccaggaccatccgactggactggttaccttcctgcagggaaactgaggcaagga

SEQ ID NO: 256375 - DNA, 201 bp, Homo sapiens
cctctcacctgctccccattcctctacttctgggagctcgggagggtggagcagcttctagagtccaggagcttcccctgccactgccacaacccccgatkccaccacagccatcgccactgccacctgcctcccgctgaatcttggctcttgtcttctctttccagcccaggcaagtggctgcctctggctaggttctgc

SEQ ID NO: 256376 - DNA, 201 bp, Homo sapiens
tctaatcaatctttccagatttgctgccaaactcattgagggtgtgttggatttcaaggtcatgattgacaagtgagcatccccacccctgcccagccccmcacctgcccaggcctgcttaattaccacagccacctctgaccccagccctggcccggcatgccagcttgggccctgggccctgctccagctgctggaatc

SEQ ID NO: 256377 - DNA, 201 bp, Homo sapiens
tctcaaaaaaaaaaaaagaattcgttcaccttgctgcccctccccacaccccgggtttcctcctgatctttctttcacatcctttcttagcagcagcatckgattgatctggctaatactgatcactcgggctaaagggaagaggctggtgggtttaagttgtggggcagggagggtgggttctggatctaggcatttact

SEQ ID NO: 256378 - DNA, 201 bp, Homo sapiens
ggcgagggtgggtgagctgggcctgagcccctccctcctgctcactcagtcaacacacaataattgagcacctacaggattccagccccatggtgggcacrgggaatctaacagaagctggagccgtgaatctagctctgagcttcctggggaccaaagaggaaaagggagtcattcatttgttcattcatttattcattg

SEQ ID NO: 256379 - DNA, 201 bp, Homo sapiens
cacaccactacctccaacagcttagaagacatgtggggacaggggagagacagctggacggtgaccgcctccttcctcctccacaggtctcaatgactcgycctcggccctgcccctctgtccccgcccgccgtggtcccgcccccgactcgcagccagcctactgcgacccgctaccgggcgacgccccgcccctccgtc

SEQ ID NO: 256380 - DNA, 201 bp, Homo sapiens
ataagtcatcatagccccttgagatggcttcagagaggcccttgcctcaaccaaagagtggttgggtgaggggccaccccccagggccctggggctgaccrgggtctcccttcccttccacagttcatcgtggcagaagatggctcctgtgggcttgtgtacgagcatgctgcagcggaggggccccctattgtcaccctt

SEQ ID NO: 256381 - DNA, 201 bp, Homo sapiens
agcccaatcccagtgtcctttggtttatttttcataccaaaagtcctccgctcttggaccctagctgaatgagccacagctcaggaaaaaatgagtgttcrtagagggatggctcagatgggtcccaggagtcctggagagaaacaggaaataggcagggcttctggctgtcccatccactgatggccttttcctggtgtc

SEQ ID NO: 256382 - DNA, 201 bp, Homo sapiens
aaaactttataaaccccccggagcccgagcagtgtgaagaagaggcgagaacgacccccggaccgaccaaagcccgcgcgccgctgcatcccgcgtccagyacctacgtcccgctgccgtcgccgccgccaccatgcccaagagaaaggtacgtggcgcgagggccccaggcgccgggccaccactgccgccaccgccgcc

SEQ ID NO: 256383 - DNA, 201 bp, Homo sapiens
ctataaaaactttataaaccccccggagcccgagcagtgtgaagaagaggcgagaacgacccccggaccgaccaaagcccgcgcgccgctgcatcccgcgyccagcacctacgtcccgctgccgtcgccgccgccaccatgcccaagagaaaggtacgtggcgcgagggccccaggcgccgggccaccactgccgccaccg

SEQ ID NO: 256384 - DNA, 201 bp, Homo sapiens
cggggctcccagcgctataaaaactttataaaccccccggagcccgagcagtgtgaagaagaggcgagaacgacccccggaccgaccaaagcccgcgcgcygctgcatcccgcgtccagcacctacgtcccgctgccgtcgccgccgccaccatgcccaagagaaaggtacgtggcgcgagggccccaggcgccgggccac

SEQ ID NO: 256385 - DNA, 201 bp, Homo sapiens
gtgagcctggctctcacccgcgccggcttccacaccccgcgggactgagaaccgccctcccactagctcgcaggcgcaggcgcagggcagggtcccctcartttgggtgacggaaggggcgtgtcgcagcgcccaaagatgacgtgttctgccagcgccacgtcatgaggaagtgccggcccactgaagccgtggggacgc

SEQ ID NO: 256386 - DNA, 201 bp, Homo sapiens; identical to SEQ ID NO: 51049

SEQ ID NO: 256387 - DNA, 201 bp, Homo sapiens; identical to SEQ ID NO: 51050

SEQ ID NO: 256388 - DNA, 201 bp, Homo sapiens
ggggcttcgatagcatttggggaggcggctgcgcaacgggtgctgaaaggacagctcctacctgacccacggcacccaaaaggcacctctgcatggaaagkctccccctgaaacccctagcccacctcgagtgggaccgtctttcaggtgaggtgcacgaaaggcttctccgaagtggcagctcggaaggatgcacgtccg

SEQ ID NO: 256389 - DNA, 201 bp, Homo sapiens
caaagttataatagagatactgattatcttgaagccttctccagcaggagcccttggaggtcctggccaggctttctctaccccagaagcttcaaagctctgtttctagaaatcatatcaccttggcagatgcactaaggggagaatccagactaacagcatcctcaccagtttgttctcagaccagagaggtctttccag

SEQ ID NO: 256390 - DNA, 201 bp, Homo sapiens
ccaaagttataatagagatactgattatcttgaagccttctccagcaggagcccttggaggtcctggccaggctttctctaccccagaagcttcaaagctctgtttctagaaatcatatcaccttggcagatgcactaaggggagaatccagactaacagcatcctcaccagtttgttctcagaccagagaggtctttcca

SEQ ID NO: 256391 - DNA, 201 bp, Homo sapiens
gacctctcactcctgcctggtgttccaacccgttctgtggccagagtatacattttggaacctcttcgaggccatcctgcagttccagatgaaccatagcrtgcttcaggtaagaaagagttcagggctggccagatgggatgggatggaagaaaagattagcattgattgacaaccaccttactatataccaggcacttc

SEQ ID NO: 256392 - DNA, 201 bp, Homo sapiens
acaggagaactgatcatattgctgtttatttaaaatccggtgtaatgtggaatttttgcaatgtttcagggtccatatgacttaaataagattttaaaaakaaattagctgagcatggtgttgcacacctgtggtcctagctacttgggaagctgaggtaggaggattgcttgagcatggaaggtggaggttgcagtgagc

SEQ ID NO: 256393 - DNA, 201 bp, Homo sapiens
atgcagagtttgggagttattgtatggaagcaatataatgtcataattaagaagacaagctctggaggctgactccctacgtgcaaatcctggttctccahcagctgtccaaacaaattacctaacgtccctgtgcctcagtttcctcatctgtaaaaggggaataataagggtatataactcagaggttggtgtaaggat

SEQ ID NO: 256394 - DNA, 201 bp, Homo sapiens
tgaacgtaggaggtggaggttgtagtgagccaagattgcaccactgcactccagcctgggtgacagagcaagactccagcttaaaaaaaaaaaaaaaaaaagatgtaggacatttccatctctccaaaaaaattccctggtgccccttctcaatcaacttctgttctacctcctccttttcctctctaggcaactaccgtt

SEQ ID NO: 256395 - DNA, 201 bp, Homo sapiens
actgcccaaaaaggacacatgaggtcgtgtaatgtatagtaaagagtttgggttcttgctggacatggtggctcacacctgtaatcctagcactttgggasgctcaggcaggaggatcacttgaggccaggagtttgagaccaccttgggcaacatagtgagacctcatctttacaaaaaatacaaaaattagccaggcat

SEQ ID NO: 256396 - DNA, 201 bp, Homo sapiens
ttcctcaccactagagatatcaggcagtggctgtcaagagtgttccaaaggggattcttcatcagtgattattattaaagtacacctggctctttgctatrcatatgttatctcatttaatctaaacagtaccctgaaaattaggtattcctattatccagttttacatttgaggaatctcaggccaggtgaaattacccc

SEQ ID NO: 256397 - DNA, 201 bp, Homo sapiens; identical to SEQ ID NO: 51047

SEQ ID NO: 256398 - DNA, 201 bp, Homo sapiens
tgcccctgaatcccaagtccataactcctgctataagtaaatcaaatcacaaagacttgatcatgtatttaattacttagtctcagaatatgaggaaattraaagaagtttagaattagtgaaaagaaaaacagcaaaggcacaattatccactgtcagtggggaatgaatatcagatttttccatatgaccaaagctccc

SEQ ID NO: 256399 - DNA, 201 bp, Homo sapiens
ctgtgcttgggaaagtagctcttatcaaacacaggagaactgatcatattgctgtttatttaaaatccggtgtaatgtggaatttttgcaatgtttcaggrtccatatgacttaaataagattttaaaaataaattagctgagcatggtgttgcacacctgtggtcctagctacttgggaagctgaggtaggaggattgct

SEQ ID NO: 256400 - DNA, 201 bp, Homo sapiens
tctaacagaaagagtggattgtgaacactaacacttattctactatgcagaatgcaataagtggcttaagagagttgaacctgcttctcagaatgttcataggggggtcatttgctggaaggatcaggctggtcttcatacaggaggcaagtctggagctctgaaaaatagcctagggagtggggaggatggtaccctcag

SEQ ID NO: 256401 - DNA, 201 bp, Homo sapiens
cactcaggaacttttatgcaggtgctagaaactttatgtcaaagtggccacaagattgtttaataggagacgaacgaatgtaactccatgtttactgctaraaaccaaagctttgtgtaaaatcttgaatttatggggcgggagggtaggaaagcctgtacctgtctgtttttttcctgatccttttccctcattcctgaa

SEQ ID NO: 256402 - DNA, 201 bp, Homo sapiens
tacagtgcatgatctctgctcacggcaacctccgcctcccgggttcaagtgattttctgcctcagcctcctgagtagttgagattgaacacccgtcaccaygtccaactaatttttttgtatttttagtagagatggggtttcaccatgttggccaggctggtctcgaactcctgacctcaggtgatccacccccttcagc

SEQ ID NO: 256403 - DNA, 201 bp, Homo sapiens
cttatcaaacacaggagaactgatcatattgctgtttatttaaaatccggtgtaatgtggaatttttgcaatgtttcagggtccatatgacttaaataagrttttaaaaataaattagctgagcatggtgttgcacacctgtggtcctagctacttgggaagctgaggtaggaggattgcttgagcatggaaggtggaggt

SEQ ID NO: 256404 - DNA, 201 bp, Homo sapiens
tgatctctgctcacggcaacctccgcctcccgggttcaagtgattttctgcctcagcctcctgagtagttgagattgaacacccgtcaccatgtccaactratttttttgtatttttagtagagatggggtttcaccatgttggccaggctggtctcgaactcctgacctcaggtgatccacccccttcagcctcccaaag

SEQ ID NO: 256405 - DNA, 201 bp, Homo sapiens
cttttttttttttttttttttttttgagacagagtcttactctgtcacccaggctggagtgcagtggtgctatctcggctcactgcaacctctgcctcccrggttcaagccattctcctgcttcagcttcctaagtagctgggattacaggctcccaccaccacacctggctaatttttgtttttgtttttttcttttttc

SEQ ID NO: 256406 - DNA, 201 bp, Homo sapiens
gggtggtgtgtgtctgatcctgggttcttgtctcccctaaatgctgccccccaagttactgtatttgtctgggctttgtaggacttcactacgttgattgmtaggtggcctagtttgtgtaaatataatgtattggtctttctccgtgttctttgggggttttgtttacaaacttctttttgtattgagagaaaaatagcc

SEQ ID NO: 256407 - DNA, 201 bp, Homo sapiens
cccagtacaactccccaggcaaggagactctgagggtgcttcagaacatcatgtttctggtaggaggtgcccttctctgcctgagagcagccctcagaaakgcattcctcatgctgctgacctgggctggctggttgcagcttggggaaggacttttcattggctaatgttttgaagccaaggacctgcagcctctctcca

SEQ ID NO: 256408 - DNA, 201 bp, Homo sapiens; identical to SEQ ID NO: 51043

SEQ ID NO: 256409 - DNA, 201 bp, Homo sapiens
ccccctcctcactccctccagaggaggtgagtttaaaccccgcccacgtgaccccagctgggccaatgaacggcggcgggaggtgaaatccggttctaacyggtccggggctcccagcgctataaaaactttataaaccccccggagcccgagcagtgtgaagaagaggcgagaacgacccccggaccgaccaaagcccgc

SEQ ID NO: 256410 - DNA, 201 bp, Homo sapiens
agaggggcagagagacttaagtaactgtcccaaggaacctgaattttatctttatttatttatttattttgagatggggttttgctcttgttgcccaggcyggagtgcagtggtgcgatctgggctcactgcaacctccccctcctgggtttgaacgattctcctgtctcagcctcccaactagctgggattacaggcaca

SEQ ID NO: 256411 - DNA, 201 bp, Homo sapiens; identical to SEQ ID NO: 51046

SEQ ID NO: 256412 - DNA, 201 bp, Homo sapiens
tgcttggcctgggcacacctgccagctccaccattgtaacgtcggaatggtacgcactgtttctgtaaagtgacatctttcaggtacttcatggcttttcrtatatgcatacccttgatggcctgggcagtttcacgaatattcttaaagtaaacacgaagattggaacctcttgatttgcatgatatcatgaggttctcc

SEQ ID NO: 256413 - DNA, 201 bp, Homo sapiens; identical to SEQ ID NO: 51048

SEQ ID NO: 256414 - DNA, 201 bp, Homo sapiens
tcgagaggaagaagaagaaatccacagccctaccctgctcccggaggcacagaattgagccacaatgggtgggggctattcttttgctatcaggaagtttygaggagcaggcagagtggagaaagtgggaatagggtgcattggggctagttggcactgccatgtatctcaggcttgggttcacaccatcaccctttcttc

SEQ ID NO: 256415 - DNA, 201 bp, Homo sapiens
tggcctcccaaagtgctgggattataggtgtgagccaccacgcccggcctgtttttttttgagttgaagtctcactctgtagtctaggctggagtgcagtrgtgagatctccactcactggttcaagcgattctcctgcctcagcctcccaagtagctgggaatacaggtgtgcgccaccgcacccagctaagtttctgta

SEQ ID NO: 256416 - DNA, 201 bp, Homo sapiens
gctaactgcaacggaagaacaccttcttttgctgctgcaattgcctaccctccctcaggtgcacttggctagctccaagaccctggctttggactaggggrcaccggaagagcccttttgccatcacaccacctgttcctctacttgtttcctaatccccgggcgctttcctccaccctcctttcctcgcgcaagtgaaag

SEQ ID NO: 256417 - DNA, 201 bp, Homo sapiens
cctgattctgtttcatcagttgggaaactaaaccctagtaaagagaagaggttgagcaaggtggctcatgcctgtaatctcagcactttgggaagccaagragggtacattgcttgagtccaggaatttgcttgattccagcctaggcaacatggcaaaaccccatctctacaaaaaaatacaaaaaaattaactggggat

SEQ ID NO: 256418 - DNA, 201 bp, Homo sapiens
tcaaaacgcatggcagaagagatgctaatgagattgcgctgatcagttagtagtagagaaaatggtcttcgtttatcatgaagtcctggcaaaagcaagargaaactcagaggtgcttttccattaatgtgccacagaaccccaaggtctgaggaggtgtagaaagaacctagtgggaatggggtagggggtgctgagttg

SEQ ID NO: 256419 - DNA, 201 bp, Homo sapiens
acctgtaatcccagctacttgggaggctgcggtgggaggatcgcttaaacccgggatgcggaggttgcagtgagctgagattgcgccactgcactccagcytgggtgacagagcaagcctccatctcaagaaaaagaatttgggttctcaaatcagacaaactgggtttcaatcctgacaaagcacttgatggctatatga

SEQ ID NO: 256420 - DNA, 201 bp, Homo sapiens
tttgagacagtctcactctgttgcccaggccagagtacagtgcatgatctctgctcacggcaacctccgcctcccgggttcaagtgattttctgcctcagmctcctgagtagttgagattgaacacccgtcaccatgtccaactaatttttttgtatttttagtagagatggggtttcaccatgttggccaggctggtctc

SEQ ID NO: 256421 - DNA, 201 bp, Homo sapiens
tcagtgcatttagatttatctttatttttagaatgcagttgcatagtatttcatcaaatactgggccataggatgtatgtatgtattttaaaaaacaagaygtttttagcaaaagacaacagatatttttgtgggtgcatctggttttaggcctgaggctaaatgactttcagcaaattattcatctttgagcctcagttt

SEQ ID NO: 256422 - DNA, 201 bp, Homo sapiens
tgttcattcagttagttgctgatatcaaaaatttaattgcccttttcttgtatcactccaaatgtaccatttggtccagtgtgcttgtggctttcctgttwacttaaatcctggattcttgaaatctctactgtcagctgaagggcattgtgttttatactacatgaagttttcaagctaggagtaacctcaggtctctta

SEQ ID NO: 256423 - DNA, 201 bp, Homo sapiens
cagggaagtttgaaatctaactagaaaaagtagcagcaaaggcattttgctggtgcccagaagaatgttggctctgctggggtcaccgtggagattgtccrtgatgacctgctgggatttgccctcctagagtgcccctcagtcctggaatacaaggtgcaggctggaaacagctccttgtacaacatgcctccatgtttc

SEQ ID NO: 256424 - DNA, 201 bp, Homo sapiens; identical to SEQ ID NO: 51069

SEQ ID NO: 256425 - DNA, 201 bp, Homo sapiens; identical to SEQ ID NO: 51070

SEQ ID NO: 256426 - DNA, 201 bp, Homo sapiens; identical to SEQ ID NO: 51071

SEQ ID NO: 256427 - DNA, 201 bp, Homo sapiens
ttcaagttttctttctattcaaagtgcatgactagtcaatatccaaggttttcccctttgggaaaatttcttcttgccatagtatttcaaagccaccccaygcactaaaccaacacatttatgaccaagctatgaattcttcctcttctattagctggtcatcgggagcctccctgtggcataaatgtgagcacctgcaga

SEQ ID NO: 256428 - DNA, 201 bp, Homo sapiens
aataatatttgagagaccccgcctgctggggcgcaggcggcagcggcgtggccatgaagctgaaggtgaagaacgtgtttctcgcctacttcctggtgtcratcgccggcctcctctacgcgctggccagccatgtgactgccttcctcccctgcgggcagcagctgagcagctacggcagaaggatctgaggatttccca

SEQ ID NO: 256429 - DNA, 201 bp, Homo sapiens; identical to SEQ ID NO: 51073

SEQ ID NO: 256430 - DNA, 201 bp, Homo sapiens; identical to SEQ ID NO: 51074

SEQ ID NO: 256431 - DNA, 201 bp, Homo sapiens; identical to SEQ ID NO: 51075

SEQ ID NO: 256432 - DNA, 201 bp, Homo sapiens; identical to SEQ ID NO: 51076

SEQ ID NO: 256433 - DNA, 201 bp, Homo sapiens; identical to SEQ ID NO: 51077

SEQ ID NO: 256434 - DNA, 201 bp, Homo sapiens; identical to SEQ ID NO: 51078

SEQ ID NO: 256435 - DNA, 201 bp, Homo sapiens; identical to SEQ ID NO: 51079

SEQ ID NO: 256436 - DNA, 201 bp, Homo sapiens
ggtaggaagaatcaatatcatgaaaatggccatactgcccaaggtaatttatagattcaatgccatctccatcaacctaccaatgactttcttcacagaaytggaaaaaactactttaaagttcatatggaaccaaaaaagagcccgcattgccaagtcaatcctaagccaaaagaacaaatctggaggcatcatgctacc

SEQ ID NO: 256437 - DNA, 201 bp, Homo sapiens
ttcagcctagatcctgccatgaagcggactgctgctccctggctcccactctgatctgcttttcactcttgccttgtctcccaattaataaggtaaatatytcttttagtcaccttccactctgcattagacccagtgggatccctgccctcagggatttacagtgtgctatgcaaggaaagaatggaggctacaaaatat

SEQ ID NO: 256438 - DNA, 201 bp, Homo sapiens
aaagcaatggcaatgaaagccaaaattgacaaatgggatctaattaaactaaagagcttctgcacagcaaaagaaactaccatcagagtgaacaggtaacytacagaatgggagaaaatttttgcaacctactcatctgacaaagggctaatatccagaatctacaatgaactcaaacaaatttacaagaaaaaaacaaac

SEQ ID NO: 256439 - DNA, 201 bp, Homo sapiens
attgcagcactattcacaatagcgaagacttggaaccaacccaaatgtccaacaacgatagactggattaagaaaatgtggcacatatacaccatggaatwctatgcagccatagaaaatgatgagttcatgtcctttgtagggacatggatgaaactggaaaccatcattctcagcaaactatcacaaggacaaaaaacc

SEQ ID NO: 256440 - DNA, 201 bp, Homo sapiens
ctggattaagaaaatgtggcacatatacaccatggaatactatgcagccatagaaaatgatgagttcatgtcctttgtagggacatggatgaaactggaarccatcattctcagcaaactatcacaaggacaaaaaaccaaacaccgcatgttctcactcgtaggtgggaattgaacaatgagaacacatggacacaggaa

SEQ ID NO: 256441 - DNA, 201 bp, Homo sapiens
ggctgcctgggtttgacacctgacttatctgcctaactgagtgacctcaggcaagtcacttatctctctctgcctcagttgccccctccataaaatgggcmcaatactcacctcataaattgttctggggtgcatatggtattatacacataaagagcttagtagtagtgcccacagtaatctcccaataaatgttatgta

SEQ ID NO: 256442 - DNA, 201 bp, Homo sapiens
attcagaatttacgtctccatggttttactctggttcatccttgctacaggtttagtcatgcagaaaaacaaagggcccgttaggaagaatctattttctccccccccgcaaaacatctcagtgtttgcatatgtgtcatgaagtgaagtaggaaatcaggattttctggatccagcaaggtcagggtggggagcagattt

SEQ ID NO: 256443 - DNA, 201 bp, Homo sapiens
tataattttcatcctcacatagagggcaaaaatagtgcccctgttaattcctatagaaggggaagtcatgctgttcctcaactatatcctgatcctaactrtcctcactgctgtatgggacccttgcctgagcgccaccctcacagcctttgtctcagcagagaagcctttctctcagtgctacccgggttgtagaaggct

SEQ ID NO: 256444 - DNA, 201 bp, Homo sapiens
ggcaggcactcttaaactaggaataacagggaatgtctcaaaataacatatttgtcaagatagactaggctagctgcaataataaatcctccagttttagmagcttaacacacaaaaatttctctctccccagatgaatcccatgtggtttagacgatctacagggcagttatcatggttagtgagcacagtccatggcta

SEQ ID NO: 256445 - DNA, 201 bp, Homo sapiens
tgcacctcccaactgtgattcatagagcatccactggcctgttcagccttcatggagagcctggccaagtttccacccttcccagatatttcaggatcctrttgtcatcctattaccttgaggaagttggtagtaatggcagcttgttttctttttgagtgaatgaatgaacaaacaagctaaaacaaagtggcctttttt

SEQ ID NO: 256446 - DNA, 201 bp, Homo sapiens
tctgtatgtgcaacaccactgctctctcttacctaggaatgtaccaggtcatccagggtatcatctctcctgtcaacgacacctatgggaagaaagacctygcagcttctcatcaccgagtggccatggcccggctggccctgcagacatccgactggatccgggtggacccttgggagagtgagcaggcacagtggatgg

SEQ ID NO: 256447 - DNA, 201 bp, Homo sapiens
acagtggtttgggctcctgagtaaatagaatttccagccttaaataaaggttctcctgtgatagcatgtagtgcccaaatgagaggagctctgtatcctakcctgaggaaaggatttttcatttataatactgtctgtgtcacttgggacggaatgatgtgaaatcccatgttaaaccaacagcgctccagatttgcaagg

SEQ ID NO: 256448 - DNA, 201 bp, Homo sapiens
aataaggtcatttcataatcacaaaggggttaattctttaagcagaagtaatacgctttttgcacttagtaatataacttcaaaatacataagaagcaaaracttatagaattgcaaggagaaatagacaaacccacatttagagtcagctattttaatgctcttctcagtaattaatagaataagcacacagaaaattaa

SEQ ID NO: 256449 - DNA, 201 bp, Homo sapiens
taagtgggagtcagggaggttatttagtaaaagaaaacaacatagtcacttaagtatttggaagggaaaaaaaagcagtttgatttcctaccacatatatktcacttagtaaaatactaaacataaaacctaaatgtggagaattccctgtcaatggctgtttcctttgacctgcacctacctcctggaactacacaggca

SEQ ID NO: 256450 - DNA, 201 bp, Homo sapiens
tggcatagcacttggcatacttcatggcccatggccaaccctccttaaacgttgttttaatggcctcctcagtcatcttacaagtgagaagtaatggtctstgtgtggtttagagagactgatctggataattgtctcagtgctaactccctgacatgagcttttgtccccataaaagcagggtggccactgcaacaggtg

SEQ ID NO: 256451 - DNA, 201 bp, Homo sapiens; identical to SEQ ID NO: 51092

SEQ ID NO: 256452 - DNA, 201 bp, Homo sapiens
ttaaatgatgggagacagaggcttgcaaaaaaggagattctaatgctccaaaagcaggcaggaccccaacggagcaccccttcctctggaagctatgtaasggctcagacacacagaaggtgctgccagccaaccagtgccacatgtctgagactcagagagatgattgcagagaaaggaacaggaaaaagaagaaacaaa

SEQ ID NO: 256453 - DNA, 201 bp, Homo sapiens
tactcaataaacccagtagtagttactcagacgtactttattgtggcaattgaaactagtcccaaattatgagtatggcattgcaagagatctcattccaygccttgtgctccttcaaatcttttgaaatttctcgaaactaaagagtgggctgcctgctttcctgggagtctcataattaggatgaatgcttaattgaca

SEQ ID NO: 256454 - DNA, 201 bp, Homo sapiens
gtttttctcagaaagccacccaggagcccctgaaggtatggttcacacagctccactgagcatcagttacttcttgaatttcattggtggttctcagcttwtggtgtcacctcttaaaactggacagaagacttcccagaagcagcaactatgctgggaccttgctaaggacgtgtcagaccttgagaccccatggatttg

SEQ ID NO: 256455 - DNA, 201 bp, Homo sapiens
agccacccaggagcccctgaaggtatggttcacacagctccactgagcatcagttacttcttgaatttcattggtggttctcagcttttggtgtcacctcytaaaactggacagaagacttcccagaagcagcaactatgctgggaccttgctaaggacgtgtcagaccttgagaccccatggatttgggagagcatttta

SEQ ID NO: 256456 - DNA, 201 bp, Homo sapiens
gtgtctacctcagaaggttattatggggatttaatgaggacctaaaatacatagagcagtacctgacatgtgggaggatactactactataactattgatrtcgttccttagtctggacaaaaattgatgaaacaagacagggcagaggcgggagagggataggagtggaggcagtatgaggaattgtgcagggtgattag

SEQ ID NO: 256457 - DNA, 201 bp, Homo sapiens
ctaagattctctgtaataggttttgggtggaagtgcctgggatgagggtgaccatgcatctggaagtcagcactgtctgctctttccacccagaagtgctrtgtctgggctgccttcctgcccagtgaaatcctggtcttcatccctgtgcctctctgctgtccctgcctctggccagagctgcccctaaatccagaatcc

SEQ ID NO: 256458 - DNA, 201 bp, Homo sapiens
gaagtgcctgggatgagggtgaccatgcatctggaagtcagcactgtctgctctttccacccagaagtgctgtgtctgggctgccttcctgcccagtgaartcctggtcttcatccctgtgcctctctgctgtccctgcctctggccagagctgcccctaaatccagaatccctggggcagcggcagaggcacactctgtt

SEQ ID NO: 256459 - DNA, 201 bp, Homo sapiens
aagtgcctgggatgagggtgaccatgcatctggaagtcagcactgtctgctctttccacccagaagtgctgtgtctgggctgccttcctgcccagtgaaakcctggtcttcatccctgtgcctctctgctgtccctgcctctggccagagctgcccctaaatccagaatccctggggcagcggcagaggcacactctgttg

SEQ ID NO: 256460 - DNA, 201 bp, Homo sapiens
ctgagacttgcaggatgactggattattgaggttggagacatttctgggccaaggggcagactaaggaaagcacaagggcaggagatagcataagtgtgargcactccatgccactagggcagactggagcctccagtgagaggcaggggcagccagagtgactcaggagggacaacacactgaggccaccatcctcgcac

SEQ ID NO: 256461 - DNA, 201 bp, Homo sapiens
tacctttcttaggttaccatctgccttcaacattgtaggtgattcagtttcaatgtcccatcctccagaaaacgtgttccaacctgttcagagcttctttygggctcctgacacttccctcatgtgtttctgcccagcagtgactacccatctggagactgtccaactcccttgggactttatcccccacccccaacccca

SEQ ID NO: 256462 - DNA, 201 bp, Homo sapiens
gccctgcaaatagcaggtaagcgcagcgtgggcccctcgtcagcccactaggacctggatcgcggctgaatgcccgggcccacgtgactcctggcccctamctgagtcctgggagtccccgctggggcgacaggtggcggcggagtgcggagccatccggggtggcgcgaaccggggggacagctccgcgctgcctctgcg

SEQ ID NO: 256463 - DNA, 201 bp, Homo sapiens
agcaacctccacctcccatgttcaagcgattctcctgtctcagtctcccgagtagctgagactacaggcatgcatcaccatgcctggctgatttttttgtrtttttagtaaagatggggtttcatcatattggtcaggctggtcttgaactcctgaccttgtggtcagcctgcctcggcctcccaaagtgctgggattaaa

SEQ ID NO: 256464 - DNA, 201 bp, Homo sapiens
gtggaggctaaaataaactctttggtgttgtattggaattggaggtttcagtatgaacagttttcaatatgtatacagatggatagttttagaaataagtrcagagtggtgtgtgtacacatttgaggatagatatagatagttgcagatataattaatataattatatatttatataaaattttctagctttgccttcta

SEQ ID NO: 256465 - DNA, 201 bp, Homo sapiens
tcaaattaagctgaaacagtttgtttagtaactttaaatagaaattaatagtatcttcctggtttgctgcagtagcactaactacttttgggccttgcacyctttcccctttcacaagcattccttcttcaaactacaattgtccttcctttgttgatttcttcctttttctcctgaaataacaacataaccttaaaagct

SEQ ID NO: 256466 - DNA, 201 bp, Homo sapiens
tagtgattttaatatatattcatggaaaattctccagcctggtctgaaaaactattcattttcacatttctaacttaaaagatttttctggagaagatagwtttaagaatgttgaattactccaacaattgttttgaaccaagataattttttttcatatcatgtgaggcttcaaggatttgaggctacacatgttagatt

SEQ ID NO: 256467 - DNA, 201 bp, Homo sapiens
attaaaggtatcagggtgaactcatgaatagataagataaaaaggatagatacagtgggtgggtcggtgggtgggtagatggataaatggatggatgggtggatggatggatggatagatagatagatagatagatagatagatagatagatagatagaaaatgtgtgtggatatttatatagatacacatacaacgctat

SEQ ID NO: 256468 - DNA, 201 bp, Homo sapiens
tgggtcttctgggctttaggagataccacaagagcatgagtaaatattatataagctcagcatgttgctttaatcttgggctcacacggatgtttattaaycaaatatagtgattttaatatatattcatggaaaattctccagcctggtctgaaaaactattcattttcacatttctaacttaaaagatttttctggaga

SEQ ID NO: 256469 - DNA, 201 bp, Homo sapiens
gtccatacttgaatattattagagagttactttggccagagctgttgacaaaatacatctccaatccctaccagtctcagatgtagaccttatcaccagakatgagctgccgtcttctctgcagcaaaggaaggatgcatcactgcacagagattgaaaaggcccccatgctactcttagtcgggtgagtttgcctgcctt

SEQ ID NO: 256470 - DNA, 201 bp, Homo sapiens
ataggattgtaattgtgtggctcttagccatggagaaaagaagtggttctggaaatctccctttcataaaggctgacacgctgacagtatttatgcctctygaaagtacatgttaagtggtggatatttatgaaaagggttttgaggagtaaatgtgtccatcagtcaacctggaactttttagagctcctaagatggttt

SEQ ID NO: 256471 - DNA, 201 bp, Homo sapiens
cttttggcttcttctgaaattctgctttaagaaaataatctgaaaattagaaagagccactgtataaaaatgctctctgcaccattatttgccatggtgaraacttggaagtgatctgaatatacagtataggaggagaacaaattacagaacgacaggctgatggagtattatgtagtacttagaaatatgaagattagc

SEQ ID NO: 256472 - DNA, 201 bp, Homo sapiens
ccgtgcaggaactgactgctcactggggagaagctgcccttccaggaggtaaaacaacctttggaagcatcatcatatagaatttttcagaaggaaagtgytcaaaagacagattcccttggcttttgtgtgaaactgagtcaatgaatggtgactttgccccactcttgtagaagagacaaaagacgcacttgcctcaga

SEQ ID NO: 256473 - DNA, 201 bp, Homo sapiens
ttgtggggtgggggaaggggggagggatagcattaggagatatacctaatgctaaatgacgagttaatgggtgcagcacaccaacatggcatatgtatacrtatgtaacaaacctgcacgttgtgcacatgtaccctaaaacttaaagtacaataataataaaatttttaaaaaaagaaaactatgtttttcagtttacca

SEQ ID NO: 256474 - DNA, 201 bp, Homo sapiens
atatagaatttttcagaaggaaagtgttcaaaagacagattcccttggcttttgtgtgaaactgagtcaatgaatggtgactttgccccactcttgtagawgagacaaaagacgcacttgcctcagactttggctacttactgtgtgtcttttttttctttttttaaataaaaacatggaagaccaccagggagtttggtg

SEQ ID NO: 256475 - DNA, 201 bp, Homo sapiens
cacagccacctttagagcactctgccttggtccaaagcaaccacagacagacttctgttagaacactgaaaagaaaaaaaatcgtattccttggcactttyccaatattaaacaaaaggtgtattgattaaatcattacttacaactgtattccctgaaatggctgcagattcatttacatgctttttcttttcaagtcat

SEQ ID NO: 256476 - DNA, 201 bp, Homo sapiens
tattccttcctccctttctttcttctacacatacttcaggcagtgtcctggggattcaaacagtgagtcaaaatgacatagtcctgaccctcatggagtcygcacacatcatgagacagatttaacaatagaattaagcacatacacacatagcaacacattttaaactggcttaactctcctgaaggaggaggctggtgt

SEQ ID NO: 256477 - DNA, 201 bp, Homo sapiens
ctggcttaactctcctgaaggaggaggctggtgtcagggccgcatgtggaagggagaaagatagagaaatatagtcagtatcactatagacagaggggccraaagtgttggagggaggcttatgttccttttttcatatacacccttgaagaccgctggatgatatttttctataaatcctggtaagcagtggtgtatgct

SEQ ID NO: 256478 - DNA, 201 bp, Homo sapiens; identical to SEQ ID NO: 51091

SEQ ID NO: 256479 - DNA, 201 bp, Homo sapiens
aagtgtacacaccattagagaaaggcaagaactgaggcctcttgaggtatatctctttggatgctttgggccacacgccactgaacacctgatcagcaggygctttagcaataaagatattttagcagtttatataataataagtctggagaaaagtaatactgcacaaggttaatatagttctctaggccttccctttgt

SEQ ID NO: 256480 - DNA, 201 bp, Homo sapiens
accactgccatcagcagccctgatatcagccaggctgctcgctgaaaggtttacaaccataaaggaaaagaatgatgaaaacatgtgatgcaaaccaaccygaatttgggctcaataagtggcaggtggaagtgaatgagtgtcagtgtcaatgagggaatcacaccaggtcaggtcaagagaaacctttagaaggctgga

SEQ ID NO: 256481 - DNA, 201 bp, Homo sapiens
ggtcagacagaaaatctctggcttacaagcttcttaaattggagactgtgtggcatgaattgcatgcacaactgtaatgagtgaaattacaaacgtgcccrtcttcatttttcaatttggaaatatttagctgtatgaaagtttatatgccctagctagaaggaaattgagaagctatctattataccttctttcctgcag

SEQ ID NO: 256482 - DNA, 201 bp, Homo sapiens
atggagtattatgtagtacttagaaatatgaagattagccacatgggaaaccttaacatgctctgggaacagaatgcggttacattacagacatatttagraaaacagtcttcaagggaaccctctaaggggacaagagttacatatgaaaaagggaattatggataacctttttcatatatcaagctttctatattattt

SEQ ID NO: 256483 - DNA, 201 bp, Homo sapiens
cttagtcttaggctgagctagacgcagccctacactaggtgccttgcccgtggtaaggcaaatcttgggaacaggctccaagaaagccttatcaccagacktgattctgagttcgccccgttgcacaggtgcttttgttgagctctttatagtcaatctgcaatcaagtaaataagaaacagttggctgagtcttttatga

SEQ ID NO: 256484 - DNA, 201 bp, Homo sapiens
gttaggagtaagttctagtgtctgatagcacagtagggtgacaatagttaacagtaatttattgtagatttttaaattgcaggaagaggagatttggaatrttcccaacataaagatggtaaatatttgaggttatggatttcttcatcattacacattgtatgcatgtagcaaaatatcacaagttaccctatcaatatg

SEQ ID NO: 256485 - DNA, 201 bp, Homo sapiens
gtgacaatagttaacagtaatttattgtagatttttaaattgcaggaagaggagatttggaatgttcccaacataaagatggtaaatatttgaggttatgratttcttcatcattacacattgtatgcatgtagcaaaatatcacaagttaccctatcaatatgtacaattattatgtattaacacaaaacaaaataattt

SEQ ID NO: 256486 - DNA, 201 bp, Homo sapiens
cagcaggagtttattgtggaggagggtgtgggtagtggtcatcacataatagtactaagatatcattgaaaaattgctgtcctgataaaaatccagcaaartagaattctcctttgtcaaggaagtattcttaaatctcagactcttattgtttttgctaggttgtcaaggaagtattcttaaatctcagactcttattgt

SEQ ID NO: 256487 - DNA, 201 bp, Homo sapiens
ccgttgcacaggtgcttttgttgagctctttatagtcaatctgcaatcaagtaaataagaaacagttggctgagtcttttatgatacctgatcattgaaarattgcttatggtatgcgactgtccttccacaaacagctgggtgggttttcctccatggtggcgtcattcctttactgtattatgatacaaaaaaaggacc

SEQ ID NO: 256488 - DNA, 201 bp, Homo sapiens
tctgaaaatccctgggtggctttgagggctggaggacagacataccctgagcccatatgtttacaacacaggcatcatcacagcaaactgctcagatctcyaccccagatggaaggcccagaccatggcaaggcactcttctcgacccctgcaggtgggtgctgatcctcttgtctgtaggagaatgagatgtcagggatt

SEQ ID NO: 256489 - DNA, 201 bp, Homo sapiens
ttaaaggtatcagggtgaactcatgaatagataagataaaaaggatagatacagtgggtgggtcggtgggtgggtagatggataaatggatggatgggtggatggatggatggatagatagatagatagatagatagatagatagatagatagatagaaaatgtgtgtggatatttatatagatacacatacaacgctatc

SEQ ID NO: 256490 - DNA, 201 bp, Homo sapiens
taaaggtatcagggtgaactcatgaatagataagataaaaaggatagatacagtgggtgggtcggtgggtgggtagatggataaatggatggatgggtggatggatggatggatagatagatagatagatagatagatagatagatagatagatagaaaatgtgtgtggatatttatatagatacacatacaacgctatct

SEQ ID NO: 256491 - DNA, 201 bp, Homo sapiens
aaaggtatcagggtgaactcatgaatagataagataaaaaggatagatacagtgggtgggtcggtgggtgggtagatggataaatggatggatgggtggatggatggatggatagatagatagatagatagatagatagatagatagatagatagaaaatgtgtgtggatatttatatagatacacatacaacgctatctt

SEQ ID NO: 256492 - DNA, 201 bp, Homo sapiens
tcttaatactagcaggttgaaataacaagatatgtacacggtcaccaagtaactcctgacaatagactgattaattccacaggaaaaaatatctttacagmtgagaaatgtagcagatacaaccttaaccaagtgatcaaagctaacaccaccaatatgggacataatgacctcatgtatgttgtgatatgatgcactgag

SEQ ID NO: 256493 - DNA, 201 bp, Homo sapiens
cagatgagaaatgtagcagatacaaccttaaccaagtgatcaaagctaacaccaccaatatgggacataatgacctcatgtatgttgtgatatgatgcacygaggagggtccaccccaacttctgtgctggttctgccagaagggcgtaccctgtacctcctcctgaggaaacatcagacaagcctaaagtgagggacatt

SEQ ID NO: 256494 - DNA, 201 bp, Homo sapiens
actcgtcatttacattaggtatatctcctaatgctatccctccccccttcccccaccccacaacaggccctggtgtgtgatgttccccttcctgtgtccaygtgttctcattgttcaattcccacctatgagtgagaacatgcgggtgtttggtttttttgtccttgcgatactttgctgagaatgatggtttccagcttc

SEQ ID NO: 256495 - DNA, 201 bp, Homo sapiens
agcaatcagaaactatcagttttagacttggttccctgattttgctctagttcacgttcagagtcccaaactatggtctccagaatgtatcctctatgcatttttttttttttttttgagacggagttttgctcttgttgcccaagctggagtgcaatggcacagtctcggctcaccgcaacctctgccttccggattcaa

SEQ ID NO: 256496 - DNA, 201 bp, Homo sapiens
aacaaattgttctaatttatagtttctgggaacttttggaaaaatggatgagagccccaggttacctgagatgctgttacatattttaatggtgctaacawtgtatattttgtcaaaatgaaacaggattttgaaagacttcataacagttgtaaaaaaaaaacagccaccttttcagatacagtcatcacgaggctgctc

SEQ ID NO: 256497 - DNA, 201 bp, Homo sapiens
aatttgaattctctattacacagtgaatatggagagaattaaatgcatatgataaggtggtgcagtacaatctgggataagggggaaattaagctatgatrattctatttaaggcagtgacagccccagttctgggtcttctgggctttaggagataccacaagagcatgagtaaatattatataagctcagcatgttgct

SEQ ID NO: 256498 - DNA, 201 bp, Homo sapiens
atatatttgttttattttttgcttatttagttttactgtcttattccttaatgtgtgcacctgtagtctcagctactctggaggtttaggcaggaggatcrcttgagcccaggagttctgggctgtagtgcactgtgctgatccactaagttctgcatcagtatggtgacctcctgggagtgggggaccaccaggttgcct

SEQ ID NO: 256499 - DNA, 201 bp, Homo sapiens
atcacttttgctaccttggtgattttaatttgaattctctattacacagtgaatatggagagaattaaatgcatatgataaggtggtgcagtacaatctgrgataagggggaaattaagctatgatgattctatttaaggcagtgacagccccagttctgggtcttctgggctttaggagataccacaagagcatgagtaa

SEQ ID NO: 256500 - DNA, 201 bp, Homo sapiens
gtgggacaagatgtggagttataagacggtgatatcaggacaacagagtgacatcctgtctcaaaaaaaaaaagttaaatgtgtgtttactatattactgyatgattcagccattctatttctatttacacaagagaaatgaaagcaaatgcaaatacttgtgcatgaatgttcagagcagctttaattatagtagcctca

SEQ ID NO: 256501 - DNA, 201 bp, Homo sapiens
gtagtggtgctattaatgtgatagtggtagtgggaatcatcgtgttggtcgatgctgatcatgatttgatgatggtggcactgttggtgatggtgaaggasattgtgatttccgtaatttaggtcagtgttttaacctgaatttcagaagcaggaagttgatattggagaaaatgcccccaaatatctcatatacacccca

SEQ ID NO: 256502 - DNA, 201 bp, Homo sapiens
caccagcaattttctgtgttaaataaaaatgtcttatcagtgtccaatgtgatgtatatcacttttgctaccttggtgattttaatttgaattctctattrcacagtgaatatggagagaattaaatgcatatgataaggtggtgcagtacaatctgggataagggggaaattaagctatgatgattctatttaaggcagt

SEQ ID NO: 256503 - DNA, 201 bp, Homo sapiens
atcacatctgtgcagttcagcaatgtagatgtctgggagaatggctttgttggtgatatctgggagaatggctttgttggtgatatctaggagaatggctytgttgaagcagtggtattgacaactggattggctatgcattcaggagagactaggagaagaggagatagaggtggctagtagcaacagtcctcttgtgaa

SEQ ID NO: 256504 - DNA, 201 bp, Homo sapiens
ccaagaaaagcattttgtgagactttccaatgatgttgtctttcctggcagtgacctctctctaactttactgggtccatccttgtttttgcagctgtgcytgagctgaagcttctctgtggggcagacgtcttgaagaccttccagacccccaacctctggaaggatgcgcacatccaggaaatagtggagaagtttggc

SEQ ID NO: 256505 - DNA, 201 bp, Homo sapiens
ccagatgttcactttaaaattcttttgactttgctgcatgtttgaaaatctttcacaataaagtttgggaagaaattgcatacattcaaaacaaacaagtwcttcatctgcatgtctgcacttttgagtttttgccaccccagagggtcttgataggggatggctcctcacagaagtcaaatgggcagaaggcttggagca

SEQ ID NO: 256506 - DNA, 201 bp, Homo sapiens
aaagataaaagtgtagttacaggtacagtataggtactgccaaaatatgagttagtaggcctaaaaatcacctagtaaatagtatattaacttttagttaytagtgatttgttatgcttgatttattattgtcatccatgaaggttcaaaatgtgaaaataataagatttggaattcctgttttctaccacaaatagcatt

SEQ ID NO: 256507 - DNA, 201 bp, Homo sapiens
agatcctcccatttcagcctcccaactagctgggactacaagcatgcaccactacatccagctatttttaaaaaacagttttgtagatatgggggtcttaytgtgttgcccaggctggtctcaaactcctaacctcaagcaatctgcctgcctcagcctcccaaagtgctggcattttgagtatttaagtagctgcttgtt

SEQ ID NO: 256508 - DNA, 201 bp, Homo sapiens
gaggtatcaaagtaaggaagattttatattttttattttataaatgatgtggtggttttctttgattacttcttggatcctactgttcagagaaaatcagwtattcctttttgtaagagaagttatgaatcttccctgaagagttttagaaagataaatacttctcccttggcatgatgtcagcaacttctgcctcgagga

SEQ ID NO: 256509 - DNA, 201 bp, Homo sapiens
gtttggtgtaaaagccagtttttttgtttgtttgtttgtttgtttgttttctttgcttgccatcctgcaacattagctgggttacaggaaacttccagaarccacaggcaatctttaaagaccatctcctgcatagcccttcactgagcacacaattactgagggtcgccactgtttgccagacatcattcaaaacaaggt

SEQ ID NO: 256510 - DNA, 201 bp, Homo sapiens
ccattttcacactgctataaagaatacctgagactgggtaatttataaagaaaaggggtttaattgactcacagctccacatggctgaggaggcctcaggraacttacaatcatggcagaaggcaaaggggaagcaaggcacgtcttacatggcagcaggtgagagagaacacagaggaaacagccacttttaaatgatca

SEQ ID NO: 256511 - DNA, 201 bp, Homo sapiens
ggctgaggaggcctcaggaaacttacaatcatggcagaaggcaaaggggaagcaaggcacgtcttacatggcagcaggtgagagagaacacagaggaaacrgccacttttaaatgatcagatcttgtgagaactctcccactatcacaaggacaacgtagggaaaacccccccaggatccactcacctcccaccagatccc

SEQ ID NO: 256512 - DNA, 201 bp, Homo sapiens
tccccttacctcccttttataaggatacatgtgattgcatttagcactccctcttctcaagattcttaatcacatctgcaatgaccctttttccaagtaargtaacatttacaggttctagggattaggacctgacatctttgggggacattattcaacctagtttgatggagttgttgacctcctttccaatatatttta

SEQ ID NO: 256513 - DNA, 201 bp, Homo sapiens
gcagaggcagggagagaatagaggaatcaaatattaccactaaggtgggaatcaggaatcagggtccttggatggggctcagccaaggcagcagatacaayttatggggttaaaacaaaatttaagtttggaagggaactgacaccccagattaggatgcagaaattctgaagaggtaaagcaaactgggcaaaggagaag

SEQ ID NO: 256514 - DNA, 201 bp, Homo sapiens
cccagggtcaatccacaggcccaaggtaccactcaggcaggcagcaagaagcagttaatggtcatgccccatagaggcgcagtggaagtccctggcaaatrcatgttgtattggaagtaattatttccacaacaaagttcagagatccagctaatattcaaagtagggtcaacctgaactaggaccttcaaggtaagtaaa

SEQ ID NO: 256515 - DNA, 201 bp, Homo sapiens
agtgctgggattacaggcatgagtcaccacaccaggcctctttttaattttttttaaataactcctttattcttgtgttgctcagtgttagtttgcacackggaatcacccagggagcttttaaaagtacccatgtcattggtctgggttggggcatcaggatttttaaaagctacctggtgattctaatatatggctagc

SEQ ID NO: 256516 - DNA, 201 bp, Homo sapiens
ttatcagcttaaggagattttgggctgaaacaatggggttttctagatacacaatcatgtcgtctgcaaacagggacaatttgacttcctcttttcctaaytgaataccctttatttccttctcctgcctaattgccctggccagaacttccaacactatgttgaataggagtggtgagagagggcatccctgtcttgtgc

SEQ ID NO: 256517 - DNA, 201 bp, Homo sapiens
cttccagtttttgcccattcagtatgatatcggctgtgggtttgtcatagatagctcttattattttgagatacgtctcatcaatacctaatttattgagmgtttttagcatgaagggttgttgaatttttcaaaggccttttctgcatctattgagataatcatgtggtttttgtctttggttctgtttatatgctggat

SEQ ID NO: 256518 - DNA, 201 bp, Homo sapiens
gtttgtatttctgtaggatcggtggtgatatcccctttatcattttttattgcgtctatttgattattctctctttttttctttattagtcttgctagtgrtctatcaattttgttgatcttttcaaaaaaccagctcctggattcgttaattttttgaagggttttttgtgtctctatttccttcagttctgctctgatt

SEQ ID NO: 256519 - DNA, 201 bp, Homo sapiens
tctggaggttcagagatgctggcttgagtttgttgacagctgcacactcataacattgctaaaaacttcataaactctgatgcctggaaatagcccaagtsatttgaggttttgctcacttgtaaatgtttgagtattgtgtccacaaattgcaaattgagtaactcaatttcgaggcacagctgttatttggaaaagacc

SEQ ID NO: 256520 - DNA, 201 bp, Homo sapiens
ggtggtgatatcccctttatcattttttattgcgtctatttgattattctctctttttttctttattagtcttgctagtgatctatcaattttgttgatcytttcaaaaaaccagctcctggattcgttaattttttgaagggttttttgtgtctctatttccttcagttctgctctgattttagttatttcttgccttct

SEQ ID NO: 256521 - DNA, 201 bp, Homo sapiens
taagggggaaattaagctatgatgattctatttaaggcagtgacagccccagttctgggtcttctgggctttaggagataccacaagagcatgagtaaatrttatataagctcagcatgttgctttaatcttgggctcacacggatgtttattaaccaaatatagtgattttaatatatattcatggaaaattctccagcc

SEQ ID NO: 256522 - DNA, 201 bp, Homo sapiens
tttcctgctttctcttgtgggcatttagtgctataaatttccctctacacactgctttgaatgtgtcccagagattctggtatgttgtgtctttgttctcrttggtttcaaagaacatctttatttctgccttcatttcgttatgtacccagtagtcattcaggagcaggttgttcagtttccatgtagttgagcggtttt

SEQ ID NO: 256523 - DNA, 201 bp, Homo sapiens
ggtcaatgttggaataggtggggtgtggtgctgaaaaaaatgtatattctgttgatttggggtagagacttctgtagatgtctattaggtccgcttggtgmagagctgagttcaattcctgggtatccttgttaactttctgtctcgttgatctgtctaatgttgacagtggggtgttaaagtctcccattattattgtgt

SEQ ID NO: 256524 - DNA, 201 bp, Homo sapiens
ctcacttcatttcattcatttcatcttccatcgctgataccctttcttccacttgatcgcatcggctcctgaggcttctgcattcttcacatagttctcgwgccttggttttcagctccatcagctcctttaagcacttctctgtattggttagtctagttatacattcttctaaatttttttcaaagttttcaacttctt

SEQ ID NO: 256525 - DNA, 201 bp, Homo sapiens
agttggagaaaactagggttgaaaagggtctaaaatggtctttttgatgatgtgtctctaactgatggctgagtgggggttccctgcagggggctgccacygcaccttgcagacccttgccatccctttgagcatggtaactgcctgagaccgttctggctctttgacctgggagctatggagtctaattttgcaaacttc

SEQ ID NO: 256526 - DNA, 201 bp, Homo sapiens
tgagccaccacacctagccctctacttttctatatgtttgtgatttttcataacaaaattttttttaaagtcactgagtacaaggatgtacttagtcttasgctgagctagacgcagccctacactaggtgccttgcccgtggtaaggcaaatcttgggaacaggctccaagaaagccttatcaccagacttgattctgag

SEQ ID NO: 256527 - DNA, 201 bp, Homo sapiens
ctcctggtccccagtactgtgggaggaaggaggaatttggaattgcagccttcagagcccttattggtgacatttcagcaaactctccccacaacccaacrcacacagttactaattgcctagggtagccctgtatcattctggcatcttgtcttgcaggcattgtattctagtacctcaggaactggatattatgtgtgt

SEQ ID NO: 256528 - DNA, 201 bp, Homo sapiens; identical to SEQ ID NO: 51088

SEQ ID NO: 256529 - DNA, 201 bp, Homo sapiens
gaatttacgtctccatggttttactctggttcatccttgctacaggtttagtcatgcagaaaaacaaagggcccgttaggaagaatctattttctcccccsccgcaaaacatctcagtgtttgcatatgtgtcatgaagtgaagtaggaaatcaggattttctggatccagcaaggtcagggtggggagcagattttgatc

SEQ ID NO: 256530 - DNA, 201 bp, Homo sapiens
agtttcctcatctgcaaaggtggagtaatagcatctaattgaaatatgtgtgccccttaaatggttggaaatattagtcagtgcaaatgcttattctttakctttccttggattgttcacccggagccatttaacctcacttctgagtccccttacacacagtgatgttgatcatctgggtacccacaaaatgtaagggga

SEQ ID NO: 256531 - DNA, 201 bp, Homo sapiens
cagcggtcatgcgaccatgagataatcttgagggtagctggaagtcatgttctaagaataacagagaaaaaaatctagagggatcctggcaaattggtgayatcagagctgctgccctaaccctaaactgcctatcttcctcatcttcattttatgagagacaagtttaggccctgttttgtctaaggcattattttcccc

SEQ ID NO: 256532 - DNA, 201 bp, Homo sapiens
gatacccatacttgcagtggattgtgttatgggagaagatccctgggcttcaggaacccagatattttatcagggacaataaacatgcctgtcttttgctycaaagaaggacatcatcttcattatactggacagtaactctgcctgcctttgtcccagcaggagacaatatcagtcttccaaggctgctgttagctattc

SEQ ID NO: 256533 - DNA, 201 bp, Homo sapiens
tgtcttttgctccaaagaaggacatcatcttcattatactggacagtaactctgcctgcctttgtcccagcaggagacaatatcagtcttccaaggctgckgttagctattcaaatatctgtgaaagaaagtccagaacaatcagcagccaatgccttacttgaaagacatgcagaaacataagcaacccatggagaactg

SEQ ID NO: 256534 - DNA, 201 bp, Homo sapiens
gaacatcccttaaattacttcatgcaagatgatatatttatacaactgatgtacacacactgcatctgtgtgtagacaatgtgcagacagtgtgttaaaakgtagagtgttggttaagatcatgggccctggaaccagactacctgggtttagatcttagtcttacaattaattagctttgtaagcttaggctaattattt

SEQ ID NO: 256535 - DNA, 201 bp, Homo sapiens
gtgttgaaagaattagcattgatgtgtgtgaagtttttagcacagtgcctagcctattactcaataaacccagtagtagttactcagacgtactttattgyggcaattgaaactagtcccaaattatgagtatggcattgcaagagatctcattccacgccttgtgctccttcaaatcttttgaaatttctcgaaactaaa

SEQ ID NO: 256536 - DNA, 201 bp, Homo sapiens
gcaggtaagcgcagcgtgggcccctcgtcagcccactaggacctggatcgcggctgaatgcccgggcccacgtgactcctggcccctaactgagtcctggragtccccgctggggcgacaggtggcggcggagtgcggagccatccggggtggcgcgaaccggggggacagctccgcgctgcctctgcgcgccggcggttc

SEQ ID NO: 256537 - DNA, 201 bp, Homo sapiens
ctaaaaatacaaaattagcagggcacagtgggacgtgcctgtaatcccagttactcaggaggaagaggcaggagaatcacttgaacctgggaggcagaggytgcggtgagttgagatcgtgccattgcactccagcctgggcaacaagagcaaaacgctatctcaaaaaaaaaaaaaaaatcaaacaaaaacacaaatgta

SEQ ID NO: 256538 - DNA, 201 bp, Homo sapiens
aggcagaaacagcatgcactgttgctgcatttcactgctggggagagaagcatgttcagtgcaaaccccaccctagaagacagaactttaaaagcctgcaygtggacacctccagactctaccttatgtgcctttcctcctgttgtgtggtgtttcactatggtaaccattgcatggatgcaactgcctctgaggtctgtg

SEQ ID NO: 256539 - DNA, 201 bp, Homo sapiens
gggcagagagacccttctctgagtgttcctctttatatagctctgactattggaacaatgggatcacatgccagaaaaactaaatatacaatgaaagccartcaggaggcaaggggaacccaagatgaaatgcaaatagtaacaaatgagcctggctctattacaaatgaatacatagccacactgagggcagtaggaaag

SEQ ID NO: 256540 - DNA, 201 bp, Homo sapiens
aatcccatgttaaaccaacagcgctccagatttgcaaggtacatttggtaattgggttaatacatgaatatgaatttccttatccccatcctcacactttstaggctaacagtatttctgccctccctttctgcaaggatcttcatgcacagattgtgttcagtttcagtcatgaagttattttcctggatcaaaaattgg

SEQ ID NO: 256541 - DNA, 201 bp, Homo sapiens
tctgtcttggaaaatcaagtgtaagacaagagcacaaaccaagaactggggcttaaaatttagaaacttgaaacaaaactataattttattgtctctcacmattctgggggttgactgggctcaaccaggcagttctcactctgggtctcattcagaggcagttagaagggggctgaggctggacccactccaaaggcttc

SEQ ID NO: 256542 - DNA, 201 bp, Homo sapiens; identical to SEQ ID NO: 51087

SEQ ID NO: 256543 - DNA, 201 bp, Homo sapiens
agattttatttactcctctatctccgaggcactagcacagtagctggtaggttgtgtttttaattttctgctatttgcattcctaacagcagacccaaaayactcctcaccttctaaccccctcttctgccttctttgtccatgttgacagatcagctatgattttaggcatatttatttttcatcagaaaattttacttc

SEQ ID NO: 256544 - DNA, 201 bp, Homo sapiens
agcaacatgcattaaaaaaatgacagttctctggtgaagaaacaaaaaggtgataaaatatgtaacaagtacagagttagcatggtggtgagggcagtagsggggaggtaaatattccagggagaaaaccttgaaggcagatcatcaggatggcgtttcaggtggtcatgactgcttttgcagaagcagcatgttgtgctt

SEQ ID NO: 256545 - DNA, 201 bp, Homo sapiens
catccagctttgttccattgctggtgaggaactgcgttcctttggaggaggagaggcgctctgatttttagagtttccagtttttctgctctgttttttcyccatctttgtggttttatctacttttggtctttgatgatggtgaagtacagatgggtttttggtgtggatgtcctttctgtttgttagttttccttctaa

SEQ ID NO: 256546 - DNA, 201 bp, Homo sapiens
tgaagatctcacaaagaagtcctaataggtagttcattgttgctagaatataaagtaggaaactggatgaaagcctggagaaggagataacatgggccaarttgaaacagtttcctttgatataagcagggtcccaggttcctgtgactgagcactctacatgttgcccccagaactgcaggattacagctaagaccatca

SEQ ID NO: 256547 - DNA, 201 bp, Homo sapiens
tatgacattttagcaaataacagaccatatgtatgacagtggtctgataagattgtaatggagttgaaaaattcctattgaccagtgacgttatagcatcrtggctcaaggcattacttgtgtttgtggtgacgctggtgtaaacaaacctactgcataactaatcatataaaagtctaaaaagtctagcataggccgggc

SEQ ID NO: 256548 - DNA, 201 bp, Homo sapiens
aaatttgtgggattgtttagagggcaattttatagcctgaactgtatatagtaggaaataaggatgtgagggtgatctggctgagacatctgtcaccccaytgattgccagagttgattcggctgatctggctgcctagacgggttccccttcctccctcaccgctccatgtgcatccctcccaaagctgcgtgctcggct

SEQ ID NO: 256549 - DNA, 201 bp, Homo sapiens
tgcaggcagatcaggaggtcaagagttcaagaccagcctggccaagatggtgaaatcccatctctactaaaaatacaaaaattagccaggcctggtggcaygcacctgtaatcccagctacttgggaggctcaggcagggaattgcttgaacctgggaggcagaggttgcagtgagctgagattgagctactgcactccag

SEQ ID NO: 256550 - DNA, 201 bp, Homo sapiens
tatatatgtgagcttgtatttatatattatatatattttttgttgaccaattgaaagtaagtttcaggctttgtaacacttcacccttaaatattaagtgkacattttcttttcttttttttttttttttttttttttttgagacagtcccactctgttgcccaggctggagtgcaatggtgcaatcttgactcactgcaa

SEQ ID NO: 256551 - DNA, 201 bp, Homo sapiens
ttgttcattcttgaaacatttaactggcgcccactttaccctggctctgaggattcagagagaaatcagacaggggccctgccctcctggagcccatgtcsggtgggccaggtgaaataaagtgacagttccaccctggcacaacccagagaaagggttcttacccactggccttgcaggggaaagcttctctgtttttct

SEQ ID NO: 256552 - DNA, 201 bp, Homo sapiens
accttatacttagtaacaaagactgctttgcttttaatttccccatctggccttcttctatgtaacttatatggtgccgttgatcattcttgtcttaatgtttgtgtgtgtgtgtgtgtgagagagagagagaaaggataccactgtctgttactcatgttgtgttttgtaagtaatcaaaggaccgtcgatgataaaagt

SEQ ID NO: 256553 - DNA, 201 bp, Homo sapiens
gcattagggaaatgcagatgaagatcacggtgagataccactggacccctattagaatgactaaaattaaaaattgattataccaagtatggctaaggacytgaagcaattggaattttcatacactgttggtggggatgtaaatagtggaatggctgtggaaaataacttcgcagtttcttaaaagttaaatatggccaa

SEQ ID NO: 256554 - DNA, 201 bp, Homo sapiens
ttcctgacctcaggtgatcctcctgccttggcctcccaaagtgctgggattacaggcatgagctatcatgtccggcctaagtgtacattttctaagaatamgaatattctcttatattaataaagaatgacatctcttttataaacaccccaatggtgaacacatttactaagaagttagatcttctcttttgttttttgc

SEQ ID NO: 256555 - DNA, 201 bp, Homo sapiens
ttttcaaactcttgctattatattgccattggcaaaagatgcagcagtgcttactacttccctccttctgtggctcgggcactttagtaatttagaaatgyttcttcttcatctagagaagtaaaaataattataatagaaaatgggtaatttgcagctacaatgccaggctgataatcaaaaccttgtaaatggaaacat

SEQ ID NO: 256556 - DNA, 201 bp, Homo sapiens
atcaaatgatattcatgagggagttggagaaatttgaagactggctggatattagatggtatttaaaaattattgtttaaatgttttcaggccaataatgktattgctgctgtgttaaaataaaatgtgtccttatctcttaggaaaaaattttgtacccttagtctagcagggggagaaaggatgtattccctgtatagc

SEQ ID NO: 256557 - DNA, 201 bp, Homo sapiens
acaattagtgttatctgtttatctgttgatggacatttacactacttgtttcccattttctactatttcaaataaagttgctatgacacttgtgtaaaaamaaaaaaaagatgttctcctgtataataaatacagtaccattatcactcctaagaaaattaatgaaaattacataatatcatctaatatactgtccatatt

SEQ ID NO: 256558 - DNA, 201 bp, Homo sapiens
tgcctcagactttggctacttactgtgtgtcttttttttctttttttaaataaaaacatggaagaccaccagggagtttggtgtaaaagccagtttttttktttgtttgtttgtttgtttgttttctttgcttgccatcctgcaacattagctgggttacaggaaacttccagaaaccacaggcaatctttaaagaccatc

SEQ ID NO: 256559 - DNA, 201 bp, Homo sapiens
ccacttgtgacagttgctcctgatctcttagatttttgtctttcaaggcctttgtttcccagggtgcacttcagccaacacaaccaagggaagaagaaaawgggcaaaagtgtgcatgaggtggtaggggccagactgtgcttgtgcccacagaaacaccaagcttctcccagcaaaagccccagaactgaagtctgcaaa

SEQ ID NO: 256560 - DNA, 201 bp, Homo sapiens
gaattcatactttattgttgtatcaaattaggatgcacacaatgcaaattgttctattatttgtgataactttcattgcttgattaaagcggtgattgccaaaaaaaaaagaatatcacaactaactttatgccagtaaatttcaaattttagatatgatgaataaaatcctggaaaatgtaagttgccaaaatcataatg

SEQ ID NO: 256561 - DNA, 201 bp, Homo sapiens
gtgcactttgtgtgtattaacccctttaatcttcataaccacccatcagaggtgggcactgtcataattcctcactggcagatgcagcaccatccacataragacttgaaatcacccacccagggtcacacagccagctggtggaggagctgagattcaacccaggccatctggctgcaagccctggctcttggccatcac

SEQ ID NO: 256562 - DNA, 201 bp, Homo sapiens
tggaagaatcagagaccctgcagcttgtttctagcatagacttggatttcctttgctgattagctcaccaagagggacacggatagtgccaggaaaatcastctggaactctaggaagggcttctccagtataatgcaagtacagatttccaccagcaggcagcagcagaacccagcagttacaaatgccacacctggagg

SEQ ID NO: 256563 - DNA, 201 bp, Homo sapiens
ggtggatatttttctttatttgttaacttgagaaaagtatccagaggctctcccagaagactaaccaggtgctcagaaagctttcagagatatcaaaaggyaattgtttttgaaagtgattaaatgagtgtgatactgactccagacagcataatggaacatgactctatataaaaagataatataaggtaaaaacaaaaa

SEQ ID NO: 256564 - DNA, 201 bp, Homo sapiens
attctgaattataatcattaaggaaattaaatcagtagtcaaaaatttgactactgagtctactcccactcaggatgaggcactggagatatttagcaccygcctgaattcgggctgccaggtggcgagcgtctgtctgtatgtgcaacaccactgctctctcttatgtaggaatgtaccaggtcatccagggtatcatct

SEQ ID NO: 256565 - DNA, 201 bp, Homo sapiens
taactaagtaaaggagaaaaaaaatcacacaatcaagagttgcagaaaaatcatttaataaaattcaacgttcatttatggcaggcactcttaaactaggmataacagggaatgtctcaaaataacatatttgtcaagatagactaggctagctgcaataataaatcctccagttttagaagcttaacacacaaaaatttc

SEQ ID NO: 256566 - DNA, 201 bp, Homo sapiens
gaaaagtgtgtttctgtgattgcatatgttgctttaaatgagtctagagctcatcatctcatggatggggaaactgatacccagagaaaggtcttggctcyggccgcacagcagcctgtgcccagttgaggccaggactcagacttctccatgacacctccagtctctcactttccattccacagttgctccagtgctttt

SEQ ID NO: 256567 - DNA, 201 bp, Homo sapiens
aggcaccaccagcctcacagacatgcctttgatttggggggcaggggaggtgtgggcccttgttccttctaggcaaggctcaaagtgaatagtattccttrctgtcattgttaatgaatcaaacggtacccaatgttgaaactgacatgcagaaattgtccccacaaaaaaatctattggaaaaaggaggtggtatcttct

SEQ ID NO: 256568 - DNA, 201 bp, Homo sapiens
tgtgagagcccatgccaatccaagggtgaatcctcagaaataaagtttaccaaaatcaaagcagtaaaacgataatgaaaacactgagtccagccaggctytaagaagactctgctgagtctctgagatgatctagaagggctttgaaccaggttaaatgtattcattcatccactccttccaacattcctgaattcagca

SEQ ID NO: 256569 - DNA, 201 bp, Homo sapiens
atgagttttaggtgcctggcaaaagcaaatatgaagtgtctctggaatatctatcttagatctggaggatctttcacaaataactgctcaggagcattcascagaaaacattgaaaaataactaggcacaaaagaaaacaatatgactaagaactatcagaaaaaacagacaacagaaataacctgtacagactttgaaac

SEQ ID NO: 256570 - DNA, 201 bp, Homo sapiens
gagttacatacttaggacttggatagagtcactcggtctaaaaattttgtaacagtgttgtaaatggatttggaagagatgtgtgaatgcgtttgtgagcsctgaagacaggactgccaggaattagaagtctgaggcccatgttgcccgagaagtgatctatcacatggtattgtcgtcatgaaataacaggcaccacca

SEQ ID NO: 256571 - DNA, 201 bp, Homo sapiens
actacaccctggagttacatacttaggacttggatagagtcactcggtctaaaaattttgtaacagtgttgtaaatggatttggaagagatgtgtgaatgygtttgtgagccctgaagacaggactgccaggaattagaagtctgaggcccatgttgcccgagaagtgatctatcacatggtattgtcgtcatgaaataac

SEQ ID NO: 256572 - DNA, 201 bp, Homo sapiens
ggtgcccgccattgccgagttagttgtttcattaggtaaacaaagcgtccaggaagctccaactgggtggagcccaccacagctcaaggaggcctgcctgmctctgaaggctccacctctgggggcaggacacagacaaacaaaaagacagcagtaacctctgcagacttaaaatgtccctctctgacgctttgaagagag

SEQ ID NO: 256573 - DNA, 201 bp, Homo sapiens
tctacctttcaaagcccttagctactcaaaggtagagcacactgcccccagaatgcctatggacatcccatttgtttatgtatctgtatcactgttaggakaaatcgtattgatttctttatactacaccctggagttacatacttaggacttggatagagtcactcggtctaaaaattttgtaacagtgttgtaaatgga

SEQ ID NO: 256574 - DNA, 201 bp, Homo sapiens
aacaaaaacacaaatgtattcccttcaagttttgtaggtcagaagtttaaaatgaaggggtccgcgttccttctagaggtcctggggacagtcatttcctygccttctccagcagctaggggccgtttgcattgcttggttcatggccccttcctagcacctctctcttctctgacgactgcttctttcacacatcttctt

SEQ ID NO: 256575 - DNA, 201 bp, Homo sapiens
tgctgcgtattttattggtgtgctgttatactctggggttgcaaattacgtgatgagctcggcaatttctggctgccagagccttgctttgcccatcactkctatgatttgcaggcctccttgggctcacccagagtcatatggattgctacattctgggctgcttgggtgtgacactttgggatggatgatgccttcagt

SEQ ID NO: 256576 - DNA, 201 bp, Homo sapiens
caacctccagttctgtagggcagagggatgaccttggtgtcaatgtgcaggaggccagcatatccctgttgacaggatcatggtggtaaagagggcccaayaggcaaggatgtcttttttaagtttcagattgagtcgggtgaagtggggctttggggagggatcttgtgtgccttcagggagccagaaagttcactttat

SEQ ID NO: 256577 - DNA, 201 bp, Homo sapiens
gaatttcctacggcagggtctcccgactttggttggtggaacactgcttccagaatagaagagtttaggaatgctggggtttagcacacctaatgtggttyctctactgaaggactttttagagcctttactatgtccatgtgcattgtgattctacaagaaagagaaataccttgcagtcattcttaccatttttttaag

SEQ ID NO: 256578 - DNA, 201 bp, Homo sapiens
tgaataaaatcctggaaaatgtaagttgccaaaatcataatgaagaagtgaaattctgaattataatcattaaggaaattaaatcagtagtcaaaaatttsactactgagtctactcccactcaggatgaggcactggagatatttagcacctgcctgaattcgggctgccaggtggcgagcgtctgtctgtatgtgcaac

SEQ ID NO: 256579 - DNA, 201 bp, Homo sapiens
tgggatagcacttgtgaatagccactgcacttcagcctgggcaacatagcaagattttgtctcttaaaaaaaaaaacaagtaagttgcaaaccacatatcygacaagggactagtgtttagaatatctaaagaactttaaaaatttaacaattaaaacacaatcaggaaatgaacaaaatacatgaagaacaatttcacga

SEQ ID NO: 256580 - DNA, 201 bp, Homo sapiens
tcctttcctaggccccatacaccaaggcctcctcaggcacaggtgcagtctctcttcaactgcaacccacatgaagttgcttccttgattttagagaccayattatgcagaagatacttatctttgcacactaggatcacatttggcccatgaaagtgtacacaccattagagaaaggcaagaactgaggcctcttgaggt

SEQ ID NO: 256581 - DNA, 201 bp, Homo sapiens
aaataaaaaacctctaagatattatcttccacttggagaagagcaacatgcattaaaaaaatgacagttctctggtgaagaaacaaaaaggtgataaaatrtgtaacaagtacagagttagcatggtggtgagggcagtaggggggaggtaaatattccagggagaaaaccttgaaggcagatcatcaggatggcgtttca

SEQ ID NO: 256582 - DNA, 201 bp, Homo sapiens
acagagcaggtgaaaactcctgggctgattaatagtgggatagcacttgtgaatagccactgcacttcagcctgggcaacatagcaagattttgtctcttraaaaaaaaaacaagtaagttgcaaaccacatatccgacaagggactagtgtttagaatatctaaagaactttaaaaatttaacaattaaaacacaatcag

SEQ ID NO: 256583 - DNA, 201 bp, Homo sapiens
aaaggacccaagtcaaacatctagaattaaatactacaacctgttagatgaaaaatacactataaagaataaaaaacagattagacattacagaagaaaakattagtgaacttgaagatgtaataataggaactatctaaaaatacaggaagaaaaaattttaaaaaagaaagaataacaatgagatacgggaaaacttga

SEQ ID NO: 256584 - DNA, 201 bp, Homo sapiens
ggcatgagaatcagttgaacctgggtggcttgcagtgagccgagatcatgtcactgcacttcagtccaggcaacagagcaaagccctgtctcgacaaacaraataaaacaaaataataacccagtgaaaaactgggccaaatatttgaacagacacttcaccaaagaagacatatggatgaaatattagtatatggaaaga

SEQ ID NO: 256585 - DNA, 201 bp, Homo sapiens
gccctgtctcgacaaacaaaataaaacaaaataataacccagtgaaaaactgggccaaatatttgaacagacacttcaccaaagaagacatatggatgaamtattagtatatggaaagatgctcaatagcattagggaaatgcagatgaagatcacggtgagataccactggacccctattagaatgactaaaattaaaaa

SEQ ID NO: 256586 - DNA, 201 bp, Homo sapiens
aaggccaccagctggagtcttagagaccttttgtttatccaaagagcctttataattaatctttatagtgagattgttatataaaagtgccaggtactagytcctagtaacacaagggctgaaatggatttcaaataaggcagtgacttgtccaaggcccatggcttgttggtctcagagctttcagaaccttaccttcta

SEQ ID NO: 256587 - DNA, 201 bp, Homo sapiens
agtaaaaaacatcaaactttaaaaaaaaaaaaaaaagactccacaaggttgcttcagttatacataagatacaatacattctttagggcaaaagacacaasaaataaatagtaagagaaattggaaactataaaattccacagagatttagaagacgtataaactaaataccatatatggaccttatctgaatcctgattc

SEQ ID NO: 256588 - DNA, 201 bp, Homo sapiens
tgaactgagtcccatctggaagcaaaggcactctgcagacactaaccagacagcttgtgtgaaatgaaatcaactttatgtgcatttcattcgttacttawagcacttgactaagtgaaattttaaaaagaaaaaaacctgcaaaattataatttgtgtgcctttcaagttcaggtattttatcatctcgataaatcttcc

SEQ ID NO: 256589 - DNA, 201 bp, Homo sapiens
gacttggatttcctttgctgattagctcaccaagagggacacggatagtgccaggaaaatcagtctggaactctaggaagggcttctccagtataatgcargtacagatttccaccagcaggcagcagcagaacccagcagttacaaatgccacacctggaggatggctgcctgggtttgacacctgacttatctgcctaa

SEQ ID NO: 256590 - DNA, 201 bp, Homo sapiens
atcttctctgttctctgacctgtaggaagagagggggtgtgtcccaggtcccagcaaatcctggaatgaaatgcacatcatagtacctcccccataggaakaccacataaaactacctaattgtttgaaagaccaaacactgttctcctttatactacactggttggatagataagaaattggagtaaaacttcacagatg

SEQ ID NO: 256591 - DNA, 201 bp, Homo sapiens
actcttgctagccatgagcagtcctctctttttcgaagcaatcagaaactatcagttttagacttggttccctgattttgctctagttcacgttcagagtyccaaactatggtctccagaatgtatcctctatgcatttttttttttttttttgagacggagttttgctcttgttgcccaagctggagtgcaatggcacag

SEQ ID NO: 256592 - DNA, 201 bp, Homo sapiens
aaacctgtttttgcatctgtaaaatgagaatcactgtagctaattcatagggctgttaggagcattaagcaagataagcatatgaagcactgacctcagtrtacaacatgcagtatggtaagtgcccggtcaataatggctgccttattattatatttattaatcttcccaatgatctccacagtggtaaggaaactgaag

SEQ ID NO: 256593 - DNA, 201 bp, Homo sapiens
actgacctcaagattggtgttctttgatctcacagacttaggacaaccaaactttcaaagatcctagtggcacttccctcacagtctatgtaaatttcagytttatctacctttcaaagcccttagctactcaaaggtagagcacactgcccccagaatgcctatggacatcccatttgtttatgtatctgtatcactgtt

SEQ ID NO: 256594 - DNA, 201 bp, Homo sapiens
accttccctgtggaaccagccccagctgctctcattaatatgaactctctccctctgccaaagcccactccaggttctttccagaatcatttttctagggrctaccaacttaatctgcttggccctatattgttgagggcctctttctctctgttcagaccctaaatcccactcacttgttctattctaaagtaactattt

SEQ ID NO: 256595 - DNA, 201 bp, Homo sapiens
agtaaattagaactgtaaggatccttccttagcatgatgcataatggcataacacttcaaaagcatccccacagaagcaagggaatagaaaagaatgcctrctcaccaccattattttccaatggtatcagtcaaaaataagaaatatagttatagaaaggagattcagttttcattacttgcaggtggtgttactgtgtc

SEQ ID NO: 256596 - DNA, 201 bp, Homo sapiens
agggggcacctgcactgagacttgcaggatgactggattattgaggttggagacatttctgggccaaggggcagactaaggaaagcacaagggcaggagayagcataagtgtgaggcactccatgccactagggcagactggagcctccagtgagaggcaggggcagccagagtgactcaggagggacaacacactgaggc

SEQ ID NO: 256597 - DNA, 201 bp, Homo sapiens
aattgagaatcactgttacagtcaacacagttttatcaaatgctgattaagatttttaaaattattatttggagtaagtttcatctccaaaatgtaccaaytgcatttgtgtttgattactaacactttccgaaaattatcaaaatcaaagttttttaagactgaaaatccagttataattgtaaagtcaggtggttttag

SEQ ID NO: 256598 - DNA, 201 bp, Homo sapiens
gttcataatgtgttttagttttcatttttaacttatcttcaaaatcacttgggagaaaaagatttacctttttagtagaggtaatcatttagtttttatawcctggttcttattacttaccttttactgtggaaagaagcagccagaagcattcagcagttacagtgttgcttcagaacctgttgccaaattaaaaggaaa

SEQ ID NO: 256599 - DNA, 201 bp, Homo sapiens
ggctggccctgcagacatccgactggatccgggtggacccttgggagagtgagcaggcacagtggatggagacagtgaaggtgctgaggtaatggtagtcrctctcctgtgtgatgaccaggggccacgggagatgtctgcagagcttacagggtaaaaggtagggcagattgtggggctgggtttctgccagaccttctc

SEQ ID NO: 256600 - DNA, 201 bp, Homo sapiens
ctcagcaacctgattctcagcccagatcctcatccagtgataggacttgctgactctgagcattcaggcccacttcaccagaagagggatgcatgcatttrgactacctgcctgcaacctggtccaaatgcatactggaatgcatgcagaatacagggagaatacaactccatttgcctgcagcctggtccagcatacctt

SEQ ID NO: 256601 - DNA, 201 bp, Homo sapiens
tctctgacgctttgaagagagtagtggttctcccagcacgcagcttgagatctgagaacgggcagactgcctcctcaagtaggtccctgacccccgagtarcctaactgggaggcatcccccagtggggcggactgacacctcacacggccgagtactcctctgagacaaaacttccagaggaatgatcaggcagcagcat

SEQ ID NO: 256602 - DNA, 201 bp, Homo sapiens
ccctgacccccgagtaacctaactgggaggcatcccccagtggggcggactgacacctcacacggccgagtactcctctgagacaaaacttccagaggaaygatcaggcagcagcatctgcggttcaccaatatctgctgttctgcagccaccactgctgatacccaggcaaacggggtctggaggggacctctagcaaac

SEQ ID NO: 256603 - DNA, 201 bp, Homo sapiens
ctgctccctggctcccactctgatctgcttttcactcttgccttgtctcccaattaataaggtaaatatctcttttagtcaccttccactctgcattagayccagtgggatccctgccctcagggatttacagtgtgctatgcaaggaaagaatggaggctacaaaatatagactaaaaatatttatatatagacaactat

SEQ ID NO: 256604 - DNA, 201 bp, Homo sapiens
aaacttccagaggaatgatcaggcagcagcatctgcggttcaccaatatctgctgttctgcagccaccactgctgatacccaggcaaacggggtctggagkggacctctagcaaactccagcagacatgcagctgagggtcctgtctgttagaaggaaaactaacaaacagaaaggacatccacaccaaaaacccatctat

SEQ ID NO: 256605 - DNA, 201 bp, Homo sapiens
gagtgcctctcctcctccaaaggaacgcagctcctcaccagcaatggaacaaagttggacagagaatgactttgacgagttgagagaagaaggcttcagamgatcaaactactccgagctacaggaggaaatctgaaccaatggcaaagaagttaaaatctttgaaaaaaatttagacgaatggataactagaataaccaa

SEQ ID NO: 256606 - DNA, 201 bp, Homo sapiens
cgaatggataactagaataaccaatgcacagaagtccttaaaggacctgatggagctgaaaaccaaggcacgagagctacctgacgaatgtagaagcctcrggagccgatgcgatcaactggaagaaagggtatcagtgatggaagatgaaatgaatgaaatgaaatgataagagaagtttagaggaaaaagagtaaaaag

SEQ ID NO: 256607 - DNA, 201 bp, Homo sapiens
tttagaaccactaggattggcaggaaatgggaggcaaagggacaaggtggaatgactgacaggcctgttcataatgtgttttagttttcatttttaacttrtcttcaaaatcacttgggagaaaaagatttacctttttagtagaggtaatcatttagtttttatatcctggttcttattacttaccttttactgtggaaa

SEQ ID NO: 256608 - DNA, 201 bp, Homo sapiens
ggctaaggaaataattagagattgggacaaagatttatgcagaaagatgtttatcacaacagtttttacaatggcaggaagtaaaagcaatatcaatgttyaaatataaaggaaagtatacctaaattatactgtatacatagcataaagaaactacataaaaggttttgatgatgtggagaaacacttatgaaggaagtg

SEQ ID NO: 256609 - DNA, 201 bp, Homo sapiens
tagaggaaaaagagtaaaaagaaacgaacaaagcctccaagaaatatgggactatatgaaaagaccaaatctacgtctgattggtgtgcctgaaagtgacrgggagaatggaaccaacttggaaaacactctgcaggatattatccaggagaacttccccagtctagcaaggcaggccaacattcaaattcaggaaataca

SEQ ID NO: 256610 - DNA, 201 bp, Homo sapiens
gagtgagcaggcacagtggatggagacagtgaaggtgctgaggtaatggtagtcactctcctgtgtgatgaccaggggccacgggagatgtctgcagagcytacagggtaaaaggtagggcagattgtggggctgggtttctgccagaccttctcagcaaatatccaagaagcagtttctacttagcaggagagagatcaa

SEQ ID NO: 256611 - DNA, 201 bp, Homo sapiens
taaattggataaagagtcaagacccatcagtgtgctgtattcaggaaacccatctcacgggcagagacacacataggctcaaaataaagggatggaggaasatctaccaagcaaatggaacaaaaaaaggcaggggttgcaatcctagtctctgataaaacagactttaaaccaacaaagatcaaaagagacaaagaaggc

SEQ ID NO: 256612 - DNA, 201 bp, Homo sapiens
caccagtacacaagaaaggtaatatatcttggccaaatagggcttatctcaggaatgcagtgttagtttaggattagaaaattaatcaatgcaatttaccmtattaactaagtaaaggagaaaaaaaatcacacaatcaagagttgcagaaaaatcatttaataaaattcaacgttcatttatggcaggcactcttaaact

SEQ ID NO: 256613 - DNA, 201 bp, Homo sapiens
aagacccatcagtgtgctgtattcaggaaacccatctcacgggcagagacacacataggctcaaaataaagggatggaggaacatctaccaagcaaatggaacaaaaaaaggcaggggttgcaatcctagtctctgataaaacagactttaaaccaacaaagatcaaaagagacaaagaaggccattacatcatggtaaag

SEQ ID NO: 256614 - DNA, 201 bp, Homo sapiens
acaccaaaaacaggatcccaaaatacatggagtagaaactgatagagctgaaaggcaaaatagacaaattcgcaattataggtagagatttcaacaccccrcaattgccaattactactgctagacagaactactggacagaaaatcagcaaggatatagaaataaagacactcaacaacagcatcaaattgatgtgtaac

SEQ ID NO: 256615 - DNA, 201 bp, Homo sapiens
aaaaccgctcagctacatggaaacggaacaacctgctcctgaatgactactgggtaaataatgaaatgaaggcaaaaataaagatgttctttgaaaccaaygagaacaaagacacaacataccagaatctctgggacacattcaaagcagtgtgtagagggaaatttatagcactaaaggccacaagacaaagcaggaaag

SEQ ID NO: 256616 - DNA, 201 bp, Homo sapiens
ttattcctttattatcattttcttagttttcagagagggtagagataaacaaggaattctgtctgtagggatggtatatcttcattctaactaatgtgctygtcgtgttacccagaacgaaaagacaagttcacgtccttaaggagcgctcagtgtcatgggaaaggcacaggcagatgaatcattttcatacaggtgctg

SEQ ID NO: 256617 - DNA, 201 bp, Homo sapiens
aaaccgctcagctacatggaaacggaacaacctgctcctgaatgactactgggtaaataatgaaatgaaggcaaaaataaagatgttctttgaaaccaatkagaacaaagacacaacataccagaatctctgggacacattcaaagcagtgtgtagagggaaatttatagcactaaaggccacaagacaaagcaggaaaga

SEQ ID NO: 256618 - DNA, 201 bp, Homo sapiens
cccacccagtgccctgcatactgcagttcctcattgcatacttactggcatgaattaatgaggattttgctgagagtggttgttgctctgccaccacattytgcaccacactgctttgcacttgttggtttttcgtgtcttttttccccccttagatttcagtgaacttgcatttcctctgggactaggcttaaaaatcag

SEQ ID NO: 256619 - DNA, 201 bp, Homo sapiens
atttcctctgggactaggcttaaaaatcagcacatgagataaattgcatataatcaacaatatccttgaacatcccttaaattacttcatgcaagatgatrtatttatacaactgatgtacacacactgcatctgtgtgtagacaatgtgcagacagtgtgttaaaatgtagagtgttggttaagatcatgggccctggaa

SEQ ID NO: 256620 - DNA, 201 bp, Homo sapiens
cacagggactaattttcaggtgcttagtgagaatgggcaactttaggttattttaaatgtcttgtattgcaaagtggaaaagatcatcttaaatttacatratcagaattgtgtacaaggaatccattagacatgtaaattaagagtattattagaaacaaacctcaaaaatgaaattgcattaactacatcaaacattta

SEQ ID NO: 256621 - DNA, 201 bp, Homo sapiens
atttcctaacgatcctgccccacgtgcttgtggcatcccagattaaattgcatcgtaaagataacaacccagtccaaagccttgtccttttcttaacaccmccacccccatcctcaccaactttggacaaccttgaggagaggaaaggtattttatggctcccagtttttcctctcagtgacttgcattttaaattgaagt

SEQ ID NO: 256622 - DNA, 201 bp, Homo sapiens
tcaacacttcgttaaagcatctcctattcctgtggccatgaccagacaggttaacataatactcttataactatgcatggaagaaagaaagcctcaagacmgtttctcctgttttcttttagacctttcttgattctttatgatgttatttcctaacgatcctgccccacgtgcttgtggcatcccagattaaattgcatc

SEQ ID NO: 256623 - DNA, 201 bp, Homo sapiens
gaggcactggagacatttagcacctgcctgaattcaggctgccaggtggtgagcatctgtctgtatgtgcaacaccactgctctctcttacctaggaatgyaccaggtcatccagggtatcatctctcctgtcaacgacacctatgggaagaaagacctcgcagcttctcatcaccgagtggccatggcccggctggccct

SEQ ID NO: 256624 - DNA, 201 bp, Homo sapiens
atagagggcaaaaatagtgcccctgttaattcctatagaaggggaagtcatgctgttcctcaactatatcctgatcctaactgtcctcactgctgtatggsacccttgcctgagcgccaccctcacagcctttgtctcagcagagaagcctttctctcagtgctacccgggttgtagaaggctctagaggagaagcacatg

SEQ ID NO: 256625 - DNA, 201 bp, Homo sapiens
agatacccccagaaagaagagtactagttctcttgacttgtggagcagaaatgggcacagatgtgctgtcagccaaatctctgtcctgtcacgggcaggayacaggaggccatgcctggcagcctgccaacacaaagccccccacccagccctggctcactgcccagctaagcttagctctcacttggttgctcctgggtc

SEQ ID NO: 256626 - DNA, 201 bp, Homo sapiens
attagaaaattaatcaatgcaatttaccatattaactaagtaaaggagaaaaaaaatcacacaatcaagagttgcagaaaaatcatttaataaaattcaaygttcatttatggcaggcactcttaaactaggaataacagggaatgtctcaaaataacatatttgtcaagatagactaggctagctgcaataataaatcct

SEQ ID NO: 256627 - DNA, 201 bp, Homo sapiens
gggattacaggcgtaagccaccacgtccagccctcctctattgtttttttatgatcgactcaacagatacccccagaaagaagagtactagttctcttgayttgtggagcagaaatgggcacagatgtgctgtcagccaaatctctgtcctgtcacgggcaggacacaggaggccatgcctggcagcctgccaacacaaag

SEQ ID NO: 256628 - DNA, 201 bp, Homo sapiens
gtagagatttcaacaccccacaattgccaattactactgctagacagaactactggacagaaaatcagcaaggatatagaaataaagacactcaacaacarcatcaaattgatgtgtaacagaactctccatcatccaacaacagcagaatatatatttttttcaagcacctatggaatattcactaagataggtcatatt

SEQ ID NO: 256629 - DNA, 201 bp, Homo sapiens
tcagcacccagcaggagttagtcctcccaacccccatttcttttaaacaggaagagaaaaagaaggagcatgtatgtcccatgtataacatgagctcagakgcgcagaaagataacttactttgctttctataacattcaacttgatcttaagccaccatttccatgaattgtgaaaaaatatgtcacttcaagggattcc

SEQ ID NO: 256630 - DNA, 201 bp, Homo sapiens
tttggagggcaagaaggagttttagatcaaattgttatttttattgactctcctctcctgggtgctataaaaaagcattgatttctcaatgcagggcctgycctatcaagatgagctaaaccatcacaggtgacacctgggtatccaacatgcccagcagagctgcctggagagagccctgtccttccaccattttcttct

SEQ ID NO: 256631 - DNA, 201 bp, Homo sapiens
attcatcagatgatctgtctgttccgttttgtgtctgcccatatccctcctgaagccctccaggtcctagctggacatccagctctctgtacccactataytgtcatcctgggattgcctttcactgtctccctggggattctctgtgcctgtttcctgattcaaaacccctgtttcttggatcccatgccttctgctttt

SEQ ID NO: 256632 - DNA, 201 bp, Homo sapiens
ttgggtttgattcatattattgttcacatttatgtctatgtaaatagtgtcaagaaaaccatgcagtgcactatgattccactgcctcccatataaacttkgggttttttcctagagttagtaattgttcatgtatttgttgccttagtttcctatgcctatcattaattcagtcccaattttaccaaaagatctctaaaa

SEQ ID NO: 256633 - DNA, 201 bp, Homo sapiens
ttggactacctgcctgcaacctggtccaaatgcatactggaatgcatgcagaatacagggagaatacaactccatttgcctgcagcctggtccagcatacmtttcccacctcattgccaaggtgatcttgtgacaccttgtcaaatgcctggataaggttctgtattcatggctgttgcttgcctgctcatctggaaactc

SEQ ID NO: 256634 - DNA, 201 bp, Homo sapiens
tcaggcaggagaaggaaataaagggtattcagttaggaaaagaggaagtcaaattgtccctgtttgcagatgacatgattgtatatctagaaaaccccatygtctcagcccaaaatctcctcaagctgataagcaacttcagcaaagtctcaggatacaaaatcaatgtacaaaaatcacaagcattcttatacaccaata

SEQ ID NO: 256635 - DNA, 201 bp, Homo sapiens
acaagcattcttatacaccaataacagacaaacagccaaatcgtgagtgaactcccattcacaattgcttcaaagagaataaaatacctaggaatccaacktacaagggatgtgaaggacctcttcaaggagaactacaaaccactgctcaatgaaataaaagaggatacaaacaaatggaagaacattccatgctcatgg

SEQ ID NO: 256636 - DNA, 201 bp, Homo sapiens; identical to SEQ ID NO: 51142

SEQ ID NO: 256637 - DNA, 201 bp, Homo sapiens
gataagtctaagtgtggtgatcaatatgttaatcagcttaatttaatcacaccacattgtatacttacatcaaaacatcatcttgtaccccatgaatgtawacaactataatttgtcaataaaatcaggtaaacaatggataacaatttagtataagtatgccccatgcaactcaaatttaactgggcattttgtaatttt

SEQ ID NO: 256638 - DNA, 201 bp, Homo sapiens
taacatctttctatagaataggaaactggatatttttctgaattaaatgaaaaagggattttttgctcatgaattctcatcatttagcttccacttataartgagaacatgcagtatttgattttctgttccttcgttaacatatttaaaagaaaatgaggaacttggtttctcttattcatgtgttgaattcagtggtgc

SEQ ID NO: 256639 - DNA, 201 bp, Homo sapiens
ctaaatgtagaattcatatatacctatagacatagcctaaagataattttatacaattatttaatacttttgtgcacaaaataaaatttgtgtacactgamccatcagaaagcaaaggtatcactgtctcagtcactcatgtaggcagtctgtggttgtctggcggaaaagatatattgaagctgaatggggcaaggaggg

SEQ ID NO: 256640 - DNA, 201 bp, Homo sapiens
ctctcgggttcaagcaattctcctgcctcagcctcctgagtagctgggactacaggtgcatgccatcatgcctggctaattttttattttgtattttagtrcagatggggtttcactgtgttagccaggatggtctcaatcccctgacctcgtgatccacccacctcggcctcccaaagtgctgggattacaggcgtgagc

SEQ ID NO: 256641 - DNA, 201 bp, Homo sapiens; identical to SEQ ID NO: 51153

SEQ ID NO: 256642 - DNA, 201 bp, Homo sapiens; identical to SEQ ID NO: 51156

SEQ ID NO: 256643 - DNA, 201 bp, Homo sapiens; identical to SEQ ID NO: 51155

SEQ ID NO: 256644 - DNA, 201 bp, Homo sapiens
aatcccagtgacttgggaggctgagatggaaggatcgcttgagcccaggagtttcaggcttcagtgagttatgatcatgccactgcactcctatgtgagtracagagatcccacctctaaaaataaaataaaaaaaatgcacatctgaggtttgcctccctgcctaggtggggacttggagtgggctttgagactgaactg

SEQ ID NO: 256645 - DNA, 201 bp, Homo sapiens
tttaaatgtcttcttggcgcagtcataaaaagaatgaaatcatgtcctttgtagcaaagccacatggatgcagctggagccattatcctaagccaattaaygcaggaacagaaaaccaagtaccacatgttctcactcgtaagtgggaattaacctttgagtactcatggacataaagatagcgacaacagaaactgggga

SEQ ID NO: 256646 - DNA, 201 bp, Homo sapiens; identical to SEQ ID NO: 51158

SEQ ID NO: 256647 - DNA, 201 bp, Homo sapiens
agatttttagtgctctagaactgcacagcctcttcaggtcaggcttagggcctactagttttgcttggtgaaatgaattatgcaactaggtaatgaatggycaccgttttacgttcagaactcgttcgcttctacctttacaaaagggacaacacagatgcattactaagctcttggctcataacgatccctggggtatat

SEQ ID NO: 256648 - DNA, 201 bp, Homo sapiens
tctttgaaatataatgaaattggctgggtgcagtggctcatgcctgtaatcccagcactttgggaggccaaagtgggcggatcacttgaggtcaggagttygagaccagcctggccaatgtggtaaaaccctgtctctagtaaaaatacaaaaattagccgtttgtggtggtgtgcacctgtaatcccagctacttgggag

SEQ ID NO: 256649 - DNA, 201 bp, Homo sapiens
cttgtcttgtctttttttttttttttttttttttttgtgacagtctcgctctgtcgccctggagtgcaatggcgtaatctcggctcactgcaacctctgcrtcctgggttcaagcaattcttctgtcttagcctcccaagtagctgggactacaggcacatgtcaccacacccggccaatttttgtatttttagtagagaa

SEQ ID NO: 256650 - DNA, 201 bp, Homo sapiens
agtcttttaaatgtcttcttggcgcagtcataaaaagaatgaaatcatgtcctttgtagcaaagccacatggatgcagctggagccattatcctaagccarttaatgcaggaacagaaaaccaagtaccacatgttctcactcgtaagtgggaattaacctttgagtactcatggacataaagatagcgacaacagaaact

SEQ ID NO: 256651 - DNA, 201 bp, Homo sapiens; identical to SEQ ID NO: 51161

SEQ ID NO: 256652 - DNA, 201 bp, Homo sapiens
tatgaaagggcaatgagtcttttgtgagatcagttgcaaatatttttctaatttttctttgaccctgcttttatttttttaactttgtttttgttttgtcrtgcatatctaatccacccatttctaatctataggtaaattattttaatcgttttaataacttgctcacctgttgaccacttgatttttttcactgaatga

SEQ ID NO: 256653 - DNA, 201 bp, Homo sapiens
ttatgttttaagttagacaaaacatttagtgtttgcatgtactattttatattttgaatatataaaacatttctgtgattcaaaagtcagaactatataawcaggaatagtcagagaagtctgactcctatatccatcccttccatgccttttccacctacctttcatagatgactgttttcattcattttttaatgtatc

SEQ ID NO: 256654 - DNA, 201 bp, Homo sapiens
aagggctaactgtaaaactcatatattagaagtaaattaaattttaattttttctttttcctaaaaggagaatgcaagcctacagttcctgactacgaaakagacaagctactattggcaaactggggacttcctaaagcagttctggaaaaataccacagttttggtgtaaaaaagatgtttgaatggcaggcagagtgc

SEQ ID NO: 256655 - DNA, 201 bp, Homo sapiens
ggtataaagattttaagtgctattgggcccttagtgattggttagccttaggctctgtagtactacacatggcttaaaacatttattaatgaattgtaccraatattacttttttcttataatcttgtggaataatcatgttttagctcctacaagtgctgggaagactcttgtggcagaattacttattttgaagcgggt

SEQ ID NO: 256656 - DNA, 201 bp, Homo sapiens
aatatttaaatataaatgtatttcagttcagcattgatagtctgcatttttaagataatccagaaatgtgaatactgttaagacaaatactagattttttytcctgattttatgtctttattctgcttgattttaggacgaataacctttacagaaccaaatattcagaatgtgccaagagattttgaaatcaaaatgcca

SEQ ID NO: 256657 - DNA, 201 bp, Homo sapiens
tttcttctggggtgaatttacctgcacgtcgtgtgattattcgaacccctatttttggtggtcgacctctagatattcttacttataagcagatggttggycgtgctggcaggaaaggagtggacacagtaggtaagtgagtttgaatttaattgtagcagcattgctgaaggacagtgtctacttgaaatttgactagtg

SEQ ID NO: 256658 - DNA, 201 bp, Homo sapiens
caggattttatattttttagatagatagtatcttaaaactcacctgaagaaaaaccagtacctggccgggcgtggtggctcacgcctgtaatcccagcacrttgggaggccgaggcaggtgcatcacgaggtcaagagatcgagactatcctggccaacatggcaaaaccccctctctactaaaaatacaaaaaattagcc

SEQ ID NO: 256659 - DNA, 201 bp, Homo sapiens
cgggtgtggtggcgggtgcctgtaatctcagctacttgggaggctgaggcaggagaatcacttgaaaccaggaggtggaggttgaagtgagccgagattgygccattgcactccagcctggacaaaaagagcaaaactctgtctcacacacacacacacacacacacacaaaataccagtacctatcaaacttgagaaata

SEQ ID NO: 256660 - DNA, 201 bp, Homo sapiens
tttatataaaatttttatgggttttcttttttttttttgagatggagtcttgctctgtcgcccagactggagtgcaatggagttgtctcggctcacggcascctctgcctcccgggttcaagtgattcacctgcctcagcctcctgagtacctaggattacagatgcccgctgccatgcctagctaatttttgtattttta

SEQ ID NO: 256661 - DNA, 201 bp, Homo sapiens
agtggaaaacaaagtttcttcattgtgccctatgtagctttaagaggctactgccaaaagcattaaaaatttacagcaaggggctgggtgtggtagctcaygcctgtaatcccagcactttgggaggccaaggtgggcggatcatctgaggtcaggagatcgagaccagcctggccaacatggggaaaccccatctctact

SEQ ID NO: 256662 - DNA, 201 bp, Homo sapiens
ttgttttgcaggaaaatatgttggggtgagtagttacttaagctttttttttattttggatagaatagtatgtgttcatactaaatctctctttaaaattyatttccaaatacttttcctgtctttaactcctcattttgggaaatgtaattttgtttttacaagtattaatatttaatattttctcccacctaattaagt

SEQ ID NO: 256663 - DNA, 201 bp, Homo sapiens
cattgtgccctatgtagctttaagaggctactgccaaaagcattaaaaatttacagcaaggggctgggtgtggtagctcacgcctgtaatcccagcacttkgggaggccaaggtgggcggatcatctgaggtcaggagatcgagaccagcctggccaacatggggaaaccccatctctactaaaaatacaaaaattagctg

SEQ ID NO: 256664 - DNA, 201 bp, Homo sapiens
atagttttatcaatacggtggtttaaaaaactccaagtaatagttttgagttgtcgatattactctcaaatttaattttgagactgtattatttacagaamagagattctagcttgctgtggaatttggacaagaattcaatcttaccttatatttttttggcaggacgttttaaataaattaaaggcattacatccttta

SEQ ID NO: 256665 - DNA, 201 bp, Homo sapiens
ctttaagaggctactgccaaaagcattaaaaatttacagcaaggggctgggtgtggtagctcacgcctgtaatcccagcactttgggaggccaaggtgggyggatcatctgaggtcaggagatcgagaccagcctggccaacatggggaaaccccatctctactaaaaatacaaaaattagctgggtgttgtggcgcacac

SEQ ID NO: 256666 - DNA, 201 bp, Homo sapiens
ttcatgtctaactgatgatgttgtttgcaccacagaggaaaatataagaagggtttcagcgtgaatcctagatgccaggcacagatggaggagagagctgyagacagaggaatgccattttcaattagcatgcgacatgcctttgtgcctttcccaggtaaggtggctgatagctttgaagcttctcattgctgtgagaat

SEQ ID NO: 256667 - DNA, 201 bp, Homo sapiens; identical to SEQ ID NO: 51150

SEQ ID NO: 256668 - DNA, 201 bp, Homo sapiens
agcattaaaaatttacagcaaggggctgggtgtggtagctcacgcctgtaatcccagcactttgggaggccaaggtgggcggatcatctgaggtcaggagwtcgagaccagcctggccaacatggggaaaccccatctctactaaaaatacaaaaattagctgggtgttgtggcgcacacctgtaattccagctactcggg

SEQ ID NO: 256669 - DNA, 201 bp, Homo sapiens
ttcttatttatgattgtgttttttttcttcatttatttctatggatttgggacaccatctcttgtcatttccttagtccagtacagctttgcttccacctscctcctgtgggctgatactgtcaaatatattgtgaattttatatgttatggacccaacaattcaattatatgcatattggcaggttgtagtggctcatgc

SEQ ID NO: 256670 - DNA, 201 bp, Homo sapiens
aaaatttacagcaaggggctgggtgtggtagctcacgcctgtaatcccagcactttgggaggccaaggtgggcggatcatctgaggtcaggagatcgagaycagcctggccaacatggggaaaccccatctctactaaaaatacaaaaattagctgggtgttgtggcgcacacctgtaattccagctactcgggagactga

SEQ ID NO: 256671 - DNA, 201 bp, Homo sapiens; identical to SEQ ID NO: 51151

SEQ ID NO: 256672 - DNA, 201 bp, Homo sapiens
actgagtactgtaggcagttgtaatacaatggtaagtatttgtgtatctagacatttctaaacatagaaaaggtaatgcaacatgctagatatttgatgaytatgatgtcactaggcaatattaatttttcagctccattataatcttatgggactgctgtcatatatgcagtttgtcattgaccaaaaatgtcattatgc

SEQ ID NO: 256673 - DNA, 201 bp, Homo sapiens
tggttaggttgtataatcctttttatgttgctggatttggtttgctggtattttattgctagtattttatttggtttgctagtatttttgtcataagatayattgacctgtagttctgttttctcgtgatgtctttgtgtggttttggagtaatactaactgcacagtatgatttaggatatatttcttcctcttctgttt

SEQ ID NO: 256674 - DNA, 201 bp, Homo sapiens
gagatggggtttcaccgtgttagccaggaaggtttcgatctcctgacctcgtgatccgcctgcctcggcctcccagagtgctgggattacgggcgtgagcyactgcgcctggctcacccagttaatttttgtattttcagtagagacggagtttcactgtgttggccaggatggtcttgatctcctgacctcgtgatctgc

SEQ ID NO: 256675 - DNA, 201 bp, Homo sapiens
aataagatgtctttaaacagaaacatgcataaaacaaggttttgtattgatgaagtgatgaaaatgtttttactagaggcttgcaggaacctaatcatctrttttccttggcagcaagggttcagtattctgtgttcgtggcagctttatagaacatgactaccacaaataccaaaaattgaccgtaatttattggtatct

SEQ ID NO: 256676 - DNA, 201 bp, Homo sapiens
ggcagttcattttgttgaagaatcaaagccccgaaagacctttaaacagcccaaagtggcttgtttatcttgctgctaatgctagttgattcattttctargtaatttatatgtgtgtgttttctttcttaagctgggctgttttgtagccattgcaagagtcaggtgttatattcatgtgatttttaaaaattggatatt

SEQ ID NO: 256677 - DNA, 201 bp, Homo sapiens
tctttttaatgggctagttagtgccatatttttcacatttttgtgcttttagttggtgattttgctgtttaacatgacccccaagcaaagtactgaaatgstatctaatgttccctagtgccttaaggctgtgatgtgccttatggagaaaatatgtgataagttttctttaggcatgaattataatgctgttggctggag

SEQ ID NO: 256678 - DNA, 201 bp, Homo sapiens
tcttttcttttgctgtctcttccctctattccagacttaggcaactgttgatctctgcttgctgtcactttagattacttgtgcttttctaaaaattccaygtaaataaagtcatacagtatgtatgtgtcttttgtatctagcttgctttcactcagcctggtgtgattgatgttcacccaggttgttaatttatcagtt

SEQ ID NO: 256679 - DNA, 201 bp, Homo sapiens
ccccattcccccaccacacaacagtccccagagtgtgatgttccccttcctgtgtccatgtgttctcattgttcaattcccacctatgagtgagaacatgyggtgtttggttttttgttcttgcgatagtttactgagaatgatgatttccaatttcatccatgtccctacaaaggacatgaactcatcattttttatggc

SEQ ID NO: 256680 - DNA, 201 bp, Homo sapiens
ccaggctggagtgcggtggcacgatctcagctccctgcaacctccacctccctgcaacctctgcctcccaggttcaagtgattctcctgcctcaacctccygagtagctgggattacaggcgcataccaccacatctggctaatttttgtatttttagtagagatggggtttcgtcacattgatcaggctggtctcgaact

SEQ ID NO: 256681 - DNA, 201 bp, Homo sapiens
ttatttcaatccatgttgaactgtagagattgttttctgaaataacttaaaatattttctgaatgataatccttgcaagtttcattcttgactaaagagayattaatttcttgcaggttttatttttggaattgaagttgcccccaaatagagagatgaaaaaccaaggcagcaagaaaactctgggttctaccagaagag

SEQ ID NO: 256682 - DNA, 201 bp, Homo sapiens
tacagacatgagccaccgcgcccggccagattatgctgttaaagagatagactgtgatgactcctttgtcaacagtcataacaatagtttcaaaaatcttyagaggcttgaagcagactctcaaatccatttgtaagtgaacacgtataatattttcgttatatatcaataaatatataaaaacctcctttttttaggtct

SEQ ID NO: 256683 - DNA, 201 bp, Homo sapiens
tcagacctctttcatatatttgagactgcttcatgtctaactgatgatgttgtttgcaccacagaggaaaatataagaagggtttcagcgtgaatcctagrtgccaggcacagatggaggagagagctgcagacagaggaatgccattttcaattagcatgcgacatgcctttgtgcctttcccaggtaaggtggctgata

SEQ ID NO: 256684 - DNA, 201 bp, Homo sapiens; identical to SEQ ID NO: 51145

SEQ ID NO: 256685 - DNA, 201 bp, Homo sapiens
agtgctggtattacaggtgtgagctaccacacccagccctcagtaaggtttttattaagtttcttagacggaaatactgatgttactgaaaatcagacctytttcatatatttgagactgcttcatgtctaactgatgatgttgtttgcaccacagaggaaaatataagaagggtttcagcgtgaatcctagatgccaggc

SEQ ID NO: 256686 - DNA, 201 bp, Homo sapiens
atcccagcactttgggaggccaaggtgggcggatcatctgaggtcaggagatcgagaccagcctggccaacatggggaaaccccatctctactaaaaatayaaaaattagctgggtgttgtggcgcacacctgtaattccagctactcgggagactgaggcttgaacctgggaggtggaggttgcagtgagccgagatcac

SEQ ID NO: 256687 - DNA, 201 bp, Homo sapiens
accagcctggccaacacagtgaaaccctgtctctgctaaacatacaaaaattagccaggtgtggtggtacacacctatagtcccagctacttgggaggctraggcaggagaatcacttgaacctgggaggcggaggttgcagtgagccgagacaggtccattgcactccagcctgggtgacagagcaagaccctgtctaaa

SEQ ID NO: 256688 - DNA, 201 bp, Homo sapiens
tctgctaaacatacaaaaattagccaggtgtggtggtacacacctatagtcccagctacttgggaggctaaggcaggagaatcacttgaacctgggaggcrgaggttgcagtgagccgagacaggtccattgcactccagcctgggtgacagagcaagaccctgtctaaaaaaaaagaaatactaccacgtactgtctata

SEQ ID NO: 256689 - DNA, 201 bp, Homo sapiens
gtagtctgatagatctacctctgatacttaatagagatacttgatatggctgagatagtagttgaatcacaaaacctatctgaacctcatatcttcacctrttaaataggatattataatccctatcttgaatattgtaagaattaaatatgatttttaaaaattatctggcatctagaaagttacttgataaataagtac

SEQ ID NO: 256690 - DNA, 201 bp, Homo sapiens; identical to SEQ ID NO: 51154

SEQ ID NO: 256691 - DNA, 201 bp, Homo sapiens
aaactatgttgttatgaaaatgtttaactaaagaaagtattagttgatactgaattttcagtaattcttaagaattattccaagtatatacattggttaamttctccaagtagtgaaggacattgtgatcatatttatgttttgcagtatgatgactcactagcttaccatattaaaaaaaaactcttaaaattgtctttt

SEQ ID NO: 256692 - DNA, 201 bp, Homo sapiens
gttgcatttttgtactttacaaaacgtagattatatccttgagccctcaataatttctccttgcttctttcctatctaaactctaccaggaatagaaggargcctgctgggccagatctgccattttgtggttagtgtatatgggtttttgttattatattctgctgctatgatgtctattttgggcttggacccagagtc

SEQ ID NO: 256693 - DNA, 201 bp, Homo sapiens
aaagatgtttgctggatatcagtctctgtggatgtaacccaccaaaagcaatctaatcattgtttcactcactgtgaaataaaaagtttgccgaaattcgyatcctaatgaacccttttatttgcattttatgtacttataacctttatttgttggatgactccctttcagatttgctatgggatcatttatggaatggga

SEQ ID NO: 256694 - DNA, 201 bp, Homo sapiens
attgtcaaaatagccacagttaacattcagaagcaattagagaccttccactcaaccttcaaatcccatggtcatcgagagggtatgctccaaagtgaccraacaggtttgttcatagatgaggcctgtgctgtaacatgatgagaataattgtatcagaaatgtaaatgggaagtattttttattttatttctcaacagt

SEQ ID NO: 256695 - DNA, 201 bp, Homo sapiens; identical to SEQ ID NO: 51243

SEQ ID NO: 256696 - DNA, 201 bp, Homo sapiens
ggcatggttccctgccaagaagcacttggcagcagtcatttcaaggaagttgtaactgaatacccagggatctaggatgtgcgttttcactagcggctaargatttgcctcagcagcccatgaaaagctctgattcacatcagagggctccatacctgcagggctcacactctatattaaagaccaagaggccattggtat

SEQ ID NO: 256697 - DNA, 201 bp, Homo sapiens
aggttgcgaaaattttctcccattctgtaggttgcctgttcactctgatggtagcttcttttgctgtgcagaagctcgttagtttaattagatcccatttrtcaattttggcttttgttgccattgcttttggtgttttagacatgaagtccttgcccatgcctatgtcctgaatggtattgcctaggttttcttctaggg

SEQ ID NO: 256698 - DNA, 201 bp, Homo sapiens
tcaggtttgtcaaagatcagatagttgtagatatgcggcgttatttctgagggctctgttctgttccattgatctacatttctgttttggtaccagtaccrtgctgttttggttactgtagccttgtagtatagtttgaagtcaggtagcttgatgcctccagctttgttcttttggcttaggattgacttggcgatgcag

SEQ ID NO: 256699 - DNA, 201 bp, Homo sapiens
acatttctgttttggtaccagtaccatgctgttttggttactgtagccttgtagtatagtttgaagtcaggtagcttgatgcctccagctttgttcttttkgcttaggattgacttggcgatgcaggctcttttttggttccatatgaactttaaagtagatttttccaattctgtgaagaaagtcattggtagtttgatg

SEQ ID NO: 256700 - DNA, 201 bp, Homo sapiens
ctgatcagttttgctcctttttcatgaagtaggattgtcacgaaagagaaaactgcaagggatgttctgcccaatcagaggaggcttcttcatccttcaastccatgatgaactcctatatgaagtggcagaagaagatgttgttcaggtatttttgcaatgcttgtgtccattccataggaagacaagacactgtattgt

SEQ ID NO: 256701 - DNA, 201 bp, Homo sapiens; identical to SEQ ID NO: 51165

SEQ ID NO: 256702 - DNA, 201 bp, Homo sapiens
caatggggttttctggatatacagtcatgtcatctgcaaacagggacaatttgacttcctcttttcctaattgaataccctttatttccttctcctgcctrattgccctggccagatcttccaacactatgttgaataggagtggtgagagagggcatccctgtcttgtgccagttttcacagggaatgcttccagttttt

SEQ ID NO: 256703 - DNA, 201 bp, Homo sapiens
tggatatactgttgatctctctagtaaattatccattttaggtccaggtttggtggctcacgcctttaatcctagcactttggaaggccaaggccaaggcwggagtgttatttgagttcaagaattcaagaccaacctgggcaacataataaaccccattttagttactgcactttttttttttttttttttttgagacat

SEQ ID NO: 256704 - DNA, 201 bp, Homo sapiens
cagatcttccaacactatgttgaataggagtggtgagagagggcatccctgtcttgtgccagttttcacagggaatgcttccagtttttgcccgttcagtrtgatattggctgtgggtttgtcatagatagctcttattattttgagatatgtcccatcagtacctgatttattgagagtttttagcatgaagcgttgttg

SEQ ID NO: 256705 - DNA, 201 bp, Homo sapiens; identical to SEQ ID NO: 51141

SEQ ID NO: 256706 - DNA, 201 bp, Homo sapiens; identical to SEQ ID NO: 51143

SEQ ID NO: 256707 - DNA, 201 bp, Homo sapiens
cgcatttacatttctagttcctcacagttgtagtttttgtgtgtgtgtgtggagaggtgaggtctcaatttgtcgcccagggtggtcttcaactcctggcrtcaagtgatacttccaacttggcctcccgaagtgctgggatcgtaggcatgagccactgcacccagcctcacagctgtacttcttgactggctcatcaag

SEQ ID NO: 256708 - DNA, 201 bp, Homo sapiens
taaaacagctaagggtcattttagaattggaaatagaattggaaattcatgtgtttcactaactacctaggtatgcatttgtagtttctgcatacttggtrtggaatcttgcttgctttgctctgtgccccatatttcgcctggctatgccttggttacttcaatacatttatgtgtgaacacattcatttgctctcctgt

SEQ ID NO: 256709 - DNA, 201 bp, Homo sapiens
gtgtcataaaatagagttttagtgttgctgatagtgttataaaaaatcacagtaacaaaatttctcaaacttttttggagtgatacttaacatgttttcaygttttagagaaattcaaccaataagtaaacaaaagatgtaaaatatatttggaaataaaggctttataagcatttttttttttttttttttgagacagtc

SEQ ID NO: 256710 - DNA, 201 bp, Homo sapiens
agtaggattgctagctgaggtaaatgcacaccaccgtactctgagatcctgctgtttttgtttcgcatttacatttctagttcctcacagttgtagttttygtgtgtgtgtgtggagaggtgaggtctcaatttgtcgcccagggtggtcttcaactcctggcgtcaagtgatacttccaacttggcctcccgaagtgctg

SEQ ID NO: 256711 - DNA, 201 bp, Homo sapiens
agaagagggattgacaatggacgcaagctaaggctgggaagacagttcagcactagtaaggtgctctttggggcagtcacagagcagggcagaacctaaaytacttttaacattttggtgtctagaaagaatgctgatgaaatcaacatcttagcctaccatttgaatttacccagatataaattaacacattggtttgtg

SEQ ID NO: 256712 - DNA, 201 bp, Homo sapiens
tatttaatacttttgtgcacaaaataaaatttgtgtacactgaaccatcagaaagcaaaggtatcactgtctcagtcactcatgtaggcagtctgtggttrtctggcggaaaagatatattgaagctgaatggggcaaggaggggcttttttcctttagagacgctgaataaactttgtgttgtacacctgtgttttgact

SEQ ID NO: 256713 - DNA, 201 bp, Homo sapiens
cagttgcaaatatttttctaatttttctttgaccctgcttttatttttttaactttgtttttgttttgtcatgcatatctaatccacccatttctaatctrtaggtaaattattttaatcgttttaataacttgctcacctgttgaccacttgatttttttcactgaatgactttgttattgtcaaatcagggcacacatt

SEQ ID NO: 256714 - DNA, 201 bp, Homo sapiens
tattacaaataatgatttttattcttagtctgttttcttatatgaatatggcaacatcagctttctcttaatattagttcatatagcttttttctatcccytttaacctttctaggtccctatcttcagacatgtcttataaacaaagtatagctcatttacttttcaggcttaactttttttttttttttttttttttta

SEQ ID NO: 256715 - DNA, 201 bp, Homo sapiens
ttattttttcatatttataaactacttagtagactgagataagagttagatttctcaatgttagatattaaatataatctattcaagttgtagtatgtatmtcctctgtggatttatgtgtagaacagccttatttattcagcatacctaaattaattaatgatagttgccctccagtataagaggtgcatgtaatatata

SEQ ID NO: 256716 - DNA, 201 bp, Homo sapiens
cgaattatataaactttggagaagtctttagagtggaaaggatgtaatctggaaataccctgtgatctgaatgtggatgttggataccccagctgataggytggttttggacaggagcaaaattaataaggaaacattttaaaggatgctgtatagtgtctgttccttagtaagcatgaaatattttcagttgttttgcag

SEQ ID NO: 256717 - DNA, 201 bp, Homo sapiens
tcatacaggatttattatgatcaaggatccctgcaggacttacgtgggggaaatcttcccttagaaaggttttgctcctgcctctgctgggtaccacactrctctgcatcaaaggaccgcagtagcctttgagagttttgtttcagaacaggagtctgagactctgctcctcatcctgttgttgtttcaaggatctatatc

SEQ ID NO: 256718 - DNA, 201 bp, Homo sapiens
gactggtactggtctgcatctcgggggttgaggacccctggtttagacttttaactggccacttggaatctgtccacacttgcacggtttagaggtcagtsagagatttgggcagagtttatatgaagaattacgagttgttcctctctagttatctgttctagactgccttaaatttccaactaatgtagttactcttaa

SEQ ID NO: 256719 - DNA, 201 bp, Homo sapiens
ttggagtgggctttgagactgaactgagggctgtttaaacttccacccttggcagaactagtccctgcactttgcaaaaatacagtatgataggcatcttycacctggggcaggtccttgaggctgagcttgagcactgtttaaaatcccaggtttggcagaactagcccctgcttctttccagaatgcactgtgatggtc

SEQ ID NO: 256720 - DNA, 201 bp, Homo sapiens
ggaatagcttcagaaggaatggtaccagttcctccttgtaactctggtagaatttggctgtgaatccatctggtcctggactctttttggttggtaagctrttgattattgccacaatttcagagcctgttattggtctattcagagattcaacttcttcctggtttagtcttgggagcgtgtgtgtgtcgtggaatttat

SEQ ID NO: 256721 - DNA, 201 bp, Homo sapiens
atatttaagccagtgaatgaagtgaaggatagactttggttctaattaattatttctgtattttctttgtagggattaatcaattcatgacagagacagtraagaattgtaaaagagacggatttgttcagaccattttgggaaggcgtagatatttgccaggaatcaaagacaacaacccttatcgtaaagctcacgtat

SEQ ID NO: 256722 - DNA, 201 bp, Homo sapiens; identical to SEQ ID NO: 51163

SEQ ID NO: 256723 - DNA, 201 bp, Homo sapiens
tttttctagattttctagtttatttgcgtagaggtgtttgtagtattctctgatggtagtttgtatttctgtgggatcggtggtgatatcccctttatccttttttttttgtgtctatttgattcttctctcttttcttctttattagtcttgctagcagtctatcaattttgttgatcctttcaaaaaaccagctcctgg

SEQ ID NO: 256724 - DNA, 201 bp, Homo sapiens
gtgtctctatttccttcagttctgctctgattttagttatttcttgccttctgctagcttttgaatgtgtttgctcttgcttttctagttcttttaattgkgatgttagggtgtcaattttggatctttcctgctttctcttgtgggcatttagtgctataaatttccctctacacactgctttgaatgtgtcccagagat

SEQ ID NO: 256725 - DNA, 201 bp, Homo sapiens
agcagatgggcattaaagaaaatgatgctgcatgctatattgactccttcaaatccagatacacaggtaatttatcttctagatagtattcttttcaaccrtcttaccatattatatttttaaaaatttgtgtaatggaattttcttttgaaatatcaattagtcagaagttttcatcaggcattgttaagggtaaataag

SEQ ID NO: 256726 - DNA, 201 bp, Homo sapiens
gagttctagtttgattgcactgtggtctgagagacagtttattataatttctgttcttttacatttgctgaggagtgctatacttccaactatgtggtcarttttggaataggtgtggtgtgctgctgaaaaaaatgtatattctattgatttggggtggagagttctgtagatgtctattagatctgcttggtgcagagc

SEQ ID NO: 256727 - DNA, 201 bp, Homo sapiens
aacctgggaggcggaggttgcagtgagccgagacaggtccattgcactccagcctgggtgacagagcaagaccctgtctaaaaaaaaagaaatactaccaygtactgtctataactgccaacattaaaaagattgacaataccaagtggtgacaagattatggaacaatagaaaacacagattgtggaggtgttactttgg

SEQ ID NO: 256728 - DNA, 201 bp, Homo sapiens; identical to SEQ ID NO: 51242

SEQ ID NO: 256729 - DNA, 201 bp, Homo sapiens
tggtcttttcacataatctcatatttcttggaggctttggtcgtttctttttactcttttttctctaaacttcccttctcgcttcatttcatcttccatcrctgataccctttcttccagttgatcgcatcggctcctgaggcttctgcattcttcacgtagttctcaagccttggctttcagctccatcagctcctttaa

SEQ ID NO: 256730 - DNA, 201 bp, Homo sapiens
aggaccctcagctgcaggtctgttggagtttgctagatgtccactccagaccttggttgcctggatatcaacagcggtgactgcagaacagcggattttcrtaaactgcgaatgctgctgtctgatcgttcctctggaagttttgtctcagaggagtacccagccgtgtgaggtgtcagtctgcccctactggggggtgcc

SEQ ID NO: 256731 - DNA, 201 bp, Homo sapiens
tgtttcaccatgttggccaggctggtctcgaactcgttgcctcaagtgattcgccttccttggtctcccaaagtgctgggtttacaagtgtgagctaccgygcccggccggatgtttttcaatgaaagttttatggctttcacttttttaaaggcttctacttaaagaatctgtcttagtgaagccttcctttattatgcc

SEQ ID NO: 256732 - DNA, 201 bp, Homo sapiens
aaatgtgtatcttttggttataggcgagagtatcttaatttgtaagaactctgagaaatcaaaaggcatagctctccttcagggttctctaaagcctgttygcagctgtctgcaaagacgagaaggagaagaagtaactggcagcatgatacgagctattctggaggtaagagagaatttactaaattaccatttgctctt

SEQ ID NO: 256733 - DNA, 201 bp, Homo sapiens; identical to SEQ ID NO: 51240

SEQ ID NO: 256734 - DNA, 201 bp, Homo sapiens
agctacatggaaaaaaatgacctaagatacagagctgaattccatcatattaagaggaaggttttaacttttgacatgtgatttcaaagttctaagttagracaaaatttttgtcatcctgctcaattatatgatatagaacttggattgtgtgatatagaaactttgtactagcttttctgaaatcacttctacttcagg

SEQ ID NO: 256735 - DNA, 201 bp, Homo sapiens; identical to SEQ ID NO: 51241

SEQ ID NO: 256736 - DNA, 201 bp, Homo sapiens
ttttttttttttaaagaaattagtgccagtttggttccaccttctttagatccaagcctgactttgaaagacaggatgtggtaccttcaatcttgcttgcraaaggaatctgataaagaatgttctgttgtcatctatgacttcatccagagctataaaattcttcttctttcttgtggcatctccttggagcaaagttat

SEQ ID NO: 256737 - DNA, 201 bp, Homo sapiens
ctgtgatggtcatctcctttcctgggcagggtcctcatgagctttgacgctgggcctggaggctggccatctaaagattcaagccaggtagaatttcctascacttctagaagtgatcagtttggctttgtcctgggctacactgtttagctgttagctggtacctctgattgggcaccaccactggcaggtacacagagc

SEQ ID NO: 256738 - DNA, 201 bp, Homo sapiens
ctctgagtttgggtgggactgctggctgggctctgctatcaggtgaacccacaagctgagctctgcagtcaggcagagttgctggtttggcactgcaatcrcctcttggctgggccccagagtgtattccttggccagatggtacccctatttgagatctgtacttggacagtgttgcaggctgggcctcgaggttaggtg

SEQ ID NO: 256739 - DNA, 201 bp, Homo sapiens
gctgcctttgctctgagtttgggtgggactgctggctgggctctgctatcaggtgaacccacaagctgagctctgcagtcaggcagagttgctggtttggmactgcaatcgcctcttggctgggccccagagtgtattccttggccagatggtacccctatttgagatctgtacttggacagtgttgcaggctgggcctcg

SEQ ID NO: 256740 - DNA, 201 bp, Homo sapiens
ccagtaatcctattttctattaagaatctcaccacaatgtattatataagccctctgttgcctttccagttcttagtcatttttcaacacactgtatcgcytagtagacgtgaaggatctcttaccacgcttttgatgatttattcccaggtttttcaccagtcttgtgctattagatttaatcagtgaagttcccttaag

SEQ ID NO: 256741 - DNA, 201 bp, Homo sapiens
ttgcctgtagctcacctcctgctgtgcggcccagttcctaacaggccatggactggtactggtctgcatctcgggggttgaggacccctggtttagacttytaactggccacttggaatctgtccacacttgcacggtttagaggtcagtcagagatttgggcagagtttatatgaagaattacgagttgttcctctctag

SEQ ID NO: 256742 - DNA, 201 bp, Homo sapiens
tgctgcctttgctctgagtttgggtgggactgctggctgggctctgctatcaggtgaacccacaagctgagctctgcagtcaggcagagttgctggtttgrcactgcaatcgcctcttggctgggccccagagtgtattccttggccagatggtacccctatttgagatctgtacttggacagtgttgcaggctgggcctc

SEQ ID NO: 256743 - DNA, 201 bp, Homo sapiens
gtaggattgtcacgaaagagaaaactgcaagggatgttctgcccaatcagaggaggcttcttcatccttcaactccatgatgaactcctatatgaagtggyagaagaagatgttgttcaggtatttttgcaatgcttgtgtccattccataggaagacaagacactgtattgtcaggccgacagctttgtttcctgtgcat

SEQ ID NO: 256744 - DNA, 201 bp, Homo sapiens
acaaattttgttatacctccacaacagagtagtatagatcaaggaatagtaattaaatattgatattcagtacaatattgatgattcttaaaaatgttttycttagcaaaagaaggcagacacaaatgagcatatacagtgtcattcaatttgtatgatattcatgaacatgaaaaacttaagagtatcataaagcagatg

SEQ ID NO: 256745 - DNA, 201 bp, Homo sapiens
ttctttgggagactccttctttctaggaggaagtttgtgagtttataccggatacttagggtaggtagcgaccagcaagtagttattttcctgatagttcytattcttgtgtgttttaatcttctcattaaaattcctcagagttactcagaatctctaaaaacattctcctatgacttagcgacatgctgatcagttttg

SEQ ID NO: 256746 - DNA, 201 bp, Homo sapiens
atcagtttggctttgtcctgggctacactgtttagctgttagctggtacctctgattgggcaccaccactggcaggtacacagagctaccaccaagatctrcatgctggttgccgtgagctctacctccttgctttgtttctgcctgaccccaggtgatctagccatgctgttacccagcatgttctctgtgaggcgagac

SEQ ID NO: 256747 - DNA, 201 bp, Homo sapiens
ctttaatctatctctcatattaaccaaccaggaggttggaggccggaagtcttagacgccagcgagagccgctccttccccacgagtctatggctttcggsttacttaagccacggagaactctatggttccggggcgggccgggaggtttgagtttgaagactggcgggaagatgtccgcagctgttgccaggccagggt

SEQ ID NO: 256748 - DNA, 201 bp, Homo sapiens
cctttgagtactcatggacataaagatagcgacaacagaaactggggactactagaagggaacaagggttgaaaaactaactatttaataatagggtactrttgctaagtacctgggtgatgggatcatttgtatccaaacctcagcattacacaatatacccaggtaacagaccttcacatgtacccccaaatctaaaat

SEQ ID NO: 256749 - DNA, 201 bp, Homo sapiens
atcctggaataaagacacctagatatctgccccgttctggaatttttagttttacgttttgtttttgttgttgttactcaaaaaacaaaggccatgtagtrgctcacacctgtaatcctagcactttgggaggcggaggtgggcagatcgcttgagctcagatgtttgagaccagcctgggccacattacgaaacctcatc

SEQ ID NO: 256750 - DNA, 201 bp, Homo sapiens
gttcatatagcttttttctatcccttttaacctttctaggtccctatcttcagacatgtcttataaacaaagtatagctcatttacttttcaggcttaacytttttttttttttttttttttttacaaatttgccaatttattgtgattcttgatgtatttctgcttatttgattattgatacacttgttctctattttcc

SEQ ID NO: 256751 - DNA, 201 bp, Homo sapiens
tcatgatgtctttatactattagaaattattaaggatttcaaagagctcttgtttttgtgggttatgtctatatatttaccatattataaattaaaacagrgaattttaaaacattaacatttaaagtaattacaaactcaccatattttgacatgtcacatatttttatgaaaataactacatctcttaagaactaaaga

SEQ ID NO: 256752 - DNA, 201 bp, Homo sapiens
ttgtatgggcacccaaagtatggtttctattgagtgcatactgcttttgcaccactgtaaaataaaaaaaaatcataaagtccaatcattttaagttgagsatatctgtattttaatgtgtctcttggtgagactataaaccccttgactattaggatcttgactttctttttactcaatattgtattcccattgcctgag

SEQ ID NO: 256753 - DNA, 201 bp, Homo sapiens
ttcatatagcttttttctatcccttttaacctttctaggtccctatcttcagacatgtcttataaacaaagtatagctcatttacttttcaggcttaactyttttttttttttttttttttttacaaatttgccaatttattgtgattcttgatgtatttctgcttatttgattattgatacacttgttctctattttcct

SEQ ID NO: 256754 - DNA, 201 bp, Homo sapiens; identical to SEQ ID NO: 51159

SEQ ID NO: 256755 - DNA, 201 bp, Homo sapiens
agaaaatatggctactttttccccattgcagattacttttttttttttgagatgaagtctcactcttgttacccaggctggagtgcaatggtgcgatctcrgctcactgcgacctccacctcctgggttcaagcgattctcctgcctcagcctcctgagtagctgggattataggcacccaccaccaggcccagctaattt

SEQ ID NO: 256756 - DNA, 201 bp, Homo sapiens
cacctggaaaatcgggtcactcccaccctaatactgcgcttttccaagggtcttagcaaagggcacatcaacagattatatcctgtgcatgactcggaggstaccatgtccatggagcctcgctcattgctagcacagcagtctgagatcgaactgcaaggcagcagcaaggctgggggaggggcgcccgccagtgctgag

SEQ ID NO: 256757 - DNA, 201 bp, Homo sapiens
tttttttttacaaatttgccaatttattgtgattcttgatgtatttctgcttatttgattattgatacacttgttctctattttcctactattttactttrtttctagtcactttttgttttgtaagtagttcattcacagttgtgcaatattctaactagtccttatctgcagttttggggatctaaatttcttcttggt

SEQ ID NO: 256758 - DNA, 201 bp, Homo sapiens
tggatcatgataggtgttattcttaggatgcagcctaatagttggtgttctgggttgcatctcagtccagctttccagtctggctgcaaatgtgagcactraactgtggacactaaaggaaagtatgaaaccatgttggcatatctggtggagcacctgttgattgttttttctaggctgagcgtcaagctatcaacacaa

SEQ ID NO: 256759 - DNA, 201 bp, Homo sapiens
gtaaagggtgcagtcagccatgatcgtgccactgtgctcagctcagtctgggtggcagagtgagatcctgtcgccacagatgcacgtgcgtgcgcgcgcgmacacacacacacacatacagagacacacacgcacacacacagaagaaatacatacctatagactctactacgatttgagaaaaaatgaagtccatatggc

SEQ ID NO: 256760 - DNA, 201 bp, Homo sapiens
tcagctcactgcaacctctggctcctgggttcaaggaattctcgtgcctcagcctcctgagtagctgggactacaggtgcctgccaccacacccagttaattttttttttttttttttttttggagacggagtctcgctctgtcacccaggctggagtgcagtggtgcaatctcggctcactgcaaactccgcctcctgat

SEQ ID NO: 256761 - DNA, 201 bp, Homo sapiens
tggactggcagtatgctggggtggaagggatgcctattatttttcactgcagaaggaacaaaagcattctggtaagtaatgagtatttggctaagtcactrtgtaattactgtaacatccattagggtagtgatcttatattttgagaataatttcctgatatttacctaggatttatttttagagttaaatttttttttg

SEQ ID NO: 256762 - DNA, 201 bp, Homo sapiens; identical to SEQ ID NO: 51167

SEQ ID NO: 256763 - DNA, 201 bp, Homo sapiens
caaacaaaaggcagcagaaacctctgcagacttaaatgtcccatcggacagctttgaagagagtagtggttctccccgcacggagtttgagatctgagaayggacagattgccccctcaagtgggtccctgacccccaagtagcctaactaggaggcaccccccagtaggagcaggctgacacctcacacggccagttacc

SEQ ID NO: 256764 - DNA, 201 bp, Homo sapiens
atatggacttttgaattagtgagaaattttttttgctctgaaattattaaggaattcacccacattttcttcaagtaattgtatagttgtgatccccctattttttttttttttttttttgagatggagtttcgctcttgtcacccaggctggagtgcaatggtgcaatctcggctcactgcaacctccgcctcctgggtt

SEQ ID NO: 256765 - DNA, 201 bp, Homo sapiens
ccttcatagaaattctggagtaggaaaatgcaattgacatactgaatagtacatcagagtctccttgctctggattagactttggcttaagagaatgttgkggctggtttcattttttttatccagaccacttaaattttctccatattagcaataagcctgttttgccttcttatcatttgtgtgttcagcgtagtaaca

SEQ ID NO: 256766 - DNA, 201 bp, Homo sapiens
agaatgttgtggctggtttcattttttttatccagaccacttaaattttctccatattagcaataagcctgttttgccttcttatcatttgtgtgttcagygtagtaacacttttaatttccttcaagaacttttcctttgcattcacaacttggctaactgtatggcacaagaggcctagctttcaacctatctcagctt

SEQ ID NO: 256767 - DNA, 201 bp, Homo sapiens
ttgtagttcattggacttttttaggataattattctggattctttctcatttcacagatcttcatttctttagggttcattgttggagctttgttagtttmttttgaaggtatcttggcttcctggttctttgtaatctgtgttcttgtgttggtatctgcacatttgaggagacagctacctctttggcttttataggtg

SEQ ID NO: 256768 - DNA, 201 bp, Homo sapiens; identical to SEQ ID NO: 51239

SEQ ID NO: 256769 - DNA, 201 bp, Homo sapiens
tcttctcagaaacttgcagtggctttctgtttcatttagaataaaagccagtgtcttcttagtagtctataaggtcctacatgatctacatcccccacccmtcttagtgctctgactctatctactatgttccctctcacttccttcacactggcctctgctgttttttaatacaacaagagtttctggcctcaggttctc

SEQ ID NO: 256770 - DNA, 201 bp, Homo sapiens
caataccaagtggtgacaagattatggaacaatagaaaacacagattgtggaggtgttactttggaaaacaatgtgggattatctactaaaattgaagatmttctgtgactcagtaatctgtggctcagtaattttattcttaggtatatatcctaaagaaatgtatgcatgtgtgtaccaaagggcataaccaagaatat

SEQ ID NO: 256771 - DNA, 201 bp, Homo sapiens
gaacacatctctcttgtgatagaacaagcagataaccatctatatcccaaatcactagggatatagaaaatctgattaatataatcagcaaatttgacctratggatatatattgaacaattacctcaaaacagcagagtacctgtgcatttgagttacacatggaacatttatcaaaaagttttccatatactggaccat

SEQ ID NO: 256772 - DNA, 201 bp, Homo sapiens
tttggtgaatgaatgagtaagtgctaaaataactcatcagacagtacaattttggagacagcttattgataggaaaaagaacatcatgtgtcattaggaartttcctattgtctccttaaattccttttcaccagaaagttgtcttttggtggggagaatttggggtggggagaataccagtacatgtggaaactatgttg

SEQ ID NO: 256773 - DNA, 201 bp, Homo sapiens
atcttgctgacatcttgttttcctttttttttttttttttttttttttttgagatagagtctctctctgttgccaggctggagtgcagtggcgtgatctcrgctcactgcaacctctgcctcctgggttcaagtgattctcgtgcctcagcctcctgagtagctgggactacaggtgcgtgccaccatgcccagctaattt

SEQ ID NO: 256774 - DNA, 201 bp, Homo sapiens
tttggagtgatacttaacatgttttcatgttttagagaaattcaaccaataagtaaacaaaagatgtaaaatatatttggaaataaaggctttataagcatttttttttttttttttttgagacagtctcactctgttgcccaggctggagtacagtggcatgatctcggctcagtgcaacctccgcctcccaggttcaag

SEQ ID NO: 256775 - DNA, 201 bp, Homo sapiens
agaaagtctatgtggtgtatggtaattttttttttttttttcgagatggagtttccctcttgttgcccaggctggagtgcaatggcgtgatctcggctcarcgcaacctctgcctcccaggttcaagtgattctcctgcctcagcttcccgagtagctgggattacaagcatgggccaccatgcctggctaattttgtatt

SEQ ID NO: 256776 - DNA, 201 bp, Homo sapiens
agctggccacagtttttctttcaccagttcagatgacatcgctgaggttgtatcatggggctagggatatagatacataatttttagagttaaaatgattktgtgtgtgtgtgtgtgtgtgtgtgtatttacctgaacaccaaaggtcagtaaaatgaaacagccagttaaccagattgctttgggaatattctagcatct

SEQ ID NO: 256777 - DNA, 201 bp, Homo sapiens
gtggtgcaatctcggctcactgcaacctccgcctcccaggttcaagcgattcttttgcctcagcctcctgagtagctgggattacaggtgcccaccaccaygcccagctaattttttgtatatttagtagagacagggtttcaccatgttgaccaggctagtcttgaacttctgacctcaggtgatcaacccgcctcagtc

SEQ ID NO: 256778 - DNA, 201 bp, Homo sapiens
gtagaggaaaagaaataatacagatcagagcagaaataaagaatgaaattgaaacaaagtatacaaaagaacaacaaaacaaaaagttggttattggttgtttttttttttttgagatggagtgttgctctgtcacccaggctggtgggcagtggcgtgatcttggctcactgcaacatctgcctcctgggttcaagcaat

SEQ ID NO: 256779 - DNA, 201 bp, Homo sapiens
ctaaaaatcagagtgcctctcccactccaaaggaactcagctcctcgccagcaatggaacaaagctggacggagaataactttgacaagttgagagaaggmggcctcagacaatcaaacttctccgagctaaaggaggaagtttggacccattgcaaagaagctaaaaaccttgaaaaaagattagacgaatggctaacta

SEQ ID NO: 256780 - DNA, 201 bp, Homo sapiens
tagttttgagttgtcgatattactctcaaatttaattttgagactgtattatttacagaaaagagattctagcttgctgtggaatttggacaagaattcartcttaccttatatttttttggcaggacgttttaaataaattaaaggcattacatcctttaccaggcttgatattagaatggagaagaatcactaatgcta

SEQ ID NO: 256781 - DNA, 201 bp, Homo sapiens
gttgatattcctatttatgaccttcagtgttctctgatcttagaatatactcttgatctctttatcacatatgttcctttgctgatattgttttcttgttmttactttcagaatattttccctgagttttccctttattgcttggataaattatttcttgtactaacaagtacagtgaaattttctttttttcttctgtca

SEQ ID NO: 256782 - DNA, 201 bp, Homo sapiens
cttaatatatatctgctcccttgttaacttacaccttgggccttgttaaatcttacaattttgcagggaaaaaacaaaagaaaatataaatacatctaaakaaatggagaattcgtctgtaaaaaaaattgaattcaacaaatattctatgaatgttctagggatgattacagtattttccaaccgtctgggctggcacaa

SEQ ID NO: 256783 - DNA, 201 bp, Homo sapiens
tgagccactgcacccagcccattattaatttgttttatgaaaagttttcatttccaaatacattctcttacctgtctagctaggtcagaagtacatttttygctttcttggagcctcaaatatatgctgtgtgatatcagtcaaaaaacataaaccacattgttctttttgtctttgattactgaatacttggcaaatgtt

SEQ ID NO: 256784 - DNA, 201 bp, Homo sapiens
ctattattgtattatgaccatctgtattacaaataatgatttttattcttagtctgttttcttatatgaatatggcaacatcagctttctcttaatattasttcatatagcttttttctatcccttttaacctttctaggtccctatcttcagacatgtcttataaacaaagtatagctcatttacttttcaggcttaact

SEQ ID NO: 256785 - DNA, 201 bp, Homo sapiens
gctggtctcaaagtcctgacctcagatgatctgctcgacttggccttccaaagtgctgggattacaggcgtgagccactgcgcccagcatctttacatgctttttttttttttttgaaaatttgtattattttaattatttttatatacagaaaactcaacagtgtacatttaacccagtttagtggcaagttctttagcc

SEQ ID NO: 256786 - DNA, 201 bp, Homo sapiens
tatgttgatattcctatttatgaccttcagtgttctctgatcttagaatatactcttgatctctttatcacatatgttcctttgctgatattgttttcttrttcttactttcagaatattttccctgagttttccctttattgcttggataaattatttcttgtactaacaagtacagtgaaattttctttttttcttctg

SEQ ID NO: 256787 - DNA, 201 bp, Homo sapiens; identical to SEQ ID NO: 51157

SEQ ID NO: 256788 - DNA, 201 bp, Homo sapiens; identical to SEQ ID NO: 51238

SEQ ID NO: 256789 - DNA, 201 bp, Homo sapiens
caaagttcaaaaaatagccataattttattaccataacaaccactatcatctcttgtctgcttttaagcaaagtaaggcaacttaaaatctctttagcagmtatcttatggaactatattgggattttgcaaatgtgtatcttttggttataggcgagagtatcttaatttgtaagaactctgagaaatcaaaaggcatag

SEQ ID NO: 256790 - DNA, 201 bp, Homo sapiens
catgatcgtgccactgtgctcagctcagtctgggtggcagagtgagatcctgtcgccacagatgcacgtgcgtgcgcgcgcgcacacacacacacacatayagagacacacacgcacacacacagaagaaatacatacctatagactctactacgatttgagaaaaaatgaagtccatatggcaacttaaagcaaaaggat

SEQ ID NO: 256791 - DNA, 201 bp, Homo sapiens
atctgtattttaatgtgtctcttggtgagactataaaccccttgactattaggatcttgactttctttttactcaatattgtattcccattgcctgagggytggagctcagtaaatattagttgaatgaatagtaagtatttctttcacctttcatcattaggagtttattttttcttctttttttcctttcttttgttat

SEQ ID NO: 256792 - DNA, 201 bp, Homo sapiens
aatttaattttgagactgtattatttacagaaaagagattctagcttgctgtggaatttggacaagaattcaatcttaccttatatttttttggcaggacrttttaaataaattaaaggcattacatcctttaccaggcttgatattagaatggagaagaatcactaatgctattaccaaagtggtctttccccttcagcg

SEQ ID NO: 256793 - DNA, 201 bp, Homo sapiens
tcacctgtattgttcctttttactcaattcagagtctgtttcaggaagtaggaataaaagtagacggttatatgggcagcacctctccatcaaggcatttytcttcattggatattgcagtctgcacaattgagagagccaatggtctgatcaatcgcctcatagaggaaaataagatggatctgttaggtaagaaagtta

SEQ ID NO: 256794 - DNA, 201 bp, Homo sapiens
attccattttattgtaggcttctttaaaagtgctaaaactttgtacagttcttgtcatcatcagaaaattcaaaactatggctcctcagggctcagtaccrtgttacagaggattggtaactagctgaatgtcttggcctctattccttagcaacctgctgactatcctcctttctgttttccttttctttttcctgttgc

SEQ ID NO: 256795 - DNA, 201 bp, Homo sapiens; identical to SEQ ID NO: 51146

SEQ ID NO: 256796 - DNA, 201 bp, Homo sapiens
aaaaagaacaaaactggagaaatcacattacctgacttcgaattatgctacagacatatagtaaccaaaatgacatagtactggtataaaacaggcacaawgatcagtagaacagaatagagaacccagaaagaaacccacacatctacagtgaactcattttcaataaaggtaccaagaacatgcactggggaaaagaca

SEQ ID NO: 256797 - DNA, 201 bp, Homo sapiens
gaataaagacacctagatatctgccccgttctggaatttttagttttacgttttgtttttgttgttgttactcaaaaaacaaaggccatgtagtagctcayacctgtaatcctagcactttgggaggcggaggtgggcagatcgcttgagctcagatgtttgagaccagcctgggccacattacgaaacctcatctctaca

SEQ ID NO: 256798 - DNA, 201 bp, Homo sapiens; identical to SEQ ID NO: 51147

SEQ ID NO: 256799 - DNA, 201 bp, Homo sapiens
gttctggaatttttagttttacgttttgtttttgttgttgttactcaaaaaacaaaggccatgtagtagctcacacctgtaatcctagcactttgggaggyggaggtgggcagatcgcttgagctcagatgtttgagaccagcctgggccacattacgaaacctcatctctacaaaaaatataaaaattatcctggcatcg

SEQ ID NO: 256800 - DNA, 201 bp, Homo sapiens
gggtctcactatgttgcccaggctggtttcaaactcctggtcttaactgatcatcttgccttagcctcctgagtagctgagattacaggcatttaatataytagaagttgggtatagctcagatgacagaggactagagaatacctctcatgttacattgacccccttccctggagtagacctttttcattttcttagata

SEQ ID NO: 256801 - DNA, 201 bp, Homo sapiens
ggtctcgtaccttctgcatgtagttagaggccagtaactctcatttgtttctttgcttttcgtggtggttacgggtgtccctggagatttctcatgctgaytgagaccagcagtgcctcaaataatgtttgtgtggagctggggaaggtgggccagggttgcttagattcctagtgactcaatactggaagctgaagtctt

SEQ ID NO: 256802 - DNA, 201 bp, Homo sapiens
atggaaattgtgttcagaaatagccctgccctaccatcatatactaggagaaaggaggaaattatgctctattagaaaccctaggctatcttgcataatgyttctcaatctgaaataattttttacagaataccaatacgttaagaagagctacttccctgatctacctattatgggcagcccattttatgaagttagcat

SEQ ID NO: 256803 - DNA, 201 bp, Homo sapiens
tttgttgtggtataatttacgtataataattagattcaccctgaaaaaggtatatagttctgtgaattttgacaaatgcatatggtcataaaatttacacyacaaccaagatatagaaccattactctatcatcccaaaaagttcttttatgctctttttaaatcaaccctgtcccttatcccttatcccccttgtattgg

SEQ ID NO: 256804 - DNA, 201 bp, Homo sapiens
tgttaagggcctattatctatcagcaactgtgcaagcttttctgtagaatgaaaaggaaaattaagcttcctattcttaagtactcagagcaaaataagaraggcatgaaagcaccattttggattatgtgccaggtgctgtaggaacactgaggaacacactccacggtgggcagatgtcagggtggctttacccatatt

SEQ ID NO: 256805 - DNA, 201 bp, Homo sapiens
gtggtgtattagtccgttgtcatgctgctaataaagacctacctgagactgggtgatttataaaggaaggaggtttgatggactcacagttccacattgcyggggaggcctcacaatcatggtggaagatgaaggagaagcaaagggacatcttgacatcttatatggtggctggcaagagcttatgcaggggaactccca

SEQ ID NO: 256806 - DNA, 201 bp, Homo sapiens
ttgcatctgattgacaaagctggttcatctttttttagaagtattaatttgactttgaagcagaaacatccattacaaaacaatgtctatacaagttaagkaaatttactaattcttatgttactcattattacaagttaagtatcctttatctcaaatccttgggaccaaaagtatttcagattttggaatatttgtgta

SEQ ID NO: 256807 - DNA, 201 bp, Homo sapiens
ttccggggcgggccgggaggtttgagtttgaagactggcgggaagatgtccgcagctgttgccaggccagggttctcccgagagggaggacgctgggactstggcttgccctgatcggccgagaagagtttgccatgaatcttctgcgtcggagtgggaaacggcggcgttcagaatcaggctcagattcgttctcgggaa

SEQ ID NO: 256808 - DNA, 201 bp, Homo sapiens
gaaagtgtagatggtggtgcataggccacacaaagacagcttctgtttgtccctgagatattcctccgaggagggggcagctgtgagttatcaaccaacayggcagccaggggtcgggtcaaacaaccagtaaaagggatctgggaagggcagtatcataaactgtaaatgtctgtttgtaaaaagatggttaaaagacta

SEQ ID NO: 256809 - DNA, 201 bp, Homo sapiens
atcaataaatatataaaaacctcctttttttaggtcttacttttgaggagagggatatcattgaaggagcctttcgtcaaggtctcattcgggtcttggcrgcaacttctactctttcttctggggtgaatttacctgcacgtcgtgtgattattcgaacccctatttttggtggtcgacctctagatattcttacttata

SEQ ID NO: 256810 - DNA, 201 bp, Homo sapiens
cctggtcggggtcctgcggaggctggctgcctgctgggagcaccagcgggctcctgaggtctacatggcctttaccgtccgcaacccagagacgtgccagstgttcaccaccgagctaggtgagcccccacgcccacccgggcctgcatggtccccgagctgtccctgcaggactccagtggaagtgaaagaactgggtgc

SEQ ID NO: 256811 - DNA, 201 bp, Homo sapiens
ctttaccgtccgcaacccagagacgtgccaggtgttcaccaccgagctaggtgagcccccacgcccacccgggcctgcatggtccccgagctgtccctgcrggactccagtggaagtgaaagaactgggtgccagcaaaaagctaggatgccccacactcccacaccatgcggggaactcgggcagaggccggtgagcagg

SEQ ID NO: 256812 - DNA, 201 bp, Homo sapiens
ggtgttctgtcattgtcccatctcaccgacaaaaacactaggacacacagaggccaagagacccccgagctcccgcagactgcagcccggccacctggctytagtgcctccacactacacccaagccccccattgccaccagactctgccccagctccccctgagcacagcccctcctggcagccatgtgcaaagatgcac

SEQ ID NO: 256813 - DNA, 201 bp, Homo sapiens
cacacagaggccaagagacccccgagctcccgcagactgcagcccggccacctggctctagtgcctccacactacacccaagccccccattgccaccagamtctgccccagctccccctgagcacagcccctcctggcagccatgtgcaaagatgcacccgcagcagcctctgcctgcacacagagacatggacgacccag

SEQ ID NO: 256814 - DNA, 201 bp, Homo sapiens
cacagaggccaagagacccccgagctcccgcagactgcagcccggccacctggctctagtgcctccacactacacccaagccccccattgccaccagactytgccccagctccccctgagcacagcccctcctggcagccatgtgcaaagatgcacccgcagcagcctctgcctgcacacagagacatggacgacccagtg

SEQ ID NO: 256815 - DNA, 201 bp, Homo sapiens
actacacccaagccccccattgccaccagactctgccccagctccccctgagcacagcccctcctggcagccatgtgcaaagatgcacccgcagcagcctytgcctgcacacagagacatggacgacccagtgcctgtccacgtggggcagcccgttaactacagagccaacaaacaagccagcacgcgaagacatactgg

SEQ ID NO: 256816 - DNA, 201 bp, Homo sapiens
cacacagagacatggacgacccagtgcctgtccacgtggggcagcccgttaactacagagccaacaaacaagccagcacgcgaagacatactgggttccaygacagagtcccgcacaacctcgcacaggaggctggccaggcgtggggctcaggcctgtcatctcagcactttaggaggctaaggcaggaggactacttga

SEQ ID NO: 256817 - DNA, 201 bp, Homo sapiens; identical to SEQ ID NO: 51282

SEQ ID NO: 256818 - DNA, 201 bp, Homo sapiens
agggatccttttcccagaagctccacccctcggcagctgcagtcaggccctatctgggcctttccagaagcaactcaggagccccaagacctgcaggggtrtgtgcaccctgacccctgatgcatagccctgcacctgcaaccagctggcctcgggctgcaaacaaggcggggtaagcactggcctggcacgcgaccaccc

SEQ ID NO: 256819 - DNA, 201 bp, Homo sapiens; identical to SEQ ID NO: 51263

SEQ ID NO: 256820 - DNA, 201 bp, Homo sapiens
caggggtatgtgcaccctgacccctgatgcatagccctgcacctgcaaccagctggcctcgggctgcaaacaaggcggggtaagcactggcctggcacgcsaccacccactgggtgggcccagccttctgtctgtgttgtgcacaggggacaagaggactccctctgccctggcacagcccccaaaccacagggcgcaggt

SEQ ID NO: 256821 - DNA, 201 bp, Homo sapiens
cagggcgcaggttccaagccgcccctgccctgccacagcccccagagcacatggcgcgggttccaagccgcacctgccctgccacagcctccagagcacayggcgcgggttccaaaccagtcctgggagcctagaggccagaggagggaggagagcaggaccagcagctggcccagaccccgcctcttcccacaccgcttc

SEQ ID NO: 256822 - DNA, 201 bp, Homo sapiens
cagctcctgcgcttttgttttctatctaagacttagacaaagacatcagaatatacaaaaatctgcatgaggggggaaatctagggaatgttttttaaacyatcctcagcaaaaacagagatgacaggtgcaaaacagcttctagcatttggtggatgctcagagactttcttttttgcattcctgaggcctgtcctgccc

SEQ ID NO: 256823 - DNA, 201 bp, Homo sapiens
tctgaactgtgttgctaactgccctgcctttcaactcaagacacaataactttgaactaaaataattatatttttgttgttttccactctgtccccacgtytatatcaccacaacccccaatcccaccccgcaggagctaactcctccttcctgtccccgcaagatcaaaactcctcctgcaagccccgctagctctgtct

SEQ ID NO: 256824 - DNA, 201 bp, Homo sapiens
tgagtggtgaagcagccagccatgggaagggtttggggaacaggatatgcaaaggccctgtggtggaaacaagccagctgtggttgaggaacaacagcaakgcagccagtgtggctggagtggagtgagcagtgtgggccaggggtgagggagaacaggccagagagagggattaggaccaggtcttgtagggccttttat

SEQ ID NO: 256825 - DNA, 201 bp, Homo sapiens
gagactttcttttttgcattcctgaggcctgtcctgcccactcctgtctcctctagacctaaatgggcccttgctttgcccagggtggggtttggactcargtgcatctgcatgcaggtgacagccaggatcaccacccggcccagccacagcgtgaccttggccttgagggccaagtgcagatcaccctgcatcctgggt

SEQ ID NO: 256826 - DNA, 201 bp, Homo sapiens
tcacgatcattttcatgactttttaaaggcagtaatcgttctggtcactgggacacagctgccctcgcccattctaaaaagtcagcaccctcaggcccgcrggtaaccacctcctcctgagcacggtgaccaggtcaaaggctgtccctcgggcctcagtgttctcatctgtatgtcgagcactgcacagaatcagctcat

SEQ ID NO: 256827 - DNA, 201 bp, Homo sapiens
gggtggcctctcctctccctggggacctgccattctcagcacaggcgcatggcaggcagcagcctcccttctgccagcagaggggcttaatgcaccctgcyccatttgtaattcatgtgcggtgagctcactgggatgagtcagtttggatatatattcctccctgggtctgccccattttatggggtgttgcttaatcat

SEQ ID NO: 256828 - DNA, 201 bp, Homo sapiens; identical to SEQ ID NO: 51248

SEQ ID NO: 256829 - DNA, 201 bp, Homo sapiens; identical to SEQ ID NO: 51249

SEQ ID NO: 256830 - DNA, 201 bp, Homo sapiens
agctccgagggaatgtccttctcaatggcctctcattagaggcagacatcactgccaacttagatagccccagggtgacagtggcccagctggactgggaygtagcgacggtccatcagctctctgccttccagccagatgttgtcattacagcaggtaatgcccagccccgggcatcctgtgcaggcggtgtccttgcag

SEQ ID NO: 256831 - DNA, 201 bp, Homo sapiens; identical to SEQ ID NO: 51273

SEQ ID NO: 256832 - DNA, 201 bp, Homo sapiens; identical to SEQ ID NO: 51276

SEQ ID NO: 256833 - DNA, 201 bp, Homo sapiens; identical to SEQ ID NO: 51277

SEQ ID NO: 256834 - DNA, 201 bp, Homo sapiens; identical to SEQ ID NO: 51280

SEQ ID NO: 256835 - DNA, 201 bp, Homo sapiens; identical to SEQ ID NO: 51283

SEQ ID NO: 256836 - DNA, 201 bp, Homo sapiens; identical to SEQ ID NO: 51286

SEQ ID NO: 256837 - DNA, 201 bp, Homo sapiens; identical to SEQ ID NO: 51288

SEQ ID NO: 256838 - DNA, 201 bp, Homo sapiens; identical to SEQ ID NO: 51267

SEQ ID NO: 256839 - DNA, 201 bp, Homo sapiens; identical to SEQ ID NO: 51290

SEQ ID NO: 256840 - DNA, 201 bp, Homo sapiens
aagcaactctcgtgcctaagaagctgggactacaggcacacgccaccatgcctggctaatttttgtatttttagtagagatagagtttcaccatgttggcsaggctggtctcgaactcctgacctcaggtgatccgcctgcctcagcctcccaaagtgctgggattacaggcatgagccaccacacctggcctaggatgga

SEQ ID NO: 256841 - DNA, 201 bp, Homo sapiens
cgaagtgagtattttatatgccagctggctggtattacaccattccatcccaaatctcccctccaaacttggtgaaaatcatctgaccatttttacagatyagaacgaaagcaaacaagctctcactctgtctgcccccagcacgaggctgtccacacggagcttttggacgagctgtacgaggcgctggcagagaccctg

SEQ ID NO: 256842 - DNA, 201 bp, Homo sapiens
tccatcccaaatctcccctccaaacttggtgaaaatcatctgaccatttttacagattagaacgaaagcaaacaagctctcactctgtctgcccccagcaygaggctgtccacacggagcttttggacgagctgtacgaggcgctggcagagaccctgatggccaaggagtccacccagggccactggagctatttgctgg

SEQ ID NO: 256843 - DNA, 201 bp, Homo sapiens
tttacagattagaacgaaagcaaacaagctctcactctgtctgcccccagcacgaggctgtccacacggagcttttggacgagctgtacgaggcgctggcrgagaccctgatggccaaggagtccacccagggccactggagctatttgctggtatgagaagggcaccctcctccccctcacagcccagatacccttcctg

SEQ ID NO: 256844 - DNA, 201 bp, Homo sapiens
caccagatttgatcccgacattccctcagctcagctcacacgagaggctcacatccctgaatcccatccaggggccggctcctgagcaggggccaagggckcaacttttgctggggctactgcttctagaatctcctctaactccacccttccaaacacccgtctatgctgggtggagtgaggccacagcatgacactcat

SEQ ID NO: 256845 - DNA, 201 bp, Homo sapiens
gctgtccacacggagcttttggacgagctgtacgaggcgctggcagagaccctgatggccaaggagtccacccagggccactggagctatttgctggtatragaagggcaccctcctccccctcacagcccagatacccttcctgcacagacaaagtgaaaacgtgggtgtgggttcaaatcctgactcacccattctgca

SEQ ID NO: 256846 - DNA, 201 bp, Homo sapiens
agtcttagacatgaggtccgttaaccttctttagcctcagtttccctgtctgtaaatcaagcacttcaacaacaacagcatgtctcgtggggttgttgggyatttgtccaataggtgacacacactacctgcttcacaaggacctggtgcccagtcctcaaagaatatttgacagggctggacatggtggctcacgcctgt

SEQ ID NO: 256847 - DNA, 201 bp, Homo sapiens
agtttgagaccagcttggccaacatggtgaaactccatctttactaaaaatacaaaaattagcggggtgtggtagtgggcgcctgtaatcccagctactcrggaggctgaggcaggagaatctcttgaacccaggaggtggaggttgtagtgagccgagatcacgctattgcaccacggccttggcaatgagagcgaatct

SEQ ID NO: 256848 - DNA, 201 bp, Homo sapiens
gcctgtaatcccagctactcaggaggctgaggcaggagaatctcttgaacccaggaggtggaggttgtagtgagccgagatcacgctattgcaccacggcyttggcaatgagagcgaatctttgtctcaaaaaaaagtacaaaaattagccggacatggtggcacacacctgtagtcacggctacttgggcagctgaggca

SEQ ID NO: 256849 - DNA, 201 bp, Homo sapiens
caccacggccttggcaatgagagcgaatctttgtctcaaaaaaaagtacaaaaattagccggacatggtggcacacacctgtagtcacggctacttgggcwgctgaggcaggagaattgcttgaacccaggaggcagaggttgcagtgagccaagatcatgccactgactccagcctgggtgacagagctcaaaaaaaaat

SEQ ID NO: 256850 - DNA, 201 bp, Homo sapiens
tttgtaattcatgtgcggtgagctcactgggatgagtcagtttggatatatattcctccctgggtctgccccattttatggggtgttgcttaatcatttgsgttattccattgacatgaaatatttagcactcagagatcatttctggtcaggagaaatttgtgcatttttaacccaaaatagaaaccttcataaaagcat

SEQ ID NO: 256851 - DNA, 201 bp, Homo sapiens; identical to SEQ ID NO: 51252

SEQ ID NO: 256852 - DNA, 201 bp, Homo sapiens; identical to SEQ ID NO: 51254

SEQ ID NO: 256853 - DNA, 201 bp, Homo sapiens; identical to SEQ ID NO: 51256

SEQ ID NO: 256854 - DNA, 201 bp, Homo sapiens; identical to SEQ ID NO: 51259

SEQ ID NO: 256855 - DNA, 201 bp, Homo sapiens
caacacagtcccacccatctgtgggtaacaagggggtgttcttttcagccttgctaaactgtctgaatcaaggatcacaaactacagcctgcaggccaaakccagcccacagcctgtgtttgtaaataaagctttattggaacaaagccacaccccttaatctacagatgatctgtggctactttcacaccacaacagagt

SEQ ID NO: 256856 - DNA, 201 bp, Homo sapiens
gtgttcttttcagccttgctaaactgtctgaatcaaggatcacaaactacagcctgcaggccaaatccagcccacagcctgtgtttgtaaataaagctttrttggaacaaagccacaccccttaatctacagatgatctgtggctactttcacaccacaacagagtaccatggttctgacagagactgggggacccagtct

SEQ ID NO: 256857 - DNA, 201 bp, Homo sapiens
tctgtgacttctgctccctccctagcttttccgccagaccccgcatggtcccaccctggctgtgtgaaacagggatcagggagcatggctcggtgccagtytccagaaccctgtccaccctggcgtggtggcagacatggctacctgcagctgagctgccagttcctctgagtcctcaaagaccaggcggttttcttcatg

SEQ ID NO: 256858 - DNA, 201 bp, Homo sapiens
aacagggatcagggagcatggctcggtgccagtctccagaaccctgtccaccctggcgtggtggcagacatggctacctgcagctgagctgccagttcctytgagtcctcaaagaccaggcggttttcttcatgtttcaccagctcatgtaaactgcagagagaacaaaaggagcccgagagtttcctggagaagacacta

SEQ ID NO: 256859 - DNA, 201 bp, Homo sapiens
gtgaattctctgcattgatcctgctggaatgagctctttcctgactgatacaggatggattttattttttacttatttatttagttttttgagacagtctyactgtggtgcccaggctggattaccgtggcacaatctcggctcactgaaacctctacctcctgggttcaagcaactctcgtgcctaagaagctgggacta

SEQ ID NO: 256860 - DNA, 201 bp, Homo sapiens
gcggttttcttcatgtttcaccagctcatgtaaactgcagagagaacaaaaggagcccgagagtttcctggagaagacactagacccctggggtgcccagstgggctcccacccaccccacgctcaagccaggctgggggttggaacagggtgtgtggcttctgggaggtggttcttagatttggcatctgaagggtataa

SEQ ID NO: 256861 - DNA, 201 bp, Homo sapiens
taaaggcagtaatcgttctggtcactgggacacagctgccctcgcccattctaaaaagtcagcaccctcaggcccgcgggtaaccacctcctcctgagcayggtgaccaggtcaaaggctgtccctcgggcctcagtgttctcatctgtatgtcgagcactgcacagaatcagctcatgcgctgaggctttcactcctgtg

SEQ ID NO: 256862 - DNA, 201 bp, Homo sapiens
tcagtgttctcatctgtatgtcgagcactgcacagaatcagctcatgcgctgaggctttcactcctgtgatggaagagacagagaagggggtggcctctcytctccctggggacctgccattctcagcacaggcgcatggcaggcagcagcctcccttctgccagcagaggggcttaatgcaccctgctccatttgtaatt

SEQ ID NO: 256863 - DNA, 201 bp, Homo sapiens
acctataattccagagctttgtggggctgaggcaggaggttcacttgaggtcaagagttcgagaccagcctgggcaacatagagagacacccccacaccgscacctgccatctctacaaaaattaaaataattagctgggcatactagtgtgggcctgtagtcccaactacttgggaagctgatgtgggtggatcgcttga

SEQ ID NO: 256864 - DNA, 201 bp, Homo sapiens
aggaaaaacatagcatattgaatcatcacaaggcagccaccccttcatagccacacctggcccctggccaccactgacctgtgctccatcgccagaattcygttgtctcaggaatgttcgatgaatggaatcctgtgtggcctgagatgagtgtctttcatgccgcgtgacacccttgaggcccgtgcaagctgttggtat

SEQ ID NO: 256865 - DNA, 201 bp, Homo sapiens
ggaaaaacatagcatattgaatcatcacaaggcagccaccccttcatagccacacctggcccctggccaccactgacctgtgctccatcgccagaattccrttgtctcaggaatgttcgatgaatggaatcctgtgtggcctgagatgagtgtctttcatgccgcgtgacacccttgaggcccgtgcaagctgttggtatg

SEQ ID NO: 256866 - DNA, 201 bp, Homo sapiens
ctgacctgtgctccatcgccagaattccgttgtctcaggaatgttcgatgaatggaatcctgtgtggcctgagatgagtgtctttcatgccgcgtgacacscttgaggcccgtgcaagctgttggtatgtcaacagttagctgcttctcattgctgagtggcgattggtcctgtcatggtttattcagccatgtggcggat

SEQ ID NO: 256867 - DNA, 201 bp, Homo sapiens
cgagggaatgtccttctcaatggcctctcattagaggcagacatcactgccaacttagatagccccagggtgacagtggcccagctggactgggacgtagygacggtccatcagctctctgccttccagccagatgttgtcattacagcaggtaatgcccagccccgggcatcctgtgcaggcggtgtccttgcagctcta

SEQ ID NO: 256868 - DNA, 201 bp, Homo sapiens
aatggcctctcattagaggcagacatcactgccaacttagatagccccagggtgacagtggcccagctggactgggacgtagcgacggtccatcagctctstgccttccagccagatgttgtcattacagcaggtaatgcccagccccgggcatcctgtgcaggcggtgtccttgcagctctacccagctcttggctctgg

SEQ ID NO: 256869 - DNA, 201 bp, Homo sapiens
agctggactgggacgtagcgacggtccatcagctctctgccttccagccagatgttgtcattacagcaggtaatgcccagccccgggcatcctgtgcaggyggtgtccttgcagctctacccagctcttggctctgggaaaagggaacagtggatgctgtcgggcatggacatgatggggcttccagaagagttactccgg

SEQ ID NO: 256870 - DNA, 201 bp, Homo sapiens
cattacagcaggtaatgcccagccccgggcatcctgtgcaggcggtgtccttgcagctctacccagctcttggctctgggaaaagggaacagtggatgctrtcgggcatggacatgatggggcttccagaagagttactccgggcctccagggggacatcaaaggacaggggtgcctcttaaggtgaccttcaagccacag

SEQ ID NO: 256871 - DNA, 201 bp, Homo sapiens
ttacagcaggtaatgcccagccccgggcatcctgtgcaggcggtgtccttgcagctctacccagctcttggctctgggaaaagggaacagtggatgctgtygggcatggacatgatggggcttccagaagagttactccgggcctccagggggacatcaaaggacaggggtgcctcttaaggtgaccttcaagccacagcc

SEQ ID NO: 256872 - DNA, 201 bp, Homo sapiens
ctctgcctgtggtcctgggtcccagccctgaaacccacaggtccagcggtggccagggacagaggcccacccctgcaagccagcagaccaatcggcagacrcctgaaacacgaagttcacggtagggtcaggctttctgccattcaaagccctctagataggcccagaaccagagctggttttttaaggaacaccagtgag

SEQ ID NO: 256873 - DNA, 201 bp, Homo sapiens
gtaacctgaagctttcaccgtagacgtgctgtattgcccagaagccatcgtgtccctggtcggggtcctgcggaggctggctgcctgctgggagcaccagygggctcctgaggtctacatggcctttaccgtccgcaacccagagacgtgccaggtgttcaccaccgagctaggtgagcccccacgcccacccgggcctgc

SEQ ID NO: 256874 - DNA, 201 bp, Homo sapiens
gtaaccacctcctcctgagcacggtgaccaggtcaaaggctgtccctcgggcctcagtgttctcatctgtatgtcgagcactgcacagaatcagctcatgygctgaggctttcactcctgtgatggaagagacagagaagggggtggcctctcctctccctggggacctgccattctcagcacaggcgcatggcaggcagc

SEQ ID NO: 256875 - DNA, 201 bp, Homo sapiens
tggcctccagtgtgtgctggactgaccgaggggcagggcctcactgtgggcagctcactctgcactgcttccccctcagcggtggatctgtgaagctatcmccagaaaaaattcgggttctgctcctaccacttgaagttcacggcacacgcaggcaaacagcacctgaacatgtccaccaccttcatgggcaggtccagg

SEQ ID NO: 256876 - DNA, 201 bp, Homo sapiens
aagccagaagttgaatcttgactgtagttcttgcacgtacacgcacactcttgcaactgaaaccactcagattgtcctaatgctgctccccatagcaacaycacctggaattttacgtttgtttttaagcatcattcgtaatctttacttgcaactgaacacaccgcacctgtgagagccacgtgacattaaaaaaatccc

SEQ ID NO: 256877 - DNA, 201 bp, Homo sapiens
catcctggccaacatggtaaaacccagtctctactaaaaatacaaaaattagctgggcgtggtgacgcgtgcctgtactcccagctactcgagaggctgasgcaggagaatcgcttgagcccgggaggcagaggttgcagtgagccgagattgggccactgcactccagcctggcaacagagggagactgcctgaaacaaa

SEQ ID NO: 256878 - DNA, 201 bp, Homo sapiens
accatgcggggaactcgggcagaggccggtgagcagggtgggcttggggcgtggggggcttgcggcaggaggagggcagctcagcacagggcgggagggtytgagcccagcagccctactatgtgcctcagagcaggtttccctaagcccttgggcctcggtttcctcatctataaaatggaggtggtgggaggggcagtc

SEQ ID NO: 256879 - DNA, 201 bp, Homo sapiens
cctcccaagtagctgggattacaggcacccaccatcgtgcctggctaatttttgtatttttgtagagatggggtttcaccatgttggccaggctggtctcraacacctgacctcaagtgatccaccagcgttggcctcccaaagtgttgggattacaggcatgagacactgtgcccggccactttctaagctttgtgaaga

SEQ ID NO: 256880 - DNA, 201 bp, Homo sapiens
attgctagtagcaagacagaaaataaggcttgggtaagctgtagttatagttacaatggaaatgactggcccaagagagtgctacagattacatagcagcyactaagaaaaaggacaggcagaaggggtaggcaagacatgttctctggctgttgcagccaccaaaaagccaggatacaaaggcagggagttatctgaact

SEQ ID NO: 256881 - DNA, 201 bp, Homo sapiens
gccactttggcaccatgggagtttgcccctctggttgctccaagaacacagatattaatgtagcacagatattaatattaatattaattagcacagatatwaatgtagtcacagaaagaaaaagaggtgaaaaagagacaggttcttcagtgcatgagagactccctttgggatctctcagaaatgtggaagcagaggcta

SEQ ID NO: 256882 - DNA, 201 bp, Homo sapiens
agggccactttggcaccatgggagtttgcccctctggttgctccaagaacacagatattaatgtagcacagatattaatattaatattaattagcacagayataaatgtagtcacagaaagaaaaagaggtgaaaaagagacaggttcttcagtgcatgagagactccctttgggatctctcagaaatgtggaagcagagg

SEQ ID NO: 256883 - DNA, 201 bp, Homo sapiens
gaataagacacttttccccacttcatgtagactcagcatgattttagccagaaaacactctgggaagtctagggccactttggcaccatgggagtttgccsctctggttgctccaagaacacagatattaatgtagcacagatattaatattaatattaattagcacagatataaatgtagtcacagaaagaaaaagaggt

SEQ ID NO: 256884 - DNA, 201 bp, Homo sapiens
gaaggtgctgaatgggattcggggcaacccaccattgtggtcacatgataagacctcacacactatcttgagagttttggtaatagtctataaaagttacrtaaaatgaggagaaagttactcttccaggcaatattcctgagatccatttagatacaagaaagaaaacaaaaatattgctcttataaaatgaagtgggaa

SEQ ID NO: 256885 - DNA, 201 bp, Homo sapiens
gtagggagataatattgaatcttgtcagcctttataacttgatctagtaaggtactcctcaaatagctcaggtaatctgtcccaatatagtcctgattttscccaatcaaatacacttctgacaatagatatgaattcagacactgggccactgagtcacactgtctggggggcatcagtcttggaggttaggagtcctgg

SEQ ID NO: 256886 - DNA, 201 bp, Homo sapiens
gacttgtgtcaaggtccccagtgacatgctgttaaatccaacatcatctctcagcctcggctcaacctatcagcagcatttgatcctgttgatcactttcrcatgattgaaacactttctttccttggattccaggacatcacactcttggtttttctcctttctcattggctgttcttttgcttgttcttcctcctctcc

SEQ ID NO: 256887 - DNA, 201 bp, Homo sapiens
agaggcatctgttgttgtttcttttgtctgttttttaaggctcacctgatgatgattaggtcagatccacccttttgactaactcagagtcaactgattarggaccttaattatatctgaaagttctcttttgccacataatattaattacaggggtgatatctcctcatattcacaggtctcacccacacttacaggggt

SEQ ID NO: 256888 - DNA, 201 bp, Homo sapiens
tgccacataatattaattacaggggtgatatctcctcatattcacaggtctcacccacacttacaggggtgatgagattatacagggcacatacaccaggkggtggaaatgttggaggccatcttagaatcctgcctaccacaatatgcccctttgtgagagaaaatgatgaggtttgtcatctctcctcagagttggaac

SEQ ID NO: 256889 - DNA, 201 bp, Homo sapiens
cttataaaatgaagtgggaacaatttaagattctagaaagcttgaaatttttacattcaaatgtcactaattcattctaaaaaatattgagtattgggtayctttatttttctttctttgttagaagactactcaaggaattaaatttataaattcctaaatactttaagatatttgttactttagtctgaataccctcac

SEQ ID NO: 256890 - DNA, 201 bp, Homo sapiens
tttggtaaactgacataaatctaaaggaaacagatcttcattctcttgcacaatatttttttggggatccacttcacagaggtagtctttaaacatcttgygagcttcattttcaaagtcagaggtgaaagccttgaaatgtgaataatttgctaaaaaaaagtcattctttccagtgaacatgattattttctacatacg

SEQ ID NO: 256891 - DNA, 201 bp, Homo sapiens
ttgaatttatttattttcttatttgaccctttgtgggtggggtagacaagatcagaattaactgcagataaaattttaaaggtacattttcccccaaaacrtctccaaatgtggtgtgaaaaaaatctgtaaacctatgaaaatttaataaaatgtgttcatttttttatcttcccgtttgtgattttcccgtcctgattg

SEQ ID NO: 256892 - DNA, 201 bp, Homo sapiens
atgaggtaagctctgctctttatttttttgcagatgcttttctcaaactttcctgatcctgcaggcaagctaaaccagttttggaagaacctgcgggagtygcagcagctccgatgggatgagagctgggtgcagactgtgctccctttggttatggacatacaactcctgggccagaggctaaaaccccgggacccctgc

SEQ ID NO: 256893 - DNA, 201 bp, Homo sapiens
ctccctccagaccagggcctgagggggtggcaaaccctgaccacagatggggggcgtagaaggagcgggaatgggcccagggacagctttgtagtgtgagrtctgcccgactgcatctaggtcaacagccagacaggatgctgcaggggactgtggggaagccaggagaaggtgctgcccatcctgcaggctccccctcat

SEQ ID NO: 256894 - DNA, 201 bp, Homo sapiens
ttctgaatgatggctgagttgggaggttataatcataaataaggcaaattcctgttcttcctctgagaggctttggggggctttggaggggttggcagctrtggaccacaaagcttgggcacctcccaaacatgggctgctcatctcttcaccttgtcctagagtgacatcaccttctccatatgtgacagatagtgttac

SEQ ID NO: 256895 - DNA, 201 bp, Homo sapiens
ttgggaggttataatcataaataaggcaaattcctgttcttcctctgagaggctttggggggctttggaggggttggcagctatggaccacaaagcttggscacctcccaaacatgggctgctcatctcttcaccttgtcctagagtgacatcaccttctccatatgtgacagatagtgttacagtctctactctaggagg

SEQ ID NO: 256896 - DNA, 201 bp, Homo sapiens
tagtgggaaaaagtcttgaagttggaggtgggttctggtcccagcattgccatcaactagatatgtgacctcaaacaagtcacttgactagcctctgtgarctgggtttggatatcatctcatccatgaactgcctgtttaatcttggtctatttacttcctttatctgtaggctttcacagctttcttcccttcagcaga

SEQ ID NO: 256897 - DNA, 201 bp, Homo sapiens
ttggaggtgggttctggtcccagcattgccatcaactagatatgtgacctcaaacaagtcacttgactagcctctgtgagctgggtttggatatcatctcwtccatgaactgcctgtttaatcttggtctatttacttcctttatctgtaggctttcacagctttcttcccttcagcagaaggagaaaagccatccatcca

SEQ ID NO: 256898 - DNA, 201 bp, Homo sapiens
agccaccgcacctggcctcaagactgttctttttaagcacccaaagaggcaagaaaagccccatctttctctgctacaccccgtgtcacttcacacccatwtgaaagctgctcattgcatcatgtaatccttcagtccatttatactacagtgtgtattagtctaaatcaattaattcacccagggtcttcagagctttct

SEQ ID NO: 256899 - DNA, 201 bp, Homo sapiens
tgctttactagaaacattgctgttttctaatgacttctggtagtatttcattattattttctctttttggttttattttgtgtaaaaggactaagtgagakgggtgtttgcaatttttttctttccaactgactagctagtcaatgctcttttggaccccagcccacccccctgaaaaaaaggaaaaagaacaaattgaga

SEQ ID NO: 256900 - DNA, 201 bp, Homo sapiens
tgcaagtaaaagtcaaagtaacccacaggcccttaaactctctgaacccatcatttcctcttttctccttcctcacttccctccagccatgctggccatcttattatccctcagaaaggccagaccctctcctgcctcaagacttgtgcacttgcattttgtctgcctggaacatgatttcctcaggtatccacaggcttc

SEQ ID NO: 256901 - DNA, 201 bp, Homo sapiens
aactgaaatgagccagctcgggaggcatcctcagactttcaccaatctgggagagacgagaccaaaaacttaagctgcaagcagctagcgaccagacagayaggcattaccatggagaccagagatgccagagaagactgagggatgtgagaaacgactgctctgtggtcctctttccatctacattcaactgccatcttg

SEQ ID NO: 256902 - DNA, 201 bp, Homo sapiens
aatgtttttcattttaacttttcttggaaaaatttgatgaaaagcctgtgctgtggttttaaacggcattgggatgtccatctcctgtccctattcccaascccctaaacgtgatttatattgccctattttaagctagtgcagatttatgagactttaaacaccatggatggagttactggaggtttaaagggattaagc

SEQ ID NO: 256903 - DNA, 201 bp, Homo sapiens
atttttactttttattatactttaagttttacggtacatgtgcacattgtgcaggttagttacatatgtatacatgtgccatgctggtgcgctgcacccamtaactcgtcatctagcattaggtatatctcccaatgctatccctccccccttctcccaccccaccacagtccccagagtgtgatattccccttcctgtgt

SEQ ID NO: 256904 - DNA, 201 bp, Homo sapiens
ggagtgccaggagctgatttggctaaatgaagagggaaggtgttcttgctgaaatgcctggggagaagagggggatcaggaggcaacaaggtgtctgtccyggatatttatgatgagccaaattctagcaagtcaagcagaaactgaagtatgtgatttcataaccgatgttgtgagacagaagagcacaaaggtgctgca

SEQ ID NO: 256905 - DNA, 201 bp, Homo sapiens
ggaataagacacttttccccacttcatgtagactcagcatgattttagccagaaaacactctgggaagtctagggccactttggcaccatgggagtttgcmcctctggttgctccaagaacacagatattaatgtagcacagatattaatattaatattaattagcacagatataaatgtagtcacagaaagaaaaagagg

SEQ ID NO: 256906 - DNA, 201 bp, Homo sapiens
gtcctacagtgtgaggttcagcattgccatctccaagtgctcttcatagggaaacagtttctggtcatgacgaggttccacttcccatctgatcctggccyggcctggaaacagagcacatgtgtttcaggatggcagtgtttggggacaggacatgagcgtattgtgtggggctgctaggacaggcctggcggggtgggg

SEQ ID NO: 256907 - DNA, 201 bp, Homo sapiens
agacagaagagcacaaaggtgctgcattggcacctggagggaaagtgtcctaagggggaggaataagacacttttccccacttcatgtagactcagcatgrttttagccagaaaacactctgggaagtctagggccactttggcaccatgggagtttgcccctctggttgctccaagaacacagatattaatgtagcacag

SEQ ID NO: 256908 - DNA, 201 bp, Homo sapiens
tacattctcctcaatgctgcagcagggcccttacctgagaatgcaggatctttaacagctcaggtgttagctctgcccagttacacaaagcgactcgctcrgaccgctctctcaccggaggcgtctctccacgggacagggcctcaaaataactacaagaaaaaaagtcagagagtaggaggatcctatacaccagtggcc

SEQ ID NO: 256909 - DNA, 201 bp, Homo sapiens
tgtggattttaaagcatcaaagcaatgcaagagctaaaacaaagacgatgccagttagtcccgaccccctggctgcagccatgacaacctccgcggttttmcaggaccctctctccccgcccgtcctccaagagatgaaggcgagaaaggagcacgtactcggccccccactggatgaggtcctgcggctgcgcccgaatg

SEQ ID NO: 256910 - DNA, 201 bp, Homo sapiens
caggaagatgccgggttcatctctcctcctggcgtggcgggcctctgcctgatcactgcactgcaggggctcccgcctcaggctgagcctcaatttccaamggcaaacagcctggccctgtctagagaaggcctcgagctagtccggcaaagcatctctggcccgaagggtgaggcggccttggctctcggggccctgcca

SEQ ID NO: 256911 - DNA, 201 bp, Homo sapiens
catccgggaagaggcccgcaggcatcacgctccagggctcacagatgggggctccagggctcacagatgggggctccggggctcacagatggggcctgacrgaccaccccaggggcacaggatcgggttcgccgtgacctcaggggccagcagggatggcccaggacaaggagtgagagccggggctgaaggggccggcac

SEQ ID NO: 256912 - DNA, 201 bp, Homo sapiens
tcgggttcgccgtgacctcaggggccagcagggatggcccaggacaaggagtgagagccggggctgaaggggccggcaccagatccaacagggactgcagyggctggcacaggggcccctgaagaggccggcagggtgcgcctgggtaccccaggagcgaagggcgatcgggaatggggagcaacggctggggtttgcagg

SEQ ID NO: 256913 - DNA, 201 bp, Homo sapiens
ggctcgaggtcctgccgggggctgcctgcctccagggtccgcctggtctcactcggctccgcaaggaggcaggtttccaactcccggggttcttgataagrcgacgttcccatttctccttccgctcctgtggctccagggccatatctttctcagggcctccagggtgctgaagctgggtatggcgaagccgtccatgac

SEQ ID NO: 256914 - DNA, 201 bp, Homo sapiens
accccaccaatgactcagcctgcagcctatttcaaaattattcccatttccccaagggaagatttactttcagtccacggtttagtgtattttagggtggkgctaagtggtcagctgactggcaggagaacagagggctttcgtctgtacccacccagcctcaacactgtccctacattctcctcaatgctgcagcagggc

SEQ ID NO: 256915 - DNA, 201 bp, Homo sapiens
ctagaaacactatttgacccagcaatcccattactgggtatatacccaaaggattataaatcattctactatagagacacatgcacatgtatgtttattgyagcactgttcacaatagcaaagacttagaaccaacgcaaatgcccatcaatgatagactggtaaagaaaatgtggcacatatacttcatggaatactatg

SEQ ID NO: 256916 - DNA, 201 bp, Homo sapiens
ttataatcataaataaggcaaattcctgttcttcctctgagaggctttggggggctttggaggggttggcagctatggaccacaaagcttgggcacctccmaaacatgggctgctcatctcttcaccttgtcctagagtgacatcaccttctccatatgtgacagatagtgttacagtctctactctaggaggtccagagt

SEQ ID NO: 256917 - DNA, 201 bp, Homo sapiens
cttgggcacctcccaaacatgggctgctcatctcttcaccttgtcctagagtgacatcaccttctccatatgtgacagatagtgttacagtctctactctrggaggtccagagtgactgtccccattccatagatggggagcctcaagcatggtgagatgagcctgggtagcttgctcttctgccttgattcagattctaa

SEQ ID NO: 256918 - DNA, 201 bp, Homo sapiens
ttttggggagatggtagttttccagcaccacataacatcccccagaaggcaattttctcattttcctttgaataaaattcctcctgttttcactccttagmagagggcaagaggaactgtgatgcctccatgcctgaacctcagacctttggaggttgttgtcctctttcatctcctcttccctgtgcccacccatgaagc

SEQ ID NO: 256919 - DNA, 201 bp, Homo sapiens
ggttttcccagccatcctctggggaatatgaatctattctctacataaaagcaaagatacaattaaagctatgcatcagagagcaatgaagggaactaacractccacattaccatggagaggatgctatagaacaaggtcagtttctgctaggagactttttcttactattgccacaaatgcagaagaacagctcctggt

SEQ ID NO: 256920 - DNA, 201 bp, Homo sapiens
gcaagtaaaagtcaaagtaacccacaggcccttaaactctctgaacccatcatttcctcttttctccttcctcacttccctccagccatgctggccatcttattatccctcagaaaggccagaccctctcctgcctcaagacttgtgcacttgcattttgtctgcctggaacatgatttcctcaggtatccacaggcttca

SEQ ID NO: 256921 - DNA, 201 bp, Homo sapiens
aattaaagctatgcatcagagagcaatgaagggaactaacaactccacattaccatggagaggatgctatagaacaaggtcagtttctgctaggagacttyttcttactattgccacaaatgcagaagaacagctcctggtgcctctgcagccactcaagcctggcttatccgagagtgacgggcatctgcagacaaaata

SEQ ID NO: 256922 - DNA, 201 bp, Homo sapiens
caagtaaaagtcaaagtaacccacaggcccttaaactctctgaacccatcatttcctcttttctccttcctcacttccctccagccatgctggccatcttattatccctcagaaaggccagaccctctcctgcctcaagacttgtgcacttgcattttgtctgcctggaacatgatttcctcaggtatccacaggcttcac

SEQ ID NO: 256923 - DNA, 201 bp, Homo sapiens
tatgcatcagagagcaatgaagggaactaacaactccacattaccatggagaggatgctatagaacaaggtcagtttctgctaggagactttttcttactrttgccacaaatgcagaagaacagctcctggtgcctctgcagccactcaagcctggcttatccgagagtgacgggcatctgcagacaaaatattttgtctt

SEQ ID NO: 256924 - DNA, 201 bp, Homo sapiens; identical to SEQ ID NO: 51323

SEQ ID NO: 256925 - DNA, 201 bp, Homo sapiens
tcatccatgaactgcctgtttaatcttggtctatttacttcctttatctgtaggctttcacagctttcttcccttcagcagaaggagaaaagccatccatccagttttggtggaggcaagaaattcaggagccatcattccaagttaagtgaaagggaaggaggaaataaaaagtatgaaagtggtaaaaagtatagaggt

SEQ ID NO: 256926 - DNA, 201 bp, Homo sapiens
tatgaaagtggtaaaaagtatagaggtgggaatgcgatgtaaacagaagggtgggagggtaagctggcttcctgggccttcatagctagtcttcatttttkttcaaatccacaaaatgatgggtattagactctatgttttaaaagctgctgcctgatgtaaagtcctacactttaatacttgaatgaatacttagggtga

SEQ ID NO: 256927 - DNA, 201 bp, Homo sapiens; identical to SEQ ID NO: 51314

SEQ ID NO: 256928 - DNA, 201 bp, Homo sapiens
ctggagaggatgtggaggaataggaatgcttttacactgttggtgggagtgtaaattagttcaatcattgtggaagacagtgtggtgattcctcaaggatstagaactagaaacactatttgacccagcaatcccattactgggtatatacccaaaggattataaatcattctactatagagacacatgcacatgtatgtt

SEQ ID NO: 256929 - DNA, 201 bp, Homo sapiens
ctgccttgctagattggggaagttctcctggataatatcctgcagagtgttttccaacttggttccattctccccatcactttcaggtacaccaatcagaygtagatttggtcttttcacatagtcccatatttcttggaggctttgctcatttctttttattcttttttctctaaacttcccttctcacttcatttcatt

SEQ ID NO: 256930 - DNA, 201 bp, Homo sapiens; identical to SEQ ID NO: 51316

SEQ ID NO: 256931 - DNA, 201 bp, Homo sapiens
ctttgctcatttctttttattcttttttctctaaacttcccttctcacttcatttcattcatttcatcttccattgctgataccatttcttccagttgacygcatcggctcctgaggcttctgcattcttcacgtagttctcgagccttggttttcagctccatcagctcctttaagcacttctctgtattggttattcta

SEQ ID NO: 256932 - DNA, 201 bp, Homo sapiens; identical to SEQ ID NO: 51317

SEQ ID NO: 256933 - DNA, 201 bp, Homo sapiens
ctcctttaagcacttctctgtattggttattctagttatacattcttctaaatttttttcaaagttttcaacttctttgcctttggtttgaatgtcctccygtagctcagagtaatttgatcgtctgaagccttcttctctcagcttgtcaaagtcattctccatccagctttgttccgttgctggtgaggaactgcgttc

SEQ ID NO: 256934 - DNA, 201 bp, Homo sapiens
actgagtgtgtccgcggatgtggcagctgcagcagtcttggctttgtgaggaaccaagtgtgtccagggatgtggcagctgcagcaggcttggctttgtgrggaaccgagtgtgtccacatacttgatacacacgtttttatttgcacaaagaaaatgctatttttggagccagagttttcatgtctgagtgatggcgatt

SEQ ID NO: 256935 - DNA, 201 bp, Homo sapiens
ccatttttctgttctgttttttccccatctttgtggttttatctacttttggtctttgatgatggtgatgtacagatgggtttttggtgtggatgtccttkctgtttgttagttttccttctaacagacaggatcctcagctgcacgtctgttggaataccctgccgtgtgaggtgtcagtgtgcccctgctggggggtgc

SEQ ID NO: 256936 - DNA, 201 bp, Homo sapiens
gatggggtggggacaggcaatgaggtaagctctgctctttatttttttgcagatgcttttctcaaactttcctgatcctgcaggcaagctaaaccagtttyggaagaacctgcgggagtcgcagcagctccgatgggatgagagctgggtgcagactgtgctccctttggttatggacatacaactcctgggccagaggct

SEQ ID NO: 256937 - DNA, 201 bp, Homo sapiens
accattgctctgttgcaggggtaccaactttggatctgtgctgctggagtgggggagctcccacagtgtttgttcatacaagagggtttttagcagctacycacccagaataatttgggaagaaggcctatagatgccataaaatggaggttcctcaaggaattctcaggggaaatgttacaacagcactctgccgaggag

SEQ ID NO: 256938 - DNA, 201 bp, Homo sapiens
ggatggggtggggacaggcaatgaggtaagctctgctctttatttttttgcagatgcttttctcaaactttcctgatcctgcaggcaagctaaaccagttytggaagaacctgcgggagtcgcagcagctccgatgggatgagagctgggtgcagactgtgctccctttggttatggacatacaactcctgggccagaggc

SEQ ID NO: 256939 - DNA, 201 bp, Homo sapiens
gacatttaagtctgcagaggttactgctgtctttttgtttgtctgtgccctgcccccagaggtggagcctacagaggcaggcaggcctccttgagctgtgrtgggctccacccagtttgagcttcccagctgctttgtttacctaagcaagcctgggcaatgtcgggtgcccctcccccagcctcactgccgccttgcaat

SEQ ID NO: 256940 - DNA, 201 bp, Homo sapiens
gaggcccttgacaccattgagaactgaaatgagccagctcgggaggcatcctcagactttcaccaatctgggagagacgagaccaaaaacttaagctgcargcagctagcgaccagacagataggcattaccatggagaccagagatgccagagaagactgagggatgtgagaaacgactgctctgtggtcctctttccat

SEQ ID NO: 256941 - DNA, 201 bp, Homo sapiens
tggagcctacagaggcaggcaggcctccttgagctgtggtgggctccacccagtttgagcttcccagctgctttgtttacctaagcaagcctgggcaatgkcgggtgcccctcccccagcctcactgccgccttgcaatttgatctcagactgctgtgctagcaatcagtgagactccgtgggcgtaggaccctctgagcc

SEQ ID NO: 256942 - DNA, 201 bp, Homo sapiens
agggtgctcgcaggggaacatacagcacgttagaggccgggaggtgctccagggcaccaagtgtgggaaagtgggacatacggggaagtttccagaaagcrtgatgtcaagttggaggcggagcgctgctggggcgtgaagagtctcgagtccaagtgagagagttaggaacttgggaggggttgttgttgggtcggggac

SEQ ID NO: 256943 - DNA, 201 bp, Homo sapiens
cctacagaggcaggcaggcctccttgagctgtggtgggctccacccagtttgagcttcccagctgctttgtttacctaagcaagcctgggcaatgtcgggygcccctcccccagcctcactgccgccttgcaatttgatctcagactgctgtgctagcaatcagtgagactccgtgggcgtaggaccctctgagccaggtg

SEQ ID NO: 256944 - DNA, 201 bp, Homo sapiens
tgtcacttcacacccatttgaaagctgctcattgcatcatgtaatccttcagtccatttatactacagtgtgtattagtctaaatcaattaattcacccarggtcttcagagctttctctggttgtgagatgaaagcctttgtctctccctaaagcaattttaagcatcagtgaacaagtgggggaactagatttttggct

SEQ ID NO: 256945 - DNA, 201 bp, Homo sapiens
gagggtgctcgcaggggaacatacagcacgttagaggccgggaggtgctccagggcaccaagtgtgggaaagtgggacatacggggaagtttccagaaagyatgatgtcaagttggaggcggagcgctgctggggcgtgaagagtctcgagtccaagtgagagagttaggaacttgggaggggttgttgttgggtcgggga

SEQ ID NO: 256946 - DNA, 201 bp, Homo sapiens
ggagggtgctcgcaggggaacatacagcacgttagaggccgggaggtgctccagggcaccaagtgtgggaaagtgggacatacggggaagtttccagaaascatgatgtcaagttggaggcggagcgctgctggggcgtgaagagtctcgagtccaagtgagagagttaggaacttgggaggggttgttgttgggtcgggg

SEQ ID NO: 256947 - DNA, 201 bp, Homo sapiens
cggtgcgcttttgtaggtgagagggcagaagtggagcttgatctttcggcttgtggaaagtggacaggtgagaattcctcaggaatcatagcaacaacacytcttacaatgcgtttttggtgccaggaattgttctaagtgcattacacacatgaactcatttcatccttactgtcaccccatgaggcaagtactattgtt

SEQ ID NO: 256948 - DNA, 201 bp, Homo sapiens
aatgtagtcacagaaagaaaaagaggtgaaaaagagacaggttcttcagtgcatgagagactccctttgggatctctcagaaatgtggaagcagaggctayagcacaagcctgggttattgctagtagcaagacagaaaataaggcttgggtaagctgtagttatagttacaatggaaatgactggcccaagagagtgcta

SEQ ID NO: 256949 - DNA, 201 bp, Homo sapiens
tagcacagatattaatattaatattaattagcacagatataaatgtagtcacagaaagaaaaagaggtgaaaaagagacaggttcttcagtgcatgagagrctccctttgggatctctcagaaatgtggaagcagaggctatagcacaagcctgggttattgctagtagcaagacagaaaataaggcttgggtaagctgta

SEQ ID NO: 256950 - DNA, 201 bp, Homo sapiens
agatattaatgtagcacagatattaatattaatattaattagcacagatataaatgtagtcacagaaagaaaaagaggtgaaaaagagacaggttcttcastgcatgagagactccctttgggatctctcagaaatgtggaagcagaggctatagcacaagcctgggttattgctagtagcaagacagaaaataaggcttg

SEQ ID NO: 256951 - DNA, 201 bp, Homo sapiens
gtggggacaggcaatgaggtaagctctgctctttatttttttgcagatgcttttctcaaactttcctgatcctgcaggcaagctaaaccagttttggaagracctgcgggagtcgcagcagctccgatgggatgagagctgggtgcagactgtgctccctttggttatggacatacaactcctgggccagaggctaaaacc

SEQ ID NO: 256952 - DNA, 201 bp, Homo sapiens
aaatgtacctattacctaccggagtaaaaattcctgttactagactcttctacaaggaacaaactggcttttctagatgacacagagatcctgtcttgccrttgaattcgcaaaggaaagagaaactctgggcttgcctctaaggatatatgaattaactaggatgcaaggtctccaccagatggtgacccctgacttagt

SEQ ID NO: 256953 - DNA, 201 bp, Homo sapiens
attctagttgcccaggctaaaaaccttggcattatccttggctgctttttctctcacaccttaaatccaatcagagcaaatgctattggctgtatctccawaagtcattcagaattggagcacttctctccacttccatcaccttggtccaagcaaacctcatctctcacccggaccactacaatggcttcctaacccatc

SEQ ID NO: 256954 - DNA, 201 bp, Homo sapiens
ggtggggtggagcagatgtgcattagaaacgaaaccaaccacccggaatggtcatggtctctggataacagtagcttcatcaactccgtcttttccacatstctaaaattttgatattacttaagtcaggcacactgctctattcattctgacatctgaatatccattttaaagtgggctaggctcacccagaggatgata

SEQ ID NO: 256955 - DNA, 201 bp, Homo sapiens
tcctaagggggaggaataagacacttttccccacttcatgtagactcagcatgattttagccagaaaacactctgggaagtctagggccactttggcaccrtgggagtttgcccctctggttgctccaagaacacagatattaatgtagcacagatattaatattaatattaattagcacagatataaatgtagtcacaga

SEQ ID NO: 256956 - DNA, 201 bp, Homo sapiens
atgtgatttcataaccgatgttgtgagacagaagagcacaaaggtgctgcattggcacctggagggaaagtgtcctaagggggaggaataagacacttttycccacttcatgtagactcagcatgattttagccagaaaacactctgggaagtctagggccactttggcaccatgggagtttgcccctctggttgctccaa

SEQ ID NO: 256957 - DNA, 201 bp, Homo sapiens
tagcaagccctccagcctgtgtgctgggctagcctccatttgtcctgctaggtccactctgcagtcttctctaacctggtgtctgcaccagaattgtgtcrcctgggcttccttgctctctagtagctggatttggcctattggaggtatcagcaggtgatcagacattgggtatttatttcccaactcccaaactgagct

SEQ ID NO: 256958 - DNA, 201 bp, Homo sapiens
ggtgggctccacccagtttgagcttcccagctgctttgtttacctaagcaagcctgggcaatgtcgggtgcccctcccccagcctcactgccgccttgcartttgatctcagactgctgtgctagcaatcagtgagactccgtgggcgtaggaccctctgagccaggtgcgggatataatcttgtggtgcgccgtttttta

SEQ ID NO: 256959 - DNA, 201 bp, Homo sapiens
aaggtgaaacttggccttcacctttcaaggcgaatatcttcaaaggtatttttgaatctgtaatgaggtgtcatttcatcaggtatggggaagtgttctasctgtggttgaggaaggcttagtgggaaaaagtcttgaagttggaggtgggttctggtcccagcattgccatcaactagatatgtgacctcaaacaagtca

SEQ ID NO: 256960 - DNA, 201 bp, Homo sapiens
acttggccagaggccaagaggagggtgctcgcaggggaacatacagcacgttagaggccgggaggtgctccagggcaccaagtgtgggaaagtgggacatrcggggaagtttccagaaagcatgatgtcaagttggaggcggagcgctgctggggcgtgaagagtctcgagtccaagtgagagagttaggaacttgggagg

SEQ ID NO: 256961 - DNA, 201 bp, Homo sapiens
actctgcagtcttctctaacctggtgtctgcaccagaattgtgtcacctgggcttccttgctctctagtagctggatttggcctattggaggtatcagcakgtgatcagacattgggtatttatttcccaactcccaaactgagcttcttgccttgcctccatagcctcagctactgtctagcaccccattttccatggaa

SEQ ID NO: 256962 - DNA, 201 bp, Homo sapiens
caatgtcgggtgcccctcccccagcctcactgccgccttgcaatttgatctcagactgctgtgctagcaatcagtgagactccgtgggcgtaggaccctcygagccaggtgcgggatataatcttgtggtgcgccgttttttaagccggtccgaaaagcgcaatattcgggtgggagtgacccgatttcccaggtgagtcc

SEQ ID NO: 256963 - DNA, 201 bp, Homo sapiens
atttagagctcatgttatatttaggttggtacaaaagtaatcacggtttttgccattaaaggtggcaattacttctgcaccaacctagtatgaaagaaaarcatcccaaatactagaactccactcggggcttttgctcctagagtagaattggcgggaattgcctgcaggcttacatggttttctttgtttctttctctc

SEQ ID NO: 256964 - DNA, 201 bp, Homo sapiens
tgtgtcacctgggcttccttgctctctagtagctggatttggcctattggaggtatcagcaggtgatcagacattgggtatttatttcccaactcccaaastgagcttcttgccttgcctccatagcctcagctactgtctagcaccccattttccatggaaccagttctcattggctccaataacatcatttcctccctt

SEQ ID NO: 256965 - DNA, 201 bp, Homo sapiens
tgggagtgacccgatttcccaggtgagtccgtcacccctttctttgactcggaaagggaactccctgaccccttgcgcttcccaagtgaggcaatgcctckccctgcttcgggttgcgcacagtgcacgcacccactgacctgcgcccactgtctggcactccctagtgagatgaacccggtacctcagatggaaatgcag

SEQ ID NO: 256966 - DNA, 201 bp, Homo sapiens
atgaaggtggtggacatgttcgggtgctgtttgcctgtgtgtgccgtgaacttcaagtggtaggagcagaacccgaatctttctggggatagcttcacagrtccaccgctgaggaggaaacagtgcagagcgagctgcccacagtgaggccctgcccctcggtcagtccagcacacactggaggccacgaggaggagccct

SEQ ID NO: 256967 - DNA, 201 bp, Homo sapiens
atgcccctttgtgagagaaaatgatgaggtttgtcatctctcctcagagttggaaccattgagacgacaagcacagctactcattgtggttctggatcccstcctcttcctgctacctctgtgtgtagtcttttttcagaacctaggagagcaacacctcctataaccactcagttatgagaaacaaaccacaaaattcca

SEQ ID NO: 256968 - DNA, 201 bp, Homo sapiens
aacagccagagggagcctgaagctttcttgcctgcccttggctccttgtggtccagggagggctgcagtgggtgggaatgcctgacacagggtgactagtstctgtgtttacaccagggggagcaatgactccgtggctgagaggggctggctagagtctggagtttccaaatgtccattcaaggcaaaacacaattccta

SEQ ID NO: 256969 - DNA, 201 bp, Homo sapiens
tttcagatgtcccagccaggctgtgtggctgcttggccagcttaagccacttgtgcttggggctgtcgggggtcttatccgattttcactcccctcgggggatgttgcctcactgtgctgggaagatttgtgttcccagggcagagaccagcgctctgactgcacccctcttgcctagcagggtcggtggacctgggtgtc

SEQ ID NO: 256970 - DNA, 201 bp, Homo sapiens
tcagggcacaacatgggcacaccgctttgtcatattctacaaatactggggagagccaacattcttctcattgccaataattatgctcatcagcctccacrtcttgcctctcacgtttcttccatgtcccagctctgcccaccgtgttaaatcagtgtggatgtagggaacatgaacacattttaatatcagcctaaacca

SEQ ID NO: 256971 - DNA, 201 bp, Homo sapiens
ttttcagatgtcccagccaggctgtgtggctgcttggccagcttaagccacttgtgcttggggctgtcgggggtcttatccgattttcactcccctcgggggatgttgcctcactgtgctgggaagatttgtgttcccagggcagagaccagcgctctgactgcacccctcttgcctagcagggtcggtggacctgggtgt

SEQ ID NO: 256972 - DNA, 201 bp, Homo sapiens
gttacaacagcactctgccgaggagatgagatgcacctggttattttgtaagtagaaggtgtggaactgcaggtatggttctgctttgttgccccacagtratcaaagttttgcagcccaaacaaggatttggggaagtcacagctcagagaacacccaagcacatcaatgttcaaaagtgtagtatgaagtggtactgcc

SEQ ID NO: 256973 - DNA, 201 bp, Homo sapiens
ctgtctcaaaaggaaacaaaccaaaacaacaacaacaaaaataaattgtggttaagtagaaaaagtgtcaacttacattttcagatgtcccagccaggctrtgtggctgcttggccagcttaagccacttgtgcttggggctgtcgggggtcttatccgattttcactcccctcgggggatgttgcctcactgtgctggga

SEQ ID NO: 256974 - DNA, 201 bp, Homo sapiens
aaactctctgaacccatcatttcctcttttctccttcctcacttccctccagccatgctggccatcttattatccctcagaaaggccagaccctctcctgmctcaagacttgtgcacttgcattttgtctgcctggaacatgatttcctcaggtatccacaggcttcactcgttagcacctttagttttgtatccaaatgt

SEQ ID NO: 256975 - DNA, 201 bp, Homo sapiens
aagttttgcagcccaaacaaggatttggggaagtcacagctcagagaacacccaagcacatcaatgttcaaaagtgtagtatgaagtggtactgcccaaaytcattaatcaggaacagccacgtggtatatataggaacttgcattcttttaccttacagattacattatcaattcaccttgatgcaataatgtgtcctcc

SEQ ID NO: 256976 - DNA, 201 bp, Homo sapiens
tgccactgcactccagcctgggcgacagagtgagactctgtctcaaaaggaaacaaaccaaaacaacaacaacaaaaataaattgtggttaagtagaaaaagtgtcaacttacattttcagatgtcccagccaggctgtgtggctgcttggccagcttaagccacttgtgcttggggctgtcgggggtcttatccgatttt

SEQ ID NO: 256977 - DNA, 201 bp, Homo sapiens
cttccgatggtctgctctcatcacaggtgcccaatcaaattactgaaaacctaagactgatcatgtcattcctctgtttagaaccctcagtggctgccacmttatgcaagtaaaagtcaaagtaacccacaggcccttaaactctctgaacccatcatttcctcttttctccttcctcacttccctccagccatgctggcc

SEQ ID NO: 256978 - DNA, 201 bp, Homo sapiens
agggctgtgaccatctatgacaagccggcatctttctttaaagagacacctctggacctgctgcaccggctcttcatgaagctgggtggcactcactctcygttcagggcctggtaggcctcccctcctcagctgccttctctcctgctcgccactgccctggcctctccccttctcactgcagacctgggaacccactca

SEQ ID NO: 256979 - DNA, 201 bp, Homo sapiens
gccttgggctcccaaaatgctgggattacatacgggaggtgaacctgggaggtggaggttgcagtgagctgagattgtgccactgcactccagcctgggcracagagtgagactctgtctcaaaaggaaacaaaccaaaacaacaacaacaaaaataaattgtggttaagtagaaaaagtgtcaacttacattttcagatg

SEQ ID NO: 256980 - DNA, 201 bp, Homo sapiens
ctccataagtcattcagaattggagcacttctctccacttccatcaccttggtccaagcaaacctcatctctcacccggaccactacaatggcttcctaasccatctccctgtttccgcccttcccttccgatggtctgctctcatcacaggtgcccaatcaaattactgaaaacctaagactgatcatgtcattcctctg

SEQ ID NO: 256981 - DNA, 201 bp, Homo sapiens
taaacaccacagtagaacatccaactgtttactctgcaccactggatgtctaataggcttctcagacttaatacaccccaactgcactccaagattcctcyccaaaccagctcctccaggcttcctcatagcaaaatatagcaactgtaaattctagttgcccaggctaaaaaccttggcattatccttggctgctttttc

SEQ ID NO: 256982 - DNA, 201 bp, Homo sapiens
agctccgggcttgtcgggggccactgagctgtgagctgcttgcctggcctgcagcatgttgctgtccccggccactgggtggggcagcctggggacagcaggggtggtggaggtgggccgccctgaatcctcagttgggtcattgagtgaccaggccctcaggctgaaatgccccctccaggagagtatctcacagaggct

SEQ ID NO: 256983 - DNA, 201 bp, Homo sapiens
aaaggcaaatgtctggactaaaggactccccttctgacctaaacttgagacccgcccagggactacaccctcagcgtgaaaaggtgtggctgaaaatatcygcctacaggctggggtaagcaacaaagaaacctgtctccattgctgcttctagtcaggagagaaacagtcccccaggagttggtagccacagactagttc

SEQ ID NO: 256984 - DNA, 201 bp, Homo sapiens
aattttacagggaaacgataataacacaattcaggaaagttgctttcttctaaaacagaggtaagagtagagagggaggagcacatagatgttaccggtartggtccagctcttggggtggatggtgggttcatgggtgtttattatgtttcagtaaaaaaatctgtcttatatattacaataaaaacttttattacataa

SEQ ID NO: 256985 - DNA, 201 bp, Homo sapiens
tgcacgggaattacttgaacccaggaggcagaggttgcagtgagctgagatcacgccactgcattccagcctgggtgacagagcaagagtctgtcagaagaaaaaaaaaaagaaattctatcagaaattccatgtagaattgtttctttttttaaacacagagtttgaacaacttactcttgatggacacaaccttccttc

SEQ ID NO: 256986 - DNA, 201 bp, Homo sapiens
gaatcctgacggtcttctctaccatctcagccttatactaagtatcaactgtctcatactagctatgagctcagaaaatcagttctccctatcctgtgtgkcttatactgtggctcacttcccccagatcttaagtgtgccatttcataggaggaaacgagagtgaccctgtcccacctgctgcttggatcatggtgaggc

SEQ ID NO: 256987 - DNA, 201 bp, Homo sapiens
cccataaccccattgcccgtgagttatcactctgaacagcttggtgcattcccttcaagattttttccacctacgtatatatgtataaatgtattacaacmatatgaaataataggtattactgtaacatgagtgttttctcttaatatctaatcaacattgtttctcattaatctacagttataaaatggctgcctggtg

SEQ ID NO: 256988 - DNA, 201 bp, Homo sapiens
ggtggagcagatgtgcattagaaacgaaaccaaccacccggaatggtcatggtctctggataacagtagcttcatcaactccgtcttttccacatgtctamaattttgatattacttaagtcaggcacactgctctattcattctgacatctgaatatccattttaaagtgggctaggctcacccagaggatgatacaact

SEQ ID NO: 256989 - DNA, 201 bp, Homo sapiens
gctgtaaatgcagaatgagcagggaaaagttaaaaaataattcttggaggaagagcatcttaccagcaggacagatgtggctgggaagaggaaagccctcsaggcaagaaggttgtgtgtgtggttcaccattgagtggtctttatcaccagtgagatcacccttcttctgactacagctatctggaactcagtctagtct

SEQ ID NO: 256990 - DNA, 201 bp, Homo sapiens
caactcccaaactgagcttcttgccttgcctccatagcctcagctactgtctagcaccccattttccatggaaccagttctcattggctccaataacatcmtttcctcccttgccctttcaggtctaggggtggtaacagcttcccacaattgctagtccctaagttcaccactgtgtttggttcactcaactctgcccat

SEQ ID NO: 256991 - DNA, 201 bp, Homo sapiens
cctacgtctaaagcccgctgctgcatcaaacatgtgcttcataaatgcctttctgttccacgattcacttcaatgagtttttatttaaatatttaatgacrtagtaagtggtgtaagtacctccttagggaatcttggtaaagtacagggatgtaatcaaatggtttgcaaattgtacttatttatttataactctaattt

SEQ ID NO: 256992 - DNA, 201 bp, Homo sapiens
acgtctaaagcccgctgctgcatcaaacatgtgcttcataaatgcctttctgttccacgattcacttcaatgagtttttatttaaatatttaatgacatartaagtggtgtaagtacctccttagggaatcttggtaaagtacagggatgtaatcaaatggtttgcaaattgtacttatttatttataactctaatttttt

SEQ ID NO: 256993 - DNA, 201 bp, Homo sapiens
attcagacactgggccactgagtcacactgtctggggggcatcagtcttggaggttaggagtcctggccggggaaacaggagactgactatcctatcatgkattgtatacagcacacccatatgtggggatggatgtgggtcttggtcagaaaccatccttgtgggaaaccgagggcattcctagtagatgaagtatcctc

SEQ ID NO: 256994 - DNA, 201 bp, Homo sapiens
gggaaacaggagactgactatcctatcatggattgtatacagcacacccatatgtggggatggatgtgggtcttggtcagaaaccatccttgtgggaaacsgagggcattcctagtagatgaagtatcctctctgctgggggtattttgtcacagtgacaaagtatggtgttttgcaaagctagttgactaccgtcacctc

SEQ ID NO: 256995 - DNA, 201 bp, Homo sapiens
aacccatcataaagattgattgatggcagggtcagactgactatggcttacaattggagctctggttgagttagggtcttgctccctaactcaaacagaartgcagccctggacaggtagcattagcatcatctggaagttcgtgaaaaagcagacttaggcctcatgccaatcctactggatcaaaactcaatttgacaa

SEQ ID NO: 256996 - DNA, 201 bp, Homo sapiens
cacacaccggggcctattgtggggtggggggctaggggagggatagcattcggagaaatacctaatgtagatgacaggtcgatgggtgcagcaaatcaccrtggcacatgtatacctatgtgacaaacctgcacattctgcacatgtaccctagaacctaaagtataataataatttttttaaaagttgtttcttctgctc

SEQ ID NO: 256997 - DNA, 201 bp, Homo sapiens
cccatcataaagattgattgatggcagggtcagactgactatggcttacaattggagctctggttgagttagggtcttgctccctaactcaaacagaagtrcagccctggacaggtagcattagcatcatctggaagttcgtgaaaaagcagacttaggcctcatgccaatcctactggatcaaaactcaatttgacaaga

SEQ ID NO: 256998 - DNA, 201 bp, Homo sapiens
tttcctccattaaaaaaatgaaaaatcatattttatgactgttttggaataatgacaaacacatgaatataatatgttaaaacatcttgtgtacccctaasagtattttggtccctagctactgtgtctcctgtgcctaatgaatgagttggccctgtttgcaagcaatgggaaaagaatgtagcttaactcctttctcag

SEQ ID NO: 256999 - DNA, 201 bp, Homo sapiens
gcattagcatcatctggaagttcgtgaaaaagcagacttaggcctcatgccaatcctactggatcaaaactcaatttgacaagattcccaggcaatttatmtgcccattaaagtttaagaggccctgggttagggtgcttcttttgaaaagaaggtaagtatctcttctagaggccagtcatttacactgtagtaagaaag

SEQ ID NO: 257000 - DNA, 201 bp, Homo sapiens
atttaaggtgcacaattgtccttcagaacggctgcatctgcagtgggtgagggctctctttccccacctttttgccaatgcttggtaatatctgacttaamaagtgatatgcaatgggcaacaaatagctgtgaaaggaagtgctatatagatgacttagtggaaaccatgctgtaaatgcagaatgagcagggaaaagtt

SEQ ID NO: 257001 - DNA, 201 bp, Homo sapiens
agaacggctgcatctgcagtgggtgagggctctctttccccacctttttgccaatgcttggtaatatctgacttaaaaagtgatatgcaatgggcaacaartagctgtgaaaggaagtgctatatagatgacttagtggaaaccatgctgtaaatgcagaatgagcagggaaaagttaaaaaataattcttggaggaagag

SEQ ID NO: 257002 - DNA, 201 bp, Homo sapiens
taaaaagtgatatgcaatgggcaacaaatagctgtgaaaggaagtgctatatagatgacttagtggaaaccatgctgtaaatgcagaatgagcagggaaawgttaaaaaataattcttggaggaagagcatcttaccagcaggacagatgtggctgggaagaggaaagccctcgaggcaagaaggttgtgtgtgtggttca

SEQ ID NO: 257003 - DNA, 201 bp, Homo sapiens
tcttctagaaatagttttagatttttacatcacttgtgcttattcttaacttcctcatttggtctcttggatccttgggtccgtggagctattctggaagrgttactagtatctctttttgcttgtaatgggagcaaaccttaggacctaactggagtcctttgattacatcatcagccatttgggcttgcaatcacataa

SEQ ID NO: 257004 - DNA, 201 bp, Homo sapiens
ccactgcactccagcctgggcaacagagcaagactccatctcaaaaaaataaataaataaaataaaaaataaaaatagaaaaagcttaaaccctaaaaatrgaattaggtgggaaggctaatgtgactgtgagataaaagacccaggcctgatcagtaacattcccaggtagctccatttaccttttccccaaagcagacc

SEQ ID NO: 257005 - DNA, 201 bp, Homo sapiens
ccaggcaatttatatgcccattaaagtttaagaggccctgggttagggtgcttcttttgaaaagaaggtaagtatctcttctagaggccagtcatttacaytgtagtaagaaagcttaatcggaatacttctcatttatcctttagctaaaatatgccagaatgggaatttttgttgcaaggagggaacatcaccaaaccc

SEQ ID NO: 257006 - DNA, 201 bp, Homo sapiens
caattgtgcttagtctcagtaagcacggatagctacagcaccaataacttcatgtctgtgtctagtatacacttgggtcgttggaatttcattagcctcaytcttgagggattatgttcaaggctaccaagactaagtttctgatttcaacctgttttcccaaatgtacaagggactcttgcttttgttacatttatgaac

SEQ ID NO: 257007 - DNA, 201 bp, Homo sapiens
tgaataaactcttccttgagtgatagttttacttgatggcaagtaatttaaacataatttataataattattaattttaattgagttaatatttaaaattygtttctttacatttagtaagcattgttattttatgaaacagaatcttcaataaaccacacgatgtcaaaaaaaaatgagtttgaggcaggccaccttcct

SEQ ID NO: 257008 - DNA, 201 bp, Homo sapiens
tatatgaattttgggaggacacaaacattcacactgtaccactgaccaaccccacatttaagatcccagaaacagtccagcatgatagaaatgaatataagggtattgattactggattcatagggcaccccttatttacagacttaacctccaggctgactttacctctaggggttctttgcacatggggatgatgagga

SEQ ID NO: 257009 - DNA, 201 bp, Homo sapiens
tattttctttaatcagaaaaataacccctgcacttctgggatggaggccccaggtgagcaccggaggaaggggcctggatgagcagggagtgagggggccyggggcccagggcccagagcaaatgctgcaccagagcctggtcaggacccaggagggcctgagggagtggggtcctcatgagcaagtgctgggggctggag

SEQ ID NO: 257010 - DNA, 201 bp, Homo sapiens
tctccattacatgaatgaaaggctccagggcagaatctcagagggtttctatgagcggcttggaaccaagcacagacaactgcacatccctgtttgggttyggaattggaggtggtgggtttgggatgtggttactcttgtttggaatgcattctcctcctcttaacaggttgattcttcctttggaggtctgcttaacct

SEQ ID NO: 257011 - DNA, 201 bp, Homo sapiens
gggtgtgagcaagttctctcctcctgcatccattctctgtcctccccttggaccgacatcagtcagacatgccctccagcttcaggttctgtttagtcgayagaagagggagagaatgggatattcctgctatctcagcaccatttggctgatgcactggccctctgcatcatcaggggagcccctggagctccagtcttc

SEQ ID NO: 257012 - DNA, 201 bp, Homo sapiens
aatgaataataatgatctttgtgcagaagaacaggtttttcagacaaagcactaacagctggagatggaagatgaaataaaatagaattttagagtagcargttaaacacaagggaggaatttcatagcactgtctgactgaggtgatttgatgtctgtctgtaggaggccaggttgagaggcgtaggttagattatcctt

SEQ ID NO: 257013 - DNA, 201 bp, Homo sapiens
gaatcaactattgtttggactgctttggtgcattggggctgacagctacttgaatgtccgaggctcgggattatccaggactagccctttgagcttggtcyggaggtttagtccttctagtatcatggatacacaactctgcttgtctatccagtctttcataattcagcacattgaaccaattactttgccaattggctc

SEQ ID NO: 257014 - DNA, 201 bp, Homo sapiens
aaagggattaagcagcacctggaggtgtataagttgtttaaaagatttatcagcatttccatgttaaaatacacttctcaaggattctcatatcctggatmtgaatctattttgggcagaggagtaaatttttaggatgtctcataaatggagaaaaaaatcatccctctatcgcttcttgctttgttttttgtttttttt

SEQ ID NO: 257015 - DNA, 201 bp, Homo sapiens
ttaagctagtgcagatttatgagactttaaacaccatggatggagttactggaggtttaaagggattaagcagcacctggaggtgtataagttgtttaaamgatttatcagcatttccatgttaaaatacacttctcaaggattctcatatcctggatatgaatctattttgggcagaggagtaaatttttaggatgtctc

SEQ ID NO: 257016 - DNA, 201 bp, Homo sapiens
ccctctggttgctccaagaacacagatattaatgtagcacagatattaatattaatattaattagcacagatataaatgtagtcacagaaagaaaaagagrtgaaaaagagacaggttcttcagtgcatgagagactccctttgggatctctcagaaatgtggaagcagaggctatagcacaagcctgggttattgctagt

SEQ ID NO: 257017 - DNA, 201 bp, Homo sapiens
ctctgtggtctgggtctattgccccacagaaggtagatggcatcctggataagatcaggtcttccaaagcagactcggggttggaatttttgctccatcayttaccagccgtgctacttggggtaaattacttaaacagtctgaaccttagcttcctcatctgtaaaacagaaataataataatatttctcatggggctgc

SEQ ID NO: 257018 - DNA, 201 bp, Homo sapiens
gccgtgggctcccggaccttcttggcccgccccccgagcttccgcttccggaaaggatcacgccgaaggccgcacttcatagtctccgacgcacctccaarccctttctcctgctctaggcccagcgccttggacgtgcacagtagatccctcccggcttcccggcttcccgtctcgtcaccctctggtaggggatgggag

SEQ ID NO: 257019 - DNA, 201 bp, Homo sapiens
tgggtctattgccccacagaaggtagatggcatcctggataagatcaggtcttccaaagcagactcggggttggaatttttgctccatcatttaccagccrtgctacttggggtaaattacttaaacagtctgaaccttagcttcctcatctgtaaaacagaaataataataatatttctcatggggctgctgtggggata

SEQ ID NO: 257020 - DNA, 201 bp, Homo sapiens
taagaaagacaatatgcaaacaactctcatttcacattaattctgctgttgctcctttttctcttaactttgtttttctgagacagggtctggctctgtcstccaggctggagtaagtgatgcaatctcggctcactgcaacctctgcctcctgggctcaagccattctcccaattaactgatacagacacacaccaccac

SEQ ID NO: 257021 - DNA, 201 bp, Homo sapiens
atcctggataagatcaggtcttccaaagcagactcggggttggaatttttgctccatcatttaccagccgtgctacttggggtaaattacttaaacagtcygaaccttagcttcctcatctgtaaaacagaaataataataatatttctcatggggctgctgtggggataaaattagataatgtacccaaagctcttcaca

SEQ ID NO: 257022 - DNA, 201 bp, Homo sapiens
cagccgtgctacttggggtaaattacttaaacagtctgaaccttagcttcctcatctgtaaaacagaaataataataatatttctcatggggctgctgtgrggataaaattagataatgtacccaaagctcttcacacagaaaagccttcccctgctggatctctcatgtaccccctggattttctaggagagtgtggctt

SEQ ID NO: 257023 - DNA, 201 bp, Homo sapiens
tccatgggtctagggtgtagcctgagattctgcatttctaacatgttctcaggtgccgctgccgctactgctagcctcagtagcactcaaagaattattgkcctatatcattcttttccttcctcttctccttccctttctccttttctttcagatcgatatttcatgtcctcacttttctgttcccagagcagtataata

SEQ ID NO: 257024 - DNA, 201 bp, Homo sapiens
gtctctggataacagtagcttcatcaactccgtcttttccacatgtctaaaattttgatattacttaagtcaggcacactgctctattcattctgacatcygaatatccattttaaagtgggctaggctcacccagaggatgatacaactagattaagaaaatgaaatgaaggatgaaaactcctggttcgtgctttcgcc

SEQ ID NO: 257025 - DNA, 201 bp, Homo sapiens
cctaactcaaacagaagtgcagccctggacaggtagcattagcatcatctggaagttcgtgaaaaagcagacttaggcctcatgccaatcctactggatcwaaactcaatttgacaagattcccaggcaatttatatgcccattaaagtttaagaggccctgggttagggtgcttcttttgaaaagaaggtaagtatctct

SEQ ID NO: 257026 - DNA, 201 bp, Homo sapiens
tgtcctcccattggtccttgagctttactaagatagtttctttggccagagtccctttgaggttgctataaagagaacccaacttacctatggagattctrttgcttctgctctgtcttctgctcatctattatttctcagccctaatggaactagtatgcaaaacactagtagggagataatattgaatcttgtcagcct

SEQ ID NO: 257027 - DNA, 201 bp, Homo sapiens
caagactttggggtttgaaaggtcactgggacaggccagaaaagaggaagcagaaaacatatcaattcttagagtgtgatatgtgagattcttccaaatgmtctgtggtctgggtctattgccccacagaaggtagatggcatcctggataagatcaggtcttccaaagcagactcggggttggaatttttgctccatcat

SEQ ID NO: 257028 - DNA, 201 bp, Homo sapiens
tcacttggtggtacgtccctgcaggccaactggaacttgaagcaagtgacacaagctggagactcttattttctctacaggactgaagtttcagtaaagastcagttaacacagtggatttttccaagactttggggtttgaaaggtcactgggacaggccagaaaagaggaagcagaaaacatatcaattcttagagtgt

SEQ ID NO: 257029 - DNA, 201 bp, Homo sapiens
tccctgcaggccaactggaacttgaagcaagtgacacaagctggagactcttattttctctacaggactgaagtttcagtaaagagtcagttaacacagtrgatttttccaagactttggggtttgaaaggtcactgggacaggccagaaaagaggaagcagaaaacatatcaattcttagagtgtgatatgtgagattct

SEQ ID NO: 257030 - DNA, 201 bp, Homo sapiens
attcttagagtgtgatatgtgagattcttccaaatgctctgtggtctgggtctattgccccacagaaggtagatggcatcctggataagatcaggtcttcyaaagcagactcggggttggaatttttgctccatcatttaccagccgtgctacttggggtaaattacttaaacagtctgaaccttagcttcctcatctgta

SEQ ID NO: 257031 - DNA, 201 bp, Homo sapiens
tttgctcatttctttttattcttttttctctaaacttcccttctcacttcatttcattcatttcatcttccattgctgataccatttcttccagttgactgcatcggctcctgaggcttctgcattcttcacgtagttctcgagccttggttttcagctccatcagctcctttaagcacttctctgtattggttattctag

SEQ ID NO: 257032 - DNA, 201 bp, Homo sapiens
ccccttttaaacagtgtctattgatatatattctaggtgtctggaagtctttttctacagtcggctcttggttgtctctgggaatatgaatggaaggagcrgagtgaaaataaatctgagggcaatattcataaataatccaagagctacactgtagtcaactctccccagagcctgaccacagtgtttccctctctcctc

SEQ ID NO: 257033 - DNA, 201 bp, Homo sapiens
tttagttttgaattagatcaaactgtgaaaacctctcctttccttccccagccctcacataacttcataactttctaacatattcacctgaaattaagggktttttttttagttgttggtttttaaaaattcatgttgacttttcttaatacatgtttattttagaaaatatagataagcaaaaaggaaaagaccacccat

SEQ ID NO: 257034 - DNA, 201 bp, Homo sapiens
tatacatatgtaacaaacctgcacgttgtacacatgtaccctagaacttaaagtataatttaaaaaataaagaaatgcggggccactttggctaggaaggyagacagcaggtagcattagttgttgcccatcccctgcaggtgcagcccactgctatgggggaagaatttgtttcagtctcttttattgcttcactcgagt

SEQ ID NO: 257035 - DNA, 201 bp, Homo sapiens
tggagtgccccaggatttacacttggacttctctatctacatgcactctcttttttatctcattcagtttcatgttttggatattacatttatgtcttcasccctaatccttccctaaacaccacagtagaacatccaactgtttactctgcaccactggatgtctaataggcttctcagacttaatacaccccaactgca

SEQ ID NO: 257036 - DNA, 201 bp, Homo sapiens
tcttgaacatcaagataaaccttcctccaaagcatctgggtccatctaaatagaatcacctagtgctttatttcattttacgtaatactaacccttttatygctggggaaatattggttgagaatgagtgccaggaattttaacagaagggttactacagaagcaaaccctccttacaatgaaacttgaacattaaaggag

SEQ ID NO: 257037 - DNA, 201 bp, Homo sapiens
cgccttgggctcccaaaatgctgggattacatacgggaggtgaacctgggaggtggaggttgcagtgagctgagattgtgccactgcactccagcctgggygacagagtgagactctgtctcaaaaggaaacaaaccaaaacaacaacaacaaaaataaattgtggttaagtagaaaaagtgtcaacttacattttcagat

SEQ ID NO: 257038 - DNA, 201 bp, Homo sapiens
ctaaatctgtacagaggaaaaaaggattttttaaaatttttttagtatttattgatcattcttgggtgtttctcggagaggggggaagaaaggaatttttwaaaaacacaaaaaagcaaacaaaacatgcctcccaatgtgaaatggcagcccaacgtatacctgccaagtgctgaagaatgtaggtcttaaaatagactg

SEQ ID NO: 257039 - DNA, 201 bp, Homo sapiens
ggcatcctggataagatcaggtcttccaaagcagactcggggttggaatttttgctccatcatttaccagccgtgctacttggggtaaattacttaaacartctgaaccttagcttcctcatctgtaaaacagaaataataataatatttctcatggggctgctgtggggataaaattagataatgtacccaaagctcttc

SEQ ID NO: 257040 - DNA, 201 bp, Homo sapiens
gccagaaaagaggaagcagaaaacatatcaattcttagagtgtgatatgtgagattcttccaaatgctctgtggtctgggtctattgccccacagaaggtwgatggcatcctggataagatcaggtcttccaaagcagactcggggttggaatttttgctccatcatttaccagccgtgctacttggggtaaattacttaa

SEQ ID NO: 257041 - DNA, 201 bp, Homo sapiens
gcgactgtcacagccgggtcctcaaacagctccgagggaatgtccttctcaatggcctctcattagaggcagacatcactgccaacttagacagccccagrgtgacagtggcccagctggactgggacatcgcgacggtccatcagctctctgccatccagccagatgttgtcattgcagcaggtaatgcccagccccggg

SEQ ID NO: 257042 - DNA, 201 bp, Homo sapiens
gctccgagggaatgtccttctcaatggcctctcattagaggcagacatcactgccaacttagacagccccagggtgacagtggcccagctggactgggacrtcgcgacggtccatcagctctctgccatccagccagatgttgtcattgcagcaggtaatgcccagccccgggcaccctgtgcaggcggtgtccttgcagc

SEQ ID NO: 257043 - DNA, 201 bp, Homo sapiens
aagagttactctgggcctccagggtgacatcaaaggacaggggtgcctcttaaggtgaccttcaagccacagccctcttgttggagacaggcatactcccrttacagtcgtcaccacatggctctgtcccagagccatgcttgtgtctttcagagaccacaggaggaaaacaaccacttctgggatgaggacagggccctt

SEQ ID NO: 257044 - DNA, 201 bp, Homo sapiens
gccccacctcccgggccccaaacctggactcggccccgcccgaagctccggatcctggggcccgccgctggccccgcgtcggcagaccgtgggctcgctcytgggcctgcctcaaaccctccgcaggtaacgcctcccgaacttgagccacactccaatcccctcctcaaacccctccccgtttctcacaccctggacccc

SEQ ID NO: 257045 - DNA, 201 bp, Homo sapiens
cccagagccatgcttgtgtctttcagagaccacaggaggaaaacaaccacttctgggatgaggacagggcccttgagagaaggtggtgtttggctgggccrccgaaaacccctcgcccctgccagcacactcagtctcctctctggtcgaacagagctgtgcctgttgtcctgggtcccagccctgaaaaccacaggtcca

SEQ ID NO: 257046 - DNA, 201 bp, Homo sapiens
agagccatgcttgtgtctttcagagaccacaggaggaaaacaaccacttctgggatgaggacagggcccttgagagaaggtggtgtttggctgggccgccraaaacccctcgcccctgccagcacactcagtctcctctctggtcgaacagagctgtgcctgttgtcctgggtcccagccctgaaaaccacaggtccagcg

SEQ ID NO: 257047 - DNA, 201 bp, Homo sapiens
cggggcaatacagtaggtcagggcttcgagcatggagatacctgaagttatctcgcaccctgctctgagttgcacccttagcctcactcttgtaggtggtkaagcatgaaatgtagggatagctgctttcaaacccagcacaaggctgggtgcactggctcacacctgtaatcccaggactttgggaagctgaggtggacg

SEQ ID NO: 257048 - DNA, 201 bp, Homo sapiens
acgggatgggtctccgtgcagaagcccccgacacgcccgccacgtgagtgcctgggctcccgccagtcaggtccgcgcgacccggtccccatccctggggmctggccagagtcgctcacacccttcctgccccgcgggctggcggcataagctgggggcctctccaccgtcttagggggcagaggcgcactcgttgtggga

SEQ ID NO: 257049 - DNA, 201 bp, Homo sapiens; identical to SEQ ID NO: 51361

SEQ ID NO: 257050 - DNA, 201 bp, Homo sapiens
aagcccccgacacgcccgccacgtgagtgcctgggctcccgccagtcaggtccgcgcgacccggtccccatccctggggcctggccagagtcgctcacacycttcctgccccgcgggctggcggcataagctgggggcctctccaccgtcttagggggcagaggcgcactcgttgtgggatacagttcacgatcattttca

SEQ ID NO: 257051 - DNA, 201 bp, Homo sapiens
atcggctcatgctctgaggctctcacacctgtgatggaagagacagagaagggggtggcctctcgtctccctggggacctaccattctcagcacaggcacrtggcaggcagcagcctcccttctgccagtagaggggcttaatgcacccggccccatttgtaattcatgtgcagtgagctcactgggatgagtcagtttgg

SEQ ID NO: 257052 - DNA, 201 bp, Homo sapiens
tctcgtctccctggggacctaccattctcagcacaggcacatggcaggcagcagcctcccttctgccagtagaggggcttaatgcacccggccccatttgyaattcatgtgcagtgagctcactgggatgagtcagtttggatatatattcctccctggaattttatggggtgttgcttaatcatttgcgttattccattg

SEQ ID NO: 257053 - DNA, 201 bp, Homo sapiens
ggggacctaccattctcagcacaggcacatggcaggcagcagcctcccttctgccagtagaggggcttaatgcacccggccccatttgtaattcatgtgcrgtgagctcactgggatgagtcagtttggatatatattcctccctggaattttatggggtgttgcttaatcatttgcgttattccattgatatgaaatatt

SEQ ID NO: 257054 - DNA, 201 bp, Homo sapiens
agaaaccttcataaaagcatcataggtctccattcaatattggctataattgttcacatgcccacgctgaatgctaacttgggctcaccctcaacacccaygaggtgggtactattattatcactcacatttgaccagagggattgtttgattagggtgcagtagttgagagttcagacccaggagacagcctgcctgctt

SEQ ID NO: 257055 - DNA, 201 bp, Homo sapiens
gattagggtgcagtagttgagagttcagacccaggagacagcctgcctgcttcaaatcctgtcccaacccctggccctgtgtgaccttgggcaagtgactrcatctctctgtgctgttgttttcttattaataaaatgggggatataatgatacctacctcttagggttgttgtcagggttgagtacaaaagcctgtggat

SEQ ID NO: 257056 - DNA, 201 bp, Homo sapiens
tgttttcttattaataaaatgggggatataatgatacctacctcttagggttgttgtcagggttgagtacaaaagcctgtggatcagtgcctggctcatgrtaaatgcatgtcggtgttagctagtgtttttattcagtctcaaaatgtttaataaatgccttccgtgagccaggcaccatggatcagcagtacccatgac

SEQ ID NO: 257057 - DNA, 201 bp, Homo sapiens
gagccagagaataaacaaataaataaataaacaagaaaagaccagatgagagtggctttaaagccaataaaacagggaaatggtgaatggagcaactgggragaaaagtcaccaaagtcggggaatcagggaagccttccccaaagaggtggcttttgaactggggcctgagtggtgaagcagccagccatgggaagggct

SEQ ID NO: 257058 - DNA, 201 bp, Homo sapiens
cagatgagagtggctttaaagccaataaaacagggaaatggtgaatggagcaactggggagaaaagtcaccaaagtcggggaatcagggaagccttccccwaagaggtggcttttgaactggggcctgagtggtgaagcagccagccatgggaagggcttggggaacaggatatgcaaaggccctgtggtggaaacaagcc

SEQ ID NO: 257059 - DNA, 201 bp, Homo sapiens
agccagcagacaaatcggcagacgcctgaaacacgaagttcatggcagggtcaggctttgtgtcattcacagccctctagataggctgagaaccagagctsgttttttaaggaacaccagtgagtctggagatttttttcttttgcttcggtcttttgcagctttctctactaagggttctcctttttcacccaagtaatt

SEQ ID NO: 257060 - DNA, 201 bp, Homo sapiens
gggaatgtccttctcaatggcctctcattagaggcagacatcactgccaacttagacagccccagggtgacagtggcccagctggactgggacatcgcgayggtccatcagctctctgccatccagccagatgttgtcattgcagcaggtaatgcccagccccgggcaccctgtgcaggcggtgtccttgcagctctaccc

SEQ ID NO: 257061 - DNA, 201 bp, Homo sapiens
tcgtgcctccacactacacccaagccccccattgccaccagcctttgccccagctccccctgagcacagcccctcctggcagccatgtgcacagatgcacrcgcaggagcctctgcctgcacacacagacacgggtccaatgcctgtccacgtggggcagcccgttaactacagagccaacaaacaagccagcacacgaag

SEQ ID NO: 257062 - DNA, 201 bp, Homo sapiens
agcacagcccctcctggcagccatgtgcacagatgcacgcgcaggagcctctgcctgcacacacagacacgggtccaatgcctgtccacgtggggcagccygttaactacagagccaacaaacaagccagcacacgaagacacactaggttccatgacagagtccctcacaacctcgcacaggaggctggccgggcgcggg

SEQ ID NO: 257063 - DNA, 201 bp, Homo sapiens
aaaacagggaaatggtgaatggagcaactggggagaaaagtcaccaaagtcggggaatcagggaagccttccccaaagaggtggcttttgaactggggccygagtggtgaagcagccagccatgggaagggcttggggaacaggatatgcaaaggccctgtggtggaaacaagccagctgtggttgaggaacaacagcaag

SEQ ID NO: 257064 - DNA, 201 bp, Homo sapiens
gtttcgccatgttggccaggctggtcttgaactcttgacctcaagcgatctgctgcctcagcctcccaaagtgttaggattacaggcatgagctactgcayccagccccatttttgtttaaaaaataataataatcacccacacatggttatgagtacctatattcccaactactcaggaggctgaggtgggaggatggct

SEQ ID NO: 257065 - DNA, 201 bp, Homo sapiens
tgagctactgcacccagccccatttttgtttaaaaaataataataatcacccacacatggttatgagtacctatattcccaactactcaggaggctgaggygggaggatggcttaagcccaggagtttgtggcccccttgagcaacatagcaagacttcatctcaaaaaaaaattatcacaataatcattttcacataagt

SEQ ID NO: 257066 - DNA, 201 bp, Homo sapiens
acaatctcggctcactgcaacctccgcttcctgggttcaggcaattctcctgcctcagcctcccaagtagctggaattacaggcacccgccatcgtgcctrgctagtttttgtatttttgtagagatgggttttaccatgttggccaggctggtctcgaactcctgaactaaagtgatccacccgccttggcctcccaaag

SEQ ID NO: 257067 - DNA, 201 bp, Homo sapiens
ctcggctcactgcaacctccgcttcctgggttcaggcaattctcctgcctcagcctcccaagtagctggaattacaggcacccgccatcgtgcctggctartttttgtatttttgtagagatgggttttaccatgttggccaggctggtctcgaactcctgaactaaagtgatccacccgccttggcctcccaaagtgttg

SEQ ID NO: 257068 - DNA, 201 bp, Homo sapiens
ggctagtttttgtatttttgtagagatgggttttaccatgttggccaggctggtctcgaactcctgaactaaagtgatccacccgccttggcctcccaaastgttgggattacaggtgtgagccactgtgcctggccgctttctaagctttgtgaagagtgggttgacggagcagccaggtagatgtgggttcagatctct

SEQ ID NO: 257069 - DNA, 201 bp, Homo sapiens
cggagcagccaggtagatgtgggttcagatctctgcttctgtcctgctgtgccaagtgctggggcagacgcgggtagagagtggacagcggcatggtgccygctgctagccatttctatgcaaaaccagatttctggtcccatcctggaggccaattctaggcacctgggtgggcctgggaacctgtgaaccaagtaaact

SEQ ID NO: 257070 - DNA, 201 bp, Homo sapiens
ccccaccccgccaggcctgtcctagcagccccacacaatacgctcatgtcctgtccccaaacactgccatcctgaaacacatgtgctctgtttccaggccrggccaggatcagatgggaagtggaacctcgtcatgaccagaaactgtttccctatgaagagcacttggagatggcaatgctgaacctcacactgtaggac

SEQ ID NO: 257071 - DNA, 201 bp, Homo sapiens
aggtcttgtaaggccttttacagcatggaaggagctctgaagcaatgaagtgccttgccctgtgtcacataccagctgagacagtctgcctaactcgggarccaaagtttgctgctgggcttgaggcccctgtgagaggacaatgtaacccaggctggtatgggcacattctgcatttccacttaaactcagatggcaagc

SEQ ID NO: 257072 - DNA, 201 bp, Homo sapiens
gtgagaggacaatgtaacccaggctggtatgggcacattctgcatttccacttaaactcagatggcaagcccatcaaaccttggtgccatggctgccctgktaattcctggctgaccagtgcaaccagggagctggcccatgacccaggtggccgctaagtagccaggactaatgtggccaagagtcagtcttctagcctt

SEQ ID NO: 257073 - DNA, 201 bp, Homo sapiens
accctttaaaaacacccctgttcaaagaacattgaacattgagtcagcactgcaggtgggtgttggcacctctgacagctccagctctttcattttctatstaagacttagacaaagacatcagaatatacaaaaatctgcatgagagggggaaatctaaggaaagttttttaaaccatccacagcaaaaacagagatgac

SEQ ID NO: 257074 - DNA, 201 bp, Homo sapiens
acatacatctttgctgagagatggggtagcctggagtttgccctctgttgtgttggcttgaagctcataggagacttaagacgggctctcgagcaaccaaygttctgtcctttgctgtagactgtgaagcatcctgtgtgtgtgacgcacccgccgtcagtcaagtatgcccggtgctttctctcagaactcatcaaaaag

SEQ ID NO: 257075 - DNA, 201 bp, Homo sapiens
gcatagccacctgcgtgctagagcccccatccttcccaggccctgggcctgctttgcaaaccccagcatggcaggggcctccccaggcgactggctgcagmcacgtgtgacccatgggagacagtgcagggcgggaagaaggggaggtcagcgtctctccctcactctgcctcctggggtttccgcagcagctgcttctct

SEQ ID NO: 257076 - DNA, 201 bp, Homo sapiens
ccatccttcccaggccctgggcctgctttgcaaaccccagcatggcaggggcctccccaggcgactggctgcagccacgtgtgacccatgggagacagtgyagggcgggaagaaggggaggtcagcgtctctccctcactctgcctcctggggtttccgcagcagctgcttctctggggccccagctcccagcatatggat

SEQ ID NO: 257077 - DNA, 201 bp, Homo sapiens
gtgccaccaggagagggcagcagtcacccagtataccctgctgctgccctgtgaattttaggatggggccagccctggagaagcagcctgctgacagccayagcctgcagcatgggccgccctcacagttctgcctgggctcacttaaaagcaccttttgttttcctgctctctgtcatggtcatgtggcagctctcacgg

SEQ ID NO: 257078 - DNA, 201 bp, Homo sapiens
ctcacagttctgcctgggctcacttaaaagcaccttttgttttcctgctctctgtcatggtcatgtggcagctctcacggaatccttgtctcctgccctaractacacctaactctaccctctcaacacctctcattgaaggccctcccatccaggtttccctaccaagtgaattttttttttagagacaaggtctcttgc

SEQ ID NO: 257079 - DNA, 201 bp, Homo sapiens
gtgaaaatcatctggccatttttacagattagaacgaaagcaaacaagctctcactctgtctgcccccagcacgaggctgtccacacggagcctttggacragctgtatgaggtgctggtggagaccctgatggccaaggagtccactcagggccactggagctatttgctggtatgagaagggtaccctcctccccctca

SEQ ID NO: 257080 - DNA, 201 bp, Homo sapiens
acactgccatcctgaaacacatgtgctctgtttccaggccaggccaggatcagatgggaagtggaacctcgtcatgaccagaaactgtttccctatgaagmgcacttggagatggcaatgctgaacctcacactgtaggactcacacacgactccaatgggattgtgagaatcaagtcactctcaagggaagaggtttcat

SEQ ID NO: 257081 - DNA, 201 bp, Homo sapiens; identical to SEQ ID NO: 51349

SEQ ID NO: 257082 - DNA, 201 bp, Homo sapiens
tttacagattagaacgaaagcaaacaagctctcactctgtctgcccccagcacgaggctgtccacacggagcctttggacgagctgtatgaggtgctggtrgagaccctgatggccaaggagtccactcagggccactggagctatttgctggtatgagaagggtaccctcctccccctcacagcccagatacccttcctg

SEQ ID NO: 257083 - DNA, 201 bp, Homo sapiens; identical to SEQ ID NO: 51350

SEQ ID NO: 257084 - DNA, 201 bp, Homo sapiens; identical to SEQ ID NO: 51352

SEQ ID NO: 257085 - DNA, 201 bp, Homo sapiens; identical to SEQ ID NO: 51353

SEQ ID NO: 257086 - DNA, 201 bp, Homo sapiens; identical to SEQ ID NO: 51354

SEQ ID NO: 257087 - DNA, 201 bp, Homo sapiens; identical to SEQ ID NO: 51355

SEQ ID NO: 257088 - DNA, 201 bp, Homo sapiens; identical to SEQ ID NO: 51357

SEQ ID NO: 257089 - DNA, 201 bp, Homo sapiens
ataaatgccttccgtgagccaggcaccatggatcagcagtacccatgacagatgaggctctgcttgcatgggagagccagagaataaacaaataaataaakaaacaagaaaagaccagatgagagtggctttaaagccaataaaacagggaaatggtgaatggagcaactggggagaaaagtcaccaaagtcggggaatca

SEQ ID NO: 257090 - DNA, 201 bp, Homo sapiens; identical to SEQ ID NO: 51358

SEQ ID NO: 257091 - DNA, 201 bp, Homo sapiens; identical to SEQ ID NO: 51359

SEQ ID NO: 257092 - DNA, 201 bp, Homo sapiens
gctcttccccatagtaacaccacctggaattttacgtttggttttaagcatcagtcctaatcttcacttgcacctgaacacactgcacctgtgagagccamgtgacattaaaaaaaatcccttcagtgaggccgggcatggtggctcacgcctgtaatcccagccctttgggaggccaaggcagatggatcatgaggtcaa

SEQ ID NO: 257093 - DNA, 201 bp, Homo sapiens
cccggcatggtggctcacgcctgtaatcccactacttgggaggctgaggcaggagaatcgcttgaacccgggaggtggaggttgcagtgagccgagattgygccattgcactccagcctgggcaacaagagagtgaaactctgtctcaaaaaaaaaaaaaaaaaaaaaaaaaaaagaagaaaagatttcttctgtgtgcat

SEQ ID NO: 257094 - DNA, 201 bp, Homo sapiens
tgtctgcccccagcacgaggctgtccacacggagcctttggacgagctgtatgaggtgctggtggagaccctgatggccaaggagtccactcagggccackggagctatttgctggtatgagaagggtaccctcctccccctcacagcccagatacccttcctgcacagacaaagtgaaaacgtgggtgtgggttcaaatc

SEQ ID NO: 257095 - DNA, 201 bp, Homo sapiens
actctgtctttactaaaaatacaaaaattagcggggtgtggtagtgggcgcctgtaatcccagctactcgggaggctgaggcaggagaacctcttgaaacygggaggtggaggttgtagtgagccaagatcgcgccattgcactcctgcctgggcaaagagagtgaaactctgtctaaaaaaaaagtagaaaaattagcca

SEQ ID NO: 257096 - DNA, 201 bp, Homo sapiens
gtggcacatgtctgtagtcgtacctacttgggcggctgaggcaggagaattgcttgaacccaggaggcagaggttgcagtgagccaagattgtgccactgrctccagcctggggaacagagctcaaaaaaaataagataaaacatagatacagaaaaccacaaaggaaaaacatagcatattgaatcatcacaaggcagcc

SEQ ID NO: 257097 - DNA, 201 bp, Homo sapiens
gttgcagtgagccaagattgtgccactgactccagcctggggaacagagctcaaaaaaaataagataaaacatagatacagaaaaccacaaaggaaaaacatagcatattgaatcatcacaaggcagccaccccttcatagccacacctggcccctggccaccactgacctgtgctccatcgccagaattccattgtctca

SEQ ID NO: 257098 - DNA, 201 bp, Homo sapiens
ttgcagtgagccaagattgtgccactgactccagcctggggaacagagctcaaaaaaaataagataaaacatagatacagaaaaccacaaaggaaaaacatagcatattgaatcatcacaaggcagccaccccttcatagccacacctggcccctggccaccactgacctgtgctccatcgccagaattccattgtctcag

SEQ ID NO: 257099 - DNA, 201 bp, Homo sapiens
attgtgccactgactccagcctggggaacagagctcaaaaaaaataagataaaacatagatacagaaaaccacaaaggaaaaacatagcatattgaatcawcacaaggcagccaccccttcatagccacacctggcccctggccaccactgacctgtgctccatcgccagaattccattgtctcaggaatgttcaatgaat

SEQ ID NO: 257100 - DNA, 201 bp, Homo sapiens
gataaaacatagatacagaaaaccacaaaggaaaaacatagcatattgaatcatcacaaggcagccaccccttcatagccacacctggcccctggccaccrctgacctgtgctccatcgccagaattccattgtctcaggaatgttcaatgaatggaatcctgtgtggcctgaggtgagtgtctttcatgccacgtgacac

SEQ ID NO: 257101 - DNA, 201 bp, Homo sapiens
gccaccactgacctgtgctccatcgccagaattccattgtctcaggaatgttcaatgaatggaatcctgtgtggcctgaggtgagtgtctttcatgccacrtgacacccttgaggcctgtacaagctgttggcatgtcaacagttagctgcttctcattgctgagtggcgattggtcctgtcatggtttattcagccatgt

SEQ ID NO: 257102 - DNA, 201 bp, Homo sapiens; identical to SEQ ID NO: 51351

SEQ ID NO: 257103 - DNA, 201 bp, Homo sapiens
catcgccagaattccattgtctcaggaatgttcaatgaatggaatcctgtgtggcctgaggtgagtgtctttcatgccacgtgacacccttgaggcctgtrcaagctgttggcatgtcaacagttagctgcttctcattgctgagtggcgattggtcctgtcatggtttattcagccatgtggtggatggctacttgtctt

SEQ ID NO: 257104 - DNA, 201 bp, Homo sapiens
ggatggctacttgtcttctaagccacttgccttctgattgctggaatgactctctcgccctctcttggtgcagccctcaggaggctcagtcacactctcckagagcacagccatcatctcccaggcatcacaggcctggtcacatgggatgctaccctctaccttgcagaatgggccatcgagaacccggcagccttcact

SEQ ID NO: 257105 - DNA, 201 bp, Homo sapiens; identical to SEQ ID NO: 51360

SEQ ID NO: 257106 - DNA, 201 bp, Homo sapiens
ggacccctcgctccgtctcggccccgccccaagcccagctccctctcggcccctgagcccagccccgatccgcctcccagtcccttggtccctgccaacaycggaccctccctaagctccgcctcccagggcccgcctcctgagcgcagcccgcagcctagactcggccccgcctcccggaccctgggcccctccccacgt

SEQ ID NO: 257107 - DNA, 201 bp, Homo sapiens
catgacgctcatcctggccccaccccaagcccccgcctcataacgctcatcctggccccgccctagagccgcccccacgactctcctcctgaccctacccscaggccccgccccctctctgcccccgcgcactgccctgggcccgccccgtcttcagtccaggcccggcttccgcacggtctcccggcaacactgcggccc

SEQ ID NO: 257108 - DNA, 201 bp, Homo sapiens
ccgcaggccccgccccctctctgcccccgcgcactgccctgggcccgccccgtcttcagtccaggcccggcttccgcacggtctcccggcaacactgcggccccgcccacgtcatggcgcccgaggagaacgctgggacctaactcttgctgcagagtttgcagcgccgctttctggcggcgcgcgcgctgcgctccttcc

SEQ ID NO: 257109 - DNA, 201 bp, Homo sapiens
caggcccggcttccgcacggtctcccggcaacactgcggccccgcccacgtcatggcgcccgaggagaacgctgggacctaactcttgctgcagagtttgsagcgccgctttctggcggcgcgcgcgctgcgctccttcccctggcaggtgggcggcggggcgagcggagaggcccgcagggctcgcgggagtccaggggc

SEQ ID NO: 257110 - DNA, 201 bp, Homo sapiens
cacttgccttctgattgctggaatgactctctcgccctctcttggtgcagccctcaggaggctcagtcacactctcctagagcacagccatcatctcccasgcatcacaggcctggtcacatgggatgctaccctctaccttgcagaatgggccatcgagaacccggcagccttcactcataggtgaccttggggtgcagg

SEQ ID NO: 257111 - DNA, 201 bp, Homo sapiens
ggcaacactgcggccccgcccacgtcatggcgcccgaggagaacgctgggacctaactcttgctgcagagtttgcagcgccgctttctggcggcgcgcgcrctgcgctccttcccctggcaggtgggcggcggggcgagcggagaggcccgcagggctcgcgggagtccaggggcagacgggatgggtctccgtgcagaag

SEQ ID NO: 257112 - DNA, 201 bp, Homo sapiens
ctcgccctctcttggtgcagccctcaggaggctcagtcacactctcctagagcacagccatcatctcccaggcatcacaggcctggtcacatgggatgctrccctctaccttgcagaatgggccatcgagaacccggcagccttcactcataggtgaccttggggtgcagggcaggggaccgaggcaggcttaccctggtg

SEQ ID NO: 257113 - DNA, 201 bp, Homo sapiens
gagaggcccgcagggctcgcgggagtccaggggcagacgggatgggtctccgtgcagaagcccccgacacgcccgccacgtgagtgcctgggctcccgccrgtcaggtccgcgcgacccggtccccatccctggggcctggccagagtcgctcacacccttcctgccccgcgggctggcggcataagctgggggcctctcc

SEQ ID NO: 257114 - DNA, 201 bp, Homo sapiens
catacatcttcagcgactgtcacagccgggtcctcaaacagctccgagggaatgtccttctcaatggcctctcattagaggcagacatcactgccaacttagacagccccagggtgacagtggcccagctggactgggacatcgcgacggtccatcagctctctgccatccagccagatgttgtcattgcagcaggtaatg

SEQ ID NO: 257115 - DNA, 201 bp, Homo sapiens
atacatcttcagcgactgtcacagccgggtcctcaaacagctccgagggaatgtccttctcaatggcctctcattagaggcagacatcactgccaacttagacagccccagggtgacagtggcccagctggactgggacatcgcgacggtccatcagctctctgccatccagccagatgttgtcattgcagcaggtaatgc

SEQ ID NO: 257116 - DNA, 201 bp, Homo sapiens
acatcttcagcgactgtcacagccgggtcctcaaacagctccgagggaatgtccttctcaatggcctctcattagaggcagacatcactgccaacttagacagccccagggtgacagtggcccagctggactgggacatcgcgacggtccatcagctctctgccatccagccagatgttgtcattgcagcaggtaatgccc

SEQ ID NO: 257117 - DNA, 201 bp, Homo sapiens
aagtgagcacagtcatggataccgttggccggaggcttcgggactccctgggccgaactgtggacctggggctgacaggcaaccatggagttgtgcacccyagtcttgcggtgagtgggcctaacaggcataccccctatttcaatgccctcctgccagatctccttgtggcagaaaagatctcactgtggggggtctggg

SEQ ID NO: 257118 - DNA, 201 bp, Homo sapiens
tctggcaggtggtgggtttgggggggttcaggctgtagccaggggcccagcatacccaggccagaggggggcacggagcttctgggtgccgaatgggccaygttgctggacagtgagcgccagcagcgaggcctccagtcacaggaccatggactttctgcagtgagcttaaacaggccaaagtgagcacagtcatggata

SEQ ID NO: 257119 - DNA, 201 bp, Homo sapiens
cctgacctcgtgatccgcccgcctcggcctcccaaagtgctgggattacaggcgtgagccaccgtgcctggcctccaacctttttttttttctataccacyttcagggtggttttggaatggatggaggcagggattcctttaagttggctgtcacttttagttagggactcacctataagcctgtggtcctgggcccaga

SEQ ID NO: 257120 - DNA, 201 bp, Homo sapiens
attgtgtgatctgttctcagacctcatcctacttgacccatcattggcatctgacaccgttcatccttccaccctgttgacgcactttcgtctctggtttstgaatcactgttctcgccattctctgaatgttctaaatacttcactggctgatacttctctgtgtccattgctggttcttattcagctccttgaccgcta

SEQ ID NO: 257121 - DNA, 201 bp, Homo sapiens
ggtcctaaagatgctgctcagggcctcgcagaggcccccgcagcccagggctgggtcgcatgctctcaggggctctcctagccctggcacgtctccttccygactgctgccctccatgaagtcacaagcctgaggagtcagttcagttagcatgtgccaggtggcaggggagggaactggggccacagagatgacttcgga

SEQ ID NO: 257122 - DNA, 201 bp, Homo sapiens
taagttcttcccaagggaatgtaagtggaaggaatccgtgatttctgtccggtttttaaaagatgggatcgttcttcgcagtctcctcttcccccagctgyaggcagaggcctctaggccctcggggatggtggtgtaaggtggaaggggcaggtctttgcagcagcatctgcaggaaagcctttctcctaccttttgatg

SEQ ID NO: 257123 - DNA, 201 bp, Homo sapiens
ctttgagctcacacaataattgatgtagaattgtccatttcagtaaggagtttccacatccactatcttccacgattctcacaagggccttgagtaaataktacctgcatgttatgggtgagaaaggggtagtttagagagctgaagggatttggtgaaggccacataattagtaagcctgaaatcaaggaccagaccccc

SEQ ID NO: 257124 - DNA, 201 bp, Homo sapiens
ttaagttcttcccaagggaatgtaagtggaaggaatccgtgatttctgtccggtttttaaaagatgggatcgttcttcgcagtctcctcttcccccagctscaggcagaggcctctaggccctcggggatggtggtgtaaggtggaaggggcaggtctttgcagcagcatctgcaggaaagcctttctcctaccttttgat

SEQ ID NO: 257125 - DNA, 201 bp, Homo sapiens
agggttcaggaagccctcaaggccttggaagaacacagggctctcgatgtagggtgagagctcctgtctggagcctgctcggagctgggtggtcctgccargaggcccctgcagtccccccttttcctgtagggagtcctgctgtccgtgatgtcagcctgactgcaggggacagtcctcagtccctagtgctggctgtgt

SEQ ID NO: 257126 - DNA, 201 bp, Homo sapiens
gcgccatgaggacaggtgatgcttgggcttatagctctgactcaggacatcactgctcaacagcctgaagcccacatccaaagctcatgtcatgctggcarttgaaggggtagcagagcccaaaagtccagaggggctcagcacagggagcagatgtctgtgagcaggagagacagcggctgtagggatcgatgagacttg

SEQ ID NO: 257127 - DNA, 201 bp, Homo sapiens
ttggcctcccaaagtgctgggattacaggcatgagccactgtgcccagccctggctgtattcttgaagctgcccggggaaggctcacgaagggaggagcayctggttgtacctgattctggagacagcattttacctgcccctttacccactgtactccatccaaaatgaccctgcagtgccctgcagaggtctcaggcct

SEQ ID NO: 257128 - DNA, 201 bp, Homo sapiens
taggctcaatagatcctcccacttcagcatccccagtagctgggactacaggcacgccctgccacacccagccaagattctttttttaatctacctttgtrctcaaaagctgtactaagaggtctaacaggcatttgagattaatagatcccaaactgagttcctggttcccacccaatcctgctccttccaccagccttc

SEQ ID NO: 257129 - DNA, 201 bp, Homo sapiens
agggataaagaggaagaggacttggagggactggtacagcaagacctacgtttcctgtctctgccttaccccaaagaaagaactgtcagtatctttgccgytggaaggtcccagtgaagcccagagcctctgcccccagctcttggctggacacctagagatcagtcatgggtaatagtgttgaagctcaggaagccttta

SEQ ID NO: 257130 - DNA, 201 bp, Homo sapiens
ccagtcacaggaccatggactttctgcagtgagcttaaacaggccaaagtgagcacagtcatggataccgttggccggaggcttcgggactccctgggccraactgtggacctggggctgacaggcaaccatggagttgtgcaccctagtcttgcggtgagtgggcctaacaggcataccccctatttcaatgccctcctg

SEQ ID NO: 257131 - DNA, 201 bp, Homo sapiens
tgaggtcgttgattctgatggatcagtgaaagacaaaatcacagcattcatagtagaaagagactttggtggagtcactaatgggaaacccgaagataaaytaggcattcggggctccaacagtaagtagctcctgtgcgcgcgtgcgcgtgtgtgtgtgtaagggggagactggcctttgacggtgtgtgtgtgtgtgtg

SEQ ID NO: 257132 - DNA, 201 bp, Homo sapiens
tttcctttcctcctcctcaccaccctcccgccttttttcatttctttgtagaattaacaaataaatgttgtgtgtatttacatctacaacatgatgttttkatatatgtataccttaagaaatgattaaaccctttctttcttgaagaaatgcagttgtctggcggtggagcctgagctgtctgacaactttgggtgttct

SEQ ID NO: 257133 - DNA, 201 bp, Homo sapiens
ctggaggccaagtacaggttgctagtagcattttgtctccttcacaggagacagctgctgggaagctggctgtgactccacccctcatgggggagcatatrtgtggctcccctgaggagactggctgctctctggcaggtggtgggtttgggggggttcaggctgtagccaggggcccagcatacccaggccagagggggg

SEQ ID NO: 257134 - DNA, 201 bp, Homo sapiens
tgtggcaatgggcaagcaggcagtggccggccctacccagcacacgtggcactaccatggctgcctggccggggggcagcctttgacctctacactactgrccacagggaaccaatgagattctccggatgtacatcgccctgacgggtctgcagcatgccggccgcatcctgactaccaggatccagtaggtgccattgt

SEQ ID NO: 257135 - DNA, 201 bp, Homo sapiens
ctcatccctgtgcactccctgagccctggccagagccctgctcccagctacttcaggagcagtggcttttgtggcaatgggcaagcaggcagtggccggcyctacccagcacacgtggcactaccatggctgcctggccggggggcagcctttgacctctacactactggccacagggaaccaatgagattctccggatgt

SEQ ID NO: 257136 - DNA, 201 bp, Homo sapiens
cctaaagatgctgctcagggcctcgcagaggcccccgcagcccagggctgggtcgcatgctctcaggggctctcctagccctggcacgtctccttcccgaytgctgccctccatgaagtcacaagcctgaggagtcagttcagttagcatgtgccaggtggcaggggagggaactggggccacagagatgacttcggatgc

SEQ ID NO: 257137 - DNA, 201 bp, Homo sapiens
tggacactggaaaattggctggctcctagaagaagtgtatggtaaggactgggaatttcccttcacctctgaggccctattcgcctcgagcggaggctaasattcccttctgcagtgggtatgagaaagcagcctgtgggctctggtgaatctcaagctctgtgtaccacaaccctggtctgcatcgctgccctactcttt

SEQ ID NO: 257138 - DNA, 201 bp, Homo sapiens
cagggcattatttggttgtatctgtgttgtgggaaattcccccaggggctcagcaagtgctggacatgtggacggggctcatgtggagagtgagttgcagkgatgaggccggagaccaggggctctcctgctgggagggaggggctggacctaagagagcacagcaggatgagtgggatatgatggtgggcatgggtatac

SEQ ID NO: 257139 - DNA, 201 bp, Homo sapiens
gggtagggaacacaagctggccagtgtggtcacggaaggcaaaggacttgaccacatcacccctcaagttcctccctggccgatctcctccccaagcccgkgtgcctcccatgcctccccagccacccagctccctgcagcgtaggtcctccttttggaaaggattcagtgtgacaccccacaggtgttcagctccgaggc

SEQ ID NO: 257140 - DNA, 201 bp, Homo sapiens
gaaaggctgttggatcagggctggaattagaacccaagacggggtgactcctgtgccaggccttgtgacccctgccatgctacccagtttggctgattgataggctgggtttttgaagctcagaggtctgattccaggaatttgggcatatcttttctgtcctcggttctggcaggttctcttggccaacaccttctgcgt

SEQ ID NO: 257141 - DNA, 201 bp, Homo sapiens
ggaaaggctgttggatcagggctggaattagaacccaagacggggtgactcctgtgccaggccttgtgacccctgccatgctacccagtttggctgattgataggctgggtttttgaagctcagaggtctgattccaggaatttgggcatatcttttctgtcctcggttctggcaggttctcttggccaacaccttctgcg

SEQ ID NO: 257142 - DNA, 201 bp, Homo sapiens
gggaaaggctgttggatcagggctggaattagaacccaagacggggtgactcctgtgccaggccttgtgacccctgccatgctacccagtttggctgattgataggctgggtttttgaagctcagaggtctgattccaggaatttgggcatatcttttctgtcctcggttctggcaggttctcttggccaacaccttctgc

SEQ ID NO: 257143 - DNA, 201 bp, Homo sapiens
ggggaaaggctgttggatcagggctggaattagaacccaagacggggtgactcctgtgccaggccttgtgacccctgccatgctacccagtttggctgattgataggctgggtttttgaagctcagaggtctgattccaggaatttgggcatatcttttctgtcctcggttctggcaggttctcttggccaacaccttctg

SEQ ID NO: 257144 - DNA, 201 bp, Homo sapiens; identical to SEQ ID NO: 51380

SEQ ID NO: 257145 - DNA, 201 bp, Homo sapiens
cctagccctggcacgtctccttcccgactgctgccctccatgaagtcacaagcctgaggagtcagttcagttagcatgtgccaggtggcaggggagggaaytggggccacagagatgacttcggatgctgtgttctgattgtgcagcagggccgaccaagggagatgacagagtgtaaagaggcagggagcgggcatcctc

SEQ ID NO: 257146 - DNA, 201 bp, Homo sapiens
ctgggattacaggtgtgagccaccatgcccggcctgtattgtgatttttttttttaatatggtgatctggcattactttataatcagaagaaaaaaaaaaagccaatgaagccttaatgggaggaatctagggctgggctgtgattgatgctggtccatctctcctaggtggcctgggcttctccaacaccatgtactcac

SEQ ID NO: 257147 - DNA, 201 bp, Homo sapiens
cattgccaggattcaagtctgtatctgatgccaaactctgtgtgtgggtgccatgaggaggggtggttctcctctgacccacgggtgctggcaagtggggktgccagcttctggggtatttgacctcagcagacacgcttctcacagtgcccacctgtgggaagggtaaggatgatggccataggaaatcatgtttgaacc

SEQ ID NO: 257148 - DNA, 201 bp, Homo sapiens
ctctggggagctcctctgctggggctctgagtggggctcggccctctacacctcctgagtgcaccacacctgggagagcctgtggaggacatggctatggyggggcgggggtgcttctgcctgggagaggcgccatgtcactcttgggcccttagagctcagcactttgtcacagccacacgcctggaagccccagcctga

SEQ ID NO: 257149 - DNA, 201 bp, Homo sapiens
tcaggttttctcgggaaggggagatcttaggtgggttttaaaggaacaggagctcagccaggtgcagatagggtgaaggcaggcccagaggtacagaaggycatggtggggtagggaacacaagctggccagtgtggtcacggaaggcaaaggacttgaccacatcacccctcaagttcctccctggccgatctcctcccc

SEQ ID NO: 257150 - DNA, 201 bp, Homo sapiens
tgtgcatggcaggtgactttgcatggttatctgttgggaaattggcaaaatggacactggaaaattggctggctcctagaagaagtgtatggtaaggactrggaatttcccttcacctctgaggccctattcgcctcgagcggaggctaagattcccttctgcagtgggtatgagaaagcagcctgtgggctctggtgaat

SEQ ID NO: 257151 - DNA, 201 bp, Homo sapiens
cctgtgcatggcaggtgactttgcatggttatctgttgggaaattggcaaaatggacactggaaaattggctggctcctagaagaagtgtatggtaaggaytgggaatttcccttcacctctgaggccctattcgcctcgagcggaggctaagattcccttctgcagtgggtatgagaaagcagcctgtgggctctggtga

SEQ ID NO: 257152 - DNA, 201 bp, Homo sapiens
agagacggggtttcaccatgttggccagatctcaatctcttgacctcgtgaaccacctgcctcagcctcatgttctattaatagcagcagagttgaggaggtgagacagacatcctgtagcttggaaagctgaatatgttatctgacccttgattttaaaagtttgctgacctcttacaagtactaaaacctccattttca

SEQ ID NO: 257153 - DNA, 201 bp, Homo sapiens
gtgctacagttagattgcaggggtgtgattgtgttagagttaagaattgagaccagtggtcccagtctaccctaaggcttcaggaaatgctgttctttccytcactttgcttgttctggctctttatatgcctggttcttttcattcttaaacttctgctaaatgtcaccttagaaaagtctgacatagtccttaataaaa

SEQ ID NO: 257154 - DNA, 201 bp, Homo sapiens
tagagacggggtttcaccatgttggccagatctcaatctcttgacctcgtgaaccacctgcctcagcctcatgttctattaatagcagcagagttgaggaggtgagacagacatcctgtagcttggaaagctgaatatgttatctgacccttgattttaaaagtttgctgacctcttacaagtactaaaacctccattttc

SEQ ID NO: 257155 - DNA, 201 bp, Homo sapiens
acctagcaggcagggaaagggagggaggtccatccctcctcacagtgggagagtgctacagttagattgcaggggtgtgattgtgttagagttaagaattragaccagtggtcccagtctaccctaaggcttcaggaaatgctgttctttccctcactttgcttgttctggctctttatatgcctggttcttttcattctt

SEQ ID NO: 257156 - DNA, 201 bp, Homo sapiens
gtagagacggggtttcaccatgttggccagatctcaatctcttgacctcgtgaaccacctgcctcagcctcatgttctattaatagcagcagagttgaggaggtgagacagacatcctgtagcttggaaagctgaatatgttatctgacccttgattttaaaagtttgctgacctcttacaagtactaaaacctccatttt

SEQ ID NO: 257157 - DNA, 201 bp, Homo sapiens
ttttttagtggagatggggtttcaccatgttagccaggatggcctcgatctcctgacctcgtgatccgctcacctcggcctcccaaagtgcgtgagccacygcacccggcctttttttttttttttttaaatagagatgaggtcttgctatgttgtcctggctggtctcgaactcctgggttcaagtgatcttcctgcctc

SEQ ID NO: 257158 - DNA, 201 bp, Homo sapiens
ttccttctgaatccacctcctgtccccattgcctctgatccacccttcaaggcccaggtagggtgccactgccttcgccttgggctggaagtggtctcctctcctgagccttcgtccttcagcctgagcatgcccccactctttatgcaagccaccttctccccactgggcttggagcaccttagggcaggcccagggtca

SEQ ID NO: 257159 - DNA, 201 bp, Homo sapiens
gtagcaccgactaccttcttgagctgcttttatgtgtttgtttttaattttttttagttttttttatttgcgatggagtctctgtcacccaggctggagtrcagtggtgtaatctcagctcactgaaacttctgcctcccaggtttccaatgattctcctgccttagcctcctgggtagctgggattagaggtgcgtgtca

SEQ ID NO: 257160 - DNA, 201 bp, Homo sapiens
cttccttctgaatccacctcctgtccccattgcctctgatccacccttcaaggcccaggtagggtgccactgccttcgccttgggctggaagtggtctcctctcctgagccttcgtccttcagcctgagcatgcccccactctttatgcaagccaccttctccccactgggcttggagcaccttagggcaggcccagggtc

SEQ ID NO: 257161 - DNA, 201 bp, Homo sapiens
accacctgcctcagcctcatgttctattaatagcagcagagttgaggaggtgagacagacatcctgtagcttggaaagctgaatatgttatctgacccttsattttaaaagtttgctgacctcttacaagtactaaaacctccattttcaggccctcaaaagcattcatatttattcccagtattctcccttgaccacatc

SEQ ID NO: 257162 - DNA, 201 bp, Homo sapiens
ccttccttctgaatccacctcctgtccccattgcctctgatccacccttcaaggcccaggtagggtgccactgccttcgccttgggctggaagtggtctcctctcctgagccttcgtccttcagcctgagcatgcccccactctttatgcaagccaccttctccccactgggcttggagcaccttagggcaggcccagggt

SEQ ID NO: 257163 - DNA, 201 bp, Homo sapiens
acctcgtctctactgaaaaaaaaaaaaaaaattagctgggtgtggtggtatatacctgtagtcccagcttctcatgaagctgaggcaggaggctcacttgmgcctgggagattaaggttacgtgagctatgattgtgccactgcactccagcctggatatcagagtgagaccttgtctctaaataaatatataaaaataaa

SEQ ID NO: 257164 - DNA, 201 bp, Homo sapiens
gcagattgcttgagtcccagagtttgagaccagcctaggcaatggagcgaaaccctgtctctactaaaaatttaaaatattagccgggcatggtggtgcgygcccatagtcccagctacttgggagtctgaggtgggagaaggtacccaagcctgggaagtcaaggctgtagtcagctgtgttcatgccattgagctccag

SEQ ID NO: 257165 - DNA, 201 bp, Homo sapiens
cacgattctcacaagggccttgagtaaatagtacctgcatgttatgggtgagaaaggggtagtttagagagctgaagggatttggtgaaggccacataatkagtaagcctgaaatcaaggaccagacccccaggcttctaaatgttagtcttgggctccttgtttcatgggactattatcatcccttgtactgagaaggaa

SEQ ID NO: 257166 - DNA, 201 bp, Homo sapiens
ggaaacccgaagataaattaggcattcggggctccaacagtaagtagctcctgtgcgcgcgtgcgcgtgtgtgtgtgtaagggggagactggcctttgackgtgtgtgtgtgtgtgtgtgtgtgtgtgtgtgtgtgtgtgtgtgtaagggggagactggcccttgactctgtccaaatagcaagataaaatgagatttaaa

SEQ ID NO: 257167 - DNA, 201 bp, Homo sapiens
gcccttactggcaatctcattactcagattatttctgcttaatgttgacatcaaagagagctgaatgcacaccatgctcggctcccccaccccagagagcrcacacattcatgcagatgtttagtgaagagggggactgtctttgtggcactgggagggcagcaggtgggacagccctgacactgagcaccttctttagga

SEQ ID NO: 257168 - DNA, 201 bp, Homo sapiens
ggccccgccaccagctaagctgtgctccacccccaccctgcctggtcctaaagatgctgctcagggcctcgcagaggcccccgcagcccagggctgggtcrcatgctctcaggggctctcctagccctggcacgtctccttcccgactgctgccctccatgaagtcacaagcctgaggagtcagttcagttagcatgtgcc

SEQ ID NO: 257169 - DNA, 201 bp, Homo sapiens
tctttaaacctctggcactacctgccctgccctgcctttactctcagctgtcagctttgcttcccattccactgggaaaatccatgcagtcagatgagaasttcacaggcacagttaccccctcccgctgcatatgtgccggtattatctacattctgttactgtgaactgtctgctcctggcaaaaccaacctctcatta

SEQ ID NO: 257170 - DNA, 201 bp, Homo sapiens
agccaatgaagccttaatgggaggaatctagggctgggctgtgattgatgctggtccatctctcctaggtggcctgggcttctccaacaccatgtactcamgactaggggagatcatcagcatggatgggtccatcactgtgaccctggcagcgcaccaggctattggcctcaaggtcaggtatctggggattctgtgtgg

SEQ ID NO: 257171 - DNA, 201 bp, Homo sapiens
tttcaggccattaattgtgttgctctgctctcttcctgacttcatattgcttcagaagagatgtctgcttccattctttgttcctttgtacatagtgtttytttcatctctggctgcttttcagtggtttttaggaaaattgattatcacatttatttatgtagttttttgcacatttattttgcttggagttgtttgaac

SEQ ID NO: 257172 - DNA, 201 bp, Homo sapiens
ctgtttccatctttaaacctctggcactacctgccctgccctgcctttactctcagctgtcagctttgcttcccattccactgggaaaatccatgcagtcrgatgagaacttcacaggcacagttaccccctcccgctgcatatgtgccggtattatctacattctgttactgtgaactgtctgctcctggcaaaaccaac

SEQ ID NO: 257173 - DNA, 201 bp, Homo sapiens
caagtagctgggactacaggcgtgcgccgccatgcctggtgaattttttttattttgtagagctggggtcctgctatgttgcccaggctagtcttgaattyttggaaccaagcaatcctcccacctcagcctcccaaagcgccgggattacaggcgtgagccactgtgcccagccctcgatttttgtttactttgtacctt

SEQ ID NO: 257174 - DNA, 201 bp, Homo sapiens
catcgaggtgggagattggaccagtgggaacctttgagcagggtcctttgtcctatggactgtccctgtaattctttgagcatcctagtgatgtttttagmccccaagtggcggttctgccttattagagttggccagtcactacaacttgcctcccttacgctttttctcgagttggtcacctgaattctgcagaggtta

SEQ ID NO: 257175 - DNA, 201 bp, Homo sapiens
tccataacaggtctagttgctggaatagatgacaccatccgtggtgggctacttggtaggggtggactgactgaaggacctgtagggaggaagtgttctcsggtcctgtgcttctcatcctagcacagaggaatgaggcatgtggtctggctggctgtagagtgcaaggcacatcgaggtgggagattggaccagtgggaa

SEQ ID NO: 257176 - DNA, 201 bp, Homo sapiens
tttttttaatatggtgatctggcattactttataatcagaagaaaaaaaaaaagccaatgaagccttaatgggaggaatctagggctgggctgtgattgaygctggtccatctctcctaggtggcctgggcttctccaacaccatgtactcacgactaggggagatcatcagcatggatgggtccatcactgtgaccctgg

SEQ ID NO: 257177 - DNA, 201 bp, Homo sapiens
atgttggccagatctcaatctcttgacctcgtgaaccacctgcctcagcctcatgttctattaatagcagcagagttgaggaggtgagacagacatcctgyagcttggaaagctgaatatgttatctgacccttgattttaaaagtttgctgacctcttacaagtactaaaacctccattttcaggccctcaaaagcattc

SEQ ID NO: 257178 - DNA, 201 bp, Homo sapiens
gccagactgtggaggaccttgattgacagcagaggaatttggaagccacaaaacgtctttaagcagggcattatttggttgtatctgtgttgtgggaaatkcccccaggggctcagcaagtgctggacatgtggacggggctcatgtggagagtgagttgcagtgatgaggccggagaccaggggctctcctgctgggagg

SEQ ID NO: 257179 - DNA, 201 bp, Homo sapiens
ttctgcataattttgaatttcatccatggtgcatgtattggtagtggcttcctttttaatgctgagtcatatttctttctatggatataccaagatttgtktatccattcaagtattcatcaacatagggtatgtatccagattttagctatcaccaaaaaagttgccataaacattccttttttcctctttttctttttt

SEQ ID NO: 257180 - DNA, 201 bp, Homo sapiens
agtccattctgatgttcatacagggagagaatcacctgacgcatgactgtatttagagagtacccctcaggagccatcagtgcaacagaggaagtgaacgkactcattacccgtcaaagtttccttgtgcctcttttatttcccccctgtttccaggcaactgctgatctgttttctctcactatagattagttcgtattt

SEQ ID NO: 257181 - DNA, 201 bp, Homo sapiens
caaagtgctgggattacaggcgtgagccaccgtgcctggcctccaacctttttttttttctataccaccttcagggtggttttggaatggatggaggcagrgattcctttaagttggctgtcacttttagttagggactcacctataagcctgtggtcctgggcccagagaggagaaagcagtgcgagcatattgatagag

SEQ ID NO: 257182 - DNA, 201 bp, Homo sapiens
tagtcagctgtgttcatgccattgagctccagcctgggcgacaggagtgagaccctgtctcaaaaaaaaataaaaataaaaataaaaaaataaataaatawatatatatatatatatgcaagaaaccactgcaaaccaaacccactccctctcacaggaacaaaggtctcttggaataaatagcaaatgctggaataaaaa

SEQ ID NO: 257183 - DNA, 201 bp, Homo sapiens
gaaacccgaagataaattaggcattcggggctccaacagtaagtagctcctgtgcgcgcgtgcgcgtgtgtgtgtgtaagggggagactggcctttgacgktgtgtgtgtgtgtgtgtgtgtgtgtgtgtgtgtgtgtgtgtgtaagggggagactggcccttgactctgtccaaatagcaagataaaatgagatttaaac

SEQ ID NO: 257184 - DNA, 201 bp, Homo sapiens
cctagggctttttgggctgcaagtcccagaagaatatggtaagtcaagcaaacaagcacccagccagtttagctcttaagaaagcactctgtatttgtccrtaacaggtctagttgctggaatagatgacaccatccgtggtgggctacttggtaggggtggactgactgaaggacctgtagggaggaagtgttctccggt

SEQ ID NO: 257185 - DNA, 201 bp, Homo sapiens; identical to SEQ ID NO: 51372

SEQ ID NO: 257186 - DNA, 201 bp, Homo sapiens
agcaagggacagaccctgcacattgcccgctgtgctggagggaggcgggtgcagtctctgaggacccactgtataccaggatctctgcctgcactttccaragcacctgcagataccaggattgtgacatctgcctttcagaggaaacagggtcagagatgttgagtcacttgctgttggggaaaggctgttggatcaggg

SEQ ID NO: 257187 - DNA, 201 bp, Homo sapiens
atgattttgtaccattgttatattattatatttctttttttttttttgagatggagttttgctcttgttgcccaggctggagtgcagtggcgcgatcttggctcactgcaacctccacctcccgggttcaagcgattctcctgcctcagcctccctagtcgctgggattacaggcacgtgccaccacgcccagctaatttt

SEQ ID NO: 257188 - DNA, 201 bp, Homo sapiens
gtatgattttgtaccattgttatattattatatttctttttttttttttgagatggagttttgctcttgttgcccaggctggagtgcagtggcgcgatctyggctcactgcaacctccacctcccgggttcaagcgattctcctgcctcagcctccctagtcgctgggattacaggcacgtgccaccacgcccagctaatt

SEQ ID NO: 257189 - DNA, 201 bp, Homo sapiens
ttcctcagcaccggctggttcaccatgatcctcgcgctggagctgtgtgaggagatcgtggtctatgggatggtcagcgacagctactgcaggtcagaccrgccaggccgggcacgcggggacgcggggaggactgtgagccctcctaggccttaaaccagaggatttgggagctgtgggggcagagggagtgtgggcttc

SEQ ID NO: 257190 - DNA, 201 bp, Homo sapiens; identical to SEQ ID NO: 51384

SEQ ID NO: 257191 - DNA, 201 bp, Homo sapiens
ctccctcaccaggagcccaggaccactagcagggtccctgcagtctccatctcttgatctacgcacttgttctggaaggcggatgtgaccgtctgcgtttwacacacgggctcttgaggctcacagcgtccatctctggcccagagtcatccagcttgcaagaggcagagccaggactcgaaccctggctctcgggatctg

SEQ ID NO: 257192 - DNA, 201 bp, Homo sapiens
ttgtaccattgttatattattatatttctttttttttttttgagatggagttttgctcttgttgcccaggctggagtgcagtggcgcgatcttggctcacygcaacctccacctcccgggttcaagcgattctcctgcctcagcctccctagtcgctgggattacaggcacgtgccaccacgcccagctaattttttgtag

SEQ ID NO: 257193 - DNA, 201 bp, Homo sapiens; identical to SEQ ID NO: 51387

SEQ ID NO: 257194 - DNA, 201 bp, Homo sapiens; identical to SEQ ID NO: 51406

SEQ ID NO: 257195 - DNA, 201 bp, Homo sapiens; identical to SEQ ID NO: 51386

SEQ ID NO: 257196 - DNA, 201 bp, Homo sapiens
tttttttttgagatggagttttgctcttgttgcccaggctggagtgcagtggcgcgatcttggctcactgcaacctccacctcccgggttcaagcgattcycctgcctcagcctccctagtcgctgggattacaggcacgtgccaccacgcccagctaattttttgtagttttagtagagacggggtttcatcatgttggc

SEQ ID NO: 257197 - DNA, 201 bp, Homo sapiens
cggtggctcacgcctgtaatcccagcattttgggaggccaaggcgggaggatcacttgaggtcaggagtttgaggccagcctggctgacatggtgaaaccytgggctctaccaaaaatacaaaaattagggctaggcccggtggctcacgcctgtaatccgagcactttgggaggccaaggtggaaggatcacgaggtcaa

SEQ ID NO: 257198 - DNA, 201 bp, Homo sapiens
atggtatgattttgtaccattgttatattattatatttctttttttttttttgagatggagttttgctcttgttgcccaggctggagtgcagtggcgcgaycttggctcactgcaacctccacctcccgggttcaagcgattctcctgcctcagcctccctagtcgctgggattacaggcacgtgccaccacgcccagcta

SEQ ID NO: 257199 - DNA, 201 bp, Homo sapiens
agccctgttccccaccccgcagggagaagagccacccctcagtgccttaccactactttgagaagggccggctagatgagtgtcagatgtacctggcacaygagcaggcgccccgaagcgcccaccgcttcatcactgagaaggcggtcttctcccgctgggccaagaagaggcccatcgtgttcgcccatccgtcctgga

SEQ ID NO: 257200 - DNA, 201 bp, Homo sapiens
gctgccaccttgacttaggcttcccgcccccaccactcctggcctgcctgccctgcgtgatcctgcctctgcctgcctctgtgactttgtgtctccttcartctccctgttctacccatactggccgtctggggctcagacatccatgcctatttctacctgcaggactttgcacctgctgttccctctccctggaatgtt

SEQ ID NO: 257201 - DNA, 201 bp, Homo sapiens; identical to SEQ ID NO: 51391

SEQ ID NO: 257202 - DNA, 201 bp, Homo sapiens; identical to SEQ ID NO: 51411

SEQ ID NO: 257203 - DNA, 201 bp, Homo sapiens; identical to SEQ ID NO: 51385

SEQ ID NO: 257204 - DNA, 201 bp, Homo sapiens; identical to SEQ ID NO: 51408

SEQ ID NO: 257205 - DNA, 201 bp, Homo sapiens
tgtaagctgcgtgttcatgcctctctgtctctttctccctgcctgccctgcagccgctggtccgcgagccctgccgcagctgtgccgtggtgtccagctcyggccaaatgctgggctcaggcctgggtgctgagatcgacagtgccgagtgcgtgttccgcatgaaccaggcgcccaccgtgggctttgaggcggatgtgg

SEQ ID NO: 257206 - DNA, 201 bp, Homo sapiens
tggcgtcgcttctggtgcattctccggacccaggaaggtgatagcaaagccctgctcacctcctggggactcaggcctgggggcaggtccctgagaacccrgcactgtctgggaggccaggggcagcctttcatcacccggaacccagagcagggacgaggcaggactggcccgggttcctctcgggacaggaagggcttc

SEQ ID NO: 257207 - DNA, 201 bp, Homo sapiens
cccatctctggccccacagctgcccaggctcagcccctcatgccctgtctctgcccccacccccccggcagctggcggagatccacggtgtgccccgtggrctgtatgacgggcccgtccacgaggtgatggtgcctgccaagccagggagtggcgctccggcccgcgcgtcctgcccaggcaagatctccgtccctcctg

SEQ ID NO: 257208 - DNA, 201 bp, Homo sapiens
ccagcctgggcaccgacggttcacactactggagcaagaactgggccaaggccgcagccttcgtcacatcaccccctgtcaacccagaccccaccacggcrgaccacctcacctgcttgctgtccaggtaagcagcctctccaggtggccccaggttggccgcccgctgcacaccctgccaaggctgtggccccgacaccc

SEQ ID NO: 257209 - DNA, 201 bp, Homo sapiens; identical to SEQ ID NO: 51427

SEQ ID NO: 257210 - DNA, 201 bp, Homo sapiens
caaggaaagtgaggggcagtcgtgggtgtcagcagcagcagttctcggggccccagggggtgcaggtggtcggtggggcacctctcatgggcctcgtgctkcaggggtggtcgtgtttggggagcccatcaccgccagcctgggcaccgacggttcacactactggagcaagaactgggccaaggccgcagccttcgtcac

SEQ ID NO: 257211 - DNA, 201 bp, Homo sapiens
gcccctctctcatggccctgccatggcgccctcactgtgctctgcgcattcgtcaccgactgtgatgatctgtgcacgtgtgtttttgctgccgttggtcycccctcagtgggaggcagcctcctggggtggggaccatgcctgtgggggcgctgtctgcctccgcctcctggcaccatcactggtctgtagtgtttgggt

SEQ ID NO: 257212 - DNA, 201 bp, Homo sapiens
ctaacccggagcacaggagcaggcaaggagggcctggatgtagctgcctccgcctcacttcccagcttgctggtgtgtgcatggaagcgggggactgctcscagggctggcaagccagtgagggaagcactgcgggggaggggcccaagacccccaaccctccagtgggcaggagcagcagaggctccgtaggttgtctga

SEQ ID NO: 257213 - DNA, 201 bp, Homo sapiens
cactgtgagccaggcatggcaagtggggctccaaggccctgcaggcaggtgctggatgtgctggacggccagaatgcaggtccccagcacagcgcggccckggccgcacttccaggagggagccagtggaacccaggccgagagcccaggcacagcggctcttccagtaacggggggtctgctggatgggtgtgaggggtt

SEQ ID NO: 257214 - DNA, 201 bp, Homo sapiens
gactctagtgttgcccggacactgtgtttgcccaggggtcagcatggggtctccacgctgtgatgttagtgctcccccgcgatgccctcacgacccgtcgyacaccgccctgtcctgcgccctcccgcatcctcagccccacctccccgggcaactgagctcttcccctcagctgctcctgccttcccagcctccagggct

SEQ ID NO: 257215 - DNA, 201 bp, Homo sapiens
acctgcagagccctccctgcctgtgcacacccccacacatgcccccgctgggggaggcagcgtgatgggcatagtggtgggagggtggggtcttggtgccrtcagtcaggagccctgcagccttgggggagccactttcccctatccgagctgtcccctccttggtaactcagggagcaggaatcacacctctccaagccc

SEQ ID NO: 257216 - DNA, 201 bp, Homo sapiens
ccctctagcagaggcacccacaggtacagatggagttcagagagtgggccaccccatacccgtgggacctcagtgggggtcaccacacaggacacacctcyctgacactgcaaacccacagtgagacttcgtgggacgggacgggctctgcccacctcctgagctctacaggaaggtggtggcactcgggcaggggcatgt

SEQ ID NO: 257217 - DNA, 201 bp, Homo sapiens
ctcctgtggagcggggtacccgctgggggttgggttaccaccttccttccagccaagggcacccatgttgacagggccacatccttcagacacatcccacygggctggggagggcctgagcccgcgtgcagtggcgccgaccccccaggcccttggggctgaggcaaccttggccctgcaccttgttttcccctctagcag

SEQ ID NO: 257218 - DNA, 201 bp, Homo sapiens
tgatttactcggcaagatactgggccagttcagtgtctctagctgagcctgacctcggggtttgcgtctcgagtctgaaatcctgtttagtcctctgtgcrtagttttgtctcattttaacgactgcatcttcttggcacatttattatactcacaactgaatggcacacaatagccttgtgttaataaaagctaccgtgg

SEQ ID NO: 257219 - DNA, 201 bp, Homo sapiens
tgtgctggacggccagaatgcaggtccccagcacagcgcggcccgggccgcacttccaggagggagccagtggaacccaggccgagagcccaggcacagcrgctcttccagtaacggggggtctgctggatgggtgtgaggggttctcacctgcatttgccgctgggtggacaatcagttcctaacccggagcacaggagc

SEQ ID NO: 257220 - DNA, 201 bp, Homo sapiens
tcgggaggcctgtggcctcgtgtctcagagcggaggtggaagcagggcctgcacctcccctcaccctgtgttggcagtgctggggcctctgctccccaagmgccatgcaggagtcctcagtcctgtgcccacggggtagtgttgcagggacagcactgcgcaacccaaacatgaccttcctcagacactcgggggcaggcc

SEQ ID NO: 257221 - DNA, 201 bp, Homo sapiens
caaggccctggcactcccagggatgcctgctacccgtcccctacagacctgaaggaggcaggggcatttcttcaaggccattcctctgggttcccattccycagagggtgacggtcatcacataggtgccccttgatgtcaggacccctcacctccctgcccgggggctggtggagcccgtcaatcctcagtccctgggcc

SEQ ID NO: 257222 - DNA, 201 bp, Homo sapiens
aggctctagaccaagaggccttctctttcccaatccgagggacccatcctggaattgtcctcctgatgaaaagatgcagcagatccgtcgtttcttagaaragaggctgcccagggtggaagagcagcagttccctagtctcctagcatctggggatcctttcagagggagacccttttaaatccatatctctttgttgtc

SEQ ID NO: 257223 - DNA, 201 bp, Homo sapiens
tccctcaaatggtcctctggtctcttgggaacatgaaacagaatctcccatggaggaggcagaggtgggaaccagggaccagtgggggaagctgctgaccmtgctgccttcacagtggaccacgtcttccccgacacgggtgtgagcctgctggcggcctacgagcagtggcgggagcgggcggacagcgcggcctgctgc

SEQ ID NO: 257224 - DNA, 201 bp, Homo sapiens
cctcctgtgctcctccaagtgcgatgtgggagtagggatggtttggggtggggcttttcctttctcccctctcccttctgtgctcagagggtggctggggsacttgggacagaaggttcctctttgaacaaagcaatagaacgggttcgtggcagcgtcatcctctctcaggggccggtggcctctgctgtgtctccctca

SEQ ID NO: 257225 - DNA, 201 bp, Homo sapiens
ggagttcctagataatgaactccttctcattctgagagttttaccaattgtgcacttcagtttaatgctcttggcttcagactgacggtgcgtgaaggctscagccccaggctagggccctggccacctatgggtgggccctggaaacccagagcaggcggccggacctccctgttaaatgcagacggtcagtcctgccgg

SEQ ID NO: 257226 - DNA, 201 bp, Homo sapiens
gagttcctagataatgaactccttctcattctgagagttttaccaattgtgcacttcagtttaatgctcttggcttcagactgacggtgcgtgaaggctgyagccccaggctagggccctggccacctatgggtgggccctggaaacccagagcaggcggccggacctccctgttaaatgcagacggtcagtcctgccggg

SEQ ID NO: 257227 - DNA, 201 bp, Homo sapiens
tgtcctcgcgcaagcctcaccccaaccccacccgtcgccctcagctcagccttcttgttccccaggcctctgggaagatggacgagaatgagttcgtcgcrgtgaccagtacaaatgctgccaaaatcttcaatttttacccaaggaaggggcgagtggctgtgggctctgacgctgacctggtcatatggaaccccaagg

SEQ ID NO: 257228 - DNA, 201 bp, Homo sapiens
gggtttcaccctggcagcgggaatgtggactctctcttcctagccctgagtggggactgtcccgcccgctcctcctggtggtgtcaccctggtcctgggcrttccccacacgtacacggtgtgagcggccagcaccttgccaaggactcgagaagaagccggcagactcccacgctctctgcgggcagccctctcctctcc

SEQ ID NO: 257229 - DNA, 201 bp, Homo sapiens
gctcaaccctatctagacatacaaaacgtacagcaaaacccagtgttaccatcttacgggaccacccccccatgcgattggccagtgacggaagcatcgtyatgcaatgcgtgacaacagtctgcgttcacccgagacggacaacagcatgctttcacggccccagccagggctaaggggactcttccctgtcacagtgtc

SEQ ID NO: 257230 - DNA, 201 bp, Homo sapiens
cgtttacccagttagttacagttccaaccacagaaccacccagccacagtgagagggatacgtccctttatggagggccaagcactgcccggcactgcggyggctccacggtgcacggtgctgtcctgggctcctctgcctccaggaccgtctctgccttccacagccttacggctccagggccacggagacaggcaccca

SEQ ID NO: 257231 - DNA, 201 bp, Homo sapiens
ctttgtctacaagaggatcaaagctcgcaacagggtagggcggcacccgcaagggtgttgtgcaggtaggcaggtgggcgctgagttctaggcccagaacrcacccctggtcaacctggcccggcctcccgaggggtcaggaagacagagcggggccgctgcttgcccagggccctggtgggtctaagtggagaagagcct

SEQ ID NO: 257232 - DNA, 201 bp, Homo sapiens
cctgtctctgcccccacccccccggcagctggcggagatccacggtgtgccccgtgggctgtatgacgggcccgtccacgaggtgatggtgcctgccaagmcagggagtggcgctccggcccgcgcgtcctgcccaggcaagatctccgtccctcctgtgcgcaacctacatcagtcggggttcagcctatctggtgagtt

SEQ ID NO: 257233 - DNA, 201 bp, Homo sapiens
cccgtgggctgtatgacgggcccgtccacgaggtgatggtgcctgccaagccagggagtggcgctccggcccgcgcgtcctgcccaggcaagatctccgtscctcctgtgcgcaacctacatcagtcggggttcagcctatctggtgagttgggcctggggcaccagtgggggtgaggggctctgccggagcatccagggc

SEQ ID NO: 257234 - DNA, 201 bp, Homo sapiens
atcttgctaggggctcagtgtaggcacaccgggcctgctccacgctgggcggccacagtgctccagcggctcaacggggatgggactgttgggccccagcrtggaggcactggaccctcgggcctctctccccagaacgtggagtacaacatcttcgagggagtggagtgccggggagcgcctgccgtggtcataagtcag

SEQ ID NO: 257235 - DNA, 201 bp, Homo sapiens
gccttgggcgcctcgcgtctcctgggacctgggttccgcgctggagggcagcgggggcgcgggcggggcctggcaggacgtggccggactctctccctcgyctccccggggtgcaaaccccgcgcacatcagctggagcaggttgaaatccccacccagcgctcgtccgcgggtctgcgcgggggcccggggtgcagagat

SEQ ID NO: 257236 - DNA, 201 bp, Homo sapiens; identical to SEQ ID NO: 51428

SEQ ID NO: 257237 - DNA, 201 bp, Homo sapiens
ggctcggaatcccggggccttgggcgcctcgcgtctcctgggacctgggttccgcgctggagggcagcgggggcgcgggcggggcctggcaggacgtggcyggactctctccctcgtctccccggggtgcaaaccccgcgcacatcagctggagcaggttgaaatccccacccagcgctcgtccgcgggtctgcgcggggg

SEQ ID NO: 257238 - DNA, 201 bp, Homo sapiens
ctgccctccgtctctcgcggccagcgtggaacagcctcgcggggtcacagcctggcgctcggaccctggcccgggtcatctgcgaaggagccggctttggscaaggtgccttcctggacgggtgtggttcccagagcgtcgcggcccggggttgactggctcggaatcccggggccttgggcgcctcgcgtctcctgggac

SEQ ID NO: 257239 - DNA, 201 bp, Homo sapiens
gagcaggcggccggacctccctgttaaatgcagacggtcagtcctgccgggtcagttgcagggcgtgctgaggcgcacgccagacggtggagggaaaagcrttgccgagtccagcccgtgggcgcgtccttctccacctcctttcactccttttttgtgtttctctcccccattctccaatgaggtcagatcttcacctct

SEQ ID NO: 257240 - DNA, 201 bp, Homo sapiens
gtcagaagggagcccatctaaccagtgcacactcgtgaaacagatcagagcacacgggctccggggtggcggattccccacccagggcgcctcagacacgyggttctggcccctccagatgagactccaacagcaacaggggcagctggtagccccccacccctcagcagactctagtgttgcccggacactgtgtttgcc

SEQ ID NO: 257241 - DNA, 201 bp, Homo sapiens
atcggggcggggcactggaccctgagtccctgcatcggggtggggcactggaccctgagtccctgcatcggggcaggggctggacctgagtttccagcctygctggagcagcagctgctcaccaggggccctgaggcaaaacatggggacgctcatcccatttccagtgggggtgggtgtggggagaatggaatgatgagg

SEQ ID NO: 257242 - DNA, 201 bp, Homo sapiens
cgagggacccatcctggaattgtcctcctgatgaaaagatgcagcagatccgtcgtttcttagaaaagaggctgcccagggtggaagagcagcagttcccyagtctcctagcatctggggatcctttcagagggagacccttttaaatccatatctctttgttgtcaccaatgctaaaacagatcagtctataaacaagtt

SEQ ID NO: 257243 - DNA, 201 bp, Homo sapiens
gagctcaggaggcaggacgaggcctcagagcctagaccttgactgcactgtgtggccttgggtgccattcactctgcggcgtccgtctggcacagacatcrctgctgtggttgagaacgggtctgaggagcctagctgaacctggttgtatggttttctagctgtgtgactccagataaactcagctggcttttataagtc

SEQ ID NO: 257244 - DNA, 201 bp, Homo sapiens
ttcccagctcgtgtgtacacgctggtcatgtggtatccaggcagatgaacatagttcccagctcgtgtgtacacgctggtcatgtggtatccaggcagatkaacatagttcccagctcgtgtgtacacgctggtcacatggtatccaggcaggtgaaagtatgttcccagctcgtgtgtacacgctggtcacgtggtatcc

SEQ ID NO: 257245 - DNA, 201 bp, Homo sapiens
ctggcgctcagctgggactgggcaggaggaggagaggtgcagcggctgggaacagacagctctgtagaccaagggtctaaaacttcttccacaaccagccygagagtaaatgttgtcagctttgcggaccacgctgttcctgtctcagctgcttggccctgccaggaaagcagtcctggacatttaggaagtcgatgggca

SEQ ID NO: 257246 - DNA, 201 bp, Homo sapiens
gtcgagtttgggggtggcaggaggaccccttcccaggggaggtcaggcaaccatgtcagtgcggaggggcagctgcttcccgggaactttcacctccatcyggatgagtgcagtaagaagagcacagccccacaccccagctgcgtctcctctgggttccaaacccagtctcagtgcgggtgcctgaacacttgggcgcct

SEQ ID NO: 257247 - DNA, 201 bp, Homo sapiens
ggcttttcctttctcccctctcccttctgtgctcagagggtggctgggggacttgggacagaaggttcctctttgaacaaagcaatagaacgggttcgtgrcagcgtcatcctctctcaggggccggtggcctctgctgtgtctccctcaaatggtcctctggtctcttgggaacatgaaacagaatctcccatggaggag

SEQ ID NO: 257248 - DNA, 201 bp, Homo sapiens
cgggtgtggttcccagagcgtcgcggcccggggttgactggctcggaatcccggggccttgggcgcctcgcgtctcctgggacctgggttccgcgctggarggcagcgggggcgcgggcggggcctggcaggacgtggccggactctctccctcgtctccccggggtgcaaaccccgcgcacatcagctggagcaggttga

SEQ ID NO: 257249 - DNA, 201 bp, Homo sapiens
gcggaccacgctgttcctgtctcagctgcttggccctgccaggaaagcagtcctggacatttaggaagtcgatgggcaccactgtgttccaacaaaacttyatctgtggatgctgcagtgtgaacttcatagaatttttgagtcatgacatactcttgttattgttttcagtgaatatacaagaacgattcttagcctagg

SEQ ID NO: 257250 - DNA, 201 bp, Homo sapiens
gccccgagggccacgtgctcagccaccccgaggaggtaagatcccagggcaccacagcacacccgagccaactccgcccagaccactgctgcctggggctrtgctgaccctggccctgggctcctggccctgccactgtgctcgccccgacctcatctgggaggcgtgaatcctccccgtgccaggcacttgtcctccatc

SEQ ID NO: 257251 - DNA, 201 bp, Homo sapiens
ggcaggtgggtgacgaggtcaggtgttcaagaccagcctggccaacatgatgaaatcccatgtctactaaaaatacaaaaattagccaggcgtggtggtgygtgcctgtagtcccagctactcgggaggctgaggcacgagaattgcttgaacctgggaggcgaaggttgcagtgagctactgcactccagcctgggcaag

SEQ ID NO: 257252 - DNA, 201 bp, Homo sapiens
acctagttaagagtctcatctccctctcccgcccccacctagttaagagtctcatctccctctcccgcccccacctagttaagagtctcatctccctctcycgcccccacctagttaagagtctcatctccctctcccgcccccacctagttaagagtctcatctccctctcctacccccgcctcattaagagtctcatct

SEQ ID NO: 257253 - DNA, 201 bp, Homo sapiens
gcctcattaagagtctcatctccctctcctacccccgcctcattaagagtctcatctccctctcctacccccgcctcattaagagtctcatctccctctcytacccccgcctcattaagagtctcatctccctctcccgcccccacctagttaagagtctcatctccctctcccgcccccacctagttaagagtctcatct

SEQ ID NO: 257254 - DNA, 201 bp, Homo sapiens
ttattttttctttatttttttttttttaagatggactctcactgtcacccaggctggagtgcagtgacgtgatcttggctcactgcaacctccgcctcccrggttcaagcgattctcccaccgcaggctcttgagtagctgggattacaggcacgcgccaccacacccggctaatttttgtatttttagtagagacggggt

SEQ ID NO: 257255 - DNA, 201 bp, Homo sapiens
gattacagccaccacgctcaacctaaattttttttattttttctttatttttttttttttaagatggactctcactgtcacccaggctggagtgcagtgaygtgatcttggctcactgcaacctccgcctcccaggttcaagcgattctcccaccgcaggctcttgagtagctgggattacaggcacgcgccaccacaccc

SEQ ID NO: 257256 - DNA, 201 bp, Homo sapiens
cctcaagtgatccgtccgcctcagcctcccgaagtgcaaggattacagccaccacgctcaacctaaattttttttattttttctttatttttttttttttragatggactctcactgtcacccaggctggagtgcagtgacgtgatcttggctcactgcaacctccgcctcccaggttcaagcgattctcccaccgcaggc

SEQ ID NO: 257257 - DNA, 201 bp, Homo sapiens
caccatgttgcccaggttggtcttgaactcctgacctcaagtgatccgtccgcctcagcctcccgaagtgcaaggattacagccaccacgctcaacctaawttttttttattttttctttatttttttttttttaagatggactctcactgtcacccaggctggagtgcagtgacgtgatcttggctcactgcaacctccg

SEQ ID NO: 257258 - DNA, 201 bp, Homo sapiens
attgtgtatacagaggaactatgggcaggcagtggcaaaatgttgagttttgttacgctagaagtttctaagtgttttttgtttgtttgtttgtttgtttggagatggagtcttgctctgtggcccaggctggagtgcagtggcatgatctcggctcactgcaacctccgactccagggttcaggcgattctcctacctca

SEQ ID NO: 257259 - DNA, 201 bp, Homo sapiens
aattgtgtatacagaggaactatgggcaggcagtggcaaaatgttgagttttgttacgctagaagtttctaagtgttttttgtttgtttgtttgtttgtttggagatggagtcttgctctgtggcccaggctggagtgcagtggcatgatctcggctcactgcaacctccgactccagggttcaggcgattctcctacctc

SEQ ID NO: 257260 - DNA, 201 bp, Homo sapiens
gaattgtgtatacagaggaactatgggcaggcagtggcaaaatgttgagttttgttacgctagaagtttctaagtgttttttgtttgtttgtttgtttgtttggagatggagtcttgctctgtggcccaggctggagtgcagtggcatgatctcggctcactgcaacctccgactccagggttcaggcgattctcctacct

SEQ ID NO: 257261 - DNA, 201 bp, Homo sapiens
tgaattgtgtatacagaggaactatgggcaggcagtggcaaaatgttgagttttgttacgctagaagtttctaagtgttttttgtttgtttgtttgtttgtttggagatggagtcttgctctgtggcccaggctggagtgcagtggcatgatctcggctcactgcaacctccgactccagggttcaggcgattctcctacc

SEQ ID NO: 257262 - DNA, 201 bp, Homo sapiens
tccctcaagtttcatttgtgaaggtatttatatttcaatgtcatgtcttttgtgaatttaattctgatttatgggttagattagggctgggtgcggtagctcacacctgtaatcccagcactttgggaggctgaggcgggcagatcacctgagttcaggagtttgagaccagcccagccaacatagtgaaaccctgtctct

SEQ ID NO: 257263 - DNA, 201 bp, Homo sapiens
cgatcatggagacagcaggcatctttgagcaatgggggctcgggcaagctccccctctgccactggagggaacaccgtgcaggggcccctcgccaccctgktgtgttgtgactctgtggctcatttattcagagccggagctccaaacgactgattccaagtggaaaacatgccccgggtgccatccagggtgggacaagc

SEQ ID NO: 257264 - DNA, 201 bp, Homo sapiens
attatgctaatatatactttatgatattctgcccagtagaagagactgagaatctgactctggcagtttctgacctccctttactttgaattaatggtgtraacactgtgtttgcttctgaaatctgtgatttatgtgaagtttatgatagaaacatgcaagaaaagcataaacagggaaaagaaaaaagcaatgttgatt

SEQ ID NO: 257265 - DNA, 201 bp, Homo sapiens
agacacctgaagaggtggctaaccacagaaaatggcctccttgccgatcctaacctcattgtgactttctgtgtcatatataaagaaacctgccaaaaatyagaaatgattggctgggcgcggtggctcatgcctgtaatcctagcactttgggaggccgaggtgggtggatcactgagatcaggagttcaagaccagcct

SEQ ID NO: 257266 - DNA, 201 bp, Homo sapiens
ccggggccagcgacggcaggtgatgtccagggccccgcgccaactgggagctttgctgccgctgcggccttgtgtgaatttggagggacaaggccggggcrcgaactgaatctactgtcatatgcggagtcaatgcaccatctccaggacctcgaaagcctcagtttccacgtatgcaaaacggtccatggtgccctcgta

SEQ ID NO: 257267 - DNA, 201 bp, Homo sapiens
ccgccggcactggattgcttctgtctggcggcggcagcatggcggcgggggcggctgaggcagctgtagcggccgtggaggaggtcggctcagccgggcastttgaggagctgctgcgcctcaaagccaagtaagcggggcggcgagcggtaggagtgaggagccggagcgggagcggccgcgagaccgggccggtgtggg

SEQ ID NO: 257268 - DNA, 201 bp, Homo sapiens
taatataaccaaatgcagacgctctgaaatgtgcaaggccgcagctggcccctaggactccggggctccttctctcagcactatcccaggtttacccctgrgagacaagccccagcttgtgctccttgccagcccactgcccgggcttcctttgcaatgtcaggtgcagcacctgggctcatgcgtttgcacctcctatgt

SEQ ID NO: 257269 - DNA, 201 bp, Homo sapiens
aaggaggtgggccgtcacggcttggaggaaacttgaaagtgaactgaatatcagactctattaaggaattatggatcattttgttaaatgtgtgtatcagycgtggcaaaatacccttatctgttaaagacacatactgaggtattcaaggtggaattacggattaccttaatacactccaggaaaaaactcggagacagt

SEQ ID NO: 257270 - DNA, 201 bp, Homo sapiens
cttggagaggctaaggcaggaagatcacttgagctcaggagttggagaccagcctgggcaatatagtgagacctcatctctattaaaaaaaaaaaaaaaaagtttgtgacaccaaggaaagctcatctgggtccttagtttcttagatatgaaacatgaactacaaataacagcagaaaattaactccatctggacttgga

SEQ ID NO: 257271 - DNA, 201 bp, Homo sapiens
gtggctgttgagtctcatctccctctcctacccccgcctcattaagagtctcatctccctctcctacccccgcctcattaagagtctcatctccctctccyacccccgcctcattaagagtctcatctccctctcctacccccgcctcattaagagtctcatctccctctcctacccccgcctcattaagagtctcatctc

SEQ ID NO: 257272 - DNA, 201 bp, Homo sapiens
ggcatgaacctgggaggcggagcttgcagtgagccaagatcgtggcactgcactccagcctggacgacagacgaagactccatctcaaaaaaaaaaaaaccaaaaaaagaatatcatggtggcttacaccagcaaacccagcactttgggaggatggcttgaggccaggagtttgagagtagcttgaacaacatagaaccc

SEQ ID NO: 257273 - DNA, 201 bp, Homo sapiens
ggacgccgcgggaagcgcgagagcaccaaggcgaggaccgcaggcaggagtagcagagaccagagtcttctgagactattgggatgctgtgggcgttgtcsgtctgccccaagtcattacttcgcagagaggtccctgcatatctctgcttgtcgcttctcccttcacaggagcagccgtggggctctaaagaaagcattc

SEQ ID NO: 257274 - DNA, 201 bp, Homo sapiens; identical to SEQ ID NO: 51508

SEQ ID NO: 257275 - DNA, 201 bp, Homo sapiens
tggcatgaacctgggaggcggagcttgcagtgagccaagatcgtggcactgcactccagcctggacgacagacgaagactccatctcaaaaaaaaaaaaamcaaaaaaagaatatcatggtggcttacaccagcaaacccagcactttgggaggatggcttgaggccaggagtttgagagtagcttgaacaacatagaacc

SEQ ID NO: 257276 - DNA, 201 bp, Homo sapiens
atcacttgaacccagggggcggaggttgcagtgagccaagatcatgccacttcactccagcttgggcaaaagagggagacaccatctcaaaaaaaaaaaaraaaaagaaatgattgagtgtaggcataactggcagggtgaacacctgtattagggttgtaaccaaagatgaattatcattgatcaatttcctatatctac

SEQ ID NO: 257277 - DNA, 201 bp, Homo sapiens
ggtgggagtgtaaattagttcacccattgtggaagacagtgtggcaattcctcaaggatctagaaccagaaataccatttaacccagcaatcccattactrggtataaacccaaaagattataaatcattctactttaaagacacatgcacatgtatgtttattgcagcactattcacaatagcaaagacttggaaccaac

SEQ ID NO: 257278 - DNA, 201 bp, Homo sapiens
tgtgattttgatttgcaatgccctgatgagtagtaacattgcatatcttttcatctatctgttaaaggcatcacactttctaattttgaaatatattacawagctacagtaataaaaatggtatagtactgacataaagacaaatctatagaccaatggaatagagtcaagaaataaatccaaccatatatggtcaactgc

SEQ ID NO: 257279 - DNA, 201 bp, Homo sapiens; identical to SEQ ID NO: 51493

SEQ ID NO: 257280 - DNA, 201 bp, Homo sapiens
agctgcatgtaaacatctgtggtgattaggtatacccactcagtgaccaacaaattgcattcagtgtgtctggggtgatcgcctcaggaactgggccttcrgttagtaacgatgctttggaagcatgtatgccagtcataacatgtggagggcttttcctctctccctccctgtgttaacatgctttcatatggctagtac

SEQ ID NO: 257281 - DNA, 201 bp, Homo sapiens
tgaaattttgccgactgaatttgaattagaggcaagtagtactctgattttgcaatggagagtgcaggtgagatggggtgttgcctttggaaatggggagrggtgcgagttactgactaatggttagaaatgctttatgggggtgatgaaattaaagtgttatttaaacagctctttaggcatttcaggtttacctgggaa

SEQ ID NO: 257282 - DNA, 201 bp, Homo sapiens
tgcttctttaattctttcttgacagggagtaacatgcggcggcctcttccagcaggtacaggcacagagggaggcatggaccctgcagcaactgggccagmaggtgacaggtggcctgagagagagggccagccgctgactgaagtttcgggttcgggactgctcatttgtgcatgagaagtgggtcctcagttgtatgtt

SEQ ID NO: 257283 - DNA, 201 bp, Homo sapiens
gccagttcttctgctgttctaaagaacggaaaagattttggtatgtttaaaaatgatttcatattgaatggaaacttgagagttgtttttgactcctgttkccagcctgactctcagacatttctagaccagtatcaccgtttctgtgtgcatgactaccctgccattctcactgtccccacgtggcagcctgttcttact

SEQ ID NO: 257284 - DNA, 201 bp, Homo sapiens
atatgaaacattcgatatattggaggatgaagaagtaagttctgtgtttgatgtttcacccttgtcttagctttaatcttaagggcctgataggatggttkcaggattcctgttgtttctttaggttcggcaaggattaaaagcttactcaaattggccaacataccctcagctgtatgtgaaaggggagctggtgggagg

SEQ ID NO: 257285 - DNA, 201 bp, Homo sapiens
ggagctggtaaaaatagagttagaagagttagtcacccatttttggtcagagtagttagtttgtgctctttggaattgaatgctgaaagacaaggttttcrtatttattgcatctgaatccctcattctctgtattgatgatatggtcgtaaagtgtatttggggtggggcacagtggctcacacctgtaatcccagcact

SEQ ID NO: 257286 - DNA, 201 bp, Homo sapiens
cagccaacgtctggagagcctatattcgtatagccagtgtgagaaaggtggaaactgaaaacacaagtagggaaagcaacgcttggaaaggaggtgggccrtcacggcttggaggaaacttgaaagtgaactgaatatcagactctattaaggaattatggatcattttgttaaatgtgtgtatcagtcgtggcaaaatac

SEQ ID NO: 257287 - DNA, 201 bp, Homo sapiens
ttaaaatgtcttctcttttttgcagtgttgaatatgaaacattcgatatattggaggatgaagaagtaagttctgtgtttgatgtttcacccttgtcttakctttaatcttaagggcctgataggatggtttcaggattcctgttgtttctttaggttcggcaaggattaaaagcttactcaaattggccaacataccctc

SEQ ID NO: 257288 - DNA, 201 bp, Homo sapiens
cctttccatgggctgagtgcactcatcagcagggaacatgaggagctggggtgggagtcatctgagcctggatgccccctccctaagggagtgctgggaakttcagcagccagcatcagtaggcctgggatccatgcccccagcccccagtccctgctgggctgaaggcaccccaatcccagctggcctgttgctgagcag

SEQ ID NO: 257289 - DNA, 201 bp, Homo sapiens
accaccggtggtgctttccagtccaagcccaaaggcctgagagccaggggagtccgccacgtgagtcccagtgtgagtctgaagactggaaaaccaggagmaccagcatccgagggcaggagaagatgggcagcccagatcaagcagagagagcaaacgtgccctcctcatcttcctgttctactcagccctcgatgaggt

SEQ ID NO: 257290 - DNA, 201 bp, Homo sapiens
aatgcctagtatgcaggaagcactcagtagatgttggcacttagtatttcagtaggaagtagaatggttcatggaattcacaggcaaaaagctttgttttkttttgtttttgagacagggtctggctctgtcacccaggctgcagtgtagtggagcgatcacggctccctgcagcctccgcctcccaggctcaagtgatcg

SEQ ID NO: 257291 - DNA, 201 bp, Homo sapiens
cccaacccatttcctagagcaggcctctcatctcctcaccttcacccgcagaagtaactgggagaaccagatggctggggatagacagttggccagacacygtaccactgtgcaatgagaggctcgtcagcatctaggaatctctgtcacacttggccacatatcctggcacatagcagcgtggcactctggcccacaggc

SEQ ID NO: 257292 - DNA, 201 bp, Homo sapiens
ttgagctaatcccactcggttggcaatgtaagtgatacagctttgtgcgtgattgatgcatttcatttgggatgagtttataaggatatttattattattwttttttgagacggactctggctctgtagcccaggctggagtgcagtggtgctatcttggctcactgcaagctccgcctcccgggttcacaccattctcct

SEQ ID NO: 257293 - DNA, 201 bp, Homo sapiens
aaggacttacctgattcaagaggggagaaaacagggtggtcaggaatacatttgtgattcactccctgaagaggcagtctggtgacgtggtttggctgtgtctccacccaaatctcttcttgaattgtagctcccatgattcccacgtgttgtgggaggtaatcaagtcatgggggtgggtttttcttgtgctgttctcct

SEQ ID NO: 257294 - DNA, 201 bp, Homo sapiens
tccccagataaacaaaaacagaaaatctgtcgctagaagacttgccttacaagaaatgctgatgaaatacagaacactagatagtaacttacatcctcacrctgcaaccatgtgaatggagttttgttcttctaattgactgttaccagtaagtaagagtctatctatttttgtgtgttcatcttatattcaacaatcttg

SEQ ID NO: 257295 - DNA, 201 bp, Homo sapiens
caaggacttacctgattcaagaggggagaaaacagggtggtcaggaatacatttgtgattcactccctgaagaggcagtctggtgacgtggtttggctgtgtctccacccaaatctcttcttgaattgtagctcccatgattcccacgtgttgtgggaggtaatcaagtcatgggggtgggtttttcttgtgctgttctcc

SEQ ID NO: 257296 - DNA, 201 bp, Homo sapiens
aaatgtaatccatgacataagcagaaccaatgacaaaaaccacatgattgtctcaatagatgcagaaagggcctctgataaaattcaccagcccttcatgmtaaaaactctcaataaactaggtactgatggaatgtatttcaaaataataagagctatttatgacaaacccacagccaatgtcatactgaatgggcaaaa

SEQ ID NO: 257297 - DNA, 201 bp, Homo sapiens
aaaaaaaaaaaaaaaaaaaaagaaagaaaagaaaaatgggccttatcagaagagtgatgaaatagatcattttaactgaaaaatgcattggtggctgatgrttgttaactttttaaataactttactctttttaataatggtcactgaataaatgagtaaatgcaatttaaagtaagtaaatttagatgtcagaaaggaaa

SEQ ID NO: 257298 - DNA, 201 bp, Homo sapiens
tgtttccagcctgactctcagacatttctagaccagtatcaccgtttctgtgtgcatgactaccctgccattctcactgtccccacgtggcagcctgttcytactttcacacctgagctaaccattgcatctcctttctgtggggtgatcttccctgtcactcagggtccttgttagatcctgcttcagctcccagacaac

SEQ ID NO: 257299 - DNA, 201 bp, Homo sapiens
acttgtctaacttttttcaaggtttttagcttccttgcaatgagttagaacatgctcctttagctaggagaagtttgttattaccgatcttctgaatcctrcttctgtcaacttgttgaactcattctctgtccagttttattcccttgctggcaaggagttgcgttcctttggaggagaagagacgttctggtttttgga

SEQ ID NO: 257300 - DNA, 201 bp, Homo sapiens
acttggcagggtcagagccccccagcgggatccagagcccgccgccgaggccccttttgggatttctcaggctcggcagcctcagcgcaggcaggggcggsgctttccctcgcgcagccgctcagctccccgtggccccgcccacatccggccgccggcactggattgcttctgtctggcggcggcagcatggcggcgggg

SEQ ID NO: 257301 - DNA, 201 bp, Homo sapiens
acctgggaggtggagcttgcagtgagccgagatcacgccactgcactccaggctgggtgacagagcgagactccgtctcaaaaaaaaaaaaaaaaaaaaaagtatatgctaggccgggcgcggtggctcacacctgtaatcccagcactaggagaggccaaggtgagcagatggcttgagcccagaagttcaagaccagcc

SEQ ID NO: 257302 - DNA, 201 bp, Homo sapiens
cttttgggatttctcaggctcggcagcctcagcgcaggcaggggcggggctttccctcgcgcagccgctcagctccccgtggccccgcccacatccggccrccggcactggattgcttctgtctggcggcggcagcatggcggcgggggcggctgaggcagctgtagcggccgtggaggaggtcggctcagccgggcagtt

SEQ ID NO: 257303 - DNA, 201 bp, Homo sapiens
tgatatgtacgctgaactaatgtattatcatgtgtatgtgttttgggagagagaagttaagtgctttatttctttttttgtgtacaggtttcagcaagcaratggtggaaattcttcacaaacataatattcagtttagcagttttgatatcttctcagatgaagaggttcgacagggactcaaagcctattccagttggc

SEQ ID NO: 257304 - DNA, 201 bp, Homo sapiens
atttagattgggctggaagggtgtatctaaggaagagagatctttcttttttttttaagagataaggtctcgctctgtcacccaggccagggtgcagtggygtgatcatagctcactgcagccccaaacttccgagctcaagcattcttcccaccttggcctcccaaagtgctgggattacaggtgtgagctactgtgcca

SEQ ID NO: 257305 - DNA, 201 bp, Homo sapiens
tgagaaaagaaaaaaattatgtatttctaaaattgagatgcagtgcaggcaattggcaatgagggtttctttttttacatctccggtaatactgttgtccyctttaaaaatctgctataacaatgtcattattatggaatgctgcatgtattctaaataactttttaaactttagaattctcagaaaatcgaccgattaga

SEQ ID NO: 257306 - DNA, 201 bp, Homo sapiens
ccatccgccctcccgtccctaacgcccaggccccgggggctcaccacgtcccccggaacctgcagatcctccgccctccgctgtcgccagcggccgagcgmtaagctgtccatgcagccccagggtcaaaccctcccggcatctcaggcctggccgaggcccgcgcaccacgcccccttccgcacaaggccctggggagcc

SEQ ID NO: 257307 - DNA, 201 bp, Homo sapiens
tgacttatgcctgtaatcccagcactttggaaggccaagacaggcggattgtctgaggccaggagttcaagaccagctggccaacatggcaaaaccctgtytctgctaaaaatacaaaaattagccaggcatgatggcgcatgcctgtaatcccagctttttgggaggccaaggcaggagaattgcttaaaccctagaggc

SEQ ID NO: 257308 - DNA, 201 bp, Homo sapiens
gaaccctaacaccaggagccctgacacccagtcaccccgacagccaggaagccaacagcaagaagcctctaccaccaggagccctgacagcaaggaacccygacacccaggagcccctgctatagccaggaaccctaacacccaggagcccctacagtcaggaaccccgacacccaggggtcccgacagccaggaaccccg

SEQ ID NO: 257309 - DNA, 201 bp, Homo sapiens
ttgaagtattacatacagtaacaatgcacagatcttaatcgtcagatgtggtgaattttcacaattgtatacacaccgataaccaccattcacaggaagartatagaacccaggaagttttccatcccctttagcccagctactgatttcttactgtcactgtagatgagttttccctgctcttggactttgtgtgagtag

SEQ ID NO: 257310 - DNA, 201 bp, Homo sapiens
cccaagccctccttccactctcacctctcccaacacttaccatttatttgtagccttacccattcttaattccttggctcctgactcagaggagactgccktcttcttcttcaaggtaagctcttctctgctctggatttcccctctcctgcctcttctgagtccttgcatcctcagctgtcttgtgtctacggcccttcc

SEQ ID NO: 257311 - DNA, 201 bp, Homo sapiens
ccaagccctccttccactctcacctctcccaacacttaccatttatttgtagccttacccattcttaattccttggctcctgactcagaggagactgcctycttcttcttcaaggtaagctcttctctgctctggatttcccctctcctgcctcttctgagtccttgcatcctcagctgtcttgtgtctacggcccttccc

SEQ ID NO: 257312 - DNA, 201 bp, Homo sapiens
acttgaacctgggaggcagaggttgcagtgagccaagatctcaccactacactccagcctgggcaacagagtaagaccctgtctcaaaaaaaaaaaaaaaagaaaagactttatgaccagtgcaaattagagatctatatgacactgtataacgtatatgcccaagtctgtctcacaatggtactctaaacactcgctata

SEQ ID NO: 257313 - DNA, 201 bp, Homo sapiens
ccaaatgtacacttttccttgatcatcctcgggtgtgaggcatgactaccaaatgtcaaggtggctgtgggctggagttttggagagcacaggcagacaarttagttccctgtgggtaactgtggttttaaggcatttaaaatagtaacacaaattatgtcattgaaaagctaggtgtgctgtagaaaataattcaggaag

SEQ ID NO: 257314 - DNA, 201 bp, Homo sapiens
cttgcgcgggtccaacatgtgctacctcaggatgtagtgtaacaagggggctgggtgggcagagtgggcctgtgagcgcccgcatcccccagctccccccsgcagccggctccacaatggtctgctccggttgccgggtgcggattcgggttccggacgcaaggctgcgagttctccgctgcttgttgtggccggggttac

SEQ ID NO: 257315 - DNA, 201 bp, Homo sapiens
ataaaattttcaggaggcttctgtataaataagtttgctttgaataggcattatactcagttggctcaaaattccaaacagtgtagaaagatgtccgttgrgaaggcccaccccgttcctctgttgtcacccttgtgtcccaccacataagtaactgcttgtattaattttgtatgaatccttctagtgtttctttatgca

SEQ ID NO: 257316 - DNA, 201 bp, Homo sapiens; identical to SEQ ID NO: 51498

SEQ ID NO: 257317 - DNA, 201 bp, Homo sapiens
cgcctcaaagccaagtaagcggggcggcgagcggtaggagtgaggagccggagcgggagcggccgcgagaccgggccggtgtggggcggcgggtggcccakcctggcttcttggtgcccggctcccttcggcctcgggggaccgggcccggcgccacccgtagactcccccgagcctccgcgtgagtggcccgagccgcag

SEQ ID NO: 257318 - DNA, 201 bp, Homo sapiens
aatgtctaaatattgaatcaggattcagcacaaaagcaacacaaaagtggctcctctcaccagggacatccgggagtaagagaggctcacggcaatccccrccagggcccctccggcccccaacccatttcctagagcaggcctctcatctcctcaccttcacccgcagaagtaactgggagaaccagatggctggggata

SEQ ID NO: 257319 - DNA, 201 bp, Homo sapiens
cacattgcacttattctaaaattgaccacataattggaagtaaaacattcctcagcaaacgcaaaagaacggaaatcaaaacagtctctcagaccacagtrcaatcaaattagaattcaggattaagaaattcactcaaaaccgcacaactacatggaaactgaacaacctggtcctgaatgactaataggtaaataacga

SEQ ID NO: 257320 - DNA, 201 bp, Homo sapiens
atggggtttcaccatcttagccaggatagtcttggtctcttgacctcgtgatctgctcaccttggcctcccaaagtactgtgattaggcgtgagccaccaygcctggccaaatgtacacttttccttgatcatcctcgggtgtgaggcatgactaccaaatgtcaaggtggctgtgggctggagttttggagagcacaggc

SEQ ID NO: 257321 - DNA, 201 bp, Homo sapiens
gacagaaaattaacaaagatattcaggatttgaactcagctctcaactaagcagacctaatagacatctatagaactctctaccccaaatcagcagaatayacattcttctcagcaccacattgcacttattctaaaattgaccacataattggaagtaaaacattcctcagcaaacgcaaaagaacggaaatcaaaacag

SEQ ID NO: 257322 - DNA, 201 bp, Homo sapiens
aggggcctgaagaaggcttcacacaagacaggaatctcgggtgggccacgaaggagcaagagaatctttggaggtgggaaggtatacctcaagcagtaagmacagtacaaggtcagactgttccaggatcggagaagctgtggcggctggagcaggggcttgtggcgcacatggcagggatgggagcagctgtctgggagg

SEQ ID NO: 257323 - DNA, 201 bp, Homo sapiens
agtgcaaggaaggtctggagccccaaaagccaggagcctcaggagtcaggtgtcctgacagccaggaaccctgacacccaggagccctggcacccaggaamcccaacagccagaagcctctaccaccaggagccctgacagcaaggaaccccgacacccaggagcccctactacagccaggaagccaggaaccctaacacc

SEQ ID NO: 257324 - DNA, 201 bp, Homo sapiens
caggagccctggcacccaggaaccccaacagccagaagcctctaccaccaggagccctgacagcaaggaaccccgacacccaggagcccctactacagccwggaagccaggaaccctaacaccaggagccctgacacccagtcaccccgacagccaggaagccaacagcaagaagcctctaccaccaggagccctgacagc

SEQ ID NO: 257325 - DNA, 201 bp, Homo sapiens
cacaataatagtgggagattgtaacaccccattgtcaatattagatagatcaacgagacagaaaattaacaaagatattcaggatttgaactcagctctcractaagcagacctaatagacatctatagaactctctaccccaaatcagcagaatatacattcttctcagcaccacattgcacttattctaaaattgacca

SEQ ID NO: 257326 - DNA, 201 bp, Homo sapiens
gcctaccttacaaaagctcctgagggaagcattaaatatggaaaggaaaaactggtaccagccactgcaaaaacataccaaattgtaaagaccatcgacastatgaagaaactgcatcaattaacgggcaaaataactagctagcatcataatgacagaatcaaattcacacataacaatattaaccttaaacataaatgg

SEQ ID NO: 257327 - DNA, 201 bp, Homo sapiens
aagtttcctggagctgcagcagcctttttgtcaccatgagggcagctggtgggaaccctaggaaagcaggaaatcacctagagccggaacagcctgagcckctgaaccaacccacagctgactacccgtcactttgtcgtgtctctgtgatttgagtccatcattctgctgcagttgaaggtatcctttgacaaagccctg

SEQ ID NO: 257328 - DNA, 201 bp, Homo sapiens
caggggttgactgacacctcatagaggagagctccagctggcatctggcaggtgcccctctgggacgaagcttccagaagaaggaacaggcagcaatcttyggtgttctgcagcctctgctggtgatacccagacaaacagggtctggagtggacctccagcaaactccagcatacctgcagcaaaggagcatgactctta

SEQ ID NO: 257329 - DNA, 201 bp, Homo sapiens
gcacagcactcaagctctgctaagggacagactgcctcctcaagtgggtccctggcccctgtgcctcctgactgagagatacctcccagcaggggttgacygacacctcatagaggagagctccagctggcatctggcaggtgcccctctgggacgaagcttccagaagaaggaacaggcagcaatcttcggtgttctgca

SEQ ID NO: 257330 - DNA, 201 bp, Homo sapiens
ccctgaggcgctgacctcgggtctcctctgtgtccctctgtaaccctttgcggtgtggtgctggcactgttcctttcttgattcccaaatctgtatatcargtgcagacttcttccctgagctctagacatcatactaacaacccattaaacttcctttcctcaggttggcagcttctgcactatgatttgaggcatagtg

SEQ ID NO: 257331 - DNA, 201 bp, Homo sapiens
tcgcctaacccgggaagcacaaggggtcacggaactccctccccagccaagggaagccgtgagggagtgtgccatgaggaacggtgcactccagcccagawactatgcttttcccatggtcttcgcaacccacagaccaggagattccctcgggtgcctacaccaccagggccctgggtttcaagcacaaaactgggcggc

SEQ ID NO: 257332 - DNA, 201 bp, Homo sapiens
ggacttgatataattaaggttagaattgagaagtctgtgctttgtaaagaaattccatttagagcatactttttaaaatgttgtgataaatctaagatacraatttcttatgaatctatatttactaataagaacctgcaatgaatacacagtatttctgattagttgattgatcaataatctgtgttatggtatgatcaa

SEQ ID NO: 257333 - DNA, 201 bp, Homo sapiens
tgtccccacgtggcagcctgttcttactttcacacctgagctaaccattgcatctcctttctgtggggtgatcttccctgtcactcagggtccttgttagwtcctgcttcagctcccagacaacaaattgttttttcttgccttactcatctgcccttgggtgcatggagtgacagcagtgtgaggcctgtggcccggtgc

SEQ ID NO: 257334 - DNA, 201 bp, Homo sapiens
acagatagatgagaggggatttaggaggctgagaagtctcaccatctgccctccacatgctggagaactagggaagctggtggcatagctcagtccaagtytgaaggcctgagaacctgggggccgctggtgcaagtcctgcagtctaacggctggagaatctagagctgtgatgtccaaagacaggagaagatggatatc

SEQ ID NO: 257335 - DNA, 201 bp, Homo sapiens
tgtcatcctgccatccctcaaatatgcatgttactcacgaagcggaggaaaagtggtgttgcataattgagctgagccgttttatatcaattttctctctwtaggctcaaagtgctgacaaataaagcttctgtgatgctctttatgaaaggaaacaaacaggtaaagaactcaaaaatggttttatttgtaatttctttt

SEQ ID NO: 257336 - DNA, 201 bp, Homo sapiens
gggagcaccaagcacagtcccccacacccagaagcatccccgggatagttactgcccccagatgacacagccaggacacgtgaggtgcaagctgggtctcrcgcccagaccagctttgaggaggctgccccagcctgcgtcagccccataggacacttgaggttacacagctgaatctttggaccccctcaccttgtcatc

SEQ ID NO: 257337 - DNA, 201 bp, Homo sapiens
aaagcctgaagtgtttagtgtctgactctttaagaagaagtttgcccacccctggtctaacccaatattgtccggagaaaaatccagataaagtcatatgytggaatgactaattctgtgtagtaccagacagattaagaagtaaaatcatttccattggtctgtagtacattttgttagcagtgaaacggttttcttgat

SEQ ID NO: 257338 - DNA, 201 bp, Homo sapiens
gccttggcctctagtgcccataagagatgcccaaacccaggtttctcctcctcccatcaatgtcatttccataaagacccactggaaacatttttttttttcggatttatcaccaggaaagtaatgtggcttcccctaaagcacagatgtgcttcctttctggaggccagctgtttttgcctttgaagcccagataaaaat

SEQ ID NO: 257339 - DNA, 201 bp, Homo sapiens
ttctttatgcaaatagggcagatgtgaatatagtgattagctttttaaaatttaaggacttatttaaaattccaatgaaatgtataatgtaactgtagagwgtaaccctaaaatgtccaatataaataatagaagggggcattaaaactgcatgtttggtcagtgataaaagataatgattacaagtgaaatgaatgatta

SEQ ID NO: 257340 - DNA, 201 bp, Homo sapiens
tcacaccactggacgtagagtgataccatgtctcaaaaaaaaggaggaatgtagttcattttaaaacagctttctttttgttaatgagagtttttggaaasttctagagtatgaactaatgttcttctgcttcatcttgtgtctatttgatttcttagtcttttttttggagacaaggtctcactcttattgcccaggctg

SEQ ID NO: 257341 - DNA, 201 bp, Homo sapiens
ttatgaaattgatgaagcatgtagaaatttgatcaaaatttccctttgcatctgggaaaaatgcactagtaggttttaaacagcattttttttttttttttcagaaatgatctggtataacagttacacatagaaacagtaattgaaccaagatgatctgggatgagcttaaagtgcaggacctatctatactaacgaaac

SEQ ID NO: 257342 - DNA, 201 bp, Homo sapiens
tcctagggcccagaggagatgatgtggtatttctatcactaaaaggagttcaagaccagcttgagtaacatggtgaaaccctgtctccactaaaaatacaraatttagccaggcatgatggcgcatgcctgtaatcccagctactcgggaggccgaggcaggagaatcatttcaacccaggaggtggaggttgcagtgacc

SEQ ID NO: 257343 - DNA, 201 bp, Homo sapiens
ggaggccgaggcgggtggatcacgaggtcaggagattgagaccatcctggctaacacggtgaaaccccatctctactaaaaatacaaaaaaaatcagccarctgtggtgggacatgcctctattcccagctagtcgggaggctgaggcaggagaattgcttgaacccaggaggcggaggttgcagtgagttgagaccacac

SEQ ID NO: 257344 - DNA, 201 bp, Homo sapiens
taaagatacagattgcactgttgaatttctaaagatctgtacaatcattataaatgtaaatgtagtttatgtttaatttctgagtgtataattactgtatrtaaacagatagtgttgggcaatcttccgaagggtaccaactagctgtataaccaggtgcatgctaactagtggaattaaaatttttcagtggcagagaat

SEQ ID NO: 257345 - DNA, 201 bp, Homo sapiens
atacaggtgctgcatttactcaacaggcctgcgcttcccagaatattcccagaatcacatgtgtagcaggtatccctttacaaaaggacattttggaaacmagtttcttcatgcaattctcgaggtctttcacagtctaatggacatcaagtctctaaaaggcaggggaaagtatgtagcatttcctgaacttctctggac

SEQ ID NO: 257346 - DNA, 201 bp, Homo sapiens
tctaaagatctgtacaatcattataaatgtaaatgtagtttatgtttaatttctgagtgtataattactgtatgtaaacagatagtgttgggcaatcttcygaagggtaccaactagctgtataaccaggtgcatgctaactagtggaattaaaatttttcagtggcagagaatgttggccaatttatttggcatcttaag

SEQ ID NO: 257347 - DNA, 201 bp, Homo sapiens
cgacctcacctgccgggcgtgaggtgctggactgagaccagggtggggctctgggcatgggaggtggggctgggcgtggggcacgtggcacagagggatgygcgtggtagggctcagggcagacggaacgtggaacagggagtggctcagggcatggggatggggcggggcgtgggacggggcgtggcgtggggcacagga

SEQ ID NO: 257348 - DNA, 201 bp, Homo sapiens
tacaattttatcatgtttagtttgtgttctcaccaccacaggcaagatacaaaatggttcctcatcactctcctgttgcattttaaataacacaatttacygtgttcaataccatgtatttctccaggtgaggtatacatgtgacaggctccaaaaggcttttaatcaccacagtagtgctgcccaagaaaattcaagggc

SEQ ID NO: 257349 - DNA, 201 bp, Homo sapiens
ttctagtcaacagacagtacggttgttcagttgcaaggaaaggcgttcacactataatccaggtgtttcactggaagagatgtgtctcgcatccacagtgktcagctggcttgtcacatcacggcactgaggttggtctaggctcctgccaatatccagatgggctccaaaagcagccacccaatcccctgtgtgagcctg

SEQ ID NO: 257350 - DNA, 201 bp, Homo sapiens
agatgcccaaacccaggtttctcctcctcccatcaatgtcatttccataaagacccactggaaacatttttttttttcggatttatcaccaggaaagtaakgtggcttcccctaaagcacagatgtgcttcctttctggaggccagctgtttttgcctttgaagcccagataaaaatcgagtgctccagtctggcagcctg

SEQ ID NO: 257351 - DNA, 201 bp, Homo sapiens
atatttataaacaatcgactgatctttttcagattttcccagttttacttgtactcgtgcgcgcgtgcatgcgtgtgtgtgtgtgtgtgcgttgtttgtttttgtttttgagacagggtcttgctctgtcgcccaggttagtgggcagtagcagtggcaggatcatggctcactgcagcctccaactcccaggctcaagtg

SEQ ID NO: 257352 - DNA, 201 bp, Homo sapiens
gatatttataaacaatcgactgatctttttcagattttcccagttttacttgtactcgtgcgcgcgtgcatgcgtgtgtgtgtgtgtgtgcgttgtttgtttttgtttttgagacagggtcttgctctgtcgcccaggttagtgggcagtagcagtggcaggatcatggctcactgcagcctccaactcccaggctcaagt

SEQ ID NO: 257353 - DNA, 201 bp, Homo sapiens
tgatatttataaacaatcgactgatctttttcagattttcccagttttacttgtactcgtgcgcgcgtgcatgcgtgtgtgtgtgtgtgtgcgttgtttgtttttgtttttgagacagggtcttgctctgtcgcccaggttagtgggcagtagcagtggcaggatcatggctcactgcagcctccaactcccaggctcaag

SEQ ID NO: 257354 - DNA, 201 bp, Homo sapiens
ggctcatttattcagagccggagctccaaacgactgattccaagtggaaaacatgccccgggtgccatccagggtgggacaagcatggtgtgcggcagacygggcagcccctgggccagccagatcgcctccacctggaggggcccttgttgaaccagccccgggaagatgcttgagtaccctttggtcctgggcaggggc

SEQ ID NO: 257355 - DNA, 201 bp, Homo sapiens
ttgatatttataaacaatcgactgatctttttcagattttcccagttttacttgtactcgtgcgcgcgtgcatgcgtgtgtgtgtgtgtgtgcgttgtttgtttttgtttttgagacagggtcttgctctgtcgcccaggttagtgggcagtagcagtggcaggatcatggctcactgcagcctccaactcccaggctcaa

SEQ ID NO: 257356 - DNA, 201 bp, Homo sapiens
ttgtaattttcatagcaattgaacctctacttaattctcaatcagttgttgaagtaggcagggttggacagactttggcctgttttagagataaagaaacyaaagttttgaaaggtgaggctgttggaataaagaaactgcctcacttgttagcaagatgcaccgggcaagtgacatggagaaccactttgctcattggga

SEQ ID NO: 257357 - DNA, 201 bp, Homo sapiens
cagagcccgccgccgaggccccttttgggatttctcaggctcggcagcctcagcgcaggcaggggcggggctttccctcgcgcagccgctcagctccccgyggccccgcccacatccggccgccggcactggattgcttctgtctggcggcggcagcatggcggcgggggcggctgaggcagctgtagcggccgtggagga

SEQ ID NO: 257358 - DNA, 201 bp, Homo sapiens
aggtgtctgtcggcccctactgggaggtgtctcccagtgaggctatacgggggtcagggacccacttgaggaggcagtttgtctgttatcggatcttgaaygccatgctgggagaaccacctgctctcttcagagctgtcaggcagggacgtttaagtctgtagaagccttttgttcagatatgccctgcccccagaggtg

SEQ ID NO: 257359 - DNA, 201 bp, Homo sapiens
gcctactcaagcctcagcaatggcctactcaagcctcagcaatggcggacgcccctcccctagccaagcttcagtgtcctaggtcgatctcagactgctgygctggcagcgagcaaggctccatgggtgtgggactcaccgagccaggcacgggagggaatctcctggtctgccagttgcaaagactgtgggtaaagcgta

SEQ ID NO: 257360 - DNA, 201 bp, Homo sapiens
tctgttttgaaatttatatttggctgtttgacaaagattctgattttgaaatactatttttttttttttaatatcacacatcacagagtagaaggaagcckcttttggaggtttagccaaatgttcctgaatagcaggtttaagtgttctctccttagtcttgcagctcagtgccatcattggtaagtggccatccccatt

SEQ ID NO: 257361 - DNA, 201 bp, Homo sapiens
ttaagtgttctctccttagtcttgcagctcagtgccatcattggtaagtggccatccccattcttggcttaggtatagtgaccacctttgtttaatattckgtcaaaatttatcaaacactaaatgccgcacagtagtctaggcactgaggatacagaacattaagggtcacagacaacaaatagtagacatatatgttat

SEQ ID NO: 257362 - DNA, 201 bp, Homo sapiens
agccccaaacttccgagctcaagcattcttcccaccttggcctcccaaagtgctgggattacaggtgtgagctactgtgccagcagggccatttgaaaaayggaaaggagccagccattgggagagctaggaagagcttttaaccaaagtgcagagtgtcaaagcaaaaggctagtggggctggagggtggtgagagtgtg

SEQ ID NO: 257363 - DNA, 201 bp, Homo sapiens
gtttagtgagaggtgtttgatagagctctgagtgcaggtgttgagtgtatagtctggaggtgaggggagaggcctgggctgggaagaagttgggagttgtratagcagcgtcatttagagccataggatcggatgagcccactccaggagaatgagtgtggataggcatagaagaggactcagaaccaaggctggcacatg

SEQ ID NO: 257364 - DNA, 201 bp, Homo sapiens
gtttgagcatttagggagggcagaggaaacatggagagccaagtggaaggtgttgcaggaaggtggttgtggtcactgttactgaaggatactgaagggtsagtggaatgaggacagggcagcagccatgaagtggaacatggtgtagggaggcgcttggctccagagacacactgtctgcctacatcactcaacaggttt

SEQ ID NO: 257365 - DNA, 201 bp, Homo sapiens
actgcagtggcgccaatctcggctcactgcaagctccgcttcccgggttcacgccattctcctgcctcagcctcccgagtagctgagactacaggcgcccrccaccgcgcccggctaattttttgtatttttagtagagacggggtttcaccttgttagccaggatggtctcaatctcctgacctcatgatccacccgcct

SEQ ID NO: 257366 - DNA, 201 bp, Homo sapiens
ttttggaagccttcctcgctgggctctccatgacctctctgtggagccggaaggacagcagggccaacagggacacacctcactccatctgggaccattaygtgaaacacccagattgatgccctcacctctggtacatctagctgcaagtcatccctgtggactgggggaggagagaactgcaccccacatctccttccc

SEQ ID NO: 257367 - DNA, 201 bp, Homo sapiens
accttgttgccgtgtcctcacttggcagcaggagaagaagggcaaaaacagactagccagcctcaaacccttttataatggcactgttcccatccatgagrgcatagccgtcttggcctaatcacctcccaaaggcccctcttaattgctatcacctttgatgttaatttccagcatatgaatttaggagggacatataca

SEQ ID NO: 257368 - DNA, 201 bp, Homo sapiens
aaattagagagaaacttagacattttaatttttctgcttaccttttactttattaaactgaatttaaaatatactgctagcatttttatatttatattaarcttatttaaattatgtttattataatggagtgagatttggaagactgtacaaataacagaataaaaaagaagctttgaaatatttcagggctgggcgtgg

SEQ ID NO: 257369 - DNA, 201 bp, Homo sapiens
accaggatgttgatatttataaacaatcgactgatctttttcagattttcccagttttacttgtactcgtgcgcgcgtgcatgcgtgtgtgtgtgtgtgtgcgttgtttgtttttgtttttgagacagggtcttgctctgtcgcccaggttagtgggcagtagcagtggcaggatcatggctcactgcagcctccaactcc

SEQ ID NO: 257370 - DNA, 201 bp, Homo sapiens
aaggtcaaaaatacactagagaattcaggatgcaagggagcttactggagaacagccaccaaataaactgagaatcacatgtaagtttcccattaggaatkccacacaaactacccctcacatcaccttggcttctctctgaccaagagaaccattctgagctgcctacgggcatcatgggagagtgggcaggcccacgtg

SEQ ID NO: 257371 - DNA, 201 bp, Homo sapiens
aaccaggatgttgatatttataaacaatcgactgatctttttcagattttcccagttttacttgtactcgtgcgcgcgtgcatgcgtgtgtgtgtgtgtgtgcgttgtttgtttttgtttttgagacagggtcttgctctgtcgcccaggttagtgggcagtagcagtggcaggatcatggctcactgcagcctccaactc

SEQ ID NO: 257372 - DNA, 201 bp, Homo sapiens
agggtttcctcatgttgcccaggctggtctctggaactcctgagctcaagtgattcgcctgcctcggccttgtaaagtatcgggattacaggcttgagccsccgtgacctgccctgttgatctaaattgagtgaaattttgccgactgaatttgaattagaggcaagtagtactctgattttgcaatggagagtgcaggtg

SEQ ID NO: 257373 - DNA, 201 bp, Homo sapiens
cagctttgaggaggctgccccagcctgcgtcagccccataggacacttgaggttacacagctgaatctttggaccccctcaccttgtcatcatagactttyactgtacctatctaatcacaaacgtaagctgcctattttaatatcaggagctattttaataaaagtacaggattaaaggaagagcttagaccaggacacc

SEQ ID NO: 257374 - DNA, 201 bp, Homo sapiens
aaggctgcagtgagtcatgatcacgccactgcactccagctggggcaacacaagaccctgccataaataaataaataaataaataaataaataaataaatwcctgtttatgcaccactaactgtcatcttgcacaccaccttcaagggaagtatctctcaggtagaaggtgattcgagttcaatcccaccctgccagtttc

SEQ ID NO: 257375 - DNA, 201 bp, Homo sapiens
tcttgaacacagaaagggagaagcgacatactatgtgcaagtgagcctcagtgataccaacagctgatttctcatcagacatcatggagtgagaggcagcsagatgacatactccaagtgccagaagaaagactgtcagcacctgttactctacttcaaaaccatgtggccacatatgcctttcctcaatatccaacaaaa

SEQ ID NO: 257376 - DNA, 201 bp, Homo sapiens
tctaggaccaaacccaacaagtacccagacccaggaacggccactaaagagtgtgttggtcccaacggcactacttttgttttctctcttcgcctattacrtgatcagctgtgtgttttttttttatcagagtctaccttgagtctctgcagcaggagggggacacatctgtgttggttttatctaacatgtttgtaggaa

SEQ ID NO: 257377 - DNA, 201 bp, Homo sapiens
gactttaaactttatcttttcagaataacaatcatccattacatttaacctcattatttcttgcattgcctgatatttacttagctttatacatttaaaayagtcatttcaaataattttggctgaaactcttgtaataaactatggtgactggtttattgatattgaaaatgtgcaaaacctataaattttgttcaagaa

SEQ ID NO: 257378 - DNA, 201 bp, Homo sapiens
tagctactcgggaggctgaggtaggagaatggcatgaacccgggaggcggagcttgcagtgagctcagatcgcgctactgcactccagtctgggtgacagrgcaagactccgtctcaaaaaataaaaaataaaagaaaaatcagcatttataaaacagccacatttgaggggtgattactgcttttttttttgaaaaggat

SEQ ID NO: 257379 - DNA, 201 bp, Homo sapiens
gtaacaatgttgtaactgacacagagtttcagaggcaggaggacctctgtaaacagtcatggaggccaccctggcccagggcgagaaatccaccccaggarccctggcagccagcccaagaggccccgctgctggacagccctgatgtcagaacacacttcatggtacactggcatctccccaacctctgcagtcacttgc

SEQ ID NO: 257380 - DNA, 201 bp, Homo sapiens
agtgtggtagcattaaaagtccagatataaatcaaaatatatatgaaagtttggcttcaaatcactgtgataaggatggactttttatacatacatatatratcttctttttttttttagagatgaggtctcactatgttgaccaggctggtctcacactcctggcctcaagcaatcctcccttcttggcttcccaaagtg

SEQ ID NO: 257381 - DNA, 201 bp, Homo sapiens
ccaggccttgccccagacttaagagtctgcattttaaccagacacccacccctactccaccaccccacaatccatgtgcagttctaggagtgagggtctgragaaggcagatgctggagtggaggccaggtctgaccccagcatctgactgtggacaagtgatgcagcctccttgggcctctcttcttagtacagtgaagg

SEQ ID NO: 257382 - DNA, 201 bp, Homo sapiens
atttggagaaaagaaatttagatctgcacctcacaccatgacatggtttggctgtgtccctaccaatctcatcttgaattgtagctcctataattcccacrtgttgtgggagggacccagtgggggataattgaatcatgggggcggttcccctacacggtcctcgtgttagtgaataagtctcacgagatctgatgtttt

SEQ ID NO: 257383 - DNA, 201 bp, Homo sapiens
aaataacaagagcaaagtttctcactgtttaagaaataagctacaaatacagaaaagggagaggctacaatgaacccagtggtgttgcattagaatttttratacatatccagacagagatatagaaatatataaagatatgtatgtgtgagttactgtgtgtgcaggtgatacacacacacacacacacacatacatata

SEQ ID NO: 257384 - DNA, 201 bp, Homo sapiens
cataaccacatatgtacatgcccatgcacaccctaagcacacattcacatgcacactcatgcacattatgcatgcacacacgttcatacatacccaaatakgcacttgtgtacacacgtgcacacccacacatgcacactatgaacacacagctacacattcatgtgcacacccatacatacacacacagacaaccccagg

SEQ ID NO: 257385 - DNA, 201 bp, Homo sapiens
cagcctgggcgtcagaacgagattccgtctcaaaaaaaaaaaaaaaaaaaaaaaccatggctaaatgatgcttatatacagggtcagtagaatattagcgrccaggaggaacccgtgggcacatggccacaatcagccacagtccttgcttttcagcttaatggggcttaagggaaaggccaggtccagcgcattctaggc

SEQ ID NO: 257386 - DNA, 201 bp, Homo sapiens
agaataaaaaagaagctttgaaatatttcagggctgggcgtggtggctcatgcctgtaatcccagcacattgggaggctgaggtgggcggatcgcttgagrtcaggagttcgagaccagcctggccaacatggcgaaaccccgtctctactaaaaatacaaaaattagctgggcatggtggagtcctgtaattccagccac

SEQ ID NO: 257387 - DNA, 201 bp, Homo sapiens
tgcagtgagccgagatcgagccactgcactccagtatgggtgacagagtgaaactctgtctcaaaacaaaacaaaacacatttcagagccatctgaaaacrtagtattatagttatttaattaataaaagacaataaatattttgagatacatatggttgaatggttacagtttcttcttttaaagtacttctatataatt

SEQ ID NO: 257388 - DNA, 201 bp, Homo sapiens
acagtttcttcttttaaagtacttctatataatttttataactacattttcagtgggtttttctgtttcctgatattttctgtttcatgtctttctgtcayatatagtaaatagatcatttaagaatgttgctgttctttaataaaatacttaggattaattggaaaatatttttaaactgttttcttatgggaacataag

SEQ ID NO: 257389 - DNA, 201 bp, Homo sapiens
gcgtaacatttctagtctgccactttaactcttaaaaatgaaacactaccaatcaatctttctagtctgcatgtaattgcctaaagctaaaataaagcttyttctcagccagttacagtaaaaatgagttaatatattggcaacagaataaccatcagcaatcagccgttagctgtttactaatgaactcccagatgaata

SEQ ID NO: 257390 - DNA, 201 bp, Homo sapiens
catctgcccagaattgattctcatagattcataacagaaaggctgggagggactgtcagagcatcaggtcagtctcctgattagtaggaaagtgctgagcrgaggccacccatggcctcatcatgtgtcaccttggtgggtggagggagcaggtgtcagattcagatttctggttttgtttaaagacaaggtcttgcttta

SEQ ID NO: 257391 - DNA, 201 bp, Homo sapiens
tccctgtatccaggtgactgggttagttagttgggttgtcagggtcagcattgtattcctatatctgttcatatttttctgaacttgagctaatcccactyggttggcaatgtaagtgatacagctttgtgcgtgattgatgcatttcatttgggatgagtttataaggatatttattattatttttttttgagacggact

SEQ ID NO: 257392 - DNA, 201 bp, Homo sapiens
ccaggtgactgggttagttagttgggttgtcagggtcagcattgtattcctatatctgttcatatttttctgaacttgagctaatcccactcggttggcartgtaagtgatacagctttgtgcgtgattgatgcatttcatttgggatgagtttataaggatatttattattatttttttttgagacggactctggctctg

SEQ ID NO: 257393 - DNA, 201 bp, Homo sapiens
agctaatcacaaagagtccaaactatgattccacttatatgagctgcctagaatagtgaaaggtgtggagacagaaagttgaatggtgattgtcagggcctgggaggaggaggaggaatgggaaggtactgttaagtgagtacagagctttcgcttgggaagatgaaaacattctggagctgaatgatggtgatgtttgca

SEQ ID NO: 257394 - DNA, 201 bp, Homo sapiens
ggctcacgcctgtaatcccagcactttgggaggccgaggtgggcggatcacgaggtcgggagatcgagaccatcctggctaacacggtgaaaccccatctstactaaaaatacaaaaaattagccgggcgtggtggcaggcgcctctattcctagctactcgggaggctgaggtaggagaatggcatgaacccgggaggcg

SEQ ID NO: 257395 - DNA, 201 bp, Homo sapiens
taactgtagcttcaaataaattactttcaagtaatctttgatatacttcaaagatctattgaaaatagttgaatagtacaggttgaatacaatttcagggrcataaaaagaatatagggccaggcacagtggctcacacctgtaatcccagcactttgggaggctgaggtgagtggatcacttgaggtcaggagttcgaga

SEQ ID NO: 257396 - DNA, 201 bp, Homo sapiens
gcaggagaatctcttgaacccgggagacagagattgcagtgagctctctgcaactccagcctggtgacagagggagactctgtctcaaaaaaaaaaaaaamcaaaaaaaaaaaaaaaaaaaactttttcagaatatagaagttaaaaaaaaattatcaccagcaaacctgtcctataagaaatgtttaaaaaaaattcctt

SEQ ID NO: 257397 - DNA, 201 bp, Homo sapiens
caacatttttatattactgaaagaaaaaaacctatcaatttagaattccacacacagtggaaatatctttcaaaataaggataaaattaagatttttttgrccgggcatggttgctcatacctgtaatcccagcactttgggaggtggaggcgggcgcatcatgaggtcaggagattgagaccatcctggccaacatggtg

SEQ ID NO: 257398 - DNA, 201 bp, Homo sapiens
caggagaatctcttgaacccgggagacagagattgcagtgagctctctgcaactccagcctggtgacagagggagactctgtctcaaaaaaaaaaaaaacmaaaaaaaaaaaaaaaaaaaactttttcagaatatagaagttaaaaaaaaattatcaccagcaaacctgtcctataagaaatgtttaaaaaaaattccttc

SEQ ID NO: 257399 - DNA, 201 bp, Homo sapiens
gtcaggagattgagaccatcctggccaacatggtgaaatcccatctctataaaaatacaaaaattagctatggtggcaagcatctgtagtcccagctactygggaggctgaggcaggagaatctcttgaacccgggagacagagattgcagtgagctctctgcaactccagcctggtgacagagggagactctgtctcaaa

SEQ ID NO: 257400 - DNA, 201 bp, Homo sapiens
ggacaacatggtgaaaatctgtctctacaagaatacacaaaaattacccgggatggggtgccatgtgcctgtagtcccagcttatgtttattgagccttcstttatggcccaaaatataattagtcttgggaaatttgttttctgctgtttttgagtgaagagttctataaattccaagtaagtcaggcggtttgatagtt

SEQ ID NO: 257401 - DNA, 201 bp, Homo sapiens
cctaatgtgagagaaatactgatctaaaccaaattgccttctcacaacctcaacccactgtttctaattattctcctttgagcaacataaaataaacaaarccccttgtgtatgagataaacattcagatatttgatgatcattctcagacactttggaggcttgttctctccaaccaaatatccctagtctctctcacta

SEQ ID NO: 257402 - DNA, 201 bp, Homo sapiens
cccgggaggcggaggttgcagtgagccgagatcatgccactccactccagcctgggcgtcagaacgagattccgtctcaaaaaaaaaaaaaaaaaaaaaaaccatggctaaatgatgcttatatacagggtcagtagaatattagcgaccaggaggaacccgtgggcacatggccacaatcagccacagtccttgcttttc

SEQ ID NO: 257403 - DNA, 201 bp, Homo sapiens
acccgggaggcggaggttgcagtgagccgagatcatgccactccactccagcctgggcgtcagaacgagattccgtctcaaaaaaaaaaaaaaaaaaaaaaaccatggctaaatgatgcttatatacagggtcagtagaatattagcgaccaggaggaacccgtgggcacatggccacaatcagccacagtccttgctttt

SEQ ID NO: 257404 - DNA, 201 bp, Homo sapiens
aacccgggaggcggaggttgcagtgagccgagatcatgccactccactccagcctgggcgtcagaacgagattccgtctcaaaaaaaaaaaaaaaaaaaaaaaccatggctaaatgatgcttatatacagggtcagtagaatattagcgaccaggaggaacccgtgggcacatggccacaatcagccacagtccttgcttt

SEQ ID NO: 257405 - DNA, 201 bp, Homo sapiens
tgaaatcaccttttatatccatggtaatattctttaccctgaaattgactttgtcttttattaatatagcaactccacctttcttctggtcagtgttagcrtgattttttttgcgtccttttatttatctattgcatctttatatttatagtgagtttcttatagatggacttataattgagtctttttttttttttaaag

SEQ ID NO: 257406 - DNA, 201 bp, Homo sapiens
tctcaaaaaacaaaaacaaaaaaaactctaaacctaaataacacggtcttgataactgccaagagagaaatctaaaaagatagtagctatgtgatgataaygaagggtgaccatgtggcacgctgatggcgttttccccaaatgaattataattttccctaaacaaagatgttttgaaaataccaacaattttatgcattt

SEQ ID NO: 257407 - DNA, 201 bp, Homo sapiens
gctactagggaggctgaggcaggagaatcacttgaacccagggggcggaggttgcagtgagccaagatcatgccacttcactccagcttgggcaaaagagkgagacaccatctcaaaaaaaaaaaaaaaaaagaaatgattgagtgtaggcataactggcagggtgaacacctgtattagggttgtaaccaaagatgaatt

SEQ ID NO: 257408 - DNA, 201 bp, Homo sapiens
aaatcatttccttgcctgtttaggagcagtaaatgtttgttgtcatcacccagcaaaataattacacctcaatttctctctctctctctctctctctctcwcacacacacacacacacacacaccctttaaaatacaggcaattcataggcaagaggtgaagttttttttgctgccaggaaagtccaggaaagcatcttcc

SEQ ID NO: 257409 - DNA, 201 bp, Homo sapiens
gacgttatcctttgttgagccatcctggtttgagtcaggatgagtgttgagagtttttggggagttgcccctgtgtcctatattattttatcctcttaaaktctgatggtctttggctccactgactccaggtaagttggggtgacagtgcagcatatttctattttctagttgtttctggccagacatggggaaggtcaa

SEQ ID NO: 257410 - DNA, 201 bp, Homo sapiens
tcaggggctgcatcatcagctggttatttactaggttctcacggcaaagatcttactcagcagatgagctataaaatctgcaaccaatggggtaaaacaargatatttaactctgaatcttcttcttttatttttatttatttatttatttatttatttatttatttatttattttgagacacagtctcactctgtcgccc

SEQ ID NO: 257411 - DNA, 201 bp, Homo sapiens
ttttctgccatctggtagcacagtagcagtgagccacccttggctatgcagaggagggtgacacccaggggatggtgtgaggggaaggaacttaggtcccygcatatcccctgatctgggtaccaccagccctacgcctatatttagtgaccctgggctccaccccactggactgctcacgtccatgctgttctgtgcagg

SEQ ID NO: 257412 - DNA, 201 bp, Homo sapiens
accagcccccaatatttcaatataggttctttctattttccctaagtttcggccggtctgagaaataaagagtacaaagagaaattttcagctgggcctcygggggtgtcatcacatattggtaggactgtgatgatgacccgagctgcaaaaccagcaagtttttattagggattttaaaaggggagggggtgtacgaac

SEQ ID NO: 257413 - DNA, 201 bp, Homo sapiens
ctgtttccagcctgactctcagacatttctagaccagtatcaccgtttctgtgtgcatgactaccctgccattctcactgtccccacgtggcagcctgttyttactttcacacctgagctaaccattgcatctcctttctgtggggtgatcttccctgtcactcagggtccttgttagatcctgcttcagctcccagacaa

SEQ ID NO: 257414 - DNA, 201 bp, Homo sapiens
acctaattttttatttcttgtagagatgaggtctcctgcctcagcctcccaaagtgctggaatttacaggtaggaccaccacacttggtccacttacttayaataaacattgatttggtcgttcaggttcctttggtcctcctattgagaacagtttgaagtccatgaaaattttaacaatatttttgatcctgaatctaa

SEQ ID NO: 257415 - DNA, 201 bp, Homo sapiens
ccttttgggatttctcaggctcggcagcctcagcgcaggcaggggcggggctttccctcgcgcagccgctcagctccccgtggccccgcccacatccggcsgccggcactggattgcttctgtctggcggcggcagcatggcggcgggggcggctgaggcagctgtagcggccgtggaggaggtcggctcagccgggcagt

SEQ ID NO: 257416 - DNA, 201 bp, Homo sapiens
tatctcaaacttaattcatttgcatactgctttttctctaagtgccaactgtcctagtatattttctaagtcaacttttactttcactttatcctaagcargaatatctttggcatcacagactcagtaagcccgtttttttctaatgcacatacaaataaataaaatgcacaacttttaacataaatggctgcctccaat

SEQ ID NO: 257417 - DNA, 201 bp, Homo sapiens
gggatttctcaggctcggcagcctcagcgcaggcaggggcggggctttccctcgcgcagccgctcagctccccgtggccccgcccacatccggccgccggsactggattgcttctgtctggcggcggcagcatggcggcgggggcggctgaggcagctgtagcggccgtggaggaggtcggctcagccgggcagtttgagg

SEQ ID NO: 257418 - DNA, 201 bp, Homo sapiens
ttgtttctggccagacatggggaaggtcaagacatcttgttcatgcaaacggattgatggccattcctaatctgattttattagtgtattttaggaagtamagtaagattcttgagcccagctgaacttcccctattgaattttctaacaaaaagagagtttgcgtatgggtttataattgagcctgctcttgtagaaatg

SEQ ID NO: 257419 - DNA, 201 bp, Homo sapiens; identical to SEQ ID NO: 51482

SEQ ID NO: 257420 - DNA, 201 bp, Homo sapiens
cagggcagggcccttctggaatgaaggtctgggatccattttcagataaagtagtgttgaggatgtctttgtggccggctcctgtagtggacctcagatcygggtgctcgccagttacagagtccagttgacaagagcaaggtctggtagaaagaaagtgactattaaccagaactagtcatggggatatggctggattcc

SEQ ID NO: 257421 - DNA, 201 bp, Homo sapiens
ggttaagatggcaggctctggagccagatggcttggatttaagacctagttctaccatttactagctgtgtatccttaggccagttaattaccccctctgygtttcagctgcctcctttgtatcatgggaataatttagcagtgttgtgctataaattcagataatccaggatgggcacggtgtctcacgcctgtaatccc

SEQ ID NO: 257422 - DNA, 201 bp, Homo sapiens
ctctgcctcaataagtaaataaatacatacacacttgtacacgaggccaggtgcagtggctcatgcctgtaatcccagaattttgggagtccaaggtaggyggatcacttgagcccaggaatttgagaccagcctgggcaacatggcaagatcccgtctctacaaaaaagttttaaaaaattagctgggcgtggtgatgct

SEQ ID NO: 257423 - DNA, 201 bp, Homo sapiens
taaacattcccagcacttccttgggcactagaataaggttagattttacctttgaaatttacggtttctttagatattacaataacaataattggttatcktctttacctggaaatgcttccccctttgattagtctgttttgcactgctataaaggaatactgaggctgggtatttacaaagcagtttatttgtctcata

SEQ ID NO: 257424 - DNA, 201 bp, Homo sapiens
gcctcttgtattttagaggagagagagaatgggaaggaagccactgcaggtgtggcagacattggaggactcaggtcaagtataaaactgctgtggccacrgatttaactaagtttcaaccaagtagctttccaggttgggtgacatctgctacatgctagaactagctgtggagtctgtgctttggccccagtttggagt

SEQ ID NO: 257425 - DNA, 201 bp, Homo sapiens
gtggcttaaacaacagaaactcactttctctccattctggaggctggaggtctgagatcatgctgccagcatggctgggttctggtaagccctcctttccyggcttgccaatgcctgtcttcttgctgtatcttcacctggtggagagagagggatagtgagctctctggtttctcttcttataaggacacaaattcgatc

SEQ ID NO: 257426 - DNA, 201 bp, Homo sapiens
ctactaacaatgttaaaggtttttctttcatatataggttcttattaactcccacccccacctcccacctcctagaattgattttgtgtgaggcagagatstaattttatctttcctcatatatggataactaattgccctggcacaatttataggtgtatgtaaatctcatttataatgccttcaaactgccatatatgc

SEQ ID NO: 257427 - DNA, 201 bp, Homo sapiens
tatttctattttctagttgtttctggccagacatggggaaggtcaagacatcttgttcatgcaaacggattgatggccattcctaatctgattttattagygtattttaggaagtaaagtaagattcttgagcccagctgaacttcccctattgaattttctaacaaaaagagagtttgcgtatgggtttataattgagcc

SEQ ID NO: 257428 - DNA, 201 bp, Homo sapiens
ttaggaagcaggtgcacacctgtgcttccaggcacccatgggtgtcatcgtagttccccaaatacctcatttatacttagtaatagattcattccagccamtgtgggggcagtcttttttgtattatgttagactgacctgatttgactttgagatgttgcagtgttttctcagtgtgtttctgagaaaagaaaaaaatta

SEQ ID NO: 257429 - DNA, 201 bp, Homo sapiens
ttgcagtgttttctcagtgtgtttctgagaaaagaaaaaaattatgtatttctaaaattgagatgcagtgcaggcaattggcaatgagggtttcttttttkacatctccggtaatactgttgtcccctttaaaaatctgctataacaatgtcattattatggaatgctgcatgtattctaaataactttttaaactttaga

SEQ ID NO: 257430 - DNA, 201 bp, Homo sapiens
gtggttaaaaacaaaagcacttatttggagatatacagcacatgttctatagggtttgtcagatatttttgtttatttctcatttcatgattgtatctttwaaaaatcatgtattctaactgtagcttcaaataaattactttcaagtaatctttgatatacttcaaagatctattgaaaatagttgaatagtacaggttg

SEQ ID NO: 257431 - DNA, 201 bp, Homo sapiens
atgattgtatcttttaaaaatcatgtattctaactgtagcttcaaataaattactttcaagtaatctttgatatacttcaaagatctattgaaaatagttraatagtacaggttgaatacaatttcagggacataaaaagaatatagggccaggcacagtggctcacacctgtaatcccagcactttgggaggctgaggtg

SEQ ID NO: 257432 - DNA, 201 bp, Homo sapiens
ctatgacattttatagaagcaagtatagtcagtttattgtaattgtaacttcaagcctgttcctttcttcacccctgccctgggccatacagtgggggctkgcttgtttttggtcatttttgattttcccctttctttgtcgaccctctgctgcgggtccacagtgagacacacacagtccatccctctctagcagtacca

SEQ ID NO: 257433 - DNA, 201 bp, Homo sapiens
tgatccaggggttggcaagttgcagctggctgcccatttttgtaaataaagttatattggcacatagccacatcccttcatttatacattgtctgtggctkcttttatgctgacagttgcagcagagagcagaactgagcagttgcagcagagactgtctggcctgtaaagcctgaagtgtttagtgtctgactctttaag

SEQ ID NO: 257434 - DNA, 201 bp, Homo sapiens
ctaacttaactgacaaaggaaacatattagaagaatagaaaatctgctaatttgattaaacttacattcttagaagagtttgtgaatggataaatatgacraagttcctttggctcacttcctcagaagaaacattgtgatcgatttcaccatcgttttctcaaacggtctcagtcctggacaattagctggcgtgtttgc

SEQ ID NO: 257435 - DNA, 201 bp, Homo sapiens
gagttatacggcaaaaaattgatcatcattacttataaacatgctggtattcctggaaaattgaagagaacgcgttaacatattaaagcaaattggaaagkttatcagctggctagacacaaaacacaccaaatctaacagtcctcctaaatatcagccataacccactggaaagtatgatttttacaagatgcccattac

SEQ ID NO: 257436 - DNA, 201 bp, Homo sapiens
attgaagagaacgcgttaacatattaaagcaaattggaaaggttatcagctggctagacacaaaacacaccaaatctaacagtcctcctaaatatcagccrtaacccactggaaagtatgatttttacaagatgcccattaccaagacgggcaggtgggaaaaagccccgcccctctgtactgtgcttctctctctgggcg

SEQ ID NO: 257437 - DNA, 201 bp, Homo sapiens
ataacccactggaaagtatgatttttacaagatgcccattaccaagacgggcaggtgggaaaaagccccgcccctctgtactgtgcttctctctctgggcrgctcagcaactttgctcgttccagcagcagaaagtctctccccaacccctctgtcagccctggtcttcttctcccctcctcaaccatggcactcacgccc

SEQ ID NO: 257438 - DNA, 201 bp, Homo sapiens
cagatgttctccccgaggggtgtggtcttccagaagttgaagcatctccaccccactgttccagaggtgcttatgccctgccttggcataacaagggcacygtccatcctgacagttaaaccaaaatgaacgagcagatgccccagcaatgtggagctccgcctcttgcaggtggaacctacttgtagctcgtcatgatgg

SEQ ID NO: 257439 - DNA, 201 bp, Homo sapiens
ccagccagggctgccagggagccaggggctgggaaccccgggtgtggtctttgaggaagggggtttcattgaggtgagctggtcactctgctaagggctcrgaaaggcatcacgctgggctacaaagtgcacccagctgcagatgagcaaagtcagggaaagggatgcttggctcttaaatcccatttggcttctgatgga

SEQ ID NO: 257440 - DNA, 201 bp, Homo sapiens
ggaatccgtcgtgtggagaacgtgcctgccacgtgcgggggagaaaggagccaccttccgagtacgcgacctcacctgccgggcgtgaggtgctggactgrgaccagggtggggctctgggcatgggaggtggggctgggcgtggggcacgtggcacagagggatgcgcgtggtagggctcagggcagacggaacgtggaa

SEQ ID NO: 257441 - DNA, 201 bp, Homo sapiens
ctggctctggcttcagtctgcccctttccggggattagagggcattaaccctacttcctacagccaagcagctcttcctcatgactctactttctaactcsgggggttgactgattgatttgaagaccgccttgttgatgaatgtgttgaaacttgctatcataatgtaaatgctccttaataaaataacaggacctggtg

SEQ ID NO: 257442 - DNA, 201 bp, Homo sapiens
cctcaagtgatcagcctgccttggcctcccacagtgctgggataacaagcatgagccactgcgcccggcctgctttgtattttagttccacaaatgccacrtgggaagctgtgcagccctgtggttaagatggcaggctctggagccagatggcttggatttaagacctagttctaccatttactagctgtgtatccttag

SEQ ID NO: 257443 - DNA, 201 bp, Homo sapiens
taaactttagaattctcagaaaatcgaccgattagatggtgcacatgccccagagttgaccaaaaaagttcagcgacatgcatctagtggctccttcctayccagcgctaatgaacatcttaaagaagatctcaaccttcgcttgaagaaattgactcatgctgccccctgcatgctgtttatgaaaggaactcctcaaga

SEQ ID NO: 257444 - DNA, 201 bp, Homo sapiens
ctgtttttcaaggtaaggataaaggtggtacaagagattatccatttgtagggtgccatggggctacctattttgtttctttaccctctctctaatccccraatattaggtgtttggctgtttctggccctccacctttcttctgatagtctcatttttgcaccgatgctgagaaagaagaccatgccagctgcttgccag

SEQ ID NO: 257445 - DNA, 201 bp, Homo sapiens
ttaaatgtaaatgtgtcataaacttttgtaccatgctctttaaaaaatgccagctacttgaagggataatgcatgtgaaactgatttacatattaaagtastgaaaaaggaccttgtaataatcaagcttgaattcttttattttaaagttggaagctgaaggtgttcctgaagtatctgaaaaatatgaaattagctctg

SEQ ID NO: 257446 - DNA, 201 bp, Homo sapiens
gttattgcaagggaaataaaggcagtctgctccctcgctctctctcagccccagcatcagcacagggcttggggcgggagggtctgtgtaaggcactgagsggggctgcgtacttggtagggaagcctccagagcccaccttccctgaggctgccttaatgccctgatgatgcccacagctctcaacctgcagccgctttc

SEQ ID NO: 257447 - DNA, 201 bp, Homo sapiens
catccacagggaaatcatccagtggcgatcatggagacagcaggcatctttgagcaatgggggctcgggcaagctccccctctgccactggagggaacacygtgcaggggcccctcgccaccctggtgtgttgtgactctgtggctcatttattcagagccggagctccaaacgactgattccaagtggaaaacatgcccc

SEQ ID NO: 257448 - DNA, 201 bp, Homo sapiens
ggaaatcagcaggaatataagaatgtaagaagaaatcagatttttttttttttttgagacggagttttgcttagtcgcccatgctggagtgcaatagtgcratcttggctcactgcaacctctgcctcccgggttcaagcgattctcccgcctcagcatcccgagtagccgggattacaggcacccgccatcatgcctggc

SEQ ID NO: 257449 - DNA, 201 bp, Homo sapiens; identical to SEQ ID NO: 51505

SEQ ID NO: 257450 - DNA, 201 bp, Homo sapiens
actacacgtgcggtccaccacgctgggctaatttgtgtatttttcgtagaggcagggtttcctcatgttgcccaggctggtctctggaactcctgagctcragtgattcgcctgcctcggccttgtaaagtatcgggattacaggcttgagcccccgtgacctgccctgttgatctaaattgagtgaaattttgccgactg

SEQ ID NO: 257451 - DNA, 201 bp, Homo sapiens
tgggcatgctgtggggtgacggcaggtttttgccctcctcctgcagctaagccctggagccctgggttcccatcggggctgtggcactgtgctgtttcccrggccactgccagggaaggagcctcctatattgctgggcagggcctgcgtgcaggtccaggtttataaattttagagcttgttcagaaagcaggcaaaaag

SEQ ID NO: 257452 - DNA, 201 bp, Homo sapiens
ttagtacctcagggttgttgtgagggttaaatgagatgacgtatgtaaaatacaaataatacaatgcctagtatgcaggaagcactcagtagatgttggcmcttagtatttcagtaggaagtagaatggttcatggaattcacaggcaaaaagctttgttttgttttgtttttgagacagggtctggctctgtcacccagg

SEQ ID NO: 257453 - DNA, 201 bp, Homo sapiens
ttttctgcgcgtgttcgctccccacgtactcgtcccccaacacccagccctgggcctggcacgtggcaggcgctcagtgaacgagactcaggaacagtcargtgtagacggcaggagaagacatgacacggataccaagcacccgaggtcctgcaatgagtctcggcccatgttttagggagcctgggtctggagccccag

SEQ ID NO: 257454 - DNA, 201 bp, Homo sapiens
gggaactcttatgtcggattgcctgggatccagtcccaccgcagccactcagtagccatgtaacccctgggcacgtttcatgcccaagcctcagtttcccracggtgacatagattagcacctgttagtacctcagggttgttgtgagggttaaatgagatgacgtatgtaaaatacaaataatacaatgcctagtatgca

SEQ ID NO: 257455 - DNA, 201 bp, Homo sapiens
tattagcggttgttatgggaactcttatgtcggattgcctgggatccagtcccaccgcagccactcagtagccatgtaacccctgggcacgtttcatgccyaagcctcagtttcccgacggtgacatagattagcacctgttagtacctcagggttgttgtgagggttaaatgagatgacgtatgtaaaatacaaataata

SEQ ID NO: 257456 - DNA, 201 bp, Homo sapiens; identical to SEQ ID NO: 51491

SEQ ID NO: 257457 - DNA, 201 bp, Homo sapiens
aggaacatacccctgtacttagcctcccctggccactctctggccttggtgctgggaggcagcctcttgatggaagctcccggtcctctgggccccaggaygccagggcacaggcattcacctggtggcagccacgctcatgcccactggcttctaatctcctgcatacccgtttctgaaacaaacaaaattttactttag

SEQ ID NO: 257458 - DNA, 201 bp, Homo sapiens
tattattagaagaagaagatatatgcagctatagtctgttcaaatatcaagaggtgtgacttttcaaattcacatttcaatctttatttacattagacttkcagaagtagtgggtgtaaatattaaaacgcccaagcctgggtgaaattttattgagaataactacaaataaaaggaaactgattttttaaagtcagtttc

SEQ ID NO: 257459 - DNA, 201 bp, Homo sapiens
cctcaaaaaactgcataaaaatcacgaatcctagctaagaggcagtgggtagagaagatgaggtctgagacagcctctccacgaggcctgtgattgtgggkgaagggggcttcacaacagggtcagcatgtggatggcagagggctggctttaatcctatgccactgtggccctgggcactggagtggcgggttctgaggc

SEQ ID NO: 257460 - DNA, 201 bp, Homo sapiens
aagatgatctgggatgagcttaaagtgcaggacctatctatactaacgaaacaggaaagtgtttatcagagcaaaatgtaccacgtgtctgtgtaagtctyaatactgtaaagctaccccttatcctgcaattcatcaataatcagcacagaccccatcaacactttatgtgggttttttttttgagatttgacaaaatga

SEQ ID NO: 257461 - DNA, 201 bp, Homo sapiens
gccatgaaccccgggagccaggaggcccgcagcggagtgcccagacttggcagggtcagagccccccagcgggatccagagcccgccgccgaggccccttytgggatttctcaggctcggcagcctcagcgcaggcaggggcggggctttccctcgcgcagccgctcagctccccgtggccccgcccacatccggccgccg

SEQ ID NO: 257462 - DNA, 201 bp, Homo sapiens
cagtctgtttcctcagggtgtaagaaaatgtctttttcctcctcttttgacaagaatacaaagatgaagcactttaaagggataatcccatttcacgctcrtcatgggtgcatcaagacccagtttagtgaaatctatgcaggttttgcctattagctaatctgttttagtacctgtggtgctgacaaattaatttgccag

SEQ ID NO: 257463 - DNA, 201 bp, Homo sapiens
cgacctccccaccacacagatgggaaccagaggctccaagaagtctaaggactcatcaaggtcaggtggagatggtcggtggagatgagatgggaactcaygtctgtctgactctgaagcgggggcattttccttggggcaggaggatgcccggggactgttctctacaaaagccagcttcgtatgaacagctggagggac

SEQ ID NO: 257464 - DNA, 201 bp, Homo sapiens
cagagtactgacgtcagatactgatggctccttcgagtgatcagaacgaaatgctacaggagccagggaagacagcacgtgaccctacctggtgaggggcytgaagaaggcttcacacaagacaggaatctcgggtgggccacgaaggagcaagagaatctttggaggtgggaaggtatacctcaagcagtaagaacagta

SEQ ID NO: 257465 - DNA, 201 bp, Homo sapiens
tgggctgtgcactgaaggggcagagtcagtggaagcctgggaggctcacttggaggtgccgtggggtgcgcagacccaggaggcagcaggcgtctcttagrgaagagacaggggaactgcagggaaatgctgtttaattcatttcgtcatcaccaaccacagaacttgaaaaacacaatgatttcttttttaaaaaaagct

SEQ ID NO: 257466 - DNA, 201 bp, Homo sapiens
agagcaggaggatgctttgggagagcatgacctcccagctctggacttgctaagcgtgattggccctaggatgagtgaggccatccaggacctcagcttckcttaacacgagcagaccatgctcttgctgggcgccaaatgtatgtggagaaaactcctttttactttttctcatttcttatcttttcctttagtagccaa

SEQ ID NO: 257467 - DNA, 201 bp, Homo sapiens
catggccacataccctgccctcgttctccagcctcctgttgcctgccccaaatccccctagcggctgagcccaaagggaagtgggagagcccaggtgcccycggcaccccctggatgtaagccatgcaggctggcctcctgtgcagatgccaggaaaggtgggcagtggatctgacctggaagggcaaacagaacacaaag

SEQ ID NO: 257468 - DNA, 201 bp, Homo sapiens
gatttttgtggttaaaaacaaaagcacttatttggagatatacagcacatgttctatagggtttgtcagatatttttgtttatttctcatttcatgattgwatcttttaaaaatcatgtattctaactgtagcttcaaataaattactttcaagtaatctttgatatacttcaaagatctattgaaaatagttgaatagta

SEQ ID NO: 257469 - DNA, 201 bp, Homo sapiens
ctgaggggcacatattaaggtccattacctggatctgagaggtagcacaagttaaattgcagtgctcctagttttgatgtgctcagtggtgaagctgtcasgtaagaacattgccattgatttttgtggttaaaaacaaaagcacttatttggagatatacagcacatgttctatagggtttgtcagatatttttgtttat

SEQ ID NO: 257470 - DNA, 201 bp, Homo sapiens
cgcgcccaagtccctggctcatcctaggtgggagattagaatctatgtagggaatggaaaatgggcaggcattccagggtgagtttttcttcccccccgawaaattgtaaacaaacaattacaaacatgtttgaaaattgttttaactagtttttagagattgcaatagctgggttgggatttatgaactacatttcttat

SEQ ID NO: 257471 - DNA, 201 bp, Homo sapiens
catacccatctattctgggattcgtatttggctatactgacacagccagactcttccattcccagcttattccctcacagtgtgagtaaatcagccctgtrtcttagccaagagcttctcactgtgtccggggatgaagtccacaaaaacccgcactgtcactgccacagttctcatagggtgttcgagcctgacgctggg

SEQ ID NO: 257472 - DNA, 201 bp, Homo sapiens
gaaaggtgctccaatgaggaccgagtgggtgagtttgacaggcaggaaaaagtggaggaaagcaggaagaatgaacaaatagcagatcagtcatttcaagrttactttccttatagaggtgtagacgaaatcttggtgtaatgtaatttggctttcatccctctcctgatttctcagaagatcttacaagtaagcaaccca

SEQ ID NO: 257473 - DNA, 201 bp, Homo sapiens
acccatctttatattttgtgcattgtaaatatctttcctgcaaaaagcttttcttagacaatgatgaaagaattctgatatgtagcatgtcttaatatatrcagttatattctatatattttttttgagacacagtttcactcttgttgcccaggctggagtgcaatggcacaatctcggctcaccgcaacctctgcctcc

SEQ ID NO: 257474 - DNA, 201 bp, Homo sapiens
cccaggagtttgagaccagcctcggcaacacagtgagacccccgtctctacaaaataaaaataacaaaattagccgggcactatggcgcccacctgtagtmccagctactcagaaggctgaggtgggaagattgcttgggcctggaaggttgaggctgcagtgagttggctgtgatcacaccacagcactccagcctggcc

SEQ ID NO: 257475 - DNA, 201 bp, Homo sapiens
gcttaaaattgtatctagatagtatcattctacgtagatccttctgtaatttccttttttctccatttgatttgatccattttcactgctctctgtaacayttcattgagtaaatctattgcaattcatttattcattctattgatgaacatttaggttgtttctggcttttcttactctaacagtgcaacaacaaatatt

SEQ ID NO: 257476 - DNA, 201 bp, Homo sapiens
tcatgcttagccagtcatttctctctagcagctctacacgtttctctgcctttgatgtcctccagtgtcatgatgacctatctatgtgtggatacatcacrcccaagactcacaaaacttaggggataaaacattagatatcaccaaaacactgcaccctgagcccttccactcagtagaaataacgcccttattttgaag

SEQ ID NO: 257477 - DNA, 201 bp, Homo sapiens
tacctggaggaggggtgcggctgtgatagaaacctaagtggtactggcttcacggccaggcagtgagtagtgaggaaagagatggtgcagggtagaaagcyagtcattcccgctacgcagtaaagacatctaaaaaaatgctgcctgtattaactgggaagacggatcctgcacttaccaagcctgtgtagctctagaaga

SEQ ID NO: 257478 - DNA, 201 bp, Homo sapiens
tagggtacaatcagatcttcaggctctaaactttatgcaaggatccaaattctagctcccacacctttgttaggccaaaaccacatctatctctggacgtsagcattccagttcccagccctgggtgcaatctaggaccaaacccaacaagtacccagacccaggaacggccactaaagagtgtgttggtcccaacggcac

SEQ ID NO: 257479 - DNA, 201 bp, Homo sapiens
acatgcaagaaaagcataaacagggaaaagaaaaaagcaatgttgattgctatttggaaaattaaatgagaaagatcttttctccaagatgtccttaaatrattctctattttaaccaaatccagtggcctggtccctttcctaaaccctgttttttagaaggaattttaaatgtatttgcaatttatatttccaatctga

SEQ ID NO: 257480 - DNA, 201 bp, Homo sapiens
ggaacagggtggcatgggaacagaaatgaagagggagtgtagagctctgcattaaagcaccagagtaacatttcacatgccaaaaagtgagggaaaaatgkaagtaaaccaagacatagggggagaggaacccaagtggaatacaaaaataatgaacctaactacattacaaataagtaacatagccacactgaaaagaac

SEQ ID NO: 257481 - DNA, 201 bp, Homo sapiens
ttaacaacagcagtaatgggacacaataccatgaaccctcctccgtacaacgtaccaagatggcacaacatcacttctgcagtactcatgccaaaaatgcrcaccctgactctaatcataagaaaatgtgggacaacaaaataactaaccaataatcactaagtgtcgaggtcctaaaagactgtcaaagtgtcacagatt

SEQ ID NO: 257482 - DNA, 201 bp, Homo sapiens
attcttcaaggggcgcagggggctgaagggccagggtcccgacagcctgtagtaggagaaaggagagccaagccatactctgccaccaaggcgagcagagygtgggttctagtagggaatgtgaggatgacatctcagtggcactcagccagcacagtgaattaatttattcatattttctgttacttactgtggattatt

SEQ ID NO: 257483 - DNA, 201 bp, Homo sapiens
catctcagtggcactcagccagcacagtgaattaatttattcatattttctgttacttactgtggattattgagagctgaccacatacgatactgatctayacacttacttgggaaatagttcagttgtcatggatgggcctggaccaaagaaaaatgactgccacagaggcatttacatctggggctgcttacgttgaac

SEQ ID NO: 257484 - DNA, 201 bp, Homo sapiens
atatgatacaagtatccagaaaatatatatatataaaatttaattttttaatttttttttttttgagacagagtctcgctctgtcacccaggctggagtgyagtggcgtgatctcagctcactgtaacctctacctcctgggttcaagcgattctcctgcctcagcctcccaaaatgctggaattacaggcataagccact

SEQ ID NO: 257485 - DNA, 201 bp, Homo sapiens
atggccaggcatgggcgctcatgcctgtaatcccagcattttgggaggctgacttgggaagatcatttgaggccagggtttgagaccagcctgggcaacayagcaagactgtacctctacaaaaaaagtaaaaataaaaactgcagtgagatactgctccgtatctactagaatgactatatatgaagatgtggacaaaat

SEQ ID NO: 257486 - DNA, 201 bp, Homo sapiens
agcctcatcatgagttgcaggataaacgtaagcaaggcctctactcatcgtttcttcatctcatctccagtgcctaggacagggcttgagacacagcaggygctcaaaacatgtctgcccaatggaaacgataaaacactactgtcattgaactatgacacatgtgaccacgctagctaactggactgcaaggaaatgcac

SEQ ID NO: 257487 - DNA, 201 bp, Homo sapiens
ggaggcaagacgggaggagtgcagggatctgtggacccacccagccccttctgttctgaggttacaatgggtgatggctctgtggggctgcaatgagtggyggcacgcgcggagggccaggggaggagggacatgctgtgggctccgggttcaggtcccaggactgaattggaagcaccctgtctgtgttgaagttcaaga

SEQ ID NO: 257488 - DNA, 201 bp, Homo sapiens; identical to SEQ ID NO: 51503

SEQ ID NO: 257489 - DNA, 201 bp, Homo sapiens
ggagaaagacaggatttgcttttttgcttttcctctgcatttttttttcctagttcttttcaggccttcaacctattggatggtggccgccgccccccccsccccccccccccgcccatattgggtgagaatggatcttccttactcagtctactgattcaaatgccagtctcttcccaaaacaccctcacagccatgccc

SEQ ID NO: 257490 - DNA, 201 bp, Homo sapiens
gggagaaagacaggatttgcttttttgcttttcctctgcatttttttttcctagttcttttcaggccttcaacctattggatggtggccgccgcccccccycccccccccccccgcccatattgggtgagaatggatcttccttactcagtctactgattcaaatgccagtctcttcccaaaacaccctcacagccatgcc

SEQ ID NO: 257491 - DNA, 201 bp, Homo sapiens
tctttatagcgatgtgaaaatggactactacaggagccaaacactcaccaggaggacaaagggaggaggaggtggacctcgcaagagatgggcccagagggactactctgcaggagctatgtactgcgggagggctagagagagagagaaatgctctggcctcctcctccttctcccccacattcctgtgtcccaccaatg

SEQ ID NO: 257492 - DNA, 201 bp, Homo sapiens
gtgagtcaactagatctcttttctttataaattatccagtctcaggtagtttttgtgtgtgtatgtgtgtgttttttgtttgtttgtttttttttttttttggaaatgatggagtctcattctgtcactcaggctggagtgcaatggcgcaatcttggctcaatgcaacctccacctcccaggttcaagcgattttcctgc

SEQ ID NO: 257493 - DNA, 201 bp, Homo sapiens
ttatgaggccaacgaacatgaaaaaatgctcatcatcactggtcattagagagatgcaaaccaaaccacaatgagataccatctcacgccagttagaacgrtgatcattaaaaagtcaggaaacaacagatgctggagaggatgtggagaaataggaacgtttttacactgttggtgggagtgtaaattagttcacccatt

SEQ ID NO: 257494 - DNA, 201 bp, Homo sapiens
ctgatcacacctttcattttccagggcagtgaagtaaggtctcaacacatcagcataatcatgtcacttttctgtttgtttttctgccatctggtagcacrgtagcagtgagccacccttggctatgcagaggagggtgacacccaggggatggtgtgaggggaaggaacttaggtccctgcatatcccctgatctgggta

SEQ ID NO: 257495 - DNA, 201 bp, Homo sapiens
ataatgggaaaacccttttccacttttggtaaaacacaattccacggagcaagagaacgatgtttgtgaagagggagtttttatttgcttctaaccttggratgaaaagggcccagggccagctgcttctggttgcacctgctgcccagcgccttctcctccacacccttggggcacacgtgtgtggcctcagcccttctt

SEQ ID NO: 257496 - DNA, 201 bp, Homo sapiens
ttagggaagagacaggggaactgcagggaaatgctgtttaattcatttcgtcatcaccaaccacagaacttgaaaaacacaatgatttcttttttaaaaamagctattcactgaggtgacttattcctgacgcatccttccctgctctgttcaaggaggggtatacctggaagacatgtttgagacagaaaggataaaacg

SEQ ID NO: 257497 - DNA, 201 bp, Homo sapiens
tccatgttggtcagactggtcttgaactcctgacctcaagtgatctgcctgccttggcctcccaaagtactgggattacaggtgttgagctaccacgcacwgctgagtcgtgattttttaattctctgccttttcctttgggtatttagttttatctctactaaaattagaaaaattagctggcacactcctgtagtccca

SEQ ID NO: 257498 - DNA, 201 bp, Homo sapiens
gaaataaaggtattcaaataggaagagaggaagtcaagttgtctctgcttgcagatgacatgattgtatatttaggaaaccccattgtctcagcaaaaaaatctccttaagctgataagcaacttcagcaaagtctcaggatacaaaatcaatgtgcaaaactcaaaaacattcctatacaccaataatagacaaacagag

SEQ ID NO: 257499 - DNA, 201 bp, Homo sapiens
tcaaggaaaatgtcaacgcatttgcttgtttaataccactcaaagctgtgaactgtcatcctgccatccctcaaatatgcatgttactcacgaagcggagraaaagtggtgttgcataattgagctgagccgttttatatcaattttctctctttaggctcaaagtgctgacaaataaagcttctgtgatgctctttatga

SEQ ID NO: 257500 - DNA, 201 bp, Homo sapiens
taaatcttgcaggatctcaaatagcctagtgaaacgggaagagaagaaggtgttaaaagtttgcaggtcaggggaaaagcacgtgttttgggtgagtcggyggagcctccacaaatacagcatcggtttgtgtgaattctcagctgtggtttctcaggttgaataaagccactcaacaaaggctgctgtttctccagcctg

SEQ ID NO: 257501 - DNA, 201 bp, Homo sapiens
acacacatgcacacaatactatttacatataaaacattgtgactcaaacggagagaaaatgcagctgcatgtaaacatctgtggtgattaggtatacccaytcagtgaccaacaaattgcattcagtgtgtctggggtgatcgcctcaggaactgggccttcggttagtaacgatgctttggaagcatgtatgccagtcat

SEQ ID NO: 257502 - DNA, 201 bp, Homo sapiens
cagtggctcactcctgtaatcccagcactttgggaggtcaaggcgggtggatcacctgagatcaggagttcgagagcagcctggccaacatggtgaaattscgtctctactaaacatacaaaaaattagccaggcgtggtggcacgtgcctataattccagctactcaggaggctaaggaaggagaatcacttgaacccgg

SEQ ID NO: 257503 - DNA, 201 bp, Homo sapiens
acataccaaaggagctagccaggtgcagtggctcactcctgtaatcccagcactttgggaggtcaaggcgggtggatcacctgagatcaggagttcgagascagcctggccaacatggtgaaattgcgtctctactaaacatacaaaaaattagccaggcgtggtggcacgtgcctataattccagctactcaggaggcta

SEQ ID NO: 257504 - DNA, 201 bp, Homo sapiens
caaattaatacaccttggctatatatacatttgccaacacaaagcactacatttaaaatgactacttgtaagtgataacttaattcctgaggtatctgttyatagatatattaatatatattacattataattaagatatttaaagcatttccagtagtgactggtacacagaagactttcaataaatgttacttcccttc

SEQ ID NO: 257505 - DNA, 201 bp, Homo sapiens
actacttgtaagtgataacttaattcctgaggtatctgtttatagatatattaatatatattacattataattaagatatttaaagcatttccagtagtgrctggtacacagaagactttcaataaatgttacttcccttctttcctatagtactttgaggaatagcaagagaatgaaaatactattcatatattcataaa

SEQ ID NO: 257506 - DNA, 201 bp, Homo sapiens
ctacttgggaggctgaggcaggagaatcacttgaacacgggaggtggaggttgcagtgagccaagattgcaccactgcactccaacctgtgcaacagagcragactccatctcaaaaagaaaaaaaaactattttgactagaaactcaaacgctaaataaagacgacaaaaagcactgtatagaaatcctgtactctagct

SEQ ID NO: 257507 - DNA, 201 bp, Homo sapiens
taaggagggcagatcgcttgagcccaggagttcaagaccagcatgggcaacaaagcaaaaccccatctctaaaaataaaataaaaattgtttctcatggcycggcatggtgacacacatttgtaaccccagcagtttgagaggcataggtggggagatcacttgagctctggagttctaggccagcctgggcaacataggg

SEQ ID NO: 257508 - DNA, 201 bp, Homo sapiens
agttagggttctctagagaaacagaactaactaataggataggtacagatagatgagaggggatttaggaggctgagaagtctcaccatctgccctccacrtgctggagaactagggaagctggtggcatagctcagtccaagtctgaaggcctgagaacctgggggccgctggtgcaagtcctgcagtctaacggctgga

SEQ ID NO: 257509 - DNA, 201 bp, Homo sapiens
cttaaaaatcttaaaataattttgcattttttttttctttgagacagagtcttgttctgtcgcccaggctggagtgcagctccagctcactgcaacctctrcctccccggtttaagcgattttcctgcctaagcctcccgagtagctgggactacaggcacatgccaccacacccagctaattttttgtatttttagtaga

SEQ ID NO: 257510 - DNA, 201 bp, Homo sapiens
aagattgagcccataaggctgaggctgaagtgagctgacatcatgccactgcactccaccctgggtaacagagtgagactgtctcaaaaaataaataatamcaataataattcccagctcataaaaactaggaaaagaacaagaaagcaaaacaaaagaaaacacaaagaaaaaataaaggaaaaagctaaaattaatgag

SEQ ID NO: 257511 - DNA, 201 bp, Homo sapiens
cctgtggaactgtgagtcaactagatctcttttctttataaattatccagtctcaggtagtttttgtgtgtgtatgtgtgtgttttttgtttgtttgtttktttttttttttggaaatgatggagtctcattctgtcactcaggctggagtgcaatggcgcaatcttggctcaatgcaacctccacctcccaggttcaagc

SEQ ID NO: 257512 - DNA, 201 bp, Homo sapiens
gttttccctgctcttggactttgtgtgagtagaatcatacagttctttgtctgtgttatcttttgctcacatattttcaagcttcatttgtgtcattgctyatgtctgtggttggttcctttttactggtaagttacattctgttgtatgaatgtctatcactttctcctgttggcggacatttggctaatttccagtttt

SEQ ID NO: 257513 - DNA, 201 bp, Homo sapiens
ttgatctcctgggctcaagtgactctcccacttcagtctcactactcgctgaaagtacaggcatatgctaccagcaggcccagctatttttttttttttttgtaaagatgaggtttcaccgtgttgcccacgctggtcttgaactcctgggttcatatgatcctcccgcctcagcctcccaaagtgctgggattacaggtg

SEQ ID NO: 257514 - DNA, 201 bp, Homo sapiens
agaaccgaaggcctgctttggggtggaggggctgtgtaccaggagggagggcactgacactgaggagtcacactgtgggctaagggcaaaccccaagggcracctccccaccacacagatgggaaccagaggctccaagaagtctaaggactcatcaaggtcaggtggagatggtcggtggagatgagatgggaactcacg

SEQ ID NO: 257515 - DNA, 201 bp, Homo sapiens
ggataagaactgacggggttccttgtcctgtttgtttgtcctgcctacttttgtgggtgcaaagtgctccatgctaaaaaaaaaagtttctgccaatgttygtgcacagggacaggacatgggctcttggtacctttccagagggcagaaaaccagaaggtgccctctgcaccagcagcacaacttctagaatgttctttt

SEQ ID NO: 257516 - DNA, 201 bp, Homo sapiens
ctcactcacagttatagcaccatttttatttttgctaatttgatggtttaatttgcaagcccttaaattactagtaaggttgaacacctatttatatttaytggctattttgggtttcctcttctctgaactgccaggtcatatactttgcccatttatttactggactgatttgcatatttattcaagaaacccatcttt

SEQ ID NO: 257517 - DNA, 201 bp, Homo sapiens; identical to SEQ ID NO: 51504

SEQ ID NO: 257518 - DNA, 201 bp, Homo sapiens
ataaagaactcttaaaaataaataaagacacatgctccagtagaaaaatgggcaaaggtggaaagtttacaaaagacacacacggccagtaagcatctccraaaagcagtgtgtggcatgcaaattaaaactgcaactagcaaagatcatactggcatcaatcaaaagagaagacttgctaaaaaatctaaatagaatcca

SEQ ID NO: 257519 - DNA, 201 bp, Homo sapiens
tcataaagcaagttctaagagacctacaaagagatttagactcccacacaataatagtgggagattgtaacaccccattgtcaatattagatagatcaacragacagaaaattaacaaagatattcaggatttgaactcagctctcaactaagcagacctaatagacatctatagaactctctaccccaaatcagcagaat

SEQ ID NO: 257520 - DNA, 201 bp, Homo sapiens
atgactaattctgtgtagtaccagacagattaagaagtaaaatcatttccattggtctgtagtacattttgttagcagtgaaacggttttcttgattattytaaaaacatcaaatgcatagaggttttacactttgatttaactgtatttccagttaaaatgtcttctcttttttgcagtgttgaatatgaaacattcgat

SEQ ID NO: 257521 - DNA, 201 bp, Homo sapiens
aataaagggatggaggaatatttaccaagcaaacggaaagcaaaaaaagcagggttacaatcctagtctctgataaaacagactttaaaccaatgaagatmaaaaaaaagacaaagaagggcattacataatggtaaagggatgaatgcaacaagaagagctaactatcctaagtatatatgcacccaatagaggagcacc

SEQ ID NO: 257522 - DNA, 201 bp, Homo sapiens
gcttgagcccaggagtttgagaccagcctggacaacatggtgaaaatctgtctctacaagaatacacaaaaattacccgggatggggtgccatgtgcctgwagtcccagcttatgtttattgagccttcgtttatggcccaaaatataattagtcttgggaaatttgttttctgctgtttttgagtgaagagttctataaa

SEQ ID NO: 257523 - DNA, 201 bp, Homo sapiens
ggcagggtgaacacctgtattagggttgtaaccaaagatgaattatcattgatcaatttcctatatctacatgggaggatagtggaatctcattaaactgwgtataacagatagtataatatagctcaacagattgtttccaaaatacaaaatgggtgagagaattaaatagcttgcttcttgaggaatgggtgataatta

SEQ ID NO: 257524 - DNA, 201 bp, Homo sapiens
accctagtccagtgtttctaaattgccaatatcccgcttaaaataaaccacgcaaaatactttcaatgccatgtaactagcagagtagaatcaccacttgmcactgtgtttgcacaggagaaacccacactaggtcaacagccccagcaaccacatcacacacaggtccatgcgagctcacctcccctgcaaccccctcag

SEQ ID NO: 257525 - DNA, 201 bp, Homo sapiens
ctgagatcacaccactgcactcaggcctggatgatagagggaagctctgtctcaaaaaacaaaaacaaaaaaaactctaaacctaaataacacggtcttgrtaactgccaagagagaaatctaaaaagatagtagctatgtgatgataatgaagggtgaccatgtggcacgctgatggcgttttccccaaatgaattataa

SEQ ID NO: 257526 - DNA, 201 bp, Homo sapiens
caacaccttgtcttcctctgctccatctttcccgtatggaactctcccatgaccgaatgccatgatgacttatagagggggctcttcccacatcagtgccraggacactccctggagggagcacattccctgcagataacgtgatgcggacaggagcttacaaacaggacatctcaggaagctttcaaacccagagaaaat

SEQ ID NO: 257527 - DNA, 201 bp, Homo sapiens
taaataaataaataaataaataaataaataaataaatacctgtttatgcaccactaactgtcatcttgcacaccaccttcaagggaagtatctctcaggtrgaaggtgattcgagttcaatcccaccctgccagtttccagcacctggacaaagctgcttgaacctctaagtccccttcccctttttggtgtataaaattg

SEQ ID NO: 257528 - DNA, 201 bp, Homo sapiens
agtttgctggaggtccactccagaccctgtttgtctgggtatcaccagcagaggctgcagaacagcaaatattgctgcctgatccttcctctggaagcttygttccagcggggcacctgtctgcatgaggtgtctgtcggcccctactgggaggtgtctcccagtgaggctatacgggggtcagggacccacttgaggagg

SEQ ID NO: 257529 - DNA, 201 bp, Homo sapiens
ggcgccaatctcggctcactgcaagctccgcttcccgggttcacgccattctcctgcctcagcctcccgagtagctgagactacaggcgcccaccaccgcrcccggctaattttttgtatttttagtagagacggggtttcaccttgttagccaggatggtctcaatctcctgacctcatgatccacccgcctcggcctcc

SEQ ID NO: 257530 - DNA, 201 bp, Homo sapiens
caccatgtctgctcatcttactgagatgtacaagataacacgtaaagcctgtagtagggagcctggcatggagtaggcatttccgaggcgctccttccatkccctgctgccctcttatttaaacattcccagcacttccttgggcactagaataaggttagattttacctttgaaatttacggtttctttagatattacaa

SEQ ID NO: 257531 - DNA, 201 bp, Homo sapiens
gtcctccaaaggagctcccctttctgctggccatctgcgtttgctcacctggacttgctgagggagctcgggtgccctgtgtgtgcttatctgtgtgtccyggcgcccggcacaggcagggcccagagtgggtgcctgctcgaggccaggggatgggtgagttcagcagttagctgtggggtgtctgcttaggcccagccc

SEQ ID NO: 257532 - DNA, 201 bp, Homo sapiens
gcttgaacccaggaggcggaggttgcagtgagttgagaccacaccactgcattccagcctggataacagagcaagactccatctcaaaaaaaaaaaaaaaagaaagaaagaaaaagaaaaaaatgactttcctttgttcgaatggctcttgctttccatgcaagcctccctgatcccacttccagcttactgctcccatcc

SEQ ID NO: 257533 - DNA, 201 bp, Homo sapiens
ggtgcctgctcgaggccaggggatgggtgagttcagcagttagctgtggggtgtctgcttaggcccagcccttgggggcctctaggaggggtccccctgcyctcctgccctcctgccctctctgcaggagaggctccagtgaagcagacacagctcgatgttaagtgagacaagtcggtgagaatgcacaagccacgcagg

SEQ ID NO: 257534 - DNA, 201 bp, Homo sapiens
caggttttcattagtaaaaaaaaaaaaaaaaaatagggccgggcatggtggctcacgcttgtaatcccagcactttgggaggccgaggcgggtggatcacraggtcaggagattgagaccatcctggctaacacggtgaaaccccatctctactaaaaatacaaaaaaaatcagccagctgtggtgggacatgcctctatt

SEQ ID NO: 257535 - DNA, 201 bp, Homo sapiens
gccgaggtgggtggatcacgaggtcaggagatcgagaccatcctggctaacacggtgaaaccccgtctttactaaagaaaatacaaaaaattagccaggcrtggtggcaggtgcctgtagtcccagttactcgggaagctgaggcaggcgaatggcatgaacctgggaggcggagcttgcagtgagccaagatcgtggcac

SEQ ID NO: 257536 - DNA, 201 bp, Homo sapiens
agtttcgctcttactgcccaggctggagtgcaatggcacaatctcagctcaccgcaacttctgcctcccaggttcaagtgattctcctgcctcagcctccygagtagctgggattacacgcatgcgccaccatgcctggttaattttttatttttagtaaagatggggtttctccctgttggccaggctggtctcaaactc

SEQ ID NO: 257537 - DNA, 201 bp, Homo sapiens
gaatgtgttgaaacttgctatcataatgtaaatgctccttaataaaataacaggacctggtgggttcagttgccttgcccacgtgtgacttacatgtttttgcctttttttgttgaacactgagccttgcagaaccatcaggaagtccaccttggtcccactggattgatcattaagaaggaaggaaaaaagttatttgcc

SEQ ID NO: 257538 - DNA, 201 bp, Homo sapiens
acttagcctcccctggccactctctggccttggtgctgggaggcagcctcttgatggaagctcccggtcctctgggccccaggatgccagggcacaggcaktcacctggtggcagccacgctcatgcccactggcttctaatctcctgcatacccgtttctgaaacaaacaaaattttactttagatggtctcataaagca

SEQ ID NO: 257539 - DNA, 201 bp, Homo sapiens
tttttttttttttttgagacagagtttcgctcttactgcccaggctggagtgcaatggcacaatctcagctcaccgcaacttctgcctcccaggttcaagygattctcctgcctcagcctcctgagtagctgggattacacgcatgcgccaccatgcctggttaattttttatttttagtaaagatggggtttctccctgt

SEQ ID NO: 257540 - DNA, 201 bp, Homo sapiens
cagtgttgtatacaacaaaattctagcaatatgaaaaacttcagacggttcttttaaagctttcttttttttctttttggtaatttatatcagtatttgtktatttccaaaattggtataattttaaataaatgcatttaattgatttacaggtccctccttgtggtccatttctgggcaccatgggctccacagtgtgca

SEQ ID NO: 257541 - DNA, 201 bp, Homo sapiens; identical to SEQ ID NO: 51481

SEQ ID NO: 257542 - DNA, 201 bp, Homo sapiens
ctctctggccttggtgctgggaggcagcctcttgatggaagctcccggtcctctgggccccaggatgccagggcacaggcattcacctggtggcagccacrctcatgcccactggcttctaatctcctgcatacccgtttctgaaacaaacaaaattttactttagatggtctcataaagcacacaacactctaattgaat

SEQ ID NO: 257543 - DNA, 201 bp, Homo sapiens
tcatttcaacccaggaggtggaggttgcagtgacccgagatcgcgctactgcactccggcctgcgtgacagagcaagactccgtctcaaaaaaaaaaaaaacaaaacaggaaaagtcttagagaaaccttgtgtttattcagaataaaatgaaatagttaaaatgttttagtgccttttattttcaaattacatagtcagt

SEQ ID NO: 257544 - DNA, 201 bp, Homo sapiens
cctgtggagctggaaaactttatagggcatttgaggagatgactttaaactttatcttttcagaataacaatcatccattacatttaacctcattatttcwtgcattgcctgatatttacttagctttatacatttaaaatagtcatttcaaataattttggctgaaactcttgtaataaactatggtgactggtttattg

SEQ ID NO: 257545 - DNA, 201 bp, Homo sapiens
attgaatatggtacaacaagcacttttttcataaggtctagaagaatgggtagtcatgacaaagaatggaaaagtattgtcatttgttgtaagcatcactrctttttttttttttttcagacggggtctggctctgtcacccaggctggagtgcagtggcacgattatggctcattgcagcctcgacttctcggggccaag

SEQ ID NO: 257546 - DNA, 201 bp, Homo sapiens
atcatttcaacccaggaggtggaggttgcagtgacccgagatcgcgctactgcactccggcctgcgtgacagagcaagactccgtctcaaaaaaaaaaaaaacaaaacaggaaaagtcttagagaaaccttgtgtttattcagaataaaatgaaatagttaaaatgttttagtgccttttattttcaaattacatagtcag

SEQ ID NO: 257547 - DNA, 201 bp, Homo sapiens
gaagctgaagcaggagaatcgcttgaactcaggaggcagaggttgcagtgagccaagatcgtgccactgcactccagcctgggtgacacagcgagactcgrtctcaaaaaaaaagcagccgggcatggtgggtggctcatggctgaaaactcagagcttcatgaggctgagctgagcggatcacttgagtgtaggagtttg

SEQ ID NO: 257548 - DNA, 201 bp, Homo sapiens
ttgagacagagtcttgttctgtcgcccaggctggagtgcagctccagctcactgcaacctctgcctccccggtttaagcgattttcctgcctaagcctccygagtagctgggactacaggcacatgccaccacacccagctaattttttgtatttttagtagagatggggtttcaccatcttagccaggatagtcttggtc

SEQ ID NO: 257549 - DNA, 201 bp, Homo sapiens
ggaagctgaagcaggagaatcgcttgaactcaggaggcagaggttgcagtgagccaagatcgtgccactgcactccagcctgggtgacacagcgagactcsgtctcaaaaaaaaagcagccgggcatggtgggtggctcatggctgaaaactcagagcttcatgaggctgagctgagcggatcacttgagtgtaggagttt

SEQ ID NO: 257550 - DNA, 201 bp, Homo sapiens
gcactgtggcttatgcctgtaatcccagcactttgggaggctgaggcaggcagatcacttgaggccaggagttcaagacctggccaacatggtgaaacccygtctctactaaaaatacaaaaattagtcaggtgtggtggtgcaggcctgtaatcccagctactcgggaagctgaagcaggagaatcgcttgaactcagga

SEQ ID NO: 257551 - DNA, 201 bp, Homo sapiens
tagtcccagctactcaggaggctgaggcaggagaattgcttaaacctgagaggcggaggttgcagtgagccaagattgcgccactacactccagcttggaygacagagcgagactccatctcaaaaaaaaaaaaaaaaaaaaagaatgcctacaactcaacaacaacaacaaaaaacctgattgaaaacatggacaaatac

SEQ ID NO: 257552 - DNA, 201 bp, Homo sapiens
tctttcatttttttaaattaaattaaatctattttattttattttattttgaaatggagtctcgctctgtcgcccaggctggagtgcagtggcgctctctyggctcactgcaagctccgcctcctgggttcatgccattctcctgcctcagcctcctgagtagctgggattacaggcacccaccaccgcacctggctaatt

SEQ ID NO: 257553 - DNA, 201 bp, Homo sapiens; identical to SEQ ID NO: 51500

SEQ ID NO: 257554 - DNA, 201 bp, Homo sapiens
cctcccacctcagcctcctgagtatctgggactacacgtgcggtccaccacgctgggctaatttgtgtatttttcgtagaggcagggtttcctcatgttgsccaggctggtctctggaactcctgagctcaagtgattcgcctgcctcggccttgtaaagtatcgggattacaggcttgagcccccgtgacctgccctgtt

SEQ ID NO: 257555 - DNA, 201 bp, Homo sapiens
gcctctacctcctgggttcaagcgatcctcccacctcagcctcctgagtatctgggactacacgtgcggtccaccacgctgggctaatttgtgtatttttmgtagaggcagggtttcctcatgttgcccaggctggtctctggaactcctgagctcaagtgattcgcctgcctcggccttgtaaagtatcgggattacagg

SEQ ID NO: 257556 - DNA, 201 bp, Homo sapiens
ccaaggctttcaatctctggttattcaggatctgctcaatccttacagtgcaaaaggaggtgtgttatgttaaaactggtttgctgtcaactttcaatcamctggattaaaggggaaaagtggaaatattaagtattccccacataattttacaagtttcaattttcccccatcagtaacaccatagtcggctaatagcaa

SEQ ID NO: 257557 - DNA, 201 bp, Homo sapiens
tcccttgcttgttattctacttcaaaattgtttgaccacatatgcctttcttcaattctggaaaattctcagccattatcttttcaactattctactcaaacattctctaaagtccttccttctggatttcctaatgggcattctcattctttcctctatgactcctaattacacttttatactatccatctttttatctc

SEQ ID NO: 257558 - DNA, 201 bp, Homo sapiens
ctaggagtgagggtctggagaaggcagatgctggagtggaggccaggtctgaccccagcatctgactgtggacaagtgatgcagcctccttgggcctctcytcttagtacagtgaaggtacttcttctctcaaggagttctgggggttaaatatgctaatgtaagtcaagtattcagcacggtgtctgacatacagggtgc

SEQ ID NO: 257559 - DNA, 201 bp, Homo sapiens
agaatcccaggccttgccccagacttaagagtctgcattttaaccagacacccacccctactccaccaccccacaatccatgtgcagttctaggagtgagsgtctggagaaggcagatgctggagtggaggccaggtctgaccccagcatctgactgtggacaagtgatgcagcctccttgggcctctcttcttagtacag

SEQ ID NO: 257560 - DNA, 201 bp, Homo sapiens
cgaccaagccaaagaaaggatatcagagattgaagatcaacttaatgaaataaagcatgaagataagattaagaaaaaagaatgaaaaggaatgaaccaascctccaagaaatatgggaccatgtgaaaagaccaaacctacatttgactagtgtacctgaaagtgacagggagaatggaaccaacttggaaaccctcttc

SEQ ID NO: 257561 - DNA, 201 bp, Homo sapiens
tctctaccccaaatcagcagaatatacattcttctcagcaccacattgcacttattctaaaattgaccacataattggaagtaaaacattcctcagcaaaygcaaaagaacggaaatcaaaacagtctctcagaccacagtgcaatcaaattagaattcaggattaagaaattcactcaaaaccgcacaactacatggaaa

SEQ ID NO: 257562 - DNA, 201 bp, Homo sapiens
  misc_feature (1)...(201): n = A,T,C or G
ggatcttaacatcttgatactgtgaccttttttaaaaaagactcctcagcctactatgctcgagctttcagtccacactcttgaccaagtctagcttggcnaagagaaggcaagttctgatatgagcaagccaacactcaaagtaagagggcaactgaattctaggggagtgagttatcttgagataatggagaagattaa

SEQ ID NO: 257563 - DNA, 201 bp, Homo sapiens
gggagagtgggggaaggccccttagggaccatgcctggatggggagattctcacgtgggagagtgagtgtctgaacccaaatggaaaggacgagagcaagygtgagccatccctccaagtgccaccgtgggtcatgggccagtatgctgttttgaattttattgtggcaggaacacttgccatcagatctgtccttttagc

SEQ ID NO: 257564 - DNA, 201 bp, Homo sapiens; identical to SEQ ID NO: 51501

SEQ ID NO: 257565 - DNA, 201 bp, Homo sapiens
aaatagacgctgtttcaaacgatgctaaattaaaatagcaaacagggatggtgctgcctcaatgatagaaacacacgaagctgccacaggtctcaggaagycttgctgcctgtcctgaggaggcaagaccaaccatttgttgagggggacttcttccttttccggaggtgatggtcccaagtgagcttaatgagtgaagtg

SEQ ID NO: 257566 - DNA, 201 bp, Homo sapiens
tgttgctcaggctggtcttgaactcatgggctcaagcagtctgcctaccttggcctcccaaagtgctcagattatagatgtgagccactttgcccttcagkctttttttttttttttttttttttttaatgatgaaatggtttggcatttttggcttgtgaagtaaagggatcagttcatttttgtgactgggatttataa

SEQ ID NO: 257567 - DNA, 201 bp, Homo sapiens
gctcactgcagcctctacctcccaggctcaagcaatttctccaccttagcctcccgaatagctgggactataggtgtacacccctgcccagctaatttttrtattttttgtagcgatacggtttcaccatgttgctcaggctggtcttgaactcatgggctcaagcagtctgcctaccttggcctcccaaagtgctcagat

SEQ ID NO: 257568 - DNA, 201 bp, Homo sapiens
catttaacctcattatttcttgcattgcctgatatttacttagctttatacatttaaaatagtcatttcaaataattttggctgaaactcttgtaataaamtatggtgactggtttattgatattgaaaatgtgcaaaacctataaattttgttcaagaaactagttatatgcttttgcttagtatcaagttacatacttt

SEQ ID NO: 257569 - DNA, 201 bp, Homo sapiens
aataatttggactatatcaaaatttaaaattttgtacatcaaaggacactattaatccagtgaaaaggcaacccaggaaatggagaaaatattttcaaatmgcatatctgataaggagttaatatccagattatataaagaatacctggctgggtgcagtggctcattcctataatcccagcactttgggaagccgaggtg

SEQ ID NO: 257570 - DNA, 201 bp, Homo sapiens
gttgagtctcatctccctctcctacccccgcctcattaagagtctcatctccctctcctacccccgcctcattaagagtctcatctccctctcctaccccygcctcattaagagtctcatctccctctcctacccccgcctcattaagagtctcatctccctctcctacccccgcctcattaagagtctcatctccctctc

SEQ ID NO: 257571 - DNA, 201 bp, Homo sapiens; identical to SEQ ID NO: 51506

SEQ ID NO: 257572 - DNA, 201 bp, Homo sapiens
cattgcctgatatttacttagctttatacatttaaaatagtcatttcaaataattttggctgaaactcttgtaataaactatggtgactggtttattgatrttgaaaatgtgcaaaacctataaattttgttcaagaaactagttatatgcttttgcttagtatcaagttacatactttcttaatacaatatgaataattc

SEQ ID NO: 257573 - DNA, 201 bp, Homo sapiens; identical to SEQ ID NO: 51507

SEQ ID NO: 257574 - DNA, 201 bp, Homo sapiens
tttacttagctttatacatttaaaatagtcatttcaaataattttggctgaaactcttgtaataaactatggtgactggtttattgatattgaaaatgtgsaaaacctataaattttgttcaagaaactagttatatgcttttgcttagtatcaagttacatactttcttaatacaatatgaataattcacatgtgactac

SEQ ID NO: 257575 - DNA, 201 bp, Homo sapiens
cagtggctcatgcttgtaatcccagtactttggaaggccaaagcgggaggattgcttgaacccaggagtttgagaccagcctcggcaacacagtgagaccmccgtctctacaaaataaaaataacaaaattagccgggcactatggcgcccacctgtagtaccagctactcagaaggctgaggtgggaagattgcttgggc

SEQ ID NO: 257576 - DNA, 201 bp, Homo sapiens
gattacaggcacccaccaccgcacctggctaattttttgtatttttagtagagacggggtttcaccatgttagccaagatggtctcgatctcctgacctcrtgatccgcctgcctcggtctcccaaagtgctgggattacaggcgtgagccactgtgcccggccagttgctttcattttttatacagagtctcactgtgtc

SEQ ID NO: 257577 - DNA, 201 bp, Homo sapiens
gagaaagggaagggttgagccattgagagttttttatttctttcatttttttaaattaaattaaatctattttattttattttattttgaaatggagtctygctctgtcgcccaggctggagtgcagtggcgctctcttggctcactgcaagctccgcctcctgggttcatgccattctcctgcctcagcctcctgagtag

SEQ ID NO: 257578 - DNA, 201 bp, Homo sapiens
tagccctgaagcagcagaaacagatctgcatttgtttcttccctccctccctccttccctccctccctccctccctctttctctctctctctctctctctmtatatatatatagtcttatttttgtaagacacaaacaatactcaaaccccaaatactcttgagcctgttcttgtctgaatgttttatagcctgtacctta

SEQ ID NO: 257579 - DNA, 201 bp, Homo sapiens
tggcctacctatcctcagctctatgtttctggagagctcataggaggacttgatataattaaggttagaattgagaagtctgtgctttgtaaagaaattcsatttagagcatactttttaaaatgttgtgataaatctaagatacaaatttcttatgaatctatatttactaataagaacctgcaatgaatacacagtatt

SEQ ID NO: 257580 - DNA, 201 bp, Homo sapiens
atagccctgaagcagcagaaacagatctgcatttgtttcttccctccctccctccttccctccctccctccctccctctttctctctctctctctctctcyatatatatatatagtcttatttttgtaagacacaaacaatactcaaaccccaaatactcttgagcctgttcttgtctgaatgttttatagcctgtacctt

SEQ ID NO: 257581 - DNA, 201 bp, Homo sapiens
cacaggtgtgtgccaccaagcccagctaatgtttgtatttttagtagagacagggtttcaccatgttagccgggctgatctggaactcctgacctcaagtkatcagcctgccttggcctcccacagtgctgggataacaagcatgagccactgcgcccggcctgctttgtattttagttccacaaatgccacatgggaagc

SEQ ID NO: 257582 - DNA, 201 bp, Homo sapiens; identical to SEQ ID NO: 51502

SEQ ID NO: 257583 - DNA, 201 bp, Homo sapiens
ggtcagccttggatattctatgtagataattataccatctggaaataacaatttagatttttctctttccaattcttatgtccattgtttcttttttttttcttatcacattatgccagctaggagccctagcataccgagcagaagtgctaatagcatcctcgtccttttctcttcaacacagatgcttccactaagtat

SEQ ID NO: 257584 - DNA, 201 bp, Homo sapiens
taagagtctatctatttttgtgtgttcatcttatattcaacaatcttgctggatattagttctactagtctatctgcagattttctggaaaatttttttttaagagatggggtctcaccctgctgcctgggatggagtacagtggcataatcatagctcactgcagcctccaactactgggctcaggcaatcctcctgtct

SEQ ID NO: 257585 - DNA, 201 bp, Homo sapiens
attttaatatcaggagctattttaataaaagtacaggattaaaggaagagcttagaccaggacaccagtgaataagactatcggtcaactaatcagcgttrctctttcatggtcctctcagtacccttgaagataaagaaaattattagtagagcatttgaaaattcttgcattcactctgaagagaaaaacaatgcatgt

SEQ ID NO: 257586 - DNA, 201 bp, Homo sapiens
agtgactttacttcttgattgagttttaaatggacgttactttgcatgtatttaatgtctagaattcagggcaggcccaccaactaacacctgtgtgctcwgtagctctttgattagcccaaaacaataaacagaagctgtagctttaatatctacacacagaccccactgcaccccaggcccactgtgggcatggtggca

SEQ ID NO: 257587 - DNA, 201 bp, Homo sapiens
taaatggacgttactttgcatgtatttaatgtctagaattcagggcaggcccaccaactaacacctgtgtgctctgtagctctttgattagcccaaaacartaaacagaagctgtagctttaatatctacacacagaccccactgcaccccaggcccactgtgggcatggtggcatcgaggagggtggtagctggttgggt

SEQ ID NO: 257588 - DNA, 201 bp, Homo sapiens
aacctgggaagcggaggttgcagtgagctgagatcatgccattgcactccagcgtgggcaacgagagcaaaactccatctcaaaaaaaaaaaaaaaaaaaagaagattatgattaagaattaaagaaaagcagaatgatgtctcaccaaatagataattatcaataaagagagaattttatacatataaactaaacagaag

SEQ ID NO: 257589 - DNA, 201 bp, Homo sapiens
gcgtggccgagaaatagacgctgtttcaaacgatgctaaattaaaatagcaaacagggatggtgctgcctcaatgatagaaacacacgaagctgccacagrtctcaggaagccttgctgcctgtcctgaggaggcaagaccaaccatttgttgagggggacttcttccttttccggaggtgatggtcccaagtgagcttaa

SEQ ID NO: 257590 - DNA, 201 bp, Homo sapiens
  misc_feature (1)...(201): n = A,T,C or G
tattgcaggcaagatctaataatagatgctaaaattaggaggcaaaagtttaaggagaaactggatgtttgcacagcctcaaactatcttccccaagattngtattaattgtaaagagaaaaatagtaactttaccgtggataaaaccatcgtaatcaagtgacaaggttaacaacagcagtaatgggacacaataccatg

SEQ ID NO: 257591 - DNA, 201 bp, Homo sapiens
caggtgaggcagcttgaaccaccagggcgatctctggagaaggtagccatgggagccgggagcaccaagcacagtcccccacacccagaagcatccccggsatagttactgcccccagatgacacagccaggacacgtgaggtgcaagctgggtctcacgcccagaccagctttgaggaggctgccccagcctgcgtcagc

SEQ ID NO: 257592 - DNA, 201 bp, Homo sapiens
atttctggtttgtggagtttttaaatatatatcatgaatgggattcgcatctgactgtatgctgttgctgcatgtaacagatgatctctattttccctttkatcagacaatgcagtcatttttctaatgttaaatcatccatgtgttctttcatacagggtttttaaaatctgtaaaatccctgtgatgggagctttttga

SEQ ID NO: 257593 - DNA, 201 bp, Homo sapiens
ctaaatcatttccttgcctgtttaggagcagtaaatgtttgttgtcatcacccagcaaaataattacacctcaatttctctctctctctctctctctctcwcacacacacacacacacacacacaccctttaaaatacaggcaattcataggcaagaggtgaagttttttttgctgccaggaaagtccaggaaagcatctt

SEQ ID NO: 257594 - DNA, 201 bp, Homo sapiens
tgatttaagcaataaaataaataaaaaacagcactggataatccacagaataaagtaaatgcctattagtctacccatatcaaaaataattgagtaaatamatagctgaaaagggaaaggacttccttacagttgaattctaattaacaaatgcaaaaggaaagaaggaaatacattaagtaaataccacagtaaaaatta

SEQ ID NO: 257595 - DNA, 201 bp, Homo sapiens
ctagttaagagtctcatctccctctcctacccccgcctcattaagagtctcatctccctctcctacccctgcctcattaagagtctcatctccctctcccrcccccacctagttaagagtctcatctccctctctcgcccccacctagttaagagtctcatctccctctcccgcccccacctcaggaggccaccaccatac

SEQ ID NO: 257596 - DNA, 201 bp, Homo sapiens
cctagttaagagtctcatctccctctcctacccccgcctcattaagagtctcatctccctctcctacccctgcctcattaagagtctcatctccctctccygcccccacctagttaagagtctcatctccctctctcgcccccacctagttaagagtctcatctccctctcccgcccccacctcaggaggccaccaccata

SEQ ID NO: 257597 - DNA, 201 bp, Homo sapiens
cctagttaagagtctcatctccctctcccgcccccacctagttaagagtctcatctccctctcctacccccgcctcattaagagtctcatctccctctccyacccctgcctcattaagagtctcatctccctctcccgcccccacctagttaagagtctcatctccctctctcgcccccacctagttaagagtctcatctc

SEQ ID NO: 257598 - DNA, 201 bp, Homo sapiens
taagagtctcatctccctctcccgcccccacctagttaagagtctcatctccctctcccgcccccacctagttaagagtctcatctccctctcctaccccygcctcattaagagtctcatctccctctcctacccctgcctcattaagagtctcatctccctctcccgcccccacctagttaagagtctcatctccctctc

SEQ ID NO: 257599 - DNA, 201 bp, Homo sapiens
ccgcacaaggccctggggagccaataaggagagggaggggcgggacgccgcgggaagcgcgagagcaccaaggcgaggaccgcaggcaggagtagcagagmccagagtcttctgagactattgggatgctgtgggcgttgtccgtctgccccaagtcattacttcgcagagaggtccctgcatatctctgcttgtcgcttc

SEQ ID NO: 257600 - DNA, 201 bp, Homo sapiens
aaaccagatggcactgctgtactccagcctgggtgacagaccgaaactctgcctcaataagtaaataaatacatacacacttgtacacgaggccaggtgcrgtggctcatgcctgtaatcccagaattttgggagtccaaggtaggtggatcacttgagcccaggaatttgagaccagcctgggcaacatggcaagatccc

SEQ ID NO: 257601 - DNA, 201 bp, Homo sapiens
ctagttaagagtctcatctccctctcccgcccccacctagttaagagtctcatctccctctcccgcccccacctagttaagagtctcatctccctctcccrcccccacctagttaagagtctcatctccctctcctacccccgcctcattaagagtctcatctccctctcctacccctgcctcattaagagtctcatctcc

SEQ ID NO: 257602 - DNA, 201 bp, Homo sapiens
gggggctcaccacgtcccccggaacctgcagatcctccgccctccgctgtcgccagcggccgagcgctaagctgtccatgcagccccagggtcaaaccctmccggcatctcaggcctggccgaggcccgcgcaccacgcccccttccgcacaaggccctggggagccaataaggagagggaggggcgggacgccgcgggaa

SEQ ID NO: 257603 - DNA, 201 bp, Homo sapiens
ctggaattacaggcaccaggtagttctttatagcgatgtgaaaatggactactacaggagccaaacactcaccaggaggacaaagggaggaggaggtggamctcgcaagagatgggcccagagggactactctgcaggagctatgtactgcgggagggctagagagagagagaaatgctctggcctcctcctccttctccc

SEQ ID NO: 257604 - DNA, 201 bp, Homo sapiens
gtcagactggtcttgaactcctgacctcaagtgatctgcctgccttggcctcccaaagtactgggattacaggtgttgagctaccacgcactgctgagtcktgattttttaattctctgccttttcctttgggtatttagttttatctctactaaaattagaaaaattagctggcacactcctgtagtcccagctacttgg

SEQ ID NO: 257605 - DNA, 201 bp, Homo sapiens
cctagttaagagtctcatctccctctcccgcccccacctagttaagagtctcatctccctctcccgcccccacctagttaagagtctcatctccctctccygcccccacctagttaagagtctcatctccctctcctacccccgcctcattaagagtctcatctccctctcctacccctgcctcattaagagtctcatctc

SEQ ID NO: 257606 - DNA, 201 bp, Homo sapiens
ggagtagcagagaccagagtcttctgagactattgggatgctgtgggcgttgtccgtctgccccaagtcattacttcgcagagaggtccctgcatatctcygcttgtcgcttctcccttcacaggagcagccgtggggctctaaagaaagcattctttcaggatcccgccaaacttttgacaacaccccgtggatcggctg

SEQ ID NO: 257607 - DNA, 201 bp, Homo sapiens
agaacggaaaagattttggtatgtttaaaaatgatttcatattgaatggaaacttgagagttgtttttgactcctgtttccagcctgactctcagacatttctagaccagtatcaccgtttctgtgtgcatgactaccctgccattctcactgtccccacgtggcagcctgttcttactttcacacctgagctaaccattg

SEQ ID NO: 257608 - DNA, 201 bp, Homo sapiens
ctagttaagagtctcatctccctctcccgcccccacctagttaagagtctcatctccctctcccgcccccacctagttaagagtctcatctccctctcccrcccccacctagttaagagtctcatctccctctcccgcccccacctagttaagagtctcatctccctctcctacccccgcctcattaagagtctcatctcc

SEQ ID NO: 257609 - DNA, 201 bp, Homo sapiens
tttttgagtgaagagttctataaattccaagtaagtcaggcggtttgatagtttattatttttatttttttttgagacactctcactctgccacccaagcygaagtgcagtggcgccatctcagctcacagcaacctctgcctccagtggttctcccacctcagcctcttgagtagctgggattataggcgcctgccacca

SEQ ID NO: 257610 - DNA, 201 bp, Homo sapiens
cctagttaagagtctcatctccctctcccgcccccacctagttaagagtctcatctccctctcccgcccccacctagttaagagtctcatctccctctccygcccccacctagttaagagtctcatctccctctcccgcccccacctagttaagagtctcatctccctctcctacccccgcctcattaagagtctcatctc

SEQ ID NO: 257611 - DNA, 201 bp, Homo sapiens; identical to SEQ ID NO: 51510

SEQ ID NO: 257612 - DNA, 201 bp, Homo sapiens; identical to SEQ ID NO: 51511

SEQ ID NO: 257613 - DNA, 201 bp, Homo sapiens; identical to SEQ ID NO: 51512

SEQ ID NO: 257614 - DNA, 201 bp, Homo sapiens; identical to SEQ ID NO: 51513

SEQ ID NO: 257615 - DNA, 201 bp, Homo sapiens; identical to SEQ ID NO: 51514

SEQ ID NO: 257616 - DNA, 201 bp, Homo sapiens; identical to SEQ ID NO: 51526

SEQ ID NO: 257617 - DNA, 201 bp, Homo sapiens
ggtcagagaaattttgtgagtcttattgaaatggggcagaattgtatccttggaagcagcagcgtggtgaccaaggacaagaggcaacttttctctgatayattttgctccatcacaattgtgttttactttatgtcttgttcttttcttgtttttaatcttttaagtcccttgactttaataccctcgtggataacatat

SEQ ID NO: 257618 - DNA, 201 bp, Homo sapiens; identical to SEQ ID NO: 51527

SEQ ID NO: 257619 - DNA, 201 bp, Homo sapiens
ggagtctgactcaagctttactatagagtagcatgcctgtgagattctccaaagttaatatggtttcccaagtaaatggttgaacaagtcaacaatttccmaaagaagtttccaaaagatatttgtagtttggactgtgagacgtattttttaagccttcatatatgcatttttctgattctacccttcttttgcagaaag

SEQ ID NO: 257620 - DNA, 201 bp, Homo sapiens
ttccataattgtgctttcaaatgtaatttctagctgccaatttacactttaccacagttaagacttagtttcatttccatgaaaaatgtgcactttgctcytgattgacagatatatgctttgacaattgatacaggtttacccagtcaaggcttgttttagttgaaggtgaaaatggaagagggaaaaaaaattgcttca

SEQ ID NO: 257621 - DNA, 201 bp, Homo sapiens
gggagcaaaagaacaaaaactgacagctgtgaaactgacaactatgacaactatggtaagaaagttgacagatgtatatgtgaaggttcctgagggtaaastaaggagttattaatcccaatgcagaagactggagaagctacaaagcatcatgagtaggggtctttccagtgggtaatgggctaaagagcattctaggtg

SEQ ID NO: 257622 - DNA, 201 bp, Homo sapiens
tgtgaaggttcctgagggtaaactaaggagttattaatcccaatgcagaagactggagaagctacaaagcatcatgagtaggggtctttccagtgggtaaygggctaaagagcattctaggtgaagggaaaagtgtgagcaaataaaaagaggtatgaaagaaatacagggaagagtccttagtatcatgacacttgattt

SEQ ID NO: 257623 - DNA, 201 bp, Homo sapiens
taccctcttaaataagcaaccacatgcaatttactcagcctctcagtgcctccatttccttacctacaaaacagggtaaatattcatctttttctcaaagrtggctaaaaagattaaatgaggaagtatgtgtgagagcccttattggagcttggcacatagtaggccatgaaaagcaatttgaatgaatgaggcgtgtgt

SEQ ID NO: 257624 - DNA, 201 bp, Homo sapiens
ttttccttttggccagagtaggtatggctgttcaactctcatttctaatgatcacaaactcctccacatgctcttctgaagaaccttctgaggactcaagmccctcagagacggcccattcttttcctctcttgtttctcgagctgattggatgctggctcctggcctcaggatctccattcaagttattaccaggaaaaa

SEQ ID NO: 257625 - DNA, 201 bp, Homo sapiens
aggataaaggatatttaaatacctcatgggtctctttttccacctccctttcactttagtgtgaatgacattgtggttcttggaccagaacagttctatgmcaccagagaccactattttaccaactccctcctgtcattttttgagatgatcttggatcttcgctggacttatgttcttttctacagcccaagggaggtt

SEQ ID NO: 257626 - DNA, 201 bp, Homo sapiens
ggcacaagcactagaaatcagtggtggatttgacaaagaattatttaatccacatgggatcagtattttcatcgacaaaggtaaaacctgtatgtttaggrataagggggaaatgagggaaatagaaaccatttatctccagcccctcaatatttatgtaacaggaagagagaagatgctattttaccatacagatgtgtt

SEQ ID NO: 257627 - DNA, 201 bp, Homo sapiens
ccacctgactgagccctaccagctcatttaattacctgtcactacttaagccctcccagtgggacatctgccccgtccactctgccccatgcaaggtcttsaggggtgtactaaatgacattctttgtgggtttttctcagcacatttccttactgacatctctccacattacctaaagaatgtcattgaccactccctgg

SEQ ID NO: 257628 - DNA, 201 bp, Homo sapiens
cctcagtatttctttttattgcattcgttgtctaacaacaataatactcattggcaagaaatttatttacactaacaaattaaatttaatcacaggtattkttagattggtcagaaaacaaaagaccactgtgatattttgcttgaatgcctctgaaaaccaaagagtaaggaatgtcatttgaaactttttgaacaatct

SEQ ID NO: 257629 - DNA, 201 bp, Homo sapiens
aaaagggattaaaatatccaggcatgccaaactttgcgccagatgaaccaggaaaaatcttcttgatggatctgaatgaacaaaacccaagggcacaagcrctagaaatcagtggtggatttgacaaagaattatttaatccacatgggatcagtattttcatcgacaaaggtaaaacctgtatgtttagggataaggggg

SEQ ID NO: 257630 - DNA, 201 bp, Homo sapiens
tcagaacaggctccctgctagactgtcagcacttccatggcatgagctgtgtctgctgggtacctggtgctctccaggtgttgcgttccttgcagagctcrtgtaggagctcagtaattgtgtcttgaatgaatgggaccccaggtttctgtgtccttctcccactcccactctcatctcaggtttcatctgccgtggaat

SEQ ID NO: 257631 - DNA, 201 bp, Homo sapiens
gatcctaatagtagaaaggaccactgtccaagttactggaataaactttttgtgatgtttgagtaaagcattcatgtcagaattttcagacatacctatakgaacaaaataggtcaaaaatagtcaactatataagactggtatccttatgttaattcttagccagctatactgtttgccactacatgatataatcgatgt

SEQ ID NO: 257632 - DNA, 201 bp, Homo sapiens
tgtaaggacactgaaaaccactagcattaaagtaggaattgtgcaagacattggagccttgattaggtatcatgcactacagtcaataaaagaaataatargaaaacaaaatgtgcacaagatctgaggtctttcactttgctttcatacccttaatcagtttacatcttatgctttgtggggcaatcaaaccaaatgact

SEQ ID NO: 257633 - DNA, 201 bp, Homo sapiens
aaaccactagcattaaagtaggaattgtgcaagacattggagccttgattaggtatcatgcactacagtcaataaaagaaataataggaaaacaaaatgtkcacaagatctgaggtctttcactttgctttcatacccttaatcagtttacatcttatgctttgtggggcaatcaaaccaaatgacttttacaatttcatc

SEQ ID NO: 257634 - DNA, 201 bp, Homo sapiens
caggtatttctgtaaaacaaaagttaaagaattttatgagaatagaacccaatgtaacagacattcaccacagaatgtcaaggctctgctctcaccagggygagactgagggcaaggccagtttcagcaacagaccaggcctgtctcccatcatgaaaaccccaaaaaggttctccatcaattgtcacattattctttctt

SEQ ID NO: 257635 - DNA, 201 bp, Homo sapiens
agtggcctgatggtaggaatgtactcatttttttctgaatgaataaatgaaagatcaatcacccccaaattcctatcattttgtaccacgtcggtaagaaktttatctagcgtgtctgttccgcctgtagcccatccgcctcctgtgagttcaagtcatcaggaggacaagtaaatttcttagcctatctgaagccaaata

SEQ ID NO: 257636 - DNA, 201 bp, Homo sapiens
tgctttcctgccataaacgcccactgcaggaagcactgtcagcgccaattgtatgactgttcctgtcagcacatctgagagactgtcatgaggggcctcaytcagagaaaattaccttaaagcaacatcaaatgtaacatcgtgtttgacattaaaaatcactggcagggctagtttggtattagctcaagtaaaatggaa

SEQ ID NO: 257637 - DNA, 201 bp, Homo sapiens
tttcttctgatctccctctcctccaccttccttccctctcctcccttttctttctcttttttcctctatgttgatggaacagccaagaaatagcctcaaattgtactttatgcagggctgctctccacaatgtttatgaagtccacgtgctcacgatggctgctaggtgacctggctgcccctcacctctctgcctttacc

SEQ ID NO: 257638 - DNA, 201 bp, Homo sapiens
agtaaagaaatgaagttatgccaagtagcagtagggttgacaggctaagaagcagtaggcacctattcataagactgattttagacttagcagtgggattytaatgatagttgtgcataggctaataagtgtgtgggaaagtctcagaggaaggtatcctgggggcttttgctcccacaggtgccattgttgctgagatgc

SEQ ID NO: 257639 - DNA, 201 bp, Homo sapiens
gctgcacttgaaatatgaatacttcagtaggactttcactaggcaggattatcgagtaggtggcctctgtatttaatacctacgtatcttctcttccactsctttccattctatagcttcccatgtctccaatatatgcttctactccataataggttccatgtgttttcttagctggctatcagaaacttctctccaaga

SEQ ID NO: 257640 - DNA, 201 bp, Homo sapiens
atttgagttttctgccttttcttgcctctcaatttctaaaaaataaagtaatctgaaccttgcactccctagtcttagaggtggtttgtgctagcagctgkaaagcagaagaaaccaaagaaaacgcctttcctgaattgtttttaaaaacctgagccccttcaagggattctgttggagaagggatatgaatatgtggat

SEQ ID NO: 257641 - DNA, 201 bp, Homo sapiens
taatctcacctactagttaatgccacacctgcttatttgggctccacagctccaattcttcctgacattgctaacagaaaaataaaataaaatcaggctarattgtgttccctgttctgggaatatgttctttcaccttctcacctttgcttatgaaattccctccaaacttactgattcctctgtctctgcttactaaaa

SEQ ID NO: 257642 - DNA, 201 bp, Homo sapiens
gaaatctaacatcaatatttttgtttatgaatgttgctttgaatatcctcttttaaaaatctttatgtaccccaaaattatgaaatatgcttccttgtgawcttataaaatatttatagttatttttcacatttagatttttcatccacccagaatatacttttggttgtcctgtgagtaggaatcaagattcattttggc

SEQ ID NO: 257643 - DNA, 201 bp, Homo sapiens
gatacaatcacatttctcctcaattaagtgaaggaaactgaacttacaaaatcttatacatttagagacaggaggttaagttcagaacacatgagtatggkacacagatatggttttttgagggccacattttttttcttgtctgcattttaaaaaccaggaattaagtgtaaacatccagttagttccctggcttacctg

SEQ ID NO: 257644 - DNA, 201 bp, Homo sapiens
ctactaatgagctgtatgattttgagaatatcatttaacctctctttacagatgagaaaactgaggctctgcatgcctgtctaacttgcctgagagctcaragctgcgtcagagctgatgcgctggccatgacgcctctgcaatagagcagagataattttctcccagatcatgccctggggaacttccatcacctcaatc

SEQ ID NO: 257645 - DNA, 201 bp, Homo sapiens
acttatttttaaggctttagaaagaatattgtttaaaataaccccatactctacgatggtcctgattcttccttagcttgcccctcgctatgtgagactghctacttaatggatttgtcacagaggttttcctggctgagagatatcagagactttgatggtgaagcagcgacaggggaacaaaatgacgggcgaggaagc

SEQ ID NO: 257646 - DNA, 201 bp, Homo sapiens; identical to SEQ ID NO: 114340

SEQ ID NO: 257647 - DNA, 201 bp, Homo sapiens
ttatttttaaggctttagaaagaatattgtttaaaataaccccatactctacgatggtcctgattcttccttagcttgcccctcgctatgtgagactgactacttaatggatttgtcacagaggttttcctggctgagagatatcagagactttgatggtgaagcagcgacaggggaacaaaatgacgggcgaggaagctt

SEQ ID NO: 257648 - DNA, 201 bp, Homo sapiens; identical to SEQ ID NO: 114341

SEQ ID NO: 257649 - DNA, 201 bp, Homo sapiens
tgggccttgacactaaattgtcaaaccaaaagagaaacgctgtaatgcattttactcccagatactaaaagttagtgttagggctaagttcctcccatacygataaggacaactatgtcccctccttcagaaacaacttttcagagattaaacccctctgtcactgtaaactcactgagttctttcagaatttggtgtgtt

SEQ ID NO: 257650 - DNA, 201 bp, Homo sapiens
ggatgcacagtgcttagactaaccccagatctttgtggggtatgactaaagccacagggtcaggaccacactcagggcagaagaggaggaagacttctctygatccaagccaagcagcttttcttctctcatattttctctggattaaaacaaggggctgttgtccaagggctttcctgcaactttcccgagagagaactc

SEQ ID NO: 257651 - DNA, 201 bp, Homo sapiens
atgtgtgtatgttttaattgcagtttgaatgatattgttgctgtgggacctgagcacttttatggcacaaatgatcactattttcttgacccctacttacratcctgggagatgtatttgggtttagcgtggtcgtatgttgtctactatagtccaagtgaagttcgagtggtggcagaaggatttgattttgctaatgga

SEQ ID NO: 257652 - DNA, 201 bp, Homo sapiens
cagatttcttagaccaatgattgtctttaaggattgtatcggcaggactaatttcatattaattgtgttccattatagctagcacgaaggctccatcccayatcttgattttaggaatagacagtgaggaatgccagttaataatcctgtaatgttcaataccttcaccttatatattatgtgtgtatgttttaattgcag

SEQ ID NO: 257653 - DNA, 201 bp, Homo sapiens
ggccgaggggggcggatcatgaggtcaggagatcgagaccatcctggccaacatggtgaaaccccatctctactaaaaatataacaattagccgggcatgktggcggcgtgtgcctgtaatcccagctactcggaaggctgaggcaggagaatcacttgaaccagggagtcatcggaggttgcagtgagctgagatcgcgc

SEQ ID NO: 257654 - DNA, 201 bp, Homo sapiens
tgtcattcataaattatgataaagatagttaaccaacacgaagatgattgaagtccacatttaaacatacattttgaatgctgtgccttgacttccagggytgggttttatcttctacagagaaagggtgaatgcctctcgagaagtggagccagtagaacctgaaaactgccaccttattgaggaacttggtatgtatgt

SEQ ID NO: 257655 - DNA, 201 bp, Homo sapiens
ctcggcgccgcgcagtcgccgctgggcaccccgagaccatggggaagctcgtggcgctggtcctgctgggggtcggcctgtccttagtcggggagatgttyctggcgtttaggtgagtggcatcttgacagggcgtcttcgactctctttctctcctcttccaagtgaggtcaggggctgcctggcgcccccttcctagcg

SEQ ID NO: 257656 - DNA, 201 bp, Homo sapiens
ttgtaaggacactgaaaaccactagcattaaagtaggaattgtgcaagacattggagccttgattaggtatcatgcactacagtcaataaaagaaataatrggaaaacaaaatgtgcacaagatctgaggtctttcactttgctttcatacccttaatcagtttacatcttatgctttgtggggcaatcaaaccaaatgac

SEQ ID NO: 257657 - DNA, 201 bp, Homo sapiens
ttatgtgttccctattgtacccattaaagcagaaaaatagactcatatatcttacattttcagtaacagagaatcctaatcagaaaggaaaaaaaaaaagycatagcattctatttctgagcattcttgttcatggacatttcattcagtttagaatcacgaaatcttaaggctggaagatcaaccagtctatcatcctgc

SEQ ID NO: 257658 - DNA, 201 bp, Homo sapiens
ctgcaatagagcagagataattttctcccagatcatgccctggggaacttccatcacctcaatcagcaaagaatgactcacttatgtgttccctattgtayccattaaagcagaaaaatagactcatatatcttacattttcagtaacagagaatcctaatcagaaaggaaaaaaaaaaagtcatagcattctatttctga

SEQ ID NO: 257659 - DNA, 201 bp, Homo sapiens
gagattggagagaaattgagttactggatgaaggccaatcaactcactagtggccaagtaggaaccccagctcaggtcatcttctgccccatcaagatgartaaaagttcagagaacagcttttggtggaagagtttattcgtgcatttatttaacaaatatattttggagagagaataaggtcactgagtggagaatgtg

SEQ ID NO: 257660 - DNA, 201 bp, Homo sapiens
ataaaacactcaagaatctccaatctcagtcaacttcctcacatgccctgtgaagatttggcttgtaaggccagtgatggatttaggagaacaatccgacwctatcttctgaaacatttacctccaactgattacgattttctagaatcccaacctatttttatataatttatgtacagcatttgactacctccatatctg

SEQ ID NO: 257661 - DNA, 201 bp, Homo sapiens
tttctctcctcttccaagtgaggtcaggggctgcctggcgcccccttcctagcgggtaggaaagagcagctttggaacctcactcctccatctcacccagyaaaccgccccttgagactcgcttatggggaaagtgagctacttgcgtttccaaagactgccgagccgaattagtcccatttattttttgaaggttatgat

SEQ ID NO: 257662 - DNA, 201 bp, Homo sapiens
tctggtagtcatcttcccactaactggtattcctctcaccatgtctgcctttatttggagctctgcaaatgtttgtggatcgaatattaaccacgttactygatttaaaactctaaacacgttccatcttgggttccctgccattcttaacaagtctttcaaagagaaatagagaacagactgcattttaattcccagtac

SEQ ID NO: 257663 - DNA, 201 bp, Homo sapiens
atgaggaagtatgtgtgagagcccttattggagcttggcacatagtaggccatgaaaagcaatttgaatgaatgaggcgtgtgtagtagcagaaaatagaytgattagagtgaatttggccccaagaagagtttgagaatcgatacggatttcttaatgcctaggcaaagatctctgcttttttctgcgagcagccagcat

SEQ ID NO: 257664 - DNA, 201 bp, Homo sapiens
gtctggttttctgtccttgtgatagtttgctgagaattatagttttcagtttcatccatgtccctgcaaaggacatgaactcatcctcttttatggctgcatagtattccatggtgtatatgtgccacattttcttaatccagtctatcactgatggacatttgggttggttccaagtcattactattgtgaacagtgctg

SEQ ID NO: 257665 - DNA, 201 bp, Homo sapiens
catgccaaactttgcgccagatgaaccaggaaaaatcttcttgatggatctgaatgaacaaaacccaagggcacaagcactagaaatcagtggtggatttracaaagaattatttaatccacatgggatcagtattttcatcgacaaaggtaaaacctgtatgtttagggataagggggaaatgagggaaatagaaaccat

SEQ ID NO: 257666 - DNA, 201 bp, Homo sapiens
tctggttttctgtccttgtgatagtttgctgagaattatagttttcagtttcatccatgtccctgcaaaggacatgaactcatcctcttttatggctgcatagtattccatggtgtatatgtgccacattttcttaatccagtctatcactgatggacatttgggttggttccaagtcattactattgtgaacagtgctgc

SEQ ID NO: 257667 - DNA, 201 bp, Homo sapiens
aggtgggtcaattttcaggtgcatcttccagcttttaagcagtgttctctgtagattttgcctggtcagagagctaaatgtgagctttgtgttcatacttraattccaatccctgctcagccactttataactctgtggccttagaaagccacttaatcttggtcaactataacttagggaaaataacacctcacggaggt

SEQ ID NO: 257668 - DNA, 201 bp, Homo sapiens
tctgttttggtaccagtaccatgctgttttggttactgtagccttgtagtatagtttgaagtcaggtagcaatgatgcctccagctttgttctttttcctkagaattgtcttggctatgcgggcccttatttgattccctatgaactttaaagtagttttttccaattctgtgaagaaaatcattggtagcttgatgggga

SEQ ID NO: 257669 - DNA, 201 bp, Homo sapiens
catgctgttttggttactgtagccttgtagtatagtttgaagtcaggtagcaatgatgcctccagctttgttctttttccttagaattgtcttggctatgygggcccttatttgattccctatgaactttaaagtagttttttccaattctgtgaagaaaatcattggtagcttgatggggatgacactgaatctataaat

SEQ ID NO: 257670 - DNA, 201 bp, Homo sapiens
ggagaccctgaatcaagtgcatctaagacctccttatactgcctccgctgctgtttgattgcacaaaatttatgcaatagcagatctgtggtaacactcarttccccctaggcaccttgttcatgtaacatatggtgaaataaaacactcaagaatctccaatctcagtcaacttcctcacatgccctgtgaagatttggc

SEQ ID NO: 257671 - DNA, 201 bp, Homo sapiens
ttttaaaaatatttttaagtacaaagaaatatagtgtttgatgtgtggatactttttaaaataaaaatgaggtaatattacacaaccccttctataaattkcttctgcattaaacactacatcatggactcctttatatatagcacatttgcagttgctttgccaaggcagttcgggattcagttgtgtgggagcactgta

SEQ ID NO: 257672 - DNA, 201 bp, Homo sapiens
ttgtctattccctaagcacttaaaattgccatattcaaatatttgctaaattaaatatacatttaatgtatactacttcacaggtcatttcaactttcacrtttttaaacaaatttcagaataagccctttaatttaaaattgttgataggtcccaattcccaattcccaagctttgaagacagaatccaccatatttgct

SEQ ID NO: 257673 - DNA, 201 bp, Homo sapiens
ggctcaactctccagctggttccaaccaaccagctttgttatttgaagacaattggtttgagatcatgcttttgtgtgctttgggtgtttctttttctttyttttttttttttttttttttgttcttttagaattattcatctcagttgattaaggctcaggaggctagatcagatgacttagtaccactaaatttcacta

SEQ ID NO: 257674 - DNA, 201 bp, Homo sapiens
ccagtccaggctgcggagtcagattgggcagatgagtaggaggctgcccatctgtcagcaactctaaaacatcaatggaataaactggaaccatgttgccrtttacccggactttccacctaggagtccttacacactgatgaaattgctcctgttcctgccaaagtacacagagccctagagaggatattatgtatctct

SEQ ID NO: 257675 - DNA, 201 bp, Homo sapiens
gaaggagttttgcatttcctcaacatgttaaacatagagttaccacacaatccagcaactctgcaccttggtgtatgctcaagagaattgaaaacctatcyatgcaaaaacccatatacaaatgttcatagcagcattactcctaatacaaaaggtggaaataacccaaatgtctatcaactgatgcattcataaacaaaa

SEQ ID NO: 257676 - DNA, 201 bp, Homo sapiens
gactggtgactctttactctggttatacgttgggacaaactgtggcacttttacaaagcagattactaagaggcactccttgcctcttacgtcagattttyttagacagcgaaaatgatagccagtggcctgatggtaggaatgtactcatttttttctgaatgaataaatgaaagatcaatcacccccaaattcctatca

SEQ ID NO: 257677 - DNA, 201 bp, Homo sapiens
catctattcattcatctctgtatttctagtacctagactggtgactctttactctggttatacgttgggacaaactgtggcacttttacaaagcagattaytaagaggcactccttgcctcttacgtcagattttcttagacagcgaaaatgatagccagtggcctgatggtaggaatgtactcatttttttctgaatgaa

SEQ ID NO: 257678 - DNA, 201 bp, Homo sapiens
ctaagttcacatctatcaatcaggaaaccacagtctcctcacagtccaagccttcatcatctattcattcatctctgtatttctagtacctagactggtgrctctttactctggttatacgttgggacaaactgtggcacttttacaaagcagattactaagaggcactccttgcctcttacgtcagattttcttagacag

SEQ ID NO: 257679 - DNA, 201 bp, Homo sapiens
acacctctcagtgtccttcctcttttaaaatattgtgattgagctttatggtcatttgatactttttttcaagcactagtttttagaagtatatacacttytggccttgtaagagatccacttaccttcattcaatttaaggaaaaagttgtgacttcgaagtaataagattgagcctatatatgtcatctagaaacacca

SEQ ID NO: 257680 - DNA, 201 bp, Homo sapiens
gagttatggaggattccttcttttctattgattggaatagtttcagaaggaatcgtcccagctcctctttgtacctctggtagaatttgtctgtgaatccrtctggtcctggactttcattggttggtaggctattaattattgcctcaatttcagagcctgttattggtctattcagagattcaactttttcctggttta

SEQ ID NO: 257681 - DNA, 201 bp, Homo sapiens
ttctagtttatttgtgtagaggtgtttttagtattctctgatggtagtttgtatttctgtgggatcagtggtgatatcccctttatcattttttattgcayctatttgattcgtctctcatttcttctttattaatcttgctagtggtctatctattttgttgattttttcaaaagagcagctcctgcattcattgatttt

SEQ ID NO: 257682 - DNA, 201 bp, Homo sapiens
acttttggaagtgaccaagttttaaaacaagtctaatattagttgtgataggggtaactttcttggaaattatcccttttttccatgtagacaatactgtrtatctttatgttgtgaatcatccccacatgaagtccactgtggagatatttaaatttgaggaacaacaacgttctctggtatacctgaaaactataaaac

SEQ ID NO: 257683 - DNA, 201 bp, Homo sapiens
tcttttcctaactgaataccctttatttctttctcttgtccaattgccctggccagaatttccaatactatgttgaataggagtggtgagagagggcatcsttgtcttgtgcaggttttcaaatggaatgcttccagtttttgcctattcagtatgatattggctgtggatttgtcataaatagctcttattattttgaga

SEQ ID NO: 257684 - DNA, 201 bp, Homo sapiens
atccagtctatcattgttggacatttgggttggttccaagtctttgctattgtgagtagtgccgcaataaacatacgtgtgcatgtgtctttatagcagcrggatttatattcctttgggtatatacccagtaatgggatggctgggtcaaatggtatttctagttctagttctagatccctgaggaatcgccacactgtc

SEQ ID NO: 257685 - DNA, 201 bp, Homo sapiens
tatgtcctgagtgttattgcctaggttttcttctagggtttttatggttttaggtcttacatttaagtctttaatccatcttgaattaatttttgtataargtgtgaggaagggatccagttttggctttctacatatggctagccagttttcccagcaccatttattaaatagggaatcctttccccatttcttgttttt

SEQ ID NO: 257686 - DNA, 201 bp, Homo sapiens
gtcttgtgctggttttcaaagggaatgcttccagtttttgcccattcagtatgatattggctgtgggtttgtcatagatagctcttattattttgagataygtcccatcaatacctaatttattgagagtttttagcatgaagggctgttgaattttgtcgaaggccttttctgcatctagtgagataatcatgtggtttt

SEQ ID NO: 257687 - DNA, 201 bp, Homo sapiens
ctgccaggccttggtatcaggatgatgctggcctcataaaatgagttagggaggattccctctttttctattgattgggatagtttaggaagaatggtacyagctcctccttgtacctctggtagaattcggctgtgaatccatctgatcctggactttttttggttggtaagctattaattattgtctcaatttcagagc

SEQ ID NO: 257688 - DNA, 201 bp, Homo sapiens
gaattgttccctttaccattatgtaatggccttctttgtctcttttgatatttgttagtttaaaatctgttttatcagagactaggattgcaactcctgctttttttttttttgctttttatttgcttggtagatcttcctccatccctttattttgagcctatgtgtgtctttgcacatgagatgggtctcctgaataca

SEQ ID NO: 257689 - DNA, 201 bp, Homo sapiens
aattgttccctttaccattatgtaatggccttctttgtctcttttgatatttgttagtttaaaatctgttttatcagagactaggattgcaactcctgctttttttttttttgctttttatttgcttggtagatcttcctccatccctttattttgagcctatgtgtgtctttgcacatgagatgggtctcctgaatacag

SEQ ID NO: 257690 - DNA, 201 bp, Homo sapiens
gacacgggagggaatttcctggtctgctggttgcaaagactgtgggaaaagcacagtatttgggcaggagcgtaccgttcctccaggtacagactgtcacrgcttcccttggctaggaaagggaaatcccctgaccccttgcacttcctgggtgaggtgacgccctgccccactttggcttgccctccatgggctgcaccc

SEQ ID NO: 257691 - DNA, 201 bp, Homo sapiens
ggtttcaccatgttgcccaggctggtctcgaactcctgagctcaggcaatcctcccatctcggcctcccaaagtgctgggattacagttgtgagccaccgygcccagcctacttcacctgcttttatgctgtttaccattttctcattcacaaaacttgctcttccctgatactgcagtgcacctagctgttccagttctc

SEQ ID NO: 257692 - DNA, 201 bp, Homo sapiens
aagtgattttccatccttttatctttccttctcttccccatgtgagacacacacacacacacacacacacacacacacacacacacatatacatatatatycctttcaatggactttccactcatccacccattcatcaccattatgttttattttaaaaatatttttaagtacaaagaaatatagtgtttgatgtgtgga

SEQ ID NO: 257693 - DNA, 201 bp, Homo sapiens
taatttaaacttgttattattcatatatcacaactgttattattggtcatttactgtatgccaggcatggtgtgaaggcctttgcattcattatttcattktattcttactctagcctttcaaggtatacagagaaaacagaggttcagaatagtggctcaaaatttagtgacaatgctgtggccccacattataaggata

SEQ ID NO: 257694 - DNA, 201 bp, Homo sapiens
ccttccatgccagtctttgtgttgtcctcggttatgaccatcacccttaacatcttgtacctgccctttggttccttgagggcatgctacaaatattcacyacactttccctagaccagagttttttcaaatggtgggtaacaaagtcaatttagtaaataattaccaacatttaaaaataaataaaacagaattgaacag

SEQ ID NO: 257695 - DNA, 201 bp, Homo sapiens
tatgagagagaagcctgaattagaataggagctgaccagttctgcctttctccatcttttgtgaacccatatgtttagtgacccttgtgagtcaggcagcrtgagtattcttcccattggttttgagtctaagaaaagtgaatttgactatccttggtgtttttcacaagtcttggcccattcagtgattttatgtccttg

SEQ ID NO: 257696 - DNA, 201 bp, Homo sapiens
caaaatatataaacatatagaaggataagtgcatttagtagaaatacttacaataaaaaaatctcttaaaatctatgagccattcaatgtatacacaacgmaagaagtggcaataaggctatgattacagctccaggtcctgactgacctcgccaagttccatacacaatatattttttaatgccatgtgattgcagtgtg

SEQ ID NO: 257697 - DNA, 201 bp, Homo sapiens
gatatgacatgtttgggccacaaattggaacccaaatcaacaagtgctgacttaatgcccccttgcccaccctgggctccctttaactgtgattattctaygttttccaggctagagatcatcttctatgagagagaagcctgaattagaataggagctgaccagttctgcctttctccatcttttgtgaacccatatgtt

SEQ ID NO: 257698 - DNA, 201 bp, Homo sapiens
acaccagggacagcatttcggtaaacaaacaaaaaaatgtgtatttatgagatgttgaaatttttcatatattaatatttgttaaatcaattgcattttgraatggggatatgattttgaaaaagtatatttaccacattttcaatgtgaattctgattgctggaattggatgtctaatattccatttggggcaataaaat

SEQ ID NO: 257699 - DNA, 201 bp, Homo sapiens
ataactctgtggccttagaaagccacttaatcttggtcaactataacttagggaaaataacacctcacggaggtgtttgaggattaaacgcgggcatatayggtacctgaactatagtagtaatgattatcctgttgagatatgacatgtttgggccacaaattggaacccaaatcaacaagtgctgacttaatgccccct

SEQ ID NO: 257700 - DNA, 201 bp, Homo sapiens
tccttgatataaaggaaatacctgaatctttatgtataagatctgcaaggaaagagtatagagtgagaagggaggagggatcgataaaaacagaaggaggyataaatccaagagtcaggaagaggagcaggatttctatctgggaactcaacttttgacgttttgataagaaagaagaaggtatactgtagtgtcaaatgc

SEQ ID NO: 257701 - DNA, 201 bp, Homo sapiens
gagatatatctcagacattgacccttatctcttaggcccagaacatttggacttaagcctttgacaagatatttcctaataaattgaaaatgaggtagaamaaatatgagttggatgataataacacaggtgggtcaattttcaggtgcatcttccagcttttaagcagtgttctctgtagattttgcctggtcagagagc

SEQ ID NO: 257702 - DNA, 201 bp, Homo sapiens
caatgtgtggggagtcaaaaacaaaattacatgaggctgtggaaaaaataagttctgttacacttcatggttttagctttttcagaattggaacaggataragtggaaagaacttagtcttttgctaatggacatgtgattagtatcttttattccttgttctgtggctaagaccaatggactattaagttggttttctcc

SEQ ID NO: 257703 - DNA, 201 bp, Homo sapiens
ccttttttctttatcagttgcttagcctcagatgttcctttagagtgacacaaagcagactcagacaagttcacagcaaaggctgtatggtttctgcgcaragttcagagtctagtgaatcagagatatatctcagacattgacccttatctcttaggcccagaacatttggacttaagcctttgacaagatatttcctaa

SEQ ID NO: 257704 - DNA, 201 bp, Homo sapiens
aacagcagacagcagagaagagagacatggttgtacagaggcacctcctttgggtctttactcaaatgccccattatcagtgagaacttctctgactgctrttcttcagcagagggtattccttatcccctttcttgctttatgtgttttctccataacatatgtgcatatccataacacacacatgcatcacctagagca

SEQ ID NO: 257705 - DNA, 201 bp, Homo sapiens
ttttacatagtagctcaaggcttaagagcaagtgttcagaaggagcagagagagagggcagtagttacaatgtgaggccaaagaagcttccccccagaaarctaaaggtgataagtaaagcatgttggtattggctggcaatattccacaagagatgaaaggacagatattgcagaagagagaaggtataactgggaccaa

SEQ ID NO: 257706 - DNA, 201 bp, Homo sapiens
gacaccaaaaaacttggccctggagcatagcataaacgaaatgcatatggtaagtcataaggagctggcagagtcagggttctggtaagtgtctgtcctaraaatgagccaacagacatccacaaggaagcccatttctttgctgctatgcaaacagcaagagcttcaggcatataaataacaaactgggagtgtgtgttt

SEQ ID NO: 257707 - DNA, 201 bp, Homo sapiens
ctattgtatccatgttatctaattcagtagttacttctctgccataagcatactcaactcatagccacattggacacagatcatcattccccctcttttcsaatactcttctcttttggattcattggttctacttcttaggtagattcttctgctccacctggtgttaaccagggtggcttagccagtggtattcagttg

SEQ ID NO: 257708 - DNA, 201 bp, Homo sapiens
aaaaactaaatattgtacccagagttccccacttgtcttgccctggccttgcctggaaaaattgcaggaaaaactctggagttgaaactcaggcaaagtayagtgaaggagaacttttgtggactgcctacctttgcaacttattataatttctgaatagttttgtgtgtgttttatttctttctcccccacagaacacga

SEQ ID NO: 257709 - DNA, 201 bp, Homo sapiens
acagtaggcggtctgcaagcctgaggagcaaggagagccagtctgagtctcaaaactgaagaatttggagtctgatgtttgagggcaggaagcatcagcaygggagaaagatgtaggctgggagggtaggccagtctctcctcttcatgtttttctgcctgctttatattcgctggcagctgattagattgtgcccaccca

SEQ ID NO: 257710 - DNA, 201 bp, Homo sapiens
aatgttaaaaatttacatgtacttaaagtataactaacttgaagacagtaatatttaaccgatgtttataattagtagtaaaaattcatattcttgatcamctaaaatgtatccccattttaactcaactatttggaatttgcttatatcttcaatatggctttccaagggtttaattgatttggaagtattaagtatcaa

SEQ ID NO: 257711 - DNA, 201 bp, Homo sapiens
ttttcagcaattttcagaatgtggggtacttggtgctttgttgtttttatctttgagcccttcgatgctgattctataatcacagaaaaattctcattctrtattcctttggcatcaaacaggttttagtttcaggtagcagaaaccactctatctagtttttggggaaagtgatcaaatgcaggaactaatgcttcacaa

SEQ ID NO: 257712 - DNA, 201 bp, Homo sapiens
atcctatgcagtggataaacagcatcaaaagacaccaaaaaacttggccctggagcatagcataaacgaaatgcatatggtaagtcataaggagctggcaragtcagggttctggtaagtgtctgtcctagaaatgagccaacagacatccacaaggaagcccatttctttgctgctatgcaaacagcaagagcttcaggc

SEQ ID NO: 257713 - DNA, 201 bp, Homo sapiens
gaggacttggggcttggaagaataagggtttgcaaatggcaaaggaagaattttccttcctccctaaggattgcttactcaaaaaaaaaaaaaaaaaaaargtgggggggcagtggtagtaggtggggtccttaaaaagccacagagtgagatcctatgcagtggataaacagcatcaaaagacaccaaaaaacttggccc

SEQ ID NO: 257714 - DNA, 201 bp, Homo sapiens
tataggaacaaaataggtcaaaaatagtcaactatataagactggtatccttatgttaattcttagccagctatactgtttgccactacatgatataatcratgtaggaatgggaacaatacaattaaactatacaccccttctctctgctttgaggaaggttagttatagaataccaggaccggaaataatcttataatc

SEQ ID NO: 257715 - DNA, 201 bp, Homo sapiens
aagcaattctcatgcctcagcctcccaagtagctgggattacaggcatgcgccaccatgcccggctaattttttgtatttttagtagagacagggtttcascatgttggccaggctggtctcgaacttctgacctcaggtgatccacctgccttggcctcccaaagtgttaggattacaggtgtaagccaccactcccagc

SEQ ID NO: 257716 - DNA, 201 bp, Homo sapiens
ctgtgagccataacaatcttacctcctggtgttaaggacatagcaccatatttctagacattctctgtagctttttcctttatacctgctagttctctctctctctctctctctctctctctctctctctctctctctctcttttttttttttgagacagagtctcactctgtcaccctaggtggagtgcagtggcgtgat

SEQ ID NO: 257717 - DNA, 201 bp, Homo sapiens
aggacatagcaccatatttctagacattctctgtagctttttcctttatacctgctagttctctctctctctctctctctctctctctctctctctctctctctctcttttttttttttgagacagagtctcactctgtcaccctaggtggagtgcagtggcgtgatctcagctcactgcagcctccgcctcttgggttca

SEQ ID NO: 257718 - DNA, 201 bp, Homo sapiens
gacatagcaccatatttctagacattctctgtagctttttcctttatacctgctagttctctctctctctctctctctctctctctctctctctctctctctctcttttttttttttgagacagagtctcactctgtcaccctaggtggagtgcagtggcgtgatctcagctcactgcagcctccgcctcttgggttcaag

SEQ ID NO: 257719 - DNA, 201 bp, Homo sapiens
catagcaccatatttctagacattctctgtagctttttcctttatacctgctagttctctctctctctctctctctctctctctctctctctctctctctctcttttttttttttgagacagagtctcactctgtcaccctaggtggagtgcagtggcgtgatctcagctcactgcagcctccgcctcttgggttcaagca

SEQ ID NO: 257720 - DNA, 201 bp, Homo sapiens
tagcaccatatttctagacattctctgtagctttttcctttatacctgctagttctctctctctctctctctctctctctctctctctctctctctctctcttttttttttttgagacagagtctcactctgtcaccctaggtggagtgcagtggcgtgatctcagctcactgcagcctccgcctcttgggttcaagcaat

SEQ ID NO: 257721 - DNA, 201 bp, Homo sapiens
tattactctattaccctttaaaaatttgttatttatttacttattttactacacctgggggtagtaaattttcagcaataaaaagctattgctctaaaccrttccactctgcccctttctgtgaaaaacagacaaatgatagtccagcatactaatttaagaaatttacttttaaaaaagagagagtaaaatcagattgta

SEQ ID NO: 257722 - DNA, 201 bp, Homo sapiens
ttggacttgagcaactggatggtagtgatgccatttattgaagtgtgagtttgggcaggggggattaagagttttcctttggacacattttgaaaagactrttaaacaccccagtgggcatgtcaaccaggtagcctgctgggccctgcccaaattccttatgcactgtttatgagcataagaaaatgattgtttggttta

SEQ ID NO: 257723 - DNA, 201 bp, Homo sapiens
cttcacccactccagttgagccttcagataagatggcaattcacactgacagctcagctgctaactcatgagagaccttgagccagaggtatctagctgtrccatgcctgaattcctgacccacagaaatgatgagataataaatgtttgttgtttttaatggtgagactttagtataatttgttatgcagcatacgataa

SEQ ID NO: 257724 - DNA, 201 bp, Homo sapiens
ttctccaaaagttagtgtaaaatttagcattttttcttccttaagtgtttggaataattcacttatgaagctacctgggactaaagatttctttaaggggrattttaaagtatagattacatttatttaaagaatatagaaatattacaattaaatgtttctgcttgtgtatgctttgataaatttagcaattcattcttt

SEQ ID NO: 257725 - DNA, 201 bp, Homo sapiens
aggtatgagagggattgcaaataggcatgaagaaatttggaggcaaaggatatatttattaccttgatgcctgtgatgttttcatgggtgaatatatatgycaaaacttattgatttatatataatgacatatattgaattataaacacatataattatatttatatattataaatgtgtgcagtttattgtatataaatt

SEQ ID NO: 257726 - DNA, 201 bp, Homo sapiens
atttagtggaataaagtagttcataatatccttttgttacatatttaggatctgcggtaatatcctctttatttctcacatttagaatttgttttctttcycattttctttctgtcagtcttaccacagttttatatctttcattagtcttttcaataatcaacttttgaatgttttgtcctaagtttttattgtagtaaa

SEQ ID NO: 257727 - DNA, 201 bp, Homo sapiens
tattgcagaagagagaaggtataactgggaccaaaagccttgagaaggaaagagacatggagcaaatcattcacagtaacagcagacagcagagaagagasacatggttgtacagaggcacctcctttgggtctttactcaaatgccccattatcagtgagaacttctctgactgctattcttcagcagagggtattcctt

SEQ ID NO: 257728 - DNA, 201 bp, Homo sapiens
gttttaattataatagatttataataaaccttgatttttggtattaaaatcccccaaatttgttcttcctcaaaattttttatggatattcttaactcttygtattttcacttaaatttagagtcagattgccaatttgtacaaaacctttctaggatttgtgttggaattttattgagctccttatagatcaatgcgggg

SEQ ID NO: 257729 - DNA, 201 bp, Homo sapiens
ggcacctattctctgtcttctctctttacagttggaaggagcaaaatgggacttttggctgaaagtgctgagctcctgcggtgggggctgaccgcaagccrcgccttctgtgcacctggtcggcccagctagctgcggacccggcggggaggggcggggcgggccaatcggcgctgccccagcagggctgcggctgcaggc

SEQ ID NO: 257730 - DNA, 201 bp, Homo sapiens; identical to SEQ ID NO: 114321

SEQ ID NO: 257731 - DNA, 201 bp, Homo sapiens
ataaatcacatatatgtgcagcttttgcaagtactgtcaagcagttttccaaagtggttgtagcagcatactccttcacgaataatgttggagagttctasttgcttcatttctttgccagcacttaataatattagttttccttctttaacttttaactatttggattgttatgtaagaatatctcattgtggttttatt

SEQ ID NO: 257732 - DNA, 201 bp, Homo sapiens; identical to SEQ ID NO: 51525

SEQ ID NO: 257733 - DNA, 201 bp, Homo sapiens
caatgagattttctagaagagtgattcactagaaatgtaaatgaccatattagcacagccaagggcaagtcatccaactgagggaaaccaagaggaatgtwcttaagcagaagcagagaatgtaatgaaaatttttaacatattcagtttcatattctgtctaacagatgtatcagaaaaagctcagtcctttagggatga

SEQ ID NO: 257734 - DNA, 201 bp, Homo sapiens
attagaagcttacattcagaatgggtttttactatttattgtggatgtttttctaatttttttaagttacagagtgcagaaaaaaagtaagaagcagttgktattcttggcttttaaatcatgtaaaaattacagtttgtgagtttttattaatcacagtgctggtggctgccaaaggagattataggtatagataaaaat

SEQ ID NO: 257735 - DNA, 201 bp, Homo sapiens
tacactctatggggcattgtcattagcttcctgatcaaaattcgctcaccttcacatcagattccagccatggaaagaagaaagagaggatgagaaaacaygtcaaatatctttgggcccaatttggaaatggcacaaactacctccactgacattctattgataagagaatagttatacaattatagctaattggaagga

SEQ ID NO: 257736 - DNA, 201 bp, Homo sapiens
agtttattgtttaaatctcttggttgtgctaacgtcgtctgtttctttcaaatgcagcatcagtagcttcgctctgctcaggcagccggctggcacttccytctcacatctgttcatttttcctttgtcctttactcagacattttctatggtgtttatgcactcatatctaataagtcgctcctgtgtatgtgtgtgagt

SEQ ID NO: 257737 - DNA, 201 bp, Homo sapiens
tcaagtgaggtgtgataaagaaatggatccacatcctgcaataatatgaaacaacctgtactttctgttctcttttctggcagaaactggctctgaagacwtggagatactgcctaatggactggctttcattagctctgtgagtgttttctttcacttttctgtgttctagaacgttttctaggactggcagtttaagtc

SEQ ID NO: 257738 - DNA, 201 bp, Homo sapiens
ctcgtggcgctggtcctgctgggggtcggcctgtccttagtcggggagatgttcctggcgtttaggtgagtggcatcttgacagggcgtcttcgactctcyttctctcctcttccaagtgaggtcaggggctgcctggcgcccccttcctagcgggtaggaaagagcagctttggaacctcactcctccatctcacccagc

SEQ ID NO: 257739 - DNA, 201 bp, Homo sapiens
tatcaatgtgttgtcagtgagccattatggtccttttaaattcaataaagggtctatttggtgggacattaggagccagattgattgtcccattgtgataytgaagtcctcctcgagaataagggctgctgtacccactaccttgaggcaatgtggccaccattgtgctgctgggtctaggttctttgaaaagtaacctac

SEQ ID NO: 257740 - DNA, 201 bp, Homo sapiens
tcaagttattttaccactttattccagaaaagttccagccagtttctccacccgaaaattaggggataataatacatattacagcatatatatatatatayacacacacacacacacacatacatatatttatatttatataaaacatataaataaaactaagtatatatatatatataaaaatcaggcatatagcagatg

SEQ ID NO: 257741 - DNA, 201 bp, Homo sapiens
ggataataatacatattacagcatatatatatatatacacacacacacacacacacatacatatatttatatttatataaaacatataaataaaactaagwatatatatatatataaaaatcaggcatatagcagatgtcctgtaaacgttagcttttatagctgtcatatgtgatctcaaaaatatagagtgatacttga

SEQ ID NO: 257742 - DNA, 201 bp, Homo sapiens
caaaacagggtaaatattcatctttttctcaaaggtggctaaaaagattaaatgaggaagtatgtgtgagagcccttattggagcttggcacatagtaggccatgaaaagcaatttgaatgaatgaggcgtgtgtagtagcagaaaatagactgattagagtgaatttggccccaagaagagtttgagaatcgatacggat

SEQ ID NO: 257743 - DNA, 201 bp, Homo sapiens
caagtaaatttcttagcctatctgaagccaaataagatttctagggatatttggataattgtcactacttgctatgacaatactgtatcactagttctctaaaaaaaaaaaaaaaaaaaagtttattgtttaaatctcttggttgtgctaacgtcgtctgtttctttcaaatgcagcatcagtagcttcgctctgctcagg

SEQ ID NO: 257744 - DNA, 201 bp, Homo sapiens
tgaggaagctattttgagggtgtcaggcataggggtgttgggacccagtgctagtttctggagtttcttccaaatcatctggggctgcctgagttaggaartggtcctttaggaccagttgcccttctggtgtctctgggtctaggttagtatatctcattagggcctcttgtagcctccctaggaaagcagaggaggttt

SEQ ID NO: 257745 - DNA, 201 bp, Homo sapiens
aagtaaatttcttagcctatctgaagccaaataagatttctagggatatttggataattgtcactacttgctatgacaatactgtatcactagttctctaaaaaaaaaaaaaaaaaaaagtttattgtttaaatctcttggttgtgctaacgtcgtctgtttctttcaaatgcagcatcagtagcttcgctctgctcaggc

SEQ ID NO: 257746 - DNA, 201 bp, Homo sapiens
ttgtgatattgaagtcctcctcgagaataagggctgctgtacccactaccttgaggcaatgtggccaccattgtgctgctgggtctaggttctttgaaaartaacctacagcatgtttgactggcccaaaggtttcagttagaactcctagtgctataccttgccttttcagtgatgaaaaactgaaatggtttggttagt

SEQ ID NO: 257747 - DNA, 201 bp, Homo sapiens
aaagctctagtccatcaatttaaaacaaatatactaagtgtaaattttaattaaacttgttaatgaattaatatatttttaatttccatataatcgcattmatcaatttgaataaatgaaagaatgaattattctgaacctattaaagaagagtgatgtatagccccagtttcaagtgaggtgtgataaagaaatggatcc

SEQ ID NO: 257748 - DNA, 201 bp, Homo sapiens
agtaaatttcttagcctatctgaagccaaataagatttctagggatatttggataattgtcactacttgctatgacaatactgtatcactagttctctaaaaaaaaaaaaaaaaaaaagtttattgtttaaatctcttggttgtgctaacgtcgtctgtttctttcaaatgcagcatcagtagcttcgctctgctcaggca

SEQ ID NO: 257749 - DNA, 201 bp, Homo sapiens
tgcactgaggtccctggggacagagctttagtctctacaacttggtgatgggactctgtagcataccctgcatatctagttccatccctgacgaagctackgccatctgaaaaccatattttgtctggattatctatgggctgatcctttaagtcttcccagctggcataaattttgttaagaatctcacagcatgaatat

SEQ ID NO: 257750 - DNA, 201 bp, Homo sapiens
gtaaatttcttagcctatctgaagccaaataagatttctagggatatttggataattgtcactacttgctatgacaatactgtatcactagttctctaaaaaaaaaaaaaaaaaaaagtttattgtttaaatctcttggttgtgctaacgtcgtctgtttctttcaaatgcagcatcagtagcttcgctctgctcaggcag

SEQ ID NO: 257751 - DNA, 201 bp, Homo sapiens
tgcttactaacggccctactaacctgttgagttacttaggaaataaaggatggaccattgtcactttgcaatgacctgggtagctcaaaccaggaaatgcrttcctttaggaggaatttagctacctcctgtgccttctcagtctttgtggagcaggcttctacccattttgtgaaggtatctacacagaccaagaggtac

SEQ ID NO: 257752 - DNA, 201 bp, Homo sapiens
tgagcccagatatgtgagcacatttttgccctgacaatgatttctggcttaatttaatttctactgaatttagtgtatttacacacagacacacacagatacacacacacacacacacacacacacacacacacacgacgtaacactattttaagatacatataataggatttttatgttacagtgctataatcacctcct

SEQ ID NO: 257753 - DNA, 201 bp, Homo sapiens
atcctggctaacacggtgaaaccccgtctctactaaatatacaaaaaattagctgggcgtagtggcaggcgactgtattcccagctactcgggaggctgargcaggagaatggcgggaacccagggggcagagcttgcagtgagccaagatcgcgccattgcactccagccggggtgacagagcgagactccgtctcaaaa

SEQ ID NO: 257754 - DNA, 201 bp, Homo sapiens
gagcccagatatgtgagcacatttttgccctgacaatgatttctggcttaatttaatttctactgaatttagtgtatttacacacagacacacacagatacacacacacacacacacacacacacacacacacacgacgtaacactattttaagatacatataataggatttttatgttacagtgctataatcacctcctc

SEQ ID NO: 257755 - DNA, 201 bp, Homo sapiens
aggcaagattcttcccacagagggaggaccaccatccacttgagaactaaataagagcatcttaactccttctgtaagggatgcctgcactaaaaaaattrtgtaagtcatccctgaggaatttggctaatgtcagaaagccagttcactttggtgcatagatatctatgacattagtactttcatcagaagaagaacaat

SEQ ID NO: 257756 - DNA, 201 bp, Homo sapiens
gacttggaagaatttaagccagtcacatttggtgttatagaactaaagaaattttacgtatgagaaaagtaaagtttttgacaggtagggagataaggttcgttaactcttttaggccaccattaacttttcaataactcttgctgttgggaataatggaaaaacataagctcgattattcatattgacccagattgccat

SEQ ID NO: 257757 - DNA, 201 bp, Homo sapiens
atagggtatcagagtgatttaatttgattttaaaaataaggaaatgtgacatttactcatttgtttactgttttgtggtgtagtagtattcatattcactmtacaaataactgtcaaaatatataagcctgcaaataatcaagaggtataattagactagatgattggtagggtctagtctgactcgaattgtatcactca

SEQ ID NO: 257758 - DNA, 201 bp, Homo sapiens
ctcatatctaataagtcgctcctgtgtatgtgtgtgagtgcacctgtgtgtgtgaaatgcctttttacatgcaggccttgtgtatgattttctgaagttamaaatcctttcaacgtacctgtatttttcaagcactacatcacaaagcagatgcccagtccaggctgcggagtcagattgggcagatgagtaggaggctgc

SEQ ID NO: 257759 - DNA, 201 bp, Homo sapiens
ttgagtatattatgattcacagcttatcttatttgtttgtcatctcccttaattatgtatttaattcataaggccaaaatattacatatagaaatagagayggaatgaggagatggagaagaaaagtactctcactaagtatatcttatttggaaagagggattcagtagatgcactagaagaaatgaaatcaggctagca

SEQ ID NO: 257760 - DNA, 201 bp, Homo sapiens
cagattgggcagatgagtaggaggctgcccatctgtcagcaactctaaaacatcaatggaataaactggaaccatgttgccatttacccggactttccacytaggagtccttacacactgatgaaattgctcctgttcctgccaaagtacacagagccctagagaggatattatgtatctcttatgtgtacctatccacct

SEQ ID NO: 257761 - DNA, 201 bp, Homo sapiens
aactctaaaacatcaatggaataaactggaaccatgttgccatttacccggactttccacctaggagtccttacacactgatgaaattgctcctgttcctrccaaagtacacagagccctagagaggatattatgtatctcttatgtgtacctatccacctctgctaaataaaaactaaatattgtacccagagttcccca

SEQ ID NO: 257762 - DNA, 201 bp, Homo sapiens
gatgctgggaaagtaattatcaagcctccaatgtgggaggcaggccctgtcagcaaagataaaacggtaggagaatagcagctgggaggcaaccaacaagragagtccccgggctcaactctccagctggttccaaccaaccagctttgttatttgaagacaattggtttgagatcatgcttttgtgtgctttgggtgttt

SEQ ID NO: 257763 - DNA, 201 bp, Homo sapiens
ctttctgtatacccatgcccactttcaaataaaatgaacagtcatggtttaaaagacaaattgtgtatgcatttacacttgtgctataattatgatcatgygtgttctatgcatatttgtgttcttcggtctacattgaaccatattacgttagcttctattgcagcaatttttttgtgagttcagtgtattcaagaattg

SEQ ID NO: 257764 - DNA, 201 bp, Homo sapiens
ataacagagttgataggaaacgacagacaatcatccagccatttaaaaacctttgctaccccttgtaatttacttagtccagttttctcttacaaagatgrtagactagtcatcctgcaaagcaatgtcttgcaaactttcttgagcaacataaggtgtatttcaagcaaaatcttatatgggaacacaatatataaaaca

SEQ ID NO: 257765 - DNA, 201 bp, Homo sapiens
gcttaggtttagaacccaccacttaaaatgatttcataaccctaacagacaaacccagtaatgactcagattggattttccatcaacttagtggaataggrtatcagagtgatttaatttgattttaaaaataaggaaatgtgacatttactcatttgtttactgttttgtggtgtagtagtattcatattcactatacaa

SEQ ID NO: 257766 - DNA, 201 bp, Homo sapiens; identical to SEQ ID NO: 51534

SEQ ID NO: 257767 - DNA, 201 bp, Homo sapiens
attcaaagcctgtttaaagcacttcaagaatattaaaaatactaccccattatcttcttttactgtggtttagaaaaggattgcagtggtactttcaaggrgtgtgcatttttatacctcttctccaaaataaaagtgagtgttgtctctcattaccacttgcttaagtgtaaatgtcatttacttcaaaggtatgtctat

SEQ ID NO: 257768 - DNA, 201 bp, Homo sapiens
ttgtttccttggactttaggttcttcccagttaaaggagggatgtggacttaaggatataaggacctcattccaaatttttacataactcttgaaacacaytttcctaacacactacaaaggaagataaatgagcaatacccctgccccttatgaaagtacaaagtatttgaccacttatgctaagttcagttacacaaaa

SEQ ID NO: 257769 - DNA, 201 bp, Homo sapiens
tctggaagtgggaggcaagaggcccacagtaggcatgagctgagacactgctaggctgcccctctgggaagtacatcagacctgtgcagaactggttgaartagcagcagctggaacaaggtaggtgaggctatgaggatctaaagaggagcctgagggtacactggcacaggcattgataagcacttacaagggggcata

SEQ ID NO: 257770 - DNA, 201 bp, Homo sapiens
ggttgtgttctgtgagcctcacccactgggtgttataaccaacctccagatgagccacttctttgtttaattacagctttaaagtagaattttttaaaagyccttgggcacttataaaaattacatttgttaagcattgactatgtgccaggcactatgccagaatacttaatttaacttaattctcacaaagcctttaat

SEQ ID NO: 257771 - DNA, 201 bp, Homo sapiens
aaattgctgatggatcattcgcctcctgagcttcaatttcctcaactaaatctggattctggcatttgtctgacttacctatcatgtagactgtgagggtmaaatgcaagatgtaagaagaaaacttttggaagtgaccaagttttaaaacaagtctaatattagttgtgataggggtaactttcttggaaattatccctt

SEQ ID NO: 257772 - DNA, 201 bp, Homo sapiens
agcacaagtgattgttcactattgtgtctagcaaaagactgaaggtccgtgttggggctgaaatccaacccatgttctgtttgccacgccctgagccttgraacagagctggatcagaccagaaggaagatttcctctgtgagcaagcacctttccttaatttgcatcaaagtgcccagtgtgtttcagaggtcctggtta

SEQ ID NO: 257773 - DNA, 201 bp, Homo sapiens
agcacatagtaatattcaactttatagatggatacaatgaagtttagaggaatgcagtgaagtgtgacttcacttctgcaattagtaaatggctgatccasaactcagacagaggaggtctcacttctaatcctgtgtcttttactaaaatgagattaggactctatttaaataattttaaaactgcaactgttttgcctc

SEQ ID NO: 257774 - DNA, 201 bp, Homo sapiens
gcaatttactcagcctctcagtgcctccatttccttacctacaaaacagggtaaatattcatctttttctcaaaggtggctaaaaagattaaatgaggaartatgtgtgagagcccttattggagcttggcacatagtaggccatgaaaagcaatttgaatgaatgaggcgtgtgtagtagcagaaaatagactgattaga

SEQ ID NO: 257775 - DNA, 201 bp, Homo sapiens
atttcaagcaaaatcttatatgggaacacaatatataaaacaacagctttattgttttgattgaaggctaagaaaggagtagttcctctggcccaccaaamctctgtctttgagatgcttccaaggacctaccagggaacagtttaaaagccataagcaatattctctctgtattccttgcttatatcattgaagactatt

SEQ ID NO: 257776 - DNA, 201 bp, Homo sapiens
tgattaatttaatattgatgaaataaattcaagattgttgttgatatccatctgcttatcatcactcagattttgagccaaattcccactgattgaacggaaaaaaaaaaaaaaaactcaagctgtaaatttagtataaagtcataccatatttgtagtatatttactcacctggcagaaacaaacacatatcctctctgg

SEQ ID NO: 257777 - DNA, 201 bp, Homo sapiens
accctttgtgccttttgctagtttttagctattagggttgctgaatggtatgtttaatagaattgaagaaatgtatgctgtggagtgttcagtgctcagamctgagcagaatgttagattctaatttgttcttgcttgttagctcatttagtaaccttgggtcatttgctatagcatggacttggtttgttgttctggaga

SEQ ID NO: 257778 - DNA, 201 bp, Homo sapiens
gatgaaagggtttgtgtggggtggcctagtggagcatgtggcttccagaagacttctcctggggacccattacagaagctaactaagaggcttcctatgtrgccatctggctagccctgtggtttggagcagtcaacatgaacccatgggccatgcagcgcctctattagcatttgaagtactggtattgtgcttgatttt

SEQ ID NO: 257779 - DNA, 201 bp, Homo sapiens
agcccagatatgtgagcacatttttgccctgacaatgatttctggcttaatttaatttctactgaatttagtgtatttacacacagacacacacagatacmcacacacacacacacacacacacacacacacacgacgtaacactattttaagatacatataataggatttttatgttacagtgctataatcacctcctca

SEQ ID NO: 257780 - DNA, 201 bp, Homo sapiens
acacacacacgacgtaacactattttaagatacatataataggatttttatgttacagtgctataatcacctcctcagatttcttagaccaatgattgtctttaaggattgtatcggcaggactaatttcatattaattgtgttccattatagctagcacgaaggctccatcccatatcttgattttaggaatagacagtg

SEQ ID NO: 257781 - DNA, 201 bp, Homo sapiens
tccaggaagttctgccccagggcctttgcacactttctcccctcaacctggaatgctctttccctagatatccacattattcgttctcttatttcacttargtttttgctctaacatcccctcatcagagagaacatgcctgactcccatgaagataatacttcgttactctctattcttttatcctgttgtatttttcct

SEQ ID NO: 257782 - DNA, 201 bp, Homo sapiens
cacacacacgacgtaacactattttaagatacatataataggatttttatgttacagtgctataatcacctcctcagatttcttagaccaatgattgtctttaaggattgtatcggcaggactaatttcatattaattgtgttccattatagctagcacgaaggctccatcccatatcttgattttaggaatagacagtga

SEQ ID NO: 257783 - DNA, 201 bp, Homo sapiens
cattcttgagaatttttttttctcctgtggagttttgagttttcagagactgtcactggttcttccttgagccacttttgtttggaacaggagcaatcacmaatgcttctctctacaaagagatgaaaatattccatctgcctgacatcctaactactagctggaggtgggttgaaattggtttttggagagagggctgac

SEQ ID NO: 257784 - DNA, 201 bp, Homo sapiens
ggtggctcacacctgtaatcccagcactgtgggaggctgaggtgggtggatcacgaggtcaagagttcaagaccagcctggccaatatggtgaaaccccgyctctactaaaggtacaaaaaattagccagacatggtggcacatgcctataatcccagctacctgggagactgaggcaggagaatcacttgaacctgggag

SEQ ID NO: 257785 - DNA, 201 bp, Homo sapiens
gccatcctaatcctatgaagctactgaactataaccctgaggaccctccaggatcagaagtaagttcctatacctctctgagctcacaggcaaagctgcargaacaaatttgttggggtgacttggaagaatttaagccagtcacatttggtgttatagaactaaagaaattttacgtatgagaaaagtaaagtttttgac

SEQ ID NO: 257786 - DNA, 201 bp, Homo sapiens
ataggtatttgcacatttactgagttttcagtatctactaaggatacttattacttacatcatatatatgatatcatcttgacatatttgtctactgctgkgtattgttaaagctcagttttaagagtccatttcacctgcccaacaggaaaaaaaaaagtgttaaagcccgtatctcttgggttaaaaaaaaaagaaaca

SEQ ID NO: 257787 - DNA, 201 bp, Homo sapiens
agatggcaaattttatgggaaaaaaggctcagcagagtaaaggggatcaggattactatatgcagcaggatgagcaggtcctactactaaagtcagagatsagagtaggcctcattgagaaagtacaatttgaaaaaaattaaaatgtgtgaatccacatttggtgatttgagaaactgaaattcaaattcaaacccagta

SEQ ID NO: 257788 - DNA, 201 bp, Homo sapiens
aaatgaaccagataagtgactttattcccagctactgttttttcagttgacaacataattctcaattcttggtttttttttttttttttttttttttttgkgacagagtatcgctctgtcgcccaggctggagtgcagtggcgcaatcttggctcactgcaagctccgcctcccgggttcacaccattctcctgcctcagc

SEQ ID NO: 257789 - DNA, 201 bp, Homo sapiens
gcaagctccgcctcccgggttcacaccattctcctgcctcagcctcccaagtagttgggaccacaggcgcatgccaccatgcctggctaattttttgtattttttttttttttttagtagagacagggtttcatcctgttggccaggatggtcttgatctgctgaccttgtgatccacccgcctcggcctcccaaagtgcc

SEQ ID NO: 257790 - DNA, 201 bp, Homo sapiens
actgactcaaatgttaatctcctttggcaacacgctcacagacacccaggatcaatactttgcatccttcaatccaatcaagttgactctcagtattaacyatcatactgagtaacagcttcctccctccacatttactgaaatccccactgctccctaatgtcccacatccaggatgcgctgctcatttgcatttcctgc

SEQ ID NO: 257791 - DNA, 201 bp, Homo sapiens; identical to SEQ ID NO: 51530

SEQ ID NO: 257792 - DNA, 201 bp, Homo sapiens; identical to SEQ ID NO: 51531

SEQ ID NO: 257793 - DNA, 201 bp, Homo sapiens
cactattgaatcagaaccagcgtcatggaacaaactccctgggggattagagatcatgaatctgccccagggagagaaggcaagagatgatatcatgaggyctgcatcaggagcaagccaaatccccaggatagatgcatccttttttcttcagacttggagtgtatgtgtgtgcggctcacaggaagctatatatgcctg

SEQ ID NO: 257794 - DNA, 201 bp, Homo sapiens
gagcttcaaccccaacagtcctggaaaaatacttctgatggacctgaatgaagaagatccaacagtgttggaattggggatcactggaagtaaatttgatrtatcttcatttaaccctcatgggattagcacattcacagatgaaggtaacaatatttactatttattaaaaccaaaaccaaacttaaaacaaaaacagaa

SEQ ID NO: 257795 - DNA, 201 bp, Homo sapiens
atgaaaggaagtacctacttacttgttatgtcattcataaattatgataaagatagttaaccaacacgaagatgattgaagtccacatttaaacatacatkttgaatgctgtgccttgacttccagggttgggttttatcttctacagagaaagggtgaatgcctctcgagaagtggagccagtagaacctgaaaactgcc

SEQ ID NO: 257796 - DNA, 201 bp, Homo sapiens
  misc_feature (1)...(201): n = A,T,C or G
gccagagtaggtatggctgttcaactctcatttctaatgatcacaaactcctccacatgctcttctgaagaaccttctgaggactcaagcccctcagaganggcccattcttttcctctcttgtttctcgagctgattggatgctggctcctggcctcaggatctccattcaagttattaccaggaaaaaaatcctcttct

SEQ ID NO: 257797 - DNA, 201 bp, Homo sapiens
attcttgcctcctcaaaggaaataatttacctaaggggtataaggtagagtgagagaccaaggcaagtttttgaacaggaatgagagcaggagtgaaaggaagaaagtatacttggaagagggccaagcgggcaacttaagagatccaagtgcctcatccaacccttcacttggggtttttatacattggcctggttctga

SEQ ID NO: 257798 - DNA, 201 bp, Homo sapiens
ggggaaatgagggaaatagaaaccatttatctccagcccctcaatatttatgtaacaggaagagagaagatgctattttaccatacagatgtgtttttttwaaatgataaataggtataaaaccttgtaaacattgcattaaagaaggaacactagtatttttggccctatgtggcctcctcctcttccttctatccactt

SEQ ID NO: 257799 - DNA, 201 bp, Homo sapiens
tctttaagaggaaaatgaattggaaccgtagtgggcattagtctataatatgatgctctcctccctgccagaacttcaggacaaatatttgaaatggcctrtcttggcctggtgtggtggcttatgcctgtaatcccggcacttcgggaggccaaggctggaggattgcttgagccgagtttagaccagcctaggcaatat

SEQ ID NO: 257800 - DNA, 201 bp, Homo sapiens
ttctggaaagaaagtggttggccaggtggcaggttggctcctgaggtgtctttgtgccccccgggtctgctgattctgcagagacaccggcaggcgggtcrtgggtcatctctgaagggaattctcaggaaggctttgtgtgatctcagcctgcttcctgccatgctgtgccttcactgtaaccttttaagatacttacca

SEQ ID NO: 257801 - DNA, 201 bp, Homo sapiens
agaaacttctggaggtcaaactgggggagctgccaagctggatcttgatgcgggacttcagtcctagtggcattttcggagcgtttcaaagaggtcagagycttgtggatgtctgtaaatgaaagcaaatctctgggtcttcagatctcttttttgccatgaattaatttgggcaatgaaggccttgttgtctgaaagcag

SEQ ID NO: 257802 - DNA, 201 bp, Homo sapiens
gcacccccccaccccacgaccttggcccgagcccctccgtgaggaacacaatctcaatcgttgctgaatcctttcatatcctaataggaattaacctccarataaaacatgactggtacgtgtgctgattgcctgcctgtctgccgtagccattatcccatgttccaggggctcctgtggcacaaggtggggggaggtcgt

SEQ ID NO: 257803 - DNA, 201 bp, Homo sapiens
gccatgctgtgccttcactgtaaccttttaagatacttaccatcttgccttcctgacttcagagcacgagcggctccgcaaataccactgaagaggacacrctctgcacccccccaccccacgaccttggcccgagcccctccgtgaggaacacaatctcaatcgttgctgaatcctttcatatcctaataggaattaacc

SEQ ID NO: 257804 - DNA, 201 bp, Homo sapiens
cccaccttcttctgaggctgagggacctttagttaaagttccttatgtttccacctaaaagaattggagggacctatcagagtacagtatgtgggatattstttgaaatgagaaaattgtgacaaagagaacacaggaaaatcaagatgaagccagggtaaagagagtacttagaagcattctttaaaatacagcacactg

SEQ ID NO: 257805 - DNA, 201 bp, Homo sapiens
agacccttaattaatgagacatggcttaaaaaacaagctttaatccatttcataaaaattgttcttgcaattgaacacagccaggcccacatgcccagcakgttgcaggagacagtttcacattttccaggctcaggacagggcagtctcctccacatgccacaggtgtctgagtgacagtgtagacgcctgatgggcagg

SEQ ID NO: 257806 - DNA, 201 bp, Homo sapiens
tcttgccttcctgacttcagagcacgagcggctccgcaaataccactgaagaggacacactctgcacccccccaccccacgaccttggcccgagcccctcygtgaggaacacaatctcaatcgttgctgaatcctttcatatcctaataggaattaacctccaaataaaacatgactggtacgtgtgctgattgcctgcct

SEQ ID NO: 257807 - DNA, 201 bp, Homo sapiens
caaataccactgaagaggacacactctgcacccccccaccccacgaccttggcccgagcccctccgtgaggaacacaatctcaatcgttgctgaatccttycatatcctaataggaattaacctccaaataaaacatgactggtacgtgtgctgattgcctgcctgtctgccgtagccattatcccatgttccaggggctc

SEQ ID NO: 257808 - DNA, 201 bp, Homo sapiens
atgctgtgccttcactgtaaccttttaagatacttaccatcttgccttcctgacttcagagcacgagcggctccgcaaataccactgaagaggacacactytgcacccccccaccccacgaccttggcccgagcccctccgtgaggaacacaatctcaatcgttgctgaatcctttcatatcctaataggaattaacctcc

SEQ ID NO: 257809 - DNA, 201 bp, Homo sapiens
acacccctgggggacactgaggttctcgctgtagaaaaggcacttccttcctaccgaggaaggccaggcacggtacctttgctggaggctgtgtctgctgyggcagtgggggctgctcggtggttcccatgggcagttcaaatcgagggctggtcaccagcagccagaggggatgagaacaagagaaggagtggggtcagg

SEQ ID NO: 257810 - DNA, 201 bp, Homo sapiens
cgaccttggcccgagcccctccgtgaggaacacaatctcaatcgttgctgaatcctttcatatcctaataggaattaacctccaaataaaacatgactggyacgtgtgctgattgcctgcctgtctgccgtagccattatcccatgttccaggggctcctgtggcacaaggtggggggaggtcgtctttccaggccgttga

SEQ ID NO: 257811 - DNA, 201 bp, Homo sapiens
ccgcaaataccactgaagaggacacactctgcacccccccaccccacgaccttggcccgagcccctccgtgaggaacacaatctcaatcgttgctgaatcmtttcatatcctaataggaattaacctccaaataaaacatgactggtacgtgtgctgattgcctgcctgtctgccgtagccattatcccatgttccagggg

SEQ ID NO: 257812 - DNA, 201 bp, Homo sapiens
cgcaaataccactgaagaggacacactctgcacccccccaccccacgaccttggcccgagcccctccgtgaggaacacaatctcaatcgttgctgaatccyttcatatcctaataggaattaacctccaaataaaacatgactggtacgtgtgctgattgcctgcctgtctgccgtagccattatcccatgttccaggggc

SEQ ID NO: 257813 - DNA, 201 bp, Homo sapiens
catttacatagtacctagggccaagtaccaaggatttcacaaaggaggaaactgagaaggagtagtaccttgcccaagggcacacacctacaaaatggcaytaaacccagaatggcactagacccaagggtctgctctgtctctgaactctactgggtctctttatgtgacccagtgattgcagatggaagcttcagtgct

SEQ ID NO: 257814 - DNA, 201 bp, Homo sapiens
tagagaggctgctcagatactgatgttttctgagcaggcagaaaggaggggcacttctgcctggtgttctctgtgctctcctttccccatcctgttgctcttttttttttttttttttgttcttctcctttaggtggtaaataaagatgtcctggacgtttacattgagcatcggctaatgatggagcagcggagtcggga

SEQ ID NO: 257815 - DNA, 201 bp, Homo sapiens
gtggtctctgtcgggaaagatgtagggattggttctccaggatcttgtttgtgactgttttctccccttagtgagctgtattttcaaggccctagcagcarcaagcctcgtgtgatccgggaagtgcgggctgactctgtggggaagttggtaactgtgcgtggaatcgtcactcgtgtctctgaagtcaaacccaagatg

SEQ ID NO: 257816 - DNA, 201 bp, Homo sapiens
tgcggtggcggggtgcggtggcggaggtcccggtgaaatcaggggctaaggggacccaaagaaggcgggggatcataggggtggaaagaaagctgagaacyttgagaccggagtgtgaggggccaacggggaagggcgctagaattttaaactaaagtagggaccggaattcccctggggagatgttggatggccctgtgc

SEQ ID NO: 257817 - DNA, 201 bp, Homo sapiens
ccagagtaagttcagagggttcttgacacttacaagatgtctgccatgaagagaaaatgtgattcaaaggaccgacccaatggggctcttttccttctgasttcctttggtgtttctgttctcacatcctagatccagtctcccactttcatgcctctgatcatgtgcccaagccaggagtgccaaaccaaccgctcagga

SEQ ID NO: 257818 - DNA, 201 bp, Homo sapiens
actggccaccattgttctctgttgatgtcgagcattcctgtttgtatcctgaccttacacacccactcatttccttcaggactcagagaccagcagatgtsatatttgccaccgtccgtgaactggtctcagggggccgaagtgtccggttctctgaggcagagcagcgctgtgtatctcgtggcttcacacccgcccagt

SEQ ID NO: 257819 - DNA, 201 bp, Homo sapiens
atcctgaccttacacacccactcatttccttcaggactcagagaccagcagatgtgatatttgccaccgtccgtgaactggtctcagggggccgaagtgtscggttctctgaggcagagcagcgctgtgtatctcgtggcttcacacccgcccagttccaggcggctctggatgaatatgaggagctcaatgtctggcagg

SEQ ID NO: 257820 - DNA, 201 bp, Homo sapiens
gagtagctgggattacaggcgcacgccaccacgcctggttaattttttgtattttagtagagagcagtttcaccatgttggccaggatgcccacctctgcytcccaaagtgctgggattacaggcatgaaccactgctcctggcccacaaaaatatttttaataaaattaccttcaggttatgtgtatcagttgtatatga

SEQ ID NO: 257821 - DNA, 201 bp, Homo sapiens; identical to SEQ ID NO: 51581

SEQ ID NO: 257822 - DNA, 201 bp, Homo sapiens
gttggcccagcacatcacctatgtgcaccagcacagccggcagcccccctcccagtttgaacctctggacatgaagctcatgaggtaggagagctgggtgmgggtgggcaaacgttggcgtgggccgtgcgagcctcctgaaaaagtgcttattagtcttagggtgtgtgtttttcacaccaccacttcccgctacagaca

SEQ ID NO: 257823 - DNA, 201 bp, Homo sapiens
aagccatcaggctaatggagatgtcaaaggactctcttctaggagacaaggggcagacagctaggtgagtggtttagtgaaggacaaagctgtgtcacttkgtcttctgtggccatgtgtctgaggttggcctcaattctaacactggccaccattgttctctgttgatgtcgagcattcctgtttgtatcctgaccttac

SEQ ID NO: 257824 - DNA, 201 bp, Homo sapiens; identical to SEQ ID NO: 51585

SEQ ID NO: 257825 - DNA, 201 bp, Homo sapiens; identical to SEQ ID NO: 51586

SEQ ID NO: 257826 - DNA, 201 bp, Homo sapiens
tatagcgacaatcatgacagagtaggcatggagtattactcacatctgtgtgcttggtcatagggttcaacttcagaaagagggggctctcgatgatctcrcacacctggaagagagggacaatgcacaggaagtcagtgccccctacctttctccttcccctcattctccattctctgccccagcatgcacaggtgtgag

SEQ ID NO: 257827 - DNA, 201 bp, Homo sapiens
cggtttgacctcctctggctgattcaggaccggcccgaccgagacaatgacctacggtgaatgaagctcaacacccaaagagaggtcccctgtaatgatcygtgtagggaggaggggaggtgaatcagaaaacaaattccacgctcctggaaaccccagagcctcccctttgcagcaggggctggtccatggttctcaggg

SEQ ID NO: 257828 - DNA, 201 bp, Homo sapiens
aaaataaaacaaccttaacttctctacagaggaggatttctacgaaaagctggcagcttcaatcgccccagaaatatacgggcatgaagatgtgaagaagkcactgctgctcctgctagtcgggggtgtggaccagtctcctcgaggcatgaaaatccggggtaagaagaaacaagggagaggctcagggtggatgaagtc

SEQ ID NO: 257829 - DNA, 201 bp, Homo sapiens
aacttctctacagaggaggatttctacgaaaagctggcagcttcaatcgccccagaaatatacgggcatgaagatgtgaagaaggcactgctgctcctgckagtcgggggtgtggaccagtctcctcgaggcatgaaaatccggggtaagaagaaacaagggagaggctcagggtggatgaagtcatttaggaggaaaaaa

SEQ ID NO: 257830 - DNA, 201 bp, Homo sapiens
tggcagagccaaaggagggacacctaagaggacatgggtgcgtagccctaaaaagggtgttccttctaaccttccctctgtccaggttggcccagcacatyacctatgtgcaccagcacagccggcagcccccctcccagtttgaacctctggacatgaagctcatgaggtaggagagctgggtgcgggtgggcaaacgtt

SEQ ID NO: 257831 - DNA, 201 bp, Homo sapiens
ctatacttctgcccggaccctgctggctatcctgcgcctttccactgctctggtaagtgcccaaattgctggagggccatctgttttgacccttaaagggstagctccttaccgtgctctcattgccgcctccccacctcccgctccagccctgccggggctaaagtgctgacagtgcagatagtggtcctctccgtgcta

SEQ ID NO: 257832 - DNA, 201 bp, Homo sapiens; identical to SEQ ID NO: 51578

SEQ ID NO: 257833 - DNA, 201 bp, Homo sapiens
tctgcccggaccctgctggctatcctgcgcctttccactgctctggtaagtgcccaaattgctggagggccatctgttttgacccttaaaggggtagctcyttaccgtgctctcattgccgcctccccacctcccgctccagccctgccggggctaaagtgctgacagtgcagatagtggtcctctccgtgctaccgcact

SEQ ID NO: 257834 - DNA, 201 bp, Homo sapiens
ccatcagcccttcaagtaccctcatcagaaaaagagcccgcgcattctcctgccgatgccttgtcggtcgtagaggacattgaacttgttcacaaactggytcatggtgttgcacgttttggtgatggtgccgaggtaggccatgagccccacgtcgttgcattgctgggagggaacagaaaggaccagttcctcgggatc

SEQ ID NO: 257835 - DNA, 201 bp, Homo sapiens
ctgcgcctttccactgctctggtaagtgcccaaattgctggagggccatctgttttgacccttaaaggggtagctccttaccgtgctctcattgccgcctycccacctcccgctccagccctgccggggctaaagtgctgacagtgcagatagtggtcctctccgtgctaccgcactgtgggtacttgctgctccagcagg

SEQ ID NO: 257836 - DNA, 201 bp, Homo sapiens
ctcaattctaacactggccaccattgttctctgttgatgtcgagcattcctgtttgtatcctgaccttacacacccactcatttccttcaggactcagagrccagcagatgtgatatttgccaccgtccgtgaactggtctcagggggccgaagtgtccggttctctgaggcagagcagcgctgtgtatctcgtggcttca

SEQ ID NO: 257837 - DNA, 201 bp, Homo sapiens; identical to SEQ ID NO: 51583

SEQ ID NO: 257838 - DNA, 201 bp, Homo sapiens
aggggatggagagcgacggaaacactcccagtcactccgcaggccatcacgctggggactactaagggtggagggaaaggagagagggtgagagtccgggmcccacgttcttccctggagatggcagtgggggacggcggagcccgggccacactttcctcccgtaacttatcccagggaaagatgttgctgctccgccct

SEQ ID NO: 257839 - DNA, 201 bp, Homo sapiens
gcccggaccctgctggctatcctgcgcctttccactgctctggtaagtgcccaaattgctggagggccatctgttttgacccttaaaggggtagctccttrccgtgctctcattgccgcctccccacctcccgctccagccctgccggggctaaagtgctgacagtgcagatagtggtcctctccgtgctaccgcactgtg

SEQ ID NO: 257840 - DNA, 201 bp, Homo sapiens
ctcttttttttttttttttttgttcttctcctttaggtggtaaataaagatgtcctggacgtttacattgagcatcggctaatgatggagcagcggagtcrggaccctgggatggtccgaagcccccagaaccagtaccctgctgaactcatgcgcagattgtgagtggtctctgtcgggaaagatgtagggattggttct

SEQ ID NO: 257841 - DNA, 201 bp, Homo sapiens
cccatcggattgtgaagatgaacaagagtgaggatgatgagtctggggctggagagctcaccagggaggagctgaggcaaattgcaggtgaggggcagggkagagagaggaaattccgtttacatcctagctcccttttcccccagaaaataaaacaaccttaacttctctacagaggaggatttctacgaaaagctggca

SEQ ID NO: 257842 - DNA, 201 bp, Homo sapiens
acacagggagggcttagaaatagtgctgggtgttaggggtaggcagaactcaaaattgctctgttgttggccaagcactgggagaagagtcattccagggytgccttcccttcctccaggcaacatcaacatctgtctgatgggggatcctggtgtggccaagtctcagctcctgtcatacattgatcgactggcgcctcg

SEQ ID NO: 257843 - DNA, 201 bp, Homo sapiens; identical to SEQ ID NO: 51587

SEQ ID NO: 257844 - DNA, 201 bp, Homo sapiens; identical to SEQ ID NO: 51588

SEQ ID NO: 257845 - DNA, 201 bp, Homo sapiens; identical to SEQ ID NO: 51589

SEQ ID NO: 257846 - DNA, 201 bp, Homo sapiens
ttaaagccagaacaagggtgtcccctgacctcgttccactgccctcctcccgttcccatctttcccccctaccttccccttaggcacgtctgagaatggtrgatgtggtggagaaagaagatgtgaatgaagccatcaggctaatggagatgtcaaaggactctcttctaggagacaaggggcagacagctaggtgagtgg

SEQ ID NO: 257847 - DNA, 201 bp, Homo sapiens
aaagaacgcgtgtgcgctggccctttaagagcgattctcctccgcccgcgccagctcggaccgcgggaaacccggcgcctgcactaccccgcccggagatwcccttccgacgcccgcaccgcctccccgtcactcattctaggcccgcacggtgattggcttgcggctagcgggaggtgaagaaggccgccttgtccgatt

SEQ ID NO: 257848 - DNA, 201 bp, Homo sapiens
ttcagcttcatccatgtagctacaaaagacatgatttcattcttttttatggctgcatagtattttatgttgtctatatgccaaattttatttatccaatyaaccactgatggacacttaggttgattccatgactttgctattgtgaatattgctgtgatcaacatacaagtgcaggtatttttctgataaactattcct

SEQ ID NO: 257849 - DNA, 201 bp, Homo sapiens
tcccgcctcagcctcctgagtagctgggactacaggtgtctaccaccacacccagctaattttagtagagacggggtttcaccgtgttagccaggatggtytcgatctcctgaccttgtgatccgcctgcctcagcctcccaaagtgctggtattacaggcgtgagccaccgtgcccggccaggtcaatgtttttaaatgc

SEQ ID NO: 257850 - DNA, 201 bp, Homo sapiens
ggggagccagagatagggcccactctacccgtgcttgcccagacaggccatacccctggcagggacgaggaaagggagctgggggtggggcagtcccgggmggcaggccgtgtgcctcgcccgcccaggtggcctgcagttggcgtggtggccgctggtcagcactgttgccccgcgcacgagccggcctgcgggactcgc

SEQ ID NO: 257851 - DNA, 201 bp, Homo sapiens
cccgcctcagcctcctgagtagctgggactacaggtgtctaccaccacacccagctaattttagtagagacggggtttcaccgtgttagccaggatggttycgatctcctgaccttgtgatccgcctgcctcagcctcccaaagtgctggtattacaggcgtgagccaccgtgcccggccaggtcaatgtttttaaatgca

SEQ ID NO: 257852 - DNA, 201 bp, Homo sapiens
attggattacaaaagaaacgaattatattgaaaaataattaccaaaacatttaaatatataaatatgtgatatagtcatatatgtgctttttatatatcaytaaataacaagatctaggggttggtctaataactactataatttaaaatattaatgagtataaatgatatttttagatatctgcaataattacattatga

SEQ ID NO: 257853 - DNA, 201 bp, Homo sapiens
caaaaaattagccgggtgtggtggggggcacctgtagtcccagctactcgagaggctgaggcaggagaatggcatgaacccggaaggcggagcttgcagtsagcggagaccgtgccactgcactccagcctgggcgacagagcgagactccacctcaaaaaacaaaaaaaaaaaaaaaaaaaaaaaaaaagaaagaaagaa

SEQ ID NO: 257854 - DNA, 201 bp, Homo sapiens
acttctaccggggacagagtcacaggtgttgctaataccactgtggtttattgtctagttttgtgattaactgaaatgctagatatggattaaggattaaytaaaatagaaagtctgtgaatttggactttctgaaatctatccacaaccccaggtcaggagctccttctagtctgacccagctttgtgggcattgaagct

SEQ ID NO: 257855 - DNA, 201 bp, Homo sapiens
ggggcagggaggtaccacgtggcatggagaggcagcctggggacccgtgggcatgggtaggggccggcagctagtagcccagattgcaatcaagaagggcmattcccaagatgaagctctgcaaccttcctctttgcctgctgtcctgaagacaccttgccctatcactgtctagctgtggggcctgaggcaaactaagcc

SEQ ID NO: 257856 - DNA, 201 bp, Homo sapiens
ccattaccaagctctctctacctaccaatttctagccaacaatctcctatgaggctgaagacacccagagttcagtcaaaaagtctcgaggtggagactgmagcaaactgctgggcatttatccctgaggacttatgtaaaacccctttgtgatgttaaaaacacttaaattttaccctctaaagcaccgctatccaatag

SEQ ID NO: 257857 - DNA, 201 bp, Homo sapiens
tggggcccgggttgcggggcgtctgttctactcactgtccttgtgacccgggctcctgacccagctgggtcctgcccctgccagcctcactgtgcgcatgsgtctgtgtgtgtctgtgtttccatccatgtagatgctgcccccttggaccctcggccttctcctgctggccacagtcagaggtgaggatgctgtcaccat

SEQ ID NO: 257858 - DNA, 201 bp, Homo sapiens
cactgcagtgagggtgacgttatggcaggtataagaacatcaaagctctggcatgggctaggtgtttgacagacgtgaatgcctatctctggggtgtgcamctgggggctgtttataaattgatttctctcccttgtttgtcttccccagaaaatgtttgaagtggagaaggtgaactgcatctgtgtggactggaggcac

SEQ ID NO: 257859 - DNA, 201 bp, Homo sapiens
ggagtccaaaggataaagcctggttataaaaggccacagccaacctgctgggctgtgagtggaagctctggtgcagcatggtaagtcagggccccatgtgrgcaggggatttggcagggcgggggcagcccaggctacaagagggacgtggcccagaggcggggaagccaccacagtggagcccctgagtccagggtccta

SEQ ID NO: 257860 - DNA, 201 bp, Homo sapiens
tgtagaattttgcagtttgcaaagtcccttctcttacatctcttcatgagggtttcacaacgactctgtaaggtaggggttgtcattattcctgctttccygataaggatacagaagctcagagagggcagacatttgacctggagtagaactagggcaagaatacaggccactgtgtgccccctcctcccacgctctgtt

SEQ ID NO: 257861 - DNA, 201 bp, Homo sapiens
acccctggaggattcagagcttggaacaataatattttcatagatcattttttcaataagatgagttcattaaatgggttgtatttctttggacaggttgragatataaggtatcagtcacactttctggaaaagagaaagtgaatgggtacatcaggattgctttgtatggaagtaatgaaaactcaaaacaatatgaga

SEQ ID NO: 257862 - DNA, 201 bp, Homo sapiens
agaaaggagaggggttagattttccatttaaccatgaggaggtggtgtgtgagctgggtttggaggagaaagatttagataaaggaagaatgtgggaaagrgcacagcaggctggagaatggcgtgagccaaacaaaggagtagatgctagcagctgggtaaggcctggggtcttgcagtctctgagagcagtggccaaat

SEQ ID NO: 257863 - DNA, 201 bp, Homo sapiens
tgagagaatggatggacacatggatgcatgggtgcatgggtagatagatgcaggaatggatggattagtggataggtatgagaatggatggatgggtagaygaaaggatggataagggatggatgagtagatggatggttgcataggtaaatgaaaggtggatggttgggtgggtgatgggtagataggtagatagacata

SEQ ID NO: 257864 - DNA, 201 bp, Homo sapiens
  misc_feature (1)...(201): n = A,T,C or G
gattcagagcttggaacaataatattttcatagatcattttttcaataagatgagttcattaaatgggttgtatttctttggacaggttggagatataagntatcagtcacactttctggaaaagagaaagtgaatgggtacatcaggattgctttgtatggaagtaatgaaaactcaaaacaatatgagattttcaagta

SEQ ID NO: 257865 - DNA, 201 bp, Homo sapiens
agagaaatgaaaaaacacctttccggactttttctaaagaaaaggatgataaataaaatgcagtaagagagtggccagaggccatggccaccttgccatcrccgcttttaccttgtgccctgcatagcaaagaggaagaatcaaaaagcctggttgatggggaaggcctgcccggtatgtcctcacagggatcctcacagg

SEQ ID NO: 257866 - DNA, 201 bp, Homo sapiens
tttccaaagtggctgccacattttacatttccagagcagtgtatgaggggccctctctgattttaatttgacagagaaagtcccctctgtgctggctgggrcactcttggtccctggaactcattgctagacccaaagaggcagtcccatcagagtcccctcagttttgcagtttgcaaagcttcagtttgacatggctga

SEQ ID NO: 257867 - DNA, 201 bp, Homo sapiens
agcaaaactgcagataatggggggctactatgctcagttgtaaggcacaacaaggactgggacccaggtcttctgacagcccctccagtgttctttccactgtgcccatcaactcagccagctggatgtgaaactgagaagtccatatggtctggtagtgcaatgcaatgtgaaaatgtctggatttctcagtatttaagt

SEQ ID NO: 257868 - DNA, 201 bp, Homo sapiens
ttcagaggatccctcaaaccagatgcaagtcacacgtgtgctattgatgtggattttaatgttggaaaaatacagaaagttaaattcctctggaacaaacrtgggataaatctatctgagcccaaactgggggcttcccaaatcacagtgcaaagtggtgaagatgggactgagtatgtattttttattgcatctaagttt

SEQ ID NO: 257869 - DNA, 201 bp, Homo sapiens
gatggacacttaggttgattccatgactttgctattgtgaatattgctgtgatcaacatacaagtgcaggtatttttctgataaactattccttttcattygggtagatacccagtagtgcaattgctgggtcaaaatgaagttctatttttctatcaaggtatttgagaaatcttcatactgttttccataggggttgag

SEQ ID NO: 257870 - DNA, 201 bp, Homo sapiens
tgtcttcttgctgtatactcccacgtggtggaaagaggaaaagagcactctctgtggtctcttttatgaggttactgatcccattcatgtgggctcttacycacatgaattcagtccattgtaccatgtatcagtcaaaatacacatgtgcagtatcagctgcccttcattcatccaagagcacataccttgctgtgttca

SEQ ID NO: 257871 - DNA, 201 bp, Homo sapiens
aatacttttatgttatggcagcccctggatgtgtatgaagtcatccaaggtgtttgcagaaaaccaacaacagcaactattgtttagagaagtgatagatygcaatcatgttatgtattcatatatccagctgatataacattttatgtctatattttcagaggatccctcaaaccagatgcaagtcacacgtgtgctatt

SEQ ID NO: 257872 - DNA, 201 bp, Homo sapiens
gcataggtaaatgaaaggtggatggttgggtgggtgatgggtagataggtagatagacataggaaggaagctgaattgattgactaacagacaaattatgkttttttttttccactagagtaagtgtttcccttgtccagctgaaggatgccccaaaatggggcactatgctgaccaatttaaggggaaaacaagtgctgt

SEQ ID NO: 257873 - DNA, 201 bp, Homo sapiens
ctttccacccattcagagcccacatggggagaggagtgctctttgagcaggttttgttagtaagaattacttggactctgcctggtaaagcagaacttttyggtcaaggggagccgaatccagggggttgcccaaatgctgtttactcacctgaagtcacatttccacaagcaaaagagcctcatgctgacaatcttttcc

SEQ ID NO: 257874 - DNA, 201 bp, Homo sapiens
tcaagcttctccagttatccaaataatgccctctagagctgtatctgtttgcctgccttctttctttccttcccttcttcttctttttttttttttttttttcgcattgcaattattttgttgtctctttagtcacctttagtcaagaacagcttcccattttttcttggtctttgaagacttgccagttatgaggctttc

SEQ ID NO: 257875 - DNA, 201 bp, Homo sapiens
ggctgggagacaagtggagggtgtggtgttcccacctgatcccaatgcccttgtccttgcctgcagaccaaagtcatgtggatgtgccctctcccaagaamgcccagtcctgccaggcaagcctgcctttctgccatcaagcccacgtgtcctcttctcagagtcaccgtttctgtctctccagtttgttcccccgacctg

SEQ ID NO: 257876 - DNA, 201 bp, Homo sapiens
catttagaaaaatttccaatttgcaaagaaggtgaaagaagaataatgatgaatactgtacacctgtcacttagatgcaccagttgctaatattttatatrtgtgtgtgtatgtatactttttctaaattatgtgaaagtaaattaaagacattatgacatgttacttataaaaactttagcctccatctcttaaaaacaa

SEQ ID NO: 257877 - DNA, 201 bp, Homo sapiens
aaaagaggtctgctacggacaacttggctgcttttctgatgaaaaaccatgggcaggaacccttcagcgacctgtaaaattacttccctggtcccccgagsacattgacacccgctttcttctgtacacaaatgaaaatccaaacaacttccaagtaagagcaggcatgtaagcgctgcatggtgggtgtatttgggccgc

SEQ ID NO: 257878 - DNA, 201 bp, Homo sapiens
gccgcagcccccaggtgattcttatcatcccagaggtttggaaaatgatggcaaagataaagaccagcactggccttagccaaacctgggctctgtcctgyagagttttcctgtatggatatgacgttgcttctttccagaagttcacacatgtcctgtttgtggctcaccctaggaaaagaggtctgctacggacaactt

SEQ ID NO: 257879 - DNA, 201 bp, Homo sapiens
tctcactctctgaaattgtttgattttttaggcggtgcttcagtgagtaatagcaggtccttctcagtgtattacaactaaagagattcatttaatgttcwcttattatttgatgacataaattcattcattatttgatgacttaaactttaattacttggttaagatgtttaaactcacattttgtcctttcaaaactaa

SEQ ID NO: 257880 - DNA, 201 bp, Homo sapiens
aggcaagtgacaaaacaacatgcaacacacccattgtcttcattggttcagactgctgtaatgtagtaccatagactgggtggcttataaatagtagaaawgtatttctcacagttctggaggatggaaatctgagaccagggtgccagcatgatcaggttctgctgcacattgctgtcttcttgctgtatactcccacgt

SEQ ID NO: 257881 - DNA, 201 bp, Homo sapiens
cctgcccggtatgtcctcacagggatcctcacagggataggatgcggtctgcagcagcattggatgggccggcatggtaactgtttttaagatggggatgygctgccttcactcacgcatgcgaaggttttcaggtagaagtggagatcctggcttcttatgaaaaaatcagaggaccaggcgatttggggctttgaacat

SEQ ID NO: 257882 - DNA, 201 bp, Homo sapiens
aaacacaaaaattagttgaatgtgatggcatgcgcctgtagtcctagctactcaggaggctaagatatgagagtcacttgaacccaggaggtggaggttgyggtgagccgagatagcaccactgcaccagcctgggtgacggagtgagactgtctcgaaatatatatataaaaaaagttacatagctcattcaaggccgct

SEQ ID NO: 257883 - DNA, 201 bp, Homo sapiens
ggcagatcacttgaggtcaggagttcaaggacagcctggccaacatagtgaaaccccatctctactaaaaacacaaaaattagttgaatgtgatggcatgygcctgtagtcctagctactcaggaggctaagatatgagagtcacttgaacccaggaggtggaggttgcggtgagccgagatagcaccactgcaccagcct

SEQ ID NO: 257884 - DNA, 201 bp, Homo sapiens
tttatggagtgttgtgaaaatgtgccaggcattttcacagcaatgcaatgagatagttactctgattagttccagtttgcagatccaaaaactgaggatcmgaaaaattacataactcaattgggcgtggtggctcatgcctataatcccagcactttgggaggctgaggtaggcagatcacttgaggtcaggagttcaag

SEQ ID NO: 257885 - DNA, 201 bp, Homo sapiens
tttggacaggttggagatataaggtatcagtcacactttctggaaaagagaaagtgaatgggtacatcaggattgctttgtatggaagtaatgaaaactcraaacaatatgagattttcaagtaagttcaatggtaatgtgaaatgatcatactttccataatagattattcaaaattgattgagtataaagtgctttata

SEQ ID NO: 257886 - DNA, 201 bp, Homo sapiens
ctttgtatggaagtaatgaaaactcaaaacaatatgagattttcaagtaagttcaatggtaatgtgaaatgatcatactttccataatagattattcaaamttgattgagtataaagtgctttataaatctaggcatctattatacagaaccactgaatcctagaatgtcagagctggaagaaagtctcaatgtctagttc

SEQ ID NO: 257887 - DNA, 201 bp, Homo sapiens
taaaatgagtcatgtgctaactccttttggaatgtcagtcacctgactagattgttttttctttttttgttattttattttattttagattcagggggtgmatgtgcagattcattacatgggtatattgtgtaatggtgaggtttggacttctagtgaacctattacccaaacggtgaacattgaacccaatggataaat

SEQ ID NO: 257888 - DNA, 201 bp, Homo sapiens
tggaatgtcagtcacctgactagattgttttttctttttttgttattttattttattttagattcagggggtgcatgtgcagattcattacatgggtataytgtgtaatggtgaggtttggacttctagtgaacctattacccaaacggtgaacattgaacccaatggataaattttatcccttatccccatcccaacctc

SEQ ID NO: 257889 - DNA, 201 bp, Homo sapiens
tctggcttctgctgggcatgtgaggtgcttggtaaatatgtgttagatgaatgcataacctgtacaataaagttaggttctgtttttgcactaacttttayataaaaatgtttgtgttgaattaaatgtccttgacaaattcctgtaatacacatgagatgctaacaaatggcacctgctgaaccacatgcatctttaaac

SEQ ID NO: 257890 - DNA, 201 bp, Homo sapiens
tgtgttgaattaaatgtccttgacaaattcctgtaatacacatgagatgctaacaaatggcacctgctgaaccacatgcatctttaaacataagacattgycccaaatagtcctgtaacaaacttagagcattcatatgccaccccaaatattcgacttagctgtaggtaaaaactaaaacagtggaaatctggagtccag

SEQ ID NO: 257891 - DNA, 201 bp, Homo sapiens
tttaaatgcagaaataaaatatattggattacaaaagaaacgaattatattgaaaaataattaccaaaacatttaaatatataaatatgtgatatagtcayatatgtgctttttatatatcattaaataacaagatctaggggttggtctaataactactataatttaaaatattaatgagtataaatgatatttttagat

SEQ ID NO: 257892 - DNA, 201 bp, Homo sapiens
taatacacatgagatgctaacaaatggcacctgctgaaccacatgcatctttaaacataagacattgccccaaatagtcctgtaacaaacttagagcattmatatgccaccccaaatattcgacttagctgtaggtaaaaactaaaacagtggaaatctggagtccagtatttttaaaaggtgtgttctgcacaaatactt

SEQ ID NO: 257893 - DNA, 201 bp, Homo sapiens
tatatatacatatatacacatacatatatatacatatatgtatgtgtatacatatgtatacatatatgtatgtgtatacatatatatacatatatgtatgdgtatacatatatatacatatatgtatgtgtatatatacatatatacatatatgtatgtgtatatatacatatatacatatatgtatgtgtatatatacat

SEQ ID NO: 257894 - DNA, 201 bp, Homo sapiens
ctgttccccttgcatcaaagtcacctgcaagggaaggaagaggccagaagtggccagcttctcatgcttggtgcttgctccaacctgacttagttagtttstcacggttaataaccctccaggatcttttttatttttaagcaattttattgaaccataattcccataaaacacaattaacccatttaaagtgtgcaattc

SEQ ID NO: 257895 - DNA, 201 bp, Homo sapiens
gtgtggactggaggcacgggtcccgggcaatgtacacccaagccgtgcaaaacattcgggttgttggggcggagacagctttcttaatacaagcactgtcvgtaaaaccctgcctgggccctgtcctgtgggtaggggtcagagaggggcagggaggtaccacgtggcatggagaggcagcctggggacccgtgggcatgg

SEQ ID NO: 257896 - DNA, 201 bp, Homo sapiens
tttgaaaaaccaaacgttgttttccttaggcaaaattcaacttggcaggggcaaggcaatgattgtaggcacagattcaagaaacgggcaaatatgaatgrctattttatctcaaacaataaggaaaacacttgggaagcacatagtggaaatctctgagttaattccagttgatgtgcagttattaatgtaaacaggttt

SEQ ID NO: 257897 - DNA, 201 bp, Homo sapiens
atttttgaatatttttcttacttcttcagtcaaagctttggttacactttgttttgttggcaactttatcccattctttaattcttctaaaatcagtgttyttttttcaatattttcttatatagccactcatgaaacttgccaataaagggtatgtttttgatgatgatgatgatgatgttatcacttacttagtgttta

SEQ ID NO: 257898 - DNA, 201 bp, Homo sapiens
agtgagggtgacgttatggcaggtataagaacatcaaagctctggcatgggctaggtgtttgacagacgtgaatgcctatctctggggtgtgcacctgggkgctgtttataaattgatttctctcccttgtttgtcttccccagaaaatgtttgaagtggagaaggtgaactgcatctgtgtggactggaggcacgggtcc

SEQ ID NO: 257899 - DNA, 201 bp, Homo sapiens
agacacaaataacttaattttgtgcagccaaatcagtttgtaacttcaccaaacagttcacatcaacatttaatgagcgtccctttgcccaaggcactgggtgaaggatgagggggtattggtttgtgtttatgtagaattttgcagtttgcaaagtcccttctcttacatctcttcatgagggtttcacaacgactctgt

SEQ ID NO: 257900 - DNA, 201 bp, Homo sapiens
ggcctgcagttggcgtggtggccgctggtcagcactgttgccccgcgcacgagccggcctgcgggactcgcaggctgcaaataggaagcggggtcgccctrccccaggcggcgtgctcgagcccgggtcctgcccccatccctggcagggcccggcgccccgctctcagaccagcgggtccccacgcggtgctgtgggacc

SEQ ID NO: 257901 - DNA, 201 bp, Homo sapiens
caggagaatggcatgaacccggaaggcggagcttgcagtgagcggagaccgtgccactgcactccagcctgggcgacagagcgagactccacctcaaaaamcaaaaaaaaaaaaaaaaaaaaaaaaaaagaaagaaagaaaagaaaaggagaaagatttaactagcacattaaatccatgacttaagagctattattttca

SEQ ID NO: 257902 - DNA, 201 bp, Homo sapiens
aggtggcctgcagttggcgtggtggccgctggtcagcactgttgccccgcgcacgagccggcctgcgggactcgcaggctgcaaataggaagcggggtcgycctgccccaggcggcgtgctcgagcccgggtcctgcccccatccctggcagggcccggcgccccgctctcagaccagcgggtccccacgcggtgctgtgg

SEQ ID NO: 257903 - DNA, 201 bp, Homo sapiens
ctcgcccgcccaggtggcctgcagttggcgtggtggccgctggtcagcactgttgccccgcgcacgagccggcctgcgggactcgcaggctgcaaataggragcggggtcgccctgccccaggcggcgtgctcgagcccgggtcctgcccccatccctggcagggcccggcgccccgctctcagaccagcgggtccccacg

SEQ ID NO: 257904 - DNA, 201 bp, Homo sapiens
aggccatacccctggcagggacgaggaaagggagctgggggtggggcagtcccgggcggcaggccgtgtgcctcgcccgcccaggtggcctgcagttggcrtggtggccgctggtcagcactgttgccccgcgcacgagccggcctgcgggactcgcaggctgcaaataggaagcggggtcgccctgccccaggcggcgtg

SEQ ID NO: 257905 - DNA, 201 bp, Homo sapiens
tctctggccacctggaagaagcctaaaggccccttcttaggtcaattttttgttgttgttgttttttgttggtttgtttgttttttttgagacagagtctygctctgtcacccaggctggagtgcagtggcgcgatctcggctcactgcaagctctgccttctgggttcatgccattctcccgcctcagcctcctgagtag

SEQ ID NO: 257906 - DNA, 201 bp, Homo sapiens
ggcccactctacccgtgcttgcccagacaggccatacccctggcagggacgaggaaagggagctgggggtggggcagtcccgggcggcaggccgtgtgccwcgcccgcccaggtggcctgcagttggcgtggtggccgctggtcagcactgttgccccgcgcacgagccggcctgcgggactcgcaggctgcaaataggaa

SEQ ID NO: 257907 - DNA, 201 bp, Homo sapiens
aaggcatagaatccaaggcgtagctctcaggatcataaacacctgagtatctgatgaaatctactgatgcctaacccagaaacttacacattcacacacamtggtgcagagaacttcaggggctaccccagcgtaaatgccttgttccctgggaggaagggactatgagcagcatttatggagaagcccaggcctggtgta

SEQ ID NO: 257908 - DNA, 201 bp, Homo sapiens
aggacaaaaagaaaaagggaaagaaggggtgtacggaggctacccagatcctccacggagccaggcactgggtatttctgaatgttcatccacaggcaatsaccccattcccagcctttctgtcccagactctctctcccaggcagaccaagaactgcagacccaatccccagaaccatagctgctggggtaggaggaatc

SEQ ID NO: 257909 - DNA, 201 bp, Homo sapiens
ctttctgcagagctagaggcagtggtagctgtgataaagggagaatttgccaaaaagggtcttgctgtggccacaccctaactttggcaccagtcacctcrccgctcatctctgcttcaaatattttaggtttcggaatgagccaaaaggtgggccatctggatttctttccaaatggaggaaaggaaatgcccggatgta

SEQ ID NO: 257910 - DNA, 201 bp, Homo sapiens
gcccttgtccttgcctgcagaccaaagtcatgtggatgtgccctctcccaagaaagcccagtcctgccaggcaagcctgcctttctgccatcaagcccacrtgtcctcttctcagagtcaccgtttctgtctctccagtttgttcccccgacctggttctgtccagaggagatacagatattcaagttctacttatcctaa

SEQ ID NO: 257911 - DNA, 201 bp, Homo sapiens
agatacagatattcaagttctacttatcctaaaacacaaatcacctccgtttcttttggagccccctgagccccagcctgctgacttcccatctgcctacrccttcacaggcgtgcttcctccgggagtctttccctctccgtgggggctgcctcacctcctctcctgccagaatacctcactgcccaatttggtccccca

SEQ ID NO: 257912 - DNA, 201 bp, Homo sapiens
cctacgatgagtttcaggaggtaggttaccccaggaggctgaggaagatgttgctggccctgtttggggtgtttttgtgttcctgtggcttagaacagaasaaagagatgtaactctgcaactaatgcagggaggtaatggaaattctgcacctcacaaagccatcttcccccaggcagcagggtgggctggagggggaag

SEQ ID NO: 257913 - DNA, 201 bp, Homo sapiens
gcctacgccttcacaggcgtgcttcctccgggagtctttccctctccgtgggggctgcctcacctcctctcctgccagaatacctcactgcccaatttggycccccaagtcctgctgtaggagacatggtctccttgggtccctgtgggggctttcttctgccttgtgactcttcccccttgtcttctcaaccccgccagc

SEQ ID NO: 257914 - DNA, 201 bp, Homo sapiens
agcccactcttggcctctccttccatcctggccatgaattaaggccaggctcctgacggcagagaccggggtgggtgcgactgctcctccggccatacaayccctcttcatctcctttgctgacctgcagcctcctcctgccccaaatgtggacattccccaaggctcacgccaggctctctcctcatctctctcctccta

SEQ ID NO: 257915 - DNA, 201 bp, Homo sapiens
taacatggtatctggcacatagtaaacaaatataaactattatgcatttttttaatgattcaccaatatttggcatcatcagtacaggagttgaggaagcrtaagagaaaggacccattataatcctttgggttggaattatgtcacccgtagtgaccatatcctgtgatcatgtttatgtcatggacacagaaagtactc

SEQ ID NO: 257916 - DNA, 201 bp, Homo sapiens
agtctccacataacaatataatgtagacatcaaaattttaaaatgagtaaagtaatacaaattgcaccagtcttgataggtctactggtgcataatggtascagggcatatcaatatggtccaagactctccgagacacacagatgcacatccaaatgtatgtgtctcactcacccaaagctcagcctccccctcatctca

SEQ ID NO: 257917 - DNA, 201 bp, Homo sapiens
atgctgacaatcttttcctccacaggtataatttttgtagcagcgacactgtggaagaaaacgtcttgcaatctctttacccttgttaaaaacgtggtgcrgctattgcggtaataaaatctttaatgcactcggtttgagggtgagctgttagtttgacattctctactttctgggttcgcatttcagaaatgatttggg

SEQ ID NO: 257918 - DNA, 201 bp, Homo sapiens
tgcccccatccctggcagggcccggcgccccgctctcagaccagcgggtccccacgcggtgctgtgggacctgacacgctatccctccgcagacgcagctrgggtacagccttgaggacgtgcatgtcatcggccacagcctgggcgcgcacacggccgcggaggcgggcaggaggctggggggccgcgtgggcaggatca

SEQ ID NO: 257919 - DNA, 201 bp, Homo sapiens
gaggctggggggccgcgtgggcaggatcacaggtaggggtcgcggggccccgggccggagtcccaggcccccgggtgcgcacctcggaagcctcggccagygcctttccgacggcgaagggcgcccctgatggtcctcctggggacccgattttttgtgatgaccggccttaaatttaaaaataattttccataatgtgta

SEQ ID NO: 257920 - DNA, 201 bp, Homo sapiens
ccagtagtgcaattgctgggtcaaaatgaagttctatttttctatcaaggtatttgagaaatcttcatactgttttccataggggttgagctaactgacawccctaccaacagtgtataagcattcccttttctccatatccttgccaacatctgttattttttttttgactttttaataatagtcattctgactggtatg

SEQ ID NO: 257921 - DNA, 201 bp, Homo sapiens
aatagcacataatggctggaaaggagagcagttattttctaagagagtttcaaatttaaaaatttatatcagcactttacaaaacacttttcacatacagkatttcctgtaatcctcaaaatatttatcataaaagataagagtttggcagaatctataaaatcttatatgcacattcctttaacccagtaacttcacttc

SEQ ID NO: 257922 - DNA, 201 bp, Homo sapiens
cttgcaatcacctaagaagcttcgagtattactcaagcagcgtcctcaaccctgatggcttcctgggctatccctgtgcctcctacgatgagtttcaggasgtaggttaccccaggaggctgaggaagatgttgctggccctgtttggggtgtttttgtgttcctgtggcttagaacagaacaaagagatgtaactctgca

SEQ ID NO: 257923 - DNA, 201 bp, Homo sapiens
acagtcacctagccctgagtaggtccctgctcagcaaatgccccaagatattcaggagccgacacccatcggtgaaatgtgcaggtgattcttccttagtsagaatgagttgttcacacttaaaagtgaaaggcctcctttgagctcccgggacctttgtttttttcaggaattggtggctttgtgtcttgcaatcaccta

SEQ ID NO: 257924 - DNA, 201 bp, Homo sapiens
aaacctttttcctgaacacaggagagagtggtaactttactagtaagtttccattttactcacttcaaattcttgcgaataattttcaaaagtgtgccaaycttattagtcagtatccttggtaacaatggatagaaacttaactacaacaagcttaagttgtaatgaaaggacagtgaaatggaatttgtgttgggtctc

SEQ ID NO: 257925 - DNA, 201 bp, Homo sapiens
ctctcagacttagatgtggttacttggatcatggattacatgtattgagtctctactacacgtagtgtgatacacaagtcattcctgttcttaagaaactyactttttcaaagagcaaaagagaaaatatgaaacggcagagaatcaccctttcaaaaaaatgtgcataaaaggatgacatgaagacatgtgaattggtgt

SEQ ID NO: 257926 - DNA, 201 bp, Homo sapiens
cttactttttcaaagagcaaaagagaaaatatgaaacggcagagaatcaccctttcaaaaaaatgtgcataaaaggatgacatgaagacatgtgaattggygtgggcacggcctatgctgtgtgtaatagagatgtcaagacaaagtagcaactctgtgctacagagtttgtaggcactcgataaatactcactatttgat

SEQ ID NO: 257927 - DNA, 201 bp, Homo sapiens
ggactgagtatgtattttttattgcatctaagtttggttatttatatttacatattgatctatctgtctaggcattcattcatccaattgcccacctactyatctatgtacccatctactcatccattcatctacccatctatccatttctctatccttttaaccacttagccacttacccattcacttattcctctaccc

SEQ ID NO: 257928 - DNA, 201 bp, Homo sapiens
acttccaagtaagagcaggcatgtaagcgctgcatggtgggtgtatttgggccgccacagtggagtctttgcatggctgtctagggcataagtcactgccytggaattttccagaaactccaaggcatagaatccaaggcgtagctctcaggatcataaacacctgagtatctgatgaaatctactgatgcctaacccaga

SEQ ID NO: 257929 - DNA, 201 bp, Homo sapiens
acattgctgagaatccagcagctcacagctctggtccctgacagagtttagggagccaggtgtctgtcaataggtttctgaggtcacccactgtgggactstatctgacagaccagccttcttagtgcccccagcccagagtcggcttggacatggttacggtgcgtctcatctgtaggggttggtggcatcttctggcat

SEQ ID NO: 257930 - DNA, 201 bp, Homo sapiens
ttcttgtttttgctgcatttgctttgaggtcttagtcataacttctttctttctttctttctttcttttttttttttgagatggagtttcactcttgttgyccaggctggagtgcaatggcaagatctcggctcactgcaacttccgcctcctgggtacaagcaattctcctgcctcagcctcccacgtagctgggattac

SEQ ID NO: 257931 - DNA, 201 bp, Homo sapiens
tgctgagaatccagcagctcacagctctggtccctgacagagtttagggagccaggtgtctgtcaataggtttctgaggtcacccactgtgggactctatstgacagaccagccttcttagtgcccccagcccagagtcggcttggacatggttacggtgcgtctcatctgtaggggttggtggcatcttctggcatctca

SEQ ID NO: 257932 - DNA, 201 bp, Homo sapiens
tagtgatgttgagaatttttttatatgtttgcttgatgtttgtatgtcttttgagaagttctttgcccactttttaatggggttgttagtttttttcttgytgatttaagttccttatagattctagatattaatcttttgtcagatgcatagtttgtaatattttctcccactctgtaggttgtctgtatactccgttga

SEQ ID NO: 257933 - DNA, 201 bp, Homo sapiens
cttttttatggctgcatagtattttatgttgtctatatgccaaattttatttatccaatcaaccactgatggacacttaggttgattccatgactttgctmttgtgaatattgctgtgatcaacatacaagtgcaggtatttttctgataaactattccttttcatttgggtagatacccagtagtgcaattgctgggtca

SEQ ID NO: 257934 - DNA, 201 bp, Homo sapiens
gagtgagaccttgtctggaaaaaagagaaagtgttaaggggagggacaaataggtttcaacaggcctcaaggacaagcaaaggaggacccaaaccacccccatcccctgggcagcagctgtgccagctggcagggctcactcaggccctgaccctcctacctgccaaccatgtggtcagcaaatgagttttcccacaggtg

SEQ ID NO: 257935 - DNA, 201 bp, Homo sapiens; identical to SEQ ID NO: 51609

SEQ ID NO: 257936 - DNA, 201 bp, Homo sapiens; identical to SEQ ID NO: 51610

SEQ ID NO: 257937 - DNA, 201 bp, Homo sapiens
actaatgacagcatctgggacacacggacgtatcaagttcatggtggacattcctattataaaaaatactcaggtcttgagaattcctgtgctgaaggatyccaaaatgctttctaaaaagcattagtcatgcctcaaaactgccctttgaggtaggtcagtattattatccccattttaacagaaggaaaactgaggcac

SEQ ID NO: 257938 - DNA, 201 bp, Homo sapiens
catcttgggtttgacttcagagacacgagtgacgattccacgcacagttaccaacttccccacagagtcagcccgcacttcccggatcacacgaggcttgytgctgctagggccttgaaaatacagctcactaaggggagaaaacagtcacaaacaagatcctggagaaccaatccctacatctttcccgacagagaccac

SEQ ID NO: 257939 - DNA, 201 bp, Homo sapiens
gaacttacaaaccaaacttttattctgagaaactggctgtacaatatctaaaaagaaagtgacatgaaggaagcaatctacaacttccttccgcttagcgwgcatgcatgtgtgtacgtgcacgtgtgtacgtgtctgcatgtgtgggaatccgggggctggcaggtggagcatcacggagcaggctgaggggagccggag

SEQ ID NO: 257940 - DNA, 201 bp, Homo sapiens
gacttcatccaccctgagcctctcccttgtttcttcttaccccggattttcatgcctcgaggagactggtccacacccccgactagcaggagcagcagtgmcttcttcacatcttcatgcccgtatatttctggggcgattgaagctgccagcttttcgtagaaatcctcctctgtagagaagttaaggttgttttatttt

SEQ ID NO: 257941 - DNA, 201 bp, Homo sapiens
ttttttcctcctaaatgacttcatccaccctgagcctctcccttgtttcttcttaccccggattttcatgcctcgaggagactggtccacacccccgactmgcaggagcagcagtgccttcttcacatcttcatgcccgtatatttctggggcgattgaagctgccagcttttcgtagaaatcctcctctgtagagaagtt

SEQ ID NO: 257942 - DNA, 201 bp, Homo sapiens
cgaggggaccatctcccgcaatgtggctctggtatacgaactcctggatgaagtgctggtgagaatcaacaatccccttctgtggcccctacccaattccyctgaagatacatctgctcttctactgtgggatgccgtggttaggaggccaagtctacctttttttttttttttttttttgcttttagagacagggtcttg

SEQ ID NO: 257943 - DNA, 201 bp, Homo sapiens
tgttgctcagcacagggccgtccagcacactgcggatccgctccccttcctgctgcagccggggcagaatcagagtcttgataacctgttagaagggaaarggacaagcaaaagccggagggtcaccagggtctcccagatgggggtacagtgccctctataacctcatgactgtgtcccctcccccatttcttcctccca

SEQ ID NO: 257944 - DNA, 201 bp, Homo sapiens
actggctgtacaatatctaaaaagaaagtgacatgaaggaagcaatctacaacttccttccgcttagcgtgcatgcatgtgtgtacgtgcacgtgtgtacrtgtctgcatgtgtgggaatccgggggctggcaggtggagcatcacggagcaggctgaggggagccggagttgggctgggagccattggcttttggagtcc

SEQ ID NO: 257945 - DNA, 201 bp, Homo sapiens
gggagagcagtgcagcaggtagctgtatgttctgctccaggctgcggcgagggttgtagcgcccgtaggcagggttggcggcagccaggatggagcagcgrgcattgagtgtggtgagaatgccggccttggcaatggagatggtctgctgctccatgacctcgtggatggctgtgcggtcggcctcagccatcttgtcga

SEQ ID NO: 257946 - DNA, 201 bp, Homo sapiens
ccgaggtgggcagatcacctgatgccaggagtttcagagcagcctggccaacatggtgaaaacctgtctctactaaaaatgcaaaaaaaaaaaaaaaaaaagaaaaagatcttggcacatctcccacccccccagatgtgggtggaggtgggagatgatcccttccatcacccatgtcctcaccctagagctgtagctttg

SEQ ID NO: 257947 - DNA, 201 bp, Homo sapiens
ggaaaaaagccaggtagagggagggctggtgacactcttgagaagaaccttggggatggggtaaaaaaggacattccttatcatctcagtgcccctgttgraggccaaattatgctgaactattagtgtgtgtacagaacactgtgggctttctcataagaaaagatgggcacggggccaggtgcagcatcttaggcctgt

SEQ ID NO: 257948 - DNA, 201 bp, Homo sapiens
ctgtagccaagccctcaatgtcaggctgcacctccccctgcctcgaggggtggtcaggtgagtgtgtgcacccaccacggggagattcctggggagagagygagctcagcatgacgggtctgcctcaagaaggtgccaagcccagcaccttccctttccaaactccagcctgtctcaggagctgagcagcccagagcagaa

SEQ ID NO: 257949 - DNA, 201 bp, Homo sapiens
ttggcacatctcccacccccccagatgtgggtggaggtgggagatgatcccttccatcacccatgtcctcaccctagagctgtagctttgactgtcctgtyctttctccctgtctgtccatttcagaacataggctattctgcttccaaccacccaaattctctctctttctcagagccaaaagaatgaagtttttttgga

SEQ ID NO: 257950 - DNA, 201 bp, Homo sapiens
agctcactgcagcctggaactcctgggctcaagccgtcctcctgccccagcctcccctgtgcctagctaattgtttattttttgtagagactagagtctcrctgtgttgcccaggctggtcttgaactcatggcctcaagccattctcctacgtctcggccttccaaagcgctgagagtacaggagtgagtcaccatgcct

SEQ ID NO: 257951 - DNA, 201 bp, Homo sapiens
tagcactttgggaggctgaggcgggaggatcacttgagcccaggagttccagaccagcctgggcaacatagtgagaccccatctctctgaaaaaaaaaaaaggaaaaagctttggctaatggagttgggctgggcttcagcccttttccctcttgggagtacagcccacacccacacagccccacatggaggtccctggtg

SEQ ID NO: 257952 - DNA, 201 bp, Homo sapiens
gatgtggccgagctcttctaccggaagctgacgggactgccaggagacgagtccccggttgtcatggtaaccagtggcgggaggcgggtgaggagcggggycccgtcgggccgggtgggcgccagctccctcccaggactggttcattggtagattccacttggggggtgcattccgccaaataaagctaacgtgaggccc

SEQ ID NO: 257953 - DNA, 201 bp, Homo sapiens
ccatgatttcccaattcttcattctgtcctccaagggggacccgctcatctacaaagactgtatcctagacccttggggctgggaaggggcggaggggccrggcgggaggggcgcccagggccagcctgtgtcgcaggatccttcactgagtccttccacccgccagtccgcggggacagtggcggccgggatgtggccga

SEQ ID NO: 257954 - DNA, 201 bp, Homo sapiens
caacacaccaggcccagctccctgcgtgactccatcctcagcaactcggggtagttagtgtaattaaccccctttccacattgggaagctgggcccaggcrtatgtcatgtatctcccaaaggcactgctgttgtgactagtaagaggcatcgggatccgagctcaggtctcctgggttctgatcactccacctccctttt

SEQ ID NO: 257955 - DNA, 201 bp, Homo sapiens
cagagacccagagggtggggcatggaggttacctgggggcgggttctcggggatagctggctggcagccctcgatgctcagccaatgagctgcaaggaagrcaggtgtcaaggtgaattgccacgcatggacattggggagttgccccatgctatggaagcgtgtttccactcctgctccccttgcaactcaccagggatc

SEQ ID NO: 257956 - DNA, 201 bp, Homo sapiens
agaaccaatccctacatctttcccgacagagaccactcacaatctgcgcatgagttcagcagggtactggttctgggggcttcggaccatcccagggtccygactccgctgctccatcattagccgatgctcaatgtaaacgtccaggacatctttatttaccacctaaaggagaagaacaaaaaaaaaaaaaaaaaagag

SEQ ID NO: 257957 - DNA, 201 bp, Homo sapiens
ccgtctcctctgtagccaagccctcaatgtcaggctgcacctccccctgcctcgaggggtggtcaggtgagtgtgtgcacccaccacggggagattcctgrggagagagtgagctcagcatgacgggtctgcctcaagaaggtgccaagcccagcaccttccctttccaaactccagcctgtctcaggagctgagcagccc

SEQ ID NO: 257958 - DNA, 201 bp, Homo sapiens
cgtaggcagggttggcggcagccaggatggagcagcgggcattgagtgtggtgagaatgccggccttggcaatggagatggtctgctgctccatgacctcrtggatggctgtgcggtcggcctcagccatcttgtcgaactcatcaatgcagcacacaccctggtcagccagcaccagggccccaccctctaaggtcagtt

SEQ ID NO: 257959 - DNA, 201 bp, Homo sapiens
gtatgttctgctccaggctgcggcgagggttgtagcgcccgtaggcagggttggcggcagccaggatggagcagcgggcattgagtgtggtgagaatgccrgccttggcaatggagatggtctgctgctccatgacctcgtggatggctgtgcggtcggcctcagccatcttgtcgaactcatcaatgcagcacacaccct

SEQ ID NO: 257960 - DNA, 201 bp, Homo sapiens
tttcatccagacggaagctgtggtcagcaagcccttcagcctctttgacctcagcagcgttggcttggtcagtagagggaaagaggagggtgaggaaagaraagaggggttggctggggttgtcagacctgatgattgattgctttggatgctttacagtttggggctgagacacaacagagcaaagtggcccccagcagt

SEQ ID NO: 257961 - DNA, 201 bp, Homo sapiens
tgtatgttctgctccaggctgcggcgagggttgtagcgcccgtaggcagggttggcggcagccaggatggagcagcgggcattgagtgtggtgagaatgcyggccttggcaatggagatggtctgctgctccatgacctcgtggatggctgtgcggtcggcctcagccatcttgtcgaactcatcaatgcagcacacaccc

SEQ ID NO: 257962 - DNA, 201 bp, Homo sapiens
aatcggacaaggcggccttcttcacctcccgctagccgcaagccaatcaccgtgcgggcctagaatgagtgacggggaggcggtgcgggcgtcggaagggwatctccgggcggggtagtgcaggcgccgggtttcccgcggtccgagctggcgcgggcggaggagaatcgctcttaaagggccagcgcacacgcgttcttt

SEQ ID NO: 257963 - DNA, 201 bp, Homo sapiens
ggggcttggtggctcacgcctgtaatcctagcactttgggaggccgaagctggaggagcacttgaggtcaggagttccagaccagcctggccaacatggtraaaccctgcctctactaataatacaaaaattagccggatgtggtggcatgcacctgtaatcccagcttcttgtaaggctgaggcagaagaatcgcttaaa

SEQ ID NO: 257964 - DNA, 201 bp, Homo sapiens
agaataagagaaaacattttcaaattatgcatttgacaaagatcgaatatccaaaatctgtaagaaacttaagcaaactaacaagcaaaaaaaccaaacamccccattaaaaagttagcaaagtacatgaacaaacacttctcaaaagaagacatacatgcatctaataagcatatgaaaaatggtcaatatcaataatca

SEQ ID NO: 257965 - DNA, 201 bp, Homo sapiens
aaagcaggaggagcacttgaggtcaggatttgaggccagtctgggtaacatggtaagaccctgtctctaccttaaaaaatataaatatatatattatataytattatatatacaatatattatatatatataatttatttagtcagattactgagcaattaattcaggtaattgcactgtcagtctgaagtaattgagatg

SEQ ID NO: 257966 - DNA, 201 bp, Homo sapiens
gccaatggaagccttggattccttctagcagatgcaggttatgatgtatggatgggaaacagtcggggaaacacttggtcaagaagacacaaaacactctyagagacagatgagaaattctgggcctttaggtaaatattagctaagaaaactcaagggggaaattggaggcaattttaaaaaaataacgtggacgctatt

SEQ ID NO: 257967 - DNA, 201 bp, Homo sapiens
tcacagtcatattctcaagggcttcaaagaatatgaaagcaaaaagcctcatccaaaggacagcaacttcaaagattaaaggaatatcagccaaaacagtkgagaaggaatcagtgcaagaactctggacatttgaaaaggcaaatgacctctaaatgaccacactaactctccagcaattgttcttaaccagattgaaat

SEQ ID NO: 257968 - DNA, 201 bp, Homo sapiens
ctgagctgagccctggtaccctgaagtcatccagaaatgaagccagtcaactaaacacaacttatatcacagtcatattctcaagggcttcaaagaatatraaagcaaaaagcctcatccaaaggacagcaacttcaaagattaaaggaatatcagccaaaacagtggagaaggaatcagtgcaagaactctggacatttg

SEQ ID NO: 257969 - DNA, 201 bp, Homo sapiens
cagcatgctggatgcttcttcttggatctatgtatggttatgacaagaaaggaaacaatgcaaaccctgaagctaatatgaatattgtaagtcatttattmagaaaaaatgctaaaataaggaattattcatatttcagcattttagatacaactggtgtgccttcttagttttcagcaattcctccagtgactaagtctg

SEQ ID NO: 257970 - DNA, 201 bp, Homo sapiens
tggtctacctttgaatagacatacttttaaaccatggcaaggaagtgagactgcacattgaaatatgtaaaatttgcctttgggtgccacgtgagaaatartcacatcactagaaactaatcataagcttttgtgtttggttaaagttttattgatccatttttcttgtttactttgtgggatactgggcttaactagggg

SEQ ID NO: 257971 - DNA, 201 bp, Homo sapiens
ctccctgaatgctctctctccctcagaaatctggaagttggcagagggacactgagctgagcatattattgtagtttttaaatgctctccactggacagargatggggatttgaatagaaatttggtgaggaactaatcagtgtccatttacactcacctcctcttcctccctggaagagctataggacttgagtaagcat

SEQ ID NO: 257972 - DNA, 201 bp, Homo sapiens
tacatgctgaacagataaggtgtctattgtaaatatagtactgctccctcccatattctttgtgaaagtcatatccttgttccagataatgtttttttttmttaattccaggctccatactctgaatcatctgagccacttctcattaacacatacatcagcttagcctaattatagcttttgcagggatttatctgagct

SEQ ID NO: 257973 - DNA, 201 bp, Homo sapiens
ttgaatagaaatttggtgaggaactaatcagtgtccatttacactcacctcctcttcctccctggaagagctataggacttgagtaagcatgataaatttyatgtctttgtaaaccacacccaggaaatttgtatatacaaatacatagagcacagtagttatcaggacagactttgacataaaaagaactgggtttgagt

SEQ ID NO: 257974 - DNA, 201 bp, Homo sapiens
gctgaaacataataaatgtgcatcaatcatctctttctcacaacccaaatgggatttttaaaaaataaaagggaagggcttatacctatatttaaacaaaytgaaaaggcatggttatatttgtttgtgagttggaacacacaagcttactataataaatcaattgagcttatctattcagtgtgtgatttagtatttatg

SEQ ID NO: 257975 - DNA, 201 bp, Homo sapiens
tacatcagcttagcctaattatagcttttgcagggatttatctgagctgatgtatctgtactgtttccatttacttttctgcttattttcttcagagaacwgtcctatttaaaatgaaaatgctagtgtgattcttactgttaccatgggaagaagagagagaaagagaaagctttgaaatagtgcattgcaatagtccat

SEQ ID NO: 257976 - DNA, 201 bp, Homo sapiens
gattcagagtctttttatcaattgttcagtcaattatttcagttcttctttttctggccaagacagttttaatgttccaacaagtgtttcagtacacacayacacacacacacacacacacacacacacacacacacatgctagtggaggcccaggaagggacctctggaaaccaaattatatggatattctccctagcct

SEQ ID NO: 257977 - DNA, 201 bp, Homo sapiens
ggcagttaaatcactaaatttatttctaagcagtactttggctgtatgtcaaattttgatatgtcatgttttattatcatttagttgcaaatatcttctawtttccatttttattgcttcagtttctatgggttctttaggcatgttctgcaaatgtcaattataacaaattggttaatagtgctgttcaggttttctata

SEQ ID NO: 257978 - DNA, 201 bp, Homo sapiens
  misc_feature (1)...(201): n = A,T,C or G
tatctttatagaataactcagaagacttccaattcatccccagtatgatcacgatagaaggaaaaaatgactaagcagagccccaattttgttagaaacantgcgtaagtatttatttttacaagattgtcttatctcctgttctctcagggtttgtagccttttccaccatgcctgaactggcacaaagaatcaaaatga

SEQ ID NO: 257979 - DNA, 201 bp, Homo sapiens
attctgtcatgattcctctattgagtttttaaaatatgcctacctcaagattgcaaatttgtaccctattatctgatgactgaaaacaattgacttgtatrtttgatctagtgagagaactagtcttgtatgagttacaccaccatatttggaagtggaagtttttcattatggtttctcaaatggatatttaatatgata

SEQ ID NO: 257980 - DNA, 201 bp, Homo sapiens
ccatatttggaagtggaagtttttcattatggtttctcaaatggatatttaatatgataaaatgattttgtaaaaattaatcttttggcaacatacataaygattcgactcataaagactcaaaaatgaaaaaccaggcaggagaccagtataatgatataagatattaggaattagatactagactagataggtaatagt

SEQ ID NO: 257981 - DNA, 201 bp, Homo sapiens
atctgggacagtactcgaatgcagtgtacacatgggtaacatggaaaaccccgattttcccttatattcaaggtattatttgaccttaagaaaaaccgttytacatttcataccaattaatgagaaaaaaatattggcaagcactgactgggcagaatacagggaagcttcactatggagaagtgaatttgggattgaggg

SEQ ID NO: 257982 - DNA, 201 bp, Homo sapiens
gtggtggcttatgtctataatcccagtgctttgggaagcccaggcgggaagataccttgaggccaggagttcgagaccagtctgagtaatgtagaaacacmctatctctaaaaaaaagaaaaaaaattagccagatgaacacctgtagtcccagctaccctggaagcagaggtgggaaaatcacataataacctcaaatca

SEQ ID NO: 257983 - DNA, 201 bp, Homo sapiens
ttaaaaactgagaatcccctgaatttatcatgtctgcttttttcttagtctaaaatccttatatgcattagcatatccttagtctaatatccttatatttmttagtctaatatctttatatttcttagtctaaggatatatgtctaaggatatatgaaacaggatataaggatatatgatattatatagaatataaggata

SEQ ID NO: 257984 - DNA, 201 bp, Homo sapiens
ataggcaaagcaggtaagaacatcccttgtaagaggtgctggaagacaggctgtttagattggacttgacactccttcctaaatggaacacgtatagactyctcttgctgcggtgtgtcatccttctatatccagatccatataacacaggggaacaaaacaaaggcagctgatgggctgtatgtcatggttacaaaaggc

SEQ ID NO: 257985 - DNA, 201 bp, Homo sapiens
gttaactgtcaaagccttgagagagaagaccaatttttacacatttccctactactttgccataaaatataatcctgaggtaaggacctgatcaacattcraagcttactctcagtgaggaatgatgaagtggaataaaatcaaaccagtgaagcaatatgtaatataaaatagtgagtcaatttggcatagtcattaaga

SEQ ID NO: 257986 - DNA, 201 bp, Homo sapiens
agagctggtggaggaaaaagttcttcaaagatgggcttttttggttaatatgtcttcagattatatggtacatgttttttccttaaagaaagggaaaagasgccgggtgcagtggctcacacctgtaatcccagcactttgggaagctgaggcaggtggatcacgaggtcaggagagcgagaccatcctggctgacacagt

SEQ ID NO: 257987 - DNA, 201 bp, Homo sapiens
ggggtttcactgtgttagccaggatggcctcgatctcctgacctcgtgatctgcccgcctcagctcccaaagtgctgagattataggcgtgagccaccgcrcctggcaaccagacagccttttacatgttttagttctcatcgaattcttataaataccctaggagatagcatttattattatttcccattatacagatag

SEQ ID NO: 257988 - DNA, 201 bp, Homo sapiens
acttcaagagtaagtaccaggatgagatcaacaagcatatagagatggagaatgaattttcctcatcaagaaggatgtggttaaagcttacatgaacaacrtagaataagcagtctcgcctaaaagggctgccccaggagaagagaagatccgtgagctgcagtcccagatctcggccacatctctggtcctatccttgga

SEQ ID NO: 257989 - DNA, 201 bp, Homo sapiens
ctggagcagcagaacaagatgctggagaccatgtggagcctgcagcagcagaagacagctgggagaacgtggacaacatggagagctgcatcaacaacttkctgcggcagctggacacatgggaccagaagctgaaggtggaggtggagcttgacaacatgcaggggctggtggaggacttcaagagtaagtaccaggatg

SEQ ID NO: 257990 - DNA, 201 bp, Homo sapiens
cactcctacaccatcacgtgaagcatttcctccacttcacaaggcttcaatcaactatcaaaagaggcagcaaagaccctgatagtgacggctactgggcmcgagtaggaaaaaaggattttggcaacaggagaagtttaagaaatatgtattaggtggaggaggtgtcagcagctgccttactgaaggattaggcaggag

SEQ ID NO: 257991 - DNA, 201 bp, Homo sapiens
tttggtatttcaaatggggtatttagctttattttgtttcaaatatttagtcaattttctaatgttatccaaaaaataattcatcctttacccacaaatcyttcatttaaaaaaaatttttttaagagacaggatcttggagcttctatatagctgaatatctggacgttcctagagactggggcacaagggagggcttgg

SEQ ID NO: 257992 - DNA, 201 bp, Homo sapiens
gggcaaattacttgactttgtaagacccagttttattttaaataaaatgaggacaatatttcccatccttttttaaattgtttttcttcttttcttttttyttttttttttttttttttttttgacagggtttcactctgtcaccgaggctggcgttcagtggtggtgctattacagctcactggagtctcaaactcctgg

SEQ ID NO: 257993 - DNA, 201 bp, Homo sapiens
ggtgggagtgcagtggcccgatctcggttcactgcaacctctgcctctcgggttcaagtgattctcctgcctcagcctccgagtagctgggactacaggcrtgtgccaccacaactggctaatttttgtattttcagtagagacagatttcaccatgttagccaggctggtctggaactcctggcctcaggtgatccacac

SEQ ID NO: 257994 - DNA, 201 bp, Homo sapiens
tagccaaaattccaagtacaatacaataaactatagccctcaagttgtacattagctgttttgtttcttctcttttcctttgctttttgagacagtctcaytctatcacccaggctggagtgcagtggcacaatctcggctcactgcaacctccacctcctgggttcaagtgattatcatatctcagcctcctatgagtag

SEQ ID NO: 257995 - DNA, 201 bp, Homo sapiens
gctgtacaattgtatcaataaacagcaatgtgtttgaaaatgtgcaatgcctcaacaggcagttgaacacttaggaaaagcttcaggactgctagtgtaargatgcaggattgatgggggagcactttctattcagaaagaaaaatatttttaaggaaatggagaattattcaactggttataagaaaagagtcgctcaag

SEQ ID NO: 257996 - DNA, 201 bp, Homo sapiens
gtgatgtatcgagaaaacagcacccctgacccagcaacctcagaagtggtggagcaagctggaaagctcatagaaaatgtagatccagaaaaggctgtacwattgtatcaataaacagcaatgtgtttgaaaatgtgcaatgcctcaacaggcagttgaacacttaggaaaagcttcaggactgctagtgtaaagatgcag

SEQ ID NO: 257997 - DNA, 201 bp, Homo sapiens
ctatgagaattaaatgagataatagtcataataactatatttaactaacgtttatgagatgcccagcatgttaagaactttacttttgttatcataatgarttcccctaacatagagaaatgtactattacaggccctgttttatagatgagaacactgtcttagcaagatagttcatttcacgtataccatgttgaacac

SEQ ID NO: 257998 - DNA, 201 bp, Homo sapiens
ccaggtgtggtgatgagtgcctgtaatcccagctacttgggaggctgaggcaggagaatcgattgaacctgggaggtggaggttgcaggttgcagtgagtygagatggtgccactgcaccactcaagcctgggtgacagattgagactccatctcaaaaaaaaaagcaatagattaatacatatcaccagagaaaatcatt

SEQ ID NO: 257999 - DNA, 201 bp, Homo sapiens
tgagtgcactgagaagttttaaaaagaggagtggcataatacagttttcattttcaaaatatcatgttggctgatttgtgaaaaataaaatagagaaagayaggatttatattaaatgacatggaacacagcatacacattattattaaatctgacatttcatttcagggatagaaataattcccacctacagatactatc

SEQ ID NO: 258000 - DNA, 201 bp, Homo sapiens
aataaacagcaatgtgtttgaaaatgtgcaatgcctcaacaggcagttgaacacttaggaaaagcttcaggactgctagtgtaaagatgcaggattgatgrgggagcactttctattcagaaagaaaaatatttttaaggaaatggagaattattcaactggttataagaaaagagtcgctcaagtcttatttcacttaca

SEQ ID NO: 258001 - DNA, 201 bp, Homo sapiens
tagtgcctttatttttcagtttatatttggtgacaaaatattctacccacacaacttctttgatcaatttcttgctactgaagtgtgctcccgtgagatgytgaatctcctttgcagcaatgccttatttataatttgtggatttgacagtaagaactttaacacggttagtatgcatttcaatttctatattttgagcaa

SEQ ID NO: 258002 - DNA, 201 bp, Homo sapiens
gtctcctgacattgccaaatatcatcttgatggcaaaatgcccaccctactaagttaagaaccagtactgtaaattataaccttaataagattaagatttwaaaaaaaaaatattttatagaccgtatggtgttctactataatgaggctgacaatgcacagctgtttctcttttttagaatgtcagagactactgctttt

SEQ ID NO: 258003 - DNA, 201 bp, Homo sapiens
tcttgtgagagcttctataagttggctccaaagttcttttaccaaacctgtcatcctgaatgtttgctgcttctgctcagttatttccctaagaggtcccrattcctttttaatgtggaattttacaagatcatattctataagtgaggatgatcattgttattaggtcgttatttgtaggacttttcaatgcagagacct

SEQ ID NO: 258004 - DNA, 201 bp, Homo sapiens
aggaatggaggcaagaaggaggtaaagaaaggaagatattagaagacatagaaagggacttgagcttccaggtgcaaacattacctgcatatctcagttgkccattatcctagccctactggaaaaattctaaaagctatatataatctaagccaaaccagaaaaagtatttaaagcatacaaggaggatgccactctaga

SEQ ID NO: 258005 - DNA, 201 bp, Homo sapiens
gagcagcctatataagtatctgattacagaacaatggataatttctccgctcacataaaacattgatactctggcttatcaggtcttctttgtggttttgkttcatataaatcagttcctagaagtctgattacctttcagtaacctaataaaagcatattcataagtgtgcaaagcaaagcttacatacaattattgaac

SEQ ID NO: 258006 - DNA, 201 bp, Homo sapiens
gtagggtagatttggaggctgcttgtgtttttcctcctaatccaggggcatttactctatttaatcaatagatgatgcctgtactcattttacttagcatrtcagcccctttattaaaaattgtgaaaaaaaagactacctaaataagcaaaacccaatcaggaattaaattttagagaagttcccagatggaagatagga

SEQ ID NO: 258007 - DNA, 201 bp, Homo sapiens
gaagccagtcccaagataattgttctgtacccctattctctaagaagctaaattgtgttagactgaaacccataaggaaccattgttcaaagttggcttgytcaaaagtaaagatttttaatagtttctcttaattagattattttctaagacatagaattatgattactattttatctctataattttcatctctataac

SEQ ID NO: 258008 - DNA, 201 bp, Homo sapiens
aagcaaattatcctacagattcagagctggtacaggtgtgctgtcaagcagcccattccattagtcagcttgtggttcactcacattaaagtattgacctwaatggtatatttatctagataattctaccttgttattttcaaagccccagtcttgtttgctaattctgtgcatcatttttctctgattctgaaaggcaaa

SEQ ID NO: 258009 - DNA, 201 bp, Homo sapiens
ctctcctcaagttcacagcattatctctgctatatctatattttattgagtataagagaattaacccatgtaagctccatgagggtagggatttctcatcrttttgttcaccagtgttttctcatcttgaagagtacatgacaattactgggctcccagtatctatgtgttgcattaatgaaatttcttaactttaatcta

SEQ ID NO: 258010 - DNA, 201 bp, Homo sapiens
tgctatatctatattttattgagtataagagaattaacccatgtaagctccatgagggtagggatttctcatcgttttgttcaccagtgttttctcatctkgaagagtacatgacaattactgggctcccagtatctatgtgttgcattaatgaaatttcttaactttaatctacctcaaaatgtctctatcttcttgatt

SEQ ID NO: 258011 - DNA, 201 bp, Homo sapiens
aaaacaagcaagaccatcaattctatcaagttatcattatgtcactctgttcttatcaacatatttttagtattgaagagggcttcttctacttactcctkaaccttgtacaatgtagtttaggtcttcatctttttatcatagctaccttatttaaagtcacccatggcttttaattgccaaattcaatggcctatcttc

SEQ ID NO: 258012 - DNA, 201 bp, Homo sapiens
cccttgtctccaaaacttccgcaatatgtccaaatttcctagcctgacattcagactttgattatctgcctccaagtttatatcctatcatattcctttayatattctgttctccaggtacactgggaagcttgccattcctgatcatagcctacaaactcttcctgcctcccactcaccctcatctctgctgtcaaaatg

SEQ ID NO: 258013 - DNA, 201 bp, Homo sapiens
ccattgtatgttttcttcatatgttgctggtgcctaacagaactatggccattgtccacattcatttagcagcctttgtagttattgctttgaggagcttyctctcatgaatgcccttgctttctctcccacagagtcatccccctatatatgacctgactgccatgaaagtgcctactgctatttgggctggtggacatg

SEQ ID NO: 258014 - DNA, 201 bp, Homo sapiens
tcatcaatttaatgtatacgtattgatggggaataatggtcactatgaaaaccatgtgataatatggaaaaatacccatgatataatgttatgtgaagagragaaaatgaaactggtagaactatgtgattgcaaatatatacaaatattaaaacaattatatgactttataaaatatttgtatataatgaaaactgaagc

SEQ ID NO: 258015 - DNA, 201 bp, Homo sapiens
ccaaagctagagacagttatcaatgttcatgtacaagaagcctatagaataccaagcagacttatcccaaagaagacttaataatcaaactcccaaaggtytaggataaagaaaggatcctaaaagcagtaagagagggagggagagagggagagagaaagagagagagagagagaacattcaagggagctccagtatgtc

SEQ ID NO: 258016 - DNA, 201 bp, Homo sapiens
gccttgggtcttggatggcatttctggatctgggttggaccagaggagagcccactctcctgaaaggtgagtcccagggctggaagcattcaccacaagcygactgaagagccactgggcctcgagtgagtttggcggtagcctggcaatactcaccacaggcctggggtggtggtggccatggggagagactcctctgtt

SEQ ID NO: 258017 - DNA, 201 bp, Homo sapiens
gaagactgaggtgggaggatagcttgagccgaggaggcgaaggctgcagtgagccaagatcacaccactgcactccagcccagggaacacagtgagacccrtctcaaacaaacaaacaaacagacaaataaagtactatgttgtaattcatgtgtaaaaattaagagattataacatgaaggtatatatttcctttcctct

SEQ ID NO: 258018 - DNA, 201 bp, Homo sapiens
tgaggtgggtggatcacctgagatcaagagtttgagatcagcctggccaatgtggtaaaaccctatctctactaaaaaaacaaaaattagtagggtgtggyggcacatgcctgtaatcctagctacttgggaggctgaggcatgagaatcacttgaacccaggaggcagatgttgcagtgagccaagatggtgccacagca

SEQ ID NO: 258019 - DNA, 201 bp, Homo sapiens
gcaggggaacgaatgccttgagctgaggagtttaagaccagcctgggcaacatggtgaaaccccatctctacaaaaacatacaaaaagtgtagctggccaytggggcaggtgcctttagttccagctacttggaagactgaggtgggaggatagcttgagccgaggaggcgaaggctgcagtgagccaagatcacaccact

SEQ ID NO: 258020 - DNA, 201 bp, Homo sapiens
ggtaggagtgcagtggcatgatctcagctcactgcaacctttgcctctggggttcaaaggattctcccgcctcagcctccccagtagctgggattacaggygcacaccaccacgcccagctaattttgtatttttagtagagatgtggtttcaccatgttggccaggctggtctcaaaatcttgaccttgtgatccacccg

SEQ ID NO: 258021 - DNA, 201 bp, Homo sapiens
aatcaaggtgacacccttaaaagttgcatagttgcctaatatcatatatcgacactagtcttatatttaacaaaatcaaagtatttatgtcttcactgaaygtgtttaaatgttctaggcctaacaatgagatgacttttctaatttgttattccttctttttgatagtttggatgagatggctaaatatgaccttccagc

SEQ ID NO: 258022 - DNA, 201 bp, Homo sapiens
taaaatatcctgctgagtacacctggaaggtaatttttctggcactgactaccatacaaaaataactatgaatttatttcaaagaagaaaatgctttttawtttattttattattattatactttaagttttaaggtacatgtgtacaacgtgcaggtttgttacatatgtatacatgtgccatgttggtgtgctgcaccc

SEQ ID NO: 258023 - DNA, 201 bp, Homo sapiens
tacagactatatttctgagcaactatttatgtaagactttgcccatattctttttttgagatagagtctcgctgtcacccaggctggagtgcagtggcgcratctcggctcatagcaagctccgcctcttgggttcacgccattctcctgcctcagcctcccgagtagctggaactacaggcgcccgccaccacgcccggc

SEQ ID NO: 258024 - DNA, 201 bp, Homo sapiens
attctcagcaaactaacacaggaagagaaaaccaaacaccgcatgttctcattcataagtgggagttgaacaatgagaacacatggacacagggaagggamcgtcacacaccagggcctgccaggggctaggggacaatgggagggatagcactaggagaaatacctaatgtagatgatgggtggattggtgcagcaaacc

SEQ ID NO: 258025 - DNA, 201 bp, Homo sapiens
cagagtaaggcagttgcttgagaaccaccagcacaaagtcattcttatttgttcctaagatgttaaagttaatctctttattcaaaagaatgtcttggaayctcactgcaaatggctcaaaatataactttccctgtattagaaacccaaagtcaatacacagcacagttagggaatttatttagtctgattactgagcaa

SEQ ID NO: 258026 - DNA, 201 bp, Homo sapiens
accatatatatatatatgtatggtaagtagatatatatatatccacttactacagatttatatatatagggtaaatatatatacttactatatatatatayggtatatatatctgtatatctctatatatctactatatatatctataatatatataggatatatatatagagaatatatatatagggtaagtaaattgat

SEQ ID NO: 258027 - DNA, 201 bp, Homo sapiens
tgtgtgtgtgtgtgtgtgtgtgtgtgtacttggttaagtcctatcttgttattctgctttaaatcaatattcttaaatatttttgccgttttcttctcaakaaaattatgttttcaacaagtttgaaaaaaattcaccagaattttaattgaaattgcattaagcctttttaataatttaagagttgaacaattttcaaag

SEQ ID NO: 258028 - DNA, 201 bp, Homo sapiens
cctaaaggcacaaattttaaaatgtgtgtagattacagactcagctcagctccattctaaaagatgcattctctataagacctccctaacacctggaatasaagcagctgggtaaacatcctggccatgcagtatgggcagcatgagtcagttagagggcaaggttctttctcttgatccgcccacataccttgggggtgt

SEQ ID NO: 258029 - DNA, 201 bp, Homo sapiens
gtgccccaaactacaatgatttggatttcctgtgggtaggaatgcattgcagaaaatgtttggcaaaatagttcaagatcaactatgtaataattgaaaaktccatcgtttcttttcttttttccccaagaatatctgtgttttctagtatagaaatgtttgtatttgctagcatagactagattccagcagtttgtatat

SEQ ID NO: 258030 - DNA, 201 bp, Homo sapiens
tgtcaaagccaaactgttattttttgtttgtttttacaaaatagttatcctttgttttctttttctagaaataagaaagcagtttttaccaggctttcttygtgtctgaaaacagaaaccaactcaaatatatagcaccttggcatacttagcacttcaggctgtaaatatgagagtatggaactgagttttggaataaca

SEQ ID NO: 258031 - DNA, 201 bp, Homo sapiens
gcaccttggcatacttagcacttcaggctgtaaatatgagagtatggaactgagttttggaataacaatatgaagttaaagtgccattttactctaaaatkacttggtttcatattccttcactggactatcctgtctctcccttactttgtaaggacattgagggaaaaattatttccttcactgctcttcctttgtggt

SEQ ID NO: 258032 - DNA, 201 bp, Homo sapiens
gtacaacaaaccaacaaaaagaggataatagagataataatagtagcacctaccaatagagttgtttgtaacttaattcttataaatcactttttaaagtyaacgccatatagttatttccaattgttattatatgtgatagataccaaaaattatagctgttattgtcctaattgcattttgattttttgttgtaagtat

SEQ ID NO: 258033 - DNA, 201 bp, Homo sapiens
tgaatagaaatttggtgaggaactaatcagtgtccatttacactcacctcctcttcctccctggaagagctataggacttgagtaagcatgataaatttcrtgtctttgtaaaccacacccaggaaatttgtatatacaaatacatagagcacagtagttatcaggacagactttgacataaaaagaactgggtttgagtc

SEQ ID NO: 258034 - DNA, 201 bp, Homo sapiens
ctccagtatcacggtaaatggaggtgataagaaagacatgctttctcttgtttcattcttaaggtgaaagtattcaatatgttagcattaattataattgyacctggaggatattttatagaattccttcatctgattgagttccttttcatttctattttcctaaaaattttttattataaagtggtgttgagttttgtc

SEQ ID NO: 258035 - DNA, 201 bp, Homo sapiens
tggaggatattttatagaattccttcatctgattgagttccttttcatttctattttcctaaaaattttttattataaagtggtgttgagttttgtcaaaygtacttcccaattttaaaactgatcattttaaactatttgctcctttgattaatttccatattattctaataaccttggctccaatttatccatcagaac

SEQ ID NO: 258036 - DNA, 201 bp, Homo sapiens
agcagacagatgataagatgctgttggatcaaggagaatggggaaagagaccagtgcatgtagctagcaaagggtggagctgggagtcagaacaccagagrtgaagaagcggatgggtgactaggagacagcaggagagatcccacatgtttgattccaggatttgtctgttttgtcatccagttcatttaaatagtaaac

SEQ ID NO: 258037 - DNA, 201 bp, Homo sapiens
gagagaatcaagagtttttgtgtgtgttttgtttttgtttttgttcttgtgtgtgtttgtggttgtttatccataagatatctaaatataccgactgactgaattaattctgttacacaaaatttcagagtcctgtagaatattcatcacattttaaaattcagaaaacgaacgtcaacattcagatctattcttagtgtc

SEQ ID NO: 258038 - DNA, 201 bp, Homo sapiens
gtctgttttgtcatccagttcatttaaatagtaaacatagggatgagctctcaaaccatctgctaaatacctggttgtgaataccagattcctttggaatrtctctctgctcccttctagatcttttcattcaaatgattgtaaaggaaaggttcgtcttggtccttaactttgcttgagttattttagaaacatagcaga

SEQ ID NO: 258039 - DNA, 201 bp, Homo sapiens
tgagagaatcaagagtttttgtgtgtgttttgtttttgtttttgttcttgtgtgtgtttgtggttgtttatccataagatatctaaatataccgactgactgaattaattctgttacacaaaatttcagagtcctgtagaatattcatcacattttaaaattcagaaaacgaacgtcaacattcagatctattcttagtgt

SEQ ID NO: 258040 - DNA, 201 bp, Homo sapiens
tcttctgaaggacagagttagaattttaactcagaattctccacaaagcattcagggattcatcattagctttattttaccattgatcaaactgaaattcwtctgtagaaactgacccctttgcattttttaaacttaagagttttccaaacttagagcttagagttttctgtggggtctttgtacctgcacactctggcc

SEQ ID NO: 258041 - DNA, 201 bp, Homo sapiens
cagtgaagaattagggtggggactggttaagaatgctctccaagcattgccataagttgttattaagtgtttgcttgatgagcctgatagttcctattatkgggcaatgagaaaaatggaattaaggtctctattacttctgatattcttttgttgagaaattgctatccttgatttcaccatcaatgtatttgtcagtgc

SEQ ID NO: 258042 - DNA, 201 bp, Homo sapiens
atgagagaatcaagagtttttgtgtgtgttttgtttttgtttttgttcttgtgtgtgtttgtggttgtttatccataagatatctaaatataccgactgactgaattaattctgttacacaaaatttcagagtcctgtagaatattcatcacattttaaaattcagaaaacgaacgtcaacattcagatctattcttagtg

SEQ ID NO: 258043 - DNA, 201 bp, Homo sapiens
ttgatttcaccatcaatgtatttgtcagtgcaaaatgcattacttatgagagctgcctacatataatccacatgcatttgatatacaatatgtaaacccartataaaatcaaacatgcatcaaggcaatattctcttgaaagtctcatatttcctactgactgcagtagctagaggggttgggggcagggagcggacaaaa

SEQ ID NO: 258044 - DNA, 201 bp, Homo sapiens
ctcagccctagctctcagcccaccctacagggatagtttgctgcctagggtacacctcttgcccttgcctccaactgaaaaaacaagtctattttttttttctgaaacagagcctcaggtatcctcaggaatctctgcaaaaaagaccctattagttcctatcagttctgtgcttaaacttcattaaagagccaattctag

SEQ ID NO: 258045 - DNA, 201 bp, Homo sapiens
ggagaagaagcagatcaagaccctgaacaagtttgcctccttcattgacaaagtgtggttcctggagcagcagaacaagatgctggagaccatgtggagcytgcagcagcagaagacagctgggagaacgtggacaacatggagagctgcatcaacaacttgctgcggcagctggacacatgggaccagaagctgaaggtg

SEQ ID NO: 258046 - DNA, 201 bp, Homo sapiens
aaagactgcaaaaagaaatcaaagtggaagtatcctgaaggcttgagggaatatggaattagaggttcacatgtgggatgtatggatttggatttttttttctcacctagggaatatatgaaagtatgtgattagtgagagatacttgagagaatgagtttggggagaaagaaagagtgagcagcagacagatgataagat

SEQ ID NO: 258047 - DNA, 201 bp, Homo sapiens
tttcttttttctttctttctgtttctctttctttctttctttcctttctttctctctctctttctttctccttccttccttcctgctttccttccttcctwgcctgttttctgccttattctaggataataaaatattagcattctgtcatgattcctctattgagtttttaaaatatgcctacctcaagattgcaaattt

SEQ ID NO: 258048 - DNA, 201 bp, Homo sapiens
aaaaccatttaccattttttaggaagccctttatgttctcattccaatggccttgagtatgaatattcttttttatgatcagggtcatctgcaggggaatatgaagcaaagtgactgtcaagagtgacacaactgcttatgaaatcaatcatttgtggaggacacaccattctctttttctgctgctttgtaataaatagt

SEQ ID NO: 258049 - DNA, 201 bp, Homo sapiens
aaggaaatcgcattttaacaagctcctgctgctgctggtgctatgtccacagaccacaatttgagtagcactgctctatacaatggctgaatttctacatyatctcacctaagtctatttaaatcatcatatactactatgtcatattaatggaatctaaatctgcactagaactacaacagaaaactccaggaacatata

SEQ ID NO: 258050 - DNA, 201 bp, Homo sapiens
ttcatagaatcattttaatatttttattacctctaggagtttttttaaaaatacagaacaatttgttttctaaaacaaaactcaagcatttccttgaaaasgaaaaaaaatcacctctattaatcaattagcactcaatctactatgtgcaaaaaaccgtgccaaaagcttttggaatacgcaatcctatagatctgaact

SEQ ID NO: 258051 - DNA, 201 bp, Homo sapiens
gggcagtaatagtccatctcctggtggtttgaactaccatccagtggtggcttcctaaagagaagtttcatgacttaatacagatgatctctatagagtayctttgagatttccccgagatttttgatagagcagtttctttgattttgtgagctatcccaatacgcttttttggtttcataagccagtgttggtttctgt

SEQ ID NO: 258052 - DNA, 201 bp, Homo sapiens
agagaaaagcaatgttaagttgcactgaagcaaaacaaggctattgggttaaatttttttcatagaatcattttaatatttttattacctctaggagtttytttaaaaatacagaacaatttgttttctaaaacaaaactcaagcatttccttgaaaacgaaaaaaaatcacctctattaatcaattagcactcaatctac

SEQ ID NO: 258053 - DNA, 201 bp, Homo sapiens
atagtccatctcctggtggtttgaactaccatccagtggtggcttcctaaagagaagtttcatgacttaatacagatgatctctatagagtatctttgagwtttccccgagatttttgatagagcagtttctttgattttgtgagctatcccaatacgcttttttggtttcataagccagtgttggtttctgttgtttatt

SEQ ID NO: 258054 - DNA, 201 bp, Homo sapiens
cagtgctttgggaagcccaggcgggaagataccttgaggccaggagttcgagaccagtctgagtaatgtagaaacaccctatctctaaaaaaaagaaaaawaattagccagatgaacacctgtagtcccagctaccctggaagcagaggtgggaaaatcacataataacctcaaatcagtaaatgtttatggaataactat

SEQ ID NO: 258055 - DNA, 201 bp, Homo sapiens
atatagagaatatatatatagggtaagtaaattgatagttgggtgtgtatatatatagtaaatttgtgtgtgtctgtgtgtgtgtgtgtgtgtgtgtgtgtacttggttaagtcctatcttgttattctgctttaaatcaatattcttaaatatttttgccgttttcttctcaagaaaattatgttttcaacaagtttgaa

SEQ ID NO: 258056 - DNA, 201 bp, Homo sapiens
tatatagagaatatatatatagggtaagtaaattgatagttgggtgtgtatatatatagtaaatttgtgtgtgtctgtgtgtgtgtgtgtgtgtgtgtgtgtacttggttaagtcctatcttgttattctgctttaaatcaatattcttaaatatttttgccgttttcttctcaagaaaattatgttttcaacaagtttga

SEQ ID NO: 258057 - DNA, 201 bp, Homo sapiens
gctccagtatgtctggcagaagacttttcagtggaaacctttcaggtcgggagaaagtggcatgacatatttaaagcgctgaaggaaaaaaaaaaaaaaaacaccttttaccctagaatagtatatctggtgaaaatatccttcaaacatgtaggagaaataaagactttcccagacaaacaaaagctgaggcatttcatt

SEQ ID NO: 258058 - DNA, 201 bp, Homo sapiens
gagctgagatcatgccactgcactccaacctgggcgacagagcaagactccgtctcaaaaaaaaaaaaaaaagaaagaaagaaagaaaatacagtcagagwaaaaagaatgaaaaagaacaaagcacaaaagcacacctacaaaatctagaaaatagcttcaaagcgcaaatataagagtcactggccgtaaaaaggaggt

SEQ ID NO: 258059 - DNA, 201 bp, Homo sapiens
gtttcatgacttaatacagatgatctctatagagtatctttgagatttccccgagatttttgatagagcagtttctttgattttgtgagctatcccaataygcttttttggtttcataagccagtgttggtttctgttgtttattaccaaagtattttaacattcaggaattcatatcagaagtggaatggaatagtgtta

SEQ ID NO: 258060 - DNA, 201 bp, Homo sapiens
gaacctgggaggcggaggttgcaatgagctgagatcatgccactgcactccaacctgggcgacagagcaagactccgtctcaaaaaaaaaaaaaaaagaaagaaagaaagaaaatacagtcagagaaaaaagaatgaaaaagaacaaagcacaaaagcacacctacaaaatctagaaaatagcttcaaagcgcaaatataa

SEQ ID NO: 258061 - DNA, 201 bp, Homo sapiens
cttgaacctgggaggcggaggttgcaatgagctgagatcatgccactgcactccaacctgggcgacagagcaagactccgtctcaaaaaaaaaaaaaaaagaaagaaagaaagaaaatacagtcagagaaaaaagaatgaaaaagaacaaagcacaaaagcacacctacaaaatctagaaaatagcttcaaagcgcaaata

SEQ ID NO: 258062 - DNA, 201 bp, Homo sapiens
aattattgttaactatagtcatcctattgtgcatgccagactttagtccttctaacggtattttggtacccattaaccaatgcctctttatccttcccccwcccctactacctttcccaccctctggtaaccatcattcttctcactatctctataaggtcagtttttttttaaactcccctatatgagtgagaacatgca

SEQ ID NO: 258063 - DNA, 201 bp, Homo sapiens
aaatttcagataattcaccctaataagcacacaacagatggtttgttttgattcctttttatatcctttggagaagttccactaacgactgtatttttacygggcagagtgaaatcatcatctacaatggctaccccagtgaagagtatgaagtcaccactgaagatgggtatatactccttgtcaacagaattccttatg

SEQ ID NO: 258064 - DNA, 201 bp, Homo sapiens
gacacttaggctgatttcatatcttggtcattgtgaatagtgctgtactaaacatgggggtgcagatgtctcttccatggattgatttccttttttttttytgaatatagacctagcactggaattgctggatcatatggtaattctacttttagttttttgaggatccctcatactcttccccatagttcctgtactaat

SEQ ID NO: 258065 - DNA, 201 bp, Homo sapiens
cctccaagtttatatcctatcatattcctttatatattctgttctccaggtacactgggaagcttgccattcctgatcatagcctacaaactcttcctgcytcccactcaccctcatctctgctgtcaaaatgcaaccttccctcaagagtcatttcacaggacccctctttctatgaagccctcaggtggaaataatttt

SEQ ID NO: 258066 - DNA, 201 bp, Homo sapiens
actggacagaagcagctacactatgttggccattcccagggcaccaccattggtaagtaatggcagtcaaggccaagtggtttacttctcataaacacttycccagtggttatggtaggcatgttagcaaccacactaattgctttccattcatttaatgcctccaacaacacaatgacatagggacaattataattccta

SEQ ID NO: 258067 - DNA, 201 bp, Homo sapiens
catcatcctcatcacacatgtataagtagattagataaactagtgagtcttttctgcagcttgattgctacaaccctctaatagtgcctttatttttcagwttatatttggtgacaaaatattctacccacacaacttctttgatcaatttcttgctactgaagtgtgctcccgtgagatgctgaatctcctttgcagcaa

SEQ ID NO: 258068 - DNA, 201 bp, Homo sapiens
tctcaaaaccatttaccattttttaggaagccctttatgttctcattccaatggccttgagtatgaatattcttttttatgatcagggtcatctgcagggkaatatgaagcaaagtgactgtcaagagtgacacaactgcttatgaaatcaatcatttgtggaggacacaccattctctttttctgctgctttgtaataaa

SEQ ID NO: 258069 - DNA, 201 bp, Homo sapiens
cccctctaggctcactctctgttctttaacacctttctctctgcccaagaggctgaactgtaaggacaggtcaacaagctcccttgacttttggttttcakttcaattcagccaatggaaatggtgagcaggagatggaaagaaataggccagtaaggtttcattttttattgccctggcttcctccctgtgaagtcaact

SEQ ID NO: 258070 - DNA, 201 bp, Homo sapiens
ccaactctccctcaccttctacatgcaacctatcatcgccatctatcaattttgccttctaaatttctccctaatctgacaactttcagcttcaataatcwttcaaatccaggtttggatataatgtcttcaactactacaatgccttctcactggtattaaactatttgtagtcagttctggacccaagtctgtgtgatt

SEQ ID NO: 258071 - DNA, 201 bp, Homo sapiens
aattaatcgttttgtttgacaatgcttaataccctaattctctcacccagtaaaaccaacacacacacacacacacacacacacacacacacacacacacwctctctctctctctctctctttcctttaggggaacggtttagcctcaggttataaaatataaggattccatttccttctatggttttgtactattcatct

SEQ ID NO: 258072 - DNA, 201 bp, Homo sapiens
gaattaatcgttttgtttgacaatgcttaataccctaattctctcacccagtaaaaccaacacacacacacacacacacacacacacacacacacacacamtctctctctctctctctctctttcctttaggggaacggtttagcctcaggttataaaatataaggattccatttccttctatggttttgtactattcatc

SEQ ID NO: 258073 - DNA, 201 bp, Homo sapiens
actccttggagacagtgtcaatagccctctactcattttcataaagtcagccatgcctgcacttaataatgggttgtctataaatgtgttaacttctaaawtgctactctgaaacttgcaacacattttgctatgaaaatggtgctgtaggtcagagcttttcagactttaccatgcccagaaatctcctggagatcttgg

SEQ ID NO: 258074 - DNA, 201 bp, Homo sapiens
taatggaatatttgatattccatggaatattaatggaataaaagaagtaccaagatttcatactcctcttcctgtccaagagaggaagagagggatggagscagggaaaaaggaagggaaggagggagagggagagggagagaagacagaaggaagaggaggaggaagaagaggaggaagaagaaaaagggaagggaaagg

SEQ ID NO: 258075 - DNA, 201 bp, Homo sapiens
aattatgttgacatttacttcatgttttcaagtgtgacaatttaaatagattgtcacacaaataaataattaaagtaaaaggcaggatctgactttaaccsgtaaacaaatttattttttatttatcaataacttgctttatttatcaatccatgcttggcaaaacaaatccatgtgaaagaaaatagccacttcataaaa

SEQ ID NO: 258076 - DNA, 201 bp, Homo sapiens
actttaaccggtaaacaaatttattttttatttatcaataacttgctttatttatcaatccatgcttggcaaaacaaatccatgtgaaagaaaatagccasttcataaaataatcaacaattaaaatacggtgttaagaaacaggtgacatctaccataatggattcttggttctctgttctgaaacctggagttggcttt

SEQ ID NO: 258077 - DNA, 201 bp, Homo sapiens
ggaaatcgcattttaacaagctcctgctgctgctggtgctatgtccacagaccacaatttgagtagcactgctctatacaatggctgaatttctacatcakctcacctaagtctatttaaatcatcatatactactatgtcatattaatggaatctaaatctgcactagaactacaacagaaaactccaggaacatatatc

SEQ ID NO: 258078 - DNA, 201 bp, Homo sapiens
tttccagagtaccgctctcccatttcttgtcaactcagcgtgtcatcttttcctaccatagttaaatatgtaacctagatcttgcctaaagaggaaagggractgatatttatttaatatctactaaacatcatgcactgtgttaagcacattgtatgcatcatcgcattcacattttgtctacattttacaaatgaaaac

SEQ ID NO: 258079 - DNA, 201 bp, Homo sapiens
tggattcttggttctctgttctgaaacctggagttggcttttccaaatacggagtaaagatcttaaagtgaattagatcttaaatgaataaatgctagttrttactgttctttagttgtaatttctggttaataaagaattctagaagaaatgtgtgtttatttttactgtaaataggtgtttccaaagttttaagaacta

SEQ ID NO: 258080 - DNA, 201 bp, Homo sapiens
atatttatttaatatctactaaacatcatgcactgtgttaagcacattgtatgcatcatcgcattcacattttgtctacattttacaaatgaaaacctacygtggaaagagcaagagcagtttcctccctgacctggatgagtgactttaaataaagtgcttaatctctccaagcacgggttcttcatttataagtgaggg

SEQ ID NO: 258081 - DNA, 201 bp, Homo sapiens
cttccatttcatccagagcgtttgtaaagctgatatgcattaagaatctctaagagcacaaagtagtttttttaaacttttttgttcaagaatatgttgcygtttaattcattcttttgtacaaatatttttctaagttaggcactttgaaaaatgctaacacactgtcttaaagcattctcttaaatttgttttcaaatt

SEQ ID NO: 258082 - DNA, 201 bp, Homo sapiens
ggaggaattttattttgcctccttccattttataggaggaacagatttataccctgtttacacatgtagcttattggataataacatgaacgaataatatygacttagaaactttatttggactaagttataaattgtatttcttattatacaataatgggaatataatttctacattccaaaacatgtacaggtagccat

SEQ ID NO: 258083 - DNA, 201 bp, Homo sapiens
ctattatagtaatggaagcaaagccaattccaactacaatttccaatcaaactgactctaatggaacctaattagtaactgacacaatccaaagaaacttraaggtatttaaactaacctcatgccactaagtcctacctgactaaaatgcacgttctgatacaagtgtgtttgcaattctttcctatgctctgcgtgtat

SEQ ID NO: 258084 - DNA, 201 bp, Homo sapiens
tataattacattcagtaaaatgcacagatctgaattgtacagtttgatgaatcttagcaattaccccagtcaaaatttgccctagaaccaagcaaacactrttgtgatttctattcctatgaattagttttatctgtttttgacctttacagaaattcaaccgcagagtatgcactcctttgcgcttttttcattcggcat

SEQ ID NO: 258085 - DNA, 201 bp, Homo sapiens
tagaaccaagcaaacactattgtgatttctattcctatgaattagttttatctgtttttgacctttacagaaattcaaccgcagagtatgcactcctttgygcttttttcattcggcataacgtttgtgatatttatccaggctgttgaatgtgtcgatgagtagtaagcattccattacataaatataacatgattatgt

SEQ ID NO: 258086 - DNA, 201 bp, Homo sapiens
aaggatgttatggtacagaccaagtagatgacataaatgaacaccaccttaaatcagagttttaaaaataggccctgaactgaagcaagaggtaaactagrgaagcctcaggagaactgagacttctccagagagaagtatctgggatttaacttctttctaatgaggcttggttttccatgaacttttcctttaaaccaa

SEQ ID NO: 258087 - DNA, 201 bp, Homo sapiens
aaatgggtggttacatccttctggtgatctaggagccctattttcgtcctagcatacagcatttttctaaaatttgctgttagctttcatgattcttaccytaactattctttttctaaaaaacatttgtttcagctttaccactctgatgaattcagagcttatgactggggaaatgacgctgataatatgaaacattac

SEQ ID NO: 258088 - DNA, 201 bp, Homo sapiens
atactttaattaaataatactttgcatgtgcgctagatgctaggaactgcactaattgtcttttaaacatgacctactaacttcacaacagccctacccaktagaaaatttttccattttatagatgagaaaattcataataatagaaatttaaaactctcctaaggtatagaacgtgtttgaatccagaatgaaacacat

SEQ ID NO: 258089 - DNA, 201 bp, Homo sapiens
gttcttgtgtgtgtttgtggttgtttatccataagatatctaaatataccgactgactgaattaattctgttacacaaaatttcagagtcctgtagaataytcatcacattttaaaattcagaaaacgaacgtcaacattcagatctattcttagtgtcttagggccaacagctctctttgaatgtcctttgggacttaac

SEQ ID NO: 258090 - DNA, 201 bp, Homo sapiens
ctgtgtccggcctatttttttgatgatgtttttgaagaacagaagttttttattttaataattttttaatcttttttttgtttatggttagttgtctaccmcaaatttgtaaagatattattctttgttatcttctaacaactttgtacttaagcttttagttttagatttgcaatctgaggtatatttttgtatctggtt

SEQ ID NO: 258091 - DNA, 201 bp, Homo sapiens
tccggcctatttttttgatgatgtttttgaagaacagaagttttttattttaataattttttaatcttttttttgtttatggttagttgtctaccacaaayttgtaaagatattattctttgttatcttctaacaactttgtacttaagcttttagttttagatttgcaatctgaggtatatttttgtatctggtttggga

SEQ ID NO: 258092 - DNA, 201 bp, Homo sapiens
atctggaaatatatagaaatatattactcaagaccagccattccattgtttaccaacaactgaacatgtaaaaattgctcaaacatagcttattaagatamgaagtgaaaaaacatcactcaggttgcctaaacttgtattatttaatgtttttttttttctgatttatttcttccccactctctttttctttgccttcct

SEQ ID NO: 258093 - DNA, 201 bp, Homo sapiens
atcttccaatgagttacactgttcccaaactatcttcataaggggtagtaagacccagtgaaaagaaattgagtaaaacagatattgttcaaattctaaaytgacatttacgtttgctagcgatggaaaaataatgattataatgattaagcatatagatgctcagtccatggtatataaattatagattaaataggtaaa

SEQ ID NO: 258094 - DNA, 201 bp, Homo sapiens
agatctactgaaacagaatttttacttcaacaagatcttcaggtaattcacaggcccattagaatttgacaagcacttatctaaaacatattgcattcacyttgctctgtggataaaggtggttttctctgtgcaatcattgctagaattcacttataaaaccgccagttaatgttatacactctacttgaatagtaagta

SEQ ID NO: 258095 - DNA, 201 bp, Homo sapiens
ttataataaaaaattatttgagggtggaaagactcctacctgtcatttggtggcatttatactgatagaacttttttttaaaaaaattttaattttaattttaatttatttcagaaaatttataaattaaagaagcatatacaaagaaacttacatcatgtgtaatccttccatccagagataactagatgtactaacatt

SEQ ID NO: 258096 - DNA, 201 bp, Homo sapiens
acaaaatatgttgttatttttcataagtcaattgaaataattgtgccatattcagtatgagcaaaactagagacacagaagatttaaaaagttataaataygaagtatttgtatttataatataaagtataatatgtggttcttgtccttaagaagcttatgaactagttgaagaaccaagacatacatctgaaataatca

SEQ ID NO: 258097 - DNA, 201 bp, Homo sapiens
attataataaaaaattatttgagggtggaaagactcctacctgtcatttggtggcatttatactgatagaacttttttttaaaaaaattttaattttaattttaatttatttcagaaaatttataaattaaagaagcatatacaaagaaacttacatcatgtgtaatccttccatccagagataactagatgtactaacat

SEQ ID NO: 258098 - DNA, 201 bp, Homo sapiens
gggcctttaggtaaatattagctaagaaaactcaagggggaaattggaggcaattttaaaaaaataacgtggacgctattaatgattatctttgacgcttraagtcatatagctccttgtagtttctgttaagatctcaaaggagggtaacagcaagaagctctgatttttcactgattctcccacaagcaaagtatggca

SEQ ID NO: 258099 - DNA, 201 bp, Homo sapiens
agtttaaataataatgtttttcctatgataaagtaatactggatatagaaaatttagaaagtgtgaaaaacactttaaaaatgagaaaataatcatccaamtattcaccatctagatataactataattaaaatttgatgtttaggctttttttttctattatggtttgtgtcatcattgaactcaaaatatatgcacaat

SEQ ID NO: 258100 - DNA, 201 bp, Homo sapiens
aattataataaaaaattatttgagggtggaaagactcctacctgtcatttggtggcatttatactgatagaacttttttttaaaaaaattttaattttaattttaatttatttcagaaaatttataaattaaagaagcatatacaaagaaacttacatcatgtgtaatccttccatccagagataactagatgtactaaca

SEQ ID NO: 258101 - DNA, 201 bp, Homo sapiens
tgggcaccagcatgggtctgggtgaggtctatgctggggctggtgatatgggaggcatcacaattttcactgtgacccagagtctgctgagctccctaaargtggaggtggatcccaacatccatgctgtgaacacccaggagaagaagcagatcaagaccctgaacaagtttgcctccttcattgacaaagtgtggttcc

SEQ ID NO: 258102 - DNA, 201 bp, Homo sapiens
caattaaaatacggtgttaagaaacaggtgacatctaccataatggattcttggttctctgttctgaaacctggagttggcttttccaaatacggagtaargatcttaaagtgaattagatcttaaatgaataaatgctagttattactgttctttagttgtaatttctggttaataaagaattctagaagaaatgtgtgt

SEQ ID NO: 258103 - DNA, 201 bp, Homo sapiens
aaattataataaaaaattatttgagggtggaaagactcctacctgtcatttggtggcatttatactgatagaacttttttttaaaaaaattttaattttaattttaatttatttcagaaaatttataaattaaagaagcatatacaaagaaacttacatcatgtgtaatccttccatccagagataactagatgtactaac

SEQ ID NO: 258104 - DNA, 201 bp, Homo sapiens
ctcaagagaacttttaagtctctccaaacttttctcttgtcatttctatcacgtagctgccaaaattcatgagacaaaaagctgtacaatgagaaactctytttctaatctgagatccctgtgatttgtctcagactcagatcaaagaggcctgatggtacttgactatttaatggtacttaactttggcagagttagtaa

SEQ ID NO: 258105 - DNA, 201 bp, Homo sapiens
taaattataataaaaaattatttgagggtggaaagactcctacctgtcatttggtggcatttatactgatagaacttttttttaaaaaaattttaattttaattttaatttatttcagaaaatttataaattaaagaagcatatacaaagaaacttacatcatgtgtaatccttccatccagagataactagatgtactaa

SEQ ID NO: 258106 - DNA, 201 bp, Homo sapiens
taatctgagatccctgtgatttgtctcagactcagatcaaagaggcctgatggtacttgactatttaatggtacttaactttggcagagttagtaacaccwcttctttccctctattccaaatggtggaaaaatggacatagactcttagttccttggtcccgatggctgaaggctctctgagagtacaacttactcactc

SEQ ID NO: 258107 - DNA, 201 bp, Homo sapiens
acattcagatctattcttagtgtcttagggccaacagctctctttgaatgtcctttgggacttaacacggggtgaaggagaagatcactggggtttttatyctttaatctcctatacccttgaacctatgggagttgagtctggaaaaagatagatttccttttgtctttgccccgcgggatgccctctgtaggctttctg

SEQ ID NO: 258108 - DNA, 201 bp, Homo sapiens
atcaatattgttaaaatgtccatatgatccaaaacaatctacagattcaatgcaatccctatcaaaataccaatgacattcttcattgaaataaaaaaaaagcctaaaatttaagtggaaccatgaaggtagatgtctgctatacatagaagattaagtactcaacaaaccttgaatatgaagactggggaagtgaatagg

SEQ ID NO: 258109 - DNA, 201 bp, Homo sapiens
tactcactctcaggaagccactctagttccaaaagtgacctgaggtagagtcctgagataacaacacagcatcacaaaccacttataaagcacaggaaaartctagtcacttcttccctctcttctctctttttccacactttctcacttctttctttttcctttctcttttttagttgaaatgttcctattttacattgg

SEQ ID NO: 258110 - DNA, 201 bp, Homo sapiens
aaattcattaaatttgcaggatacaacatcaacatacaaaattcagcagcatttcaatatgccaagagcaaataatcttaaaaaaaagaaagaaaaaaaaacaagaaataatcccatttataatagctacaaataaaataaaacacctaggaataaaccataccaaagaagtgaaagatttctacaatgaaaactataaaa

SEQ ID NO: 258111 - DNA, 201 bp, Homo sapiens
tgtatataatcccttacaaatgagaaaacaagacagagaacttaaataacttacccaagtaagtagctcagaagggactagatcccaggtttgcctggcaycaaattttatctcttaacctttcttttatactacagaaattcaggaatgagatttttcttgtagacactgagaaagttcaaatatgaaattcttgttgcc

SEQ ID NO: 258112 - DNA, 201 bp, Homo sapiens
ttgaacattgtttttaatgtacctcttggctatttgtatgtcttcttttgagaaatgtctactcagatcttttgtccatttttaaatcagattttttttttgcaattgagttatatgacctctttatatattctggttactaatcccttgtcagatgggtagtttacaaatattttctctcattcaacaggttctttagtt

SEQ ID NO: 258113 - DNA, 201 bp, Homo sapiens
tgtttgctttattattctctcctttagataagcattccaggtaattgctcttttcagaggagcttggtaaatctgttatagaattaagtgaatacgactarccttgcaagaaaagcatcagtaggcctcgacaaatcaaatttttctgatttcagtttcttaaaaatgttgacttgcaatcaaggtgacacccttaaaagt

SEQ ID NO: 258114 - DNA, 201 bp, Homo sapiens
cgattttcccttatattcaaggtattatttgaccttaagaaaaaccgttttacatttcataccaattaatgagaaaaaaatattggcaagcactgactgggcagaatacagggaagcttcactatggagaagtgaatttgggattgagggcctttattgcaatctccttgtaaataatatttgatactcttcctcatctgg

SEQ ID NO: 258115 - DNA, 201 bp, Homo sapiens
cccacacaattaagagatattttgggatggtgagatctttccattcctcttcatttgcacagctctcttcaaacttctgcataccctgacgtgtgtaggaygtggtgcaattcaagttaattcagccaaaagatatctaggagctactacttcaaggccctggcattaggaaacagctatgtctacaaggaaactttccag

SEQ ID NO: 258116 - DNA, 201 bp, Homo sapiens
attcagagtctttttatcaattgttcagtcaattatttcagttcttctttttctggccaagacagttttaatgttccaacaagtgtttcagtacacacatacacacacacacacacacacacacacacacacacacatgctagtggaggcccaggaagggacctctggaaaccaaattatatggatattctccctagccta

SEQ ID NO: 258117 - DNA, 201 bp, Homo sapiens
agaaaggctttctgaaacaagagagaaacatgagcaacattgaagtggtgaagctcaggccatggagaaccacacataactcactttactggagatttatrttagtatttgtgaaggagagtatgagaaatcatgttggaaatgtagaggcagatgataaagggatttgagcgccaaattaatgaatttggaatgtattat

SEQ ID NO: 258118 - DNA, 201 bp, Homo sapiens
agaaatggtgtagagaagaagaaatgactttagttggttttggaaagtgggtaggacttagatatgctcttatacttgatctgcaaaaaaaaaaaaaaaaaccatggagaatttgattatctgtgctctgtgtttcatttaggacataaatatttttagtgactgttgtttgcattttggacagagcaatttctgttatgt

SEQ ID NO: 258119 - DNA, 201 bp, Homo sapiens
tggaaatgtagaggcagatgataaagggatttgagcgccaaattaatgaatttggaatgtattatataagtaattggggagcatggaaatatttgcacagrggaatgacacgcataatgcccctttttagaaagattcccctgggaaccaaatgtaagcagatgagggtaaaggacatcaagaagggtgaaagattaggag

SEQ ID NO: 258120 - DNA, 201 bp, Homo sapiens
ggcttgaattctagaatgaggagccagccatgccatagcaggggaatgatactccttaaaagggaaaatttaactacaaatcctctgaagtagaaatgatragaataaccaaaatatctgcaatggttcaatagcaaataatttattggcagctgcttaccgtgttcattttgcatcttttttcccaccacacatattaag

SEQ ID NO: 258121 - DNA, 201 bp, Homo sapiens
tcatgaccaatgtgcacattcattcagccaatgtttactgagtggctactgtatgcgctgttctaggccccgaacattcaaacagggaacagacaaactcygacctcacaaagcttatgttcattttagtgataattttacaagtcattgctcctggattgccaatcaactgtgtaaagatgatttggaccaggaccttat

SEQ ID NO: 258122 - DNA, 201 bp, Homo sapiens
agattcccctgggaaccaaatgtaagcagatgagggtaaaggacatcaagaagggtgaaagattaggagaatcattatggagttattgttaacacatcagytgatagatgttggggattggacaagagttgtgcactgatgagaagaatgattatggggttattgttaacacatcagctgatagatattggggattggaac

SEQ ID NO: 258123 - DNA, 201 bp, Homo sapiens
ggtaatgaaaaccaaattgtgctattgtgctatctatctatctatctatctatctatctatctatctatctatctatctatctatttatctatctatctahagatagaacctcctcttttgaatttatgttttaagaatatcaagctatttgttgatatacatgattgccttctattgatctatagttctattacttttaa

SEQ ID NO: 258124 - DNA, 201 bp, Homo sapiens
atgtaagcagatgagggtaaaggacatcaagaagggtgaaagattaggagaatcattatggagttattgttaacacatcagttgatagatgttggggattrgacaagagttgtgcactgatgagaagaatgattatggggttattgttaacacatcagctgatagatattggggattggaacaagagttgtgcaacaaaaa

SEQ ID NO: 258125 - DNA, 201 bp, Homo sapiens
caaatactgtccggtaatgaaaaccaaattgtgctattgtgctatctatctatctatctatctatctatctatctatctatctatctatctatctatttawctatctatctatagatagaacctcctcttttgaatttatgttttaagaatatcaagctatttgttgatatacatgattgccttctattgatctatagttc

SEQ ID NO: 258126 - DNA, 201 bp, Homo sapiens
agaagaatgattatggggttattgttaacacatcagctgatagatattggggattggaacaagagttgtgcaacaaaaaataatctgtaagatatgacaawgaaatgatagacaacgtttaggtatatttttgactttttgaggaacgggctttctttctcctctcctctcccatcagccagatgctcgcaggcatgcttg

SEQ ID NO: 258127 - DNA, 201 bp, Homo sapiens
aacaaatactgtccggtaatgaaaaccaaattgtgctattgtgctatctatctatctatctatctatctatctatctatctatctatctatctatctattyatctatctatctatagatagaacctcctcttttgaatttatgttttaagaatatcaagctatttgttgatatacatgattgccttctattgatctatagt

SEQ ID NO: 258128 - DNA, 201 bp, Homo sapiens
tttgaggaacgggctttctttctcctctcctctcccatcagccagatgctcgcaggcatgcttggtgaaaggcttccttttttatgggagcttctggactragacaaccttttttctctctctgattagcacttccttttcattgatgctgccagttctttcaattgctccatttctattacattcaactcagttcatgag

SEQ ID NO: 258129 - DNA, 201 bp, Homo sapiens
cagttaatgttacttctataatgtaatattctgtaaaaacttttctctctctcttttattgtatttagcttacacctcctttatacaacattactaagatsgaagttccaacagcaatatggaatggtggacaggacattgtggctgatcccaaggatgttgaaaatttacttcctcaaattgctaaccttatttattaca

SEQ ID NO: 258130 - DNA, 201 bp, Homo sapiens
tgaaaaggggactgcattgacctcctgcttctcaggaggaatttaatgctagatatgcatcaacagagtttatcaaaattggtttgaattattggattagyctttaaatagttatcagggaggctcactctttgcctgataattctctgaagacagacaggaacctaaaaatacaaacagcaagactgatcttgctaactg

SEQ ID NO: 258131 - DNA, 201 bp, Homo sapiens
agctgaacacttccttttactccacatttgtttaattggcatgaaatttcccactccactaaaacagatcttaggatttggacaacacaaaatatcatttkttttgaaaggatttgaggataaatccaaactaatagaactgaaacttctatattatgctgggtagcaacttagttttccctacccttcttcatgctggga

SEQ ID NO: 258132 - DNA, 201 bp, Homo sapiens
ctgaaaaacaaatactgtccggtaatgaaaaccaaattgtgctattgtgctatctatctatctatctatctatctatctatctatctatctatctatctadctatttatctatctatctatagatagaacctcctcttttgaatttatgttttaagaatatcaagctatttgttgatatacatgattgccttctattgatc

SEQ ID NO: 258133 - DNA, 201 bp, Homo sapiens
ctatctatctatctatctatctatctatttatctatctatctatagatagaacctcctcttttgaatttatgttttaagaatatcaagctatttgttgatrtacatgattgccttctattgatctatagttctattacttttaaagcaagaggggtctcaaaagacaattgacttgataatatagctttgtcagaaagaat

SEQ ID NO: 258134 - DNA, 201 bp, Homo sapiens
cctctctcatcttaccctttcccccaccaggtccccggccagttgtgtatatgcagcatgccctgtttgcagacaatgcctactggcttgagaattatgcyaatggaagccttggattccttctagcagatgcaggttatgatgtatggatgggaaacagtcggggaaacacttggtcaagaagacacaaaacactctcag

SEQ ID NO: 258135 - DNA, 201 bp, Homo sapiens
tagcacttccttttcattgatgctgccagttctttcaattgctccatttctattacattcaactcagttcatgagagttgaactgaattgagtataaagcrtaaagacttaagtcagacagaactgggttcacattctgcccctgcctcctgcctattgtaaccttggacaagttatttaaccatgctaagcctcaatttt

SEQ ID NO: 258136 - DNA, 201 bp, Homo sapiens
tgtctgaaaaacaaatactgtccggtaatgaaaaccaaattgtgctattgtgctatctatctatctatctatctatctatctatctatctatctatctatytatctatttatctatctatctatagatagaacctcctcttttgaatttatgttttaagaatatcaagctatttgttgatatacatgattgccttctattg

SEQ ID NO: 258137 - DNA, 201 bp, Homo sapiens
gtcaagaagacacaaaacactctcagagacagatgagaaattctgggcctttaggtaaatattagctaagaaaactcaagggggaaattggaggcaatttwaaaaaaataacgtggacgctattaatgattatctttgacgcttgaagtcatatagctccttgtagtttctgttaagatctcaaaggagggtaacagcaag

SEQ ID NO: 258138 - DNA, 201 bp, Homo sapiens
gttcttctttttctggccaagacagttttaatgttccaacaagtgtttcagtacacacatacacacacacacacacacacacacacacacacacacatgcyagtggaggcccaggaagggacctctggaaaccaaattatatggatattctccctagcctacccagtgttgtgctaatctccatcctcacagatatacaaa

SEQ ID NO: 258139 - DNA, 201 bp, Homo sapiens
aagaaccatagccaggggtacataagtaatattggtggaactttgaaaaaatacacatgtccagaactcaacctttgagattttgatttttattcagtacrtttggatagcttataagtaggttaaaatatttttaaagccctaagatgtttctgatgcttactttggtggaaaataactcttttaatttaaaaaatagtg

SEQ ID NO: 258140 - DNA, 201 bp, Homo sapiens
aagctagttagatctttgtctgaaaaacaaatactgtccggtaatgaaaaccaaattgtgctattgtgctatctatctatctatctatctatctatctatstatctatctatctatctatctatttatctatctatctatagatagaacctcctcttttgaatttatgttttaagaatatcaagctatttgttgatataca

SEQ ID NO: 258141 - DNA, 201 bp, Homo sapiens
atctttgacgcttgaagtcatatagctccttgtagtttctgttaagatctcaaaggagggtaacagcaagaagctctgatttttcactgattctcccacargcaaagtatggcatttcaacaagatcatttttacatccaattctgtgaattctatgcattaaaagtatgtccaaagagacagctcaggaaattatcatga

SEQ ID NO: 258142 - DNA, 201 bp, Homo sapiens
ggcatttgccccttctaatccagtcccattttaacaaattacactccaagtaggaggataaacaagtcattttcattctaatccattcttggattcttccrtgtacctcattcctagggtagcttttccttcaaacttttgtgatctcaggagtctccattagggatttccagaaagtgattttccaaatggaatgaacaa

SEQ ID NO: 258143 - DNA, 201 bp, Homo sapiens
ctaaatataccgactgactgaattaattctgttacacaaaatttcagagtcctgtagaatattcatcacattttaaaattcagaaaacgaacgtcaacatwcagatctattcttagtgtcttagggccaacagctctctttgaatgtcctttgggacttaacacggggtgaaggagaagatcactggggtttttatccttt

SEQ ID NO: 258144 - DNA, 201 bp, Homo sapiens
attccaatcaccatttatttactcttgcaaattagaggagacaaattaaaactagatccaacttgaatgtctagctaagtgtcctgtgtctttttttttttaaagaatctacatttgaatatacctcctacagaaattcaaatacaaaatgagctctagagaataccacacatacatgctgcacattaagcaggaagcgag

SEQ ID NO: 258145 - DNA, 201 bp, Homo sapiens
gttctaggccccgaacattcaaacagggaacagacaaactctgacctcacaaagcttatgttcattttagtgataattttacaagtcattgctcctggatkgccaatcaactgtgtaaagatgatttggaccaggaccttattgatttagagaaactgtgattgatttagagaaactgagatcgcacatagtaccattttc

SEQ ID NO: 258146 - DNA, 201 bp, Homo sapiens
tctattcttagtgtcttagggccaacagctctctttgaatgtcctttgggacttaacacggggtgaaggagaagatcactggggtttttatcctttaatcycctatacccttgaacctatgggagttgagtctggaaaaagatagatttccttttgtctttgccccgcgggatgccctctgtaggctttctgaagacactg

SEQ ID NO: 258147 - DNA, 201 bp, Homo sapiens
aataggaagagaggaagtcaaactacttcttttcatggatgatgtgattctatatctaaaaaaccccatagtctcattctaaaggctccttacactgatawcttcagtaatgttttaggatacaaaatcaatgtaccaaaatcagtaacaatgtccaagctgacagccaagtcaagaacataatcccaatcataatagcca

SEQ ID NO: 258148 - DNA, 201 bp, Homo sapiens
gaccttattgatttagagaaactgtgattgatttagagaaactgagatcgcacatagtaccattttcaggaaaactccaatattagatttttaaaaccttkttaatgggcaatgaagaagaatcttttttgatatcttgtttcttttaatggaagagttttctgctgtcaccagaggacaggctgatgcctgcgatagact

SEQ ID NO: 258149 - DNA, 201 bp, Homo sapiens
ggagaagatcactggggtttttatcctttaatctcctatacccttgaacctatgggagttgagtctggaaaaagatagatttccttttgtctttgccccgygggatgccctctgtaggctttctgaagacactgctgaggacaggacagagctggtggaggaaaaagttcttcaaagatgggcttttttggttaatatgtc

SEQ ID NO: 258150 - DNA, 201 bp, Homo sapiens
aatagcttaaacccaggaggcagaggttgcagtgggctgagattgtgccatggcactccagcccaagtgacagagcaagactccgtctcaaaaaaaaaaaagaaaacaataataatattaaatgccatttatgacaaacccacagccaacataatactgaataggcaaaagcttgaagcattccccttgagaactgaaaca

SEQ ID NO: 258151 - DNA, 201 bp, Homo sapiens
ttttctgctgtcaccagaggacaggctgatgcctgcgatagacttttctttcttcaggcctaagctccctgttggtttgtaaacctgatgctagaacagastgtgtattcctattacattaataaaacattcagtacccactgaaagtttgagaatagtggaggaatagaatagaatgttatagtctgagttcttgggcag

SEQ ID NO: 258152 - DNA, 201 bp, Homo sapiens
tcaaaaccacaatgagataccatctcatgccagagagaatggcgattattaaaaagtcaggaaacaatagatgctggcgaggctgtggagaaataggaacrcttttacactgttgatgggaatgtgaattaattcaaccattgtggaagatagcatggctattcctcaaggatctagaatcaaaaataccatttgacccag

SEQ ID NO: 258153 - DNA, 201 bp, Homo sapiens
ctggtggaggaaaaagttcttcaaagatgggcttttttggttaatatgtcttcagattatatggtacatgttttttccttaaagaaagggaaaagaggccrggtgcagtggctcacacctgtaatcccagcactttgggaagctgaggcaggtggatcacgaggtcaggagagcgagaccatcctggctgacacagtgaaa

SEQ ID NO: 258154 - DNA, 201 bp, Homo sapiens
catctcaacaaacatatgaaaaaaagctcaacatcactgatcatcagagaaatgaaaatcaaaaccacaatgagataccatctcatgccagagagaatggygattattaaaaagtcaggaaacaatagatgctggcgaggctgtggagaaataggaacgcttttacactgttgatgggaatgtgaattaattcaaccattg

SEQ ID NO: 258155 - DNA, 201 bp, Homo sapiens
attagccaggcgtggtggtgcgcacctgtagtcctagctactcgggaggctaaggcaggagaatggaacccaggaggtggagcctgcagtgagctgagatygcaccactgcactccagcctgggtgacagagcgagactccatctcaaaaataaaaataaaaataaaaataaaaaaaagaaagaaagggaaaagaggaaaa

SEQ ID NO: 258156 - DNA, 201 bp, Homo sapiens
tcaatagacacagaaaagactcttaagaaaattccacatcccttcatgttaaaaaccctcaacaaactaagcatcaaagaaacttacctcaaaataataaragccatctcaacaaacatatgaaaaaaagctcaacatcactgatcatcagagaaatgaaaatcaaaaccacaatgagataccatctcatgccagagagaa

SEQ ID NO: 258157 - DNA, 201 bp, Homo sapiens
ttttcctaggacttggcaacaagcattttgagaaatttattctgcccttgaacatctttgagcccattgagatgttctccaacgcaaacagtaggttaagygtcctcactttacaatggcaaatcacttaatggaggtcatgtgggttcctgaaatgtttgatgaaagcctctggtttgaatgttacaacactactggtta

SEQ ID NO: 258158 - DNA, 201 bp, Homo sapiens
tgggaaaatcacataataacctcaaatcagtaaatgtttatggaataactattataaacaacatttaaaatcaccatgattactttgaacacacgttatayagagattggatatagagaagtcaaaggcccacacatccctcacccaaatctgggctctcaaaataagcaggcaaaagtcttaaacacaaagcataataag

SEQ ID NO: 258159 - DNA, 201 bp, Homo sapiens
  misc_feature (1)...(201): n = A,T,C or G
caaggaaatgtattcactttcattttgtctttttcctttcagctttgatgaaatggctaaatatgaccttccagccacaatcgacttcattgtaaagaaanctggacagaagcagctacactatgttggccattcccagggcaccaccattggtaagtaatggcagtcaaggccaagtggtttacttctcataaacacttt

SEQ ID NO: 258160 - DNA, 201 bp, Homo sapiens
ctccagagctagcagaagaaaaaataaccaaaattacagcttaactgaatgaaactgagatgcaaagaaacatacaaaagatcaacaaaatcacaagttgyttccttgacagaataaataaaattgatagactgctagctagactaataaagaataaagagagaagattcaaataaatacagtcagaaatgacaatgggga

SEQ ID NO: 258161 - DNA, 201 bp, Homo sapiens
aaactgagatgcaaagaaacatacaaaagatcaacaaaatcacaagttgtttccttgacagaataaataaaattgatagactgctagctagactaataaakaataaagagagaagattcaaataaatacagtcagaaatgacaatggggacattaccaccaccccacagatacataataatccctcagagactatcattat

SEQ ID NO: 258162 - DNA, 201 bp, Homo sapiens
ttattatttactttcataggctgtttttggtaccaaaggtttctttttagaagataagaaaacgaagatagcttctaccaaaatctgcaacaataagataytctggttgatatgtagcgaatttatgtccttatgggctggatccaacaagaaaaatatgaatcaggtatgtatgataattatagggccatttgatacctt

SEQ ID NO: 258163 - DNA, 201 bp, Homo sapiens
actatatttctgagcaactatttatgtaagactttgcccatattctttttttgagatagagtctcgctgtcacccaggctggagtgcagtggcgcgatctsggctcatagcaagctccgcctcttgggttcacgccattctcctgcctcagcctcccgagtagctggaactacaggcgcccgccaccacgcccggctaatt

SEQ ID NO: 258164 - DNA, 201 bp, Homo sapiens
aactgaatcagtactaaaacactaccaaccagaaaaagccctggaccagaatgaattacagtccaattttaccatacatgtaagaagagctggtgccaatyttattgaaataattccaaaaaatcgaggaggagggactcttctctaactcattttatgaagccagcatccatcattctgatgccaaaatctggcagaaac

SEQ ID NO: 258165 - DNA, 201 bp, Homo sapiens
aagaagaaattatgttaactgcgcatctgttttccaaaggaatgttgatgttctgtctctcattctcccacatgactatgcattcctgctctggtggctaygctcatttaaagaggtttacaaagctgccctcaaagtactacacccctgtgtgtgagagacttcccaggacttaccactacccattgccattacacagac

SEQ ID NO: 258166 - DNA, 201 bp, Homo sapiens
cacagacctgtcccatatcccagatccccagcacactgtcctctcctttctgaagtactaatacctgatataataagctaataattctaactgttcatggmatttctggtcttcttaaacaataccctttcctttgttgacagccagaggagtgatttcaatgggatatattcccaaatagaagaaaaagatgccgtgctt

SEQ ID NO: 258167 - DNA, 201 bp, Homo sapiens
taccaggttggtctttaactaactgaagcaatgacactaatttaagagccagggccagcatctagaaaactctttgaataataggatgtaagtaaaataarctgggtttataattatgaatattctccacacactcccttttctctaatatttaggaaatataatagaaatcatgaaaatattagggaaaattacatatca

SEQ ID NO: 258168 - DNA, 201 bp, Homo sapiens
ggtaagtattcaacaattacagctccataactgaaacaactgacctatcccctgaccataactgggaagtcaatacaaagccaaaataaatgactcaggayattttgagatcatattttagagtgtttgggtagaaacaacctattaacaattagaatctaatcaaatccatttcccttagcttgagttgcaatctatgtt

SEQ ID NO: 258169 - DNA, 201 bp, Homo sapiens
gtaaccaagctcttaacctttatgctttaatattataagtatgtattataaactagccattcagaacaagaagaatgataaggaaaacactgttcctgccyaagtggcactcagagtaatgaaaacatcagatactatacagctatagtttgagtatcctatgtccaaaatgcttgagaccagacatattttgaattttgt

SEQ ID NO: 258170 - DNA, 201 bp, Homo sapiens
tttggagccaatggcatcagcatcacctatgaatgcagaatctcaggctgttccccagatctactgaaacagaatttttacttcaacaagatcttcaggtrattcacaggcccattagaatttgacaagcacttatctaaaacatattgcattcactttgctctgtggataaaggtggttttctctgtgcaatcattgcta

SEQ ID NO: 258171 - DNA, 201 bp, Homo sapiens
tacccaaaggaatataaaccattctactataaagatacatgcacatgtatgtttactgcagcactgtttacaataacaaagacatggaaccaacggaaatrcccatcaataatagactggataaagaatatgtggtacatatgcaccatggaatactatgcagtcatagtaccatgcagccaatgagataatgtactttgc

SEQ ID NO: 258172 - DNA, 201 bp, Homo sapiens
agttaagagtatggatttagatcagtttaaattcaaaccctacatttggaactgacttaaacgtctctgtcttgatttcctcatccacaaaatgggttatygggaagatcaaatgagctagtatgtttaaagcatatagaacattgtacaaagcatatagcacatagtaatagcatataaggttttctactactattcata

SEQ ID NO: 258173 - DNA, 201 bp, Homo sapiens
ccagaggacaggctgatgcctgcgatagacttttctttcttcaggcctaagctccctgttggtttgtaaacctgatgctagaacagactgtgtattcctaytacattaataaaacattcagtacccactgaaagtttgagaatagtggaggaatagaatagaatgttatagtctgagttcttgggcaggggcaagcatcag

SEQ ID NO: 258174 - DNA, 201 bp, Homo sapiens
tttaggaggtgtcacaacaattctcctattcttgtaagtcccaatctatagatttcctcacatgttcttttaataaacaggcttctagcttatggaatacytgatttgactaaatgttatataggcccttttgttcctcctgtctgaagaacaaaatactagtactatggaatattggtatatattaaatatatatctata

SEQ ID NO: 258175 - DNA, 201 bp, Homo sapiens
gtactctaagtagctgtgagcctgcagtgcacagactatatgtagggcaaacctttcctgggtctctggtcacagcagcatattgactacggtgatgcaayttcccaggaataacatgtgttccaaattcaaagaaataattccacagagtaagtttctagattccctctgagctgaaaaagtaaaattcaatgccatgga

SEQ ID NO: 258176 - DNA, 201 bp, Homo sapiens
ataacagcagaatacatattcttctcatgtgcacatggcatatactctaaaatcgaccacacactcaaccataaagcaattctcaacaaattaaaaaaaaactgaaattatactatgtacactcatgaatcacagtacaataaaagtagaaatcaataccaagatgatccatcaaaaccatgcaattagacaaccttctcc

SEQ ID NO: 258177 - DNA, 201 bp, Homo sapiens
aatgtaagcactatgtagaaatttctaaagttttttaagctgacaacttacttcttaatttacttactttacttaatttactttacaatttactttccagrtattttggaaagaaatcaataatctagttccaagtaaaagttgaaaggaacccacactaataaaagctttgaatttgtcattgaacttccactaaagttt

SEQ ID NO: 258178 - DNA, 201 bp, Homo sapiens
aataattatctgaaaactatgaactactgtcttcttccatttcagcttttatagcattttctacaaacccagaactggctaaaaagattaagatatttttkgcactggctccagttgtcacagttaaatacacccaaagtcctatgaaaaaactaacaaccctttccaggcgagtagttaaggtatgtgacttcccaagtt

SEQ ID NO: 258179 - DNA, 201 bp, Homo sapiens
agtgcttcttattcctgcttgatgcacacatatctctgcaagaccctcaagaagtgctctcagagaactcactgcagggttctgctggcacctgccactgycacattgatgtttttggaatcagcatcaactcttcatttttatttacttcattcccatttcttctccttgtcctcagtgtctgggttttgagcatggttc

SEQ ID NO: 258180 - DNA, 201 bp, Homo sapiens
gcggtcaacatttaaatttgggaaattcagagaacccctgcaagatagtatataagacaaccatccccaagacacatagtcatcagattctccaaggtctrtatgaaagaaaaaatattaaaggcagctagagagaaggggcagttcaccaacaaagggaacctcatcaggctaactgtggacctttcagcagaaacccta

SEQ ID NO: 258181 - DNA, 201 bp, Homo sapiens
acacataagcataatatttgatgactgaataattccattttttctcacccataatttaggtcaacagtctcttacttcgggaaattttactgtcttaagayatataataagaaataattttatacccagtgtttatatagacgtcatttttcttttagatagattcctgaaaacaaaattactgagtgaaggttatgaata

SEQ ID NO: 258182 - DNA, 201 bp, Homo sapiens
aaagaatttaaaaaatgaacaaaatctgcagaaaatataggattatgtaaagacaccaaacctacagctctctggcattcctgaaagagaggaagagagaggaagtaacttggaaaacatatttgatgatattgtctatgaaaatttccccaacctcactagagcggtcaacatttaaatttgggaaattcagagaacccc

SEQ ID NO: 258183 - DNA, 201 bp, Homo sapiens
ggtagaatcatggctcactgtagccttgacatcctgggtttaagcaatcctcccatctcagcttcctgagtagctggcaccacaggcatgcaccaccatgmccagataacgtttgtttctttttacaaagatgaggtcttgttttgttgcctaggctggtcttggactgctggactcaagcaatcctcccacctcagccta

SEQ ID NO: 258184 - DNA, 201 bp, Homo sapiens
atttcattccatagtgagaaagaaaacctgttagaataactgggtgatgctgcagaaagaaatcaattcacctcctgtgactgattatttgcttctggaarctctgtgattcattctggcatctcagagttagggatgaaatgagaatgttgccagcatttaccccatgcttgggaagtttacacagcagtagctactcca

SEQ ID NO: 258185 - DNA, 201 bp, Homo sapiens
aaaagaatttaaaaaatgaacaaaatctgcagaaaatataggattatgtaaagacaccaaacctacagctctctggcattcctgaaagagaggaagagagaggaagtaacttggaaaacatatttgatgatattgtctatgaaaatttccccaacctcactagagcggtcaacatttaaatttgggaaattcagagaaccc

SEQ ID NO: 258186 - DNA, 201 bp, Homo sapiens
taacagactcacagctccacaggctgtacaggaagcatggctaggaggcctcaagaaacttacaatcaatcaccgtggaaagtgaaggggaagcaagcacrtcttaccacggtggagcaggagagagagagcacaaagcgggaagtgccacacactttcaaacaaccagatcttgtgagaactcacttactatcaggagaa

SEQ ID NO: 258187 - DNA, 201 bp, Homo sapiens
tatacaaggtcatcagcaggctgagtatatgtcagaatttctagctgaactgagtgctatatgacaacaaggatttttcttgttttcccaagtgttttttkttccatttagtcaggtaggtcaatgaattcacattgcccaaatgaaagacacttcaagttacccataatcactgatgtgtccaattttgacattagaaaa

SEQ ID NO: 258188 - DNA, 201 bp, Homo sapiens
agcttaggaaaaaatctcagagattgaagactggttatttcagtgaacccagtcagacaaaaataaagaaaaaagaatttaaaaaatgaacaaaatctgcwgaaaatataggattatgtaaagacaccaaacctacagctctctggcattcctgaaagagaggaagagagaggaagtaacttggaaaacatatttgatgat

SEQ ID NO: 258189 - DNA, 201 bp, Homo sapiens
ggctaggaggcctcaagaaacttacaatcaatcaccgtggaaagtgaaggggaagcaagcacatcttaccacggtggagcaggagagagagagcacaaagygggaagtgccacacactttcaaacaaccagatcttgtgagaactcacttactatcaggagaacagcaaaggggaagtccgcccccatgattcagtcacct

SEQ ID NO: 258190 - DNA, 201 bp, Homo sapiens
gctaatctgggacagtactcgaatgcagtgtacacatgggtaacatggaaaaccccgattttcccttatattcaaggtattatttgaccttaagaaaaacygttttacatttcataccaattaatgagaaaaaaatattggcaagcactgactgggcagaatacagggaagcttcactatggagaagtgaatttgggattg

SEQ ID NO: 258191 - DNA, 201 bp, Homo sapiens
tcattatttctaattcttacaaggaccttgcaaggtaaatattattatccctatttttttcagaggttcagagagggtaggtaaattaccagagttattcagctagtaaacaaccagagacaggggctcaagatggtcaactggatacagccaggaagagtttctcccattaagagacaagaccatcaagaagattggaac

SEQ ID NO: 258192 - DNA, 201 bp, Homo sapiens
tcaggagaacagcaaaggggaagtccgcccccatgattcagtcacctcccaccaggcccctcacctgacaagtgtggttacaattagagatgagatttggrtggggacacagagccaaaccaaatcatcagatttgatcctagagcccaagttcctaagtagtacgtcctattgcctctcatttctaaaagcttgcagaat

SEQ ID NO: 258193 - DNA, 201 bp, Homo sapiens
tgtataaattcatatggtattccaaacccttaaagacagatttttttttgcttttaaaaatgtttatgggtatataatagttgtacatatttatgagacayatatattttgatataagcatacaatgtgtaatgaccaaatcagggtaattgggatatccatcacctcaagcatttatcatttctttttgttagagacatt

SEQ ID NO: 258194 - DNA, 201 bp, Homo sapiens
gagccaaaccaaatcatcagatttgatcctagagcccaagttcctaagtagtacgtcctattgcctctcatttctaaaagcttgcagaatttcaacagcavactgctgcctctctgaatataaatcatgatgagaataattttaaactaaaaatcaggactaaattggtaagtgggaaaaatatctgagattcaagctaag

SEQ ID NO: 258195 - DNA, 201 bp, Homo sapiens
atagttataagagcagttatgacagcaataataattattgcttctgaaggtgatattattattgctgccatagagttgcaccagaatcaagctatattaayctgtattaatttatatgtcaatatattatattactatacaatagcaaaacagattagcagggagggtgtattttctaacataatttgaagatctgtattt

SEQ ID NO: 258196 - DNA, 201 bp, Homo sapiens
atattactatacaatagcaaaacagattagcagggagggtgtattttctaacataatttgaagatctgtattttataagtaactgtaaaaggaagccctcytgaaaaatgttccccttggttgtttttgcaaagttgttctttgctttaaacttaagtagtttcaaagacaaatgagaaatactcataatctttttctctc

SEQ ID NO: 258197 - DNA, 201 bp, Homo sapiens
cctagctactcgggaggctaaggcaggagaatggaacccaggaggtggagcctgcagtgagctgagatcgcaccactgcactccagcctgggtgacagagygagactccatctcaaaaataaaaataaaaataaaaataaaaaaaagaaagaaagggaaaagaggaaaagaagaaactttttaaatttctctcaaatgttt

SEQ ID NO: 258198 - DNA, 201 bp, Homo sapiens
ataaatgtcaaaattatctgcctcatcaatcctatatgggtggcaaataacagaaaaatgaagtgctgcatatatgcatgaccttatattctaatatttgragtttcaataccaaaatgcaaaagtagtcatgcacagtgtctcagtcagcccatggctacattatgcacatcacagcaggtggcttgactccacatatgg

SEQ ID NO: 258199 - DNA, 201 bp, Homo sapiens
agagaatcaagagtttttgtgtgtgttttgtttttgtttttgttcttgtgtgtgtttgtggttgtttatccataagatatctaaatataccgactgactgaattaattctgttacacaaaatttcagagtcctgtagaatattcatcacattttaaaattcagaaaacgaacgtcaacattcagatctattcttagtgtct

SEQ ID NO: 258200 - DNA, 201 bp, Homo sapiens
tgactccacatatgggaggcagagagcagccatgtaccttacacagaactgcggaagctcagtgggtgaatatttcttttaatagtaaaaaaaaaaaagtytaaggatagggaatataatcataacagtttagaccacatcatgaggataaggtacaaagttgtataataacaatagcagtaatttttaaatgtaagaaat

SEQ ID NO: 258201 - DNA, 201 bp, Homo sapiens
agaaaatttagaaagtgtgaaaaacactttaaaaatgagaaaataatcatccaaatattcaccatctagatataactataattaaaatttgatgtttaggytttttttttctattatggtttgtgtcatcattgaactcaaaatatatgcacaatttgaagtctgtttttccctatgtattatgtagtaggaattttcaca

SEQ ID NO: 258202 - DNA, 201 bp, Homo sapiens
ctataattaaaatttgatgtttaggctttttttttctattatggtttgtgtcatcattgaactcaaaatatatgcacaatttgaagtctgtttttccctaygtattatgtagtaggaattttcacatatcacacataagcataatatttgatgactgaataattccattttttctcacccataatttaggtcaacagtctc

SEQ ID NO: 258203 - DNA, 201 bp, Homo sapiens
tgtagtaggaattttcacatatcacacataagcataatatttgatgactgaataattccattttttctcacccataatttaggtcaacagtctcttacttygggaaattttactgtcttaagatatataataagaaataattttatacccagtgtttatatagacgtcatttttcttttagatagattcctgaaaacaaaa

SEQ ID NO: 258204 - DNA, 201 bp, Homo sapiens
atggcaagtttgatatctgtactggggactacacatggtttgtttggaaaattacatcctggaagccctgaagtgactatgaacattgtaagttactctgsggaaaaactctataaaactaaaagatgctattatttaaaatcataatgagttaaagattttatatgaccaattaaaaataaacagtaatattcatttatt

SEQ ID NO: 258205 - DNA, 201 bp, Homo sapiens
taatcaacaattaaaatacggtgttaagaaacaggtgacatctaccataatggattcttggttctctgttctgaaacctggagttggcttttccaaatacrgagtaaagatcttaaagtgaattagatcttaaatgaataaatgctagttattactgttctttagttgtaatttctggttaataaagaattctagaagaaa

SEQ ID NO: 258206 - DNA, 201 bp, Homo sapiens
ttttctcacccataatttaggtcaacagtctcttacttcgggaaattttactgtcttaagatatataataagaaataattttatacccagtgtttatatasacgtcatttttcttttagatagattcctgaaaacaaaattactgagtgaaggttatgaatacttttaaatttacaagacatgttaacaaatttttttcat

SEQ ID NO: 258207 - DNA, 201 bp, Homo sapiens
aactaacacaggaacagaatatcaaataccacatgttcttactcataagtgggagttgaacaatgagaacacatggacacagagaggggaacaacacacascagggcctgtgtgtgagggttggatggcgagggaagggaacttagaggatgagtcaataggagcatcaaactaccatggcatatgtacacctatgtaaca

SEQ ID NO: 258208 - DNA, 201 bp, Homo sapiens
  misc_feature (1)...(201): n = A,T,C or G
atgaatacttttaaatttacaagacatgttaacaaatttttttcataaaggttttgccaatgattaactctaccatcagaaaaaagtaccaaccaatctantaactagagataccaaatgtgctttgattaatttattggccattatatttcttttccacacattatctattccctcttttgtccagttatctactggaaa

SEQ ID NO: 258209 - DNA, 201 bp, Homo sapiens
accgccagttaatgttatacactctacttgaatagtaagtactgggtttaaagtgtggttacctaaactctggttctttctcttgtgttttctagtcccarcctccctactacaatgtgacagccatgaatgtaccaattgcagtgtggaacggtggcaaggacctgttggctgacccccaagatgttggccttttgcttc

SEQ ID NO: 258210 - DNA, 201 bp, Homo sapiens
ttatactatgttacggtttgatgtataaaatataaatgagataaggaatatcttgtacccagcatagtgtataaaacatagtgagtattcacaaaaacctrttaacaatgtttattatattgtcacatccctcaacctttgttaggaagccccaaacttaatttgttttaagcaagaaattgctaaaagaagataacttgg

SEQ ID NO: 258211 - DNA, 201 bp, Homo sapiens
  misc_feature (1)...(201): n = A,T,C or G
caatgattaactctaccatcagaaaaaagtaccaaccaatctaataactagagataccaaatgtgctttgattaatttattggccattatatttcttttcnacacattatctattccctcttttgtccagttatctactggaaacttgattgattggtttctctgttcctttccattcattccctcttttcttctttcctt

SEQ ID NO: 258212 - DNA, 201 bp, Homo sapiens
cctgtaattccagctacttgggaggctaaggcaccagaatagcttaaacccaggaggcagaggttgcagtgggctgagattgtgccatggcactccagccyaagtgacagagcaagactccgtctcaaaaaaaaaaaagaaaacaataataatattaaatgccatttatgacaaacccacagccaacataatactgaatag

SEQ ID NO: 258213 - DNA, 201 bp, Homo sapiens
  misc_feature (1)...(201): n = A,T,C or G
ttgtataattcagtattctactggttaaagcacagcctagaagtatgtttctgctctctctcatagcagtgttataaaaagattacaccaaatttcacttngtagaatttatctttgatgacaaatatattaaatttcctttcctaggcagatcccaaatgtggcagcttttagcagcagcatgctggatgcttcttcttg

SEQ ID NO: 258214 - DNA, 201 bp, Homo sapiens
ctcttttttagaatgtcagagactactgcttttcaatacacaaacccaagagttaattaggagattaaaaatggtggcattccaatttgatcagttcttcrtttattaactgaatacttccataaagaggaattgttgtcacatatatttaagttatccaaaatccatgattctttccctttatttatgaatttccaaaat

SEQ ID NO: 258215 - DNA, 201 bp, Homo sapiens
agtgggctgagattgtgccatggcactccagcccaagtgacagagcaagactccgtctcaaaaaaaaaaaagaaaacaataataatattaaatgccatttmtgacaaacccacagccaacataatactgaataggcaaaagcttgaagcattccccttgagaactgaaacaagacaagaatgtccactgtcaccactccta

SEQ ID NO: 258216 - DNA, 201 bp, Homo sapiens
ctggatgatatgaattgccatatctgtgagttcaatatttaagaaaaacatctatgcttttctaaatttcctcaaaggtcttcctataagtgctaagaatyccttgttctttattggagtaaacccaattcatgtgtgccagtagattacctgacttactatcttactgttcaatttatgtcactgtagctaagtcagtac

SEQ ID NO: 258217 - DNA, 201 bp, Homo sapiens
acagaccctccatttgtttaggggaaagtaagggaaaagaacaagatactctgcctggtaatccagagaattcttctggatcttatccaaaaccaccaagrtggtacctctataagtctgcaagagctacagtgttactgggctaagggtgcctcctaacgcagatatggctgcagtgaccaagaacttagatcacagcac

SEQ ID NO: 258218 - DNA, 201 bp, Homo sapiens
aatacctagaaagccttccaataagggtgggtacaaacaagcccagactgtgaagactacaacaaatacataactcttaaatgcccagacactgacaaacrtctgcaaacatcaagaccgtctaggaaaatatgacctcaccaagtaaactaaataagccaccagggaccaaccccagagagacagagaaatgtgaccttt

SEQ ID NO: 258219 - DNA, 201 bp, Homo sapiens
ctgtacactgcctcaagggaaaatgttactcaagtcagagttcccattgacttgactacacaatccttgattcatattttaatttggcatttagagattgyaaaacagtgacgtggttctcattacatttttgagttctaatgtgatttaagaagtgctttggagtagggtgaaaacagattgctagtatttataccttga

SEQ ID NO: 258220 - DNA, 201 bp, Homo sapiens
tattggattaaaaataaaatcctaaaaaaggagagaagcacatataaacctgcgtcttatttcatgtgttcctttctttgtgggtgacttttgttttgaartaaaacctgcaaaataacaggacagggtggaagggagatgggatcccctctttatgaagaagcagcagtcctgttttatcacctcttcattttctgttat

SEQ ID NO: 258221 - DNA, 201 bp, Homo sapiens
ttattttctaagacatagaattatgattactattttatctctataattttcatctctataacgtttacaaatactgaaataacctttggaaaaaattggcytttagctttacttttgcaatattttattttatccccataaaagcctaggaaattggtactatgacttttagtatgttcatttaatagatgaaaacacaga

SEQ ID NO: 258222 - DNA, 201 bp, Homo sapiens
aatagcagtaatttttaaatgtaagaaatgtatagctaatgcctttttaaaaaaattattaaaattcctgaagcaaagatattcaagaatcattcaattcygcatctttaaaaaatatttctgtgtgtaacatggtaacatttaaaggcattggatttaaatgaaaaatctgaggattttcactggaaagatacaggaatg

SEQ ID NO: 258223 - DNA, 201 bp, Homo sapiens
gcccattccattagtcagcttgtggttcactcacattaaagtattgacctaaatggtatatttatctagataattctaccttgttattttcaaagccccartcttgtttgctaattctgtgcatcatttttctctgattctgaaaggcaaaattttgttgggcaattgctgtaatatgagttttatctcctttagagtcga

SEQ ID NO: 258224 - DNA, 201 bp, Homo sapiens
tatattattttaacgtgcttattttattttaggctgttaattctggtcagctccaagcttttgattggggaaactctgatcagaacatgatgcacttccaycaggtacaaaaataatcctcataatcagttccatgctgcaaatgaactaacaaaaatagtgtctactcatgaagcacctgccacttccatttaaccacac

SEQ ID NO: 258225 - DNA, 201 bp, Homo sapiens
agaagtatctgggatttaacttctttctaatgaggcttggttttccatgaacttttcctttaaaccaaggggggtattgctcatctttctgttgagccccrtttgtcataattgtaaaatgggtggttacatccttctggtgatctaggagccctattttcgtcctagcatacagcatttttctaaaatttgctgttagct

SEQ ID NO: 258226 - DNA, 201 bp, Homo sapiens
ctcaattccctgtcctctgctgggaataaccctagtactctaagtagctgtgagcctgcagtgcacagactatatgtagggcaaacctttcctgggtctcwggtcacagcagcatattgactacggtgatgcaatttcccaggaataacatgtgttccaaattcaaagaaataattccacagagtaagtttctagattccc

SEQ ID NO: 258227 - DNA, 201 bp, Homo sapiens
cagaacatgatgcacttccaccaggtacaaaaataatcctcataatcagttccatgctgcaaatgaactaacaaaaatagtgtctactcatgaagcacctrccacttccatttaaccacactggatattgcttattgctgttctcacaggctgcttattgggttcttgccatatgccatatcattatttctaattcttaca

SEQ ID NO: 258228 - DNA, 201 bp, Homo sapiens
tgttgagccccatttgtcataattgtaaaatgggtggttacatccttctggtgatctaggagccctattttcgtcctagcatacagcatttttctaaaatktgctgttagctttcatgattcttaccctaactattctttttctaaaaaacatttgtttcagctttaccactctgatgaattcagagcttatgactgggga

SEQ ID NO: 258229 - DNA, 201 bp, Homo sapiens
cttctctcactggtcttcttgtgccttattcctggaaattactgatggaggtagagaacagaacaaaacctggctgctgatgctaaggcatgaaagtgttycaagagttctaggagctgaaaggaaacctgtgtgtcccaggtgtagcgggaaaagggaaaatgacatgagtgaagactgaggtgcagatggggcagtagt

SEQ ID NO: 258230 - DNA, 201 bp, Homo sapiens
tcagagcttatgactggggaaatgacgctgataatatgaaacattacaatcaggtgagctatttacagtaaccccagcatgctgattttgataaattatartaaaaaattatttgagggtggaaagactcctacctgtcatttggtggcatttatactgatagaacttttttttaaaaaaattttaattttaattttaatt

SEQ ID NO: 258231 - DNA, 201 bp, Homo sapiens
tattatccctatttttttcagaggttcagagagggtaggtaaattaccagagttattcagctagtaaacaaccagagacaggggctcaagatggtcaactrgatacagccaggaagagtttctcccattaagagacaagaccatcaagaagattggaacactctgagcagatcttcagaagaaaggcattgagaatgaatg

SEQ ID NO: 258232 - DNA, 201 bp, Homo sapiens
tagctttcactctgataaaaaaagaaaactgcagaataattttgaatcgaagagttacatgattcataacaggatcccttttgttgccaggggcaaagagscaggagcagagaaccaattagaggactcttatagtacccatgcaggagatggtggtgacctggatgaagggtgttcttggaaaaaccattcttccacaaa

SEQ ID NO: 258233 - DNA, 201 bp, Homo sapiens
cccagcatgctgattttgataaattataataaaaaattatttgagggtggaaagactcctacctgtcatttggtggcatttatactgatagaacttttttytaaaaaaattttaattttaattttaatttatttcagaaaatttataaattaaagaagcatatacaaagaaacttacatcatgtgtaatccttccatccag

SEQ ID NO: 258234 - DNA, 201 bp, Homo sapiens
gaaccataaaaagaacgaaactgccaaagttttttttcattagtatctcttcttgttcctctctccaaagtatccagcaagtacccttgatctcctaccamactgttgaactcacataatttttctctctctagcatgagggatttttagcttttaaaccttctataatgataagaacaatcatctataaagcatttatgt

SEQ ID NO: 258235 - DNA, 201 bp, Homo sapiens
tcaactggatacagccaggaagagtttctcccattaagagacaagaccatcaagaagattggaacactctgagcagatcttcagaagaaaggcattgagartgaatggaggtaggatgtggagcctgggctagagggaggattctgggaagcctgaacggggttgctgagcaccaggactcacttcaggccctgagtagct

SEQ ID NO: 258236 - DNA, 201 bp, Homo sapiens
ttgcaaattctgaagtgacatacaaatgtgttgttcatatccttccagtaaatgctacctttaaacacttgacctgaatcagaaaacataaatctttactktttttaagaaactgagtatgtgtcttagtatgtatataatatgtgtgtctgttgatttctagagtcgcttggatgtgtatctatcacataatccagcagg

SEQ ID NO: 258237 - DNA, 201 bp, Homo sapiens
atttggaccatttctatggcttatctagattttttcaggacttgccttcaacctattctttctgtaggtgattccattaactgttgcccatatggtagtcygaagacagacctccgagaaatgacccttgtctccaaaacttccgcaatatgtccaaatttcctagcctgacattcagactttgattatctgcctccaagt

SEQ ID NO: 258238 - DNA, 201 bp, Homo sapiens
cctctctccaaagtatccagcaagtacccttgatctcctaccacactgttgaactcacataatttttctctctctagcatgagggatttttagcttttaawccttctataatgataagaacaatcatctataaagcatttatgttaagcattattctacacatattacatataatcctcacaatgtcacagtctgtctcca

SEQ ID NO: 258239 - DNA, 201 bp, Homo sapiens
tgcaatggcccattcttactatggacctacctgtaggacaccccacaacccccatagacatttgagctagtaggcagagctgtttggggagttggcagggwcaggactcttgcctgtgcaaagcccaaagggtttggtgcaggaacggttgcagtgaagtatggccagggacatccattccctaaggctcgccaagcacct

SEQ ID NO: 258240 - DNA, 201 bp, Homo sapiens
actttgattttgtctggggcctcgatgcccctcaacggatgtacagtgaaatcatagctttaatgaaggcatattcctaaatgcaatgcatttacttttcrattaaaagttgcttccaagcccataagggactttagaaaaaatagtaaccaacaatgaggttgtcccccagcaccctgggggagatgcacagtggagtct

SEQ ID NO: 258241 - DNA, 201 bp, Homo sapiens
acagcttttgcagatgggtccctaccagtgtgaacatacttgcagcctcccctgactgctttgcaagcatgcgtgtgtgcaaaccttgccaccaccaccaygatgaagtgcttttgccccacctcccatcagagtgttgttgccagtatatgaggaacatctcagcctctccagtgcagcagtggccagagaacaaagctt

SEQ ID NO: 258242 - DNA, 201 bp, Homo sapiens
ctgtatctctagccacttctctcatcttaatttgaagcaaatctcaagcatcacatatttcatccatgaggatttcaggatgaattactaaaagataaagyctctgttttaacataataatactgttcttacatctaaaattttaaaaatatctagccagtgctcagatttccaattatttcattaataatgtttatttat

SEQ ID NO: 258243 - DNA, 201 bp, Homo sapiens
tgttcattttagtgataattttacaagtcattgctcctggattgccaatcaactgtgtaaagatgatttggaccaggaccttattgatttagagaaactgwgattgatttagagaaactgagatcgcacatagtaccattttcaggaaaactccaatattagatttttaaaaccttgttaatgggcaatgaagaagaatct

SEQ ID NO: 258244 - DNA, 201 bp, Homo sapiens
taataatactgttcttacatctaaaattttaaaaatatctagccagtgctcagatttccaattatttcattaataatgtttatttatgaaatgttttatastttgtttagattgaaattcaaataaggcctttatcttttattacttgatgttgtctcatgtttctttagatatacaggtccatttgcccttgcccttttt

SEQ ID NO: 258245 - DNA, 201 bp, Homo sapiens
tgttgaactcacataatttttctctctctagcatgagggatttttagcttttaaaccttctataatgataagaacaatcatctataaagcatttatgttargcattattctacacatattacatataatcctcacaatgtcacagtctgtctccagagcctgggctcttcaccattgctctgtgtagcccacaatttatac

SEQ ID NO: 258246 - DNA, 201 bp, Homo sapiens
catgggcaactggagacccatctgacgctcagccctagctctcagcccaccctacagggatagtttgctgcctagggtacacctcttgcccttgcctccarctgaaaaaacaagtctattttttttttctgaaacagagcctcaggtatcctcaggaatctctgcaaaaaagaccctattagttcctatcagttctgtgct

SEQ ID NO: 258247 - DNA, 201 bp, Homo sapiens
tcttagcttacccttcctgtggctgtcccacatcccgctggggaggcagctgtgcaggggagcatgggcaactggagacccatctgacgctcagccctagytctcagcccaccctacagggatagtttgctgcctagggtacacctcttgcccttgcctccaactgaaaaaacaagtctattttttttttctgaaacagag

SEQ ID NO: 258248 - DNA, 201 bp, Homo sapiens
ttgggaggctaaggcaggggaacgaatgccttgagctgaggagtttaagaccagcctgggcaacatggtgaaaccccatctctacaaaaacatacaaaaartgtagctggccattggggcaggtgcctttagttccagctacttggaagactgaggtgggaggatagcttgagccgaggaggcgaaggctgcagtgagcca

SEQ ID NO: 258249 - DNA, 201 bp, Homo sapiens
tgcaatgggaagctggtatccgagtcctctgatgtcctgcccaagtgaatgtccacggcagcacttcttagcttacccttcctgtggctgtcccacatccygctggggaggcagctgtgcaggggagcatgggcaactggagacccatctgacgctcagccctagctctcagcccaccctacagggatagtttgctgccta

SEQ ID NO: 258250 - DNA, 201 bp, Homo sapiens
cttcacatcgtctggtaaccatcattgtactcccttcatctccatgagttcaatatttttcatttttagctcctacaaataagtgaaaatgtgagaaatcygttcttctgtgcaagatactattttaaatagagtggtcagaaaaagctcccctgggaaatgacacctgagcagagaagtggctaaagtgagaaagatcca

SEQ ID NO: 258251 - DNA, 201 bp, Homo sapiens
ggaacgaatgccttgagctgaggagtttaagaccagcctgggcaacatggtgaaaccccatctctacaaaaacatacaaaaagtgtagctggccattgggrcaggtgcctttagttccagctacttggaagactgaggtgggaggatagcttgagccgaggaggcgaaggctgcagtgagccaagatcacaccactgcact

SEQ ID NO: 258252 - DNA, 201 bp, Homo sapiens
ggaaaaatacttaaagcagaggtacttagatgtcctgggagaagtcaagcagtttttgttctgaaattcttaacagtcctttccattaaaggagaaaaatkatcgccccccatctctctgtttaatttgtgtaactttgaagttttaagtcacttttacatacactgtttatctggtcactccttttcttcatgactttgt

SEQ ID NO: 258253 - DNA, 201 bp, Homo sapiens
gtctgggacaaaaactgatctgagatatgaagaaatgccctggagaatagtctcctaacatcaacttttagcatacaccagaatcacctggagttcgccawtctccagtgttcctgctttagtaggtctaggccctgtctaagaatttgcatttcaaacaagttcccagctaatgctgataccactggtcaggaatttcta

SEQ ID NO: 258254 - DNA, 201 bp, Homo sapiens
aattttgccttctaaatttctccctaatctgacaactttcagcttcaataatcattcaaatccaggtttggatataatgtcttcaactactacaatgcctyctcactggtattaaactatttgtagtcagttctggacccaagtctgtgtgatttcatggtttaaagtaaatattaccctattagctcccacctagcaaca

SEQ ID NO: 258255 - DNA, 201 bp, Homo sapiens
acaattaatacccacaaaagtactataaaattggtaatattatgccaattttatgttaattatacaaatatatacataatataaatatataatattggcayagtgtgccaattttttattataacatgtaaagtagggagatgtagaatgaattatatgtgcaaattctcatgaaaaatagtgaattcaggtcttcctgac

SEQ ID NO: 258256 - DNA, 201 bp, Homo sapiens
gtctgtgtgatttcatggtttaaagtaaatattaccctattagctcccacctagcaacagcatctcagcttgtcaaatcaccatctagtttagcctacctrccttcactccagcctccaccatgtccatcagggtgacccagaactccgccttcagcagttgttggtacaggagcatacccagtgcttgtatcagatcctc

SEQ ID NO: 258257 - DNA, 201 bp, Homo sapiens
gcatctcagcttgtcaaatcaccatctagtttagcctacctgccttcactccagcctccaccatgtccatcagggtgacccagaactccgccttcagcagytgttggtacaggagcatacccagtgcttgtatcagatcctcaagcttattccaggtaggtagcagctttctgggtggcctgggcaccagcatgggtctgg

SEQ ID NO: 258258 - DNA, 201 bp, Homo sapiens
acctgccttcactccagcctccaccatgtccatcagggtgacccagaactccgccttcagcagttgttggtacaggagcatacccagtgcttgtatcagawcctcaagcttattccaggtaggtagcagctttctgggtggcctgggcaccagcatgggtctgggtgaggtctatgctggggctggtgatatgggaggcat

SEQ ID NO: 258259 - DNA, 201 bp, Homo sapiens
agaacattaactcaggaaaaaaaacaggagcatatatcaaaacaacaatgttacctctttgcacattccaatcaccatttatttactcttgcaaattagakgagacaaattaaaactagatccaacttgaatgtctagctaagtgtcctgtgtctttttttttttaaagaatctacatttgaatatacctcctacagaaat

SEQ ID NO: 258260 - DNA, 201 bp, Homo sapiens
ccagctttgttcttttttctcagaatcttatatttagaaaaacctaaagactccaacaaaaaacctgctagaactgataaacaaattcattaaatttgcargatacaacatcaacatacaaaattcagcagcatttcaatatgccaagagcaaataatcttaaaaaaaagaaagaaaaaaaaacaagaaataatcccattt

SEQ ID NO: 258261 - DNA, 201 bp, Homo sapiens
tttttctcagaatcttatatttagaaaaacctaaagactccaacaaaaaacctgctagaactgataaacaaattcattaaatttgcaggatacaacatcarcatacaaaattcagcagcatttcaatatgccaagagcaaataatcttaaaaaaaagaaagaaaaaaaaacaagaaataatcccatttataatagctacaa

SEQ ID NO: 258262 - DNA, 201 bp, Homo sapiens
gagagactcctctgtttatggaagggtgaagggagagtgggaaggattttgacttgtggtttgggtgccagctcagctgcagtagaataaggcaccaggcrgattcctaagatatccaactccaggctctgactcctggatgacatcgctggacccgcttggggctgagggtaactcaccaccttgaaaggaaggacacaa

SEQ ID NO: 258263 - DNA, 201 bp, Homo sapiens
cagtggagaaggaatcagtgcaagaactctggacatttgaaaaggcaaatgacctctaaatgaccacactaactctccagcaattgttcttaaccagattkaaatgactgaaatgacagatacacagttcagaatctggacggcaacagagatcattgaaattcaggagaaagttgaaactcagtccaaggaatctaagga

SEQ ID NO: 258264 - DNA, 201 bp, Homo sapiens
ttagcattacaacagaagtgtgtaaagtcacctttgtttttatctatttgtaggtaacccgttgtggatttttagaaaataattaactttctgcttatatrcttgttttatattattatggtttggttttcatctctgtaatgaaatgaacttagcaagcatatttttgcaaaggtatcccctttgatttcaattttgcag

SEQ ID NO: 258265 - DNA, 201 bp, Homo sapiens
cagctctctggcattcctgaaagagaggaagagagaggaagtaacttggaaaacatatttgatgatattgtctatgaaaatttccccaacctcactagagmggtcaacatttaaatttgggaaattcagagaacccctgcaagatagtatataagacaaccatccccaagacacatagtcatcagattctccaaggtctat

SEQ ID NO: 258266 - DNA, 201 bp, Homo sapiens
aaatatatacataatataaatatataatattggcacagtgtgccaattttttattataacatgtaaagtagggagatgtagaatgaattatatgtgcaaaktctcatgaaaaatagtgaattcaggtcttcctgactcaaaaatccaaatctgtccaatataccacattaacagatcaaatcaagccttaatataaataaa

SEQ ID NO: 258267 - DNA, 201 bp, Homo sapiens
taaaggcagctagagagaaggggcagttcaccaacaaagggaacctcatcaggctaactgtggacctttcagcagaaaccctacaagccagaagagattasgggcttgtattcaacatccttaaagaaaagaaattctaaccaagaatttcacatacagacaaactaagctttataagtgaagaaaatataaaatattttt

SEQ ID NO: 258268 - DNA, 201 bp, Homo sapiens
actcaccaccttgaaaggaaggacacaaggctggctggcttcatcatctgctaatcgtagagccctagggccatgaataaacataggcggcagccaggtartggttacagcaggccttgggcgagactcagtgctgtgctggcttcaggtctgacccagcacagtcccagtggcagtggctacagggtagtgcttgtatta

SEQ ID NO: 258269 - DNA, 201 bp, Homo sapiens
acaatagtgggagacttcaacaccccactgacagtactagacagatctttgatgcagaaagctaacaaagatatttgggacctaaacttgacacctaaccraatagactgagcagacatctagagaacactcgacccaataacagcagaatacatattcttctcatgtgcacatggcatatactctaaaatcgaccacaca

SEQ ID NO: 258270 - DNA, 201 bp, Homo sapiens
ctccagcctccaccatgtccatcagggtgacccagaactccgccttcagcagttgttggtacaggagcatacccagtgcttgtatcagatcctcaagcttmttccaggtaggtagcagctttctgggtggcctgggcaccagcatgggtctgggtgaggtctatgctggggctggtgatatgggaggcatcacaattttca

SEQ ID NO: 258271 - DNA, 201 bp, Homo sapiens; identical to SEQ ID NO: 51626

SEQ ID NO: 258272 - DNA, 201 bp, Homo sapiens
aaacataggagattttaaaaataatcacaatacacaaacatcatgcctaaaaaccaagcagatcaaaaatcttttaataatataaaatatgcaggcaatcrttcaaatttccatgattatctcataaatgtgtgttttttaaaaaacaaatttgtccaaatcaggatataaatagtgccaggcatcatatttgatttatag

SEQ ID NO: 258273 - DNA, 201 bp, Homo sapiens
cgggaggctaaggcaggagaatggaacccaggaggtggagcctgcagtgagctgagatcgcaccactgcactccagcctgggtgacagagcgagactccawctcaaaaataaaaataaaaataaaaataaaaaaaagaaagaaagggaaaagaggaaaagaagaaactttttaaatttctctcaaatgtttacttgtggta

SEQ ID NO: 258274 - DNA, 201 bp, Homo sapiens
acctaatacagcaacacatcaaaaagctagtccacaacaatcaagtaggctttattcctgggttgcaaagttggtccaaaatatgcaaatcaatatgtttsaggcatcacataaacagaactaaaaacaaaaatcacaagattatctcaatagacacagaaaagactcttaagaaaattccacatcccttcatgttaaaaa

SEQ ID NO: 258275 - DNA, 201 bp, Homo sapiens
atgattatctcataaatgtgtgttttttaaaaaacaaatttgtccaaatcaggatataaatagtgccaggcatcatatttgatttataggtatcacaagaytcactctatactagctctttcctcctgttttatttttaaccatttatttattgatgctattcctcagtcctgataatatgatccatctttgagaatactt

SEQ ID NO: 258276 - DNA, 201 bp, Homo sapiens
ttacaatgacattgtttctatgatatcagaagataaaaagtagttctggatttaaagaattatccgtttgtttttccaaaatactttattctctcatacayagtattttcataatgtttgacatgcagtgcttctttctgtaattttgactttagaaatatattggcatcaacaaacttccatttgtcattttgaattttt

SEQ ID NO: 258277 - DNA, 201 bp, Homo sapiens
ttgatgctattcctcagtcctgataatatgatccatctttgagaatactttacacaaatttgtttttgccaagggcaattcttttgctttaagactatcasttctaatttatatttccattttagcttttaacattcaactttttttcccaaaagggcctctttaaattcagtctatacaaatacttacatccccaataaa

SEQ ID NO: 258278 - DNA, 201 bp, Homo sapiens
taagtaccaggatgagatcaacaagcatatagagatggagaatgaattttcctcatcaagaaggatgtggttaaagcttacatgaacaacatagaataagyagtctcgcctaaaagggctgccccaggagaagagaagatccgtgagctgcagtcccagatctcggccacatctctggtcctatccttggacaacagccga

SEQ ID NO: 258279 - DNA, 201 bp, Homo sapiens
catggatggcatcatctcgacgtctccgcccagtaccaggagatcgccagccgcagctgggccaaggccgagagcatgcaccaccaggtcgagtatgaggygctgcaggccttggctgggaaggctgagaatgagctgtgtcgcaggaagaggatcttccaggtgaaccgaaacatcagccggctccaggatgagactgaa

SEQ ID NO: 258280 - DNA, 201 bp, Homo sapiens
ggctttaaatagagctcagtctgaatccagtttgcaatttataactaatggtgtcaattttgaaaatcatctcaaatttgaaaatgttttatatttattcmttcctgctagatgcaacacatttgctctaagaccacaaaaacctatcaaatttattttccaatttaacatttatctttaacattagtcttttctcttctg

SEQ ID NO: 258281 - DNA, 201 bp, Homo sapiens
tcgagtatgaggcgctgcaggccttggctgggaaggctgagaatgagctgtgtcgcaggaagaggatcttccaggtgaaccgaaacatcagccggctccasgatgagactgaaggcctcaaaggccagagaacgcagagcagcgtggggagtccgccattaaggactcaacgctgagcctgcagagctggaggccgcccta

SEQ ID NO: 258282 - DNA, 201 bp, Homo sapiens
cgagtatgaggcgctgcaggccttggctgggaaggctgagaatgagctgtgtcgcaggaagaggatcttccaggtgaaccgaaacatcagccggctccagsatgagactgaaggcctcaaaggccagagaacgcagagcagcgtggggagtccgccattaaggactcaacgctgagcctgcagagctggaggccgccctat

SEQ ID NO: 258283 - DNA, 201 bp, Homo sapiens
aagctggccttgggcatcgagagcgccacctacaggaagctgctggagggcgaggagagcccgctggagtctgggacgcagagcaggtgtatgcataggargacaagcagtggctacccaggtgggctgggctcggcctcacaagctctgccctcagctatggcctggactccttccagtccagctttgactgtggtgggg

SEQ ID NO: 258284 - DNA, 201 bp, Homo sapiens
tgggacgcagagcaggtgtatgcataggaggacaagcagtggctacccaggtgggctgggctcggcctcacaagctctgccctcagctatggcctggactycttccagtccagctttgactgtggtggggactccggctctttcagccgcaccagctcctgcagggccatagttgtgaagaagattgacccctgcaatggg

SEQ ID NO: 258285 - DNA, 201 bp, Homo sapiens
acacccaaagtcctatgaaaaaactaacaaccctttccaggcgagtagttaaggtatgtgacttcccaagttttaatctgaaataactaaaagtagctctrtttccattgatttcaacagaagaccaatgacattttacaaacttctgagaaaataataggtattcaagatatccatgtaagttcactgatgatgtatgca

SEQ ID NO: 258286 - DNA, 201 bp, Homo sapiens
aggaggacaagcagtggctacccaggtgggctgggctcggcctcacaagctctgccctcagctatggcctggactccttccagtccagctttgactgtggyggggactccggctctttcagccgcaccagctcctgcagggccatagttgtgaagaagattgacccctgcaatgggaagctggtatccgagtcctctgatg

SEQ ID NO: 258287 - DNA, 201 bp, Homo sapiens
aaatatctgcaatggttcaatagcaaataatttattggcagctgcttaccgtgttcattttgcatcttttttcccaccacacatattaaggagcagctgargtcatgtttgacattctctccctcttttatctccagtttcagaatgaaaaatgagagtgagatatgagtagttttactagttaaaatatgaaacacccag

SEQ ID NO: 258288 - DNA, 201 bp, Homo sapiens
aacaaataattttgtataagtctcattttaagataatactaaaaagtcattatttattcactattatcactatttataaaattttgtagagcatcctggawctttttgcttacttttgtttttattttttgctaaatctggcaatcccaggcacatgtgtgaaggagctgtgaaatataaaaggagaaaacttttatggga

SEQ ID NO: 258289 - DNA, 201 bp, Homo sapiens
tggagtttcaataccaaaatgcaaaagtagtcatgcacagtgtctcagtcagcccatggctacattatgcacatcacagcaggtggcttgactccacataygggaggcagagagcagccatgtaccttacacagaactgcggaagctcagtgggtgaatatttcttttaatagtaaaaaaaaaaaagtctaaggataggga

SEQ ID NO: 258290 - DNA, 201 bp, Homo sapiens
gaaacaagacaagaatgtccactgtcaccactcctattgagcatagtactggaagtcctagccagagcaatcacacaagagaaagaaataaatggcattcraataggaagagaggaagtcaaactacttcttttcatggatgatgtgattctatatctaaaaaaccccatagtctcattctaaaggctccttacactgata

SEQ ID NO: 258291 - DNA, 201 bp, Homo sapiens
tcatttcccagaaactatttgctcttgctttcttctctctcttcttagttcattttatactttgacatgtcgaataacaaaacttctcaatatcagaaagwctatttatttaaagaaaaactctagatttctaaaaagagaggaagatataatggtgttgctggctttacagagccaattatttcccaaaataactccata

SEQ ID NO: 258292 - DNA, 201 bp, Homo sapiens
acctccatgatatgcaatttacttatgtggcaagcctgcacatgtaccccctgaatctaaaataaaagttggaaggggaaaaaaatcaaccagaatacgayccaggtttcctggatttaaagtctagtcttctccactacacttattccttctcaaaaaaacaaaaacaaaaaacaaacaaacaaacaaaaaacatgtttg

SEQ ID NO: 258293 - DNA, 201 bp, Homo sapiens
cttttagagaaaagttttatattaaagggaaatgtgtattgttattgttattttattcccaagtatgtgaggaaatccaataatgattttggcttcttgcygatagactgagcttaaactgaaaaagtagtcatgaatgatacttgggtttttcaaatctaggatgtagaaatttgggaaaaaaaaattcttttttttaat

SEQ ID NO: 258294 - DNA, 201 bp, Homo sapiens
caaattttatctcttaacctttcttttatactacagaaattcaggaatgagatttttcttgtagacactgagaaagttcaaatatgaaattcttgttgccygtgttttgcagctccaaagcctgctgtgtatttgcagcatggcttaattgcatctgccagtaactggatttgcaacctgcccaacaacagtttggctttc

SEQ ID NO: 258295 - DNA, 201 bp, Homo sapiens
tcatgaatgatacttgggtttttcaaatctaggatgtagaaatttgggaaaaaaaaattcttttttttaatttcttttttcttttacctttaaaaataaartcagggtctcattatgttgtaaaggctaatcttgaactcctggctcaagcgattctcttgcttcagtgtctcaaagtgctgggattacaggcgtgagcca

SEQ ID NO: 258296 - DNA, 201 bp, Homo sapiens
tggctttccttctggcagatagtggttatgacgtgtggttggggaacagccgaggaaacacttggtccagaaaacaccttaaattgtcaccgaaatcaccrgaatactgggccttcaggtaaagagaaacctattaatgaataaaatgtgtactttcctcatgcatatgtatgaacacctagtgatttttttcctgttttg

SEQ ID NO: 258297 - DNA, 201 bp, Homo sapiens
aaactgatgcactggcataggagctaagaaccatgccttggaggtcatgaaaatcctgtgttccttggcctcgttgcctgccttctttctggaaaccactrggatttcctaattctatgccatagtccattgcacccttgcaaatgactagaaaattccctaggtaagtatttcttaaactatacataggatcagaagtaa

SEQ ID NO: 258298 - DNA, 201 bp, Homo sapiens
tatagattgctttgatcctttgcttttgacgtgtctctacaacattaaagattgttagtactgtctccatttcttaaaagaagaacttgaggctcagagarcctaagcagcctgtcccgagtcacccagctaatggacggcagagcgagaatttgaacccagatctgaccaggcaacccatggtcaacagtcttttttata

SEQ ID NO: 258299 - DNA, 201 bp, Homo sapiens
gagtcagagaatgtcctgctaatttactccgtatttgggaaagctaactccaggtttcagaacagagattatcttgtatagtcagatataatctttatttmatggaatatttgatattccatggaatattaatggaataaaagaagtaccaagatttcatactcctcttcctgtccaagagaggaagagagggatggaggc

SEQ ID NO: 258300 - DNA, 201 bp, Homo sapiens
agcaacttcctatttactctgagtggatttgatccgcaaaacttaaatatggtaggtgtaagtaattgggtctgggaaaacatttgttttgttgcacagargtgatgaaagttatcctggattgtatggcaactgcaattcaaggtttcctttttgcatttggaatgcaattagtacatttatggcttccaatgagggttg

SEQ ID NO: 258301 - DNA, 201 bp, Homo sapiens
gggtctgggaaaacatttgttttgttgcacagaggtgatgaaagttatcctggattgtatggcaactgcaattcaaggtttcctttttgcatttggaatgyaattagtacatttatggcttccaatgagggttgagagtccacttgctttcataggaggatttgagaagaaagcttttctgccaacaattctcatctcttc

SEQ ID NO: 258302 - DNA, 201 bp, Homo sapiens
atctgttcagaatatgctgcactgggctcaggtaagtgcttcttattcctgcttgatgcacacatatctctgcaagaccctcaagaagtgctctcagagarctcactgcagggttctgctggcacctgccactgtcacattgatgtttttggaatcagcatcaactcttcatttttatttacttcattcccatttcttctc

SEQ ID NO: 258303 - DNA, 201 bp, Homo sapiens
tgggaataaccctagtactctaagtagctgtgagcctgcagtgcacagactatatgtagggcaaacctttcctgggtctctggtcacagcagcatattgaytacggtgatgcaatttcccaggaataacatgtgttccaaattcaaagaaataattccacagagtaagtttctagattccctctgagctgaaaaagtaaaa

SEQ ID NO: 258304 - DNA, 201 bp, Homo sapiens
aagcgattctcttgcttcagtgtctcaaagtgctgggattacaggcgtgagccaccatgcccagccaaaaaattttaatgtgggaatttttaatgtcatcmtaacaactactataacaactataatagtgaaaatgtataactcaactctaactgttgtgaaaaacctgacttttctccccagctgctatagttagatgta

SEQ ID NO: 258305 - DNA, 201 bp, Homo sapiens
tcttgcttcagtgtctcaaagtgctgggattacaggcgtgagccaccatgcccagccaaaaaattttaatgtgggaatttttaatgtcatcataacaactrctataacaactataatagtgaaaatgtataactcaactctaactgttgtgaaaaacctgacttttctccccagctgctatagttagatgtacgtggcagg

SEQ ID NO: 258306 - DNA, 201 bp, Homo sapiens
gtggggatatgccacacacacacactgtttcagaatacggttgtctcttgtgaggaaacagtggtgactaggtttacttagttcatatagtttttccaaargccccctaaccccaactcccaccaaaagatactatattctcaatggctatggcaaaaagttctagagggacctctggcccagttttagtcacgtgcccat

SEQ ID NO: 258307 - DNA, 201 bp, Homo sapiens
ccagttttagtcacgtgcccatctctcatacaatcactgtgacctgaagaatggaggacgaattggccagacctggttacctggaacagaggttgtgttgkatcaatacaagaaagaagcggtaagggaaaacttgctgagagtttatagagtgctatagccactctagttatttgtaacagactgactcctttttagcat

SEQ ID NO: 258308 - DNA, 201 bp, Homo sapiens
ggtaatgttaagaaaaatttcctttgtaacagcaaagaaagccagtggaatttacagccaagttggtagcatatcaaagtaaaatacctgacacatactaygtacttaataaataataaataattcactattattatttataataacattattagtattcttcagtaactaagctgcattctctggacttccagaatcatc

SEQ ID NO: 258309 - DNA, 201 bp, Homo sapiens
tacttcattcccatttcttctccttgtcctcagtgtctgggttttgagcatggttctcagatattctgactgggttctgatccttagatgattccaaactrcattttaagggaaggcttttatttcctctttcagaaagtcatcagctctaatagaactttatataaaatgatgcatcttattccagaaagagctgttcat

SEQ ID NO: 258310 - DNA, 201 bp, Homo sapiens
tcttctccttgtcctcagtgtctgggttttgagcatggttctcagatattctgactgggttctgatccttagatgattccaaactgcattttaagggaagrcttttatttcctctttcagaaagtcatcagctctaatagaactttatataaaatgatgcatcttattccagaaagagctgttcatcctccaatcaatata

SEQ ID NO: 258311 - DNA, 201 bp, Homo sapiens
ccagaaagagctgttcatcctccaatcaatatatggggcatttcagaatgtggaaatgatgctttattcagagaagattgaatgctagggaagaattaaartggatttatggcttatgtttttaccttcagctaaagttttatttgttttattttattactcaatatacagaaagctcagagataagtctaatccagttgg

SEQ ID NO: 258312 - DNA, 201 bp, Homo sapiens
ggagaaagaagcaatccaacaaacaaaaagataaccacactgtaataggaaatgtgttttgaataggacattggaagaaaaataataatcatttttacagrtagatcccaaagtcaaggatctatgttcaaccatgtgtgttccaccatcttcacaattgaatgagtaaccatcattaagcagttagcttaggccgtaata

SEQ ID NO: 258313 - DNA, 201 bp, Homo sapiens
tgtgtgtctttgtgtgtgcatgcgcacacacgtgcatgcacattcatttgtttattatgtaatatttgcctatattcttggctggtggctcagtcacaacsctttttgaaaagtgaacaaaatatacataattctatgatggggaaagtggtggtgtcttcttaaaggtttaatatatctgagaccccccccaaccaggaa

SEQ ID NO: 258314 - DNA, 201 bp, Homo sapiens
aataggacattggaagaaaaataataatcatttttacaggtagatcccaaagtcaaggatctatgttcaaccatgtgtgttccaccatcttcacaattgartgagtaaccatcattaagcagttagcttaggccgtaatatgattcttggactgagatttcaaaaataccacaggccttctgaaaggttacccctttctag

SEQ ID NO: 258315 - DNA, 201 bp, Homo sapiens
tgtgtctttgtgtgtgcatgcgcacacacgtgcatgcacattcatttgtttattatgtaatatttgcctatattcttggctggtggctcagtcacaacccyttttgaaaagtgaacaaaatatacataattctatgatggggaaagtggtggtgtcttcttaaaggtttaatatatctgagaccccccccaaccaggaatt

SEQ ID NO: 258316 - DNA, 201 bp, Homo sapiens
acattcatttgtttattatgtaatatttgcctatattcttggctggtggctcagtcacaaccctttttgaaaagtgaacaaaatatacataattctatgayggggaaagtggtggtgtcttcttaaaggtttaatatatctgagaccccccccaaccaggaatttgcattttaatatatatcctactaaatttgctccctg

SEQ ID NO: 258317 - DNA, 201 bp, Homo sapiens
cagctaaggcaagagtgatgatcatgatgatgggagtaatactagtgaaaaaaagctgtttgttgggtattattaggtgctacatgctttataggtgttamcataatcttcacaatcctaagaaagaatgttactatcattctcatttcacaaatatcttgccttgaatcacagattcagtagtctattaagcctggatac

SEQ ID NO: 258318 - DNA, 201 bp, Homo sapiens
gatgacattctggtctatagctacaaaatgcaccgattgaagcacagatgatgtgtatcatttaaagagtgttgataattttgttttttctctgtcattaktttctatccctataacatattcagtttcttcatctttaaaaagcttttgaagtcaaaattgagtttaaataaccaaatagcatttagacttctcaaatta

SEQ ID NO: 258319 - DNA, 201 bp, Homo sapiens
ggacatcttagggtaaaaacatactgtaataccttcctcagttgttttccaatttaccacccccttcctaggaaaatccacacgccttaatgaattgctayagtcattagcaaagggagtaagttttgatgtttgtcttgtctgtgggccttgtttccctctgactcataagctctaatatactccagccattcaaaatac

SEQ ID NO: 258320 - DNA, 201 bp, Homo sapiens
acaagaagcctatagaataccaagcagacttatcccaaagaagacttaataatcaaactcccaaaggtctaggataaagaaaggatcctaaaagcagtaaragagggagggagagagggagagagaaagagagagagagagagaacattcaagggagctccagtatgtctggcagaagacttttcagtggaaacctttcag

SEQ ID NO: 258321 - DNA, 201 bp, Homo sapiens
gacattggaagaaaaataataatcatttttacaggtagatcccaaagtcaaggatctatgttcaaccatgtgtgttccaccatcttcacaattgaatgagyaaccatcattaagcagttagcttaggccgtaatatgattcttggactgagatttcaaaaataccacaggccttctgaaaggttacccctttctagctcca

SEQ ID NO: 258322 - DNA, 201 bp, Homo sapiens
tttaaattaatttcagtatgagtattgaaatatataatagaaatattgtaacattatatattttctatatacttttattatatagaaaatatatattacakaatatattattaaatattgtagaacaatatataatacagaaaaatatataatactcagtaatatattaaatacttattaaaatagcaagcttatatagga

SEQ ID NO: 258323 - DNA, 201 bp, Homo sapiens
tatatattttctatatacttttattatatagaaaatatatattacagaatatattattaaatattgtagaacaatatataatacagaaaaatatataataytcagtaatatattaaatacttattaaaatagcaagcttatataggaagagtgatggagcattgtgagaaagtttcagctttatttctttgacattacttt

SEQ ID NO: 258324 - DNA, 201 bp, Homo sapiens
ctctgccatactgctagttccaaattccttctggtttcaggatttaggagtcagggttgcctcatcttctcaaatgagttacagtcacgcacatccctacrcactgcatggttggcactagttccttgatatatgttactccgtttgatcctcatgaaggatcaaatggggaagggagatactattgtctctgattgtcca

SEQ ID NO: 258325 - DNA, 201 bp, Homo sapiens
gcaggtcttaaatctctctaagcctttgtttttttaattgataaaatgaggataataatagtaccaaaattagggagattttcagagcttaaataacataygtgaactatttagagtaatgcctgccataaggggactcagtagcttattattagtttcatacaatttgaaaagtttcataatatttgcagatataagatg

SEQ ID NO: 258326 - DNA, 201 bp, Homo sapiens
cactttttaaataccattatatggatcattaaagatataagtaagaagtatcatttttaggaggtagtagtatctgccagggatagtgtgccttagcatgycattccctagcaaatagtactattttcgatctggtgtgtcaccagatctacgaaaacttttagagaaaagttttatattaaagggaaatgtgtattgtta

SEQ ID NO: 258327 - DNA, 201 bp, Homo sapiens
gaaaagtttcataatatttgcagatataagatgatcttcaaccagatagctaatgtatgcaaagctatttagcttcagaagtaaactctgcatttctagargttaaatattactttgttatagtgaattatctgtaatatttatctcttgctcacttttataagaaaaatagtgaaagcatttattaagaacttacactgc

SEQ ID NO: 258328 - DNA, 201 bp, Homo sapiens
atgaacagacactagagtgatccccagtgatttccagcttctagtatctatgcctttgtataatctcctcccattcaatgtgggtgggatatgagacttckttcaagccaacagaactggcaaaggtgtaagatgtcacacccttgattaggttttgtcatatggcaaaggtgataaaatgtcaatccctgattacattat

SEQ ID NO: 258329 - DNA, 201 bp, Homo sapiens
cttgtttactttgtgggatactgggcttaactaggggatacctccactttttacttggccatggtatgaaaacctgtcctctgaatctttagatattttgkcaaattgtaggcaaacaaagacttaaagcaattcaaccttgattaaaataagaccaaaaatgcctccatacttgattaaatttatttcattttaggaact

SEQ ID NO: 258330 - DNA, 201 bp, Homo sapiens
cttatgtttcatatacactatacaaataggctgaaagtaagcttgtatggtattttaaataattttgtgcatgaaacaaaagttttgactgtgttttgagygtaacctgtcgtataaggtcaggtgtagaatttttcacttgtggcatttcagtgctcaagaagttttagattttggagcatttcagatttgggatttttg

SEQ ID NO: 258331 - DNA, 201 bp, Homo sapiens
aagagaaatgacagattgacagaaatagactagcaaactgagtgggaaatgaatactcagcactgttgatggaagtgcatagcctatttctggaataatcyggaaatatatagtaaaattgatcaaccatatgacctatgaccaaaaaattctcattcctagatgtatggcatgcacactattccatcgtggggcatataa

SEQ ID NO: 258332 - DNA, 201 bp, Homo sapiens
aaaagagtaaggtaactatcccctgaaaattctggttatttctaggaaaatggaatatctctgcatttataagattttttaaatgtatggaaaaatgaaaraatacagactgtgtaaaagatatcagattgtgctatagtggttactaggtttaagaataatttggaggctgaaaaagagaaaaaatgctatcaggtagca

SEQ ID NO: 258333 - DNA, 201 bp, Homo sapiens
ataaatgctgacatatttaatggtgcagaatttaagggaatgaaattatcggtcattggggaataggacagtttaaaggtggaggttttacagtaagaagyaacaaacaacatatgcttaatgcaacatgttggattctcacaagccaggcctgctttatagatgtgtgaaatatgcaactctagaggattagaaggtgtg

SEQ ID NO: 258334 - DNA, 201 bp, Homo sapiens
tcatacttcaaatgtctttcatgccttggtctcaatgctccctgaagagtctgctgattcccaaatattaataatgccactgagcccagatttgtgactargagaagggatatttatcctatccgacattttgtttgaaaaggtcacattctgagatcaaatgctaactagaaagatgatcccccatggaaaaaagaatgc

SEQ ID NO: 258335 - DNA, 201 bp, Homo sapiens
actattattatttataataacattattagtattcttcagtaactaagctgcattctctggacttccagaatcatctattcaatcactcattcactcagtcmgcaaaaatttttgatgatgatggtgattagaggaggaatgaaatcaagaaactctaaaaacaatttatctattttcaggggtgctggtgagatttgaagg

SEQ ID NO: 258336 - DNA, 201 bp, Homo sapiens
agctgcattctctggacttccagaatcatctattcaatcactcattcactcagtcagcaaaaatttttgatgatgatggtgattagaggaggaatgaaatyaagaaactctaaaaacaatttatctattttcaggggtgctggtgagatttgaaggtgatttaatagtaactcaaaatagaacattaactcaggaaaaaaa

SEQ ID NO: 258337 - DNA, 201 bp, Homo sapiens
agagatcttgaaagaattggatatactatttcctaccaattctaatgcccaatttacataccaaggtaaaagaaattcagaaaagccaaagcaataattgrcaatgtggtagcattagaagtgatgcagctggatgaggcaggaggatgtggcattttacagagatgctcgtatgactggggtcatttcatccacccttgg

SEQ ID NO: 258338 - DNA, 201 bp, Homo sapiens
atataattttcctcatattcaatggtatggcccttcctcttcattctcacaaggatttgacctttgtcacaaacacggatggtcctgatcgtgtcactccrgaacatggacgttatcaaggacagctgccggcactcttggtaataatttctctttaaatgtaagtgatctttcctttgaacattttgagttgagatggat

SEQ ID NO: 258339 - DNA, 201 bp, Homo sapiens
atttctaaatgtcataacctttgctattattataaggatgattcaagctaataaattcatcaagaaaaatatataaccaataagtaaattagtggaagagrgaaaatgtttattccctgtgaccaaatataaccattttcattttggagtaattcttctagtcttttgaagaccatacttttttgtttatttgttttagaa

SEQ ID NO: 258340 - DNA, 201 bp, Homo sapiens
aaagctactaaaacacttgcctgaggttagacatcttcttctgtggtgaggctggatttcaaatttagaccatttgactgtagcacttatatgatgagcaygctgtttagtgttatagtgttggtctacctttgaatagacatacttttaaaccatggcaaggaagtgagactgcacattgaaatatgtaaaatttgcctt

SEQ ID NO: 258341 - DNA, 201 bp, Homo sapiens
cctttgctattattataaggatgattcaagctaataaattcatcaagaaaaatatataaccaataagtaaattagtggaagagggaaaatgtttattcccwgtgaccaaatataaccattttcattttggagtaattcttctagtcttttgaagaccatacttttttgtttatttgttttagaagtttaaaaacaataaaa

SEQ ID NO: 258342 - DNA, 201 bp, Homo sapiens
ttatatgatgagcatgctgtttagtgttatagtgttggtctacctttgaatagacatacttttaaaccatggcaaggaagtgagactgcacattgaaataygtaaaatttgcctttgggtgccacgtgagaaatagtcacatcactagaaactaatcataagcttttgtgtttggttaaagttttattgatccatttttct

SEQ ID NO: 258343 - DNA, 201 bp, Homo sapiens
ctattggtatatacaattcttttgcccaacaactttttcctctatttaacataatgttataagtatgctttcatgtttttatatagtctttaaaataattkaatggacttatctacaagattaaattaatatattatagtttattttaaaattctcttgtaattgaaaacatgtttttaatttttattacaaataacaaga

SEQ ID NO: 258344 - DNA, 201 bp, Homo sapiens
atatgatgagcatgctgtttagtgttatagtgttggtctacctttgaatagacatacttttaaaccatggcaaggaagtgagactgcacattgaaatatgyaaaatttgcctttgggtgccacgtgagaaatagtcacatcactagaaactaatcataagcttttgtgtttggttaaagttttattgatccatttttcttg

SEQ ID NO: 258345 - DNA, 201 bp, Homo sapiens
gggattacaagcgtgagccactgtgtccggcctatttttttgatgatgtttttgaagaacagaagttttttattttaataattttttaatcttttttttgyttatggttagttgtctaccacaaatttgtaaagatattattctttgttatcttctaacaactttgtacttaagcttttagttttagatttgcaatctgag

SEQ ID NO: 258346 - DNA, 201 bp, Homo sapiens
ccggcctatttttttgatgatgtttttgaagaacagaagttttttattttaataattttttaatcttttttttgtttatggttagttgtctaccacaaatktgtaaagatattattctttgttatcttctaacaactttgtacttaagcttttagttttagatttgcaatctgaggtatatttttgtatctggtttgggaa

SEQ ID NO: 258347 - DNA, 201 bp, Homo sapiens
gctttaatttccttcactgaaaatagtgagtgtatacctcccagagttgtgaggatttttgtgtttatttcttgaacaaatatctattgaatggcttcttyatattgagcattttaatataattagcgtatgatccgtggtattgcttaattaatattacccaccattattggttttataactgcaaggtattacttatta

SEQ ID NO: 258348 - DNA, 201 bp, Homo sapiens
ttattaagttcctaatgtgaaagtctagtctctgtgactcttctttttgagaaggaatagatcagtaatctagtgacatataattggctgtattaatatgytatgtttaatatttaatatcatccaaatcaactgctgttgaattgatcattattaatacgattgtgaaaccttataggctattaaaacatttatttaaat

SEQ ID NO: 258349 - DNA, 201 bp, Homo sapiens
gcagttttgattattacaggtttgtagtataatttgaagtcaggtcatgtgatgcctccagctttgttcttttttctcagaatcttatatttagaaaaacstaaagactccaacaaaaaacctgctagaactgataaacaaattcattaaatttgcaggatacaacatcaacatacaaaattcagcagcatttcaatatgc

SEQ ID NO: 258350 - DNA, 201 bp, Homo sapiens
atatctagttttcccagcatcatttcttgtggaaattgtcctttgcccaatgtatgttcttgatgcctttgttgaaaattagttgactataaatgtgtggrtttatttgtgggttctttattctgttccattggtctatgtgtctgtttttatgccagtatcatgcagttttgattattacaggtttgtagtataatttga

SEQ ID NO: 258351 - DNA, 201 bp, Homo sapiens
cctcaaattggcccagaccaatgtcccggagtgcttctgtaatgtttgttttttagtagtttcatagttttaggtcttaaatgtgtctttaatccattttkattttgtttttgtatctggcaagagatagagatctaatttcattcttctgcatatggatatctagttttcccagcatcatttcttgtggaaattgtcctt

SEQ ID NO: 258352 - DNA, 201 bp, Homo sapiens
catcctattgtgcatgccagactttagtccttctaacggtattttggtacccattaaccaatgcctctttatccttcccccacccctactacctttcccascctctggtaaccatcattcttctcactatctctataaggtcagtttttttttaaactcccctatatgagtgagaacatgcagtatttgtctttttgtgcc

SEQ ID NO: 258353 - DNA, 201 bp, Homo sapiens
gaggatcacgaggccaggagatcgagaccatcctggctatcatggtgaaaccccgtctctactaaaaatacaaaaatattatccgggtgtggcggcacgcrcctgtagttccggctgctggggaggctgaggcaggagaacggcgtgaacccgggaggcggagcttgcagtgagctgagttcgagccactgcactccagcc

SEQ ID NO: 258354 - DNA, 201 bp, Homo sapiens
gggtagggcagggtctaggcttcgacctttccagggaactgaggtcggccaagtggaggtggaggtggtgacggagccctcgcgctgcagtcacagctctcttctccctctctacccctcactccactgtgggacgctgggtcagacctactacgggcaggtgctgaagagatcggcagacctccagaccaacggctgtgt

SEQ ID NO: 258355 - DNA, 201 bp, Homo sapiens
ggggtagggcagggtctaggcttcgacctttccagggaactgaggtcggccaagtggaggtggaggtggtgacggagccctcgcgctgcagtcacagctctcttctccctctctacccctcactccactgtgggacgctgggtcagacctactacgggcaggtgctgaagagatcggcagacctccagaccaacggctgtg

SEQ ID NO: 258356 - DNA, 201 bp, Homo sapiens
gacttttccaaactgtcaaagaacatatactcctggccgggcgtggtggctcacgcctgtaatcccaccactttgggaggccgaggcaggcggatcacagrgtcaggagttcgagaccagcctggccaacatggtgaaaccccgtctctacttaaaaaatacaaaaattaaccaggcatggtggcacatgcctgtaatccc

SEQ ID NO: 258357 - DNA, 201 bp, Homo sapiens
cctgataaacaacaagtgcttcaggaggcatatcgggtgctgaaggtgaggaggagagtgagataaattatctttgaacatcagtaagagctgatgggttragtcttgtttgttcccccttgaactaagagctcaaactctcttaatttatccattaaatgaataaggggtggcaaaagggggaaggggcaggaatacccc

SEQ ID NO: 258358 - DNA, 201 bp, Homo sapiens
tcaagaccagcctggccaacatggtgaaaccccgtctctactaaagatacaaaaaagtagccgggtgtggtggtgggtgcctgtaatcccagatactcagraggctgaagcatgagaattgcttgaacctgggaggtggagtttgcagtgagtggagattgcacctctgcactctagccagggtgacaaaagtgaaactct

SEQ ID NO: 258359 - DNA, 201 bp, Homo sapiens
cttggctttacattacaacagcccctgccttcaaggcaaccacaactcccattgagtctgttttctaaatgtctcacaaatcctttgtttctttttttctyggctacttctgtgtttcaggccatcctcattccttgcttagagtactgctgtgtcatcctaaccaatctctctgcctcattccccactctagtccacctg

SEQ ID NO: 258360 - DNA, 201 bp, Homo sapiens
aatctaaaaagattctgtagtgaagattgttttacaggtgtattcaagatgttcttccattttaaagaaagcaaaactagaaatctcagatggtatgttaygtgtctggtctgtttatgtaggaaagtgatgcagaatgccaatgaatatatcaaggaaaagccttggctttacattacaacagcccctgccttcaaggca

SEQ ID NO: 258361 - DNA, 201 bp, Homo sapiens
actgccagaagaaatcaggacacacaaagttttatggggtaggtgattttgtttagtttagtattaaggcagatggttgtacatgtgcagaactcctttcygctaatagccaggatgaggctatatgagatcacatggggttaggccatgaggccaaggttccattcttcctctgccattcaaaagtgatagggctttgga

SEQ ID NO: 258362 - DNA, 201 bp, Homo sapiens
tggaaatagctatcttgcctcctgtacaatggtaaccccccaaaaattttgatatttaataaagcactttgaagtcattcagtaaatagagtgaagtgctyagaaagataactgatgacatgcaaggaagaaaatcatctttataacgtgtttgctccttgtctgctgagcaaggcaacaactgggggagtgctggagatg

SEQ ID NO: 258363 - DNA, 201 bp, Homo sapiens
ttcaccatgttggccaggctggtctcaaactcctgatctcaggtgatccacccgcttccacctcccaaagtgctgggattacaggtgtgaggcactgtgcycagccctcatttccttttgaacacagagatgtcactattactgtttgctgaattgactctcatttagggtgttaaactaaacttagcatggcttactaat

SEQ ID NO: 258364 - DNA, 201 bp, Homo sapiens
taactaaagaggcagctgctatttgttcacaaagggtcagcttaaacattgctattgatttttaaatttgattttgttcccctattcctttctttgttatstggggtcaatgtaatcattaatcatcttgtttggactaatatgcctctgtttcagcatggtggggagttatatttcagtgacgtctatacgagccttgaa

SEQ ID NO: 258365 - DNA, 201 bp, Homo sapiens
ccacatccagctaattttttaaatcttcttttagtagagacagggtttcaccatgttggccaggctggtctcaaactcctgatctcaggtgatccacccgyttccacctcccaaagtgctgggattacaggtgtgaggcactgtgcccagccctcatttccttttgaacacagagatgtcactattactgtttgctgaatt

SEQ ID NO: 258366 - DNA, 201 bp, Homo sapiens; identical to SEQ ID NO: 51630

SEQ ID NO: 258367 - DNA, 201 bp, Homo sapiens
cacggaatgtgaattatatctcaacaaacttgacttcaaaaaacagatcgagaaaagatgattctattcccaaaaagggggaggggggaagatcattatayaggtgagtgttcatttaaatcagagtacgagatttatccgtgaaaatcgcagtggagcgaacaagggggatgctgataccgacctcctggttggaaagcc

SEQ ID NO: 258368 - DNA, 201 bp, Homo sapiens
cggggtagggcagggtctaggcttcgacctttccagggaactgaggtcggccaagtggaggtggaggtggtgacggagccctcgcgctgcagtcacagctctcttctccctctctacccctcactccactgtgggacgctgggtcagacctactacgggcaggtgctgaagagatcggcagacctccagaccaacggctgt

SEQ ID NO: 258369 - DNA, 201 bp, Homo sapiens
cttctgctgtatcccatagatttttgcatgttgtatttccattttcatctgtttcaagatattttaaatttttctcctaatttcttcatggacccattggytattcaggagcatgttgtttaatttccatgtgtttgtgtattttccaaggttcttgttattgatttctaattttattccatagtggtgagaaagatactt

SEQ ID NO: 258370 - DNA, 201 bp, Homo sapiens
ctgttctagtaactcagaggagatacgtgttttatttgtgatagcaaattcctaaatgaacattaggcaagtggtatcattatcaggccagctgcagcctyttgccttgacctgcattcctagaatttctttgttgctgtaattcttgattaagtgaccttgactttcattttgtaattttgctaatcatcagcaaattca

SEQ ID NO: 258371 - DNA, 201 bp, Homo sapiens
gccccggcgactcaccatcgtcagtgcgcaaccgttcgctaactgaaatgatggcgactggaacgccagagtctcaagcgcggttcggtcagtccgtgaargggcttctcacggagaaggtgaccacctgtggtactgacgtaatcgcgctcaccaagcaggtgctgaaaggctcccggagctccgaggtgagctggaagt

SEQ ID NO: 258372 - DNA, 201 bp, Homo sapiens
aaaaggtacctcagaagtcacagtgatcttgctgttgctcctttcgatggttataatgctccaccaagattcccagcttttccattcactttaatcctctyttgcaaaaactgctcaaaattggcagcatctatgattccattttctacaaggtgggtacagtcaagagtgaacatcataacctgcttctttttttgcctc

SEQ ID NO: 258373 - DNA, 201 bp, Homo sapiens
tgcacaggcctctgttaaagggtaggggagaaaatttctatgtatgttagttttttatcttaaaaaaattagcttttgtgaggctgggcgtggtggctcaygcctgtaatcccagcactttgggaggccgaggcgggcagatcacgaggtctggagattgagaccgtcctggctaacacagtgaaaccccgtctctactaa

SEQ ID NO: 258374 - DNA, 201 bp, Homo sapiens
tgtgacggtgtgcacaggcctctgttaaagggtaggggagaaaatttctatgtatgttagttttttatcttaaaaaaattagcttttgtgaggctgggcgyggtggctcacgcctgtaatcccagcactttgggaggccgaggcgggcagatcacgaggtctggagattgagaccgtcctggctaacacagtgaaaccccg

SEQ ID NO: 258375 - DNA, 201 bp, Homo sapiens
gaggttgaggcttcagtgaacagtgatggtgccactgcgctccagcctgggtgacagagtgagaccatgtctcaaaaaaaaaaaaaaaaaaatatatatakagagagagcgagcgagagagagagagagagagagcaaggtgtaaacaagtacacatagtatgttacattttaagtaggaaagtggtatggaggaaaataa

SEQ ID NO: 258376 - DNA, 201 bp, Homo sapiens
tctcttgcctcagcctctcaagtagctgggattataggcacacgctaccacatccagctaattttttaaatcttcttttagtagagacagggtttcaccawgttggccaggctggtctcaaactcctgatctcaggtgatccacccgcttccacctcccaaagtgctgggattacaggtgtgaggcactgtgcccagccct

SEQ ID NO: 258377 - DNA, 201 bp, Homo sapiens
tgactatagcccattttctttattattattattattattattgagatggactctcgctctgtcacccaggccagagtgcagtggcccaatgtcagctcackataacctctgcctcccgggttcaactgattctcttgcctcagcctctcaagtagctgggattataggcacacgctaccacatccagctaattttttaaat

SEQ ID NO: 258378 - DNA, 201 bp, Homo sapiens
gctaggggtgggaagagggaatttactacaaagaggcacgaagaaacttgtgggccagagctattttggtctccgttttggtgatgtatatacgtttgccrgagttcacagaactgcacactgaagaaagatggatttcacggaatgtgaattatatctcaacaaacttgacttcaaaaaacagatcgagaaaagatgatt

SEQ ID NO: 258379 - DNA, 201 bp, Homo sapiens
atttatgcattaaagtacagatagcttgtacaggacaggtgtagtggctggctcatgcctgtaattgcaggactttggaaggctgaggctggaggattgcktgagcccagagtttgagattgccttgtgcagcatagtgagaccctgtctgtaatggaaaaaaaaaatttgtaaatagttgtacaaagatgtctttattat

SEQ ID NO: 258380 - DNA, 201 bp, Homo sapiens
tataattgtggaagtaaaaataaataatttaaaaatacttttgggtgctcgcttcggcagcacatatagttggaatgatagagaagatttgcatggccccygcgcaagatgacatacaaattcgtgaagtgttccatatttaaaaaaacaaaaaatacttttgggcctggcactgtggctcatgcctgtaatccaaacact

SEQ ID NO: 258381 - DNA, 201 bp, Homo sapiens
aaaaggcatttaaaatacactttctatttcaaaaaaactaaaagaattttttaaaagggtatgttttaaaacccaacataatatttgatgaagaagagtcrtataaaaccccagaatattagagctgtatggggccttaaaagttattaaattctggccccatgttttacagatgaaaaaaacacagccaggaagatgaaa

SEQ ID NO: 258382 - DNA, 201 bp, Homo sapiens
caaagttgatgtaatagttacaaaacacattacattaataagaaataataaaatcttttgtcactataatatataccaaaaaggcatttaaaatacacttyctatttcaaaaaaactaaaagaattttttaaaagggtatgttttaaaacccaacataatatttgatgaagaagagtcgtataaaaccccagaatattaga

SEQ ID NO: 258383 - DNA, 201 bp, Homo sapiens
tttgggaggccgaggagggcggatcacctgagatcaggggttcaagaccagcctggccaacatggtgaaaccccgtctctactaaagatacaaaaaagtasccgggtgtggtggtgggtgcctgtaatcccagatactcaggaggctgaagcatgagaattgcttgaacctgggaggtggagtttgcagtgagtggagatt

SEQ ID NO: 258384 - DNA, 201 bp, Homo sapiens
gggattacaggtgttagccattgtgcccggcccttctttcctttcttcttctttctttctcagggtctcactctgtcacctggactggagtgcagtggtgmaatcatggctcacagcagctttgacctcctgggctcaggcaatcctcctaccccagcatcccaagtagctgggactaaggctaccatgcctggctgattt

SEQ ID NO: 258385 - DNA, 201 bp, Homo sapiens
  misc_feature (1)...(201): n = A,T,C or G
aaggaggtcgcgttgcatcttgggaattgtaggctgtgaagtacttgctatgagtaggtcttcttcgcggaggcgcgtgttgcattctggggtgtgcagtntctttggttagggacagtgtgtgagggttgggggaagaagcgatgccatgggaacctgtgctttaaaacagctctttgggaggccgaggcgggcggatca

SEQ ID NO: 258386 - DNA, 201 bp, Homo sapiens
cccagcactttgggaggccgaggcaggcagatcacctgaggtcaggagtttgataccagcctggccaacatggtgaaatcctgtctctaccaaaaatacaraaaaaattagctgggcatggtggtgcacacctatagtctcagctactcgggaggctgaggcaggagaattgcttgaacccaggaagtagaggctgcagtg

SEQ ID NO: 258387 - DNA, 201 bp, Homo sapiens
aggctgcagtgagtaagcatcacgccactgtactccagcctgggcaacagagcaagactctgtctcaaaagcaaaaaaaaaaaaaaaaaaaaagaaagaaraagaaaacaacaaatggcagagagccaccatattccaaatcactgaaaaaaataaatgaattatttttatttatttatttatttttttgagatggagtct

SEQ ID NO: 258388 - DNA, 201 bp, Homo sapiens
ggaagtagaggctgcagtgagtaagcatcacgccactgtactccagcctgggcaacagagcaagactctgtctcaaaagcaaaaaaaaaaaaaaaaaaaaagaaagaaaaagaaaacaacaaatggcagagagccaccatattccaaatcactgaaaaaaataaatgaattatttttatttatttatttatttttttgaga

SEQ ID NO: 258389 - DNA, 201 bp, Homo sapiens
cctaggttgcccagcctgggcaacaagagcacaactccatctcaaaaaaacaaaaacaaataaacagaaaaccccaataataccagcttttttttttttttgagacagagcttcgctcttgttgcccaggctagagtgcaatggtgcggtcttggctcaccgcaacctccgcctcctgggttcaagcggttctcctgcctc

SEQ ID NO: 258390 - DNA, 201 bp, Homo sapiens; identical to SEQ ID NO: 51629

SEQ ID NO: 258391 - DNA, 201 bp, Homo sapiens
cagggaggtggagggcaatgagccaagactgcaccactgcactccagcctgggcaacagagtgagactctgtctcaaaaaaaaaaaaaaaaaaaaaaaaargaaagaaggctagagagagaaatggtttcaaaggaaaactataacacttgttactagatttccagcctggacttttgtttttgagtgcatattgaatcat

SEQ ID NO: 258392 - DNA, 201 bp, Homo sapiens
agtctcaagcgcggttcggtcagtccgtgaaggggcttctcacggagaaggtgaccacctgtggtactgacgtaatcgcgctcaccaagcaggtgctgaarggctcccggagctccgaggtgagctggaagtggactctcccggcctgatagtccggggagtcgcagtctttcgttgctgtgggaaggaggtcgcgttgca

SEQ ID NO: 258393 - DNA, 201 bp, Homo sapiens
catggcttactaatgggagagagctggtttgagctgctggagctcaccagcagcagaacacaccagaccaagagggaacttacttgaaacttaaccacaarccaatgaacccaaaagaccagcaggaccactaagtttgctcctacaatacatgctgacctgtatctttcataatattttcatggtaaattataggattct

SEQ ID NO: 258394 - DNA, 201 bp, Homo sapiens
gtggaggttgcagtgagccgagatcatgccactgcactctaacctgggcgacagagcgagactccatctcaaaaaataaaaaaaaaataaaaataaaaaartaaaataaaattataaaccctcaaccatctgaacggacccctcctgtcgggcaaaggcattgcaaagttatcctaaaaaactagttcaggtcacgaaggg

SEQ ID NO: 258395 - DNA, 201 bp, Homo sapiens
ctgcaacctccgcctcacaggttcaagtgattctcctgcctcagcctcctgagtagctgtaattacaggcatgtgccaccatgcctggctaattttttttycttttttttttttttttccgagatggagtcttgctctgttgcccaggctggagtgcagtggtgcgacctcggctcactgcaacctctgcctcccaagttc

SEQ ID NO: 258396 - DNA, 201 bp, Homo sapiens
tgattaatgctgcagtcaacattaggagtgcagatatttccctgacatactgatttcatttcattcccttcccttcccctgcctgtctgcctgcctgcctkccttccttccttccttccttcctttcttccttccttccttcccttcctccctccaccccccccgcccctttcagatggaatctggctctgtcgcccaggc

SEQ ID NO: 258397 - DNA, 201 bp, Homo sapiens
attgtgattaatgctgcagtcaacattaggagtgcagatatttccctgacatactgatttcatttcattcccttcccttcccctgcctgtctgcctgcctkcctgccttccttccttccttccttcctttcttccttccttccttcccttcctccctccaccccccccgcccctttcagatggaatctggctctgtcgccc

SEQ ID NO: 258398 - DNA, 201 bp, Homo sapiens
aatatacaatatattattgtaaactagtcactttactgatatatcaaacactaggtcttatttctttcatcaaaccctatatatatatatatatatttttwtttttttttttttttttttgagacggagtctcgctctgtctcgctctgtcgcccaggctagagtgcagtggcacaatctcggcccactgcaagctccgcc

SEQ ID NO: 258399 - DNA, 201 bp, Homo sapiens
gaaatatacaatatattattgtaaactagtcactttactgatatatcaaacactaggtcttatttctttcatcaaaccctatatatatatatatatatttwtttttttttttttttttttttgagacggagtctcgctctgtctcgctctgtcgcccaggctagagtgcagtggcacaatctcggcccactgcaagctccg

SEQ ID NO: 258400 - DNA, 201 bp, Homo sapiens
ttgaaatatacaatatattattgtaaactagtcactttactgatatatcaaacactaggtcttatttctttcatcaaaccctatatatatatatatatatwtttttttttttttttttttttttgagacggagtctcgctctgtctcgctctgtcgcccaggctagagtgcagtggcacaatctcggcccactgcaagctc

SEQ ID NO: 258401 - DNA, 201 bp, Homo sapiens
ttttgaaatatacaatatattattgtaaactagtcactttactgatatatcaaacactaggtcttatttctttcatcaaaccctatatatatatatatatwtttttttttttttttttttttttttgagacggagtctcgctctgtctcgctctgtcgcccaggctagagtgcagtggcacaatctcggcccactgcaagc

SEQ ID NO: 258402 - DNA, 201 bp, Homo sapiens
aactcctgggctcaagcgattctcccatctcagcctcccaagtagctgggactacaggcatgtgtcaccatgcctggctaattttttatttttattttttygttggtgagacaggttttttttttttttcttttttgagaccaagtctcgctctgtcactcaggctggagtgcagtggcccgatctcggctcactgcaagc

SEQ ID NO: 258403 - DNA, 201 bp, Homo sapiens
tcccaaagtgctgggattacaggcatgagccaccgcgctcggcctatgatttattttttatactactttattcacataacagtgcttttcagaatgtggcstactgcatacatgaatattatgcttgcagctgagtagaaccaatccaccagtgagtgtcctgaagaatggttcctagagaccatcagctagcacacccag

SEQ ID NO: 258404 - DNA, 201 bp, Homo sapiens
atagtagccaccacgcccaactaatttttatattttcagtagagacggggtttcatcatgttggccaggctggtctcgaactcctgacctcaggtgatccrctgccttggcctcccagagtgctggtattactcccagagtacatgagccaccgcaccaggccagggcaaaccctttcaagcaggagttccagtatactga

SEQ ID NO: 258405 - DNA, 201 bp, Homo sapiens
tttatattttcagtagagacggggtttcatcatgttggccaggctggtctcgaactcctgacctcaggtgatccgctgccttggcctcccagagtgctggkattactcccagagtacatgagccaccgcaccaggccagggcaaaccctttcaagcaggagttccagtatactgagagatggaaatgcaattgatgtgaag

SEQ ID NO: 258406 - DNA, 201 bp, Homo sapiens
atttcatctgagcatcagcaattgctagtgacagccctacatctgggactcactttcctgtttggtataaatgtttctggagattagaataagggaagagragtcgttttagcatttccgtatctcagttccaaagaggtttaaaaggcacgtgcaaatgacaatcccacaaaacaaaatcaactgagcaaaaatcaatgc

SEQ ID NO: 258407 - DNA, 201 bp, Homo sapiens
aagttgtaattagaagcttcaggaagcaagtgcctttatggcagaatgactgatgttactcccaggatctcatggaattgtaaaattttatctctgttctrtgtaagtcaacctaaatcaaacagaaatattagtgtttgggtacatcaaaacacctttaacttgtcctttcattttggtttgccttttgacaggatataa

SEQ ID NO: 258408 - DNA, 201 bp, Homo sapiens; identical to SEQ ID NO: 51635

SEQ ID NO: 258409 - DNA, 201 bp, Homo sapiens
gcttcatctgcatgataaaaccttggtctccacaatctcttatcataacctagacactcccttctattgatcccaggtctttggattataactcaaccaaytgccaatcacaaaatctttgaatctgcctgtgacctggaaatccccacttccagttgtcccacgtttctggtctgaaccaatgtacatattatatgtatt

SEQ ID NO: 258410 - DNA, 201 bp, Homo sapiens
taacccacaaactaagaataaccaattaaaatggcatttgcttgtgaaagctttcatgagacttttccaaactgtcaaagaacatatactcctggccgggygtggtggctcacgcctgtaatcccaccactttgggaggccgaggcaggcggatcacagggtcaggagttcgagaccagcctggccaacatggtgaaaccc

SEQ ID NO: 258411 - DNA, 201 bp, Homo sapiens
caagttcagtgaaaagaagatactgtcattatttgttccaaaagtggaagaacttactattaatatttcatttttctgatttatttatttatctattttaragacaaagtctctctctgtcacccatgctggagtgtagtggcacagtcatagctcactgtaacctcaaactcctgggctcaagcgattctcccatctcag

SEQ ID NO: 258412 - DNA, 201 bp, Homo sapiens
ggacaaattctcattctgggcagtcattcgtttcatcctatgaatgccatggtgagggaaacagtgtagttagaggaacagatgaagtcagaacactcacmtgcatcacggtcacagaactttaagtcacaagacagaaaagaaatcgattctgctttggatcaaagtttatagaacactacttaatggaaactagtggaa

SEQ ID NO: 258413 - DNA, 201 bp, Homo sapiens
tattatgagtgattgtggcagaggtttgtgccatggtgaaaactttgatgtttgtctgtgttcattggatccatctttttaaatgacattaccatgagtcwgttgtcaaacctaaatatctttgtttgaatttaaaatgggactctatattgttgtagttcaggtcttcattgactaagagattgagagaaatctgacata

SEQ ID NO: 258414 - DNA, 201 bp, Homo sapiens
cgtgtctgtactaaaaatacaaaaattagctgggcacggtggcaaatgcctataatcccagttacttggggggctgaggcaggaggatcgttttgagcccrggatgtggaggctgtagtgagccgtgatcacaacactgtaccccagcctgggcgacagagcaagaccctgcctcaaaaaaaaaaaaaaaaaagcacaaag

SEQ ID NO: 258415 - DNA, 201 bp, Homo sapiens
attagctgggcacggtggcaaatgcctataatcccagttacttggggggctgaggcaggaggatcgttttgagcccgggatgtggaggctgtagtgagccrtgatcacaacactgtaccccagcctgggcgacagagcaagaccctgcctcaaaaaaaaaaaaaaaaaagcacaaagctttttgagaaatcactttcaaaa

SEQ ID NO: 258416 - DNA, 201 bp, Homo sapiens
cttcttttttttttttttttttttttgagatggagtctcgctctgtcacccaggctagagtgcagtggcgcaatcttggctcactgcaacctccacttccygggttcaagtgattctcctgcctcagcctcccaagtagctgggattacaggtgcatgccaccatgcccagctaatttttgtatttttagtagagatgggg

SEQ ID NO: 258417 - DNA, 201 bp, Homo sapiens
agtaaaaccctatctcttaaaaaaattacttataatcatataacccagtgataacttcttttttttttttttttttttttgagatggagtctcgctctgtyacccaggctagagtgcagtggcgcaatcttggctcactgcaacctccacttcccgggttcaagtgattctcctgcctcagcctcccaagtagctgggatt

SEQ ID NO: 258418 - DNA, 201 bp, Homo sapiens
ccagggcccctccctttccttctctccccgtaccccctgccctagaagctacaataaactgctgatctcccggtttcatgatcatcttggctgatcctgcrgaaaagggacagaggtgagcacctctcagagcagccctgaggctggagaggacttggtggtaacctgctgtttttctgggaggggccctagagctggcta

SEQ ID NO: 258419 - DNA, 201 bp, Homo sapiens
agaggggattgggatgaagaagaaaattatttttatttttattttttgagacagagtcttgctctgtcgcccaggctagagtgcagtagcgtaatctcagstcactgcaacctccacctcccggattccagcgattctcctgcctcagcctcccaagtagttgggactacgggcgtgcaccaccacgcctggctaattttt

SEQ ID NO: 258420 - DNA, 201 bp, Homo sapiens
tcaggaaactcaacaatctggtttggcagagcagtagttcttaaactgtattctacacaaaaatcagccccggtatcattaaaatgcaggttccgaggtaycagcaacagctggctcagtagttctggagcacaggaatttgcattttccattcagtaggtctcgtgcccaggaatcatgtcctgaatgattctgaagaag

SEQ ID NO: 258421 - DNA, 201 bp, Homo sapiens; identical to SEQ ID NO: 51641

SEQ ID NO: 258422 - DNA, 201 bp, Homo sapiens; identical to SEQ ID NO: 51642

SEQ ID NO: 258423 - DNA, 201 bp, Homo sapiens
ttaataaatgtactttgttatttgtaattttcaagtcgggtactaaaacctttataaccttagcccccctccttgaaccctctaaaattaacaaaatcatrttaagttttatatagcaagtccttgggttatactttttgttgatattgctaggcaaatatgctcttaacaagtaattgcctgaggcaggaggattgcttg

SEQ ID NO: 258424 - DNA, 201 bp, Homo sapiens
ttactgcttttctccacacattgacagtcaggcaccagtgtggtagaataataagcttttaatagaatgtttatctttgtgtttttcctgatctcttctaycaaaacattagccttttttttttttgtacatgacttaaaatcctttttttaaatttggaattagagtttataagtgagtattttgacatccatattttct

SEQ ID NO: 258425 - DNA, 201 bp, Homo sapiens
atgacccagctcaaacaccacctcctcagcaaagcgcattcaattcttccttagtcacaaggatttgttctctgggtttctctaacagacacatgcgaatstgaaagagccagaaatgtttcatttgtgtttttgttcttttatcccactattcttctcccctcccctccccctccaagaagaaactagcatggtgcctgg

SEQ ID NO: 258426 - DNA, 201 bp, Homo sapiens
gctgtctcaagcttctcggggttttccgccggctccacccgagccacaagtctacaggactcctcggagctttccgccgggacgcaagacccaccgccagrggttggtacctcctagagaacagcgaagcgcatcccgagggccgccggccggaagcgccctccagacccgccccctgccctccggagccggaagctgggc

SEQ ID NO: 258427 - DNA, 201 bp, Homo sapiens
gttcttagaaatgtacgccaattctaggtgtttttgccaactttttgaagtcacagttccatggagtttagccaggggtatcaggaatcttttcagtgctrggaatctctgtagtgttgaaagatactggctaaatattttttttttttttttttttttttttggagacagagtctcgctctatcccccaggctggagtgc

SEQ ID NO: 258428 - DNA, 201 bp, Homo sapiens
caccaccatttgttcaccttttgatgaacatttggttattcacagttttaaggctattgcaaataatgcttctgaatatttgtgatctttgtatgttatgwtttgatttcttgggaacctacctaattagatggaatggttgagtcttaagtaggtgtatttttcacttttttttttttgagacagagtcttactctgttg

SEQ ID NO: 258429 - DNA, 201 bp, Homo sapiens
agttttaaggctattgcaaataatgcttctgaatatttgtgatctttgtatgttatgttttgatttcttgggaacctacctaattagatggaatggttgartcttaagtaggtgtatttttcacttttttttttttgagacagagtcttactctgttggccaggctagagtgcagcggcacgatcttggctcacttcagcc

SEQ ID NO: 258430 - DNA, 201 bp, Homo sapiens
tacagtcccagctactcaggaggctgaggtggaaggatcacttgagcccaagaggcggaggttgcagtgagctgagactgtgtcgctgcactacagacagyctcctgcatgacagagccagaccctgtctcaaaacgtgggggggaggaaagttctctattgtttgaaataataacgaaacattaaaggctctaaagtcag

SEQ ID NO: 258431 - DNA, 201 bp, Homo sapiens
tggtctgcagcactctcttctcaggtactcctgctgtgaattcagccagtgtggcctccctaaattctcactcccatctcagctgctcagggcgacttccygagctgtttgggcatcccctccctgtgccatagtctggaaactcggcagtaagctggggcagttgttggagtcacctcctttgccttccttttcttataa

SEQ ID NO: 258432 - DNA, 201 bp, Homo sapiens
aaagaaaggggcagtaggctctgtgcaaatctgaaaccagcagggcagttgttaaatctttttttctttttctttttctctctctctctctttttttttttaaacagagtctcactctcttggcccaggctgcatgatcacagctcactgcagccttgacctctctggcacaagccatcctcccacctcaccctcccaggt

SEQ ID NO: 258433 - DNA, 201 bp, Homo sapiens
ctgtttgggcatcccctccctgtgccatagtctggaaactcggcagtaagctggggcagttgttggagtcacctcctttgccttccttttcttataactaytgttgagtgtctgaaactttgtatgttttgttcagctttctggtactttaaggtaggacagtaaatctggtccctattactccgtcttgactggaagtgg

SEQ ID NO: 258434 - DNA, 201 bp, Homo sapiens
tacctcttcctgtattttttgcttgtttgtttgttttgagacaaggtcttactctgacaccctggagtgcagtggcgtaatcatggcttattgcatcctcracttcctgggctcaagtgatcctcatacctcagcctcccaagtagctgggactacaggcatgcgccacagcgcctggctaattttgtggggagttttcgt

SEQ ID NO: 258435 - DNA, 201 bp, Homo sapiens; identical to SEQ ID NO: 51644

SEQ ID NO: 258436 - DNA, 201 bp, Homo sapiens
ctcttgaggaggcagtctgtccgttctcagatctcagactccgtgctgggagaaccagtactctcttcaaagctgtcagacagggacgtttaagtctgcasaagtttctgctgcattttgttcagctacgccctgcccccagaggtggagtctacagaggcaggcaggcctccttgagttgcagtgggctccacacagttc

SEQ ID NO: 258437 - DNA, 201 bp, Homo sapiens
tataaatgggcaaacacagctatttaagaaggattatatattagctctttggaagctcttttggtcatagataattacctggaggcagttgtttttttatrtacccgagtttgatattttgccagttgagtttcaaacaatgaagtagaaatttgtttatatattgcttagtcattcttgttcataagaagagcattctga

SEQ ID NO: 258438 - DNA, 201 bp, Homo sapiens
catttaatcttcaatctctatttctttagccttttctagctattctcatgcgttacagccattataaatggggaataattttaccccaagagtttcctgaycaatatgtgcttatttcagctgtgcggattagtaagatgttagtgttcctttttcacacttaacattttcaataatttgaaactgtcatttatgtcagtg

SEQ ID NO: 258439 - DNA, 201 bp, Homo sapiens
ctggtgggctcaagcagtccttcccctctgcttctggagtcactgggattatagataggagtaatctgtaattagctctgctaatttttttttttttttttacctattccttttcaatgttttttctccgggatttggatagttttctcatacgcatgtgctgttcagtgccagctgaaaatttgagggagcccctgctgg

SEQ ID NO: 258440 - DNA, 201 bp, Homo sapiens
taactgaaacctctgcctcccggattcaagtgattttcctgcctcagcctctccagtagctgggattacaggcgtgtgctaccatgcccaggtaatttttktatttttagtagagatggggtttcaccatgttagccaggctgatcttgaactcctgaccttaggtgatctgcccgcctgggccccccaaagtgctggtat

SEQ ID NO: 258441 - DNA, 201 bp, Homo sapiens
tcccagcagtttctctagtgtgagccctgtgtttggagagttcacaggagctccaggattctctagccccgggcctcactgtaggcctgccttgcactcaycaagtcctggagaggactaaatacttcccaatttcagctgctatatccagttcacacacagcgcttccagtgaatacctgtgggctgtttgggattctct

SEQ ID NO: 258442 - DNA, 201 bp, Homo sapiens
ctccttagggtttcagttttatgaaccctatgtcctccttaaggtttcaggaaacctccttagggtttcatgttgatagcatattatatgaattattatggcagttttttctattttataagttgtttttctctgagataaaatttctctaagtgggatttttaatattcaagctttcttgactttttttttaaaaaagac

SEQ ID NO: 258443 - DNA, 201 bp, Homo sapiens
attaaacatttttgacaagagcactacgtaagtgatatatccttctcagtgcatcatatcagaaggactgatgtctgcttgtcatgtcattgattattatyactatttttttgagacagtgtctctctctgttgcccaggctggagtgcagtggcgcaatctcagctaactgaaacctctgcctcccggattcaagtgatt

SEQ ID NO: 258444 - DNA, 201 bp, Homo sapiens
atgtttctctctctttctcctctctgtcagtctctctcctctctctgtctctgtctctgtctctctctctgtcacacacacacacacacacacacacacamtttcttactccctcattcagacatatacacatgctcatacccatttattgttgccagtattttgggcttgttcatagaccagctttggtttgttggagaa

SEQ ID NO: 258445 - DNA, 201 bp, Homo sapiens
agtaatataaagcctcaactgtaggcattatttttaaaacaaattatcttttctgaatttccccctgataaagtgatacaaatggaaaaatcatataaattctttagcttttgaagcagttcaaaagtacctgttaatgtgtaagaggggtaagttttagaaagtgaaaagcaaagtactatgatgttttttgagttatat

SEQ ID NO: 258446 - DNA, 201 bp, Homo sapiens
aaattatgcactggatctcagacacttggtagaaaaaagaatgtaaagtttactaatggcgtataaattacttgctgaaatgacaatagtttggatatatygtcatatcttgtccccagtttattagagttcttctgtgggggaaagaggagagagttactgacagtaaattcttctggttagacagtggaggtgttgctg

SEQ ID NO: 258447 - DNA, 201 bp, Homo sapiens
tactgagcatcttttcatgtgcttatttacatctatatatctagtttggtgaagtctttattttgtgtgctttttaattgggttatctttattactgtttstgtgtgtgtgtgtgtgtgtgtgtgtgtgtgtgtgtgttgtctaggtacaagtcctttgtcagatttatgctctataggaatatattctcttagtctatgg

SEQ ID NO: 258448 - DNA, 201 bp, Homo sapiens
tttcctagtcaagatattttcttaagaattgcaatccagttgacaaagtgggcagaattatccatttcaagagaaacaaacatacatactgatttttttttgcatacacatccaaagcccagataaaactatattcaattttctcatattttatgtacaaaaatgatatacttggtgttcttttcgtggtaaattgttgga

SEQ ID NO: 258449 - DNA, 201 bp, Homo sapiens
gttttgaaatactgttaacagtttcagtgtactttttgagtatatatttctagcgtactcttatatatggaagttattctgctccttattttttcttacaygcttttctgtagttattttgatatgaattgttttcctgaacatttagaaaaaggtttgtgtcagattgcttgtctcatctcacagagcccccccgttctg

SEQ ID NO: 258450 - DNA, 201 bp, Homo sapiens
atactgagcatcttttcatgtgcttatttacatctatatatctagtttggtgaagtctttattttgtgtgctttttaattgggttatctttattactgtttgtgtgtgtgtgtgtgtgtgtgtgtgtgtgtgtgtgtgttgtctaggtacaagtcctttgtcagatttatgctctataggaatatattctcttagtctatg

SEQ ID NO: 258451 - DNA, 201 bp, Homo sapiens
taataatccagtccatcatctgtatgaatgtcttccagggcaaggccactcaggtttgccagcttcctttcaatcctgtcaggttccaaaaccaggagtgktcttggcaaatttatggcttcaccctttcatgcatctgtcatacttgagctaagagacagcgtcaccttttgctctgagccccgttcaaggcgttcatgt

SEQ ID NO: 258452 - DNA, 201 bp, Homo sapiens
agtcaggcaccagtgtggtagaataataagcttttaatagaatgtttatctttgtgtttttcctgatctcttctaccaaaacattagccttttttttttttgtacatgacttaaaatcctttttttaaatttggaattagagtttataagtgagtattttgacatccatattttctgacaaaatgactttcactttcccaa

SEQ ID NO: 258453 - DNA, 201 bp, Homo sapiens
taatccagtccatcatctgtatgaatgtcttccagggcaaggccactcaggtttgccagcttcctttcaatcctgtcaggttccaaaaccaggagtggtcktggcaaatttatggcttcaccctttcatgcatctgtcatacttgagctaagagacagcgtcaccttttgctctgagccccgttcaaggcgttcatgtaat

SEQ ID NO: 258454 - DNA, 201 bp, Homo sapiens
tttttgtttgtttgtttttaactaatggacttttaaaagtaattttaggttcacagcaaaattgagtagaaagtacagagagttcctacttactgcttttytccacacattgacagtcaggcaccagtgtggtagaataataagcttttaatagaatgtttatctttgtgtttttcctgatctcttctaccaaaacattag

SEQ ID NO: 258455 - DNA, 201 bp, Homo sapiens
gaggtgggataataaggaatgttgtttgtggaaacataatggttgcttcaatttgagtgtaaactgtcctttttactgaagcaattgcaaccaagtgtgtkagtttacaggtgcctacattgcttttttggcttaggtattgtttgggttttaatactgactggtatataatacagacaaatcaactcaatcaaagaaacc

SEQ ID NO: 258456 - DNA, 201 bp, Homo sapiens
ctggaaaggacaaatactatattttgtgcagaatggtaattaaacattgtaaccatttcttagagaatcattattaaatcagggaatcttgttatattttwgaaaatatattagaaattatttttgaatttttttaggtattagaatatttaaatgatctgaaacaatattggaaaagaggatatgggtatactattaaca

SEQ ID NO: 258457 - DNA, 201 bp, Homo sapiens
cattatgaaaattaggttaagggcctggttttctaatgagtctattttagatagtcacaccacccagtgccatttatagtgggaagaaacaactgtctcarcttttcttcctacttcagtgctatgagactgaaaagactctgagaagagaaattgagatccttggggcaggacataaaaaagtaagatagaaacaacagc

SEQ ID NO: 258458 - DNA, 201 bp, Homo sapiens
aaaggcaaaggctggaagagtttggagggcaaagaagacaggaagatgaagaaaaatttggaacttctgagagactggttaaatggttgtgaacaaaatgytgatagcgatatgaacagtgaagtctaggctgatgaggttccagatggaagtgaggatgttattgggaactagagcaaatgttacccctgtcacatccta

SEQ ID NO: 258459 - DNA, 201 bp, Homo sapiens
cctggattctaaactcagcacaccactaatttgtgtgctgggtcacttcactgctagaactgctgtggcttttgctgccactgtggctgtttgctatcacrgattgattgatggctctgtggcaaacactaccatagagccatcgatcaatatgtgatagcaaatatgtgagtatttttctgtagctcaaatccaacagct

SEQ ID NO: 258460 - DNA, 201 bp, Homo sapiens
ctgattttgccccattattgaggcatttcaccctgagtatttatatgtaccctgtgtattttgaggttttcccactctggcttatgtgaaaactattctgwttttttgtgttagctttgggaattttttttctttttttagacggggtctcactctgttacccaggccagagaacagtggtgcgatcatagctcactacag

SEQ ID NO: 258461 - DNA, 201 bp, Homo sapiens
tccaaactggcagtacattggcatcgcctgtggagctttaaaaattatttactttattgggaaataattcaaacacgaagataacaaaaaaggctaatgtrgtgaacatccctatacccacaacttggttttactaaattttaactttgtgcttcagttacttgccttaaataaattgaggtctactggtccctttcctgg

SEQ ID NO: 258462 - DNA, 201 bp, Homo sapiens
tataatgatataactgtttatgtaagattgtgaaacaatgtaagaagttgaaagagagagtttgaccctttaagacaggaaatcgttttggccaccgcctyttgttctaactgaagaaggaatcaacaaacactgctcagcagtgagcgatgatgaagaaactggcagatggtttcctgggactgggtatctctgtactaa

SEQ ID NO: 258463 - DNA, 201 bp, Homo sapiens
atcaccataacagatataataatcatagtaataattaaaaaaactttgaaatattgtgtattactaaaatgtgatacattactaaaatgtgatacattactaaaatgtgatacacaaaatgagcacgtgctgttggaaaaattacacagatggccttgcttaactcaggattgccacaaaccttccatttgtggcaaaatg

SEQ ID NO: 258464 - DNA, 201 bp, Homo sapiens
ttggctctatgttgagtaggagtggtgagagaaggcatccctgtcttgtgccagttttcaaagggaatgcttccagtttttgcccattcagtatgatattsgttgtgggtttgtcataaatagcttttattattttgagatatgtcccatcaatacctagtttattgagagtttttagcatgaagggctgttgaattttgt

SEQ ID NO: 258465 - DNA, 201 bp, Homo sapiens
tggactttgtgtaccttcagcaagcattttttgagtttccgttctgtgacaagcacttgcttggaactaaagacactaacataagatagatattgtcctcraagaatgccacaaggaatgaaagacatgtaactaaaccattgcaagacaataggatgtctatacagtgatagaagtatactcagatgctccttaagttat

SEQ ID NO: 258466 - DNA, 201 bp, Homo sapiens
gattgccacaaaccttccatttgtggcaaaatgcagtatctacaaagcacaataaatcaaagcacaagatgaggtaatacctgtatcatatacagtttacctacttaaagtgcacaattcagtgttttagtatattcacagagttgcacaaccatcactactgcaactttagaacattttcatcgcctcaaaaagaaactc

SEQ ID NO: 258467 - DNA, 201 bp, Homo sapiens
  misc_feature (1)...(201): n = A,T,C or G
ctctctcctctctctgtctctgtctctgtctctctctctgtcacacacacacacacacacacacacacactttcttactccctcattcagacatatacacntgctcatacccatttattgttgccagtattttgggcttgttcatagaccagctttggtttgttggagaaggttggaagtgaaaccagaaaagttgtcata

SEQ ID NO: 258468 - DNA, 201 bp, Homo sapiens
agatcaccataacagatataataatcatagtaataattaaaaaaactttgaaatattgtgtattactaaaatgtgatacattactaaaatgtgatacattactaaaatgtgatacacaaaatgagcacgtgctgttggaaaaattacacagatggccttgcttaactcaggattgccacaaaccttccatttgtggcaaaa

SEQ ID NO: 258469 - DNA, 201 bp, Homo sapiens
cagatcaccataacagatataataatcatagtaataattaaaaaaactttgaaatattgtgtattactaaaatgtgatacattactaaaatgtgatacattactaaaatgtgatacacaaaatgagcacgtgctgttggaaaaattacacagatggccttgcttaactcaggattgccacaaaccttccatttgtggcaaa

SEQ ID NO: 258470 - DNA, 201 bp, Homo sapiens
tgtagttcattttcactgtagtacaatattcaataatgtgaatataccatctactcttgtcagtgggcatttagatagttcctatcttttgctgttataawtagtgtaattatgaactctatgtggctcctgctatgaatgtgcaaaatgtttttgttttgaaagagaaaaagcttttgttaacatttataatcttcaatt

SEQ ID NO: 258471 - DNA, 201 bp, Homo sapiens; identical to SEQ ID NO: 51643

SEQ ID NO: 258472 - DNA, 201 bp, Homo sapiens
acagatcaccataacagatataataatcatagtaataattaaaaaaactttgaaatattgtgtattactaaaatgtgatacattactaaaatgtgatacattactaaaatgtgatacacaaaatgagcacgtgctgttggaaaaattacacagatggccttgcttaactcaggattgccacaaaccttccatttgtggcaa

SEQ ID NO: 258473 - DNA, 201 bp, Homo sapiens
aaattattagatcacttccctgcattgatgcgcaatatattggaaaataattgaatttttttaattaaggattttacagtgtcatagggtcattatttttwaaaacagtttgagaaataattcatatgtaggcatgtctcaaagatagtgcaagttcaattccagaccactgcaaaaaagtgaatatcacaatgaagggag

SEQ ID NO: 258474 - DNA, 201 bp, Homo sapiens
gtcacacacacacacacacacacacacacactttcttactccctcattcagacatatacacatgctcatacccatttattgttgccagtattttgggcttrttcatagaccagctttggtttgttggagaaggttggaagtgaaaccagaaaagttgtcataccatctttgtgattttggtgtattcaaagagaaactgga

SEQ ID NO: 258475 - DNA, 201 bp, Homo sapiens
cattaaaggcatcactgtctatgacagctatagccttatgacatttatttcttaaataaataatatttctctgtcatatgaaatttctgttttttttttttgagacagagtctcgttctgtcacccaggctggagtgcagtggcgtgatctcggctcattgcaagctccgcctcctgggttcacgccattctcctgcctca

SEQ ID NO: 258476 - DNA, 201 bp, Homo sapiens
gatgcgcaatatattggaaaataattgaatttttttaattaaggattttacagtgtcatagggtcattattttttaaaacagtttgagaaataattcataygtaggcatgtctcaaagatagtgcaagttcaattccagaccactgcaaaaaagtgaatatcacaatgaagggagtcacacaatttttttggtttcccggt

SEQ ID NO: 258477 - DNA, 201 bp, Homo sapiens
tcactctctctactatattagtttcctattggtgctctaacaagttaccacaaacttactggcttaaaacaatataagtttattatcttatggttctggargtcagaagttcaaattgaatcttacagggctgaaatcaaggtatcaatagagccgtatacaatagagccgtattctttcagggggctttaggagaacatc

SEQ ID NO: 258478 - DNA, 201 bp, Homo sapiens
tgtaatcagtgataggtaggtttcaaaccgttttctatacttttataatctgtatcattcttagaaatataaaaggtatagtgtgtgtgtgtgtgtgtgtkttggtaataaatggtattatagggtatgtattatttttaatgggttcttattcaacattgtgtcttggagatttttccatgtcagtacatggaaatctat

SEQ ID NO: 258479 - DNA, 201 bp, Homo sapiens
atctggcaactgttaaaagaggaatgatgcaacagcagggcagaaagataagaaagctcaaactttcctggcataggcacaaagttcgttgcttaatgtakttatgagataataaatatctatgaaaaactatttgtcagtttatttaagagagacgtgataataagaaaccctttaattctgcttaataaaagcaactga

SEQ ID NO: 258480 - DNA, 201 bp, Homo sapiens; identical to SEQ ID NO: 51645

SEQ ID NO: 258481 - DNA, 201 bp, Homo sapiens
tcacccaggctggagtacagaggcgtgatctcggctcactgcaagctccacctcccgggttcaagccattctgctgcctcagcctcccgagcagctgggaytacaggcacccgccaccacacccggctaattttttgtgtttttagtagagacggggtttcaccctgttagccaggatggtctcgatctcctgacctcgca

SEQ ID NO: 258482 - DNA, 201 bp, Homo sapiens
tattacagtagtttattgtttactaatttattttttccctaagaaacagtttagctttatctgtttttgaactttataatgatggaattactcagcgtgtrttttttttcttttggtatctagctcttgttcaacattaagtttttaagatttatttgggagctaaatggtgagaacacatggacagatagaggggaacaa

SEQ ID NO: 258483 - DNA, 201 bp, Homo sapiens
ttagagaatattaatctgaaagtagtgaataattgtcttttagtttgttttgaaatactgttaacagtttcagtgtactttttgagtatatatttctagcrtactcttatatatggaagttattctgctccttattttttcttacacgcttttctgtagttattttgatatgaattgttttcctgaacatttagaaaaagg

SEQ ID NO: 258484 - DNA, 201 bp, Homo sapiens
ataattttgccaggaaagcaggtgggaaaccatggcacatggtcacctagcaatgggagattaagaaaataagatttttttctgttttctaggaatttatrttccatagggtagatgttgacaaagatacatgcaaagattgtagattacattatactctgaattaatttccaaaagactggaagtagatgttggggaaaa

SEQ ID NO: 258485 - DNA, 201 bp, Homo sapiens
  misc_feature (1)...(201): n = A,T,C or G
aaggaattcgtttcacatttgttgtgttttttgccctcctatacctacatgcctatgtttctctctctttctcctctctgtcagtctctctcctctctctntctctgtctctgtctctctctctgtcacacacacacacacacacacacacacactttcttactccctcattcagacatatacacatgctcatacccattt

SEQ ID NO: 258486 - DNA, 201 bp, Homo sapiens
cacttgaggtcaggagtttgagaccaacctggccaacatggtgaaaccccgtctccactaaaaatacaaaaaaaaattagctgggtatggtggtgcatgcytgtaattccaactacccaggaggctaaggcaagagaatcgcttgaacccaggaggcagaggttgcagtgagctgagatcataccactgcactccagcctg

SEQ ID NO: 258487 - DNA, 201 bp, Homo sapiens
aagacttaaaaattatataccttaaacaatgtaagttaacagaaaaaagtcaaatgacaattttaatagactttaaaacagtgtacaagtaaaaaacactrgttttgtatttcaaaagttgaaggaagatatccagtcattaaacagtctacaaaacatatgccagtaaattacataaaagactatgtacaatataaaaag

SEQ ID NO: 258488 - DNA, 201 bp, Homo sapiens
gaggccaaggtgggcggatcacctgaggtcaggagttccaggccagccttgccaacatggtgaaacctcgtctctactaaaaatacaaaaattaatcgggygtggtggcacacacctgtaatcccagctacttgggaggctgagacaggagaattgcttgaacctgggaagcggaggttgcagtgagccaagatcgcgcca

SEQ ID NO: 258489 - DNA, 201 bp, Homo sapiens
ttcagaaacataactaacaatgcctgatttctgcctatattgccgctacacattaagttgggaaaacagaagaatacaacagtatacatattccataattratatgctttagcagagtcccaaaggaagggtatataaatcttatctccaatgtgtgtgtgtgtatatatttttttaatttacaaaatttattctggcttc

SEQ ID NO: 258490 - DNA, 201 bp, Homo sapiens
tggaaaagtgcaaaattgaaaatatatgtatagcttgatgagttttctaagtgaatctattattggcttctcagtgtagtttgaatttgcatttctccacrggccatttctgtttctttctctgtgaacttttggttcacatctcttacccacttgtcatgcgaattactgaccttttttttttttccctaagaagtcaat

SEQ ID NO: 258491 - DNA, 201 bp, Homo sapiens
ccccaaagcatttttttctttagatattttaaatttctctgtcttggccaggcgtggtggctcacgcctgtaatcccaacactttgggaggccaaggtggrcagatcacaaggtcaggagatcgagaccatcctggctaacacgatgaaactccgtctctactaaaaatacaaaaaattagccggtcatggtggcgggtgc

SEQ ID NO: 258492 - DNA, 201 bp, Homo sapiens
tcagaaaacatgaaaattatataaacaattctttttacgaaaaattaacaataagcatacattataatacatctcactgaaaatgcaacagatatagaccratccttttaaagtgccattagaagtaagaactataggcaatatctcttaagttttatctgtccatccattcgtctcatatttattgagcacctgtttgga

SEQ ID NO: 258493 - DNA, 201 bp, Homo sapiens
attttatttttctgcctatagactagattttattgctcatctgatcttgcacttctatctcttactgttctggttttttggcataaagttttctcactttwatttttctaattgtctagattttatctctatttcctggcctttatactttttttgctacatttaacccagtgcttttctttctaatggtatttgttagat

SEQ ID NO: 258494 - DNA, 201 bp, Homo sapiens
aagaagctgggattacaggccactccaggctattttttagtagagatggggtttcgtcatgttgactgggctggttttgaactcctggcctcaagtaatcyacccgccttggcctcccaaagtgctgggattacccggtgtgaaccaccatgcctggcctatttcagtttttttgaatggtttaagacttgttttatgaca

SEQ ID NO: 258495 - DNA, 201 bp, Homo sapiens
tacctgttgctggcgagaggacgcctctgtgttttaaagaaaagggtggttaaacctcgcgcgctgaagtcggggtattttcctgtattactcttattttrtttttaaatatgggaagacaatgcagaactcttgggaattatcgagttctgataccccaaaagaatgaaatcaaacttctgttaatgggatgatgggtcg

SEQ ID NO: 258496 - DNA, 201 bp, Homo sapiens
aaataagattttattttaaagcatttgtaatttagctgtcaaagatctataaatcttttcagatgtttgaagcagaccctgaattacttaacattaccacrttgcttaagtttgtgtatggttatagaggtagagagtttaaattgagacttgtacacgtgattttttaaattctccaagtaatgcttaggcattaatttt

SEQ ID NO: 258497 - DNA, 201 bp, Homo sapiens; identical to SEQ ID NO: 51680

SEQ ID NO: 258498 - DNA, 201 bp, Homo sapiens
caggtcagaagttgtgtttcaaataaagcttagttggggattatgtaaaacaccattgattgaaggtccaccgtcattttatgtaccactacaaaaaaaaacgctaattaaaccatgtgacattaattagggtattacaatcagtgaaatacagtacatgctgcattagccagtggttcagcaataacgttatgcataggg

SEQ ID NO: 258499 - DNA, 201 bp, Homo sapiens
aaagtgctgggattacaggcatgagccactgtgcctcgccaagaataaatactcttgatttttatttccttctagctatcttttgtagcttttgttctatyttttttaaatcatctttggtttaaactgaaatatactgagatgcagattagaaaaagctttttttcttggtgcagggcagaagaaaggcttgtaaacttc

SEQ ID NO: 258500 - DNA, 201 bp, Homo sapiens
aatcccagcactttgggaggctgaggcaggcggatcacgaggtcagaagatcaagaccatcctggccaacatagtgaaacccccgtctctactaaaaataygaaaattagctgggtgtggtggtgtaggcctgtaatcccagctactcgggaggctgaggcaggagaatcgcttgaacctgggaggcagaggttgcagtga

SEQ ID NO: 258501 - DNA, 201 bp, Homo sapiens
ggaaatacacaaaatatttttaatcattattcctgagtgattggtttacaggtgtttattcattttcttttctatgttttttctttgttttccaaatttcraatgtgtattactttttaaatcagaaaaaaagttatagtaattatttcacctattaacttaatgtcgaatgacatgaatatgcttatgtctgggaaaaaa

SEQ ID NO: 258502 - DNA, 201 bp, Homo sapiens
taaaaagaaaaattaaagagtagtttttaatggtatagagtaggtcagtttttagtctaaatttttcatttttttaaaaatctactcccctattctgagayaaatttttcaaaattgaaatgagttggtgttaagatttttcttaaattactaggaaagttgtggcttaactggaaaatagaaaattggtaattgtgttta

SEQ ID NO: 258503 - DNA, 201 bp, Homo sapiens
taagtccaatgtttcttcattgattttctgttagaatgatctgtccagtgctgtaagtggagtgttgaagtctccagctattattgtattggggtctctckctctctctttagcggtaataatatttgcttcatatatctgggcagtccagtatgggtgcatatttatatttgtaattttgttttgttttgttttgagaca

SEQ ID NO: 258504 - DNA, 201 bp, Homo sapiens
tgtttttaagtacagtagttgttctttaatgtattgtctagagtttataattgttagtgccaggaagagtagtctgatacaaagtattctgccatatttaktaccagaattcctctagtctcttttaatttagaatagctccttttttttttcaatccctgctaccttgactttttgaagattcttggccagttttcttat

SEQ ID NO: 258505 - DNA, 201 bp, Homo sapiens
ctggctaatttttgtatttttagtagagatggggtttcactatattggccaggctggcgtcgaactcctaacatcaaatgatcctcccacctcagcctccyaaagtgctgggattacaggcatgagccactgtgcctcgccaagaataaatactcttgatttttatttccttctagctatcttttgtagcttttgttctat

SEQ ID NO: 258506 - DNA, 201 bp, Homo sapiens
catataattggagagaaatttagtgttgaaatatttagaatgtattatttatggctggacgcggtggctcacgcctgtattcccagaactttgggaggtcraggcgggtggatcacaaggtcaggagtttgaaactagcctggccaacatggtgaaactccatctctactaaaaaaaatacaaaaattagctgggtatggt

SEQ ID NO: 258507 - DNA, 201 bp, Homo sapiens
aaaggcatcccagattaggctcactgccaatataaaatgtttaaaatttttttaaattaaaaaactttttacatgaacatacacacttaatttttaaaatwccatgttttaaagcagataacattggataaatggatgaaagtaatatttaagaaagtctagaataaacagtaataccttcatcaagtattattttatcag

SEQ ID NO: 258508 - DNA, 201 bp, Homo sapiens
caaaaagatcatatttctaacccctctgtgttgcttcctaccactgtgattttgaagaagtctttttctttatcccatatgcaaatgaagaattatctatmaggattgaaataccagccctgatagttttccaagatttatgtattgtttacattatacagtatgggctgggcgtgatggctcatgcttgtaatcccagca

SEQ ID NO: 258509 - DNA, 201 bp, Homo sapiens
gtgttcggtggtattgagcgccttttcatatgcccgtttgtttttgttttgtttttttttttttttgctcagtgcaacctccgcttcctgggttcaagcarttctcctgcctcagcctcccaattaactgggactacaggcccacgccaccatgcccagctaattttttgtattttattagagacggggtttcaccgtgtt

SEQ ID NO: 258510 - DNA, 201 bp, Homo sapiens
ggatattgatatctttttctatgtttgggaagttctctgtcattatctctttgaattaattttctgccccatctatctcctctttaaggccagtaacttakatttgcccttttgggccttttttctagattctgtaggcatgccttattgttttttattcttttttcttttgtctcctcagctcactaattctttcttctg

SEQ ID NO: 258511 - DNA, 201 bp, Homo sapiens
gtttgttgagtcttgctactctcctttctgattcatgaacatggtgaatgactcttcagtttctctcagcagtgcttggtagttttcaaggatcttgcatattcttttaaaaattttattccttctctttctcaaagatttattcctaaatgttttatgtttttgatgctattgtaaatgatttttaaaatttttattttc

SEQ ID NO: 258512 - DNA, 201 bp, Homo sapiens; identical to SEQ ID NO: 51655

SEQ ID NO: 258513 - DNA, 201 bp, Homo sapiens
accccacactcagctttaagtgatccttaaaattttagtgtattacttctgcttatatgacagtagtagtttcctctttctctctgccacaaatgagccawttctggtaccctgttaccttttgtaaggatttgttgatccttggattcaggctacttggttgtcttgtaactttagctctctcacaggttcaagaaaagt

SEQ ID NO: 258514 - DNA, 201 bp, Homo sapiens
caactaaactgaagataaacagaggaagttcagaatcctatcagataaatttaacaaagagattaaaacaatggtgaaatatcaaagagaaattctggagwtagaaatgtaattgacaacctggagaatgcatcagaggctctcaacagcagaattgatcaagcagaagaaagaattagcatgaagacatgatatatgaaa

SEQ ID NO: 258515 - DNA, 201 bp, Homo sapiens
gttactggccttaaagaggaggtagaaggagagagagggatagaaagtttatttaaagagctaataatagagaccttttcaatcctaaagaaaaatatcartattcaagtgcaaggttatagaacaccaagcagatttaacccaaataagactacctcaagacatttgataatcaaactcccaaaggtcagggataaagaa

SEQ ID NO: 258516 - DNA, 201 bp, Homo sapiens
tctcaactaaactgaagataaacagaggaagttcagaatcctatcagataaatttaacaaagagattaaaacaatggtgaaatatcaaagagaaattctgsagttagaaatgtaattgacaacctggagaatgcatcagaggctctcaacagcagaattgatcaagcagaagaaagaattagcatgaagacatgatatatg

SEQ ID NO: 258517 - DNA, 201 bp, Homo sapiens
ttttgttttggggtgcgtgtgcaaggtccttttctggtattttgatagtgatgatctcatagaatgatttaggaaatattccctctgctgtgatcttttggaagagtttgagaattggtgttaattctcctttaaatgtttggtagaatctgatccttggcttttctttgttggaagatttttattatttttattttttat

SEQ ID NO: 258518 - DNA, 201 bp, Homo sapiens
agtcagaggtaatggttagttatggaatgcttgaaattgagatttggagggttgtagttgaatgtaagatataaccatgggtatgggcattgaggtgtggyggagaacaagattgttggaaacagacaggtccagaaactgagaggctagtgtgttgtatgcatttttttttgtctggatattgaagttgccaaaaacgat

SEQ ID NO: 258519 - DNA, 201 bp, Homo sapiens
acttcttcccaaaatgttcaggtcacttgatattctgagttgattatgccctatgatatatttatctgtggtttaccacaatgagaattacgtttggaacrtatttgttgaatagttcaaaataactggttatatctagtgtgtgtttaagcatttctttagcttgtttgtataaaatgaagaatgtgttttgttcttatt

SEQ ID NO: 258520 - DNA, 201 bp, Homo sapiens
tctttttgcttaccaaccctttttccctgtcctgtactttctattttaaattaattcagttttaaagaatgcttaatgtaagataccttatgttttactgkttttttttctgtcaaataaaaacaatttatggcttattttttcttactttgtgtccatatggcattttaatctactaaacactgtcagacattttgctga

SEQ ID NO: 258521 - DNA, 201 bp, Homo sapiens
ttctgattcatctaattgggtgttagaggagtgctctgtagcattaaacattagattaattattcattttaattcttttttaagaaagggtaaacaattaratttctgattctatgattaaaaaaacttttttaaattttttagtgagatagatggaacgttttcttcctctggttgcctaaatggaagttttttagctgt

SEQ ID NO: 258522 - DNA, 201 bp, Homo sapiens
agctaaggagaaaatcgatctcccatactataaactcccttggtatatagtatagttatcaagcaggccatagataaatttttataggcttttttttttttgcttatttaaactttcttagtagtaataacactttttaaatgtcctacaagaggaatattggtgatatgaaggctgtgcatatgtgaggataagggtata

SEQ ID NO: 258523 - DNA, 201 bp, Homo sapiens
cttattaacttaccaaacttggtaatttgtaattaatcatggtaggatttcaaactagagagtaccaaatttctagttctggctttaagtagaattctcasataagctatatggtagcagaattttatctcaaatttagtagttttttttaattaaatgagagaaaggtagaatataataatagattattataagttttga

SEQ ID NO: 258524 - DNA, 201 bp, Homo sapiens
aaaaaatggagtggtagctggaatcaagggataattttttaagaaagaaaataattgacctcagcagttttgaataaatatttccttttttcttcatctcygacctaggtaaagcttctcaaactcttcctttagagaacctgtgatggcaggagaaataacatatttcttaaggatttaaccttccctcagcaagacttg

SEQ ID NO: 258525 - DNA, 201 bp, Homo sapiens
gtaattaatcatggtaggatttcaaactagagagtaccaaatttctagttctggctttaagtagaattctcagataagctatatggtagcagaattttatmtcaaatttagtagttttttttaattaaatgagagaaaggtagaatataataatagattattataagttttgagtctgacattgactttttttaaaaattt

SEQ ID NO: 258526 - DNA, 201 bp, Homo sapiens
ttttgagtctgacattgactttttttaaaaatttaaattaatagatcacagttgaaaactttggtgcaacagaagtgaaagagctggttctaaatggtgcmgacacagctgttaacaaacaaaatcggtaagtgaattttagcagcaacagtgggagtaataagattcagtagacattttcttctgtacgtagaaaacgtg

SEQ ID NO: 258527 - DNA, 201 bp, Homo sapiens
tattaggtgaagtgttatgacagtgagtgcaagttggtttaaattgttattcagatcatctatacttgctggttttgtctatttttttctatcagttaatragagcagtgttaaaaatctccaaatataatcatggttctgttgatttctctttcatatattttcaagctctgctgtttttggattgttgtgacttcttgg

SEQ ID NO: 258528 - DNA, 201 bp, Homo sapiens
acatttaaaatggaagccattgcagttagctatctttatctgtcaaaacaaaatgcaaaaacaactccttttccttgtttgttaatgcttgcacttacttrggttcagaccttaaattcactttaggatcttttcctttcccgtagcaccaacattgacccagttgccagattttggttatttttctcagtgactgtcttg

SEQ ID NO: 258529 - DNA, 201 bp, Homo sapiens
cttacaatttcaaaagtgcattgtttcaagttctcctgctttttaagaagttaaggctggcctaggagatccagacttcgtttttatgaatcagggactgyagccaatgtgtaattttctctgatagaatgagaccctgcaattcaagcctatctttcagggagagtgtagaaagtgatggtagccaacactgtacaagga

SEQ ID NO: 258530 - DNA, 201 bp, Homo sapiens
atgcagctaagtctttaataactagacactatcccattaaaatagtaccatggtcttataaaacttgaattaggcacataaaattttaatgcagaaatggrtaagcagttagatacaaaatatttaggtttactactcttatttgctgccatttgtgtatacttgaggcccacttttctgtacccaggtaatttaatatgt

SEQ ID NO: 258531 - DNA, 201 bp, Homo sapiens
gccaaggtggacagatcacaaggtcaggagatcgagaccatcctggctaacacgatgaaactccgtctctactaaaaatacaaaaaattagccggtcatgrtggcgggtgcttgtagtcccagctactcaggaggctgaggcaggagaatggcgtgaacccgggaggcagagcttgcagtgagctgagattgtgccactgc

SEQ ID NO: 258532 - DNA, 201 bp, Homo sapiens
ttgaatctgaaagttagagtctaccagtctcctaccttattcactaaattgtgcttatgtttagaattatttacagtaatatcttctgtttgaggcaggtmaaatactagtgcacagattgtttccctgccattcgatttgatggcctgttaaatcattattttaccaagatgcttacattctgataccactttgatactt

SEQ ID NO: 258533 - DNA, 201 bp, Homo sapiens
cagtgggcaatccattgaattgcacaagttgcaaactactggaccatgttagctttatgtgctaatatattagccagtgtgtcccttaatactaataaaasattatgttgtttttagaatacagaatacaaaggggaatattgggcagaacatcctacgataaaaattttttgggaagtatttcacgaattaccattggaa

SEQ ID NO: 258534 - DNA, 201 bp, Homo sapiens
agaataaatatggccaattgggtttaggtactgactgtaaaaagcaaacttcaccgcagctgcttaagtctttgcttggaatccctttcatgcaagttgcmgcaggaggagcccatagttttgtactcaccctttctggagctatctttggatggggacgcaacaagtttggtcagctaggtcttaatgatgaaaatggta

SEQ ID NO: 258535 - DNA, 201 bp, Homo sapiens
ctgacagtgtctagaatatgtctagtaagcactaaaaaagtacagtagtttttgaatggcaatctggttagtgcacgctgtttttaggatactcccacctyccggaatcaggttgcttctagacatcttttccttccctagtgtacttgggtctggactgggagagactcattgacttttctcctgagtcactttgaggct

SEQ ID NO: 258536 - DNA, 201 bp, Homo sapiens
tggccaggcgtggtggctcacgcctgtaatcccaacactttgggaggccaaggtggacagatcacaaggtcaggagatcgagaccatcctggctaacacgrtgaaactccgtctctactaaaaatacaaaaaattagccggtcatggtggcgggtgcttgtagtcccagctactcaggaggctgaggcaggagaatggcgt

SEQ ID NO: 258537 - DNA, 201 bp, Homo sapiens
tgttaatgcttttcaaattcagcctttcagataaccattcatcctaatgttctaggataagtaactttttatgtctatttagttttaagaaatgctaattstcttaatcttttgtattcttctctcagaagatagtagctagtgatatttgtttattggaattttgggtgtacattatttttaacaaaattagatagttgt

SEQ ID NO: 258538 - DNA, 201 bp, Homo sapiens
aatatttctgaggtcccagaggacataggatatttttacccagttactcattcaacaggaagtactttgttatgtaatattttgcaacaagaacctggacytgtctatcctgtatgtgagacagtattcttttttttaatgatatttgtgcagaaaaatgtacttgatgtagttcgtaagcaaacaaacactgaagttgga

SEQ ID NO: 258539 - DNA, 201 bp, Homo sapiens
gctaggtcttaatgatgaaaatggtaggttctcattatgtatagtttaagtgtactttttgaaagagatggtcttttgagttagatcagtgattcttagtrtaagagagaaatgtatcttccctggtatagaggtggggatgagatgttatttaaaaattccatttggggaatgcagtgggaagatacaaaatatccttta

SEQ ID NO: 258540 - DNA, 201 bp, Homo sapiens
tattcgaagtcgttatctacaaagtggatatgtttcatctgtctagcactttatcttttcaggttttgcctatgtctctgaaaaatgaattcagaaggcawttttttccacttgtgttttcctttttgtgcctccaaaaattaaatgtctctttttttttcttgaagagaaatactgtgactcataaatactgataggaac

SEQ ID NO: 258541 - DNA, 201 bp, Homo sapiens
aatttactaaagtcactaagatctcagaaaatagtttatatttgttgtggagaagatcatactgctgctctaaccaaggtattgtacttctaaaacttctwtattattactcatcatagttctttcataattaatgaatgttctcatggtattttctcaagttttaacttgagtgttattggtatttcaaaaataatttat

SEQ ID NO: 258542 - DNA, 201 bp, Homo sapiens
gtctgtttcttttatattttttaagttatattttatttattgtttgttttgaaaagacaatatatattcacatggttcaaacatcaaagcaatttaaatayacattgagaagcttggctcttacatttgaccacgctattgttccctctgcctatatcccttctaagtaactacgcttgttagttgtttttttgtttttga

SEQ ID NO: 258543 - DNA, 201 bp, Homo sapiens
actgcaacctccaccacctaggttcaagcaattctcgtgctttagcctcccaagttgctgggattacaggcatgtgccaccacggccagctagtttttgtrttttcagtagggacagggtttcaccacattggccagggtggtcttgaactcctgacttcaggtgatccacctgccttctcctccccgagtgctgggatta

SEQ ID NO: 258544 - DNA, 201 bp, Homo sapiens
tacctcttttgatattttctctgcttttgtcattgtaaattgttggaaggtaacattaagtctgaagttttctatcattttactctaggcagcacacttcygcttttgttccttcatcaggacgaatttactcttttgggcttggtggtaatgggcagctgggaaccggttcaacaagcaacaggaaaagtccctttactg

SEQ ID NO: 258545 - DNA, 201 bp, Homo sapiens
caacaagatcgaagctccgtctcaaaaaaaaaaattttaggcttttaatagtgacaaatagaaagttccatctgagaacaaaaatcagccaagggaagaarcacacagggcagagtctgggaaagataaccagaggcagagcttctgttgtcctttccatgtagagtcatggatgaattactttcctggcatagatgtgta

SEQ ID NO: 258546 - DNA, 201 bp, Homo sapiens
gcactttggtttaagtaatcaacaaccctagactacccttttaacacttgggaacattataatactttctttatccgttatagatgtcaggttttgctttratttgcattttgttggttgctatgtttttcccagcacttgaaccaatgaagcattttgagttagctttaaattatagctctaatattgtttgcttcctca

SEQ ID NO: 258547 - DNA, 201 bp, Homo sapiens; identical to SEQ ID NO: 51659

SEQ ID NO: 258548 - DNA, 201 bp, Homo sapiens
ggtagaatcattagctatagattagtatattcattagtatagaaataaggaatccaggaagaagagaaatattctcttttaagaggcaagttaaaagattytggtaaggtgaattttgtggtaaacttaataatattaagtgagcagtaagaaatgtagtattgtaagtggggagaaagatcagggctaaatgtgtgaagt

SEQ ID NO: 258549 - DNA, 201 bp, Homo sapiens
acacagcaagactctgtctcaaaaacaagcaaacaaaaagaacattatttacaccttataatgctgatttaaaaaaataataacagtaaacctccattatrtgccaggtactgtgctgaatcctttattcattatccaaaagtcttgtatctatcctgcaaaagtatgtgttttggtgagaacagtcagactccagaagat

SEQ ID NO: 258550 - DNA, 201 bp, Homo sapiens; identical to SEQ ID NO: 51660

SEQ ID NO: 258551 - DNA, 201 bp, Homo sapiens
agaatgcatggtttgatcatacttctgtactcttattttgcatttgctgttattttcacaccaatctgaataatattttggcttagtgtgttgttgataarctgtgtacccactgttatacagtgcttgactgtgagagaaatttatatgtcaagaaaatcaaggacaaatatatatatatattacatggatgtttgaaat

SEQ ID NO: 258552 - DNA, 201 bp, Homo sapiens
aaagcctggatgacagctcatctgtttacagcatggtgtactgaatatattaatatgggcttaagcccactgttgagacccaccgctcagtaaaaagattkctttcaaaatactgctgcttattgacagtgcacctggtcacatcagagctcagatggagatatacatggagattaatgttttcatgcctgctaatacaac

SEQ ID NO: 258553 - DNA, 201 bp, Homo sapiens
tttagttttaagaaatgctaattctcttaatcttttgtattcttctctcagaagatagtagctagtgatatttgtttattggaattttgggtgtacattawttttaacaaaattagatagttgttaatatccccaaagtaaaatattttattttccctttatttaagttaaaatacctgttccatatccatatgtcttgct

SEQ ID NO: 258554 - DNA, 201 bp, Homo sapiens
cataagacttttagtttgttgaagacaatgattatagctttcttattaagctgaaagaaagttaattttaaatggtatcttttaaaaaacttgtgatactrgtaaaaaaacctgacaaacacatcttgaggactaagagaaacaaattcactttccttattgatttgtcaattgatggctactggtagtagggccagtatt

SEQ ID NO: 258555 - DNA, 201 bp, Homo sapiens
aacctggatggggacctgaaagagaatttacttgagttctttggtttcaacatctttatttttgtatgtgctcaacatctgtattaactttaagctgtatrttaaggtatttctgcttttcatccttctcagtttttcaaaattttatggcttgatctgatttgttgtaacgtatacatagtttttactgatattaccagc

SEQ ID NO: 258556 - DNA, 201 bp, Homo sapiens
ttaaacagttaaaaactcttcatagctgcaactggggaagattgcttccccaatctcatttaatctcatagatgaactttctatgcatagaaataaagaargctaaacatcatatttattagctttgtttgcattcctctcttaccagtttaacttactagtatcctagctaaggattggaacatgggctagtaaagaatc

SEQ ID NO: 258557 - DNA, 201 bp, Homo sapiens
taggtttataatttttgctactgagtcacttaggatgttacttaccaaaatggggagcactggaaagaggtccagggaagtaggatgggggtcatgaattsagtctggggcatcctaagttagaagttcctttgaaatttccaagtatagtgtcaggtaaacaatgggttatgtgggttttttgctcaggagaggtttggg

SEQ ID NO: 258558 - DNA, 201 bp, Homo sapiens
gtttgagcttgaatgagtgcctcttgggagaaactataaaataaaaatgagacttgaatattaaaaggagactgttgaggggcataaggaaatgagattaytccttgttatgtgattcaccggttcatctgtgtagtcaatcaaacttaaagtgtactaatactgaatgttcttctaggtagtagtatatgttcatataag

SEQ ID NO: 258559 - DNA, 201 bp, Homo sapiens
tctgacctctcactgtcttgggtatgtgccaattgagtatcagtactgtttagttcttgagtgactagaagttagatgaaaatgaaagcattcagttaacstttaccagataattatttattgcagtcatgttaatgtaaagtttttcattggtcaaattagaaactggttaaatttctttatcttttttggtcttacata

SEQ ID NO: 258560 - DNA, 201 bp, Homo sapiens
ggggtgaggggcgtggggcgagggcagggctgtggctccctggccccggggctggaatgtctcatctgcctggggatgggcttctctcaggttgaggccgygcactgccaagcctcggccgccggcctctgaagctgttgcgagcggccggttgcggtagtcgtctgcttggctgcgaggttgggtgtgtgcagatgattt

SEQ ID NO: 258561 - DNA, 201 bp, Homo sapiens
gcttcttagagaagagtctgatcccatgtctagggcaaaaaatatgtataagaatacctttgggcattttgtgttacaaaaaagcaaagattactacggtsctctcagaagaacaacttgaaggagctttcactggatatcgagaagaaataatgactgcaaaaaatggaaaacatcagatctataaaaaaatccatgaat

SEQ ID NO: 258562 - DNA, 201 bp, Homo sapiens
catggaggtctgtaagttatctgaagttgatttattttgtggaggacagtataatgttcaagtaaggaatcaactttttaaaaatataaatagtcaattaycctagcaccattaaaagtttttgtgggaaatacatacaacaaaatttaccaccttaactatttttaagtatacagtccatggtattaagtacattaatat

SEQ ID NO: 258563 - DNA, 201 bp, Homo sapiens
tagctccaacatttgggtcttctctgaatctgactctgttgattgctttgtctctagacacttttttgttttgttttgtttgttgatttttttttttttttgagacagagtctcgctctgtcacccagggtggagtgcagtggtgcaatctcagctcactgcaacctccaccacctaggttcaagcaattctcgtgcttta

SEQ ID NO: 258564 - DNA, 201 bp, Homo sapiens
tcttaaagcagaaacattgatcattgattttagaccctttatttctaatatgatcatttaatgctatagattttcttttatgcctggatttattagcatcycacaaatttttatgtgtttttacttttaagttcaaaatattttcctaaagcccctgtttcctagctccaacatttgggtcttctctgaatctgactctgt

SEQ ID NO: 258565 - DNA, 201 bp, Homo sapiens
tgaactcccgacctcaggtgatctgcccacctcggcctcccaaagtgctgggattaccggtgtgagccaccgtgcctggccttttttttttttttttttttcctttgagacagagcttcactcctgtcacccagactggagtgcaatggtgagaccttggcccactgcaacctctgcctcccaggttcaaatgattctcct

SEQ ID NO: 258566 - DNA, 201 bp, Homo sapiens
tgagacagagtttgactctttttgcccaggctggagtgcaggcacgatctcagctcaccgcaacctccgcctcccggattcaagcgattcttctgtctcakcctcccgagtagctgggattacaggcatgcaccaccatgcccggctaattttgtattattagtagagatggggtttctccatgttggtcaggctggtctt

SEQ ID NO: 258567 - DNA, 201 bp, Homo sapiens
gtcagttatgtctctgaggcaaacgtttctcgagtaacttgacagtcctgccattactttcaactaagaaaggttgtcttgttttcctgaccctgtgtgtrtgtgtgtgtgtgtgtgtgtgtgtgtgtgtgtgtgtgtgtacagtaatttttttttttttttttttttgagacagagtctctctctgttgccaggctagag

SEQ ID NO: 258568 - DNA, 201 bp, Homo sapiens
taccactcatccctcccctttgcaaaggcagaggaacaccccagacctccccttggccactgtcaccaggggcctgtggggagtactgccagaatactgccagtgtttccttgaggcccaaggggtttttttgtttgtttgtgtttggagacggagtctcctgtcgcccaggctggagtgcagtgacgcaatctcagctcc

SEQ ID NO: 258569 - DNA, 201 bp, Homo sapiens
cttaccactcatccctcccctttgcaaaggcagaggaacaccccagacctccccttggccactgtcaccaggggcctgtggggagtactgccagaatactgccagtgtttccttgaggcccaaggggtttttttgtttgtttgtgtttggagacggagtctcctgtcgcccaggctggagtgcagtgacgcaatctcagct

SEQ ID NO: 258570 - DNA, 201 bp, Homo sapiens
tttgagacagagtttcgctcttgtttcccaggccggagtgcaatggcgccatctcggctcaccgcaacctctgcctcccaggttcaagcaattctcctgcytcagcctcccgaatagctgggattacaggcgcccaccacaatgcctggctacttttcatattttaatggagatggggttttaccatgttggccaggctgg

SEQ ID NO: 258571 - DNA, 201 bp, Homo sapiens
ccttaccactcatccctcccctttgcaaaggcagaggaacaccccagacctccccttggccactgtcaccaggggcctgtggggagtactgccagaatactgccagtgtttccttgaggcccaaggggtttttttgtttgtttgtgtttggagacggagtctcctgtcgcccaggctggagtgcagtgacgcaatctcagc

SEQ ID NO: 258572 - DNA, 201 bp, Homo sapiens
actgttctgtgaccataatttgtaaataaagtggtgttctgtttaaaaacaagccctgttatctaaaaaacagttttttgtgttttacaacattctttcamatggagtatctcatttaattctcacaacagttgtatgtagctaaggcaggtatcatggtccgcattttacagatgaggacactgaggttaaaagagatta

SEQ ID NO: 258573 - DNA, 201 bp, Homo sapiens
attcctggaattggaattgctaggtctgaagggtgaatgcatgtgttttgttagatattgccacatttctcttcatagaggttgtactgttttgtttttaractaacagtatacaagagtgcctttttccccatgaactgttatcaaactttttgatttttatcagatgaataaatggtatcttggtatgtgggtttttta

SEQ ID NO: 258574 - DNA, 201 bp, Homo sapiens
gcctctgcctcccaggtccaagtcattttcctgcctcagcttcccgagtagctgggactacagcgtgccaccacacctgctaatttttttttttttttttkgtattttcagtagagacagtgtttcaccaggttggccagtctggtctcaaactcctgactgacctcaagtgatccgcctaccttggtctccaaaagtgct

SEQ ID NO: 258575 - DNA, 201 bp, Homo sapiens
tcatagttaagtatcatgtttgctgttaagatttttatagataacctctatcagactaagtaatttccctttaattcctagttttttttattgtgaatggrtgttaagtttttaatgttgttttttctgtatttattgaaatgatttatgatttttttttcctttaatctgttaacatggcatattgatggattttttttt

SEQ ID NO: 258576 - DNA, 201 bp, Homo sapiens
acagataagaactccattttctgttgatgtggaggtaggtattagaaagcttaattatactaggattgcaaggttatgtttctgcagttggctaaattttkcactgtgtatatttgctttttgggcagaggaaagatgtcttatttcttgttcccattgaaattatttaaagcaaaaagtagaaaaaattgtgattaattt

SEQ ID NO: 258577 - DNA, 201 bp, Homo sapiens
ggagaaagatcagggctaaatgtgtgaagtgtttattttcgattttgttttattttcagttcagataggctgacattccaactgtagacttctcccagttytaacctgttaagtaattaataattcattaacaatacttaactttgtgcttttggaagactgcttaaggcacatggtgatataataccgttgtaaatttaa

SEQ ID NO: 258578 - DNA, 201 bp, Homo sapiens
aatgggccctttactatttttgcttagcttggaatgctgcctcaggttgagattttcatggtacggaggctactgctgttctttgtactttagcatgcccyatagaaataactgaacatctctctgtattactttaataatttctgaaaggccatagggcaagtagaaagtaaaaagccagcacatagaaattgccagtat

SEQ ID NO: 258579 - DNA, 201 bp, Homo sapiens
cttgtgtcagaaagcacatggaatggagggaactaagaattgtttctttacataggttggctttataaatatacatattccataactaataaggaatgaargagaaagaggtagccttattaaggataaattattctcgagattcataataacctactggaggacttggcctgacaatgtagtgaatagatttaacctgtg

SEQ ID NO: 258580 - DNA, 201 bp, Homo sapiens
gatatgagatcaccataaaagataaaataataatgaaaaatattgaaatattgcgagaattactaaagcttataagctttactcaatttttgatactgaakttttacaaattgaaggttttttgacaacactgcattgagcaagtcagttggcaccatttttccaacagcatatatgctcactttgtgtctttatgtcaca

SEQ ID NO: 258581 - DNA, 201 bp, Homo sapiens
tggaggcttgctttgaacgctttactttgagaaaggttagtgcccaagaatcacagtgtcaagggtaggaaaaaaaatcataatgcaaacagatgactacygttagagaaatgtataataatactttactttgtgtaggaccctacatctgaggaatttcaagagcattacacaataactcatggttcctttcaaaatgct

SEQ ID NO: 258582 - DNA, 201 bp, Homo sapiens
gttaccattatctccttagtaaagattcttaggttctgtattcccaatatatcatacaaatgtagcactgtttttaaagctcatttctcacaaaggcatgyatttttaaaactgctttgaagacacaaaagttacttctgtattcctaggctataaagtatatcaagtgcttgggatatgtatgaaagaatctaatagagg

SEQ ID NO: 258583 - DNA, 201 bp, Homo sapiens
tacctgtaccagaacatagaactattcatattttcagttaggaagttgaatgagcctctgcaactgagaataaggggaaaagagaacacattataagttgrtactgcattgtatagggtgaagaaacacataaaccatataattggagagaaatttagtgttgaaatatttagaatgtattatttatggctggacgcggtg

SEQ ID NO: 258584 - DNA, 201 bp, Homo sapiens
ctgcttctttcatgctgctttcaagattctttgtctttcagcattttgattgaactgtgtgtctctggtctctgagtttatcctgcgtagaattcattggrgcttatggatgtttagattcatgtctttccccatatttgggagtttttggctattacttcttcaaatagtctctctcttgctctattcttctgagaattc

SEQ ID NO: 258585 - DNA, 201 bp, Homo sapiens
attgaactgtgtgtctctggtctctgagtttatcctgcgtagaattcattggggcttatggatgtttagattcatgtctttccccatatttgggagttttkggctattacttcttcaaatagtctctctcttgctctattcttctgagaattctacagtgcttatgttggtctgcttaatggtatcctatggttcccctag

SEQ ID NO: 258586 - DNA, 201 bp, Homo sapiens
ggaaaaatggttgagattattcactttgatgagccatttggaaaaaaatagataactttttaaaaattatagtgaagttatcagttttgtgtatttgatgkctaaaaagtcagctattaaatattattctcaagttgtgtgtttttataataatgtattgctgaagtcattatccattttcaaagttagtatcccaataat

SEQ ID NO: 258587 - DNA, 201 bp, Homo sapiens
aagggataattttttaagaaagaaaataattgacctcagcagttttgaataaatatttccttttttcttcatctctgacctaggtaaagcttctcaaactmttcctttagagaacctgtgatggcaggagaaataacatatttcttaaggatttaaccttccctcagcaagacttgaactgaggctaattttctatcttta

SEQ ID NO: 258588 - DNA, 201 bp, Homo sapiens
aagtgaaaagaaaatctctcactttaaatcacatttctcactttaaatcaaaagctagaaaggattatgcttagtgaagaaggcatatcaaaagcccagayaggctgaaagcaaggcttcttgtgccagttatccaagttgttaatgcaacttaaaggaattaaaagtgctactctggtgaatacatgaatggtaagaaag

SEQ ID NO: 258589 - DNA, 201 bp, Homo sapiens; identical to SEQ ID NO: 51658

SEQ ID NO: 258590 - DNA, 201 bp, Homo sapiens
ccttatttccccatgtatcaacttttgccatagtaatattctgtaacaaaacatgccagaactcattggcatacaatgatgaacacttattctaattcctrcgggattgggccttgttttagcctaagccttggctgaggatggctaacctagagacggttgaggtcagcttatttcccaactgcatgttgaatccagttt

SEQ ID NO: 258591 - DNA, 201 bp, Homo sapiens
ttcataggtttaaacatacttgatgtttttcaattcactgcagttattgtcttcattgatgctcatattgtcccatctttgttcaaggagagctcttaagkttggtgcccaagtccttttgaaacaacctatatactttttggtaccttccttgctaccttgtgtacttactatgacagaatgttccagacttatcttaca

SEQ ID NO: 258592 - DNA, 201 bp, Homo sapiens
tttttgatttgagtttaccatgaggcttgcaaatagcttataacccaatattgtaaacaccaattacataaactaacatgcaaagagaaaactaataaaarctttatgctttaactgtgttcccctggtttttaactttgtgttgtttctgtttattttactacactatgtcttgtagctgtagttattatttttttattg

SEQ ID NO: 258593 - DNA, 201 bp, Homo sapiens
ttcctcgcagttttgttctttttgcttaagatagctttgactattctgggtcttttgtggttctgtgtaaattttaggattgtgtttcctatttctgtgakcaatgtcattggtattttgataaggattgcaatgaatctgtagattgctataggtggtatggacattttaacaatattgaacatggaatatcttccattt

SEQ ID NO: 258594 - DNA, 201 bp, Homo sapiens
gcttgaacctaggaggcagaggttgcagtgagccggagatcgtgccgttgcactccagcctgggcaacaagagtgaaactccatctcaaaaaaaaaatgcrcagctgggtgtggtgtctcacacctctaatcctggcactttgggaggctgaggttggcagatagtttgaacccaggagttcaagaccagcctggacaaca

SEQ ID NO: 258595 - DNA, 201 bp, Homo sapiens
taatcccagcaccaggcagattgcctgagcccaggaattggagaccagcctgggcaacatggcaaaaccctgtctctacaaaaaaatacaattagctgggygtggtggtgcacacctgtggtctcagctacttgggaggctgaggtgggaggatcagctgagcccaggaggtcgaggctgcagtgagctgagattaacacc

SEQ ID NO: 258596 - DNA, 201 bp, Homo sapiens
ccagttcaattctttcttttttttttttttttgaggtggagtcttatgctctggcccaggctggagtgcagtggggtgatctcggctcactgcaacctccrcctcctgggttcaagcgattctcctgtctcagcctcccaagtagctgggattacaggcacacaccaccacgcctggctaatttttgtatttttagtagag

SEQ ID NO: 258597 - DNA, 201 bp, Homo sapiens
ataaactcccttggtatatagtatagttatcaagcaggccatagataaatttttataggcttttttttttttgcttatttaaactttcttagtagtaatarcactttttaaatgtcctacaagaggaatattggtgatatgaaggctgtgcatatgtgaggataagggtatattggaagtctctgcaccttactttcaatt

SEQ ID NO: 258598 - DNA, 201 bp, Homo sapiens
gctctttaatattctgcaacaaagtgacattttgcttgagttcagtatttctatctcagagggttcttgaagtcataatgattttctttttttttcttttytttttcgagacggagtcttgctctgtcacccaggctagagtgtagtggagcggtctcagctcactacaagctctgcctcccgggttcttgccattctcct

SEQ ID NO: 258599 - DNA, 201 bp, Homo sapiens
agatcacaccactgcactccatcctgggtgacagagggagactttatctcaaaaaaaaaaaaaaaaaaaaaaaaaaagttgtgttttagaagaacatttartgacataatactcatgtaattagaaaatgagataaaatcttaaatacggtgtattaaaaatatttttctgagcttattataggtggaaatacacaaaata

SEQ ID NO: 258600 - DNA, 201 bp, Homo sapiens
gagaaccactggcataagtgagaattagagcagtaaggttgtgccagaaaacattttaaataataactgaaattagaactggatagtactgtaccccccccttttttttttttcaattgaggtggagtgtcactcttttgcacaggctgtaatgcagtggcaggatctcggctcactgcagcctccgcctcctggattcaa

SEQ ID NO: 258601 - DNA, 201 bp, Homo sapiens
ctcccagactcaagcgatcctcccacctcagcctcctgagtagctgggactacaggtgcatgccaccacacccagttaactttttgtattttttgtagagwtggggttttaccatgttgcccagggtgttctccaatttctgagctcaagcaatgtgcctacctgggccttcaaagtgctgggattacaggcatgagccac

SEQ ID NO: 258602 - DNA, 201 bp, Homo sapiens
gaccttaactaattatatctgcagtgaccttatttccaaataagatcatattctgagatattggggattaggatttcaacacacaatttttttttttttttgagacagtctggctctgtcgcctaggctggagtgcagtggcatgaccttggctcactgcagcctccacctcccagactcaagcgatcctcccacctcagc

SEQ ID NO: 258603 - DNA, 201 bp, Homo sapiens
ctccctggccccggggctggaatgtctcatctgcctggggatgggcttctctcaggttgaggccgcgcactgccaagcctcggccgccggcctctgaagcygttgcgagcggccggttgcggtagtcgtctgcttggctgcgaggttgggtgtgtgcagatgatttctctttcccagtccccatgagctgatctgggtgca

SEQ ID NO: 258604 - DNA, 201 bp, Homo sapiens
agttcaagactagcctgggcaaaatagggagaccacatctctacaaataattaaaaaattaatggggtgtggtagctcatgtccgtggtcccagctactcrggaggctgaagcaggaggatcacctgagcctgggaggttgctgctgcagtgagctgtaatttcaccactgcactccatcctgggcgacagagagacctgg

SEQ ID NO: 258605 - DNA, 201 bp, Homo sapiens
ggtgtggtagctcatgtccgtggtcccagctactcgggaggctgaagcaggaggatcacctgagcctgggaggttgctgctgcagtgagctgtaatttcaycactgcactccatcctgggcgacagagagacctggtctaaaaaaaaaaaaaagtgtagtgcttaaatacatattaaataagatgttttaaaacagaagca

SEQ ID NO: 258606 - DNA, 201 bp, Homo sapiens
gcctccctcgcgtggccacctccccctctgccttctcctacccagtctcttccccaactctccccacccctggtgctctccgccccgcttgcctcccgttyttccccgcccgctccatccgggtcgctgacggctgtctctggactggacagcagtggcgtccgcttttctctaaggaacccggtaaagtttcccaggggc

SEQ ID NO: 258607 - DNA, 201 bp, Homo sapiens
atttatcagttgacaaaaatgttctgaccagaggcttgcaggaaccttaccttgtattttcttcgggggcaatgattcaatatttgctaagtcaatgttcrtggtgattttataggacataactactgcagatagtgagaattgattattcccagctagactagaataaaaagactaataagtggaagaatgatgtggttt

SEQ ID NO: 258608 - DNA, 201 bp, Homo sapiens
aagaaaaatatgtcatattaggatatcatgtatcttttctgctacaaaacagcctaaagtacatttttttttccaggcttttaagtaggctcctgtgggtrtaactatcatgaagtgaatataaagaatgatgtatgtgtggaaaattagaagcagttagataattttgaaatttcttgatttctgagtcctttgcatact

SEQ ID NO: 258609 - DNA, 201 bp, Homo sapiens
agtccctcctttatcacaatagtatggataggcctgggaacctgacttagtaagcttgtactacaaaatcatcgaatcatagttaaaattatttagtcacractatctactgagcttggcaagctgtagaggaaacacatctagatgagttttgatttttaaaatactattaacatctcttgttggaattttcagataggt

SEQ ID NO: 258610 - DNA, 201 bp, Homo sapiens
aaactgcaattaattttgcaccaacctaatatcatattttattgattttggcattcagataacaaatgtaatcactgaagtcttatttattcctgttggcragtcttaaattttactcgtcctttttcgttattggtatttggaagaaatttatcaaaatataaaaaatatcatgtgtggtgtcattccaaaaactaattt

SEQ ID NO: 258611 - DNA, 201 bp, Homo sapiens
tggagtgcagtggcacagtcatagtgcactgaagctatgaccgaattcttgggcttaagcagtcctcccacctcagtctcctgagtagctggagctacggkcgccactgtgcctggctaatttttttattttttattttttgtagagatggtgtctcgctttattgcctaggctggtctggtactcctggttttaagcgag

SEQ ID NO: 258612 - DNA, 201 bp, Homo sapiens
aagcattgaggttttatcttactctaccagaatgtcccctgatgagtgattccaacaatttcacaacaatagcaattccctttggtacagctcttgtgaasctagaaaaggcaccactgaaagtacttggtaagaattctaatattttttcttttgaaaccttttctctttaaatgaaaatgcttcataagttcttttgcc

SEQ ID NO: 258613 - DNA, 201 bp, Homo sapiens; identical to SEQ ID NO: 51649

SEQ ID NO: 258614 - DNA, 201 bp, Homo sapiens
taacatgtggtcatttccttgaaaagaatggataattctatagcagccatggtcacaaataatacaaggtgaagaattagtcaactaaggaatgggaatargataacagggatagactatggactagccaagcaatatttttggtaatagatactctttccagtttggggagcagaagaaaagaaaaaaaagaggcccgga

SEQ ID NO: 258615 - DNA, 201 bp, Homo sapiens
agaaagaaagaaaggaaaacagccagcatggcttatgggagtgaggagggaacagagaaatgggcaggggccagatcatagagagtttagtaaactaggaytaggaatttggattttatctaaagtgttaatgataaacaggggaaacttaatctgatctttttgaatgatcactttgttggctgtgtagggaacgggaca

SEQ ID NO: 258616 - DNA, 201 bp, Homo sapiens
cttttttttttcaatccctgctaccttgactttttgaagattcttggccagttttcttataaaagtttcataatcaggatttgtctgattgtttcctcatkgtgatgtttatttaacttgttcctctatcccttgtatttcctataaactaaaatttagattaggagacttgattggatttgggttaaactatttttactt

SEQ ID NO: 258617 - DNA, 201 bp, Homo sapiens
gaaaaatggttgagattattcactttgatgagccatttggaaaaaaatagataactttttaaaaattatagtgaagttatcagttttgtgtatttgatgtmtaaaaagtcagctattaaatattattctcaagttgtgtgtttttataataatgtattgctgaagtcattatccattttcaaagttagtatcccaataatt

SEQ ID NO: 258618 - DNA, 201 bp, Homo sapiens
accttataatgctgatttaaaaaaataataacagtaaacctccattatatgccaggtactgtgctgaatcctttattcattatccaaaagtcttgtatctrtcctgcaaaagtatgtgttttggtgagaacagtcagactccagaagattaagtaattctgccaaagttgaaattaaagctgagtaggaacaagagccaat

SEQ ID NO: 258619 - DNA, 201 bp, Homo sapiens
gtgtgatctagcacagtcttagcagtggtggccatgggagtgcttgcatcacctctaccccaactattaagaatctcagcacagagagagagagtgagagsgaaacttcatttgtttgggggagagtaagggagaagaacaagagactctgcctagtaatccagggaattctcccagatcttacccaagttcaccaaggca

SEQ ID NO: 258620 - DNA, 201 bp, Homo sapiens
agagatgtattcgaagtcgttatctacaaagtggatatgtttcatctgtctagcactttatcttttcaggttttgcctatgtctctgaaaaatgaattcaraaggcaattttttccacttgtgttttcctttttgtgcctccaaaaattaaatgtctctttttttttcttgaagagaaatactgtgactcataaatactga

SEQ ID NO: 258621 - DNA, 201 bp, Homo sapiens
cacaaaaaaaaaaacaaaaacaaaacattcatgtgcaggtgtttatgtggacataagtgtttgagtaaatatcaaggaattgggtcatatggtaagagtakatttacttttgtaagaatctgccaaactgttttccaaagtggctgtaccattttgcattcccaccagcagtgaaggagagttcctgttgcttcacatcct

SEQ ID NO: 258622 - DNA, 201 bp, Homo sapiens
acgaggtctcactatgttgcccaggctggtctcaaactcctgggttcaagtgatcctcccaccttggcttctgcaagtgctgggattatagatgtgagctmcctcgcctggactatcttttaagatttacataaatagctcatattcctttaatgccttttgtatatgtttatcttagcatttagtcacaatctttatctc

SEQ ID NO: 258623 - DNA, 201 bp, Homo sapiens
gaggttaaacccatggcccccagcatgaattaacattttaatcataaactatctgtgtggccagtgccatgggtaaacaagaggaatttttttttttttttaaatacaaggtctcactctgttgcccaggctagagtgctgtgacatgatcacagctcactgcaacctcagcctcccaggctcaagcagtcctttcacctc

SEQ ID NO: 258624 - DNA, 201 bp, Homo sapiens
gaggctgaggcgggcagatcatgaggtcaggagatcaagaccatcctggctaacacagtgaaaccccatctctactaaaaatacaaaaaaaaaaaaaaaaattagtcaggcatggtggcaggcgcctgcaggcctgtagtcccagctactcgggaggctgtgcaagagaatggcatgaacccgggaggcggagcttgcagt

SEQ ID NO: 258625 - DNA, 201 bp, Homo sapiens
cccagcactttgggaggctgaggcgggcagatcatgaggtcaggagatcaagaccatcctggctaacacagtgaaaccccatctctactaaaaatacaaamaaaaaaaaaaaaattagtcaggcatggtggcaggcgcctgcaggcctgtagtcccagctactcgggaggctgtgcaagagaatggcatgaacccgggagg

SEQ ID NO: 258626 - DNA, 201 bp, Homo sapiens
atcccagcactttgggaggctgaggcgggcagatcatgaggtcaggagatcaagaccatcctggctaacacagtgaaaccccatctctactaaaaatacamaaaaaaaaaaaaaaattagtcaggcatggtggcaggcgcctgcaggcctgtagtcccagctactcgggaggctgtgcaagagaatggcatgaacccggga

SEQ ID NO: 258627 - DNA, 201 bp, Homo sapiens
caaagcaaaagtggacaaatgggatcacatcaaattaaaaagcttctacacagcaaaggaaacaagaaagtgaagaaacaactcacagaatgggagaaaayatttgcaaactacccgtctgataaggaattaataaccagaatatataaagacaactctgttgtttcaactcagttgttgaactctgttgaactcaacaac

SEQ ID NO: 258628 - DNA, 201 bp, Homo sapiens
gttcctaatgctggtggaacaattcctgtacctgcacaattattacactatgatttgtttgatggatagttcatgtctgttacttcctgtttcacagatayagcttcattaattgcctcttgatcatctccatcagtcccaaatccagctcctccagctctctctggaacatcaggctcatcttctaagccattgtagaat

SEQ ID NO: 258629 - DNA, 201 bp, Homo sapiens
agcagaagaaagaattagcatgaagacatgatatatgaaaatatacagagttgacaaaagaaaaaagagtgaaatactcccacaggatctagaaaatagcytcaaaagggcaaatctaagggttactggccttaaagaggaggtagaaggagagagagggatagaaagtttatttaaagagctaataatagagaccttttc

SEQ ID NO: 258630 - DNA, 201 bp, Homo sapiens
ctccaaactttttttttttttttttgagacggagtctcgctctgtcgcccaggctggagtgcagtggcgcgatctcagctcattgcaagctccgcctcccrggttcacgccattctcctgcctcagcctcccaagtagctgggactacaggcgcccgccactacgcccggctaattttttgtatttttagtagagacgggg

SEQ ID NO: 258631 - DNA, 201 bp, Homo sapiens
tatttcaggtattgtactttccaactccaaactttttttttttttttttgagacggagtctcgctctgtcgcccaggctggagtgcagtggcgcgatctcrgctcattgcaagctccgcctcccgggttcacgccattctcctgcctcagcctcccaagtagctgggactacaggcgcccgccactacgcccggctaattt

SEQ ID NO: 258632 - DNA, 201 bp, Homo sapiens
gtttgcttcttagagttttatagttttaccttttacatttaggtctttgatctatttgaattttatttatttatttatttatttatttatttatttatttwttttgagatggagttttgctcttgttgctcaggctggaatgcaatggcatgatcttggctcactgcaacctctgcctcccgggaccaagcgattctcctg

SEQ ID NO: 258633 - DNA, 201 bp, Homo sapiens
cagcccctcccccgcctccctcgcgtggccacctccccctctgccttctcctacccagtctcttccccaactctccccacccctggtgctctccgccccgyttgcctcccgttcttccccgcccgctccatccgggtcgctgacggctgtctctggactggacagcagtggcgtccgcttttctctaaggaacccggtaaa

SEQ ID NO: 258634 - DNA, 201 bp, Homo sapiens
tggcaagctgtgcctcctgggttcaagcgattctgcctcagcgtccaaagtagatggaactacaggcacccactaccatgcctaactaattttttttttttgagacggagtctttctgtcgcccaggctggagtgcagtggcgtgatctcggctcactgcaacctctgcctcccgggttcaggcaattctcctgcctcagc

SEQ ID NO: 258635 - DNA, 201 bp, Homo sapiens
catcttcttcgtttgtcttcgcaaactccaactttctgtatttggcttttccctcttaaagcaacgcaaagcggcacactgcgcaggcgcctgtggccagscacccccccccccccccccccggaagattcggcgcaggcgccggtgccggggccgggaagtgggcgggctcgcgcgcgtgctctgcggttcacttccggc

SEQ ID NO: 258636 - DNA, 201 bp, Homo sapiens
ttctgctctttcagcctaatgaactacaagcaatggtcattggaaatacaaattatgattggaaggaactggaaaaggtaggggaaaactaatctctgatrttgttaaatggaaagatttatatatggaaatcttgcctttttatgtattattttttattttatacactttattactaccattttacaggaaagcactcta

SEQ ID NO: 258637 - DNA, 201 bp, Homo sapiens
agcacacttctgcttttgttccttcatcaggacgaatttactcttttgggcttggtggtaatgggcagctgggaaccggttcaacaagcaacaggaaaagyccctttactgtaaaaggaaattggtacccctataatgggcagtgtctaccagatattggtaagttctgtcatattaaagctttccttcatatattgaagt

SEQ ID NO: 258638 - DNA, 201 bp, Homo sapiens
tgtaagtggggagaaagatcagggctaaatgtgtgaagtgtttattttcgattttgttttattttcagttcagataggctgacattccaactgtagacttytcccagttctaacctgttaagtaattaataattcattaacaatacttaactttgtgcttttggaagactgcttaaggcacatggtgatataataccgttg

SEQ ID NO: 258639 - DNA, 201 bp, Homo sapiens
ttcagagttctctatatattctagatactaatcccttatcagatatttgcagatattttctttcattctgtgggttgtattctatagatagtgtcttttgatgcatgaagctttaaaattgtataaagtccagtttgtttattttttcttttgttggctatgcatttggtgtcatatctaagaaatcattgccaaatccaa

SEQ ID NO: 258640 - DNA, 201 bp, Homo sapiens
actccagcttgggcaaccatagtgagactctgtctcttaaaaaaaaaaaaaagtgttactgggcttggagtgtccactaatgcagatggctgcagtgactraagaattgagatcattacactcaattccttttgaatacttggaatgccttcccaagaagttcaggtacaaacaagtacggactgcaaaggatagaataaa

SEQ ID NO: 258641 - DNA, 201 bp, Homo sapiens
ggaaagaatcaagtattctgcctttcatttgcaaattgtattttaggtaatttaatagttaatgagttaagttatttatagaagaattccagctcataackctaggaaaaataatgcaactagaaaaatcaccattttacactccctgatgaaataatggatctaggcaaagaccattaaacctaatggggatgtatcagg

SEQ ID NO: 258642 - DNA, 201 bp, Homo sapiens
tctcaaaaaaaaaaaacaaagtgttatatatatatgtaaaaattatatgtaaattatataaataaaaatatatataatatataaaaattatataaatattygtccttaaaaattgaaaactaacaagttagtggcacaactacaccagaaataattattttaggtgattttaaaatacagcattttgctgtatatcactag

SEQ ID NO: 258643 - DNA, 201 bp, Homo sapiens
gttaatagattttatctattcacagtgacgaggatactatgaaggttgacatttgtaaaggtccagtgctttttattgtaaataaacttgatgtttttttwataattaaaaggctttttcagttaagctcatatttaacaaaggtcaccattacttaggaatgcattttggcaccttcgaaactgtagaccttgagattat

SEQ ID NO: 258644 - DNA, 201 bp, Homo sapiens
tccctgatgaaataatggatctaggcaaagaccattaaacctaatggggatgtatcaggctgacacactttgacttatttttattatatatatatatatawaattaaaaatataataaatatatatataataaaaatatgtgatatatatatataatttttttctttttgagatggagtctcactgtgttgcccaggctgg

SEQ ID NO: 258645 - DNA, 201 bp, Homo sapiens
atatcgagaagaaataatgactgcaaaaaatggaaaacatcagatctataaaaaaatccatgaatttttgtagtgatcttctcttcttgcaaatcaatatragcaaaacttattgcttacctttggaagttgctaggacaacactcatttttttttttttaactggtcaataatgggaaagaatcaagtattctgcctttc

SEQ ID NO: 258646 - DNA, 201 bp, Homo sapiens
tcacttgaacccgggagatggaggttgcaatgagtgaagattgcgccactgcactccaacctgggcgacagagcaagactgtctcaaaaaaaaaaaaaaaagagtggttgtctcttgaaagaggaaccaggattctgatttttttggaaggaagcttacttttaagtgtgtactattttgttgtttcaacttaaaaaaatc

SEQ ID NO: 258647 - DNA, 201 bp, Homo sapiens
gagcactctgaggagtacttgaggtatgagtatagctcactttgcttaaatactgtctttccaagatgtgttcttttcacccctttaatttttttttttttgtatctagctcttgtttactgattttagcataaatttttggtacgctaaaattgagcttgtatgaaaaaaaataatatgacctatgtgcatatagtaggc

SEQ ID NO: 258648 - DNA, 201 bp, Homo sapiens
agcctctgcctcccaggtccaagtcattttcctgcctcagcttcccgagtagctgggactacagcgtgccaccacacctgctaattttttttttttttttktgtattttcagtagagacagtgtttcaccaggttggccagtctggtctcaaactcctgactgacctcaagtgatccgcctaccttggtctccaaaagtgc

SEQ ID NO: 258649 - DNA, 201 bp, Homo sapiens
ataacaagtaattcaaatttcctcaaatggatacatggactccttctcttacctcagctcaggacttagctagttttcactgtcttccaaaattcttcatgtttttttttgtttgtttgtttgtttgtttttctggagacacagtctccctctatagcccatgaaggaatacagtggcgtgatcacagctcactgtagctt

SEQ ID NO: 258650 - DNA, 201 bp, Homo sapiens
tttgcatttctccacgggccatttctgtttctttctctgtgaacttttggttcacatctcttacccacttgtcatgcgaattactgaccttttttttttttccctaagaagtcaataaaaactggggatgttattcttttgtctgagatgaatactattttttgtctgatttttttcatcagttttttgactttgctgttg

SEQ ID NO: 258651 - DNA, 201 bp, Homo sapiens
ggctgaggtgggaggattgcttgagcctgggaggctgcagtgagccatgattatgccgctgcacttcagcctgggcaacagggtgagaccctgtctcacamaaaaaaaaacaaaaacaaaacattcatgtgcaggtgtttatgtggacataagtgtttgagtaaatatcaaggaattgggtcatatggtaagagtagattt

SEQ ID NO: 258652 - DNA, 201 bp, Homo sapiens
tatgaataaaactgctagaaacttctgtgtgggctgggtgtggtggctcatgcctgtaaatcctaacactttgggaggctgaggtgggaggagcacttgarcccaggagttcatgaccagcctgggcaacatagtgagaccctgttgctacaagaaattaaaagattagctgggtatggtggcatgtgcttgtagtcccag

SEQ ID NO: 258653 - DNA, 201 bp, Homo sapiens
aaataataactgaaattagaactggatagtactgtaccccccccttttttttttttcaattgaggtggagtgtcactcttttgcacaggctgtaatgcagyggcaggatctcggctcactgcagcctccgcctcctggattcaagcaattctcctgcctcagcctcctgagtagctggaattacaagcagtgctaccacac

SEQ ID NO: 258654 - DNA, 201 bp, Homo sapiens
cttggaaactacctcagaaaatttttagtgttgcttagtaccatatttttaaaaggagagataaattgtaatggtttgacttctgttcatgaatacagagraagggaattttctgattatcacagataattccatgtcagacttttgatggtcctataacattattttatctagtttctctttatttacttttgaagatga

SEQ ID NO: 258655 - DNA, 201 bp, Homo sapiens
cctgatgaccaaagaagaaaggatgtgtctgagtggtgtaggctgagggaacagtatgtccaaaggacctgacgcatctgaagaactgaaagttaaagccractgcggctggataagaacagttcacagtataaactatttcctctctacttcctacctgcttctcttttagtactaatttttttgttgtttttttttttt

SEQ ID NO: 258656 - DNA, 201 bp, Homo sapiens
aggacttccctccaggtcttactggaaacaaagcttttgcagtcagaaggtgcaatgacataggtataagttgcttttggttccactagtagctgaagtarttttaactataagttgtatatatgcgggcaatgtaggcaagagctattgggaaatacaccttttgcgataatgctgttggttctgtgaaagggaaacggt

SEQ ID NO: 258657 - DNA, 201 bp, Homo sapiens
aaagtggtgtatttgaatattggcatgtagttttatgtgggtgttgtgagggagtgggagacatactcatacttcagtttaggctgaaataaaaagagaartctgttataaagggccttaaatgtcatattaaggaatttggacttctataggcagttaggaacatggaatctctgtgtattctttgttgttttgccaact

SEQ ID NO: 258658 - DNA, 201 bp, Homo sapiens
ccgcctcagcctcccaaagtgctaggtggcatgagccactgtgcctgttcgtttgttagtttccaaagtgtttttttttttttttttttttttggggcagkgtctcactctgtcacccaggctggagtgcagtggtgtgaatttggctcactgcaacctctgcctcctggattcaggcagttctcatagtgagattacaga

SEQ ID NO: 258659 - DNA, 201 bp, Homo sapiens
atcctcccgcctcagcctcccaaagtgctaggtggcatgagccactgtgcctgttcgtttgttagtttccaaagtgtttttttttttttttttttttttgkggcagtgtctcactctgtcacccaggctggagtgcagtggtgtgaatttggctcactgcaacctctgcctcctggattcaggcagttctcatagtgagat

SEQ ID NO: 258660 - DNA, 201 bp, Homo sapiens
tcctaaagagcagaattaggagtatctgaaaagcaactggaagaaagtttagctactttacctatacattattagaagacatttgtgacttttttttttttaggatggcataacgaggataaagtagatcttaaattgcttcccacaattgatacaaagtacagttgatcaatcagcatatgtgtaatttctaatccaagt

SEQ ID NO: 258661 - DNA, 201 bp, Homo sapiens
aaaaattagcctggcatcatggcacatgcccatagtcccagttatttgggaggctgaggtaggaggattgtttgaccaggaggttgaggctgcagtgagcyatgattgtgccactgcacttcagtgtgggcagtagagcaagaccatgtctcaaaaaaacaaacaaaattaatagatgcacagaaaattaaaaaaaaaaag

SEQ ID NO: 258662 - DNA, 201 bp, Homo sapiens
taggcaagagctattgggaaatacaccttttgcgataatgctgttggttctgtgaaagggaaacggtgtggggaagaaagaggtgaggctaaaagcggtcctaaagagcagaattaggagtatctgaaaagcaactggaagaaagtttagctactttacctatacattattagaagacatttgtgacttttttttttttag

SEQ ID NO: 258663 - DNA, 201 bp, Homo sapiens
gcccggctaatttttttgtatttttagtagagacgtggtttcaccatattggtcaggctggtctcgaactcctgacctgaagtgatctgcccgtctctgcytcccaaagtgctaggattacaggcgtgagccactgatcccagcccatttgcttattctttcgctgacagaaacctattcctttttttttttttttttttt

SEQ ID NO: 258664 - DNA, 201 bp, Homo sapiens
ccagtagttgggactacacttatgtgccaccatgcctggctaattttttttttttttttttttttttgaaacggagtcttgctctgttacccaggctggcrtgcagtggtgtgatctctgctcactgcagcctccacctcccaggttcaagtgattctcctgtctcagcctcccgagtagctgggactacaggtgtgtgcc

SEQ ID NO: 258665 - DNA, 201 bp, Homo sapiens
aggttcaagcgattctcctgcctcggcctcccgagtaggtgggactataggggcgtgccaccatgcccgggtaattttttatatttttagtagggacgggktttcaccgtgttagccaggatggtcttgatatcctgaccttgtgatctgcccgccttggcctcccagagtgctgggattacaggcgtgagccaccgtgcc

SEQ ID NO: 258666 - DNA, 201 bp, Homo sapiens
ggtgaggcgagcggatcacttgaggtcaggagtttgagaccaacctggccaacatggtgaaaccccgtctccactaaaaatacaaaaaaaaattagctggktatggtggtgcatgcctgtaattccaactacccaggaggctaaggcaagagaatcgcttgaacccaggaggcagaggttgcagtgagctgagatcatacc

SEQ ID NO: 258667 - DNA, 201 bp, Homo sapiens
atagattgcccacgggtgatttttttaatcccggttaccacttgtaataaaagaggttgaattttggagagaattgatatttaaattgcatgtttttttttctgtattataattatgcacattgatttagttttaaaattagtgaggttggaatgttagtattttgatttgaaatctgggatctttggaggtgatttaaga

SEQ ID NO: 258668 - DNA, 201 bp, Homo sapiens
acatttgaaaagaaactacacttgtactctttaatgattatcctaaaagaatgcttagtaccctctcttaggcatttgttaaagtaaattttgttcagatkccttggaacccaaggaaaagaaggctatagttggtcaaatgatctgaatccaaagctctcatttttttgtcacctattgtttgtaacagacattcctttt

SEQ ID NO: 258669 - DNA, 201 bp, Homo sapiens
cacacacacatatatacatatatttttgagactgagtcttgctctgttgcccaggctggagtgtggtggcagaatcttggctcactgcaacctctgccttmcaggttcaagtgatcctcctgcctcagcctcctgagtagctgggactacaggcgcatgccaccgtgcccagctaatttttgtatttttaatagagacagg

SEQ ID NO: 258670 - DNA, 201 bp, Homo sapiens
tgttttagtatgctaaattgctgtcctaaagaacagttatggttgggtgcagtggctcacgcctgtaatcccagcactttgggaggccgagtcaggtggatcacctgaggtcaggagttcgagaccagcctggccaacatggtgaaactccgtctctactaaaaatgtaaaaattagccaggtgtgcacctgtaatcccag

SEQ ID NO: 258671 - DNA, 201 bp, Homo sapiens
ataaagatatttttctacttaaaaaatgtttttagttgcatagatttctttttatataatgagttagccttatttcttaactgcattttgaactattaagrtgtaaaaagtaggtcctattttactatcaaaaggcaacttaaatgccaatttctttctcaaaataccaggtgttgtttagaacaaaaattatcatagatg

SEQ ID NO: 258672 - DNA, 201 bp, Homo sapiens
aatacttttgcctactttgtgttgagttgtttcttgttattgaggtaccaagtatttaattgtgacaaagttcagattattttttcttctataaaagttgyattcttagccaagtgtggtaacttatacatgtaatcccagtgctttgggaggccaaggcgggcagattacttgagcccaagagttcaagaccaacctgag

SEQ ID NO: 258673 - DNA, 201 bp, Homo sapiens
tagactaaacctcatcttgttcacattctagtagaacaagataaaaacaaatgcttattcatatagtatgttcatcatttaagaaggtcatagtatttacyggcctggacactagtttatatgtgtttgtatttaagaaactagccattataatctcaattatgtgcagtgaaggagagagaaacgtgacatgagcaaagt

SEQ ID NO: 258674 - DNA, 201 bp, Homo sapiens
gtaataggagatgctaagaaattttggatgggagttaaaattaaatctctgaaagaataaaagggaattaatactcaatttatatcttaaataaatatttytaaatgttacactatgcagaaatccttcttccctggaaaaaatgagatcaagtcctattcaaaaaggtcaagaagaaagactgaggttggtgacccgtga

SEQ ID NO: 258675 - DNA, 201 bp, Homo sapiens
aggtccctgactacaaagagagtggctggagttgagactgtgcgtctttggaatctactgtggaaaggaggctgattggctcacctcattggctcagattrgcatgcatcacccaacaggtcccagtatctgggcagtttcttgactgcagcaagagggcttggagccaagactgggccccttcagtatctactatggata

SEQ ID NO: 258676 - DNA, 201 bp, Homo sapiens; identical to SEQ ID NO: 51692

SEQ ID NO: 258677 - DNA, 201 bp, Homo sapiens; identical to SEQ ID NO: 51693

SEQ ID NO: 258678 - DNA, 201 bp, Homo sapiens
ccctattggactaccagatgtactttgtggttataacttgcatagctccaggatttttcgtgaacaagtaataaaacacatttctggtttgctttctgccrtagagtattaagagtttaacactttttaaatgttactttaatctctgaaattttcaacaatgattagtggcagtatactcaaaaaaggaaatgtgtaggc

SEQ ID NO: 258679 - DNA, 201 bp, Homo sapiens
gccattagagtagccctggaggatgagacttatagtggcaatgattatcacaccttgacaacttgggaagggccatgggatgtggatgtggaaaatatataaaaggacattggttcacatttgaacaaagtggaaggaattattagaaaagcacttaacaagggtgctgatctctccccatctgaggtcttctttcttctt

SEQ ID NO: 258680 - DNA, 201 bp, Homo sapiens
agagtatgctttaagcccaggttttctgagtcctgcaagggcaccaaggttgacacagctttctggcccagatggacctcgggaagacccaagggaggtasttgggctgcctgggaatgctgtccagacacctgaagccagaagactctcctagtggtcctgataggtatgcctcccaacaaatctctgcacagatgggat

SEQ ID NO: 258681 - DNA, 201 bp, Homo sapiens
tgaggcatgagaatcgcttgaaccggggaggcagaggttgcagtgagctgagatcatgccactgcactccagcctgggcaacagagtgagaccctgtcttaaaaaaaaaaaaaaagtgaagaacaaggtaagacacatttaatatatctgatcaagtggtcttgtccaaaaaatgtcctgatacatttttttaaactaata

SEQ ID NO: 258682 - DNA, 201 bp, Homo sapiens
ttataaacatcatattccaatattgattctgctgctttgtctgtacatttggagagcagaggtagcagggaggtttaagagactgaaaaaagggagagggktgtatgaagtgtagatcagtaacaaacaccatcactcttgaaaagaaaaagtccaacagaggtcctagacctgtgttttagacaggtgggaggacagtaa

SEQ ID NO: 258683 - DNA, 201 bp, Homo sapiens
aaaataccatgtctgaggtgaaaagttcactgggtaagatgtggcactacagaagaaaagattaaggatcttgaagacatagcaatagcaattgttcaaartgaaacacctagagggaaaaaaagactggaaaaacaagcagtgtcactgtgagctgtgagacaactttagatgatcaaatatataaagactacggatggg

SEQ ID NO: 258684 - DNA, 201 bp, Homo sapiens
tttctgtctaaaagcaaaacaaagcttcatcaagaaatactacaagcagtgggacctaatttcatcaaggggataaaactctattcctttttattctattwtggaattggaattcagaaacatttttttttggtcctatggatggtatattcacttatttgaaatgaaaattgaactcagacttttctgaaagagtctcat

SEQ ID NO: 258685 - DNA, 201 bp, Homo sapiens
tatattgagataattgtgtaaagaagaagactgaatgagtttcaaaaaatggattatttcttcattaccgagcactttataattaactgttcttttttttytttatttcaggaagctgccacttttgctagagagcaaggctttgaggtgagttaacccacaattgcacactaaacagatcctaaaggttttttctagctg

SEQ ID NO: 258686 - DNA, 201 bp, Homo sapiens
cctgtaatcccagcactttgggaggctgaggtgggcagatcacttgaggtcaggagttcgagaccagcctggccaacatggtgaaaccccatctctacttaaaaaaaaaaaaaaaaattagcagcgtgtggtggcatatgcctgtaattccagctactttaggaggctgaggcaggagaactgctcgaacctgggaggtgg

SEQ ID NO: 258687 - DNA, 201 bp, Homo sapiens
agtacatgaatctttacagctgataagattttatagaatagtacacacacactaagaacaatgcatgtaatgtctactttggggagctttttttaaaaaartttcttttaagagacagtgtcttgttccatttcccaggctggagtgcagtggcacaatcatagctcactgtagcctcaaacacctgggctcaagggattc

SEQ ID NO: 258688 - DNA, 201 bp, Homo sapiens
gtgattcccctgcctcagcctcctgagtagctgggactacaggtgcctgccaccacgtctggctaatttttatatttttagtagagacagggtttcaccatattggtcaggctggtctcaaactcctgacctcaggtgatccgcctgcctcagcctcccaaagtgctgggattataggcgtgagccaccgcgcctggccgc

SEQ ID NO: 258689 - DNA, 201 bp, Homo sapiens
aatgtaaattttaaactttgcaaaaaatattggtaattatctattgaaatatatgctaagtttgactataatattacttgcttattctttggttgttttargtccctcatagctaatcttgctgctgccaattgttataaaaaggaaaaacatcttgatctggagaaaaactggatgttggtagaaaaagcaagagtttgt

SEQ ID NO: 258690 - DNA, 201 bp, Homo sapiens
cgtatgcatgtaatatatggttttggtataacagctgctgccatttcattacctgagctctgtgaaatagctggtaagatgtgtaaaaaattgattacccyactaggaggaacatgtttattgaaaatataattatttctttcagtctaatgttaatgtctcctacagcatgtttgtgtgcactgttctaggctttacaac

SEQ ID NO: 258691 - DNA, 201 bp, Homo sapiens
agacacacataggctcaaaataaagggatggaggaatgtttaccaagcaaatggaaagcaaaaaaaaaagcaggggttgcacttctagtctctgataaaasaggctttaaactaacaaagatcaaaaaagacaaagaagggcattacataatggtaaagggatcaatgcaacaagaagagctatcgtaaatatatatgcac

SEQ ID NO: 258692 - DNA, 201 bp, Homo sapiens
tactcttcttgcttcatttcattcatttgatcttcaatcactgataccctttcttccacttgatcgaatcagctactgaagcttgtgcatgtgtcacgtakttctcgtgccatggttttcagctccatcaggtcatttaaggtcttatccatgctgtttattctagttagcctgtcgtctaatcttttttgaaggttttta

SEQ ID NO: 258693 - DNA, 201 bp, Homo sapiens
taccatctcatgccagttagaatggcgatcattaaaaagtcaggaaacaacagttgctgttgaggttgtggagcaataggaatgcttttacactgttggtsggagtgtaaattagttcaaccgctgtagaagacagtgtagcaattcctcaaggatctagaaccagacataccatttgaccgagcaatcccattactgggt

SEQ ID NO: 258694 - DNA, 201 bp, Homo sapiens
actcaagcctcagcaatggcgggcacccctcccccagcctcactgcttccctgcagttgatctgatagcggactgctgtgctagcagtgagcaaggttccatgggcatgggaccctccgagccaggcgtgggatataatctcctggtgtgccgtttgctaaggccattggaaaagcgcagtattagggtgagagtgtcctg

SEQ ID NO: 258695 - DNA, 201 bp, Homo sapiens
agatcctatgctgccctgataagaatcacctgcacagcctcattgactctcacggaagtattccagtaactctttgaattttttcctagaaaaattggcayctgttacccctacacaattccttcataaacagtagaaatttcccccatgaaacctttcctttaaccttaacattcttcgataattatttatgaagtcctt

SEQ ID NO: 258696 - DNA, 201 bp, Homo sapiens
ctcaagcctcagcaatggcgggcacccctcccccagcctcactgcttccctgcagttgatctgatagcggactgctgtgctagcagtgagcaaggttccatgggcatgggaccctccgagccaggcgtgggatataatctcctggtgtgccgtttgctaaggccattggaaaagcgcagtattagggtgagagtgtcctga

SEQ ID NO: 258697 - DNA, 201 bp, Homo sapiens
gcattgcctcatggagattggagctcagggaactggtctaaatatattgttctaggtgctgcttttgctacgagtaataaattgtctttgtttctgatccwcagttcttgtgtccttatgtcattgtgtgtgtgtgcatatgtgtatgcaggagaacgaatgcggcagattgaagagcagttgaatatcagacctttgtag

SEQ ID NO: 258698 - DNA, 201 bp, Homo sapiens
gtggctcatgcctgtaatctagctctttgggaggctgaagtgggaggattgcttgaggccagggattcaagaccagcctaggcaacatggcgtgaccgtcyctacaaaaaaatatttttttaattagctaggcatggtagcatacacttgtagtcctgtctacttgggaggctgaagcaggaggatcctttgggcccaggt

SEQ ID NO: 258699 - DNA, 201 bp, Homo sapiens
tcaagcctcagcaatggcgggcacccctcccccagcctcactgcttccctgcagttgatctgatagcggactgctgtgctagcagtgagcaaggttccatgggcatgggaccctccgagccaggcgtgggatataatctcctggtgtgccgtttgctaaggccattggaaaagcgcagtattagggtgagagtgtcctgat

SEQ ID NO: 258700 - DNA, 201 bp, Homo sapiens
ctcctgccttggcctcccaaagtgctcacaggcatgagctaccgtgccggccaggaatcttttatgtgcaacgttgtcagctgttaatgctcctatttatraataggtcacctttgtttgaaaaaagcgtacaaggttttctaactccaaatctttccagccacaatattgctacgttaagcagaactgtcaaagataaaa

SEQ ID NO: 258701 - DNA, 201 bp, Homo sapiens
cactgcactccagcctccattacagagggagagcctgtctcaaaaaaaggaaacgaatttatattccacattttactgagtctagtgtgagtttttgtttaaaaaaaaacaacccaggaataatttcttcaaattcataagcatggcaggcagttttattttaaattctgtgggaaatatgaatttaaggatctcatgtac

SEQ ID NO: 258702 - DNA, 201 bp, Homo sapiens
caagcctcagcaatggcgggcacccctcccccagcctcactgcttccctgcagttgatctgatagcggactgctgtgctagcagtgagcaaggttccatgggcatgggaccctccgagccaggcgtgggatataatctcctggtgtgccgtttgctaaggccattggaaaagcgcagtattagggtgagagtgtcctgatt

SEQ ID NO: 258703 - DNA, 201 bp, Homo sapiens
aaagatgagatttgaatctagctggtctaatttatcctgaagttcaagatagcaatacaagaattatgaacatataaatggagtgagtggatatgatcgcycaagataaatctcttggccgggcgcagtggctcacacctgtaatcccagcactttgggagactgaggcgggcagatcacgtggtcaggagatcaagacca

SEQ ID NO: 258704 - DNA, 201 bp, Homo sapiens
aagcctcagcaatggcgggcacccctcccccagcctcactgcttccctgcagttgatctgatagcggactgctgtgctagcagtgagcaaggttccatgggcatgggaccctccgagccaggcgtgggatataatctcctggtgtgccgtttgctaaggccattggaaaagcgcagtattagggtgagagtgtcctgattt

SEQ ID NO: 258705 - DNA, 201 bp, Homo sapiens
gttttttatagtttcattcactttggaaattattttacaataaattttctctttccacctccatctacctttgggactccgattaaaataataataataakaataataataataagaagaagaagaagaagaagaagaagaagccacttgtagttgacccatgtctcagtgattctgttttcaatatttttgtttttctat

SEQ ID NO: 258706 - DNA, 201 bp, Homo sapiens
ttttatagtttcattcactttggaaattattttacaataaattttctctttccacctccatctacctttgggactccgattaaaataataataataataakaataataataagaagaagaagaagaagaagaagaagaagccacttgtagttgacccatgtctcagtgattctgttttcaatatttttgtttttctatctg

SEQ ID NO: 258707 - DNA, 201 bp, Homo sapiens
attttctttctgactgctctaccagaaaaaagtaaaaaataaaaataaattgtcactcttaatttttgggtcttactccggtggatcacccaccttcatgrtaatgatagacaaatataattttgtttctgtcactggtttatgcaaaagtaaatgtcaattgtttggtacaaggtaaaacactttattttatttttattt

SEQ ID NO: 258708 - DNA, 201 bp, Homo sapiens
attcacattaaaagatgtagtgttgtattccatcatctagactaaagtcttactgggaaatatgtcatgctattttctctttccagataaaatattaaatkgttcctattttctttctgactgctctaccagaaaaaagtaaaaaataaaaataaattgtcactcttaatttttgggtcttactccggtggatcacccacc

SEQ ID NO: 258709 - DNA, 201 bp, Homo sapiens
caccaccatgcctaatataaatatatatatatacacacacatacatatacacacagacacacacacacacacacacacacatatagagagagagccactgygcctggcctaaatagttttattttgaaataattttagatttatagaaatgttctaagatagtaaaaataagttccatgtactcttcacctagcttctcct

SEQ ID NO: 258710 - DNA, 201 bp, Homo sapiens
ctacttgagaggtggaaacaagaagatagcttgagcccaggattttgaggccagcctgtgcaacacagcaagaccctatctcagtcaatcaataataaatmcacacacacacacacacacacacacacacacacgtatatataaccattcatgcgaagaagcaggaaaatacaacccataatgaggagaaatattaataga

SEQ ID NO: 258711 - DNA, 201 bp, Homo sapiens
ttcatcagttccctactgaagactggagtgctgagcctgccacggaaggctggtccacagctcccaatgctcaggccattgaatgggtaggagcaaacacygaaaggtcttaagctgttattgcacacgctcttaagcaacatggaaataaggttgacggaaaataaatgtcagtttaaaaaaaaaaaagtaatgcattca

SEQ ID NO: 258712 - DNA, 201 bp, Homo sapiens
attgaatgggtaggagcaaacactgaaaggtcttaagctgttattgcacacgctcttaagcaacatggaaataaggttgacggaaaataaatgtcagtttaaaaaaaaaaaagtaatgcattcagcaaggttgacagataaaatatcaagatagaaaaatatattggatttttgagcaatattaatgggcaaattgaaaat

SEQ ID NO: 258713 - DNA, 201 bp, Homo sapiens
agccttttacagtaagtttatttgaatcagcatctaaagaattcaaacactatatttgtaccttgtgtcttttattattactgcttttctctctctcgtcttttttttttttttttaatactgtcattgacctttttttaaaagagaaactgtgttatttttccaggagaatatctcactttctgaatttggttagttgct

SEQ ID NO: 258714 - DNA, 201 bp, Homo sapiens
tagtatagaattgtcacacttgagctttggagatgaggtgtctcaaattaaaccctaggatggttatttagtctttctgtgcctcagtttttttttttttwaatctatgaaatggagatcatgtgtctacctcataggtttataatgaagattgaatcacttcccataataatcagaaactacatatttgggctgggagca

SEQ ID NO: 258715 - DNA, 201 bp, Homo sapiens
acttttaattctagagcatttatgtggattccttatgattttacatatattccttaaacatgcacaggttggtatctagccatagcctcaagggttactctgtagatttcaactcattcttctctgaaaatctttttcacaatttctagtctcctggctctccttgaacacatctctttctcctcattttagtgaaaatgc

SEQ ID NO: 258716 - DNA, 201 bp, Homo sapiens
cttttaattctagagcatttatgtggattccttatgattttacatatattccttaaacatgcacaggttggtatctagccatagcctcaagggttactctgtagatttcaactcattcttctctgaaaatctttttcacaatttctagtctcctggctctccttgaacacatctctttctcctcattttagtgaaaatgcc

SEQ ID NO: 258717 - DNA, 201 bp, Homo sapiens
tacagtttattcaaacagacgtacagtgtgtattgtggcacaaagaaattcaagaatgattcttattctttttgtttgttggccttgactaaatttgataycagataattgctttaaaggataggccaattttattggtataacaaatctacccttcattatccataaaccacttatatagtaatctggttttcctataca

SEQ ID NO: 258718 - DNA, 201 bp, Homo sapiens
atcagttttcctgtattgtttttaaatttacttttgttaaacatgcagttgaattcatgaggcataatggaataaaagtttgaggttatttagtccagtcwctactttttataattagaatcagaaaaggctgatagcttgctcaatgccttgtagcttgctcaacaccttgtagctaatttgttgcaaaacttgaattag

SEQ ID NO: 258719 - DNA, 201 bp, Homo sapiens
agttgttatactctcttgtttagggaataatgtcaaggaaaaacactctttacatgttcagtacatatttttccaaatattttcaatctgtggttggttgratccatggatgtggaacatacggatatggagggccagccgtacttgccccatgtcatataattagatgaatatagaattaaagccaggtccgtctgacag

SEQ ID NO: 258720 - DNA, 201 bp, Homo sapiens
aatgatgcatcttgccttaatatctatgccagctttctattggttagtgtttacatgatatcttttttcattcctttattttcaacctttctgtgttcttdtatgacttttgttgttttttaattaattctgacaatcttcatattttaatcagcctgtttatatttaatataagttactaatgtatttgtgttcatatct

SEQ ID NO: 258721 - DNA, 201 bp, Homo sapiens
aggcggaggttgcggtgagccgagatcacactattgcactctagcctggacaacaagagtgaaactccgtctcaaaaacaaaaaacaaaaaacaaaaaaaraacccggcttcttgaatcccagactagtccaatctgttccataccatgttaactcattggcttacatctgtggttttcaaccagaaacaactttccccct

SEQ ID NO: 258722 - DNA, 201 bp, Homo sapiens
gtggtggcaggcacctgtagtcccagctactcgggaggctgaggcaggagaatggcgtgaacccaggaggtggagcttgcagtgagctgagaccgcaccaytgcactccagcctgggtgacagagtgagactccgtctcaaaaacaacaacaacaacaacaacaataacaacaaaaccctaatgtcacatataacaaaaag

SEQ ID NO: 258723 - DNA, 201 bp, Homo sapiens
tatacacaaatgtgaagatagtgttgatttgatgctttacttttgataatgttgatctgatgccctggttttgatcacttaacagatacccatgtgctttrtgggaagttgagttcttcttatgctcatgggctgagcccgaattaatccaaatcagtaatggtaattttatgccctctcccattgatttgatagtgagtg

SEQ ID NO: 258724 - DNA, 201 bp, Homo sapiens
cctagtctttctctaaagggtaatctcaaatgaaacaactggaactggattctcatttgtttaatgactgaagaagtcttccaattactctacaaaccatygataacttttgttatttgtgaccagtattcatctagtaagatgttaaatgcttttatgaaagagacaagtgttttacctaaagaatgagaaaaaaaaaac

SEQ ID NO: 258725 - DNA, 201 bp, Homo sapiens
tgtcttctttaatttctttcatcaatgttttgtggttttcaatgtaaaaatcttgtgcctccttggttactcataagtattttattcatttttaatgctaytattaatatatttgttttcttaattttctttttgggttgttcattgttagtattttcaaacacaattaattgttttatgtttattttgtgtcctgcaact

SEQ ID NO: 258726 - DNA, 201 bp, Homo sapiens
aaaaagaaagaagaatcaaatagacgcaataaaaaatgataaaggggatatcaccactgatcccacagaaatacaaactaccatcagagaatactacaaayacctctacgcaaataaagtagaaaatctagaagaaatggataaattccttgatacatacaccctcccaagactaaaccaggaagaagttgaatctctgaa

SEQ ID NO: 258727 - DNA, 201 bp, Homo sapiens
ttggtctggtgggcctagtgcaggagcttagtccaaactaatgggatcctatacattttgtttaacactgccaacatcctggtgcacgatcatcagatttytcattgaacagggaatggatgactttgaatgttggagagcacctgtggtgagttgtttatatataatctgtaaactagttatgcacagtagcactatata

SEQ ID NO: 258728 - DNA, 201 bp, Homo sapiens
tgaccagagagtgtaccatgaaagagcatgtgggaagggttcccattttagctatgatggctatggaatgaccctaaaaatatgaatatctagcaatgacaaaaaaaaagcgacacaaacagcaaaacaaatttcaaacagagagaacaggactataaaagtctctgaacgagagagaacttaatgtactatgtactccag

SEQ ID NO: 258729 - DNA, 201 bp, Homo sapiens
tgataaaaaggcagaaattctcagactagataaaaaaactgaggtctaactatatgctgtctgaaagagatgtatcttcaattcaaagatacaaataggtaaaaaaaaaaaaaaagaatgaagagagtatgttctttgatttggaagacaatgtgatcaccaatgacaataaaaccatatttctacatttataaaatgctc

SEQ ID NO: 258730 - DNA, 201 bp, Homo sapiens
aaccctagcaccttgggaagtcaaggtgggaggattgcttgatcccaggagttggagaccagccttggtaacagcaagacttcatctctacaaaaaaaaatggaaaaaaaaaaaaaattagctgagagagtagtggcacatgcccatagtcctggctacttgggaggctgatgcaagaagatcacttgagcccagaagttc

SEQ ID NO: 258731 - DNA, 201 bp, Homo sapiens
ccctagcaccttgggaagtcaaggtgggaggattgcttgatcccaggagttggagaccagccttggtaacagcaagacttcatctctacaaaaaaaaatgraaaaaaaaaaaaaattagctgagagagtagtggcacatgcccatagtcctggctacttgggaggctgatgcaagaagatcacttgagcccagaagttcga

SEQ ID NO: 258732 - DNA, 201 bp, Homo sapiens
tgtgtgtatgtgtctttatagtagaatgatttataatcctttgggtatatacccagtaatgagattgctggatcaaatggtatttcctgttctagatcctkgaggaatcgccacactgttttccacaatggttgaactaatttacacttccaccaacagtgtaaaagcattcctgttcctccacatcctcaccagcatttg

SEQ ID NO: 258733 - DNA, 201 bp, Homo sapiens
aataaataggaattaacaaatatgagctgggcgtgatggctcatgccggtaattccagtactttgggaggccaaggcgggcagatcacctgaggttgggartttgagaccagcctgaccaacatggagaaactccatctttactaaaaaaaaaaaaaaaaaaatacaaaattagctggatgtggtggtccatgcctataat

SEQ ID NO: 258734 - DNA, 201 bp, Homo sapiens
acttttcttgcaaaagcttacaaggcacatgcttttgatagcagtgttacatttttaattaatattttagatgtaaaaggtgacagtttaaaagattgttktattagtgggttatccttaaaagcaagtggcatttggttttattttacaatagagtttaatcttacatgttttttgttaaagtaatgttaccaaaaaatc

SEQ ID NO: 258735 - DNA, 201 bp, Homo sapiens
tcagctacatcttaccattactcagttctctctcccttttgaccttgctggtttctaaatctgggtcaatttgtgtgccttgcttcttgacttgatattamaattaacttattttgtcatactagatgttttcagccatctttgatccccaggttgctcaccaactcttattatcctttgaaatgactctcaaatcttacc

SEQ ID NO: 258736 - DNA, 201 bp, Homo sapiens
tctttcctgtctcccaatgagttaaaaaagaaaaaagtatccaaatgtgttcccaccccaacccaagcctgtgatcacttctttgtttttttgcttccctstaagggtatttctccctataattatactcacactttaagaagtaggagccattatactttattttcaaatttcaaattagaaagtgatttgggtttggaa

SEQ ID NO: 258737 - DNA, 201 bp, Homo sapiens
tctctactaaaaatacaaaaattagcctggcgtggtggcgggcacctgtaatcccagctactcaggaggctgaggcagagaattgcttgaaccggggaagsagaggttgctgtgatcggagatcgcgccactgcactccagcctgggtgacagagcaggactctgcttcaagaaaaagaaaaaaagaagaaaaaaaaaggc

SEQ ID NO: 258738 - DNA, 201 bp, Homo sapiens
gcctagtatgtgacttgtctttcattttgtggtgtcttttgcctcacacaagttttaaaatgaaatgtaatcacattatcaatttttaaaaatgctttatsttcttatgccttatttaagaaattacttcctactctaaggtcagagtttcccatatgtgctttgcagaggtagatctttcatctggtagtatgtaatttt

SEQ ID NO: 258739 - DNA, 201 bp, Homo sapiens
atatgtaatttattttcacctgtatagacttgtatgaatacatcacaatttattctttggttgaggaattacaggtttttcagtattagaaacactactgygtttaaggttcttgtactgatctgtttatgcatatgtgaaagattcttgaggactgtattttaaatatgtggatgtttaaatttcaattaattaaaatta

SEQ ID NO: 258740 - DNA, 201 bp, Homo sapiens
acttttagtttttccttatgaaatactttatgtagaacaaactagcagtactaaaacaaacacccatgtacccaatctgtcaacacttagatttgttgaakatttgggtgggcagagtcttccacccaaatggtaaaaggggaatacattacaagtacatctggggttctctgtatacctgtcttcagcccattttctgtc

SEQ ID NO: 258741 - DNA, 201 bp, Homo sapiens
gcagaggttgcggtgagccacaatcatgccactgtacttcagcctgggtgacagagtgaaactctgtctcaaaaaaaaaaaataaaaaaaaaaaagtttcrcagacaaaatatgaatcattccttgtttaacacttaaaaggtttttatactcaggcaatagaatagtgtatagtttcattcacaataggtgaggagtatg

SEQ ID NO: 258742 - DNA, 201 bp, Homo sapiens
ttatttaaaacatatgttatattgacctcatggctaaatggcctggtttaggaatccatgaattatcccacaggtaatagcaaagttttctccctgcctcrtctcccaccccaaatatttgatttccacatatactgcacaggggaattgaatttgatgtcgaaagccataagaaaaagagaaactttgctttttactgct

SEQ ID NO: 258743 - DNA, 201 bp, Homo sapiens
tctttggacattcttagaatctcctctttcctcctggtattctggcatttctcaatgtgatttttcttattatggcttttttttttcattgttctgagcaygtaatgggcccttatagtccagagacttaaatgttcttcctgccattcatgcaggtttttgaaatttcttctctactattttctttagagctatgagtta

SEQ ID NO: 258744 - DNA, 201 bp, Homo sapiens
tttgattgtttttagtcttattagtttatgcccttgttttgctcaagcacattctccagagcttcctgagaaaagaatatgtgagaaataaaatttttccrtacatgtaggtctaaaatgtctttattctacctttacataggttggtatttcaattaagtctggaaatgcagattgaaaataattattcctcagaaactt

SEQ ID NO: 258745 - DNA, 201 bp, Homo sapiens
agtagaattatagattcttttgtttgtttgtttgttttgctttttaaattagagacaagttcttgccctctcaccaggttggagtacattggtgtgatcayagctcactgaagccttgaactcctgggctcaagccatcctcctgcctcagcttcctgtgcagctgggactacaggcatgcaccactccacccagctaatt

SEQ ID NO: 258746 - DNA, 201 bp, Homo sapiens
gcaaccatatatcaaaacagtatttttgaaggaatcattgtagaagtacagacatttatagaaaattttttacctctctgatttagagaaatttttgaaakcacaataacttaggtaacatagtaacataaaagttctcataatatgtgtaaaccaaaatgagttactgcaactaagagtcattttgaaagagactaaaat

SEQ ID NO: 258747 - DNA, 201 bp, Homo sapiens
tcattgccatggaaagtggtggtaactcctgggtgttctcatagcagtgttgacatggcacactggtgggtgtgtctgatggaaagcttcttctgcctaaycatctttcagctagtcctcaatttaattgggtgtctgaacctgtctctagagtcaagtcctgcctcctaactcagtaggggcaagggtcttagagcatta

SEQ ID NO: 258748 - DNA, 201 bp, Homo sapiens
tttttttgagacagggtcttgctctgtcacccatgctggagtgcagtgacatgatcacagctcactgcagctagggctacagatgtgtgccaccatggctrgccaattttttatttttatttttatttttggtagagacaaggtctcattatgttgcccaggctggtcttaaaatcctgagctcaagcgattcttccatct

SEQ ID NO: 258749 - DNA, 201 bp, Homo sapiens
tcaatttgaaataatcacagattttccttataaaccaacttggtttaattttaacatatagactaacataatttctagtaggcatatatgcttcattttaraagcccctgttattaggttatataatttctccttacaacttataatgtagaaatagttttcttataataaggtatttctcttaatagttaataattaaac

SEQ ID NO: 258750 - DNA, 201 bp, Homo sapiens
gctgtgggacctgcatggagctttctctcgctggctcctggagcagccggccaggtcctgcactctcttgctaacatgctccctcctgcagggggttgagygctgtggcgtgagtaaactgtcgcccttgttgcaagtccaatgaagggaccaagaaaaatcctgcatcactgatatgaaatgtaccaaattaagtaacat

SEQ ID NO: 258751 - DNA, 201 bp, Homo sapiens
aaaagttgtacaagttgagatgtttaattcctttactttaagaaaaagcatcataattagaagggagaattgctgttatctggaaggtgttcagacagttkggggagaaaaaaacaaccaaaacagctgcagtgtaatttccataagggaatgggcttatatctttgtttatttgtgtttgttttccattgtacactcagt

SEQ ID NO: 258752 - DNA, 201 bp, Homo sapiens
gaatgtaactatcaacacatgttatggagtagtataaattgttacttgatgtttggagttgttttactcagtcactcagcaaaggtaagattagatctccrttagatgaaaagtattatctcttatgcaaagagacattggttagctctggatgaagacaatggctatggggtcagtcaaccttgtagaaagaataggcta

SEQ ID NO: 258753 - DNA, 201 bp, Homo sapiens
ttttttctatttctatgaagattatcattgtcatttgagagggtttactttgaatctgtagatcactttggatagtatgggcattttaatgatattctttmattacatgaatgcaggctgtcttttatttgtgtcttctttaatttctttcatcagcgttttatacttttcatcttagagatcttttatctccttggttga

SEQ ID NO: 258754 - DNA, 201 bp, Homo sapiens
ctcatataaaatttagaataaacatgaaagttttagcatgtccagactttagggatttagactttatgaaggtctcaagcctgtctcctggaattccaacrttgtgatgactcaaattttatcagtaaatatggaaaaataagctaaagttcttgagaaattgctatctaataagtgattattttattttttttctagttt

SEQ ID NO: 258755 - DNA, 201 bp, Homo sapiens
ccgggttttggagctgtccccagtccacagatttcccgcccctcacactcaccccaacacctgtgccagtcagtgattcggcgccggatcctctcctaccraagctggagaagccgagaaggccgcgaggacccgcagctggagtgcccaggaaattgcctgattaacagcttcaaagacaccgactctgtctaccgtatt

SEQ ID NO: 258756 - DNA, 201 bp, Homo sapiens
tccttgtgtggaatgagtaagctggaaaataacaaagagggaatcccatgtgctaggaagcttcctcttgtcttctgtgtgctccgtgtactgctttttcrattctctgggccttattttgttcaactataaagtaaaaggagtagctaaaaaatctctaatatatctttcagttctaatagactacatgtttaaatcagg

SEQ ID NO: 258757 - DNA, 201 bp, Homo sapiens
agagggaatcccatgtgctaggaagcttcctcttgtcttctgtgtgctccgtgtactgctttttcaattctctgggccttattttgttcaactataaagtraaaggagtagctaaaaaatctctaatatatctttcagttctaatagactacatgtttaaatcaggaatcggcaaactttttataaagggtcaaatagtaa

SEQ ID NO: 258758 - DNA, 201 bp, Homo sapiens
attttctgctttgcagggcatactacctccattgcaagtgctcaactctccctctgtagcgtgaaaacagctgtatataaacaaatgggtgtggctgtatkccaataaaactctatttataaaaataggcagctagccagatttggcccacaggccatattttaacaagcccaggtctagatgttaatgtaatgggaatgt

SEQ ID NO: 258759 - DNA, 201 bp, Homo sapiens
gaaagatcacatgagtcctctttcttgaaataatatttttgtgtttgtaactgctgacacgactggtacttaaattttgagagaataaactttttgaaaawttttttgaccattaataaaaaacttttttttcatttcctacagtacatggattttcttttttttttttttttttaagacagggtcttgttctatctctca

SEQ ID NO: 258760 - DNA, 201 bp, Homo sapiens
ttttttttttttttaagacagggtcttgttctatctctcaggctagattgcagcggcgcaaacacagcttgctgtagccttgaactcttgggctcaagccrtccttccatctgagcctcccaggtagctcggactacaggtgtgtggtctccctatgttgcccaagctggttttgaacccctaggctcaagtggtcttcct

SEQ ID NO: 258761 - DNA, 201 bp, Homo sapiens
aactgagtcatatatatgtcctattttgtataaggcttctgtcactccctgtgtttttgaaattcatcagtgttgttgcatatatcagttaattccttttyatttttgcagattaacattctgttgtttatttgttctattattgctaagtattgccacttgtttgatttgtcattattgatggtcttgatatttttggct

SEQ ID NO: 258762 - DNA, 201 bp, Homo sapiens
gcagaaaactctttaataagagctcaaatttggaggataacgagatagctgcctctgcctttgccggtgcagtgagagcagcttcaggaatcttatggccyctgaatattttggcatcttcagcctaccaaaactgtgtcaaaaatgcctctcttatttctgcattgtccactggacgttttagtcatattcagacaccag

SEQ ID NO: 258763 - DNA, 201 bp, Homo sapiens
acgcagaaaactctttaataagagctcaaatttggaggataacgagatagctgcctctgcctttgccggtgcagtgagagcagcttcaggaatcttatggyctctgaatattttggcatcttcagcctaccaaaactgtgtcaaaaatgcctctcttatttctgcattgtccactggacgttttagtcatattcagacacc

SEQ ID NO: 258764 - DNA, 201 bp, Homo sapiens
agtatgaatgccttaataagatcctttcctgggcaatatatactagtgcagcgtgagggtggtagagagagccagaggaaagcttgcatggatggttctgsgtatccagggacaagcatggaagtgcttgaaactcagggaaagtgggaagggccttaggaaaacaaggggcattgaagactatgtttcttattttgggta

SEQ ID NO: 258765 - DNA, 201 bp, Homo sapiens
agtaacattttctttcttttttttttgagatgagtcttgctctgtcacccaggctggagtgcagtggcatgatctcggctcactgcagcctccaccttccgggttcaagcgattctcctgcctcagcctctgagtagctgggactacaggtgcccgctaccacacctggctaattttttgtatttttagtagagacggggt

SEQ ID NO: 258766 - DNA, 201 bp, Homo sapiens
gttagccaggatgttctcgatctcctgaccttgtgatccatccgcctcggcctcccaaagtgttgggattacaggcgcgagccactgtgcccggccaacaktaaccttttcttaaggtcccgtggttgatgtcttcactcattctttcttcttttaatatagtagaattgcgtatttgggggaggaatagagtttctgaaa

SEQ ID NO: 258767 - DNA, 201 bp, Homo sapiens
gagaaccattgaagagtttttaacaggggaataacatcagatttgtattcatgaaaaagtactctgtttattcatcatatatttattgagcccctataatrtaccaggcatagttctggatgctagcaatcatcagaaaaaaatattgccttttctatagctcctcttacctaggcagccaagttttgtgccctgagccct

SEQ ID NO: 258768 - DNA, 201 bp, Homo sapiens
tgtgagccaccatgcctggccaagaaaagttttttttaaagtttatttttgtatgtagtcataatacttgtaaggtaaccttttcactgtattgctttttwaactaaggtttaaatagttcattgtaataagagttaccgtttgtgcttataaggctgcatctccaggagtaagtactaaatctgtgttagatttctttgc

SEQ ID NO: 258769 - DNA, 201 bp, Homo sapiens
ttcattgtaataagagttaccgtttgtgcttataaggctgcatctccaggagtaagtactaaatctgtgttagatttctttgctgcttttttttgtttgtytttttttttttcttttactgatatggtcaggtggtcaggttacttccgtaaggatccaaaactagagttgattgagatcatttcaggcttatacataatc

SEQ ID NO: 258770 - DNA, 201 bp, Homo sapiens
attttcctgtttttagttagagacagggtttcaccatttggccaggctgatctcgaactcttgacctcgggtgatccgccctcctcagcctcccaaaatgmtgggattacaggcatgagccactacacccagcctttaaatatcttaataagaatacttagctcattcatttacagccttttttcatttctaagatgagca

SEQ ID NO: 258771 - DNA, 201 bp, Homo sapiens
gaggccagcagtacaagaccagcctgggaaacatagtgagaccccatctctacgaaaaacttaaaaaaggccgggcacggtggctcacgcctgtaatcccrgcactttgggaggccgaggtgggtggatcacctgaggtcaggagttcaagaccagcctggccaagatggtgaaaccctgtctctactaaaaatacaaaaa

SEQ ID NO: 258772 - DNA, 201 bp, Homo sapiens
atcccagtgacctgttagaatgatgaatctcttttctctgtgttagcaagcctttaattagtaaggctgtttgcagtgtaattagaactgcacaagcatgraaggtcagtaatactgttcagaatttcataatgtactgtgtaacataacatactgtgaaatgaatccatagtaccacaaaatttgtttttaaagaagttt

SEQ ID NO: 258773 - DNA, 201 bp, Homo sapiens
gtcttcaaggtctagccaaattctctcttctctataaaacttttctactcaccaaacctagaaatggtttctcctttgactgtttgtactttatactttgmgttattgcaatgtacagtatgtgcatgttttatctcacctattgctacttgaagttgggaaactagttgaataactcttagtgcctcataactgatcact

SEQ ID NO: 258774 - DNA, 201 bp, Homo sapiens
tctctgggatgaccagttctaaagcctaagggtaacagactctgtcagaaagaacagcaaaagatgttgggttttctttgtctttgaaatgctttgtcacrtgtttatctgtgcatatagttctaagccaaattctaccctgaattgctttaagccacaaagtagcaggttgtaaaatattgttgcataagagggcacctc

SEQ ID NO: 258775 - DNA, 201 bp, Homo sapiens
gagcaggcgagcaagcgagactccatctcaaaacaaaaaacaaaacaaaaacaaagtagcaagagtgagtatgccagtgtgctgggggtaagatgatttaratactctgtattttccatgtcttattttcatactttaaaaaacatatcagttgtttctaaaagaacatattccttttagttacaaacatatacattcagc

SEQ ID NO: 258776 - DNA, 201 bp, Homo sapiens
aaaaccccttctctactaaaaatacaaaaattagccaggcatggtggtgcgtgcctgtaatcccagcttctggggaggctgagacaggagaatcgcttgarcaggttgcactgagtcaagatcgtgccactgcactccagccttggtgacagagtgagactctatctcaacaaataaacaaacaaacaaaaaacacacaaa

SEQ ID NO: 258777 - DNA, 201 bp, Homo sapiens
agtctcgctctgtcacccaggctggagtgcagtggcacaatctcagctcaccgcaacctccgcctcccggattcaagcaattctccctgcctcagcctccygagtagctgggattacaggtgcccaccaccacgccctgccaatttttgtatttttagtagagacggggtttcacaatgttggcaaggctggtcttgaact

SEQ ID NO: 258778 - DNA, 201 bp, Homo sapiens
cactgtaaccttgaaatcctgggctcaagtgatcctcccacctcagccctccagagaggctgggactataaacacacaccaccatgcctggctatattttgtgtgtgtgtgtgtgtgtgtgtgtgtgtgtgtgtgtgtcaggggggtgggtaaagatggggtcttgccatgttgcccaggctggtcttgaacctcctggcc

SEQ ID NO: 258779 - DNA, 201 bp, Homo sapiens
agccaggaagacccccgggcctcccgaaggacatatccgtggcagagctgcccagggagctgagcctcaccaaggaggaggaattgctgttcctccagttkccagacaccctccctggccacccacctatccaggacatcaagcccatcaaggcagaggtacagggcaaggacagagaggtggtactcatcaagcaggaga

SEQ ID NO: 258780 - DNA, 201 bp, Homo sapiens
aattatcctttttttcttttttcacagttttattgtggcataatagacatacaataaacggtatgaatctaaagtttacaattgtataactttggacataygtgtacacccatgaaaccatcactatggacatatccactgctcccatggccttttctaatcatgccttcctgctccttctcatccccttttggattgttt

SEQ ID NO: 258781 - DNA, 201 bp, Homo sapiens
aagtttatttttgtatgtagtcataatacttgtaaggtaaccttttcactgtattgctttttaaactaaggtttaaatagttcattgtaataagagttacmgtttgtgcttataaggctgcatctccaggagtaagtactaaatctgtgttagatttctttgctgcttttttttgtttgtctttttttttttcttttactg

SEQ ID NO: 258782 - DNA, 201 bp, Homo sapiens
tgtccacactgtagctatgtaagagaatatccttattctcagaaaagatacactgaagttttcagaagtaaaaagacattgtaaatgtaacttcctctcamatagttcagggaaataaaattgtatgcagagaaagagtacatgcaaatggtgcaaaatgttaacaatattgtgcacctgggtagatgatatgcagatgct

SEQ ID NO: 258783 - DNA, 201 bp, Homo sapiens
agctgtaaaaaagaatgaagaaaatctctaccaattgatgtataatgattaccaggagattttggtctctgactacaggagtctcgctctgtcacccaggytggagtgcagtggcgtgatctcggctcactgcaacctctgcctcctgggttcaagcgattcttctgcctcagcctcccaagtggctgggattacaggcac

SEQ ID NO: 258784 - DNA, 201 bp, Homo sapiens
aattttattcattgtagcattgtttatatttccaaaacattggaaactatgtaaatgcccacacataggagatagattaaactacagtgtatttatacatrgagatactatgtagctgtaaaaaagaatgaagaaaatctctaccaattgatgtataatgattaccaggagattttggtctctgactacaggagtctcgct

SEQ ID NO: 258785 - DNA, 201 bp, Homo sapiens
acttagtggtttaaaaagtgagtgagaggttatagtcaggttgggactatgtattaatcctttatttttttaatttactgtactgtactatgtattattgktaatatcctttatttcagattgacatatacccttaaatattcttaagatcatatccttaaggtcttaatagtctctgaataaatattggtataagctgct

SEQ ID NO: 258786 - DNA, 201 bp, Homo sapiens
tatttttgcttttgttgcctgtgcttttgttccatatttatgaaatcattgctaaatccaatgtcctgaagctgtcccccatatttgaaaataatatatawtattaagttttattttttaaacaaagctttttacctttgagacttgatttttttttgaagttaacaaaatatcctggaaattactttgtatagaaggagt

SEQ ID NO: 258787 - DNA, 201 bp, Homo sapiens
tgactatgtatacatgcatacttcccagctctgttcattaacatggtctagaagcaaagagcacagctgccacccagatcttggtctctaataccattctrtgctaaaaagaaccagttatcctcagataaatggctgattccagggcatagtagagcccagaacattatgccagaacataaagaagggatcaaaaataat

SEQ ID NO: 258788 - DNA, 201 bp, Homo sapiens
ttaatcccatttacagatgggaaccagagtgttgggagacaggtcatggatttctcatgttcctgcacagtctaagtgttctaaggagaggcatttacagkgccaattgtataaggagaaatttcaggacagtaaaactactgacatgtccctccctggagacgtccaaggataataaaaataaaagaccttctcttcccc

SEQ ID NO: 258789 - DNA, 201 bp, Homo sapiens
gaatcatgactcagaaaatgtatgaagatgagacaaggtagttgcctattggaatcttaaatgatacttttagtagagatcatgtaaatctgtgttgatgktaaagaaaagtgaacataggctgagcgcagtggctcatgcctgtaatcccagcacttcgggaggctgaggcaggcggatcagctgagatcaggagttcga

SEQ ID NO: 258790 - DNA, 201 bp, Homo sapiens
tgctcatatcctgatatgtgtgtcctagtgaaaagaaaagcatttccggattctcattttttccctattccttgatataggcatatttcatgctgttagtrtaacaatttagtttccttctatcagttctctccataaagctggaatgatattattgacctatgaagcaaaataattaaatttaaggtctgtttaaaagca

SEQ ID NO: 258791 - DNA, 201 bp, Homo sapiens
gaaaagatgagatttgaatctagctggtctaatttatcctgaagttcaagatagcaatacaagaattatgaacatataaatggagtgagtggatatgatcrctcaagataaatctcttggccgggcgcagtggctcacacctgtaatcccagcactttgggagactgaggcgggcagatcacgtggtcaggagatcaagac

SEQ ID NO: 258792 - DNA, 201 bp, Homo sapiens
gaaatccagattaaaattatactgaaatatttctaacccatcggactggcaaaaattcaaaagctggacagtgtactatattggtgaagttgtggggaaaygggcactcttacattactagtagaaatagaaaatccttaaacctctatgaaggagaatcactaataaaactatgtatgcatatagttactcattaaccta

SEQ ID NO: 258793 - DNA, 201 bp, Homo sapiens
ctgggattacaagcatgagccaccgcgagtggtctttatcattattatcgctgttttacagatgagaaaactgaggcacagagacctgcttatggtgacasaagtaggaattgaaaagatgagatttgaatctagctggtctaatttatcctgaagttcaagatagcaatacaagaattatgaacatataaatggagtgag

SEQ ID NO: 258794 - DNA, 201 bp, Homo sapiens
atagtcacaaatgatcttaattaaggagagaatgtggagggaccttttgaaaaaatatagcagagcacgcagaaaactctttaataagagctcaaatttgraggataacgagatagctgcctctgcctttgccggtgcagtgagagcagcttcaggaatcttatggcctctgaatattttggcatcttcagcctaccaaaa

SEQ ID NO: 258795 - DNA, 201 bp, Homo sapiens
aaataatctcttagtgaaggcctgaggggtccttataggtgtaatatggatggccatggagctgctatggcttcaggctttatatatatgaggtattgctrtctattcacagtattctctgacctttaaatttatgtggcttaaaatctattttcaatgcataaacatttgtatatttttccaggtgaacaatgtactacc

SEQ ID NO: 258796 - DNA, 201 bp, Homo sapiens
gagactgaggcaggagaattgcttaaacccaggaggcgaaggttgcagtgagctgagatcgtgccattgctctccagcctgggcaacaagagcaaaactcygtctcaaaaataaaaaaaagaaagaaggaaagaaatgagctattaagccaagaaaagacatgagggaaccttaaatgcatgttgctaaatgaaagaaggc

SEQ ID NO: 258797 - DNA, 201 bp, Homo sapiens
ctgcactgttttgcattcctaccggcagtgcataagtgttccagtttctctacgtctttgccaaagcttattttttattttttaaattatagccatatgartgggtgtgaaatgatgtctcattgtgattttgatttgcatttttctattgaaaacttttgatgttagcatcttttcatatgcttattggatatttgtata

SEQ ID NO: 258798 - DNA, 201 bp, Homo sapiens
taagagttttgtagtttaaggtcttagatttaggcatttgatcaattttgagttaatttttgtataaggtatgaaataagggttcaactttattcttttgygtgtggaaatccaattgtctcaacatcatttgttgaagagactattcttttccccactgaatgatcttgatactcttgacaaaatcaggtgaccatagat

SEQ ID NO: 258799 - DNA, 201 bp, Homo sapiens
cctttttcaaaagaacctgggggttttttgtttgtttatttctgatgtgtgtatatatgtttagaaatatataaattaaatcctaaatttttgtgtaaatrtccttgagaattgtgcaacaaaattgcctcaatgtcaactgctctcagtattttcaatatttccttcagtatatactaacttctttcttagtgaagcatt

SEQ ID NO: 258800 - DNA, 201 bp, Homo sapiens
catctccccaattgtagccagtgtctttgcagcagctgctctagacagcctgctgctgccatcaatgacgctgctgggagctcgagtaacttctttgtttyacatgttttactagcagctggtcctaagtggctagctgaagttctattttatatttggaaggttttaatctttaactttgattttcaaataagtacttga

SEQ ID NO: 258801 - DNA, 201 bp, Homo sapiens
tgggttcacaccattctccttgccttagcctcccaagtagctgggactgcacgtgcctgccaccatgcccggctaattttttgtatttttagtagagacgrggtttcaccatgttagccaggatggtctcgatctcctgacctcatgatccacacgctttggcctcccaaagttctgggattacaggcatgagccaccaca

SEQ ID NO: 258802 - DNA, 201 bp, Homo sapiens
acccctcccccagcctcactgcttccctgcagttgatctgatagcggactgctgtgctagcagtgagcaaggttccatgggcatgggaccctccgagccakgcgtgggatataatctcctggtgtgccgtttgctaaggccattggaaaagcgcagtattagggtgagagtgtcctgattttccaggtaccgtctgtcatg

SEQ ID NO: 258803 - DNA, 201 bp, Homo sapiens
aagtttctattgccttttattcagctatgccctgcccccagagatggagtctacagaggcaggcaggcctccttgagctgctgtgggctctacctagttcragcttcctggccgctttgtttacctactcaagcctcagcaatggcgggcacccctcccccagcctcactgcttccctgcagttgatctgatagcggactg

SEQ ID NO: 258804 - DNA, 201 bp, Homo sapiens
ccatggttttcagctccatcaggtcatttaaggtcttatccatgctgtttattctagttagcctgtcgtctaatcttttttgaaggtttttagcttctttkagatgggttcgaacatcctcctttagctcggagaagtttgttattacctatcttttgaagccttcttctctcaactcgtcaaagtcattctccatccagc

SEQ ID NO: 258805 - DNA, 201 bp, Homo sapiens
ggggttttcatttcctttcatatatcccttatatatgtagtcctagtaggtgtatacatatgtatatcatgaatagttatatatataataattgcaaatayatcctgtttatttaatgggttatgtttctttaagttccaatacaatattttctaaattagaaaggtattacaattttaaaaaatgtgccaggacaaaatt

SEQ ID NO: 258806 - DNA, 201 bp, Homo sapiens
tcgtatttattgaaatctgtaaacttccttttgaaatacaatgttatttccacaaagacactgcaggttttgcaaatctgtaattccctttgatttcagarcattccgaaatgatgtgtagtctagtctagttttttcttagcatatggtcaaaccataaattaagtgggctgccccatactttctggttctatgaggtca

SEQ ID NO: 258807 - DNA, 201 bp, Homo sapiens
agagactgatctaaaagtaatcaaggatgatcatgtcttgggagtatcctgtttctcagttgctctggacagaaagcacctagaaggttgagataattcartgcaaaatcagagatttccccccatgtaatcaacctcagaacttgagttggtcctaacagtagactcaaccccttggaaaagactaggcagagcaatttt

SEQ ID NO: 258808 - DNA, 201 bp, Homo sapiens
gaacttttatgaaagtgtagattcaacttgcagacaactcatagttttagcatttatgcactatattgtatctagccatatttgggtgaatggagttttayagtagtattaaatatttatacttacgtgcaattttgtacagcataaagtgatcagcttttggtgaaattaataaggcaaatgatattatttttgagattt

SEQ ID NO: 258809 - DNA, 201 bp, Homo sapiens
aacaaagtagaataaatggccagagatgttattgtaatcttatggttgaatgttatttcttttttctaggtcattgtttaaaatctggacatcatagaaayagataatgcagagagaaaattctttcataattccaccacatctcaatctttgttattagttttaaaatatgtccttctagacatattttattgtaaaaag

SEQ ID NO: 258810 - DNA, 201 bp, Homo sapiens
ttaagctttgccaaactgatatatttaaaatggtattttattgtttcaatttgcagttttagaggtaatgttgtaattctatatcttttcatattatagtscatttatattttcctcttctcttaactccttgtttgcctagctttctttttcttttggttggttcaatttttccaactaagttttttcatgttgtttttt

SEQ ID NO: 258811 - DNA, 201 bp, Homo sapiens
ggcatgggcaaagacttcatgactaaaacacccaatgcaattgcagcaaaagccaaaattgacaaatgggatctaattaaactaaagagcttctacacagmgaaagaaactatcatcagagtgaacaggcagcatacagaatgggagaaaatttttgcaatctatccatctgacaaaggtctaatatccagaatctacagg

SEQ ID NO: 258812 - DNA, 201 bp, Homo sapiens
tgttccttcctaaaattttgttaatttagtcttttatgtgtccttatatttataaatattagttttgtggctaaaatgtgtacatttttccaagttatagyattgagaagcatagctagtagcatttcacccaacagaaaaaattcctttagataaaagccaaatcacagttggcctcattctacatactgttctacaaat

SEQ ID NO: 258813 - DNA, 201 bp, Homo sapiens
gtcacgtctccctacctcttcatacctccttggttttattttattatttttattttttgaggcacggtcttgccctgttgcccttgctggagtgtggtggyatgaacacagttcactgcaacgtcaacctctgggcttaagtgatcctaccacctcagcctcctgagcagctgggagtagtcccacttgtagtccctacag

SEQ ID NO: 258814 - DNA, 201 bp, Homo sapiens
gcttcatgcagcatttggctagcttgctcttccactctggcttacccttccaccctcacaagacaccaaatgccaacagcttgatcttgaacttcaaagckgccataattgtgagacaataaatttctgttctttatgtattacccagtctcaagtattctgttgtagcagcacagactatgagagagactatggaaaagt

SEQ ID NO: 258815 - DNA, 201 bp, Homo sapiens
gatctgtacttatactagcagaataaatgcatgatttttttttctgaaaaatcaacttaaaagaagtagtaaaacaattataaaataatttaagccaggcrcagtggctcatacctgtaatctcagcactttgggaggccaaggcaggaagattacttgagcctaggagttcaaaatgagcctgggcaacatagtgagact

SEQ ID NO: 258816 - DNA, 201 bp, Homo sapiens
ttaatagccaagcacttttaatggtatttccaagtagatcaagatatcaagattgtgacttgttaaatatatgaatttaatggctaagggtttttcagacyttttctcactctaaattaggctaccactagaacataattagaaccaaaaccaatgtaaagatacagtgatctgtacttatactagcagaataaatgcatg

SEQ ID NO: 258817 - DNA, 201 bp, Homo sapiens
cctcaagcaaccctcctgcctctgcctcccaaagtgctgggattacagttgtgagccactgtgcacagcctttcaccaattgtcaaaaacttattcatgtmtgtgattgtagattctttgaccaacatctctccatccttctacccctctaattacccaagcctctgataaacaccattttactttctccttctatgagat

SEQ ID NO: 258818 - DNA, 201 bp, Homo sapiens
gttaacaagttattctccaggttcctccatgttatcacaaatgagaagattttgttccttttttttgtggatgaatagtattccattgtgtatatatatcscattttatttattcattcattcattgcctgataaactcttaggttgattacatatcttggctgttgtgaataatgaagcagtaaatatggacgtgcagat

SEQ ID NO: 258819 - DNA, 201 bp, Homo sapiens
aattaaaaattaaaaatgtttttaagaaagaatgaaatgagattaaacaaactcccatttgtccctatccacattttatttggtggctcatgatgtcacgyaggaaaaccatgacctattcaaaagcccctatttgatgaatgaagaaagtaaggcccaaagaaaggtaagatgagttgtccaagggagttaattgcaaat

SEQ ID NO: 258820 - DNA, 201 bp, Homo sapiens
tccattgtgtatatatatcgcattttatttattcattcattcattgcctgataaactcttaggttgattacatatcttggctgttgtgaataatgaagcartaaatatggacgtgcagatatatcttaatcatttccactgaatatgtacccagaagtgggattgctggatcacatgttgtaccgttaatttcttaaggaa

SEQ ID NO: 258821 - DNA, 201 bp, Homo sapiens
gactatgatgaatagaaatggtgaaagtatacatccttgtcttgttccagatttcagaggaaaagctttcaatttttccccattcagaataatagctttgkatttttcatatatggcctttattgtgctgagctgcattccttctatacccaatttgttgataatttctaacatgaaagaatgttgaattttgtcaaatgc

SEQ ID NO: 258822 - DNA, 201 bp, Homo sapiens
tgtacttcttggatctgactaaagactaaaaatggaaggaaacacaagtagaaattataaagtcaggatcaggccagtgtggtagctcatgcctgtaatcygaaaaccttgggaggctgaggtgggaggatcacttgaggccagaagttggagaccagcctgggcaacctagtgaggccccatctctaccccaaaaaaaaa

SEQ ID NO: 258823 - DNA, 201 bp, Homo sapiens
acctcctggattcaagtgattcttccgcctcagcctccctagtagctgggattacaggcaccaaccaccatgcctggctaatttttgtatttttagtagaraggggtttcaccatgttggccagggtggtcttgaactcctgacttcaagttatttacttggcctcccaaaattaatgtgctattgaatttggtttgctgg

SEQ ID NO: 258824 - DNA, 201 bp, Homo sapiens
caggaaaaatatttagatttagggatttgtgagaatttggtcagctctgggataataattctccaccaggggaaattttgccctccaggggacatttggcrtggtctagaaagatatttttggtagggagagctattggcacctagtggatggaattcaggggtgctgctaaacatgctacataggacaacccccacaaca

SEQ ID NO: 258825 - DNA, 201 bp, Homo sapiens
ctgtaatctgaaaaccttgggaggctgaggtgggaggatcacttgaggccagaagttggagaccagcctgggcaacctagtgaggccccatctctaccccmaaaaaaaaagaaaaagaaacttatttatttaatttcctctctttaaaggtatcatatgcaaaacagaaggtttgggggttttggggttttttgtttgttt

SEQ ID NO: 258826 - DNA, 201 bp, Homo sapiens
ctttacattccttctgtcatgtgaggacacagtgttcctcccctctggaggatgcagcaacaaggttccatgttagaagcagagaaaagcctcgccagacaccaatcttgctggtgccttaaccgtggatttcccagcctccaggaatgtgagaaatatatttctattgtttacaaattaccccaaacaaaataagaaaaa

SEQ ID NO: 258827 - DNA, 201 bp, Homo sapiens
atagaaaaaggaaaaaaaaactaaatatcttttcactttccattctaacagttacttggagtctataaaaaatgagatgacaaatcaaaaaattgaaatcrtctattttttcagctattttaaaagaaaaatgcctagtgggctgggaatacacaagaaatttaaatttgtgattgagaataagaaatgcatttgtggttt

SEQ ID NO: 258828 - DNA, 201 bp, Homo sapiens
ctgcctgccttggcctcccaaagtgctgggattataagcatgagccactgcgcccagctaatgatttttaataactttatataatactgataaatcactcttttttttttttttttttaagacagagtcttgctctgtcacccaggctagagtgcagtggctcgatctcggctcactgcaagctctgcctcctgggttcac

SEQ ID NO: 258829 - DNA, 201 bp, Homo sapiens
tttattgcattttacaggtcaatattttttgtagttgtagacgtctgtaattttgcactgttaattttaatgtaatggacatattagaaattaggttttcwatatgcaggggaaatgctgttaatttacaattgaagagagttatgaaataataataaatagaaaaagtaaatagagaaaggaaagtacagtcatccctta

SEQ ID NO: 258830 - DNA, 201 bp, Homo sapiens
aatatataaaatagcaagtaagccatgtaaaatattttcaatattcttagccattagagaagtgcaaattaaaactataagatactgctgcatacatatgyggatagcgaaagtaaaaactggtgagaatacagaatgaatggatttctcatctgttgctgataggaaaatgacacagccactctggaaaacagtttggca

SEQ ID NO: 258831 - DNA, 201 bp, Homo sapiens
tttcaatattcttagccattagagaagtgcaaattaaaactataagatactgctgcatacatatgtggatagcgaaagtaaaaactggtgagaatacagartgaatggatttctcatctgttgctgataggaaaatgacacagccactctggaaaacagtttggcatttttaataaaattaaagataaatattccatatga

SEQ ID NO: 258832 - DNA, 201 bp, Homo sapiens
gtggctcgcacctgtaatcctagtactttgggaggacaaggtgggcggatcacttgaggtgaggagttggtgaccagcctggccaacgtggtgaaacttcrtttctacttaaaatacgaaaattagccgggcgtgggggtgcatgcctgtagtcccagctattttggggactgaggcacgagaattgcttgaacccagcag

SEQ ID NO: 258833 - DNA, 201 bp, Homo sapiens
tatacagtataacatgtctagccaactttgggtgaatggaacttttatgaaagtgtagattcaacttgcagacaactcatagttttagcatttatgcactrtattgtatctagccatatttgggtgaatggagttttacagtagtattaaatatttatacttacgtgcaattttgtacagcataaagtgatcagcttttgg

SEQ ID NO: 258834 - DNA, 201 bp, Homo sapiens
tacttgttgactatgaaataagacagtgtattctgatgaaaaagtatatttaacttgacaattacagtcttctatgtttcaatatatagttgttcaatccygaattgtgagccaacttgcaaacaactcatagttgtaatgattatacagtataacatgtctagccaactttgggtgaatggaacttttatgaaagtgtag

SEQ ID NO: 258835 - DNA, 201 bp, Homo sapiens
aattatcttttatttaccctgcaaattatttatctctctcaaagcatatgttagattcactattgtgaaaatagaacagaaatcattatctttctatgggyaacataatttgtattatttatcttcaggtctacctatttttggatacattatgcataggtgcttgccaaccaagcgcagaattctatattaaatcagttt

SEQ ID NO: 258836 - DNA, 201 bp, Homo sapiens
tatttatatttatttaaaaatcaataacattagttttgaagaattaattaaaatgtaaattttaaactttgcaaaaaatattggtaattatctattgaaayatatgctaagtttgactataatattacttgcttattctttggttgttttaggtccctcatagctaatcttgctgctgccaattgttataaaaaggaaaaa

SEQ ID NO: 258837 - DNA, 201 bp, Homo sapiens
gtgtgtattttcctcagaaccattctgaagtatttattccttattcaagaaattaagcattgatactgttttctgatgtgtgatcaagattccagatgtcrcagttattctggtagtgtccttgatagctgtttaattttattctcagtccaggatccaataagaatcacacattacatgtattagtactatttctttaat

SEQ ID NO: 258838 - DNA, 201 bp, Homo sapiens
atagataaataaaagtaagttatagaataacacagaaattttctgctaaatttatactttcactaaatttaataacaatagaaattctctgttaaatttayactttcactaattgtagaataaagtattttaagttaggcatttatactgagacattttatgatattaactgcttcatgttatttactcattttgataaat

SEQ ID NO: 258839 - DNA, 201 bp, Homo sapiens
tatttatttgtagtggaaatatttcaattcatttaaatcctgattatggagtagttagtaaatcaggtttaagcctgacagtgagttgatatagctcttayttcagactgtagtttgaacatgtagactctctgattataactaggctaaattatataataatgactttattttcactgaacaaagtttgctattattttg

SEQ ID NO: 258840 - DNA, 201 bp, Homo sapiens
ctgttttcagtttgagatttttttatttttaattttttttaaagatgacatcccactgtgttgtccaggctggagtgcggtggctattctcaggcatgatyatagcacaactacatccttgaattcctgggctaaagaggtcctcctgcctcagccactcaagtagctgggactataggcttgcacctccacacctgactt

SEQ ID NO: 258841 - DNA, 201 bp, Homo sapiens
atcattgtcagttatattgtcctaaatattgcatttaggtaataaaaaggaaatcttccttgaaggtaaagttaatattaatagaaatctttccatatgtygttaaagactcttgttatgaagtttaatatgccatttatttaggccttatttaaattcagttgtaaattttttccttctggctccttaccttagtgaact

SEQ ID NO: 258842 - DNA, 201 bp, Homo sapiens
ttatgaaaatcttgtgttttgccctgtctcacttggtggtattgtaatcatctgagaatctatcctataagttatgtgatatatgctattttccttatcartctatttcagttttgatttcctcatcatcctttgcagtctgcttgttgctgtttctcagttttgacatttaatttcttttagttgtgctttacagttttt

SEQ ID NO: 258843 - DNA, 201 bp, Homo sapiens
tccctctgccttgacctatttttacatcatgttcagtgttactcacccatcttactctcactaatttattaagtctcaaatattttctcagagattctttmttcacccatgcctccatatctcagttagatctcccttaaaaatctcttctgtgttactagttcctagcatatagtggatgtgtgataagtgaaaggatgg

SEQ ID NO: 258844 - DNA, 201 bp, Homo sapiens
aaggtgatattaaaacattgttatataaacataagagtatatactatgtgattccatttgtataaagtcaatggaaacaggcctcaagttacttttgatgrggattagtaattgcaaggaggggagggaatttttcaccataatgaaccactccataaattagtaacataaaaaacagcagttttattttctcatgattct

SEQ ID NO: 258845 - DNA, 201 bp, Homo sapiens
ctggagtgcaggggtgtgatctctgctcactgcaacctctgcctcccaggttcaggtgattcttttgcctcagcctcctgagcagctgagactacaggcaygcaccatcatgcctaacaaatttttgtatttttagtagagatggggtttcaccatgttggccgggctggtcacgaactgctgacctcaagtgatccgccc

SEQ ID NO: 258846 - DNA, 201 bp, Homo sapiens
acctgtaatcccaatactttgggtggccaaggtagaagaattgtatgaggccagggattggagaccaacctgggcaacacagcaagaccccatctctaccaaaaaaaaaaaaaaaaattagctgggcgcagtggcacatgcctgtagtcctagctactcagaaggctgaggcaaggaggttcgtggagcccaggagttcaa

SEQ ID NO: 258847 - DNA, 201 bp, Homo sapiens
ggtttcaaacttctgggctcaagcaatcctcctgccttggcttcccaaagtactggtattacaggtatgagccagtgcacctgacctcaataattttttargagaaaaagtttgagaacccctcctctaatgtaatacccttagttgcaatactctgatctcatggttactgatatcatctttaccatattccctcttata

SEQ ID NO: 258848 - DNA, 201 bp, Homo sapiens
ttacatttattggatcatactgtggtctttcaaaacttattctcctgagtttaatttttctacctgatcactctctgaattcttataaaatcttaagttcytttttttttttttttttttttttaagacagggtctcactcagtcactatcacccaggctggagtgcagtagcatgatcatagctcactgtagcctcaaac

SEQ ID NO: 258849 - DNA, 201 bp, Homo sapiens
ctgacaagactagtctgcctttctcaaatatctattatttttctaggctcggttgcttttcagcatataacagttgcttataaagaaagaatcaggctctracatgttttcacgtgggattaggggaaagaagggaacgttaattgagtgctagacattatactatgtgctctatatatgttatctcttttaaccctccca

SEQ ID NO: 258850 - DNA, 201 bp, Homo sapiens
atggaaaacaaaagtcccctaatgcacttagtatgaatgccttaataagatcctttcctgggcaatatatactagtgcagcgtgagggtggtagagagagccagaggaaagcttgcatggatggttctgggtatccagggacaagcatggaagtgcttgaaactcagggaaagtgggaagggccttaggaaaacaaggggc

SEQ ID NO: 258851 - DNA, 201 bp, Homo sapiens
aattgaactgtggactatagattagattaaaatgttgttttctgtgtttatcaactataacctggctaacagaatatcatcactcttaggaaatacacacygaagtattaaggggtaaaaggcataatatataccacaaatgctaaataaaactttgaaagaataaataatgttatatatatgggaggaatgatcaactaa

SEQ ID NO: 258852 - DNA, 201 bp, Homo sapiens
caatcatagctcactgtagcctcaaacacctgggctcaagggattctcctgcttccagcctcccaggtagctaggactataggtgcatgccaccatggctsgctaatttttttatttttattttttgtagagatgggggtctcaccatgttgcccaggctggtctcagtctcctggcttcaagcagtccttctgccttggc

SEQ ID NO: 258853 - DNA, 201 bp, Homo sapiens
cctgcttccagcctcccaggtagctaggactataggtgcatgccaccatggctcgctaatttttttatttttattttttgtagagatgggggtctcaccaygttgcccaggctggtctcagtctcctggcttcaagcagtccttctgccttggccttctaaagtgctgggattacaggggtgagccactgccctggcctaa

SEQ ID NO: 258854 - DNA, 201 bp, Homo sapiens
gaccaagttatgaaggctctgctcttatgaatggggttagcacacttgtgaaaggactcaaggttgaagggagagctctcctgcctttacattccttctgycatgtgaggacacagtgttcctcccctctggaggatgcagcaacaaggttccatgttagaagcagagaaaagcctcgccagacaccaatcttgctggtgc

SEQ ID NO: 258855 - DNA, 201 bp, Homo sapiens
ccctccttgactattttgggtccattgcaattccaagtgaattttagagtcagtttgtcaatttacacaatgagtatagcttggattctgatagggattgygttgaatctctacatccataatgggtaatattgccaatcttaataaaattttccatgaatgtgggatgtttttccatttatttggatcatctttaatttg

SEQ ID NO: 258856 - DNA, 201 bp, Homo sapiens
caattctcttgtctcagcctcctgagtagctgggactacaggcacacgctaccatgaccggcaaatttttgtatttttagtagagacggggtttcaccatwttggtcaggctggtttcaaactcctgacctcaagtgatccacccgcctcggcctcccaaagtgctgggattacaggcatgagacactgcgcccagccgat

SEQ ID NO: 258857 - DNA, 201 bp, Homo sapiens
cttagtacatagcctggttcacagtatatgattactatatatttaatgaatgatttacatattatttgtgaagtccaaaatacttaacgttgtagttgttscatcagttttgaactgctgaataagtgtgacattacagatgattcactacagaagaatattgaagatcttcaaagcattgttaaggtgatctcctttcag

SEQ ID NO: 258858 - DNA, 201 bp, Homo sapiens
ggtttcaccatgttggccagggtggtctcgaactcctgacctctggtgatctgcccacctcggtctcccaaagtgctgggattacaggcatgagccaccgyacccagcatagataagtggtatattgctatggtttgaatgatggtatcctctccaaaaattcatgttgaaacttatccccagtgtagcagtataagaagt

SEQ ID NO: 258859 - DNA, 201 bp, Homo sapiens
ggtccattgcaattccaagtgaattttagagtcagtttgtcaatttacacaatgagtatagcttggattctgatagggattgtgttgaatctctacatccrtaatgggtaatattgccaatcttaataaaattttccatgaatgtgggatgtttttccatttatttggatcatctttaatttgttgcaacaatgttttgta

SEQ ID NO: 258860 - DNA, 201 bp, Homo sapiens
gtttcgccatgttggccaggctggtcttgaattcctgacctcaagcgatccacccacctcagcctcccaaagtgctgggattatcacaggcttgagccacygtgcccagcccctacattttattacgaaaagttttaaacatatgttatgtgttcacccatatatttaccaccaaggttttatcattaacatattactgca

SEQ ID NO: 258861 - DNA, 201 bp, Homo sapiens
attgatcttgtatcctacagcctttctgaacttacttagctctaatattttttagtgggttctttatgattttctataaacaaaaccatgtcatctgtgamtatagttgtgtttccttctttctttctaatttggaagcctttaactattttcccccttccttaattgctgtgactagtagttgtaatgtaacagtgaaca

SEQ ID NO: 258862 - DNA, 201 bp, Homo sapiens
gaggattgcttgagaccaggaggtccaggctgcagtgagctatgatccgtgccactgtgctccagcctgggtgacagaatgagaccctgttaaaagaatcttttttttttttttttttggtaagaatgagctaagaactggatatctgtaaagctaatagaaaaaaatcctgtgaagcaaaaagtcaaaattgaaataagc

SEQ ID NO: 258863 - DNA, 201 bp, Homo sapiens
tgtgactagtagttgtaatgtaacagtgaacagaagtggcaagaagagatgtccctagtcttgtttctcatatagggggaaaatatctaatcattcaccaytaagtttgatgtttctctgcagttttcttagatgccctttatcagattgaggaagttactttctatttctgtttttttttagcgtttttatcttgaaaca

SEQ ID NO: 258864 - DNA, 201 bp, Homo sapiens
aggaggcagaggaggaactggttttgctgtcttaagggtggcagaggtggaagaaaatactggtgtaagtggatttgtgaagttcaaaccagtgttgttcyggagtcaattgtagtggattttgccaaatgctttttgtttgtttgttttttgagacggagtttcgctcttgttgcccaggttagcgtgcaatggcatgat

SEQ ID NO: 258865 - DNA, 201 bp, Homo sapiens
gctcaggttggtctcaaactcctgacctcaagcagtcctcctgcctctgctcccaaagtgttatgattacaggcatgatctactgcacccagccagtaacttttttttttttttttgagacggagtctcactctgttgccaggctggagtacagtggcgcgatcttggctcactgcaatctccgcctcccaggttcaagtg

SEQ ID NO: 258866 - DNA, 201 bp, Homo sapiens
ctgtctcaaaaaaaaaaaaaaaaaaaaaaaaaaaaaaaaaaaagatggccgaataggaagagctccagtctgcagctcccagcaagaccaacacagaaggygggtgatttctgcatttccaactaaggtacccagttcatctcattgggactaattaggcagtggttgcagcccacagagggtgagcagaagcagggtggg

SEQ ID NO: 258867 - DNA, 201 bp, Homo sapiens
atctattttcaatgcataaacatttgtatatttttccaggtgaacaatgtactacctagatgtataataatttaaatttagtgtaaaatgagattttttasaacaaattatatatttccaaaaactttaaaatgtttaaactctacataggcatatggtggtctactatatataaaaggtttctgggaactatttaagaag

SEQ ID NO: 258868 - DNA, 201 bp, Homo sapiens
tgcaaggagctgggggacctccttcccccagccaagggaagccatgagggactgtgctatctggcccagataccatgattttcctatggtttttgcaatcygcagatcaggagattccgtcgtgtgcctacaccaccagggccttgggtttcaaacacaaaactgggcggctgtttaggcagacacttagctagttgcagg

SEQ ID NO: 258869 - DNA, 201 bp, Homo sapiens
ttttggactcttggtaagcccaaatcttgttctaaaaagagcagacttttttgttttgttttgttttgtttgagatagtgtctcactctctctcccattckggagtgcagtggagcgatatggctcactgcagccacaacctcccaggcttgggtgatcctcccacctcagcctcctgagtaagtagctgagactacatgt

SEQ ID NO: 258870 - DNA, 201 bp, Homo sapiens
agactttctcttactgtcaaggctgaagaatgagacaggtgcttagatcatatattggtctgacccaatatgacatttctgctgctgttatacaatactcwtgtgtttttttttgcctgtgttctaggttttctgtctcaactggtctctgacaagcctctgactgaatgtatccgtgctggccactatgcagcaagcatc

SEQ ID NO: 258871 - DNA, 201 bp, Homo sapiens
cactgcaacattcacctctcaggttcaagcaattctcctgcctcagcctcccgagtagctgggactacaagtgcacaccaccacacctggctaaatttgtrtatgtgtgtgtttttagtacagacggggtttcactgtgttagccagtatggtctcgatctcctgatctcgtgatctacctgcctcaacctcccaaagtgc

SEQ ID NO: 258872 - DNA, 201 bp, Homo sapiens
gttagaatgttttctctcactaattagtctgtatttatgcctttaataattatctgttcattttctagcagcaaatgtttgttctcagattaaattggagraggaaggaaaaaaaagatagctacccacagtatagtatccacagacgatatagagttatgtccctctttgtgtggttcttgagtataatagacataacag

SEQ ID NO: 258873 - DNA, 201 bp, Homo sapiens
gagtaatagatgtgttcccattgaggttgtggttgcagtactttatacatacgtcaagttttatctaattaaacacttttagtttgtgcagataattgtaygtcagttatacctcagtaaagctattaaaatgaatatatactttgattccatttatatgtttaaaagtaggaaacattattctaaagccattaagttcca

SEQ ID NO: 258874 - DNA, 201 bp, Homo sapiens
ttagctgggcatggtggcacacgcctgtaattccagctacttgggaggctgaggcaggagaacccgggaggctgacctgaggcaggagaacccaggaggcrgaggttgcgatgagccgagatcatgccactgcactccagtctgggcgacagagcaagactctgtctcaaaaaaaaaaaaaaaaaaaaagctattagaact

SEQ ID NO: 258875 - DNA, 201 bp, Homo sapiens
ttgaggtcaagagttctagaccagtgtggccaacatggcaaaaccgcgtctctactaaaaatacaaaaattagctgggcatggtggcacacgcctgtaatyccagctacttgggaggctgaggcaggagaacccgggaggctgacctgaggcaggagaacccaggaggcggaggttgcgatgagccgagatcatgccactg

SEQ ID NO: 258876 - DNA, 201 bp, Homo sapiens
tctgttccattgatctatatatctgttttcataccagtaccatgctgttttggttactgtaggcttatagtatagtttgaagtcaggttagcatgatgccyccagctttgttctttttgcttaggattgtcttggctatacgggctcttttttggttccatatgaaatttaattttctctaattctgtgaagaaagtcaat

SEQ ID NO: 258877 - DNA, 201 bp, Homo sapiens
tggaaaacaaaagtcccctaatgcacttagtatgaatgccttaataagatcctttcctgggcaatatatactagtgcagcgtgagggtggtagagagagccagaggaaagcttgcatggatggttctgggtatccagggacaagcatggaagtgcttgaaactcagggaaagtgggaagggccttaggaaaacaaggggca

SEQ ID NO: 258878 - DNA, 201 bp, Homo sapiens
ataaagaactcctgtaaaggtatctatataagtaaatataaaaaccagtattgctggtttgtaactcttctttcattcatgaaaggaaaatgcctaggccrggcgccgtggctcacacctgtaatcccagcactttgggaggccaaggcaggcagatcatgaggtcaggagatcaagaccatcctggccaaaatggtgaaa

SEQ ID NO: 258879 - DNA, 201 bp, Homo sapiens
tcaaaaaacaaaaaaagaaataaaataagaaataatgaagttttctctagttttgttaaagtagtatataaaaattagattattagaaaatacacttaatygctagcttagaagtcttttaaattctactgtcagccgggcacagtgtctcacccctgtatttccaacactttaggaggccaaggtgggaggatcacttgg

SEQ ID NO: 258880 - DNA, 201 bp, Homo sapiens; identical to SEQ ID NO: 51689

SEQ ID NO: 258881 - DNA, 201 bp, Homo sapiens
tcatcctaggtactcaggaggctgaggtgggaggaccacttgagactgaaagattgaggctgcagtgagtcttgattgcaccactgtactccaacctgggygacagagtgagactctatatcaaaaaaaaaaaaacaaattctgtcagtcaatcaactaatattcaagtatttaatatagtaggcttcctgctaagtttca

SEQ ID NO: 258882 - DNA, 201 bp, Homo sapiens
ggcttgagtaggtggtttttccctgacagtactaaggtggcggggaggtttgaaccaggtggaattcaccacagtgcagcaaagcagctgtggccagactycctgtctagattcctcctcactggacagggtatttgtgaaagaaaggtagcagacctagtcaggggcttatggataaaactcccatctccctgggacaga

SEQ ID NO: 258883 - DNA, 201 bp, Homo sapiens
gaaaactggctagccatatgcagaaaattgaacctggatcactgccttacacattatacaaaaagtaaccaagatggattaaggacttaaatgtaaaacckaaaaccataaaaaccctagaagaaaacctaggcaataccattcaggacataggcatgggcaaagacttcatgactaaaacacccaatgcaattgcagcaa

SEQ ID NO: 258884 - DNA, 201 bp, Homo sapiens
cacaattccttcataaacagtagaaatttcccccatgaaacctttcctttaaccttaacattcttcgataattatttatgaagtccttaaataattattamaacaagtattggttttgaatacgtaccagctttggaatactgcttaaggaaaccatgataaactccaactcctttatgattatttagaggaatatatcta

SEQ ID NO: 258885 - DNA, 201 bp, Homo sapiens
aatctatctgcaccgtttattagccagttctacaaggaatcattgatgaaagttatgccttatgttgatatactttttggaaatgagacagtgagttacckttcctttttcaaaagaacctgggggttttttgtttgtttatttctgatgtgtgtatatatgtttagaaatatataaattaaatcctaaatttttgtgtaa

SEQ ID NO: 258886 - DNA, 201 bp, Homo sapiens
tccatcctcataagttaaactaaaaaaaagttatagattgaggctgggatatctggtggcgaaattatatttatttgaacagagtttgtgtatatacatayatatttcagaatatattgaaaaataaaagtgtaatgaccttgataaaaatgaaatattcacttaaaaactccatttaataatgcccacaggaaagaaatg

SEQ ID NO: 258887 - DNA, 201 bp, Homo sapiens
tattattacccttgtaatatataattaactttgtaagttaaccttgtggaacttttaagggaaatgcattaacttagcattaatatagacttctaaaattyactgtgatgtagaacatttgatttaatgttgtctgtgtctaatacaaaataactgtggtccacttacttatttcaaattttattctcaaaggtacctact

SEQ ID NO: 258888 - DNA, 201 bp, Homo sapiens
atggatatctttggtctatatatttatttatatgacagtaccatgctgttttggttactgtagcttggtaatataatttgaatttgtgtagtgtgatgccrcagctttctctttttgctcaggattattttagctatttggggtcttctgtggttccatatgaattttaggatttgttttttctatttctgtgaagaatgc

SEQ ID NO: 258889 - DNA, 201 bp, Homo sapiens
tagtgcatcacgcctgtaatcccagcactttgggaggccgaggctggtggatcatttgaggtcaagagttctagaccagtgtggccaacatggcaaaaccrcgtctctactaaaaatacaaaaattagctgggcatggtggcacacgcctgtaattccagctacttgggaggctgaggcaggagaacccgggaggctgacc

SEQ ID NO: 258890 - DNA, 201 bp, Homo sapiens
gagtggatcctttgaggtcaggagttcaagaccagcctggccaacatggtgaaaccccctctctactaaaaatacaaaaaagcctggcagggtggttgtgsgcctgtaatcccagctactcgggtggctgaggcatgagaattacttgaacctgggaagcagaggttgcagcgagccaaaattgcaccactgcactccagc

SEQ ID NO: 258891 - DNA, 201 bp, Homo sapiens
tattttatatcctcaccttgtttctttggtcccaaacatttatagcttccttccccattcttcttaattgctgcttcattgtgctatgcatagaagtggtrcagaattcttgggatttgttttttctacactacccccttcctttgctctccatctcagaagactagaagacaacttggtaagtgttgaatatattgtttc

SEQ ID NO: 258892 - DNA, 201 bp, Homo sapiens
ccccttctagtttccagtgctcccacttcctctagttctttgctctaattatcctctctcccttgcctcttcattcttctatttctccaatagatcctttyctttgaaaagcaaaatctttccaactttccctgcccttaaaagcaaatctcttctttcctcccttccctgcccacccttccccgcaaaaaagcgtttgtg

SEQ ID NO: 258893 - DNA, 201 bp, Homo sapiens
gatacttggttaaaaaagaaagataaaaacatttaaaaataataactaagactaagatttgttgcctcttagaacacttgaatattggtaaagaattaatrgattcaatttttaaatgatgagaaatattgttattatacaaaaacattttgtatttcactaaacatactaaaacatttagaatttcactagcagtacttt

SEQ ID NO: 258894 - DNA, 201 bp, Homo sapiens
ttttttcttttaaagttagggatgaagtgacttggaaactattttagatgtattacaaaagtgagtaaacaaataaatttgttgatatttttgggagctargttctcactataaaagaaggaacatacaaataatgggatgaggaaaggcaagaaagaaccctgtggagatggactagaattggaagtactggtgtcagct

SEQ ID NO: 258895 - DNA, 201 bp, Homo sapiens
attaaaaatttagtttcacgatcatactagccacgttacttatgctcatcatgtacatgtagcttcttcatttaaatttaaattacatttaaaattcaagmctctctttgcactagtcacattttaagtgatcagtagtgagctttagagtatatagccaattcttgactgttcctctgtcatttttttacattgatttca

SEQ ID NO: 258896 - DNA, 201 bp, Homo sapiens
tctttaacttttgtcagcacccacatcaaatcaacaaacttgtttatttttcttctttccttactatctatcacccagaatagtggttctcaaacttgagygtgcatcagaatcatctgaacacttgttaaaagatctgttgctggaccctctcccagggcttctgatttagtaggtccgtgatggggcttaagtgatact

SEQ ID NO: 258897 - DNA, 201 bp, Homo sapiens
tcaggaggctgaggtgggaggaccacttgagactgaaagattgaggctgcagtgagtcttgattgcaccactgtactccaacctgggcgacagagtgagaytctatatcaaaaaaaaaaaaacaaattctgtcagtcaatcaactaatattcaagtatttaatatagtaggcttcctgctaagtttcaacaattgtctcca

SEQ ID NO: 258898 - DNA, 201 bp, Homo sapiens
tttacaatcgtgttattattgataggtgaggacttactcctgtcattttattgattgttttctggtggtttgtatatcctttgttcattactttctctcartgttatttttgcagttgaatggttttctctagtgaaaaggtttgattcctttctccttctcctttgtacagcagctctatcagtgtgttttatagtttca

SEQ ID NO: 258899 - DNA, 201 bp, Homo sapiens
ctcgccactgcactccagcttgcgtgacagagtgagactctgtctcaaaaaaagtaataataataattgctaatacctaatgttgcgctttacagctcacrtagaacatttacttatattatctaaaatgaggtattaaaatagatgaacaaactgatatctgggctgggagggagttgttgcttcttttatttctttggg

SEQ ID NO: 258900 - DNA, 201 bp, Homo sapiens
ttacagttgttatattctcttgttggatcaatccttttataattatatagtagccctctgtcttcttttacagcttttgacttgaagagtgttttacctcrtataattatagctattcctgtttgcttttagtttccatttgcactgaatattttttccatccacttccagtctgtgtgtgtatacaggtgatacaagttt

SEQ ID NO: 258901 - DNA, 201 bp, Homo sapiens
agttcaagaccagcctggccaacatgatgaaaccctatatctactaaaaatacaaaaactagttgggcttggtggtgggcacttttaatcccagctacacrggagggtaaggcaggagaattgcttgaacccaggaggcagaggttgcagtgagccgagatcatgccattgctgtccagcctgggtgacagagcaagactc

SEQ ID NO: 258902 - DNA, 201 bp, Homo sapiens
acttgagctactattgtttaggaaatgagtcatttaaggttttttgaacaaaggagctttgccagagcaggaaagtgttgcagtagggtttacaaagtaawgagagttatcaactaaagttatattaataggaaggatgacatagttccaggagttgctgtataattaaaattgataggaccttagacactgcattttgag

SEQ ID NO: 258903 - DNA, 201 bp, Homo sapiens
tagagacagggtcttgctgtgttgtccaggctgatttcaaattcctggcctcaagtgattctcctgctttggcctcctgagtcactgggattgcagggcaccctattcttgatttttattcttcccttgtcaggactagcttagaactgttaccccaactgtataagtaagtgcatccttaactatcaagacccaagaaag

SEQ ID NO: 258904 - DNA, 201 bp, Homo sapiens
ttaaagagttttttcagaacaaggatgccacttcctcttcacgtggcacctatctatacttctgagaaccatgaagactctctaattatcttcatattttmtatcctcaccttgtttctttggtcccaaacatttatagcttccttccccattcttcttaattgctgcttcattgtgctatgcatagaagtggtgcagaat

SEQ ID NO: 258905 - DNA, 201 bp, Homo sapiens
gtgaatcagggttaggaacataaccaaaggtagacagtccatagatggtcagtgagctatgagctaaaacagcagaggaaatcagttttttgtctgtctgwttttgatgtaggatctccctctgtcacccaggctggagtgcagtggtgctatcatggctcactacagccccaacctcctgggctcaagcaatccacccac

SEQ ID NO: 258906 - DNA, 201 bp, Homo sapiens
aaaaacaatttcattctctaattcatgtttagaaaagaacattggtttacaaaaaatttttaaagagttttttcagaacaaggatgccacttcctcttcaygtggcacctatctatacttctgagaaccatgaagactctctaattatcttcatattttatatcctcaccttgtttctttggtcccaaacatttatagctt

SEQ ID NO: 258907 - DNA, 201 bp, Homo sapiens
taaaagtttattaattatataattaagttctccctcagctttctccctgatattagtctcataataaaacagtcattgcctacttttattcttttgcacttttttttttacaatatttcacattcattctaacaacgtattctagtagtggtttatttgttcctgtctttagcaaggtaataaaaggaatttgaagctttg

SEQ ID NO: 258908 - DNA, 201 bp, Homo sapiens
agcccctataatataccaggcatagttctggatgctagcaatcatcagaaaaaaatattgccttttctatagctcctcttacctaggcagccaagttttgygccctgagccctagctcctttcctgtgctcagctgagtgaatcagggttaggaacataaccaaaggtagacagtccatagatggtcagtgagctatgagc

SEQ ID NO: 258909 - DNA, 201 bp, Homo sapiens
cacgtggtcagccttctatctttaaacaggatctgaatctagattcatcaactcataaatatgttctcatttttaaatgatggaatgatggaaagtgaaarcaccaatcaaatcatattttcattatttccagaatgtgttcagcacagttaggtctggaaaggtttttgggaaaggttgtgcaaggttgaatttattcac

SEQ ID NO: 258910 - DNA, 201 bp, Homo sapiens
gagtttttaacaggggaataacatcagatttgtattcatgaaaaagtactctgtttattcatcatatatttattgagcccctataatataccaggcatagytctggatgctagcaatcatcagaaaaaaatattgccttttctatagctcctcttacctaggcagccaagttttgtgccctgagccctagctcctttcctg

SEQ ID NO: 258911 - DNA, 201 bp, Homo sapiens
attatattttatttttattattccttataaacttctcaattcaaaattatacacttattaatagagaagagctttcccctttttttgtttattaatttacwtatgtcatatggactcatgaatattttattctattatttaaaatatattactatcactatttattgtgtttctcaaattgtcgtagatttgaccattgga

SEQ ID NO: 258912 - DNA, 201 bp, Homo sapiens
atttaatctgtagctcactttggttagtaaagatattttaacaaggccgagcatggtggctcatgcctgtaatctagctctttgggaggctgaagtgggargattgcttgaggccagggattcaagaccagcctaggcaacatggcgtgaccgtccctacaaaaaaatatttttttaattagctaggcatggtagcataca

SEQ ID NO: 258913 - DNA, 201 bp, Homo sapiens
taaaactatgtttcatggattgtcagttggaatggacttcaggaggtccataagtccatgaaattacagttttttaacatgaatttttctgaggatacatratttttatcatactctcaaaagaatctaaaactcaaaaatggttaagagacacttaaataaaatgttgataaaggccatggtcattgattctcattcttc

SEQ ID NO: 258914 - DNA, 201 bp, Homo sapiens
gtttgttttttaatttttccatatcttttgcagattgtgatattgtgctttccctttttttcatattttaggcctttaattttaggatgtaattatatagrccataacagttaaaaaatagcagtgataacatgcatcctacaataacatgaatagctaatatttattttagtataattttcttcttgtataattatgttg

SEQ ID NO: 258915 - DNA, 201 bp, Homo sapiens
gtgagactccatctctaaaaaaataaataattggttccttctttgcctgcctcccactctttgtctttctcaaacatttttttcttcatagcatttcttasaattatgcattttatttctgtgtaatgtttttgtttgctatgctttgcattttatattgtgtggaatctccatgaaaataaggaccagcctgacttgttc

SEQ ID NO: 258916 - DNA, 201 bp, Homo sapiens
aatttttttaaaattataagatacagtattttaaaattttggtaaatagctttggattaaatgagtttcttgtttaatttgatgaatttgactcagttctrtaacctttttgctctttttcttgaaaagaaaaaggcttcctcactggctatatctgggttctgcctacactcttccctcacttccccttggtgtaggtgg

SEQ ID NO: 258917 - DNA, 201 bp, Homo sapiens
atgcttctgaaaacaacaggattttcactttgaatctatctgcaccgtttattagccagttctacaaggaatcattgatgaaagttatgccttatgttgayatactttttggaaatgagacagtgagttacctttcctttttcaaaagaacctgggggttttttgtttgtttatttctgatgtgtgtatatatgtttagaa

SEQ ID NO: 258918 - DNA, 201 bp, Homo sapiens
tcagatttagaggatttttaatgccacttcaggaacttgagctactattgtttaggaaatgagtcatttaaggttttttgaacaaaggagctttgccagarcaggaaagtgttgcagtagggtttacaaagtaatgagagttatcaactaaagttatattaataggaaggatgacatagttccaggagttgctgtataatt

SEQ ID NO: 258919 - DNA, 201 bp, Homo sapiens
atcagtaagatacatttcactccagcctggacaacagagcaagactctatctcagtcaatcaataagatacatttatctctttagtagggacctgaaaaarttaaattccatagacaaaaggctttctgagctcttctttaataagtagtgttggcagatgcagtggctcatgcttataattccagcactttaggaggcca

SEQ ID NO: 258920 - DNA, 201 bp, Homo sapiens
ggcagaaaaaaatacttgaagaaaaaatggcaaaaaaccgcccaaatttattgaaaaacatttgtttatacatctaggaagctctttgaacaccaagtacrataaatgcaaagagatgcacacctggcctcataatagcaaaatcttgactatttgacaaggacaaaaggaaaatcttaaactcagcaaatcacaacaggg

SEQ ID NO: 258921 - DNA, 201 bp, Homo sapiens
cagatagcaatttaaatctatacacaaaaaacaaagagcatcaataaaggtaattatgtaagtaattacaaaagacagtataatgacatatttcttcactrttctctcaactcatttaaaagcaaatgcatacagcaatttgtgtataattgtatttaggccctatgacttattagaatgtaatgtatatgatgataacag

SEQ ID NO: 258922 - DNA, 201 bp, Homo sapiens
gtcatccttgattttttcttttccttcaataagtccctatctttatatctggaacccatttactcttcttttatcagcaattaccattctattacagaccrttagtatttttctcctgccctactgctatagtctcctgactgatctccttctactttttaaccctttcaaaccattctccacagaatagctggagtggcc

SEQ ID NO: 258923 - DNA, 201 bp, Homo sapiens
ctgaaagtgagtacacctttgacagattatgtgtaggcacttatatacaactctcagataaaagactagagacttcacccaagaaccaacattcttagaaytaaaaaaaaaaaaaaacaccttcattaagtatggttaaaagccacgtatagattagaagattttactttgttggttttttttgttttgttttcgtttttg

SEQ ID NO: 258924 - DNA, 201 bp, Homo sapiens
cctttatctacattctgaaccaaaatttaattctagagtttgtagtcagcgtttttccaaatgtgtaaaactgtaatccttcataaaatgtcatatgtaaragagtaagcaattctgtgtgtactaaaaggtgagaaagttattactttagctttcactgggaagacttaaagtttatcaaaaaggattatagaaagaaca

SEQ ID NO: 258925 - DNA, 201 bp, Homo sapiens
gtagcatgtgacaggatttccttcttttgtttctttatcctttaattgttgatagatgtctgggttgcttgtacttcttggctatcatgaatattgctgcrgtgaacatggacatgcaaatatatctttgagatcctgctttgaattcttttgactgtatacccagaagtgaggttgcttgattatatgttaatttaattt

SEQ ID NO: 258926 - DNA, 201 bp, Homo sapiens
ctcattctaatctaaatattcagccatagagaatttattaatatatacataagatggaaattgatttagtattttaatttttatgaacatggaatgatgtrtacaatatattggggatgttttcttctataggttttttaatctgtgttttcaaggtattatattcacacagtatgaaattcctccttctagatgttaccc

SEQ ID NO: 258927 - DNA, 201 bp, Homo sapiens
cagtggtgcgatccggctcacttgaagctccgcctcctgggttcatgccattctcctgcctcagcctctctagtagctgggactacaggcgcccgccaccacgcccagctaattttttgtatttttagtagagacggggtttcaccgtgttagccaggatggtctcgatctcctgacctcatgatctgcccgcctcagcct

SEQ ID NO: 258928 - DNA, 201 bp, Homo sapiens
aaatcattatctaaattctggaagctaatacagttggatcaattgttttggataggtccagtaacctttgctgccactatcaaaaactcagaaattggccrggtgtggtggtcacaccttgtaatcctaacactttaggagaccgaagtaggctgatcactcgagctcaggagtttaaggccagcctggccaacatggcga

SEQ ID NO: 258929 - DNA, 201 bp, Homo sapiens
cgccctgctttggctcacactctgtgggctgcatccactgtccgacaagccccagtgagatgaacctggtacctcagttggaaatgcagaaatcacccgtsttctgcatcactcacgctgggagctgtagaatggagctgttcctattcctttttttgttttgttttgttttgttttgagatggagtcttgctgtgtcatc

SEQ ID NO: 258930 - DNA, 201 bp, Homo sapiens
gaatatttgcagccattatacatcttcaaattggttttctgacccttttatgccacttgaagttgtctcatagctcactgacactctttttttattttgtytctttctctatgttttattttggatacctcctttgctgtgccttccatttcactaatattttcttctgtaatacctgaactgttattaatctcatcaaat

SEQ ID NO: 258931 - DNA, 201 bp, Homo sapiens
gctgttggagggtcttgcaccagtgttgatggctgctgactgctcagagtggtggcttctgaaggttggggtagctgtgacgatttcttaaaataagacarcaatgaagtttgccacatcaattgactcttctttcataaaagatttctctgtagcatacaatgttgtttgatagcatttacctacagtagaacttctttg

SEQ ID NO: 258932 - DNA, 201 bp, Homo sapiens
tggagggtcttgcaccagtgttgatggctgctgactgctcagagtggtggcttctgaaggttggggtagctgtgacgatttcttaaaataagacagcaatkaagtttgccacatcaattgactcttctttcataaaagatttctctgtagcatacaatgttgtttgatagcatttacctacagtagaacttctttgaaatt

SEQ ID NO: 258933 - DNA, 201 bp, Homo sapiens
atgtgttctcattgataaagttaattttaaagtaaaatgaatactatatccataccgaaaggggataaagaagaaagaaatgaaggaagaagggaggacaratttatgaacaccagattcaactatatgtccttagcttggggtgggtgggagagaaatgaagaattgcaaacaaatcctgaactcacttttgtaggttta

SEQ ID NO: 258934 - DNA, 201 bp, Homo sapiens
tacaaacttgtaaaaaaattatttaataccaattacatcaaagtccaaggcctacttctttaatatgtagtgagtttctaaaagtcaataagaaggaaatmattatgtattaaaaatgagcaatgtttgtgaagagttgatgtgtagaaaagttaatattaatggcagtaaaacatatgaaaggatgttcatcgtctcatg

SEQ ID NO: 258935 - DNA, 201 bp, Homo sapiens
gcgcggtggctcacgcctgtaatcccagcactttgggaggctgaggcaggtggatcacgagatcaggaattcaagaccagcatggccaagatggtgaaacytcatctctcctaaaaatacaaaaattagccgggcgtagtggtgggcgcctgtaatcccagctactcgggaggctgaggcagggagatttgcttgaatctg

SEQ ID NO: 258936 - DNA, 201 bp, Homo sapiens
gggattacaggtgtgagccaccgtgcccggcctataggtttattttaatggtatgggcaaactaaatcagagactattttgagcaaatgagtgagcctggkttctcactatggaagaagggacaaacatatagacaggaggaagacaggtaagaattctgtgtagaggaattggattggaggtgtctgtgtacatatggac

SEQ ID NO: 258937 - DNA, 201 bp, Homo sapiens
tcttgttctttatggcctagaagttaagaaaggtttttatatgttttaatgtttgggagaagaaagcatattttatgacacatgaatgttatatgaaattyaaattttagtgttcataattaaagtttattagaagacactgatgcatattcctttatgtattgtctatggctgccttcccaccactatggcagaattgag

SEQ ID NO: 258938 - DNA, 201 bp, Homo sapiens
gagcttgaatctgttaagagtatgtcattaatcaaatttggaaatttttaagccatttttttttctttctttcctttccttttccttttttagaagcaggktcttgctttgtggttcaggctgcagtgcagtggcacaatctcagttcactacagcatcaaactcttggactgaagtgatcgtcctgcctcaacctcctga

SEQ ID NO: 258939 - DNA, 201 bp, Homo sapiens
gtcaaagttgatttttcagtgttgacagttcagttgagcctgtttgcttctgttcctagagcctgaacctctaggacttttaattgataccagtggtctcygctctgaaacagtccaccagaatgagggtaccaaactgacctcagaggtttccaggttaatgcagaggtttctagcttaatttctttctgccttcaaaat

SEQ ID NO: 258940 - DNA, 201 bp, Homo sapiens
ttcactgggaagacttaaagtttatcaaaaaggattatagaaagaacagatttatagcaactgtctgatatatgaccagaacccttatgttccactgaaasagacttgccctaggctttctagagcataatgcccttagcaagtagctttcaacatctttttcaggaagcaatattttccttcagtaaaagggtcactgta

SEQ ID NO: 258941 - DNA, 201 bp, Homo sapiens
ggcattataaaggtaatatgacatcagatgttaaacttacttatttaaccagcattcattgaggctgcctactatacgtatcctgtgaagcaatgtgaccratacaaagatgaagaaaacatgggtgctgtctttagtgaactacccatcttctaggaagaataagatctattgtaatataaacaagagtgatgagtcctt

SEQ ID NO: 258942 - DNA, 201 bp, Homo sapiens
accatatgacccagcaattccacttttagatatataccaaagaaaaatgaaaacctgtgtttacacaaaaatgtgtatatgaatgtttatggcagcattawttataatagtcaaaaggtagaaatgactgaaatgttcatcaactgctgaatggataaataaaattagattgttattttacatgagacacaaaaatgaact

SEQ ID NO: 258943 - DNA, 201 bp, Homo sapiens
agaaagggaaaaagagaaatctatggtgtgagttcaagtttactactgtaagtgtttaagaaagggctctgttaccatgacaacaaatgcatgaatttcawgtggaaaattttcagtgtatgggactgataaaattgtaacattctgattttctctggtatagaattgttctttgtcaagttaaaaaaaatctgttaatat

SEQ ID NO: 258944 - DNA, 201 bp, Homo sapiens
cagaatgtacaggtttgttacataggtatacatgtgccatggtggtttgctgcacccatcaactatcacctacattaggtatttcacctaatgctatccckcccctaaccccccaagcctcaacaggcccctgtgtgttatgttcccttccgtgtgtccatgtgttctcattgataaagttaattttaaagtaaaatgaat

SEQ ID NO: 258945 - DNA, 201 bp, Homo sapiens
caaatgacccaggtatatgaaaacatgtgcagtgtccctaatcatcaaagaaatacaaatcaaaagaccacagtgaagctgggttcagtggtggtggtgcrtacctatagtgccagctacttaggagactgagataggaggatcagttgagcccaggggttcaaggccagcctaggcaacataggaagaccctatctcttt

SEQ ID NO: 258946 - DNA, 201 bp, Homo sapiens
tgaattgctaatccagctgctgctttgcttcagatcctgtttaatccagaggaacaattgactaattctgcttgtggaccttcggtcaaagtcttaaccaygccaagtatagctcagtgttttaacagcttttactcatggactgaacacatcagttttatagaccatggcttcattctggataggcatttcccaggttaa

SEQ ID NO: 258947 - DNA, 201 bp, Homo sapiens
attatgctctcctggtactcttgaaattgtcccttgacaaagtggaggacaaggctggatttggccaccatagactcattgttcccagtggctggtccacyaggtcgtgtgctgtgccttgccgacccgccactacccgtccagctgttgtgataccagagagcatggggacgggagccattgctatgcaaagaggcactt

SEQ ID NO: 258948 - DNA, 201 bp, Homo sapiens
ggtccagaatagaaataggatattagtgtaaaaactggtgaaatctaaataaagtcttgactttagtcaataatccaccaacattggtttcttggtttggmcaaatgtaccacagtaatgtaagatgctaagatagtgacattagaacaaattggatgaggggtacataggaagtctgtatattaaacttgcaatttttct

SEQ ID NO: 258949 - DNA, 201 bp, Homo sapiens
tcatgtgttagtaagccagtgagaaagaatcataccagagctttatagatcaccagttctatctcctgtccctccatttcaggtatatgcaactggcctayctgttcagagtattaactctatggtgcttcatcagtcagaccatccactatgcccaaatgagtaatatgtccaaactgtatttgcaaaatgcatttcttc

SEQ ID NO: 258950 - DNA, 201 bp, Homo sapiens
gttaaaacatctgtttcaaacacaatagtggttgtttgttatactaaaaagggttaaatttttgcctatttttggctcaataagaactggcaaattttatrtgaactaatgattttggtaatgaatactcaaaaataaaatcaaaacaatagaagacttggcttgatgacttagattgatctaaaatctgattcaaaaatt

SEQ ID NO: 258951 - DNA, 201 bp, Homo sapiens
aaatggtgttttgattggacaatgtaaagctaaagactaaggaacactatagaaacactctattctagttggtaaatttgtttctcataacggtatgggtkaacagttctgaacctctttacatgtatcctggggttgaacaaataagtaaatggatgatgaatggtggaagctaggtttctcactgtcaggaagggatgt

SEQ ID NO: 258952 - DNA, 201 bp, Homo sapiens
tctatggtgcttcatcagtcagaccatccactatgcccaaatgagtaatatgtccaaactgtatttgcaaaatgcatttcttcacagaaattaatatcctrtgcaaatgctggctaattgattattactctttcataaaggcttaattaggtaggaaacccagtacctgcagcgagagaggaagaaaagtctttcctaggg

SEQ ID NO: 258953 - DNA, 201 bp, Homo sapiens
tgcagatgattttgcaccttagttcccaagtgcccctgtacagaatatggagcttatgtcctgtctctctttgaatgatgagtgatgaaggagcttcagaygttactgggtgagcttgtattgagtgttacaaagagaagtcattctgcctttctttggctctaattgcagaaagtgaagtcactgcttttgctgtcttgg

SEQ ID NO: 258954 - DNA, 201 bp, Homo sapiens
tgtggttttgtttttaataaatagttttggctttattttaaacaattaaaaattcaaaatatttttatgaccaaagcttgtaggttctatccctggaaaayattttataaatgcagaaaatagttgcttaggattggaatccaactctgtttaccatgaacaacttaaaagttgatctcataatcttgcatgttgtggaat

SEQ ID NO: 258955 - DNA, 201 bp, Homo sapiens
tgtcatgaatctaactctttttaaatgagctatttaaatttaaatacataaatggatgttatattttgattttaattacttcagtagtaattcagaattarttgaagctacagcttaaacatattttattacatttaaatagttgggaaaaaataaacagttggttagctaaaacccaataaataaattgggaatagattc

SEQ ID NO: 258956 - DNA, 201 bp, Homo sapiens
agaaacacccaatattcattatttatatttttttaaatttacaactctttaactgtatccaacatttcactgccaggaatatagtcaggctcgaagctttwttagaaacccatgatccaatccataccaacacttcctttagtttatggcttctgttcatttgcactgtccagaaaggtactgctaccatttgtagtcact

SEQ ID NO: 258957 - DNA, 201 bp, Homo sapiens
gtagtgttttcacatcctcagatgaactgaattgggacaatactttgtaggaagttttttaatatagtatgtagacacattggtaaaaatcagtatgtccrctggcttattagtttcacagatgcttccataattcttagtgtactcttgggtattttaaattatcatttcctgacagcaatcctgaaacatgccagtctt

SEQ ID NO: 258958 - DNA, 201 bp, Homo sapiens
tggtttactagttagggatattagtaaatcctaaatagttgaagacgttctgaaagatatattgctgctttttaaaaatttatttatcttgttctctatayggatttctggcacaaggttggtttttgtttttgtttttgtttctgtttttttttttgtcaattgtggtaagtccatggatgcttttctctataactttcc

SEQ ID NO: 258959 - DNA, 201 bp, Homo sapiens
tgaaaaaatgagaggacaacgtttttcctttctggtacttagcaggaaggcaagttcttgtatgaacccatatttcctgttacccattttcagaccaataktggtttctcatctatataatagggatcttttgactctaacctcttaaatctatcatgtgttttctttcttcaccttggaaatagcttcttgaagccccag

SEQ ID NO: 258960 - DNA, 201 bp, Homo sapiens
caaagtgagaccctgtctctacccacccgccccccaaaaaaaagcaaaaaattgaccagctgtggtgctgcgtgtctgtggtcccaactacacaggaggcmgagagaatcccttgagcccaggaggtcaaggttggagtgtgttatgattatacaactgcactccagcctggatgacagagcaagacctaaaaaaaaaaaa

SEQ ID NO: 258961 - DNA, 201 bp, Homo sapiens
tgtgatttctaggtctgtaggtctgtgttgagtaaagcctgatggaagccctaggggaaaaataaattttgacgtttagctggatacttgaaattatcccttttttttttttttttctgaaactttccggtttgacttgggtgggaaaatgttcataagggattttttttttttatcttgtagagaaggggaaagcaaact

SEQ ID NO: 258962 - DNA, 201 bp, Homo sapiens
tcaccacaatgatccttcatgttgcccacccacttccctctgttcacctattgaaagacatcttggttgtttccagtttggagctattacagataaagctkctgtgaatatttgcacataagtttttgtatgaacaccaatttttggctgggcgtaatggctcacacctgtaatcccagcattttaggaggccgagatgag

SEQ ID NO: 258963 - DNA, 201 bp, Homo sapiens
ttggctgggcgtaatggctcacacctgtaatcccagcattttaggaggccgagatgagagaattgcttgaggccagaagttcatgaccagcctggtcaacrtagcaagaccccatctcattttataaaaataaaaaattattttttaaaaggaacatcaattttcattactttagactgcctctaagcttttaattcttac

SEQ ID NO: 258964 - DNA, 201 bp, Homo sapiens
taactactctctctccatatctattacatatgtttctggaatatttctatggtcagagaaactcaggcccattataaaccatggactctggtagaaatagmagctgaaagcaaaccagtaagggaggtggagtgtataatttgtgttttggaagtacctgccggtggacttgggggtgatgctctaggtttaccatgagat

SEQ ID NO: 258965 - DNA, 201 bp, Homo sapiens
gataaggagaaaaatgacacattaaaaattacagtgctatttgtgttttaaaatttcttctgtcgcttttgtattccttattgttctcttcactttttctrttgtttttctagcttttcaggatacattttctaaatgcatcctaaatataacttacaatagttgccttttatttaaaagtaatacatttagtttccaacc

SEQ ID NO: 258966 - DNA, 201 bp, Homo sapiens
cgatgaaacttttatgaaaaacataggagacaatctcagaatctaggggtaatcaaatttctactgaaaattttagtagccacagcaaataagcaataaayagaaagaaatgtcattaaggttggaaagaagtgaaactactcttatttgtagatgacattttgcatatagaaaatcttaaggaatccactaagaaaaata

SEQ ID NO: 258967 - DNA, 201 bp, Homo sapiens
atggctgagaatttaccaaaatttaagaaagaccagttctcagcttgaaagggcattatatgtatctagtaagatggaaacaaaaatataaactaaaactwcagagattttcttgctaattatattaatgtatctattatagaaagactgaaaatttagacactccaaatttaatagtgggcatctttaggtggaagaatt

SEQ ID NO: 258968 - DNA, 201 bp, Homo sapiens
tatgaaaaacataggagacaatctcagaatctaggggtaatcaaatttctactgaaaattttagtagccacagcaaataagcaataaatagaaagaaatgkcattaaggttggaaagaagtgaaactactcttatttgtagatgacattttgcatatagaaaatcttaaggaatccactaagaaaaataaaggaggacagg

SEQ ID NO: 258969 - DNA, 201 bp, Homo sapiens
caaggtggaaaattaaacgcttatttgaagacttctaattttgggaaattgactaattctgctattcttcaggatttctcaggccaaaattcagaacaagrctaaatttgcccatttccacctactattatttattctttctttatattatgctagagcttgtaggctctgtactaacacaagaaaggggaagaaaaaaat

SEQ ID NO: 258970 - DNA, 201 bp, Homo sapiens
taaaaatagaaaaattagctgggcatggtgggatgcgcctgtagtcccagctacttgggaggctgaggcaggagaatcacttgaaccagggagtcagaggmtgcagtgagccgagatcgcgccagtgcactccagcctggcaacagagcgagattctgtctcaaaaaaagaatcctaacaagttggtttttggagtttgac

SEQ ID NO: 258971 - DNA, 201 bp, Homo sapiens
tggcttcccatagtgctgggattacaggtgtgagccactgtggcagcctttatatggtttcttaattttgaggcataccagtgcttatatgtaaaacttayactatggtaaagttatttgacagcagctaatgtagtttgaatcacaagtaatgtcaagctgctttatatacaatgtcccattctgtcaaaagttaaaaca

SEQ ID NO: 258972 - DNA, 201 bp, Homo sapiens
ggtggtgcatgcctgtattcccagctatttaggagactgaggcgggaggatcccttgagcccaggaggtggaggctgcattgagctatgtttgcaccactkcactccagcctggatgaaaaaggaagattctgtctccaaaaaaaaaaaaaaaaaaaaaaaaaaagttaatgtttttagcttaccattataagtctaaata

SEQ ID NO: 258973 - DNA, 201 bp, Homo sapiens
gtctccaaaaaaaaaaaaaaaaaaaaaaaaaaagttaatgtttttagcttaccattataagtctaaataatgaatttgtgcttatttttaattaacaaacktatacaatgtctgtaaactctatactggaagatgaagaatgtagtgcacttacactgttttgcctttttattcttccttatatttgctttagtttgattt

SEQ ID NO: 258974 - DNA, 201 bp, Homo sapiens
atttagaaaaaggatttccaagtggtgggtttttttctaatttaagtttcacattttaatttcccaaactggcaattatatgtaggacaaaatgtaatcaygggaatattcaattaaaaagtcaaatgttttgatcatgagaatataaataaaaattttcaggaattttttaaagttttactgattttaagttttaatatt

SEQ ID NO: 258975 - DNA, 201 bp, Homo sapiens
gttgcagtgagctgagatcatgccactgcactccagcctgggcaacagagtgagactccatctcaaaaaaaaaaaagagagaaaaaaaggatgatttactwaagccttaatttatcaaggcacgttttgcattttgcagttttcagtcttttctcctgctagaactgggggtgatatggttaggctttgtgtccccaccca

SEQ ID NO: 258976 - DNA, 201 bp, Homo sapiens
aagcctcaactttcccatctatgcaataagaatcatttttacctcattagattgttatgaggattaaatgaagcagcatgtatatatgtgtatatatataygcatatatacatatagtatcttgtatataataagtatttattacatgcaatttcatcttttatgtagactttctagactctaaccttgccccaggaagat

SEQ ID NO: 258977 - DNA, 201 bp, Homo sapiens
aaaccatcttgggataaagttttttgaaaaaagaaatagaaagttcagggcattttggtcattatttttgtgtattgtgcctattatatctttttattttwaatttttgagaatctgtttagtgcctagtattttgccaagattataaaggaaacaaaggtatcttaatgtttttttcaaatcttaacatcttaaagttgt

SEQ ID NO: 258978 - DNA, 201 bp, Homo sapiens
catttattttatttttgtagagacgaggtctcaccatattggccaggctggtctcgaactgctgggcttaagtgatcctcccactgcggcctcccaaagcrctgggattgcaggtgtgagccaccatgcccagcccatgaatgttcttaatgacaactggaatgatgaattattttcaggaggttttcaatttactctgcc

SEQ ID NO: 258979 - DNA, 201 bp, Homo sapiens
tgaggtgggaggtcagttgaggccaggagtttgagaccagcctgggcaacatagcgaaaaactctgtctccacaaaaaattaaaaaaataaaaattagccrgacatggtggcatgtgcctgtagtcctagctacttgggaagctcaggtggaggatcacttgaatctagaggtggaagctgcagtgatctgtgatcgtatc

SEQ ID NO: 258980 - DNA, 201 bp, Homo sapiens
atctttatcagtaatctaaaagcaataaagcccttaaaatgaggtagtgtgataaattataagaaatctcatctaagaaatcatatgtttgaaattttacstgtcagtaatgtggtttgtgtccattgaattaacaagttagaatgaatttataattaaataaataatttctatttttttaggatttggttatcttttggc

SEQ ID NO: 258981 - DNA, 201 bp, Homo sapiens
aggctattgattaaatttagagatacacataaagatgactctcatataaaatttagaataaacatgaaagttttagcatgtccagactttagggatttagrctttatgaaggtctcaagcctgtctcctggaattccaacgttgtgatgactcaaattttatcagtaaatatggaaaaataagctaaagttcttgagaaat

SEQ ID NO: 258982 - DNA, 201 bp, Homo sapiens
ccaaatgtttacattttacatctcctgctttgtttgccctataggtttttcatacctatgccatgagtaacaatttttcttagtaaaactttcatttataytcagttacaattaaatatctttatcagtaatctaaaagcaataaagcccttaaaatgaggtagtgtgataaattataagaaatctcatctaagaaatcat

SEQ ID NO: 258983 - DNA, 201 bp, Homo sapiens
aaaattacccatgcctatagtcctaattacttgggaggccaaggcaggaggatcacaattgatcctcaggaagatcatgcttgtctgtaaaggattttatwtccccttgacttatgaagcttagtttggctggatatgaaattctgggttgaaaattcttttctttttttttgagacagagtctcactccgtcaccaggct

SEQ ID NO: 258984 - DNA, 201 bp, Homo sapiens
tgtatactttaacttgttcccctatcctctgtatttcttatagactgcaagttactggactaaagttttgattaattcatattaaagtatttaggttagartactttataggtgatggtgtgaacttcacactgcatcacaacagaaggcaaagaatatttggtgatcccactattagtgatgataagtgatagcatcgat

SEQ ID NO: 258985 - DNA, 201 bp, Homo sapiens
gagtgtcagaaaatgatcataaccatcactgataaatgtgttatggggaatattagagtaaaagcagaaattccaagttgtggtgagaaagtacagtagamccttgaacaatgtgagggttctgggcactgaccccttcgaaaatccacatacaatgtttacctcctcaaaaacttaactactaatagtagttaattggaa

SEQ ID NO: 258986 - DNA, 201 bp, Homo sapiens
ccaggatggtcttgatctcttgacctcgtgatcctcccgccctcggcctcccaaagtgctaggattacaggcgtgaaaattcttttctttaagaatattgwatattggctcccactctcttctggcttatagggtttctgcagagagatctgctgttagtcccatgggcttcactttgtgggtaacccaacctttctcttt

SEQ ID NO: 258987 - DNA, 201 bp, Homo sapiens
tttctccagccttcagttactttatttacaaattaaagtttttccttatcagaaataatgcataagttaaaatagtataatactaacgtggtatcataagraagtatataaatggtttgatagataacataaagtaaaggtaactcatagtttgaaggacagcatgagaaaatatttagaagctttagcagtataagtctt

SEQ ID NO: 258988 - DNA, 201 bp, Homo sapiens
ttatctctgacattatagttttcatctcttgaactttgatttggacctcttttactcatgccatatctctacatagtatgcttatgttgtcatgtgctttyggaatgttgttataacaattgttttaatattcatgtctactaattctgtcacttttttttaatctgattaccttggtattggtttttcctgattacctgg

SEQ ID NO: 258989 - DNA, 201 bp, Homo sapiens
gtcctttgcagggacatggataaatctggaaaccatcattctcagtaaactaacacaagaacagaaaaccaaacactgcatgttctcactcataagtgggrgttgaacaatgagaacacatgaacacagggaggggagcatcacatactggggcctgtcagggggtaggggactaggtgagagatagcattaggagaaata

SEQ ID NO: 258990 - DNA, 201 bp, Homo sapiens
taatttttttcagttatgtttattgaggtataatttatatactgtttatctaatttttattataaacctattggatagaggcatgagtgtctttatagctrtgcattgccccatagagtttttggcactcaataaaatgttaaataatatttttattcagcattctgtagacgggaagcatatggtaacaaatgtcagagc

SEQ ID NO: 258991 - DNA, 201 bp, Homo sapiens
gaataacgtccttacctgtaagtgtatattcagatttagtgaatgtacttcatgtgttcatataataaatttcctagaatagctatggagtaggtcatgcyggtaaaaactgttagttttgtgacttttttttttttttttttttgagactgagtctcactgttgcccaggctgaagtgcagtgacatgatctctgctcac

SEQ ID NO: 258992 - DNA, 201 bp, Homo sapiens
tcactgattttaaacaattttattatgatgtaccttggcatagttttatattttgtgtggttggggttttttatagtttcattcactttggaaattatttwacaataaattttctctttccacctccatctacctttgggactccgattaaaataataataataataataataataataagaagaagaagaagaagaagaa

SEQ ID NO: 258993 - DNA, 201 bp, Homo sapiens
acgcgctcccagtcgctgagtgcctgagccgggaagcagttgctgtggtacctgctgctgcccgagcggacgtagagcatcggacgcgggcgccgtggcgytgggcaggagggcgaagccatgacgtcagtcaggtaacgagcgggcggctgccttgactgctccgagctgggcgttagcctcccgagcgcgtgagcactg

SEQ ID NO: 258994 - DNA, 201 bp, Homo sapiens
gtttctctgtaaatctttctgttctctgatattgtggtctttcaactcttaactgctctgaaattcccagactctcagttgtatttcctcaactcactggmatctactacagttctccttataccatattctggaaactcttgcaataaactgctgtagtcatatggctgacctccattgtttcccatctctcagagatac

SEQ ID NO: 258995 - DNA, 201 bp, Homo sapiens
gtcccaaattcctgcctttgccatgggactctaggcagttgacaaactctgtgagcctcagagtcatcatttataaaataaggttagtgataccttactcwtgtgagaattagatgagataaagtatacaaagcatttgatgcagtgctttttcactcagataactaccgttgcattccattgcctgatgtatcaaatcca

SEQ ID NO: 258996 - DNA, 201 bp, Homo sapiens
gaaacagccactatttccaaatgtgtatgtgcctcaggtactgttccttctatttttttttcctcttaatacttttggatgtttctttcccaggtactgascttaagaaaagaccctctacagaattccaggtttctctgtaaatctttctgttctctgatattgtggtctttcaactcttaactgctctgaaattcccag

SEQ ID NO: 258997 - DNA, 201 bp, Homo sapiens
ggttgttactagtttggccatattacaaataatgttggtatgtgaacattcttgggtgtgtcttttggtgctcatatgcacatatttcttttctttctttytttttttttttgagatgaagtcttgctcttgttgcccaggctggagtgcaatggcacagtctcggctcattgcaacctccacctcccgggttcaagtgat

SEQ ID NO: 258998 - DNA, 201 bp, Homo sapiens
tatatcttatgtggaagcccttgggtaggagtcgatcaggaaaaacttcccaagacaggtagcatacagggaattttaaaaagatgaatgggagtttgccrggcaaaggaagcaggagaagaactttacaagcagagtcttattcaaagaacagtaaggcattatgattaaaatagtttgtatatattagaatggtgagag

SEQ ID NO: 258999 - DNA, 201 bp, Homo sapiens
ataaaatggaaactgatgttcttcccatgaaagggtaattatacattaatgtactctttttccctcctgtcctttttttattatgaaatatttcatatatmaaagaatatgtctaacatatgtgtattacaaagtatatcctctgcctccctcctcatttgaagatcctgccaatcctctgcagagctaatgcttattctg

SEQ ID NO: 259000 - DNA, 201 bp, Homo sapiens
ccacactttatagatttgtatggatatacaatcaaatgtactaatttttaaattatcctcattttgcagtaattttacattttgctcatttgtgcaaaccrtggtgatagtaaaatatttaacagaaattcaagcacattcttttaactctttctgaaaaatctcacaaatgagatttttttaaaacagttaagaatttac

SEQ ID NO: 259001 - DNA, 201 bp, Homo sapiens
aatttgtaacagagaaaataggcttgattaacaaaaatatgaaagatcttttaaataaatgaattttgaattttcagagtagcccagaattttatctaaaytcggattatttcattagctagaacatgaaaataggcatttattctactcacctacagcttctgtagtactaaatttatggaatgaggctttgtggtgctg

SEQ ID NO: 259002 - DNA, 201 bp, Homo sapiens
ctccagattatccaggatactccagtaatagaagtcaactgactgggagttttaattacatctgaaaaatacctgtatagcaacacctagattggaatttrattgaataactagagtctgtagcctagtcaagttgtcacctcaaaaaaaccatcttgggataaagttttttgaaaaaagaaatagaaagttcagggcatt

SEQ ID NO: 259003 - DNA, 201 bp, Homo sapiens
agccatgcttttctttttaaattttattattattatactttaagttttagggtacatgtgcacaacgtgcaggcttttactttcaactgattgaatcaggyccctccagattatccaggatactccagtaatagaagtcaactgactgggagttttaattacatctgaaaaatacctgtatagcaacacctagattggaat

SEQ ID NO: 259004 - DNA, 201 bp, Homo sapiens
tttgaaataatgagattgtattaataggattcagccacagaaacagacccattagggaagatagagtgagaataagatttatttgttggttgatcgatttygaggaattggcctatgtcattgtggagactggctaagtagtccaaaaccatagggcaggcaaccaggaaggggagaaagccttgaacttcttaggcatgg

SEQ ID NO: 259005 - DNA, 201 bp, Homo sapiens
agtttttaaaaaatttgtagaagcacttaatgtgagttttgacttgaaagaaatggaaaaacgttggcattgtgactcatgcctgtaatcccagcattttsagaggctaagttaggagaatcgcttgagtccagtagtttgagaccagcctggacaacatagtgagaccctgtctctaggaaaaaaaaaaaaaaaaagaaa

SEQ ID NO: 259006 - DNA, 201 bp, Homo sapiens
tgaaagaaatggaaaaacgttggcattgtgactcatgcctgtaatcccagcattttgagaggctaagttaggagaatcgcttgagtccagtagtttgagaycagcctggacaacatagtgagaccctgtctctaggaaaaaaaaaaaaaaaaagaaatggaagaaaatgacttccttggatatgtgcctaaaagatggcta

SEQ ID NO: 259007 - DNA, 201 bp, Homo sapiens
aaatattttattatttcttaggcaaaaagaagcatgcctttattctttttaattaaatattggtaaaatgtttaatccaactgtggttacgttattttttwaaaaagtgtgatagaaataaacaacagaataatatatgattttgaataagttcaatattagtttgctagggcagtcttagcaatttcagagactaggtgg

SEQ ID NO: 259008 - DNA, 201 bp, Homo sapiens
ctgtggttacgttatttttttaaaaagtgtgatagaaataaacaacagaataatatatgattttgaataagttcaatattagtttgctagggcagtcttarcaatttcagagactaggtggcttaaacaacaaagatttattttctcacagtgttggagtcccagatcaaagtgttgacaccttgattccttcagaggcct

SEQ ID NO: 259009 - DNA, 201 bp, Homo sapiens
tttgcgtggtggtttctgtgtacatatgtacctctggagtgtctctgtgtgtcctaatgtcttcttataaggacaccagtcagattggattaaggcctacyttactgccctcattaatttaattaccttgttaaagaccctatcttcaaatgtagtcacattgtgagatactggggtttagggcttcaacatatgcatagt

SEQ ID NO: 259010 - DNA, 201 bp, Homo sapiens
agtttttctgtattaaaaaaatctgattatctcttgtgacctattttacctagaaaagctagttagaggttaaaaggttttttatgagacatacttctgtkcatcggaacagtccagatgtaaatttaaaaagaagaaatgacaatgaagtgatcaaagagaattctgtgttcaaatgctttcacctggagcagttgtaga

SEQ ID NO: 259011 - DNA, 201 bp, Homo sapiens
tgtggcttttagtgtgttcacagatctagctagctgtgcaaccatcaccacagtcagtttcacaatattttcttttcttttcttttttttttttttgagayggagtctcgcactgtcgtccaggctggagtgcagtggcgcgatcttggctcactgtaatctccacctcccggggtcacaccattctcctgcctcagcctc

SEQ ID NO: 259012 - DNA, 201 bp, Homo sapiens
ttgcacaggctgatgttgaattcctgacctcaagcaaccctcctgcctctgcctcccaaagtgctgggattacagttgtgagccactgtgcacagcctttmaccaattgtcaaaaacttattcatgtatgtgattgtagattctttgaccaacatctctccatccttctacccctctaattacccaagcctctgataaaca

SEQ ID NO: 259013 - DNA, 201 bp, Homo sapiens
agcttcattaactaagagagggtaaatggggataatttggtctagttttgtataaattatggggaaagtcttggtctcatagtttagcattccatagtacrttctccatagtgtataagtgataggttttactaatttaataatttttttgtctcaaacttgtgacttagactttgataaacttctgtttatgatagatgg

SEQ ID NO: 259014 - DNA, 201 bp, Homo sapiens
gattttattgtttgtattttataatggattttaaggcatattagtgaaaacacaacttaaaatttattttcttaccttactaacattccaaaaaaggaacrtatactgtataatgtttttttgtctcactaatatattcgtatccctcttcccccttcttggcaaacttgtctgaaagtatactgttgcatgttatgtcat

SEQ ID NO: 259015 - DNA, 201 bp, Homo sapiens
actctgtctcaaagaaaaaaaaaaggaaaaaggagaatttaatctgattaccagattgtaaatggcaaatctggaatgtgaacccaagcagtctgacttaygcacttaaccacagttatactccctctactctctatggagaatttatcaacttaatttagtcaaatttggttatcagtaccaggcttaagggaatttaaa

SEQ ID NO: 259016 - DNA, 201 bp, Homo sapiens
gctgctatatatactataatgcacaagacagccaatccacaataaagaattatctggcccaaattattaattgcctcaagattagaaaagccctgtcttamagtatccctcaaaatttatatatttaaaggatcactggctgattcctctttacacttaatcataaggtcaacaccaataggctttagtaggataaagcat

SEQ ID NO: 259017 - DNA, 201 bp, Homo sapiens
atctccttgacccctggctataaaagatgaggaaatctttcttaccctcatagtctcacaccttccctctcccaattactctattttgtatatttgttccygagatttataacatttatattgttctgtaaccaaacatattctcctccctcctgcaaatttttgatcttattcataacagttaaaaggcaataaacagaa

SEQ ID NO: 259018 - DNA, 201 bp, Homo sapiens
catttatctgttgttggacatttgggttgatttcatgtcttggctatagtgaataatgctgtagtaaacatgggggtgcaaatgtctctttaacgtactartttcctttcctttggagaaatacccaatagtgggattgctggatcatatggtagttctgtttgtttcttttctctgcatcctcaccagcatctgcttttt

SEQ ID NO: 259019 - DNA, 201 bp, Homo sapiens
cagaagcacccctcacccccaccttcttccccaaaggtatcttctgtcctgacttctaacattggagattacctttgctgttttaaactttaaatatatgkaatcatatagtgtgtactttttgtctctggcttctttggctcatcattataagctttatccacattgttgaacatagcagtgcttttgttcattttcttt

SEQ ID NO: 259020 - DNA, 201 bp, Homo sapiens
gggctggcgttgaatgcctgcagcttttccaggtgcatgatgcaagctgtcggtggacctaccattttgaggtctggaggacagtggccctcttctcaccrttccaataggcagtttcccagtggggactctgtatgaggactccaaccccacatttctcctttgcattgccctagtagaggttctccatgagggttcacc

SEQ ID NO: 259021 - DNA, 201 bp, Homo sapiens
agcaaacttctgcctggacatcaggtgtttccatacgtcctccgaaatctaggcagaggctcccaagcctcatctcttgccctctgcatacccacaggctraacactaggtagaagctgccaaggcttacagcttgcaccctctggagcagtggcctgagatgtatctggggctcttttttccatggctgggacgcaggga

SEQ ID NO: 259022 - DNA, 201 bp, Homo sapiens
acaaatgatcttaattaaggagagaatgtggagggaccttttgaaaaaatatagcagagcacgcagaaaactctttaataagagctcaaatttggaggatracgagatagctgcctctgcctttgccggtgcagtgagagcagcttcaggaatcttatggcctctgaatattttggcatcttcagcctaccaaaactgtgt

SEQ ID NO: 259023 - DNA, 201 bp, Homo sapiens
acaataataatcccctccttagaaacatttgagtagactgtacaacagaggtcagcatttttatttattttttttttttgagacgagtctcgccctgcctyccaggctggagtgcagtggagtgcagtggcgcgatctcggctcactacaagctccgcctccccagttcacgccattctcccgcctcagcctcccaagtag

SEQ ID NO: 259024 - DNA, 201 bp, Homo sapiens
tggcctgagatgtatctggggctcttttttccatggctgggacgcagggagcagtatcaaggttgcacagggcagctggtccctgagcctggcctaggaawgcactcttcgcttttatgactctgggctggtgatgggaggggctgctgcaaatgtctctgaaataccttagcagcattttccccactgtctcggctatta

SEQ ID NO: 259025 - DNA, 201 bp, Homo sapiens
tgcaaatgtctctgaaataccttagcagcattttccccactgtctcggctattaacatttggctcatttttacttatgcaaatttctacagccaacttaamttcctgcccagaaaatttctcttttctaccacacggtcaggctgtacattttccaaactttccaaattctgtttcccttttaaatataagttccagtttc

SEQ ID NO: 259026 - DNA, 201 bp, Homo sapiens
ataatacataccagtttcttaggattgtagtaatgcttaaatgaattaatatatttggagcacttaggaaagagccaagtacatagtaattttctaaaaaytatacctacttattatgtggatctttgctgaggaaatatgagtaagcatacaagactggacaggctttgagtagtgaagatgttttactcacaagcaagg

SEQ ID NO: 259027 - DNA, 201 bp, Homo sapiens
tctctcttatatacatacattctgtcctctcctcctctccagttctccagtagagtttttgataaatcagttttcagcataaataatattatacagatgtrtgtattatttatttctgagacaaattatattctatggtgttttacaacttttagtttctcctagagtttagaattcccttatctttttgtttccttaggt

SEQ ID NO: 259028 - DNA, 201 bp, Homo sapiens
ttttgacttaaagtctattttgcctaatgtaattataggtattcctgcccttttctggtttttatttgaatagaatatctttctgcatcccttcactttcrgcatctatgtgtctttataggtgaaatgagtttcttgtaggcagcatgtatctgggtcttgtttttaaaatccattcacccaccctgtgtctttatttgg

SEQ ID NO: 259029 - DNA, 201 bp, Homo sapiens
caagtatttaaaactgataatcaacttaactttgattggaaaaaaaacacacaaaagtgaacattaacttccttctcccccttcattttgaatttctgatrtcacagttcacatttttatattgcctatcttgtaacaaattgttgtagttattatttttaatagttttgtcttttagtcgtcttactacagatattagtg

SEQ ID NO: 259030 - DNA, 201 bp, Homo sapiens
atttgtaccttgtgtcttttattattactgcttttctctctctcgtcttttttttttttttttaatactgtcattgacctttttttaaaagagaaactgtrttatttttccaggagaatatctcactttctgaatttggttagttgcttcatatttagtatttgctgagaatttgagctagagatttggttaaactcaggt

SEQ ID NO: 259031 - DNA, 201 bp, Homo sapiens
tggagtgcagtggtgctctccaggctcactgcagcctccacctcctgggctcaagcagtcctcccacttcagcctcccaagtagctaggattacaggcacrtaccaccacgctaattttttaaattttttgaagagacgaggtctcactgtcttgcccagactgatcttgaactcctgggctcaagcaattcacccacctt

SEQ ID NO: 259032 - DNA, 201 bp, Homo sapiens
taagagtattccattttggtttcttttcacatcctgattggggttttattttctcaataaaattcactttttgtagtgtcaagttctgtgggttttgacaracacataagatcatgtaaccaccaccatagttatgataccaaagagttacatttttcagctccggatttgcaaggatggtaccaatataaactcccccaa

SEQ ID NO: 259033 - DNA, 201 bp, Homo sapiens
tccatttttgtgcactttcttactttttgacaacataagatcccccgggctcacgttgtattttctccacttcagtcctataatcaactatttctccaagraaccctggttccctttattgaagaatggtttttagaaacctgtaactgtgctctagatatgctctttgttccttgagtgtctttgcttctaggccctctt

SEQ ID NO: 259034 - DNA, 201 bp, Homo sapiens
tgtgtgttgctttcccccccgatagaaactataaatggtagtgttattgtggttaggagtatggggctatggagttggggaaaacatgtatgaatctcagktctactactttaccttttgaatgtgggcaagacaagtctcagagttgttttagtttttttaattttaactttgaaataattgtagaaaaatagcaaaact

SEQ ID NO: 259035 - DNA, 201 bp, Homo sapiens
gttatttataaaaataattatgtacttctctctggggtttaatgtgtctttttattctcaaaaaatgtagtacattgatcagccacctaaaatactagccstatagaattctaatagttaggttttatatacagccatttgtcgattaaatattaaataccggatcagcttaaaatggacacacaaaaaaacactaccaca

SEQ ID NO: 259036 - DNA, 201 bp, Homo sapiens
ttctcacctatgaatgtaagttactaagttattagctcatggtccatttttagattattgtaatcacaaaagataaactcctttaattaattggtcaaaamtaatttagaataacatgtggacctgtcacatttttgacaaagtagtatctttgggatgtggttcatttagttcagtgatctcaagcctgaagaaatgaga

SEQ ID NO: 259037 - DNA, 201 bp, Homo sapiens
atctcattgtggttttaatttgcatttctctgattattagtgatgtggaacatttttcatatgtttgttggctgcttgtatgttcccatttttaaaaattktattgatttatttgtattttatagagaaagtgtcttgctatgttgctcaggctggtctcatacttcctgaggctcaagcagttctcctgcctcagccttc

SEQ ID NO: 259038 - DNA, 201 bp, Homo sapiens
acttttgttctgaattggaaataatgtgtttccaattaaataggtccactgaaaaataaactgtagatttttctgtttcgtttgttttaagaccaggcctygctctgtcacccaagctggagtacaatgacacaatcatggctcactgcaacctcaaccgggctcaagcgatcctcccttcccagcctcctaagtagccgg

SEQ ID NO: 259039 - DNA, 201 bp, Homo sapiens
tgtacttgctaataattgctattaagaattttgttaatcgtgtgtggattggtgcttgagttcagaatgaatgattgataggggacaactctaagaaatayagcacttacattaatgttttattaaacagaaaaagctttaatgttttattaaacagattttaagagttacagtcttaaaatctttattatttattttatg

SEQ ID NO: 259040 - DNA, 201 bp, Homo sapiens
ttccaagctgcagtgggctccacccagttcaaactttttttgcgaactttgtttgcatctttgtttacactgttaggggaaaaccgcctactcaagcctcrgtaatggcagtcgccccttcccccaccaagcttgagcatcccaggtcgacttcagactgctgtgctggcagcgagaatttcaagccagtggatcttagct

SEQ ID NO: 259041 - DNA, 201 bp, Homo sapiens
cattaacctaagtgaatagaacctaatttttgtacttgctaataattgctattaagaattttgttaatcgtgtgtggattggtgcttgagttcagaatgawtgattgataggggacaactctaagaaatacagcacttacattaatgttttattaaacagaaaaagctttaatgttttattaaacagattttaagagttac

SEQ ID NO: 259042 - DNA, 201 bp, Homo sapiens
ttttttaaaataaattttattctttatatttgaggtttataacatgatgttataggatacatagatatatatagatcaactttcttatttcagaatggtcraaagcaagattcagagatttgtttcaaaaaatatttgcttcaaagtagttcagtgagtggtagataaagtgagggtataaatgaaatgagactggtaatg

SEQ ID NO: 259043 - DNA, 201 bp, Homo sapiens
accaagatgacagctgcccactgctaaacaacccaatgtcaacaactctttttcttgtctttctgctctaatgggacatcttctctgttttatttcttgarcagaaatttttcttaaaaccatcaaatgaacagtgaaattggcttggtcattaggaatatgaaacagaccaggcatggtggctcacacctgtaatcccaa

SEQ ID NO: 259044 - DNA, 201 bp, Homo sapiens
cagttacttaaagagtttggctgggcattgtggctcacacctaatcccagcactttgggaggctgaggcagtcagatcacttgaggtcaggagttcaagaygagcctggccaacatggcaaaacctatctctactaaaaatacaaaaattagctgggcgtgatggcacatgactgtaatcccagctacttgggaggctgag

SEQ ID NO: 259045 - DNA, 201 bp, Homo sapiens
tatcttttttggtgatttcatagtacatgggggctgggctatgataccgctcctgtccagcgctgccccagatctcaaacttgactattgtgtcgtctaarcagacagtctgtgtaaggaaggctgctctgattatgctctcctggtactcttgaaattgtcccttgacaaagtggaggacaaggctggatttggccacca

SEQ ID NO: 259046 - DNA, 201 bp, Homo sapiens
agccaggtgtgcacctgtaatcccagctactcgggagacgaaagtaggagaattgcttgaacctaggaggtggaggttgcagtgagccgagattgtgctaytgcgctccagcctgggcaacagagcaagattctgtctcaaaaccaaagagagagagagaacagttatgataatattagatcttctggatgtcaaaaactt

SEQ ID NO: 259047 - DNA, 201 bp, Homo sapiens
taaaataagtttactagttggtttaaactaaggagaattgagttaattctccttgggtcttatcaaattatcttcatctgacttaggcatagtttctctcyttttttatttttcatatcactcctgatctcttcccaccatgggtactcttaatgtgtttgatatggctcttacatttggatgtgtcctttaagactgtat

SEQ ID NO: 259048 - DNA, 201 bp, Homo sapiens
gtgcttaaaatatatgtgtatatattcataagcaatatgaagtattgatttgcgtgttctaaaacatattttacagtgcctctccttcggctcgctttttygtgtaacattgaatttttagatttttccctgttaatgcacgtaatttatatgtaatttattttcacctgtatagacttgtatgaatacatcacaatttat

SEQ ID NO: 259049 - DNA, 201 bp, Homo sapiens
tgttactgaagttgatgttgatgtccacactgtagctatgtaagagaatatccttattctcagaaaagatacactgaagttttcagaagtaaaaagacatygtaaatgtaacttcctctcaaatagttcagggaaataaaattgtatgcagagaaagagtacatgcaaatggtgcaaaatgttaacaatattgtgcacctg

SEQ ID NO: 259050 - DNA, 201 bp, Homo sapiens
gttccagatttttaaaaactataaagataccacagttaaatcctgaactagactctgttccagaggagaaaatttccataaaggatattattgggtaattsactaaattgaaatatggacagtagattagataacagtgttactgaagttgatgttgatgtccacactgtagctatgtaagagaatatccttattctcaga

SEQ ID NO: 259051 - DNA, 201 bp, Homo sapiens
cagtggctcacacctgtaatcccagcactttaggaggctgaggcgggtggattgcttgagtccaggagttcgagaccagcctgggcaacatgacaaaaccscatctactaaaagtacaaaaaaattagccaggcgttgtggtgtgcacctgtggtcccagctacccgggaggcagaggtaggagaatcacctgagcctagg

SEQ ID NO: 259052 - DNA, 201 bp, Homo sapiens
cttcccaagtagctgggactataggcgcacgccgccacacccggctgatttttctatttttagtagaggcagggtttcactgtgttggtgaggctagtctygaactcctgacctcgtgatccacccgccttgccctcccaaagtgctgagattacaggcgtaagccaccgcgtctggcctataaggaataattttgtgatt

SEQ ID NO: 259053 - DNA, 201 bp, Homo sapiens
cataacattttggtcattgacagaccacatatatggcagtggtctcataagattataaaaccttatttttactgtaccttttctatgtttagatatgtatrgatacataggtacttaacattttgttacaattacctaaaattcaatagaataacaggctatacaggattgtagcctgggaacaataggctataccatcta

SEQ ID NO: 259054 - DNA, 201 bp, Homo sapiens
aagatggcagctgctgaggaggagccgaagcccaaaaagctgaaggtggaggcgccgcaagcgctgaggtgagcgctgccggacttggggaggagggtgayggcgctgcaagcaagccagggcccacgtggggttgcacggccccgacgctgggtggtgtctctcactgccagcttggggccaacacgcaggacctccccc

SEQ ID NO: 259055 - DNA, 201 bp, Homo sapiens
gttatacttttcacaccagattctattcttatatgatgtattttatgcataagttatattttgcctgtaacatgcatacattatgaaggtagtatattttkatgcattacagtctttcatgcatattgattaccctattatatgtctttgcagccagccaaaatgtgtaaattttaaaatatctcttagtcattaaattgt

SEQ ID NO: 259056 - DNA, 201 bp, Homo sapiens
gtcccagctgctcaggaagctgaggcaggtagatctcttgggcctaggagatcaaggctgcagtgaaccatgatcattccactgagctctggactggacarcagagtgagaccttgcctttaaaaaaataaaaaaagaataccaataagagagtacaatgatagttctaattatcttgatattaatgaatattaagtatgt

SEQ ID NO: 259057 - DNA, 201 bp, Homo sapiens
ataacattttggtcattgacagaccacatatatggcagtggtctcataagattataaaaccttatttttactgtaccttttctatgtttagatatgtataratacataggtacttaacattttgttacaattacctaaaattcaatagaataacaggctatacaggattgtagcctgggaacaataggctataccatctag

SEQ ID NO: 259058 - DNA, 201 bp, Homo sapiens
ggaccaatggtcagaatatcttgggccccactgagggccttttctgagttactgagcttccatttctcttttctttttattattattattattattattattgttattattaattattattttgagacagtgtcttgctctgtcgcccaggctggagtgcagtggcgcgatctcggctcattgcaacctccacctcctggg

SEQ ID NO: 259059 - DNA, 201 bp, Homo sapiens
gaccaatggtcagaatatcttgggccccactgagggccttttctgagttactgagcttccatttctcttttctttttattattattattattattattattgttattattaattattattttgagacagtgtcttgctctgtcgcccaggctggagtgcagtggcgcgatctcggctcattgcaacctccacctcctgggt

SEQ ID NO: 259060 - DNA, 201 bp, Homo sapiens
accaatggtcagaatatcttgggccccactgagggccttttctgagttactgagcttccatttctcttttctttttattattattattattattattattgttattattaattattattttgagacagtgtcttgctctgtcgcccaggctggagtgcagtggcgcgatctcggctcattgcaacctccacctcctgggtt

SEQ ID NO: 259061 - DNA, 201 bp, Homo sapiens
cattgcaacctccacctcctgggttgaagccattctcctgcctcagcctcccgagtagctgggtttacagacgcctgcctcacgcccagctaatttttttstatttttggtagagacggagtttcatcatgttggccaggctagtctttttttttttttttttttttgagacggagtctcgctctgtcacccaggctggag

SEQ ID NO: 259062 - DNA, 201 bp, Homo sapiens
tcccaaagtgctgggattacaggcgtgagtcatcgcgcccggcccttaagtattctttaattcacgaactatgtgtataaagatgtttatttccatattamctataaaagccaaaaaactagacataacctaaatgtttattctagagactaggttgtagctacccaatggaaaactatgtagccactaaaaggcaataga

SEQ ID NO: 259063 - DNA, 201 bp, Homo sapiens
acatatcttgaactagatatgagatctctagataccttgttcagttccctttctagtatagcattcaactctgaggaattcctaaataatgattttttttkggggggggtctctttaggaattcctaaataataattttaaatgaaaacttttctttttttttaacttaagatctttgaatttggctggagttagtatttc

SEQ ID NO: 259064 - DNA, 201 bp, Homo sapiens
atctaaggtctcaaaagctgtcagtttttttccttcggttcgttctttgtctctgagagttagcttcactttgtcagcctgcttctttatactcttcctgkttttcactctgacttactgtgtttataattatcttgggttagtttttcttattgctcatttggaaaaactatcagtacttctgattagtaatttcagatg

SEQ ID NO: 259065 - DNA, 201 bp, Homo sapiens
atctgaattgctttcttcctatagtataaggattattcctgtcttagcagtggacagtttagaaaagtgaaaaacatacaggcttcttataggaattgtartactaccttcagatttacaaaatattctttggttgctctttgtggagacattcattttaagtctttgtatattctagatatacatactgtacaagtgtct

SEQ ID NO: 259066 - DNA, 201 bp, Homo sapiens
gcttaggctggagtgcagtggcgcaatcccgactcgctgcaagctccgcctcccgggttcacgctattctccttcctcagcctcccgagtagctgggactrcaggtgcccaccaccacgcctggctaattttttgtattttttagtagagacgaggtttcaccatgttagccaggatggtctcaatctcctgcctcctgat

SEQ ID NO: 259067 - DNA, 201 bp, Homo sapiens
cttgttaaattttcctaaactgatttttaaaaatctatttcattctcaattataacatctttactgagattattaagtgctttgaagcagttaacgtggcttttttttttaatggctgtaaaaaaactgaatttttaggcttgttaaactctggttttagaatgacttttgagtggaaatcactgatcaaaagcaaagttc

SEQ ID NO: 259068 - DNA, 201 bp, Homo sapiens
tcactgtaaccttgaaatcctgggctcaagtgatcctcccacctcagccctccagagaggctgggactataaacacacaccaccatgcctggctatattttgtgtgtgtgtgtgtgtgtgtgtgtgtgtgtgtgtgtgtcaggggggtgggtaaagatggggtcttgccatgttgcccaggctggtcttgaacctcctggc

SEQ ID NO: 259069 - DNA, 201 bp, Homo sapiens
actgtaaccttgaaatcctgggctcaagtgatcctcccacctcagccctccagagaggctgggactataaacacacaccaccatgcctggctatattttgkgtgtgtgtgtgtgtgtgtgtgtgtgtgtgtgtgtgtcaggggggtgggtaaagatggggtcttgccatgttgcccaggctggtcttgaacctcctggcct

SEQ ID NO: 259070 - DNA, 201 bp, Homo sapiens
atagggttgaaataaattgtttagaaaattgatcaaaagtagtagttactcagtactctctctctcagcgctcactctctttctgtctctctctgtctctstgtgtgtgtgtgtgtgtgtgtgtgtgtgtgtgtatttagaaaaagagtagaatggaaagattagaaatagagcatgaaaggctggggaagggaagttgct

SEQ ID NO: 259071 - DNA, 201 bp, Homo sapiens
ttgcagacccatatcttcccttaattatactgaatttagtatatttgttaaaaaataaagttttaagactacctgttttggtatcaaaattagtttttttkttttctttttttttgagatggagtcttgctctgtcacctaggctggagtgcagtggcatgatctctgctcactgcaagctccaccttgggttcacaccat

SEQ ID NO: 259072 - DNA, 201 bp, Homo sapiens
catgcctgtagtcccagctactcgggagcctgaggcacaagaatcgcttgaacccaggaggcagaggttggagatcgcaccactgcactccaacctgggcracagaacaagactccagctcaaaaaaaaaaaaaaagtgaaatgtagtccaactaaaacaatacaattgtgtttagtggaaaaatatattgcttcagttat

SEQ ID NO: 259073 - DNA, 201 bp, Homo sapiens
agacagcttgggaacctaaccctcagtaagatctaactgtgctgaactcggacatagtctgtctcttaaattgcataattatatatatatatatatatatatatttttttttttttgagacagagtttcgctcttgttgcccaggctggagtgcaatggcgcgctctctgctcactgcaatctccgcctcccgggttcaaa

SEQ ID NO: 259074 - DNA, 201 bp, Homo sapiens
acagcttgggaacctaaccctcagtaagatctaactgtgctgaactcggacatagtctgtctcttaaattgcataattatatatatatatatatatatatatttttttttttttgagacagagtttcgctcttgttgcccaggctggagtgcaatggcgcgctctctgctcactgcaatctccgcctcccgggttcaaacg

SEQ ID NO: 259075 - DNA, 201 bp, Homo sapiens
cagcttgggaacctaaccctcagtaagatctaactgtgctgaactcggacatagtctgtctcttaaattgcataattatatatatatatatatatatatatttttttttttttgagacagagtttcgctcttgttgcccaggctggagtgcaatggcgcgctctctgctcactgcaatctccgcctcccgggttcaaacga

SEQ ID NO: 259076 - DNA, 201 bp, Homo sapiens
gaaaagaccaaatctacgtctgattggtgtacctgaaagtgacggggagaatggaaccaagttggaaaacactctgcaggatattatccaggagaacttcygcaatctagcaaggcagccaacattcagattcaggaaatacagagaacgccacaaagatactccttgagaagaccaacaccaagacacataattgtcaga

SEQ ID NO: 259077 - DNA, 201 bp, Homo sapiens
acagacaagcaaatgctaagagattttgtcaccaccaggcctgccctaaaagagctcctgaaggaagcactaaacaaggaaaggaacaaccggtaccagcygctgcaaaatcatgccaaaatgtaaagaccatcaagactaggaagaaactgcatcaactaacgagcaaaataaccagctaacatcataatgacaggttca

SEQ ID NO: 259078 - DNA, 201 bp, Homo sapiens
gacttattgcgccactctctccctattcatccatttaccagttgttactgaatgcttactctatgtactagaaatgcagagatgagtaagatacaacctgkccctgaaaaaaattcagtctatttggagttatagacaggcagtaactagctattatatagtgtgatgatggctatgatataattacaaataatattctgc

SEQ ID NO: 259079 - DNA, 201 bp, Homo sapiens
agtccttgtttggtagagctatacccactctggaggcttgctcctaacaggcagcagacattttatatgtactaccaccagtcaggaggttgtgcaacctrtttgaagtcaatatgatgtgctcttgttaaatgtcaaaacatccaaggcctcattttgaatgtacaacatcagtcttacagatattatatccagggtgaa

SEQ ID NO: 259080 - DNA, 201 bp, Homo sapiens
gaagcactaaacaaggaaaggaacaaccggtaccagctgctgcaaaatcatgccaaaatgtaaagaccatcaagactaggaagaaactgcatcaactaacragcaaaataaccagctaacatcataatgacaggttcaaattcacacataacaatattaactttaaatgtaaatggactaaatgctccaattaaaagacac

SEQ ID NO: 259081 - DNA, 201 bp, Homo sapiens
catcaactaacgagcaaaataaccagctaacatcataatgacaggttcaaattcacacataacaatattaactttaaatgtaaatggactaaatgctccarttaaaagacacagactggcaaattggataaagagtcaagacccatcagtgtgttgtattcaggaaactcatctcacatgcagagacacacataggctcaa

SEQ ID NO: 259082 - DNA, 201 bp, Homo sapiens
agagtcaagacccatcagtgtgttgtattcaggaaactcatctcacatgcagagacacacataggctcaaaataaaaggatggaggaagatctaccaagcraatggaaaacaaaaaaaggcagggcttgcaatcctagtctctgataaaacagactttaaaccaacaaagatcaaaagagacaaagaaggccattacataa

SEQ ID NO: 259083 - DNA, 201 bp, Homo sapiens
catacgcaaatcaataaatgtaatccagcatataaacagaaccaaaaacaaaaaccacatgattatctcagtagatgcagaaaaggcctttaacaaaattyaacaacccttcatgctaaaaattctcaataaattaggtattgatgggacatatctcaaaataataagagctatctatgacaaacccatagccagtatcat

SEQ ID NO: 259084 - DNA, 201 bp, Homo sapiens
aaaaccacatgattatctcagtagatgcagaaaaggcctttaacaaaatttaacaacccttcatgctaaaaattctcaataaattaggtattgatgggacrtatctcaaaataataagagctatctatgacaaacccatagccagtatcatactgaatgggcaaaaactggaagcattccctttgaaaactggcacaagac

SEQ ID NO: 259085 - DNA, 201 bp, Homo sapiens
catccccatcaagctaccaatgagtttcttcacagaattggaaaaaactactttaaagttcatatggaaccaaaaaagagctcacatcgccaagtcaatcytaagccaaaagaacaaagctggaggcatcacgctacctgacttcaaactatactacaaggctacagtaaccaaaacagcatggtactggtaccaaaacag

SEQ ID NO: 259086 - DNA, 201 bp, Homo sapiens
aatggaacagaacagagccctcagaaataacgccgcatatctacaactatctgatctttgacaaacctgagaaaaacaagcaatggggaaaggattccctrtttaataaatggtgctgggaaaactggctagccatatggagaaagctgaaactggatcccttccttacaccttatacaaaaatcaattcaagatggatta

SEQ ID NO: 259087 - DNA, 201 bp, Homo sapiens
gaaataccatttgacccagccatcccattactgggtgtatacccaaaggactataaatcatgctgctataaagacacatgcacacgtttgtttattgcggygctattaacaatagcaaagacttggaaccaacccaaatgtccaacaatgatagactggattaagaaaatgtggcacatatacactatggaatactatgca

SEQ ID NO: 259088 - DNA, 201 bp, Homo sapiens
atgaagcagctcacacacttcagagtttattctcaatattgttgaattgggccataatgaagcataatgcctggttaaactttattgcaattcaaacatcmcaccagaaagaaatttttaaaaactatatcaacaaataaattcactgaagtctgtctatagcttcttctaggaactacaatttatttatttgtttatttt

SEQ ID NO: 259089 - DNA, 201 bp, Homo sapiens
gggtgtatacccaaaggactataaatcatgctgctataaagacacatgcacacgtttgtttattgcggcgctattaacaatagcaaagacttggaaccaasccaaatgtccaacaatgatagactggattaagaaaatgtggcacatatacactatggaatactatgcagccataaaaaatgatgagtttatgtccttttt

SEQ ID NO: 259090 - DNA, 201 bp, Homo sapiens
gaggctgagacaggagaatcgcttgaacaggttgcactgagtcaagatcgtgccactgcactccagccttggtgacagagtgagactctatctcaacaaayaaacaaacaaacaaaaaacacacaaaccctccaaagcttttctttccctcctgtgtcatgctacttagtacatagcctggttcacagtatatgattacta

SEQ ID NO: 259091 - DNA, 201 bp, Homo sapiens
ccggatgtggtggtgcctgcctgtagtcccagctacttgggagactgaggtgggaggattgcttgagaccaggaggtccaggctgcagtgagctatgatcygtgccactgtgctccagcctgggtgacagaatgagaccctgttaaaagaatcttttttttttttttttttggtaagaatgagctaagaactggatatctg

SEQ ID NO: 259092 - DNA, 201 bp, Homo sapiens
tttttttttttggtaagaatgagctaagaactggatatctgtaaagctaatagaaaaaaatcctgtgaagcaaaaagtcaaaattgaaataagctaggacygacagcaaggttaaatgcttatttttttttagtgttcataaataaggtacagttttaaaaatatcataaacatttttatgatcctattctcagggcccgg

SEQ ID NO: 259093 - DNA, 201 bp, Homo sapiens
ttgttgagatggggtcttgccatgttgtccaggctggtcttgagctcctgggctcaagtgatatgtctgccttggcctcccaaagggctgggattacaggtgtgagccaccatgcctggccaagaaaagttttttttaaagtttatttttgtatgtagtcataatacttgtaaggtaaccttttcactgtattgcttttta

SEQ ID NO: 259094 - DNA, 201 bp, Homo sapiens
atcaaggaaggtaactcattataaggatttaaaaaaaaaatttttttttgagacggagtcttgctctgtcacccaggctgaagtgcagtggcacaatcttrgctcactgcaagctccacctcccgggttcacgccattctcctgcctcagcttcccaagtagctgggactataggcgcacgccgccacacccggctgattt

SEQ ID NO: 259095 - DNA, 201 bp, Homo sapiens
cctatatattttttatataaatgaatagttttgtcatgccaagtattgatattagtattagtgacaacaagtattcctcattccatagtttttgtttttgtttttttttttttttgagacagagtcttactctgtcacccagggtggagtgcagtggcagaatttcagctcactgcaatgtctgcctcccaggttcaagca

SEQ ID NO: 259096 - DNA, 201 bp, Homo sapiens
ccagagaggttagtttagttaagtacactcatccagtttttggcttagctgattcttggatcactgacatctggctttttttgatttttttttttttaagttttttttttttttttttttttttgagacagagtcttgctgtgtcagctaggctcgggggctggagtgcagtggtgcagtcatggctcactgcagccttca

SEQ ID NO: 259097 - DNA, 201 bp, Homo sapiens
acaagtttaaacacacacacacacacacacacacacacacacgttttttagagttggggcttgccttgtagcccaggctggtgtctaacttctggcctcawgtatttctcccaccttggccttccagatagtttggattatgggtgtttacccctatgcccagctctaaataagttttaatgccaaccatcacttctattt

SEQ ID NO: 259098 - DNA, 201 bp, Homo sapiens
ctatgcttctatttttctctgtatatagtttatatccttaagactttcagaaagaaattgagatgttatgttgttttattgtatatgcatgtacatgcatacacacacacacacacacacacacacacacagttttatttgttcatcatatatttaaggcctgacataggtcttacaaagttcaattactatagggcttaa

SEQ ID NO: 259099 - DNA, 201 bp, Homo sapiens
tatgcttctatttttctctgtatatagtttatatccttaagactttcagaaagaaattgagatgttatgttgttttattgtatatgcatgtacatgcatacacacacacacacacacacacacacacacagttttatttgttcatcatatatttaaggcctgacataggtcttacaaagttcaattactatagggcttaag

SEQ ID NO: 259100 - DNA, 201 bp, Homo sapiens
gatatgaagctctgctgtttccgctttattagtaacttccaatgtttcaacttagctgagaaatcagtttgtttatttacctaagtatttgaggccatttsgtacaatagtccccacttgtgtccttgttttcagtttctgaggtctcagttacccataggacagtgtaataagacattttgagagagagacatgcaccac

SEQ ID NO: 259101 - DNA, 201 bp, Homo sapiens
gccatttcgtacaatagtccccacttgtgtccttgttttcagtttctgaggtctcagttacccataggacagtgtaataagacattttgagagagagacaygcaccacgtccacataacttttattacagtatattttaatagttgttctatttttagttagttgttgttaatctcttattgtgcctaatttataaatgaa

SEQ ID NO: 259102 - DNA, 201 bp, Homo sapiens
tatagtttcattcactttggaaattattttacaataaattttctctttccacctccatctacctttgggactccgattaaaataataataataataataakaataataagaagaagaagaagaagaagaagaagaagccacttgtagttgacccatgtctcagtgattctgttttcaatatttttgtttttctatctgttc

SEQ ID NO: 259103 - DNA, 201 bp, Homo sapiens
tttagtagagatggggtttcactgtgttagccaggatggtatggatctcctgaccttgtgatctacccgccttggcctcccaaagtgctgggattacaggygtgagccaccgcgcccggccttaaacaagtttaaacacacacacacacacacacacacacacacacgttttttagagttggggcttgccttgtagcccag

SEQ ID NO: 259104 - DNA, 201 bp, Homo sapiens
gttctgaaagatatattgctgctttttaaaaatttatttatcttgttctctatatggatttctggcacaaggttggtttttgtttttgtttttgtttctgtttttttttttgtcaattgtggtaagtccatggatgcttttctctataactttcccattttcccttatcacaccgtcactgcaaacatctaatttctgtcc

SEQ ID NO: 259105 - DNA, 201 bp, Homo sapiens
atagagtcttgtatttacactctaaaatgaccattcttcctccccaacaacagtattttagtgcaagactcaatatgcaaagcactctattgcaaaaatakttttggtatgtacaatatttaaagtgattttaagattggcctatttcagtctttgaagtatttcccccccccaaaaatcccttatttaaattttttaggg

SEQ ID NO: 259106 - DNA, 201 bp, Homo sapiens
tagaggaattggattggaggtgtctgtgtacatatggacatttctgtgtgtgtatgtatctgttgatgtgtgtgcatgtatttttgtatatgtatatgtakgtgtgtgtgtgtgtgtgtgtgtgtgtgtgaagagacattcatatatttcttagctctattgctgaaagagcaaaggagcgaagtcacaatagtagtgaca

SEQ ID NO: 259107 - DNA, 201 bp, Homo sapiens
gagatattttgttcaggaagtcaactaattcatggtcactattttaaaaaaatcatgatgtataaaagtaaagagcaacttaaaaatttgaaattttatcrtgtatttcaaaagtaaaataaagtatagagacaaacccataaatgtagaacattttatatgggaagcaagaattgaaatttgggatatacacacagacca

SEQ ID NO: 259108 - DNA, 201 bp, Homo sapiens
atccacctgccttggcctcccaacgtgctgggattacaggtgtgagccacagcacctggcctaaagtccatctaaatatgactcaatctaggagttcaccrcttgtctctgttgtcctttagattcaatttatctctcacgtaggccatttcagtgtaacaagatggcagttctcaactccaagccaaaatctcatgagtc

SEQ ID NO: 259109 - DNA, 201 bp, Homo sapiens
gaggcacgataattgcttgaacctgggaggcggaggttgcagtgagcctagattgtgccactgtgctccagcctgggcaacagagcaagactctgtctcchatcaatcaatcaatcaatcagtaagatacatttcactccagcctggacaacagagcaagactctatctcagtcaatcaataagatacatttatctcttta

SEQ ID NO: 259110 - DNA, 201 bp, Homo sapiens
ttttttttaagataagaataacatatttgaagaaaatgtcaagtactttcacttacattttcttattgatctccacaagaagacaaccaggcaatctgtckttagctgaggaaacagacccccgagaggttaagagtccctaagtagtaaacattcatctcacgttcaggacctctgactcatgtgtcttgctgtttatat

SEQ ID NO: 259111 - DNA, 201 bp, Homo sapiens
aaatggggagatattttcatgcccagttctatgctataactactattatgtctgaaaataaaggcagaaaaaaatacttgaagaaaaaatggcaaaaaacygcccaaatttattgaaaaacatttgtttatacatctaggaagctctttgaacaccaagtacgataaatgcaaagagatgcacacctggcctcataatagc

SEQ ID NO: 259112 - DNA, 201 bp, Homo sapiens
ttttttgagatggggtcttacttggttgcagaggctgtagtgcagttgaacaatcttagctcactgtaacattcacctccgggctcaagccatcctcccaycgcagcctcccaagtagctgggaccacaggcttgtgccaccacgcccaactaattttggtattttttgtagagatgaggttttgccatgtcacccaggct

SEQ ID NO: 259113 - DNA, 201 bp, Homo sapiens
cctggaaatcataaggaatagaaaatatatttactattcattaagtggaattgaatcatcataaaggtcttcatcctcttagtcttcatttactgtctccaaaaaaaaaaaaaagtttccatgactcttcagtagattatcataaattaagatgtatattgtaacccttagggcaactgatgagaaaataacaaaaaattc

SEQ ID NO: 259114 - DNA, 201 bp, Homo sapiens
gttcaagcaattctcctgcctcagcctcccaagtagctgggattacaggtgcctgtcaccacatccggctaattttttttttttttatctttagtagagayggggttttaccgtgttagccagagtggtctcgaactcctgacctcgtgatccctccgcctcagcctcccaaagtactgggattacaggcatgagccactg

SEQ ID NO: 259115 - DNA, 201 bp, Homo sapiens
ggggttcaaggccagcctaggcaacataggaagaccctatctctttaaaaaaagaaaaaaaaaattactcccccacccccactttcctctccctcacaatgagatactaccttaaatttgtgactgttatcaaaaagtcaaaatcatgtggaaaaaagggatcccttgttagcgggaatgtaaattggcacagagattatg

SEQ ID NO: 259116 - DNA, 201 bp, Homo sapiens
aagtattcttttttttttttttctttttttttgagatggagtcttgctctgtcacccaggctggagtgcagtggcgccatcttggctcactgcaagccccrcctcccaggttcacaccattcgcctgcctcagcctccggagtagctgggactagaggctcccgtcaccacgctgggctaatttttttttgtatttttagt

SEQ ID NO: 259117 - DNA, 201 bp, Homo sapiens
aagtaatactaagactgtgtttacccttttcattctcattctctcatgagcataggtggagttttctagaggttgcataccatgccatactgattgaatgyacaagttatatgaaactctagcagttctgtcaaaagacaaagttacaacaaatttagtttaaagatctcagtcagctttattgtgattctagaatcaggc

SEQ ID NO: 259118 - DNA, 201 bp, Homo sapiens
agttttgttcaaaacagtggcctataattttggcttcataagccagacattaaagagatttgcaaagattataaaacagtgcttctcttgtcactaagatkttttttagtttggaaatagttattttcataaaatgttacattaacatttaatgaatttattcttaaaataataaatatttaaaaaagttatattttaact

SEQ ID NO: 259119 - DNA, 201 bp, Homo sapiens
cagagcacgcagaaaactctttaataagagctcaaatttggaggataacgagatagctgcctctgcctttgccggtgcagtgagagcagcttcaggaatcytatggcctctgaatattttggcatcttcagcctaccaaaactgtgtcaaaaatgcctctcttatttctgcattgtccactggacgttttagtcatattca

SEQ ID NO: 259120 - DNA, 201 bp, Homo sapiens
agcacgcagaaaactctttaataagagctcaaatttggaggataacgagatagctgcctctgcctttgccggtgcagtgagagcagcttcaggaatcttayggcctctgaatattttggcatcttcagcctaccaaaactgtgtcaaaaatgcctctcttatttctgcattgtccactggacgttttagtcatattcagac

SEQ ID NO: 259121 - DNA, 201 bp, Homo sapiens
ctaaggtctgtaattaatgtcaaaattagctatccaatttacttaataagaagcttactccacagccattcattactgctgttttccttgtggcagatacttttttttttttttttttttttgtcgactcacctctttaccgtgtgatgtgagtaaattctgtatagtctaggccactcatgattatcccatttttcttgc

SEQ ID NO: 259122 - DNA, 201 bp, Homo sapiens
tattgtgcctaatttataaatgaaactttatcatagtatgatgtgtaggtatgtatgtgtaggaaaaacagtgtgtgtgtgtttgtgtgtgtgtgtatatrtatgtatgtatgtatgtatgtatgctatctatctatctatctatctatctatctatctatctatctatctatctatatatggttcagtactatccatggt

SEQ ID NO: 259123 - DNA, 201 bp, Homo sapiens
atcatagtatgatgtgtaggtatgtatgtgtaggaaaaacagtgtgtgtgtgtttgtgtgtgtgtgtatatgtatgtatgtatgtatgtatgtatgctatstatctatctatctatctatctatctatctatctatctatctatctatatatggttcagtactatccatggtttcagatacccactggtcatcttacaatg

SEQ ID NO: 259124 - DNA, 201 bp, Homo sapiens
cataaaattgatcgttttaaccattataaagtatacaattcagtgactgccagtatattcacaaagttgtacaaccatcaccactatctaattcaggacaytttcatcaccccaaaatgaaatcccatacccagtaagtagtcattcgctattccctcctctaacccagtctcctgggaactactagtatacttagttttt

SEQ ID NO: 259125 - DNA, 201 bp, Homo sapiens
gcaattttataggttactgaactttatattttacatgatattacagtcatccttcagtatacatgggcgggtggttccaggacccaagtctacaaatatgttaagtcccacagtgggtgctgtgaaacctacataaaggaaaagttggctctctgtatgcgcaagtttcgtatcctgtgaattctgtattttcaatccaca

SEQ ID NO: 259126 - DNA, 201 bp, Homo sapiens
acccagtctcctgggaactactagtatacttagtttttctatgaatttgtctattctgagcattttatagaaatggaatcatataataatatatgatcttytgtgtttatatatatgaccttttgtgtttgggcttattttacttatgtaatgctttcaaggttcatccatgttgtagcatgtatcagtccttcattcctt

SEQ ID NO: 259127 - DNA, 201 bp, Homo sapiens
taggagtgtaattgataaaacatgtatttgtgcttttcaatagtaatattgactaactcaagaaaacttttggagacaggctttctttgaatggactgtgwtgcttgcttgtttatgttttcatgaatacatttactagcttttgattttttatattaggagagaacagagtgtcttgttgtggcagaaatacctaatatg

SEQ ID NO: 259128 - DNA, 201 bp, Homo sapiens
ggattgcttgaacccgggaggcagaggttgcagtgagtaagccaagattgtgccactgcactccagcctgggtgacaagagtgagaccctgtctcaatagaaaaaaaaaaaaaaggccaatatgggcccagggcctgccattcagacttccgcttgtggcagagaccaagggatggcagcaggttagtcgcaggtgaagtc

SEQ ID NO: 259129 - DNA, 201 bp, Homo sapiens
gaggcagagaattgcttgaaccggggaagcagaggttgctgtgatcggagatcgcgccactgcactccagcctgggtgacagagcaggactctgcttcaaraaaaagaaaaaaagaagaaaaaaaaaggcactgcttgtatagtaaatgagcgaattgtcttattgagtataacccatagtatattatagttcttgatatt

SEQ ID NO: 259130 - DNA, 201 bp, Homo sapiens
taagaatctaaagatgattattaaaagcaaacaacataatagcattcttacaatgtcttttgcaggagagaattaatagatttagcagtgtttctttgaawaaacttgtccataatgaaagctaactaaaattgcattaaaatttatcaactcctttaaaaaaattcaatatgttttgagatacaagtatgcacaagtatt

SEQ ID NO: 259131 - DNA, 201 bp, Homo sapiens
ttaactgtgttccctgcttactgtttcttccattaatttaaatatcatcgaagttgataatgctaagaacttgtttgtgttaaggtaattctcacatgtgrataaaaactgattagtgccaaaagtttacaataaaatataacagtctcctatcctaccctgggttctccagaagcggcaacttataatactgttagtttg

SEQ ID NO: 259132 - DNA, 201 bp, Homo sapiens
aagctgtttttctttgccaggtatggtggctcacacctgtaatcccagcactttgggaggctgtggtgggaggttcacttgaagccaggagtttgagaccrctctgggcagcataatgagatcccatttctacaaaatatttaaaagttagccagagatagtggcatgaacctgtagttctagctacccaggagactgagg

SEQ ID NO: 259133 - DNA, 201 bp, Homo sapiens
aaagatgattattaaaagcaaacaacataatagcattcttacaatgtcttttgcaggagagaattaatagatttagcagtgtttctttgaataaacttgtmcataatgaaagctaactaaaattgcattaaaatttatcaactcctttaaaaaaattcaatatgttttgagatacaagtatgcacaagtattttctttcat

SEQ ID NO: 259134 - DNA, 201 bp, Homo sapiens
tagtccacttgtaagcatggttattacccagacatgtttggattttatcagtctttgctatatgttttaaattagcctataatctgtaagtatcacagatrttgtagaatgatcaattttcagattatcagtttgatttattgattaccgctttcagtgctgaaaatgacagttggtagatattgtccaattcatgacttg

SEQ ID NO: 259135 - DNA, 201 bp, Homo sapiens
gttatattttgattttaattacttcagtagtaattcagaattaattgaagctacagcttaaacatattttattacatttaaatagttgggaaaaaataaayagttggttagctaaaacccaataaataaattgggaatagattctgctagttgaatgctgaaatgaatagtatatactttaaagggctttaattttttctt

SEQ ID NO: 259136 - DNA, 201 bp, Homo sapiens
attgcttgaaccctggaggcagaggctgcagtgagtcgagatcacgccactgcactccagcctaggcaacagagtgagactctgtctcaaaaaaataaataaaagagttaggtttaatcccagctacttgggagggtgaagtgggagggtctcttgagcccaggagttcaagtccagccggggcaacctagtgaacacttc

SEQ ID NO: 259137 - DNA, 201 bp, Homo sapiens
atttcctggtgaacactacatttaatacaattatgtcatatctttagtttttgcaataatgatgtcagacatgttcctatcagaggcatttgagccagagygactccatcttgaatagggtctgggtaaaataaggctgagacctaccagggtgcattcctaggaggttaggcattcttagtcacaggatgagataggaga

SEQ ID NO: 259138 - DNA, 201 bp, Homo sapiens
ttgcttgaaccctggaggcagaggctgcagtgagtcgagatcacgccactgcactccagcctaggcaacagagtgagactctgtctcaaaaaaataaataaaagagttaggtttaatcccagctacttgggagggtgaagtgggagggtctcttgagcccaggagttcaagtccagccggggcaacctagtgaacacttcc

SEQ ID NO: 259139 - DNA, 201 bp, Homo sapiens
ctaaatatagtagtatgtgactcttttcatagcaatggctatgaaagaatacaggattggaaatcaatgaggaccaatggtcagaatatcttgggccccaytgagggccttttctgagttactgagcttccatttctcttttctttttattattattattattattattattgttattattaattattattttgagacagt

SEQ ID NO: 259140 - DNA, 201 bp, Homo sapiens
cttcagcctgtgtgacagagtgagactttttctcaaataaaagaatcaatacagcaatacagccccaatttctaaattggagaaagtcattttctatttcrtctctctctgttcctccactagattgtaaactctttgagagtaagaattatgcagttttgtctgctcttcaatgttttattgccttgcattaaaaagata

SEQ ID NO: 259141 - DNA, 201 bp, Homo sapiens
aattaaatattagaaaaatgcccaaggaaaaacaatacaactgagcttcctttctggttttcatgcttttaaaatttataaaaattgtggctctgctgcctttttttttttttttttttttttttgtagttagatgaatttggcctgagattctatgaaaaaaataaaacaatagtttttatttcatgatttttttttcaa

SEQ ID NO: 259142 - DNA, 201 bp, Homo sapiens
tttttagacaggaaacaaatttacctatctaattttctcattttacagttgaattaaagcccagagatagtgtgacatgttcaagttcacacagttacatmtcttgaactagatatgagatctctagataccttgttcagttccctttctagtatagcattcaactctgaggaattcctaaataatgatttttttttgggg

SEQ ID NO: 259143 - DNA, 201 bp, Homo sapiens
gaaaaacaatacaactgagcttcctttctggttttcatgcttttaaaatttataaaaattgtggctctgctgcctttttttttttttttttttttttttgkagttagatgaatttggcctgagattctatgaaaaaaataaaacaatagtttttatttcatgatttttttttcaagttgttctgattttataatatctagt

SEQ ID NO: 259144 - DNA, 201 bp, Homo sapiens
aatatgttatttaatatgtaacccattttaatgttttaattcatttgaaagtttttttaactgtccaagatataattcatctctatgggtataacttggcraactgatacttttttcttacctttttttttgtttttttgagacagactcttgctccgtcacctaggctggagtgtggtggcatgatcttggctcactgca

SEQ ID NO: 259145 - DNA, 201 bp, Homo sapiens
cctcaggaagatcatgcttgtctgtaaaggattttatatccccttgacttatgaagcttagtttggctggatatgaaattctgggttgaaaattcttttctttttttttgagacagagtctcactccgtcaccaggctgaagtgcagtggcatgatctcggctcagtgcaacctctgcttccctggttcaagcaattctcc

SEQ ID NO: 259146 - DNA, 201 bp, Homo sapiens
gtgagctatgatcatgccactgcactgcagcctgggcaactatttaagaaaaaaagagagagagagagaagcagaaattcaaaggacactttttgaaatgyacttaatgtaaaggctgctttgcatggttaatttattcctattaaaggaatactacattcctgccacttttctaggtggtgaatttatagcagcgaccag

SEQ ID NO: 259147 - DNA, 201 bp, Homo sapiens
attatgaaaattagccgggcatgatagtgcgcacttgtagtctgagctactcgggaggctaaggtgagaaaatcacctgagcccaggagtttgatgctgcrgtgaactgtgattgcaccactgcactccagcctgggtgatagagtgagcccttgtctcaaaagaaaaatattttttaaccttttaatttattttttagag

SEQ ID NO: 259148 - DNA, 201 bp, Homo sapiens
taactttattcttttgcatgtggatatcctgtttttcccaccaccatttctcaaagaaactatcctgtatgcattatcagtactatactttttcttttttyttttttttttgagatagattctcactctgttgcccaggctggagtgcagtggtatgatctctgctcactgcaagctccgcctcccaggttcacgccattc

SEQ ID NO: 259149 - DNA, 201 bp, Homo sapiens
aaccttttgtaaattattttcttctctcctatttaaggtaacataaattgttaattataaaatggcaggaccaatgttcagggaaaggattttcttatgcrttcttaccgtttacacattccactattatgctaacctttcatcagtatttttatatttggcctatccttatttgagtataatctccatagtgggttctca

SEQ ID NO: 259150 - DNA, 201 bp, Homo sapiens
acccttgcacagtgataggatgctttattacatgccacactagtgttatacatccagagtcttagtcaagctgaagctagaccagcaccaaatttcataarcactgtctatgattatttgagccttcgttagttaaaaaaatgtaaagattatcctctccagccatgatttaaaaaaagagagagagaaatcactttgttc

SEQ ID NO: 259151 - DNA, 201 bp, Homo sapiens
atcctctccagccatgatttaaaaaaagagagagagaaatcactttgttcatgtgaaatacaggatgattttagagtgaagcctgtaatttctcatcaacrcaaatgttccctcaaagacctaatatcctgaatggccttcatctagaagcaattgtaaatagataatggaattgaaaggagtttatcttctgggaatgtg

SEQ ID NO: 259152 - DNA, 201 bp, Homo sapiens
aagattaataatatccttgtccatttaatcataaaaaggaatgcttattatgtgccaacttttccaagtgctttatatgtattaactaatttactcctcasaaaaatcctgtaagtacctgcaaatgctattattgttccttttttctttctttctgagacaacatctggctctatcacccaggctggagtgcagcagcac

SEQ ID NO: 259153 - DNA, 201 bp, Homo sapiens
tttgctatactcccttttattactacaacatcttagcttcctctctaaaggaggagaaatagccaaagtggttttataaacactggtctgtcgactggtaycagtctatgacataagagttttcatcagtcagtatcaaaatgtaaaaaggcaggggcaagaaagtaaatttccataaaactaaatgtattcagttttaaa

SEQ ID NO: 259154 - DNA, 201 bp, Homo sapiens
gagaccaaggcaggaggattgctcgagcacaggagtttgaaaccagcttgggcaacaaagtgagaccctgtctctacccacccgccccccaaaaaaaagcmaaaaattgaccagctgtggtgctgcgtgtctgtggtcccaactacacaggaggcagagagaatcccttgagcccaggaggtcaaggttggagtgtgttat

SEQ ID NO: 259155 - DNA, 201 bp, Homo sapiens
atttttgcctatttttggctcaataagaactggcaaattttatgtgaactaatgattttggtaatgaatactcaaaaataaaatcaaaacaatagaagacttggcttgatgacttagattgatctaaaatctgattcaaaaattcttttgataagtctaaattccttctagttaagtgtagttaattaagctagtttatag

SEQ ID NO: 259156 - DNA, 201 bp, Homo sapiens
attacaatattagaaattaaaatggaaacggttgaaaatattcaatacatttaaagataactgtaataaacccagtatttgctagcataaacacatttttstggaaaataatgatattttctaaaccagaaaaaaatagttaaaagaatggtattgctttttgcaaatctctttaatgtctgacttagtagaagacagctg

SEQ ID NO: 259157 - DNA, 201 bp, Homo sapiens
gaaagtgagtacacctttgacagattatgtgtaggcacttatatacaactctcagataaaagactagagacttcacccaagaaccaacattcttagaattaaaaaaaaaaaaaaacaccttcattaagtatggttaaaagccacgtatagattagaagattttactttgttggttttttttgttttgttttcgtttttgtt

SEQ ID NO: 259158 - DNA, 201 bp, Homo sapiens
aagcaaatagttttaaccttgttggttccctgaaaagattttgtgggacccttgtagtccttagactatgctttgagaactgctggccttagcaattgaamgtaagtacagtaggagacattggtagaaatgcttttgaatttacagtagagtctgggcatcaatattagatgtctattgatcttttattaaaagactaag

SEQ ID NO: 259159 - DNA, 201 bp, Homo sapiens
acctgtaatcccaacactttgggaggcagaggcaggaggatcacatgaggccgggatttcaagaccagcctgcacagcacagtgagaccccagtctctacaaaaaaaaaaaaaaaaaaaaaaaaaaatagccaggcagggtggcatgtgcctgtagtcccaactactcaagaagctgaggtgggaggatagcttgagccca

SEQ ID NO: 259160 - DNA, 201 bp, Homo sapiens
tcaagcgattaccctgcctcagcctcccaagtagctggcgactacaggtgtgcgccaccacgcccggctaattttttgtattttagtagagacagggtttyaccatgttggccaggatggtctctatatcctcacctcgtgatccacccgcctcaacctcccaaagtgctgggattacaggagtcagccacagtgcctggc

SEQ ID NO: 259161 - DNA, 201 bp, Homo sapiens
gactatgctttgagaactgctggccttagcaattgaaagtaagtacagtaggagacattggtagaaatgcttttgaatttacagtagagtctgggcatcartattagatgtctattgatcttttattaaaagactaagagtttgagaatttaaaggctaaaacattataggtcctgctgatcagacttttcatagccagat

SEQ ID NO: 259162 - DNA, 201 bp, Homo sapiens
caagtagctgggactacaggctcccgccaccatgcccagctaattttgtttttctatttttagtggagacggggtttcaccgtgttagccaggatggtctygatctcctgacctcgggatccgcccggcctcccaaagtgctgggattacaggcgtgagccaccatgcccggctggcatttttttcttaaaggaccagaga

SEQ ID NO: 259163 - DNA, 201 bp, Homo sapiens
atagccagatagttctgtaggcttaaggccctttaaatccagataatgtccaagtaagtggcaaggcagcaatttggattccatagctgctaaaaagtttyttacggcatttgtacatagatcattaagaagagaggaattatttctcacaaccaatttttagtgtagacaaaactggaatattttggagaaaaatgtctt

SEQ ID NO: 259164 - DNA, 201 bp, Homo sapiens
aagaacattggtaacttaagtgagtgagcaagggtggggtgagggatggaggcagcagggaaatcatagaattattacaatcaggaatgcaaatggttaattagatcattgcacccagtccttaaggatctgagccagagccatggagaataccaaacgagtctgaggtaaattctccatggcttgtcacagtgtcttctg

SEQ ID NO: 259165 - DNA, 201 bp, Homo sapiens
ccagatagttctgtaggcttaaggccctttaaatccagataatgtccaagtaagtggcaaggcagcaatttggattccatagctgctaaaaagttttttayggcatttgtacatagatcattaagaagagaggaattatttctcacaaccaatttttagtgtagacaaaactggaatattttggagaaaaatgtcttaata

SEQ ID NO: 259166 - DNA, 201 bp, Homo sapiens
ggcaggagaattgcttgaacctgggaggcggaggttgcagtggccaagatgatgccactgtactccagcctgcgtgacagggcaagactccatctcggggaaaaaaaaaaaaaaaaaagacctccctaacggtaacgcacaagactttctcttactgtcaaggctgaagaatgagacaggtgcttagatcatatattggtc

SEQ ID NO: 259167 - DNA, 201 bp, Homo sapiens
gttcaattcccatctatgagtgagaacatgcggtgtttggttttttgtccttgtgatagtttactgagaatgatgatttccaatttcatccatgtccctayaaaggacatgaactcatcattttttatggctgcatagtatatattcaggtatattttaaggcagtttttaagtatatcttttttctttaatagtacttac

SEQ ID NO: 259168 - DNA, 201 bp, Homo sapiens
gtctcaaactcctggatgcaagcaatcctcctgcctcagcctcccaaagttctgggattacaggcatgagccaccacagccaatatgcttcattttctacmtctgattataatttaaaggatagtattataaatgcttaattttataacctccaaatagtgatattgtattgctccttattgtgatggataaattataaga

SEQ ID NO: 259169 - DNA, 201 bp, Homo sapiens
tggatgcaagcaatcctcctgcctcagcctcccaaagttctgggattacaggcatgagccaccacagccaatatgcttcattttctacatctgattataawttaaaggatagtattataaatgcttaattttataacctccaaatagtgatattgtattgctccttattgtgatggataaattataagacatatgtgttta

SEQ ID NO: 259170 - DNA, 201 bp, Homo sapiens
gtttggtggcaagtctgtttacagaaatttgctgttaatttctcagttgttcacatgaacttatctgatttatagctttggccagcaatttacaaagaaasttcagtctgtagggcttcctgttgctctgagtgggggctccttctacccctgttcaacttcagtcagcccatggtctatagtatacctctcacaaggtcc

SEQ ID NO: 259171 - DNA, 201 bp, Homo sapiens
tgtgcagccctgatcctccttcaaggaagaattgtggcccagttgtggggaggtcagtcatcagaaaaccttcagctgtctggcctacagaggacagccaraaaaaaaaaaaaaattgccttaagctgtcagctccttcaggctctacctcagttgcggagagcctccttgcttaaggtcacatcctttccagggcagcac

SEQ ID NO: 259172 - DNA, 201 bp, Homo sapiens
tgtcatccaggctggagtgcagtggcgagatcatggctcgctgaaacctcagcatcctgggcttaattgatctcccaccttaggctcccatgtgtgtgggkgtgtgtgtgtgtgtttgcatgtgtatgtagatggaatttcactgtgttgcccaggctggtcttgaaccttctaggctcaagcaatcctcacaactcgccc

SEQ ID NO: 259173 - DNA, 201 bp, Homo sapiens
attctctaatcctaacactttgggatgctgagacagaaggatcacatgaggccaggagtttgagaccagcctggacaatgtagtaagacccccatctcttaaaaaaaaaaattagccaggcatagtgacatgtgcctgagacctagctacttgggaggtttaggcaggagaattgcatgagcccaggaggttgagcctgtg

SEQ ID NO: 259174 - DNA, 201 bp, Homo sapiens
aagggagaattttgcatgcaatagtgtatgatgggcacttttaacttttttatggctttctttttcaaagtcatacaccactttacttttcttttaacctmattccatctttcttctgttttttttgggggggagaggttggaacatctccttagtaattttttccacataggaaaaaggattattaaatattactttgcc

SEQ ID NO: 259175 - DNA, 201 bp, Homo sapiens
cagcttggctgcatataaaatccttgactttatttcttggaaataatgttctagttttgtcttgctttgtgttttgctcttgaagtctaaggcagcctaattttctttctttctttctttctttttttttttttttaaagagacagagtctcactctgtcacccaggctggagtgcagtgtggtatgatcatactttacta

SEQ ID NO: 259176 - DNA, 201 bp, Homo sapiens
ttgcttgagcccaggatgtcaaggttgcagtgtggtatgatcttaccactgcactccagcctgggtgacagagtgagaccctgtctcaaaataaataaatwaataaataaataaataaataaataaataaataatcctttgaaaaataagggaaattcaaatgtaatccacaatgaggtatcattttataccagttgataa

SEQ ID NO: 259177 - DNA, 201 bp, Homo sapiens
attttgtgcttatataggaaaatctccttggtcagtatgtatcataatagggtcataatgtctgcaacttattttccagtggtttgaggggaaaaaagacktgtgtgtgtgtgtgtgtgtgtgtgtgtgtgtaaagaatatgttctaattgatacatatacgtaaatagcataggagtgttcatttgtactactctcaatt

SEQ ID NO: 259178 - DNA, 201 bp, Homo sapiens
attctttaaaatcatgtgaaataagtagagtttctatgattttttaaaaatcacaaatagcatatatccgttttatctttaatagtgtttgagcccatcatttgaaagcattggagcatgtaaccaatatttctgaaaatgaaccatggttccagtcataatctatatgctttaaaattccttccctttattctttcttcc

SEQ ID NO: 259179 - DNA, 201 bp, Homo sapiens
aataattgtagaaaaatagcaaaactagtttaatgaattcccatatgttaatatttaccacagctattgtatgtatgtatgtagagtttttttcctgagtygtttgagagtaagttgcaaaaataatgcctctttaacctctaaatacttgaggtgtggttagtaaaaattcacgttttgttacataaccacagtatattt

SEQ ID NO: 259180 - DNA, 201 bp, Homo sapiens
acacacccagcatgtatgtgtgtgtgtgtgtatatacatatatatgtatatccacacatacatacatacacacatctttacatatatagacctcatctatmtatatatatatatctcatctatatagaagagatatatatagagagatatatagatatagagagagatatagatatatagatatagatatagatatagata

SEQ ID NO: 259181 - DNA, 201 bp, Homo sapiens
acacacatctttacatatatagacctcatctatatatatatatatatctcatctatatagaagagatatatatagagagatatatagatatagagagagayatagatatatagatatagatatagatatagatagacatagatatatatctcatctgtatatatatagatgaggtctccatatgttgcccaggttggtctc

SEQ ID NO: 259182 - DNA, 201 bp, Homo sapiens
atttttaatgccacttcaggaacttgagctactattgtttaggaaatgagtcatttaaggttttttgaacaaaggagctttgccagagcaggaaagtgttscagtagggtttacaaagtaatgagagttatcaactaaagttatattaataggaaggatgacatagttccaggagttgctgtataattaaaattgatagga

SEQ ID NO: 259183 - DNA, 201 bp, Homo sapiens
acatgtttaaaggcccagccattttgttcaggcctgagacaactctgacaggtgatataccaccagagatctgccaggttgcttgaggctttgttgggccygaattgcaatttgatttttccctctgcccaattcggctttcttccccaaatctcttcttcttctttttttttttctttgagatgaagtcttgctcttgtt

SEQ ID NO: 259184 - DNA, 201 bp, Homo sapiens
tcttaattaaggagagaatgtggagggaccttttgaaaaaatatagcagagcacgcagaaaactctttaataagagctcaaatttggaggataacgagatrgctgcctctgcctttgccggtgcagtgagagcagcttcaggaatcttatggcctctgaatattttggcatcttcagcctaccaaaactgtgtcaaaaatg

SEQ ID NO: 259185 - DNA, 201 bp, Homo sapiens
actcctgctaggatgatgggtataatcagaaggacagagttttggcaaggatttggagaaccctaaggcattgctggtgggaatgttaaatagtgcagccwttttggaaaagagtcttgcaattccttaaatattttaacatagagttaccatatccagcaattctgctcctaggtatatacacaagacaaatgaaaatgt

SEQ ID NO: 259186 - DNA, 201 bp, Homo sapiens
ttgtgaggcagcttctaaggcctttaagcatgtctaagtgccagtctttgggggtgtggtttgagagaccaaaatagatgcccctttattaactaggacasatcttaaggttaaggaaacaaagttacctatcggtagaaagttcagggccctgctggtgtggcaaatttctaaattcctatggctacaagaaaaatcact

SEQ ID NO: 259187 - DNA, 201 bp, Homo sapiens
taacttgtggcctcaagcgatcttcccgtcttagcctcctgagtagctgggactacagatgttagccatcacactcagcttctttcacatttatacattargagtccttttgctttttatatgtcttttataatagccattagttggattctttaatcttataatctttattttttaacataatgatttttgatttttgtt

SEQ ID NO: 259188 - DNA, 201 bp, Homo sapiens
ctgtaatcccagcaagttgggaggctgaggcagaggattgcttgaaaccaggaatttgagatcagcccaggcaatgtagggagaccccgtctctaaaaaakaaaaattaaactggtgtggtattatgtacttgtagtcccagctattcagaaggctcagggaggaggatcacttgagcccaggagtttaaggctgcaatga

SEQ ID NO: 259189 - DNA, 201 bp, Homo sapiens
ggatggtatggatctcctgaccttgtgatctacccgccttggcctcccaaagtgctgggattacaggtgtgagccaccgcgcccggccttaaacaagtttmaacacacacacacacacacacacacacacacacgttttttagagttggggcttgccttgtagcccaggctggtgtctaacttctggcctcaagtatttct

SEQ ID NO: 259190 - DNA, 201 bp, Homo sapiens
cattttaatacatctggctcctaggactgattaaagagacattttatttgttgaaatatgcacattttcttcatgaaattggttttcttttttatgtgtgacttttcttgcaaaagcttacaaggcacatgcttttgatagcagtgttacatttttaattaatattttagatgtaaaaggtgacagtttaaaagattgttt

SEQ ID NO: 259191 - DNA, 201 bp, Homo sapiens
taggattctttgttacaagtgatgggaaaccaaactagtgctatgctaggttaaaaaaaggaatttagggactcaagtcactaaactactcacgcgcgcamacacacacacacacacacacactcacacacactcacataggggttcaattgggccttaggaatggctaaatctaaggtctcaaaagctgtcagttttttt

SEQ ID NO: 259192 - DNA, 201 bp, Homo sapiens
aggctggtctcaaactccttggctcaagtgatcctcttgcttccacctcccatagtgctaggattataggcgtgaaccaccatgcctagccagaaatactrtcttaaaatcaactctgcataattcactgacccatcattaaaatttgtcagtacttaaaaatagctaagtcctctattattttatttaaccttttactgt

SEQ ID NO: 259193 - DNA, 201 bp, Homo sapiens
cctcctgaaaaatcaatgcagaatgggaaatgaaggtagcagtatccacttggaatacaaggcttgaagagtgtgcagtattccataagcatacatattcmtttagtaaatacagttaacccttgaacagtgccgggggttagaggcactcccctcccccgggtagttgaaaatccatgtataacttttgactccccagaa

SEQ ID NO: 259194 - DNA, 201 bp, Homo sapiens
ctccatcaagtcatcttctgttaattcctgtgatatggtgtctgttagctcttgaattactccaagatccgtatcttgaaactcttcaacttccccccacttttttttttttttttttgccatatccacagtctcttttatgatatccttgattgactctgttgtaaatcctatgaagtcatatacaccattggacacagt

SEQ ID NO: 259195 - DNA, 201 bp, Homo sapiens
atttgtttacatttctcttgactcaaatgctgccgtgtatggtctgtaagtgtttgcctgtgtaagttttgatagattttaactttttataatacattttwatagttttatgatagtgataaaatagtatctacatatactttatgagttcatgacatacttaacaatttttatcaatatttctaggctacacagtttgtc

SEQ ID NO: 259196 - DNA, 201 bp, Homo sapiens
tggaactacaggtgcatgcagctgggcctggcttagtttactgcttttttaaaaataatttacaaataataattgtacatattcatggaatacattatgatttttttttttttttgagacggagtctcactctgtcgccaggttggagtgcagtggcgcgatctcgcctcactgcaacctccaccccctgggttcaagcga

SEQ ID NO: 259197 - DNA, 201 bp, Homo sapiens
cttcatagaatcaattaggaagtatttcctctgcttcatttttggaataatttgggacaaattggttttaattcaacagtgaagccatccagttctggactttttttttttttttttggtgttggaagactttttgttattaaatcaatcttgtttcttgtcattggtctgtttaggctttctatttcttctttcagtctt

SEQ ID NO: 259198 - DNA, 201 bp, Homo sapiens
cataattggtaatagaaataatgaaaagaggttgtgttcttaggcaaggacaatttaaaagaaccccaaatgattaccttgaattaaggtaaacactggtaaaaaaaaaaagagcaaaaagggcaattttttcctttagtatattaaacaatgttgtttctaacattccctcacgtttagactactctgaaaaatccttag

SEQ ID NO: 259199 - DNA, 201 bp, Homo sapiens
ttttgaatttttttctgagatacagtctcactctgtcacccaggctggagtgcagtggtatgatctcagctcactgcaacctccacctcccgggttcaagygattctcatgcctcagccacccaagtagctgggattacaggtgtgcaccaccttgctcaggcaatttttgtatttttagtagagacggggtttcaccatg

SEQ ID NO: 259200 - DNA, 201 bp, Homo sapiens
tcctttctttctctacttccccatagcaccttcttaaaatttcccttgcttagtttctccaccatcacttctcctctcctcatttggcctcctcttgtttyctccttttccttttttatttcctctaatttttgttctccattttttccttcgtcgtcttttgttctgtgttctctgccttgggaattacaccacctcttt

SEQ ID NO: 259201 - DNA, 201 bp, Homo sapiens
atggcgtgaacccaggaggcggagcttgcagtgagccgagatcgcgccactgcactccagcctggacagagcgagactccgtctcaaaaaacaaacaaacaaaaaaaaaaaaacataaatatgattccaaagaatgaaactttggaagtaaagaaagcttagggagattgaatgccataaaaaatgctatttggactttat

SEQ ID NO: 259202 - DNA, 201 bp, Homo sapiens
tgtggagggaccttttgaaaaaatatagcagagcacgcagaaaactctttaataagagctcaaatttggaggataacgagatagctgcctctgcctttgcyggtgcagtgagagcagcttcaggaatcttatggcctctgaatattttggcatcttcagcctaccaaaactgtgtcaaaaatgcctctcttatttctgcat

SEQ ID NO: 259203 - DNA, 201 bp, Homo sapiens
cggctgccttgactgctccgagctgggcgttagcctcccgagcgcgtgagcactgtcgctccttctcgcgggtggtctggagcctgcctccgcctctggtycccctcgtgttgggggttccctccgcacttttcatttgggcatttctgctttcctcagaagttttcgggtctgtggcacattgcggagttctgtgtgtcg

SEQ ID NO: 259204 - DNA, 201 bp, Homo sapiens
gattattttggcaaggaaaaaagcctggtaatagtatttgcatttcaattaattgtttcattctgatttgaaatgtgacttatgttagatacatctctgayccttccctatctcagtactaatactaatatgttgtatttccactacaatagcattacatcttacaaacatttatttcctttataactgacgtagagcttt

SEQ ID NO: 259205 - DNA, 201 bp, Homo sapiens
tcctttctggttttcatgcttttaaaatttataaaaattgtggctctgctgcctttttttttttttttttttttttttgtagttagatgaatttggcctgrgattctatgaaaaaaataaaacaatagtttttatttcatgatttttttttcaagttgttctgattttataatatctagtcaagtgatgacatgcagagat

SEQ ID NO: 259206 - DNA, 201 bp, Homo sapiens
ctaaaagtttattaattatataattaagttctccctcagctttctccctgatattagtctcataataaaacagtcattgcctacttttattcttttgcacttttttttttacaatatttcacattcattctaacaacgtattctagtagtggtttatttgttcctgtctttagcaaggtaataaaaggaatttgaagcttt

SEQ ID NO: 259207 - DNA, 201 bp, Homo sapiens
tcattagctttttgtatattaatctgtgttgtcctactattagctagaagagcttactaactgtgagcttgaagatattgtatattccctcttcggatgatttttttttttttttttttgagtcagagtcttgctcttgtagcccaggctggagtgcagtgatgcaatctcggctcaccgcagcctccgcctcccgggttc

SEQ ID NO: 259208 - DNA, 201 bp, Homo sapiens
atatatatgcacccactacaggagcacccagattcataaaacaagttctcagagacctacaaagatacttagacttccacacaataatagtgggagacttyaacaccccactgtcaatatgagatcaatgagacagaaaattaacaaggttattcaggacttgaactaagctctggaccaagcggacctaatagacatggg

SEQ ID NO: 259209 - DNA, 201 bp, Homo sapiens
aaagcagctagagataatgaaaataaaacctttaaaaagaatgtaacacctttaagttgactgcctcgtgtacactgtggcagcatatatctggtaatcaytggtataggaggtaagtttaacaggccagtttaagacagcatataaatcatcactaaaggacagatagctaagaaagatggaaaataaacaaataattga

SEQ ID NO: 259210 - DNA, 201 bp, Homo sapiens
cttagatgatgggttgataggtgcaccaaaccaccatggcacatgtataccaacgtaacaaacctgcacgttctgcacatatatcccagaacttaaagttaaaaaaaaaaaaaaaaagccaggcgcagtggctcacgcctgtaatcccagcactttgggaggctgaggcaggtggatcacaaggtcaggagatcgagacca

SEQ ID NO: 259211 - DNA, 201 bp, Homo sapiens
tctttgactcctttggtgcacccaaagcccagtacctagacattcaatagctgttggttgatggaatgaatccaggtacttctgacagattccagattttyactttcttttgtttcttataataaaaatgtagtatagaagcagtcatggcatgagtctagtaaactgaggattcagatcagtcaaagttataatttatct

SEQ ID NO: 259212 - DNA, 201 bp, Homo sapiens
gtgaaatagattaattagaataaatgaagtgttcttttttcattctgtttgtacagtagatattattggattattttataaaatacccattttataaattggatggtatgttataaatggatagtaggatttttcctttcttcattttgtaccaagagaataaaaaacactcctgttcagtacatctctagcaagcctatt

SEQ ID NO: 259213 - DNA, 201 bp, Homo sapiens
ttatctgttgtttccttgtaattagactgaaattatggggttttgagaataccaccactgaggtgattttgctttcccaatgtatcacatcaaggtgtacrtagtatcaatctgttactgttagtgtgaaccttgaacatcaagttaaggtggtgtccattgggtttctccattgtctatttgttcctttccatatacagt

SEQ ID NO: 259214 - DNA, 201 bp, Homo sapiens
cacacacacatatagagagagagccactgtgcctggcctaaatagttttattttgaaataattttagatttatagaaatgttctaagatagtaaaaataarttccatgtactcttcacctagcttctcctaatattaacaccttaaataactgtaggatcttcatcaaagctaaattaacattggtacaataccattaact

SEQ ID NO: 259215 - DNA, 201 bp, Homo sapiens
cctcttcagtgactagtatagaattgtcacacttgagctttggagatgaggtgtctcaaattaaaccctaggatggttatttagtctttctgtgcctcagttttttttttttttaatctatgaaatggagatcatgtgtctacctcataggtttataatgaagattgaatcacttcccataataatcagaaactacatatt

SEQ ID NO: 259216 - DNA, 201 bp, Homo sapiens
agcaaacccacagagagtcttcagggtatttcaaaatttcaaggtaaacacagtgacgtctatcagacacagcatgaaccactagctccagatatttcagtttttttttttttgagatggagacttgctgtgtcacccaggctgtagcgcagtggcgggatcttggctcactgcagcctccacctcctgagttcaagcgat

SEQ ID NO: 259217 - DNA, 201 bp, Homo sapiens
ttattgaatatgtatctttgtgtacatatctgcaaaaatggataagtaaaaatctcgatgtaaattgtatcaatgaatatgtaaacatacagtgacaacaytgaacttataaaagttttaaaacttaaaaaaaaagctcaaatttgtaaaagacatgtaaaaagaaggtggaaaatgtatttagaatcagggaatgatgct

SEQ ID NO: 259218 - DNA, 201 bp, Homo sapiens
attgaatatgtatctttgtgtacatatctgcaaaaatggataagtaaaaatctcgatgtaaattgtatcaatgaatatgtaaacatacagtgacaacactraacttataaaagttttaaaacttaaaaaaaaagctcaaatttgtaaaagacatgtaaaaagaaggtggaaaatgtatttagaatcagggaatgatgctaa

SEQ ID NO: 259219 - DNA, 201 bp, Homo sapiens
atgtatctttgtgtacatatctgcaaaaatggataagtaaaaatctcgatgtaaattgtatcaatgaatatgtaaacatacagtgacaacactgaacttakaaaagttttaaaacttaaaaaaaaagctcaaatttgtaaaagacatgtaaaaagaaggtggaaaatgtatttagaatcagggaatgatgctaaaagtttg

SEQ ID NO: 259220 - DNA, 201 bp, Homo sapiens
gctgaggcaggagaatcgcttgaactggggaggcagaggttgcagtgagccaagatcatgccaccacacgccagcctgggcaacagggtgaaactgtgtcaaaaaaaaaaaaaaaacccttggaatagtagaagcatgaaaaaatccagatttagaaagaaggaagtaaaactgtctctattatcaaaagcatgatcatct

SEQ ID NO: 259221 - DNA, 201 bp, Homo sapiens
aggctgacctgaggcaggagaacccaggaggcggaggttgcgatgagccgagatcatgccactgcactccagtctgggcgacagagcaagactctgtctcaaaaaaaaaaaaaaaaaaaaagctattagaactaagtgacgtagcaagattgtagcatacagaataaaaaatttaaatctcaaatgtatttttctatatta

SEQ ID NO: 259222 - DNA, 201 bp, Homo sapiens
aaagtgaagtatccacagtaataccattgctatgttcttgtgatataaccagattataattactaaatgatacaatttactttctttttttaattctggtaaaaaaaaaatacacaatataaaatttagaccattttaactatttttaagtgtacaaatcagtggcattaagtacatttgcaatgttgtacagccatcacc

SEQ ID NO: 259223 - DNA, 201 bp, Homo sapiens
cctatcttcaaatgtagtcacattgtgagatactggggtttagggcttcaacatatgcatagtggcaggagggtctgtggaggggtgtttataattcagcygataacaactatgtgtttttaaatttttgtgtctaagtaataaaacatgaataagttaatttttggtagtgttcttttttgataccttcttccttttctt

SEQ ID NO: 259224 - DNA, 201 bp, Homo sapiens
taaactcataacaacctaatttgaataataccaatgtagtttcaataatatacaaacactctgctcctttacatctccatcctcttcttatatattattaygctcattgattacgtctttatatattgcatgcccattaacatagatttgtaactattcttttattcatttgtcttttaaatcatataaaaataaaaggaa

SEQ ID NO: 259225 - DNA, 201 bp, Homo sapiens
attgcatttataaagagtgttgtcaactgttctgtgtatgtaaattcttaaccaattgaaatagattttacatcatttttcccactttatatatatatatwtatttatttatttatttatttttattttattattttttttttttttttggagacagagccttgctctgtcaccaggctggagtgcagtggtgcaatctcg

SEQ ID NO: 259226 - DNA, 201 bp, Homo sapiens
gtgtatgtaaattcttaaccaattgaaatagattttacatcatttttcccactttatatatatatatttatttatttatttatttatttttattttattattttttttttttttttggagacagagccttgctctgtcaccaggctggagtgcagtggtgcaatctcggctcactgcaacctccacctcctggattgaagt

SEQ ID NO: 259227 - DNA, 201 bp, Homo sapiens
gggcagatcacgtggtcaggagatcaagaccatcctggctaacatggtgaaaccccctgtctactaaaaatacaaaaaattagtggggcgtggtggtgcaygcctgtaatcccagctactcaggaggctgaggcacgagaatcacttgaacccaggaggcggaggttgcagtgagccaagattgcgccactgcactccagc

SEQ ID NO: 259228 - DNA, 201 bp, Homo sapiens
tatttgaagttaatgtttagttattttgttttaaaatctttataaaaattctctgctttatcttccagtgaacaagacatattaatagcttttctgtagarcaaggcatattaatagcttttctgttgaatatgaaagaaagcagctgtagttttatcctactgagtacaaatatttgttggggaattaaagatttattag

SEQ ID NO: 259229 - DNA, 201 bp, Homo sapiens
aagaatcaatacagcaatacagccccaatttctaaattggagaaagtcattttctatttcgtctctctctgttcctccactagattgtaaactctttgagrgtaagaattatgcagttttgtctgctcttcaatgttttattgccttgcattaaaaagataataaatactgcttgatgaattaattaaaaacagcatacag

SEQ ID NO: 259230 - DNA, 201 bp, Homo sapiens
gccatttttcaaagagagcttattaacctctcctatggatcaaattgtgaaatactaaactaggttgcctgtggaagtatagtgagagacgacgataggaragaagataggatggggtcagaagaaccttacattccatgcttaggagtataaactgtatacgataagcagctgggaaccataaaatccttttaagaagta

SEQ ID NO: 259231 - DNA, 201 bp, Homo sapiens
aaagtttaaaattttcagccattgtagccacttatcaagtgctcatatagccaaataggggtagtggctaccatattggatagtgaaaaggaacatttccrtcatcgcagaaagtggtctcatataaagaactgatatgacagtgttttttccatactctattttgtctttttccacatgccagctatctcaacaccattt

SEQ ID NO: 259232 - DNA, 201 bp, Homo sapiens
gtacatttttaaaaattaaagtttaaaattttcagccattgtagccacttatcaagtgctcatatagccaaataggggtagtggctaccatattggatagkgaaaaggaacatttccatcatcgcagaaagtggtctcatataaagaactgatatgacagtgttttttccatactctattttgtctttttccacatgccag

SEQ ID NO: 259233 - DNA, 201 bp, Homo sapiens
tcatcagtttctgccttctaaaagtttattaattatataattaagttctccctcagctttctccctgatattagtctcataataaaacagtcattgcctayttttattcttttgcacttttttttttacaatatttcacattcattctaacaacgtattctagtagtggtttatttgttcctgtctttagcaaggtaataa

SEQ ID NO: 259234 - DNA, 201 bp, Homo sapiens
cagtagaatttggaaaattggagtcagtcctctcaaaccatgctgttactttatcaacttaagtttatggaatattcaaaattctttgttgtcatttcagyagtgttcacagcatcttcaccaggagtacattccatcttaggaaaccactttttttgctcatctataagaagcaactccctgtccattcaagttttatca

SEQ ID NO: 259235 - DNA, 201 bp, Homo sapiens
tttacctgtacatttttaaaaattaaagtttaaaattttcagccattgtagccacttatcaagtgctcatatagccaaataggggtagtggctaccatatkggatagtgaaaaggaacatttccatcatcgcagaaagtggtctcatataaagaactgatatgacagtgttttttccatactctattttgtctttttccac

SEQ ID NO: 259236 - DNA, 201 bp, Homo sapiens
gtcagtcctctcaaaccatgctgttactttatcaacttaagtttatggaatattcaaaattctttgttgtcatttcagcagtgttcacagcatcttcaccrggagtacattccatcttaggaaaccactttttttgctcatctataagaagcaactccctgtccattcaagttttatcatgagattgcaacatttcagtat

SEQ ID NO: 259237 - DNA, 201 bp, Homo sapiens
acattcctttcagtagtatggatattttaacagtattaagttccaatccatgaacacaggacgtcttttcatttattggtgtcttctttaatttctttcakcaatgttttgtggttttcaatgtaaaaatcttgtgcctccttggttactcataagtattttattcatttttaatgctattattaatatatttgttttctt

SEQ ID NO: 259238 - DNA, 201 bp, Homo sapiens
caaaccctaggagtcatccttgattttttcttttccttcaataagtccctatctttatatctggaacccatttactcttcttttatcagcaattaccattytattacagaccattagtatttttctcctgccctactgctatagtctcctgactgatctccttctactttttaaccctttcaaaccattctccacagaata

SEQ ID NO: 259239 - DNA, 201 bp, Homo sapiens
aaagtcaggaagttttggaccattatatcttcaaaaatttttttcttttattttctctttgttttccttctggcattctcataattaatatgttggtctgyggtgattgtttagtgataaggattctgattaaataagatagaaaaaaacaccatggtgagtaagcaaagcagaaatagaaccccactgttttaactagta

SEQ ID NO: 259240 - DNA, 201 bp, Homo sapiens
ggatcggctattattacttttattatattaatttgctttcagactcaaagtgtgataatgcattgagtatttacactgaatttatgatgacttgcttgacrggggattgctactggttttggttaaggagaatggattataaagactttgcataatttaatgtgcagcatcagtgggaacaaataatgagatatatttgta

SEQ ID NO: 259241 - DNA, 201 bp, Homo sapiens
acaatatgaatttagtgccacctgtagacatgaagttaaaagattagacacttgagtactgggacaaatctctaattttgtggggagacattttaggatcrgctattattacttttattatattaatttgctttcagactcaaagtgtgataatgcattgagtatttacactgaatttatgatgacttgcttgacagggga

SEQ ID NO: 259242 - DNA, 201 bp, Homo sapiens
aaagaagtttatgatgcctacttgtcattcttgggtccttagaccttctgtggcaatattaggtcggggatagatgtctaatgatttgcagtcagggagctttgataaccattgtcacatgttagcataaatcagaacccaatcacttttttttttttttttgagatggagtctcattctgtcgcccaggctgcagtgcag

SEQ ID NO: 259243 - DNA, 201 bp, Homo sapiens
agaaataggaactagctgagcatgttttcttatacctgcagtcctggtgctttgtgaggctgtggtgagagcattccttaggcaactaaaattcactttayacaatatgaatttagtgccacctgtagacatgaagttaaaagattagacacttgagtactgggacaaatctctaattttgtggggagacattttaggatc

SEQ ID NO: 259244 - DNA, 201 bp, Homo sapiens
ttgtccactggacgttttagtcatattcagacaccagttgtttcctccactcccagacttaccacatctgagagaaacctgacatgtgggcatacttcagygatccttaatagagtggccctcttgcttccaagtgtcttgaagctgccagccagatctctaacatacgtcagtacaggaaaaggcaagagaaggattgtg

SEQ ID NO: 259245 - DNA, 201 bp, Homo sapiens
acttccactgctttacttgactagccttaggaaaaaacaatttttcaggaaaaataagttggatgtgtcaaaattgaggacctttccccagaagacattgtgaaagtgaaaaggcaaaatataaagtgggcttaagaattatgagaagttcagcacagaggactagtggaagaaaatatgtttgtacataatttctttccc

SEQ ID NO: 259246 - DNA, 201 bp, Homo sapiens
cccgtacctttgaggaccctctaccagggacccagacccctccgatgctttgcaggggcagcatttggatgaatggataggaaaggttgatttctcttttktatttacactttttggcagcaacggggacagtgctgcccctaacacctgcctcacatgtgattgatgttgcaacttttacttatgaagagtcatttgtta

SEQ ID NO: 259247 - DNA, 201 bp, Homo sapiens
aactggattgtggtgatgtttgcacaaaatttgcacaaaagcattgaattatacactgaaagcatattttatagtgtgtaaatgaatgccttaataaagcttttttttttttttaaggataccattaagataatgaattgtccagccacagattaggagaaaacatttacaattcatgtatctgacaaatgattgtatcca

SEQ ID NO: 259248 - DNA, 201 bp, Homo sapiens
gtgcatttatattttcctcttctcttaactccttgtttgcctagctttctttttcttttggttggttcaatttttccaactaagttttttcatgttgtttktttttttctttttcctttgtatttgggaaataaatccttacttgtaaatacttcttgcagtttgtccattgactttttttttgagacaggatcttgcttt

SEQ ID NO: 259249 - DNA, 201 bp, Homo sapiens
tttctcctcctcctcccttcctcacatctctttcccttctcctcctacccttcctcttccctcccctcttcttcctttcttcctactttgttttatgcatwatgttaagaaattgttttactgctattagtgataacatgcttttagttctgtcttagcagttatggttgtgctctccaggataaatctacacatatcaca

SEQ ID NO: 259250 - DNA, 201 bp, Homo sapiens
cacttgaacctgagaggcggaggtggcagtgagccaagatcactttattgcactccagactgggcgacaagagcaagactctgtctcaaaaaaaaaaaaawtttttttaaatgaaaaatctctgtactcagggctatgacactttttggttggcatatgtctttttggacttgttctttcattctttaaatggtgtctttg

SEQ ID NO: 259251 - DNA, 201 bp, Homo sapiens
aggcgctctgctttttagagtttccagtttttctgctctgttttttccccatctttgtggttttatctacttttggtctttgatgatggtgatgtacagaygggtttttggtgtggatgtcctttctgtttgttagttttccttctaacagacaggaccctcagctgcaggtctgttggagtttgctagaggtccactcca

SEQ ID NO: 259252 - DNA, 201 bp, Homo sapiens
tgactctcaaaggctgcggactggaattagtacgtcgtgctgccgttgccaggcattttatattttcctaggctgaggcttcccaggctgttgcttttttyccccccacctttgcagatggattttgcaggctgttaaatcccactcccgaagacctgccctgacagcgcctctttcctaagtgctgttacagggagctga

SEQ ID NO: 259253 - DNA, 201 bp, Homo sapiens
atctcagactgctgtgctagcaatcagcgagactccatgggcgtaggaccctccgagccaggtgcgggatataatctcctggtgcgccattttttaagccygttggaaaagcgcagtattgaggtgggaatgacccgatcttccaggtgccgtctgtcacccctttctttgactaggaaagggaactccctgaccccttgc

SEQ ID NO: 259254 - DNA, 201 bp, Homo sapiens
tgttggaaaagcgcagtattgaggtgggaatgacccgatcttccaggtgccgtctgtcacccctttctttgactaggaaagggaactccctgaccccttgygcttcccgagtgaggcaatgcctcgccctgctttggctcacgcacagtgcgctgcacccactgtcctgcgcccactgtctggcactccctagtgagatga

SEQ ID NO: 259255 - DNA, 201 bp, Homo sapiens; identical to SEQ ID NO: 51699

SEQ ID NO: 259256 - DNA, 201 bp, Homo sapiens
aattatgttacttttatttttagttgacaaatgataattaaatatatttatgggtacagtgtgatgttttgatatatgtttacaatgtggaatgattaaayctggctaattacgaaatcattacctcacatacttaatcattatttgttgtgtggtaaaaacatttgaaatctactcttagcaattttgaaatagatgtta

SEQ ID NO: 259257 - DNA, 201 bp, Homo sapiens
ttatgttacttttatttttagttgacaaatgataattaaatatatttatgggtacagtgtgatgttttgatatatgtttacaatgtggaatgattaaatcyggctaattacgaaatcattacctcacatacttaatcattatttgttgtgtggtaaaaacatttgaaatctactcttagcaattttgaaatagatgttaca

SEQ ID NO: 259258 - DNA, 201 bp, Homo sapiens
tagaacactttgagcaagaaaataaagtagtattgtaatataacctggaacataaaataaatctccatgagtctatactgacaaataaatgattgaataartagacaaatgaggaagaatagacaaatctcaaagcagaagaattccaaataatttatgcagatactccattctcaaggaggtccttaattgtgagttgtg

SEQ ID NO: 259259 - DNA, 201 bp, Homo sapiens
ttcgtttcaattttgaaaggtgagagtgcattcacaccatctgttcactacttggtagtacggctctgttctgttggtccgtgtgtgcatttccaacgtgyttcttatgcaagagaacttggcatgctgtggccacaattagtgaagccaagcccatcactctgtcagcactcatttactaaggctttattttcctgcagt

SEQ ID NO: 259260 - DNA, 201 bp, Homo sapiens
gcagtgagccaagatcacaccattgcacaccatcctgggtgacagagtaagggaccttatctcagaaaaaaaaaatgtgtactgtgggcatttagcaatayaattaattatagtaataactttttctaatttattttgcagaaaatgagaaaggacaatatatatctccatttcatgatattccaatttatgcagataagg

SEQ ID NO: 259261 - DNA, 201 bp, Homo sapiens
cattatctgttttaaagcttaaatttagtttagcattagatgtgtagtaggagctacagcatttaattgaaactcttgtgtgtagttaagattcttaaatrcgaataaagaactaaaacaatgagaaaaaagtagctgaagagtcataggatgttatctgttattctcaacatgatccattttgtcagtatgtataggaat

SEQ ID NO: 259262 - DNA, 201 bp, Homo sapiens
tttggggaaatgttgataataggaaaataatacctttttatcattgtaatgcaaatctcttcaaattataggactttgccattgatattattaaaagcacwcatgaccattggaaagcattagtgactaagaaaacgaatggaaaaggaatcagttggtaagtgtaaacactttgcatgtttaacacacaaagcagaccag

SEQ ID NO: 259263 - DNA, 201 bp, Homo sapiens
gagaccagcctggccaacatggagaaaccatgtctctacaaaaaaaaaatacaaaaatttgctagatgtggtggcacacgtctgtaataccagctgctggrgagactgaggcacgagaattgcttgaacctggaagatggaggttgcagtgagccatgattgctgccactgcactgcaatctgggcaagagagtgagaccc

SEQ ID NO: 259264 - DNA, 201 bp, Homo sapiens
agacggggttcactgtgttagccagatggtctcgatctcctgacctgtgatccgcctgccttggcctcccaaagtgctgggattacaggtgtgagccaccrtgtctggcctaatagtcaaccttttgagaagggttgtttaccaatttattcccagcacaatgtcagtatgtagtaggttcttatttgatatttgaagaat

SEQ ID NO: 259265 - DNA, 201 bp, Homo sapiens
ctttggctattgactctcaggtatgtgcaagaggtgaaataattggcgtgaaagttctaggcatattggctatgattgacgaaggggaaaccgactggaargtcattgccattaatgtggatgatcctgatgcagccaattataatggtaagaaaatttgaaaagtctgaagtctttctaattaattcataagcaccacca

SEQ ID NO: 259266 - DNA, 201 bp, Homo sapiens
aaacccggtctttaccaaaaatagaaaaaaaaaaattagctgggtgtggtggcaggtgcctgtggtccaggaggcagaggtaggaggatcacttgagcccsggagacggaggttgcagtgagctgagatcatgccactgcacttcagcctgggtgacaggtgagactctgtctctaaataaataaataaataaataagagt

SEQ ID NO: 259267 - DNA, 201 bp, Homo sapiens
agagtgtatggtagtagtcaaaagcactgatttttggcaccagacagaccagagttcaaatcccaagatggccaattcctagcttacctaacttgcctccytttctttctccttgagacgtccatatcgcctccctgagctattcacagtatgtaggtggtatggttatttcaaaaaataaagcacttaatacctgcacac

SEQ ID NO: 259268 - DNA, 201 bp, Homo sapiens; identical to SEQ ID NO: 51708

SEQ ID NO: 259269 - DNA, 201 bp, Homo sapiens
attagccgggcatggtggcatgtgtctgtagtctcagctacttggaaggctgaggtgagaggatcgcttgtgcctgggaggcagaggttgcagtgagccgrgatggcactactgtactccagctgggtgacagagtgagaccctgtctcaaaaaaaaaggtccattgactaaataagaagttagtcttaaaactagattat

SEQ ID NO: 259270 - DNA, 201 bp, Homo sapiens; identical to SEQ ID NO: 51709

SEQ ID NO: 259271 - DNA, 201 bp, Homo sapiens
aacagacggtaagatttctattccagtaaaatttcattaaacattacacagttatggaaaaattatgttacttttatttttagttgacaaatgataattawatatatttatgggtacagtgtgatgttttgatatatgtttacaatgtggaatgattaaatctggctaattacgaaatcattacctcacatacttaatcat

SEQ ID NO: 259272 - DNA, 201 bp, Homo sapiens
tttattttgcccttttaataaaaattgtggtatttttattactcaaacattagaatttattccagctaattttagtctttgctttctagaattagtaaatrttctttttcccttcttgatagttcctttatacctcacataacctttcacttaatggccgattatggaaacaccttagttcaattataaaagtgttaggga

SEQ ID NO: 259273 - DNA, 201 bp, Homo sapiens
gtaaggcatccttgtttttggacacagtctctttactcagatcagctagttctacatatgaattttcttatatgtctctcaacaagtgcttaaaatgcctygttgtgctgtgagctaaaggtctgttgattaggctgggcgtggtggctcacgcctgtaatcccagcactttgggaggctgaggcgggtggagggcttgag

SEQ ID NO: 259274 - DNA, 201 bp, Homo sapiens
ttgaacttccgtgataagtcattccacagctctttcaaaataagtacttggaatttttgttgagtgtataattatttgtgcatcttgaaatctgcttattstcttctttctttttaaaaaaatcattctcactgtcatcttatgcttcttctcttcttagatatcaatgatgtcaaacggctgaaacctggctacttagaa

SEQ ID NO: 259275 - DNA, 201 bp, Homo sapiens
ttgtatgcatgttactgtgtggagtcttgaaattagaaaccatgaacacatgcaagtggccatttgactgagggagaagctgagggagtgattctaatcawtcataagttggacagatagcatggtagtaagatttgtaaaaatcagaatggttccagaatgtaccaagtaacctgtgtgcctatgacccatcataagcca

SEQ ID NO: 259276 - DNA, 201 bp, Homo sapiens
taaggcatccttgtttttggacacagtctctttactcagatcagctagttctacatatgaattttcttatatgtctctcaacaagtgcttaaaatgcctcrttgtgctgtgagctaaaggtctgttgattaggctgggcgtggtggctcacgcctgtaatcccagcactttgggaggctgaggcgggtggagggcttgagt

SEQ ID NO: 259277 - DNA, 201 bp, Homo sapiens
gagatattcacatatcaaagagtcaccattgtaaaatgtacaattcagtggtttttagtatattcactaagttgtacaaccatcaccactctctaattgcrgaacatttcatcagcccagaggaaatcctgtatccatgggcaatcactccctgtcccccttccctcagtccctgatgactgcagatctactttgtgccta

SEQ ID NO: 259278 - DNA, 201 bp, Homo sapiens
acaattcagtggtttttagtatattcactaagttgtacaaccatcaccactctctaattgcggaacatttcatcagcccagaggaaatcctgtatccatgrgcaatcactccctgtcccccttccctcagtccctgatgactgcagatctactttgtgcctatggatttgcctatgctgttatttcatgtaaatggcatca

SEQ ID NO: 259279 - DNA, 201 bp, Homo sapiens
cccagcctaaaaccacacatctttaaagtaaacgtttgggtctatatttgtgtttccctattgtctcagttattgagtagttggcttttgcttgttttaartaggatcattatctgttttaaagcttaaatttagtttagcattagatgtgtagtaggagctacagcatttaattgaaactcttgtgtgtagttaagattc

SEQ ID NO: 259280 - DNA, 201 bp, Homo sapiens
attcacaaaacagaagtctggaaacataacacagtcttggtgtttatttattcactttaatattctcttccatttttagaataaggaaatgattcagaagrgacaaagtatcaggctttggggaaatgttgataataggaaaataatacctttttatcattgtaatgcaaatctcttcaaattataggactttgccattga

SEQ ID NO: 259281 - DNA, 201 bp, Homo sapiens; identical to SEQ ID NO: 51700

SEQ ID NO: 259282 - DNA, 201 bp, Homo sapiens
atttttagaataaggaaatgattcagaagagacaaagtatcaggctttggggaaatgttgataataggaaaataatacctttttatcattgtaatgcaaayctcttcaaattataggactttgccattgatattattaaaagcactcatgaccattggaaagcattagtgactaagaaaacgaatggaaaaggaatcagtt

SEQ ID NO: 259283 - DNA, 201 bp, Homo sapiens
gaatcaagcatgtgtaaggcactgcccccgccagacccttctaacttctgcacactggaaggtgaaacctggagagagaagacactcccctccctagcttytacctggcaccctccaaagatgagcattcatcttggagaccaaaataaaaaaggacaaaagaccaggctcagagggagcagagctcaatggggggaagtg

SEQ ID NO: 259284 - DNA, 201 bp, Homo sapiens
ttattccacacacctcccaaggcagggggtagcgtgggaatcaagcatgtgtaaggcactgcccccgccagacccttctaacttctgcacactggaaggtraaacctggagagagaagacactcccctccctagcttctacctggcaccctccaaagatgagcattcatcttggagaccaaaataaaaaaggacaaaagac

SEQ ID NO: 259285 - DNA, 201 bp, Homo sapiens
tttattccacacacctcccaaggcagggggtagcgtgggaatcaagcatgtgtaaggcactgcccccgccagacccttctaacttctgcacactggaaggkgaaacctggagagagaagacactcccctccctagcttctacctggcaccctccaaagatgagcattcatcttggagaccaaaataaaaaaggacaaaaga

SEQ ID NO: 259286 - DNA, 201 bp, Homo sapiens; identical to SEQ ID NO: 51718

SEQ ID NO: 259287 - DNA, 201 bp, Homo sapiens; identical to SEQ ID NO: 51720

SEQ ID NO: 259288 - DNA, 201 bp, Homo sapiens
gccaaaccccacccaggaggtctgaggagctggaggctggccaggcatagagggcccggggtggtccttcctcccagggtgcaaaggcttcttcattgtcyggaagggagcagggtgggcggagccccagcagctagtgaggagttccattccagcccacccagctgggggaccctcctctggcttcacttgccccagttg

SEQ ID NO: 259289 - DNA, 201 bp, Homo sapiens; identical to SEQ ID NO: 51719

SEQ ID NO: 259290 - DNA, 201 bp, Homo sapiens; identical to SEQ ID NO: 51721

SEQ ID NO: 259291 - DNA, 201 bp, Homo sapiens
tacctggcaccctccaaagatgagcattcatcttggagaccaaaataaaaaaggacaaaagaccaggctcagagggagcagagctcaatggggggaagtgraagcagccatcttctcctgcagctaagccagggcaaggcactagagacccacatccttcccatgccaccaactcgtcaggtcccaccaagcaagccactc

SEQ ID NO: 259292 - DNA, 201 bp, Homo sapiens
agagagaagacactcccctccctagcttctacctggcaccctccaaagatgagcattcatcttggagaccaaaataaaaaaggacaaaagaccaggctcaragggagcagagctcaatggggggaagtgaaagcagccatcttctcctgcagctaagccagggcaaggcactagagacccacatccttcccatgccaccaa

SEQ ID NO: 259293 - DNA, 201 bp, Homo sapiens; identical to SEQ ID NO: 51723

SEQ ID NO: 259294 - DNA, 201 bp, Homo sapiens
ttgaccatgactgtaggtggggtggtgcagatcagtgcaggcttcagaggtttccccatgttatgtcaccactccaagccttggttacctcctctgcaaartgagtataatagcatggcctacttcataggattttctctttttttttttttttttttttccgagatggagtcttactctgttgccgaggctggagtgcag

SEQ ID NO: 259295 - DNA, 201 bp, Homo sapiens
cctcccgggttcaagcgattctcctgcctcagcctcctgagtagctgggattacaggcatgcgccactatgcccgactaattttgtacttttagtagagayggggtttctccatgttggtcaggctggtctagaactcctgacctcaggtgatcgacctgcctcagcctcccaaagtgctgggattacaggtgtgagccac

SEQ ID NO: 259296 - DNA, 201 bp, Homo sapiens
cacagatcactggagcctctacctcccaggctcaagtgaacctatcttagcctcccgagtagctgggtccacaggcatgtgacgtaccaccatgcctggctttttttttttttttttttttttgagacagggtcttgctctgtcacctaggctggactgcagtggcacaatcacgtctcaacctcctggtctcaaccagtt

SEQ ID NO: 259297 - DNA, 201 bp, Homo sapiens
ttctcctgcctcagcctcctgagtagctgggattacaggcatgcgccactatgcccgactaattttgtacttttagtagagacggggtttctccatgttgktcaggctggtctagaactcctgacctcaggtgatcgacctgcctcagcctcccaaagtgctgggattacaggtgtgagccaccgcacctggccttctgtc

SEQ ID NO: 259298 - DNA, 201 bp, Homo sapiens; identical to SEQ ID NO: 51727

SEQ ID NO: 259299 - DNA, 201 bp, Homo sapiens
tgaattcagtgaatggtttggtgtttgttggtggaggtggcaaagttgcagggtaatagccgaagagccagtgaagaagccattctttttctgtttttttktttgtttgttttgttttgttttgttttgagacggagtcttgctctgtcgcccaggctggagtgcagtggtgccatctcggctcactgcaagctccacctc

SEQ ID NO: 259300 - DNA, 201 bp, Homo sapiens
gtgccccaccatgctctgctaatttatctatttttagtagagatggggtttcaccatgttggtcaggctggtcttgaattcctgaccttgtgatccacccrcctcggcctcccaaagtgctgggattacagacatgagacactgcaccctgccccattccttttaatctcccttggaattagctgtttggttgatttggag

SEQ ID NO: 259301 - DNA, 201 bp, Homo sapiens; identical to SEQ ID NO: 51736

SEQ ID NO: 259302 - DNA, 201 bp, Homo sapiens
tatttttagtagagatggggtttcaccatgttggtcaggctggtcttgaattcctgaccttgtgatccacccgcctcggcctcccaaagtgctgggattayagacatgagacactgcaccctgccccattccttttaatctcccttggaattagctgtttggttgatttggagttccagggtgatactgtctgagtcataa

SEQ ID NO: 259303 - DNA, 201 bp, Homo sapiens; identical to SEQ ID NO: 51737

SEQ ID NO: 259304 - DNA, 201 bp, Homo sapiens
agacgtgagcagacttgtgtggttggagtcctggctcagatttcctttctcttcctttggctggtgcagaactcatccatgtgccacaggaaaatagtccrtgtttttcattgtcgtgtaatcgaacaaaatagggtttttgggctaaatgaactacttggaatggtgatatgtctaaggatagttaatggagactttata

SEQ ID NO: 259305 - DNA, 201 bp, Homo sapiens
gaggcatgagaatcgcttgaattcgggaggcggagttgcagtgagctgagatcgcaccattgcacttcagcctaggtgacacagtgagactgtctcgaaaraaaggaaaagaaaaggcggccggacgtggtggctcatgcctgtaatcccagcactttgggaggctgaggtgggtggatcacaaggtcagatcgagaccat

SEQ ID NO: 259306 - DNA, 201 bp, Homo sapiens
caattctgcctcagcctcccaagtagctgggactataggcatgcgccaacacgcccagctaatttttgtgtttttagtggagatcgtttcaccatgttgascaggctggtctcgatctcttgaccttgtgatccacccgcctcggcctcccaaagtgtttggattacaggtatgaaccactgcacccagccatattttttg

SEQ ID NO: 259307 - DNA, 201 bp, Homo sapiens
tctgaacaaatgccttttccctttttcagatcaaagacatcttaaagccagaaataatggaggagattgtgatggaaacacgccagaggcttttggaacargagggataaggaggtgctccagaagcacgggactgtggaccttgcaggagtgaagactgtgatgtgtggtccccatatgtggctcagcaaagactcgaga

SEQ ID NO: 259308 - DNA, 201 bp, Homo sapiens; identical to SEQ ID NO: 51724

SEQ ID NO: 259309 - DNA, 201 bp, Homo sapiens; identical to SEQ ID NO: 51725

SEQ ID NO: 259310 - DNA, 201 bp, Homo sapiens
ccgccaatcttgcagtgacctagcttcgtgatatatttctttagctaggtcagggggttttggtccaggtttccccctccctggtgaaacggcagaagacscactttcatgatttgccatgtggtgcctcagtgattctcggtaacaacggcttcatctggatttacccaacacctgagcacaaagaagaggaagcagggg

SEQ ID NO: 259311 - DNA, 201 bp, Homo sapiens
ttgtggccagtgaagttggttgtttttagctatgttactggtgtaggctgagtcactttgactttccatcacggtatgttcatgaagcccatattatcttytcttctaaggagatgaattcagtgaatggtttggtgtttgttggtggaggtggcaaagttgcagggtaatagccgaagagccagtgaagaagccattctt

SEQ ID NO: 259312 - DNA, 201 bp, Homo sapiens; identical to SEQ ID NO: 51722

SEQ ID NO: 259313 - DNA, 201 bp, Homo sapiens
gccttgtagccagagtaagcattttggcttctactttgtgtaatctgggaagcactggaaggggtggagcagaggagggacttgatctggacttaagctcmctctggctgctgatgggagattgaagggggatagggcaagcttagggaggtggattagggaccatactcatgatctgaagtgatggtggcttcaactaag

SEQ ID NO: 259314 - DNA, 201 bp, Homo sapiens
acgtaacatcaggacggtcagggttcacagggtcatgggtcagtagccttgtaaagaacaagttttatcctttttctccaaggagactgactttcaccagragagcccctccaactgtgggctgggaggtgcagctgtctctcttcctccagggggcgctgcagctcagcactggggctgaggctgtcctgggaacaaagg

SEQ ID NO: 259315 - DNA, 201 bp, Homo sapiens
tgcgatctcggctcactgcaacctctgcctcctgggttcaagtgattctcctgcctcagcctcctgagtagctgggattacaggtgcacgccaccatgccyagctaatttttggttttttttttttttagtagagacagggtttcactgtgttggccaggctggtctcgatcccctgacctcaagtgtgatctgcccgcct

SEQ ID NO: 259316 - DNA, 201 bp, Homo sapiens
cactgcaacctctgcctcctgggttcaagtgattctcctgcctcagcctcctgagtagctgggattacaggtgcacgccaccatgcctagctaatttttgkttttttttttttttagtagagacagggtttcactgtgttggccaggctggtctcgatcccctgacctcaagtgtgatctgcccgcctcggcctcccaaag

SEQ ID NO: 259317 - DNA, 201 bp, Homo sapiens
aactggttgagaccaggaggttgagacgtgattgtgccactgcagtccagcctaggtgacagagcaagaccctgtctcaaaaaaaaaaaaaaaaaaaaaaagccaggcatggtggtacgtcacatgcctgtggacccagctactcgggaggctaagataggttcacttgagcctgggaggtagaggctccagtgatctgtg

SEQ ID NO: 259318 - DNA, 201 bp, Homo sapiens
ggctaattttttgtatttttagtagagatggggtttcaccttgttggccaggctggtctcgaactattgacctcaggtgatctgcccgccttggcctcccyaagtgctgggattataggcgtgagccaccgtgcctggcctgcttggttaactttattcttccaactttaccagctgcattctcagtcatttaaaggatat

SEQ ID NO: 259319 - DNA, 201 bp, Homo sapiens
ctccgcctcccaggttcaagtgattctcccacctcagcctcccaaatagctgggactacaggtgcacaccaccacacctggctaattttttgtatttttartagagatggggtttcaccttgttggccaggctggtctcgaactattgacctcaggtgatctgcccgccttggcctccctaagtgctgggattataggcgt

SEQ ID NO: 259320 - DNA, 201 bp, Homo sapiens
tcagcatcttacaagtcactctccaagcaggacagattaaggcagcccggtgtggacataatcacatctatggctacaaggaacacgcaacagaaaatcakattccaaccaagcaaaaggctgcttgtttttttttttctttgaaacacagtctcgctctgtcacccaggctggagtgtggtacgcgatttcagctcactg

SEQ ID NO: 259321 - DNA, 201 bp, Homo sapiens
gaggtggagcttgcagtgagccgagatggcaccactgcactccagcctgggcgacagagcaagactccgtctcaaaacaaaacaaaacaaaacaaacaaamaaaaaaacagaaaaagaatggcttcttcactggctcttcggctattaccctgcaactttgccacctccaccaacaaacaccaaaccattcactgaattca

SEQ ID NO: 259322 - DNA, 201 bp, Homo sapiens
cccctgcttcctcttctttgtgctcaggtgttgggtaaatccagatgaagccgttgttaccgagaatcactgaggcaccacatggcaaatcatgaaagtgsgtcttctgccgtttcaccagggagggggaaacctggaccaaaaccccctgacctagctaaagaaatatatcacgaagctaggtcactgcaagattggcgg

SEQ ID NO: 259323 - DNA, 201 bp, Homo sapiens
ggctgaggcaggaagattggctgagcccaagtctatagtgagccatggtcatgccagtgtactgcagcctggattacagagaccttgtctcttaaaaaaamaaaaccaaacttgactcagactcccactctttgccattcccttctctccagagatatacagcctggataacctcaaaaacatgacaggtcgatccatcta

SEQ ID NO: 259324 - DNA, 201 bp, Homo sapiens; identical to SEQ ID NO: 51739

SEQ ID NO: 259325 - DNA, 201 bp, Homo sapiens
aagaatggcttcttcactggctcttcggctattaccctgcaactttgccacctccaccaacaaacaccaaaccattcactgaattcatctccttagaagaraagataatatgggcttcatgaacataccgtgatggaaagtcaaagtgactcagcctacaccagtaacatagctaaaaacaaccaacttcactggccacaa

SEQ ID NO: 259326 - DNA, 201 bp, Homo sapiens
atggtctcgatctgaccttgtgatccacccacctcagcctcccaaagtgctgggattacaggcatgagccaccacgtccggccgccttttcttttcctttytttcgagacagtctcactgtgtcacctaggctgaagtgcaatggtgcgatctcagctcactgcaactccgcctcccgaattcaagcgattctcatgcctc

SEQ ID NO: 259327 - DNA, 201 bp, Homo sapiens
caaaaaatatggctgggtgcagtggttcatacctgtaatccaaacactttgggaggccgaggcgggtggatcacaaggtcaagagatcgagaccagcctgstcaacatggtgaaacgatctccactaaaaacacaaaaattagctgggcgtgttggcgcatgcctatagtcccagctacttgggaggctgaggcagaattg

SEQ ID NO: 259328 - DNA, 201 bp, Homo sapiens
tgtttttttttttctttgaaacacagtctcgctctgtcacccaggctggagtgtggtacgcgatttcagctcactgcaacctccgcctcccaggttcaagygattctcccacctcagcctcccaaatagctgggactacaggtgcacaccaccacacctggctaattttttgtatttttagtagagatggggtttcacctt

SEQ ID NO: 259329 - DNA, 201 bp, Homo sapiens
tgcgaaagcccggcccggcacgaccttttaaatgtggcttctctgagcgcaaggtgagtggtaaggaagcacccgcctcctctgtattgccattggcctcygagaatccgggtcaggcctctttcctccgtcccattggccggtgggagcagtagggttggatctcccagccaaccgtgttcggcgcagtccgcggtgcgt

SEQ ID NO: 259330 - DNA, 201 bp, Homo sapiens
tctcgagtctttgctgagccacatatggggaccacacatcacagtcttcactcctgcaaggtccacagtcccgtgcttctggagcacctccttatccctcytgttccaaaagcctctggcgtgtttccatcacaatctcctccattatttctggctttaagatgtctttgatctgaaaaagggaaaaggcatttgttcaga

SEQ ID NO: 259331 - DNA, 201 bp, Homo sapiens; identical to SEQ ID NO: 51740

SEQ ID NO: 259332 - DNA, 201 bp, Homo sapiens; identical to SEQ ID NO: 51745

SEQ ID NO: 259333 - DNA, 201 bp, Homo sapiens; identical to SEQ ID NO: 51742

SEQ ID NO: 259334 - DNA, 201 bp, Homo sapiens; identical to SEQ ID NO: 51747

SEQ ID NO: 259335 - DNA, 201 bp, Homo sapiens
ttgttttacagcttcatatagttaaagaaactcatgtaatttgtctcaagtgtttaagaaagtcttcatttaattaaaaagaaaagtacagttcataatayaacagagccaggtctgccatttctttgttcatatttcatcgtttcgtgccagtcaaactacctgtcctgtgacaagtggaatggagcttgcatgttccct

SEQ ID NO: 259336 - DNA, 201 bp, Homo sapiens
gccaagtcacctcgtaacccagaggcattatgaatggaatgctgacttccagaaataaaattctaaaatctattacggtgctatccatgtctttgtaatgaacattcgccttttacttgttagttttattttggttgttcttggtggtaagtaggtttggtttggtggctgatagtttaaagaaaaatagtactattacta

SEQ ID NO: 259337 - DNA, 201 bp, Homo sapiens; identical to SEQ ID NO: 51756

SEQ ID NO: 259338 - DNA, 201 bp, Homo sapiens; identical to SEQ ID NO: 51758

SEQ ID NO: 259339 - DNA, 201 bp, Homo sapiens; identical to SEQ ID NO: 51760

SEQ ID NO: 259340 - DNA, 201 bp, Homo sapiens; identical to SEQ ID NO: 51761

SEQ ID NO: 259341 - DNA, 201 bp, Homo sapiens
acctttaattgactaggccaatgtttctgaactctaatgtgtaaaagaatcacctggagaaactcctgggtctgccccagatgttctaactcagtacgcakagttagggcccaataatttgcattcagatgctgccagtttttggaccatcctttgagtagccctggactggacaacttgattgagtaatgataataatag

SEQ ID NO: 259342 - DNA, 201 bp, Homo sapiens
tgcttttaggttttggaggatcttatacagtgctgaggcattgtggtttggggaagccatgtgggtatcactcatcctcagcccacatcactgttccaccygatccttggtgtttgatccttacagtttgtcctgagatatcctttgttcttatctgtaagacagtagatctttcaaatccattagcacacatttctattc

SEQ ID NO: 259343 - DNA, 201 bp, Homo sapiens
ttgttcttatctgtaagacagtagatctttcaaatccattagcacacatttctattcctgttgaactcttgggtacatataatgggctgtggagaaaagayagattgtcttaggtccatctgcaagacattcatgcagaccctgctacatttatgctttcactgggcacacagaatcattctgtttttccctcaccagctg

SEQ ID NO: 259344 - DNA, 201 bp, Homo sapiens
ctactcttccctaaggtcttgcctctttccagggttctgtctgggtatgaggcacagggtcagctgcttcagattccacagacctatctgggagtttttgyaccccagggttcttttttcattggctcccagatatttatctatacagccctcatttcctctgcaacactttctcttcccctcttctaccatctagcctgg

SEQ ID NO: 259345 - DNA, 201 bp, Homo sapiens
tcttattcgtcatgtaatcttctaaatcaatgcctattttttaaaagattctcggccgggcgcggtggctcatgcctgtaatcccagcattttgggaggcsgaggtgggtggatcacttgaggccaggagttcgaaaacagccttgccaatgtggcaaaaccctgtctctactaaaactacaaaatgtagccaggagtggt

SEQ ID NO: 259346 - DNA, 201 bp, Homo sapiens
gggattacaggcgtgagccaccgcacccggtcccagctaatttttatatttttagtagagatggggtctcaccatgttggccaggctggtctctagctccygacctcagatgatctgcctgccttggcctcccaaagtgctgagattataggcatgagccactgcactcagccaaattgtcccttttctaatcagcacttc

SEQ ID NO: 259347 - DNA, 201 bp, Homo sapiens
gccctttcctctttgccagcccgctggcgagccgagccagggcaagatgaggtcgtcctgtgtcctgctcaccgccctggtggcgctggccgcctattacktctacatcccgctgcctggctccgtgtccgacccctggaagctgatgctgctggacgccactttccggggtgcacagcaagtggtgaggtgcagcccagc

SEQ ID NO: 259348 - DNA, 201 bp, Homo sapiens
accactgtgttgctattgtaaacaatgcagatggttgttcaagtattctgtgaatgcaagcgaaacataagctaacatggagagatgtttctggaaaggtrtgaacaaattgagtcaaacccgcatgtactcagagcatgcattacataaaggaaactcgaggtgggctctcttataaaatgtacagtcttctcatatctg

SEQ ID NO: 259349 - DNA, 201 bp, Homo sapiens
ctgtctcaaaaaaatatataaataaataaattgcatggtgtcaacctcgttactcagataattttagtttgagttgattggctcaactacaaaagcaattkaagctgtttgagagattaagctcagcctatttcctaagacagcatcagctgcctaccattaagaaatgtgaatgttagtttattctgttgtcattggcaa

SEQ ID NO: 259350 - DNA, 201 bp, Homo sapiens
ggggtttcaccgttttagctgggatggtctcgatctcctgacctcgtgatccgcccgcctcggcctcccaaagtgctgggattacaggcgtgagccaccgsgcccggccctgcctccgcttcttaaagcactgggtttacaggcataagccaccgcatctggccaactatcttatattgaatatgtctcacatagcaaaat

SEQ ID NO: 259351 - DNA, 201 bp, Homo sapiens
ccactacgcctggctaattttttgtatttttagtagagacggggtttcaccgttttagctgggatggtctcgatctcctgacctcgtgatccgcccgcctyggcctcccaaagtgctgggattacaggcgtgagccaccgcgcccggccctgcctccgcttcttaaagcactgggtttacaggcataagccaccgcatctg

SEQ ID NO: 259352 - DNA, 201 bp, Homo sapiens
gtaaaacaagggggctaggcaaggccttcccaaagcagtctcaagggatgtgaagagttgtgaaaagactaaagtttaagcagagttaagtaaatttctcwccgcctgctgggacttgtcagtgtgtttcaaaagctgacgtgcattgtgaatctctgagaggagaattgctgggcagcaatttcctgagctgagtgaatc

SEQ ID NO: 259353 - DNA, 201 bp, Homo sapiens
cagcactgtaggcaattacaatgtaatggtaagtatttgtatatctaaacatagaaaaggtacagcaaaatatgatacaaaagattaaaaaatgctacccstgtgtaaggcacttaccgtggagcttgcaggagtagaatttgctctgggtgaatcagtgaatgagtagtaagcaaatgtgaaggcctaggacattactat

SEQ ID NO: 259354 - DNA, 201 bp, Homo sapiens
tgtaacacatttgtgaagtcacagggcatgagtggacaagctctgaactgtcatatcaaagaagggaatatgggaggttttgtttggaagtttaattcttytgtgctgcttttagtcagctgctacttggaacactcaaatgaaaacaaatgctgctgtcctggcaatcaagggaggcttttagcagcttgggtagcctca

SEQ ID NO: 259355 - DNA, 201 bp, Homo sapiens
tcctggtatttgagtgtagatagtgctatcctggtgaagggtgaggaggacagcatttaggccacttggactttctttcatataaagatattaaaaatacrtatcttatataaatatgatatcatctcatctattttcctttaatcttctaactccaacccagtaatgatctcagaaaaattaatccttccatttcttttg

SEQ ID NO: 259356 - DNA, 201 bp, Homo sapiens
ccgcccccccgcccctcccccaccaacagcttgctttgtcacttagggctttatgatcctgagcaaagcatttaacttctctaagccccaaatgagcataygagtgtaatacctgctgttcctatcacaagtccttgtgacattcagatgagtgaaagttcaaaaggtcataaactgtaaaggtccatttgaaagagtaca

SEQ ID NO: 259357 - DNA, 201 bp, Homo sapiens
gccttgctgagtaaattaaatttatgttcaagtgctatttctttatggcaccagggaacaagcatttcaaacgggggtgagggttgaaaaatgacctgttyggtacagtgttcactatgtggatgatgggtgcacagacttcaccactacacaatatatgcatgtaggaagcctgcagttgtgcccctttaaggtatattt

SEQ ID NO: 259358 - DNA, 201 bp, Homo sapiens
ctctggaatcaactaggaaaacttggtgtgagaaagacaataggaaaagtgagaaaacgggaagctggttatgaagttaggagaaaatgcaaaggaagtgyggaaagtttagcatgtactaccacatttctggaagggcccaggatcacccgccacttttgcataaaacctaggatgcccatgtgaagagccttcacctca

SEQ ID NO: 259359 - DNA, 201 bp, Homo sapiens
ctcccccaagaaaaaatggggaagagaccttgattcctggcacatgaaggcctctggaatcaactaggaaaacttggtgtgagaaagacaataggaaaagygagaaaacgggaagctggttatgaagttaggagaaaatgcaaaggaagtgcggaaagtttagcatgtactaccacatttctggaagggcccaggatcacc

SEQ ID NO: 259360 - DNA, 201 bp, Homo sapiens
cccaagagtgaccataattacctctgacaagactatactcaaatcaaggaaaataaaatctgttttgaagggaaaagaaatcttaaaaagaaacaagtgcrtcagcttgagaagatccaataaattcctttagagtctccgtaatctccatgtccattttctttttttttttttttttttttttgaggtggagtttcgctc

SEQ ID NO: 259361 - DNA, 201 bp, Homo sapiens
ttactctaaaaacattaacatggtttctgtctctctcaaagcatatttcgagagcaaataatagaatttaagtgctttaaagagttggactttcatttggstattatgagtggttaaatatctttatctcatccccaactctaaccaccccctcccattttttttttttttcatattcaggctttagaagattggcaagca

SEQ ID NO: 259362 - DNA, 201 bp, Homo sapiens
cgtcgtttatatccacggaggaggctgggccttggcaagtgcaagtgcgtcctggtcaccttcagatggtttgttgttgtggttggccttgggggagatgygtaactgagtttggctttcttagtgggaaagaaggggaccatttatctaggttcccctggatggtcccagttacccctgttgtcccagcaaaattattac

SEQ ID NO: 259363 - DNA, 201 bp, Homo sapiens
actgtgaagagttccttaggctgtaggtaccttaggcaaagttgttgaaatgacattttgttaaattaaagtgctttacttgaattctagtcctaatggcrggtgaccttgcctcaatgtgaaggtagtgaagaagtacttacaagcagggttgatattttcctcaacaaagggctttagatttgctcaaatgattgacaa

SEQ ID NO: 259364 - DNA, 201 bp, Homo sapiens
gggaagagaccatcaggcagtatggtctttgcctcatttctaaaaagcttctggttatatctgagctgagctgcttctaaatgccagggcctcccttgacmatgtttcttttttctcacacgctcctttcaaaaggacaagacacatttaaagatacaattaaatatattgaagttacaaagcaatttaaagaaattaagc

SEQ ID NO: 259365 - DNA, 201 bp, Homo sapiens
cagcaaatgaagtgttaaaagagcaaaattgttaaaattattatttttagacataagatctcactctgtcacccaggccagagtacagtggctctatcacwgctcattgtaacctcaaactcttgggctcaagtaatcccccttcctcagcctcccaagcaactgggactgcaggcgtgcaccactatgcctggctaatta

SEQ ID NO: 259366 - DNA, 201 bp, Homo sapiens
aatgcttttgcacacgtgtctcttcttctttaggtcttttttagataccatcctctcagccaagcctttttttgacaagcctttgtgaaattgcaacccaygttcctctgtttcatttctctccaaagctatcatcaatatctgacaaaccacatatttgacttattatgtttattgtaataagtggaaatagacaatatg

SEQ ID NO: 259367 - DNA, 201 bp, Homo sapiens
ttcaagcgattcttctgcctcagcctcctgagtagctgggattacggcacgtgccaccacacccggctaattttctttggtatctttagtagagacagggyttcaccatgttggccaggctggtcttgaactcctgacctcgtgatctgcctgcctcgtcctcccaaagtgctgggattacaggcgtgagccaatgtgctc

SEQ ID NO: 259368 - DNA, 201 bp, Homo sapiens
tcctgttttgtgctagttaccgtgttaaatgctggtgacataacaatgtaagaatgacttaattcctgccctcatagagtttatgatctagaagagaaagmccttgaataagtaatgttaaaagtgtgataagtgatgggaagtagaagggcaagtagtaacagagacatctaacaggcaagatcttacctcgtttaaagg

SEQ ID NO: 259369 - DNA, 201 bp, Homo sapiens
ctcagcctcccctgagtagctgggattacaggcaccacacagctagcttttatatttttggtagagctggggtttcaccatgttggccaggctggtctcgmactcctgatctcaagtgatccgcccgcctcggcctcccaaggtgccgggattataggcatgagccatcgcacctggccacaaaatcctttcttatataaa

SEQ ID NO: 259370 - DNA, 201 bp, Homo sapiens
tgtgatgttgcaacagatccaaggcagaagcaggtgtgagaatccagctgtctctagttaagctagacattaaagagatttgtaggcccgggcgtggtggytcacgcctgtaatctcagcactttgggaggccgaggtgggtggatcatctgaagtcaggagtacaagaccagcctggccaacatggtgaaaccacgtctc

SEQ ID NO: 259371 - DNA, 201 bp, Homo sapiens
ctggggaaggtttttatctgaggaagctggtgggcaggggttccagcagccttggtaatggaatcacctcttatgagcaccaggagttgggactccatgawtcatgtcactcatgctggctcaagggtctggggacagaccaaatgactgataggtgaagtccttgagtacaaaacctacgtaaaagctatgtctcctact

SEQ ID NO: 259372 - DNA, 201 bp, Homo sapiens
gccaaaagtgtccatttttattgagtaaaactgaagaatgtttccagcatgaaaacagatgaggggaggggttaggccatggatctttatggcaccaggarcactcttgcatcataacctgtttgtttttaagcatgtttatcctattatataagccaattattaattgagaagattgagcagtagcatgttttttttagg

SEQ ID NO: 259373 - DNA, 201 bp, Homo sapiens
atgacaagtatttaccatacaaaatcctttttttttttgtaaaattttttaaaaattatacttgtgcacaatgtgcaggtttgttacataggtatacatgwgccatgttggtttgctgcacccatcaactcacaaaatcatttatttatttatttatttatttatttatttatttgagacaggatcttgctctgtcaccca

SEQ ID NO: 259374 - DNA, 201 bp, Homo sapiens
tctttgtcttctcacctccaaatttcatttggtgtcctcaaataccatctgtcattctaattatgatgtaccttggcttctaactcttttgctataattcragaacttgattttccatttggcattggcaagttttccatccaaatatggtcagaagagagtcttggctcagtggagagaacattcttggctttgaagcca

SEQ ID NO: 259375 - DNA, 201 bp, Homo sapiens
tttataggttgtgattaaaattcaaggtggaggttaccgatggaaattactgatgtactaaatagtaaaatacacacatacacacacacacacacacacasacacacacacacacatatatataactctttccccaaataactaaattaatgtcagttggttcatcaatgtggaaacatattttacagtctggactcttca

SEQ ID NO: 259376 - DNA, 201 bp, Homo sapiens
ggagacaaaggcttcttgaatgtttgtcaaaaggggtggatctatgcttagagaaggtgacctcttgttttgactacccagtctggtttccctctcacctyctctcactacaccctgttctttctttctttctttctttctttttttttttttttttttttgagacggagtcttgctctgtcgcccaggctggagtgcagt

SEQ ID NO: 259377 - DNA, 201 bp, Homo sapiens
agtaagtattacttgatgaaataaacttgaaactacttactaaaaatattctaggccaggcacggtggctcacacctgtaatcctagcactctaggaggcygaggcaagtgggtcacttgagcccaggagtttgagaccagcctgggcaacatagtgcaaccccatctctacaaaaaaattaaaaaaaaaaaaattagcca

SEQ ID NO: 259378 - DNA, 201 bp, Homo sapiens; identical to SEQ ID NO: 51759

SEQ ID NO: 259379 - DNA, 201 bp, Homo sapiens
tcctagcactctaggaggctgaggcaagtgggtcacttgagcccaggagtttgagaccagcctgggcaacatagtgcaaccccatctctacaaaaaaattaaaaaaaaaaaaattagccaggtgtggtgacatgcacctgtggtcccagctacttgcaaggctgaagtgggagaatcacttgagcccaggaaattgaggct

SEQ ID NO: 259380 - DNA, 201 bp, Homo sapiens
ttacacctgttttactcatttccattagttgccctggtccttgaagacatgagtttatgacctatattctacagaaagctcatttaatgtttcatgtaataaatatttattgaattactttcatttttacaagtgttgcaaatggttcctgtgcttcagagattcagaatctatttgagaagatgaaagatattgtgcagc

SEQ ID NO: 259381 - DNA, 201 bp, Homo sapiens
gcttcaaagaaagaacaattgaccatgtaaatagtcactccctcattcatttttatttaataatcttattcattagaagttataaaggatgataaaatggyaactttcagcaaggctttgccagaaagaaaatatgtttagtcactttgttaactgaattcatggtatgagaggaggaaaatgtttgataatattaagtaa

SEQ ID NO: 259382 - DNA, 201 bp, Homo sapiens
tttaaacattgatagctagtgccccatctgtaatccatttgtagaatacctattgggaagctcacctttctccagtttgtaacttttaaaatatatgtctrttatcattgttattaaacacagatagatagtccccaagttacatgtatttaggtagccgtataatttattgtccaaaccaggacatttttgagagtagca

SEQ ID NO: 259383 - DNA, 201 bp, Homo sapiens
tgatgtcaaggatgtcctccaaaactgatgttttgactttggcaatgttgatattgagccatcatttctgacaagaaatagtcaaaatatagtttataggytgtgattaaaattcaaggtggaggttaccgatggaaattactgatgtactaaatagtaaaatacacacatacacacacacacacacacacagacacacac

SEQ ID NO: 259384 - DNA, 201 bp, Homo sapiens
tttcagggctaaaggaatttgagagttaagcagtgggaatatgtttatctgctcagttatggggcataatttttctttgaaaaaggagtgttgttcagtcttttttttttttgagacagtctcattctgtcgcccaggctggagtgcagtggtgtgatctcacctcactacaacctctgcctcctggatgggtttaagcga

SEQ ID NO: 259385 - DNA, 201 bp, Homo sapiens
cttcctcctcttacgcaatatttgaaggggatacaaaattcctccgccgggttccacgaaaacgcaggtttttcctaatgcattgaggctgtcgctttttraggtggtccagtcgggaattttcagggtatcgcattcgcctccttgctagcagcgggctagatctgcatttccccgtctgcgtttgtgacggggaagaag

SEQ ID NO: 259386 - DNA, 201 bp, Homo sapiens
tcccacaattaatctacatcagtgcttcttcttattttttgtgtcatagaaacaattacatttgtatagtatactggggattctggaagcaattttggggraatctgtatgagcttgaataacagaattcacaagatttataaagagttacacaaatggttctcaaatagaatgccaactctgatgccaattattcaactc

SEQ ID NO: 259387 - DNA, 201 bp, Homo sapiens
caaagggctttagatttgctcaaatgattgacaactctggggcttagagatctggcctatgagtatggaaaagatgactttgacttctgaagttatgaaayataggtgtcttcagttgaccaccataattgaggaaatataccatgtcctctctatcatgttagttgagcaattattatgtgctagtacttggatatagca

SEQ ID NO: 259388 - DNA, 201 bp, Homo sapiens
gccctccctgctgggctatgctgtgaggacactcatgataacttagtcactagtgaattttttgtcctgattttttttttgagctcccacaattaatctayatcagtgcttcttcttattttttgtgtcatagaaacaattacatttgtatagtatactggggattctggaagcaattttgggggaatctgtatgagcttg

SEQ ID NO: 259389 - DNA, 201 bp, Homo sapiens
tctttaaacatatggaggcaaaaggttttaagaatagtgtcaggggcattatttaatcagtgttagttctgacaggtgaacaacctgagttggtctctgcmgatagtacctatgaaacattaaggtcagattgattcagctacctggtgtgtaagataatgcccaatttatagtttcctttttattttttctggtacttct

SEQ ID NO: 259390 - DNA, 201 bp, Homo sapiens
ttcactaaccacaatttttagctgatttgctaggatttttctttaaacatatggaggcaaaaggttttaagaatagtgtcaggggcattatttaatcagtrttagttctgacaggtgaacaacctgagttggtctctgcagatagtacctatgaaacattaaggtcagattgattcagctacctggtgtgtaagataatgc

SEQ ID NO: 259391 - DNA, 201 bp, Homo sapiens
ttgggagactgttgtgccaaacccccattaacctcagtagtgaaggcaccaggttgaagaggctgaagaagattcccagagcctgcaaacaagacatgggttttttttttttttttttttttggttgttgttgttgagatggagtctcactgtgtcacccaggctggagtgcagtggcgtgatctcagctcactgcaacct

SEQ ID NO: 259392 - DNA, 201 bp, Homo sapiens
tgggagactgttgtgccaaacccccattaacctcagtagtgaaggcaccaggttgaagaggctgaagaagattcccagagcctgcaaacaagacatgggttttttttttttttttttttttggttgttgttgttgagatggagtctcactgtgtcacccaggctggagtgcagtggcgtgatctcagctcactgcaacctc

SEQ ID NO: 259393 - DNA, 201 bp, Homo sapiens
ttttctgggaggaaaaaaaccaaatgttttagggtgacagggttagagtgttaaatccgtctgtgagctcttttatttctctgagctagattttgttatgkagtggcagtaaggttctccttaggtttgctttgtagcttgtcatgaaattcctggatatttgaggaaacaattggaaattttataattgtgcaatctaat

SEQ ID NO: 259394 - DNA, 201 bp, Homo sapiens
agttgtcatcctaccactttcttgaaacaggtcttctaactgttttccttctggatttctggttgaaattttgctagtgaagttttctctctcccattcastactcacccacccctcctcacccccaatcattaacaagaaatctgggtttaagtgtatttctgctaccattgactcactgaaagaatttttcaggtgata

SEQ ID NO: 259395 - DNA, 201 bp, Homo sapiens
aggccatcctgtcttgtaatgcctcaggccaaggagggactgagctgcattaacttgaaactactggctgtagaaattgtccttattgtaaaggcttgggsttttgtactgatgctaattttctcagacactgtttatgtaggcaaaactcctgctaaccagcccagcagatcagctggcagagagaatgtgctgccagtg

SEQ ID NO: 259396 - DNA, 201 bp, Homo sapiens
gcactgggatctaacccaggacccaccgttgagtgctgcggggccctggataagtcccttaacctctctgagcctcagaaaaacgaggacagtgtcatctrattgcagggctgttgcaaggacttagtgaggtgatgtgtatacaatttttggcacatattcaaagtgctatttactgaccattcttgcttttggagagca

SEQ ID NO: 259397 - DNA, 201 bp, Homo sapiens; identical to SEQ ID NO: 51763

SEQ ID NO: 259398 - DNA, 201 bp, Homo sapiens; identical to SEQ ID NO: 51764

SEQ ID NO: 259399 - DNA, 201 bp, Homo sapiens
  misc_feature (1)...(201): n = A,T,C or G
gcattcagatgctgccagtttttggaccatcctttgagtagccctggactggacaacttgattgagtaatgataataatagagataagaaaagaattcgtncttaaaacccaggagattggtttgaccaggtgtgtcattcacgtagcctgcaaaaaacctggccctcccaccttagccctgtaaaatgcaaaggtgggtc

SEQ ID NO: 259400 - DNA, 201 bp, Homo sapiens; identical to SEQ ID NO: 51752

SEQ ID NO: 259401 - DNA, 201 bp, Homo sapiens
ttagggcccaataatttgcattcagatgctgccagtttttggaccatcctttgagtagccctggactggacaacttgattgagtaatgataataatagagrtaagaaaagaattcgtccttaaaacccaggagattggtttgaccaggtgtgtcattcacgtagcctgcaaaaaacctggccctcccaccttagccctgta

SEQ ID NO: 259402 - DNA, 201 bp, Homo sapiens
tggtcctcagggccctgagcctctatggttcatgcatatcccctctatttcgccactgagttcacgtatcttggcaagtaaaggcttataggtgtcatactttttttttttttttttctagaggctgaaatgtctcatcacatttggcttcaatttcatgggattcttctacagctttttgagggcaaggacttggcattt

SEQ ID NO: 259403 - DNA, 201 bp, Homo sapiens
aacagggcacacagtagactttgaaaaaacgattttgaagcctccttcctgagtgtgtttcttcgctgtaactgccatttgccatgttcttctctttttgyggggagtgagagggagaggacatggtctgagtctcgctctgtcacccaggctggagtgtagtggcatgatcttggctcactgaaaccttcgcctcccagg

SEQ ID NO: 259404 - DNA, 201 bp, Homo sapiens
ggtcctcagggccctgagcctctatggttcatgcatatcccctctatttcgccactgagttcacgtatcttggcaagtaaaggcttataggtgtcatactttttttttttttttttctagaggctgaaatgtctcatcacatttggcttcaatttcatgggattcttctacagctttttgagggcaaggacttggcatttc

SEQ ID NO: 259405 - DNA, 201 bp, Homo sapiens
cacctttaattgactaggccaatgtttctgaactctaatgtgtaaaagaatcacctggagaaactcctgggtctgccccagatgttctaactcagtacgcrgagttagggcccaataatttgcattcagatgctgccagtttttggaccatcctttgagtagccctggactggacaacttgattgagtaatgataataata

SEQ ID NO: 259406 - DNA, 201 bp, Homo sapiens
  misc_feature (1)...(201): n = A,T,C or G
gtccttaaaacccaggagattggtttgaccaggtgtgtcattcacgtagcctgcaaaaaacctggccctcccaccttagccctgtaaaatgcaaaggtggntcactatgatgtttgaacacatggtgttatctggaggcggccatcacacttggcacaagtggtgacaaggagaagatggcgggaatcactatattgagtg

SEQ ID NO: 259407 - DNA, 201 bp, Homo sapiens
tctgtcgcaaggggcaggccctgtgcttccacgtgcttctgactctgaatgtagccaaaaatggttttgtgttgtccttcacaactgtgttttgcaagcctcgctgttttctgggtttctaacttcctcatgttttaatagatttatgcttgttttcaaatttgtcatgaattatgtgtctgtttctgactaaatgttaat

SEQ ID NO: 259408 - DNA, 201 bp, Homo sapiens
taattaggaataaatagtaacttctcttaaaagcaaaatttattcaaagacctgtgctaacattcttaaatatctgctagctgtaataaagaaatcaatayacttcatgttcttagagccgacaatttagcctgaatattttccctggcatgcttatagtggtccaagcaagcattaggtcatagctgtccctcttcctta

SEQ ID NO: 259409 - DNA, 201 bp, Homo sapiens
caactcagaaatcatctcttttgagaacttccccgtctctttccctctcactgcccttccttggccttaatttctctctcaacactctgctagcgttttgkttttcttttatggcccttagatgttgcttatgttgctacttatgtacaggctccccaccaaatcataaattttctctcctatcattgacataattttcct

SEQ ID NO: 259410 - DNA, 201 bp, Homo sapiens
ttctactatttggtagcaaattttgacaggaaaggatagaaatgaaaaaaagtatctgttggggtaaaggtgggactgagtaagatgagtagccctcactttttttttttttttttttttttggagacagagtctctcccagtcgccgaggctggagtgcagtggcgcgatctccactcactgcaacctccgcctcccggg

SEQ ID NO: 259411 - DNA, 201 bp, Homo sapiens
tggggtaaaggtgggactgagtaagatgagtagccctcactttttttttttttttttttttttggagacagagtctctcccagtcgccgaggctggagtgyagtggcgcgatctccactcactgcaacctccgcctcccgggttcaagcgattcttctgcctcagcctcctgagtagctgggattacggcacgtgccacca

SEQ ID NO: 259412 - DNA, 201 bp, Homo sapiens
gctggcgaaatgggaactgcaatagaaattcatggactcttagtttcatgccctccctgctgggctatgctgtgaggacactcatgataacttagtcactmgtgaattttttgtcctgattttttttttgagctcccacaattaatctacatcagtgcttcttcttattttttgtgtcatagaaacaattacatttgtata

SEQ ID NO: 259413 - DNA, 201 bp, Homo sapiens
agtagccctcactttttttttttttttttttttttggagacagagtctctcccagtcgccgaggctggagtgcagtggcgcgatctccactcactgcaacytccgcctcccgggttcaagcgattcttctgcctcagcctcctgagtagctgggattacggcacgtgccaccacacccggctaattttctttggtatcttt

SEQ ID NO: 259414 - DNA, 201 bp, Homo sapiens
acttgaggttcagaaaggctcaaggacaccatcaagatcgtatgatcagggccaggcacggtggctcacacatgtaatcccaaggcaggagaccccttgargccaggagttcaagaccagccttggcaacaaagtaagactgtctctacaaaacatagttagccagatgtggtggcacatgatctcagctactggggagac

SEQ ID NO: 259415 - DNA, 201 bp, Homo sapiens; identical to SEQ ID NO: 51762

SEQ ID NO: 259416 - DNA, 201 bp, Homo sapiens
ccgaggctggagtgcagtggcgcgatctccactcactgcaacctccgcctcccgggttcaagcgattcttctgcctcagcctcctgagtagctgggattayggcacgtgccaccacacccggctaattttctttggtatctttagtagagacagggtttcaccatgttggccaggctggtcttgaactcctgacctcgtga

SEQ ID NO: 259417 - DNA, 201 bp, Homo sapiens
tgtcagtggactagtccaaggatggctgatcataaacagctgcatatacagatccagagctcaggagacagagctgggctggtgatatggatttgggagtrgtcagcaaatggatagtggcagaagtagttgaaatgaatgtgtttggagtgacagtaagatctggaggattttaccaagggtgcccctcagggacaccag

SEQ ID NO: 259418 - DNA, 201 bp, Homo sapiens
atgtaacaagtatgtgtgtgcctgtgtgcatgtgtgtatgtatatatacatgctacatttatacacacctgatatgtgcatgtgtaaatatatatacacayatgtagcaggtgtatatataggtagcatatatatatatttgtatatatatctatatatgtgtgtgtgtgtgtgtgtgtgtatgtgtatgtgtgtgtagca

SEQ ID NO: 259419 - DNA, 201 bp, Homo sapiens
tgcatgtgtaaatatatatacacacatgtagcaggtgtatatataggtagcatatatatatatttgtatatatatctatatatgtgtgtgtgtgtgtgtgwgtgtatgtgtatgtgtgtgtagcagcggttttgtgctagaaccaagagcctggaactggtacaatgaaaatattttacccgaaaggtatgctaagtaaaa

SEQ ID NO: 259420 - DNA, 201 bp, Homo sapiens
tgcttaagatgacaccgtttatacgaggtggagcctgaattcgattccagcctgtgttactcctgaactcaagagtttagatttgtgctaaatttccttayaatagaaaccagagaagagaagggtgaaaggggcattccagccagaagcagcagtatgtgaaagttctgtgggagaggatggtgtagctgaggaactaca

SEQ ID NO: 259421 - DNA, 201 bp, Homo sapiens
aaaagtgacttgcttaagatgacaccgtttatacgaggtggagcctgaattcgattccagcctgtgttactcctgaactcaagagtttagatttgtgctaratttccttacaatagaaaccagagaagagaagggtgaaaggggcattccagccagaagcagcagtatgtgaaagttctgtgggagaggatggtgtagctg

SEQ ID NO: 259422 - DNA, 201 bp, Homo sapiens
ttgtttctgttgccacactaacgatttgtcccttttctctctttttctcactccctctcttgttcttttttgtcttttattgattggtttttcctgtcctrctcaccagctctttaagtgagggtgtttctgaagcttccattttttaattttattcaactttacctgagcaaattaactttccctctctggtggaattta

SEQ ID NO: 259423 - DNA, 201 bp, Homo sapiens
gacagctggagccaaatctgctgaggaagcagccaccgcacctggacctttctggactctcagcaaggcctcccagattactcaagggttgtcagtgcagwttggtaatacaggaaccttcaaggaaatgatttgggcagttggcctgagcagctggccagaggaaagcacaggggatgtttaaggagacaaggccctaca

SEQ ID NO: 259424 - DNA, 201 bp, Homo sapiens
ataagtcaacatgacagatgagcatccaagatggagttgctttggcctccacaagcatgttgtttccctaaactcggaaccttcttcagaacttgaagtgrcagttttcctgaggtcattaacagtagtgccatggcctccaccacaggctctgtctattccagcactccctgaaatgtaaagctgatgtgtgggttagga

SEQ ID NO: 259425 - DNA, 201 bp, Homo sapiens
tagctctggcagtccacccgccttggcctcccaaagtgctaggattaaagtgtaagccgctaggcctggcccaaagatgggtcttttttttggggatgggrgtgggggatggagtcttgctgagtcgcccaggctggagtgcagtggcacagtctcggctcactgcaacctcacctcccaggctcttgcagttctcctgtc

SEQ ID NO: 259426 - DNA, 201 bp, Homo sapiens
acagtagataaactggaagtcttagaagccttcccagggctagggttaatcataagtcaacatgacagatgagcatccaagatggagttgctttggcctcsacaagcatgttgtttccctaaactcggaaccttcttcagaacttgaagtggcagttttcctgaggtcattaacagtagtgccatggcctccaccacaggc

SEQ ID NO: 259427 - DNA, 201 bp, Homo sapiens; identical to SEQ ID NO: 51754

SEQ ID NO: 259428 - DNA, 201 bp, Homo sapiens
caactgatctttccatctccataaaattctttgagttaacgaaatcctactttctggtttctgaaggatggtattctgcaaatgtaaaagtttcccttaayctccaaaaaataattgggttaatccagctaccacaagtgtgaaattgagaagctgcttgctaagattgaatttaatattgtcacatgtcatctgagagct

SEQ ID NO: 259429 - DNA, 201 bp, Homo sapiens
cctctttatttcctccctcgccctgcagagtaacctgatccactacctgggactgagccatcacctgctggcactgaattttatcattgtttcttttggcmaaaaaagcgcgtggtcttctgcccaagtgaaggtgaccgacacagactttgatggtgtggaagtcagagtgtttgaaggccctccgaagcccgaagagcc

SEQ ID NO: 259430 - DNA, 201 bp, Homo sapiens
taccttattagaaaagacattcactttaaaagtataaacgctgtagtaacttttttctttcattgttttcaataaaagtgtaatggaagtaaactgacaartttaggaggctttcagaacataaaggagaaaggctgacagctcttgagaacctctttgctttcagctgagagcaagtagagaatgcttgctctctggccc

SEQ ID NO: 259431 - DNA, 201 bp, Homo sapiens
taggacaattgaagtacagtcaatttaaggttgttttgacctcagggcaggatttacagtaaacagtagataaactggaagtcttagaagccttcccaggrctagggttaatcataagtcaacatgacagatgagcatccaagatggagttgctttggcctccacaagcatgttgtttccctaaactcggaaccttcttca

SEQ ID NO: 259432 - DNA, 201 bp, Homo sapiens
tgctaataatctctttcataacagttttgaactggaatatttactattgtcaggtgaatttaactttaaaacatcagtaaataatgattgtccagaaattrtgatgatgcgtatttcttcatgcacattagtaacttcactaaccacaatttttagctgatttgctaggatttttctttaaacatatggaggcaaaaggtt

SEQ ID NO: 259433 - DNA, 201 bp, Homo sapiens
cactacgcctggctaattttttgtatttttagtagagacggggtttcaccgttttagctgggatggtctcgatctcctgacctcgtgatccgcccgcctcrgcctcccaaagtgctgggattacaggcgtgagccaccgcgcccggccctgcctccgcttcttaaagcactgggtttacaggcataagccaccgcatctgg

SEQ ID NO: 259434 - DNA, 201 bp, Homo sapiens
gaatcaaaacgttggtgttaattcagtgtctcaaagacattagacccaaggcctctgtcttttcctcatggttgctgatgaaggccgaagctatagccatratggtaatattccagttggagagagaagaaactactcttttgtatactaaaaatacaaaaattagctgggtgtggtggcatgcgcctgtagtcccagcta

SEQ ID NO: 259435 - DNA, 201 bp, Homo sapiens
tgacagtgcttttggactagttgatcaaggatttttatcttgccaaatgtccccaaacttgttgagatttagtgtcacctcacctgaattctctgtgcatratgtgcttttgggctgtgtgggtgtggtttaaatgacagctcagctggaaactgtgcagaacttcaacgtgctaataatctctttcataacagttttgaa

SEQ ID NO: 259436 - DNA, 201 bp, Homo sapiens
attttcctgagctatatcccaggtctacagcatttcctgatcttgcctaacaggattacttctctaggctgtaaaaattcccacacattcaacacacagaragtaagagatcgcagacagagaaaccaggaaagaaggaaggttttgcaacaggatagccggcagacagccttgagattaaaggacagatctgagattgag

SEQ ID NO: 259437 - DNA, 201 bp, Homo sapiens
tgctgagtgttccccctgtttcttatgggtgacagtgcttttggactagttgatcaaggatttttatcttgccaaatgtccccaaacttgttgagatttartgtcacctcacctgaattctctgtgcatgatgtgcttttgggctgtgtgggtgtggtttaaatgacagctcagctggaaactgtgcagaacttcaacgtg

SEQ ID NO: 259438 - DNA, 201 bp, Homo sapiens
tgacacagacacacatgtaatggttttaaggagtggagagtttattaggcaagaaggaaggaagaagaaaacagctcccccatacagagacagagggaggrgggattagaacaaacagaaacttggtgtgtggcagaaaagtggttgcttatattgggatgctgcagggggcagtgtctggtttgcatagggcccagggga

SEQ ID NO: 259439 - DNA, 201 bp, Homo sapiens
aaggtagataaaatcacaaagatggggagaaaccagagcagaaaagctgaaaattctaaaaatcagagtgcctcatctacaccaaaggatcacagcgcctygccagcaacggaacaaagctggatggggaatgactttgatgagttgacagaattaggcttcagaaaatcggtaatgacaaacttctcccagctaaaggag

SEQ ID NO: 259440 - DNA, 201 bp, Homo sapiens
caggaaacacagagaatgccacaaagatactcctcgtgaagagcaaccccaagacacataattgtcagattcaccaaggttgaaatgaagaaaaaaatgtyaagcgcagccagagagaaaggtcaggttacgtacaaagggaagcccatccgaccaatagtggatctctctgcagaaactctacaagccagacgagagtgg

SEQ ID NO: 259441 - DNA, 201 bp, Homo sapiens
aacacagagaatgccacaaagatactcctcgtgaagagcaaccccaagacacataattgtcagattcaccaaggttgaaatgaagaaaaaaatgtcaagcrcagccagagagaaaggtcaggttacgtacaaagggaagcccatccgaccaatagtggatctctctgcagaaactctacaagccagacgagagtgggggcc

SEQ ID NO: 259442 - DNA, 201 bp, Homo sapiens
cacaaagatactcctcgtgaagagcaaccccaagacacataattgtcagattcaccaaggttgaaatgaagaaaaaaatgtcaagcgcagccagagagaarggtcaggttacgtacaaagggaagcccatccgaccaatagtggatctctctgcagaaactctacaagccagacgagagtgggggccaatattcaacattc

SEQ ID NO: 259443 - DNA, 201 bp, Homo sapiens
attcaccaaggttgaaatgaagaaaaaaatgtcaagcgcagccagagagaaaggtcaggttacgtacaaagggaagcccatccgaccaatagtggatctcyctgcagaaactctacaagccagacgagagtgggggccaatattcaacattcttaaagaaaagaattttcaacccagaatttcatatccagccaaactaag

SEQ ID NO: 259444 - DNA, 201 bp, Homo sapiens
aattgtccttattgtaaaggcttgggcttttgtactgatgctaattttctcagacactgtttatgtaggcaaaactcctgctaaccagcccagcagatcasctggcagagagaatgtgctgccagtggggtagagtttgggatacatttcatgacctacttcccctccctaccctgatttttaaaccttttcatcttaagt

SEQ ID NO: 259445 - DNA, 201 bp, Homo sapiens
gtcacctcacctgaattctctgtgcatgatgtgcttttgggctgtgtgggtgtggtttaaatgacagctcagctggaaactgtgcagaacttcaacgtgctaataatctctttcataacagttttgaactggaatatttactattgtcaggtgaatttaactttaaaacatcagtaaataatgattgtccagaaattatga

SEQ ID NO: 259446 - DNA, 201 bp, Homo sapiens
tcacctcacctgaattctctgtgcatgatgtgcttttgggctgtgtgggtgtggtttaaatgacagctcagctggaaactgtgcagaacttcaacgtgctaataatctctttcataacagttttgaactggaatatttactattgtcaggtgaatttaactttaaaacatcagtaaataatgattgtccagaaattatgat

SEQ ID NO: 259447 - DNA, 201 bp, Homo sapiens
tttcaaacttagctctggcagtccacccgccttggcctcccaaagtgctaggattaaagtgtaagccgctaggcctggcccaaagatgggtcttttttttkgggatgggagtgggggatggagtcttgctgagtcgcccaggctggagtgcagtggcacagtctcggctcactgcaacctcacctcccaggctcttgcagt

SEQ ID NO: 259448 - DNA, 201 bp, Homo sapiens
cacctcacctgaattctctgtgcatgatgtgcttttgggctgtgtgggtgtggtttaaatgacagctcagctggaaactgtgcagaacttcaacgtgctaataatctctttcataacagttttgaactggaatatttactattgtcaggtgaatttaactttaaaacatcagtaaataatgattgtccagaaattatgatg

SEQ ID NO: 259449 - DNA, 201 bp, Homo sapiens
cctcccaagtagctgggaccacaggcatgtacctgccacacccagctagctttttgtatttttagtagagatggggttttaccatgatgcccaggctggtytcaaacttagctctggcagtccacccgccttggcctcccaaagtgctaggattaaagtgtaagccgctaggcctggcccaaagatgggtcttttttttgg

SEQ ID NO: 259450 - DNA, 201 bp, Homo sapiens
agtctcactctgttgccaggctggagtgcagtggtgcaatattggctcactgcaagtctctgcctcccggtgtcaagcaattctcctgcgtcagcctcccragtagctgggattacaggcgcgcatcaccacgccaggctaatttttgtattttttagtacagacagggtttcaccatgttggccaggatgatcttgatct

SEQ ID NO: 259451 - DNA, 201 bp, Homo sapiens
agggaagaaagtttcaagaaagcacaagttgtcaaatgtctgcagtgaggccaagtgggtcattggcatcggcattggcattggggtcaggggttcattgrtgagcctaatggatagtttcatcagacatatggggctgaagccagattgcaatgggttaccttcaaagagggcagtctttgaaaagtcactgtctttttt

SEQ ID NO: 259452 - DNA, 201 bp, Homo sapiens
tcctcccatctcagcctcccaagtagctgggaccacaggcatgtacctgccacacccagctagctttttgtatttttagtagagatggggttttaccatgwtgcccaggctggtttcaaacttagctctggcagtccacccgccttggcctcccaaagtgctaggattaaagtgtaagccgctaggcctggcccaaagatg

SEQ ID NO: 259453 - DNA, 201 bp, Homo sapiens
agactgttatctagaattcaagttagcaggcaagtgcagaaaataatgagcatcttagccaaggcagcaacgagagcgggggtggagctggggtagaactwggtcagaaaacgttggcaggtggagttaatagggtttgatgaggtgattggaaatcatgtgagagaagaagctgaggacaatagtaaggtttctagctta

SEQ ID NO: 259454 - DNA, 201 bp, Homo sapiens
aggctggagtgcagtggtgtcctcaccgcagcctctgcctcccaggctcaagccatcctcccatctcagcctcccaagtagctgggaccacaggcatgtayctgccacacccagctagctttttgtatttttagtagagatggggttttaccatgatgcccaggctggtttcaaacttagctctggcagtccacccgcctt

SEQ ID NO: 259455 - DNA, 201 bp, Homo sapiens
cagtccagtggcagctgcttgtaggaattcagacactcagttggtgagggcagctctggtgatgccaagttgacgtgcgccctccctctttatttcctccytcgccctgcagagtaacctgatccactacctgggactgagccatcacctgctggcactgaattttatcattgtttcttttggcaaaaaaagcgcgtggtc

SEQ ID NO: 259456 - DNA, 201 bp, Homo sapiens
ggtgacagggttagagtgttaaatccgtctgtgagctcttttatttctctgagctagattttgttatgtagtggcagtaaggttctccttaggtttgcttkgtagcttgtcatgaaattcctggatatttgaggaaacaattggaaattttataattgtgcaatctaatgagagaaccctactattgcctacttattttgt

SEQ ID NO: 259457 - DNA, 201 bp, Homo sapiens
ttaggtttgagtcccagaactaccacttatccaatgaaatgaacaagcatagttattgtttaagccttctcaataaaatgggactgatgatacctgaggasatctcatgtatgaaaatattttgtccaaaagcaaaaggtaaatacaattggtttttgtattaaaagggctcaatgagccctccagtccagtggcagctgc

SEQ ID NO: 259458 - DNA, 201 bp, Homo sapiens
tctttcaaagcttttgcaaaacctcccagccttccaagaaggtttttgtctttctctataacttctataatttttcccaccaccctgaccaaactcctacrctcatgaatggcaatagagggtgatggttgagggttttggagccagaatgcttgggttcaaatccagttcaccatttactgcctgagtgaccttgggtga

SEQ ID NO: 259459 - DNA, 201 bp, Homo sapiens
gattaactgcctcttgttcttgtttttcattaacatttgctaatgctgttataatatagtgctttctaactcttttcatgacaggacaggacatatatatrtgtgtgtgtgtatatatatatatgtatgtatatataaaatatacacacacagttataatgtttatatgggacactggggtaaagggctcaggaatttgcc

SEQ ID NO: 259460 - DNA, 201 bp, Homo sapiens
atatataaaatatacacacacagttataatgtttatatgggacactggggtaaagggctcaggaatttgcccagaggctgaggcgatgagcacacacggamcctcttcaaggtgtaccgtcgtacgctgtgcacagcctgagaagctgtaaggtgccacatcgcagacatcatatagtcctgatttctgctagcaacattg

SEQ ID NO: 259461 - DNA, 201 bp, Homo sapiens
gaactgtgatatacttatttagaaaaaaaaggtactgaatcctggaattcaaacctaatcttaggtttgagtcccagaactaccacttatccaatgaaatkaacaagcatagttattgtttaagccttctcaataaaatgggactgatgatacctgaggagatctcatgtatgaaaatattttgtccaaaagcaaaaggta

SEQ ID NO: 259462 - DNA, 201 bp, Homo sapiens
agaatctcttctacagctgagagttgaaaaagttgctctcttagagtcaggttctatgacttgtgccttgggaacagaaatacgtgttcaacaaattttartggtgtggttagtagtaatagtagtaatattaatattttgggttgtctctgtcagttctgtataagccacttttctgggcaactaagaagaatgtgaata

SEQ ID NO: 259463 - DNA, 201 bp, Homo sapiens
aaaaatagaaaaaaaaagcagttcagagcgggatctcagtggctcgcttctttcttctttcttttattccataaatatttactggattcctgttttgtgcyagttaccgtgttaaatgctggtgacataacaatgtaagaatgacttaattcctgccctcatagagtttatgatctagaagagaaagaccttgaataagta

SEQ ID NO: 259464 - DNA, 201 bp, Homo sapiens
tttcatgtggattatggcactggggaaggtttttatctgaggaagctggtgggcaggggttccagcagccttggtaatggaatcacctcttatgagcaccrggagttgggactccatgattcatgtcactcatgctggctcaagggtctggggacagaccaaatgactgataggtgaagtccttgagtacaaaacctacgt

SEQ ID NO: 259465 - DNA, 201 bp, Homo sapiens
tgtacacattaatttgattaaacctcatgcctgaatttacaccaaattttgttcttctgatgggagttacatgcagtgataaagctaggtaatccacttgkcattgcagagtcatcctctccctgaagtgagttgggcaaattgaggaatatatatgcatccataatattaatatgatataacatctttgatatttacgta

SEQ ID NO: 259466 - DNA, 201 bp, Homo sapiens
aaaaatgtcaagcgcagccagagagaaaggtcaggttacgtacaaagggaagcccatccgaccaatagtggatctctctgcagaaactctacaagccagamgagagtgggggccaatattcaacattcttaaagaaaagaattttcaacccagaatttcatatccagccaaactaagcttcataagtgaaggagaaataaa

SEQ ID NO: 259467 - DNA, 201 bp, Homo sapiens
gaaaggatcaacaaaattgatagaccgctagcaagactaataaagaaaagagagaagaatcaaatagatgcaataaaaaatgataaagggtatatcaccaycgatcccacagaaatacaaactaccatcagagaatattatgaacacctctacgcaaataaactagaaaatctagaagaaatggataaattcctggacaca

SEQ ID NO: 259468 - DNA, 201 bp, Homo sapiens
accaataacaggttctgaaattgaggcaataattaatagcctaccaaccaaaaaaattccagggccagacagattcacagccaaattctaccagaggtacraagaggagctggtaccattccttctgaaactattccaatcatagaaaaagagggaatcctccctaactcattttataaggccagcatcatcctgatacct

SEQ ID NO: 259469 - DNA, 201 bp, Homo sapiens
gtatttttgtagggatggggtttcaccatgttggccaggctggtctcaaactcctgacctcaggttatccacccgccttggccttctaaagtgctgggatkacaggggtgagccactgcacccagccatatttacttttctaaagaaaatatgtaacactgcaaatgtgtgtcatccttctgcaggggcatgctagtcctc

SEQ ID NO: 259470 - DNA, 201 bp, Homo sapiens
gaaactggatcccttccttacatgttatacaaaaattaattcaagatgtattaaagacataaatgtgagacctaaaaccataaaaaccctagaagaaaacytaggcaataccattcagggacataggcatgggcaagggcttcatgactaaaacaccaaaagcaatagcagcaaaagccaaaatagacaaatgggatctaa

SEQ ID NO: 259471 - DNA, 201 bp, Homo sapiens
gtttcaccatgttggccaggctggtctcaaactcctgacctcaggttatccacccgccttggccttctaaagtgctgggattacaggggtgagccactgcrcccagccatatttacttttctaaagaaaatatgtaacactgcaaatgtgtgtcatccttctgcaggggcatgctagtcctctctgaactgttatggtttt

SEQ ID NO: 259472 - DNA, 201 bp, Homo sapiens
taaacaaatttacaagaaaaaatcaatcccatcaaaaagtgggtgaaggatatcaacagacacttctcacagtaagacatttatgcagccaacagacacakgaaaaaatgctcatcatcactggccatcagagaaatgcaaatcaaaaccacaatgagataccatctcacaccagttagaatggcaatcatcacaaagtca

SEQ ID NO: 259473 - DNA, 201 bp, Homo sapiens
ctggtctcaaactcctgacctcaggttatccacccgccttggccttctaaagtgctgggattacaggggtgagccactgcacccagccatatttacttttytaaagaaaatatgtaacactgcaaatgtgtgtcatccttctgcaggggcatgctagtcctctctgaactgttatggttttagtgtatgtgctgctgaagt

SEQ ID NO: 259474 - DNA, 201 bp, Homo sapiens
caatgagataccatctcacaccagttagaatggcaatcatcacaaagtcaggaaacaacaggtgctggagaggatgtggagaaataagaatgcttttacamtgtgggtggaagtgtaaactagttcaaccattgtggaagacagtgtggcaattcctcaaggatctagaactagaaataccatttgacccagcaatcccat

SEQ ID NO: 259475 - DNA, 201 bp, Homo sapiens
ctaacaaggttgcacgtggtgaggatttagaatgatgctctacttctaggtctaggggaacagatggaacagaagagtgggagaaaaatcaaaacaaaatragtataaagttaagtcgatgaaggggaagagaaaaaaaaagttagggttgcagaagcattgagataaactggaactattttcaatcaagatataatgaaa

SEQ ID NO: 259476 - DNA, 201 bp, Homo sapiens
ttcatgtcctttgtagggacatggatgaagctggaaaccatcattctgagcaaactgttgcaaggacagaaaaccaaacactgcatgttctcactcatagrtgggaattgaacaatgagcacacttggacacagggtggggagcatcacacactggggcctgtcgtggggaggggggagggatagcattaggagaaacacc

SEQ ID NO: 259477 - DNA, 201 bp, Homo sapiens
ttattttttaataactcctgtattattaccagggaaggctcaagagagtgatgtgctgttgaggaagagctgaaggaaaggggaaagatgggggtggctgyttgatccagagtggtcaagcatagagctatgctgccatagtcactgagcccaggagagttacaaatcctttctgggccttagtttccctttgggtaaata

SEQ ID NO: 259478 - DNA, 201 bp, Homo sapiens
cagatttaatgactttgagtcaacacatcttgtgagtaattaacatggttgtccccctggagagagcagtcctgtgcacagatgattaaaggccaggttcygaggcccaagtaaactaacttaaccagatcaattcctttatacttgcttgttatctgccttttgctctcagcctcccgacaaaagaatttggctgccttc

SEQ ID NO: 259479 - DNA, 201 bp, Homo sapiens
gatgattaaaggccaggttccgaggcccaagtaaactaacttaaccagatcaattcctttatacttgcttgttatctgccttttgctctcagcctcccgayaaaagaatttggctgccttcagccaaattatctttcaaagcttttgcaaaacctcccagccttccaagaaggtttttgtctttctctataacttctataa

SEQ ID NO: 259480 - DNA, 201 bp, Homo sapiens
ttctctctttttctcactccctctcttgttcttttttgtcttttattgattggtttttcctgtcctgctcaccagctctttaagtgagggtgtttctgaarcttccattttttaattttattcaactttacctgagcaaattaactttccctctctggtggaatttaccatgtggcctaaatcctcccagaaatggtgctc

SEQ ID NO: 259481 - DNA, 201 bp, Homo sapiens
ataggtgtcttcagttgaccaccataattgaggaaatataccatgtcctctctatcatgttagttgagcaattattatgtgctagtacttggatatagcarttcacaagacgaacagcacttggtcctcctggagctaaaatccaggctaaaaacatgagatgaataagtaaaggaaatataggaaatagggagaaatttg

SEQ ID NO: 259482 - DNA, 201 bp, Homo sapiens
ttctaatagccagcatttgcatatcaaagcttgccagactggcccttcaagtcgtttttctgttagaaaagaaatggcttgggttccaagaatagaagcarctccagtctacagctcccagcatgagtgacacagaagatgggtgatttctgcatttccaactgaggcactgggttcatctcactgggacttgttggacag

SEQ ID NO: 259483 - DNA, 201 bp, Homo sapiens
aagacagggagtgttcgactgttttccctccctggttcctgggttctgccaccaagttaaatatgccgcccatggttgaagacatggtcctccaagccatrgaactggataaactaagtgatgggactaaccgtgctttactgcgcaaccttaggtcatccaccttctgtgatttccctttgacttcctaaacctgtgtga

SEQ ID NO: 259484 - DNA, 201 bp, Homo sapiens
tattatttatacagtgcctggtagaaatgtaacacttataccattgacagattcagagtaacacatgaagctactctacagggtatggttcctataaaagraggcatgcaaaatgaaataatgtatttgcttcctcttctctagtttactcaagatgccagcctaaaaaataagctcaaactacaagctttaatttatcca

SEQ ID NO: 259485 - DNA, 201 bp, Homo sapiens; identical to SEQ ID NO: 51757

SEQ ID NO: 259486 - DNA, 201 bp, Homo sapiens
actgaggcagttctgaccctgttgacagaagccctagagtcacccaaaagccctagagtcaccccaaagccctagagtcactcaaaagccctagagtcacycaaaagccctagagtcactcaaaagccctagagtcacccaaagccctagagtcaccccaaagccctagagtcactcaaaagccctagagtcacccaaaag

SEQ ID NO: 259487 - DNA, 201 bp, Homo sapiens
ttacaaaattttgatatacttcttaggtgaatttcaagctactttgaaagttcatcttatgccaggtaacctaataaatatctactttcaggatattcttmagtctacaaagtctccattttttttttttttttttgagacggagcctcactctgtcaccagtctggagtgcagtggcgtgatctcggctcactgcaacct

SEQ ID NO: 259488 - DNA, 201 bp, Homo sapiens
tggtaatactgaagattaaaaattgagacccaccccccaccccaagaactaggggtaaatagactcatatgaaatgatgtcatctagtggacaaaactgcrtaattctacttttttgctcaaatggaattatatagattatatagcagcagctttcatacatagtgaaaaatcaactggaaaaaaaaagcattttgcatga

SEQ ID NO: 259489 - DNA, 201 bp, Homo sapiens
cagtgataactgactcataaagggcttcttatgtgacaggcactgttctaggtgccttagttttcagtcttcacaacaatcttttgaggtcatgtgtatarttacttccattttgtggatgggagattgaggtacagagaggtttggtcatttgcccaggggcccagtgctggtaagtgagggagctgggattttagccca

SEQ ID NO: 259490 - DNA, 201 bp, Homo sapiens
atctgtaatcccaacactttgggaggccaagacgggtggatcacttcaggtcaggagttcaagaccagcctgggcaacatagtgaaaccctgtatctactaaaaaaaaaaaaaatacaaaaattagccaggtgtggtggtaggcatctgtaatcccagctatttgggaggctaaggcaggagaatcgcttcaaccagggag

SEQ ID NO: 259491 - DNA, 201 bp, Homo sapiens
agcggtgcatgacaaggtctagcagaccaacacaccctccattatgtgtggcaaatgcatagctgggtgggccggtcactagatggccaaattgttcatgygattacacttgtagagctctcagagatctcgttgaagtaggaagatgagtcattggaggaagtatcacctatgagtctttgtaaagtccctgattacagt

SEQ ID NO: 259492 - DNA, 201 bp, Homo sapiens
ctttgggaggccaagacgggtggatcacttcaggtcaggagttcaagaccagcctgggcaacatagtgaaaccctgtatctactaaaaaaaaaaaaaatasaaaaattagccaggtgtggtggtaggcatctgtaatcccagctatttgggaggctaaggcaggagaatcgcttcaaccagggaggcaaaggttgtagtga

SEQ ID NO: 259493 - DNA, 201 bp, Homo sapiens
atgcatagctgggtgggccggtcactagatggccaaattgttcatgtgattacacttgtagagctctcagagatctcgttgaagtaggaagatgagtcatkggaggaagtatcacctatgagtctttgtaaagtccctgattacagtcagtgttagagaagggctgacatcccttgcttctcagggctatgtatggaactc

SEQ ID NO: 259494 - DNA, 201 bp, Homo sapiens
cctttagattgagcctgttattgccatgctcctcttgcctccattttgcttgtataccttacctacccataggtgttttgagttaaaacactttccaggcygggcacggtggctcacgcctgtaatcccagcactttgggaggccaaggcgggaggatcatgaggtcaggagatcgagaccatcctagccagcacagtgaa

SEQ ID NO: 259495 - DNA, 201 bp, Homo sapiens
aaatacaaaaattagccaggtgtggtggtaggcatctgtaatcccagctatttgggaggctaaggcaggagaatcgcttcaaccagggaggcaaaggttgyagtgagccaagatcatgccactgctttccagtatgggcaacagagtgagactctgtctaaaaaaaagaaatagaggtttcaggaaactttattacttcca

SEQ ID NO: 259496 - DNA, 201 bp, Homo sapiens
gggtgggccggtcactagatggccaaattgttcatgtgattacacttgtagagctctcagagatctcgttgaagtaggaagatgagtcattggaggaagtrtcacctatgagtctttgtaaagtccctgattacagtcagtgttagagaagggctgacatcccttgcttctcagggctatgtatggaactccagtatcccc

SEQ ID NO: 259497 - DNA, 201 bp, Homo sapiens
caattagagcaaaatataaagagaattaaaaagctgatggactgaatgaagtgaccgtagtggaaaaattggagagtcactgacatagaatacaaaccttygaatgtgaagaacgaatcaggtagtgagttagaatcgatgctttaagtgttaatgttgctggttcatgttgaaacttgaccagatgcgaagtcattgatg

SEQ ID NO: 259498 - DNA, 201 bp, Homo sapiens
tggtaggcatctgtaatcccagctatttgggaggctaaggcaggagaatcgcttcaaccagggaggcaaaggttgtagtgagccaagatcatgccactgcwttccagtatgggcaacagagtgagactctgtctaaaaaaaagaaatagaggtttcaggaaactttattacttccagaatgttacttgtgtgactctgaat

SEQ ID NO: 259499 - DNA, 201 bp, Homo sapiens
ggtaggcatctgtaatcccagctatttgggaggctaaggcaggagaatcgcttcaaccagggaggcaaaggttgtagtgagccaagatcatgccactgctytccagtatgggcaacagagtgagactctgtctaaaaaaaagaaatagaggtttcaggaaactttattacttccagaatgttacttgtgtgactctgaatc

SEQ ID NO: 259500 - DNA, 201 bp, Homo sapiens
ttgttatgagacgggaacttgaagggggcccaaataagggggatcctcaaatggttccctggaagttgcttctttaacttttggggaactgttttccctgrgactgcccaatatgattgctaaaagagctgggttgatcttacagtgcttggcaaaggtttagtaaaaatgccatgcccttgtataaaagaaaatgagttg

SEQ ID NO: 259501 - DNA, 201 bp, Homo sapiens
catctgtaatcccagctatttgggaggctaaggcaggagaatcgcttcaaccagggaggcaaaggttgtagtgagccaagatcatgccactgctttccagyatgggcaacagagtgagactctgtctaaaaaaaagaaatagaggtttcaggaaactttattacttccagaatgttacttgtgtgactctgaatctgattt

SEQ ID NO: 259502 - DNA, 201 bp, Homo sapiens
tgctcttcaactgcagtgagggtctggtttaggaggagagtaacatccctgcatgtgaggtgaaatacctgagttaaattttggaaagcttttatgtaccratcatggttgttagaaaattggcctaagtcatcttttatttgcctaaggttttgttatgagacgggaacttgaagggggcccaaataagggggatcctca

SEQ ID NO: 259503 - DNA, 201 bp, Homo sapiens
ttcaaaataaaactgaacaatcaaatttctaattttatgccttggttctgtttgttgtccaggttaggggctagaacactgtcaattatgcatattattgkttgtatgaaacgatgtgatcaaactttcaaacagccagcttgacagccagagactgacctgcacatgttatttttggcccacattgcatattaaacattt

SEQ ID NO: 259504 - DNA, 201 bp, Homo sapiens
aatcccagcactttgggaggctgaggcaggcggatcacaaggtcacgagtttgagaccagcctggccggtatggtgaaacccagtctctactaaaaatacaaaaaaaaaaaaaaaaaactagctgggcgtggtggcacgcgtctgtagtcccagctactcgggaggctgaggcaggagaatcccttgaatctgggaggtgg

SEQ ID NO: 259505 - DNA, 201 bp, Homo sapiens
atctgtaatcccagctatttgggaggctaaggcaggagaatcgcttcaaccagggaggcaaaggttgtagtgagccaagatcatgccactgctttccagtmtgggcaacagagtgagactctgtctaaaaaaaagaaatagaggtttcaggaaactttattacttccagaatgttacttgtgtgactctgaatctgatttc

SEQ ID NO: 259506 - DNA, 201 bp, Homo sapiens
atgaaagcattggtgtcaattcagtgtctcaaagatattagacccaaggcctctgtcttttcctcacggttgctgatgaaggctgaagctatagtcatcayggtaatattccagtcggagagagaagaaactactcttttgtaaactaaaaatacaaaaattagccaggtgtggtggcaggtgcctgtagtcccagctact

SEQ ID NO: 259507 - DNA, 201 bp, Homo sapiens
cttcctcttccttggtttgcaacgtcaaaaggcaaatccttaagcagtttataaaccacccttcttcacactgtcgttctcccatagggaccggcagaggataaatatttttaggagagctcgggaaaagcaggctctggttcctgggaatgcagccaccttagaagcagaagcaggcaagggcagtctcgcaatgtcccc

SEQ ID NO: 259508 - DNA, 201 bp, Homo sapiens
tcaattttcaagttttcaaacagtcttgatattggctctagtataactctaatttatcaatacaattgtgaacattagcacagtttttcttgtagcagttytctaaattctttttctactcatctacctaccctttcatattcctgtcttttaccctgcataaacaaattgtcccttttttttttttttttttttttttcg

SEQ ID NO: 259509 - DNA, 201 bp, Homo sapiens
atcattacatttttcatcatactgacctaatacctagctatatttagcttgctcacgctctgccttctggggggaaaatatatatgtctgtgcattctctrtatctacctagtatcaattagagttttatgttttcctgcatgtaacagaaaacacgttaacagtggacttctccagatacttctttaaatatttttctca

SEQ ID NO: 259510 - DNA, 201 bp, Homo sapiens
ttcctcttccttggtttgcaacgtcaaaaggcaaatccttaagcagtttataaaccacccttcttcacactgtcgttctcccatagggaccggcagaggataaatatttttaggagagctcgggaaaagcaggctctggttcctgggaatgcagccaccttagaagcagaagcaggcaagggcagtctcgcaatgtcccca

SEQ ID NO: 259511 - DNA, 201 bp, Homo sapiens
ttcagtttttgtaaagctccatcattacatttttcatcatactgacctaatacctagctatatttagcttgctcacgctctgccttctggggggaaaatayatatgtctgtgcattctctatatctacctagtatcaattagagttttatgttttcctgcatgtaacagaaaacacgttaacagtggacttctccagatac

SEQ ID NO: 259512 - DNA, 201 bp, Homo sapiens
tcctcttccttggtttgcaacgtcaaaaggcaaatccttaagcagtttataaaccacccttcttcacactgtcgttctcccatagggaccggcagaggataaatatttttaggagagctcgggaaaagcaggctctggttcctgggaatgcagccaccttagaagcagaagcaggcaagggcagtctcgcaatgtccccag

SEQ ID NO: 259513 - DNA, 201 bp, Homo sapiens
attcctgtcttttaccctgcataaacaaattgtcccttttttttttttttttttttttttcgaggcagagtctcgctctgtcatccaggctggattgcagkggcacagtctcggctgactgcaacatctgcctcccgggttcaagcgattcgcttacctcagcctcctgagtagctgggattacaggcatgtgccaccatg

SEQ ID NO: 259514 - DNA, 201 bp, Homo sapiens
caaatgtgaaggcctaggacattactatgcattactgtaggccttataaatactgtacacttaggttacactaaatttgttttaaaaattaagtaattgcrctacaatgtcacaatgacaacaatgccactaggttataagagttttccagctccatcataatctatggaaccaccctcatatatgtgatctgttcttgag

SEQ ID NO: 259515 - DNA, 201 bp, Homo sapiens
accgtggagcttgcaggagtagaatttgctctgggtgaatcagtgaatgagtagtaagcaaatgtgaaggcctaggacattactatgcattactgtaggcyttataaatactgtacacttaggttacactaaatttgttttaaaaattaagtaattgcactacaatgtcacaatgacaacaatgccactaggttataagag

SEQ ID NO: 259516 - DNA, 201 bp, Homo sapiens
cctcttccttggtttgcaacgtcaaaaggcaaatccttaagcagtttataaaccacccttcttcacactgtcgttctcccatagggaccggcagaggataaatatttttaggagagctcgggaaaagcaggctctggttcctgggaatgcagccaccttagaagcagaagcaggcaagggcagtctcgcaatgtccccagg

SEQ ID NO: 259517 - DNA, 201 bp, Homo sapiens
tttcctagggttaactaggaggcttttctgactagtagagctactatgacaatggcttggaagcatttgtaaataggtcctcctaaccacaactaaggttragaaaaatattggattagagtttttcttgaaatgccccttatagttgcgctataggaagagaggaggcctggcttagagaggagaaaagagagagactgg

SEQ ID NO: 259518 - DNA, 201 bp, Homo sapiens
ccttctgctaccttatctgttccctttcagtgttccctacaatacatccctgctgtctctcatgaaagaaaaactgaggataacctgctaatttcctggtratattttataggagatatattagtgttaagaaaatgcctttcctttcaaatggcagcatgagcatggaaaatcaggaaagcatacttggagtcagtataa

SEQ ID NO: 259519 - DNA, 201 bp, Homo sapiens
gatccgttaaaacaagaagctgctcctggtgtagatttaaacactccattgtgtgttttcccagattctgtcccaacagccagtgacttccttcttgcctstggaactggcaggccatcctgtcttgtaatgcctcaggccaaggagggactgagctgcattaacttgaaactactggctgtagaaattgtccttattgta

SEQ ID NO: 259520 - DNA, 201 bp, Homo sapiens
tggttcctgggttctgccaccaagttaaatatgccgcccatggttgaagacatggtcctccaagccatggaactggataaactaagtgatgggactaaccrtgctttactgcgcaaccttaggtcatccaccttctgtgatttccctttgacttcctaaacctgtgtgatctgcctggctccccaaaaaacgtatctccag

SEQ ID NO: 259521 - DNA, 201 bp, Homo sapiens
cacagttatgaataaaacacagttcctgatatcagagaacacaatctttaggaaaaacatatgataattttcatatgagccaataagaacagtgagtgacrtaccctggcacatagaaatatcaaggaatggtagccagttcaagcccaaaagcaagtggagatatgaccaaggaaggctgcccagaggaggccaaaccct

SEQ ID NO: 259522 - DNA, 201 bp, Homo sapiens
tcttctgcagtctcttgaaaggggctgctcagagtcactgaggcagttctgaccctgttgacagaagccctagagtcacccaaaagccctagagtcacccmaaagccctagagtcactcaaaagccctagagtcactcaaaagccctagagtcactcaaaagccctagagtcacccaaagccctagagtcaccccaaagcc

SEQ ID NO: 259523 - DNA, 201 bp, Homo sapiens
agaagctaaaaacctagaaaaaagattagacaaatggctaactagaataaacagcatagaggagaccttaaatgacctgatggagctgaaaaccatggcaygagaactacgtgacacatgcacaagcttcagtagccgattcgatcaagtggaagaagggggtcagtgattgaagatcaaatgaatgaaatgaagcaagaa

SEQ ID NO: 259524 - DNA, 201 bp, Homo sapiens
ttttttacgtgttcatttaaagaaaataccatattcttcaaattgatcactttactgaactgcagcaaatgaagtgttaaaagagcaaaattgttaaaatwattatttttagacataagatctcactctgtcacccaggccagagtacagtggctctatcacagctcattgtaacctcaaactcttgggctcaagtaatcc

SEQ ID NO: 259525 - DNA, 201 bp, Homo sapiens
ggcgcccacgaccgtgcctggctaatttttgtatttttagtagaaacgggttttcaccatgttggtcaggctggtctcgaactcctgacctcaggtgatcygactgcctctgcctcccaaagtgctgggattacagacctaagccaccgcacctggccctttttttgtatttttagtagagatggggtttcaccatgttgg

SEQ ID NO: 259526 - DNA, 201 bp, Homo sapiens
gaggctgaggcaggagaatggcgtgaacctgggaggcagagcttgcagtgagccgagattgtgccactgcactccagcctgggcgacagagcgagactccrtctcaaaataaataaataaataaaataaataaataaagggggcagggaagaaaggaagctttgctttttttttgaccttgtgatgcaacagtagaaagga

SEQ ID NO: 259527 - DNA, 201 bp, Homo sapiens
acctgggaggcagagcttgcagtgagccgagattgtgccactgcactccagcctgggcgacagagcgagactccgtctcaaaataaataaataaataaaawaaataaataaagggggcagggaagaaaggaagctttgctttttttttgaccttgtgatgcaacagtagaaaggaaacttctgttagtggaataaatagat

SEQ ID NO: 259528 - DNA, 201 bp, Homo sapiens
cctgggaggcagagcttgcagtgagccgagattgtgccactgcactccagcctgggcgacagagcgagactccgtctcaaaataaataaataaataaaataaataaataaagggggcagggaagaaaggaagctttgctttttttttgaccttgtgatgcaacagtagaaaggaaacttctgttagtggaataaatagatt

SEQ ID NO: 259529 - DNA, 201 bp, Homo sapiens
cctacaaacatgtagtttacatagcattgtcacttgacgtcttccccctaatgacttccacctggcaaccttcatttaacccaaaactcagggcctcaatyccctgtacatcccatgttacatgatgggcggtgctcacatgtttatcatagataaagaacaaatcactgggttgggcacttggggactccttaactcaga

SEQ ID NO: 259530 - DNA, 201 bp, Homo sapiens
ccagcaatttttgtatttttaggagagatggggtttcaccatgttggccaggatggtctcgatctcctgacctcgtgatccgcgcaccttggcctccccargtgctggaattacaccatgcctggtgctggtgagccaccgtgcctggccaaaagtgtccatttttattgagtaaaactgaagaatgtttccagcatgaaa

SEQ ID NO: 259531 - DNA, 201 bp, Homo sapiens
gacatttttgagagtagcagggactgctattaataatcatgctaggtcaacagtgtttttttctttgttttgagacagggtgtctgtggcgcaggctggartgcagtggtatgatcgtggttcactgcaacctctgcctccccaggttcaagcaatcttcccacctcagcctcccaagtagctgggaccacaggcatacac

SEQ ID NO: 259532 - DNA, 201 bp, Homo sapiens
tttgccatatatcagctagaacttacaaaccactccaagtctggctccagaaaacagaatttttatatcctttctcagtactctgagtcagaatgacccayttgctttgtccagagactcgtcacactgaaactattttccgtttgagaccttccaggaggaaagccatcctcacacgcatgcagtacaaaccagtgtcct

SEQ ID NO: 259533 - DNA, 201 bp, Homo sapiens
tctttgtggccacttcctgctgaaaaggagcatgcaggggagcagcagttgggccttctcctgaggttgatttaaggattcttggaagaatggcgtgtccrtgtgtggttctgcttgcagtaccatttggagtttaattgcttctaggcgaaaagagatacgttttacaagaaggtttaaaatatagtgttagaataagag

SEQ ID NO: 259534 - DNA, 201 bp, Homo sapiens
atggaaggcaaaggagagtgagacaagaataggaccaagagaggtgtaaatgacatggctccgatgactgaaggaacaccagggtccttggtctcgcgccmgtttagataaaatgacacagacacgtgtggagtagttttaaggagcggagagtttattaggcaagagagaagcaaggaagaaaacagctccccggtacag

SEQ ID NO: 259535 - DNA, 201 bp, Homo sapiens
ttcctaagacagcatcagctgcctaccattaagaaatgtgaatgttagtttattctgttgtcattggcaaatactttatgctttagcattttttatgtcctttatcttgtgcagtgagtcagactattgagattatgttcattgtgctttttttccttggggttccccatattccttaagaagcagctacttaggatctct

SEQ ID NO: 259536 - DNA, 201 bp, Homo sapiens
aaatgtgtgtcatccttctgcaggggcatgctagtcctctctgaactgttatggttttagtgtatgtgctgctgaagtgagcaccatatatttacttttgmtgccaaatgaaattatgtgggaactgtctaccacttctctttcattttatgtttatatagaatgaagaaatgtaattgaatttattttcgttttttactt

SEQ ID NO: 259537 - DNA, 201 bp, Homo sapiens
tcctaagacagcatcagctgcctaccattaagaaatgtgaatgttagtttattctgttgtcattggcaaatactttatgctttagcattttttatgtcctttatcttgtgcagtgagtcagactattgagattatgttcattgtgctttttttccttggggttccccatattccttaagaagcagctacttaggatctctc

SEQ ID NO: 259538 - DNA, 201 bp, Homo sapiens
tgaggcaggagagtcgcttgaacccaggaggcagagcttgcagtgagctgagatcacgccactgtactccaacctgggtgacaaagtgagactccgtctcaaaaaaaaaaaaaaaaaaaaaaaattctgcttttagaaagtgatcagcttttaacaataagattgctggcagatatctgcataataatagatgcatttgca

SEQ ID NO: 259539 - DNA, 201 bp, Homo sapiens
tacagtgcctggtagaaatgtaacacttataccattgacagattcagagtaacacatgaagctactctacagggtatggttcctataaaagaaggcatgcwaaatgaaataatgtatttgcttcctcttctctagtttactcaagatgccagcctaaaaaataagctcaaactacaagctttaatttatccagttcttcaa

SEQ ID NO: 259540 - DNA, 201 bp, Homo sapiens
cctaagacagcatcagctgcctaccattaagaaatgtgaatgttagtttattctgttgtcattggcaaatactttatgctttagcattttttatgtcctttatcttgtgcagtgagtcagactattgagattatgttcattgtgctttttttccttggggttccccatattccttaagaagcagctacttaggatctctct

SEQ ID NO: 259541 - DNA, 201 bp, Homo sapiens
ctaagacagcatcagctgcctaccattaagaaatgtgaatgttagtttattctgttgtcattggcaaatactttatgctttagcattttttatgtcctttatcttgtgcagtgagtcagactattgagattatgttcattgtgctttttttccttggggttccccatattccttaagaagcagctacttaggatctctctg

SEQ ID NO: 259542 - DNA, 201 bp, Homo sapiens
taagacagcatcagctgcctaccattaagaaatgtgaatgttagtttattctgttgtcattggcaaatactttatgctttagcattttttatgtcctttatcttgtgcagtgagtcagactattgagattatgttcattgtgctttttttccttggggttccccatattccttaagaagcagctacttaggatctctctga

SEQ ID NO: 259543 - DNA, 201 bp, Homo sapiens
ccagagggtttatgttcctgttccctgtccactcattatgtgtaggattacataatctgtggggctttatcctatgaaaagtccccttactaggatattgyagcacattcctagcgtggatttgcttttcctgaattcagccacattctcacctccaaagccccttttgtctcttaggaaaggtctatgaagctatagacc

SEQ ID NO: 259544 - DNA, 201 bp, Homo sapiens
gcaggagaattacttgaacctgggaggcggaggttgcagtagaccgagattgtgccactgcactccagcctgggcgacaggagtcgtccccaccaaatgcraaaaaaaaagaaaaaaatcaagaaatagacattaaaacggttgagataaaaaaggaatgaaagtgatgatattttttccacacttttcagcggcttgttt

SEQ ID NO: 259545 - DNA, 201 bp, Homo sapiens
ccacagcttctgtcccacaaacatctgtctcttctagcccctatttctatctaagatgagacggaaacaaacttcctgactgtatcctggagtttttgttyaggatttgtgttagttttagggtgcttatgaaaattcctgtgtttggcaaggtcaagaatgggtccttttgaaaatatgaacaagataagacacacacaa

SEQ ID NO: 259546 - DNA, 201 bp, Homo sapiens
ctcgggaggctgaggcaggagaatcgcatgaacccaggaggcggaggcttcagtgagccgagatcttgccactgcactccagcctgggctatccatctccmaaaaaaaaataataataataatatctccaaaaaaaaaataataactgaactatgacctgaattgaatttcagaagttttcctatgcatattttcttttgt

SEQ ID NO: 259547 - DNA, 201 bp, Homo sapiens
aaaccagcctgggcaacatggccaaaccctatctctataaaaaaatagctgggcgtggtggcatgtgcctgtggtcccagcaactttggaggctgaggtgrgaagatctcttaagcccaggaggtggagattgcagtgagccaagatcatgccactgcactgcagcctgggggacagagagagaccccgtctcaaaaaaaa

SEQ ID NO: 259548 - DNA, 201 bp, Homo sapiens
gctggcttgtgttgcctaaagtgttttagaagttctagtttcctacggatattcatcaagtcatccaattttgaaattattaatgtccaaaaagatcaagktgttttaggctggtccttgggataattgaagacactctagagactaccataaaatgttagaaatcacttatctgtttaaattcttgtaattcatatgtgc

SEQ ID NO: 259549 - DNA, 201 bp, Homo sapiens
tcgcatgaacccaggaggcggaggcttcagtgagccgagatcttgccactgcactccagcctgggctatccatctccaaaaaaaaaataataataataatatctccaaaaaaaaaataataactgaactatgacctgaattgaatttcagaagttttcctatgcatattttcttttgttctgtctcgagatttagctagat

SEQ ID NO: 259550 - DNA, 201 bp, Homo sapiens
cattgtgactgcgctgggattgaatgtttaaccaaagccccaagaacagcaagccttggtgaattgatcggtgattctttgttctgttcttttttgaaaawtttttaataggtatctaaaggaagtgctgagaattaaatttactgaggaatccagaattaaaaagctccacaaattgctcagttacaatctgcccttgga

SEQ ID NO: 259551 - DNA, 201 bp, Homo sapiens
aatcgcatgaacccaggaggcggaggcttcagtgagccgagatcttgccactgcactccagcctgggctatccatctccaaaaaaaaaataataataataatatctccaaaaaaaaaataataactgaactatgacctgaattgaatttcagaagttttcctatgcatattttcttttgttctgtctcgagatttagctag

SEQ ID NO: 259552 - DNA, 201 bp, Homo sapiens
acactttctttatgccgctttcacccattcttactatacacagactctagggaaaactgaggtgctgctttgttttcatctcccaaatggggctttattcrtttagtcataaacctacttccctcagtattagagaagtctttcattaagtactggccaaataagtttattctgtctgatggcttaaataggttaaaagaa

SEQ ID NO: 259553 - DNA, 201 bp, Homo sapiens
tgttggccaggatggttttgaactcctgacctcaaatgatccgcccccctcaacctcccaaagtgctaaggttaccaatgtgagccaccatgcctggctcwttatattatccataattgataatgatttggtttcttaaatagcatttccaatttattttgctattgatgacatgctattctttgtagctgattcatcact

SEQ ID NO: 259554 - DNA, 201 bp, Homo sapiens
tgcccaggcaggaggagtacagtggcccgatcttggctcactgcaacctccgcctcccgggttcaagcaattctcctgcctcagcctcttgagtagctgggattacaggcgcccgccaccgcacccagctaattttttatttttagtagagggggtttcgccgtgttgaccagtctggtctcaaactcctgacctcaagtg

SEQ ID NO: 259555 - DNA, 201 bp, Homo sapiens
gagatggcgccattgcactccagcctggacaataagaatgaaactctggccgggtgcggtggcccatgcctgtaatcccagaactttgggaggccgaggcrggcggatcacgaggtcaggagatcgagaccatcctggcaaacacggtgaaaccccgtctctactaaaaatacaaaaaaaaaaattagctgggcctgttgg

SEQ ID NO: 259556 - DNA, 201 bp, Homo sapiens
ggtcaggacactttgtggcattctgaactgtcatccagacacaacaacccagccatacagggctgctgccacccagagcctatagaattttttttttttttgagatggagtcttgatctgtcacccaagctggagtgcagctatgcgatcatggctcactgcagcctctaactcttagcaagcctcttgcctcagcctccc

SEQ ID NO: 259557 - DNA, 201 bp, Homo sapiens
tctttcttccattttgaaattttagcagtctggaagtagtacctgacagtagttaaatacagtagaaatgtctggaaataaaatttgtttgaacagaattmtatgtcccgatttatttctaagaaaaaagactattaagtaactaagaaaaataaaaagaataatttaagccacttaaaatgtaattagctcttaccaaac

SEQ ID NO: 259558 - DNA, 201 bp, Homo sapiens; identical to SEQ ID NO: 51768

SEQ ID NO: 259559 - DNA, 201 bp, Homo sapiens
ttgagatatctgaaaaagtaggaccaattttccctccactgtcaccagctgtggctaaaccagtgcgtggtacaggagagaacccagccatgtctgtccarccccctttttaccatgctcactttcaggagcaatcaggaaggtgcctggagacatagtgatgacaagaagaccaccagtagttggtacacttattctagg

SEQ ID NO: 259560 - DNA, 201 bp, Homo sapiens
gacctcctgggctcaggtgatcctcccacctcagcctcctgagtagctgggactacaggagtgagccaccacgcccagctaattttgtattttttgtagargcagggtttcaccatgtttcccaggatggtctcaaactcctggccttaagtgatgcacccgtctagtcctctcaaaatgctaggattacaggcatgagcc

SEQ ID NO: 259561 - DNA, 201 bp, Homo sapiens
cagagtctcgctgtcgccaggctggggtgcagtggcgcgatcttggctcactgcaacctcggcctcctgggttcaagtgattctcctgcctcagcttcccragtagctgagacttacaggcgcacatcaccacacccagctaatttttgtatttttagtagagaaggggtttcaccatgttggcaaggatggtgtcgatct

SEQ ID NO: 259562 - DNA, 201 bp, Homo sapiens
tgtgagatgaagtctcactctattgcccaggctggagtgcagtggtgtgatcttggctcactacaatctctgcctcccaggttcaagcgattctcccgcckcagccttccaagtagctgagattacaggcacttgccaccagacccggctaatttttttgtatttttagtagagattgggtttcaccatgttggccaggat

SEQ ID NO: 259563 - DNA, 201 bp, Homo sapiens
cgcatgaacccaggaggcggaggcttcagtgagccgagatcttgccactgcactccagcctgggctatccatctccaaaaaaaaaataataataataatatctccaaaaaaaaaataataactgaactatgacctgaattgaatttcagaagttttcctatgcatattttcttttgttctgtctcgagatttagctagatc

SEQ ID NO: 259564 - DNA, 201 bp, Homo sapiens
aacagttgatgccagctgaaaacacagaccccttgctgttaatacacaagcagaaaagattcttgtgttcaccatgcagcttgggttttaaatttaatcargttgcagtttcaaagtatagtttttgaaatctttcatcattattttggcacttttactggtgtgcctttattttttgagacaggatctcactttgccacc

SEQ ID NO: 259565 - DNA, 201 bp, Homo sapiens
gaggcagggtttcaccatgtttcccaggatggtctcaaactcctggccttaagtgatgcacccgtctagtcctctcaaaatgctaggattacaggcatgarccactgcacttggcctgctatgtcttgatagtcattttttctttgaggactgtttacgttctgcaacgattaagtcccatttctgctgttttttgtgttt

SEQ ID NO: 259566 - DNA, 201 bp, Homo sapiens
cttacttcagcctcaaactcttaggctcaaacaatcctcctatgtcagcctcccaagctgggaatataggcacacgccaccatttagggcaaatatatatwtatttttttaaacagggtcttgctctgtcacccaggctaaagtacagtgcagccttgacttcctgggctctagtgatcctcttgcctcagcctcttgagt

SEQ ID NO: 259567 - DNA, 201 bp, Homo sapiens
taattttttgtatttttagtagagatggggtttcactgtgttagccaggatggtcttgatctcctgacctcgtgatcctcctgcctcggcctcccgaagtkctgggattacaggcatgaaccaccgtgccaggcacctgccacaccttcttgagtgggaaagtgttttcctattcttgagttttaagagttctttatatat

SEQ ID NO: 259568 - DNA, 201 bp, Homo sapiens
cctcaaatgatccgcccccctcaacctcccaaagtgctaaggttaccaatgtgagccaccatgcctggctcattatattatccataattgataatgatttsgtttcttaaatagcatttccaatttattttgctattgatgacatgctattctttgtagctgattcatcactttttaaaatctgtctcacagcagctcatg

SEQ ID NO: 259569 - DNA, 201 bp, Homo sapiens
ttgaactctcctggcttcaagctcttctcctgtctcagcctcctaagtcaccaggattacaggtgtgaaccactgcacccagccatagtgaagattttttwaaaattctgttatatactaggtttgaaccatatgacgccgccggtgtttgactgtttttgaccaacaagaatggcagtttcatttgattcaacctaatac

SEQ ID NO: 259570 - DNA, 201 bp, Homo sapiens
agcttacttcagcctcaaactcttaggctcaaacaatcctcctatgtcagcctcccaagctgggaatataggcacacgccaccatttagggcaaatatatwtatatttttttaaacagggtcttgctctgtcacccaggctaaagtacagtgcagccttgacttcctgggctctagtgatcctcttgcctcagcctcttga

SEQ ID NO: 259571 - DNA, 201 bp, Homo sapiens
gcgatctcggcttgctgcaacctccgcttcctgggttcaagcgattctcctgtctctgcctcctgagttcttgagattacaggcacctgccactacgcctrgctaatttttggtatttagagatggggtttcaccatgttggccaggctggtcttgaactcctaacctcaggtgatccacctgcctcggcctcccaaagtg

SEQ ID NO: 259572 - DNA, 201 bp, Homo sapiens
gaagggctgtctaagggggtgctatacaagccgagaccagcagagaaaggggctccaggagggagcggcacatgcagaggtcctccgggggaagagctgartgcagagggcctgtggagttgttgccacgtaatgacgcagttgtcagaattcacatcacagatactactctgaaactgtgtgttgctttggagcacgaat

SEQ ID NO: 259573 - DNA, 201 bp, Homo sapiens
tacattaaagtatgatacaaccagacaatgaggttttgtattatttttatagagtatgaggccagtcacaatgtctcatgtctgtaatcccagcactttgrgaggccaaggtgggaggattgcttgagcccaggagttctagaccagcctgggcaacatagcaagaccccatctctacaaaaaataaaaacattagccagg

SEQ ID NO: 259574 - DNA, 201 bp, Homo sapiens
attatatgataaattgaactgttacatttttgctaccatttctggcatttcttcctaccacattttattgttcctggtcatattattatttgactcattgktagttggctttttttctaggtaaatttctcacagtttgggttattggtgccagtcaccttgcttcatttattttgactgtcactaaaaaataattgacaa

SEQ ID NO: 259575 - DNA, 201 bp, Homo sapiens
atatgcactgagtttccctgggtcttgtcttgtcttttcttcttcttttttttttttttcccgagacagagtctcgctctgtcgccgaggctggagtgcartggtgcgatcttggctcactgcaacctccgccttccgggttcaggcaattctccttcctcagcctcccaagtagctggaattacaggcatgtgccacccc

SEQ ID NO: 259576 - DNA, 201 bp, Homo sapiens
cgcagaaacttctgttagatactgctacattgttttatggtgtgaaaacagacttggaggcctgcccaaggtctgcacagctattttgtgcagagccagcmctccacctgggctggactggtctttttttttttttggaggcagggtttttgtgttgcccaggctggagtgcagtgacgtgatcacggctcactgcagccc

SEQ ID NO: 259577 - DNA, 201 bp, Homo sapiens
tgactttggaacctctgtttcttcatatttaaaatggggatgatgataacagtagtgcccacgtgaaagaatactcatgaggatcagatgaaacactcctrtgagagtgcttctgatgcctggcgcttagcaaacactcagtaaacacctgatttgttgccatctgttttagggggctgaggccatggttctggagagcgt

SEQ ID NO: 259578 - DNA, 201 bp, Homo sapiens
cctctttccctcctaagcccagccaatcactggtctttttacagtctccataggttttccttttccagaatgtcatagaattggaatcacacagtatgtaagtcttttcagtttggcttttttcacttgataatatgcactgagtttccctgggtcttgtcttgtcttttcttcttcttttttttttttttcccgagacag

SEQ ID NO: 259579 - DNA, 201 bp, Homo sapiens
agcaaacactcagtaaacacctgatttgttgccatctgttttagggggctgaggccatggttctggagagcgttatgtttgccattctcgcagagaggtcrcttgggccaaaactctatggcatctttccccaaggccgactggagcagttcatcccggtaagatttgttcataaacgcttagttgacatatgccacagac

SEQ ID NO: 259580 - DNA, 201 bp, Homo sapiens
acagcatcatagagatttcagcaagacaacaaacattcaataacaggaaaaggtcgggtgtgccaactgaaaatagcaatctaggatgctccatgctaggstgctctttggactagaaagccgtagaccctggacctaaatcagtaattttcaagcttgttggacccatgagcccaatttagtaggcagaaggtcctttgg

SEQ ID NO: 259581 - DNA, 201 bp, Homo sapiens
agctttgttctttttgctccagattgctttggctactggggtcttttgtgatttcatataaattttaggattggttttcctatttctatgaagaatgtcaytggtattttgatagggattgcattgaatgtatagattgctttgggtagtatggacttttttttttctttttttttttttgagacagagtcttgctctgtc

SEQ ID NO: 259582 - DNA, 201 bp, Homo sapiens
tcatttccagacatcacaacttaatactaacttctgtccctgcctatcaaatcaatagtatgttattagcattttctttctttctttctttttttttttttaagacagtcttgctctgttgcccaggcgggagcacaatggcgcgatctcggctcactgcaacctctgcctcccaggttcaagcgattctcctgcctcggc

SEQ ID NO: 259583 - DNA, 201 bp, Homo sapiens
ttaagcccaggaggtggagattgcagtgagccaagatcatgccactgcactgcagcctgggggacagagagagaccccgtctcaaaaaaaaaaaaaaaaamcccaaaaaaactggatgggaaattagtagttttctatacggataataagcatacctctaacaatctgacagttgacatagacaacaaactgatttttgtt

SEQ ID NO: 259584 - DNA, 201 bp, Homo sapiens
tctatggactagaagcccacacgtggcctctggtcagtttgtgaaggttccattgagaaggaaaatgtcaaaggagtggcttggtggccagggcagtagartgtctggtggggtggattttctctggtggggagaagggagtaagggcaggctggggagtgtgaggaagatccttcttccttacagttcaaccttggcttt

SEQ ID NO: 259585 - DNA, 201 bp, Homo sapiens
gatatcaaatcccaccctaaaattcattagcttgatagatagatgttatcagtttattgtcatatacacaaaaccacaaattaggaaagattgagcctcasaagatcacaggccataattgtgaggattatacgaatgatggttgtagacgataattgtggggggattaccggcaaatccatttacccccacaaaatgtaa

SEQ ID NO: 259586 - DNA, 201 bp, Homo sapiens
tcacccaggctaaagtacagtgcagccttgacttcctgggctctagtgatcctcttgcctcagcctcttgagtagctggtgtccattttttaattggtttyctttcctttctttgctgtgagttccttgtatattttctatattatccccttaactgatgtatagtttgcaaatagattcttccattctgtaggttgtttc

SEQ ID NO: 259587 - DNA, 201 bp, Homo sapiens
agtcttagctgacttttttttactctgaactcttatttgaattgttttttgtgcatatatttctgctaccacagagattgtactatacaaataaaaaaatwaaaacccaacctcaagctgtcacccttggatgtgtcctgaatctcaggcagggctcctggtacctgaaggagcccacggagggctccatctgcacccact

SEQ ID NO: 259588 - DNA, 201 bp, Homo sapiens
tgcattggctatttctctttagtctttttcagcctgtaacaattcttttgttatttgtaatctttatacttgtgaagagtactgatccgttattttggaartgtctcctcaatttcagcttgtctagtgttttctcacaattgaggttatgcatttttggctgaaataccacagaaatgctgttatgtcttctcaagaagt

SEQ ID NO: 259589 - DNA, 201 bp, Homo sapiens
tacttcagcctcaaactcttaggctcaaacaatcctcctatgtcagcctcccaagctgggaatataggcacacgccaccatttagggcaaatatatatatwtttttttaaacagggtcttgctctgtcacccaggctaaagtacagtgcagccttgacttcctgggctctagtgatcctcttgcctcagcctcttgagtag

SEQ ID NO: 259590 - DNA, 201 bp, Homo sapiens
tctgctaggcttgatgatcgctgctgagggaaaacaagtaaacaaataaaataatgtcaaattgtgataagtgctgtgacagaaacagatcaaagtaggcycttagtctgcataggaggacctgcttgggtcactggtaagagaagggctgtctaagggggtgctatacaagccgagaccagcagagaaaggggctccagg

SEQ ID NO: 259591 - DNA, 201 bp, Homo sapiens
cctgaccataagtgatctgcccaccttggcctcccaaattgctgggattacaagcatgagccactgtgcctggcttccctgtaaattttagaatcagttcrttggtattcacaaaataacttgctggggttttcattgggattgcattaaatctacagatcaagttgggaagaaccgacatcttgataatattgagtcttc

SEQ ID NO: 259592 - DNA, 201 bp, Homo sapiens
aatattaaactaccagctactgagaaatcagctgctaaaacctatttctttatgttactaaggtcacaccatgcaaagaccagcattgctggtactccttraaggagtcatgtccctggtaactgaattctatgaattgccactgttttcctcattgtgttaggatcattaggaatttaagttgttctgttcactctgctt

SEQ ID NO: 259593 - DNA, 201 bp, Homo sapiens
gcttcagaggtcattttcttctcataaatcctggtctaggagacacaatgttctggagtagtggttcaggtgcacctgtatagctttagtcagctgtgatkctgatcaaccacctgttgtctctctctgtcattaaagcagctacagtcctgctccctcagcaagtccagatggcaacaggagtggcgtgctcggaactca

SEQ ID NO: 259594 - DNA, 201 bp, Homo sapiens
tgagggaaaacaagtaaacaaataaaataatgtcaaattgtgataagtgctgtgacagaaacagatcaaagtaggcccttagtctgcataggaggacctgsttgggtcactggtaagagaagggctgtctaagggggtgctatacaagccgagaccagcagagaaaggggctccaggagggagcggcacatgcagaggtcc

SEQ ID NO: 259595 - DNA, 201 bp, Homo sapiens
cagcttctgtcccacaaacatctgtctcttctagcccctatttctatctaagatgagacggaaacaaacttcctgactgtatcctggagtttttgtttagkatttgtgttagttttagggtgcttatgaaaattcctgtgtttggcaaggtcaagaatgggtccttttgaaaatatgaacaagataagacacacacaacta

SEQ ID NO: 259596 - DNA, 201 bp, Homo sapiens
gtttcttcatgttggtcaggctggtctcaaactcctgacctcaagtgatccacccgcctcagcctcccaaagtgctgggattacaggtgtgagctaccgckccgggcatgttccaggaccatttgttgaaacaacaaatggtttgttgtaaaagacatttgttacattgtattgcctttgctcctttgtgaaagatctgtt

SEQ ID NO: 259597 - DNA, 201 bp, Homo sapiens
gaacgcaggcctgcagagccaggctgatggctgaccaactcctgacccagaatccaatactaaagcaaatagtcttgtaggaatgctgcctgtggtctccktgggaaggaaaagcaggcaagaacaaagcaggggatcccctgtggcagctgagctctcccttgcctttcttaccaggagggcactcccacagcttcccag

SEQ ID NO: 259598 - DNA, 201 bp, Homo sapiens
tttcaccatgttggccaggctgatctcaagctcctgacctgagatgatccacctgcctcagcctcccaaagtgctgggattacaggcatgggccacccccsccggccccaaaatatatttaacttcctgtcttcctggacgaaaaagttattctcttacctttccatgaatatacacttggtttgagatttcctcgtctta

SEQ ID NO: 259599 - DNA, 201 bp, Homo sapiens
ggtacaggtatttttgataaagctgtggaatggaaaggtatgtttttcatggggtgttcaagaatctgttaccttaaatttttttaaagaggtttcctttmtgggattccttttgtgtctggcttaagcagacttagtttaatttaacaagtaacatttttagaggcagtatttgagtataaaagtttgacgtgacacaag

SEQ ID NO: 259600 - DNA, 201 bp, Homo sapiens
ttattcagctgggagcatcagcagacttgcgtcaagagccgagctccctgaaaaagacattcttggcctttttaaaggcttacaactttaaggggtccacrtgaaagggtcgtgataaatcgagcaagctcggggaacgtgaccgggggctgcatgcgtcagctaacagaacagaaagttttgcagtgctttctcatacaa

SEQ ID NO: 259601 - DNA, 201 bp, Homo sapiens
aggtctggggtatgggccacactatgtagggcctcggaggccgtgaggccttggccttctctctgggtacagcaggcatcatggcctctgtctagaccctraaggcttggggcctcagcccctcccaatcccagtggcagccaaggcagaaccccaagaaacacacttcccccaacccctcacccatcagggcccatgcac

SEQ ID NO: 259602 - DNA, 201 bp, Homo sapiens
gctgggagaggagcaggcatgaggtatggtccctaagatggtatttctagactccagccacctttgggtctgacctctttgttttgcagaaggggaaactsagtcttgggtagggtgtagcaagacaagccacagacaaaacacctcagacactggattaaagaaggaagaggtttattcagctgggagcatcagcagact

SEQ ID NO: 259603 - DNA, 201 bp, Homo sapiens
acccagggtgaaggggagagagggggccaggatcagggtgctgttgtatatgtgggggtcagggaaggtttctctgagaagggggctttagagcagagacrtgaagatggaggggaggctccccatggatgctggggagatggcagcgggcacagcacgtgcaaaggccctgaggcaggaggtgctgggtgtttctgcttg

SEQ ID NO: 259604 - DNA, 201 bp, Homo sapiens
cccagctctggagcaagaagctctgccacacacacgccccatgttcacatcccaccccctctctgcccccacttcctcgtttgtaaaatgttagatctgcrgaaagacaggctctatgaatggggcggcccatggggtggtgtggaggaacacggaagcacagggcgctgggagaggagcaggcatgaggtatggtcccta

SEQ ID NO: 259605 - DNA, 201 bp, Homo sapiens
ctgcgcagctccaaggcctgggccgcttcctgcaagaaaacaagcagcttctgcacgacgcactggcccaggacctgcacaaggtgggctggggttggggktatgagagggtgcactggggcaggggggcatggagggcagctgggacagcaggggatgaagacacctgcgccctccatgaagcggggctaaaagcagctc

SEQ ID NO: 259606 - DNA, 201 bp, Homo sapiens
cttgcacatcatccccacagcacgctggctctgacaggtgtatccggggcgggctgggggcaggcagggacaggcttaggcacagctgcctgtgccgaacytgaggaagatcgggactacaggaaccaccaaggcgacacgtggcatcatgaccacggtcctaagcagagaggcaggcactcctcctgggaggcagagggg

SEQ ID NO: 259607 - DNA, 201 bp, Homo sapiens
ttggcccagaggccccggggccaggagctacggaggcccagggcaccagggagatggtagcagcggcaggcccaggaaggggcatagaggaggctcttccyccacacctgtcaccctgtcccctgcctgtccacacccacagcagcttgcacatcatccccacagcacgctggctctgacaggtgtatccggggcgggctg

SEQ ID NO: 259608 - DNA, 201 bp, Homo sapiens
ttctgtgccactgtacaggtgccagtgggatgggccggtaccatggcaagttctccttcgacaccttctcccaccatcgcgcctgcctcctgcgcagcccrgggatggagaagctcaacgccctccgctacccgccgcaatcgccgcgccgcctgaggatgctgctggtggccatggaggcccaaggctgcagctgcacac

SEQ ID NO: 259609 - DNA, 201 bp, Homo sapiens
cagtctgactctggaatccatgcccttgaccaccacctgcctatcttgccctggcatctggcatccccagggcttactgagctggtgccaagctcggggcyaagccctttacacacagtgcctcatgatcagcccactggacagatggggaaactgaggctcagaggggagaagtagcccgcctaggccccactgtctgtg

SEQ ID NO: 259610 - DNA, 201 bp, Homo sapiens
gtgcaaatgggagcttgagtgggtcctgggaggtggagattgtgatccccactgaactacatgggggaccctgccacaaccatgtagtggggcccagagcyacctgcccccatcctgctgggcactggatcccgggctgcagcgggagcctgtggtggggccgacactccaaagcactggctaccaccgacctggctggag

SEQ ID NO: 259611 - DNA, 201 bp, Homo sapiens
cctccctgccctggaggagagtcggggctgtctgtgggcacatctgaccctgctgctccctcaagaaagcctcccccagctcccaggcccccgagctgacmcttcttggtggccgtggccccaccccggcttccccacctgctgctcccacagcctgagctctgcccaggtccctaacacaccgcatggcacccacctcta

SEQ ID NO: 259612 - DNA, 201 bp, Homo sapiens
caaccggcgggagaagcccctggccctgtacgccttctccaacagcagccaggtgggggtgcggccgggctgggcagggtcaggagcccgcagtgggcagyacaagtggtggcagcagggggggcaccaaaatccagtggcttcaggactttgggatggtggacctcttggctctgtctctgcccactctcctggaagcag

SEQ ID NO: 259613 - DNA, 201 bp, Homo sapiens
gcctgaacaacttctgtccctcccagtccctccactcagcaggcacatgacacccctctcctgggatgcctccctactgtccagtactgccctgctgccaytacaccctccatgtccccaagcaacactaggtttcctgcccctacccccagccctaagagtctgtgccatcagcatggaccacacatgagcagatgtcca

SEQ ID NO: 259614 - DNA, 201 bp, Homo sapiens
caggaggcaagaggcagtctcagaccccacaacctaagcagtgtggggagtggcagcaatagtgaggagggaggccgaggaaatggaatccaaacagcaasagacctcccctcaccggtcacccctcccacagctggcctaccggagtccacccagccttgggtctgccgtccaggccccagcccagtgtcccttccccca

SEQ ID NO: 259615 - DNA, 201 bp, Homo sapiens; identical to SEQ ID NO: 51783

SEQ ID NO: 259616 - DNA, 201 bp, Homo sapiens
tcatcattgcgccctggaactatccgctgaacctgacgctggtgcccctcgtgggagccctcgctgcaggtgagagctgggcctgccccttccggtcaccyttctccgctcgaggcctcagggccacccatggatcccaggaggacatgggagaactggcccaggtggcaaagaggactgtctggtccaccgtccccgggc

SEQ ID NO: 259617 - DNA, 201 bp, Homo sapiens
tacacaaccccctgccccacctgtaccatcacaggcccttcagctgacatggtggcctcagaccctttctgaggcaagatcagtgtcacagagtccagcayggaacaggctctgggtcctgaggatcctgatggggctcaaggcagcctcacgcacatcctgttctctcccaggtggtcaagcgggtgctgacccagacca

SEQ ID NO: 259618 - DNA, 201 bp, Homo sapiens
ctctgaaggcacaggcaacgtgtcggggatgacccaaaggtgcaggtccaagaatgagccctgatcccctacccctgcttaagctgcagaggcagcctggsaggcccaaggccagagtcctcagattaaaaaacaccaagaggtaccagcagtccctacccaccccgcccccttccccggccctcagccagttcctcgatt

SEQ ID NO: 259619 - DNA, 201 bp, Homo sapiens; identical to SEQ ID NO: 51784

SEQ ID NO: 259620 - DNA, 201 bp, Homo sapiens
acactgcggcgccaacattctgggacgctgttgcctcatgaactccaagggttctaagatcccatcacccctgactgtgagaccaaggtcgggggattctytgtgtcccacaggccctgagcaggctggggaagctctagagtcccttctggggggctgtggggagactttcttccctaaacactccaaagcctgaagcct

SEQ ID NO: 259621 - DNA, 201 bp, Homo sapiens
ggccgggctgggcagggtcaggagcccgcagtgggcagcacaagtggtggcagcagggggggcaccaaaatccagtggcttcaggactttgggatggtggwcctcttggctctgtctctgcccactctcctggaagcagctgagcctcacccaccccaaccctgtccccagtctgggccccactctcctaggccttcagtg

SEQ ID NO: 259622 - DNA, 201 bp, Homo sapiens
aacgtgcagagcttggacgaggccatcgagttcatcaaccggcgggagaagcccctggccctgtacgccttctccaacagcagccaggtgggggtgcggcygggctgggcagggtcaggagcccgcagtgggcagcacaagtggtggcagcagggggggcaccaaaatccagtggcttcaggactttgggatggtggacct

SEQ ID NO: 259623 - DNA, 201 bp, Homo sapiens
ctcagccagttcctcgattccctccacttgaactttttttttttttttttgagacagagtctcactctgtcacccaggctggagtgcagtagcacagtctyggctcactgcaacctctgcctcccgggttcaagcgattctcctgcctcaacctcctgtgtagctgggattacaggcgtgtgccactatgcccggctaatt

SEQ ID NO: 259624 - DNA, 201 bp, Homo sapiens
gctcacgcctgcaatcccagcactttggctggccaaggaggatcacttgagctcaggagttcaagaccagcctcaacaaagtgagacaaaccccccccccmacccatctctacaaaaaatacaaaaactagcctggtgtgatggtggacacctgtagccccagctactcaggaggctgaggtgggagaattgcttgagccc

SEQ ID NO: 259625 - DNA, 201 bp, Homo sapiens
cgcctgcaggaggcacttctcatcccgggaactgtgccccatcagggagccgaggctgttcagcctctttgtgacccggggctgggttggcccgagccacmaatgaggggatacgctggtccctggctccccaagggaggggctgctgagctttgggaggcctcatgaaaatccagcttaaggccatcaaaagacaaaatg

SEQ ID NO: 259626 - DNA, 201 bp, Homo sapiens
tcacaccacttccctggcatggatgtgattccacaatattttaaacattaaagccaatggggatgatgatcactgagtctggctcacaggatggtgggagrtccccaggttggggtgtgccaaaggctctgcccagtgcctggcacagcaaatgcccaggtggctgctgctttccactgagacttgaggctcctgagagtt

SEQ ID NO: 259627 - DNA, 201 bp, Homo sapiens
caggggtcaagtatcccttccagcaacagccgtttcctgggcaccagcctgcatgcccagtgctgatgcagggatgtggccatgaatgactctgggaaagratcattcttagcaatggactttgtcagggtccaagaaaggagtggccagccagccccgccccgcctgcaggaggcacttctcatcccgggaactgtgccc

SEQ ID NO: 259628 - DNA, 201 bp, Homo sapiens
aagacctcaccgccctcccaggtaggcagggagctggcgggtggggggggccatgatgagcacctcccaggtgccacgttggcccagaggccccggggccrggagctacggaggcccagggcaccagggagatggtagcagcggcaggcccaggaaggggcatagaggaggctcttcctccacacctgtcaccctgtcccc

SEQ ID NO: 259629 - DNA, 201 bp, Homo sapiens
agtcctcagattaaaaaacaccaagaggtaccagcagtccctacccaccccgcccccttccccggccctcagccagttcctcgattccctccacttgaactttttttttttttttttgagacagagtctcactctgtcacccaggctggagtgcagtagcacagtcttggctcactgcaacctctgcctcccgggttcaag

SEQ ID NO: 259630 - DNA, 201 bp, Homo sapiens
gagagtagagaaggcacagtggctcctgccggctttaatccttgaccacaagggggagaaatgccagggccatccccacagacgcagcagcgtggtccccragtcaggtctggagaggaggccttgaggcccagacagggctagggcagagaaggctgtgtgcatgcggagactgctgggcccctggaggccagcacagag

SEQ ID NO: 259631 - DNA, 201 bp, Homo sapiens
caccccggcttccccacctgctgctcccacagcctgagctctgcccaggtccctaacacaccgcatggcacccacctctaaggctccccaagcctgggtcyctcttgcccccacccactctcttcgtcttattaactgcatatccttggagctcactcactgcaggaagccccccagccaaccccactccacccaggctgt

SEQ ID NO: 259632 - DNA, 201 bp, Homo sapiens
gggatggagtcccatgtccagggccagcccactgtgccaaccacagcgtcaggaaccatagcctctgcccccactgtccccagaccctcatacgtgacccygctgccccccaggctcttagacaccaccctactggtgcccacagccctctctgcaggcagatgagggactgggcctcagtgtcctgcccagggtcaccct

SEQ ID NO: 259633 - DNA, 201 bp, Homo sapiens
ggagattagcaagaacgtcgagaagatcctggccgaggtgctgccccaatacgtggaccaggtgagcagggctgccgggcaggtagagcgggaacaggcarggctcaagggctgggcagcccctggcatggaagggcctgtcagtcagacccgagtccccacctcaatcctgcctcttctgagttgtgtaaacttgaccaa

SEQ ID NO: 259634 - DNA, 201 bp, Homo sapiens
agcatgacctggtgtctgcccctcagcagcaatgccgccggtgtcctttactccagggcagctgctcctctaaccccatcccccctccagctctcagtacracacctccccaccctgagaggcccggatgagtgccaatcctccaccccccagagcagccccgatgccactgcagagtcctggcctctgagtcaggaagcc

SEQ ID NO: 259635 - DNA, 201 bp, Homo sapiens
agtctaatgagggggaaataagggagatgtggacagggttgggaggtgggtagagtgtaaccagacatttatcacatggcacaactcagaacgctggggarcagagtcaaggggccactgtgacagtggatgagggcataatctgggtgggctgcctggaggaagcatcagccaagctgagatctggaggaaagggactcg

SEQ ID NO: 259636 - DNA, 201 bp, Homo sapiens
acattcttggcctttttaaaggcttacaactttaaggggtccacgtgaaagggtcgtgataaatcgagcaagctcggggaacgtgaccgggggctgcatgmgtcagctaacagaacagaaagttttgcagtgctttctcatacaatgtctggaatttacagataacacaagtagtttaggtcaggggttgatattattatc

SEQ ID NO: 259637 - DNA, 201 bp, Homo sapiens
ccatgatgagcacctcccaggtgccacgttggcccagaggccccggggccaggagctacggaggcccagggcaccagggagatggtagcagcggcaggccmaggaaggggcatagaggaggctcttcctccacacctgtcaccctgtcccctgcctgtccacacccacagcagcttgcacatcatccccacagcacgctgg

SEQ ID NO: 259638 - DNA, 201 bp, Homo sapiens
gagcccggccttgagccacagctccagtgccatgattccgtctctgtgcttctaagtctgtggccctatgaggccaaactctggtccctcaccttggattygctgagctcagatcccagggctccagggctcagcgtgctaagatgaactcccatcccaccactggctatcctgaaaggctgtaacctcagattctccgag

SEQ ID NO: 259639 - DNA, 201 bp, Homo sapiens
cctctactcatcaagctcctgcttacaccattcagactggcaggggtgaggctgccccgcctccaggaggggcatcagggcagggcagaggccatggcttkgggttaatttctgtgcggcaggaagaagcatggcgctctgcctgcctgctcaccctcgggggctgtggtggagcagctgtccccaagcccacacccagtc

SEQ ID NO: 259640 - DNA, 201 bp, Homo sapiens
ttccgtctctgtgcttctaagtctgtggccctatgaggccaaactctggtccctcaccttggattcgctgagctcagatcccagggctccagggctcagcrtgctaagatgaactcccatcccaccactggctatcctgaaaggctgtaacctcagattctccgagcccacaatccccaggttctaaactccgagagtccc

SEQ ID NO: 259641 - DNA, 201 bp, Homo sapiens
cattgcgccctggaactatccgctgaacctgacgctggtgcccctcgtgggagccctcgctgcaggtgagagctgggcctgccccttccggtcacccttcyccgctcgaggcctcagggccacccatggatcccaggaggacatgggagaactggcccaggtggcaaagaggactgtctggtccaccgtccccgggctgtg

SEQ ID NO: 259642 - DNA, 201 bp, Homo sapiens
ggcgtgaatctgcagtggcttcaggcttccaggaggtagaactttctccaggtgacgatgcccaagtgcagatgtggggaacagacaggtggattcatgcrggtgggtggctggaagtgggagacaggaaaggagccgaagagagggcagggcccgaggcgcaggggcagggaggaggtgggagagtatggctatggcggg

SEQ ID NO: 259643 - DNA, 201 bp, Homo sapiens
ccctatgaggccaaactctggtccctcaccttggattcgctgagctcagatcccagggctccagggctcagcgtgctaagatgaactcccatcccaccacyggctatcctgaaaggctgtaacctcagattctccgagcccacaatccccaggttctaaactccgagagtcccgtcctgagcccccagtctcctgggccgt

SEQ ID NO: 259644 - DNA, 201 bp, Homo sapiens
cagggtggcccctctgggtgggagctggctgctgaggggccggggtgctgagcacttaatttcatccccggctcccggcccaggccacgcagctggactcygccttcatccggaaggagccctttggcctggtcctcatcattgcgccctggaactatccgctgaacctgacgctggtgcccctcgtgggagccctcgctg

SEQ ID NO: 259645 - DNA, 201 bp, Homo sapiens
ggtgtctgaggttgccatcagccagggcgaggtcaccctggccctcaggaacctccgggcctggatgaaggacgagcgtgtgcccaagaacctggtgagcyggccgggctgaggcgggcagggggctcaggggatatttgctcccacagggtggcccctctgggtgggagctggctgctgaggggccggggtgctgagcac

SEQ ID NO: 259646 - DNA, 201 bp, Homo sapiens; identical to SEQ ID NO: 51782

SEQ ID NO: 259647 - DNA, 201 bp, Homo sapiens
catctggcaggatggacccccttggggacacgctgcggcgactgcgggaggccttccacgcggggcgcacgcggccagctgagttccgggctgcgcagctycaaggcctgggccgcttcctgcaagaaaacaagcagcttctgcacgacgcactggcccaggacctgcacaaggtgggctggggttgggggtatgagaggg

SEQ ID NO: 259648 - DNA, 201 bp, Homo sapiens
agactgaggcacagtccaaggtgacatggattgtttgcagcagggccagagtttaacccccggcagtctgactctggaatccatgcccttgaccaccaccygcctatcttgccctggcatctggcatccccagggcttactgagctggtgccaagctcggggccaagccctttacacacagtgcctcatgatcagcccact

SEQ ID NO: 259649 - DNA, 201 bp, Homo sapiens
caggctctgggtcctgaggatcctgatggggctcaaggcagcctcacgcacatcctgttctctcccaggtggtcaagcgggtgctgacccagaccagcagygggggcttctgtgggaacgacggcttcatgcacatgaccctggccagcctgccttttggaggagtgggtaggtgcctgctaccctgcccttctgttacca

SEQ ID NO: 259650 - DNA, 201 bp, Homo sapiens
gagcagagcaagctcacagccacctcggggcctttgcagccgccagggcctctgcccaaagtatgccgcctcccagtacccacgacttgcttgttccttgmcttcaggtcactgctccaatgtgaccgccgcctggagacctgcactgaccgctttgtaaaaacagcacacacacacatgctcatgtggatgtatacatgt

SEQ ID NO: 259651 - DNA, 201 bp, Homo sapiens
ctctttcctcctgtcttgtaaaccaggcaaggtggtaggaggagggcagcaggagtagtagtggtcttattccttaggggaggcattgagggaaggctggragtggggggtcgagacttccttgctattctgggccataacattccacataatattataatagaatataattaatacaataatagttccccaccccacacc

SEQ ID NO: 259652 - DNA, 201 bp, Homo sapiens
gcaccagggagatggtagcagcggcaggcccaggaaggggcatagaggaggctcttcctccacacctgtcaccctgtcccctgcctgtccacacccacagyagcttgcacatcatccccacagcacgctggctctgacaggtgtatccggggcgggctgggggcaggcagggacaggcttaggcacagctgcctgtgccga

SEQ ID NO: 259653 - DNA, 201 bp, Homo sapiens
tgacatggtggcctcagaccctttctgaggcaagatcagtgtcacagagtccagcatggaacaggctctgggtcctgaggatcctgatggggctcaaggcrgcctcacgcacatcctgttctctcccaggtggtcaagcgggtgctgacccagaccagcagcgggggcttctgtgggaacgacggcttcatgcacatgacc

SEQ ID NO: 259654 - DNA, 201 bp, Homo sapiens
agtcagatcccatccctgctcttctcaggagtccttgcctggctgcctggccccctcaccttgcccactctgcttcttgctaaacaggagcagagcaagckcacagccacctcggggcctttgcagccgccagggcctctgcccaaagtatgccgcctcccagtacccacgacttgcttgttccttgccttcaggtcactg

SEQ ID NO: 259655 - DNA, 201 bp, Homo sapiens
ttgaggaagaaggtccttctcaaggaccttcaagcaagggccaagcttctgtttctaaagtgcaaatctgaccacatcattatgttttcatgtccctgtgytcacaccacacagctcttcagcctccactctgtctgcagtgccctctttgcctgaacaacttctgtccctcccagtccctccactcagcaggcacatgac

SEQ ID NO: 259656 - DNA, 201 bp, Homo sapiens; identical to SEQ ID NO: 51778

SEQ ID NO: 259657 - DNA, 201 bp, Homo sapiens
gcggcctgcagcctgctgcctggctggtctctcctcccttggggcgcagagggcagggagcactggctagccgagagcaggacaatgtccctattgattcrggtctcctcactcctgcttagaagcctgacagtggccctggcccctgggctgtgggaactgacagcatttacctaggggtggctgtgcctgtgtctcctg

SEQ ID NO: 259658 - DNA, 201 bp, Homo sapiens
aatccactgggggcagtccgctttccccacatcagacaagccctgacccagctgtgatcagaggttcacggtgattgcaactaaatatactgaagtttttstgcagcaactatttagtgtctaccaatctttttttcctttcagtcttcaaataagtctacagattgaggaagaaggtccttctcaaggaccttcaagcaa

SEQ ID NO: 259659 - DNA, 201 bp, Homo sapiens
gtggaggtaattaagctgtatgctgctctatcatattgttagttattatctagttattttatacattcttttcttattccatttgtggtttggtggaattytgttgtattgccatttgatacctttctcttcctcctttgtatgattgttttatagggcctgtgagttttgtacttttgtgtgtattatggcaaataccaa

SEQ ID NO: 259660 - DNA, 201 bp, Homo sapiens
gcttcgctggtcctctggcccatccagcaccccactggcccgtccccctctgccctgacccgggagagcctgcaccccataacctcaggcgctgcctcagscagggagccagcctggccccagtgtccctgacctgttctccagcggcctgcagcctgctgcctggctggtctctcctcccttggggcgcagagggcaggg

SEQ ID NO: 259661 - DNA, 201 bp, Homo sapiens
gtccctctgtttggcacagagacagcacctcacacaggaagcacgcactgaacatggagtgagtgagtgaacgaatgaatgaaaatgaatgaatgagttgyggaagcaggccctgcctggaggaggctgtgccctcctgccaactctgggaatcctggcccaccctgaccccacccacttcctgcagtcagccttcgagtc

SEQ ID NO: 259662 - DNA, 201 bp, Homo sapiens
aagtcaggtcccaggtgacctaggaggtgtggcgggcaggccaccaggctcatggggccagagcacaggctgtgggaaagtccgtgtggaaggcaccttcscccagcctcagtggctaggaggtgccagtgggcgtggcgtcttcctccctcttggggctcagctgtagccctggccttgcccctggttcgctgagtgacc

SEQ ID NO: 259663 - DNA, 201 bp, Homo sapiens
ggcgctgcctcagccagggagccagcctggccccagtgtccctgacctgttctccagcggcctgcagcctgctgcctggctggtctctcctcccttggggygcagagggcagggagcactggctagccgagagcaggacaatgtccctattgattcgggtctcctcactcctgcttagaagcctgacagtggccctggccc

SEQ ID NO: 259664 - DNA, 201 bp, Homo sapiens
ccacctcctgccttcccatcccagctgcaggagcggggccctacaaaggcagcagtagcccagaacattcaacctggtccctccctctggacctggtcacycccctgtccccaccctcagcaggcagcatctgcccagcgtcacgtgcaccctctcagttaaccctttggtgaatctggttgggcaaccacacccagtggc

SEQ ID NO: 259665 - DNA, 201 bp, Homo sapiens
gcagccctggccacccagttcatgccaccccatctggcaggatggacccccttggggacacgctgcggcgactgcgggaggccttccacgcggggcgcacrcggccagctgagttccgggctgcgcagctccaaggcctgggccgcttcctgcaagaaaacaagcagcttctgcacgacgcactggcccaggacctgcaca

SEQ ID NO: 259666 - DNA, 201 bp, Homo sapiens
ctccctttgccttgaaggctgtagtgttcagaccttcccccagcccattgggctccctggggactgactcccccgccaccactgagcttctgccaccggcygcctgccggccttcatgagacttgacctgacgtctgtctggtcccttttctcccttcggctctgattccacctcctgccttcccatcccagctgcaggag

SEQ ID NO: 259667 - DNA, 201 bp, Homo sapiens
agcaggtcccgccctcaaggtggccacttaacaatcacccacagccttgcgctcaccgatgctgggccctgggctcagaaccgactgtgtggtctcatcaytagctggcaggtgccatcattacaccggtaacatgagaggcttcaagcactaggtctcaaataagtaggcacagaggggcctgcctcccagtctaatgag

SEQ ID NO: 259668 - DNA, 201 bp, Homo sapiens; identical to SEQ ID NO: 51803

SEQ ID NO: 259669 - DNA, 201 bp, Homo sapiens; identical to SEQ ID NO: 51804

SEQ ID NO: 259670 - DNA, 201 bp, Homo sapiens
tcaccccccaggtaggcaccaatccacctatttctggccacttcatatgcttcattatgtctgttcctccttcacttcctctctcctctccatcccctttkgtaccttccttcatttccaaggccatctttgttttttagaattttttattttttgtagtgatggcttctcgctacgttgaccagactggtctcaaactcc

SEQ ID NO: 259671 - DNA, 201 bp, Homo sapiens
caaggctggcaagcagcacagaggaagtgcagatccttcctgtgtcactccaggcccagaggaactgagaagccacctgctgttccggcccttgggctgtytgggaaaagccagcagtcagagtgccagcctcaagctctgattatccccctcctgtggccctggtagttcaagcaggtcctggcagcaggagggctgtgc

SEQ ID NO: 259672 - DNA, 201 bp, Homo sapiens
cagtcagagtgccagcctcaagctctgattatccccctcctgtggccctggtagttcaagcaggtcctggcagcaggagggctgtgccatggaggatggayacgactgcactcatactcaaaaacagccttgaccgtggcctggtcatgggattaaaaaatttgtgtgtattggtggggaaggatggggtgagggtgaggg

SEQ ID NO: 259673 - DNA, 201 bp, Homo sapiens
tgcgcattaaaagaattcagtaaacatttgttgattgagtgtttaaaaagtgctaagttgggcagtccagtcattatatcctaaaatgaggtatggccccrtaagtctgtgttgcttctgtgagggtttccctgactttgaagtgctcaaatagttcatgttcttggatttagtggtggcacaggtagcagatttaagtgc

SEQ ID NO: 259674 - DNA, 201 bp, Homo sapiens
ctgcattaagtctgtaggtaaatttgatggctaaactccatgtctgcttctttcattttttagccattgactgggttcagattgatgccaattcctcagtycttcatgatgaattcattgctcacaggcttggtgagtactccttttactaggaggttaaagggagggtattgtgcctagtgtcaggagggggcctccttc

SEQ ID NO: 259675 - DNA, 201 bp, Homo sapiens
cacctccggtagatctgtggagcgagatgacagggctcaggcctccctggaccactcccaccccaccagcatggccctgcagccacccctgcctgccacasggggcggtgccgcacagccttccctggagccccagcctggggacaccgggggtgggagtcaccagcagtgtcacctccctgggagagaagcctcctcccc

SEQ ID NO: 259676 - DNA, 201 bp, Homo sapiens
aggtcatcttcattcagggaccagcattctagccacaaaccagttattatttcttccagcttgtggtgacaccaggtgtcagagatcctttagcattggcraaagctaattgggctgccattttattatcatttccctctctcctaagatgtagattctgcagcaaaattcctcttttgaaaaaaagaaatgccatggagg

SEQ ID NO: 259677 - DNA, 201 bp, Homo sapiens
tgctcaaatagttcatgttcttggatttagtggtggcacaggtagcagatttaagtgcttctcatgcaaatactcagctcaaataaacatgtttccacttmtatgatattctataagtcagtgttttctgtgaagcagggagccccctgcattaaattcacctgggcagggaggtgaggtgtggtgtgtgtgggtcttatt

SEQ ID NO: 259678 - DNA, 201 bp, Homo sapiens
taaaaagtgctaagttgggcagtccagtcattatatcctaaaatgaggtatggccccataagtctgtgttgcttctgtgagggtttccctgactttgaagygctcaaatagttcatgttcttggatttagtggtggcacaggtagcagatttaagtgcttctcatgcaaatactcagctcaaataaacatgtttccacttc

SEQ ID NO: 259679 - DNA, 201 bp, Homo sapiens
ccccacccccagggccagggcccggcctcacctgtctgttcacactgcacccctggggccaggaggtcaggttctcccagactgatgtcgttgaggcgggrccccagacactccacagatagtgtcttgtaccactcctctgcctctagctctgaagaaaatgctacttcatcatgcagctccagagcccggtagcccacc

SEQ ID NO: 259680 - DNA, 201 bp, Homo sapiens
acaaagacatcccaggacctgcgtgaaggaatttctgaagcttgaggtatagacataacatacacaaatatgacacaaggcacactatgacaagtgtcttsagggaagtctgaacagagttttgtgagagaggagttgaaagggagggaatgtcacatctgtagcatagagagcaggcaaggcttagttttcaggaggcac

SEQ ID NO: 259681 - DNA, 201 bp, Homo sapiens
cttccagagctgcccccctgcaccagggctttagctttgggagcctgcggcgcgggcccagcctgtcgaggctgcagcgccttcacgccccttggcttttsatctttcagggtggccaattcgattcggagggtcttcatcgctgaggttcccataataggtaagcgactccccttcctcgttcccgcgcccacgggttcc

SEQ ID NO: 259682 - DNA, 201 bp, Homo sapiens
tactgttaagtgaaggacgtatgcgtgttttgccaaactaccctccgagatagctgaatctggtacattttaaagcaggaggccgcagaagacgctcggcrgttctggcctccgagcagcaggcggcgctgtgagtcgtctttgcggaagccgcggaggcctcgctgactgacttccggtgttggcggtggcgccgcgcag

SEQ ID NO: 259683 - DNA, 201 bp, Homo sapiens
cgttcccatcgaggaacggggtgggaagagaaaatgagaggatgtgggaacgagggtgggccgggaggggacagttgagggagctctggcgctcagctggmccccaccactctcacctgccgcctgggctcgctcccggcttctctccagccgtcgactccacgccttgcgcctctcgcgagaggaggaggctccacggag

SEQ ID NO: 259684 - DNA, 201 bp, Homo sapiens
taacaaagttaggattctgttttcccacagggagacaagccctatccttcttaagtgttagcctgaacaaacagtaaaattttttttgacagccttgagtyttctcaggcaggcactttaaaggggggtagggttatcttaagggatgtggccctgagtgatgcttatgttagtgtgtgttcaagtctttataggccaagg

SEQ ID NO: 259685 - DNA, 201 bp, Homo sapiens
cagatgagcagaagcagcagcctcccaactcattttctcagcagcattctgagacacagggggcagaaaaacctgatccagagtcttctcattcacccccsaggtaggcaccaatccacctatttctggccacttcatatgcttcattatgtctgttcctccttcacttcctctctcctctccatccccttttgtaccttc

SEQ ID NO: 259686 - DNA, 201 bp, Homo sapiens
gtctagcatgaacggagcccaaccttgagtttagagcatgcagaagtcactgggtgtttcaaagaaaaaatgagggaggagggaggaaggcaggtggggaytcagtagagtcaggatagtgaataattataaataagattggtctgctagctggcagttaacaaagttaggattctgttttcccacagggagacaagccct

SEQ ID NO: 259687 - DNA, 201 bp, Homo sapiens; identical to SEQ ID NO: 51810

SEQ ID NO: 259688 - DNA, 201 bp, Homo sapiens
tgttactgacttcacatcattttgtagccctaacctggaaacaataatctaataataaggctgacaatggttcagccctagtgtcttgattccaaaaaccycacttctttattttttcctgtcatcaggagatatcactgactcctgggaccctggtatatcaagtctctgtatcatagccacacctgccaccttgcaaac

SEQ ID NO: 259689 - DNA, 201 bp, Homo sapiens
ggtgtgattccaggcctggtgtcacatgacaccagcatgcattgcaggattattagtgtattttgagtctgtaaaaataataaatatgtttgaagtagttwcccattgtgtagttagtttccttatcaatcatgataggtatccaggaccccagagggagacaggttaagttatggcagccaggagacctgtgttctggcg

SEQ ID NO: 259690 - DNA, 201 bp, Homo sapiens
actggtaggaccgggtctcagaaccaggtctccccgatcccaagctcggagccgtttctcctcagcgtggtgtccccggggcctcagagtagggccggctrcgcaagggacgaggcagccggggaacggcagaaattcccagtcaggaccccagggaggttagggccggccctggcccctcacaccgacttctcaggaata

SEQ ID NO: 259691 - DNA, 201 bp, Homo sapiens
tggccctctgcattcccagttccaaatgctagggatggagaatgtgcttgggcttgcataagacggggctatgcccctggctctcctcagctgtagtcagyattgctagctgcccacaactcacgccagtgggtgaagatgctggtctcagagaaccagagcttggcaggccccctcatacacctcttggagaggtagatg

SEQ ID NO: 259692 - DNA, 201 bp, Homo sapiens
tcgtgagctcaggtaccccccgactccaaggctttcgtgctttgctgccaggaacccccagggaccaaaacgtcacggggactgaggcccaaggtcacaaygattggctactggtaggaccgggtctcagaaccaggtctccccgatcccaagctcggagccgtttctcctcagcgtggtgtccccggggcctcagagtag

SEQ ID NO: 259693 - DNA, 201 bp, Homo sapiens
attgctagctgcccacaactcacgccagtgggtgaagatgctggtctcagagaaccagagcttggcaggccccctcatacacctcttggagaggtagatgstggtcaactatgcaccattacctgtgagcagagcttactcctctgccattctctctccaggccctcagcatcctcatgctccctcacaacatcccgtcca

SEQ ID NO: 259694 - DNA, 201 bp, Homo sapiens
gggaggtgaggtgtggtgtgtgtgggtcttattaaaatgcaagtacctgggccccactctaatgctgtggaatcagcccagcaatctgcagtttagtgtcrggtgattcctaaatcttgagaaccactgcattaagtctgtaggtaaatttgatggctaaactccatgtctgcttctttcattttttagccattgactggg

SEQ ID NO: 259695 - DNA, 201 bp, Homo sapiens; identical to SEQ ID NO: 51812

SEQ ID NO: 259696 - DNA, 201 bp, Homo sapiens
agctggtgatgatgcaggactcctctccagactttgaggacacttggcgcttcctggaaaaccgggttaatgatgcaatgaacatgggccacactgccaascaggtaggtggggactagccattggggaaccctctttagaaggcatacctattctcctcaggtcacagctggtcttgctcccttttggcctcagctgaca

SEQ ID NO: 259697 - DNA, 201 bp, Homo sapiens
tcataaaagaaaatgtgatgatactttgtggaatcctggatgaggaggcacagaaatactcccaccatagttataacaaagtgttttaataaacttcctcyatgtgggaatataatgccaacagagacggtaggaaaatgaaattagaaagcaaagaaattaaaggaataaaacaccaagcagctgagctggtcctctgaa

SEQ ID NO: 259698 - DNA, 201 bp, Homo sapiens
gggacagttgagggagctctggcgctcagctggcccccaccactctcacctgccgcctgggctcgctcccggcttctctccagccgtcgactccacgcctygcgcctctcgcgagaggaggaggctccacggagcgacgacttccgccctccttagggccgtggtcccgtagctaccggtcgcgtcgccgtgggcgacgtg

SEQ ID NO: 259699 - DNA, 201 bp, Homo sapiens
ggggaagaggccgttggggcggcccacgagcaaggtgaggtgaagggcatcggcgcgggctcgggcgagccgcctggctagcttcggccctgctccgctgyctgtgaggggcagatgcagcggggcagggcctgtcacccccatttcatggagttggcagagcctcagagagggctcggggtacgaaagtcacgcagcctg

SEQ ID NO: 259700 - DNA, 201 bp, Homo sapiens
tgtgcaagtgtatacatttgtcaaaactcatagaatggtacacttaagatttatgcatttcattgtgtgtaaatggcatctgaataacaaaacagtgaacrtagaagtctttgatgctaaaatgtttagaggtgaataatactgatatctgcaacaaatgcactgaaaatcaagatggatgaatgaagaacatgacagatg

SEQ ID NO: 259701 - DNA, 201 bp, Homo sapiens
gtggtgcttgcctgtggtcccagctacctgggaggctggggtgggaggatctcttgagcctggtaggtcaaggctgcagtgagccataatgatgccattgmactccagcctgggcaacagagtgagaccttgtctgaaaccatatatgaggtgggtaacagggtggtcaggaaaggcttttgagctgagaattgaagaatg

SEQ ID NO: 259702 - DNA, 201 bp, Homo sapiens
cactggactccagcctgggcgacagagggagactctgtctcaaaaacaaaaaacaaacaagaaaaccacattgatagtgacacaagagtaaatgtcttccyagcatgtgcttagaggagatccagagcccctagtttctggtcatgcccattgtacatgccaggagatgaagtatgctgggctgtgtcctcttgtctcagg

SEQ ID NO: 259703 - DNA, 201 bp, Homo sapiens
aaatcatctgggatacttattaagtttcctgattcctggcactttatttagatccattgactctactcttaagaggttgggcccaggagcttgcatttttmatcaagtaggtaattctgatgctcagtcaagtttgagatggtagtgttgtccagagggccagatgtatctgtgacagtcaagaagtagtcaagagggaac

SEQ ID NO: 259704 - DNA, 201 bp, Homo sapiens
ctggcagctggtgggagtgggaaagaaatgtgcgtgccagtgtatgtataagttgtctctaaacttgggcagtccatgagaatggtataccagattgtcayagcccacaagaacctggatactgatgaacccctttttacaggtgaagaaacttaaggaactgggcattagatgcaggaagccaagacaaggagccaaggc

SEQ ID NO: 259705 - DNA, 201 bp, Homo sapiens; identical to SEQ ID NO: 51809

SEQ ID NO: 259706 - DNA, 201 bp, Homo sapiens
ttccctgggatcttttctcttctctggctggctccaagtgggccagactggggttgatccttagaaaatgttggctttccctgttaccctctgccttaatmtgatccctagaagtgctaattctggattcctcttgggcatcgttagcatcgttggtgctgcgcaccctctatcacccagggactcttttaaaggccatgg

SEQ ID NO: 259707 - DNA, 201 bp, Homo sapiens
gctccaagtgggccagactggggttgatccttagaaaatgttggctttccctgttaccctctgccttaatctgatccctagaagtgctaattctggattcytcttgggcatcgttagcatcgttggtgctgcgcaccctctatcacccagggactcttttaaaggccatggaattgttttgcctgaggctaccaccacacc

SEQ ID NO: 259708 - DNA, 201 bp, Homo sapiens
ggtaagtcttcctgacctgtcaccgtgtgggccagcgggaaggagggaccagacacagcctctcgtgctgcctggtctcctcgaaaattggctttagaccrtttttccagatgtgtgtggtcttgcagtggcactccaagtcagaatttggagaagcatgtctctcctggcccttgactgacttgtgcctctccctgcaga

SEQ ID NO: 259709 - DNA, 201 bp, Homo sapiens
aagagggaacccaggagttcccatggccttgggtaggaactgcctcagacttgcaccagcccacagcggtagtgtgggtttctttacagtttaactggtayacccgccgagccatgctggctgccatctacaacacaacagagctggtgatgatgcaggactcctctccagactttgaggacacttggcgcttcctggaaa

SEQ ID NO: 259710 - DNA, 201 bp, Homo sapiens
tgaggtgtggtgtgtgtgggtcttattaaaatgcaagtacctgggccccactctaatgctgtggaatcagcccagcaatctgcagtttagtgtcaggtgawtcctaaatcttgagaaccactgcattaagtctgtaggtaaatttgatggctaaactccatgtctgcttctttcattttttagccattgactgggttcaga

SEQ ID NO: 259711 - DNA, 201 bp, Homo sapiens
tgtggaatcagcccagcaatctgcagtttagtgtcaggtgattcctaaatcttgagaaccactgcattaagtctgtaggtaaatttgatggctaaactccrtgtctgcttctttcattttttagccattgactgggttcagattgatgccaattcctcagttcttcatgatgaattcattgctcacaggcttggtgagtac

SEQ ID NO: 259712 - DNA, 201 bp, Homo sapiens
gaaaggccctggcaggtaggagagccggctcctgatctctttcagcccctcccccctcacctctgtgggctgagatgagaatggctgctggggagggaccrcagcctctcacaccaggggaagtgaggctcctggcttcagagggaagagaattccctgcatggatagggcctggctatgccccacctccccatccaggct

SEQ ID NO: 259713 - DNA, 201 bp, Homo sapiens
acattcacagccccagggagccacgcgctcaagagccctccttcccacttcgcacagggctttgatcagtgcttcagaaacactctgccacagctctgccrcgggagaaaggccctggcaggtaggagagccggctcctgatctctttcagcccctcccccctcacctctgtgggctgagatgagaatggctgctggggag

SEQ ID NO: 259714 - DNA, 201 bp, Homo sapiens
agctatgcccaggaggccaatccaagcagaacccaaagagagcagcattgggcagccctgctgctgtgatgggactgaaacctggcagcctgtctctgacrgctttagtcaggccagcgtcaggagctggtgggaccctcctccctagggctgagtaaaccgtggagcactgagcccctgcctttcactcagagacacact

SEQ ID NO: 259715 - DNA, 201 bp, Homo sapiens
gttggggcagggcagcaggaagacattgaagcgatctggagtgggggagggtggacaagtgggaccagagttgccccagatggggacttcctccctccctycctctcttcctcctccccctccccacccccagggccagggcccggcctcacctgtctgttcacactgcacccctggggccaggaggtcaggttctcccag

SEQ ID NO: 259716 - DNA, 201 bp, Homo sapiens
ggatgggccgtcaaagtctaagtcagagcatcctgatgttggaggcaaagcaggagagtgtggattaagcagctagacattggttactggggcaacaaccrtttgggtggagaactggatcagaaatcaactggagtggatcgaggtgtgcatagaaggcgaggaagtggcgaggcgtttggctgcgaggggtagaactag

SEQ ID NO: 259717 - DNA, 201 bp, Homo sapiens
ttcttctaagaacaattgaagatattggattaaatttggcatttcaaaatgctcattttggctgccagatgaaaagtggattggaggcagagagagactcrttgggggctgctgccagacatacaggagagatgaggtggtctggcttagagtaatggcagtgggtaagttcaggaatagcttggacatgggagagagtga

SEQ ID NO: 259718 - DNA, 201 bp, Homo sapiens
tatgggccattctctgagtgaagaaagtacagagtgaaagtacacccgaagtgagagggactcagacatcttgtgtcctttgctcagctggaagactactragcacgtagtttcagtcattcagttgatagacatttgaacacttatggtggtgcctaaccccaggccgagtgtgactcattccaccttgcagttaaagca

SEQ ID NO: 259719 - DNA, 201 bp, Homo sapiens
tccaattaaaaccctttatatgattcattctttaaatgtttattgagcaaataatgtgccctaggcactgtgctagtccaagagacatgacaggggtcaargtggtcaagatggatctgcttcctgcccttgttgagcttccagtctagcaacattaataaaatatatacaaatgtttacttagaagatgtggtaagtgct

SEQ ID NO: 259720 - DNA, 201 bp, Homo sapiens
gtggagttcaccctcgatgtgcggtgcaatgaagaccagacgcgacatgtcacgtctcgagacctcatctccaacagcccccgggtcattccggtcagtgygggagagcatcctcttttccctgggatcttttctcttctctggctggctccaagtgggccagactggggttgatccttagaaaatgttggctttccctgt

SEQ ID NO: 259721 - DNA, 201 bp, Homo sapiens
ttctaaaggcaacctattggcaagaattgtctgtgatcaaaactaccatatttcattgactctaagatgccattggttgtaagaagcaccatttttaagtrcatcagtaaaaaaagaaaacatgttgcctgttaaactatgacaaatagtctaatttgtcctattaaagggttggagggctgggcacagtcgcgcatgcct

SEQ ID NO: 259722 - DNA, 201 bp, Homo sapiens
tctgtgttaccactctgggtctgaaagggtcttctctgttgaatgtccctgactgaccagtttctgtttcagtggcccgttgccgacaagccctggtgccrcgtgccttccatgcttcagctgtggggctaaggtcttcagatgagcagaagcagcagcctcccaactcattttctcagcagcattctgagacacaggggg

SEQ ID NO: 259723 - DNA, 201 bp, Homo sapiens
tgggacccaacacttggataagtggttctacaggagtctctggcctgcttttcctcctccttatctgtgttaccactctgggtctgaaagggtcttctctrttgaatgtccctgactgaccagtttctgtttcagtggcccgttgccgacaagccctggtgccgcgtgccttccatgcttcagctgtggggctaaggtctt

SEQ ID NO: 259724 - DNA, 201 bp, Homo sapiens
cgagataatgaccccaatgactacgtggagcaggatggtaagtcttcctgacctgtcaccgtgtgggccagcgggaaggagggaccagacacagcctctcrtgctgcctggtctcctcgaaaattggctttagaccgtttttccagatgtgtgtggtcttgcagtggcactccaagtcagaatttggagaagcatgtctct

SEQ ID NO: 259725 - DNA, 201 bp, Homo sapiens
aattcattgctcacaggcttggtgagtactccttttactaggaggttaaagggagggtattgtgcctagtgtcaggagggggcctccttccagcctcaccyccagaaggcttctgggttctcattttggcttggctgtttggttttctttaaagtgcttttctgttttttacaggattaattcccctcattagtgatgaca

SEQ ID NO: 259726 - DNA, 201 bp, Homo sapiens
accacgcctatgctgctgcgggccctggcccaggctgcacgtgcaggtaggaccaaagaagcctttgctgggggtaggggagtccagtctcctggtatgasgtcacgcccttctttttgcaggacctcctggtggccggagcctccacagcagtgcagtggcagccacctacagtgagtacctgggtggcctctagcctca

SEQ ID NO: 259727 - DNA, 201 bp, Homo sapiens
tacaacaaggagaagttgctcaacaacggggacaagtgggaggccgagatcgccgccaacatccaggctgactacttgtatcggtgacgccccaccggccygcagcccctgctgcccaataaaaccactccgaccccacggcctcttgtcttgactctggtggtccagggtggggccgttcccggcctgcctgaggcctgt

SEQ ID NO: 259728 - DNA, 201 bp, Homo sapiens
cgggggcgagtgtggtgtccccgttggcgccgccagctctgcgcctgggcttcccctcggctcactcaggatccgcggcctccgtgtccttcaggtgcagyggggagccggctctcagggcgcatgcgccgcccgctctgcgccaccggcctagttagggtcggagatcactgggaaggtggggaaggtgctgggttgggt

SEQ ID NO: 259729 - DNA, 201 bp, Homo sapiens
  misc_feature (1)...(201): n = A,T,C or G
gcctcaggtgttcctgactggtcctgctggagtaggggaagagacctgagttccagtcctggctttgtcaggggcgttcttctctgagcctgtttccactnttaaaatgattatggtgatggagactgactctgattcacaggggcagggtccatcattgccgaggttagcatgtgtgatctcagagctccctgggtgtga

SEQ ID NO: 259730 - DNA, 201 bp, Homo sapiens; identical to SEQ ID NO: 202375

SEQ ID NO: 259731 - DNA, 201 bp, Homo sapiens
cctgtcccgtggatgccatcgtcgaggcacgtgaggcccccgggtgggagggggcctgaggctcctcagcagggcctaaccaccgtccctgcacctcaacmtgcagggccccaactttgagttctccacggagacccatgaggagctgctgtacaacaaggagaagttgctcaacaacggggacaagtgggaggccgagat

SEQ ID NO: 259732 - DNA, 201 bp, Homo sapiens
cctgtaatctcagctacttgctaggctgaggcacgataatcacttgaaccgggaggtgggggttgcagtgagccaaaattgaaaaaaaaaaaaaaaattarggccggttgcggtggctcacgcctgtaatcccagcactttgggaggccaaggtgggcggatcacaaggtcaggaattcaagaccagcctggccaacatgt

SEQ ID NO: 259733 - DNA, 201 bp, Homo sapiens
cacacctgtagtccaagtgctttgggaggtcaaggtgaggggattacttgagcccaggagtttgagaccagcctgggcaacatggcaaaaccccgactctacaacaacaacaaaaaatacaaaaaattagcccctgtaggcccagttacttgggaggttgaggtgggaggatcgcttgagcctgggaggttgaggctgcag

SEQ ID NO: 259734 - DNA, 201 bp, Homo sapiens
aggacgtgcccttgagtttgggctgtgcccccacttgctgtgtagctttggggagcccctcaacctctcggaaccttgtttttctcatccatcaaatggagagaagtagatttaaggcacaggattgcacccaacagtgtaggcattcttggcgatgttgcaggttcggctccagaccatcggggtaaactgagtcacaca

SEQ ID NO: 259735 - DNA, 201 bp, Homo sapiens
tgtgaacatgcaggatcccgagatggacatgaagtcagtgactgaccgggcagcccgcaccctgctgtggactgagctcttccgaggtgcgtcctgggcakgaggggacagggaaggtgccgggtgggcacggatgcatgggggaggagggtgcccctgcccaccacacccgtgctgcccacaggcctgggcatgaccctg

SEQ ID NO: 259736 - DNA, 201 bp, Homo sapiens
acacctgtagtccaagtgctttgggaggtcaaggtgaggggattacttgagcccaggagtttgagaccagcctgggcaacatggcaaaaccccgactctacaacaacaacaaaaaatacaaaaaattagcccctgtaggcccagttacttgggaggttgaggtgggaggatcgcttgagcctgggaggttgaggctgcagt

SEQ ID NO: 259737 - DNA, 201 bp, Homo sapiens
tgaggcaggagaattgcttgaacctgggaggcggaggttgcagtgaactatgattgcaccaccatactccatcctgggccacagagcaagacttcgtctcaaaaaaaaaaaaaggatttacactgtactgtaggctgcgaagtgtctaaaacacaatgtatataccttaattaaaaatactttaggggccaggcacagtgg

SEQ ID NO: 259738 - DNA, 201 bp, Homo sapiens
cacctgtagtccaagtgctttgggaggtcaaggtgaggggattacttgagcccaggagtttgagaccagcctgggcaacatggcaaaaccccgactctacaacaacaacaaaaaatacaaaaaattagcccctgtaggcccagttacttgggaggttgaggtgggaggatcgcttgagcctgggaggttgaggctgcagtg

SEQ ID NO: 259739 - DNA, 201 bp, Homo sapiens
ggatcgcttgagcctgggaggttgaggctgcagtgagctatgagctgcaccactgtactccagcctgggtgacagggcaagactctgtctcaaaaaacaamaacaacaacaaaaactttattcctaaaaagtgctgacccagagataagaagcaagcacatggttggtaaaatgacatcagtgagcttgctttatgcaggg

SEQ ID NO: 259740 - DNA, 201 bp, Homo sapiens
ctctgacagcaatggggtgcgagtagagggcaaagtgacacatgtcagtggagacttgggatccttgcggtgccagtctcagaagaggatggttcttgggyacaccccaccctccatccctttttatgccaccagatgcgctgcctgaccacgcctatgctgctgcgggccctggcccaggctgcacgtgcaggtaggacc

SEQ ID NO: 259741 - DNA, 201 bp, Homo sapiens
gcggccctgatgtctctactccagccacggactgagagtgcataggagtgtccccaaacagcagtcacgatggtcacaaccttggcttccagacagtgagygctgtccacagacagacccgttgctgtgccatgtgtgtgactcacagcctctcctgtaatctccacaacccctcgaggaggtcgaggttattgtctccat

SEQ ID NO: 259742 - DNA, 201 bp, Homo sapiens
acccgtgggggccaggcctgccagcacgggaacaatatgactcggtcagagctctggtcagacccctgtgtgtgcctggcaggagccccggcagccgccgycgctactttctgtgtgcacagcaacccctcccagtgttctgtgactcgggtggctcctgtccagatcctagtttgtcctctggagcactcccaggtcctc

SEQ ID NO: 259743 - DNA, 201 bp, Homo sapiens
gaggctgcagtgagctatgagctgcaccactgtactccagcctgggtgacagggcaagactctgtctcaaaaaacaaaaacaacaacaaaaactttattcytaaaaagtgctgacccagagataagaagcaagcacatggttggtaaaatgacatcagtgagcttgctttatgcagggttgccccaaaccttcaatttgta

SEQ ID NO: 259744 - DNA, 201 bp, Homo sapiens; identical to SEQ ID NO: 202367

SEQ ID NO: 259745 - DNA, 201 bp, Homo sapiens
cagccacggactgagagtgcataggagtgtccccaaacagcagtcacgatggtcacaaccttggcttccagacagtgagtgctgtccacagacagacccgktgctgtgccatgtgtgtgactcacagcctctcctgtaatctccacaacccctcgaggaggtcgaggttattgtctccatctttataagcactaaaggatg

SEQ ID NO: 259746 - DNA, 201 bp, Homo sapiens
taggtgaggcagaacttggggtccacagaaactgaattgtagctcagccaagctgaatcagatggaaagctgggaggcgctgggaacaggaaagccatctstgcctctgacagcaatggggtgcgagtagagggcaaagtgacacatgtcagtggagacttgggatccttgcggtgccagtctcagaagaggatggttctt

SEQ ID NO: 259747 - DNA, 201 bp, Homo sapiens
cagtgatccaaaggagtgggcctgttagggggttcacaggtcgtgggatgagctcttatgagcgccggctaagtgccgggctctggggtgcccttggcatrtacgggctcccctaattcccaagaccaaccgcccccaacccacttcataggtgagaagacggaggtcaggtcacatcatctgcccaaggtcacgcggcag

SEQ ID NO: 259748 - DNA, 201 bp, Homo sapiens
  misc_feature (1)...(201): n = A,T,C or G
cgtggagtccttgtaaggataggatggcagcgctttccacccctgggcacggttcctgggggaggagagctaacaaagttcgctctcagtgcatgctggcnggggctggtaatgttgtttttggttagatttggggaggatgaagggaggagcagaaaggtgggaaacaggatctctgggagggagaaaggaaggatggat

SEQ ID NO: 259749 - DNA, 201 bp, Homo sapiens
tgtaacccaaaagaggtgtccagagccaaggcttctaccttcattgtccctctctgtgctcaaggagttccattccaggaggaagagatctataccctaarcagatagcaaagaagataatggaggagcaattggtcatggccttggtttccctcaaaacaacgctgcagatttatctgcacaaacatctccacttttggg

SEQ ID NO: 259750 - DNA, 201 bp, Homo sapiens; identical to SEQ ID NO: 51879

SEQ ID NO: 259751 - DNA, 201 bp, Homo sapiens
tagtcccagttccaaactaatttaacagccccctcccattcaagtcttagatgtatgaggccttccctaagttttctatcctgagtgatcatcttggtccmtaaaccgtaggcctccatttccttatctgtaaaatagaaataaacctaacctttgagttgtaaggtaaaggaaagatgggtgtgaaagcacattaatggg

SEQ ID NO: 259752 - DNA, 201 bp, Homo sapiens
gccgcctttggcggttctgtttctgtgctgatctggaccatctttgtcttgccttttcacggtagtggtccccatgctgaccctcatctgggcctgggccytctgccaagtgcccctgtgggatgggaggagtgaggcagtgggagaagaggtggtggtcgtttctatgcattcaggctgcctttggggctgcctcccttc

SEQ ID NO: 259753 - DNA, 201 bp, Homo sapiens
aaatactgaccaaaatgagtcaagacccaggttatagtcccagttccaaactaatttaacagccccctcccattcaagtcttagatgtatgaggccttccmtaagttttctatcctgagtgatcatcttggtccctaaaccgtaggcctccatttccttatctgtaaaatagaaataaacctaacctttgagttgtaaggt

SEQ ID NO: 259754 - DNA, 201 bp, Homo sapiens
gcataccccgcccagcttccccacctgccctgatcccactggcactacagcttgtagccccttcacgggctgtggatgagccacctgcagtttgctcatayagccagaaccactggtgagcaacctcaaacaacacttcagggtacacgcccccacccttagctgcctcttccactgccatgcaggccttctccaacatca

SEQ ID NO: 259755 - DNA, 201 bp, Homo sapiens
cctgagtgacagcggcagtcctgtttgtttgaggtttaaaacaattcaattacaaaagcggcagcagccaatgcacgcccctgcatgcagccctcccgccygcccttcgtgtctgtctctgctgtaccgaggtgttttttacatttaagaaaaaaaaaaaagaaaaaaagattgtttaaaaaaaaaaggaatccataccat

SEQ ID NO: 259756 - DNA, 201 bp, Homo sapiens
cctgcctccctctggtccaagaccacccaggaagtgctccaccctgctccataattctaggttgtcacctgcatgtatgcctgctggcagcgctgcaccakttggtggaaggccggggcacgcaggtggttgtgggcatgagcgggactcagccgctgcagcgtctccatgacgatctcctgcagcacaaacgggctcagc

SEQ ID NO: 259757 - DNA, 201 bp, Homo sapiens
cacatggaatttggaaagaagggaaaggcccaggtcgactagagtaaaaaaggagtttatatatttataaatgccaaataaataccagaggccacccaacrccccctcccagacagggctgtctcccccagccctaggcttctagggtgtgagacatcttggccccaagctatagcccaagagcagctgtcagtctgtgct

SEQ ID NO: 259758 - DNA, 201 bp, Homo sapiens; identical to SEQ ID NO: 51876

SEQ ID NO: 259759 - DNA, 201 bp, Homo sapiens
gaggagattcagttcttcaacagccctaattaccacaagggtattgactggtgagactgggccccatttgaatgtttctcagaggaacactcccttccccsaaaataccccattccagcttccctcagcacagacttctggccacttcactctgcatatttttctgcttctctctcttctgtgctacttcctaggtacatg

SEQ ID NO: 259760 - DNA, 201 bp, Homo sapiens
gtttcaccatgttggccaggctggtctcgaactcttgacctcaagtgatccgcctgccttggcctcccaaagtgctgggattacaggcatgagccaccgcrcccggccttaatttgaatttttaagagagaaaaaaaggaactccttttatacccacccctcattgatccagtctcttgaggcagtgattcctaaccctgg

SEQ ID NO: 259761 - DNA, 201 bp, Homo sapiens
atgagtatcctggaggctctcgtgaactagaccggagcatccgaggtggagagctctttctgacagtgctgcttaatccggtaaggtgctgagaggaacgrctagaagattggagagccaaggtgtttgcaggctgggacctttattcaccaaggctaattcagaggtggggtaggctctccaaatctgacatgcaggtac

SEQ ID NO: 259762 - DNA, 201 bp, Homo sapiens
acgggcaccactgtggctgctgctgtcactgctgccgctgccactgtaaccggctcagtccctgggccccctctaccctcaggcataccccgcccagcttycccacctgccctgatcccactggcactacagcttgtagccccttcacgggctgtggatgagccacctgcagtttgctcatacagccagaaccactggtga

SEQ ID NO: 259763 - DNA, 201 bp, Homo sapiens
caggcctgggtccctgtataggaccctaagggtgaaagactcagggggagaaggtggccatctcgagtgagacccgctgccacagctccttggtctgtttkctgcgcttgaggttctgtaggatgtcgttgaactgcatcatgcccatgggcgtcaggcagaaggcgctgcgggcactccggatcgcattcacaaagtcgt

SEQ ID NO: 259764 - DNA, 201 bp, Homo sapiens; identical to SEQ ID NO: 51872

SEQ ID NO: 259765 - DNA, 201 bp, Homo sapiens
tcagggaatcccccgaaggtgctggcctctgcgcccagggccaggctgctgtcatccaggctcatctcggccaggtctggctccagggagctgtcttcgctgctcagccgtcgcttgcttccgccacctgctgagcccttgctcccactgccagccccacccagtgccttggctttgcccccacctggacccatcttatgt

SEQ ID NO: 259766 - DNA, 201 bp, Homo sapiens
ccatggacttagggggaccaggcaagaactctgacagagctttgggggccgtgatgtgattgcagctcctgaggtggcctgcttaccccaggtctaggaawgaacttctttggaacttgcataggcgcctagaatggggctgatgagaacatcgtgaccatcagacctacttgggagagaacgcagagctcccagcctgct

SEQ ID NO: 259767 - DNA, 201 bp, Homo sapiens
agagagaaaaaaaggaactccttttatacccacccctcattgatccagtctcttgaggcagtgattcctaaccctggttgtatatcagaatcatctgtggygtttttacaagatcacaagtcattctggtgcacagttaaagcagagaaccactgttttagcccttccctgggcctctctcagacttgcctcctatcattg

SEQ ID NO: 259768 - DNA, 201 bp, Homo sapiens
tttgaggtttaaaacaattcaattacaaaagcggcagcagccaatgcacgcccctgcatgcagccctcccgcccgcccttcgtgtctgtctctgctgtacygaggtgttttttacatttaagaaaaaaaaaaaagaaaaaaagattgtttaaaaaaaaaaggaatccataccatgatgcgttttaaaaccaccgacagccc

SEQ ID NO: 259769 - DNA, 201 bp, Homo sapiens
gaagaggtgtccttacagaggcctctttactgaccaactgaagtatagacttactgctggacaatctgcatgggcatcacccctccccgcatgtaacccaraagaggtgtccagagccaaggcttctaccttcattgtccctctctgtgctcaaggagttccattccaggaggaagagatctataccctaagcagatagca

SEQ ID NO: 259770 - DNA, 201 bp, Homo sapiens
agggcctgagtgacagcggcagtcctgtttgtttgaggtttaaaacaattcaattacaaaagcggcagcagccaatgcacgcccctgcatgcagccctccygcccgcccttcgtgtctgtctctgctgtaccgaggtgttttttacatttaagaaaaaaaaaaaagaaaaaaagattgtttaaaaaaaaaaggaatccata

SEQ ID NO: 259771 - DNA, 201 bp, Homo sapiens
taccagggaactgagtgaggatgatctgtccagccaagtttcactccccctgtgtgaggggcccccatagccacaggcctgggtccctgtataggaccctwagggtgaaagactcagggggagaaggtggccatctcgagtgagacccgctgccacagctccttggtctgtttgctgcgcttgaggttctgtaggatgtcg

SEQ ID NO: 259772 - DNA, 201 bp, Homo sapiens
actgataatacccatggccgctatgtcttggtcatttatgagaacctgctcaagtatgtcaacctggatgcctggagtcgggaactgctagaccggtactgcgtggagtatggtgtgggcatcattggctttttccgagcccacgagcacagcctactgagcgcccagctcaagggctttcccctttttttacactcaaac

SEQ ID NO: 259773 - DNA, 201 bp, Homo sapiens
agaggtgtccagagccaaggcttctaccttcattgtccctctctgtgctcaaggagttccattccaggaggaagagatctataccctaagcagatagcaargaagataatggaggagcaattggtcatggccttggtttccctcaaaacaacgctgcagatttatctgcacaaacatctccacttttgggggaaaggtggg

SEQ ID NO: 259774 - DNA, 201 bp, Homo sapiens
gactggctgtggtcagtggtcagcgtgtggtcatagggacagaggaggaggatgcaggggacgacatgctgctgaagcaccgcaaagagttctggtggttyccccacatgtggagccacatgcagccacacctgttccacaatcgctccgtgctggctgaccagatgaggctcaacaaacagtttgctctggtgagaccct

SEQ ID NO: 259775 - DNA, 201 bp, Homo sapiens
tgaaaaaagtatttttaattttaataatttttttttttttgagataagagtctcacttctttgcccaggctggagcgcagtggcacgatctcagctcactrcaacctccacctcccaggttcaggcaattctgctcagcttccctagtagctgggattacaggcaggtgccaccacacctggctaatttttgtatttttag

SEQ ID NO: 259776 - DNA, 201 bp, Homo sapiens; identical to SEQ ID NO: 51875

SEQ ID NO: 259777 - DNA, 201 bp, Homo sapiens
ctcaggaccttagttcccaacttcaccttcaacttgggcttctcgggcaagttctatcatactggtgagcttatacccctactcctttggcatatcatagyttgacctgtcccttcactgtccacctccctgggcagacaagttgaagaaaagggtcaaggtttggggtcagactgctgtgaggagctagtggtgggcatg

SEQ ID NO: 259778 - DNA, 201 bp, Homo sapiens
atctgatattttgttggagcatgggacttctgaagacttccggggctttccgtcccttcctcacagaaagatcagagctgttgctggctgccagctgctcrgtcatgggctaggaactcctttcagagcaggcctgtttttagccttctaggatatttagcctcttgttgatgggagatttgttcctatcatttgcatata

SEQ ID NO: 259779 - DNA, 201 bp, Homo sapiens; identical to SEQ ID NO: 51877

SEQ ID NO: 259780 - DNA, 201 bp, Homo sapiens
ttggtgccagggacttgaaggtggtaagactcgctgtctaggccggagcaaaggccggaggtatccagatatggacactgaggtaagtaaagccaggggcwggggaatccctctccacttccaggatctgattctgtgtcccacttcttaccatttctgccttcattttctcctgtcagtcccgtcttttccttacggatt

SEQ ID NO: 259781 - DNA, 201 bp, Homo sapiens; identical to SEQ ID NO: 51878

SEQ ID NO: 259782 - DNA, 201 bp, Homo sapiens
ccaatacaggcttgaatcaaactctaacatttagacagctttcaacatgcattgacctatgttctctatcaactgccagtccaagtatgggggtacataaytgggggtagaaaggtgaaaaaattttaacaccctcagtaagagctttattgctataacttcagactcagtcctctataaatcccagtgtcctccatctac

SEQ ID NO: 259783 - DNA, 201 bp, Homo sapiens
gagctgggtgagtgagatactgagggctacagggcaggtggggctgtagagcagtgtaggggtgcaggccaggggagtggccatgccccagtcctggaccygggtataaactagaccccaccgatatgacgggcaccactgtggctgctgctgtcactgctgccgctgccactgtaaccggctcagtccctgggccccctc

SEQ ID NO: 259784 - DNA, 201 bp, Homo sapiens
gatctcttccccataatttctcccagccatgcttccttttctaccttcccctaatgggctacccttttcctatcctttgcgtttttctttatttggaggcktccccaccctctttaccctctactccccaaacctcaccaggtcctggtgagagtctatgccattcccaggagcatgggattcccacggacctggggtatg

SEQ ID NO: 259785 - DNA, 201 bp, Homo sapiens; identical to SEQ ID NO: 51874

SEQ ID NO: 259786 - DNA, 201 bp, Homo sapiens
tatttttttttgagctggagtctagctctgtcacccaggctggagtacagtggcacaatctcagctcactgcaatttccgcctcccacgttcaagtgattmtcctgcctcagcctcctgagtagctgggactacaggcgcccaccaccatgcccatctaatttttgtatttttagtagagacggggcttcaccatgttggc

SEQ ID NO: 259787 - DNA, 201 bp, Homo sapiens
ttagtgtatttatcttaaggctgatgaaaaccttgtggaagcccatgtttgcaggccctgcctcgccgggtgccccttttgcatccgtccaggcactcacwgacctggcggcctttgcagggtctctcaccactgcacttgccatcccaggccctggccccagcctgccctctgcaatgggggctcccaggagggggtcct

SEQ ID NO: 259788 - DNA, 201 bp, Homo sapiens
tgatggagccactaagctaggagagaaaaccactctcatcaaatgagatacactctccatccagggtaaagcttttcaaatccttttaataaaaatgcccytcccaaaatgactttgtgactatggttctgctttgatgagaaaattaaaaggaagcttttccattttttcttgcacaaagcagctgactctcccatctca

SEQ ID NO: 259789 - DNA, 201 bp, Homo sapiens
ttccctgaagcgtcttggggcccacagcaaccattcttgtttcagaggaggaaacagaggcttggaggcttggtaacataagcagagtcacacagccacgyagggacagccccatttgagactcctcggaggtgctctcctggctccctcagctcctgtcaacctgggaacagtcacaagggtccccgagactcatggcaa

SEQ ID NO: 259790 - DNA, 201 bp, Homo sapiens
tcttgggcccgttcctcagatctctgagccaccatttccccaactgtaaagtggagagagggtgggagtggaacagagcagtaaggcctgggaagggttcygagctggcgcaagagtggcggtggtagccgtggagatggtggcagtgataaagtgaggaagaacaggaggtaggggccctgtcggttcataacgaggcag

SEQ ID NO: 259791 - DNA, 201 bp, Homo sapiens; identical to SEQ ID NO: 51898

SEQ ID NO: 259792 - DNA, 201 bp, Homo sapiens; identical to SEQ ID NO: 51899

SEQ ID NO: 259793 - DNA, 201 bp, Homo sapiens
gtcctgtgcccgacccatccattccaggcccctagctcactttccagatggccctgggtgcaccccacatctccagctcccttggcccaggccccctcctmtgcatcagccctgctgtggtttcagccaccctcctcgtctgaggccaggtgtgactcctcttatgccctccactgcctcaggaagtctgaacgtcacctt

SEQ ID NO: 259794 - DNA, 201 bp, Homo sapiens
tgggggcctggcagcacatggggagtaactgatgggaagcaggggcacaggccgtgtgggacagcaaagccccctggtgcctcagcgtttcctccctcccygcacagacgacaagctggagcagcaacactccctgttcacccactacagggacccctgccgcctggggcctggtgaggagaagccgtgggccatcggtga

SEQ ID NO: 259795 - DNA, 201 bp, Homo sapiens
caaccattcttgtttcagaggaggaaacagaggcttggaggcttggtaacataagcagagtcacacagccacgtagggacagccccatttgagactcctcrgaggtgctctcctggctccctcagctcctgtcaacctgggaacagtcacaagggtccccgagactcatggcaaagaccaagctcctcaaaacaggcccct

SEQ ID NO: 259796 - DNA, 201 bp, Homo sapiens
agggaaatgtggctctgtgaaggaagggactggaatccctttttcctcacctacaatagagccttattctggacacctcttccgttgacagtctttgcccrccaggactcaaaggcacagcctttcgtgtgattgcttgtttttgcaagagaaacacaaggctctgcggctcccaaggccacgagccaggaatcaatgagg

SEQ ID NO: 259797 - DNA, 201 bp, Homo sapiens
cacccaccttctgagctccacggtgccctcggcacacaggggctgcaggggcaccggctgctggaagtcaaaggtcaggatctgccagggctcggagaggytgcggcatgggtactcccacagcgggtggggctcagcttccctgctctccctgaagtccagggcacgctgcgaacagaagggggcctgggggctgcagag

SEQ ID NO: 259798 - DNA, 201 bp, Homo sapiens
cgtggcggggatgagagccaccggtggagacacctaagccaccggggcaaggggtccaaaagtcttctaaggagggaatttctaagttgagtcttagaaagggtgagcgaggcgaggggcagaggatggggaatggcaggcagggacgggacacaagtgagaggcgggcgtccaggggagggggctgcagagacccgcagg

SEQ ID NO: 259799 - DNA, 201 bp, Homo sapiens
catcccctgggtggcctaccctgaactccacaaccacagcgtgcagcgaggctgcctggggcatcaccatggcacctggccccaggtgctggtccacagcrgtccgcacgtaccagaagtagaggttgtgccacggcagcaggctggtagtgaagaacggctcgcccaggaggagagagacctggtgaatgggcgagaagc

SEQ ID NO: 259800 - DNA, 201 bp, Homo sapiens
gcccaggccagagtggtgcaatggggcgatcttggctcactgcaacctccgccccccaggtccaagggattctcctgcctcagcctcctgaatagctgggrttacaggcatgcacacccagctaatttttttttttttttttgagacagagtctcactctgttgcctaggctggagtgcagtggcatgatcttggctcact

SEQ ID NO: 259801 - DNA, 201 bp, Homo sapiens
aatagtttctttcagcacccgcctctggcccagatccgtaagtccctagaagcaggacacatcctgtccctactcggaccccagaatccagccaggagccmggcttgtgagggtctgacctcatgggtgggtgggcactgccagtgtcctgtgctctcagggccacagtgactggcaggtggcagcactgaccccctcctc

SEQ ID NO: 259802 - DNA, 201 bp, Homo sapiens
gggccccattcagctgcccctggctagcagaagcccgtgtccacccacagaggccaccccctagaggctgcctgggccctgcctgcagcgaccactgtcaycccctcgtcccccccaggtactctgctggacacgaacggcctgtacgatgaggatgtgtgcacccccgacaacctgcagaagtaagcactgcgctcccag

SEQ ID NO: 259803 - DNA, 201 bp, Homo sapiens
gggtatttagcaagactgatttctctgccccctagaaatcctagaacaggaagagcccacgctctgcctagaaagctggagacagagatgccctaaaaacraacctctgacaaggaaggctgggggcctctgaagcagacaaaggacgagtccactagtaacacccatcaacggggcgccgcgctcttgcttcgagccagc

SEQ ID NO: 259804 - DNA, 201 bp, Homo sapiens
tgccatcccaggccctggccccagcctgccctctgcaatgggggctcccaggagggggtcctaagcctctggcccagtggtgctgaggccccaggggacargctggcaggaagcagacgggcatactgcttgtctcagggcaacagtgccagaaagggattccagatgtcacatccccctgctccagcgccctgccctccc

SEQ ID NO: 259805 - DNA, 201 bp, Homo sapiens
agcctgtgctgcccaagctgggaccctgtgagaggcctgcgatacaggagcaggtcggggggactatgcagagtgtggccctgcctaccttaatcatgtcrtccatgatgtgcacgtcgaagccttcgcagtcaccacaggggctccggatccgccacaggtcctgtgaggaaggagcagccccgtccacacccgcccgcc

SEQ ID NO: 259806 - DNA, 201 bp, Homo sapiens
gtggcagcactgaccccctcctcccccaggtgcaggtgggaagcacacctcaggaccaaagaatcgtcgggtacatcgcctgcacacacctgcatgccccrcaaggtagggttgccgcccacctgtgttttttctaggcatgggatcagtgcctggggcctagctggggtctggggcgaacttcatcatccagtctctgta

SEQ ID NO: 259807 - DNA, 201 bp, Homo sapiens
tgcgcaacctggcgcctgccatgagtggcagagcttgtcttcaagccctatgggagccagggcaggcagcaagggccctggcccccacttctggttcgtcsatggctcttgtgtggctctgccaggcccagagtttgggtcctctgctcttcattcacagcaagggatgctgaaattgaagcaactcctgacagatagatc

SEQ ID NO: 259808 - DNA, 201 bp, Homo sapiens
caaatacagacaccagctgcaataacacagccgaccattttcaaagtagagacagttccatcccagccaaaattcattcttgagcccagtaagatgtccayaaagaacacatctgagaggccaacagcagaaccaatttataattcacagcccgagactgcagtcacagcgatggttccttgcagctaatttgagccaatt

SEQ ID NO: 259809 - DNA, 201 bp, Homo sapiens
tcaccatgttggtcaggctggtctcaaactcctgaccttgtgatctgcctgcctcaacctcccaaaatgctgggattacaggtgtgagccactgtgcccarcacacccggctaatttttgtattcttagtcgagatggggtttcatcatgttggccaggctggtctcgaactcctgaactcaggtgatccacttgcctcgg

SEQ ID NO: 259810 - DNA, 201 bp, Homo sapiens; identical to SEQ ID NO: 51897

SEQ ID NO: 259811 - DNA, 201 bp, Homo sapiens
ctcacgcccaggggtactggccttgctaaatctctaggggtatttcccaaacctgttttcaggagctagccctgccccgagcccctgcctgctgggtacasgaaagggcctggaatttccccgggccaggccacaggtcgacccccatgaaagagctgctgggtacggcgcctgctgaaggcagcctggcagcttgcagca

SEQ ID NO: 259812 - DNA, 201 bp, Homo sapiens
ctgcgcctgagatgctcagagtgtcgacttttgttctctatccaaaagccgctcatggtgcttccacggttttctgaagcgtcatttggccagtggatgcrgcacagggctttctgccctgagaggcagcagctgtttcagatgtgggttctgtccctttagggtgagacatgaaaaagtggtggctttgcagggagggct

SEQ ID NO: 259813 - DNA, 201 bp, Homo sapiens
tccgtcttgggtaaaggaggtaagcaggaggtcggggcagaggggagacctgaagaggatgctgccacagtgggctcaggatggagccaggggtgtgcagrggccagcctaggacacaggtcagggagctctcatccaagacgggtgacaacgggaccacggcctataaagcagatgactcaccatgcagccagaaggcga

SEQ ID NO: 259814 - DNA, 201 bp, Homo sapiens
aagcagacgggcatactgcttgtctcagggcaacagtgccagaaagggattccagatgtcacatccccctgctccagcgccctgccctccctgtggatccmctagcaccatcatgggtttcctcactcagaagcgggatgacagcctgttccctgaagcgtcttggggcccacagcaaccattcttgtttcagaggaggaa

SEQ ID NO: 259815 - DNA, 201 bp, Homo sapiens
atttgagactcctcggaggtgctctcctggctccctcagctcctgtcaacctgggaacagtcacaagggtccccgagactcatggcaaagaccaagctccycaaaacaggcccctgttggctcagggcagaagcccattctggggaacgggtgggatcagttctgtccgagttcagaaagggaaagtgagtgctggccagg

SEQ ID NO: 259816 - DNA, 201 bp, Homo sapiens
gaacagtcacaagggtccccgagactcatggcaaagaccaagctcctcaaaacaggcccctgttggctcagggcagaagcccattctggggaacgggtggratcagttctgtccgagttcagaaagggaaagtgagtgctggccaggctggggcggacagaacacttcgacgggctccggagcccagattcagccaggaac

SEQ ID NO: 259817 - DNA, 201 bp, Homo sapiens; identical to SEQ ID NO: 51904

SEQ ID NO: 259818 - DNA, 201 bp, Homo sapiens
gcacaaagcagctgactctcccatctcaaaatgcctttaacaatcgaagcctcggctattaatgagagcagagcaggccacacggcatggcttctgaaacrcttaatttatatttttaaattattctgataagccacaattgtaaaatgacaacactcagccatttccatttcgtatgtcaaattatcgcattttttaaaa

SEQ ID NO: 259819 - DNA, 201 bp, Homo sapiens; identical to SEQ ID NO: 51905

SEQ ID NO: 259820 - DNA, 201 bp, Homo sapiens; identical to SEQ ID NO: 51894

SEQ ID NO: 259821 - DNA, 201 bp, Homo sapiens
gggggcctggcagcacatggggagtaactgatgggaagcaggggcacaggccgtgtgggacagcaaagccccctggtgcctcagcgtttcctccctccccrcacagacgacaagctggagcagcaacactccctgttcacccactacagggacccctgccgcctggggcctggtgaggagaagccgtgggccatcggtgag

SEQ ID NO: 259822 - DNA, 201 bp, Homo sapiens
caggagaagtcactcctcgggcgagggtggggtgagggccggagcaggacagggctgcccgtccctggacgcaagcagcacttgctgaccctgacctgctycagctcccaggagggttcaggaaaatggtgcatcggtgaccacaggaagtaagctcccatcttcctgagctgtgatccaacaagggagcctcagctgtag

SEQ ID NO: 259823 - DNA, 201 bp, Homo sapiens
tccctcaaagatcaccaggacctaccccacaagaccccactgctggggaagggccccattcagctgcccctggctagcagaagcccgtgtccacccacagmggccaccccctagaggctgcctgggccctgcctgcagcgaccactgtcaccccctcgtcccccccaggtactctgctggacacgaacggcctgtacgatg

SEQ ID NO: 259824 - DNA, 201 bp, Homo sapiens
ggtaagcaggaggtcggggcagaggggagacctgaagaggatgctgccacagtgggctcaggatggagccaggggtgtgcaggggccagcctaggacacasgtcagggagctctcatccaagacgggtgacaacgggaccacggcctataaagcagatgactcaccatgcagccagaaggcgacgaggccaggaggggcag

SEQ ID NO: 259825 - DNA, 201 bp, Homo sapiens
aggacgagtccactagtaacacccatcaacggggcgccgcgctcttgcttcgagccagctgccattctatcgctgtttcacttaagtgtcttaacaacccygagagggaagcattgcatgtctccacgtggtgtggtggaggaagctgagactcagagaggctggagaaccagcccaaggtcacatagccaggcagtgatt

SEQ ID NO: 259826 - DNA, 201 bp, Homo sapiens; identical to SEQ ID NO: 51895

SEQ ID NO: 259827 - DNA, 201 bp, Homo sapiens
cactgtcctcagagggaatgctgaagatcagggcgtgtgctgggggaggtgttctcaaggacacagaaaagcagcgacaaatgaagcacggggcacctgamtgggaccgagatcccacccaggggcagtggcctaagggatgggggcctggcagcacatggggagtaactgatgggaagcaggggcacaggccgtgtggga

SEQ ID NO: 259828 - DNA, 201 bp, Homo sapiens; identical to SEQ ID NO: 51896

SEQ ID NO: 259829 - DNA, 201 bp, Homo sapiens
ctcagagggaatgctgaagatcagggcgtgtgctgggggaggtgttctcaaggacacagaaaagcagcgacaaatgaagcacggggcacctgactgggacygagatcccacccaggggcagtggcctaagggatgggggcctggcagcacatggggagtaactgatgggaagcaggggcacaggccgtgtgggacagcaaa

SEQ ID NO: 259830 - DNA, 201 bp, Homo sapiens
gaggtgctctcctggctccctcagctcctgtcaacctgggaacagtcacaagggtccccgagactcatggcaaagaccaagctcctcaaaacaggcccctrttggctcagggcagaagcccattctggggaacgggtgggatcagttctgtccgagttcagaaagggaaagtgagtgctggccaggctggggcggacagaa

SEQ ID NO: 259831 - DNA, 201 bp, Homo sapiens
agtcacacagccacgtagggacagccccatttgagactcctcggaggtgctctcctggctccctcagctcctgtcaacctgggaacagtcacaagggtccycgagactcatggcaaagaccaagctcctcaaaacaggcccctgttggctcagggcagaagcccattctggggaacgggtgggatcagttctgtccgagtt

SEQ ID NO: 259832 - DNA, 201 bp, Homo sapiens; identical to SEQ ID NO: 51900

SEQ ID NO: 259833 - DNA, 201 bp, Homo sapiens; identical to SEQ ID NO: 51901

SEQ ID NO: 259834 - DNA, 201 bp, Homo sapiens
ggtcccacccacccgctcccacactgggaggagaccatggctccacacacagcccctgccaggcccacaggggcgggcatgggggcccacctgcctcctgyatgtgtggacagggtcctggagagtgaggagggccgcagggagtacctggcgtttcccaccagcaagagctcgggccagaaggggcggaaggagctgctg

SEQ ID NO: 259835 - DNA, 201 bp, Homo sapiens
gccccaggccactcttacaatgatacccatcactccctcagacccttagggccccaggtcctccaggccccatccctctgactgcaggaaggtcccagccyaccccagccccggggcctcactttggggatccccaggccgctccctgcaagatgcccttggaatctgaccaggctgtttctcccctctcccactcacccc

SEQ ID NO: 259836 - DNA, 201 bp, Homo sapiens; identical to SEQ ID NO: 51902

SEQ ID NO: 259837 - DNA, 201 bp, Homo sapiens; identical to SEQ ID NO: 51903

SEQ ID NO: 259838 - DNA, 201 bp, Homo sapiens
atcgtcgggtacatcgcctgcacacacctgcatgccccacaaggtagggttgccgcccacctgtgttttttctaggcatgggatcagtgcctggggcctarctggggtctggggcgaacttcatcatccagtctctgtacttctgccctgcagaggacagcgccatccggtgtgggcagctggacctgcttcaggactggc

SEQ ID NO: 259839 - DNA, 201 bp, Homo sapiens
gtttttgcaagagaaacacaaggctctgcggctcccaaggccacgagccaggaatcaatgaggcccagcaaataatcaagtggatcttggtgagatcacayggcagatgaggagggagaagcggggcgggagggagcaggacctcgtcactcctccggccagtgggttcttgtcgtgcagggcccagtctgaggcctccct

SEQ ID NO: 259840 - DNA, 201 bp, Homo sapiens
gtcattacacattatcttctactgcgcctgagatgctcagagtgtcgacttttgttctctatccaaaagccgctcatggtgcttccacggttttctgaagygtcatttggccagtggatgcggcacagggctttctgccctgagaggcagcagctgtttcagatgtgggttctgtccctttagggtgagacatgaaaaagt

SEQ ID NO: 259841 - DNA, 201 bp, Homo sapiens
cgcctgctgaaggcagcctggcagcttgcagcaccaatcaggcaaatacagacaccagctgcaataacacagccgaccattttcaaagtagagacagttcyatcccagccaaaattcattcttgagcccagtaagatgtccataaagaacacatctgagaggccaacagcagaaccaatttataattcacagcccgagact

SEQ ID NO: 259842 - DNA, 201 bp, Homo sapiens
ccaggccagctgtgctcaccacgggggtgagaactccaagggcaagcagcagcccctccctgccccccagccctctctgcacccaccttctgagctccacrgtgccctcggcacacaggggctgcaggggcaccggctgctggaagtcaaaggtcaggatctgccagggctcggagaggctgcggcatgggtactcccaca

SEQ ID NO: 259843 - DNA, 201 bp, Homo sapiens
caggggatgggaggacttgccagggaggatgcccggggccctgggcctggctggtcgtgtgaagtggcgccaggtctaagacagggcactggaagggccasgctaagggtggggaagggcaggtggatttggaaagcatagaagtaaaaatgcctggcaccccactgtgggatacccaccactctcggccatctgccttag

SEQ ID NO: 259844 - DNA, 201 bp, Homo sapiens; identical to SEQ ID NO: 51906

SEQ ID NO: 259845 - DNA, 201 bp, Homo sapiens
aaggtccatcacgttgtagcatgtatctgaatttattcttttataatattttttattttttggagacagaatctcgctctgtcacccaggctggagtgcartggcgtgatctcggctcaccgcaacttccgcgtcccgggttcaagccattctcctgtctcagcctccggagtagctgggactacaggtgcctgccgccat

SEQ ID NO: 259846 - DNA, 201 bp, Homo sapiens
aggccctaagaataccattttcttgctctaagttgctcttacgggaaagaagtgataatattcttcctaaacgccatcattcgtgcatccttcccacctayatgtgtcaccggatcattctccgcctgggcggggccgtcctgtgcactgcagaatgctgagcagtgtccttggcttcgaccgaccacatgccaggagcac

SEQ ID NO: 259847 - DNA, 201 bp, Homo sapiens
cgcacgccagaggacaggtccggctgcctgccgcggagtcgtcacggcgtgtcgcgtctgagcgcttctccaaagcacccaagtggcacccggggtgacakttacatcatcttgagtacagttctctcaaggaaaaagcaagcccagcatcttctgccatggcaaccctggcttggagcctccataagagagaaggcccta

SEQ ID NO: 259848 - DNA, 201 bp, Homo sapiens
gtgggaaggaagtgggagggcaggaagccctgggctgcaggggcggggccgtaggtgggaaggaagtgggagggcaggaagccctgggctgcaggggcggmgccgtaggtgggaaggaagtgggagggcaggaagccctgggctgcaggggcggggccgtaggtgggaaggaagtgggagggcaggaagccctgggctgca

SEQ ID NO: 259849 - DNA, 201 bp, Homo sapiens
aggtaggggtggaaggagggcccttacgcttctctttctttggcttctgcaattctgtgttctcatcacattcatgccacaagtattttctgtgcttgacbgtacctgagttggggtttgagggaaggagcagaccccttgccccattgacaggagaaaacagaggctcagagagggaagtcagtagcctaaggttacagt

SEQ ID NO: 259850 - DNA, 201 bp, Homo sapiens
gctgttcccacagcccggagtctcctccctggctgagggaaatcttgccggctcacatggccgtgatccccatcatttcctgcagaaagcttgcccagctytccgacacggggaccttctgcccctcctgagccctgagtcccctccatcttaactgggaggtcacctgtttgcgtggtgtctgctcagcttgcaggcaag

SEQ ID NO: 259851 - DNA, 201 bp, Homo sapiens
tccctcccttcttctcttctttccttctagttactgagccatgcatgtgttgcatgcagcaaggatgaataaaataaaataaacctacagcaatcattccrgttactatggccatataacaaattattctaaaactcagtggcttcagacaaggatcgtatctattttactcaaaaacctaccatctgcacaggccttggt

SEQ ID NO: 259852 - DNA, 201 bp, Homo sapiens
agtgagactctgtctcaataaaaaagaagacagaactaaacaactttgatctgcaccagccccaggagaatcacttttatggatctttctagtcttgtttmtaataggtttgtgtgtgtatttatatatttttatgtaaaactgggaccatcctctagcttttctattcttgttcatctttaaatagactcaagaatacac

SEQ ID NO: 259853 - DNA, 201 bp, Homo sapiens
agagcctccagaaggaacctgactctaccaataccttgatttattccagtgagacatgttttggactcttgacctgccgaactggaggaggatgcacttaygtggttttaagccactaagtctgtggtaatgcgtacagcagccatgggaatctcgtgcagcgggcattttaaatttaaatttaaatttttttgagacaga

SEQ ID NO: 259854 - DNA, 201 bp, Homo sapiens
tccagtgagacatgttttggactcttgacctgccgaactggaggaggatgcacttacgtggttttaagccactaagtctgtggtaatgcgtacagcagccwtgggaatctcgtgcagcgggcattttaaatttaaatttaaatttttttgagacagagtctcgctctgttgcccaggctggcaccatttcgactcactgca

SEQ ID NO: 259855 - DNA, 201 bp, Homo sapiens
ccaaagtgctgggattataggtgtgagccagtgcacccagccctttttgcttttttagagacgaggtcttactgtgttgccaaggctggagtgcagtgccrtcacagctcactacaacctcgacctgtgattctcctgcctcagcctcctgagtatctgggactacaggtgcatgccaccacacttggctaattatttgta

SEQ ID NO: 259856 - DNA, 201 bp, Homo sapiens
cacagaccctgtttccggcacaggccacattcacaggttgtgggagcacaggagtgtttctgctggtgcatcaggctggggtctgtcctcaccgggatgtytcctcctccacccctctcttccagaggaggagcgagtggacattctaatcaacaacgcgggtgtgatgcggtgcccccactggaccaccgaggacggctt

SEQ ID NO: 259857 - DNA, 201 bp, Homo sapiens
atgtttgccaggctggactcgaactcctgacctcaagtgatccgcccccgcccccccccacccccaaaactttggcctcccaaagtgctgggattacaggygcaagccccctcacctggccgggaatctcatgcagtgagcatttataaaataatgactgtcacttgctgaaggcgttccacacgccagacactgggtgga

SEQ ID NO: 259858 - DNA, 201 bp, Homo sapiens
ccctgtttctactaaaaaaatacaaaaaattagctgggcatggtggtgggcgcctgtagtcccagctactcgggaggctgaggcaggagaatggtgtgaasccgggaggcggagcttgcagtgagccgagatcatgccactgccctccagcctgggtgacagagcaagattccgtctcaaaaaaaaaaaaaaagttccgac

SEQ ID NO: 259859 - DNA, 201 bp, Homo sapiens
tgcagtgagcatttataaaataatgactgtcacttgctgaaggcgttccacacgccagacactgggtggagccacttatggagaacatgacagaggtcccktggtgtgatgtgatgatgtctgtgtttcagttggggtatgtgagtgagctcagacaaggttgcctgagatcattcagtcaggggcacgtggggtgagagt

SEQ ID NO: 259860 - DNA, 201 bp, Homo sapiens
tctcgtccctggcccatgttgctgggcacatagactttgacgacttgaactggcagacgaggaagtataacaccaaagccgcctactgccagagcaagctygccatcgtcctcttcaccaaggagctgagccggcggctgcaaggtacgggggcgctaggctcggcctccctcttgctttactctgagcctagagcggcct

SEQ ID NO: 259861 - DNA, 201 bp, Homo sapiens
acaatgtactgcaaacccagtggcttacaccctcagacgtgcattccctcacggttccggaagccggcagtctgaatcgcggtgtccctgtggctgtgacytgtgagacgggccataatcctcccagcctcttccacttccagcgggggcggcccaccctcaccttggagctgtgcctctccggtctttgcctctgtccac

SEQ ID NO: 259862 - DNA, 201 bp, Homo sapiens
tgatggcagggaggtttttagatatcaacaccctgatagttctcattttaaccacctgtaagtgcacatacaagtcaacggcactggccgggcgcggtggstcatgcctgtattcccagcactttgggaggccaaatcacaaggtcaggagatcgagaccatcctggctaacacggtgaaaccccgtctctactaaaaata

SEQ ID NO: 259863 - DNA, 201 bp, Homo sapiens
tgggttggggtgcagagggagcctggggtggacaaagggtggtggctatgggggcgctggtgacaagttgtcactctctgagctcagagtcaagacatgakctgggttcacccacttcttgctatgtgagctacacaaggttgcttggcctctgcccagtttccttatgtttacagtgggaatgacaactatcccgccttt

SEQ ID NO: 259864 - DNA, 201 bp, Homo sapiens
tattctggatatttcatgtaaatgacctcataaactatgtggctttttctgaccggtttctctcacttaaattacattcctgtgtgtcttttgaagaaatwattaggacagagtaaagcatatgcatgcaaatgtcttatcaccgcgcccagcaggcaggaatgtccataaaagcgagtcctggcatctggtccctttctt

SEQ ID NO: 259865 - DNA, 201 bp, Homo sapiens
ggcagggaggtttttagatatcaacaccctgatagttctcattttaaccacctgtaagtgcacatacaagtcaacggcactggccgggcgcggtggctcaygcctgtattcccagcactttgggaggccaaatcacaaggtcaggagatcgagaccatcctggctaacacggtgaaaccccgtctctactaaaaatacaaa

SEQ ID NO: 259866 - DNA, 201 bp, Homo sapiens
ggcatctggtccctttcttctttcctcagggctgtgtctggggcgtgtgccagcgcagagtggtgagtccttccccagaccccttccctcctgcgggatcyaccagcgcgggagcagcggggtccaggcggggtctgcggggaggctgacccagccctgctcctcttccaggaccgctccccaagccctccctccaggctc

SEQ ID NO: 259867 - DNA, 201 bp, Homo sapiens
agcaaggatgaataaaataaaataaacctacagcaatcattccggttactatggccatataacaaattattctaaaactcagtggcttcagacaaggatcrtatctattttactcaaaaacctaccatctgcacaggccttggtggaggcagcttatctgtgtgccctttggtgatggctggggctgtcaagaagctgggg

SEQ ID NO: 259868 - DNA, 201 bp, Homo sapiens
actacaggtgcatgccaccacacttggctaattatttgtagaggtggcaacataacatttgctatgttgcccaggctggtctcaaactcctgggctcaagkgacccttccgccatggcctcccaaattgttgggattacaggcatgagccaccgtacctggccttagttttctttccgatgccacaccaaatggctagagg

SEQ ID NO: 259869 - DNA, 201 bp, Homo sapiens
ctttcttctttcctcagggctgtgtctggggcgtgtgccagcgcagagtggtgagtccttccccagaccccttccctcctgcgggatccaccagcgcgggrgcagcggggtccaggcggggtctgcggggaggctgacccagccctgctcctcttccaggaccgctccccaagccctccctccaggctctgcccagctccc

SEQ ID NO: 259870 - DNA, 201 bp, Homo sapiens; identical to SEQ ID NO: 51915

SEQ ID NO: 259871 - DNA, 201 bp, Homo sapiens
tcccagcaactcggggggctgaggtgggagaatggcttgagcctgggaggcagaggttgcagtgagctgagatcacaccactgcactctagctcgggtgaygaagcctgaccttgtctcaaaaaatacagggatgaatatgtcaattaccctgatttgatcatagcacgttgtatacatgtactgcaatattgctgtccac

SEQ ID NO: 259872 - DNA, 201 bp, Homo sapiens
caggactgaccgtgccgcttctcaccctcagggactatgtcaccggtggggcttgccccagcaaggccaccatccctgggaagacggtcatcgtgacgggygccaacacaggcatcgggaagcagaccgccttggaactggccaggagaggtaaaatctcccctgctttggctctcagagagatatctgtacatccatgct

SEQ ID NO: 259873 - DNA, 201 bp, Homo sapiens
cgcaagataagaccacttcactaagattccagagcaagagggacgatggggtttgagtgcaggaagcagcctggtgcccggaagccccacagctgggtgtrggctgccacagcctcccaggtgaggctggacccctccctcagtcttctctttctttcttccccaggctctggtgtgactgtcaacgccctgcaccccggc

SEQ ID NO: 259874 - DNA, 201 bp, Homo sapiens; identical to SEQ ID NO: 51913

SEQ ID NO: 259875 - DNA, 201 bp, Homo sapiens; identical to SEQ ID NO: 51914

SEQ ID NO: 259876 - DNA, 201 bp, Homo sapiens
gtgcccagtaataggtgcttagaaaatacttaccgaatgagtaagtatacagttgtaccaggcaggtgatgttattatcctttttttttttttttttttamaaggagtaaactgagtcacagagaagtgatgtgacttggccaggatcatgcagctggtcggggtggagccaggctttgaacctgtctgtcctgctccaga

SEQ ID NO: 259877 - DNA, 201 bp, Homo sapiens
cagtgcccagtaataggtgcttagaaaatacttaccgaatgagtaagtatacagttgtaccaggcaggtgatgttattatcctttttttttttttttttttacaaggagtaaactgagtcacagagaagtgatgtgacttggccaggatcatgcagctggtcggggtggagccaggctttgaacctgtctgtcctgctcca

SEQ ID NO: 259878 - DNA, 201 bp, Homo sapiens
tgtgcccttggggatcaagaaagagccggcactgttgtcgggtaggtgagaggcactacggtgagatcacaaagaacagtgagagggcaatgcctcagagwctcagaggtggatgaacatttattaagcacctgctgtgtaccaggtacagcactgtcaccttcatgcacactgtcccaggcaatcccacccagggcgcct

SEQ ID NO: 259879 - DNA, 201 bp, Homo sapiens
cacattcgttggttcattcattcattcatactgagcccctgctgtgcccttggggatcaagaaagagccggcactgttgtcgggtaggtgagaggcactayggtgagatcacaaagaacagtgagagggcaatgcctcagagtctcagaggtggatgaacatttattaagcacctgctgtgtaccaggtacagcactgtca

SEQ ID NO: 259880 - DNA, 201 bp, Homo sapiens
cacttcggcacagaccctgtttccggcacaggccacattcacaggttgtgggagcacaggagtgtttctgctggtgcatcaggctggggtctgtcctcacsgggatgtctcctcctccacccctctcttccagaggaggagcgagtggacattctaatcaacaacgcgggtgtgatgcggtgcccccactggaccaccgag

SEQ ID NO: 259881 - DNA, 201 bp, Homo sapiens
aatggcatgatctcagctcactgcaacctgtgtctcccatgttcaagcgattctcatgcctcagcctcccgagtagctgggattacaggcgcccaccaccacacctggctaattaaagacagggtatcaccatgttggccaggcttatcttgaactcctgacctcaggtgatccacccgtcttggcctcccaaagtgctgg

SEQ ID NO: 259882 - DNA, 201 bp, Homo sapiens
caatggcatgatctcagctcactgcaacctgtgtctcccatgttcaagcgattctcatgcctcagcctcccgagtagctgggattacaggcgcccaccaccacacctggctaattaaagacagggtatcaccatgttggccaggcttatcttgaactcctgacctcaggtgatccacccgtcttggcctcccaaagtgctg

SEQ ID NO: 259883 - DNA, 201 bp, Homo sapiens
ctgtttctactaaaaaaatacaaaaaattagctgggcatggtggtgggcgcctgtagtcccagctactcgggaggctgaggcaggagaatggtgtgaaccygggaggcggagcttgcagtgagccgagatcatgccactgccctccagcctgggtgacagagcaagattccgtctcaaaaaaaaaaaaaaagttccgactt

SEQ ID NO: 259884 - DNA, 201 bp, Homo sapiens
ttcccgtcttctgatttcacttcttgcctgcctccgactgcaaatcctggtttgacgtcacttcctgtcttctgattttacttcctgtatgacctcacttyctgtcttctacaaccacttcctgtcttcttacttcacttcctgtcttctgactttacttcctgtatgacttcacttcttgtcttctaccaccacttcctg

SEQ ID NO: 259885 - DNA, 201 bp, Homo sapiens
gtttcttttaacaatcccacaatgtcaccccttaccacaaaatcttccttcagcttaatcgctcccactttaggttcccacgccgcccctaatcctgctcraagcagccttgagaaacatcacccattatctctccataccacccccaaaaatttttgctgtcccaacactttacccctatttcattttatttttcttatt

SEQ ID NO: 259886 - DNA, 201 bp, Homo sapiens
tgggcatggtggcgcatgcctgtggccccagctacttgggaggctgagcaagaagactgcttgagcctgggaggttgaggctgcagtgagcagtgattgcrccactgtactccagcccaggtgtcagagggagaccctgtctcaaagaaatataaaaaataggccaagtagactgagtgtggtggctcacgcctgcagtcc

SEQ ID NO: 259887 - DNA, 201 bp, Homo sapiens
acatccacaatgaaaaaaaccagaatttcaaataaaggcagaatcagccagtgcctgtgtcaagtcataccagagtctgtgccaaaacgaaaaacaggcamccctttatctgtgttttaatgcacttaaaaaaattagcgatggggtcttgctacactgcccaggccggagtgcagtggctgttcataggagcagtcatag

SEQ ID NO: 259888 - DNA, 201 bp, Homo sapiens
ctttccttattccctttagtttttcaattcatacaaaactgtatccaggccatcaccaataattctaaatgacaaatgtttcttttaacaatcccacaatrtcaccccttaccacaaaatcttccttcagcttaatcgctcccactttaggttcccacgccgcccctaatcctgctcaaagcagccttgagaaacatcacc

SEQ ID NO: 259889 - DNA, 201 bp, Homo sapiens
ataccagagtctgtgccaaaacgaaaaacaggcaaccctttatctgtgttttaatgcacttaaaaaaattagcgatggggtcttgctacactgcccaggcyggagtgcagtggctgttcataggagcagtcatagctcactgcagcctggagctccttgccttgagcaatcctcctgcctcagcctcatgagtagcaggga

SEQ ID NO: 259890 - DNA, 201 bp, Homo sapiens
cccataccgccactgttaactcttaaaataaataaataatctttgctggcaaggctatgctgaacctccttaggcactttctaattagatgtcctgagtcstcccaattcttagacctttaatacctgtttttctcctttccttattccctttagtttttcaattcatacaaaactgtatccaggccatcaccaataattc

SEQ ID NO: 259891 - DNA, 201 bp, Homo sapiens
atccccataccgccactgttaactcttaaaataaataaataatctttgctggcaaggctatgctgaacctccttaggcactttctaattagatgtcctgagtcgtcccaattcttagacctttaatacctgtttttctcctttccttattccctttagtttttcaattcatacaaaactgtatccaggccatcaccaataa

SEQ ID NO: 259892 - DNA, 201 bp, Homo sapiens
tttttattaggccccagtctcattccagacaccagaccaacttagattgtgccccaaaaaacttgtcatccctactatcttctgtctagtcatactcctawtcaccgttctcaactactcacacatgccctgctcttgtttacactgccagtttacactgtttctccaagccagcacagctggtatctcctggtactatcc

SEQ ID NO: 259893 - DNA, 201 bp, Homo sapiens
ccgtacctggccttagttttctttccgatgccacaccaaatggctagagggtgtgtttgggatgacctgagtctggtaggcaacttccagtggaccccacrgtgcgaccacctccctttgagtgtgggggagatgtagcgactggcttctagcagtaggatagggcagaagtgacagtaggttagtcttgtggttaggtta

SEQ ID NO: 259894 - DNA, 201 bp, Homo sapiens
gaagtgacagtaggttagtcttgtggttaggttacaaaactgacctctgtgatggtagcgtccctcgtcagccctcttgtcttgccctctcgctggctggyggtgatggagccggctgccatggtgagcggccctgtggagaagccagggaggaatggagacaatctggagaaacagaatcacaccaacaaccacgtgcgt

SEQ ID NO: 259895 - DNA, 201 bp, Homo sapiens
aaaaaatcgctttactttttggtctcctgcaatagtctgggaaccgcagatggacaatgtcttatggtttttttgttttttgttgttgtttttgagacggmgtctcactctcctcactctgtgatctgtgatttcggctcactctgcgatctcagctcactgcaatctccggctcctgagtagctgggactacaggtgtgt

SEQ ID NO: 259896 - DNA, 201 bp, Homo sapiens
ttactttttggtctcctgcaatagtctgggaaccgcagatggacaatgtcttatggtttttttgttttttgttgttgtttttgagacggagtctcactctsctcactctgtgatctgtgatttcggctcactctgcgatctcagctcactgcaatctccggctcctgagtagctgggactacaggtgtgtgccaccatgcc

SEQ ID NO: 259897 - DNA, 201 bp, Homo sapiens
tgcagtggctgttcataggagcagtcatagctcactgcagcctggagctccttgccttgagcaatcctcctgcctcagcctcatgagtagcagggactacrgtcacgggccaccgtgcttggctcgggattctttttaaaactttgttttggagtaatttttagactgacagaaaagttccaaagataatattaatggaaa

SEQ ID NO: 259898 - DNA, 201 bp, Homo sapiens
aatgaaaccacgcctgcggtgccggggctcccaccggtaacctcccgtttttggcctcggggctccggcaggaaggagtcccaaggcttagatggaggtgyggagggcgtgtgagtgtcctggagctgctgtaacaatgtactgcaaacccagtggcttacaccctcagacgtgcattccctcacggttccggaagccggc

SEQ ID NO: 259899 - DNA, 201 bp, Homo sapiens
tggctgttcataggagcagtcatagctcactgcagcctggagctccttgccttgagcaatcctcctgcctcagcctcatgagtagcagggactacggtcaygggccaccgtgcttggctcgggattctttttaaaactttgttttggagtaatttttagactgacagaaaagttccaaagataatattaatggaaatattt

SEQ ID NO: 259900 - DNA, 201 bp, Homo sapiens
aactatgtggctttttctgaccggtttctctcacttaaattacattcctgtgtgtcttttgaagaaattattaggacagagtaaagcatatgcatgcaaaygtcttatcaccgcgcccagcaggcaggaatgtccataaaagcgagtcctggcatctggtccctttcttctttcctcagggctgtgtctggggcgtgtgcc

SEQ ID NO: 259901 - DNA, 201 bp, Homo sapiens
cgcctgtcatcccggcactttgggagacagaagttttgggaagatcagtttgtgagatgacactctgacaaagctggaagctgtggctcttcccagctccmgactagaaagaacacaaagcaaagagccccaggaagcaggtacccacagccttgtttatcagggagtttgagatcagcctgggcaacatagcaagacctc

SEQ ID NO: 259902 - DNA, 201 bp, Homo sapiens
gcctcagcctcccaaagtgctgggattacaggcatgagccaccatgcccagctgctttgtttcttttctagtctggcactgaaagggccaaagctttcttsttcagagtcaatgtgccccgctcagtaaacgggtactcaggaaatgaacaaggaatgggggagttgtgggacctcatttatttagcagacgtgatctcag

SEQ ID NO: 259903 - DNA, 201 bp, Homo sapiens
aatgtctcaggtcccattcctcacatccactgaggaagtcaatgggcaatgtctaacacgaacgagcccaccgtgtctaacacaacacaaacgagtccacygtgtctaacacaacacgaacgagccgtgtctaacacaacacgaacaagcccaccgcgtctaacacgaacgagcccaccgcgtctaacacgaacgagccca

SEQ ID NO: 259904 - DNA, 201 bp, Homo sapiens
acaattgtatgtggcaatacaagcttacagcacagtataagcttaagctatttacttactccagcgcttgctaggcaacaggcactctgcaaattactgtrtactgtctcattcagtcatccccattttaacagaacaaggcagtgaggctcagatacagagggagatttgtctccagggccaccaggcccctgaaggcag

SEQ ID NO: 259905 - DNA, 201 bp, Homo sapiens
tgctaatttttgtatttttagtagagacggggtttcaccacgttggccaggctggtctggaactcctgacctcaggtgattcacctgcctcagcctcccaragtgctgggattacaggcgtgggccactgcgcccggctgactttgttttgtttgtttgttttgagacagatggggtctcgctctgttgcccaggctggag

SEQ ID NO: 259906 - DNA, 201 bp, Homo sapiens
atgcctgctaccataccctgctaatttttgtatttttagtagagacggggtttcaccacgttggccaggctggtctggaactcctgacctcaggtgattcwcctgcctcagcctcccaaagtgctgggattacaggcgtgggccactgcgcccggctgactttgttttgtttgtttgttttgagacagatggggtctcgct

SEQ ID NO: 259907 - DNA, 201 bp, Homo sapiens
ctggaggtgggctctttcacctgctcctgcctctcctcattcctccaggtcctgcccgccagtactacaccaagggcaacctggtccggatatgcctcggrgctgtgatcctaataatcctggcggggtttctggcagaggactggcacagccggaggaagcgcctgcggcacaggggcagggctgtgcagaggccgcttc

SEQ ID NO: 259908 - DNA, 201 bp, Homo sapiens
gaatatcagcgtatggggttcagaattgggcattaagatcaggtgggaaggttgagattttaaaaagggtcagagaaagagagattccatctcttccccascccttataactgtcctctcttttgcaatgcatcagataacgaggcagcatctgtgtctggggaggagttgtctcagagccctgtgagagcacaggaggga

SEQ ID NO: 259909 - DNA, 201 bp, Homo sapiens
ggaggctgaggcaggagaatcgcttgaacccgggaggcggaggttgcggtgagccaagatcgcgccactgcactccagcctcggcgacagagtgagactcygtctcaaaaaaccaaaaaacaaaaaacagtcaatggcattaaatataaatacatttacagtgttgtgtaaccatcaccactatggatcccccagactttg

SEQ ID NO: 259910 - DNA, 201 bp, Homo sapiens
aaggcagaatatcagcgtatggggttcagaattgggcattaagatcaggtgggaaggttgagattttaaaaagggtcagagaaagagagattccatctctyccccaccccttataactgtcctctcttttgcaatgcatcagataacgaggcagcatctgtgtctggggaggagttgtctcagagccctgtgagagcacag

SEQ ID NO: 259911 - DNA, 201 bp, Homo sapiens
atggcgtgaacccgggaggtggagcttgcagtgagccgagatggcgccactgcactccagcctgggtgacagagtgagactccatctcaaaaaaaaaatamaaaacaatgaggcaggcgtgatggtgtgcacttgtagtcccaactacttgggaggtggaggtgggaggattgcttgagcctgggaggttgaggctgcagt

SEQ ID NO: 259912 - DNA, 201 bp, Homo sapiens
ctggctggacgctaccgctgctcctaccagaacggaagcctctggtccctgcccagcgaccagctggagctcgttgccacgggtaaaggaagggggatcgragcctgggactgcgtggtcctccgttcaggacacaaatacgggggacattgagggcagggattagggtgaggcaaacgaggcactggcctagcgggtggt

SEQ ID NO: 259913 - DNA, 201 bp, Homo sapiens
gcacatagactttgacgacttgaactggcagacgaggaagtataacaccaaagccgcctactgccagagcaagctcgccatcgtcctcttcaccaaggagytgagccggcggctgcaaggtacgggggcgctaggctcggcctccctcttgctttactctgagcctagagcggcctttccatgatcctaggctgatgggag

SEQ ID NO: 259914 - DNA, 201 bp, Homo sapiens
gaggttgaggctgcagtgagccatgattgcaccactgctgtcaaacctgggtgacagagtgagaccctgcctcaaaagaaaataaaaataaaaaacaaatrtaaactttaggggaacaataacaacaacaaaaataaaagaagcaagttatattacccgaaaattctcggctgcgaatatctgtgggtataaacatgtgat

SEQ ID NO: 259915 - DNA, 201 bp, Homo sapiens
actttagagcagagttttggcaaactatgagttaggggccaagtccagttgctgcctttttttgtacagcctgcaagcaacgactttatttatttatttattactactgttattttgagagggagtctcactctgtcggccaggctgagtgcaatggcgcgatctcggctcactgtaacctctgcctcctgggttcaagcg

SEQ ID NO: 259916 - DNA, 201 bp, Homo sapiens
cagcactttgggaggctgaggcgggatcgcttgagcctaagagttcgagaccagcctgggcaacatggtgaaaccttgtctcatatacaaaaaatataaamaattagctgggtgtggtaccacatgcctactctcaggtactcaggaggctgaggttggggatcacctgagcccggggaggttgaggctgcagtgagccat

SEQ ID NO: 259917 - DNA, 201 bp, Homo sapiens
aactttagagcagagttttggcaaactatgagttaggggccaagtccagttgctgcctttttttgtacagcctgcaagcaacgactttatttatttatttattactactgttattttgagagggagtctcactctgtcggccaggctgagtgcaatggcgcgatctcggctcactgtaacctctgcctcctgggttcaagc

SEQ ID NO: 259918 - DNA, 201 bp, Homo sapiens
aagccagcctcctgcctcagcctcccaaagtgctgggattataggcatgaggcaccgtgcccggcccatgcttttcttaaatgctgtggaattgtgcctcmccatgtgtgtgtgtgttcggagtaggcacagtgacagggggcgggaatatggtttcatttcacacttagcctttgtttggttcccagagacttctaggag

SEQ ID NO: 259919 - DNA, 201 bp, Homo sapiens
ttgtggcttatttgtaatcccagtactttgggaggccgcggggtggatcacctgaggtcagaaattcaagactagcttggctaacatggtgaaaccgctgwctctactaaaaataaaaaaataaaaaattagctagttgtggtaggtgcctgtaatcccagctactcgggaggctgaggcaggagaattgcttgaacccag

SEQ ID NO: 259920 - DNA, 201 bp, Homo sapiens
tgggtgcagcaaaccaccatggcacacgtttacctatgtaacaaacctgcacgtcctgcacatggattctggaactgaaattttaattgaaaaaaaaaaaggtttattaatgcatctcacacgaagagaaataacaaagaccaaataatacccacactctcattatgccaccgagagctgagcataaactagttttttcca

SEQ ID NO: 259921 - DNA, 201 bp, Homo sapiens
gccttgagcaatcctcctgcctcagcctcatgagtagcagggactacggtcacgggccaccgtgcttggctcgggattctttttaaaactttgttttggartaatttttagactgacagaaaagttccaaagataatattaatggaaatatttcacccaggatcccctcatgttaacatcttacatttgttacaaccaaaa

SEQ ID NO: 259922 - DNA, 201 bp, Homo sapiens
atgggtgcagcaaaccaccatggcacacgtttacctatgtaacaaacctgcacgtcctgcacatggattctggaactgaaattttaattgaaaaaaaaaaaggtttattaatgcatctcacacgaagagaaataacaaagaccaaataatacccacactctcattatgccaccgagagctgagcataaactagttttttcc

SEQ ID NO: 259923 - DNA, 201 bp, Homo sapiens
tctactaaagatacaaaaaattaacccggtgtggtggtggatgcctgtagtccagctacttgggaggctgaggcaggagaattgtttgaacctgggaggcrgaggttgcagtgagccaagatcgcaccattgcactccagcctgggtgacaagagtgaaactccatctccccccccaaaaaaaaaaaaataggctgggggc

SEQ ID NO: 259924 - DNA, 201 bp, Homo sapiens
ggagacaatctggagaaacagaatcacaccaacaaccacgtgcgtgagcttgctgtgtgctcttgcttgggagcaagttacaggttcagcccaagaggagyggaccactccagggtgtaaataccaggagggggaattggaagactaccctaagcatgccgaccggagactgtgtgtgtgtagtaggtatttcttactggg

SEQ ID NO: 259925 - DNA, 201 bp, Homo sapiens
ccgctcctggctgtaacatgttttcaatatcccccctcttcggtggcacaggggctggccccatatacatgtgcgatggcaactgacagggtccctgatamaccggagtgctccagaaacaccccattgcgtgggacggaggatgttaggtggccctcctagcgtttgagtttgataaatgagcaaaggaagtggttttta

SEQ ID NO: 259926 - DNA, 201 bp, Homo sapiens
gtcaaaggacaaactaaagccggcagcgtctttctggcttcctagtcaggctgttcggtagcggagtgtcaccctgatttccagccccgcagcacacacastgagagcctgcctggcgtgattcagaggcaacgtatttcccaaggtggctgtgaaggaaccagggggataaacacagcccgtgaaccgcacgccagagga

SEQ ID NO: 259927 - DNA, 201 bp, Homo sapiens
tctgtgacttttttagcaaatcaagtaccagcttcttggtgttttcctaagatcaacagccaggaataaagacagcagtggatttaaaaatagtgaagatsgtccattttatgtggtgtgtattctaccacactggggcaggccaggtgcagcggttcacgcctgtcatcccggcactttgggagacagaagttttgggaa

SEQ ID NO: 259928 - DNA, 201 bp, Homo sapiens
ttcacaaacatctcagctgaatacggtgtaccagactacggcctgcactttaagaatatcatacgctaggctggaggctgggcgtgtctaacattccctgygtctcagagtgaagcaccaaggcaggagaaacatgctggaaagagccgaggttgataaggatgagatttgcggggttgagggcagagtgagggctattat

SEQ ID NO: 259929 - DNA, 201 bp, Homo sapiens
cggcctttccatgatcctaggctgatgggaggccaaacggtggatccagaacagagtcagcaaaagtagagcatgtggaccacgctgcccgcttctggtgyctgaagcagacatcactaatcgatcgttcttctgaggattgtctgttcatcccaggtggtctagtctgcctggatcagatgtccttccctgctgctgttg

SEQ ID NO: 259930 - DNA, 201 bp, Homo sapiens; identical to SEQ ID NO: 51916

SEQ ID NO: 259931 - DNA, 201 bp, Homo sapiens
ctgcagggagctgtgatcacgccactgcactccagcctgggtgacagagtgagaccctgtatcaaaaaacaaacaaaaaactaaccatagacacaactatrttatatcaagtaaactccaggctatttgaatttcaccagtctttccactaatatcctatttctgttcccagaccccgtccagggccccacagtgcattta

SEQ ID NO: 259932 - DNA, 201 bp, Homo sapiens
ccgtccctgaggcctcatgcctgctcctcgcctacgtcttctgaggcacagagcacaggtccctttcctccgttgacctggcctgccagcctctaacagcyccgggaagcaggcagagccctgctggcggatgagaaaaccgtgtctcagaggaagaggccgtggagctgacgcctggagtcaggctgtactcagggtaac

SEQ ID NO: 259933 - DNA, 201 bp, Homo sapiens
gactacaggtgtgtgccaccatgcccagctattttttgtatttttagtaaagacggggtttcaccatgttggccaggatggtctcgatctcttgacctcasgtgatccgcccaccttggcctcccaaagtgctgggattacaggcattcagccagtgtcatgcctggcctgacaatgtcttattaatatttgggttcccat

SEQ ID NO: 259934 - DNA, 201 bp, Homo sapiens
tgggattggaggcatgagccaccgcgcccggcatatcccagggagttctgtgatggaagccttccctatcttcagttcggaacctcccaatcaccctcagsatgcagttccaattcctcagcttgctattctgtgagcttagatatccagcccctgttgatccctccaattttgtctgcataccttccacgcattcccatg

SEQ ID NO: 259935 - DNA, 201 bp, Homo sapiens
taacctctgctgcccgggttcaagcgattctcctgcctcagcctcccgagtagctgggattataggtgcatgccaccacacctggctaatttttgtattttagtagagacggggtttcagcatcttgggaaggctggtcttgaactcctgacctcatgatccacctgtctcggcctcccaaagtgctgggattggaggcat

SEQ ID NO: 259936 - DNA, 201 bp, Homo sapiens
tctggctggacgctaccgctgctcctaccagaacggaagcctctggtccctgcccagcgaccagctggagctcgttgccacgggtaaaggaagggggatcrgagcctgggactgcgtggtcctccgttcaggacacaaatacgggggacattgagggcagggattagggtgaggcaaacgaggcactggcctagcgggtgg

SEQ ID NO: 259937 - DNA, 201 bp, Homo sapiens
gtatactgcttggaaacattgtgttaacaaggcacttcctgcacagccctagatcccttaaaccttgatttcatacaacacaggtttttgtgagctccagrttgggtcaaagtggctgggtcaaagctacaaattaacaacatctcagcaaagcaattgttcaaagtacaggtctttttcaaaatggagtctcttatgtct

SEQ ID NO: 259938 - DNA, 201 bp, Homo sapiens
catccccgaccgccctcttctgtcttggtgagtcctgagggtcagatctgggaaatgctgaaggacaggcatggactgccagacaaaggatttttaagaawtttgcattggtgatgaatttcaggacaaaaaggaacctgtaagagccccttcatttgttgggtggggaaacggggggccagcgagctggcattttgcatg

SEQ ID NO: 259939 - DNA, 201 bp, Homo sapiens
tggccaggcgcagcctgtaatcccagcactttgagaggccaaggagggtggatcacgaggtcaggagatcgagaccatcctggccaacatggtgaaacccygcctctactaaagtacaaaaaaaaaagttggccaggcgtgatggcaggtgcctgtaatcccagctactcgggaggctgagggaggagaatcgcttgaacc

SEQ ID NO: 259940 - DNA, 201 bp, Homo sapiens
agtaggtatttcttactgggagatcacggaaaagcaagtttgagaaacactcccatcagatgggtgggccgaggataacctcaaagcctttggttctccgwataggtgcgtaggactcacccaggcactctttccttttttaaattgtggtaaaaactacataacagtggccaggcgtgatggtgcacgcctgtaatccca

SEQ ID NO: 259941 - DNA, 201 bp, Homo sapiens
ttaggaaaggccggggctggtggaggaagggaggagagcattcttcatcctcatcacatcctgagcctgtgccccaggctcccaccacttccctccctggycacagagctcaggacagggctgaggaaccatgtctccatccccgaccgccctcttctgtcttggtgagtcctgagggtcagatctgggaaatgctgaagg

SEQ ID NO: 259942 - DNA, 201 bp, Homo sapiens
aggctggccagaggagataagcgcggctccttggagcttgtgtgcaagtcactgtactgaggagccggctacggctcgatgagtctcaattaggaaaggcyggggctggtggaggaagggaggagagcattcttcatcctcatcacatcctgagcctgtgccccaggctcccaccacttccctccctggccacagagctca

SEQ ID NO: 259943 - DNA, 201 bp, Homo sapiens
cagtaacagtctaatctctcttttccctacacacctggctaatttttgtattttaagtagagacggggtctcgccatgtttgccaggctggactcgaactyctgacctcaagtgatccgcccccgcccccccccacccccaaaactttggcctcccaaagtgctgggattacaggcgcaagccccctcacctggccgggaa

SEQ ID NO: 259944 - DNA, 201 bp, Homo sapiens
atggtcacatactgtgtgcgtgcatatgtgtgtgtgcgtgcatgtgcgtgtgtgcgtgcatatgtgtgtgtgcgtgcatatgtgtgtgcatgcgtgcatatgtgtgtgtgtgcatgcgtgcatatgtgtgcgtgtgcttctgactgaatttttgaactttctcttttgaaatggttctagagtcacaggaagtctacaatg

SEQ ID NO: 259945 - DNA, 201 bp, Homo sapiens
ataacaaggcagcattgctgtaaacatgtctcgcctcccgccatagggcggcttttctcctgtctcagaattgaacaaatgtacaatcgggttttataccragacattcagttcccaggggcaggcaggagacagtggccttcctctagctcaactgcaagaggctttcctcttttactaatccacctcagcacagaccct

SEQ ID NO: 259946 - DNA, 201 bp, Homo sapiens
gatggtcacatactgtgtgcgtgcatatgtgtgtgtgcgtgcatgtgcgtgtgtgcgtgcatatgtgtgtgtgcgtgcatatgtgtgtgcatgcgtgcatatgtgtgtgtgtgcatgcgtgcatatgtgtgcgtgtgcttctgactgaatttttgaactttctcttttgaaatggttctagagtcacaggaagtctacaat

SEQ ID NO: 259947 - DNA, 201 bp, Homo sapiens
tgataaggatgagatttgcggggttgagggcagagtgagggctattatgcctagtgggcagggacatggaagatggtcacatactgtgtgcgtgcatatgygtgtgtgcgtgcatgtgcgtgtgtgcgtgcatatgtgtgtgtgcgtgcatatgtgtgtgcatgcgtgcatatgtgtgtgtgtgcatgcgtgcatatgtgt

SEQ ID NO: 259948 - DNA, 201 bp, Homo sapiens
ggttgataaggatgagatttgcggggttgagggcagagtgagggctattatgcctagtgggcagggacatggaagatggtcacatactgtgtgcgtgcatrtgtgtgtgtgcgtgcatgtgcgtgtgtgcgtgcatatgtgtgtgtgcgtgcatatgtgtgtgcatgcgtgcatatgtgtgtgtgtgcatgcgtgcatatg

SEQ ID NO: 259949 - DNA, 201 bp, Homo sapiens
gttcccaggtgatgctgatgctatggctccagaatgctgctttgagaaccactgcggtaagttttgtgtgaggcgtgttatcccctccactttcacaaacrtctcagctgaatacggtgtaccagactacggcctgcactttaagaatatcatacgctaggctggaggctgggcgtgtctaacattccctgtgtctcagag

SEQ ID NO: 259950 - DNA, 201 bp, Homo sapiens
gccaggctggtcttgaactcttgacctcaggtgatctgcctgcctcggcctctcaaagtgctgggattacaggtgtgagccaccacgcccggctaagcctktttttttcagatggagtcttactgcgtcacccaggctggagtgcagtggtgcgatctcagatcactgcaacctctgcctcctaggttcaagtgattctcc

SEQ ID NO: 259951 - DNA, 201 bp, Homo sapiens
tcaccatgttggccaggctggtcttgaactcttgacctcaggtgatctgcctgcctcggcctctcaaagtgctgggattacaggtgtgagccaccacgccyggctaagcctgtttttttcagatggagtcttactgcgtcacccaggctggagtgcagtggtgcgatctcagatcactgcaacctctgcctcctaggttca

SEQ ID NO: 259952 - DNA, 201 bp, Homo sapiens
ggacaaactaaagccggcagcgtctttctggcttcctagtcaggctgttcggtagcggagtgtcaccctgatttccagccccgcagcacacacagtgagabcctgcctggcgtgattcagaggcaacgtatttcccaaggtggctgtgaaggaaccagggggataaacacagcccgtgaaccgcacgccagaggacaggtc

SEQ ID NO: 259953 - DNA, 201 bp, Homo sapiens
aaaggtggacgggagctgcatgcatttccttgttaatagcccagaatgtgccaggtgtgctttacaaatgctgctgcttttttttttttttttttggggggagtctcactttgtcacccaggctggagtgcagtggagtgatctcagttcactgcaacctccacctcctgggtttaagcgattctcctgcctcagcctcct

SEQ ID NO: 259954 - DNA, 201 bp, Homo sapiens
tggacaaattatttaatgccatgtgccttagtttcatttataaaatagggacattaagagtgaggactccataggtctctgaggattcactgaactgatayacatcataagtttggaaggcacccggaagctagcactgtcagccacatttacaacgtaacaattgtatgtggcaatacaagcttacagcacagtataagc

SEQ ID NO: 259955 - DNA, 201 bp, Homo sapiens
caaggtcaggagatcgagaccatcctggctaacacggtgaaaccccgtctctactaaaaatacaaaaaatcaactaggcatggtggcacgcacctgtagtyccagctactcaggaggctgaggcaggagaatcgcttgaacccgggaggcggaggttgcggtgagccaagatcgcgccactgcactccagcctcggcgaca

SEQ ID NO: 259956 - DNA, 201 bp, Homo sapiens
ggacgtaaccctacagtgtcagactcggtatggctttgaccaatttgctctgtacaaggaaggggaccctgcgccctacaagaatcccgagagatggtacmgggctagtttccccatcatcacggtgaccgccgcccacagcggaacctaccgatgctacagcttctccagcagggacccatacctgtggtcggcccccag

SEQ ID NO: 259957 - DNA, 201 bp, Homo sapiens
ggctggcggtgatggagccggctgccatggtgagcggccctgtggagaagccagggaggaatggagacaatctggagaaacagaatcacaccaacaaccaygtgcgtgagcttgctgtgtgctcttgcttgggagcaagttacaggttcagcccaagaggagcggaccactccagggtgtaaataccaggagggggaattg

SEQ ID NO: 259958 - DNA, 201 bp, Homo sapiens
ccccgtctctactaaaaatacaaaaaatcaactaggcatggtggcacgcacctgtagtcccagctactcaggaggctgaggcaggagaatcgcttgaaccygggaggcggaggttgcggtgagccaagatcgcgccactgcactccagcctcggcgacagagtgagactccgtctcaaaaaaccaaaaaacaaaaaacagt

SEQ ID NO: 259959 - DNA, 201 bp, Homo sapiens
  misc_feature (1)...(201): n = A,T,C or G
tacagtgtcagactcggtatggctttgaccaatttgctctgtacaaggaaggggaccctgcgccctacaagaatcccgagagatggtaccgggctagtttncccatcatcacggtgaccgccgcccacagcggaacctaccgatgctacagcttctccagcagggacccatacctgtggtcggcccccagcgaccccctgg

SEQ ID NO: 259960 - DNA, 201 bp, Homo sapiens
gtagaggggtccacgtcctaatcctcggaaggtgtgacgacattacctcacgtgtcagaggttctcgctgatgtgttaagtgaagcatcttttttttttttgagacagagtttcgctgttgttgcccaggctggagtgcaatggcacgacctcggctcaccacaacctccacctcccgggttcaagcgattgtccggcctc

SEQ ID NO: 259961 - DNA, 201 bp, Homo sapiens
aaaaggtggacgggagctgcatgcatttccttgttaatagcccagaatgtgccaggtgtgctttacaaatgctgctgcttttttttttttttttttggggrgagtctcactttgtcacccaggctggagtgcagtggagtgatctcagttcactgcaacctccacctcctgggtttaagcgattctcctgcctcagcctcc

SEQ ID NO: 259962 - DNA, 201 bp, Homo sapiens
tgaaaaaggtggacgggagctgcatgcatttccttgttaatagcccagaatgtgccaggtgtgctttacaaatgctgctgcttttttttttttttttttgkggggagtctcactttgtcacccaggctggagtgcagtggagtgatctcagttcactgcaacctccacctcctgggtttaagcgattctcctgcctcagcc

SEQ ID NO: 259963 - DNA, 201 bp, Homo sapiens
accactggagctccttgcccccctttgcttatctctacacagcaacagggtcgctaaacttaccttacactgctgaggcctcttaagatgtgtatagggaragagagttggggggagagggagagagagaacagagagagagagacacacacaagaagagagagaggaagaaaggaggagagagaggaagaggaagggaga

SEQ ID NO: 259964 - DNA, 201 bp, Homo sapiens
ttgaaaaaggtggacgggagctgcatgcatttccttgttaatagcccagaatgtgccaggtgtgctttacaaatgctgctgcttttttttttttttttttkgggggagtctcactttgtcacccaggctggagtgcagtggagtgatctcagttcactgcaacctccacctcctgggtttaagcgattctcctgcctcagc

SEQ ID NO: 259965 - DNA, 201 bp, Homo sapiens
tacccagcgccctctgagtcaacgccaagcttcctaccatggcattggagccgcgctctgggtccttttactgatggctcccgcctcagcccttccacccctcccataccctgcatgccagcccaggcagccctccctcctcccacaatatctctcatatgcattcctgtcccatgccttctgcttaagctgttcccacag

SEQ ID NO: 259966 - DNA, 201 bp, Homo sapiens
gttgaaaaaggtggacgggagctgcatgcatttccttgttaatagcccagaatgtgccaggtgtgctttacaaatgctgctgcttttttttttttttttttggggggagtctcactttgtcacccaggctggagtgcagtggagtgatctcagttcactgcaacctccacctcctgggtttaagcgattctcctgcctcag

SEQ ID NO: 259967 - DNA, 201 bp, Homo sapiens
gggagaaagagagagagagaaggagacacaggagggggagagaaagagggagagagcaatgagagagatatgagacagagaagagagagagaggagacacrgaggagggggacagaaagagggagacagagagatgagagagagaaaagacacagatgagggggagagaaagagggagagagagatgagagagagattgat

SEQ ID NO: 259968 - DNA, 201 bp, Homo sapiens
acatgcaatggaatattatgcagccttaaaaaagaaggaaattctgacacatactacaacatggatataccttgaggacattatgctaagtcagtcagtcacaaaaggacaactactgtatgattctagtcaaaggaggtatctaatgtcaacactgtagaaacacaaagtacaatggtggttgttaagggccagaaagag

SEQ ID NO: 259969 - DNA, 201 bp, Homo sapiens
tgagctaccgtgccaggccgtggagtagctaaacttatcttacactgctgaggtctctcaagatgtgtgtagggagagagagttggggggagagagagagmcaaaggaaaagaggaagagagagacagggagaaagagaggaagaaagagaaagagagaaacaggaagagtgagaggagaaagagaggaagggggagagaa

SEQ ID NO: 259970 - DNA, 201 bp, Homo sapiens
tacatgcaatggaatattatgcagccttaaaaaagaaggaaattctgacacatactacaacatggatataccttgaggacattatgctaagtcagtcagtcacaaaaggacaactactgtatgattctagtcaaaggaggtatctaatgtcaacactgtagaaacacaaagtacaatggtggttgttaagggccagaaaga

SEQ ID NO: 259971 - DNA, 201 bp, Homo sapiens
atacatgcaatggaatattatgcagccttaaaaaagaaggaaattctgacacatactacaacatggatataccttgaggacattatgctaagtcagtcagtcacaaaaggacaactactgtatgattctagtcaaaggaggtatctaatgtcaacactgtagaaacacaaagtacaatggtggttgttaagggccagaaag

SEQ ID NO: 259972 - DNA, 201 bp, Homo sapiens
tatacatgcaatggaatattatgcagccttaaaaaagaaggaaattctgacacatactacaacatggatataccttgaggacattatgctaagtcagtcagtcacaaaaggacaactactgtatgattctagtcaaaggaggtatctaatgtcaacactgtagaaacacaaagtacaatggtggttgttaagggccagaaa

SEQ ID NO: 259973 - DNA, 201 bp, Homo sapiens
gagggcaggaagccctgggctgcaggggcggggccgtaggtgggaaggaagtgggagggcaggaagccctgggctgcaggggcggggccgtaggtgggaargaagtgggagggcaggaagccctgggctgcaggggcggggccgtaggtgggaaggaagtgggagggcaggaagccctgggctgcaggggcggggccgtag

SEQ ID NO: 259974 - DNA, 201 bp, Homo sapiens
gatggtaccgggctagtttccccatcatcacggtgaccgccgcccacagcggaacctaccgatgctacagcttctccagcagggacccatacctgtggtcrgcccccagcgaccccctggagcttgtggtcacaggtaggggtagtgcagaccaaacctttcttcctcagcctttataggtcctgatggccattccaaggg

SEQ ID NO: 259975 - DNA, 201 bp, Homo sapiens
gaaggaagtgggagggcaggaagccctgggctgcaggggcggggccgtaggtgggaaggaagtgggagggcaggaagccctgggctgcaggggcggggccrtaggtgggaaggaagtgggagggcaggaagccctgggctgcaggggcggggccgtaggtgggaaggaagtgggagggcaggaagccctgggctgcagggg

SEQ ID NO: 259976 - DNA, 201 bp, Homo sapiens
gtagtcccagctactcaggaggctgaggcaggagaatcgcttgaacccgggaggcggaggttgcggtgagccaagatcgcgccactgcactccagcctcgkcgacagagtgagactccgtctcaaaaaaccaaaaaacaaaaaacagtcaatggcattaaatataaatacatttacagtgttgtgtaaccatcaccactat

SEQ ID NO: 259977 - DNA, 201 bp, Homo sapiens
cttgaacctgggaggtggaggttgcggtgagccaagatcacaccattgcactctggcctgggcaacaagagcgaaactccgtctcaaaaaaaaaaaaaaaattgtggaattgatatctggactaggtatggatttaatttgtcagtatcccctacagtagtggagtaaatagtctcctgatggatgggtggcaggtcgaat

SEQ ID NO: 259978 - DNA, 201 bp, Homo sapiens
tgtgtgtgttcggagtaggcacagtgacagggggcgggaatatggtttcatttcacacttagcctttgtttggttcccagagacttctaggagtatcaccrccagtccaaaggagtcagactctccagctggtgagtaagtcatcctctccagacccccttccttctcacccgtctcttcaccaaagccaactcctttgtc

SEQ ID NO: 259979 - DNA, 201 bp, Homo sapiens
tcatcttgagtacagttctctcaaggaaaaagcaagcccagcatcttctgccatggcaaccctggcttggagcctccataagagagaaggccctaagaatwccattttcttgctctaagttgctcttacgggaaagaagtgataatattcttcctaaacgccatcattcgtgcatccttcccacctacatgtgtcaccgga

SEQ ID NO: 259980 - DNA, 201 bp, Homo sapiens
agtcgtcccaattcttagacctttaatacctgtttttctcctttccttattccctttagtttttcaattcatacaaaactgtatccaggccatcaccaatwattctaaatgacaaatgtttcttttaacaatcccacaatgtcaccccttaccacaaaatcttccttcagcttaatcgctcccactttaggttcccacgcc

SEQ ID NO: 259981 - DNA, 201 bp, Homo sapiens
agtgatctgcctgccttggcctctcaaagtgctgggattaaaggcgtgagctaccgtgccaggccgtggagtagctaaacttatcttacactgctgaggtctctcaagatgtgtgtagggagagagagttggggggagagagagagacaaaggaaaagaggaagagagagacagggagaaagagaggaagaaagagaaaga

SEQ ID NO: 259982 - DNA, 201 bp, Homo sapiens
ggtgggaaggaagtgggagggcaggaagccctgggctgcaggggcggggccgtaggtgggaaggaagtgggagggcaggaagccctgggctgcaggggcgsggccgtaggtgggaaggaagtgggagggcaggaagccctgggctgcaggggcggggccgtaggtgggaaggaagtgggagggcaggaagccctgggctgc

SEQ ID NO: 259983 - DNA, 201 bp, Homo sapiens
gaggacacgaggggctctgccaaggccaggagaggctgctgagggtcaggacaggctgcctggaggaggaggacaggctgcctggaggaggagggcaggcyaggaatcaccttgaaggatgagtttgacagccagtgtcaatcctagaagataggggtgttctgggccctgcaactgcctgagtgaaggatgggggctgca

SEQ ID NO: 259984 - DNA, 201 bp, Homo sapiens
gggccgtaggtgggaaggaagtgggagggcaggaagccctgggctgcaggggcggggccgtaggtgggaaggaagtgggagggcaggaagccctgggctgyaggggcggggccgtaggtgggaaggaagtgggagggcaggaagccctgggctgcaggggcggggccgtaggtgggaaggaagtgggagggcaggaagccc

SEQ ID NO: 259985 - DNA, 201 bp, Homo sapiens
tatacatgtgcgatggcaactgacagggtccctgatacaccggagtgctccagaaacaccccattgcgtgggacggaggatgttaggtggccctcctagcrtttgagtttgataaatgagcaaaggaagtggtttttactagaaagccagctttcctttttttttttttttttttccagccagcaaaccccaaacaggaac

SEQ ID NO: 259986 - DNA, 201 bp, Homo sapiens
gttcccagaccccgtccagggccccacagtgcatttagtatttatgtctccttagactcttgattggtgcaaatattctaatttcttttcttatttatttwttttttttaagagaagaggttgggccgggcgcggcggctcacgcctgtaatcccagtactttgggaggctgaggtgggtggatcacttaaggtcaggagt

SEQ ID NO: 259987 - DNA, 201 bp, Homo sapiens
ttctgttcccagaccccgtccagggccccacagtgcatttagtatttatgtctccttagactcttgattggtgcaaatattctaatttcttttcttatttwttttttttttttaagagaagaggttgggccgggcgcggcggctcacgcctgtaatcccagtactttgggaggctgaggtgggtggatcacttaaggtcag

SEQ ID NO: 259988 - DNA, 201 bp, Homo sapiens
agggaagatgatggcagggaggtttttagatatcaacaccctgatagttctcattttaaccacctgtaagtgcacatacaagtcaacggcactggccgggmgcggtggctcatgcctgtattcccagcactttgggaggccaaatcacaaggtcaggagatcgagaccatcctggctaacacggtgaaaccccgtctctac

SEQ ID NO: 259989 - DNA, 201 bp, Homo sapiens
tttaaacaaaattaaaaattagtggggcatggtggcatacacctatagtcccagctactcaggaggctgaggcaggaggatcgcttgagccagggaggccraggctgcagggagctgtgatcacgccactgcactccagcctgggtgacagagtgagaccctgtatcaaaaaacaaacaaaaaactaaccatagacacaac

SEQ ID NO: 259990 - DNA, 201 bp, Homo sapiens
gtgggctcaagctatccttccaccttggcttcccaaagtgttgggatttcaggcgtgagccactgcatctggctgtgaataacattttcatgcaatttttwaaaaaatcaaaataaattgcaaaaacatccacaatgaaaaaaaccagaatttcaaataaaggcagaatcagccagtgcctgtgtcaagtcataccagagt

SEQ ID NO: 259991 - DNA, 201 bp, Homo sapiens
ctggggtctggactcttgggtctgagggaggaggggctgggggcctggactcctgggtctgagggaggaggggctatctcattgctttgggggtggcgcargcggccctccaggccatggtctggagcagcaggtgagaccgaaacccgagcctccacccaagtcccaagtcccagggcccagggcctctttcctccttct

SEQ ID NO: 259992 - DNA, 201 bp, Homo sapiens
ttttatggcaatcccacgtttaacttctggaggagctgctggaactgttttccacagcaggggcgccatgttacgtccctgccagcaatgcacgcgcagtycaatttctctgcatactcaccaatatctgctattttccattaaaaaaaattatagccggtcgggtgcagtggctcatgcctgtaatcccagcactttggg

SEQ ID NO: 259993 - DNA, 201 bp, Homo sapiens
gagctgctggaactgttttccacagcaggggcgccatgttacgtccctgccagcaatgcacgcgcagtccaatttctctgcatactcaccaatatctgctrttttccattaaaaaaaattatagccggtcgggtgcagtggctcatgcctgtaatcccagcactttgggagaccgaggcaggtggatcaactgaggtcagg

SEQ ID NO: 259994 - DNA, 201 bp, Homo sapiens
agcccagggcccaggaccctccctcagagaccgtccctgaggcctcatgcctgctcctcgcctacgtcttctgaggcacagagcacaggtccctttcctcygttgacctggcctgccagcctctaacagccccgggaagcaggcagagccctgctggcggatgagaaaaccgtgtctcagaggaagaggccgtggagctga

SEQ ID NO: 259995 - DNA, 201 bp, Homo sapiens
caacacaaacgagtccaccgtgtctaacacaacacgaacgagtccaccgtgtctaacacaacacgaacgagtccaccgtgtctaacacaacacgaaggagyccaccgcgtctaacacgaacgaacccaccgtgtctaacacgaacgaacccaccgtgtctaacacgaacgagtccaccgtgtctaacacgaacgagtccac

SEQ ID NO: 259996 - DNA, 201 bp, Homo sapiens
aatatacagatttttgttttccactcctgtattactttacttagaataatgccttccagctccatccaagttgctgcaaaagactttttttttttttttttaaagacggaatctcgctctctcaccaaggctggagtgcagtggtgtgatctcggcttactgcaaactccacctcccgggtttaagtgattctcctgcctc

SEQ ID NO: 259997 - DNA, 201 bp, Homo sapiens
agctgagattgcatcactgcgctccagcctgggcatcggagagagactctcaaacaggagctggcgaactgtggcgcactgcttatttttataaataaagwtttatgggaacacagctgtgctcacttgttttcacatcatctgtggctgcttcccagctcctctggcagaggaggtgcaacagccactgtgtggatcaca

SEQ ID NO: 259998 - DNA, 201 bp, Homo sapiens
atcatttagtttttggtagaaaaatctgttttgcccccagggtcacagtgaggggtaggacacaggaatccagaagaaatagaactgaggttgaaaaaggyggacgggagctgcatgcatttccttgttaatagcccagaatgtgccaggtgtgctttacaaatgctgctgcttttttttttttttttttggggggagtct

SEQ ID NO: 259999 - DNA, 201 bp, Homo sapiens
tgtttgttttttgagatggagtctcgctcagtcggtcgctcaggctggaatgcaatggcatgatctcagctcactgcaaactctgcctcccgggtccaagkgattctcctgcctcagcctcccgagtagttgggattacaggcatctgccaccaggtctggctaattattgtatttttagtaggggcggggtttcaccatg

SEQ ID NO: 260000 - DNA, 201 bp, Homo sapiens
ctcctgcctcagcctcccgagcagctgggattacaggtgcacaccaccacgcctggctaatttttgtatttttagtggagacggggtttcaccatactggycaggctgggcttgaactcctgacctcaagtgatctgccctcctcagcctcccaaagtgctgggattacaggcatgaggcactgcacccagctcaaatgct

SEQ ID NO: 260001 - DNA, 201 bp, Homo sapiens
ttgttcaggacccacagcgacagagcacagatttatctcattttctgatttcccaggaacctctgtgacccccagccggttaccaacagaaccaccttccycggtagcaggtaggttctgcagggtccattctggtgcacagcgtatgaggtacacggaccccttctctctctcctctctgcctagacttctcgatttaat

SEQ ID NO: 260002 - DNA, 201 bp, Homo sapiens
ggtgggtggatcacctgaggtcaggagttcaagaccagcctggtcaacatggtgaaaccccatctctacaaaaattagccgggcgtgatggcgggtgcttstaatcccagctacgtgggaggctgaggtgggagaattgcttgaaactgggaggcagaagttgcagtgagctgaggtcaggcattgcactccagcctgggc

SEQ ID NO: 260003 - DNA, 201 bp, Homo sapiens
gatcctcagaggaggaatatgcatgcattgttctctttataataaccatattaacagccagcaatgttctggcacttactatggattaagtccttgttatraatgacttcatgccatccttccaaattcaatgacaggtagctgggcgcagtggctcacgctttgtaatcccagcactttgggaggctgaggcaggtggat

SEQ ID NO: 260004 - DNA, 201 bp, Homo sapiens
tggagtgcagtggcgtgatctcggctcaccgcaacttccgcgtcccgggttcaagccattctcctgtctcagcctccggagtagctgggactacaggtgcstgccgccatgcccggctattttttttttgtattttttgggggttttactgtgttgcccaggctggtcttgaactgctgagctcaggcaatctgcctgcct

SEQ ID NO: 260005 - DNA, 201 bp, Homo sapiens
gaaaaaggtggacgggagctgcatgcatttccttgttaatagcccagaatgtgccaggtgtgctttacaaatgctgctgcttttttttttttttttttggrgggagtctcactttgtcacccaggctggagtgcagtggagtgatctcagttcactgcaacctccacctcctgggtttaagcgattctcctgcctcagcct

SEQ ID NO: 260006 - DNA, 201 bp, Homo sapiens; identical to SEQ ID NO: 51912

SEQ ID NO: 260007 - DNA, 201 bp, Homo sapiens
aaaaattacctgggtgcagtggtgcacacctgtggtcccagctacatgggaggctgagatgggagaactgcttaaactggggaggtggaggctgcagtgasccgagatcgtgccattgcattccagcctgggtgaaagagcaagattctgccaccaaaaaaaaaaaaaaaaaaaaaaaaaaaaaagaaaaaaatgttgcca

SEQ ID NO: 260008 - DNA, 201 bp, Homo sapiens
catcacgttgtagcatgtatctgaatttattcttttataatattttttattttttggagacagaatctcgctctgtcacccaggctggagtgcagtggcgygatctcggctcaccgcaacttccgcgtcccgggttcaagccattctcctgtctcagcctccggagtagctgggactacaggtgcctgccgccatgcccgg

SEQ ID NO: 260009 - DNA, 201 bp, Homo sapiens
gctttattgctcacacaaagcctgtttggtggtctcttcacacggacgtgcatgaaaggtgcgtgtatatttttgtaacacaataaataataacagtatayactttttcttttagaagtatgctgttaaacagaattaagaacaggaagtctcaaaattgtttctttcaggagagaagacttattaatgggggagagttct

SEQ ID NO: 260010 - DNA, 201 bp, Homo sapiens
aaagctcccctactgagcaccttatgaccccgactctgcccgccagagaacaacccccctttgactgtaattttcctttacctacccacatcctataaaayggccccacccctatcccccttcgctgactctcttgtcagactcagcccacctgcacccaggtgattaaaagctttattgctcacacaaagcctgtttggt

SEQ ID NO: 260011 - DNA, 201 bp, Homo sapiens
ggaggatgttaggtggccctcctagcgtttgagtttgataaatgagcaaaggaagtggtttttactagaaagccagctttcctttttttttttttttttttccagccagcaaaccccaaacaggaacctatggttggtgatggatgtgcgttcagaaagcagggagggagggggagtcagaggtgagggggtcatcagcca

SEQ ID NO: 260012 - DNA, 201 bp, Homo sapiens
agggggaatgggaaagttgcttagagaagcctccaaatgtaagaatgggtcaattcctcgtcttaacatagtggaaaatcatactgagatgctatcagaaracagaggaaaaataattttagaggtcaagtaaactaagtagattttaaaaagaccagtatagcctaggcacagtggctcacacctgtaatcccagcactt

SEQ ID NO: 260013 - DNA, 201 bp, Homo sapiens; identical to SEQ ID NO: 51917

SEQ ID NO: 260014 - DNA, 201 bp, Homo sapiens
cggaggatgttaggtggccctcctagcgtttgagtttgataaatgagcaaaggaagtggtttttactagaaagccagctttcctttttttttttttttttttccagccagcaaaccccaaacaggaacctatggttggtgatggatgtgcgttcagaaagcagggagggagggggagtcagaggtgagggggtcatcagcc

SEQ ID NO: 260015 - DNA, 201 bp, Homo sapiens
gtgagtcacttgggaaaagacagaaggatggcaccaagaagttccaggacgacggctgtgaatcagggctagtgagcacacagcttgggtgaagggggaaygggaaagttgcttagagaagcctccaaatgtaagaatgggtcaattcctcgtcttaacatagtggaaaatcatactgagatgctatcagaagacagagga

SEQ ID NO: 260016 - DNA, 201 bp, Homo sapiens
ctacttaaaataaagaagataaaaattgttttaaaaaaggaaaagaatggctggccacagtggctcatgcctgtaatcccggcactgtgggaggttgaggkaggtgagtcacttgggaaaagacagaaggatggcaccaagaagttccaggacgacggctgtgaatcagggctagtgagcacacagcttgggtgaaggggg

SEQ ID NO: 260017 - DNA, 201 bp, Homo sapiens
ttgaatatgggtgacaaaaacaaacaaactaaccaaccaaccaaccaaccaaccaaccaacaaacctgtagagtccgggactctgtttctgagtcactgawtgcattgatcagcggttctcaaacttccatgagcataagaatcacctggaggcttaaagaatagatttctgagcccccagggcttctgcttcagtaggtc

SEQ ID NO: 260018 - DNA, 201 bp, Homo sapiens
gtgagaccccatctctacttaaaataaagaagataaaaattgttttaaaaaaggaaaagaatggctggccacagtggctcatgcctgtaatcccggcactktgggaggttgagggaggtgagtcacttgggaaaagacagaaggatggcaccaagaagttccaggacgacggctgtgaatcagggctagtgagcacacagc

SEQ ID NO: 260019 - DNA, 201 bp, Homo sapiens
caaccgtttgagatatccttttgtcactcagtgcaatgcccctgaggcccatccaagctgctgtatgtatcaatgatgtgttccttttgattgctgagcartatttcatgctatattaggccgattttgtgctgctataaatacctgagactggatcattgataagaaaagaggtttaattggttcatggttctgaaggcc

SEQ ID NO: 260020 - DNA, 201 bp, Homo sapiens
tgcaacctgtgtctcccatgttcaagcgattctcatgcctcagcctcccgagtagctgggattacaggcgcccaccaccacacctggctaattaaagacagggtatcaccatgttggccaggcttatcttgaactcctgacctcaggtgatccacccgtcttggcctcccaaagtgctgggattataggtgtgagccagtg

SEQ ID NO: 260021 - DNA, 201 bp, Homo sapiens
gaggcccatccaagctgctgtatgtatcaatgatgtgttccttttgattgctgagcagtatttcatgctatattaggccgattttgtgctgctataaatayctgagactggatcattgataagaaaagaggtttaattggttcatggttctgaaggccgtataggaagcagaaggctggcttctgcttttggggaggcctc

SEQ ID NO: 260022 - DNA, 201 bp, Homo sapiens
ctgcaacctgtgtctcccatgttcaagcgattctcatgcctcagcctcccgagtagctgggattacaggcgcccaccaccacacctggctaattaaagacagggtatcaccatgttggccaggcttatcttgaactcctgacctcaggtgatccacccgtcttggcctcccaaagtgctgggattataggtgtgagccagt

SEQ ID NO: 260023 - DNA, 201 bp, Homo sapiens
atggcatgatctcagctcactgcaacctgtgtctcccatgttcaagcgattctcatgcctcagcctcccgagtagctgggattacaggcgcccaccaccacacctggctaattaaagacagggtatcaccatgttggccaggcttatcttgaactcctgacctcaggtgatccacccgtcttggcctcccaaagtgctggg

SEQ ID NO: 260024 - DNA, 201 bp, Homo sapiens
gcctcaaaagaaaataaaaataaaaaacaaatgtaaactttaggggaacaataacaacaacaaaaataaaagaagcaagttatattacccgaaaattctcrgctgcgaatatctgtgggtataaacatgtgatactggccgggcgtggtggctcatgcctgtaatcccagcacttcgggaggctgaggtgggcagatcacg

SEQ ID NO: 260025 - DNA, 201 bp, Homo sapiens
aaaaagaaggaaattctgacacatactacaacatggatataccttgaggacattatgctaagtcagtcagtcacaaaaggacaactactgtatgattctastcaaaggaggtatctaatgtcaacactgtagaaacacaaagtacaatggtggttgttaagggccagaaagaggagagagaaggaattagtgtttaatggg

SEQ ID NO: 260026 - DNA, 201 bp, Homo sapiens
gtatgagtgaggtggcaggtttgggaatgaaaccacgcctgcggtgccggggctcccaccggtaacctcccgtttttggcctcggggctccggcaggaagsagtcccaaggcttagatggaggtgcggagggcgtgtgagtgtcctggagctgctgtaacaatgtactgcaaacccagtggcttacaccctcagacgtgca

SEQ ID NO: 260027 - DNA, 201 bp, Homo sapiens
cggctgtgctgtccaccctgtatttccagtgcccagtaataggtgcttagaaaatacttaccgaatgagtaagtatacagttgtaccaggcaggtgatgtyattatcctttttttttttttttttttacaaggagtaaactgagtcacagagaagtgatgtgacttggccaggatcatgcagctggtcggggtggagccag

SEQ ID NO: 260028 - DNA, 201 bp, Homo sapiens
aacagagatagtttgatttcctctcttcctatttgagtatcctttatttctttctcttgcctgattatcctggccagaacttccaatactatgttgaatasgagtggtgaaagagggcatccttgtcttgtgctggttttcaagggaaatgcccatttagtatgaaattggctgtgggttaataaatggtgctgggagaat

SEQ ID NO: 260029 - DNA, 201 bp, Homo sapiens
cagctgcactggaatgtccggtccacacggacgggacctcggctgtgctgtccaccctgtatttccagtgcccagtaataggtgcttagaaaatacttacygaatgagtaagtatacagttgtaccaggcaggtgatgttattatcctttttttttttttttttttacaaggagtaaactgagtcacagagaagtgatgtg

SEQ ID NO: 260030 - DNA, 201 bp, Homo sapiens
gaccagcctgggcaacatagtgagaccccatctctacttaaaataaagaagataaaaattgttttaaaaaaggaaaagaatggctggccacagtggctcaygcctgtaatcccggcactgtgggaggttgagggaggtgagtcacttgggaaaagacagaaggatggcaccaagaagttccaggacgacggctgtgaatca

SEQ ID NO: 260031 - DNA, 201 bp, Homo sapiens
ggcctcctgtcagcttccacgcagctctgtcacgggtagattctctcacgagtggaagtggctctcagctgcactggaatgtccggtccacacggacgggrcctcggctgtgctgtccaccctgtatttccagtgcccagtaataggtgcttagaaaatacttaccgaatgagtaagtatacagttgtaccaggcaggtga

SEQ ID NO: 260032 - DNA, 201 bp, Homo sapiens
aaaaatacagggatgaatatgtcaattaccctgatttgatcatagcacgttgtatacatgtactgcaatattgctgtccaccccataaatatgtacaattmtgtatacatttttaaaatcataaaaataagataatgcaccgtctccacccctctcatatttactttctgaaggaaatgttaggtcttctcaaggtaaagt

SEQ ID NO: 260033 - DNA, 201 bp, Homo sapiens
aaaacaccagaagctggcggcactcctgggcgcccagctgtgagtggagtctccctgtcccgcctttgggccttacccgtgctgcgcctgctgcctgcatyccccttccctgggtctccgcacgtgggccctgcctcattttcccggtcccagtttctgcgtcacctcctgagaggggcctcctgtcagcttccacgcagc

SEQ ID NO: 260034 - DNA, 201 bp, Homo sapiens
cggggggctgaggtgggagaatggcttgagcctgggaggcagaggttgcagtgagctgagatcacaccactgcactctagctcgggtgacgaagcctgacyttgtctcaaaaaatacagggatgaatatgtcaattaccctgatttgatcatagcacgttgtatacatgtactgcaatattgctgtccaccccataaatat

SEQ ID NO: 260035 - DNA, 201 bp, Homo sapiens
cagcctgtgcaacatggtgaaacctcatctctaccaacaaaacaaaaaaacacaaaaattagccaggtgtggtggtgcatccctatactcccagcaactcrgggggctgaggtgggagaatggcttgagcctgggaggcagaggttgcagtgagctgagatcacaccactgcactctagctcgggtgacgaagcctgacct

SEQ ID NO: 260036 - DNA, 201 bp, Homo sapiens
ggcctctttcttcaacctctctaatatgggctccagacggatctctaaggttcccagctctcagggttgactctgttccatcctctgtgcaaaatcctccygtgcttccctttggccctctgtgctcttgtctggttttccccagaaactctcaccctcactccatctcccactgcggtctaacaaatctcctttcgtctc

SEQ ID NO: 260037 - DNA, 201 bp, Homo sapiens
agaggactggcacagccggaggaagcgcctgcggcacaggggcagggctgtgcagaggccgcttccgcccctcccgcccctcccgcagacccggaaatcahacgggggtcaggatggaggccgacaggatgttcacagccgcgggttatgttcatgaccgctgaaccccaggcacggtcgtatccaagggagggatcatgg

SEQ ID NO: 260038 - DNA, 201 bp, Homo sapiens
gcggggtttctggcagaggactggcacagccggaggaagcgcctgcggcacaggggcagggctgtgcagaggccgcttccgcccctcccgcccctcccgcwgacccggaaatcacacgggggtcaggatggaggccgacaggatgttcacagccgcgggttatgttcatgaccgctgaaccccaggcacggtcgtatccaa

SEQ ID NO: 260039 - DNA, 201 bp, Homo sapiens
tcctaataatcctggcggggtttctggcagaggactggcacagccggaggaagcgcctgcggcacaggggcagggctgtgcagaggccgcttccgcccctsccgcccctcccgcagacccggaaatcacacgggggtcaggatggaggccgacaggatgttcacagccgcgggttatgttcatgaccgctgaaccccaggc

SEQ ID NO: 260040 - DNA, 201 bp, Homo sapiens
gggattacaggcgtgagccaccacgcctagccgggtttatagttttataacccttatgacaaatctcatagtattctgcagggataagcatgaaaccactygttcaataagtgcaaacaaaaacgccaacaattcttaagacatttctaatcttattttaccaataattttaaagccagcttatgtattaaagatttataa

SEQ ID NO: 260041 - DNA, 201 bp, Homo sapiens
agtcttcacaactggtgagtaaccaggcatttcatgctcagcagaaaggagtgtgaggacggagctctctcttccattatctaagcctgtaggcttttaaycacttcaccgaactgtccgtctcttaccaagaaagtccttggtgtgaggctagagcatgggtgcagagtggagctctggggttcagaaggaggagcattt

SEQ ID NO: 260042 - DNA, 201 bp, Homo sapiens
ctcggtatggctttgaccaatttgctctgtacaaggaaggggaccctgcgccctacaagaatcccgagagatggtaccgggctagtttccccatcatcacrgtgaccgccgcccacagcggaacctaccgatgctacagcttctccagcagggacccatacctgtggtcggcccccagcgaccccctggagcttgtggtca

SEQ ID NO: 260043 - DNA, 201 bp, Homo sapiens
gtaaaattctaataaatctttcaggggaataaagtattcaaacagaataatgtgagttttaacgacctactcttcaaattttcaataattttttcaaataygttaattgtttgggaataattaaattttacatcccaggagagtgcctcactcacgccaccctaattcctggccagctgcactgtggtctattccgcgtta

SEQ ID NO: 260044 - DNA, 201 bp, Homo sapiens
tgaggcaggagaatcgcttaaacctgggaggcggtgagccgagattgcaccactgcagtccagcctgggcgacagagcaagactccgtcttgggaaaaaamaaaaaagagaagaggtcttactatgttgcccaggctttagtacactcgctgtattcacaggcatgatcatagctcactttagcctcaaatccctgggctc

SEQ ID NO: 260045 - DNA, 201 bp, Homo sapiens
gctactccggaggctgaggcaggagaatcgcttaaacctgggaggcggtgagccgagattgcaccactgcagtccagcctgggcgacagagcaagactccrtcttgggaaaaaaaaaaaaagagaagaggtcttactatgttgcccaggctttagtacactcgctgtattcacaggcatgatcatagctcactttagcctc

SEQ ID NO: 260046 - DNA, 201 bp, Homo sapiens
ggctttggactcggctgtgatccaggtatttaatctcgctcctcactgtgtccaggtagagcccatgctcggacgcacacagactgtaggcacctggacayagcacatcttctaaccgctccaggcctctgcagatacgctttcctcagtctctttccccttgcctgtcctggaaaatctccatttccttccagactaaac

SEQ ID NO: 260047 - DNA, 201 bp, Homo sapiens
ctctagagggttttttttttttttctgagacggtatcttgctttgtcgcccaggctggaggacagtggcacatctcggctcactccaagctccgcctcccrggttcatgccattctcctgcctcagcctcccgagtggcgggggactacaggcgcctgccaccacgcccggctaattttttatattttttactagagacgg

SEQ ID NO: 260048 - DNA, 201 bp, Homo sapiens
taaccacttcaccgaactgtccgtctcttaccaagaaagtccttggtgtgaggctagagcatgggtgcagagtggagctctggggttcagaaggaggagcrttttgggtgatggggccatttcaaagatggcggagccaaggctgtggcgggacgaccgccatccctacgcactgctcccaggatgaagtcctaggctttg

SEQ ID NO: 260049 - DNA, 201 bp, Homo sapiens
gctggacacacctgggcaggtgatgcctcctctcttagccacacgttcctcttccgggaaatggaataattccttctattttctgggattctctagagggktttttttttttttctgagacggtatcttgctttgtcgcccaggctggaggacagtggcacatctcggctcactccaagctccgcctcccgggttcatgcc

SEQ ID NO: 260050 - DNA, 201 bp, Homo sapiens
tatctagaggatatagggaaccacggggaagacctaacattgttttgctttcttagaattctcagaagccaccgctgaactgaccgtctcattcacaaacraagtcttcacaactggtgagtaaccaggcatttcatgctcagcagaaaggagtgtgaggacggagctctctcttccattatctaagcctgtaggctttta

SEQ ID NO: 260051 - DNA, 201 bp, Homo sapiens
gtgtaccaggtacagcactgtcaccttcatgcacactgtcccaggcaatcccacccagggcgcctctgatcctgtctctggcttgtggacacaggtgtccrgagcactgaggtccctgagacagtgaggaccccggctggacacacctgggcaggtgatgcctcctctcttagccacacgttcctcttccgggaaatggaa

SEQ ID NO: 260052 - DNA, 201 bp, Homo sapiens
cagacgaggaagtataacaccaaagccgcctactgccagagcaagctcgccatcgtcctcttcaccaaggagctgagccggcggctgcaaggtacgggggygctaggctcggcctccctcttgctttactctgagcctagagcggcctttccatgatcctaggctgatgggaggccaaacggtggatccagaacagagtca

SEQ ID NO: 260053 - DNA, 201 bp, Homo sapiens
gcactttgggaggccaaatcacaaggtcaggagatcgagaccatcctggctaacacggtgaaaccccgtctctactaaaaatacaaaaaatcaactaggcrtggtggcacgcacctgtagtcccagctactcaggaggctgaggcaggagaatcgcttgaacccgggaggcggaggttgcggtgagccaagatcgcgccac

SEQ ID NO: 260054 - DNA, 201 bp, Homo sapiens
atgacaaaaacgtcaaaagcaattgtaacaaaagcaaaaactgacaaatgggatctaactaaactaaagagcttctgctcagcaaaagaaagtatcatcgsagtgaacagacaacctacagaatgggagaaaatgtttgcaatctatcaattcacaaaagtctaatatccagaatctacaaggaagttaaacaaatttaca

SEQ ID NO: 260055 - DNA, 201 bp, Homo sapiens
attacaggcacccgccaccgtgcctggctaattttttgtgttttaggtagagacagggtttcaccatgttggtcaggctggtctcgaactcctgacctcargtgatctgcttcccttggcctcccaaagtgctgggattacaggtgtgagccaccgtgccctacctgaataattagtttgtttgagacaggatccatctct

SEQ ID NO: 260056 - DNA, 201 bp, Homo sapiens
catgacaaaaacgtcaaaagcaattgtaacaaaagcaaaaactgacaaatgggatctaactaaactaaagagcttctgctcagcaaaagaaagtatcatcrcagtgaacagacaacctacagaatgggagaaaatgtttgcaatctatcaattcacaaaagtctaatatccagaatctacaaggaagttaaacaaatttac

SEQ ID NO: 260057 - DNA, 201 bp, Homo sapiens
ctatccccataccgccactgttaactcttaaaataaataaataatctttgctggcaaggctatgctgaacctccttaggcactttctaattagatgtcctgagtcgtcccaattcttagacctttaatacctgtttttctcctttccttattccctttagtttttcaattcatacaaaactgtatccaggccatcaccaat

SEQ ID NO: 260058 - DNA, 201 bp, Homo sapiens
gcctgtggctgcgtcgcgcgctcttcctcggagctacccaggcggctggtgtgcagcaagctccgcgccgaccccggacgcctgacgcctgacgcctgctmcccggcccggcatgagccgctacctgctgccgctgtcggcgctgggcacggtagcaggcgccgccgtgctgctcaagtgagtacattctagccccgcgtg

SEQ ID NO: 260059 - DNA, 201 bp, Homo sapiens
aaactttagagcagagttttggcaaactatgagttaggggccaagtccagttgctgcctttttttgtacagcctgcaagcaacgactttatttatttatttattactactgttattttgagagggagtctcactctgtcggccaggctgagtgcaatggcgcgatctcggctcactgtaacctctgcctcctgggttcaag

SEQ ID NO: 260060 - DNA, 201 bp, Homo sapiens
ggaggccaaatcacaaggtcaggagatcgagaccatcctggctaacacggtgaaaccccgtctctactaaaaatacaaaaaatcaactaggcatggtggcrcgcacctgtagtcccagctactcaggaggctgaggcaggagaatcgcttgaacccgggaggcggaggttgcggtgagccaagatcgcgccactgcactcc

SEQ ID NO: 260061 - DNA, 201 bp, Homo sapiens
ttttgtacagcctgcaagcaacgactttatttatttatttattactactgttattttgagagggagtctcactctgtcggccaggctgagtgcaatggcgmgatctcggctcactgtaacctctgcctcctgggttcaagcgcggacctcagcctcctgagtagctgggattaagatgcctgctaccataccctgctaatt

SEQ ID NO: 260062 - DNA, 201 bp, Homo sapiens
gcagagttttggcaaactatgagttaggggccaagtccagttgctgcctttttttgtacagcctgcaagcaacgactttatttatttatttattactactrttattttgagagggagtctcactctgtcggccaggctgagtgcaatggcgcgatctcggctcactgtaacctctgcctcctgggttcaagcgcggacctc

SEQ ID NO: 260063 - DNA, 201 bp, Homo sapiens
ctttagagcagagttttggcaaactatgagttaggggccaagtccagttgctgcctttttttgtacagcctgcaagcaacgactttatttatttatttattactactgttattttgagagggagtctcactctgtcggccaggctgagtgcaatggcgcgatctcggctcactgtaacctctgcctcctgggttcaagcgc

SEQ ID NO: 260064 - DNA, 201 bp, Homo sapiens
gcacctggacttggcttccctcaagtctatccgagagtttgcagcaaagatcattgaaggtaggagaacgctggccatgtgggatgaggactgggataggyggctcccagggccaggctctgagaagtgaatgaagcaagcaaactttagagcagagttttggcaaactatgagttaggggccaagtccagttgctgcctt

SEQ ID NO: 260065 - DNA, 201 bp, Homo sapiens
gttttcaggaggcaacatcatcctggcctgccgagacatggagaagtgtgaggcggcagcaaaggacatccgcggggagaccctcaatcaccatgtcaacrcccggcacctggacttggcttccctcaagtctatccgagagtttgcagcaaagatcattgaaggtaggagaacgctggccatgtgggatgaggactggga

SEQ ID NO: 260066 - DNA, 201 bp, Homo sapiens
ggttttcaggaggcaacatcatcctggcctgccgagacatggagaagtgtgaggcggcagcaaaggacatccgcggggagaccctcaatcaccatgtcaamgcccggcacctggacttggcttccctcaagtctatccgagagtttgcagcaaagatcattgaaggtaggagaacgctggccatgtgggatgaggactggg

SEQ ID NO: 260067 - DNA, 201 bp, Homo sapiens
tcatgatctgcccgcctcggcctcccaaagtgctgggattacaggcgtgagccaccgcgtcggacttgactaccattcttaaagggggtttctttcaaaaragagcagcatacctcataatgtggttatatacatgcaatggaatattatgcagccttaaaaaagaaggaaattctgacacatactacaacatggatatac

SEQ ID NO: 260068 - DNA, 201 bp, Homo sapiens
cttgaaagggccagcacaggaccccgcccagagaataggtggaacaaacagttggagctttacttacttatttttgagatgaagtcttgctctgtcgcccrggctggagtacaatggcatgatctccactcactgcaacttccacctcccaggttcaagcgattctcctgtctccaagtagctgggattacaggtgcacac

SEQ ID NO: 260069 - DNA, 201 bp, Homo sapiens
ctgggctcatttcttcatgaacaaggggagaaaactatctcatagaagcatttggtatgggtccgaggcctttgggtctgagggaggaggggctggggtcyggactcttgggtctgagggaggaggggctgggggcctggactcctgggtctgagggaggaggggctatctcattgctttgggggtggcgcaggcggccct

SEQ ID NO: 260070 - DNA, 201 bp, Homo sapiens
gtattttaccacaacaaaaaaaattggaggctgggcattgtggcttatttgtaatcccagtactttgggaggccgcggggtggatcacctgaggtcagaarttcaagactagcttggctaacatggtgaaaccgctgactctactaaaaataaaaaaataaaaaattagctagttgtggtaggtgcctgtaatcccagcta

SEQ ID NO: 260071 - DNA, 201 bp, Homo sapiens
gttaagatgataaattttaagtgatttgtattttaccacaacaaaaaaaattggaggctgggcattgtggcttatttgtaatcccagtactttgggaggcygcggggtggatcacctgaggtcagaaattcaagactagcttggctaacatggtgaaaccgctgactctactaaaaataaaaaaataaaaaattagctagt

SEQ ID NO: 260072 - DNA, 201 bp, Homo sapiens
ccatcctggctaacacggtgaaaccccgtctctactaaaaatacaaaaaatcaactaggcatggtggcacgcacctgtagtcccagctactcaggaggctraggcaggagaatcgcttgaacccgggaggcggaggttgcggtgagccaagatcgcgccactgcactccagcctcggcgacagagtgagactccgtctcaa

SEQ ID NO: 260073 - DNA, 201 bp, Homo sapiens
ccaggtcacttgagcctaggagttcaaggctgaatgagctgtgatggcgccagcactccagccgcggcagcagagtgagactgactcaaaaaaaaaaaaaataataataaacaaaaagaaaagggggttaagatgataaattttaagtgatttgtattttaccacaacaaaaaaaattggaggctgggcattgtggcttat

SEQ ID NO: 260074 - DNA, 201 bp, Homo sapiens
gaggacattccatgaagtgaaataagccagtcgacagaagagcaaatacggtatgattccacttacaggagctacctacagttaaattcatagagaagttkgaatggtgcttgccaggggtcaggaggggaggggagaatggggagttactgtttaatggaaacggaagtttagtttggcaagatgaaacaatttgagaga

SEQ ID NO: 260075 - DNA, 201 bp, Homo sapiens
acccatccacagatgaacagggaaacagaatgtggcttctatagacaggggcatatgattcagccttaaaaaggaagggcattctggccgggcgcggtggygcacgcctgtaatcagtactttgggaggccaaagctggcggatcacgaggtcaggagttcgagaccagcctaaccaacatggtgaaaccccctctctact

SEQ ID NO: 260076 - DNA, 201 bp, Homo sapiens
gaggccaaatcacaaggtcaggagatcgagaccatcctggctaacacggtgaaaccccgtctctactaaaaatacaaaaaatcaactaggcatggtggcasgcacctgtagtcccagctactcaggaggctgaggcaggagaatcgcttgaacccgggaggcggaggttgcggtgagccaagatcgcgccactgcactcca

SEQ ID NO: 260077 - DNA, 201 bp, Homo sapiens
cagttactactagcaagctaattaacatacatcacctgacacagttaacttttttgtgtgtgagaatacttataatctaccctcttagcaaatttcagctrtacactgcagtattgttacctagagttggacaaattatttaatgccatgtgccttagtttcatttataaaatagggacattaagagtgaggactccatag

SEQ ID NO: 260078 - DNA, 201 bp, Homo sapiens
agttgatgttttgatatacgaatccactgtgagacagttactactagcaagctaattaacatacatcacctgacacagttaacttttttgtgtgtgagaayacttataatctaccctcttagcaaatttcagctgtacactgcagtattgttacctagagttggacaaattatttaatgccatgtgccttagtttcattta

SEQ ID NO: 260079 - DNA, 201 bp, Homo sapiens
atgtacaatcgggttttataccgagacattcagttcccaggggcaggcaggagacagtggccttcctctagctcaactgcaagaggctttcctcttttacyaatccacctcagcacagaccctttacgggtgttgggctgggggacggtcaggtctttctcatcccacgaggccatatttcagactatcccacggggagaa

SEQ ID NO: 260080 - DNA, 201 bp, Homo sapiens
gcagcattgctgtaaacatgtctcgcctcccgccatagggcggcttttctcctgtctcagaattgaacaaatgtacaatcgggttttataccgagacattyagttcccaggggcaggcaggagacagtggccttcctctagctcaactgcaagaggctttcctcttttactaatccacctcagcacagaccctttacgggt

SEQ ID NO: 260081 - DNA, 201 bp, Homo sapiens
gggtttttctatgttgctcaggttggtcttgaactcctggactcaagccagcctcctgcctcagcctcccaaagtgctgggattataggcatgaggcaccrtgcccggcccatgcttttcttaaatgctgtggaattgtgcctcaccatgtgtgtgtgtgttcggagtaggcacagtgacagggggcgggaatatggtttc

SEQ ID NO: 260082 - DNA, 201 bp, Homo sapiens
tgccaccacgcctggctaatttttgtatttttttgtagagatagggtttttctatgttgctcaggttggtcttgaactcctggactcaagccagcctcctrcctcagcctcccaaagtgctgggattataggcatgaggcaccgtgcccggcccatgcttttcttaaatgctgtggaattgtgcctcaccatgtgtgtgtg

SEQ ID NO: 260083 - DNA, 201 bp, Homo sapiens
ataaattgcaaaaacatccacaatgaaaaaaaccagaatttcaaataaaggcagaatcagccagtgcctgtgtcaagtcataccagagtctgtgccaaaaygaaaaacaggcaaccctttatctgtgttttaatgcacttaaaaaaattagcgatggggtcttgctacactgcccaggccggagtgcagtggctgttcata

SEQ ID NO: 260084 - DNA, 201 bp, Homo sapiens
ataatatttgaaaggtggcaggcattcaaccatggtcactgaatgagagatgtagggaagatgatggcagggaggtttttagatatcaacaccctgatagktctcattttaaccacctgtaagtgcacatacaagtcaacggcactggccgggcgcggtggctcatgcctgtattcccagcactttgggaggccaaatcac

SEQ ID NO: 260085 - DNA, 201 bp, Homo sapiens
gccttgacctcctgggctcaggtgatcctcccaccttggcgtccccaggagctgagatcacacgtgcgccaccacgcccggctaatttttgtatttttcgyagagacggggttttgccatgttggccaggctggtctcaaacacctgccctcaggtgatccgcctgcctcggcctccaaagtgctgggattacagacgtga

SEQ ID NO: 260086 - DNA, 201 bp, Homo sapiens
aaaggaagggggatcggagcctgggactgcgtggtcctccgttcaggacacaaatacgggggacattgagggcagggattagggtgaggcaaacgaggcamtggcctagcgggtggtggtgccacgacatttatggatcaatgtgaataatattttgttttttggacacagggtcttgctgcgtcacccagggtggagagc

SEQ ID NO: 260087 - DNA, 201 bp, Homo sapiens
gcatctggtccctttcttctttcctcagggctgtgtctggggcgtgtgccagcgcagagtggtgagtccttccccagaccccttccctcctgcgggatccrccagcgcgggagcagcggggtccaggcggggtctgcggggaggctgacccagccctgctcctcttccaggaccgctccccaagccctccctccaggctct

SEQ ID NO: 260088 - DNA, 201 bp, Homo sapiens
ttttgacagaatttcactctgtcgccaggctggaatgcagtagggcaatctcggctcactgcaacctccacctcccgagttcaagtgatgctcctgcttcrgcctcctgagtagctgggactacaggtgagtgccaccacatccagctaatttttgtatttttagtagagacagggtttcaccatgttggccaggctggta

SEQ ID NO: 260089 - DNA, 201 bp, Homo sapiens
gaggcctcttaagatgtgtatagggagagagagttggggggagagggagagagagaacagagagagagagacacacacaagaagagagagaggaagaaagraggagagagaggaagaggaagggagaggaagagagagagaaagagaaagagggagagagagaggagagaaagagacaagaagagaggaagaaaaaagagg

SEQ ID NO: 260090 - DNA, 201 bp, Homo sapiens
actcccagccatggtacagcgtcgcatggaaacctacaaagaggctgaggtgggctgtgatgcggcaggaggagggggacagagaagcggccggagcttgsgttggggtgcagagggagcctggggtggacaaagggtggtggctatgggggcgctggtgacaagttgtcactctctgagctcagagtcaagacatgagct

SEQ ID NO: 260091 - DNA, 201 bp, Homo sapiens
gtctgggaccactggagctccttgcccccctttgcttatctctacacagcaacagggtcgctaaacttaccttacactgctgaggcctcttaagatgtgtrtagggagagagagttggggggagagggagagagagaacagagagagagagacacacacaagaagagagagaggaagaaaggaggagagagaggaagagga

SEQ ID NO: 260092 - DNA, 201 bp, Homo sapiens
tgtcaagaagctggggcagtgcttgggctgcaaagactcaaatggctggagtctgggaccactggagctccttgcccccctttgcttatctctacacagcmacagggtcgctaaacttaccttacactgctgaggcctcttaagatgtgtatagggagagagagttggggggagagggagagagagaacagagagagagag

SEQ ID NO: 260093 - DNA, 201 bp, Homo sapiens
tttgttttccactcctgtattactttacttagaataatgccttccagctccatccaagttgctgcaaaagactttttttttttttttttaaagacggaatytcgctctctcaccaaggctggagtgcagtggtgtgatctcggcttactgcaaactccacctcccgggtttaagtgattctcctgcctcagcctcccgagt

SEQ ID NO: 260094 - DNA, 201 bp, Homo sapiens; identical to SEQ ID NO: 51908

SEQ ID NO: 260095 - DNA, 201 bp, Homo sapiens
atcccctacagtagtggagtaaatagtctcctgatggatgggtggcaggtcgaatgcatttctgctgcctgatcttcacttgtgctgggcatgtcgaatgmattatttcctgatttcttcagaatttgaccactaaagggacagcatctccaaaaggctaagcaggaagaagatggttgcattactggagatgagagggtt

SEQ ID NO: 260096 - DNA, 201 bp, Homo sapiens
gcagtgctgtttacctgctcagcctcctgttgctggacactatcttgttgccagcgttagcctctgtgggacatgggtgtggtgggcagagtcgtgactcmgtagaggggtccacgtcctaatcctcggaaggtgtgacgacattacctcacgtgtcagaggttctcgctgatgtgttaagtgaagcatcttttttttttt

SEQ ID NO: 260097 - DNA, 201 bp, Homo sapiens
gggtacccacaggctattagatccttgtttctgtgcatggaaattctcaaattatctccaaaagtctatgaagaaggtaaacacacatttccagatgaggraataggctgatatagttgaaagacacacagagggtcacagtctggaattgacagtggtgggattcgaacctatttcactccagaactgcgtagcgcctta

SEQ ID NO: 260098 - DNA, 201 bp, Homo sapiens
ggagtccaggcccccagcccctcctccctcagacccaggagtccaggcccccagccgccttctcctgcaggaccccaggagcttgggtacccacaggctaytagatccttgtttctgtgcatggaaattctcaaattatctccaaaagtctatgaagaaggtaaacacacatttccagatgagggaataggctgatatagt

SEQ ID NO: 260099 - DNA, 201 bp, Homo sapiens
ctctgagaacagccagccctggtgagagtgcggggagaggcgcttatgacacagggagggtgggtctgggaaccagcctggcaggaggaggagggagactsccggtggccgggagctgtttgttctctgggagggatcgtggcggggtggtttgtgcagccctttcctgaaaccggaggagcctggctccttcccaggtct

SEQ ID NO: 260100 - DNA, 201 bp, Homo sapiens
agctttccgacacggggaccttctgcccctcctgagccctgagtcccctccatcttaactgggaggtcacctgtttgcgtggtgtctgctcagcttgcagrcaaggccaccaacaccctcctttcctgtctttccttcctaccatcctctcctgtccaccctctgcctctccctcccttcttctcttctttccttctagtt

SEQ ID NO: 260101 - DNA, 201 bp, Homo sapiens; identical to SEQ ID NO: 51921

SEQ ID NO: 260102 - DNA, 201 bp, Homo sapiens
gtaccacatgcctactctcaggtactcaggaggctgaggttggggatcacctgagcccggggaggttgaggctgcagtgagccatgattgcaccactgctstcaaacctgggtgacagagtgagaccctgcctcaaaagaaaataaaaataaaaaacaaatgtaaactttaggggaacaataacaacaacaaaaataaaag

SEQ ID NO: 260103 - DNA, 201 bp, Homo sapiens
ccaggccccagcaggcggacaaacggtgcaacgccaggctggccagaggagataagcgcggctccttggagcttgtgtgcaagtcactgtactgaggagcyggctacggctcgatgagtctcaattaggaaaggccggggctggtggaggaagggaggagagcattcttcatcctcatcacatcctgagcctgtgccccag

SEQ ID NO: 260104 - DNA, 201 bp, Homo sapiens
ccggagtagctgggactacaggtgcctgccgccatgcccggctattttttttttgtattttttgggggttttactgtgttgcccaggctggtcttgaactsctgagctcaggcaatctgcctgcctcagcctcctaaagtactaggattacaggcatgggccaccacgcccggccttatttttatttttgagacagtctca

SEQ ID NO: 260105 - DNA, 201 bp, Homo sapiens
tgcgtcgcgcgctcttcctcggagctacccaggcggctggtgtgcagcaagctccgcgccgaccccggacgcctgacgcctgacgcctgctacccggcccsgcatgagccgctacctgctgccgctgtcggcgctgggcacggtagcaggcgccgccgtgctgctcaagtgagtacattctagccccgcgtgcgcggtcaa

SEQ ID NO: 260106 - DNA, 201 bp, Homo sapiens
tggctggtggccactgtattgcatggtgcccttctctcctgtgggtgcagtgctgtttacctgctcagcctcctgttgctggacactatcttgttgccagygttagcctctgtgggacatgggtgtggtgggcagagtcgtgactccgtagaggggtccacgtcctaatcctcggaaggtgtgacgacattacctcacgtg

SEQ ID NO: 260107 - DNA, 201 bp, Homo sapiens
cgaagtcttcacaactggtgagtaaccaggcatttcatgctcagcagaaaggagtgtgaggacggagctctctcttccattatctaagcctgtaggctttyaaccacttcaccgaactgtccgtctcttaccaagaaagtccttggtgtgaggctagagcatgggtgcagagtggagctctggggttcagaaggaggagca

SEQ ID NO: 260108 - DNA, 201 bp, Homo sapiens
aaaagtagctgggtgtggtggcgtgcgcttgtagtcccagctactagggagactgaggcaggagaatcacttgaacccgggaggcagaggttgcagcgagycattgcgccatgcactccaggctgggtgactgactgagattctgactcaaaaaaaaaaaaaatcctatgacaaggagaaaggtcagattccctggcaatg

SEQ ID NO: 260109 - DNA, 201 bp, Homo sapiens
atcagtgaatattagaaccttagattttgacgtcatcttaaagattatgtaattaaacctcctaaaatatgttaagaagcttatctacaatatctctgccrgttttcaactagcctatgaggcacatcttcagttatagaaaactctttttatcttctagagcaacatactccagaccttgatcctaatatgttttctttc

SEQ ID NO: 260110 - DNA, 201 bp, Homo sapiens
tgataattcactatatttaccttatattttactttatctctgtctgccttcagttaacacaatcatctgggccagttgctgtggctcacacttgtaatccragcactttggaagcccaggtgggtggatcactggaagccaagagtttgagaccaacctgggcagcatggtgagagcccatctgtatacaaaaagtaaaca

SEQ ID NO: 260111 - DNA, 201 bp, Homo sapiens
atactgctgaaagggctgcaaatgttcacttctttgtattccacctattacttatgagttgtttttatttcagtaaatcatttctgtggagaagcacaaayaatattcttctttcactgctaaagctcaccattccttcttcgtgatctcagttgatttttgcatctgcatttatctagattattgagaaggcttagctca

SEQ ID NO: 260112 - DNA, 201 bp, Homo sapiens
cccctgactttatcaaagggaaaatgtgatgaaaagtatcagtgttagcaatatggttttatttacatcattaaagtttgtagcccgggcccacattgagytttttgggagtccagtgagattagtttgccataaaattgcaaagctgcagttacagcagcaaccattaattcagcatctatcctgtgccaggtcatttat

SEQ ID NO: 260113 - DNA, 201 bp, Homo sapiens
ctttatttttttaactcttatttcagtttaatgcatacatgtgcaagtaggttctgcagataaattgcatgtcatgcgggtttgttgtacatactatttcrtcatccagttaataagcatagtacctgataggtagtttatcgatcctcactctcctcccccactccatcctcaagtgggcacgagtgtctattatttcct

SEQ ID NO: 260114 - DNA, 201 bp, Homo sapiens
ggtccatatgtctttcattatgccagcagcatactgttttaattagaatagctttgtattatattttgaaaccaggaagcgtgatttctcctgctttgttyttcttacagttgttttggctattcaaggtcttttgtagttccatataagttttagggattttttttttctatttcagtagacagtaccattgatattttg

SEQ ID NO: 260115 - DNA, 201 bp, Homo sapiens
aatagagggtttattttttaaatttttattctatttttttagatcttagaggtaaaagtatagttttcttacaaggatagattgtgtagctgtgaagttckggcttttagtgtgcccatcacccaaatactgcacaatgtacccaataggtagtatttaattcctcatacccttcctaccctccccacctttaggagtctc

SEQ ID NO: 260116 - DNA, 201 bp, Homo sapiens
aacccctggtgtggcaaatagtgggggcatattacagcttgttcatgttacagctcacgtttgttcctgcctcctgcagggcagtgaacagaaacgtgttyggtcccgccacccgtggcttggcggataggggcatgttacagctctggctcaaggagtcctaaggtctgggcctccagaagtgtgactgctctttttgct

SEQ ID NO: 260117 - DNA, 201 bp, Homo sapiens
gggttgaaaatcttagttgatggatcattaacaccacttcatttaaaaattcaacaagctaggaaacgaaagagtaaagatatagactccgtcttgtgccyctgtcttgggtcttcagtttagaaacctcttaaaggatgagccgctgtctttctactgcttgtctgctacttttgagtccttcacagtgctatcttcaaa

SEQ ID NO: 260118 - DNA, 201 bp, Homo sapiens
aaacaaggttccctggacatgagggaaggttgcctttgttcttgtcatagccatttgtcttgggttgagcagtacagttatttctcatacatgtggaaggkgctaagatcagtcatttaccttggatcatagttcagtggacattacactgattacattttaagatacatgtttgttctttatgtgaatgtccttagggcc

SEQ ID NO: 260119 - DNA, 201 bp, Homo sapiens
aatctagacatacaaatagcacaaatggtctcaattttgcatcctcatttgaagaacagctatttgaatcccaaatactacccaaaacttgacttacttawacttgtctatatctttaaaactttttatatttattgtaacttttctcattcaattaaaacttattgaatatttactatatgctaggcactatgctaggtt

SEQ ID NO: 260120 - DNA, 201 bp, Homo sapiens
cctcctcttcttcccccacttctcccttctttttcttttctgtttctctttctctctctaccctaaaagatccttttattctgtattacccccccaacccrcaatggaaacttcaaattttctgtcatgaataaaggataaattaatttagttcaggcagctattgcttccagtactgctaaaattcccttgggcacacat

SEQ ID NO: 260121 - DNA, 201 bp, Homo sapiens
ggggaagctgactaacgaccaagggtcagccatgcatcctgcagcatcccctgctattgggctccctcaccaggcaagtgaacaacgaacaaggcttcacsctcctggacaaacactgccccttgtcttctctcctgtcactgctgtatctgtgtttgtctctccctctccttcctccctcctcttcttcccccacttctc

SEQ ID NO: 260122 - DNA, 201 bp, Homo sapiens
caaaaatttttctttcaacaagcttcattgcatatttcagctcctatctagcaaagtgggtggaaagtcaatctctattattttacgctctcctccagccrcaagtcttcccttgcactgagctttgagacttttctgtatcagtcattagccactgatgtgcccatttcctatacattacggtactatcacaccttttca

SEQ ID NO: 260123 - DNA, 201 bp, Homo sapiens
catacattacggttgtttgtgttcatgttttacttttgcactagaatgtgtccttcttactggaactagccatgtcatatttactgttatatctcctacartgtgaagagtgattgtttaagcaaaataaatgtgtggcaaatgtttgctgacataatagatttattatttataatgtttgataattacttataaaattaa

SEQ ID NO: 260124 - DNA, 201 bp, Homo sapiens
taaggtaatacacactaacatattaacattctgcctattatctcagatggaatatgtgcatttaaatttcaatgtttaaatagtggaagtttaagacataytagtgaaggtgttatttttaaacaaatggaaccattcagcttttcttagtatacatgatgactaacacattcattttgtgtaggattaattctggcaatg

SEQ ID NO: 260125 - DNA, 201 bp, Homo sapiens
tagttgtcctacaatgatggtagccttcaaagtagttttccttgttcccagtgagaggaaaggaacagaaaagacaaaggcaaatccccatctggatcgtrtttctggttttaccttttcttgacattatttagcatttgtctgatccttacttaaccagattttctaggtgtgatcctatccattcacactcttatcttg

SEQ ID NO: 260126 - DNA, 201 bp, Homo sapiens
ctcagctgatccacccaccttggcttcccaaagtgctgggattacaggcgtgagccaccgtgcccggccgggcttttgtttttttaaaaaaatatttgtamctatattatatataaactgaattgactaagtatctcatgtttgcttccaacatggtcaggtagccctttccacattctttgattttgtacagttgaaact

SEQ ID NO: 260127 - DNA, 201 bp, Homo sapiens
tacagctctggctcaaggagtcctaaggtctgggcctccagaagtgtgactgctctttttgctccctctgcctgcagcacagtgaacagaggtgtgtggcycccagcggtattttctcccccactacccctcaagtgggagggagggttacagtattacagctccttttgttcctgccatgtggcaggttccaggctcttg

SEQ ID NO: 260128 - DNA, 201 bp, Homo sapiens
agaaccatgtactatgctgttttccaaggtaccatctgaaaaatagagtaaaataggatgaggacaatatgtttagtttctgattctctgatttgaaagaracaatctgccaactaaaagaaagaaatttagaaaagcaacaaaaggggtgtgtgtgtgtctgtgtgtttacacgtgcaagcattttctaacttgtttggt

SEQ ID NO: 260129 - DNA, 201 bp, Homo sapiens
ttccattggttttaaaataattccttagcaattactgggaatctgatcgaatagatagtgcttgttacctctcaaacaaatacgtaaattctattaagctkaagcctaattaaaatcattgatttcagagacacggttttatcatatcatctggcatgtgagaggggggatgattgtattttcatactattgattgcaata

SEQ ID NO: 260130 - DNA, 201 bp, Homo sapiens
tatactcttgaaaatgaatgactacaataattttcactttcttttttttttttttttttttgagacggagtttcactcttattgcccaggctggagtgcartggcgcgatctcggctcactgcaacctctgcctcctaggttcatgcgattctcctgcctcagcctccccagtagctgagattacaggtgcctgccaccac

SEQ ID NO: 260131 - DNA, 201 bp, Homo sapiens
ctgcaacctctgcctcctaggttcatgcgattctcctgcctcagcctccccagtagctgagattacaggtgcctgccaccacccccggctaattttctgtrtttttagtagagacggggtttcatcatgttgaccagcctggtctcaaactcctggcctcaagtgatctgccctcctcagcctcccaaagtgctgggatta

SEQ ID NO: 260132 - DNA, 201 bp, Homo sapiens
aaacctccctttttattatctatatctaactaacgtcatacatcaaacttagcatgtttaaatataatgtattttttctaaaacctgaaaataactttttwaattttttctctttctgatcttctatctaaaatcttaattgtcttctacttttaaattacttctgttttagaatctgtatcttcctagtctttcctcttc

SEQ ID NO: 260133 - DNA, 201 bp, Homo sapiens
tgagattacaggtgcctgccaccacccccggctaattttctgtatttttagtagagacggggtttcatcatgttgaccagcctggtctcaaactcctggcytcaagtgatctgccctcctcagcctcccaaagtgctgggattacaataattttcactttcatggtgcttataatacactggatgatgtgaccaaggaaga

SEQ ID NO: 260134 - DNA, 201 bp, Homo sapiens
gagatttggagcggacatccaaactatgttacttggtcagtgggagaggggttgacttaaccctggatctggatataacatttctattatccaaggaaggsgtgcttacctgaaacctaaattctggctttaatcactctggcatcatatggcttattgccaggtagcagctaccagcaaaagaaatatggacagcaattt

SEQ ID NO: 260135 - DNA, 201 bp, Homo sapiens
tttttttttttttttttttttttttgagatggagtctcactctgtcgcctaggctggagtgcagtggtgcgatcttcgctcactgcaagctctgccttccrggtccacaccattctcttgcctcagcctcccgagtagctgggactacaggtgcccgccaccatgcctggctaattttttgtatttttagtagagccaggg

SEQ ID NO: 260136 - DNA, 201 bp, Homo sapiens
ctcccgagtagctgggactacaggtgcccgccaccatgcctggctaattttttgtatttttagtagagccagggtttcaccgtgttagccaggatggtctygatctgctgacctcgtaatccacccgcctcagcctcccaaagtgttgggattacaggcatgagccaatgtgcccgaccaagccatatatattttaagtag

SEQ ID NO: 260137 - DNA, 201 bp, Homo sapiens
tcccgagtagctgggactacaggcacctgccaccacgcgcggctaattttttgtatttttagtagagacagggtttcaccgtgttagccaggatggtctckatctcctgacctcgtgatccacccgcctgggcctctcgaagtgctaggattaccggcatgagccaccgcgcccggccaagaggacttctttcttaactaa

SEQ ID NO: 260138 - DNA, 201 bp, Homo sapiens
cccgagtagctgggactacaggcacctgccaccacgcgcggctaattttttgtatttttagtagagacagggtttcaccgtgttagccaggatggtctcgrtctcctgacctcgtgatccacccgcctgggcctctcgaagtgctaggattaccggcatgagccaccgcgcccggccaagaggacttctttcttaactaag

SEQ ID NO: 260139 - DNA, 201 bp, Homo sapiens
ccaccacgcgcggctaattttttgtatttttagtagagacagggtttcaccgtgttagccaggatggtctcgatctcctgacctcgtgatccacccgcctsggcctctcgaagtgctaggattaccggcatgagccaccgcgcccggccaagaggacttctttcttaactaagaaactaagatttcttagttaagaggtag

SEQ ID NO: 260140 - DNA, 201 bp, Homo sapiens
aactgtggttagattaaggataaggatgaagactgatcttaaccgcttcctgctgacagggggcgctgttttggggaaatggcagaactccctcagaggcygatctaagggttcccggcagaaggggccatcttcagaggctctggttgcatgactgtttggagtttgatggcctgaaggtaagaacagacaaacccaatt

SEQ ID NO: 260141 - DNA, 201 bp, Homo sapiens
tacaccccatggagtactaatgagatctcggtccttctctggaggcctctgctttctcatctgaaaaatgaaggggttggaccaggtgatctctaagggtsccttctaaatttaacagtctgagttgaagaaaagctttgagcaatttagcagaagcctaaacaaaaaagtcagggaaaaaataccctttttccaagctct

SEQ ID NO: 260142 - DNA, 201 bp, Homo sapiens
cctaggccaattgtcccaaataccattttagtaagtcaagtttaagtaagtacacaccactagtcagtgagagcaccaagctcagaactcacttccccagkgtgtcctgctactgttcttttctttgcataaatatggttcccatttgccaaatcccatcatttttaatgcccaaatgggaaaaaaggcttacatctcatc

SEQ ID NO: 260143 - DNA, 201 bp, Homo sapiens
atggcaccactcactaagatacaggtagtgcacagattagagatgagcagagaagagagatctgctgcaaatatgttaaatgcatccacttggagaggtcygatgggtggctgcttatggacattgtggagttcaggcgagagatttaaattagagatcttcagctctaatctttgtgaatccttaagaatatgtctaact

SEQ ID NO: 260144 - DNA, 201 bp, Homo sapiens
ctaaggaacatttttgttgttgttatattgtcatgttgatatgcaaaataaatgccatctgactgtttttgactttctcagacactcaggtatctggcagtatatatatatatatattttattatctcaaagaaaaaaatttgctacttagagggaaataaaatcctaaattgtttatatatatatatataaaataacaat

SEQ ID NO: 260145 - DNA, 201 bp, Homo sapiens
gtttgattatacatctctaccagttaaaaaggttctaggtgaatagtatctttatctagttaaaaagattctagagaaatacattttaaaaggtgccaacrtaggtgcacaaaatatctcggctcacagcatctgtcctatccaacccacctctgggactttgcaagccagctctttttgtgcacctacgttgggacgatc

SEQ ID NO: 260146 - DNA, 201 bp, Homo sapiens
taaggaacatttttgttgttgttatattgtcatgttgatatgcaaaataaatgccatctgactgtttttgactttctcagacactcaggtatctggcagtatatatatatatatattttattatctcaaagaaaaaaatttgctacttagagggaaataaaatcctaaattgtttatatatatatatataaaataacaatt

SEQ ID NO: 260147 - DNA, 201 bp, Homo sapiens
tgggagattcaggttaatattgagtgaaacactccggcatatctaaagtaaagtattttctgagaaagtgggccatgaggccatgactacaggtacaattktaacttttatctgtgtggaaatgtggtagccatacttgggacctaggactaagtcaggatgacaatttttcccagcagaacaatgatactagtaccaata

SEQ ID NO: 260148 - DNA, 201 bp, Homo sapiens
tcagacactcaggtatctggcagtatatatatatatatattttattatctcaaagaaaaaaatttgctacttagagggaaataaaatcctaaattgtttatatatatatatataaaataacaattttgtaattatatataatcacaaaaaaaggcctgaaaagggccaggatcaagtctaaacaatttttttcattgtctt

SEQ ID NO: 260149 - DNA, 201 bp, Homo sapiens
tacctgaatcggggttcttattgtaacattcttgctttctggtagaggttagcaattagcaccttactaccctcccacaattttctaggtctaggttatcrttcatggtttcttggagaaaaattgggagattcaggttaatattgagtgaaacactccggcatatctaaagtaaagtattttctgagaaagtgggccatg

SEQ ID NO: 260150 - DNA, 201 bp, Homo sapiens
acaccctatctaaaacagcagccatcaaattgttctcaattatttttttctgccttaattttcttccttatgtgtatgtatgtgcgtctgtgtgtgtgtgtatatatatatatatatatatatatatgcacacacatatatatgtatatcactctcctaatatatgcatgtatatttgtttactagtttattccatttttc

SEQ ID NO: 260151 - DNA, 201 bp, Homo sapiens
ttccatgaaaccagttcctggtgccaaaaagtgtggggactgctgtgttaaaggatccttctaatattccatgaacacaattttctgtacaaaaaaaaaasatttagtagaaaattaaataagattatataatgttgaacaaatgctatttaaaacacttaagatttaaccactttatgattacttatcctgatgccctag

SEQ ID NO: 260152 - DNA, 201 bp, Homo sapiens
atggtgacaggatttgcttctggtgaggcctcagaaagcttccaattatggtggaaggcaaaggagaagcaggcacatagatggtgagagagggagcaagmtggggaggagctgtcacactcttttaaacaaccaaatatcatgtgaacttggagcaagaactcacttatcaccaaggggatgttgctaagccattcatga

SEQ ID NO: 260153 - DNA, 201 bp, Homo sapiens
gcactaattattttcagtgtattagtaactacacttgtctttgtaaaatgaagtagtcgttggaaataaaaacgtgtgatatgtacgttcagggtaacctrtgaatttcccaggtctcaactgtgtttgcttctgcaatgatgattttgaaccaccttgactgttaacatctttctatgcagcacaaaacccagatagttt

SEQ ID NO: 260154 - DNA, 201 bp, Homo sapiens
agatagcagtctctgaaatggttcatcataattactggttgtgtgtgtattatatttatatgaacattagaatcagaaatcatagaaatgttaacagaatyctgatctcagggtctataatgggggccattttatggttaaaattacctaaatgttaaaattatgctatttcttttaatatttctttaaaggccctcttat

SEQ ID NO: 260155 - DNA, 201 bp, Homo sapiens
gttattattgtgactatttttacaagaaggaaacctaggcatggttagattaattgcattgcccaagattgcaattagttgtttagtggagcctggatttwccaaggccgtttggctccagagcctgttttttttttttgtttgtttgtttgttttttgccagtgttctttacagtcttttaaagaaagggaagaaagaat

SEQ ID NO: 260156 - DNA, 201 bp, Homo sapiens
atatgcctaatttctcattcagtcttgagtactgagtttggatattattcacgtgtgaagtagaggtatggctgatgagatatatatatatatatatatayacacacacacatacacatatatatttataaatatatatctagcaggtagctccactttactcatatcttccatacacctcaagattgagatattgaatca

SEQ ID NO: 260157 - DNA, 201 bp, Homo sapiens
ttaattaataaggtcagttgtttatactccattaaagagacattttgagaaataagaaaataatcatgttgagtccgtgctgtttttcacattaagaatcttttttttttttttttttttttgagacagagtctcgctctgtcaccaggctggagtgcagcggcgtgatctctgctcactgcaagctccgcctcccgggtt

SEQ ID NO: 260158 - DNA, 201 bp, Homo sapiens
ggagtgcagcggcgtgatctctgctcactgcaagctccgcctcccgggttcaagcagttctcctgcctcagcctctcaagtagctgggactacaggcaccygccaccacgcccggctaattttttgtgttttttgtagagatgaggtttcaccgtgttagccaggttggtctcaatctcctgacctcgtgatccgcccacc

SEQ ID NO: 260159 - DNA, 201 bp, Homo sapiens
ctgcaagctccgcctcccgggttcaagcagttctcctgcctcagcctctcaagtagctgggactacaggcacccgccaccacgcccggctaattttttgtrttttttgtagagatgaggtttcaccgtgttagccaggttggtctcaatctcctgacctcgtgatccgcccacctcagcctcccaaagtgctgggattata

SEQ ID NO: 260160 - DNA, 201 bp, Homo sapiens
aattctcctacctcagcctcctgagtagctgggactacaggtgcatgctgccacacctggctaattttttgtattttagtagagacagggttttactgtgytttccaggctggccttgaactcctgaactcaggcaagctgcccacctcggcctcccaaaatgctgggactacaggtgtgagccactgcgcccagcccaaa

SEQ ID NO: 260161 - DNA, 201 bp, Homo sapiens
gtagcttgatggggatggcattgaatctataaattaccttgggcagtggggagggatagcattaggagatatacctaatgtaaatgatgacttaatgggtrcagcacaccaacatggcacacatatacatatgtaacaaacctgcatgttatgcacatgtaccctagaacttaaagtataataataataataataataata

SEQ ID NO: 260162 - DNA, 201 bp, Homo sapiens
atgtaaatgatgacttaatgggtacagcacaccaacatggcacacatatacatatgtaacaaacctgcatgttatgcacatgtaccctagaacttaaagtataataataataataataataataataataataataataaaagaaagcagtcatgtgaagagagagatggaagaccccacaaggccatgagcattctagct

SEQ ID NO: 260163 - DNA, 201 bp, Homo sapiens
caccctatctaaaacagcagccatcaaattgttctcaattatttttttctgccttaattttcttccttatgtgtatgtatgtgcgtctgtgtgtgtgtgtatatatatatatatatatatatatatgcacacacatatatatgtatatcactctcctaatatatgcatgtatatttgtttactagtttattccatttttcc

SEQ ID NO: 260164 - DNA, 201 bp, Homo sapiens
gataacctcactcaaaggctgggctcagctgtgactgttgacttaagcacctaaacaagaccttccatgtggcttgggcttcttccagcataatggctggrttcttatagggagcatctcaaaatgaggaatacagtcggcaagttccaagagaattatcaggcaggagaggcataatcaattcagacctggcctcagaag

SEQ ID NO: 260165 - DNA, 201 bp, Homo sapiens
tgtaaatgatgacttaatgggtacagcacaccaacatggcacacatatacatatgtaacaaacctgcatgttatgcacatgtaccctagaacttaaagtataataataataataataataataataataataataataaaagaaagcagtcatgtgaagagagagatggaagaccccacaaggccatgagcattctagctt

SEQ ID NO: 260166 - DNA, 201 bp, Homo sapiens
ttgcttttggtgttttagacatgaagtccttgcccatgcctatgtcctgaatggtattgcctaggttttcttctagggtttttatggttttaggtctaacrtttaagtctttaatccatcttgaattgatttttgtataaggtgtaaggaagggatccagtttcagctttctacatatggctagccagttttcccagcacc

SEQ ID NO: 260167 - DNA, 201 bp, Homo sapiens
tccctgtgcatagctaggatacagctgaattttgattccatggaagctcttcgggaagtatttttactatgccactagcattgtgcattggttgctttgcwatgtgtctaaatggatatattaggagttagtgaaacttaatagaggggcaagcatggtaaaagacaggaaaacagcttctgacagtaggagaacaagtga

SEQ ID NO: 260168 - DNA, 201 bp, Homo sapiens
gtaaatgatgacttaatgggtacagcacaccaacatggcacacatatacatatgtaacaaacctgcatgttatgcacatgtaccctagaacttaaagtataataataataataataataataataataataataataaaagaaagcagtcatgtgaagagagagatggaagaccccacaaggccatgagcattctagcttt

SEQ ID NO: 260169 - DNA, 201 bp, Homo sapiens
ctacatgacacaatagtagatggaataaaattctcaatttgaaaaataaaactgaaaattttagaagaaaacataagatactgaaatacaaactttaaaamttgataaacataaaaacctttaaaaatgcaacaaaagaaatggtaaataaaatcaaaggtaaatcataaagaaaaaaagttggcaatattgtcattgttt

SEQ ID NO: 260170 - DNA, 201 bp, Homo sapiens
tgtttaagtgtactgctgtttattgatttaattatttataactttgatgcttttagcctgtgtttccccaataaagcatttgcttaaattttaggtgaggaaaagattaaacactatgaaacatcttttggatttatgaacctacttggaagtattggagatcataattgcctctgtataaatttgaggttttcattatta

SEQ ID NO: 260171 - DNA, 201 bp, Homo sapiens
ttactacactcctgcatgagatctgtctcaaccactcaagaagccagaaagagacatagagaattggctaggactactgtttcctttcccctccttgcaatttttttttttcatttactttaacttgcattaagacatacatgatagcaaattaaggtatgttttatctgaagcccctaacttctgacatttaaaagtcta

SEQ ID NO: 260172 - DNA, 201 bp, Homo sapiens
taagtgtactgctgtttattgatttaattatttataactttgatgcttttagcctgtgtttccccaataaagcatttgcttaaattttaggtgaggaaaasattaaacactatgaaacatcttttggatttatgaacctacttggaagtattggagatcataattgcctctgtataaatttgaggttttcattattaacag

SEQ ID NO: 260173 - DNA, 201 bp, Homo sapiens
ctcccttgtataaatagaccacaatttatctattgccctagttaattttaagtaacagcaaaacatcagatgttttaccaacatctgattaccaacaatastgtaatagacattctcacatgtatatccatgtatataaaccaataggtataatgggtggtaaggcatttgtatttttaattttgctagatgctgccagat

SEQ ID NO: 260174 - DNA, 201 bp, Homo sapiens
agtgtactgctgtttattgatttaattatttataactttgatgcttttagcctgtgtttccccaataaagcatttgcttaaattttaggtgaggaaaagaytaaacactatgaaacatcttttggatttatgaacctacttggaagtattggagatcataattgcctctgtataaatttgaggttttcattattaacagat

SEQ ID NO: 260175 - DNA, 201 bp, Homo sapiens
ttgggcagctctgcccctgtaggtacagctcccctactggctgctttcacaggctagtattgagtgtctgtggcttttctaggtgcatagtgcaaggtggygatggatctaccattctggggtctggaggataatggcccatttctcacagctccaccaagcagtgctgcagtggggactgtatgtgtgggctccaacccc

SEQ ID NO: 260176 - DNA, 201 bp, Homo sapiens
tgtgtgccaccatgtctggctaattttttttgtctttttaatagagacgggatttcaccatgttggtcaggctggtcttgaactcctgacctcagatgatycacctgccttggcctcttaaagtgctgtggcccatttttcaatgaggctttagttgcctgtgttttgggctcacgtataaaaaatgtttgttcagattaa

SEQ ID NO: 260177 - DNA, 201 bp, Homo sapiens
tcccctatttatctttctactaactaagatatgtcagatatgtatttttgttgtttcatttctttcaaaaatttttctttcaacaagcttcattgcatatytcagctcctatctagcaaagtgggtggaaagtcaatctctattattttacgctctcctccagccacaagtcttcccttgcactgagctttgagacttttc

SEQ ID NO: 260178 - DNA, 201 bp, Homo sapiens
tcaaaaacgaaatacaggacccctatttgcaattgtttttataacatctaaacaaagtagacctttttctgaggatttccttaataaatgatgagaaaacrtggacacatagaggggaataacacacacagggacctgtcgaagggtggagagtaggaggagggagagattcaggaaaaataactaatggatactaggctt

SEQ ID NO: 260179 - DNA, 201 bp, Homo sapiens
tgttagagtttctgtacagagaaaagcataattacatggtattggaaccagaaaacgagttctagatctatatctatttacctatttctttgtagaaatcycctatttatctttctactaactaagatatgtcagatatgtatttttgttgtttcatttctttcaaaaatttttctttcaacaagcttcattgcatatttc

SEQ ID NO: 260180 - DNA, 201 bp, Homo sapiens
catttactttattttttatcccaaattatacctagccacatgccaatatgtttcaagagagttaatacaactataacacataacaaatatgctttgataayacaaattcaataaataatttataaaaatattataaaatctctaacaaaggagaaattatatccaaagataaagctaaaataaataattaaataaataaac

SEQ ID NO: 260181 - DNA, 201 bp, Homo sapiens
gaatagaatcagaaggcttagacagtaattttacgtgttaatgtcctcttaactgggaattaaagttatcccagactccaggagaatgacaaactagagcrgtgaaacatgattgttcacattttaaagtaccttagcaacaaacacacctacagaatgtttaagacactagtctccttccttttatctgactgttatttt

SEQ ID NO: 260182 - DNA, 201 bp, Homo sapiens
atgagttctatatatatacatatatatacacacgtatatatacgtatatatgtatatatatatagaactcatatatacgtatatatgtatatatatgtatrtgtgtgtgtgtgtgtgtgtgtgtgtatatatactttaagttctaggctacatgtgcacaatgtgcaggtttgttacatgtgtatacatctgccatgttgg

SEQ ID NO: 260183 - DNA, 201 bp, Homo sapiens
taggcatggttagattaattgcattgcccaagattgcaattagttgtttagtggagcctggatttaccaaggccgtttggctccagagcctgttttttttktttgtttgtttgtttgttttttgccagtgttctttacagtcttttaaagaaagggaagaaagaattctgtggctagactctcaaaggttatttcctgtca

SEQ ID NO: 260184 - DNA, 201 bp, Homo sapiens
gtggttcacagagctcagaaaagcaattctacttactattgctaatttatcacaaaggatattttaaaggatacagctgaacagcccagatgaagaggtamatagggcaaggtctggcaagatcctgtgtgcaagagcttttgtatgtgtaaagttggggtgtgccccctcttggcacatagttgtattcaccagcctgga

SEQ ID NO: 260185 - DNA, 201 bp, Homo sapiens
acatagttgtattcaccagcctggaagcactctgaactcagtagtttagggttctttattgaggcttcatcaagtaggcataatcaatttttaactcaatrtgtaatccctcaccccttcctgcaggatgagggctggggctaaaagctccaaacttgtaaccatgccttggtcttcctggtgaccagccgccatccagca

SEQ ID NO: 260186 - DNA, 201 bp, Homo sapiens
agctgacctcttaatttcaagtccaacactgggagtgtatatgtcaaactatcttttaaaatacctacttagaatttatctttttttaatcataagtgaamatagataaattcagctttattctcgcattccatcactaaccaatactgaggaggaagaataacaaaaattatgttaagaggcagccaataaggaacttga

SEQ ID NO: 260187 - DNA, 201 bp, Homo sapiens
cagcgattatctcatacatgcacataaaagtgttcagatacagtagtggtgtttccagatgctaaagtcacttcttcagaaacaggttaaaaaaaaaaaawagggtgttgtggttgggcatattgttgcattgagcgtggggcagccagccaggttttgttttattttactttatacttaacagaggttgacagagcagca

SEQ ID NO: 260188 - DNA, 201 bp, Homo sapiens
taatgtttttggtagatccagcctcaccaccatctctcttcaggttctctctcctcattgccttctggaagccttgcctttgtgttagctttccaaattcrtatttcaaaatacatatctgatctgtgtaccagctgcttgagaacagttcagtggcctgtcacatggttctccatctccctctcctttcccttctccaca

SEQ ID NO: 260189 - DNA, 201 bp, Homo sapiens
atatacacaataaaatgtatttattttaaaaaagaaggagactcaaagttttcaaattgagttctaagaatgtatttttaaagctccatgagagaaaaagygaaggcaaggagtgaatgacgggcagggggttaatagggcttgtatttcccagcccacaccaaacagagcagctctgcttttatctgttttacatataag

SEQ ID NO: 260190 - DNA, 201 bp, Homo sapiens
cagtggcaggttgagaaaggctaatttcatcccataattatctaggaaaaggaaggaaaataccatggggattgctgggaaatagagagatttttgtttcmtatctgtgctatctttctttgtctctgctcccttgcaatccctgggagtatttctgcacaggaatgtctcaagatatataaaacctgaaaagtatgaaac

SEQ ID NO: 260191 - DNA, 201 bp, Homo sapiens
tttgccttttagtatatgctattatcattgggtatttaattctttttatatatttaatctaaaagttattatttgtattttatagcattgatatttatgtmgatattcgcatatttattatttttattgctctttattttattgtaaactatagttaccatactgatctatcaaatactaggtcctattatttcttctatc

SEQ ID NO: 260192 - DNA, 201 bp, Homo sapiens
ggttcaaacccagatctggatgactccagaatggaagttctttttagcgccctccgtctaatatatggattttgacatttccttatttaaaagtttttttwaaaaaatgtttgttagacaaatgccttagtaatacctaagtattttgatattcaataagtatgtttttctgactagggaaaaagaaaaaagaggaggttg

SEQ ID NO: 260193 - DNA, 201 bp, Homo sapiens
tgtatgttcaaataactagacaaaagcacagcagaaattcattaggaaaacaatatcttttttaaaaatttaatgttaggttccaggatacatgtgcagtrcgtgcaggtttgttacataggtaaatgtgtgccagggtggtttgcagcatctatcaacccatcacctaggtattaaacactgcatgcattagctatttat

SEQ ID NO: 260194 - DNA, 201 bp, Homo sapiens
ttctggatattagacctttgtcagatggatagactgcaaaaattttctcttactctgtaggtggtctgtttactctgttgatagttcctttcgttgttcaraagctctttagtataattagatcccatttgttagcttttgcttttgttgcagttgcttttggtgatttcatcataaaatatttgcccatgcctatgtcct

SEQ ID NO: 260195 - DNA, 201 bp, Homo sapiens
aacagtatattttcaacatattttgcagaaacaattggatatccatgagcaaaagaacagttaactttacctcatacatatataaaatttaactcaaaatwgatcataaaccttaatgtacagtgtaaaagaacaaaagcaggcaaacttctataagaagtcatgaattgggagaaaatatttataaaatatgcatatgtt

SEQ ID NO: 260196 - DNA, 201 bp, Homo sapiens
gagcatttaggaggtgataataaggaaaacaggcccgatgttttcatgaagaagtctgcctatgccatttctactattgttgagatctgtttatgacactaaaaaaaaaatcttctcctttaaggatgtatgtctttctttagtctttaactgtttaaaacatattaggctggtgcaaaagtaattgcggttttaataaaa

SEQ ID NO: 260197 - DNA, 201 bp, Homo sapiens
tactactacttagatgcaacaagtattttcattgttgcaatccagtgttttggttctggaagtactttttaaaagtattcacatttaaacgacaatagacrtagatatctcgcaaatccctctcgctcaaggttctataatgtaagatgctgctctaggtgctctaaagtttacagaagaatggcctcataaaatgatacg

SEQ ID NO: 260198 - DNA, 201 bp, Homo sapiens
  misc_feature (1)...(201): n = A,T,C or G
tgaatgggcaaaaggagaattccccctgagaacaggaacaagaaagattcccgctctcatcactcattcaatataatatgggaagttctagtcagagcaanaagtaagagaaagaaataaaagtcatccaaataggaagagaggaagtcaaactagctgtttgcaggctttatacatctataccgaaaaaacttcagtctc

SEQ ID NO: 260199 - DNA, 201 bp, Homo sapiens
gtgactcacgcctgtaatcccagcactttgggaggcccaggcgggtggatcatgagctcaggagatcgagaccatcctggctaacacggtgaaactccgtytctactaaaaatacaaaaaaattagccgggtgtggtggtgggcgcctgtagtcccagctactccgggaggctgaggcaggagaatggcatgaacccggga

SEQ ID NO: 260200 - DNA, 201 bp, Homo sapiens
ggtgagcggattgcttgagctcacgagttcaagaccagccggggcgacatggcaaaaccccatctctactgaaaatacaaatattagctaggtgtggtggkgcatacttgtagttccagctactcaggaggctgaggtgggaggagtcccttctctttaattttttggaatagtttcactacaaatggtatcagctcttct

SEQ ID NO: 260201 - DNA, 201 bp, Homo sapiens
tttgtattactgatgcaatttcagaactcattattggtctattaagagattaaatttcttcctggttcaatcttggaagctgtatgtttccaggaatttarcaatttcttccagggttttaagtttgggtgtatagagtttttcatagtattctctgagagttttttgtatttctgtgaggtcaagtggtaatgtctcctt

SEQ ID NO: 260202 - DNA, 201 bp, Homo sapiens
gactcacgcctgtaatcccagcactttgggaggcccaggcgggtggatcatgagctcaggagatcgagaccatcctggctaacacggtgaaactccgtctytactaaaaatacaaaaaaattagccgggtgtggtggtgggcgcctgtagtcccagctactccgggaggctgaggcaggagaatggcatgaacccgggagg

SEQ ID NO: 260203 - DNA, 201 bp, Homo sapiens
ggtgtcactgcatgtgagatgggtctcttgtagacagcacagttgggtcttgtttctgtatccaacttgccactctgtgctttttaattggaacattcagyccatttacatttaaggtttgagcctgtccttgtgttgttagctggttatcatgcagacttgattgtgtggttcctttacagtgtcaatggtttatgtact

SEQ ID NO: 260204 - DNA, 201 bp, Homo sapiens
ccatcctggctaacacggtgaaactccgtctctactaaaaatacaaaaaaattagccgggtgtggtggtgggcgcctgtagtcccagctactccgggaggytgaggcaggagaatggcatgaacccgggaggcggagcttgcagtgagccgagattgtggcactgcactccagcctgggggacagagcgagactccgtcaa

SEQ ID NO: 260205 - DNA, 201 bp, Homo sapiens
taatgagttctatatatatacatatatatacacacgtatatatacgtatatatgtatatatatatagaactcatatatacgtatatatgtatatatatgtrtgtgtgtgtgtgtgtgtgtgtgtgtgtatatatactttaagttctaggctacatgtgcacaatgtgcaggtttgttacatgtgtatacatctgccatgtt

SEQ ID NO: 260206 - DNA, 201 bp, Homo sapiens
ctgaaaggtctgctgttatcctaatggagttctctttgtaggtgacctgtcccttctctctaactgccttcaatatttttcctttcatttcaacattgaaraatctgataattatgtcttggggatggtcttctggtgtagtttttcacagggattctctacatttcctggatttaaatgtttgcctctctaataaggttg

SEQ ID NO: 260207 - DNA, 201 bp, Homo sapiens
cccttctctctaactgccttcaatatttttcctttcatttcaacattgaagaatctgataattatgtcttggggatggtcttctggtgtagtttttcacarggattctctacatttcctggatttaaatgtttgcctctctaataaggttgaggaaattttgtgaatgatatcctcaaatgttttgcaagttgcttacttt

SEQ ID NO: 260208 - DNA, 201 bp, Homo sapiens
gtttcttctttcttttgaatgtcgataatcttcattccaatccatattctgaactctatttctgacatttcagccatttcagcccaggtaagaaccatttytgggtaagtagtatggttgtttagaggtaagaaggacactctgcctttttgagttgccagaattttgcactgttttttttttctcatctgtgtgagctga

SEQ ID NO: 260209 - DNA, 201 bp, Homo sapiens
ctgactctacattaagcccagacagggtggtgtcctgctttgctcctttctgctctctgcgttcctctgctgccttgatggattctgatgtggttgctcaratgatcagcctgcagggtcagtgttcactagcccttttgtttcctctagaagtagcacttgttagcggcttctagtctgccattttggcctttcccccaa

SEQ ID NO: 260210 - DNA, 201 bp, Homo sapiens
tgagaatttcattggaaaaagatcaatgaatgaagctttaaaaagttaatagttctccagctaaaacaacttttttttttttttttttttttttttgagayagagtttcgctcttgttgcccaggctggaatgcaatggtgtgatctcagctcaccacaacctccgtcccccaggttcaagtgattctcccacctcagcct

SEQ ID NO: 260211 - DNA, 201 bp, Homo sapiens
ggagataaagttaaagaatagtaagatggaattttacacggagttttacctgctacacaaaccatagtcataaatgagatatacaacttttaaatacagcyttttacatttaacattttggtataagccattttaaactcttcattaacgtctttttaatagtgacctaacattccatcaaattagttaatgcaatttatt

SEQ ID NO: 260212 - DNA, 201 bp, Homo sapiens
cataattcaagatgagacttggatgggaatacagccagaccatatcatctaagatacagaaaagctgtataatcatagtcatgctttattatagtgaaagyatacaaattaagaacagcaaagagaaaggttcatggtgcaaagtttaggaacaaactcccagctatcctctcccagtggagtcacatggaggtgtgatta

SEQ ID NO: 260213 - DNA, 201 bp, Homo sapiens
cttcagacttaatggagttagataatagggagatgagctaattttttttcgtgttactcatatcctaatttttttattattgatttctgctaaatttcccrggctactttcagaacttaggctataatctaaggtacatgtggacttttatttttatttgggagctaagagcagccctggagtcagactgccttctcagct

SEQ ID NO: 260214 - DNA, 201 bp, Homo sapiens
tagacttggctctgtaagaaaatatgccaagtgtttgtgatttgttcttgaatctccagaacctaacataattcgtagcaaataatagaggcccaatattrtggaatgaaggcctagtcatatggatctaccattgctgttgacacttttgaggttttcttgatattaataagtgaatattgttcaacatttatgcaaaaa

SEQ ID NO: 260215 - DNA, 201 bp, Homo sapiens
acatacatacatacatacatacatacatacatacacacacacataaattggcagtggaaaagggggttgaaaaacttgagaaacaagtttaaaaacaagasattgtacagaaagaggctgtagataaacttcctccttgagattcaagagcttcaatctcttggtgatgagcagttgaaaagatttccactttcctgcagt

SEQ ID NO: 260216 - DNA, 201 bp, Homo sapiens
gggctggagtgcagtggcacgatctcaagtctgctttttcagtttcatctctacccacattattctcaatcctgaccacctcttcttacctcatttatggkggcttgtgggtacctaacactttctaaaggtgaaatcagagttcctttatttctctgggatccctattctcatgctttttgagctcagtttcaatttcat

SEQ ID NO: 260217 - DNA, 201 bp, Homo sapiens
ttcttactttgttctctgttagtggtgtgccataaacccccaaaagggagctgaagtatgatcctattatattaaagtagcaagtgaatttgttaaactcytggtaagacatgtacacatatgggttgggaatatttttggtgtagaaaagtaatatatatatatgatatatattaatttataattacaaatatcattttc

SEQ ID NO: 260218 - DNA, 201 bp, Homo sapiens
ggaatatttttggtgtagaaaagtaatatatatatatgatatatattaatttataattacaaatatcattttcacatcatacagaatatgataggtactayagatataattgtacttttaatctatgtgtgtgtgtttcagtcttgaggacctggaagcaaatgaggagagaagaaggaaagttgatgtattatttttgta

SEQ ID NO: 260219 - DNA, 201 bp, Homo sapiens
gggaaacgtagaaaactcatgaaaaataatagacaagacagattttaagaaggtagaagagaaggatgacatcaaacaaataaaatatgtagaataagacrgaagtaataggcaagtttatgttgttttacttgaatacatttagtgccaacataaacagattgctttttttttaatgctgtgctgcaatggaggatgatc

SEQ ID NO: 260220 - DNA, 201 bp, Homo sapiens
gtcatcttgtcaaacttgttccttagcttataataaaactttaagttgctataaataacactttttcttattatgcaatagttatgactagagcccagatytggaaaggtaggggagcagagtagtttggcccttctcaaagtttgttttgtagaatattggtttacacattttttttattaccaataaaaaaagttgcag

SEQ ID NO: 260221 - DNA, 201 bp, Homo sapiens
cttgagaaacaagtttaaaaacaagacattgtacagaaagaggctgtagataaacttcctccttgagattcaagagcttcaatctcttggtgatgagcagwtgaaaagatttccactttcctgcagttggataagcaccactgcttttttgacaagcttggctccctgtgcatagctaggatacagctgaattttgattcc

SEQ ID NO: 260222 - DNA, 201 bp, Homo sapiens
ccttctctgcctaaattttgagaaatccattcttagtctgtttttcagacttctgtgtggagaatgcactctcaaggagccatttattgctagggctatcrttggggtaaaatgcagggatgagggagtttgactaggtgaaacaaaggaggccattaaactgccttcagtgccagcacctaggccacttgagtatgggca

SEQ ID NO: 260223 - DNA, 201 bp, Homo sapiens
aaatatatgtaaaacaaaggatgctgtgctgaatcctgaggcatttcaatattagagaaaaaagagccagaactgagcaatggcaaggtactcactgtctrtgtaagaactgagatttggcacaggaagagaaacaaaagggatattattattagtagtagtagtattatttgagatggagttttgctcttgttgcccagg

SEQ ID NO: 260224 - DNA, 201 bp, Homo sapiens
gaaatcacctcaaaagctgtgtcccttctctgcctaaattttgagaaatccattcttagtctgtttttcagacttctgtgtggagaatgcactctcaaggrgccatttattgctagggctatcattggggtaaaatgcagggatgagggagtttgactaggtgaaacaaaggaggccattaaactgccttcagtgccagca

SEQ ID NO: 260225 - DNA, 201 bp, Homo sapiens
gtctgtcctgggcccagtttgtgtgcttttctacattggctaaatcctaatcctaaggattaaatccttataatcctaacatgtcttcacatttttgaccmcttgctcaatggtgagcctcaggtattgccaccactgtcaccttatctcttaacaccattaactatatcagcctctctcaaggtgaagaccaggcattag

SEQ ID NO: 260226 - DNA, 201 bp, Homo sapiens
ccttgcccatgcctgtgtcctgaatggtaatgcctaggttttcttctagggtttttatggttttaggtctaacgtttaagtctttaatccatcttgaattratttttgtataaggtgtaaggaagggatccagtttcagctttctacatatggctagccagttttcccagcaccatttattaaatagggaatcctttcccc

SEQ ID NO: 260227 - DNA, 201 bp, Homo sapiens
catatggctagccagttttcccagcaccatttattaaatagggaatcctttccccattgcttgtttttctcaggtttgtcaaagatcagatagttgtagayatgcggtgttatttctgagggctctgttctgttccattgatctatatctatgttttggtaccagtatcatgctgttttggtcactgtagccttgtagtat

SEQ ID NO: 260228 - DNA, 201 bp, Homo sapiens
ctagccagttttcccagcaccatttattaaatagggaatcctttccccattgcttgtttttctcaggtttgtcaaagatcagatagttgtagacatgcggygttatttctgagggctctgttctgttccattgatctatatctatgttttggtaccagtatcatgctgttttggtcactgtagccttgtagtatagtttga

SEQ ID NO: 260229 - DNA, 201 bp, Homo sapiens
aaagggaagagctgatctgaggtggcagcagagtaagcaggacttaaattatgttttagccttgttacctaacatgtctgttagacagctaagtggagatkcagtacatgtgtctgtaatgcagcatcaaatgacattaaagtctggaactgtttgtttgaactaaataaaatatatgtaaaacaaaggatgctgtgctga

SEQ ID NO: 260230 - DNA, 201 bp, Homo sapiens
tgaaattcataaattcctacatatgaatattgagaatttcattggaaaaagatcaatgaatgaagctttaaaaagttaatagttctccagctaaaacaacttttttttttttttttttttttttttgagacagagtttcgctcttgttgcccaggctggaatgcaatggtgtgatctcagctcaccacaacctccgtcccc

SEQ ID NO: 260231 - DNA, 201 bp, Homo sapiens
caaccaaacacttatagaaataagtaaataaatttttaaagtagaaatcccatgggacagtttcactgggcagggtgagattcctgcattgaaaaatcgtkaaaggtgcaaaaccaaaaatcagtcacgtatgtatagcaagtagccattctataactaatttgtggttaattcttgagttaagccagaccacaaaatctt

SEQ ID NO: 260232 - DNA, 201 bp, Homo sapiens
gaaattcataaattcctacatatgaatattgagaatttcattggaaaaagatcaatgaatgaagctttaaaaagttaatagttctccagctaaaacaacttttttttttttttttttttttttttgagacagagtttcgctcttgttgcccaggctggaatgcaatggtgtgatctcagctcaccacaacctccgtccccc

SEQ ID NO: 260233 - DNA, 201 bp, Homo sapiens
ttatttctgctttcatttcgttatgtacccagtagtcattcaggagcaggttgttcagtttccacatagtcaagcagttttgagtgagtttcttaatcctkagttctagtttgattgcactgtgatctgagagacagtttgttataatttctgttcttttacatttgccaaggagtgctttacctccaactatgtggtcaa

SEQ ID NO: 260234 - DNA, 201 bp, Homo sapiens
taattttttttcccaatcatttactgagtaaacaaaatgagaaactcgtgaaaaaaaaatgatatagaagaagaggagtcaatagtatctttgatgagagygctgatagcatgcttttccactgctctggcttggatgatggaaggctatttatcaaattgcatctcagttgtgttttcggaactgctagcaatgttcttt

SEQ ID NO: 260235 - DNA, 201 bp, Homo sapiens
cagcctcaaacgctcttggtagctgcaaagcattatctttgctggatgccctcccacacccaccaattcttatagaattgtccagtgcttcccttgcttcrcaaatctttactgagttatgtcatagcctgcagtgtactttcctggatttaataatagtttaaatatccatcccaccctactagactgtggaaattttga

SEQ ID NO: 260236 - DNA, 201 bp, Homo sapiens
cattcacttagtgtttccctctgtcatggaaaggagcccagggaataaaatcacacttagtgcctgcgaggctagttggctcagggcagagatagtggggyagtgactatattgtggggcacccttagctccccagcttcactaggtttataaaaaaggtatgtgtgtgtatgtgtgtgtgtgtgtgtgtgtgtgtgtgtg

SEQ ID NO: 260237 - DNA, 201 bp, Homo sapiens
gcacctgggataacctcactcaaaggctgggctcagctgtgactgttgacttaagcacctaaacaagaccttccatgtggcttgggcttcttccagcatartggctgggttcttatagggagcatctcaaaatgaggaatacagtcggcaagttccaagagaattatcaggcaggagaggcataatcaattcagacctggc

SEQ ID NO: 260238 - DNA, 201 bp, Homo sapiens
cctcataatagcatgtacatctacaatatttttaaaataatttctaacattctaatgtattttacattatgacatcacataggcatttcatagagtattamtaagaatgtatctttttattatgttggggccattaattatcctttcaaccctttgggtttatttcatctagtctattataccacaacataaaataaataa

SEQ ID NO: 260239 - DNA, 201 bp, Homo sapiens
aaaaccacatgattatctcaatagatgcagaaaaagcctttgacaaaattcaacaacccttcatgctaaaaactctcaataaattaggtattgatgggacrtatctcaaaataataagagctatctatgacaaacccacagccaatatcatactgaatgggcaaaaactggaagcattccctttgaaaactggcataagac

SEQ ID NO: 260240 - DNA, 201 bp, Homo sapiens
catctaagatacagaaaagctgtataatcatagtcatgctttattatagtgaaagtatacaaattaagaacagcaaagagaaaggttcatggtgcaaagtytaggaacaaactcccagctatcctctcccagtggagtcacatggaggtgtgattaaagctgccagcaaaatgatgtataacccatgaagtgtggtaaacc

SEQ ID NO: 260241 - DNA, 201 bp, Homo sapiens
ttatagacacactaaaacattcacttagtgtttccctctgtcatggaaaggagcccagggaataaaatcacacttagtgcctgcgaggctagttggctcarggcagagatagtggggcagtgactatattgtggggcacccttagctccccagcttcactaggtttataaaaaaggtatgtgtgtgtatgtgtgtgtgtgt

SEQ ID NO: 260242 - DNA, 201 bp, Homo sapiens
tcatgtttttgatgcaaaaatttattaaattcttataaaaataattgcctccatgaaactgtcctagatatttcctgagataatgatcttatcacctttgttttttttttttttttcatttgtttgttttcaggcactgtcctttgatccgtatctgtgaaaactgagcctgaaacacagccagtgaaagtcaagccacat

SEQ ID NO: 260243 - DNA, 201 bp, Homo sapiens
aggtaatgagttctatatatatacatatatatacacacgtatatatacgtatatatgtatatatatatagaactcatatatacgtatatatgtatatatakgtatgtgtgtgtgtgtgtgtgtgtgtgtgtatatatactttaagttctaggctacatgtgcacaatgtgcaggtttgttacatgtgtatacatctgccat

SEQ ID NO: 260244 - DNA, 201 bp, Homo sapiens
tcttttggaaggtctgacttaaaagagtgagtagaggttagtatctgagaatatacaacactggtaatggtggtgtttgatgttgagccagttcatagttmgctccatccatttcagatgcagcaaaaaagaacagaagcaagattctatcactgggaaaagttggtagcattcaaccctaatagaatcgtctgggcgcgg

SEQ ID NO: 260245 - DNA, 201 bp, Homo sapiens
gggaaagtacattcacatgctaccttcctctcagggttaatataaaccttgtttcttcattcaccctgtctgatacacattgtttctgatgtggccttgcytcttagctcttgccctgttcacatatcctctgcgccgtcctttatccccacccctatcgacctccattccctatccctaccatggtgactgcctatacct

SEQ ID NO: 260246 - DNA, 201 bp, Homo sapiens
aatgagttctatatatatacatatatatacacacgtatatatacgtatatatgtatatatatatagaactcatatatacgtatatatgtatatatatgtakgtgtgtgtgtgtgtgtgtgtgtgtgtatatatactttaagttctaggctacatgtgcacaatgtgcaggtttgttacatgtgtatacatctgccatgttg

SEQ ID NO: 260247 - DNA, 201 bp, Homo sapiens
tggtgcaactacacatttcatgcatatagcaaaattgcacttgtataaacttatgctccaaaaaattgatgtactatattccatggtcttgaacattactrggaaacttctatattcacctagtttacttcacctacattcacctagtaaaaatgttgcacctcttcacttctctgattgcctgtactctgataaggattc

SEQ ID NO: 260248 - DNA, 201 bp, Homo sapiens
ctcaaactataaaactactacaagaaaacattaggaaaactctccaggacattgttctgggcaatatttcttgaggagtaccccacaagcatagacaaccaagcaaaaatggacaaattggatcacatcaagttaaaaagtttctgtttagtgatggaaacagtctataatatgaagagacaattcacagaatgggagaaa

SEQ ID NO: 260249 - DNA, 201 bp, Homo sapiens
tatacacacgtatatatacgtatatatgtatatatatatagaactcatatatacgtatatatgtatatatatgtatgtgtgtgtgtgtgtgtgtgtgtgtrtatatatactttaagttctaggctacatgtgcacaatgtgcaggtttgttacatgtgtatacatctgccatgttggtgtgccgcacccataaactcgtca

SEQ ID NO: 260250 - DNA, 201 bp, Homo sapiens
aggcgtgagccaccgtgcccagccaagaatcttttaaatcatagaacttagagaggatcccagagaccatgaattctcctacttattttattgatgaaaawaccaaggaccaacgattgagtcaccaatgcagctaatgacagaaccagagctagaaaattagacttctgtccttagtctcaagttcttcttccatactca

SEQ ID NO: 260251 - DNA, 201 bp, Homo sapiens
aggattgaaatttatatcaggaaagtgagatgagaaaattgaagatattggccagagagtcattaacatgatgggtaggtctgtagatgggaagaataaargtcaagtgggggctgataaggagaaagaaaaaggtcaagtggtgataaattctgagaaggttaaagaacagaagtataagaggtgactgagtgaggaaac

SEQ ID NO: 260252 - DNA, 201 bp, Homo sapiens
tgaagagacaattcacagaatgggagaaaatatttgcatactgcccatcagacaaggggttaataatcagaatatataaggatctgaaacaactctatagaaaaaaaatctaataatcctatcaaaaatgggcaaaatatttgaatagacatttctcaaaagaagacatacaaatagcaaacaagtatatgaaaaggtact

SEQ ID NO: 260253 - DNA, 201 bp, Homo sapiens
agaatatataaggatctgaaacaactctatagaaaaaaaatctaataatcctatcaaaaatgggcaaaatatttgaatagacatttctcaaaagaagacayacaaatagcaaacaagtatatgaaaaggtactcaacatcacttatcataagacaaatgcaaatcaaaactgcaatgatatatcatttcaccccagttaaa

SEQ ID NO: 260254 - DNA, 201 bp, Homo sapiens
ctaccaaaaatacaaaaaattagccaggcgtggtggtgtgtgcctgtaatccagctactcaggaggctgaggcaggagaattgcttgaatccaggaggcaragattgcagtgagtcgtgatcatgccactgcactacagcctgggagacagagtgagactccatctcaaaaaaaaaaaaaaaaaaaaaacaacagcaacaa

SEQ ID NO: 260255 - DNA, 201 bp, Homo sapiens
aaaattagccaggcgtggtggtgtgtgcctgtaatccagctactcaggaggctgaggcaggagaattgcttgaatccaggaggcagagattgcagtgagtygtgatcatgccactgcactacagcctgggagacagagtgagactccatctcaaaaaaaaaaaaaaaaaaaaaacaacagcaacaaaaaagggaaactatg

SEQ ID NO: 260256 - DNA, 201 bp, Homo sapiens
tccgcctcccgggttcaagcaattctcctgcctcagccacccatatagctgggattacaggcacatgccaccacgtccagctaatttctgtattttttggkggagatggcatttcaccatgttggccaggctggtctcgaactcctgacctcatgatccacccacctcagcctcccaaagtgctgggattacaggtaggcg

SEQ ID NO: 260257 - DNA, 201 bp, Homo sapiens
cttgcttgtatctccttaatgttcaattctatttctctctctctctcttttctggccatgttacttcagcatttaaatgtgcttatgtatcccaattattaaaaaaaaaaaaaagctatttcttaactcagtggccttatctgcttgagaaatatcagctaagtagagtgatgacactgttccctctgttcttcctacctg

SEQ ID NO: 260258 - DNA, 201 bp, Homo sapiens
aaaattttagcgaatagcacaccactgcagtgattacagagcagtatttatattcttcttgtgcactgggcagggatttgtcatttcatacatcatttacracttgctgcagtgattttggtggtgggaggaggttaggatgggcattttctgctccttgaatccagcattgctccaactttttcccctatgttttctctt

SEQ ID NO: 260259 - DNA, 201 bp, Homo sapiens
ggaagtggaggttgcagtcagccaaaatcacgccattgcactccagtctgggtgacaagagcaagactctgtcttaaaaaaaaaaaaaaaagggtataaarattaggtaattaccttttttataacatcatcttgggctgattagtttattgcattataggacagttttacatcttgcatagaaagtaaagttttaaaatt

SEQ ID NO: 260260 - DNA, 201 bp, Homo sapiens
gtgtttcagtcttgaggacctggaagcaaatgaggagagaagaaggaaagttgatgtattatttttgtagcctttgttttcactttcttttgttgtcttartactgccaattgtggaagaaagccatttgggaagtatttgtggtgctttcttcaacttgattaggctttgctgccagggccttcgttgtactatacagga

SEQ ID NO: 260261 - DNA, 201 bp, Homo sapiens
ctttcatgtcatttctcctttttcggtactcccactagtccttgaaacaagtagtatttgagtgatgttatctttcccactaagttcatttgaaaaaatayattgagacaaaaatacatataatatatgaaagatccagggagagggaatgttaaaaacaaatattactggttttgtatttgctgtaaaattgtgtcattt

SEQ ID NO: 260262 - DNA, 201 bp, Homo sapiens
ttgaagagccttgatgtgaaaattaagctggggctttgtacaaaagatctgactttaatagccatgttcatcttggccaacttatttattttctacgtttyttgactggatatgtagagcatttaggagaagaattttattcagtgtccaaaaggaagtagtttctatggaaaaggtgctataaatggatttgataactga

SEQ ID NO: 260263 - DNA, 201 bp, Homo sapiens
tttcctccatcttgtaagagatgagaggaaggaagtaatttttgcattacttagaagacatgattaatgaattatataaggaaaagcttttggtctttatygggtaattcctatgttcctggaagatagcccttctaggatcagatttaaagaataagtctttagaaacagaggcactgacagagttctgagggcttttca

SEQ ID NO: 260264 - DNA, 201 bp, Homo sapiens
atgatattcccttattaaaattttcacaacatttaaatagttgcagtttttgaaaagtcctgaaactcgacttttaatattctaattataaatgtaatctwtggaaagtttaggtaaaataacaaattatctagagtatttcgagttatttaacttcctggacattgatctaaactgaaaatgaaaatccttctccatttc

SEQ ID NO: 260265 - DNA, 201 bp, Homo sapiens
tgatattcccttattaaaattttcacaacatttaaatagttgcagtttttgaaaagtcctgaaactcgacttttaatattctaattataaatgtaatcttyggaaagtttaggtaaaataacaaattatctagagtatttcgagttatttaacttcctggacattgatctaaactgaaaatgaaaatccttctccatttcc

SEQ ID NO: 260266 - DNA, 201 bp, Homo sapiens
gtgcctacttttttcttcattgttgattgtgggtttagtgagtgccagttatgatgtagaaattgtataaaagcatagcattggcatgggtttgatttgtyagaagtcaaaatactgaaatatctgaataaataaattaatgacctgtaacatcacttctatccttaaatacatattctggtggggggaaaaaaaagagca

SEQ ID NO: 260267 - DNA, 201 bp, Homo sapiens
ctgatacagtcatggggctcaagctttaggttctgaagcagcctcctaggccatgttgctttaaattccagctgaatataagatgattacatgtgagacayctttaatatgttattctgatttccagagatggaagttaacaacaaattaattccgttgtaaaactgcccctctacaacaaaaacaaaaaccttttaattt

SEQ ID NO: 260268 - DNA, 201 bp, Homo sapiens
catggtgtatatgtgacacattttctaaatgcattctatcattgatggacatttgggttggttccaagtctttgctattgtgaatagtgccgcaacaaacrtacatgtgcatatgcctttatagcagcatgttttataatcctttgggtacatacccagtaatgggatggctgggtcaaatggtatttctagttctagatc

SEQ ID NO: 260269 - DNA, 201 bp, Homo sapiens
ccattgcttttggtgttttagtcatgaagtccttgaccatgcctatgtcctgaatggtattgcctaggttttcttctagggtttttatggttttaggtctracatttaagtctttaatccatcttgaattaatttttgtataaggtgtaaggaagggatccagtttcaactttctacatatggctagccagttttcccagc

SEQ ID NO: 260270 - DNA, 201 bp, Homo sapiens
actgtttttgcaggggctgctaccagttgttcctttccacgtttagcgcttccttgaggagctcttgtaaggcaggcctggtggtgacaaaatctctcagyatttgcttgtctgtaaaagattttatttctcctccacttatgaagcttagtttggctggatatgaaattctgggttgaaaattcttttctttaagaatgt

SEQ ID NO: 260271 - DNA, 201 bp, Homo sapiens
ctctactaaaaatacaaaaattagctgggcatagtggcgggtgcctgtaatctcagctatttgggaggctgaagcaggagaatcgcttgaactggggaggyagaggttgcggtgagctgagattgcaccattgcactctagcctgggtgatacgagcaaaactccgtctcaaaaaacaaacaaaaaaagatcatagaacat

SEQ ID NO: 260272 - DNA, 201 bp, Homo sapiens
tctactaaaaatacaaaaattagctgggcatagtggcgggtgcctgtaatctcagctatttgggaggctgaagcaggagaatcgcttgaactggggaggcrgaggttgcggtgagctgagattgcaccattgcactctagcctgggtgatacgagcaaaactccgtctcaaaaaacaaacaaaaaaagatcatagaacata

SEQ ID NO: 260273 - DNA, 201 bp, Homo sapiens
acaagatcaggaagagaaggacaattgagttaggatattagcctaggctatactgaggtaaaattaaaaaataatgccaagttctcaatggcagtattcakcaggccccagacaggaaatcaagaagtctaagaatttacaaattaagcagggttttttgaagtcaagtcaccaagagtttagcaatactgagttgctact

SEQ ID NO: 260274 - DNA, 201 bp, Homo sapiens
caagatcaggaagagaaggacaattgagttaggatattagcctaggctatactgaggtaaaattaaaaaataatgccaagttctcaatggcagtattcatmaggccccagacaggaaatcaagaagtctaagaatttacaaattaagcagggttttttgaagtcaagtcaccaagagtttagcaatactgagttgctacta

SEQ ID NO: 260275 - DNA, 201 bp, Homo sapiens
aagatcaggaagagaaggacaattgagttaggatattagcctaggctatactgaggtaaaattaaaaaataatgccaagttctcaatggcagtattcatcwggccccagacaggaaatcaagaagtctaagaatttacaaattaagcagggttttttgaagtcaagtcaccaagagtttagcaatactgagttgctactaa

SEQ ID NO: 260276 - DNA, 201 bp, Homo sapiens
atataggtatgtacattcttgagattttcataacattgggctttaaaattatatgcaaagatgctacttcaaacacacttagcagcacaggtgttctaatwtattttgacattaattgttaggtgctcagaaattcaattttggctttattttcttactaaagggctgagaatatattgcaaaaatttctgattgtgtcac

SEQ ID NO: 260277 - DNA, 201 bp, Homo sapiens
ggcaggataattgcttgaatcagtaagtgggaggttgcagtgagccaagatcacgccattgcactccagcctgggcaacaagagcgaaactccgtctcaawaaataaaataaaataaaataaaataaaataaaataaaataaaataaaataaaataacaataaacaaaaaatggacatggctgacttttaataaaaatgta

SEQ ID NO: 260278 - DNA, 201 bp, Homo sapiens
cctgtcacatggttctccatctccctctcctttcccttctccacaatttttgtcctcccagccaaccctccaggtccttgaagtcactgtccttttcacaygcagtccctgttggccgtgtcctttccccttctctgcctaataaactcccacatctctgtgaagtctctcccagacaatacctcttctgtggtggttcat

SEQ ID NO: 260279 - DNA, 201 bp, Homo sapiens
tcacgccattgcactccagcctgggcaacaagagcgaaactccgtctcaaaaaataaaataaaataaaataaaataaaataaaataaaataaaataaaatwaaataacaataaacaaaaaatggacatggctgacttttaataaaaatgtatttacaaaaataaaaaaatgtatgacctggggttagcctgcaagtcatag

SEQ ID NO: 260280 - DNA, 201 bp, Homo sapiens
gctgtcagtggatgtatttaagcatgatataggaatcttttgtgactatccagtctcctataagcatagcactagtcttagcaattgatcagaaaatattmaaataaatgttgtagatccagtccagtcaatcagatacccacaattaagtcagttcacaagaaaaaaaaaatgggaccctctggactgtctttggaatta

SEQ ID NO: 260281 - DNA, 201 bp, Homo sapiens
tccacccaggcactaagtgaaagcctatagaagataaggaaaaataggaaacccaaaaggaaggaaaatcattgaaaaagtagccaaatgctttaagaaasggaatagatagagctatagttccaaagtttactcccatatttcattgattattcatctattttagtatttttgaatgattcacttgcattataattagta

SEQ ID NO: 260282 - DNA, 201 bp, Homo sapiens
aggttaaaaagtaagcttcaaagtattgccacaggatcaaaatgaattggcctcattctctgttcaaatcttactgagcactctttttttttttttcttaktaggaaatgaaacctgttattggttggtatatatcttctcttttccttggcatctttcattttctttggtttatggtcttattaagtgaattaaattaga

SEQ ID NO: 260283 - DNA, 201 bp, Homo sapiens
taattgactcacagttctgcattgctggggagacctcaggaaactttcaatcatggcagaagtcacctcttcacagggcagcaggaggcagaatgggtgcygagtgaaaggagaagccccttataaaaccatcagatcttgtgcgaaatcactcactaccactagaactgcatgggggaaactgcccccatgatgcagtga

SEQ ID NO: 260284 - DNA, 201 bp, Homo sapiens
gatttagagccacacttcagacctctgagctccaactctagtgaagctttcccttttttgtctttattttcccctgatagaaacagcaccaaaggatattyagaaaacactgtcccttgaattatatttaaaatattaaaaaattaaataaattatcttaaattatataattataatgacagtgatagcaaagatataata

SEQ ID NO: 260285 - DNA, 201 bp, Homo sapiens
tagtaatactaatttgttttgaatactaattcttgacatacatgattacatatatgtgcatgcatgagccattacatatacttgacatatatgtaatcacrtcaagtattagtgttaatcttcccagtgttttagcaaaacaagattacctagttttaaaaagcattttcgtcaccttacataaaaattgctagtgcatca

SEQ ID NO: 260286 - DNA, 201 bp, Homo sapiens
ctcagtttttaacaaaaatgtttaaaaagtaaaaaaaaagaaaatttaaaaagtaaaaataagaaaaagttatagaataaggaaacaagaaaaaatacttytgtatagctgtacaatgtatttgtgttttcagctaaatgttttaaaagtgtcaaaaagttaagaaaatttaaaagtgtataaagtaaaaaagttatagta

SEQ ID NO: 260287 - DNA, 201 bp, Homo sapiens
aatcaacactgaaccagcattctcacagttgtttgtgaagcttagtaaatacactgggaaatcataaggggccagcagaatgcggggagattgtacaattycacaggaaagataaatgtactagctatattgcaaaacaaatatggtcagccaggcgcggtggctcacgtccgtaatcccagcactttgggaggccgaggc

SEQ ID NO: 260288 - DNA, 201 bp, Homo sapiens
ttgaggctcaatggtttatgaataatatacttattctgctatagtaaagtaaggattagaacattaatgcagaatgaggtaaacctaggggaaggggaaaygtggtgagaatttgaattacattagtattggtggtgtgtaaggaaaactgatgtaggtcttagttttttgttttaccaaagaaaataattggaagaatga

SEQ ID NO: 260289 - DNA, 201 bp, Homo sapiens
ttgtggatatataggaaatcttcataaaatattttattttcataaattattgatgtcaaaaaaggcctgtattttatattaaactgaaacattcttcaccwttgcaagaaaatggaaaagctgatcaatgagattctacttacatctaaatcattctccagtttcaaactatttgctaagagagtggttggactttgattc

SEQ ID NO: 260290 - DNA, 201 bp, Homo sapiens
ccttttctgggacatgaggctttcaaagctgtgtttctggaaaggttgattttggaaggcatcaaatgggagattattagttcaagaaaatgtaatagtgycgctgtgtgactttcagagaatgttcaatcacttccttttctctttgagtaagtatttctcagaagagtagacttctctgtttctgctttctcaccaacc

SEQ ID NO: 260291 - DNA, 201 bp, Homo sapiens
aaattattgatgtcaaaaaaggcctgtattttatattaaactgaaacattcttcacctttgcaagaaaatggaaaagctgatcaatgagattctacttacwtctaaatcattctccagtttcaaactatttgctaagagagtggttggactttgattctcttagaggaccacttagtgctaagctactataataaagtaga

SEQ ID NO: 260292 - DNA, 201 bp, Homo sapiens
agagaatgttcaatcacttccttttctctttgagtaagtatttctcagaagagtagacttctctgtttctgctttctcaccaaccatttactctttgatcyacaacaatctttcgcttactctctcattccaatagaactcctctttctcagattttccacttgccaaatgcagtagactctttctgggtgaacttactag

SEQ ID NO: 260293 - DNA, 201 bp, Homo sapiens
gtggctttcaatatgtgaaaataatattttgttacatgaaaactactttttatatgtgcagtacactcatattttccattctcttctttattatctttttwaaaaaatgctacattttattaaattgattttataacccactctagggttttgactcatgatttcaaaaacatgatcatatgtagcaatcagggataaaag

SEQ ID NO: 260294 - DNA, 201 bp, Homo sapiens
gcaggcagaactaagaggccaggtagaatctgaaggcagacttttggcctccagatccctcgtatttagccaagtggggatgctggcctgcctcctcgtgmtgatgtgagcctcagacaaatcctcctgtgccaggcttgatgccaagtgcttctaagaggtaggaagatgagcgagacagggagacacagacacagacct

SEQ ID NO: 260295 - DNA, 201 bp, Homo sapiens
tacatttcaagagctcagcttcatttctgcaaagcaagcattgaagggtagatttggagttgtgaggcaataaattgataagcagcacaaatatttaaagaaaaaaagtgcctagtcttttggcctcaaattggacagattcttttaatccctaggggtttgtgcattggggccaacccctgtcttttctgggctccagtg

SEQ ID NO: 260296 - DNA, 201 bp, Homo sapiens
ttgcactccagcctgggcaacaagagcgaaactccgtctcaaaaaataaaataaaataaaataaaataaaataaaataaaataaaataaaataaaataacwataaacaaaaaatggacatggctgacttttaataaaaatgtatttacaaaaataaaaaaatgtatgacctggggttagcctgcaagtcatagtttgcaaa

SEQ ID NO: 260297 - DNA, 201 bp, Homo sapiens
gcagtataaaacaatatctcaggatgggcacggtggctcatgcctgtaatcccagcactttgggaggcctaggcgggtggatcacctgaggtcaggagttygagaccagcccagccaacatggcgaaacccgcatttctataaaaatacaaaaattagccaggcatgatggcgggtgcctgtaatcccagctacttgggag

SEQ ID NO: 260298 - DNA, 201 bp, Homo sapiens
atgggcacggtggctcatgcctgtaatcccagcactttgggaggcctaggcgggtggatcacctgaggtcaggagtttgagaccagcccagccaacatggygaaacccgcatttctataaaaatacaaaaattagccaggcatgatggcgggtgcctgtaatcccagctacttgggaggctgaggcgggagaaccccttga

SEQ ID NO: 260299 - DNA, 201 bp, Homo sapiens
atgccatgagaccttatagcctttcactatagtctcagatatcgatttcagtaaaatttcttgagagcatcaaattaaatataatttaatacattaataamagtagcaattctggttttgctgctactgttactgttccaatactaccattaggatgatggggcagaagtggtaattatcttgtgtaagacattgtgttga

SEQ ID NO: 260300 - DNA, 201 bp, Homo sapiens
tgaacatattaaagcttttttgctatttaaaattataaacaataatgcaataaacattcttgtaacttttacctctgaatactttcttaaactccatttgaaaaaaaaaagaatactattatggagatatgcatagagactcagctgccctgtctaaattttgtgttagaataatgcaggactgagtagcaaaagcaagac

SEQ ID NO: 260301 - DNA, 201 bp, Homo sapiens
agtagtacccatgaaggtccttattatatgctttatttaactactaagtactgaagaattatacagaaacatgctgcaccatgacttatgacaagttattrtgtcatattcaaatgagaatatgacacactggaaaactgatataatgaattatttaaagccatcccaggattagagttaatatagttttcttcacagatc

SEQ ID NO: 260302 - DNA, 201 bp, Homo sapiens
catcactggccatcagagaaatgcaaatcaaaaccacaatgagataccatctcacaccagttagaatggcaatcattaaaaagtcaggaaacaacaggtgygggagaggatgtggagaaataggaacactttatactgttggtgggactgtaaactagttcaaccattgtggaagtcagtgtggcgattcctcagggatct

SEQ ID NO: 260303 - DNA, 201 bp, Homo sapiens
cttgaaacctcacctattaacaaactggctattattaatgatactgctttcctgaaccagacctgaatttctgtggtctgcagaatttttattgggttgaaaaaaaaaaaatggcagcaacccaagtattgggttgacagaggtgtgctccgaataaagcaagttttgtcactatagaaatagaaatagtggcctaaaaat

SEQ ID NO: 260304 - DNA, 201 bp, Homo sapiens
atccattattaaataattaccatagtcaaactaattactacttcctcacctcagatatttatcactttctctctctctctctctgtgtgtgtgtgtgtgtstgtgtgtgtgtgtgtgtgtgtgtgtggtgagaacatctacaatctactctgttagcaaatttcaaatacataataaagtattgctaattaaaattgcatt

SEQ ID NO: 260305 - DNA, 201 bp, Homo sapiens
ccattattaaataattaccatagtcaaactaattactacttcctcacctcagatatttatcactttctctctctctctctctgtgtgtgtgtgtgtgtgtstgtgtgtgtgtgtgtgtgtgtgtggtgagaacatctacaatctactctgttagcaaatttcaaatacataataaagtattgctaattaaaattgcattgt

SEQ ID NO: 260306 - DNA, 201 bp, Homo sapiens
cagcctaaagatggccactgttaatatctaaactagtgtttcactctgcctatatacatatgccaagagaagccaacatacaggcatgcatgtgcacgtgcacacacacacacacacaagcacacattgttacacaaataagtttattcattaatctggccaattcttcttttcagcaatgtcaaggacactttctatgtc

SEQ ID NO: 260307 - DNA, 201 bp, Homo sapiens
agcctaaagatggccactgttaatatctaaactagtgtttcactctgcctatatacatatgccaagagaagccaacatacaggcatgcatgtgcacgtgcacacacacacacacacaagcacacattgttacacaaataagtttattcattaatctggccaattcttcttttcagcaatgtcaaggacactttctatgtca

SEQ ID NO: 260308 - DNA, 201 bp, Homo sapiens
aatactcgatgcccaacaatgccattagctgtcagtggatgtatttaagcatgatataggaatcttttgtgactatccagtctcctataagcatagcactrgtcttagcaattgatcagaaaatattcaaataaatgttgtagatccagtccagtcaatcagatacccacaattaagtcagttcacaagaaaaaaaaaatg

SEQ ID NO: 260309 - DNA, 201 bp, Homo sapiens
acaaacatatacacatgtacatacctggccactcttatctcttagtaggcaatctttagtgaatgattatagttgaaattgactgattttaaagcagccaygcaagctgagtggaacacatcattctgaataagttaacagatatagagactttcatctattcttctcttacagacagtacataataaagattaactgtcc

SEQ ID NO: 260310 - DNA, 201 bp, Homo sapiens
caggaatcttgaagtttcaaactagtaagtaagtggagtctaacatacacacatgcacacacaaacatatacacatgtacatacctggccactcttatctyttagtaggcaatctttagtgaatgattatagttgaaattgactgattttaaagcagccacgcaagctgagtggaacacatcattctgaataagttaacag

SEQ ID NO: 260311 - DNA, 201 bp, Homo sapiens
agctagaactttcagtataacattgaatagaagtggtgagaatggacatctttgtcttgttcttgattgtagaagaaaagctttataaatgaacattaaawaattaaggcccattgtgacttattttctggtttagtgtctcttatcttggagcatgtttgatttttcttacccaggaaactgctgcatggaagatggtat

SEQ ID NO: 260312 - DNA, 201 bp, Homo sapiens
tctttatcaaaaacatctacattatgcaaaacatagtaggattatattacatagtgacccagactctccatttagcatgatttgacattctaagatttaayttatgtattttgtcaaaatatatttatcatcagacaagggttccccttcacttggcctacaaggtaggcatgattttatatctagctatttctccagcct

SEQ ID NO: 260313 - DNA, 201 bp, Homo sapiens
gggtatcaggaaattattgtgacttaaaatgggaatctttagctttgaggtgggagcagtttgacccatttcaacatttttatgagaatttgtctcccttytctgaaccacctctgctgctatagatgcacctaaattcagaaaaaaatatttacctagtgcaatctctatctcatgaatgctttccttttcagtctttta

SEQ ID NO: 260314 - DNA, 201 bp, Homo sapiens
gtatcaggaaattattgtgacttaaaatgggaatctttagctttgaggtgggagcagtttgacccatttcaacatttttatgagaatttgtctcccttctytgaaccacctctgctgctatagatgcacctaaattcagaaaaaaatatttacctagtgcaatctctatctcatgaatgctttccttttcagtcttttatg

SEQ ID NO: 260315 - DNA, 201 bp, Homo sapiens
aaattagaagtacatatgtaaatttgggaaacttattttagagttgataactgaagactgaagattggatgagatttctatggaaaagagtatggagtggaaaaaaaagagaatgatgattgaatttaggaaatatgcacacacatattattaattgatttaaatagtcattatcataacaataattataatgtgttgagc

SEQ ID NO: 260316 - DNA, 201 bp, Homo sapiens
tggccaaaacttccaaaacttcatgagtgcagtaagccagcttctcttattctgtcactgcccatggtgatagcatctcaaagttgttgacaatgtaattrtaaacaatgatgtaagtcttaattactagtctgttgcccaaaattctgccatttcttccccctcgatgtgtcctttggcattgatatgttctgccaccct

SEQ ID NO: 260317 - DNA, 201 bp, Homo sapiens
taccagtctagtaagtctgcacataatggcatgaaatcaaaagacataaattcaattgaaagctcacttaggtgagtcatttggtgttttcaatgcctgcrtttcattgtcagccaaatgagaataattactttgtatacaccttgtacttcaaagtaaattctaccattatctcaccagggaaaagaagttaatattaaa

SEQ ID NO: 260318 - DNA, 201 bp, Homo sapiens
ataggtgggaattgaacaatgagaacacatggacacaggaaggggaacatcacactctggggactgttgtggggtggggtgaggggggagggatagcattrggagatatacctaatgctaaatgatgagttaatgggtgcagcacacgagcatggcacatgtatacatatgtaactaacctgcacattgtgcgcatgtacc

SEQ ID NO: 260319 - DNA, 201 bp, Homo sapiens
ttgaacaatgctcaatcttgagagatgagcaccagttacacaaggacttctttatccgagcgctggattgcatgagaaggtatctcacatgtttttcaagtttttttcttttaaggtcattttgagttgtttttattttttttttcaaaatacatattttattggaggactaaatattttagaactttactgcattttcat

SEQ ID NO: 260320 - DNA, 201 bp, Homo sapiens
atagggttcacttttaagtaatgtagttcaattattgttgaaataaaaaagtttcttccttttgtctttagtcttgtttccacttgagcttatttttttcyttgtttttgattgtacttttagagaagagctgctattatttcatattatatcctatttcaaatattaaagagaagtataagcattgtaagcataggtaat

SEQ ID NO: 260321 - DNA, 201 bp, Homo sapiens
caccaggccctgcctctaacagtgattacattttaacatgagatttggagcggacatccaaactatgttacttggtcagtgggagaggggttgacttaacyctggatctggatataacatttctattatccaaggaaggggtgcttacctgaaacctaaattctggctttaatcactctggcatcatatggcttattgcca

SEQ ID NO: 260322 - DNA, 201 bp, Homo sapiens
cttttttttttattattatcctttaagttctggggtacatgtgcacaatgtgcaggttagttacatatgtatacatgtgccatgttggtatgctgcacccrtcatttacattaggtatatctcctaaggctatccctcccacctcccctcaccccatgacaggccccaatgtgtgatgttccccaccctgtgtccaagtgt

SEQ ID NO: 260323 - DNA, 201 bp, Homo sapiens
tgtatacatgtgccatgttggtatgctgcacccgtcatttacattaggtatatctcctaaggctatccctcccacctcccctcaccccatgacaggccccratgtgtgatgttccccaccctgtgtccaagtgttctcattgttcaattctcacctacgagtgagaacatgtggtgtttggctttctgtccttgcgatagt

SEQ ID NO: 260324 - DNA, 201 bp, Homo sapiens
atctgtaaattaccttgggcagtatggccattttcatgatattgattcttcctatccatgagcatggaatgttcttccatttgcttgtgtcctcttttatytcgttgaggagtggtttgtagttctccataaaaggtccttcacatcccttgtaacttggattcctaggtattttattctctttgaagcaattgtgaatgg

SEQ ID NO: 260325 - DNA, 201 bp, Homo sapiens
tatcttgagactttgctgaagttgcttatcagcttaagggtatttggggctcagacgatggggttttctaaatatacaatcatgtcatctgcaaacagggraaatttgacttcctcttttcctcattgaataccatttatttccttctcctgcctgattgtcctggccagaacttccaacactatattgaagaggaatggt

SEQ ID NO: 260326 - DNA, 201 bp, Homo sapiens
ctgtaggtttgtcataaatagctgctattattttgagacatgtcccatcaatacctagtttattgagagtttttatcatgaaaggctgtcgaattttgtcsaaggcattttatgcttctattgagattatcatgtggtttttgtctttggttctgtttatatgatggattacatttattaatttgcgtatgttgaaccagc

SEQ ID NO: 260327 - DNA, 201 bp, Homo sapiens
agggatattggtctaaaattctctttttttgttgtgtctctgccaggctttggtatgaagatgatgctggcctcataaatgagttagggaggaggattccytctttttcttttgattggaatggtttcagaagaaacggtaccagttcctgtttgtacctctggtagattttggctgtgaatacatctggtcctggacttt

SEQ ID NO: 260328 - DNA, 201 bp, Homo sapiens
ttcagggattcaacttcttcctggtttagtcttgggatggtgaatgtgtccaggaatttatccatttcttctagattttctagtttatttgtgtagaggtrtttatagtattctctgatagtgtttgtatttctgtgggataggtgttgatatcccctttatcatttttctattgcatctatttgattcttctcttttttc

SEQ ID NO: 260329 - DNA, 201 bp, Homo sapiens
tcttctagccctagctttatattaactggatatattgtggctacttatagaccagcgtctctatactggctcctcatcaaggcgtgttaatgagattgctkgcctcaaacactgaaggttctttgaacatacaatggggtacatttattacattgcgtcttcatctttgaaaaaactcggctataattcctggactaaaag

SEQ ID NO: 260330 - DNA, 201 bp, Homo sapiens
taaagtggaaggatcacttgagcctgcaaggtggaggttgcagtgagccaagatcaccccagtgcacatcagcctctaggtgacagagggaggccctgtcycaaaaaaaaaatgtgtgtctgtgtgtgtgtgtatgtgtgtatatatatatggtatgcaaatgtatatatatttatatatagatagatatacacacacaga

SEQ ID NO: 260331 - DNA, 201 bp, Homo sapiens
acataaaataaataagtgacagtagacatggtacgatagtgattgtgattctttttattattctctgtcactctttcaaggtcttaactgattatttaccrctcacattactcacaatgatgcttgcacttttatgatgaggagatcatatcatttcagttcctgctttataattaatttcgcagcatgcactcattcata

SEQ ID NO: 260332 - DNA, 201 bp, Homo sapiens
ggccaggcatgatggctcatgcctgtaatcccaggactttgggaggccgaggccagtggttggcttgagctcaggagtttgagaccagcctgagcaacatygcaaaaccctgtctctacaaaaaaagtgcaaaaattagtcaggcttggtagtatgtgcctttagttccagaaacttgggagactaaagtggaaggatcac

SEQ ID NO: 260333 - DNA, 201 bp, Homo sapiens
tggttgaagaattttgggtctgggtggagggaacatagtaaatattcaatagatgtttaataggttgacatcatcttttatttaagtcttgctaggttaayttgaaaaaaattactatatgaacttacagttgaatgacattaaatgtgatgaaataaaatgaaaccaaaactacatctttttcttatcattttaaagata

SEQ ID NO: 260334 - DNA, 201 bp, Homo sapiens
aaaagtatatataattatgcaaaatagagacactggaatattgttagtatcagaagtatgtaacactgttcctaggtttagaatgttgtgtgttccttttwtcctgggtttccacttccaatctagtgaaactggaaaccagacttgttttggtgttgttttttttgtcatctgattgtaatttataattaagaatcaact

SEQ ID NO: 260335 - DNA, 201 bp, Homo sapiens
ctcttctaaaactcgtttggtcactgtcccaacttttgtagctgttatcataccaccttatactgtaggtattcctttgtacttcttacctttccttctcrattttagctccttgaaggagggggcatgagttaaaaatattagtatcacccacagcacctcacatagaagacactatctttgtccaatgaatgagtccat

SEQ ID NO: 260336 - DNA, 201 bp, Homo sapiens
gattccccattacttccttcatacagtaggggacctagcaagataatagctgctatttctggggaaaagtcccagcaatccatttctctgataggtggtartggttgtttttaatcctctcatgtggcagggagctaagcaggatctggaggggctggaagcaccacatactgcagccacattcttatgctaccgttgtct

SEQ ID NO: 260337 - DNA, 201 bp, Homo sapiens
aagtgctgggattataggcgtgagccaccgtgcccagccaagaatcttttaaatcatagaacttagagaggatcccagagaccatgaattctcctacttaktttattgatgaaaataccaaggaccaacgattgagtcaccaatgcagctaatgacagaaccagagctagaaaattagacttctgtccttagtctcaagtt

SEQ ID NO: 260338 - DNA, 201 bp, Homo sapiens
aagagagattgtttgcaatagtgcttcagtaagataaaggattgagtcagggaaaaaatgaatactgtttaattcatggaagatagggaaacgtagaaaaytcatgaaaaataatagacaagacagattttaagaaggtagaagagaaggatgacatcaaacaaataaaatatgtagaataagacagaagtaataggcaag

SEQ ID NO: 260339 - DNA, 201 bp, Homo sapiens
attataatttaaatggctctgcagttatatattctgtattttttttatgttcctaatccatttaaataaagctgtaggtatgaccatggaaaccagttagyactttcttagtttgcattatccaaaaggtgttggatttgtcggattgcaaattggtttagagttctccgtcactgaagggacaacacaaaccagagtaca

SEQ ID NO: 260340 - DNA, 201 bp, Homo sapiens
gaggtctcattctgtctcctgggttggagtgcagtgatgcaatcttagctcattgcagccttgaactcctggcctcaagcagtcctcctgcctcagcctcyagggtcactgggattataggcatgacaggcgtgagccaccacgaccagcgtgttttaccaaatgtttgattttaagccttttaggaccagctcatctaag

SEQ ID NO: 260341 - DNA, 201 bp, Homo sapiens
aatgctgatctctcctctcttctagccctagctttatattaactggatatattgtggctacttatagaccagcgtctctatactggctcctcatcaaggcrtgttaatgagattgcttgcctcaaacactgaaggttctttgaacatacaatggggtacatttattacattgcgtcttcatctttgaaaaaactcggctat

SEQ ID NO: 260342 - DNA, 201 bp, Homo sapiens
aggccccaggcaagtccaaaacccagcaaggcagttattaaatcttaaaggtccaaaataatctcatttgactccatgtctcacatccagggcactctgawgcaagggatgggctcccaaggcattggtcatctctgcccctgtggttctgcagggtagaaccacagtggagggctagaaagccccctccactgctttcac

SEQ ID NO: 260343 - DNA, 201 bp, Homo sapiens
aagctgcagctatctgaataatgggatcaggcctggtgattggatgctgctgaacatctagtgagtaaaggatggagagacatgggatttgaagccaacckattgttagatcttttgccttttgtggagctgttttattttaagaatccatgtattatgtatagaataattttctttggaaaagttttttcctcttaaatt

SEQ ID NO: 260344 - DNA, 201 bp, Homo sapiens
caagctgttggtagatctgctgttctgaggtctggagtagccttcttctcacagctctgctaggcagtgccacagtggagactctgtgtggggcctctcaygccacatttaccctccatattgccctagtagagattctccatgaggggtccaccccagcagcagacttctgcctggacattcaggtgtttctatacattc

SEQ ID NO: 260345 - DNA, 201 bp, Homo sapiens
tgagaaagatttgatggcaccactcactaagatacaggtagtgcacagattagagatgagcagagaagagagatctgctgcaaatatgttaaatgcatccmcttggagaggtccgatgggtggctgcttatggacattgtggagttcaggcgagagatttaaattagagatcttcagctctaatctttgtgaatccttaag

SEQ ID NO: 260346 - DNA, 201 bp, Homo sapiens
catttaccctccatattgccctagtagagattctccatgaggggtccaccccagcagcagacttctgcctggacattcaggtgtttctatacattctctgmaatctaggcagaggctcccaagcctcaactcttgccctctgtgcacgtggcttaacaccatgtggaagccaccaaaggttatagcttacaccctctggag

SEQ ID NO: 260347 - DNA, 201 bp, Homo sapiens
ttcaaagttccacagatctctagggcagggttacaatgcctccaacctctttgctaacgcataacaaaagtggcctctgctccatttcccaataagttctyatctccatctgagagcaccttagcctggatttcattgtccgtatcactatcagcattttggccacaataatttaacaagtctctagggagttccaaactt

SEQ ID NO: 260348 - DNA, 201 bp, Homo sapiens
attcacaacttacaattctgtcttctttctcattggtttaaagttaagattatgaattgataattcataggagccagacagatcccatagatttgttttgwttgtttcctgttattttaataagccaagttttaaaatgaagagcttcatatgcaaattttagatttccaggtgtaaagaataagccagaagatctgaaat

SEQ ID NO: 260349 - DNA, 201 bp, Homo sapiens
gattcttctcttttttcttctttattagtcttgctagcgatctatcaattttgttgatcttttcaaaaaaccagctcctggattgattgatttttttgaasggttttttgtgtctgtatctccttcagttctgctctgatcttagttatttcttgccttctgctagcttttgaatgtgtttgctcttgcttctcaagttct

SEQ ID NO: 260350 - DNA, 201 bp, Homo sapiens
tagtgctatacattgccctctacacactgctttaaatgtgtcccagagattctggtatgttgtgtgtttgttctcattggtttcaaagaacatctttattyctgccttcattttgttatgtacccagtagtcattcaggagcaggttgttcagtttccatgtagttgagcggttttgagtgagtttcttaatcctgagttc

SEQ ID NO: 260351 - DNA, 201 bp, Homo sapiens
tatagtaaattcttgtggcagaagttctttactgatttgttgctgaaaattagctatctcaaaatgtttccaatacgttatttatcagtctcactctgtgyctcccctctaccacctcaccatcatgccccagcttgttttgttttgtttttaaaagttttcttcatacatgttctggaacaagttcctgtggtttgttca

SEQ ID NO: 260352 - DNA, 201 bp, Homo sapiens
aattcttttctttaagattgttgaatattggcccccactctcttctggcttgtagagtttctgctgagagatccgctgttagtctgatgggcttacctttrtgggtaacccaacctttctctctggctgcccttaactttttttccttcctttcagcttttgtgaatctgacaattatgtgtcttggagttgctcttctcg

SEQ ID NO: 260353 - DNA, 201 bp, Homo sapiens
gccccagcttgttttgttttgtttttaaaagttttcttcatacatgttctggaacaagttcctgtggtttgttcattccggcctccttatcttgccatccygttgcatcctgtgttgctggtgaggccttgagtcctctgctctgtgaaacacagcttcttctaatagatattcctaccgacacactctcattggttttgg

SEQ ID NO: 260354 - DNA, 201 bp, Homo sapiens
atggttttcagctccattaggtcatttaaggacttctctacaccgtttattctagttagccattcatctaatcttttttcaaggtttttagcttccttgcratgggtttgaacatcctcctttagctcagagaagtttgttgttaccgatcgtctgaagccttcttctctcaacttgtcaaagtcattctccatccagctt

SEQ ID NO: 260355 - DNA, 201 bp, Homo sapiens
gttaggctacttgggggtcagggacccactagaggaggcagtctgtccgttctcagatctcaaactccatgctggttgaaccactactctcttcaaacccrtcagacaaggaggtttaagtctgcagaagtttctgctcccttttgttcagctatgccctgcccccagaggtggagtctgcagagacaggcaggcctcctt

SEQ ID NO: 260356 - DNA, 201 bp, Homo sapiens
gtgttgaaaggcaaactaggtatcttctggtccagaacttcacagtgtcttatgttaaggagtatattcatctaaaaaagtttttttgtgtttgtttgtctgtttgtttgtttgtttgtttgtttgtttgtttgtttttgcggggggacggagtcttgctgtgtcatccaggctggagtgcagtggtgccatcttggctca

SEQ ID NO: 260357 - DNA, 201 bp, Homo sapiens
agaacagatggagattccatcaagcatgtgttcccatcttcactttgtaattcttcaggatgctttcccttttgctgaatgacacagaacaaaatctaacragtcagatggctgactcactgcattcccaaagtgggtccatgtgcttcccttcaggacatcgggtcactgttggaaactcttcaaattctggttcagatc

SEQ ID NO: 260358 - DNA, 201 bp, Homo sapiens
tgttgaaaggcaaactaggtatcttctggtccagaacttcacagtgtcttatgttaaggagtatattcatctaaaaaagtttttttgtgtttgtttgtctgtttgtttgtttgtttgtttgtttgtttgtttgtttttgcggggggacggagtcttgctgtgtcatccaggctggagtgcagtggtgccatcttggctcac

SEQ ID NO: 260359 - DNA, 201 bp, Homo sapiens
gttgaaaggcaaactaggtatcttctggtccagaacttcacagtgtcttatgttaaggagtatattcatctaaaaaagtttttttgtgtttgtttgtctgtttgtttgtttgtttgtttgtttgtttgtttgtttttgcggggggacggagtcttgctgtgtcatccaggctggagtgcagtggtgccatcttggctcact

SEQ ID NO: 260360 - DNA, 201 bp, Homo sapiens
ttgaaaggcaaactaggtatcttctggtccagaacttcacagtgtcttatgttaaggagtatattcatctaaaaaagtttttttgtgtttgtttgtctgtttgtttgtttgtttgtttgtttgtttgtttgtttttgcggggggacggagtcttgctgtgtcatccaggctggagtgcagtggtgccatcttggctcactg

SEQ ID NO: 260361 - DNA, 201 bp, Homo sapiens
cttatacccaatgatagctaattaataaatggttttgggctctgcaaccaaacacttatagaaataagtaaataaatttttaaagtagaaatcccatgggrcagtttcactgggcagggtgagattcctgcattgaaaaatcgtgaaaggtgcaaaaccaaaaatcagtcacgtatgtatagcaagtagccattctataac

SEQ ID NO: 260362 - DNA, 201 bp, Homo sapiens
tgtctgttttttgcagtcactcttttctctttcactgattgtcttcttacactcacctgcccattatttcctgtgcaactctttgggaaacattctttgattttttttttttcctattaatttaggtcatcattttctctcatcccataacagtttatacaaacatacatttcaacactgagtactgggtagtttgaacat

SEQ ID NO: 260363 - DNA, 201 bp, Homo sapiens
ttattcttcttaagaatcccatttttttttttttttttttttttacttttagattccaagggtatgtgtgcaggtttctttctttcttttttttttaaccrtggtgaattgcatgttacagggatttggtgtacaggttattttgccaccgaagtaataagtgtagtatctaataggtagtttttcaatcctcaccctcct

SEQ ID NO: 260364 - DNA, 201 bp, Homo sapiens
caattaacatgttatctcagtaagtatatagaataatgagagaacacactgttctacagtgtagcatgtaattaagatgtagtcataaatcaggaaaataytatatctcgtttaggtgcacaggtggcttttagaaagattgattattagctcctctttcccccttgagatgtgagttcatagttattcctaaaaaattaa

SEQ ID NO: 260365 - DNA, 201 bp, Homo sapiens
agcaattaacatgttatctcagtaagtatatagaataatgagagaacacactgttctacagtgtagcatgtaattaagatgtagtcataaatcaggaaaayactatatctcgtttaggtgcacaggtggcttttagaaagattgattattagctcctctttcccccttgagatgtgagttcatagttattcctaaaaaatt

SEQ ID NO: 260366 - DNA, 201 bp, Homo sapiens
cagatagtttttatactgaaagctggtataaaaatataaattcatttcactgatgcacaaacacaaaaccacacataatttcacagaaaggtcatgtgacstacttctaagaaaagattataatctgagataggaaaatgcacctgctgcaaaaataaaaaaaaaatttcatgcaaataagacagggcaaaaatgagttaa

SEQ ID NO: 260367 - DNA, 201 bp, Homo sapiens
caggaaattcattacttatattctaaacagcagcttccgagatctgtttttatatttatagaatatctggcagcaagcaaatgtaaaagagagctatattrcatttagtattttgcttttgctttttcagttccacttttaaaactatataggaaataatgagctcacaagtattgttttggcattcttcaatgtgctcac

SEQ ID NO: 260368 - DNA, 201 bp, Homo sapiens
tctttgtaactgcctggggttaggcctgaaagatcacagtaggtttttagccaaaacccagattcctcagtagaccctgatgcagcttaaagattgttggrcacagaatgggagttagaaaaattaggaaatgagatgcttgtgattgagatctgcagaaagtccagatattggtagtgacaagatctagggtctggtaat

SEQ ID NO: 260369 - DNA, 201 bp, Homo sapiens
ggaaatggtgatgataacaatgaagtccaatatctaaatcttttccttatttcttcatttaattattgcttaaacatttctaaatcctatttgtatatgargaaaaacaagaagagttccatgccagcaagccgatatctgggtgattcaagccttcaggtagttctgtggcagactttggaccttggtaagttaccagaa

SEQ ID NO: 260370 - DNA, 201 bp, Homo sapiens
atgcttgtgattgagatctgcagaaagtccagatattggtagtgacaagatctagggtctggtaatgaaaatgaatagtcctaataaagtggagacaatcrtttaagacaaaaggcaagatcatatctgtggatattgaaatctcaaatagttatgacaagaataacactggaaggagaaatggtgacctaccctttcagt

SEQ ID NO: 260371 - DNA, 201 bp, Homo sapiens
acactctctgtcttatcagacacatggaaaagggcacagaggaaatgatctgttttagaatcagagtgtgccttaatccatctaatatgctggtgtcattrtttgacttcctggactgtaaacactgcccttctaggctcctgggacctttctaacctttcctcgtctgataactttgtcaatactcaacattttcttgct

SEQ ID NO: 260372 - DNA, 201 bp, Homo sapiens
gataattttcagataattatattagggaagtgacagctgcattacattctatcctttgcttgaaaagcacagtaagaactaagacatttagatgttttacwtaggaaataatatttttggcattattaaaactcacttctatgtattaatttaaaaatttttatttttagggaaacaaaattgctattcaatttggcagaa

SEQ ID NO: 260373 - DNA, 201 bp, Homo sapiens
acagaatggagtgtctccgttgttcttcccagaaggaatgtaaagcaggcacttttgaccttgaataggattttaactttgttttaggtcagatctgctcsaaagaatagctataacattactttgtgtccctttaatttaacctttccaacaattgtttagaataaaagatgggggtctcgctttgttgcccaggctaat

SEQ ID NO: 260374 - DNA, 201 bp, Homo sapiens
ttaatgttcataccaataccagctgacctcttaatttcaagtccaacactgggagtgtatatgtcaaactatcttttaaaatacctacttagaatttatctttttttaatcataagtgaaaatagataaattcagctttattctcgcattccatcactaaccaatactgaggaggaagaataacaaaaattatgttaagag

SEQ ID NO: 260375 - DNA, 201 bp, Homo sapiens
cctttcagaggagacagcaagacccagaaaagtgaagaacctgcctgaacatggtcagtggcagactcagaagtggaactcaagccttttgcttgtccccyccacgtttttgatgcagagtttttatagctcctcaagggaggaaggaacagaagggaccctgcagtccaaggtcagtggtttagaaagttggtagttgag

SEQ ID NO: 260376 - DNA, 201 bp, Homo sapiens
agaggcagccaataaggaacttgattatacgttacgtttctgtaactttagagtgaaataaacagataaaatactgcagaaaggaaaggcttatgagtgattttttaacatactattaaaatggaatatttattgttacaaaagatcatgtgaaatatgctactacatttcctaatttttgatttgtgtgatgagatattt

SEQ ID NO: 260377 - DNA, 201 bp, Homo sapiens
aacagaagggaccctgcagtccaaggtcagtggtttagaaagttggtagttgagaaggatccatgtcacactccctgtttcctgagctacccccaggaaayacagagaagagtttactcagtgatcagagagtcaatggaggttttctgagtcaggtaaccaggattctgagtttgtgttttttctaaatctgggttgttg

SEQ ID NO: 260378 - DNA, 201 bp, Homo sapiens
acccccagatgtgaccatctagttgcaggaaaacaagctcagggctgtcactgattccacattgtggtgagttgtataattattttattatatatcacaaygtaatagaaataaagtacacaataaatgtaatacacttgaatcatccctaaaccatcgcccccacccccaggtcagtggaaaaatggtcttccatgaaac

SEQ ID NO: 260379 - DNA, 201 bp, Homo sapiens
ctaagaaacaccttcagcctctgaggaaaagtgtctagagtaggttcactgcattcagaaactcattcaataaaatgctagaacaaattccagcagggagrcatagtagctagtgacattttcctcaaatgtttgtttgtagctaagtgccttttctattgtttaggcgatgaaattggaatgctagaggacatggccgtt

SEQ ID NO: 260380 - DNA, 201 bp, Homo sapiens
ccagtcatgagggcgcgtgcctgtaattccagctactcaggaggctgaggcaggagaatcgcttgaacccgggaggcggaggttgcagtgagctgagatcrcatcactgcactccagcctgggcgacggagtgagactctgtctaaaaataaataaataaataaatacatacatacatacatacatacatacatacataca

SEQ ID NO: 260381 - DNA, 201 bp, Homo sapiens
agcctagcatcttactcactggcaaagaagaaaaatacatttcaagagctcagcttcatttctgcaaagcaagcattgaagggtagatttggagttgtgargcaataaattgataagcagcacaaatatttaaagaaaaaaagtgcctagtcttttggcctcaaattggacagattcttttaatccctaggggtttgtgca

SEQ ID NO: 260382 - DNA, 201 bp, Homo sapiens
agtcatgagggcgcgtgcctgtaattccagctactcaggaggctgaggcaggagaatcgcttgaacccgggaggcggaggttgcagtgagctgagatcgcrtcactgcactccagcctgggcgacggagtgagactctgtctaaaaataaataaataaataaatacatacatacatacatacatacatacatacatacata

SEQ ID NO: 260383 - DNA, 201 bp, Homo sapiens
gggttcttggggaaactgttcacagggaagcagtatccccagaggcactcttctataaaatctcttgagagttttgccgggagaagctagtgggtggtggrtagtggtggccatcgtgatcttcacgagctggtccctggagaagcagccaataatgcaggagctgggcactggggaagccacatgcactgcagaaataag

SEQ ID NO: 260384 - DNA, 201 bp, Homo sapiens
aattccagctactcaggaggctgaggcaggagaatcgcttgaacccgggaggcggaggttgcagtgagctgagatcgcatcactgcactccagcctgggcracggagtgagactctgtctaaaaataaataaataaataaatacatacatacatacatacatacatacatacatacatacatacacacacacataaattgg

SEQ ID NO: 260385 - DNA, 201 bp, Homo sapiens
gtatcagacacataaaatttgctagtttttctcaaatagtttttatataatgagatgatttattcactttctgacaaataatgccttattttcctataacrgggaagaatgtttttgattattgtatcaatgagtttctaatcagaacataggaaccatgcattaatttgaacacagcaagtctaatacaagaactgtatc

SEQ ID NO: 260386 - DNA, 201 bp, Homo sapiens
ccagaactgagcaatggcaaggtactcactgtctatgtaagaactgagatttggcacaggaagagaaacaaaagggatattattattagtagtagtagtaktatttgagatggagttttgctcttgttgcccaggctggagtgcaatgacctgatctcggctcactgcaacctccgcctcccaggttcaagtgattctctt

SEQ ID NO: 260387 - DNA, 201 bp, Homo sapiens
aaaaaaggcagtttctttcagttaattgtcattggtatatgtagcatcttatttaatcttactgagttatgagtattaggagatgacaatctagttattgrtttgacaaaatggctttattgctttatagtatttctaatgtgagaaggaaatgagcttcatatgaaattggttattgaaaaaaacaagtgtcaaagagca

SEQ ID NO: 260388 - DNA, 201 bp, Homo sapiens
caccaggttggtcaggctggtctcaaactcctgacctcaggtgatctgcccacctcagcctcccaaagtgctgggattacaggcataagccaccgtacctrgcaaaagggatattaaattttttatttatttatttttactattgagcacgttctgagtacctttacataattctcacaataatcctatggtatggatgtt

SEQ ID NO: 260389 - DNA, 201 bp, Homo sapiens
tacattttttttctttctctgaacatctaccttttttccattacatgatcaaaccggttgatgttgattttgaacacagaagatttacagtgttgccactrtaaaaaaggcagtttctttcagttaattgtcattggtatatgtagcatcttatttaatcttactgagttatgagtattaggagatgacaatctagttatt

SEQ ID NO: 260390 - DNA, 201 bp, Homo sapiens
ccttaaaactagacagattaggaggtagtgctaggataatattaacgataatagcaaccacaatacacaggaaaagaaaaccaaataccccacattttcarttataagtgggagctaaacatttagcacccacggacataaacatgggaacaatagacactgcacactattagaggggagagggaaggaggggagggtggt

SEQ ID NO: 260391 - DNA, 201 bp, Homo sapiens
taagaaaaaaccacttatattacaatgaagtaaaatgaccttttagctacacagtttgaaattttactaatggatttagctccgtcagaaagtaaagtttygtttcattttctgcctattatccacaaatataatagattattaagctaaaggggaattaatcctgtgacagtggaaatgcttttgcataaagttcattta

SEQ ID NO: 260392 - DNA, 201 bp, Homo sapiens
ttctttattttagtgattaaatacaacctttgagttgttcaatatcatttgaaaatggtaggatttgtggttattttcattaccctattagatttaagatagagaggctgggatgacagaggcctccttgaatagctatgaagcctcattcagcatatcaaatggtagtctgagttctaagaaaccttaagtaatttatca

SEQ ID NO: 260393 - DNA, 201 bp, Homo sapiens
actcttagaatgtaaccataaaatttacatggttttgtttctcagtgtctatataaaatatattttcgcaagagaaattttttccccattactggttgaawacttcaacaggtttattactcttgagtaataggaagttctaaggtcactttctacacaaaatacagtaacaattcagaaaataggttgtctagtccaatt

SEQ ID NO: 260394 - DNA, 201 bp, Homo sapiens
ttaaatgatgcaaaactcaatgaagtaaaatacacaaaagagcaattaacatgttatctcagtaagtatatagaataatgagagaacacactgttctacastgtagcatgtaattaagatgtagtcataaatcaggaaaatactatatctcgtttaggtgcacaggtggcttttagaaagattgattattagctcctcttt

SEQ ID NO: 260395 - DNA, 201 bp, Homo sapiens
tatagacacctttattggtgggatagtttcttatacagaaaataataatcgtagataacatttactaaatgcttaccacttttagctactttcaactacawtttataggtaaggaaactgagacatagagaagttaaataagtggcagatcaggaatccaaagccagcgactcaggttcccatcagtaacttaaaccacca

SEQ ID NO: 260396 - DNA, 201 bp, Homo sapiens
tggtaaaccagattcttggcgtgcatctttcccatggccaaagtttccattggttttaaaataattccttagcaattactgggaatctgatcgaatagatwgtgcttgttacctctcaaacaaatacgtaaattctattaagctgaagcctaattaaaatcattgatttcagagacacggttttatcatatcatctggcat

SEQ ID NO: 260397 - DNA, 201 bp, Homo sapiens
aaaaaaatataaacaggaaaaaaatatgttatcgtcgtattcttctccctgaacaccatattccatggtctccaatgtataatgttgattgaggaaatttygaagaatttttaatatattgctttggatataatttaaaaattacttttaaagtttgtttttttccttttgctatgggtgatgcaaccttgaaatttgttt

SEQ ID NO: 260398 - DNA, 201 bp, Homo sapiens
aagtgaaaaaaatgaaagtacaacttttgataggacaaatttatgaaaatactgcttgcttctcttgttcctgtgaatggacattgcttagtgcacttagwtttaagtagtttcctctaaaatgcctgaacccattagctccaatttagttcacttctttaagccccgaggcagcaagaatactgagtgtaaacccacttt

SEQ ID NO: 260399 - DNA, 201 bp, Homo sapiens
cattgcgtcttcatctttgaaaaaactcggctataattcctggactaaaagagaaatctcaattggtatcctgtgacatgcctatttttgcaattaggaaygtaccctaaggcaagtaacgtgacaaactggcttaaaactaatgaatgggtttgtttttctcatgttatagaagtcttgggaaaattgtccagggcttca

SEQ ID NO: 260400 - DNA, 201 bp, Homo sapiens
atattttgttgcattgtcatgataatttgtctttttgcatttaaattaacatgggaactcattccattcagaagactgagccccagcatcatttttctttwcagactcaaaagtttatttttatggggatatagacacctttattggtgggatagtttcttatacagaaaataataatcgtagataacatttactaaatgc

SEQ ID NO: 260401 - DNA, 201 bp, Homo sapiens
tgacttgaagtcatggtgctgattgatggtgactagatctctttttggtaaaatatagctaatcatgtcactcagttgcttaataaaactcaaaagcaatrtacaggacagtgcatcatggaaaagattattaaatataagtgtcacttaattttgttatgcagacagtagttgcgatctatctacgttgcaagataagga

SEQ ID NO: 260402 - DNA, 201 bp, Homo sapiens
ctcttgcaagaggcagccaacaatagggaatggggaaggagaggcatccctttggctctgtttatacacacagataaacaaaatacaatttaattgagcartatgtttaaaaacatcaagtccacttacacagaatgaagaattaacccaaggaagaacaggtgtttctcagcctacagccaaatgagatgggatttttct

SEQ ID NO: 260403 - DNA, 201 bp, Homo sapiens
gtatgctatctgatctatgaaatgcattttgtactgtagaagctctacagtatttgaggatgaaacttagtagtgatgttcaagttcagaatgattaatakaaaatgtcaaagatgtaacaatattttcgggatccttgatttttcttttgtgttaaaatggtgtgaggtggttattgccctgtattttgttacatgactc

SEQ ID NO: 260404 - DNA, 201 bp, Homo sapiens
tttctatgcaatgactgaagctagtgacaatatactggtaggagaaaattaggactactactgggaaatattgttgttttaggataattttgaaaaagtcmatgaaattaaaatcaaaccaataatttagacatagttttacttatgtttaagtgtactgctgtttattgatttaattatttataactttgatgcttttag

SEQ ID NO: 260405 - DNA, 201 bp, Homo sapiens
gagccaatgtgatgcagaaaatcacaactctaacgaatcccctaaaacaaacaaaaagcctcatcatcctactaatgatagattcatcttattctgattayacagcatgaaacagcatttatacagatatcctttttttcttcccccccctttttttttagctatttgccagtttataattctgtctcctcaaagagtgtg

SEQ ID NO: 260406 - DNA, 201 bp, Homo sapiens
tctttattttagtgattaaatacaacctttgagttgttcaatatcatttgaaaatggtaggatttgtggttattttcattaccctattagatttaagatagagaggctgggatgacagaggcctccttgaatagctatgaagcctcattcagcatatcaaatggtagtctgagttctaagaaaccttaagtaatttatcat

SEQ ID NO: 260407 - DNA, 201 bp, Homo sapiens
tttattttagtgattaaatacaacctttgagttgttcaatatcatttgaaaatggtaggatttgtggttattttcattaccctattagatttaagatagagaggctgggatgacagaggcctccttgaatagctatgaagcctcattcagcatatcaaatggtagtctgagttctaagaaaccttaagtaatttatcattc

SEQ ID NO: 260408 - DNA, 201 bp, Homo sapiens
gtgtgaacaatgtaagtaactgaacatgtacaactcttagaatgtaaccataaaatttacatggttttgtttctcagtgtctatataaaatatattttcgyaagagaaattttttccccattactggttgaaaacttcaacaggtttattactcttgagtaataggaagttctaaggtcactttctacacaaaatacagta

SEQ ID NO: 260409 - DNA, 201 bp, Homo sapiens
tcacatcactcttctcttgatgttagtgtcccatctgtaattgggaatgctggacaagctctcaggtcccatttcattctgacattgtgtaattctagagkcaatagagcgtacccatttttgagggcctcacagacataattttattatagcacagtataataattaatattcacaatggtgactttgggccatcaaaga

SEQ ID NO: 260410 - DNA, 201 bp, Homo sapiens
agcgccttctctctttatgttacccaaactcatgtcccttccactctaggtgtgaagattgtgctagaggtgtctctccagccgtgagcttttgcctctgrtgctgtcctggtcttgctgaagggaggggagattatattctgagcagcaagcaatggttgctgcccttgagcattttgcctccagctgtcatccctgtga

SEQ ID NO: 260411 - DNA, 201 bp, Homo sapiens
tctggagtggaaggaagtggatgactctggcttttttctttttctttttttttttttttttgagatggagtttcactcttgttgcccaggctggagtgcastgggcaatatcggctcactgcaacctcctccttcaggattcaaacaattctcctgcctcaccctccagagtagctgggattacaggcgctggccaccatg

SEQ ID NO: 260412 - DNA, 201 bp, Homo sapiens
atgccattgttattgcgtatcaacgaaatataccttgtcttcttaatctcttactctctgagattgccagtgcttataatagtggctgaatcataatatgygcttgatacatgtttgctggccttaaaatagtaaatgaagatttaatgttagctatgttgctttattttctcttaaccatatactaaataaatccaaaat

SEQ ID NO: 260413 - DNA, 201 bp, Homo sapiens
tatttggattcttcatggcttttacttttaactttctccaattggatgtgttggattctcctcagctacatgtggtgcttcctgggggccagtcttttaamtcctgatcgcttgccatcccccaggcccttaggaccccagcatggatgcagttgatgttaagagagtatataggaatttgtaggcaaagagtttggggca

SEQ ID NO: 260414 - DNA, 201 bp, Homo sapiens
ttctaacccatgtcctcattttaaaaataacagtttttcttcacttacatataattagaactcctgtctggagtcagggacccagtaatgacttaccttcrttaccaaggagtgatgtggtgttgttcccacacagttggtgacagtgggaacacagtgtacttgcaccaaagaagtttcttggtcttgctagtataaaaa

SEQ ID NO: 260415 - DNA, 201 bp, Homo sapiens
agagtcctctccaattcctattgtctcaaacacccaggccactcctttcattaattttacctacctggagcctgtgggcatgtgagtttgtaacactaccrttatgatactgatttgtgagatagtaagctagaaattccaaatgttgaagaagaaatgttcaatgtacttcccaggaatatttcagatataattttcata

SEQ ID NO: 260416 - DNA, 201 bp, Homo sapiens
gtcaaaacagagtttagaaacaggattgactttgtcgttgaacagttcgttttgtggcagccttatggccctcaggggcaggaccagaacgtagaaggggwaataggtgaatgagcccatagatagaactagaaactctgcaagaacagacagctcattagagtggggaaccctaccctttctgatagacctattttaggg

SEQ ID NO: 260417 - DNA, 201 bp, Homo sapiens
gttatgcaggtctgaatcaaagttacctgctcagggaaacccacctcagggacagctgtaggtaaagcactcccacctcgttacactgtattttattaccrtattttaatattttactttctttacacattttgatattgtccatgtcttcctgatgctagaatgtagttcataaagtgattattccttgttcatgaccat

SEQ ID NO: 260418 - DNA, 201 bp, Homo sapiens
gtggcccctgctcagcacctgtgatcggagtgggtcctagattggctcttccatgtaatctgtctctgttttatatattttcattgcaattgcatgtctgyggttttagaaggttttttttttttttttttttttttttttgagacggagtcttgctctgtcgcccaggctggagtgcagtggcgcgatctcggcttacta

SEQ ID NO: 260419 - DNA, 201 bp, Homo sapiens
catataccacttagatgcctctaggcaagtgagagggacagaatggcattagctctattcttatcgtagatttttaaagtgtataaaaactatttcatgartgaaatgtaaataagtaactgaaactttttttcaacataataataggaagaagatcaagcaagaataaagggaaattcaatggctttctcttcttattat

SEQ ID NO: 260420 - DNA, 201 bp, Homo sapiens
caagtctttctttccttgtatatatgagaaccctattttgctataacatcataacatataggtaatatattgtaacaaaatatactattatttttcctttktaatttctgcaaaacagaatatgagagataaaagcgagaaaggaaagatttggtcttttagaaaacattccttcgttttcaacgaatgcatcaattgttt

SEQ ID NO: 260421 - DNA, 201 bp, Homo sapiens
agacttgcaccagtatttcttcccctctggtacttaggaagcaaagacatccttaaggtatacatgggagatttggggttatgaggagtaaaataaatgcyggtattaatggctaaattctaaaagataagataattgagggagtataatgaaaagtaaacccaaggtattttggactagaaaaataacaggaccagaact

SEQ ID NO: 260422 - DNA, 201 bp, Homo sapiens
tgagcaaggcagagaagaattttattaagcaacagaagaaaagctgtcagtggggagggaacccaagagtgggtagccctctgtgtgagagggagcccaamagcagatagtccaatgggtagctgagtctggggtttttatgggatcagaatggaggaatgcatgctgattggtccatgggcaggcctggaaaaagcacca

SEQ ID NO: 260423 - DNA, 201 bp, Homo sapiens
tatccaagaggaatgaggtacatggacaacagagagtgagcaaggcagagaagaattttattaagcaacagaagaaaagctgtcagtggggagggaacccragagtgggtagccctctgtgtgagagggagcccaacagcagatagtccaatgggtagctgagtctggggtttttatgggatcagaatggaggaatgcatg

SEQ ID NO: 260424 - DNA, 201 bp, Homo sapiens
gtttgccaatcaagttgcatttttttctaaaggaaatgttgacacaggatcctttcagtgccacttggccaaccagaaatctctgtggctggccagtggcrcctctgcctggggccttgttcagctctgtgctcactgctgggctttctctgcccacttggcctgctgcagcccgtgactgggcccaacgtgctacaattg

SEQ ID NO: 260425 - DNA, 201 bp, Homo sapiens
aatctaaaagaaattgagttaacaaagaaaggcaaaggaatatatatagtatttatgtattttacataaagttgaaatgtagagaaaaagaaaacccacaytgttgtgtttagtggttcattatttggtggtaatactctaaggaaaagaaaaattattacaaaaggacaatgattgtctctagtggagaatactggggtt

SEQ ID NO: 260426 - DNA, 201 bp, Homo sapiens
gtaaaataccttactcttttttctagccctgccatgttgtacatttaagcagtgacatagcatgataatcaggttaatgaataatacacaacttcagcagyttacaaatacataacccctaaatgattagcagttttctcttgcaagaggcagccaacaatagggaatggggaaggagaggcatccctttggctctgttta

SEQ ID NO: 260427 - DNA, 201 bp, Homo sapiens
gtgtctgtaatgcagcatcaaatgacattaaagtctggaactgtttgtttgaactaaataaaatatatgtaaaacaaaggatgctgtgctgaatcctgagrcatttcaatattagagaaaaaagagccagaactgagcaatggcaaggtactcactgtctatgtaagaactgagatttggcacaggaagagaaacaaaagg

SEQ ID NO: 260428 - DNA, 201 bp, Homo sapiens
atttaccctcaagcagtcaaaagatgttcaacacatgacatcctcttaataagtgtgcaatgttagcttaggaagggattttgctatccaccagagagaartaaaatgtagttggtctagtcaattccttatgggtctttaagagaatataatttttaaaataaattatttgtgctattaaaaaacatgtgaattgatgtg

SEQ ID NO: 260429 - DNA, 201 bp, Homo sapiens
ccatatttcacaaatgaggaagtcttcaagatcacctatgcggtaaacagtgggtccagaatttaaacccactttgattccaaggcctttgctcataagcrataggctgtggttttactaagaaggcattaatcaacaaattggtgtcacagtaaaataccttactcttttttctagccctgccatgttgtacatttaagc

SEQ ID NO: 260430 - DNA, 201 bp, Homo sapiens
tgacatgtgctatgaggaaggtactatcattatccatatttcacaaatgaggaagtcttcaagatcacctatgcggtaaacagtgggtccagaatttaaayccactttgattccaaggcctttgctcataagcaataggctgtggttttactaagaaggcattaatcaacaaattggtgtcacagtaaaataccttactct

SEQ ID NO: 260431 - DNA, 201 bp, Homo sapiens
ctaaatgtggtactaagtaaatggaaggatttttgctcaatttcacatgatcctgagtgaatttgtaataagtgaatttgtaatgcagtttttcctccttytttattttcattgtagctgtatacaaaaacaaaatttgtttatggcccacaaattcaaagaataaagaggcttgtatagttgaaatcctacctgttctag

SEQ ID NO: 260432 - DNA, 201 bp, Homo sapiens
tagccgacataccatgttcagtattttttacagccttctgcttcaatatcaactgatatttttaattagccttattgtaaactgaagccagctaatcatakattcttgactggtgactgacttgatattttgttgcccactaagctttggtgtgtaagtgtgacataggcattcattgctgaagagcaatggaaatgaaat

SEQ ID NO: 260433 - DNA, 201 bp, Homo sapiens
atcattcctatcctcatcatcaacttgagtgtcttaaaacactgagccctgaatagcccctacattctttgaaaataaatatccagctccaggttgtttgrtgcctagctgtctttggtcatacataccacgtcccccatctatggccagcctggtccagtgggtgatcagtgccaatctcattggaaatgtggcattaga

SEQ ID NO: 260434 - DNA, 201 bp, Homo sapiens
ttttattatgacatctgcaatagtttttcttatttttggccaggagcttgtgggtttggctgcattcagggtatctgtttgctgtattttctgagctcctstcatgtttttcttaccctcacttttctgaagccatgctaaggatagtgtttttgtaaaatttctgtttagatttctcagtgctcatccgatctttaaaag

SEQ ID NO: 260435 - DNA, 201 bp, Homo sapiens
ttgcaagtaacatgagaagagagaatggcgtggaaattattaagaagaccttttggttttctaccctagggactttattttctctttatttctctttattwtattatctctctatttttttttcttatagattctaaataatactcttataaatcttttgttttctttaacacaaaatgggttttgtgcaacctgttggga

SEQ ID NO: 260436 - DNA, 201 bp, Homo sapiens
catgtgagaggggggatgattgtattttcatactattgattgcaatatacttgtatttcacgaagatgtttctggacctgatccctatgccagttgcagcyaggttcacagtacacgaggatcccagtagatctgggtcccaaacacttccatgcagttgacttctccaaagtgatgccacagtggtatgctggggcctgc

SEQ ID NO: 260437 - DNA, 201 bp, Homo sapiens
catggataaatctaaaagaaattgagttaacaaagaaaggcaaaggaatatatatagtatttatgtattttacataaagttgaaatgtagagaaaaagaaracccacactgttgtgtttagtggttcattatttggtggtaatactctaaggaaaagaaaaattattacaaaaggacaatgattgtctctagtggagaata

SEQ ID NO: 260438 - DNA, 201 bp, Homo sapiens
gataaggatgtaaaactttcttatggttcaagggtaaataatataaccattttgaaaaacagttttgcattccagcccagttatagatgtaatctctaaaratgcagcaattattctctagggtctgtaccctagaaagtgatttacacatggtctccagatacacatgcaagaatttcatagcagcagttcactgcagct

SEQ ID NO: 260439 - DNA, 201 bp, Homo sapiens
atgttttctcatatttaaattcagttttgcatttttggcaaggataccagaaagtgaggttgtgaccttatcaacatgtcttatccgaagactcttgatgycaatttattccattactgaaaatgttaactttgatcacttggggagggtggtgtttgccagatttcttcactacaaaggcactatatttctttgtactct

SEQ ID NO: 260440 - DNA, 201 bp, Homo sapiens
ctgatgtgtaaaaggatagcgtttgaggggatggtctctgagatggaccaggctctgacagtcaatcacgtgactatcaaaaaccttacaaggctctgaaygtagtccttacttctatataaagcccaatggaactcacagatgaaaagagagcttcacttattcttttgcttttttaaaaaatgagctggttataacttt

SEQ ID NO: 260441 - DNA, 201 bp, Homo sapiens
tagatggcaccactgaactccagcctgggccacagagcaagactccatctgaaaaataaaataaaataaagttgccaagtacacttggataggctagtctstcatatggcacttaatcacataattttttaaagtcaatttgttacatatacatcagtactaggtataggggttctgtgtaagggaaagtttcagacacat

SEQ ID NO: 260442 - DNA, 201 bp, Homo sapiens
gatcagatacctgatgtgtaaaaggatagcgtttgaggggatggtctctgagatggaccaggctctgacagtcaatcacgtgactatcaaaaaccttacarggctctgaacgtagtccttacttctatataaagcccaatggaactcacagatgaaaagagagcttcacttattcttttgcttttttaaaaaatgagctgg

SEQ ID NO: 260443 - DNA, 201 bp, Homo sapiens
atcatgttttttaaaaggggaacgttgttacacagtgaagaaaaatggctggctctcatctccacaattgcctctgctacctgctacagcatctagtaagwtggggagcaagagatcctaaaactaagcatttctgactttttcatgtggaaattaggccaccttttctatcaatgaacagatggagaggcctccatggtt

SEQ ID NO: 260444 - DNA, 201 bp, Homo sapiens
ccagcctgggtgacagaaagagaccctgtctctaaaaattttaaagagaaaaaaaagaaagaagtacgttatatggcatcatgttttttaaaaggggaacrttgttacacagtgaagaaaaatggctggctctcatctccacaattgcctctgctacctgctacagcatctagtaagttggggagcaagagatcctaaaac

SEQ ID NO: 260445 - DNA, 201 bp, Homo sapiens
tttaaatattgccttataaagcttttgcagcagtagtttattattctcccccatgtcttatcagttggggttatcctataatattctctggctatgaccaygctcatgtaaaacataaagtgcattatccaggtatgaagaataactactttccttttcaaatagttattcttcttaagaatcccattttttttttttttt

SEQ ID NO: 260446 - DNA, 201 bp, Homo sapiens
aattttgtgttgaatttatatagtggcttactggtttcaatgtgctttcacatatattatcacttctgatcccctaaacaaaggagtggtgtaaaaaatgktttttctattttactagaaactaaaaagggtcaaagagatttagtggtttgactaaagttacgattagttagtggctgagttatcactaatagctaacta

SEQ ID NO: 260447 - DNA, 201 bp, Homo sapiens
gaataaaattgagacatatagtactgttaaaatatatgtgataatatgaatatgtaaaattatggaaccaatttttaaatgataatgtaaattaaatgacygttagtaaataatgactactggccgggcgcggtggctcacgcctgtaatcccagcactttgggaggccgaggcgggcggatcacgaggtcaggagatcga

SEQ ID NO: 260448 - DNA, 201 bp, Homo sapiens
tattttggttagcaattagagcttatgaatgtgaatgttacttcattatgtgctttatatttttttcacatctccaaaatatgacatggatagtaacaacrtatacacacacaaacgtgaggatggggatgtaggtgtgcattcttatgaaaataatattaaatatattaaattaccgtatttaaatgaatatattaaagt

SEQ ID NO: 260449 - DNA, 201 bp, Homo sapiens
caaataataaaggtcgcacagacattaaccagatagttttcattccctaagccaggattgaacctgggctgctgtggtaagagcacagaccaagagaaagyactgccacgtggttacaatgtcatgctcccaaggacatgactgaccagtttgctgggccatcttgaacagcgggcttatggggacctaggctcacattct

SEQ ID NO: 260450 - DNA, 201 bp, Homo sapiens
tcccagaaccctgactctatcctgatctcgatctggtttgctgccaaaacacctgacaatcctttgctctaccaacctgatgtaatttttgggagaccagwtaagcagaactttggaacattgtaataatgtcttataagttgatgaatataaaagttaaatataaaataatataaaagttgattctctctgtggaaatga

SEQ ID NO: 260451 - DNA, 201 bp, Homo sapiens
gtgacaatgaagggtgacatcaaatacagaagtaggaacatcttcttataaaactgattattttatgttaactctgttaaaggcccttagggacacgattkcctgaaattttcaaaaggctctaacatcagccattttgtaataacttaaaattccatcaatttatagaacttggggagaatgcaaagcatgcaaatgtga

SEQ ID NO: 260452 - DNA, 201 bp, Homo sapiens
tcttaggtaaatttgtgttttaattgcaagcagctagagtatgccttgagactacttgaattggaaatggttttctttttttcttattcatttacaggagygtaagtaaataaagagcaataatgaaaaaccttccttacagtatgtaatgaactcacattcttatttaagaatgtgattactttggctgtggtgatttac

SEQ ID NO: 260453 - DNA, 201 bp, Homo sapiens
ccttgaaaacgaaagaaacgacttgagaaaaagaacttccttggtaagatcagactgctctttctccctgtaatttataattctgtccagcagcaagtggmaaaaaaaaaagaataaaaaaagaaaggaaaaggggaaagaataatcaaagccaaactagaatcagagggaaagaatgcagaggggaaaggttcagccttg

SEQ ID NO: 260454 - DNA, 201 bp, Homo sapiens
ttttcattataatttaaatggctctgcagttatatattctgtattttttttatgttcctaatccatttaaataaagctgtaggtatgaccatggaaaccarttagcactttcttagtttgcattatccaaaaggtgttggatttgtcggattgcaaattggtttagagttctccgtcactgaagggacaacacaaaccaga

SEQ ID NO: 260455 - DNA, 201 bp, Homo sapiens
ttttggtttaaaaggtgtaactgaaagggccttataaatgactggtgctttttttcccccttggagatatgattatatgaatttcttttatggctttggtrtttctactttaagttatctgtaattattatctccaattgtcaatagatatttctcatactatatttttttatatattattttcaagtggaatccatggtg

SEQ ID NO: 260456 - DNA, 201 bp, Homo sapiens
cctaatagacagaaaaactcttctaggacaggaactgtgttatgtgattgtatgttgtccatagagaatagcatagaactagacataaaaaatgaactaawtttttttgcagaaaatacatacaatggtatcttactgagtatctcttcctaattctgtcatcagtgatctcatgttggtaggcttgaaattggacatgat

SEQ ID NO: 260457 - DNA, 201 bp, Homo sapiens
tccctccctacttcccccatttaaatgttggctgtatgaaagtagagaacatgtagactttgttttaggaactctattctattaaataaatgaacgcagaygttcaatacaatatttaacatgttaggtttagcaaaattgtggttatggtttgtatgtgtgtttgtcttttttggtagaaataggcaataaaacatattc

SEQ ID NO: 260458 - DNA, 201 bp, Homo sapiens
taaaaacactttacattaaaatatacacatagataaaattttattttaaaaatatacatatgtccacagcttcccttgtttaacagcctgcatctggctayggcaccctgcttctaaggagactaatgctctcttccatgtgcaaagatatctcttatttctgtggttatttctctttaaatccgtgctcttcttcacaaa

SEQ ID NO: 260459 - DNA, 201 bp, Homo sapiens
taactcacacatccctacaggtcactctgacctagtttattggttaacagacttccttatcttaacttaaaacattcctttctgctgactccaaatttgtrgacaaagctttactcctttaaccagttgcaaattaaggaatctcttaatccacctataacctgtagatatctatctttttggatcaaatcaacatataac

SEQ ID NO: 260460 - DNA, 201 bp, Homo sapiens
ttcatgtaaatttacaccttataggagtatatcactgtcaactcggactttgctgaaatacttgaaaacaggcatggtggaaaaaggaaaactcaccacayatacattttccattataatgctgatctctgaggtactaacccttgtagtttggctaaagggcctttaaaaacactttacattaaaatatacacatagata

SEQ ID NO: 260461 - DNA, 201 bp, Homo sapiens
atttattactttgcctgtaactccttcctttctaaaatgtataaaacctcctccctttctaaaatgtataaaaccaaagtgcagtctaacttctgcagatrcactttctcaggaactcttcagattgtgttcctcggtacatagtcagtcatactgactcagaactaaccttttaaaataaaaataaataaacaaataaga

SEQ ID NO: 260462 - DNA, 201 bp, Homo sapiens
cttcctcctcccactctccaccctctgataggcccctgtgtgtgttctcctctatttgcccatgtgttcttccatatacctttacattttaaagaaaaacrattagcattttgagtgatgggcccttatcatattgtcaagtaatatctttaagttcactgaaaagtgtacagctggaaaaaggttgatttttcttgttgc

SEQ ID NO: 260463 - DNA, 201 bp, Homo sapiens
tacactttctcaggaactcttcagattgtgttcctcggtacatagtcagtcatactgactcagaactaaccttttaaaataaaaataaataaacaaataaraaatgaatagtgctgcgataaacttacaagttcaggtttctttctgatataatgatttcttttcctttgagtggatactcagtagtgaaatttctgaatc

SEQ ID NO: 260464 - DNA, 201 bp, Homo sapiens
gtgcactttaaggttatgaagttgtgaatttaagactgcacagaaataagcagaacccagcaaaggtagcttagaataatttgagaagtgcttatggtgcrcttctacccaaatcaaatgagatggtagaaaaccaagagaacaatgtattattttaaggtattcatttagagaaaatactgttgtgtactaactacatga

SEQ ID NO: 260465 - DNA, 201 bp, Homo sapiens
tctgatcatcagggagaaaagctctctctttattgaatgtctgttctcaacatgggtctgctccctcgtggtacaaagcagcagccggatctctagccatyacattcacattctaattagcaggaagaaagaaaggagaaaaaaggccatgcttccctttgaggaagttttctatatggcacttacattatttctgattgc

SEQ ID NO: 260466 - DNA, 201 bp, Homo sapiens
atttattcagatgctattttgttttatgaaagagacttttatctttttccacattatcaatatgtcactttttctagtctaatttcatttctcttatttcwtgttatttcatatttgaaaatattttgcctctttgatttcctttctaagccttcttgttcccaaagtctccttaaactatgcagtgatagacagcaagag

SEQ ID NO: 260467 - DNA, 201 bp, Homo sapiens
ccaaccttcattttatgtgtcagctgtgatgcaatacttcaagtgcttcataaagataagggctgcacttttccctcagagcactggccaaataataatcwggtaattggaatgtatgtagcactttcatctgaaaaactcactcctcagactttttttatgttatccctattaagaggttggttgaagaattttgggtct

SEQ ID NO: 260468 - DNA, 201 bp, Homo sapiens
gaatttgtctcccttctctgaaccacctctgctgctatagatgcacctaaattcagaaaaaaatatttacctagtgcaatctctatctcatgaatgctttycttttcagtcttttatgttatcagagagatgtctatagaaaagtttacatagaaattatttactcaaatattttaattaatgaatttttaaactattttt

SEQ ID NO: 260469 - DNA, 201 bp, Homo sapiens
atatcagttgtccttattctctggggggaaataaaaagaagtatgctgacaatgacctatcttctgtggtgttaaagtttatacagtatctaagttaagayagattgctgataattgactcaagttaatttattttagcttagattgtaaataaatgaccattgccatgatgatcttggctactaaacagactatgtagca

SEQ ID NO: 260470 - DNA, 201 bp, Homo sapiens
tagaggaccacttagtgctaagctactataataaagtagatctttcttcctaagcatctaacttacaaagagagagtactacatgcaatacagacaaaaakgaagcatcccttttacattatctttctttccactcatttggaaagtaattcataatatttcttttatctctcgtatatcagttgtccttattctctgggg

SEQ ID NO: 260471 - DNA, 201 bp, Homo sapiens
agcttttagttaacaattacttttcttgccaccctagaatttaagaatggggagtaaattacttgaaaggcacaggcctctcaaaaaaaaaaatgttatcygaaaggctgtgaggtgatgcctgctttttcttttggtaaaatttctatcacaaaaatgacagaggtgggctccaagaggtaaatgctgagtgtttgtcgt

SEQ ID NO: 260472 - DNA, 201 bp, Homo sapiens
attatacatctctaccagttaaaaaggttctaggtgaatagtatctttatctagttaaaaagattctagagaaatacattttaaaaggtgccaacgtaggygcacaaaatatctcggctcacagcatctgtcctatccaacccacctctgggactttgcaagccagctctttttgtgcacctacgttgggacgatctcatt

SEQ ID NO: 260473 - DNA, 201 bp, Homo sapiens
tgatgtgcccatttcctatacattacggtactatcacaccttttcatttcactttatccaagcctaactcaatacaggagaatctttggggaagctgactracgaccaagggtcagccatgcatcctgcagcatcccctgctattgggctccctcaccaggcaagtgaacaacgaacaaggcttcaccctcctggacaaac

SEQ ID NO: 260474 - DNA, 201 bp, Homo sapiens
ttcatatttagatgaaaacaagacaaatttcttcacttttgattttaatacccctgattcctagtcatttgatcttgattatataaaacaaattcaacaaygaagaattgacttttctagaaaaaataatgttagaaaaccaattctgaaatggctaggttattatttttcccagttttgtgctttgccaaatttgtggtt

SEQ ID NO: 260475 - DNA, 201 bp, Homo sapiens
agctgggactggaaactaagtcacatcacatttaggaattgtgtctaagttctgtcattagttagacacatcacttcagaaagtcgatctttctttgtacstcaattatgtcatctctaaaataaaaaatttgagttagatgagctttcaatccctagtgttagttgcctgatgatttcctccatcttgtaagagatgaga

SEQ ID NO: 260476 - DNA, 201 bp, Homo sapiens
atgggagctatggatggaagcttgtctatccctcaaggtactgaatgatttcctggttataattcagaaagtagggaactcaatgccagaaacttcagaarcacgtcatagatcacaacagatccattggagattatatgcataacctaatggaagatgaagatgcttgtaggaaacatttttctcaatgcataaagaaaa

SEQ ID NO: 260477 - DNA, 201 bp, Homo sapiens
tttgacacaagcctgaccaacatggagaatacaaaagtagccaggcatggtggcacatgcctgtaatcccagctactcgggaggctgaggcagaagaatcwcttgaatctgggaggtggaggttgtggtgagctgagatcacgccattacactccagcctgggcaacaagagcaaaacttgatctcaaaaaaaaagaaaaa

SEQ ID NO: 260478 - DNA, 201 bp, Homo sapiens
ttaacaaatctatcgcctcacatacttattttgtgtgtgtggtaaaaacatttaaaatttctccttgcagcaattttggaatctacaatggactattatayagtaaccattttgctcaataactcactaaagcttattcctcctggctaacggaaacttgtaccctttgatgagcacctcccatttccctaaactttccct

SEQ ID NO: 260479 - DNA, 201 bp, Homo sapiens
ctctgatccttccatatgcagccttttggtcttagtgttaattacaataaacataaataagtatttatgtttaaatataaataaatatttatatttaatartattttccattactggaaaattattcggagctgtaagcagggaatctaactgaagagagaaacctcagaaaacaataagagaacaaaattattaggaaat

SEQ ID NO: 260480 - DNA, 201 bp, Homo sapiens
taaacatgtaagtacaggcagttctttgatatattgacagatatttggatagataatagtgggattgctgggtggtgcagtagttctatttttttgttttyttgagaaatctgcatactgttttccatagtggttgtactaatttagattcccaccagcagtatataagttttctttcctctgcattatcacctgtcttgt

SEQ ID NO: 260481 - DNA, 201 bp, Homo sapiens
ttgtttgaattgaatgaacacttcaaaggtacaagggatgagagaaaaatccagtttcttgccagtaaagtaaaaaatatatatatatatatatatatgtgtgtgtgtgtgtgtgtgtatatattacatatataatgatgaaagtgagagatcaagagataggagagaaaaaacttgaaaagaatttctattctggataag

SEQ ID NO: 260482 - DNA, 201 bp, Homo sapiens
ttgagaaatctgcatactgttttccatagtggttgtactaatttagattcccaccagcagtatataagttttctttcctctgcattatcacctgtcttgtstaactggagtgagatgatgtctcactgtaattttgatttgtgtttcccagatgattaatgatgttgaacattttctcatatatctttgacaattcatatg

SEQ ID NO: 260483 - DNA, 201 bp, Homo sapiens
ttgatcatgttgtattatcttctagacatgctgttgaattcagtttactagtacttcattgaggattttttgcacctatgttcagcaggggtattggcctstactttgtgtgtgtgtgtgtgtgtgtgtgttcttgtctggttttggtattaggataattctgttcttataaaatgagctagggagaattccctctctttc

SEQ ID NO: 260484 - DNA, 201 bp, Homo sapiens
aaccacgccagttatttgaacatagatattaaatgtaagtaactgttaactagatataagattgttgttaataaaatcaatgaaagggtaaaagagaactrcaaataatcacagaagtggcaactgtaggatgcagcttccagctctagaggtagggaatagagagaagactttggagttattaaaacttagatcttggag

SEQ ID NO: 260485 - DNA, 201 bp, Homo sapiens
attttattttttgtcttccatctgaattgttctggccggtttattccttaaatgcccaagatagataaaaggtaccgaatggaaatagacaagaactccargtctgtgggggacacaagaatcttccactctgcttttcctgtgaaaattctgttcttcctacatataaatgagccgtactcatccaaacctgtgtttgaa

SEQ ID NO: 260486 - DNA, 201 bp, Homo sapiens
tgatatagtacccttgggtattagagtttttatcagccttttgaatatatcctcccattctctcctgtcctgtaaggtttatgctgagaaagagatccaartgggcaacttgaagaaaaagtgcctatcattgattttagacagtttgactataatgtaccgtggagaagatttgtggcattgtgtctgattgaggattgc

SEQ ID NO: 260487 - DNA, 201 bp, Homo sapiens
agaaggtggctgttgagcccagactctctgtgggagctgcctaaggagtcacttcatccaagggcaagattcaggaacaaataggcagggagaggaaatascactaagagagtaaatgctcaacatctacctccctataactaaaaattaggtaatgtaccaaatttatgtaatttccactattacagaaaacttacgtaa

SEQ ID NO: 260488 - DNA, 201 bp, Homo sapiens
ggaagacaaggaggttatttactaatatctctgagtttctatatgaattaggatcttctgctgagagtaagagagtgtatgtcaagagtggttgaggatarcagtgaagttttggagagtaattgagtagaagaagatgctgatccagtgcagggattggtggacttgacagtttagtacttatctattcacaacttacaa

SEQ ID NO: 260489 - DNA, 201 bp, Homo sapiens
acagattggttttattttggtttattatttgatgtaggaaatgatacagatgcgatacatgttgagatttaaaaggatacaaatcttgtgatattttaagrgtttattacagattatattttctattatttatcacatacctactataataacaactgaaagtacagcatcataacttgcaggttgattaataagttagtg

SEQ ID NO: 260490 - DNA, 201 bp, Homo sapiens
aaaaatatccaagtcagagaacacaaagatgaagatgtaaagacttcaagaaatgtggaattgctgttgtaactggacaacaggcaatcatgctataaatraggagtacctcccatgtgccaagcattgaggatatactcttgaaaatgaatgactacaataattttcactttcttttttttttttttttttttgagacgg

SEQ ID NO: 260491 - DNA, 201 bp, Homo sapiens
ttttcactgggatgttacatatcaacacacacgcacacacacacacacacacacacacacacactcttacagatcttgggttaattttaagataaaagtaraaacatgttcaatgcttgcaaacactgattgctttaaatttttcatttgtgtttcattgctttatggataaaatacaataaagattttaaaagaaataaa

SEQ ID NO: 260492 - DNA, 201 bp, Homo sapiens
aataaatggtaaaaatgatgcagactagtttttccctaaaatcctccctttcataatttaatttacactaccatttttttttttttttaaaaacaggatckcactgtatcacccaggctggagtacagtggcgtgataatgtctcactgcagccttgaactccctagctcaagtgatcctcccgtctcagcctcctgagta

SEQ ID NO: 260493 - DNA, 201 bp, Homo sapiens
tttaatctatagacctatttgagaagaattaacatcttgataatattgagtctttcaatctatgagcatgggatatcttttcatttatttagaacttcttrgatttatttcatcagatttttatagttttctgcatatagacctcatacatattttgttatatttattcttatttcattttttggaattaataattatata

SEQ ID NO: 260494 - DNA, 201 bp, Homo sapiens
catcttgataatattgagtctttcaatctatgagcatgggatatcttttcatttatttagaacttcttggatttatttcatcagatttttatagttttctkcatatagacctcatacatattttgttatatttattcttatttcattttttggaattaataattatataacataaaaattataaaatttatatattataaa

SEQ ID NO: 260495 - DNA, 201 bp, Homo sapiens
gaactggtacttttttttcagaaggttattaattattgattcaattttttaaatagaagacttttcagatagtaaaacccatttataaaagggcattcttyttcagcacaattttaaaatcactacaacccaggtaagatcaaacatcataaatatatacctaatcacaaccaccaaaaatggtaggtgttatggaaacca

SEQ ID NO: 260496 - DNA, 201 bp, Homo sapiens
tttatacttgttccctgttataaaaggagagtacagggcatatagaataagaagggccaaggacagaacctataccctccttttcccccataggtttctamggctgagaggcgagagctggagagggatgaagagaagatttaaacttactgagagattgaagttttaattttgattggaatagaattatttaatcattaa

SEQ ID NO: 260497 - DNA, 201 bp, Homo sapiens
caggttcttgagaaaggcattcctgagttataaaactagcaagaagctaaaagagacttacatctcaaaggagtagagaaagaatttacaggctagaatcyacaattactattgctcctgataaaacctctcagttttcaagtctctagttttcaagcctcttgtaatgtcctggcctcaggggcaaggagtctcacccac

SEQ ID NO: 260498 - DNA, 201 bp, Homo sapiens
acaataccaatactgggtttgacagagaagacaaatatgctaaagatattaagaggaatatagggagtattatgaacagtgaccaactttaggccaataarttctataattttagatgaaatgaagaattctcttaaaaaatcacaacttaacaaaattgacataagtaaaaaacaaaatatatgagcagtcctgtaactg

SEQ ID NO: 260499 - DNA, 201 bp, Homo sapiens
ttgtatttcttgaatttgaatgttggcctgtctttctaggttggggaagttttccaacttggttccactctccttgtctctttcaagtactccaaacagtygtaggttcagtctctttacttagtctcatatttcttgaagattttgttccatatttcttgaaggttgtgttggttccttttcattctttttttctctagt

SEQ ID NO: 260500 - DNA, 201 bp, Homo sapiens
ttgatccctgggtgtaagagatccaatgttattcttatatccatttttatgacaaagaaactggggttcagagttcggatttccttgaggtcacacaggtrataaactagtaaaagtgagactcagtcttagcaatgcattctctgcatttcatatataaaactcaatataaattgtcattaatttttggttagacaaaat

SEQ ID NO: 260501 - DNA, 201 bp, Homo sapiens
tctactaactaagatatgtcagatatgtatttttgttgtttcatttctttcaaaaatttttctttcaacaagcttcattgcatatttcagctcctatctarcaaagtgggtggaaagtcaatctctattattttacgctctcctccagccacaagtcttcccttgcactgagctttgagacttttctgtatcagtcattag

SEQ ID NO: 260502 - DNA, 201 bp, Homo sapiens
ggacatgcagtaagcaaaatgccaaactttcagtgtgttaccacatgctcatagggactgtattaatcattttggttttatagggaacttatgggggcagytgttcagttgtttgtttctgacttgaatttagcagccacagatcagcaagtgtggaaaatgccagatggggaagctgcactgtgcttccagtgagtggcc

SEQ ID NO: 260503 - DNA, 201 bp, Homo sapiens
cacaaaatcttgactaaaatcttgaagtaggtaatttaacttggttcaaattcacttgagtttcctactaagtagcacgatgctgtcaaagggaacagaayaccagtaaatagttgtagttacccagaaccagcttgtcttcaagaagatccacccagagtacagaattggaaagtgaactggcatgtcagtcctgagcta

SEQ ID NO: 260504 - DNA, 201 bp, Homo sapiens
tccttccacattataggcagcaggagaggcatggaaaaggtgagcccttggtttttggagaagggctggttatgtgtctgcctccctgggctgtcatctgrccttggtgtatttcactagcagtctggctcttgcacgggcagggaggtaagacactgaaatcacctcaaaagctgtgtcccttctctgcctaaattttga

SEQ ID NO: 260505 - DNA, 201 bp, Homo sapiens
gttaaactacatagacttttaatgtcccttaaattttagacacgatcaaattatgaaatacaaacagcagtacaagcaacaaaggtagacacacatatacrtatacaaaggtccacctgcttggccaaccagacattgatctatgttactatctatgttgcaatgtctgtgttatttggtggtcttcataaattacagtcg

SEQ ID NO: 260506 - DNA, 201 bp, Homo sapiens
aaagctagtctctgccactcacagactcaaagcacatttgccccatgttggaaatccctccttgaatatatcatcagtgggctttaatgctatgttttaamtagaagctttaaatagagctacaattttctattttggtgatcttaagccttctgtttcttctttttttgtttttgtttttttgccccagtaacgtttatt

SEQ ID NO: 260507 - DNA, 201 bp, Homo sapiens
ctggaaatcggaaaaccttgatgaggtttgcttgaggtgagggactggagaagccaaatggttggaagggatggaaggcatttcttctccattcagctccmtggcctgggttgataccttatggaaagagagagaaagctcaaaataattgctgcaacagtgcgggcaaggctaccttttcctagcgggatttagccagca

SEQ ID NO: 260508 - DNA, 201 bp, Homo sapiens
gtttggtgatttaaaaacattctttgcctattgttttaaaaattaattgttgagtgaaaactaatgggatttcataattttacttctcatacactaatgcrttttaaagtttcaactatagttcttgaggaaactcaggtaatcttgaacacactgaaaataaggagtaagacaaatacaagtaatagaagctctaaatgt

SEQ ID NO: 260509 - DNA, 201 bp, Homo sapiens
taaaaatgaaatactatttatttgaaaggattagaattttttagatgtaaaaagattgtatggagacatcatgctctcacatttttctagtcacttatatkggaaatagaagtaccaaaggtctgaattaatagtgatgtataaattcaagtttaagaatcacaattaaaacatggtaataaattctagattagctatatt

SEQ ID NO: 260510 - DNA, 201 bp, Homo sapiens
gagaccgattgaacaaattgactatcataaactaacagaaacccaaatttatatttgatgtgtttagactagaagtgtttggaggaggccgacactttacrgtattacaaatgaacaagaaacgttcgttcttacatatgttacagatttgccgcaaactgaatggtattcgtttcacctgttgtaaaagtgccaaagaca

SEQ ID NO: 260511 - DNA, 201 bp, Homo sapiens
  misc_feature (1)...(201): n = A,T,C or G
gtactttttaatgttggaatcaatgaacagcaaactctggctgaaaggtaagctttggtgtaagagtcgcacttgagatttttctttgttccttttaagcntatgatgagaagtcccatgtatctgcatgtagaactaacatcaatttatgagtaacatttttctttttatcagtatcaaattatttgagatagaaggtaa

SEQ ID NO: 260512 - DNA, 201 bp, Homo sapiens
tgtgttctctctgcccctcaaacacacacacatacacactcatgcatacactcacgcactctagggtttccttcatctcatctagaaataaacaatctctycttcctaaatcagaatctctgcatttatcctgttgaagctaatatcattcttatttattttcttataccaaactatgatcaactccaatttagttgccat

SEQ ID NO: 260513 - DNA, 201 bp, Homo sapiens
caataaaatgctagaacaaattccagcagggaggcatagtagctagtgacattttcctcaaatgtttgtttgtagctaagtgccttttctattgtttaggygatgaaattggaatgctagaggacatggccgttggcatttccgatttaaagaaagttgcatttaaaataattgaagccaaatccaatgatgtgttgccag

SEQ ID NO: 260514 - DNA, 201 bp, Homo sapiens
agatgagaaaattgaagatattggccagagagtcattaacatgatgggtaggtctgtagatgggaagaataaaggtcaagtgggggctgataaggagaaaraaaaaggtcaagtggtgataaattctgagaaggttaaagaacagaagtataagaggtgactgagtgaggaaacttgcaggggagggtgaggaggtcagtt

SEQ ID NO: 260515 - DNA, 201 bp, Homo sapiens
attatctgttactaacggtgatttaagacatgaatgactatcattatggaaagagaaagtaactgaaatagaagttattcctaaaataacattgctttcaytggtttgcatgagctagggacaaaggaatgaaacttctattagcaccatagtcatgtgccatgaaagtgacacatgttatctaatgtagacgtaaataag

SEQ ID NO: 260516 - DNA, 201 bp, Homo sapiens
gtccttgaaacaagtagtatttgagtgatgttatctttcccactaagttcatttgaaaaaatatattgagacaaaaatacatataatatatgaaagatccrgggagagggaatgttaaaaacaaatattactggttttgtatttgctgtaaaattgtgtcattttctcagagattgtctttgtaatgcctttaaattattt

SEQ ID NO: 260517 - DNA, 201 bp, Homo sapiens
ttaaaagtggctgaatggtgacatcttgaatgcacaggaaatctcaatgataataactgttattatagtttagcttattacttagcaaaagtgatacttartgagctatttatggtccagaaatgataatattaatatttgtgctaattttgtgttgaatttatatagtggcttactggtttcaatgtgctttcacatata

SEQ ID NO: 260518 - DNA, 201 bp, Homo sapiens
tatagattttttaaaatgcactagtactaatctgcccttgagtcaaaatgcttaatattttgggttttttttctatgtaaaatttggttgaaagattgttygttattgttgaatttcaacatgattgcaaattaaatgatgcaaaactcaatgaagtaaaatacacaaaagagcaattaacatgttatctcagtaagtata

SEQ ID NO: 260519 - DNA, 201 bp, Homo sapiens
ctcgtaaatgagatctgaagagcaaccaaagtgtcaatagcaaaatcaatttgaaaaggatctactatgaaattaggtttctcaaataaaatgtagtttarcaagaaagcattcactgtcttccttcttatggggatactttgcattagaatgtaaaaatgatggcatgttttgaagccataaacttaatatgtatcaaac

SEQ ID NO: 260520 - DNA, 201 bp, Homo sapiens
cgtataagacactacaaggaattataaatatgcttgtggtcaaatgtttttgcaaatttggcaaaagttcgttatttaaactttcattaattcagagttcwgtctctattcagatttcccctcccttttccttcccttcttattgggtagttctagagaggctacaggcaatgttttgggggaagttgaagtgagaataca

SEQ ID NO: 260521 - DNA, 201 bp, Homo sapiens
aagtgtcagggcctgccacttgcatagtcctcgtataagacactacaaggaattataaatatgcttgtggtcaaatgtttttgcaaatttggcaaaagttmgttatttaaactttcattaattcagagttctgtctctattcagatttcccctcccttttccttcccttcttattgggtagttctagagaggctacaggca

SEQ ID NO: 260522 - DNA, 201 bp, Homo sapiens
aaaccctgtcttagggctggatcccttcattccatccttgtttgttttgtagttctatataagactcatctttgtcactatcacatgaacacttgcatcawgatcaaggaaggaggattcggaagctaaactggggacacagagcagaaataggcagataattatgcctagacctgtaactgtgtaccaggagaccagtag

SEQ ID NO: 260523 - DNA, 201 bp, Homo sapiens
ttgttttactatgcctaccaaatagttgtagttttgttatacatacctgagaatcgaatctgtgatgcctcagaagtcttaaaatatttcaaaataaaacraatacgtttgctaactgcagtaaatctcatcaatatttttttttcagcttgctggattggtttgtggttttatcatcaaattacagacaagtctgtatga

SEQ ID NO: 260524 - DNA, 201 bp, Homo sapiens
gtggtgaaccgagccaagcagtccctgacatttgtgctccttcaggaacttgcgtacagcttgccccagtgtctgatgctgacgctaagaagagacatcgwcttcagccaagcagtaggtgcctgttgttattgttagtacaaaacaatgccggattgttaacatcctatccttgatgatgaatagaattcttattgggac

SEQ ID NO: 260525 - DNA, 201 bp, Homo sapiens
tcaggacagggtgtgggccaatgtggggaagagcctgaactgcattattgctatggtggacaaactgattgaaagagatggtggcagtgaaggcagtggcrgcaacaatgatggagaaaaggaaccttcattaacagatgccattccctctcacccaagaggtaagaaataattttttttcccaatcatttactgagtaaa

SEQ ID NO: 260526 - DNA, 201 bp, Homo sapiens
agtggcggcaacaatgatggagaaaaggaaccttcattaacagatgccattccctctcacccaagaggtaagaaataattttttttcccaatcatttactkagtaaacaaaatgagaaactcgtgaaaaaaaaatgatatagaagaagaggagtcaatagtatctttgatgagagtgctgatagcatgcttttccactgct

SEQ ID NO: 260527 - DNA, 201 bp, Homo sapiens
gaattgcactttatgactgaacttttgagttgtttctgcatgaattttaggtaagtatacataatgaaatatggtaaagcatagacagcaatatctgccarccatatttattaagattgaatgcacatggagcattaggatgccatacaatacaatttgtcatgttgaattttaagaaatttcaaggcagattattagaaa

SEQ ID NO: 260528 - DNA, 201 bp, Homo sapiens
tttgcatctttttatttttcatggttttttatagataaatacccagctataaacaaagaatcaggttgtttagcaatgtatattttagagggagaagtaawtgcctttttgatttggaagcaaagttaaaacaaattataatgttagctgaagtgcttcccttgagggatatgataggtaagaatgggcaataggatttgg

SEQ ID NO: 260529 - DNA, 201 bp, Homo sapiens
ttccaggtgccgtctgtcacccctttctttgactaggaaagggaactccctgaccccttgcacttcccgagtgaggcaatgcctcgccctgcttcggctcrcacatggtgcgcgcacccactgacctgcgcccactctctggcactccctagtgagatgaacccggtacctcagatggaaatgcggaaatcacctgtcttc

SEQ ID NO: 260530 - DNA, 201 bp, Homo sapiens
tctgctttattctttctgttctagaaaatatttttaaaatattttttctctcatgtatgcttctgatggttctttggaaggtctcatgtgatggcaacccygtgacttgggaaatgcactgcatcctccagctgcagcaaccagctcagctgtctgtaggcccttcagggtggtctctttccatgctctttcctgtgtttt

SEQ ID NO: 260531 - DNA, 201 bp, Homo sapiens
tgatctaaatatggccttgagatgttttaatgttcttctatgaacatttataaggaggaattaagtactgaaggctgtgtttcagatagagtaaccgaccrgccactcatgtaaaagtgaactactgcattgtggatgcagagaggctaacattgagaggcagtagtcatcctgacaggaaatggggaaggtgagcactaa

SEQ ID NO: 260532 - DNA, 201 bp, Homo sapiens
tggaaagaccctggaatgaccaaccctttgaacttgtcctgggatcagagaagggaaagggcttaattactggatgcagactttttctgggtagaagtatwacttgaaagaggcagctcccatctgccatctaggttgtgccaagagaaggatgcatctatgagctattagcagccaacactgctggcagctgtggcaatg

SEQ ID NO: 260533 - DNA, 201 bp, Homo sapiens
ctactaagtctaaacctatgagggcgatatgcacaaatttcccaagtgtcactggcaataatagtaagtgggacaacttctactttatcccttggtttctrgacctacaaattccactgaattgatattgtagcaccatacaatgaaattgcatttgagatgagccttgaaggagccagttgcaacaagtctataaggtgg

SEQ ID NO: 260534 - DNA, 201 bp, Homo sapiens
gctagcgatttctgcacattgatttttttatcctgagactttgctgaatttgcttatcagcttaagaagcttttgggttgagacaatgaggtgctctagawgtagatccttagtattttttaaatctctgttttatttagttcttctccgatctttattatttcctttcttttgttaatttttttttttttttttttgaga

SEQ ID NO: 260535 - DNA, 201 bp, Homo sapiens
cctaaaagaaaagttgtgtttgcaaataaatgtattgaaaaaacctccatgggcagcttcatgtgaacactgtctcattttatttttctcctttgtttttyccccttcagatatttcacattttcaggaacaaaatgatttaaaagcattgctagaaaatctccttcaaaatatccaatccaaaaaaagaaagaatgtaga

SEQ ID NO: 260536 - DNA, 201 bp, Homo sapiens
gctgggctgcagtgagcagagattgggccccattggcactccagcctgggtaggcagagcaagaccctgcctaaaagaaaagttgtgtttgcaaataaatrtattgaaaaaacctccatgggcagcttcatgtgaacactgtctcattttatttttctcctttgtttttcccccttcagatatttcacattttcaggaaca

SEQ ID NO: 260537 - DNA, 201 bp, Homo sapiens
tcaagaagttaatagtgctgagttcaaggacacttgctgtatagcaactgatttcatgtgtcttatttgaactttcagatttctcccaaccctgagttgtycaatttaatatattctcttgattcagactagctactcaatggcaaaaaaaggaaagttatatctcatgacatctatgtcttatgcttttgttaaagtgag

SEQ ID NO: 260538 - DNA, 201 bp, Homo sapiens
cttttagttctttctacactgttttccatagtggttatactagtttacattcccaccaacagtgtgaaagtgttcccttttcaccacaaccacgtcaacayctattactttttttattatggcaataaaacaaagataaatagatgggacttagttaaactaaaaaacttctgcacagcaaaagaaatagtcaggagagta

SEQ ID NO: 260539 - DNA, 201 bp, Homo sapiens
cgatatgcacaaatttcccaagtgtcactggcaataatagtaagtgggacaacttctactttatcccttggtttctggacctacaaattccactgaattgrtattgtagcaccatacaatgaaattgcatttgagatgagccttgaaggagccagttgcaacaagtctataaggtgggaaggattcccagaggaaaaagca

SEQ ID NO: 260540 - DNA, 201 bp, Homo sapiens
acagtgatagttggggggcctaacccagtaaaaacatcttctaaaaggaaaaaaaaatctttaagggctaacttgttgatgaggtagagaaggagaaagamcaaaaaagcagtttaaaaattcctggggaagagcctcttattcttgtgcaaatggttcctccaccagggagacaagtttaagcttaattgctgtccaata

SEQ ID NO: 260541 - DNA, 201 bp, Homo sapiens
tatgccaaaaaatgtgataacctagatgaaaaggaccaattactacaaagacacaatctgccaaaactcacacaagaagaaatagacaatctgaataaacstatttaatcaataattaacaacccattaaaacagaaagttttagtaccagatgtattctgccaaacattcaagaaaaaaattatatcaattctctacaat

SEQ ID NO: 260542 - DNA, 201 bp, Homo sapiens
acctgttatctatggaaagttttcagagtgtctaaaagcattttgattggttttgtaatgtttacaaaccattcatgtaaaaagtttttgttgaagaagcaaaaaaaaaaaaatgcttagctatctatccagactgttttcacctggccttataagtgtatctattttttgcttctgaaaatttccacaggaagtcaggta

SEQ ID NO: 260543 - DNA, 201 bp, Homo sapiens
acaaggaacaaaggcaatacaatggatcaaagatgatcttttcaacaaatagtactacaataacacaggcaaaaaattattttagacacagattttatacmgttcatgaaaatttactcaaaatgaaccatagacttaaatgtaaaatgccaaactataaaatgcctagaagtgagcatgggagaaaacctagaacttagg

SEQ ID NO: 260544 - DNA, 201 bp, Homo sapiens
caagatttatttcagcttgagtgttttataagcagattagaattttaaaattttcacagccagtcttcttgcattatactctttttaaattcaagcatgtwtcatattataagaagctaaccttaaattatagcccttgttttgttaaatattcagtattctaggaatttgaaattctcaaatgtagtctttaaaactctg

SEQ ID NO: 260545 - DNA, 201 bp, Homo sapiens
tggtaagttgctttgtgtgctaagtgcagccaaggtttgcattcttagttaagggtgtgattagttccatatgtccacaccttaccagttgtgaagctgamaagtcaaatagatctcaaaacccaaaaagcagtttgtaacctcaaaacacttaacaaaccttgcatctgacctgaattttaccagtggtctttagggctg

SEQ ID NO: 260546 - DNA, 201 bp, Homo sapiens
caaaacacttaacaaaccttgcatctgacctgaattttaccagtggtctttagggctgtttatatttcttaaagattaaagtcatgtgaactgaaggatamcacagcttttatcttccctctaaaaaatgttagatccaagcgcttgtttttctttaggccaaattaattagagctctttttacagatatcacacacagta

SEQ ID NO: 260547 - DNA, 201 bp, Homo sapiens
gaatagccgtttcaccaaataggatatatgaatgatttataagtacaagaaaacatattcaacataattcctcactaggagaataaatttaaaatcacagrtaccatttccttcacactagaatcatcagataagagcaaatgttggtgaggatgtggaaaacctggaacccttgtacattgctggtggaattgtcacttt

SEQ ID NO: 260548 - DNA, 201 bp, Homo sapiens
ggcaaaaagtttgaatagccgtttcaccaaataggatatatgaatgatttataagtacaagaaaacatattcaacataattcctcactaggagaataaatwtaaaatcacagataccatttccttcacactagaatcatcagataagagcaaatgttggtgaggatgtggaaaacctggaacccttgtacattgctggtgg

SEQ ID NO: 260549 - DNA, 201 bp, Homo sapiens
ccatcaggtcatttaaggtcttctctatactgtttattctagttaaccatttgtctaatcttttttcgaggtttttatcttctttgtgatgggtttgaacmttctcctttagcttggagaagttattaccggtttaggtaattagttcttagacatgacacaaaaatcaagacccataaaagaagaaaatagataaatagg

SEQ ID NO: 260550 - DNA, 201 bp, Homo sapiens
catcatgtagttcttgtgccgtggttttcagctccatcaggtcatttaaggtcttctctatactgtttattctagttaaccatttgtctaatcttttttcraggtttttatcttctttgtgatgggtttgaaccttctcctttagcttggagaagttattaccggtttaggtaattagttcttagacatgacacaaaaatc

SEQ ID NO: 260551 - DNA, 201 bp, Homo sapiens
acttcatttcattcatttgatcttccatcactgataccctttcttccacttgattgaatcggctactgaagcttgggcatgcatcatgtagttcttgtgcygtggttttcagctccatcaggtcatttaaggtcttctctatactgtttattctagttaaccatttgtctaatcttttttcgaggtttttatcttctttgt

SEQ ID NO: 260552 - DNA, 201 bp, Homo sapiens
tctccaaatcactgagtgatctcagtcatttatttcctctcttccagtaccccctgtttctccctttggtcagtttatgcatctatttattagatttgtcwttacaaaaccaaacactcctctcagtctctattcctacaaagcctcactgtgggtgtctactacctgcagtccaggcagacttccctgggcactttccac

SEQ ID NO: 260553 - DNA, 201 bp, Homo sapiens
ggtggtagtggttgtttttaatcctctcatgtggcagggagctaagcaggatctggaggggctggaagcaccacatactgcagccacattcttatgctacsgttgtcttcccactaatcagcctttcttcatcatgggagcaatctgaaactaattgtgtgattttagtagagaagaaagaagagtaggccctagcctcat

SEQ ID NO: 260554 - DNA, 201 bp, Homo sapiens
ttttattcacattttatatgcattttctgtccattcctagaagtaacagataaaaatgattagaaaacagagctacatagagattcttaaggcacatcacyaaaaggaacagtatgcattcaaatacgctggttaatcactaccctttggggatgtgtgttcaaccagctctatgttcacccattcatatcattgcatggc

SEQ ID NO: 260555 - DNA, 201 bp, Homo sapiens
acttaaggtaacgtctcctgagctccatatgcatctactactagcttcagatggactgtctcctgttttgaaggaaagacttgcagtatctgtaacttaargtgaagaaaagtcttttctcattgtttcctagttagtagctgtagtgcactatatctgaatgaggttgaaagatttctgttttaaatagtcatccttaag

SEQ ID NO: 260556 - DNA, 201 bp, Homo sapiens
ttcacattttatatgcattttctgtccattcctagaagtaacagataaaaatgattagaaaacagagctacatagagattcttaaggcacatcactaaaargaacagtatgcattcaaatacgctggttaatcactaccctttggggatgtgtgttcaaccagctctatgttcacccattcatatcattgcatggcctata

SEQ ID NO: 260557 - DNA, 201 bp, Homo sapiens
tgaactcggattgaatggtggaggaaaagagaaagagaacgaaaaggaggaggaaatgtgcatgtacacagtcaatcaactgatagtcacttactacaaayggtggaaaacaacggtagaacaaaagaaagtaaccttcattagcatctgctttgggcaaagccctgagcgtgatgctttatatctgcagtcttacttgat

SEQ ID NO: 260558 - DNA, 201 bp, Homo sapiens
atatgtgtttccagtaactagcatgaacattttattttcatattcagtttcctcctgcaattgttcgtttcactaaaaacttagtaatttttttccctacrtattgatagtacttctaaaagtcatctaaagtacgctaattcattttatcataattacatagcccatctcttgctgtcagttcctgtttgtcccaaggaa

SEQ ID NO: 260559 - DNA, 201 bp, Homo sapiens
cccttttttacactcttaatatttgttgaagacccccaaaaagcttttgtttatggatattatattcatcaatatttatcatgctaggaattaaaatacayattttaaagtaatttatttaaaaataataaatccattttatgttcacataaaatatatttttatgaaaatagctacatttttaaaagcattcttcatgag

SEQ ID NO: 260560 - DNA, 201 bp, Homo sapiens
ttacatatatgcatattgaatccagtagaggagaaataacttgcccaaagcacacagccagtcaagtgacagggcaagattctaatccactgttgtgatayagatattaggatgaagaatgttttagttaattcaccactctgtgtttttaaattatttctcaataccaaacaaattaacttgtattttgtggactctatt

SEQ ID NO: 260561 - DNA, 201 bp, Homo sapiens
aatactgctgctaagggaggagagtgtaactacattcccacaagaggttttggaagcctttgtggaaacttagatgctaaactagggagactataagacaycgtcctttcagggaggagagaagcattgaagttcagtgagttgatatgatgaaatataggttagattaatttttccaacatttcatttattgcatggtgc

SEQ ID NO: 260562 - DNA, 201 bp, Homo sapiens
tgggtcacttttaaagtgttacatttttatgttttacatttaggtatatgaactactttaagttaactgcttttgtttaatttgtaaagtttaagcagagttttttttttttccaaatggatgtttaattgttccaataccatctgttgaaaagactacttttagttcattccattgcctgtaactttgtcaaaaatcaat

SEQ ID NO: 260563 - DNA, 201 bp, Homo sapiens
gatatttaatagtcatcattgcaaaggcagcatacagcagaaaagaaagtcatctataaataaattgccagtcatctacaaataaaatatactatattttycagagctttgaaagctaagtgtagaacatctcaaactttaaaaaaatgtacatatggaatttatgtcatggaaaaatcaaacacttggctgtgttacatg

SEQ ID NO: 260564 - DNA, 201 bp, Homo sapiens
acataatatgaatataatactcttcatttataaaacaactttcatctttgtgtttcgttggaagtcattcccaatactccaaatttaaaaatgtcagtctygtaggctatagctaaaatttatctcccattcattttcaatatttcaataaagtatatttcaattaaaatatactttatttttttcttttcagaaagaaca

SEQ ID NO: 260565 - DNA, 201 bp, Homo sapiens
ctgagaccgtatttttgacatgcctttcatttgctttctaatgcattagtggcatctgaatctctctcagcattaatatttaaaaactctaattcttggcrttgtgatttacaagtgctaacataaagcaaaacaaaattgtaaggttttctaaaagtccacaaggcagtaggtgagcagatgaatgaactttgaataaga

SEQ ID NO: 260566 - DNA, 201 bp, Homo sapiens
tataaaacaactttcatctttgtgtttcgttggaagtcattcccaatactccaaatttaaaaatgtcagtcttgtaggctatagctaaaatttatctcccrttcattttcaatatttcaataaagtatatttcaattaaaatatactttatttttttcttttcagaaagaacattctctgtcacaaaattttcttttaaaa

SEQ ID NO: 260567 - DNA, 201 bp, Homo sapiens
aacttgacaaacttcagctctacaaattatcacaaaaaataataacagcaatataaatttgaaatgtcaaggatcatagtaaatttatggtaaacatttakggcagaaaacaaaagacaacacagattttattcaggattatatgtttctacacctttggttggaagtttagggaggaatttggtcatagcagttctcatt

SEQ ID NO: 260568 - DNA, 201 bp, Homo sapiens
gctctacaaattatcacaaaaaataataacagcaatataaatttgaaatgtcaaggatcatagtaaatttatggtaaacatttatggcagaaaacaaaagmcaacacagattttattcaggattatatgtttctacacctttggttggaagtttagggaggaatttggtcatagcagttctcattgtgattggtgaatgat

SEQ ID NO: 260569 - DNA, 201 bp, Homo sapiens
ccatctgtactaaaaatacaaaaattagccaggcatggtagcatgcacctgtaagtcccagctacctcgggaggctgaggcaggagaatcacttgaatctsggagcagaggttacagggagccaattgcgccactgcactctagccttggagagtgattaaattcaactctgctgaaacaagaggcagaggggtttttaaa

SEQ ID NO: 260570 - DNA, 201 bp, Homo sapiens
catcagaaaatcttactggctccacttccaaaatatatgccaccagttctcaccacctgcattgctactaccctgtgcaaaacccttcttacctcttctargttttggcaacagcttcctcctagcatctttgtttcttctgtcacttctcatttagtccattcgtatccactacatccaaagtgactgttttaaaatgaa

SEQ ID NO: 260571 - DNA, 201 bp, Homo sapiens
ttataaatgttttcaccacaaaaaatgataattatgaggtaatggataggttaattagcttgatttagctattgcacaatgtatacatatatcaaaacatsatattttacaccataaatgtatataatttttatgtgtcagttagaaagaataaagaaaataaatacaatagaccaggcatacaggtggttattacaggtg

SEQ ID NO: 260572 - DNA, 201 bp, Homo sapiens
agaatgggagaaaatttttgcaatctatccatttgacaaaggtctactgtcaaaaatctacaaggaacttaaatgtataagtctggataatttctattagmctatcttcaagttcactgattatttccttgcctgtgtcaaacctactggttagcctgtcaaaggcattctgcatctctgttattatgttttatttacatt

SEQ ID NO: 260573 - DNA, 201 bp, Homo sapiens
gcttagtttggccagacatgaaattctgggttgaaaattcttttctttaagaatgttgaatattggcccccagtctcttctggcttgtagggtttcttctragagatctgctgttagtctggtgggcttccttttgtaggtgacctggcctttctttttggctgcccttaatattttttccttcatgtcgaccttggagaa

SEQ ID NO: 260574 - DNA, 201 bp, Homo sapiens
cttgtaaaatcatttttccacatcattataacatttgttttcaaatgtcagaagcagatgaaataattttcctacagatattgcttcaaggataaggctaraactcacagagcacttagaagaacaaggatacaaacatcccaaaggtgtacattaagattaaatttgcacgttgaagaggaaaagaattgcactttatga

SEQ ID NO: 260575 - DNA, 201 bp, Homo sapiens
catcatgagatcttatcccaggatgctgataatatcaagatgaaaatagtcaggtgggaagaagaactatatatcttcatgctatttccactaattgaaakttcctagaaattatatttgctacactaggtttcagttgtgtcacaatttactaatttacttaaatatttcaatacttattccatataaaatgctaccatg

SEQ ID NO: 260576 - DNA, 201 bp, Homo sapiens
tgggtctctttctgattgtataacacaggtctctgtattttcattaaagtcccagcctatgaaaatgtgttagtttctctcttcctaaaaaggatctttcrtttttcttatttcttcctccttgtcgctgcttaacttctcaagatgagtcaatgcttacagtattaattaggccaggttccattttggggggaaaaaaga

SEQ ID NO: 260577 - DNA, 201 bp, Homo sapiens
atttattaagattgaatgcacatggagcattaggatgccatacaatacaatttgtcatgttgaattttaagaaatttcaaggcagattattagaaaattargacaagtcacctgccttattcttctactattaacattcctattattgctattttttctctttcatcgctagcaaccttcatttctttggcgtttgcaggc

SEQ ID NO: 260578 - DNA, 201 bp, Homo sapiens
aacaaaaagctttctcctcaatgatttatcaaagtgaacacccctgcaaccatcatcaggtcaagattgccagcgcattagaggcttgctttcacctccaytgaattgctcccctccttaaatgtaatcattaccattactttgttttattcacatcttttgtttttctttatagttttactggataagtatgtatcccta

SEQ ID NO: 260579 - DNA, 201 bp, Homo sapiens
agcattaggatgccatacaatacaatttgtcatgttgaattttaagaaatttcaaggcagattattagaaaattaggacaagtcacctgccttattcttcyactattaacattcctattattgctattttttctctttcatcgctagcaaccttcatttctttggcgtttgcaggcatccactaccttgaaaaccttttgg

SEQ ID NO: 260580 - DNA, 201 bp, Homo sapiens
actacttcacatcttcacccaaatttgtgattcaaagcctttttaaattttagccaatctgctgagtgtctagcagtatctcattatagttttaattagcrtttccatgattattaatgagcttgagtactttttcatatgattattgacaatttggctatcttttttttttgaaaatgcttttcaaagtcccttgacctt

SEQ ID NO: 260581 - DNA, 201 bp, Homo sapiens
caaagcacacagccagtcaagtgacagggcaagattctaatccactgttgtgatatagatattaggatgaagaatgttttagttaattcaccactctgtgyttttaaattatttctcaataccaaacaaattaacttgtattttgtggactctatttatacaaatacaatttctcagttaaagcagatgaactaattctat

SEQ ID NO: 260582 - DNA, 201 bp, Homo sapiens
ttctttaacctacagctatttctcttttcaagttgcaaattttccttttagtaatattttaaatctgtagttttgaaggttttctgtttgtttgagagccraggttttacagtatatctttggcttgctttataaatttctttttagggtaaatgcagatagtgctgagagacataaaactttctgtgctgttctgaagag

SEQ ID NO: 260583 - DNA, 201 bp, Homo sapiens
ggagtctcagcaagttcttatagacacactaaaacattcacttagtgtttccctctgtcatggaaaggagcccagggaataaaatcacacttagtgcctgmgaggctagttggctcagggcagagatagtggggcagtgactatattgtggggcacccttagctccccagcttcactaggtttataaaaaaggtatgtgtg

SEQ ID NO: 260584 - DNA, 201 bp, Homo sapiens
taggacaagtcacctgccttattcttctactattaacattcctattattgctattttttctctttcatcgctagcaaccttcatttctttggcgtttgcargcatccactaccttgaaaaccttttggttttcgttttctttctttctttcttcccttcctctgtcactctcccttcctcttctatcatgctctctctcac

SEQ ID NO: 260585 - DNA, 201 bp, Homo sapiens
ccacatgcattttatgttttcccgaggaaagattcttgttggtctcagggttaaggagtctcagcaagttcttatagacacactaaaacattcacttagtrtttccctctgtcatggaaaggagcccagggaataaaatcacacttagtgcctgcgaggctagttggctcagggcagagatagtggggcagtgactatatt

SEQ ID NO: 260586 - DNA, 201 bp, Homo sapiens
tagagggctggaaaacagaggctgtgcttggatggctcccaacacacttcacaaagctcaggaaaagctcagctaagccacatgcattttatgttttcccraggaaagattcttgttggtctcagggttaaggagtctcagcaagttcttatagacacactaaaacattcacttagtgtttccctctgtcatggaaaggag

SEQ ID NO: 260587 - DNA, 201 bp, Homo sapiens
ctagcatttcttccagttcaaaacacagattaaaaatttaacttgtgaatggttggttgtatgatataaacagtttttctttcactaaccctttttatatsctcttacgttgagtgtcaagtctgtcttctaattagtctttcctggagcagtgtatcatagaatcatagtctttcagagccaaaataaacctaagggata

SEQ ID NO: 260588 - DNA, 201 bp, Homo sapiens
atcaatactaataaaataatctgtgttttcaaaccattattgtattggaaactaatactgaaaacagtttttaatcaattctattacagagattattcagstatccaaaagttttcaaagatatgatctttcatctgctttgtcgttttagtcttggaaatatagtgatataaagagtaaatgtttatcttctcaaatttt

SEQ ID NO: 260589 - DNA, 201 bp, Homo sapiens
agaaattgtgaagaaagcatgatgctctgctacagttggttgatatttggctcttttatttttctcctgagtaacataagagtgattgagctcagaggacrtgaacatcctgcacaggaaatagatgatgtgtggaggaggtgaggggggcacccagcagccgttctctgaatccttcagtgagcttcccttgaatatgcc

SEQ ID NO: 260590 - DNA, 201 bp, Homo sapiens
attattgtattggaaactaatactgaaaacagtttttaatcaattctattacagagattattcaggtatccaaaagttttcaaagatatgatctttcatcygctttgtcgttttagtcttggaaatatagtgatataaagagtaaatgtttatcttctcaaattttatcatattttaacattgatctgaaatgttaatgat

SEQ ID NO: 260591 - DNA, 201 bp, Homo sapiens
acaaacattaactcagtatacatcataaacctaaatagaaaatctaaaccataaaacttccagaggaaactatggagaaagtcttcaagacttttgattaygtaaagatttccttagctatgatactaaaagcaagattcataaaaattgtaaattagactatcaaatttggaatcctctgcttcttgaaagacattatta

SEQ ID NO: 260592 - DNA, 201 bp, Homo sapiens
actcattcaataaaatgctagaacaaattccagcagggaggcatagtagctagtgacattttcctcaaatgtttgtttgtagctaagtgccttttctattrtttaggcgatgaaattggaatgctagaggacatggccgttggcatttccgatttaaagaaagttgcatttaaaataattgaagccaaatccaatgatgtg

SEQ ID NO: 260593 - DNA, 201 bp, Homo sapiens
tgtgattacctaatatctcaatggggtacagatgcttatataccctacattttaggggaaagggagaggagaggtagtgtggatgattttaggaagatagyaaatagtttttaggataatttaatgggcttgaagaacatacagttgtctgttgggcctgttggtttgtgacaaaaatatgtccaggtttgttgacgactt

SEQ ID NO: 260594 - DNA, 201 bp, Homo sapiens
tcaaatgtttgtttgtagctaagtgccttttctattgtttaggcgatgaaattggaatgctagaggacatggccgttggcatttccgatttaaagaaagtygcatttaaaataattgaagccaaatccaatgatgtgttgccagttataacaggaagacggtaagcagtgctcacttcctgaagaccaggctttgttagac

SEQ ID NO: 260595 - DNA, 201 bp, Homo sapiens
ggaggagagtgtaactacattcccacaagaggttttggaagcctttgtggaaacttagatgctaaactagggagactataagacatcgtcctttcagggargagagaagcattgaagttcagtgagttgatatgatgaaatataggttagattaatttttccaacatttcatttattgcatggtgcaatgtatggtatgta

SEQ ID NO: 260596 - DNA, 201 bp, Homo sapiens
tactcactgacttcctctttggcaccataagaagctctaggctcatcttatattttccctaccccagctccaggttcagccaatttctaaagaaacctggwttcattttattggagaacagcatttagaaatcaacatctggatggatagaaacattttcatggttctctataacaaaagacactctaactaacaggatct

SEQ ID NO: 260597 - DNA, 201 bp, Homo sapiens
cctaaaacctgactctcaacttgattgttctgttccattggggaggtacgagaatagtcatggggtttgtgaatgtttgtgactggggtatgtgactgcaygtgtgtgaggagactgtttcttactttggatacattctgacttttacctgagaaagtaggcttcccctctgaggctgtgaactcttttttaagtgctact

SEQ ID NO: 260598 - DNA, 201 bp, Homo sapiens
ttgttctttaacctacagctatttctcttttcaagttgcaaattttccttttagtaatattttaaatctgtagttttgaaggttttctgtttgtttgagarccaaggttttacagtatatctttggcttgctttataaatttctttttagggtaaatgcagatagtgctgagagacataaaactttctgtgctgttctgaa

SEQ ID NO: 260599 - DNA, 201 bp, Homo sapiens
tgtaagttccctcaatatgtcacccaatactgacaaaatgaatttgtctgcaatttgttcaccttcattcttgaagaatattgtattttggtagagaactytaggttggcatgtatttttaagcatattaaaatattttacgtgttcagcttccttttttctgtagatagattagctgacagagtaattgttgctactttg

SEQ ID NO: 260600 - DNA, 201 bp, Homo sapiens
acccttgggtctgggaagtaacagtgtggagatctgtctgtcttgctgcctttcacaaccatgcttctgtctgtaagttccctcaatatgtcacccaataytgacaaaatgaatttgtctgcaatttgttcaccttcattcttgaagaatattgtattttggtagagaactctaggttggcatgtatttttaagcatatta

SEQ ID NO: 260601 - DNA, 201 bp, Homo sapiens
agagaggatttatgttagctcctgccaggcacctggtcacactagaaatacaggagtgcctcaattcaattctaggtatgatggcttgaagctaagctgcrgtcccagtaaagagatgttcacttttaattcaacattacttctaagattaagccttttcatgtctcaacccaaagagatagacttacctaccacctcagc

SEQ ID NO: 260602 - DNA, 201 bp, Homo sapiens
tcactaatgtgtttagaatataaaaataaagttcctgaaaatttttaaatatttaatttgatttaaaaaataaaagataaacacaaaacagaaacgtactrtgttggctgtaagtaacagaaatccaattttaattagcttgggtatgaaagcattgccttatttaaccacattcttagaaagaactataacaggaataac

SEQ ID NO: 260603 - DNA, 201 bp, Homo sapiens
cctatgtgtataaatacttgaactaatgcctggcccatagtaagcattatacctctttactgttattattaaatcccgtatcctgtagttgtttgctcctrtttaagacaaataatgtacattgaattaagttggatttctgttcatagtgactatttttcagtattcctttggtattgggctatatcctgggattaaata

SEQ ID NO: 260604 - DNA, 201 bp, Homo sapiens
aaaaaagagatcttttgctgaaaaccttcccctgaatatcttcatgacaaccaagaaatctggtgaatttcttttctggaaaagttgactgactggattgmccctttgagaattaaatttttggatggaaaaatttagtcaactgctcctgctttctccaataaatgaatcccttcaggagcagcattttaaatgtgttta

SEQ ID NO: 260605 - DNA, 201 bp, Homo sapiens
tgatgcttgaacttgtctcaaaagacacaggaggtgagacagtgagccatgtgactatctagggaaaggatatattggtcatagaaaatagctattacagmagccttgaagcataaatgtccctaccatattcaggaaacaacaaggaagccagtttggatcaaataaggataatgatggtaggagagtagaaggtgacat

SEQ ID NO: 260606 - DNA, 201 bp, Homo sapiens
aggaaatattgataatgtgggaggaagggagagaattgctagagtgacactcttaagtaggtgagagaggatgagatctggtgtaccaacagaggagatgrtctgagctagacaacagttcatcctcagaaataggacagaaggaagagcataaagaatcaatgctggtaggagggcgagtgcaaagtatcatgtagaaat

SEQ ID NO: 260607 - DNA, 201 bp, Homo sapiens
ttatgacccatgtgatgaacctttaagaaagtcctctcattaggtaattttggaaaatgctgaattttatatctccctcctgtaattttatgatgtaattktatgatgcacattagaatattagtctctgagaaatcttgctgtaaagaaatctgtttaactttgtttaatccagcattttctcagattggtggaccatta

SEQ ID NO: 260608 - DNA, 201 bp, Homo sapiens
gtagaatggctgaagagaagtaatctactcttggaaatcaggagaatatgattgactttgtgtgtgtgtgtgtgtgtgtgtgtgtgtgtgtgtgtgtgtttggggtgggaatgggtagagagacttggtaggaagagaaggataatatgcagaatttttactgatcaattaagttcatggcttcagtcattcactgagata

SEQ ID NO: 260609 - DNA, 201 bp, Homo sapiens
ggtagaatggctgaagagaagtaatctactcttggaaatcaggagaatatgattgactttgtgtgtgtgtgtgtgtgtgtgtgtgtgtgtgtgtgtgtgtktggggtgggaatgggtagagagacttggtaggaagagaaggataatatgcagaatttttactgatcaattaagttcatggcttcagtcattcactgagat

SEQ ID NO: 260610 - DNA, 201 bp, Homo sapiens
caatatatgatcgagggtggtagaatggctgaagagaagtaatctactcttggaaatcaggagaatatgattgactttgtgtgtgtgtgtgtgtgtgtgtrtgtgtgtgtgtgtgtgtttggggtgggaatgggtagagagacttggtaggaagagaaggataatatgcagaatttttactgatcaattaagttcatggct

SEQ ID NO: 260611 - DNA, 201 bp, Homo sapiens
tcctatttcttcttggcctgatttctccctgtcctccatcttcaacacaaatctccataccaatcacatcacatcacgtcacgtcatgcaagcaaggtaayacttgcttgtgttgtcctaatgttcattcttccatgtttctcttcatttcatatactattaataatataaatatgtttatgtgatttgtaatcatttaca

SEQ ID NO: 260612 - DNA, 201 bp, Homo sapiens
agcaatatatgatcgagggtggtagaatggctgaagagaagtaatctactcttggaaatcaggagaatatgattgactttgtgtgtgtgtgtgtgtgtgtrtgtgtgtgtgtgtgtgtgtttggggtgggaatgggtagagagacttggtaggaagagaaggataatatgcagaatttttactgatcaattaagttcatgg

SEQ ID NO: 260613 - DNA, 201 bp, Homo sapiens
gcaatatgtcatttacattatttgacaggactccttaccagaatgtaagctccaggaggactagcacgttgtttctattccattaacatttgttgaatgcrtggtataagttgagtcatttagttggttgttttaaagagtcaaacagcagaaagctgttggatcttggaaatagttaatgaagactatgaaaagtaacac

SEQ ID NO: 260614 - DNA, 201 bp, Homo sapiens
attcgtatccactacatccaaagtgactgttttaaaatgaaagtctcattatgtgtctcctaaaactcttccagtaacccccaatgttgttagtttttttkttgttgttgttgttgttgtttgtttgttttcagaataaaaacctacatttttacggtggcctctaaggcaccatacagtcaacccctttgatcctttgat

SEQ ID NO: 260615 - DNA, 201 bp, Homo sapiens
atgttcacactgcaaaattgtgcctgaaagacaagaacttcactcacagaggcacataggtacccttatttgggttgatgtaaggcataggcccttcaaartcaacaaaaattttataagcaggaaataacaagcccccaaccatgaaccggtcaccatttctgtactacctggggttcaggcatagatgaaaacccctac

SEQ ID NO: 260616 - DNA, 201 bp, Homo sapiens
caagaacttcactcacagaggcacataggtacccttatttgggttgatgtaaggcataggcccttcaaaatcaacaaaaattttataagcaggaaataacmagcccccaaccatgaaccggtcaccatttctgtactacctggggttcaggcatagatgaaaacccctactggctgtaagtttggtctgtgttcacttcat

SEQ ID NO: 260617 - DNA, 201 bp, Homo sapiens
tcgatattgaattgacattgcaagaaagacattctatttctttctccattcacaaatcaactttagaaactttaacaagtcagccaggcgtggtggctcaygcctgtaatcccagcactttgggaggccgaggcgggaggatcatgagttcaggagttcgagaccagcctggccaatatggtgaaaccccgtctctactaa

SEQ ID NO: 260618 - DNA, 201 bp, Homo sapiens
ttgttaacatcctatccttgatgatgaatagaattcttattgggacagctttatttttaaaaagatccttaaagttttggtatcccatgtttcttattcaygataaatatcagctgaatatcctaagcaaagagtttatgagaccttaagtatttatttctgaaaagagatggccaagtctctaacatgtaaattctgctt

SEQ ID NO: 260619 - DNA, 201 bp, Homo sapiens
cctgccctcgaacatcagaatccatgtttttcagcttttgggctcttggacttacaccagtggtttgccagggccccccagccttcgaccacagattgaakgctacactgttggcctccctacttttgaggttttggaacttggactggcttccttgctcctcagtttgcagacagcctattgtggaacttcaccttgtga

SEQ ID NO: 260620 - DNA, 201 bp, Homo sapiens
atatcctaagcaaagagtttatgagaccttaagtatttatttctgaaaagagatggccaagtctctaacatgtaaattctgcttcacagggcatgaagtcygtgaaggaagtggtcatcatctttgtattatgctctgggatctacataagtgtaagggaagggactgttgacttgcactccaggtgacaagctaggactt

SEQ ID NO: 260621 - DNA, 201 bp, Homo sapiens
acagatgcttccagcagctgggattccaagattagtttgtccaaaatgtgaaagcatgtcatttaaccaaactattaagttgacctagtttttgtggtttmtaataattctgaaattctgtggaacactgtgatttaatttcaaaattactatagtgataggttaagggctaaatctgcctacttttattcaaatcaattg

SEQ ID NO: 260622 - DNA, 201 bp, Homo sapiens
aggaggtttgacagggccaccttccttgcctacacccaacatgattcataatgccaaggcctgcctccatcacggtgggtgtgctggtgccttccttctcyccacctgcctccatcctcatggctgagttttatagacaggacatatggagagaaagaaaaagaagacttctctttctaaacattctaggaaaagggaatg

SEQ ID NO: 260623 - DNA, 201 bp, Homo sapiens
atttgttgaataagtaaatgaaaactggtgttttccaggaattcatgctcagctcaatgatcattcaatattgattgattgccagttccctgggaagcagktttaatatatgccccagaatctcctcacttttccagcagacttgggctgagagaagaaccactgggcacactctttacctattacttttgtttacatcct

SEQ ID NO: 260624 - DNA, 201 bp, Homo sapiens
taatctcgctcttttctacagctgtgtaatattccatggtgtatatgtaccacattttctttatccagtccacagttgatgggcatttaggttgattccakgtatttgtgcttgtgattagtgtggtaatgaacatatgtgtgcatgtgtttttatggtagagctacttacgtttctttaggtatatacccattgttggaa

SEQ ID NO: 260625 - DNA, 201 bp, Homo sapiens
cctgtgaaatgattattatcatctctattttacatgtacaaaaaatagtaagatttggaagtgcttaagtgtttatgaatttactgttagaaatggtagayataagatttgaagacctatcaaccttactcctgtccatgttctttttccctttgcacttctaccttccccaagacttttatacacagcaattctagatca

SEQ ID NO: 260626 - DNA, 201 bp, Homo sapiens
atatagaatcaaataatttcaaagttggtgatcacgtgttctaaacttttgaggtccataaaaataatgcagtttttctaataccacacaactaattaggwgtatagctataaacatagatatagggaacactctgtctaaatttttttaatttacaaatatgaaaagcatatgctgttaaagtaaatgtcattttattct

SEQ ID NO: 260627 - DNA, 201 bp, Homo sapiens
ttcagaagtacttatttgtgagaaactagtgaacattgggcagcatcagtagaagtctgtggcattttgctgagggctgctcccatcaaccctggccctgygaacacaatttcctagggcaaggccattaacaccagcagcttcactaacagagggggctgacttgacttggattggagtaggaaatagcacagtcctgaa

SEQ ID NO: 260628 - DNA, 201 bp, Homo sapiens
gttttctttcctctccctaggaatgagggctggggagaagtacttatttattattaggggaaaaatcttagtgggttagttgacatttatatggtaacaartatgtctttaaaatgctatagtagtgaataaaaaggaaaacaagtacgtttgtgattggctagaattcatgagacaataatttatcaatttttttttctt

SEQ ID NO: 260629 - DNA, 201 bp, Homo sapiens
tattattaggggaaaaatcttagtgggttagttgacatttatatggtaacaaatatgtctttaaaatgctatagtagtgaataaaaaggaaaacaagtacrtttgtgattggctagaattcatgagacaataatttatcaatttttttttctttcgatatacaatggtgggctattgccaggaaaataaaagaaggaaact

SEQ ID NO: 260630 - DNA, 201 bp, Homo sapiens
gtcatttagattgtttctaagtttttgattagaaccacctgcgcttgcaaggtatatccttattcatatatctttgcaaatttctaggtgtttcttctagrtaaattcctacatttagtataactacacttagttaagaggacttctttttttttttttttttttatgttttgagatggtgtcttgctctgtcgcccagga

SEQ ID NO: 260631 - DNA, 201 bp, Homo sapiens
ttggtagacacaaataagtggctttcaatatgtgaaaataatattttgttacatgaaaactactttttatatgtgcagtacactcatattttccattctcytctttattatctttttaaaaaaatgctacattttattaaattgattttataacccactctagggttttgactcatgatttcaaaaacatgatcatatgta

SEQ ID NO: 260632 - DNA, 201 bp, Homo sapiens
aaatgacaaaatacataaccactcttggattttcttgtcttcactatagctgtggctacatgtgtacacctagagatatatcagaaaaaaaaatcaacaaraagattagggtttaaaagtaaaaatgttaagtctaatatgaaaattacagaaaaaatacattttttctgtttatttttaaaactaaatatataaagataa

SEQ ID NO: 260633 - DNA, 201 bp, Homo sapiens
gtaaagaataagccagaagatctgaaataattcactggagttgagcaatatttagcgtctttagacaaggcctgtattctcctttaagctcagccccttayattacccagcaaatgcatagtgtataatgcatatcactcatttgtgaggcttgtctggcctgtgtaggtgtatgaatgtgagatccctgctttaaacttc

SEQ ID NO: 260634 - DNA, 201 bp, Homo sapiens
cagaatgtattatcattattgtaaggtatttatctttttaaaaatggaaaactatttattaatttaaaattctgagatttcaaatacatacttgttatttrtgagaaagtggctgtgtttggaagggccaatacaacaagttgaggacattgtgagagtttcatttacattaactaatggataaaaatggccttgaaagac

SEQ ID NO: 260635 - DNA, 201 bp, Homo sapiens
atttttgtcaccccaaaaaagtctctcatgcctgtttgcagtcaaaggaacttttatatttgcagagtattggggtatgatttttactcctggacctttcytactctgtactttgatcaagtatattagggcataaggtctaggatgaagctgagaagattttgaggttggaaggaatcaggagaccaggtttgggtatta

SEQ ID NO: 260636 - DNA, 201 bp, Homo sapiens
acataaaccttgtatagagtaaaaacttagaatgaagaatgtcttaattatctattgctttgtaccaagtggcctcaaacctttgtggcttataacaatgracatttattatctcacacagactctggggatccagaattcaggagtggcttggctgagtgattctagcttggcagctctcatagggttacagtggagttg

SEQ ID NO: 260637 - DNA, 201 bp, Homo sapiens
atgcatccataaagcacacaatttcaagtttacacaattgactaagacctagagaaactatgatgcaaaaatgaaaacctgaaactgaatatcagatatcmctgcccctttcgtccattagtaatatccactcacagagagttcgggggagctatcatggcaaagtggtaaagatcttagctaaataaactggttgccact

SEQ ID NO: 260638 - DNA, 201 bp, Homo sapiens
gagaccaggtttgggtattatctccatagggacaacatgaaaataccagaagtcaaactaggcagaaatagaactgactagaccttggaaggtggcaaacraaatcaaagcaagtgaactcgtggataagtgggaataggccaggaaaggaaataaagcacactggactttgcttatttaaaggtcatataatagtacctg

SEQ ID NO: 260639 - DNA, 201 bp, Homo sapiens
ttgggaataagatttatatgaaccatcttctgatatattccttacaaattttatacagttcattttgtactatacctttctctaatgatgcctacagcagwtgtgaatgcttaacccatttatgcctgaggctgcaattttttgaatttctgcatgagtgaaaaatcagaccttggcgatgaccttgagcagtaggatata

SEQ ID NO: 260640 - DNA, 201 bp, Homo sapiens
gtactacagcctgggtgacagagtgagatcctgtctcttaaaaaaaagaagtcaataattctttagttaataatcaattttagatttctttgtatgttaartggaaaaccataagaagaaaaagtgtcgtgataaaataacactatgaaatagcattctgctactaatgtcctttttctgtccaataaatttgtccatgtg

SEQ ID NO: 260641 - DNA, 201 bp, Homo sapiens
ccttccccaagacttttatacacagcaattctagatcaaagactgtcaacttgttttactatgcctaccaaatagttgtagttttgttatacatacctgakaatcgaatctgtgatgcctcagaagtcttaaaatatttcaaaataaaacaaatacgtttgctaactgcagtaaatctcatcaatatttttttttcagctt

SEQ ID NO: 260642 - DNA, 201 bp, Homo sapiens
ccatggaattgatgagctattagaattaacctaattgatgggttggttgactaaacacagataaatctttaatgatgaatagttcttcctagcaaaattcstcagtcaaatataccttgaagcatattctgcttcactaaggaacatttttgttgttgttatattgtcatgttgatatgcaaaataaatgccatctgactg

SEQ ID NO: 260643 - DNA, 201 bp, Homo sapiens
tccttgacttccatgctcacgggtggaggtggagggggacttcgtggggagcacaaaggcttctaaaagggattcctactccatttcatggtccggtattmttttttcttaggtaactttttctttgtgtttttaagctcatacagtattttctttgttttccaacttctggacttttaattgcacaggcccaggaatata

SEQ ID NO: 260644 - DNA, 201 bp, Homo sapiens
attttgtgacttcgtgagtttcttgttaaaatcccttctaatcaaatgggatatgctaacaataactccttgttttcagatatttggttattatcattttrcatgattgaggccttaattacatattttttttctctgagtgctgtattatttgcttcttgataagtcaaatgaacaacaagagcagttccccagtggcat

SEQ ID NO: 260645 - DNA, 201 bp, Homo sapiens
aaaatacatactttgtaattctacttataaaaaattaaaaacaggcaaaactaaacttctgcttcaaagtagactgtagtaagtaatgtgaggccaagaawactgctgattaaactacaaaaactgaataaattacaaaaatcatattgttaaagataacagaaaactgaggaatcaagcagtactagatgcactaaaagt

SEQ ID NO: 260646 - DNA, 201 bp, Homo sapiens
tgtgtatatatactttaagttctaggctacatgtgcacaatgtgcaggtttgttacatgtgtatacatctgccatgttggtgtgccgcacccataaactcrtcatttacattaggtatatctcctaatgctatccctctcccttccccccaccccacgacagactccaatgtatgatgtaccccatcctgtgtccaagtgt

SEQ ID NO: 260647 - DNA, 201 bp, Homo sapiens
aaaaaattgaggctatcaatgcacatgaccctgggtgtacaaaaatgaaccgaacatttttttcctgaaggaattcagagtgaggtagagaaatcacacaygtaaatgaattcttacaatttttatgtcaagtaatttaataaggagatgaatgaatgaggaatataagcatatagcaacagaaacctaaatcagtgctat

SEQ ID NO: 260648 - DNA, 201 bp, Homo sapiens
atttataaagaaaagaagtttacttgtctcatggttccacaggttgtacaggaagcatggctggggaaacctcaggaaacttacaatcatggcagaaggccaagaggaaggaggtacatgttatgtggctagagcaggaggaagagggtgaagggggaggtgctacacacttttaaacaagcagatctcatgagaactcgc

SEQ ID NO: 260649 - DNA, 201 bp, Homo sapiens
ggctatcaatgcacatgaccctgggtgtacaaaaatgaaccgaacatttttttcctgaaggaattcagagtgaggtagagaaatcacacacgtaaatgaawtcttacaatttttatgtcaagtaatttaataaggagatgaatgaatgaggaatataagcatatagcaacagaaacctaaatcagtgctatattccaaccc

SEQ ID NO: 260650 - DNA, 201 bp, Homo sapiens
  misc_feature (1)...(201): n = A,T,C or G
caaataagtaatgtttcttccctttgtcctctgccttctttagagaacattacgtggtagaggtcaagcttccagccagaatgtttgagtcactacctctncagattaaagaaggacagttgcttcatgtgtatccagtactttttaatgttggaatcaatgaacagcaaactctggctgaaaggtaagctttggtgtaag

SEQ ID NO: 260651 - DNA, 201 bp, Homo sapiens
gcgagactccatctcaaaaaaagaaataaaaaaaaatctcttttttttgaaagacttatttttacatcttacatggctcacatatagagattacagaaaaygtagataacagttaaagatcatagaacaggccagggtcagtggctcacacctgtaaatcctagcactttgggaggcagaggcaggtggatcacctgaggt

SEQ ID NO: 260652 - DNA, 201 bp, Homo sapiens
tactcaaattcaaaatgtagatgttgtatatgaccattcttagataaataaatactattagtctgcttgggctgctgtaacaaaatactgtagactgggtkgcttaaacaacagaaatttgtttctcatagttcaggaagctgggaagtccaaggtcaaggtttcagccaatttggtttccagtgagggctctttttctgg

SEQ ID NO: 260653 - DNA, 201 bp, Homo sapiens
ttggagggggccattgtccaattctacatttcttttccccatcgtattaagcacataacatttgagcagtccaaaatcagagagctgggaatgtatttggwattcatctataaatagtataaatatgttgagatattcacaatgataagaagctaagttttaataaagtaggaaaattataatattttaaccaaaaactgt

SEQ ID NO: 260654 - DNA, 201 bp, Homo sapiens
tttgcagaagagataaagcatttgtcaggaagataagtagaaaaagagtgttccaggagaggagataggattttcaaagacattgagatgagagaacaagrtaagtttaaggaaatacatgaggttcaattcacctgagactcaagacagcaaataaacttctgaaagatgagattagacaaataggcaaagtttagataa

SEQ ID NO: 260655 - DNA, 201 bp, Homo sapiens
cccacctgcctccatcctcatggctgagttttatagacaggacatatggagagaaagaaaaagaagacttctctttctaaacattctaggaaaagggaatrttttaaccaaactgtcgctttcccccactatttcatgaatggtccagtggcacatgaagctaaccaggtgtcggaaaatatgctctgccttatacataca

SEQ ID NO: 260656 - DNA, 201 bp, Homo sapiens
tgtttgagcctcattcaacacgctgtcacttcagccaagtcacttaaccttcatggtcttcagttttcctgagacataaaatggggcataaactctctgamctcccatggtccatttggctcttttactgtctgatttgctagtgatccacaaggtgaaggacacttttctcttgccaaattttgctaattgggttgcaga

SEQ ID NO: 260657 - DNA, 201 bp, Homo sapiens
aaatccattttatgttcacataaaatatatttttatgaaaatagctacatttttaaaagcattcttcatgagaagaatcatgattagatacatgcccctargtatctttaatgtttgacttaatagaagatacctgaattatcttatctgcttctactacattcaaacagttgcaatttgttgtggttaaagtataagtaa

SEQ ID NO: 260658 - DNA, 201 bp, Homo sapiens
gacaaacttcagctctacaaattatcacaaaaaataataacagcaatataaatttgaaatgtcaaggatcatagtaaatttatggtaaacatttatggcaraaaacaaaagacaacacagattttattcaggattatatgtttctacacctttggttggaagtttagggaggaatttggtcatagcagttctcattgtgat

SEQ ID NO: 260659 - DNA, 201 bp, Homo sapiens
gccttcattgtaaataataaaaagtttattattacccatatccatgtattgttcaaattcctcatttattgtgacactaggttttttttctccctgttgcrgttttagaagatactacttggcatcatcagacttttgataaagtgatgagtcccaaagcttgattggaatggtttcaagaaaggattggagaagaaaatt

SEQ ID NO: 260660 - DNA, 201 bp, Homo sapiens
aaagtctacaagtaaactagtaatgcgtttcttagccttcataaatctgataccttcattgacttcttgttcaatcttctgaatagcccaagcctcaaagkgcatttcttttaatcttttactaagtaagtaaataaataaaataggaggaatattcattatatgtttgcaaaaaaaaaattgtttccttaaagattctga

SEQ ID NO: 260661 - DNA, 201 bp, Homo sapiens
ctgtatgtgtgggctccaaccccacatttcccttccacaggggttctccatgccctagcagaggttctccatgagggttccacccctgcagcagacttctrcctggacattcaggcatttccatacaccctctgaaatctaggtagaggttcccaaatctcaattcttgacttctgtgcacccacaggtccaacaccctat

SEQ ID NO: 260662 - DNA, 201 bp, Homo sapiens
ttcttcagttccttgcttgtagctcacctttgtctcctgtttttcttgtaggtttccagtatatgctttggccatataaagtaataaagcaaataagttcmtatcgtttaatcatatagaaaagcccagcaagaatccattgtccaaatcttgtttgattaagattgattgacagttttatgtaattggatgacattttta

SEQ ID NO: 260663 - DNA, 201 bp, Homo sapiens
cgtttcttagccttcataaatctgataccttcattgacttcttgttcaatcttctgaatagcccaagcctcaaagggcatttcttttaatcttttactaartaagtaaataaataaaataggaggaatattcattatatgtttgcaaaaaaaaaattgtttccttaaagattctgataattttcccctgaaaaatcactag

SEQ ID NO: 260664 - DNA, 201 bp, Homo sapiens
caggctctacatgcatccataaagcacacaatttcaagtttacacaattgactaagacctagagaaactatgatgcaaaaatgaaaacctgaaactgaatmtcagatatcactgcccctttcgtccattagtaatatccactcacagagagttcgggggagctatcatggcaaagtggtaaagatcttagctaaataaact

SEQ ID NO: 260665 - DNA, 201 bp, Homo sapiens
cagtcttcagggcctaaaggatgcttttcttatccaaacactcaaagaggagcaccctgtagtaataactgttcactgtaagcaactgccatcagccattytaaaagtgtatttctcacctagccatgacacataccaaggttaatttttttcataaagtaatttctggtaccccccaaagccaagaagatcaggaaatgc

SEQ ID NO: 260666 - DNA, 201 bp, Homo sapiens
gttttcttagggggaaagagatggtcacttggggttgaccaccaattcacagtgcctcagtggttcacaccaccactctcgtgaaagcctggggcaggcayctgcttgttgacaccccccttgtctaatgtatgctttacaactacttgaattcgagcagtgttgctgaactcaaaagcacctgaatgaacagttgtgttc

SEQ ID NO: 260667 - DNA, 201 bp, Homo sapiens
aaaaaaaattgtttccttaaagattctgataattttcccctgaaaaatcactagtgtgagaagaatagaacagatcatgcttcctagatgtcagtttttcytagtggtgtctgaggtttcaagatgaggaataaaattatggaatttaaataattgagctgataaaaatgtagtagacatattcagtaaataacatcgact

SEQ ID NO: 260668 - DNA, 201 bp, Homo sapiens
atcccagcactttgggaggctaagaggggaggatggctcgaggctaggcattcaagaccagtctgtgcaagcatagtaagacctagtctctatgaaaaaawttttttttaatttaatcaggtgtgatggcttgtacctgtagtcccagctactcaagaggctgaggcgggaggatcattgccgacaaagagttagatgatg

SEQ ID NO: 260669 - DNA, 201 bp, Homo sapiens
ctttattttagtgattaaatacaacctttgagttgttcaatatcatttgaaaatggtaggatttgtggttattttcattaccctattagatttaagatagagaggctgggatgacagaggcctccttgaatagctatgaagcctcattcagcatatcaaatggtagtctgagttctaagaaaccttaagtaatttatcatt

SEQ ID NO: 260670 - DNA, 201 bp, Homo sapiens
taaattcagctttattctcgcattccatcactaaccaatactgaggaggaagaataacaaaaattatgttaagaggcagccaataaggaacttgattatasgttacgtttctgtaactttagagtgaaataaacagataaaatactgcagaaaggaaaggcttatgagtgattttttaacatactattaaaatggaatatt

SEQ ID NO: 260671 - DNA, 201 bp, Homo sapiens
taagtgaaaatagataaattcagctttattctcgcattccatcactaaccaatactgaggaggaagaataacaaaaattatgttaagaggcagccaataargaacttgattatacgttacgtttctgtaactttagagtgaaataaacagataaaatactgcagaaaggaaaggcttatgagtgattttttaacatactat

SEQ ID NO: 260672 - DNA, 201 bp, Homo sapiens
taggccagaatccatataccataaggagtataaggttctggacactctcttttatcaaacaagtaagcaatttttgagtgcatattatttaccaagcacartgctttgcattgaagatgcatatatgaatatgttgtgttccttctcatgaaaaacctcagaatctactgagagagaatcacacacagatacatgatgata

SEQ ID NO: 260673 - DNA, 201 bp, Homo sapiens
aagaagagatattaagcagagagtggagatctaattgaggaggtagagcaaagactgaatttgggacggaggtgtcctatgcaaagatagaatgagatttwtgtgggactaacaataaaatttttaaaagatgaagaaaaaatattgagagcagctagggaaaaatgcatattacctagaggacaattattgtccaaagat

SEQ ID NO: 260674 - DNA, 201 bp, Homo sapiens
gttcttcttcaaatggcagcagtaagaagaagttctgagcaaaggcagaaaagctccatataaaaccatcagaccttgtgaaaactcactgtcccaagaasagcatggaagtaaccacccctatgattcgattatctctcaccagttccctcccatgacacatggggattgtgggaactataattcaggataagatttgtg

SEQ ID NO: 260675 - DNA, 201 bp, Homo sapiens
aattttagcttatatattcactcccagtcaagtggctctcatctttttactcttctcatatagaagcatttgtggactaaatattcttcccaaaatgtctwctaattctgttatatttgtagcaattttagtttatagtcacaattcagcaatctacaaacatggaatagttttatttcagtaactactaccagttttatg

SEQ ID NO: 260676 - DNA, 201 bp, Homo sapiens
gattaccttgatttataatgttaagctaagtaagtgtgtctaaatttcctaaacataaagaatagtctgaatattacagggctttatatggtatttttaayaaacttgaagacataagggtttaaagatataagaagatacaaagattttcttaaattaacacatgaatgtcattccagcagaaactatacattagactat

SEQ ID NO: 260677 - DNA, 201 bp, Homo sapiens
ttaacacatgaatgtcattccagcagaaactatacattagactattacatagtaataaacaaaatttacttccaataactttgctttataaacatctcaaytgtcataccatgtagacatccaaatatataaatgaaaaatccagtcagttatccaaatattttgcatattttatttaaaacatatgtatatttggaaaca

SEQ ID NO: 260678 - DNA, 201 bp, Homo sapiens
ggcaatagagaggaatattatgttatactgcaggacaagcttaagtttgaaaatgtcccaaaaagagtagataaaagtggaattaaaatttttcaccaccsattttttcacctaaactcattccagtaagtcttttatccatgtaacttcatggaaactttctgtcaagagcctgcattgttaaacccaatgctgagtcac

SEQ ID NO: 260679 - DNA, 201 bp, Homo sapiens
gttaaatttgatcgtgaagctttttcaattgtttgaaccaaatttcatccctatccaatagcctctctccttctctgtcatttctatagtctttgcaatcyatgttgacttatcttaattttttcgtgaaatcactgattctctgataatctttcaaacaaagcatacttttttctttctggaatgctcctataggtgagc

SEQ ID NO: 260680 - DNA, 201 bp, Homo sapiens
atagagtgaaactctccttagaggctaagtaagggtgagaaattgaagtctcaaggataaaattatctttatcaagtgggtcggaaaataacagtgtgagsacattaatagattaatatgttttgttgccattgataaactgtaaatatatgagtgtcccagattaccaaatcagagaccacatcaagtcaaaaaagggag

SEQ ID NO: 260681 - DNA, 201 bp, Homo sapiens
tttaacttattctatatagtaagaaagattcaagacctcattcttccttgcctccaggagcctgaagaggtaggccacatactgtgactattggaaaaagycccaatcttctcaaccatctccctttttctctgactttcttacagtttgtgatttaattccttccacattataggcagcaggagaggcatggaaaaggtg

SEQ ID NO: 260682 - DNA, 201 bp, Homo sapiens
cagggccccccagccttcgaccacagattgaatgctacactgttggcctccctacttttgaggttttggaacttggactggcttccttgctcctcagtttkcagacagcctattgtggaacttcaccttgtgatcgtgtgagtcaattctcctaataaactccccttcatatgtacatctatcctattagttctgtccctc

SEQ ID NO: 260683 - DNA, 201 bp, Homo sapiens
tacctgcacagcaccttgttggctcaagctctcagccagtgtcttcgtgctttgcaacacacctgagtcatatattcatggatcaatgaaagacgccgcawggtatcttaaaaggatgctaagaatcagatcctgacttgaagtcatggtgctgattgatggtgactagatctctttttggtaaaatatagctaatcatgt

SEQ ID NO: 260684 - DNA, 201 bp, Homo sapiens
taaagtttctcttctcttccactcttaacagaaaccaggagataaaagaacttggtgagctttctccacattgggacaatctgcgaaaaaatgtccttackcactgtgatcaaatggtgaatatgtaccaagacattctgacagaacttagcaaggaaacaggtgtggaagcaattactctacttactcaaagtgaattgc

SEQ ID NO: 260685 - DNA, 201 bp, Homo sapiens
ttaatggaatatgataggttgaaaatgcctttctagaatttagataagatgctacacttctgctagctgtgagagtttgtcaatttgaaatttattctatraagttcaaaactgaagaatatttggggacttttaccctatttttgctctctagtactttcacatttgagaacacataagtgtgcttattgtttttcaaat

SEQ ID NO: 260686 - DNA, 201 bp, Homo sapiens
tgctttcagaaaaagtaagatccaaatcatcactatagttgggaaaatgaaatactcaaattcccattggtctggctttctgcatacatcgccattcatarcatctggaaatgtaaaatagagtaggttaaaaagtaagcttcaaagtattgccacaggatcaaaatgaattggcctcattctctgttcaaatcttactga

SEQ ID NO: 260687 - DNA, 201 bp, Homo sapiens
tttgaataggaatgccacttcatttgaaggcagaactttgatgtggatttacatcagtctgtgtggggtacttcctctgcctcagtttgctctctacaacwttatttaccgaggagaggttccaaaaatttccaaatgtgtcagttatttgaaaagcagtataatctaagccttagtttttccaaaggtgacttgttcctt

SEQ ID NO: 260688 - DNA, 201 bp, Homo sapiens
aacattatttaccgaggagaggttccaaaaatttccaaatgtgtcagttatttgaaaagcagtataatctaagccttagtttttccaaaggtgacttgttyctttatctgcagaaaggagagctagtctggcatggggtagacactcaatatcaacttccagaactaacgagggcggctcgctgtgtgatagaaagctgag

SEQ ID NO: 260689 - DNA, 201 bp, Homo sapiens
aattaaaaagtgaaaagccaaactcagaacttccagttcaaaatgcagcattccttccaggccagaacacatgcctctgtcgtgaaaagggaggaaaataytgacccaaattttgcaagtacttactttgcgtcaaatagggcaaggggcttcacactttatgtcattttatttaatcatcagaattatggagaacatatt

SEQ ID NO: 260690 - DNA, 201 bp, Homo sapiens
tatgacagataaggttttgctctgataaccttctgtggctatagagggaaggactcttccttcaaattgttcactagggacattttagacaatcattgctytgagttgagcctgttctagtttgcagccttggagcaatgttgctttagattaatgtgtcaccaagctcttattgagaaagaagttcttttatttccttat

SEQ ID NO: 260691 - DNA, 201 bp, Homo sapiens
ttgcgtgcttcttttaggcccctatccctgctactgcaactgctaaccttgtctttctgactcaaattggaaataaaactgtcttaggtgatttaaaacattttttttcctaaataacacatcagcaggaaatcatcacatgcatacctccccctcttctcaaggttaacatccaaggctggactaatggtctttttctct

SEQ ID NO: 260692 - DNA, 201 bp, Homo sapiens
aatagccttctacccccagaaatattcttgattgtatccttagaagccaatatgtatttatctataattttattatactattttctaaaaattcaagaagsgttttgaatttaatttctgccagatttttttaaactagagctgaattataaatgaagccactttaccaagaactgcaaagagtgaggctgttggtttgtg

SEQ ID NO: 260693 - DNA, 201 bp, Homo sapiens
ttgtaagtatttgaggctgtctgtatgacagggtattaagttcttggagagtctttctttccccatgctaattttcatcaattttctattgctttaatttycccttgagctttagctttttagaagaatgattcattcttttcagcatataccatgatcattaaacaattacacctttatcaagtagagcagcaaaagact

SEQ ID NO: 260694 - DNA, 201 bp, Homo sapiens
taaataaactggttgccactattacttttttgagaatgttcagcacaatgtctgaacagaattacactcaacaaatggaggttgctgctgtgatgttagcmccatgattgtgtgctttgaatatctaactaacgccattgtgagacccttggcattgacctattgaatgcaaaaaaaaaaaaaaaaaaaaaaaaaagcata

SEQ ID NO: 260695 - DNA, 201 bp, Homo sapiens
gatcttgacatttgatttttttgtattgccttcttcataaattgaaaattggaaatgcaatttaaataaagctggttttggtggagttttgtctgttcttrtttttcaagattttacagtatctaaaacaacataattttcagttttaagatatctcaatggcttttacctaattgcatttgtctgcttgctagtacagtt

SEQ ID NO: 260696 - DNA, 201 bp, Homo sapiens
gcagctctccagaacttattcttcttgcataattgggactttatactaattaattagcaactcctcatttttccctttccccagctcctagcaatcacaaytttactctctgattctatgagtttgacaattttagatacttcctcctataattggaataatgtatgcatccttctgtgactagctcatttcactcagcat

SEQ ID NO: 260697 - DNA, 201 bp, Homo sapiens
catcttatcccccatgggtgcacagggagtgatcctctgtgtattggactggcttgggtatttgtgtcacttcatgctttggaacattattttgaagacasgatctgcaccttatttactattttaaccacctccttgctgaacacagttctcaaatatccttaaaattatttactgactttaattgaataattgagtttc

SEQ ID NO: 260698 - DNA, 201 bp, Homo sapiens
atgagaacatcaatatcctgaatttgatgttttgcatcctcatacacattttactctatatttatgtatccataaaaatatggtacagttttgcacatttractatattattgctgttgttttgtatgaatctttctataatttgtgcttttttgctcaatattgtttttgtgatatatccatgttgacacatatggcatt

SEQ ID NO: 260699 - DNA, 201 bp, Homo sapiens
gtgttattaactataggcactatgttatacagcatgtctctggaacttattttgcgtaactaaaactttatgcctattgaataacaactttgcattccccstctccatttcttgacagccaccattatattctctgcttttatgaggttgactattttgaaaacctcatgcaagtggagtgtttgtcctggaactggctta

SEQ ID NO: 260700 - DNA, 201 bp, Homo sapiens
atgttatctcagtaagtatatagaataatgagagaacacactgttctacagtgtagcatgtaattaagatgtagtcataaatcaggaaaatactatatctygtttaggtgcacaggtggcttttagaaagattgattattagctcctctttcccccttgagatgtgagttcatagttattcctaaaaaattaaacagaata

SEQ ID NO: 260701 - DNA, 201 bp, Homo sapiens
agatgtagtcataaatcaggaaaatactatatctcgtttaggtgcacaggtggcttttagaaagattgattattagctcctctttcccccttgagatgtgrgttcatagttattcctaaaaaattaaacagaataatttctcatacttcctacaataggtatgcttcaatgcaaacagcatgacggagataaatgtttgca

SEQ ID NO: 260702 - DNA, 201 bp, Homo sapiens
ttgacatcttaacctatttagtaacatagagttgttaaatatctcaaaactaccagagaagaaattagattaaacaaattgcctaagtgtcttgcttagtkagtggcattgtgatggcagaaaatcttccggaagtcgtatgactaaggggtgatattctagtgtcaactattgcttgctcaaaggagtgttcagagattt

SEQ ID NO: 260703 - DNA, 201 bp, Homo sapiens
cttgatggctaatactcaatgcaagccaaatgaccagatatggggtacaataaaatatacattttgtacatgtcaacaagctttggggttgattgtgatasgaatgggggcttggaagctagagtgaaagcattaataagcacaggtcatttattcatctaaattatattgggagaggcatagaaagcctgtatataaaat

SEQ ID NO: 260704 - DNA, 201 bp, Homo sapiens
agttgttaaatatctcaaaactaccagagaagaaattagattaaacaaattgcctaagtgtcttgcttagtgagtggcattgtgatggcagaaaatcttcyggaagtcgtatgactaaggggtgatattctagtgtcaactattgcttgctcaaaggagtgttcagagatttagctagaaatacagtctgacttcactgtg

SEQ ID NO: 260705 - DNA, 201 bp, Homo sapiens
gagaaaataagagatctatacaatgaggaatagatgaataagcatcaaaactgcctttttttcttagggagagagaaaaaaatggtaagggagaaaaattytgaatgaagttcagagtcaagcattcactgggtcacttgagacataattcacttttctgtacaaaataatgtctcctttcagatttaaaatgtggtagtg

SEQ ID NO: 260706 - DNA, 201 bp, Homo sapiens
gctcctaatttatgatttttaccctactagtaatttccatgctggcctgaggcacatttaattgtgccacttgaaaaagacacaacaatacagaattctaygttctgtttcttagggaaaggcatgagtattaccactattatttataattttgatatactctttccccagtttttgtttttacatgcttttaaatattgc

SEQ ID NO: 260707 - DNA, 201 bp, Homo sapiens
gttcaaacccagatctggatgactccagaatggaagttctttttagcgccctccgtctaatatatggattttgacatttccttatttaaaagttttttttwaaaaatgtttgttagacaaatgccttagtaatacctaagtattttgatattcaataagtatgtttttctgactagggaaaaagaaaaaagaggaggttgt

SEQ ID NO: 260708 - DNA, 201 bp, Homo sapiens
tccaacccttttaatgttttcttccaataaatctaaaataacacaaaacaaataagtaatgtttcttccctttgtcctctgccttctttagagaacattaygtggtagaggtcaagcttccagccagaatgtttgagtcactacctctacagattaaagaaggacagttgcttcatgtgtatccagtactttttaatgttg

SEQ ID NO: 260709 - DNA, 201 bp, Homo sapiens
atcatctctactgctactgagaaccaaggcacatggatagagctccccaaccaaaattccatccatctaaataaacactgttggtagagacaaacacatasaatttataaactaaaaataattcctgaattcatactatttgacagtcactgtgctcaacagaaaaggtagaaaaatggaataaaacacaggcctgttctt

SEQ ID NO: 260710 - DNA, 201 bp, Homo sapiens
ctgccaaatactgtctttattcattctggtcacaatgaagcatagtaatatatattgacatattcttgataattcaattttttaaaaatctgaatttgctyctattatttataggtatccagaagactccaaatgaaccgcagttggaattcatccttggtaagaaattccatcttatttatatcaataaatataagaatt

SEQ ID NO: 260711 - DNA, 201 bp, Homo sapiens
caactggaaactgaatttgagtaatttgctcaaaatcagattgaaatgtgggccagattcagagttttccaccatgaatccactgaactataggaagtttytcaggaacagtattaaggtacataactccattaataatttgagttgggtgatgatttccacttagctcattgctgatgataaccatacttggagatgtgg

SEQ ID NO: 260712 - DNA, 201 bp, Homo sapiens
aaaaaaaagaatactattatggagatatgcatagagactcagctgccctgtctaaattttgtgttagaataatgcaggactgagtagcaaaagcaagactytttggctatatttacatttgaggagacacagtctaagcctaaaaccaattcacgttctgtgtacaccacaattttcagttgatacatcaggatctatcat

SEQ ID NO: 260713 - DNA, 201 bp, Homo sapiens
cgtcatcccccctttacttattctttctgataataatttagagataatataaattgtaactgtatggtgcatctattagtattaaataaaaattgttagcyaatattttcattataactgtatactgaaagcaaagctgaaactttgcatattaagttgatatattatacttgctgtatatctcagattcaacctaattgc

SEQ ID NO: 260714 - DNA, 201 bp, Homo sapiens
agtaagaaagaaaaaagctatatccagggttatttaaaacaagtaaaccttttatttaaaatacaaatttcgtatcaattctcaaagatttacaaaaatawatacagcaatctctctggaattggaaattttaattctataacttttagtttttactgtctttctacttcctattagaacctctatctgccaaataccaaa

SEQ ID NO: 260715 - DNA, 201 bp, Homo sapiens
cctgaaccagacctgaatttctgtggtctgcagaatttttattgggttgaaaaaaaaaaaatggcagcaacccaagtattgggttgacagaggtgtgctcygaataaagcaagttttgtcactatagaaatagaaatagtggcctaaaaatgttaaaaaaaaaaatcaaaattacttttcttgtaagaagcacaccatggg

SEQ ID NO: 260716 - DNA, 201 bp, Homo sapiens
aaaaccacccatacctccaaaatcttaaaaggcaaatagaaaataatttgcaattttggagtttcataaaatttatgattgcttaaaagttttctttgagkgtgaataatgagtgggaatttaatttaaaagctatgattatcagtgaaggagaaagtaagatcgacatctctttaaaatacaaaatgctaaaataaaatt

SEQ ID NO: 260717 - DNA, 201 bp, Homo sapiens
ttctttttggctgcccttaatattttttccttcatgtcgaccttggagaatatggtgattatgtgtcttggggctgatcttctaatggagtatcttagtgyggttctttgtatttcttgaatttgaatgttggcctgtctttctaggttggggaagttttccaacttggttccactctccttgtctctttcaagtactcca

SEQ ID NO: 260718 - DNA, 201 bp, Homo sapiens
cttttgtatgagaatcatctgtagttatatagtaaagatatgacttttgacaactttctcttttagaaacaaattcaatggaatcatgcatatattttatrtgactattttgaacctcacttccctaaacctatctgaattgtacccaaccttcctctattctgtggtcataaaatccaagatgagatatgattattttca

SEQ ID NO: 260719 - DNA, 201 bp, Homo sapiens
gtatttcttgaatttgaatgttggcctgtctttctaggttggggaagttttccaacttggttccactctccttgtctctttcaagtactccaaacagttgyaggttcagtctctttacttagtctcatatttcttgaagattttgttccatatttcttgaaggttgtgttggttccttttcattctttttttctctagtct

SEQ ID NO: 260720 - DNA, 201 bp, Homo sapiens
tgtagttatatagtaaagatatgacttttgacaactttctcttttagaaacaaattcaatggaatcatgcatatattttatatgactattttgaacctcasttccctaaacctatctgaattgtacccaaccttcctctattctgtggtcataaaatccaagatgagatatgattattttcaatggaaattcccaccttac

SEQ ID NO: 260721 - DNA, 201 bp, Homo sapiens
atcctccatccagttctgtgcccttgttggagaggtgttgctatcatttggaggagaagaggcactctggcctttggggttttcatctttttttttttttwattgattctttctcatcttcatgagtttgtctagtttcaatctttgaggctgctgacacttggatgaggtttctgtggggacatttttgttgatgctctt

SEQ ID NO: 260722 - DNA, 201 bp, Homo sapiens
aaatttgaaaaagtacaaagcctcattactactaaaattcatttgtgtcagtttttgtgaacttgtaaggaagacatcatctatttcttcagtgaaactcrgtaacgtagttgtagtccatcttattttctcctgtttttagcctcagttaaagctctcaggaatttatctctcagtttatggattcaacagtagagtgta

SEQ ID NO: 260723 - DNA, 201 bp, Homo sapiens
aaagtgtggcctggagcttcagtgatagctgccgcccttccccactgggagcttagtgtattaagtagctagcagctgcaatgttggctcctgcccctccyccaaggagctcataaggtttagacagcaaacaacagcagcagtggtgatgccgcccctccccccagaaacctggctgacttaggcagattccagccaagt

SEQ ID NO: 260724 - DNA, 201 bp, Homo sapiens
tcaggaatttatctctcagtttatggattcaacagtagagtgtattttcatactatacagtacttatccaaccattcacttagacagtctttttgtttctrtcactataatattgaatcccatctcaccaagtcttggggacatttgggtcataacgtacattgtctccgtttttagtataaagtgtatgccatttattac

SEQ ID NO: 260725 - DNA, 201 bp, Homo sapiens
acctcagttgctggtgcaggatttgtatgctcttttgcttcttttagatgaaagcctctgatcaccactgcttctagttggccatcttggccccacccccmctcccccaaataaattcctgtacttttttttttatcttaaagggataactatgtagggattttttaaacatttcattaaaaatgattttaactagaaaaa

SEQ ID NO: 260726 - DNA, 201 bp, Homo sapiens
aggttgacatcctaggcttcagaaaattgctgtcttaaaattcttgaggggaaggaagaataaaaaacaaaaaaaggcaaaggagattaaaaatagaaaarcatattatactaataaagtaattagaggggctattaggctttttaagtgctctatatatcttttaatgtatgatataaactgatttaatctagatgtaat

SEQ ID NO: 260727 - DNA, 201 bp, Homo sapiens
attttgcagatgctagaatagagattcaaagagattgagtaattcatccaaagtcatatatagctctctcaaataaggttttatcttaagttaaaaaaaawttctttatcctccatacactatggtatgtggtttctcctctaagtctaaatttcctttggctaattttgagtacagaattgtagagatgtggaaattctt

SEQ ID NO: 260728 - DNA, 201 bp, Homo sapiens
ttaatgctatagttgaattaacaaaaataatcttattcatatgaaaacatcttaaccaaaattgtaagttattcattttatataaaaaagttaaaaattctgttattttaaaaatgttgccaaaatttacttattcactcatttaattttgattttttcttaattttcattttattgtgataaaatacacatattataaaa

SEQ ID NO: 260729 - DNA, 201 bp, Homo sapiens
tattcacacccttctcacaaatattattgcaatggggagtggaagccaaagtttcaaccatgggctctgcaggggagaggcatctcctatttactttatgrgagttggaagttaattcaaaccataggccccatgggggaagggatgccatccctactgatgtgggggtatgagtggaagacagggttttgcccatggaat

SEQ ID NO: 260730 - DNA, 201 bp, Homo sapiens
taatgctatagttgaattaacaaaaataatcttattcatatgaaaacatcttaaccaaaattgtaagttattcattttatataaaaaagttaaaaattctgttattttaaaaatgttgccaaaatttacttattcactcatttaattttgattttttcttaattttcattttattgtgataaaatacacatattataaaat

SEQ ID NO: 260731 - DNA, 201 bp, Homo sapiens
acccttctcacaaatattattgcaatggggagtggaagccaaagtttcaaccatgggctctgcaggggagaggcatctcctatttactttatgggagttgsaagttaattcaaaccataggccccatgggggaagggatgccatccctactgatgtgggggtatgagtggaagacagggttttgcccatggaatctgagtg

SEQ ID NO: 260732 - DNA, 201 bp, Homo sapiens
tcttaccagtccaaatgatatgaatttaaagttactagaaacctgtattgaagagtgcttttcagggtcctttccattctttcatgaacctcctaaaagayaccatattctaggattttgcatgcttgtgaagttttcagaaactgcatcagcattatgcaattaactgtggaaatgactctaaatagtcgtagttaaaga

SEQ ID NO: 260733 - DNA, 201 bp, Homo sapiens
aacttaccggtatttgtacatcttgcttcacagctttgattctttttcaccaaatagggttaaaccacctactattgttgttttgaagaagatactagatkgtaagctacttaggaggaaggaacattgcttttttatttgcagtctatatcattttatgttaacaacctctgggcacttaaatgttataaattgaattct

SEQ ID NO: 260734 - DNA, 201 bp, Homo sapiens
gagccattatttcttggttttctctaaaatgggtaaatctacattagctggtgtaattttatattaatataacaaaaattatcacaaaaaataaataatakgcaatgtggaaacacctcacaattatatctagaatgtggccatccatcatacatttttagacatatttaaccctctttttcctgtttcaccatctcattt

SEQ ID NO: 260735 - DNA, 201 bp, Homo sapiens
gttttctctaaaatgggtaaatctacattagctggtgtaattttatattaatataacaaaaattatcacaaaaaataaataatatgcaatgtggaaacacmtcacaattatatctagaatgtggccatccatcatacatttttagacatatttaaccctctttttcctgtttcaccatctcatttcctggcttttcttcta

SEQ ID NO: 260736 - DNA, 201 bp, Homo sapiens
caaccagtgtcatttcctgctttctacccaattatctcatactgtgaagtatagcctcatgtttttcctctttccgtgtcatatctgtgcttctttatagygctggttctcaagcaggatatatttttctgtcaggagacactggcagtgtctgaaggccatttttactgttaccttgggaaagctgctactggcatgcga

SEQ ID NO: 260737 - DNA, 201 bp, Homo sapiens
gtttttcctctttccgtgtcatatctgtgcttctttatagcgctggttctcaagcaggatatatttttctgtcaggagacactggcagtgtctgaaggccrtttttactgttaccttgggaaagctgctactggcatgcgaatggtagaggccagggatgctgtgaaacatcctgtaatgcacagtatggtcttcctccca

SEQ ID NO: 260738 - DNA, 201 bp, Homo sapiens
caggcagctgatttacactggttccatttagcaccatactgtattacatgaaggttgtttttaatagtgtggctgctctttgtatcttctaagaccactayggttgttaattctaacaaaaatttcacaatggtaggtcataaattggattttctattttactgaaaacatgacggcatgaagatagtttgatactcatgc

SEQ ID NO: 260739 - DNA, 201 bp, Homo sapiens
tgccatctgatgatttacaaacatataaatgtgtcattatgtacattgtgaagttatgtaaatagataaattaaggatacacatgtataaacacaaatgtrtattttagtatatgcaatttcccattttaatgtatgaaaaagttttcctataaatcccacacatttctaaaatatttttttgaaatgtgtatactgacca

SEQ ID NO: 260740 - DNA, 201 bp, Homo sapiens
atatgatagtaacaataaattttaaggaatattaattcaatttgaaaatcatatctcataaatagccattatggtctattttattattataaatatagttwagaatttttaaaaatgaaatactatttatttgaaaggattagaattttttagatgtaaaaagattgtatggagacatcatgctctcacatttttctagtc

SEQ ID NO: 260741 - DNA, 201 bp, Homo sapiens
cccttgggtagtgtgctgcgtcctctgctggatagtttacatcttatatggcttcaacagttccatgcctcatgcacaaagaaataaattgggtccattgygttggcttttgaaatgaaaaggtaatgcttttacatttgatgagaccgattgaacaaattgactatcataaactaacagaaacccaaatttatatttgat

SEQ ID NO: 260742 - DNA, 201 bp, Homo sapiens
tcatgaacctcctaaaagacaccatattctaggattttgcatgcttgtgaagttttcagaaactgcatcagcattatgcaattaactgtggaaatgactctaaatagtcgtagttaaagacacaattgacaaggcaatttggttatttctgtggtctacaataacttaacatagtaactataattatgataccatatactc

SEQ ID NO: 260743 - DNA, 201 bp, Homo sapiens
catgaacctcctaaaagacaccatattctaggattttgcatgcttgtgaagttttcagaaactgcatcagcattatgcaattaactgtggaaatgactctaaatagtcgtagttaaagacacaattgacaaggcaatttggttatttctgtggtctacaataacttaacatagtaactataattatgataccatatactca

SEQ ID NO: 260744 - DNA, 201 bp, Homo sapiens
ctgatttaggtaacaaatcttctggaagatgaaattggtgtgcctgtttatttaagaatgaagaggggacccttaaattagacataaaataattcaaacasgtaaataaaggcaatatatttactggacatgttatactatagaacaatatattttggtattgcctatgatggacattatatatgcaatacatttgctcat

SEQ ID NO: 260745 - DNA, 201 bp, Homo sapiens
atgaacctcctaaaagacaccatattctaggattttgcatgcttgtgaagttttcagaaactgcatcagcattatgcaattaactgtggaaatgactctaaatagtcgtagttaaagacacaattgacaaggcaatttggttatttctgtggtctacaataacttaacatagtaactataattatgataccatatactcag

SEQ ID NO: 260746 - DNA, 201 bp, Homo sapiens
ctctataaagtaaattaaaacaaaaataccattgtactattatttttccttaacaggaactctaggatgatgactacacaaagtagtaatgtgacaccatwgttctcaattgtcttttgttttatactatgttacttcctcaatctgtcatagctccttaaaattaggatagttaatatgccattagtaagaagactcagg

SEQ ID NO: 260747 - DNA, 201 bp, Homo sapiens
tgaacctcctaaaagacaccatattctaggattttgcatgcttgtgaagttttcagaaactgcatcagcattatgcaattaactgtggaaatgactctaaatagtcgtagttaaagacacaattgacaaggcaatttggttatttctgtggtctacaataacttaacatagtaactataattatgataccatatactcaga

SEQ ID NO: 260748 - DNA, 201 bp, Homo sapiens
gtcattctatttcagtaaatattgaatttataagagacttaaaaggcccattggccttattgagtttcatttatcaaatgtcatattctcaacatgttgcrcctgtaatttatctgttgggggagcataatttatgaagtattctgctttataagtaaatgactcttaaccaattgatgtcagtaaaagatgtatttgcat

SEQ ID NO: 260749 - DNA, 201 bp, Homo sapiens
gggttcccttccctgagtggccctagtgacctaaccctgcttgccacactatataaccttggaggccaaacgcaacacaaaagaaaatctttttttctttytttttttttttttttaaatgcacttcagtgcattgttgttcatttggaatgttccactgtaagttatctttagcaagattttaccctttctgtaagactt

SEQ ID NO: 260750 - DNA, 201 bp, Homo sapiens
cagtgcattgttgttcatttggaatgttccactgtaagttatctttagcaagattttaccctttctgtaagactttgctgcctcctgggcctaatgtataygccagaaagaaatgagatttttagaaattaaggaccccatttttatctaaaatattagctttttctcaggttcccttgatgacttagccaatgacatttc

SEQ ID NO: 260751 - DNA, 201 bp, Homo sapiens
ggatttacattgagattggcttgaatcttttcccactggcttatgtggcctcaagttcattaggaattaatagtaatactaatttgttttgaatactaatwcttgacatacatgattacatatatgtgcatgcatgagccattacatatacttgacatatatgtaatcacatcaagtattagtgttaatcttcccagtgtt

SEQ ID NO: 260752 - DNA, 201 bp, Homo sapiens
tgttgttcatttggaatgttccactgtaagttatctttagcaagattttaccctttctgtaagactttgctgcctcctgggcctaatgtatacgccagaargaaatgagatttttagaaattaaggaccccatttttatctaaaatattagctttttctcaggttcccttgatgacttagccaatgacatttcctacctaa

SEQ ID NO: 260753 - DNA, 201 bp, Homo sapiens
cttagcatattgttctccaggctcattcgttttgttgcagatggcagagtttccatctttttaaaggctgaataatatttttagtcattctgtatattgtyggtattgctggtcacccagtttttggcagaaatgccgcatattttgttgcattgtcatgataatttgtctttttgcatttaaattaacatgggaactcat

SEQ ID NO: 260754 - DNA, 201 bp, Homo sapiens
tttgggttggttccaagtctttgctattgtgaataataccacagtaaacatatgtgtgcatgtgtctttatagtagcatgatttataatcctttgggtatrtacccaggaatgcgatcgctgggtcaaatggtatttctagttctagatccttgaggaattgccacactgtcttccacaatggttgaactaatttacactc

SEQ ID NO: 260755 - DNA, 201 bp, Homo sapiens
gatccccagctgctctgagagatcaatggatacaagtgggtccagaaggtatcttgcttgttcactcagtgctcctgggggtcgttagaaggtctacttcrgacctcacttctgacacaatctattaaaagaaaaacttaagccgaattaaatttaaaggagtttaattgagcaaggaatgatttacgattcgggcagcac

SEQ ID NO: 260756 - DNA, 201 bp, Homo sapiens
cacatgtcttgcatggcttcccattactgcttggctttgccaagctgatatgtgatatattgccaaaatatttcttctgactagaaaagagcagaaactakttatttataagtaatataaaatgttagtctgctttggctaggaatagcttttaattactgtaaggttttataggctgcacagcaggaacaaaaggacgtt

SEQ ID NO: 260757 - DNA, 201 bp, Homo sapiens
taacttctgacatttaaaagtctacaagtaaactagtaatgcgtttcttagccttcataaatctgataccttcattgacttcttgttcaatcttctgaatrgcccaagcctcaaagggcatttcttttaatcttttactaagtaagtaaataaataaaataggaggaatattcattatatgtttgcaaaaaaaaaattgtt

SEQ ID NO: 260758 - DNA, 201 bp, Homo sapiens
gagaagagacacaccactctaagtcatttttccctaaactcaccaatcctaatccccttctgttcatgtcccaccttccctgtcttttccttcttgttttyctccttgcctgttaatcatctctcatctctattttttaatggctccactgcataaaatagtagcttggttgagcaaacagattaaggagtggaggtagca

SEQ ID NO: 260759 - DNA, 201 bp, Homo sapiens
cccaaaactgtgatttgtttaaaacaggagtaaaggtaaatatcaatttaagtacagatcatataactcatttaattatgtaagtgaaatccaaaagaggyaaaatactgttttgttttgtttttttctaattcttttctccaaaccccacttccagtagaaaatggaaagggtgcattggggaaagcagagaggcatgaa

SEQ ID NO: 260760 - DNA, 201 bp, Homo sapiens
tagaacatctcaaactttaaaaaaatgtacatatggaatttatgtcatggaaaaatcaaacacttggctgtgttacatgatataaatactgttattgcaaratctttattagaggggactttgcctgaattatttcaatgtcctcttccttgtgatgaggcttacattaataattgattattgtggtaaccccatcagaga

SEQ ID NO: 260761 - DNA, 201 bp, Homo sapiens
ctgtctttaaaaaaatataaacaggaaaaaaatatgttatcgtcgtattcttctccctgaacaccatattccatggtctccaatgtataatgttgattgargaaattttgaagaatttttaatatattgctttggatataatttaaaaattacttttaaagtttgtttttttccttttgctatgggtgatgcaaccttgaa

SEQ ID NO: 260762 - DNA, 201 bp, Homo sapiens
aacttgttaaactccaagtgatttccagaatatttttaaagctgtctgttgttctagatatttaatagtcatcattgcaaaggcagcatacagcagaaaasaaagtcatctataaataaattgccagtcatctacaaataaaatatactatatttttcagagctttgaaagctaagtgtagaacatctcaaactttaaaaa

SEQ ID NO: 260763 - DNA, 201 bp, Homo sapiens
tcttgtcatactagactataagcaccataaaatggggaatttattttcttgttcaatgctgtgaaactgtcacctagaatcatattgggcacatttggacrttcaataaatatctatgggctgatatgcatgaattccattgctttatcctcacacatttattcataaaataaatcaatatatttatatattcccttgaaa

SEQ ID NO: 260764 - DNA, 201 bp, Homo sapiens
gatagtggcctaaagccctatgagcaaaaatgcattatgcataattacactccattctcttccatttagtgagcctatcagaactcatatgagtgtgaatracatcattatggggatcaaaactgtaatttatagagcatatcatttgcaaaattggtattttattagtaacaaatcacatgtgatatctctcaaatacca

SEQ ID NO: 260765 - DNA, 201 bp, Homo sapiens
gtaatttatagagcatatcatttgcaaaattggtattttattagtaacaaatcacatgtgatatctctcaaataccatagtattatttaggggtaatcacygctctgaataccctaaaatctaacaattaggccagctcagcaaagagcaggctgccccactatggcacataaagtgggtaagaggaaggactttggaatt

SEQ ID NO: 260766 - DNA, 201 bp, Homo sapiens
tattacatagacattgttcataattagaaattaattctaaatcatggggcattatttggggttgaaataagtctattttcagaaaattatacatttgatawtcatgtgatcatgagactcttcccagagagggtggtgctctacactcttgggggaaaggaatgctaatatcatgaagcttcccaaaaatccaagagaact

SEQ ID NO: 260767 - DNA, 201 bp, Homo sapiens
gagactcttcccagagagggtggtgctctacactcttgggggaaaggaatgctaatatcatgaagcttcccaaaaatccaagagaactgggttcagatagyttccagatagctgaacacatgaaggttcctggagggcagtgcacccagggagtgcatggaagctccgtatcccttcccttatacctcaccccacacatct

SEQ ID NO: 260768 - DNA, 201 bp, Homo sapiens
acctcaggtgatccacccaccttggcctcccaaagtgctgggattacaggcatgagccactgagcccagccttttttattttttttatttttttatttttwtttatttatttatttatttatttatttttttaattttcgagacagggtctcattctgtcacccaggctgaaatgcagtggtatgattacagctcactgtg

SEQ ID NO: 260769 - DNA, 201 bp, Homo sapiens
ttccattaccagtgtctccccaaatgccatccccccagcccttggaaaccactaggtttgcctcatctggacattgcatataaatagatttatacaattcrtggtcttttgtgaatgctctctttcatttagcataacattttccaggtgcatccatgttgtcagacattttttattcctctgtaaagttccctctttgtg

SEQ ID NO: 260770 - DNA, 201 bp, Homo sapiens
ctaggtgtgcccacacaagtgtaacccctggatactttaggagagctaacaaattctaatgttccctactttttcaacgtttttcttcctttcctcatttyttgaacccttcctcccagttcctcttcttcctccttctcctcctcctcctcttaccatcatgtgtagagaaatgcccaagctccttaccccaaaacacta

SEQ ID NO: 260771 - DNA, 201 bp, Homo sapiens
ggacattgcatataaatagatttatacaattcgtggtcttttgtgaatgctctctttcatttagcataacattttccaggtgcatccatgttgtcagacawtttttattcctctgtaaagttccctctttgtgagtattctgtgcagtcattcccagagtattaacattcagctaatgaatgattccctacaacaaaacag

SEQ ID NO: 260772 - DNA, 201 bp, Homo sapiens
gtcctaaaaaagtttactgtatcatctttaacctacttcatctaacaggtaaaaagaacataacgaagtcaaattagattttctctaatgactggcaaatacacacacacacacacacacacacacacacacacatattacatgtatacatacacactatttatagcccccacccctgctgaggttctgggattggctgct

SEQ ID NO: 260773 - DNA, 201 bp, Homo sapiens
ttagttttttcataaatatttttatgggtattttgctatctttgcccacatcccctgaataacaaaagtacactaataaccttggcactagtgctaagatkaaaggaagatgaaaaatatcccattttttaaaaagccttagggattttaggatgtcagcatactagtactagggaaaataaatttatgtgtatatatttt

SEQ ID NO: 260774 - DNA, 201 bp, Homo sapiens
tcctaaaaaagtttactgtatcatctttaacctacttcatctaacaggtaaaaagaacataacgaagtcaaattagattttctctaatgactggcaaatacacacacacacacacacacacacacacacacacatattacatgtatacatacacactatttatagcccccacccctgctgaggttctgggattggctgctt

SEQ ID NO: 260775 - DNA, 201 bp, Homo sapiens
accttagttattcttatgctaaaactcaatgcgtcttttaatttagaaatagctgcctctaataatattttattagagccatttattctttaatattttaygcaaaatttatggttgtcattttttaatgtgagaaaacacttttttttttttgtgagcaacaaggctgtttatttcacctgggtgcaggccggctgagtc

SEQ ID NO: 260776 - DNA, 201 bp, Homo sapiens
tttagaaatagctgcctctaataatattttattagagccatttattctttaatattttatgcaaaatttatggttgtcattttttaatgtgagaaaacacttttttttttttgtgagcaacaaggctgtttatttcacctgggtgcaggccggctgagtccgaaaaaggagtcagcaaagggtggtggattatcattagtt

SEQ ID NO: 260777 - DNA, 201 bp, Homo sapiens
atgaaacatgtctgtccagtttaccacagtatccccaggacctaacttgaaaagagtttgatgaatggatatatatatgggggaatgaatgagtaacatcraagggttgcctgccataagaataaagggaagaaccaatgactatgcctgcagaagagatcagtgtgatagaattaggtagcagacacagagactttttgt

SEQ ID NO: 260778 - DNA, 201 bp, Homo sapiens
attaaaatagtgacttaacatcaggaatcttgaagtttcaaactagtaagtaagtggagtctaacatacacacatgcacacacaaacatatacacatgtayatacctggccactcttatctcttagtaggcaatctttagtgaatgattatagttgaaattgactgattttaaagcagccacgcaagctgagtggaacaca

SEQ ID NO: 260779 - DNA, 201 bp, Homo sapiens
tttaatgtgagaaaacacttttttttttttgtgagcaacaaggctgtttatttcacctgggtgcaggccggctgagtccgaaaaaggagtcagcaaagggkggtggattatcattagttcttataggttttgggataggcggtggagttagaagcaatgttttgcaggcagggggtggatctcacaaagtacattctgaag

SEQ ID NO: 260780 - DNA, 201 bp, Homo sapiens
atatgctactacatttcctaatttttgatttgtgtgatgagatatttatatgttcccatcttctcccaatgctcccaatgtaattacttccatggtgcctrtctttctggaatatgtgtacgctgccatcacaaacagtaccatactctaaaatttaaaagaaaacttgtctccttagcatttagcacaaatgacctctca

SEQ ID NO: 260781 - DNA, 201 bp, Homo sapiens
atcattagttcttataggttttgggataggcggtggagttagaagcaatgttttgcaggcagggggtggatctcacaaagtacattctgaagtgtggggakaattacaaagaaccttcttaatggtgagggagattacaaagtacattgatcagttagggtggggcagaaacaaattacaatggtggaatgtcatcagtta

SEQ ID NO: 260782 - DNA, 201 bp, Homo sapiens
cagtgtacaaaatccctctagactgtatgtgctctgagaatatgaaacatgtctgtccagtttaccacagtatccccaggacctaacttgaaaagagtttsatgaatggatatatatatgggggaatgaatgagtaacatcaaagggttgcctgccataagaataaagggaagaaccaatgactatgcctgcagaagagat

SEQ ID NO: 260783 - DNA, 201 bp, Homo sapiens
aataaacagataaaatactgcagaaaggaaaggcttatgagtgattttttaacatactattaaaatggaatatttattgttacaaaagatcatgtgaaatrtgctactacatttcctaatttttgatttgtgtgatgagatatttatatgttcccatcttctcccaatgctcccaatgtaattacttccatggtgcctgtc

SEQ ID NO: 260784 - DNA, 201 bp, Homo sapiens
agatcaatttgtataatcaggatggaagatcaaatcaaagttaccctgagtaagtgagggaaaaaaattggttattttgactggcatcaataatttggagaaaaaaaaattgtaaaaatttaatatttgttaaaaatagtggcatgtgatctatagtgatgctttgtagttttaagcctcactgaatcttggctgcttttg

SEQ ID NO: 260785 - DNA, 201 bp, Homo sapiens
ttataaaacaactttcatctttgtgtttcgttggaagtcattcccaatactccaaatttaaaaatgtcagtcttgtaggctatagctaaaatttatctccyattcattttcaatatttcaataaagtatatttcaattaaaatatactttatttttttcttttcagaaagaacattctctgtcacaaaattttcttttaaa

SEQ ID NO: 260786 - DNA, 201 bp, Homo sapiens
ttagctcttcttgttgaattgatccctttaccattgtgtgatggccttctttgtctcttttgatctttgttggtttcaagtctatttcatcagagactagrattgcaacccctgccttttttttttttactttccatttgaaggtagatcttcctttatccctttattttgagcctatatgtgtctctgtacctgagatgg

SEQ ID NO: 260787 - DNA, 201 bp, Homo sapiens
tcataatgcaataagattaataatatagagagcaggggttaccaaccttggctgcccactagaatcacagaccacagcaaacaacaacacagagctaaagmagccttgtcacctataagatcagtggttacacagtcacagggcaaaaactctgggactgagaagttttcttactactgtaaggaggaataagggtagata

SEQ ID NO: 260788 - DNA, 201 bp, Homo sapiens
atgggagaaaaagtttcacaaataatcataatgcaataagattaataatatagagagcaggggttaccaaccttggctgcccactagaatcacagaccacwgcaaacaacaacacagagctaaagcagccttgtcacctataagatcagtggttacacagtcacagggcaaaaactctgggactgagaagttttcttacta

SEQ ID NO: 260789 - DNA, 201 bp, Homo sapiens
acattgtgcttttcttgaataagagatggagcaccttgtatatataagtatgctatagatcaaatacaacaggcattggaactcacatagaaatcagatayagttgctgacttaaaagtgctaaaaactagaatgggagaaaaagtttcacaaataatcataatgcaataagattaataatatagagagcaggggttacca

SEQ ID NO: 260790 - DNA, 201 bp, Homo sapiens
aacccagaccatgagtcagtgtgttgtatgggaagtcatctggattgaacagctgcctccctgtcggcttgctacctcctgcccaaacaaattccctcagragactgtcaactcctcaagacaacattccaggcccctattttctttattctccctcaaactcctaaatacctgcctgacactattttttttattatactt

SEQ ID NO: 260791 - DNA, 201 bp, Homo sapiens
tttattagcatccatagtcttcctttttgatgaaggaaatgtacagagcagagaagcaactctttccctgaccctttgggacatctcagtagttaagcaartgctcccctgtgggccatcatccactgagtaatggaaccctaacctcctagttaaacccctgcttaaagggtgagttgaccatttacatgtagcacatat

SEQ ID NO: 260792 - DNA, 201 bp, Homo sapiens
aaccccttgaaccagggaggcagaggttgcagtgagccgaggtcacaccactgcactccagcctgggtgataaagtaagactctgtctcaaaaaacaaaarcaaacaaaaaacaatatctcctttgtattttatcattaggctgctcttatctcttatgttaattttatcctatgtctggtcttgtggctaaaagatggct

SEQ ID NO: 260793 - DNA, 201 bp, Homo sapiens
tttcataagtgttaaatggtatatgagagtggtatatgaattctgcagtgccttaaacgtaatattgaactggagagcgtgtggtctcttgtactactgtrtgcttttggaatagacaacagaggacctgaaattgcttcctcaaagttactttcagggaaaaagaaaaaatcaagcacaatctgagaaataatggcacag

SEQ ID NO: 260794 - DNA, 201 bp, Homo sapiens
ctgggtgataaagtaagactctgtctcaaaaaacaaaagcaaacaaaaaacaatatctcctttgtattttatcattaggctgctcttatctcttatgttamttttatcctatgtctggtcttgtggctaaaagatggctgttatgagctaaccccacactcaaccaaagggctaagaagaggttcctttcctcttcaggag

SEQ ID NO: 260795 - DNA, 201 bp, Homo sapiens
gatatttatatgttcccatcttctcccaatgctcccaatgtaattacttccatggtgcctgtctttctggaatatgtgtacgctgccatcacaaacagtaycatactctaaaatttaaaagaaaacttgtctccttagcatttagcacaaatgacctctcaaccatgtgtggttcacagatgaagggtgaaaactcgctaa

SEQ ID NO: 260796 - DNA, 201 bp, Homo sapiens
ctaagatgagaatttagtgccaactggtttagatcatgtctattcgtgaactagtcttgatttcaaggggtatggatcacacaaatggacgtcagagtggragtgtggtgcatcccatggcaattttgtatctgccacttagtgtgggaagtgagtagattagggactgggaaggcagccataatttctgattcatcttgg

SEQ ID NO: 260797 - DNA, 201 bp, Homo sapiens
catgagccattacatatacttgacatatatgtaatcacatcaagtattagtgttaatcttcccagtgttttagcaaaacaagattacctagttttaaaaarcattttcgtcaccttacataaaaattgctagtgcatcattaaaaatctcttaggacagttcttatcaataggaaagagtgatacttggagttctgtttat

SEQ ID NO: 260798 - DNA, 201 bp, Homo sapiens
tgagttgtaaaatgcagctcaaaagttggtgtctccctaatttactcttttcactagtattgctcagattcccgaaggcaactagaggacagtagacctcyaagttaatgaatgtaccctattatcaccatggacatcaagtattaatgttatcaacactttgtagatttagattttccattttagcacttgaggctgttc

SEQ ID NO: 260799 - DNA, 201 bp, Homo sapiens
ttgtaaaatgcagctcaaaagttggtgtctccctaatttactcttttcactagtattgctcagattcccgaaggcaactagaggacagtagacctccaagytaatgaatgtaccctattatcaccatggacatcaagtattaatgttatcaacactttgtagatttagattttccattttagcacttgaggctgttcattt

SEQ ID NO: 260800 - DNA, 201 bp, Homo sapiens
cttctctagtttacatatctcaacacagaggaacatgtattatactcaatcaggtagcaatttctagagaaattttaaaaaattcctagggaataaataartttggaagtcattatgtatgttaataatttattctgcagataatctctttaataattatctgtatgtaattaaatctatgggttcctcatcagctgatgg

SEQ ID NO: 260801 - DNA, 201 bp, Homo sapiens
cagctctcaagctgcttttgcctctgctggttgcccacctcatctgctcatccctttatcagagcacacctctctgttgctctcccccacttatcgttcamccttagttcacataaatacctgccccctccaactcatatagcaaacatgtaacacacaaacataacaaacccttgcctctctttatttctttttctctct

SEQ ID NO: 260802 - DNA, 201 bp, Homo sapiens
taaggcaatagagtacctttttagaaaactctttatctctgtcatacattaaagagaataaacagatattcagtggtttgatagtggcagtaatgatggattttttttttttttacaacttatctgacagtattggtttcagaaagatctggaattacttgagcataaaattcttgctttgtctattttaaaaactatagc

SEQ ID NO: 260803 - DNA, 201 bp, Homo sapiens
aaagagagagagagaggagaaaggaaaaaaatgtatctgagataaaatactgtctcctcagtcttggagtttttaattgctgcctctgtctataagccttrtaaggtgagctctctaagatactaattcactcactcccatctttttaatacatggtgtctcgttcatttcctcctcttgctttactccagacctttatga

SEQ ID NO: 260804 - DNA, 201 bp, Homo sapiens
ctggatgtgaaattctgggttgaaaattattttctttaaggatgttgaatattagcccccactctattctggcttgaagggtttctcctgagagatccacwgtttgtctgatgggcttccctttgtgggtaacccaacctttctctctggctgcccttaacattttttccttcatttcaaccttggtgaatctgacaatta

SEQ ID NO: 260805 - DNA, 201 bp, Homo sapiens
aattatatgcaaagatgctacttcaaacacacttagcagcacaggtgttctaatttattttgacattaattgttaggtgctcagaaattcaattttggctktattttcttactaaagggctgagaatatattgcaaaaatttctgattgtgtcacaaaatggaaaagtgaattttctaactgggttactttcctacgttcc

SEQ ID NO: 260806 - DNA, 201 bp, Homo sapiens
tcattgatcactccccttattggcaagattcagctctttttggctgtatgactgaagactccagatttctgctagcttttgactcgtctcagatcctggaggccacctgcaatttcttgccatatgacccactccagaatggctacttactatatcaagtccataagtaccagtttgctggcactagtctgctaaaacaga

SEQ ID NO: 260807 - DNA, 201 bp, Homo sapiens
gacatcaaatggcatttacataaagaggttcacttttgctttatataaaatgttcagtgaagtcaaaggagagatgaaagtgtcaattccaatccaataascatatttttatattcactataagtgcattggaaactgtgttgtgttcttctgttaaaaagtttaacttaattgttatcatcatagtgtccagtagaataa

SEQ ID NO: 260808 - DNA, 201 bp, Homo sapiens
ctctctaggtcctttctcagaaccagatatgataaaacaacagatctacagttttttttctccagatggtacttaaagacctgttagaaaaagctcctctrtgattttttttgcctactctagaggcctgctctaggggctttaatttcttcctctttagtcatgtcactgattacccatagaggggaagaataaagccga

SEQ ID NO: 260809 - DNA, 201 bp, Homo sapiens
ccaccctgttccaggttctttggctttccctgggtgctgttttttgttggtgctttgctgcattgagaaattctgtggcacccagtttgggacattatagraggcaagaaaaatcccgtggaactcactgtaatatcattgcttaagtcctgaggcccctaaccaatatacctcctttagtctaccttttagagtcttttg

SEQ ID NO: 260810 - DNA, 201 bp, Homo sapiens
aactagtcagaagctacccagcaggaagacagcaaagggcaggtatgttccgacctccttctcccctcctggaccctccgttctcccctcctggaccctcygttctcctgctgggacctacactgtggaaactcaactgaaagtcagaggacaaggaagcctgttgaggtagttcacagagcccgtgctccagtggcagaa

SEQ ID NO: 260811 - DNA, 201 bp, Homo sapiens
tattaggaatcagttaactagatttttgttgttgttgttgttattgcaagttttaatctgagtcactattaataaagaaaatgggagaagtgaagaagctytcatggaaatggtgaaattcctttctttttataactcctccagctgctttgggaatttgtggatactcagacttttttttttttttttttttttttcatt

SEQ ID NO: 260812 - DNA, 201 bp, Homo sapiens
ttcctttctttttataactcctccagctgctttgggaatttgtggatactcagacttttttttttttttttttttttttcatttttcccaggaagtagcaracagagcattaagcagcctgctgagttataggctttattcttaggaggtcttagaaggccagaattctagctggctttcaggggagtgtttgccccagat

SEQ ID NO: 260813 - DNA, 201 bp, Homo sapiens
tgtacgccgtttctgtaatacattgtgcttttcttgaataagagatggagcaccttgtatatataagtatgctatagatcaaatacaacaggcattggaaytcacatagaaatcagatacagttgctgacttaaaagtgctaaaaactagaatgggagaaaaagtttcacaaataatcataatgcaataagattaataata

SEQ ID NO: 260814 - DNA, 201 bp, Homo sapiens
ggcagggtgttatctgtgaattaaatcttctaacttgtggattaactccatggatttttaacctacggattaagtcttaaaatcaagaaacagccacagasgggttaaaagacatgcaaaaggccttacagctaagacgtggtggaaccaggccctcttactctgagtcctagtttccaagagcctaggctgataaattta

SEQ ID NO: 260815 - DNA, 201 bp, Homo sapiens
actaccacagccactgtactatttcaccttcgtttatttttttctcagctaagccaataaaatactgtcatctgagaaaagatataatttatgtcccttgrtgatctcttttgtgattaatacattggccacataatgaaaagggtttagcataagaacattgcttatagtatttatataaagcaattcaggtcatacaac

SEQ ID NO: 260816 - DNA, 201 bp, Homo sapiens
aaggaccttggagattacctagtgaccctgccaagtaaggcagggattctttttacaacatcgctgacagattgtcagctaacctttacttgcacatgtayggtagcagggagtttgctactttgggtatcaacccattccatttttggacagctatatgatttataaaacttatcttcttgttaagctgaaatctgttaa

SEQ ID NO: 260817 - DNA, 201 bp, Homo sapiens
atttgtggatactcagacttttttttttttttttttttttttcatttttcccaggaagtagcagacagagcattaagcagcctgctgagttataggctttwttcttaggaggtcttagaaggccagaattctagctggctttcaggggagtgtttgccccagatgtagatgctccctaatagatttatcctttcactattt

SEQ ID NO: 260818 - DNA, 201 bp, Homo sapiens
aaacaaaaataaacaaacaaacaaataaaaaacccagatagccaagtcttttagaccaggttttttgggaactaccacagccactgtactatttcaccttygtttatttttttctcagctaagccaataaaatactgtcatctgagaaaagatataatttatgtcccttggtgatctcttttgtgattaatacattggcca

SEQ ID NO: 260819 - DNA, 201 bp, Homo sapiens
tttttttttttttttttcatttttcccaggaagtagcagacagagcattaagcagcctgctgagttataggctttattcttaggaggtcttagaaggccaraattctagctggctttcaggggagtgtttgccccagatgtagatgctccctaatagatttatcctttcactatttaaaagtagctcaccatcaacacatg

SEQ ID NO: 260820 - DNA, 201 bp, Homo sapiens
atttgtgtttcattgctttatggataaaatacaataaagattttaaaagaaataaaaaacaactttgtggatcttaaaagaattctccatagggcagtggkttgagacaaatacagcttgctgaggcaatatactggtgagcatggctatcagcctacccgttaaattaagagctgacttgagcagagacttaatgattac

SEQ ID NO: 260821 - DNA, 201 bp, Homo sapiens
aatatctcaaaactaccagagaagaaattagattaaacaaattgcctaagtgtcttgcttagtgagtggcattgtgatggcagaaaatcttccggaagtcrtatgactaaggggtgatattctagtgtcaactattgcttgctcaaaggagtgttcagagatttagctagaaatacagtctgacttcactgtggagccaaa

SEQ ID NO: 260822 - DNA, 201 bp, Homo sapiens
atatagactggtctttttttttttttcctgtcatggttctgaaatatttcggaaagacagtagtatttttatattttattttaaactaagttttacagacyaatacatgcacatattcaatttcgtatacagagaccacatatagtattatagtatcaaaatctttacatattaatatatatattttctaaagttttggga

SEQ ID NO: 260823 - DNA, 201 bp, Homo sapiens
gccgtctggtgggactgattcagtatgtacagatccatgatgtgaataggtttcaccttatgaaatgcaatgactcatgtactaatttggtatttatgaaraaatattggacctggtaacagcttttaaaaagctgagtatgactgagtcaataaaaacaattttacacaataataaaacaccagatattggtaaatgttg

SEQ ID NO: 260824 - DNA, 201 bp, Homo sapiens
ttcattttattgtgataaaatacacatattataaaatttaccatcttaactataagaaatgtcttattttggcacattttaaaatattgtacttgaacatkttttgctatttttagttgttttattcactgcccgttccaaagtgtctgatgcagtgccaagcaaaatgtatttgttgaatgaaagaataaatgaatgaat

SEQ ID NO: 260825 - DNA, 201 bp, Homo sapiens
tctccatgtccctagtttattcaactcttgtccctcagtcctggctcaagccaccctacttattcatgctaggtgccatcctacaacacagctaatcccamcactttgctgctcataagtcttcagtgtttgcccaccctacatctagagaatgatgtctgtgtttgtcatcaaccacaaacatttacaacatagcctcat

SEQ ID NO: 260826 - DNA, 201 bp, Homo sapiens
ctaccttttgggtactaagctcactgtccatgtacaatatacccaaatagcaaacctactcatgtatgcccctgtatctaaaatgaaagttgaaagatttwaaaaaaaagaactatatcttgcctcctcctgcccctctccctacctacccaacacatgcctgcatgcatgttctgtgactgagccccctctacagctggc

SEQ ID NO: 260827 - DNA, 201 bp, Homo sapiens
ttcttgaaaatctatcagacctggagggaaaaccatgtatgaaagtgacccaaaggaagttgagaaatgcacagaatgacctctagaggttcctttcagcwctaatgatcagtgaaggagacttacagaccctgatgaactgaccccaaccaggcattggcttgctgcttttttcccctacattggccagtgctgtcacaa

SEQ ID NO: 260828 - DNA, 201 bp, Homo sapiens
tgtatccaaccttgtattcccagtgcctacacagcagcaattggttcatagtagacactaaaaactttgggttgaagaaatgaataaactccttctctggkattaacaattagggatttgaagccaatagaagaaataatataatgtaaggggagcttttcttagtcactttaaaaaatatcaatgcctaaaatactgtac

SEQ ID NO: 260829 - DNA, 201 bp, Homo sapiens
ggcaaagaaaagtaagaaattctgtcatttgcaacaaaatggatgaaccttgagggcattatgctaagtcagacagagaaagacaaatactttatgttctyacatgcggaatctaaaaaagtcaaactcatagaaacagaacagaattagaatggtatttggcaggggctgaggggaggaggaaatgggaagatgatgatc

SEQ ID NO: 260830 - DNA, 201 bp, Homo sapiens
tcggagtgggtcctagattggctcttccatgtaatctgtctctgttttatatattttcattgcaattgcatgtctgcggttttagaaggtttttttttttkttttttttttttttttgagacggagtcttgctctgtcgcccaggctggagtgcagtggcgcgatctcggcttactacaagctccgcctcctgggttcacg

SEQ ID NO: 260831 - DNA, 201 bp, Homo sapiens
ttttggttttaggacccttttacattcttaaaaattatcaagaatcccaaagagcatatgtttatacagttatattaactatgaatattttccacagaagaaaaactccaaaattttaaaaatatttatgaattcatttaaaatggcaaataataaactcattatatgttaaataacacatgcttttgaaaattttgtttt

SEQ ID NO: 260832 - DNA, 201 bp, Homo sapiens
ggagcttttacagtggcttgacattaaaaaaaaaaaaaagatctgctgggcgctgtggctcacgcctgtaatccctgcactttgggaggccaaggcgggcrgatcacaaggtcaggagattgagaccatcctggctaacatggtgaaaccccgtctctactaaaaatacaaaaaattagccaggcgtggtggcgggtgcct

SEQ ID NO: 260833 - DNA, 201 bp, Homo sapiens
gtcaggagattgagaccatcctggctaacatggtgaaaccccgtctctactaaaaatacaaaaaattagccaggcgtggtggcgggtgcctgtagtcccasctactggggaggctgaggcaagagaatggtgtgaaaccgagaggcagagcttgcagtgagccaagatcgtgccactgcactccagcctgggcgacagagt

SEQ ID NO: 260834 - DNA, 201 bp, Homo sapiens
aagcattaagctagaagttcaaatgcacattttattatagcttgctgcttttttcaaggacttggcaactgtgttcaagattagcaggccatgaggagctrattcaagtcttttaatattattaggggtattagaggcatcccttcaatctgggaggattgacctggtatggtcaggtatgtcaagacttaagggatttga

SEQ ID NO: 260835 - DNA, 201 bp, Homo sapiens
gccaaggaaggactccaaaaacatgcaccaaagtttgacttgactgagcagaatgtcagttatctctgcagctgttagtgaaaaagcagagggaaaagggygatgtcttgctttctcatgcctaacacaagcctctcatctcttccttgggactagttgagtaactgctttgacttgagggagtccttgcagtttttctgc

SEQ ID NO: 260836 - DNA, 201 bp, Homo sapiens
tcacaaagatacataaagaataggatatagccatggtaaaagctgttcaaaaaatcgtaaagagcagggtacaataaaaatattttttaaatgataatacrgattttaccgaccaaattgttactttagaattttaattttgttttcttataggtattgttaccttagaattttaattttgttttcttataggttattttt

SEQ ID NO: 260837 - DNA, 201 bp, Homo sapiens
gggagagggctcccttccacagctcagggctcagctcacatgtttccactagtaccaccctggggccctgcttccaactggaccctccatcctaaatgcayactctcatcacacccctggcactgcttcataaaatgtgagactttttaaagtattaatatggggaatacattattctatcaaggtgttccatttatttat

SEQ ID NO: 260838 - DNA, 201 bp, Homo sapiens
tcatccttattcattacttaaactaaatgcaacaagtagaatactcaccacaatagatcttagccagcagtgacaagaatgaaacataaaccccaaaattmaaaacaaaagtttttatactaatatactttaataaattttattttcacagcacatcagttgtgaatattatggaatataaattcttgtaatgtaatattc

SEQ ID NO: 260839 - DNA, 201 bp, Homo sapiens
ggcaagactatatttgggtgagaaatctgtaaaacgaaaacataatctttctcattattttcaattttagttgtgaccacctctcaattgttgtaaacacyatcactgttcaacccaatctcaatcctttattcttagaaatagggaaaactgtattagaactagacatcttacaacagataataagttgattttgtccaa

SEQ ID NO: 260840 - DNA, 201 bp, Homo sapiens
tgccagcagcttcaggcactggatcatattcaatgattctcaaaggagagacaatcagttcccagtggaggtaaacgtggtttagacacctctaggctttmtaagtgatttttggcaccagaccctcttggcttcagctttgaggataaagatattttcctgggggatgattaagagagaaattagccacatctctgaaat

SEQ ID NO: 260841 - DNA, 201 bp, Homo sapiens
ggaatgcatgatattataggtcaggtacaccatgggactaaactgatttaggtaacaaatcttctggaagatgaaattggtgtgcctgtttatttaagaawgaagaggggacccttaaattagacataaaataattcaaacaggtaaataaaggcaatatatttactggacatgttatactatagaacaatatattttggt

SEQ ID NO: 260842 - DNA, 201 bp, Homo sapiens
atgcaaagcatgcaaatgtgagattaggacagtaaagaggtagaaagagcagatgatttagagacatatctgtgcccaaatcctggctcttctgttgcctrtcagtatggctgattgttctgagactaagttatcttatctgtgaaatggggatactagtggtacccacttcgtggggttctctgtgaggatcacatgagt

SEQ ID NO: 260843 - DNA, 201 bp, Homo sapiens
tagctcattggctcaagttaaggggccccgaaaatctcatatataacactgtaagagcaagttttcatgatgcataagtatttatgagtacttgcaaaatwaaactaactcattatccaaacaaaagctttccaaattacaactaataggtgatattcccatggcccacagaatctctgggtcagtaacctcctttctaaa

SEQ ID NO: 260844 - DNA, 201 bp, Homo sapiens
aggaaacctaggcatggttagattaattgcattgcccaagattgcaattagttgtttagtggagcctggatttaccaaggccgtttggctccagagcctgttttttttttttgtttgtttgtttgttttttgccagtgttctttacagtcttttaaagaaagggaagaaagaattctgtggctagactctcaaaggttatt

SEQ ID NO: 260845 - DNA, 201 bp, Homo sapiens
gcattttaaaaataggtaatcttattgaattctgttcatttctcttgaggttaagaaaagactcagtagttgaagaagtgatcaaagctatccttatgttaaaaaaaaaaaaggcttctctccatgaaatatattggcctatctgaggatcaaagctttgacttcgttcatctcatgctctgataagctgaattgcttcac

SEQ ID NO: 260846 - DNA, 201 bp, Homo sapiens
aattctcaagtgggaaagatatcctataagaagcatgagtgtgggcgctcattcagagaacattttttaattaaaaaaattgacacataatacatacttakgaggtacataatgacattgcaatacatgtaatatattgtgatcagatcatggtaattagcatatccataatttcaaacatttatcatttctttgtattgg

SEQ ID NO: 260847 - DNA, 201 bp, Homo sapiens
atgcatggaattgctttctctataccagctctttcctgtccctgaatgttgaatgaagattgcctttttaggagattaaagagatctgcctaaatcctggrtatatctgtattagataaatagatggagtgaggttccaggcagctctgtccaggaagttcaggaactgtaacagcacagcttcattgcactgccgcaggt

SEQ ID NO: 260848 - DNA, 201 bp, Homo sapiens
aaagaaaagaaaaaaaaaagggaaagtgaatttctttcctgtaggacatctcagagccttcagtagcctttcaaggccctcgaagatgctcagaggacacrtgtcgcctgcagcttttcttaaattaatttgaatgcaagaagctttcatcatggaatacttatcaacagcttattagacactatgttccaagaaacatag

SEQ ID NO: 260849 - DNA, 201 bp, Homo sapiens
tccctgatcgatgtacttaagcttaatagaaatgccctgtaatccaagcactttgggaagctgaggtgggtggatcacctgaagtcaggagtttgagaccrgcctggccaacatggtgaaaccccgtctctactaaaaatacaaaaaatcagccgggcgtggtggcaggcacctgtaatcccagctacttgggaggctgag

SEQ ID NO: 260850 - DNA, 201 bp, Homo sapiens
gctgaggcagtagactctcttgaacccaggaagtggaggttgcagtcagccaaaatcacgccattgcactccagtctgggtgacaagagcaagactctgtsttaaaaaaaaaaaaaaaagggtataaagattaggtaattaccttttttataacatcatcttgggctgattagtttattgcattataggacagttttacat

SEQ ID NO: 260851 - DNA, 201 bp, Homo sapiens
catatttctttcttgccacaatcatcttcctctcccaatagtctgtgtttaaaaggtgtagcactcttttcctctttctcttactcaaaactaaaaatacaaaaaaaaaaaatgaaataaatgaacttaacaaaaagtctcaggaacagtttcttttctgtaggtctaaatgtgataattttagatgataggtggccagct

SEQ ID NO: 260852 - DNA, 201 bp, Homo sapiens
gtgtgtgtatgatattttctttatccacccattgatagatgggcatttgggctggctccatatttttgtgattgtgaattgtgctgctataaacatgcacrtgcaagtatctttcttatagtgagttattttcctctgggtagatacctggtagtgggattgctggatcaaatggtagatctacttttagttctttctaca

SEQ ID NO: 260853 - DNA, 201 bp, Homo sapiens
accacgtcaacatctattactttttttattatggcaataaaacaaagataaatagatgggacttagttaaactaaaaaacttctgcacagcaaaagaaatagtcaggagagtaaatagacaacccatagagtgggagaaaaatctttgtaatgtatatgtccgacaaaggactaatatccaaaatccagaagaaactcaaa

SEQ ID NO: 260854 - DNA, 201 bp, Homo sapiens
ccacgtcaacatctattactttttttattatggcaataaaacaaagataaatagatgggacttagttaaactaaaaaacttctgcacagcaaaagaaatagtcaggagagtaaatagacaacccatagagtgggagaaaaatctttgtaatgtatatgtccgacaaaggactaatatccaaaatccagaagaaactcaaac

SEQ ID NO: 260855 - DNA, 201 bp, Homo sapiens
cacgtcaacatctattactttttttattatggcaataaaacaaagataaatagatgggacttagttaaactaaaaaacttctgcacagcaaaagaaatagtcaggagagtaaatagacaacccatagagtgggagaaaaatctttgtaatgtatatgtccgacaaaggactaatatccaaaatccagaagaaactcaaaca

SEQ ID NO: 260856 - DNA, 201 bp, Homo sapiens
acgtcaacatctattactttttttattatggcaataaaacaaagataaatagatgggacttagttaaactaaaaaacttctgcacagcaaaagaaatagtcaggagagtaaatagacaacccatagagtgggagaaaaatctttgtaatgtatatgtccgacaaaggactaatatccaaaatccagaagaaactcaaacaa

SEQ ID NO: 260857 - DNA, 201 bp, Homo sapiens
atgttagatggaagaagctattcagggaaggagtgacttccagctttgaaacaagaactttagaaacttcagaagcatacggaaaaggaaacaagaaaaaygtaatcaagcaagcctcttgaaatgatacaataatataatagcagaattagatccacagaatttatacaattaaatccacagagtttgtaactatcctta

SEQ ID NO: 260858 - DNA, 201 bp, Homo sapiens
tctatatctttttgttgtggttaaatatttaagtctatcttctgagggaaagagaaacttgacattgtgattgaaatactgcagcagccatgaactgcttrtcttttacttctctctctgctttctgcgttaaacagtggtaatgacctggcaatacactatctgaaatgacatggtttttttccttaagtagattgagat

SEQ ID NO: 260859 - DNA, 201 bp, Homo sapiens
gtggccatgaagaaatgaccatttgtactattcttagtaggaagcagtcccaaagtcacctgtgtctactctgatacagtcatggggctcaagctttaggwtctgaagcagcctcctaggccatgttgctttaaattccagctgaatataagatgattacatgtgagacatctttaatatgttattctgatttccagagat

SEQ ID NO: 260860 - DNA, 201 bp, Homo sapiens
gttaccatgcctggcctaattttttcaaatttttcatgaatacatgaaaatatattgcattctatatctgagatgtaaaaagctgtaataactttcattamcttaaaattatcaattatatttttaatgttctttcttcatctctttttttgttatttatactgtcagaagttaaaagggctatatgataaaaatcgcgca

SEQ ID NO: 260861 - DNA, 201 bp, Homo sapiens
ttatactatgatgattgattgattggttgacagatgattctatacttttttcctaacaggagacattgaaaaggaatcaagatttcaataaagttattaarattttctgcagataaccttcaccttaaaactagacagattaggaggtagtgctaggataatattaacgataatagcaaccacaatacacaggaaaagaaa

SEQ ID NO: 260862 - DNA, 201 bp, Homo sapiens
ctataccagctctttcctgtccctgaatgttgaatgaagattgcctttttaggagattaaagagatctgcctaaatcctggatatatctgtattagataartagatggagtgaggttccaggcagctctgtccaggaagttcaggaactgtaacagcacagcttcattgcactgccgcaggtgttgcacacaggtgaattc

SEQ ID NO: 260863 - DNA, 201 bp, Homo sapiens
cagaacagagccttagactctgagtgggatctattcattttcaattcctagggttccatgaggaaaacaggtttttcccaaaatgggttctgtggctcctmctctgttttttctaaggagacccgggctactagaagttatcttagggcctctcatgtgtgcattaagagtggcaagacaaatagagaaaaataatttagt

SEQ ID NO: 260864 - DNA, 201 bp, Homo sapiens
gcctctaaaaagtttgcatcaattttacttccatcaattacataggcaaaacttaaactcttattactttttaaaattatagtttttgattacctgtgtgrttgaacatttatctatatatttattacaaatatccacacaaatacacataaatgcttatgtggaaactgggatattcctatttttccttttgacttacaa

SEQ ID NO: 260865 - DNA, 201 bp, Homo sapiens
aatatatatgtaaaatatatgatttttaacaaaaaattagtaaatacaatatgaactcattcatgccctacatgaggggtaagcaaaaactttttcttaargggcaagatagtaaatatttttgtctttgcaaggcatgtgatctctgtccttactacttagctctgccattgtaatacaaaagcactcatcgacaatatt

SEQ ID NO: 260866 - DNA, 201 bp, Homo sapiens
atctaaaatgaaagttgaaagattttaaaaaaaagaactatatcttgcctcctcctgcccctctccctacctacccaacacatgcctgcatgcatgttctrtgactgagccccctctacagctggctgtgggtggaatgaacttctttgaaaagcattttctcctcattgccagaattattcaagcatgagatagaccagt

SEQ ID NO: 260867 - DNA, 201 bp, Homo sapiens
ctatatctttttgttgtggttaaatatttaagtctatcttctgagggaaagagaaacttgacattgtgattgaaatactgcagcagccatgaactgcttgtcttttacttctctctctgctttctgcgttaaacagtggtaatgacctggcaatacactatctgaaatgacatggtttttttccttaagtagattgagata

SEQ ID NO: 260868 - DNA, 201 bp, Homo sapiens
tatatctttttgttgtggttaaatatttaagtctatcttctgagggaaagagaaacttgacattgtgattgaaatactgcagcagccatgaactgcttgtcttttacttctctctctgctttctgcgttaaacagtggtaatgacctggcaatacactatctgaaatgacatggtttttttccttaagtagattgagatac

SEQ ID NO: 260869 - DNA, 201 bp, Homo sapiens
atatctttttgttgtggttaaatatttaagtctatcttctgagggaaagagaaacttgacattgtgattgaaatactgcagcagccatgaactgcttgtcttttacttctctctctgctttctgcgttaaacagtggtaatgacctggcaatacactatctgaaatgacatggtttttttccttaagtagattgagatact

SEQ ID NO: 260870 - DNA, 201 bp, Homo sapiens
aaatattatatgtgcagtgtttccatggtataatggcactatttattctgtagtttttcttgctcggaaaaggaaactagagaatcttaaagtgtggctcktaaacttatctttagctttcattattattgccaaacataaaatttttatgctgctaaaaataatgatggtgaaaatcttatattattatcattgaatata

SEQ ID NO: 260871 - DNA, 201 bp, Homo sapiens
taatttcaaatgaaaaacaacatgcagtagctcacgtctgtaatcccagcactttgggaggcctaggcgggtggatcacctgaggttgggagtttgacacmagcctgaccaacatggagaatacaaaagtagccaggcatggtggcacatgcctgtaatcccagctactcgggaggctgaggcagaagaatcacttgaatc

SEQ ID NO: 260872 - DNA, 201 bp, Homo sapiens
tatttttagttttctgaggagcctccgtattgttttccataatggttgtattaatttacattctcaacagtgcataagggttccctttagtttacaccctytacaccctcaccagtacttacccctcattttttttttttttttttttttttgagacggagtcttgctctgtcacccaggccagagtgcagtggcgcgatc

SEQ ID NO: 260873 - DNA, 201 bp, Homo sapiens
cctcagagctttctatcgcctttctctgcattatttttgtgattagtacttgtcattgttcaatgtctatatatatatatatatatatatatatatatatwtatatattttacgaatttatctcatttgtggtctattttcctcactaatattaaacttcatgagacaaaactatttgtctattttcgttccctcctttat

SEQ ID NO: 260874 - DNA, 201 bp, Homo sapiens
aggagcatcctccagtgaggcacgggagaggcttagtttagttcagcccctgccttacctcttctattagtttaagatctgtgttgtattggaatgcagcrtagcacaagtgaccaaagggactgtgatttctacaaaaggaaagaaaatgtcttactgatgataccagcaaaaatagtgtaagtggaatacaaatacatc

SEQ ID NO: 260875 - DNA, 201 bp, Homo sapiens
aaaagataacttaccttttttgaattcaggtatgtaactcagttttaaatacttagtttcatgcaaaaatgaattttaattttatgtaaaatcaacactgaaccagcattctcacagttgtttgtgaagcttagtaaatacactgggaaatcataaggggccagcagaatgcggggagattgtacaatttcacaggaaaga

SEQ ID NO: 260876 - DNA, 201 bp, Homo sapiens
actccatctcaaaaaacaaatgaacaaaaaacaaatatcatgtgctgcataatgacatttggtcaatgccaactacatatatgacagtggtcttatcagaytataacacagctaaaatatttctattgcctagtaacatcttgatgatcctgaccccgtgtgggcctaggctaaggtgtgtgtttttgtctcagtttttaa

SEQ ID NO: 260877 - DNA, 201 bp, Homo sapiens
caatctgcgaaaaaatgtccttactcactgtgatcaaatggtgaatatgtaccaagacattctgacagaacttagcaaggaaacaggtgtggaagcaattwctctacttactcaaagtgaattgcatttcctgcatgtgaaatgaaaaaaaaaataataaatagattttatgtagataggagaactggagattttttaaaa

SEQ ID NO: 260878 - DNA, 201 bp, Homo sapiens
ggtaagcactctcatgtcaaatcttatttcctgccatgtcataaccagcaaatattatcagttctctactgtgcagggtccaacctctgcactttgggttrccaggtgtcatcttctattagtccatggattaggcatttttactcttgttggtagttctatccatagactagaacataagatagaagaagatgcacttaa

SEQ ID NO: 260879 - DNA, 201 bp, Homo sapiens
aacagaaaccaggagataaaagaacttggtgagctttctccacattgggacaatctgcgaaaaaatgtccttactcactgtgatcaaatggtgaatatgtwccaagacattctgacagaacttagcaaggaaacaggtgtggaagcaattactctacttactcaaagtgaattgcatttcctgcatgtgaaatgaaaaaaa

SEQ ID NO: 260880 - DNA, 201 bp, Homo sapiens
cccattggcactccagcctgggtaggcagagcaagaccctgcctaaaagaaaagttgtgtttgcaaataaatgtattgaaaaaacctccatgggcagcttmatgtgaacactgtctcattttatttttctcctttgtttttcccccttcagatatttcacattttcaggaacaaaatgatttaaaagcattgctagaaaat

SEQ ID NO: 260881 - DNA, 201 bp, Homo sapiens
aaaatgctggtaaaatagtactgtaggaccacttgatattaccatagttatacagaatagagaatgagagaattaagcatatttgtaagtaaagaaaaaamcaggtaaattaataagtatggttgtcctcagacacccttagcttcaaatgatatttcttgttataaaattgtgtttgaggctgggtgcagtggctcatgc

SEQ ID NO: 260882 - DNA, 201 bp, Homo sapiens
ttgtacctcttctgagtaagataaaagatgtgagaactggcctgagtagaaatatgcttaaaagctatctcttttaagtatgcttgtggtatacaacaacyacaatctattattgtgaaaaaattttgcaagtaggcacagaaaataaactgctgtatgttatcataaccataggtaaatgctctacttaacagctaaaaa

SEQ ID NO: 260883 - DNA, 201 bp, Homo sapiens
ggcatttacataaagaggttcacttttgctttatataaaatgttcagtgaagtcaaaggagagatgaaagtgtcaattccaatccaataagcatatttttrtattcactataagtgcattggaaactgtgttgtgttcttctgttaaaaagtttaacttaattgttatcatcatagtgtccagtagaataatggcaaatgc

SEQ ID NO: 260884 - DNA, 201 bp, Homo sapiens
aggttgtaacccagaaataaatgagcacctgactcagagtgaaataaatattgctgctggttccccactgactccatgaccttattgaccaggaaaatttyatagccagttgacctccaaggagtagggttgttgtgaaagctccatggaggttaaatacaccaatttggctccattgaataaagattagactttaacctg

SEQ ID NO: 260885 - DNA, 201 bp, Homo sapiens
tgaaatgttagctgattggcctgataagtagagtatcagtactcaataagaatgaagtagaggccaggcacagtggctcatgcctgtaatcccagcactaygggaggctaaagcaggaggattgcttgagcctaggagttcgagaaaagcctgggcaacatggtgaaaccccatctctataaaaaaacacaaaaattagct

SEQ ID NO: 260886 - DNA, 201 bp, Homo sapiens
gacaaagaggaaggttggtcagtgttgactagctccacagagctgtcaaggaagatgaaaaaaaaatggatttattgattgggaggttgctggcctttcaraaaataggtgctgaaaagagattagaatctgagagattaaggagtgagtgattagaccgtataagatgggtagcaaaaagaaggaagagaaaaggagtgt

SEQ ID NO: 260887 - DNA, 201 bp, Homo sapiens
tgggaagtgagtagattagggactgggaaggcagccataatttctgattcatcttggaacagtttctggccacacagttatttggccataagagaatgaarctatttgacatcattagcatcacagttcagtgagctaaaaggccacggttccattcctgtttacttattaataccctgcctgtgattcaggtcgtcaaag

SEQ ID NO: 260888 - DNA, 201 bp, Homo sapiens
aggatataggccctaaaacctgactctcaacttgattgttctgttccattggggaggtacgagaatagtcatggggtttgtgaatgtttgtgactggggtrtgtgactgcacgtgtgtgaggagactgtttcttactttggatacattctgacttttacctgagaaagtaggcttcccctctgaggctgtgaactcttttt

SEQ ID NO: 260889 - DNA, 201 bp, Homo sapiens
aatcactttcctggaatcttggctcagtgctgtttttgaaaagcaattataaaagtttcaaacaaaaaagaacaaatcatacatagcacacatttgggaayccattgctcagctttggaattttcgtaagaaacaaatatttacagatagggtaaaagctccctttgtacccctccaggttaccacccttaatcctcccct

SEQ ID NO: 260890 - DNA, 201 bp, Homo sapiens
gaggaatacagggtaacaagaagcgtggaatcggcttcctatcctgaaagaaggtgtaatccagtgaggaagacaagtcaacaaacattacattacagttyggctcatgcaataattaaaggtgtggaaggaacaggaatagtgcataaaacaaagcaattcacagaagggagatgaatccgtgggggaagtatcatagag

SEQ ID NO: 260891 - DNA, 201 bp, Homo sapiens
cgtattttctagtcctagctaatgaaagggaaagcagtgacaccatagtagcagtgagcataactagtcctcagtgcttgatttctaaacactattctctwatgaaaaggatcaaggtttattggaaagttggttgattgcagggctgggtcagggaaaatacaagatgattctggagcatcttgtggctctagaaagtaa

SEQ ID NO: 260892 - DNA, 201 bp, Homo sapiens
ttgcagggctgggtcagggaaaatacaagatgattctggagcatcttgtggctctagaaagtaatgacatgctaaaaaaattttttttaatagaataggtrtacataaagggcacaacagccaaccttaaggcgctcccaaaacacaaagttggcacaacctgaacagcaaaaagatattactgagtcattaacgaaatga

SEQ ID NO: 260893 - DNA, 201 bp, Homo sapiens
tatacaatacttttttcaccactgaatagtctttgaaatattactcactaaaaatgtctccccaatgaaggattattctaaagtgcaattggcttttttttctcctctcttcagtcaacgaggatctataaaatggtaaatattcaaatgttcttcttgtaaaatactatatatttgcctgtctcaggcaagtatagaact

SEQ ID NO: 260894 - DNA, 201 bp, Homo sapiens
aaatacatattttattggaggactaaatattttagaactttactgcattttcatggcttatagcttatgacatcagagatagataattttctccacctgtrtaatgatttcatctctatctatatttcccctactcattttaggctacttttctaaacttttcacttttagaaaacgtggctgtgtacacatttgatgaca

SEQ ID NO: 260895 - DNA, 201 bp, Homo sapiens
ggtcttacagtgttttctatagagctctacatcatctcactccccattgctgtggtaatcagaatgctaagatgttccccaagattctcagcccctggtgyagctgctctacataacacccgccccttgattacaggttgcaccgtgaatatatgctgcctgtaattatacacaggtggctgggataaccatgcataatag

SEQ ID NO: 260896 - DNA, 201 bp, Homo sapiens
aggaatgcatgatattataggtcaggtacaccatgggactaaactgatttaggtaacaaatcttctggaagatgaaattggtgtgcctgtttatttaagawtgaagaggggacccttaaattagacataaaataattcaaacaggtaaataaaggcaatatatttactggacatgttatactatagaacaatatattttgg

SEQ ID NO: 260897 - DNA, 201 bp, Homo sapiens
gtacattattcatcaggggaaatttttctagggcatctgttttcgaaacataggcctaggattgtgtgggtcctgataagcaaaaatttaaaaaaaaaaamaaaactttgcccttgtcggcattttggacccactgtttttgacattttttcaaaatgcttcaacatcacattcaagtctcagtgtaaaaggggctatcat

SEQ ID NO: 260898 - DNA, 201 bp, Homo sapiens
tttggtcaatgccaactacatatatgacagtggtcttatcagactataacacagctaaaatatttctattgcctagtaacatcttgatgatcctgaccccrtgtgggcctaggctaaggtgtgtgtttttgtctcagtttttaacaaaaatgtttaaaaagtaaaaaaaaagaaaatttaaaaagtaaaaataagaaaaag

SEQ ID NO: 260899 - DNA, 201 bp, Homo sapiens
gcaacgttagcagatattgccaaacagttttccaaaatgatactgatttatattcctatcagcagcagtaagtcagagttcttactacttcacatcttcayccaaatttgtgattcaaagcctttttaaattttagccaatctgctgagtgtctagcagtatctcattatagttttaattagcgtttccatgattattaat

SEQ ID NO: 260900 - DNA, 201 bp, Homo sapiens
gctgctggattcggtttgtcagtatttcattgaggatttttgcatcaaagttcatcagagatattggtctaaaattctcttttttggttgtgtctctgccmggctttggtatcaggatgatgctggcctcataaaatgagttagggaggattccctctttttctattgattggaacagtttcagaaggaatggtaccagtt

SEQ ID NO: 260901 - DNA, 201 bp, Homo sapiens
cagtttccatgtagttgagcagttttgagtgagattcttaatcctgagttctagtttgattgcactgtggtcttagagacagtttgttataatttctgttmttttacatttgctgaggagagctttacttccaagtatgtggtcaattttggaataggtgtggtgtggtgctgaaaaaaatgtatattctgttgatttggg

SEQ ID NO: 260902 - DNA, 201 bp, Homo sapiens
ctgccttgctagattggggaagttctcctggataatatcctgcagagtgttttccaccttggttccattctcctcgtcactttcaggtacaccaatcagaygtagatttggtcttttcacatagtcccatatttcttggaggctttgttcatttctttttattcttttttctctaaacttcccttctcacttcatttcatt

SEQ ID NO: 260903 - DNA, 201 bp, Homo sapiens
cagtctgcccctgctggggggtgcctcccagttaggctgctcgggggtcaggggtcagggacccactagaggaggcagtctgcccgttctcagatctctagctgcgagctgggagaaccactgctctcttcaaagctgtcagacagggacatttaagtctgaagaggttactgctgtctttttgtttgtctgtgccctgcc

SEQ ID NO: 260904 - DNA, 201 bp, Homo sapiens
agctgggagaaccactgctctcttcaaagctgtcagacagggacatttaagtctgaagaggttactgctgtctttttgtttgtctgtgccctgcccccagmggtggagcctacagaggcaggcaggcctccttgagctgtggtgggctccaccgagttcgagcttcctggctgctttgtttacctaagcaagcctgggcaa

SEQ ID NO: 260905 - DNA, 201 bp, Homo sapiens
atcactcttctaccttcctcgtcatcccccctttacttattctttctgataataatttagagataatataaattgtaactgtatggtgcatctattagtaytaaataaaaattgttagctaatattttcattataactgtatactgaaagcaaagctgaaactttgcatattaagttgatatattatacttgctgtatatc

SEQ ID NO: 260906 - DNA, 201 bp, Homo sapiens
tgtgctagcagtcagccagactccgtgggcgtaggaccctccgagccaggtgcgggatataatctcctggtgcgccgttttttaagcccgtcggaaaagcrcagtattcgggtgggattgacccgattttccaggtgccgtctgtcacccctttctttgactaggaaagggaactccctgaccccttgcacttcccgagtg

SEQ ID NO: 260907 - DNA, 201 bp, Homo sapiens
ttttgttttgcaatgttttcattactgtgtctggtttattacacttttatcatatagttcccctatattggaacttttctcaatgtggagagacagtatgmtagttgtttgtccttttcagaatgcgtaccttttttactgtcatctcttagaacaaacaggttcatcagtatacttctctgtataaattgtggcataatg

SEQ ID NO: 260908 - DNA, 201 bp, Homo sapiens
ccagactccgtgggcgtaggaccctccgagccaggtgcgggatataatctcctggtgcgccgttttttaagcccgtcggaaaagcgcagtattcgggtggkattgacccgattttccaggtgccgtctgtcacccctttctttgactaggaaagggaactccctgaccccttgcacttcccgagtgaggcaatgcctcgcc

SEQ ID NO: 260909 - DNA, 201 bp, Homo sapiens
atattttttcagtgataaacatatacattttgtttagcactaaatacttcagatattcggtattctatattttagagctatattttagaacagtgataaayatatctatgtatgtatctatatcctaaatctatatttttatcatttcatattattatatatgaagaagatggccgataagagtctttaaaatcccagctt

SEQ ID NO: 260910 - DNA, 201 bp, Homo sapiens
ccaggtgccgtctgtcacccctttctttgactaggaaagggaactccctgaccccttgcacttcccgagtgaggcaatgcctcgccctgcttcggctcgcrcatggtgcgcgcacccactgacctgcgcccactctctggcactccctagtgagatgaacccggtacctcagatggaaatgcggaaatcacctgtcttctg

SEQ ID NO: 260911 - DNA, 201 bp, Homo sapiens
aatttagcccaagcccatttaatttttatatctgctgttccccatactcatattacacactacatcgtttctttcctataataatgcaaccatctactaayggtttttctgtctacaactttactcttttcgttagaattcatgattcatgttgcaggcgcacaaaatctgattgaaaatgttataaaatgcatatttaca

SEQ ID NO: 260912 - DNA, 201 bp, Homo sapiens
acaaagcaattcacagaagggagatgaatccgtgggggaagtatcatagaggagatgagccaggctttaaagatgaatcagaattaatcaagctatcaagraaagtaagacattcaagtcaagagtggatagaatgttaaaagtcccaaaggcattgaaatactgctgctaagggaggagagtgtaactacattcccacaa

SEQ ID NO: 260913 - DNA, 201 bp, Homo sapiens
ccacatttcctgttgtcttaattttttctttttatctgtattatctttaatcttttttaaaatacagacttcctgcatggactgcatgctgcttttatttytattctgtctgtttaaatgaagaaactatttaaaaactatgtgataaaaaaatatttgtgatgagcagatcttagatcacatacacaaaccttgacgtgc

SEQ ID NO: 260914 - DNA, 201 bp, Homo sapiens
aaggctaagccacggggagcctgtaaatagccataagaggacacaggaagcgatctctgatggacacagaatagcagacctgcaaagagggatcacatagmagtgaccacatgactctgcattgggtctgtaagtaggtcctgctttctgctcttggagctgctgggtatcaaaagttgttcaaattctggtgacacatct

SEQ ID NO: 260915 - DNA, 201 bp, Homo sapiens
gtggttgaagaatgggatgttcgaaatcaaaatttccattatggtaccaattttgataatgataatgtccctagtgtacctttgagaatggatgattgcasaggaaaggatgaatagatcctcatttcagtgttcaagaagatatatttttacccaagtagtgaatgaaatatgttgttcttacagaccctaaaattttga

SEQ ID NO: 260916 - DNA, 201 bp, Homo sapiens
tttaagctaataagctcatagaactttcctgggaattaggatgaaataatttcttattatcttgacaactctgactaagggttatgcgtttatggatttawgataaaaataaagtttctcttctcttccactcttaacagaaaccaggagataaaagaacttggtgagctttctccacattgggacaatctgcgaaaaaat

SEQ ID NO: 260917 - DNA, 201 bp, Homo sapiens
acatgagggtaaagctgagaatcagaaaactagctacaacatttataacacagattgtgctctggaagaaatcaacactaggttttggcagacttctttarcaaactgcactgttggactctccatactgttccaaagccacagactggaaaagcaatcagtatcacatgttaacagataccttgtactagaaaaggataa

SEQ ID NO: 260918 - DNA, 201 bp, Homo sapiens
gaaatttccatgagacatcatgcctgtgtattctaacacactctctttatgaggtgggaatggggaaaggatggccaggtgcttgatttacatttaggatycttatagtctgtttaaaatggcttattaaaacatttccatgtctataatgaaacaaaattattttgataaatcatgctctgttctggagtctcagcgttc

SEQ ID NO: 260919 - DNA, 201 bp, Homo sapiens
actttggacatggggttgccctaactcagggctttgcaaatgttttatgttgatcctaggaaatgttaaataaatgtggtgtgttggaactacaatttttsaaaaattatgaaatacaaaaatttcgagtgcaatgtatacactaagggtaaatatcatttcataaggtttttgttacagaggggtgtgtgtgtatgactg

SEQ ID NO: 260920 - DNA, 201 bp, Homo sapiens
tgatgatgtatgatacatatccattattaaataattaccatagtcaaactaattactacttcctcacctcagatatttatcactttctctctctctctctstgtgtgtgtgtgtgtgtgtgtgtgtgtgtgtgtgtgtgtgtgtggtgagaacatctacaatctactctgttagcaaatttcaaatacataataaagtatt

SEQ ID NO: 260921 - DNA, 201 bp, Homo sapiens
ctttacttatcaataaaatggggaataataagcgtgtgtattacgtagggtggttgtaaggacaaaatgagataattgttgtcccattttatctacaaacrtgttcaaacacaccctaaactaaaacaatctttctgcatgttcattcacactccttttctcttccttttttttgccacctgttttatatggtctaattac

SEQ ID NO: 260922 - DNA, 201 bp, Homo sapiens
atgtattgtgtaggcagttatagaaggtaggtcattggttcaaggcctagattgaagtaaaatgtgcttaatcatatgaattcctatttgtgagactaggwaggcagcaggagtcagtgtagtcaagatgctttagtttgacttccagtactagaagactgagctaattactccttcctagagaggagacacttcagctga

SEQ ID NO: 260923 - DNA, 201 bp, Homo sapiens
tgtttctcttcaggccctgactgatacagcaaataggacttgcttttagccagtgaatatattggtttgttacatagcattttgctgacagagatactgamaaactttcactctttctttcttattgactatgtcttatttatttttgcatttctgggtctagagcaatccccaacacattgtatccctgtaagatgctgt

SEQ ID NO: 260924 - DNA, 201 bp, Homo sapiens
aggccataaaagagaaggaggccatgaccagcaaggctgaattctctcaccaccagataggcagcatctcctctccaacagacaagggatagaaggagtcygcttagggtctgctgctgagtgtcccctcaagcaaatatttgattattcataaattatgtattagtaacacagaagagactgctcaatttctcaccctaa

SEQ ID NO: 260925 - DNA, 201 bp, Homo sapiens
tagtttttgtggtttctaataattctgaaattctgtggaacactgtgatttaatttcaaaattactatagtgataggttaagggctaaatctgcctacttytattcaaatcaattgttaaaaaagaaacttctgatcctttatattctgatccattctagcaaactgcaaaactagaaagacaattcttagtatttagaca

SEQ ID NO: 260926 - DNA, 201 bp, Homo sapiens
aagggctaaatctgcctacttttattcaaatcaattgttaaaaaagaaacttctgatcctttatattctgatccattctagcaaactgcaaaactagaaaracaattcttagtatttagacagacacaaaacccatttttaattgatctacatttctgcatcaagcggcatttcagcatccaaattatccaattaattccc

SEQ ID NO: 260927 - DNA, 201 bp, Homo sapiens
atgttcattgcagtattattcacaatagtcaagatatgaaagcaacctaagtgatcatcaatgaatgaatggtaaagaaaatgtatatatacacaatgaartattatactattcagccttaaaaagtaggaaatcctgtcatttgcaatagcatggatgaacctggaggataatatgctaagtgaaataagtcagacacag

SEQ ID NO: 260928 - DNA, 201 bp, Homo sapiens
ttctagaaatgtttaataagcagaatgggcactacacaaagaggtaacggatatgcagaaagttttaaggagtaaaaaagcaaattttgatataattttascatgaatagttcaagaaaatagaatagtaccagttctggattttgtgccttcattgtttgcctgtgaatatgtgagaatatccataatctttatacacag

SEQ ID NO: 260929 - DNA, 201 bp, Homo sapiens
caaaagagaactgatctttctgggaaaatcaaagaatggcctacaaaggacttcaacttcctgaacaaaatgtatgtgctaattttcgtcgatcttcttcytatattcatgcctgacaagattgtcatagtattctattgacagaaaaatgatgattttgaagtctatttctttcccataatttcttttgttgatagtgtt

SEQ ID NO: 260930 - DNA, 201 bp, Homo sapiens
aattttcgtcgatcttcttcctatattcatgcctgacaagattgtcatagtattctattgacagaaaaatgatgattttgaagtctatttctttcccatamtttcttttgttgatagtgtttgttttccagtcatagcaacttgagaccctgtgagtgtggaggccatagtacagagcagccatcagctttatccacacct

SEQ ID NO: 260931 - DNA, 201 bp, Homo sapiens
gtggtagaatggctgaagagaagtaatctactcttggaaatcaggagaatatgattgactttgtgtgtgtgtgtgtgtgtgtgtgtgtgtgtgtgtgtgtgtttggggtgggaatgggtagagagacttggtaggaagagaaggataatatgcagaatttttactgatcaattaagttcatggcttcagtcattcactgag

SEQ ID NO: 260932 - DNA, 201 bp, Homo sapiens
ctgttaatttattattgaagaaagaaaagattttaaaaatgttgtagcctatgcatacactgtttaccaagtctacggtagtatgtggtaatgttctaggmcttcacattcacccaccactcactcactgactcatccagagcaccttcttctagctctgaaggcttctttcatggtaaatgccctttacaggtgtaccat

SEQ ID NO: 260933 - DNA, 201 bp, Homo sapiens
ggccgggcgcggtggctcacgcctgtaatcccagcactttgggaggccgaggcgggcggatcacgaggtcaggagatcgagaccatcctggctaacacggygaaaccccgtctctactaaaaatacaaaaaattagccgggcgtggtagcgggcgcctgtagtcccagctactcgggaggctgaggcaggagaatggcgtg

SEQ ID NO: 260934 - DNA, 201 bp, Homo sapiens
gaggcaggagaatcacttgaacccgggaggcggaggttgcagtgagccaagatcatgccactggactccagcctgggcaacaacagtgaaactccatctcaaaaaaaaaaaaaaaaaaagagagagagagagagagaaacacagagacagagagagggaaaggagggggaggaacgggtgcttttctttcttaaatctcat

SEQ ID NO: 260935 - DNA, 201 bp, Homo sapiens
aggtttggaataaaatattactttccttaagtctcattaaaaattttgtactgcctctgactaaaggagagagagacacaaaaaacccttccaaaagtcartgaatccaggagctggttttttgaaaagattaacaaaatagatggaccaccagccagactaataaagaacaaaagagaggagaatcaaataggcacaata

SEQ ID NO: 260936 - DNA, 201 bp, Homo sapiens
aggaactgataccattccttctgaaacgattccaaacaatagaaaaagaggactcctccctaactcattttatgaggccagcatcatcctgatacaaaaayctggcagagacacaacaaaaaaagaaaatttcaggccaatatccctgatgaatattgatgcgaaaatcctcaataaaatgctggcaaactgaatccagca

SEQ ID NO: 260937 - DNA, 201 bp, Homo sapiens
tatatttagaaaaccccatcgacttagccccaaatctccttaagctgataagcaacttcagcaaagtctcagaatacaaaatcaatgttcaaaaatcacargcattcctatacaccaataatagacaaacagagagccaaatcttgagtgaactcctattcacaattgctacaaagagaataaaatacctaggaatacaat

SEQ ID NO: 260938 - DNA, 201 bp, Homo sapiens
ttgttgatgggtgcagcaaaccaccatggaacgtgtatacctatgtatcaaacctgcatgttctgcacatgtatcccagaacttaaagtataataataaawaataataataataataataaagtttgttctacctcatgtagcaccatagattttaattgactttcacaataccacacaattgagctaaatattgagataa

SEQ ID NO: 260939 - DNA, 201 bp, Homo sapiens
tttttaaaaagtattttattcaaaactttttgaaaccatgtacatagccttatgttttgcaaataaaataatatcattccttattttgattgttctcaaawttttttttttttttttacattttttcctagtgtgccctggtatgtgaatgtacagccccggaaagtgtgagcggaaaagataacttaccttttttgaatt

SEQ ID NO: 260940 - DNA, 201 bp, Homo sapiens
atgctcctgtagtcccagctacttgggaggatgagacaggaagatcactgagatcacactattaagctccggccttggtgacagaatgagaccctgtctcaaaaaaaaaaaaaaagaaaacaataaactaaaaattagaaggattcgttttgagatcaacaaaggaagacttttatattttgtgacataattaaaaataca

SEQ ID NO: 260941 - DNA, 201 bp, Homo sapiens
cgttccctcctttatccccagtgcctgaaacagtctaagtcagaaataaatgaataaatgaagtcaattttactttaaagaagtaaagctaaaaattatcycatagaagacagaatatgtggctgcgtataactccataacaattggtggatcaataaataagatggcatgtagtgaagagtgtaggactgtggaagaaaa

SEQ ID NO: 260942 - DNA, 201 bp, Homo sapiens
atgtcaggtggacgcggtggctcacgcctgtaatcccagcactttgggaggccaaggcaggtggatcacaaggtcaggagatcgagaccatcctggctaayacagtgaaacttcatctctactaaaaatacaaaaacaaaattatccaggcgtggtggtgggcgactgtagtcccagctactcgggaggctgaggcggaag

SEQ ID NO: 260943 - DNA, 201 bp, Homo sapiens
ctaatattaaacttcatgagacaaaactatttgtctattttcgttccctcctttatccccagtgcctgaaacagtctaagtcagaaataaatgaataaatkaagtcaattttactttaaagaagtaaagctaaaaattatcccatagaagacagaatatgtggctgcgtataactccataacaattggtggatcaataaat

SEQ ID NO: 260944 - DNA, 201 bp, Homo sapiens
tcaggtggacgcggtggctcacgcctgtaatcccagcactttgggaggccaaggcaggtggatcacaaggtcaggagatcgagaccatcctggctaatacrgtgaaacttcatctctactaaaaatacaaaaacaaaattatccaggcgtggtggtgggcgactgtagtcccagctactcgggaggctgaggcggaagaat

SEQ ID NO: 260945 - DNA, 201 bp, Homo sapiens
tataaatgacaagaatgagttcagtgtttccatctcttttcaggtggtgcatgttagaaatcagtgattatcattattaattaataaaccattaatagtaktttatttaaccatcaaactttaatgtatcacactattgaaaagcgtgttcttggttgttttctccatgccaatcagttccatagttagtattactttgga

SEQ ID NO: 260946 - DNA, 201 bp, Homo sapiens
tgtctacattttttaaaaaacagctttactgaagtaaaattgacctagaaaaacttgcatatatttttacaacttgatgaatttggacgtaggcatacccscatgaaactatcaccacaattaaggtaacagacaaatccatcaagtctaaaaggtttttttgtggcctttttttggttgttgatgctgttttaagaacac

SEQ ID NO: 260947 - DNA, 201 bp, Homo sapiens
acagacacaaaacccatttttaattgatctacatttctgcatcaagcggcatttcagcatccaaattatccaattaattcccttcatgttacaaatataarccaaatttaaaattttagtcttctttcttaagctaggcaaacatttgctatttcatattatgttaaatgtgtttatgttacataaacacaatggatgatc

SEQ ID NO: 260948 - DNA, 201 bp, Homo sapiens
ctataaatgacaagaatgagttcagtgtttccatctcttttcaggtggtgcatgttagaaatcagtgattatcattattaattaataaaccattaatagtrttttatttaaccatcaaactttaatgtatcacactattgaaaagcgtgttcttggttgttttctccatgccaatcagttccatagttagtattactttgg

SEQ ID NO: 260949 - DNA, 201 bp, Homo sapiens
aggtacctgtgaaaattaatattcaaaagattttgttcagttatctgattggctagatgtgatttaaaaccattgtcctgatcttaataagaaggagatarataattctcattctttagaagtaacaaatttttatagactccttgatattaatctatgattaaactttttcaaagcaacaccttatagcttggttaccta

SEQ ID NO: 260950 - DNA, 201 bp, Homo sapiens
tcaaacatctgcttaatttcacttttgtactatttttaagaatgtaatgaaagttatctaattttaaagtgcatataagaatcagataaacaataggaaawaacttccctatttgacaatgacctgctttactttatgaattggggatagatgattatatttaccatagcttattctgcgtaagtttgaagtccatctgta

SEQ ID NO: 260951 - DNA, 201 bp, Homo sapiens
tgtttttaaggtaaggcactagaaatttaatctaaaacactaaaggcttaacttcaaatccctagtattctggtgatcttcttcttcttttggttttgtcygtatatgaggaccgtgccagagtgtgagtgttggcctgtatttgtgtgtatgtatgcatgtatttaaagaaaataagatgagttcttttctttaataact

SEQ ID NO: 260952 - DNA, 201 bp, Homo sapiens
accactttatgattacttatcctgatgccctaggatatgacatagctatcaaagtcctttgagttaactcaaacatctgcttaatttcacttttgtactawttttaagaatgtaatgaaagttatctaattttaaagtgcatataagaatcagataaacaataggaaataacttccctatttgacaatgacctgctttact

SEQ ID NO: 260953 - DNA, 201 bp, Homo sapiens
ttaaccactttatgattacttatcctgatgccctaggatatgacatagctatcaaagtcctttgagttaactcaaacatctgcttaatttcacttttgtastatttttaagaatgtaatgaaagttatctaattttaaagtgcatataagaatcagataaacaataggaaataacttccctatttgacaatgacctgcttt

SEQ ID NO: 260954 - DNA, 201 bp, Homo sapiens
ctatcttcaatctgtgataacgttaccttcttgtgagaacttctctaactttcctatttaaaattctctctgtctctgtctcacacacatatgaatctttycctgccttacttttcttcatggtgcttttatcagatgttattatttttctattcctgctcgtccaactcaaaaataaacattgttgaaatctctatctga

SEQ ID NO: 260955 - DNA, 201 bp, Homo sapiens
gggtggtagaatggctgaagagaagtaatctactcttggaaatcaggagaatatgattgactttgtgtgtgtgtgtgtgtgtgtgtgtgtgtgtgtgtgtgtgtttggggtgggaatgggtagagagacttggtaggaagagaaggataatatgcagaatttttactgatcaattaagttcatggcttcagtcattcactg

SEQ ID NO: 260956 - DNA, 201 bp, Homo sapiens
ttggctgtgggtttgtcgtaaacagttcttattattttgagatacattccataaataactagtttattgagagtttttagcatgaaggatgttgagttttktcaaagtccttttctgcatctattaagataatcatgtgatttttgtcattggttctgtttatgtgatggattacacttattgaattatgtatgttgaacc

SEQ ID NO: 260957 - DNA, 201 bp, Homo sapiens
tttggatttataggtttactttagctgctccaatgaataaacaccaaatttttaatttcttacttctttgagtccaacatgaatatttctgattagtgggmagtttttctccatggaatcattcagggaacccaggctctttccaccttttgattccaccatactctggtgcctctgagttctccatctcagatctatctg

SEQ ID NO: 260958 - DNA, 201 bp, Homo sapiens
ggtccttcacatcccttgtaacttggattcctaggtattttattctctttgaagcaattgtgaatgggagttcactcataatttggctctctgtctgtctrttattggtgtataggaatgcttgtgatttttgcacattgattttgtatcttgagactttgctgaagttgcttatcagcttaagggtatttggggctcaga

SEQ ID NO: 260959 - DNA, 201 bp, Homo sapiens
aatccaggctcatgtataggtatctgcatcttgtagggtcagccagcaggagcgcagttaagggtaggattcagatgtcctcatcttttaagacctggctrttaatttcagtcaatttcatataaacacctcttatttttgcctagtggctatcttagtcaccctactgctatgacaaagtgccttagcttggttaattta

SEQ ID NO: 260960 - DNA, 201 bp, Homo sapiens
aattattttctaaaccagtttctgttcacatgtaacaagttatttttacttccagtattctctgtatcattgagatgacaatgacgaattatgggtgaacytgagtaatttgtcaggaattgtacctgatgccggagctctaaacttctgctttgatactttatgattcatttatgccatcattggatgggtatttgtgct

SEQ ID NO: 260961 - DNA, 201 bp, Homo sapiens
taatatttttgggttgaaaatcttagttgatggatcattaacaccacttcatttaaaaattcaacaagctaggaaacgaaagagtaaagatatagactccrtcttgtgcctctgtcttgggtcttcagtttagaaacctcttaaaggatgagccgctgtctttctactgcttgtctgctacttttgagtccttcacagtgc

SEQ ID NO: 260962 - DNA, 201 bp, Homo sapiens
tctagattttctagtttatttgtgtagaggtgtttatagtattctctgatagtgtttgtatttctgtgggataggtgttgatatcccctttatcatttttytattgcatctatttgattcttctcttttttcttctttattagtcttgctagcgatctatcaattttgttgatcttttcaaaaaaccagctcctggattga

SEQ ID NO: 260963 - DNA, 201 bp, Homo sapiens
tttattaaatttgagatggtacatacacaaagtctcagggttgtgatacactttaaatcctttgggggctcccttcaattggcttaagcattaacaccttytgaattcaagtttgaaacatagcagtttttgaattggcggtgaagtgttctcataacactatacttttttaatattatggtttagttccaaaaaaattca

SEQ ID NO: 260964 - DNA, 201 bp, Homo sapiens
atttacctagccgctctaattttcagtttcctcagctgtagaaaagagactaactactatatgcacatggttattgtgaggtttaaaataaactattgataaaaaaaatgtagttcacagattcatatgcctttaaaatgtggaaaccatgcctaacatttatgtaaagaaccatatacatggtaaaacaatgtatcagag

SEQ ID NO: 260965 - DNA, 201 bp, Homo sapiens
caaaagtaaccttgattatcaaaagggataacacctggaaaatcttatggtgtccactaaccaaacaaatttgacatagaatattcaatagagcctggtgwtttccttctacctacgaaactggacaacatcctccgtccaagtccagggttagaggaatttaaaggggtggtatccagaaatgttctctatttctgaaat

SEQ ID NO: 260966 - DNA, 201 bp, Homo sapiens
ctctcagctgtttatgcactaagcagagagaaatcagtgtgatggaatcccagcatagttagtgtatgggtcagggttccaaagagaaacagaatagaacmcacacacacacacacacacacacaatttattagaaagaattggtttacatcattatgcaagctgacaagtcccaagatttgcagggtgagtaggctagct

SEQ ID NO: 260967 - DNA, 201 bp, Homo sapiens
aggccgacccaaattagagagggcagtgggccttattgaggctaccgattcaaatgttaatctccctcaaaaatctcctcatggaaacactcagtataccrttgaccaaatatctgggcaccctgtggtccaaccaagttgatatgtacaattaaccatcacaataggaaatgccatatgaagataaatttttcaaatctt

SEQ ID NO: 260968 - DNA, 201 bp, Homo sapiens
gcaactatttaattacaacattagtgtcagattccttcttttttttttttttttttttttttttgagacagagtcttggtctgttgcccaggctggagtgyagtggcacaatctcagctcactgcaagctccgcctcctgggttcacaccattctcccgcctcagcctcccgagtagctgggactacaggcgcccaccacc

SEQ ID NO: 260969 - DNA, 201 bp, Homo sapiens
caatcccagcactttgggaggctgagacgggtggatcacctgaggtcaggagttcgagtccagcctgactaacacggtgaaaccccatctctactaaaaayacgaagattagccaggcgtgatggcaggcgcctgtagtcccagctacatggtaggctgaggcaggagaatcactggaaccagggaggtggaggttgcagt

SEQ ID NO: 260970 - DNA, 201 bp, Homo sapiens
agccgctaatcaacccctttataaatgtatgttaaaacattgagttaaacagcagaatgtgacaagtggggcccgttcaagaaggacatctcagaagatcmagactgtattacaaatcctggggttaccaaggagagccaatggggctgaaagtgtctgtggtgagaaacaactctgctatgtggaatctttaggaaaagc

SEQ ID NO: 260971 - DNA, 201 bp, Homo sapiens
ctgtgtcttcagattgctatatggatgcttgtacataggactacggaaacaaatgtgggggcagggaaggagtactattaaaatttcacaaaaatcaatayttttaatgtttcatgttctaatatgcacaaactcaattaaattgtatcataattttaacattcttgttatgccttcttatggataattgggtttggttgt

SEQ ID NO: 260972 - DNA, 201 bp, Homo sapiens
ttgtatgtttgcccgaaatatccaaaaatcctgtcactctctgataactatatactcagttttcctggctcaactcaaacaccaattattctgtgaagttkccaaaatttctctccctttcccaagcacagaatggttttggtcttccttttttaaaatcaccttataccttttgcagtacgtaatagattgtatgaagac

SEQ ID NO: 260973 - DNA, 201 bp, Homo sapiens
catgaaaagttcagccaaaacaccagcatgaggaaaaaccttagaattgaggtactgccttctaggattgggaaatatgccaaaccaatcactgatgtagratgctatatttatcatacccaggactcaacagttctgggactaagggtaggcccttcctataatcagtagcagtgatccacttgtggtatttgcactacc

SEQ ID NO: 260974 - DNA, 201 bp, Homo sapiens
aaagtatgcaattctatgaaggaaaaaaaacaaggaatagataaaataaattcaaactaaaataaataatgtttttaaaggcctgaatgtggacagtgttyacgtatctctcatagctcagaaatctattagcgttcaaacacccatcactttctccattccattgagattgatagaccttgtttaataagtcattattat

SEQ ID NO: 260975 - DNA, 201 bp, Homo sapiens
atttttattctaattggctctaggcatcaagtaagaatggtggcctaaatgagcattatatatttcctgtgctttaagaaatggggctgagttttttggtaggatatacttatacccaatgatagctaattaataaatggttttgggctctgcaaccaaacacttatagaaataagtaaataaatttttaaagtagaaatc

SEQ ID NO: 260976 - DNA, 201 bp, Homo sapiens
aacctaagaatttaaaagaatggggtgttttataatattgcatttgttaaatagttaaataatggcttttattgtaaatgttagaggctatactcacagcrtatttgagaaattctcatagcttataattcctactgttctttcaacctcaatatactataccaaaatgttctcttatattcaaagaaaaataaaaactat

SEQ ID NO: 260977 - DNA, 201 bp, Homo sapiens
tatattgagttacaaatatgaatcataaattcatagttcacaaactataagtaattcaaggaattataaataagacattgaccctctgaagcaaaggaatmctgtagggaactcagggaaggaagccaaaaatgagaacaagaaaatgaacagagtggaaagaaaagggaattgtggatatgacagaagactgtggaagga

SEQ ID NO: 260978 - DNA, 201 bp, Homo sapiens
gaggaaaacaatcaattgcagttaattctaaatttaaaggaatacaactgccccagctaagaatgaacatggtactttaagtgtataccattcttcatcarctgaagagaccaggaaataaatcacatggtatacatagatcaatctattttgtagtagttacaagtgaaattcaaggctgaaagggccaaaggagataaa

SEQ ID NO: 260979 - DNA, 201 bp, Homo sapiens
aatcaaaatcacaatgcaacaccacctaactcctggaagaatggcctgttaattttaatgcaattttggaaatctgacgacatttgcaagatgccaacctygttttctcaccttgctgataaaatatttcttaattcaaggagctagagctggtttatattttacatttagcattgaaatgtttccaaatatatattttta

SEQ ID NO: 260980 - DNA, 201 bp, Homo sapiens
tcctgccatgtcataaccagcaaatattatcagttctctactgtgcagggtccaacctctgcactttgggttaccaggtgtcatcttctattagtccatgkattaggcatttttactcttgttggtagttctatccatagactagaacataagatagaagaagatgcacttaagaaagactcttgctcacttgctattctt

SEQ ID NO: 260981 - DNA, 201 bp, Homo sapiens
aatggctgttccttgtgttccgtttaggttttatagctgcattcagtgtgcacaatgctgtagagtgtgcatactccatgttacctgcaactggaacccartgggcagatcatgatggccatccatttattattattatttttaaataggtgtttgaggagcagatggtgtttggttatatgaataagtttgttagtggtg

SEQ ID NO: 260982 - DNA, 201 bp, Homo sapiens
caaaactgtttgaaagccatttgtacaagcctgacttcagaaagaagctcaggggctttccagaaggggttaagcccttgtttaaaactcatcagttgccygcattttctaggatgaagcccagattccccagcagagcagaacatgattctccttcataaatcttgccccaggactaaccactccaaggacattctgaac

SEQ ID NO: 260983 - DNA, 201 bp, Homo sapiens
gtcacttttaaagtgttacatttttatgttttacatttaggtatatgaactactttaagttaactgcttttgtttaatttgtaaagtttaagcagagtttwttttttttccaaatggatgtttaattgttccaataccatctgttgaaaagactacttttagttcattccattgcctgtaactttgtcaaaaatcaattgg

SEQ ID NO: 260984 - DNA, 201 bp, Homo sapiens
gggaatatattgggagggaaaagatgaaatcatgatgaaaaaggttaggagagcaaacactggtaatgaagagggaaccaaagcaacttttgtgaataagrtgggttgtaaaattagccttgtaaaaggtgctaagaaaatttgaataccttaagaaggaacttttatgagagtccttgtgtagcatgatcaagggtttag

SEQ ID NO: 260985 - DNA, 201 bp, Homo sapiens
tgtaaatagccataagaggacacaggaagcgatctctgatggacacagaatagcagacctgcaaagagggatcacatagcagtgaccacatgactctgcaytgggtctgtaagtaggtcctgctttctgctcttggagctgctgggtatcaaaagttgttcaaattctggtgacacatctgtatctttagagaatcatttt

SEQ ID NO: 260986 - DNA, 201 bp, Homo sapiens
agctgaaatctgttaacccataacttccaattattgatccattcacctgcctggatcaaccatcaccttccttaggtcagcctgtcaaatattggaatacrgtttctgtgttctgcttaatttttaaactccctttaagatgtgaaagtcggtccaactcctgctcttcctgaaagatattgctaccatttctcaatgcag

SEQ ID NO: 260987 - DNA, 201 bp, Homo sapiens
gtagtctctgattcctctttctcatattctctatagccagtcagtcacagtatcttattagctctaccttaaaaataaaactaaaatcggatacatctccycttcctcctaatttctccaaactcatcttcatgatcctctctgccccctacagtttattttccatattgcagcccaagttgtgtctaaaacttgtcagtt

SEQ ID NO: 260988 - DNA, 201 bp, Homo sapiens
gctcttcctgaaagatattgctaccatttctcaatgcagtcttcattttaatactctttataagtaattacgagcaaaatcaaataccatgttctaaattyaatatgaagaacacagagtaaaataaggcaaatgtctgcctgttttccctttttccttccagttgtacagtgcttactaagtatcaagcacttttctaac

SEQ ID NO: 260989 - DNA, 201 bp, Homo sapiens
tttttttttatactttaagttctagggtacaagtgcacaatgtgcagttttcatacataggtatacatgtggcatgttggtttgctgcacccatcaactcrtcatttacattaggtatttctcctaattctatcccttcccgagccccctacccactaacaggccctggtgtgtgatgtttccctccctgtgtcttaagtg

SEQ ID NO: 260990 - DNA, 201 bp, Homo sapiens
atgtaacagtcctttctggaaagctattgctcaggcttgaattttgtatcctccaatctgaacatttagataatgatgcaataaaatctattatgggataytcctcaagattgttatacattaaggcagggaataagatatattttcataacttttgacttcgataaagtactttcctccttgttgcagcatagaaaagct

SEQ ID NO: 260991 - DNA, 201 bp, Homo sapiens
tttctataatagcaatgccaggcagctagtgtgctaagaagttgaagatacacataatagagagaagaatgttatgttgattacttaaaactgagaataayttttttattgtttattcactgtaaccactcctgggtctatctcagtcccaaactgtgggaaagaacttaatgagtagaaattttgtttgtttttttaaga

SEQ ID NO: 260992 - DNA, 201 bp, Homo sapiens
aagttatagttacaattttcttaattttgtcatccaaagatggagggaacttcaattagtcaggttaaaatatctttcaatatacctggtaggtataccayggtaggattacatgtaaaaatacagaccgtgattctgttcaatttttacataggtttacatgtcctggaaatagatcaaatttcaattaagaaaatttca

SEQ ID NO: 260993 - DNA, 201 bp, Homo sapiens
cagaaggaaccctggagatctgtaaatgagtgcctttaactctttatgagtaccaatctgtgtatgcatgcgaataagctacccatgtccacagaaataartattaggaataagcttaaaaacaattcctggtggtcacacaggcccgggaatagtttatctttccaccagtaaagtggtaagactttttaatacaacggg

SEQ ID NO: 260994 - DNA, 201 bp, Homo sapiens
tacatacacattagaaatgtattattacattcaaatcaagtgccctcaaactttaatatattctattttgaataatgagatattgtttcccaaacagaaakttttttaactccaaaatttagtgaataagtgaaggaaacactatggtaaatataggtagactgttggcttgatttatcaaggttcatacaattaaaaaga

SEQ ID NO: 260995 - DNA, 201 bp, Homo sapiens
aaggattaaatagtgaaattattttggaattcacattatcacattgaaggttctgagaaagtctgtaggatggctggcaaagtttttctgtaaagagccakaaagtaaataattctagcattgtgggccatatgatctcatcaccactcaacttggctactatagggcaaaataagccatagacaatatgcaaatcaggcc

SEQ ID NO: 260996 - DNA, 201 bp, Homo sapiens
atcaccattgtgaattgtagcttgaaaaatgagacagactctttccttaggaaattattttctaatctatttaaaaaggaaaggtaaaatgtgttactttytggtaccgttttataacccacagctgttttcttttttctgtttgtaggtttggagatgtctctttgcaagaaagtattaatcaggaaaacttcgaacttc

SEQ ID NO: 260997 - DNA, 201 bp, Homo sapiens
aataaaaaatttgagttagatgagctttcaatccctagtgttagttgcctgatgatttcctccatcttgtaagagatgagaggaaggaagtaatttttgcrttacttagaagacatgattaatgaattatataaggaaaagcttttggtctttatcgggtaattcctatgttcctggaagatagcccttctaggatcagat

SEQ ID NO: 260998 - DNA, 201 bp, Homo sapiens
ttatttgaattgttttaacatagaagctcatatttatggattacttgatatgtggtaaaaaaaaatattgactgcgttaactcatttaattcttacaacaytgtagaattaattctacaaaattaaaggatgaagaagtagagagttgtagtgacctgtgcacagcctgggttctaaccctggtggtctggctccagagcc

SEQ ID NO: 260999 - DNA, 201 bp, Homo sapiens
caggcagattgtggtaagggcaaaataaaggcataaaccaaaaactatggaagcgctgagcaagtataattcattgtaacaatggcatcaaaaacagcatmtcagaggaagaggcatttggaccaagtcttaaaagaatgagcaggatttcagttggtttaggaggaacatgagagaattcagaaaaacgaaatagaaaaa

SEQ ID NO: 261000 - DNA, 201 bp, Homo sapiens
ctcattttaaaattctaaatgaacacaagtctttaaacatctttattgccaccaaattatatgtaggtatcatgaagtattgagtcttactgcctctgggrctgtgctagatgaaactcagaggaggctcaggccatgctgagctggacagggaggattttttaggcaggctgtgcctctaattgcctacttatatagaca

SEQ ID NO: 261001 - DNA, 201 bp, Homo sapiens
agtatcaagccatgacaatacatggaagaaattcaaatgcatattattaaatgaaataatcaaatctaaaagggctacaaacgttatggttttaaatatcrggcattctggaaaaggcaaaactatggagataataaaaaatgagtgattgacaggatttgcagggtcaggagggatgaataggcatgacatagacaattt

SEQ ID NO: 261002 - DNA, 201 bp, Homo sapiens
gctaatattttacttcaaggaaatcagtttaatttacaagtgaatcagttgtaaagaaatttaggagcaatgatgctcaaatctcaatgtggcaagaattmtaaagcaatatttctacaataaaatctcttaaattccctcttgcaaattattacctatattcctcaataactccgtcatctgttttctccccatggtatt

SEQ ID NO: 261003 - DNA, 201 bp, Homo sapiens
atttagatgtagattttttttatttgtcatgcttccagttttgtaagatctcttgagtccatggcttaatgtcctcaataaattttggaacgtttttagtycgtattgtttccaataatgcaattatccttttctccttctctttttgttttgttccagttacccaaaataataaaccattgcattatattccctgttcct

SEQ ID NO: 261004 - DNA, 201 bp, Homo sapiens
attatttaccaagcacaatgctttgcattgaagatgcatatatgaatatgttgtgttccttctcatgaaaaacctcagaatctactgagagagaatcacayacagatacatgatgatagattaagtcttttagggtattaagtacgaactacttaatggaaacagaatttctgcttttggaaacagaaataagggagtgat

SEQ ID NO: 261005 - DNA, 201 bp, Homo sapiens
agattaagtcttttagggtattaagtacgaactacttaatggaaacagaatttctgcttttggaaacagaaataagggagtgattaggcaagtaggaggcstaagaaaagtatggggcactgtcaggggctacagggagaaagtgaactttaagctggtattattaccggataggtaagtttaagaaagaacaccctccac

SEQ ID NO: 261006 - DNA, 201 bp, Homo sapiens
tgttgtattatcttctagacatgctgttgaattcagtttactagtacttcattgaggattttttgcacctatgttcagcaggggtattggcctgtactttktgtgtgtgtgtgtgtgtgtgtgttcttgtctggttttggtattaggataattctgttcttataaaatgagctagggagaattccctctctttcaattttt

SEQ ID NO: 261007 - DNA, 201 bp, Homo sapiens
acaccctccacccacaggagacattgatgattcttatttttgaaaagttattgcttactctagaaatgtcaccatgttttgctagatgcctatgactgggwtgtattgacaataaatattaaaagtcgattactttatcaagttatgttctctgacaaagtaatgaccttaagaaaaactagaaaagtgactaaatatcca

SEQ ID NO: 261008 - DNA, 201 bp, Homo sapiens
atgcactattactgcctcacattttaaataaatggtaaaaatgatgcagactagtttttccctaaaatcctccctttcataatttaatttacactaccatttttttttttttttaaaaacaggatctcactgtatcacccaggctggagtacagtggcgtgataatgtctcactgcagccttgaactccctagctcaagtg

SEQ ID NO: 261009 - DNA, 201 bp, Homo sapiens
atggaagttctagtccatttataccattttaatgttgagttttattaaacatctcttaccagaattctctttatctctaaaaactgagtcaataacagtamccttatctggtggcttttgaacattaaattagctaatgtgcatatacaaagtgaatataaacaccagcctttaatctgtctctggagtcacctccttctc

SEQ ID NO: 261010 - DNA, 201 bp, Homo sapiens
tagttcaagaaaatagaatagtaccagttctggattttgtgccttcattgtttgcctgtgaatatgtgagaatatccataatctttatacacaggcaaatkagaaataggctaaactatttcttgtttagcctgtaggtctttgttaatgttcataccaataccagctgacctcttaatttcaagtccaacactgggagtg

SEQ ID NO: 261011 - DNA, 201 bp, Homo sapiens
cgtgcagatcacttgaggccaggaatttgagaccagcctgggcaacatcgcgaaaccccatttttactaaaaatacaaaaattagctgggcatgtgacggrcacctgtagtcctagctactcaggaggctgaggtgggaggatcacctaacccccgagaggttgaggcagcagggagccgtggtcacaccactacactcca

SEQ ID NO: 261012 - DNA, 201 bp, Homo sapiens
ataccagctgacctcttaatttcaagtccaacactgggagtgtatatgtcaaactatcttttaaaatacctacttagaatttatctttttttaatcataartgaaaatagataaattcagctttattctcgcattccatcactaaccaatactgaggaggaagaataacaaaaattatgttaagaggcagccaataaggaa

SEQ ID NO: 261013 - DNA, 201 bp, Homo sapiens
ttctattccttgatttatcctttccaaaattaatttatatgtttatgaagtagcaaaattagctttggcaaaaaaagtacatttgagaaaaaatgtacaawccactaaggaaatactctaatttagtactatctttacattaagtggtactccaggttcctggggtagctctattatagagaaagcacccactgaaaggtt

SEQ ID NO: 261014 - DNA, 201 bp, Homo sapiens
attagaacctctatctgccaaataccaaaatatattctttttcttacatggattcttttatttagagatgacaaaggccatttaactactaatagataaaytttcttataatcggaaatctctaaataatgttctaaaagtgagctattcatagaagaaagtagatggctttcccgtgtactttatgttgaataaatggat

SEQ ID NO: 261015 - DNA, 201 bp, Homo sapiens
ttggcaaaaaaagtacatttgagaaaaaatgtacaaaccactaaggaaatactctaatttagtactatctttacattaagtggtactccaggttcctgggrtagctctattatagagaaagcacccactgaaaggttgttctgtggtgtgatgcagggaaaacaccataaatctatctgggtattatgcctggagagagaa

SEQ ID NO: 261016 - DNA, 201 bp, Homo sapiens
tcagaaagtagggaactcaatgccagaaacttcagaaacacgtcatagatcacaacagatccattggagattatatgcataacctaatggaagatgaagaygcttgtaggaaacatttttctcaatgcataaagaaaattgtaactctagacatagaggagatgtataggaaagctcacactgctatactcatctatgaga

SEQ ID NO: 261017 - DNA, 201 bp, Homo sapiens
aacttgggaatgttaatcatgatggaaaagtgtgaaagggcctgttagtttaaggggggattgaaggctgagggaaacctatggaacgtgttcttatcccmgaaccctgactctatcctgatctcgatctggtttgctgccaaaacacctgacaatcctttgctctaccaacctgatgtaatttttgggagaccagataag

SEQ ID NO: 261018 - DNA, 201 bp, Homo sapiens
aggaaggaatgtgaaattcatgtgtgtaaggggtgcagagtttcagtctaggaagatgaaaaagttctgaaagtggatgctagtaatgggtgtatgacaawgtgaatatacttaatgctactgaaatatatatatatgtatatataaccaaaaatactccaagaatttctcacacaacaggaggccattctttaaaaatgt

SEQ ID NO: 261019 - DNA, 201 bp, Homo sapiens
acaggaggccattctttaaaaatgttggtgtgtgtttgctttcataataagtgttgataaagagaatagatgccttcaatttaaaatatcataatttgtgytcaattatggattaatattgtatgatggtcatcatttctttatgacagtgaaaataatggactaaataaaaaggtttataatacttcatttttgcttcat

SEQ ID NO: 261020 - DNA, 201 bp, Homo sapiens
ctttttagggtaaatgcagatagtgctgagagacataaaactttctgtgctgttctgaagagaaataatagaataactattccaaagttctacagtttatrtatatttatgtggtttcctaatgaatgaagattgtccttttatttgtagtacactcaaatacctttctaagcatctgctgtctgtatagcactacatgcc

SEQ ID NO: 261021 - DNA, 201 bp, Homo sapiens
ggcgacagagcaagactctgtctcaaacaaacaaacattaaaaaaataaacaaacaaacaaacaaaaaacaccctgacaggtctggagcaacaccactgarggaaaaaggaaaaaatctcatttactgctttttgaataggtcctcctgtttttattttttactggattctgtcatttacgttgtcacactttctgcaagg

SEQ ID NO: 261022 - DNA, 201 bp, Homo sapiens
gtgatctgcccgccttggcctcccaactagagtatacttacaaatttttttaaaacttaaataatcaaaatatgccatgtaaagtacatttttattgtaascctagaatttcaataacatttttgaattatgacattttaaaatatctgttcttaccagaaaactaatgctgttttccttaaaaattgtacaatgaattat

SEQ ID NO: 261023 - DNA, 201 bp, Homo sapiens
tattgtaagcctagaatttcaataacatttttgaattatgacattttaaaatatctgttcttaccagaaaactaatgctgttttccttaaaaattgtacartgaattatgaagtaacagagtaacatgggactcagagccaggatcttggcaagtccacagtttggtacttatttggcttcatggcctttgtcaagccatt

SEQ ID NO: 261024 - DNA, 201 bp, Homo sapiens
tggttagctcttctttttgataaagagggagcaacgcatacacatacagtagtttcatacattgtccttttggcagaaactgaagccaataaaaccatacrtgacaataccatttatttattatctgggcttttttttttttttttttttttttttgagacggggtcttactctgtcacccaggctggagtgcagtggcac

SEQ ID NO: 261025 - DNA, 201 bp, Homo sapiens
acatatcaacacacacgcacacacacacacacacacacacacacacactcttacagatcttgggttaattttaagataaaagtaaaaacatgttcaatgcktgcaaacactgattgctttaaatttttcatttgtgtttcattgctttatggataaaatacaataaagattttaaaagaaataaaaaacaactttgtggat

SEQ ID NO: 261026 - DNA, 201 bp, Homo sapiens
ctgaggcaggtgcatcatgaggtcaggagttcaagaccatcctggctaacacagtgaaaccctgcctctactaaaaatacaaaaatataattagccgggcrtgatggtgggcgcctgtagtcccagctactcgggaggctgaggcaggagaatgacgtgaacctaggaggcggagcttgcagtgagccgagatcgcaccac

SEQ ID NO: 261027 - DNA, 201 bp, Homo sapiens
gtttcagatagagtaaccgaccggccactcatgtaaaagtgaactactgcattgtggatgcagagaggctaacattgagaggcagtagtcatcctgacagraaatggggaaggtgagcactaagataaagataagtatcatgaacagaaagaattaaatttttgtaacagaattgttagaactggtgagatataatgatga

SEQ ID NO: 261028 - DNA, 201 bp, Homo sapiens
atggccttgagatgttttaatgttcttctatgaacatttataaggaggaattaagtactgaaggctgtgtttcagatagagtaaccgaccggccactcatrtaaaagtgaactactgcattgtggatgcagagaggctaacattgagaggcagtagtcatcctgacaggaaatggggaaggtgagcactaagataaagata

SEQ ID NO: 261029 - DNA, 201 bp, Homo sapiens
ggatcccttgagccccggagttggaggcaaaaatgagccatgattgtgccactatactccagcctgggtgacagaaagagaccctgtctctaaaaattttaaagagaaaaaaaagaaagaagtacgttatatggcatcatgttttttaaaaggggaacgttgttacacagtgaagaaaaatggctggctctcatctccaca

SEQ ID NO: 261030 - DNA, 201 bp, Homo sapiens
actctgggactgagaagttttcttactactgtaaggaggaataagggtagatattttcttattctctattataaataggagactttttgcataaaaagggraaaatcatatcaggcaaataagctgtccataacctataacatagtagacatccgataaaccaggaatgggagaactagaggcaaaaccttatactgttac

SEQ ID NO: 261031 - DNA, 201 bp, Homo sapiens
acaacgaagaattgacttttctagaaaaaataatgttagaaaaccaattctgaaatggctaggttattatttttcccagttttgtgctttgccaaatttgkggttttctctccctatgaaccagacagattatagatttatcgtagcctcttgatttctggtagatggcttttttaaaaattctgatgtaatttattttct

SEQ ID NO: 261032 - DNA, 201 bp, Homo sapiens
gccaaacttatttttttcacaattctgggggctggaagtctgaaatcaaaatgtcatcagggccatgcttccccttaaacctatggagtaatccttcctcrtcccttcctggtatctgctggtttgctggcaatcattggcctgctaatgtaacacacctgtcctctatcttgctcatggtgttctcctgccctctatgta

SEQ ID NO: 261033 - DNA, 201 bp, Homo sapiens
gtgggaggccagttctagtgaatacataggtaaggaccaagtatgaattcaaacacttgatctaatccaacccatgtcaataaggaacaccaaagtttccyagatatggcccaaatcaactttcacatcctcaaggagtgtgacttaaagcccagggcttaatggctaattaaagtcactgaggtttctgagccatgtgtg

SEQ ID NO: 261034 - DNA, 201 bp, Homo sapiens
gacatctaaattctcattctgacactctgttttgtagcccttgtcacaacatagtagttacaggtttagaaaggttaaaacacaagagcaattgtacaccrttagtgaaaatgtaaactggtatagccactatggtaaaaacaaatatggaggttcctaaaaaaactaaaagtaaagctacgatagggtccaacattcaca

SEQ ID NO: 261035 - DNA, 201 bp, Homo sapiens
gggtaattgaggaatcaggactacctcagggctttgtttatcagatgcttttgctttctgtaaaatcaaaagccaccagggttgggagagagagaggtccyctgatgttgctgtctgtgtgcttgaaatttgtcagtcagtcttcttgttgagcagatggcatccaaatgtatcttaagtcacttggggaccacgccatgg

SEQ ID NO: 261036 - DNA, 201 bp, Homo sapiens
cacctgtagtcctagctactcaggaggctgaggtgggaggatcacctaacccccgagaggttgaggcagcagggagccgtggtcacaccactacactccakcctgggtggcaaagtaagaccctgtctcaaaaaataaaaaataagaaaattgtagtattggccaatgttcaatagatactaataatgttattttaaataa

SEQ ID NO: 261037 - DNA, 201 bp, Homo sapiens
gactaatatgccaggtttttttttgacttactgataactatcaatagaaactcccttttttatgggaaaaagtgagtatagtaaggtagaaggtggtagartatttaaatgtactcagttgtaagaaatatttgtcaaagagaaatatataggtttttctgaatgtacctgaaagtggtccagagtgaccaatatggtgtc

SEQ ID NO: 261038 - DNA, 201 bp, Homo sapiens
gctgaaactgagcctaagtagggaggcaatatagcttccaactaagaactaggagtatgatgccaacttgctagtgtttgaatcctatctttgctactctrtagctataaggcattagaaaaatagcccaatgtttctgaatctctatttcctatctggaaaatgggaaggatattactatttaccttataaagttcttgt

SEQ ID NO: 261039 - DNA, 201 bp, Homo sapiens
aagatccgattggggcatctgtcttcagtctgccactttcttcgtaatttatagttaaatgacaactgctcatgaggtattttgaatagagagcccgccarttttaaacaaactgttttaactacacttaaaaagctaacttccatttctatatgtatcagtgcatttcttctcaacatgttcatttgcttgtacatttaa

SEQ ID NO: 261040 - DNA, 201 bp, Homo sapiens
agaaatactttatgaatgtttcacctggattgaggtagagatgaaaatgcaaactgagtaatagcacccttaagtaatattaacggtggctaatagttaayatttaagctcatttgaattagaaaaaaataaataaaaaacaaaatttgttcatatttttcctgtcttgagaaaccaaagccccaaagtggactaatatgc

SEQ ID NO: 261041 - DNA, 201 bp, Homo sapiens
ttgctcaatggtgagcctcaggtattgccaccactgtcaccttatctcttaacaccattaactatatcagcctctctcaaggtgaagaccaggcattagcrtatccccagtagcaactgccatggaaggattcacagtagttttggcaactgtgagatagggacacacccaggaaagttctatctccattagagtattgtt

SEQ ID NO: 261042 - DNA, 201 bp, Homo sapiens
tcatgtggatatgcaattcagtatacatctgtaccaggtaaatgatgtgtaccgtcctagagtttaatgattaaaattcagttttttcacaacaatatgtmctggtacaatgacaagaggtccttaggtaggttaattcaaatattatcgtggctataaataaggagtgcttatcctctttggtggttaaggctttgtcca

SEQ ID NO: 261043 - DNA, 201 bp, Homo sapiens
atgtgccatgttggtgtgctgcacccattaactcgttatttacattaggtatttctcctaatgctatccctcccccaattccccaccccacgacaggcccyggtatgtgatgttccccgccctgtgtccaagtgttctcattgctcatttcccacctatgagtgacaacatgtggtgtttggttttctgtccttgtgatag

SEQ ID NO: 261044 - DNA, 201 bp, Homo sapiens
attcaaattgtttaacagagccattatttcttggttttctctaaaatgggtaaatctacattagctggtgtaattttatattaatataacaaaaattatcrcaaaaaataaataatatgcaatgtggaaacacctcacaattatatctagaatgtggccatccatcatacatttttagacatatttaaccctctttttcct

SEQ ID NO: 261045 - DNA, 201 bp, Homo sapiens
gaggcctattcatttactcgccctaatttgtccaacactttctgggtccctatacctacaacaaccccaggggtataaggaataaagtttaaaaaatactyatctgtttaatattccggccaatattttacacattatatgtaacaaaattaaagcacatttggttacttttctcccagttcttctatgattcactctgta

SEQ ID NO: 261046 - DNA, 201 bp, Homo sapiens
tcattgagactgaatgatctgacaagggtccagaaagtaaactggaagtgaaagagactaggggcatagttctgtggtatttgggaagctttaggagagtytaaactggatatgattaaatatcttaatatataatgacagtggttgagaaaaaaaaaaaaggaagggttaccagagataggaaaagactgaggaatagtg

SEQ ID NO: 261047 - DNA, 201 bp, Homo sapiens
tcttggtggaagactacgtgtacagaaccatttgacttcatggtatgaacgaaaaaaatgtcggcagaaatgatctactgtctgggaaatctggctctacrtgtgcctacagcagttgatagtgtgggcaagactgcgtgcagcccagtgtccagtgctggtcttctggtcccctccctcagctgccacgagtgaaatgga

SEQ ID NO: 261048 - DNA, 201 bp, Homo sapiens
ctgataagcccttaaaaaagctgttcttcctacagtcttccccatctacgtttatattaatttcaaccttttagttgctttggggaaaaaaatagccaccsttgagtcgcctctttcacatcccctttccagtccatcagaaaatcttactggctccacttccaaaatatatgccaccagttctcaccacctgcattgcta

SEQ ID NO: 261049 - DNA, 201 bp, Homo sapiens
gttgttgttgttgttgtttgtttgttttcagaataaaaacctacatttttacggtggcctctaaggcaccatacagtcaacccctttgatcctttgatccytctccaccgctttctctcacacttacctcactctgctccacactgacttctgccccccatggacctcttgctgtttcttgggactttttagtggctctat

SEQ ID NO: 261050 - DNA, 201 bp, Homo sapiens
cttaaacaccctctttaaaattgcaatctcttgcccgctggaacccttctctcttaaagttttttatagcctctatcatcatgtagcatgcaatatgtcayttacattatttgacaggactccttaccagaatgtaagctccaggaggactagcacgttgtttctattccattaacatttgttgaatgcatggtataagtt

SEQ ID NO: 261051 - DNA, 201 bp, Homo sapiens
ggcatgtcagtgagaaggtctagtcaccatcccccaccacagcttaccattggcctctcaatttcctgtgaccaatgactgtctttccatcatcagaagcttaggggctggaaaaaggatgtcagagctcatcattcctactccagttaagatgcttaatgatcattagaaggtcatcattttttaactgcttccagtgag

SEQ ID NO: 261052 - DNA, 201 bp, Homo sapiens
aaactctctctactaaaaaatacaaaaaattagccaggcatggttgcaggcacctctaatcccagctactaaggagactgaggcaggataattgcttgaaycagtaagtgggaggttgcagtgagccaagatcacgccattgcactccagcctgggcaacaagagcgaaactccgtctcaaaaaataaaataaaataaaat

SEQ ID NO: 261053 - DNA, 201 bp, Homo sapiens
aacttttttatatgcacaaaaagaagtggcattttgtcatgcttattggttaagtataaatttcaaggagaaagagaaacattactttaaaatcaagcaarcatattacttatggaagaagagacacagagatcatattgaaaaatagatctttacctctccatagttgtgccataaactctgtaaggcataagtgttgga

SEQ ID NO: 261054 - DNA, 201 bp, Homo sapiens
ttggctggcctcccagtataccagtctagtaagtctgcacataatggcatgaaatcaaaagacataaattcaattgaaagctcacttaggtgagtcatttrgtgttttcaatgcctgcatttcattgtcagccaaatgagaataattactttgtatacaccttgtacttcaaagtaaattctaccattatctcaccaggga

SEQ ID NO: 261055 - DNA, 201 bp, Homo sapiens
attcctccggggtacgatagagacccaacacctgttgggtggcaggcaaattaagttgcatcctctccactttggagtgggcagcaatttgtcctaagtgrgtgaattatggtctagatatgtgtttgcatttcctctcacagtgccttcactggcatccacatccgatagcctaagaatgcctaatccaatgatatggtg

SEQ ID NO: 261056 - DNA, 201 bp, Homo sapiens
aagtcatgagttatctgcaaatcaattcatttccagagtggaaaaatcctcagaattatttcttaatatcaaaatgtatgcaggtttctctttcaaatgcyttgtacatttaaagaggcaattgtacaaagtctcctattttccatacaggacaaattctttgtgtcagccaactttcagtggagggacaaccaggacaac

SEQ ID NO: 261057 - DNA, 201 bp, Homo sapiens
cttggagtagccacattttacatgctaaagccagtggctacccattggatagcacagctctggagaatagttgaataaatttgaggaggtccatgcaaatygtaatataaaaaaaaaaaaacctgtgctttgaatacaggctttgtgagaaggatatgaatgatggaggtttggccagctgtggccatatgtatggtgctg

SEQ ID NO: 261058 - DNA, 201 bp, Homo sapiens
ggccatatgtatggtgctgtaccttctctgacccccttaaaggtgactggggagccacagaggatctgctgcatggagatgtcaaatcctagtgagcagtstggatatctgtgacttgctcggagtggctgcaggggctggtgggttacactattcatgtggacactccctgtagggagaggccagggattctgacagatg

SEQ ID NO: 261059 - DNA, 201 bp, Homo sapiens
aaaggtgactggggagccacagaggatctgctgcatggagatgtcaaatcctagtgagcagtgtggatatctgtgacttgctcggagtggctgcaggggcwggtgggttacactattcatgtggacactccctgtagggagaggccagggattctgacagatgcaccactttttttcaccctgtttgatattactctccag

SEQ ID NO: 261060 - DNA, 201 bp, Homo sapiens
taatgaacatatgtggatttgtgagaaacctttgcacaatgcaactaccactgctttagacaataagtggagcactaagctttaaaatactaaaaaataartgctggccatgtttaataactttaaagcaaactgtgaagggtaaactgatgttatttagaagtaaataaataccaatttaactttatcaacaagagcaaa

SEQ ID NO: 261061 - DNA, 201 bp, Homo sapiens
ggcttcagattagttaggagctgctgagcaacataaaaataattcctcagttttgttatttgtattattcttggaatttagcacaatacctaacatataakaagcactcaataatatattttccttaagaacaattgaaattgttagcacagggcaacatgattacatttagaaaatgggacaaaagtgtagagggaaaaa

SEQ ID NO: 261062 - DNA, 201 bp, Homo sapiens
ttcattgatagcaaatcaagggagaaagaatgagtagggatttgggagaaagaaactaataaactattgaatttttgtaggcatagccactgtcattactrttgttgttatttgaacacatcaaagtattatccacctaccctcttctctcttctctttatggctttctctgtatctcttttgttatttccgtatgcttca

SEQ ID NO: 261063 - DNA, 201 bp, Homo sapiens
tgctactgaccattacaattggttggatagaagaggcagggtaattgaggtcgtttcacaatgaatatgccagaaatccatcctacatatgaaaaaacttwaatacaatgagatttaaatacttgctgctaatgtagacttgggacctctacctggcctgttaggaaactttacctttcaggatccagtgattctgcaagg

SEQ ID NO: 261064 - DNA, 201 bp, Homo sapiens
tcctcctcttcctcctttaggtaaactaggagaaaaacaatataggcaaaacagtgataatagtcaaaaagtttacattttgtggaagaacataaaggggyctttcagttacggttaatcttttccctgattctgatccctgtgctctctcttgcattggggcttttaattatgctcttccgtcttgcattttcccctctc

SEQ ID NO: 261065 - DNA, 201 bp, Homo sapiens
ccaggctgaggcagtaaaaaccccatgtgattgttcagtcttcacctgacaggcgatcaaggacacatactcctgatgaagcttcaaaaaattgagcttctttttttttttttttttttttttttttttttagagggagtcttgctctgtcgcccaggctgtagtgcaatggcgtgatctctgctcactgcaagctctgaa

SEQ ID NO: 261066 - DNA, 201 bp, Homo sapiens
agttgttcacccagtttaacttggctcacaagaagactgaactggggatttgtgtaaagcccttctcatactcctgtttcctttcccactctgctctatcrtctgtgcttgaactatcttaggcatcttgaggagactggagtttagagttggagagccatttaacaaatcatctttagattttttgacatgactttaaat

SEQ ID NO: 261067 - DNA, 201 bp, Homo sapiens
aaattatgaaagcacttttgtaccccatcaaaaaatttactgagtaatgtgatgaatgttatgattgtggaataagcagtagactataagaaaacagaaartaacatttaaatcagtgttttgaattctttgtcttcttcctcaaaatgtttgaggaacgtatacattccattgttaaaagtgacctcagtgtacatgatt

SEQ ID NO: 261068 - DNA, 201 bp, Homo sapiens
ttcaacgcagaccaggatgggatcttgacatttgatttttttgtattgccttcttcataaattgaaaattggaaatgcaatttaaataaagctggttttgrtggagttttgtctgttcttatttttcaagattttacagtatctaaaacaacataattttcagttttaagatatctcaatggcttttacctaattgcattt

SEQ ID NO: 261069 - DNA, 201 bp, Homo sapiens
ggaaaaattagaattttatgtatttctagtatcattgaacatcattctagtgatttaggaagtgcatttccaaaattgctgtggattagaggaagtgcacytctgacttcggggtggtcagaaatgcgatttagagaacatcaaattttaagagctgttttcagtcattcattctttcagtcaactaggacctcaataaag

SEQ ID NO: 261070 - DNA, 201 bp, Homo sapiens
atggcttttacctaattgcatttgtctgcttgctagtacagttaactataattattttagaattaattgtagaagagacttgatgttacagactatagtaytcaccagagtaggcagtgaaagcagtgttcatcatgttaactttttcatacttagaagtacaagctctttaaactgtttttattgtagctgttctgttct

SEQ ID NO: 261071 - DNA, 201 bp, Homo sapiens
agctctttaaactgtttttattgtagctgttctgttctggttgcttattgccagataacaagctacctcaagtttactgttataaaatcagaatcattttrtttatgctcacagattctgtgggttaggtatcagaaagggaaactggggatggtttctctctgctccatgatgtccatgaccttcagatgaaaggaagaa

SEQ ID NO: 261072 - DNA, 201 bp, Homo sapiens
gaggcataatcaattcagacctggcctcagaagccacagatcattacttctgtcatacttcattagtcaaaagatagtcagaagcccacccagattcaacytgaggagacatacattccacgtctttcaataaaaagtgtcgaagaatgtagaactatgttttaaacccatcactgcaggtgtgatagatttgctgccctc

SEQ ID NO: 261073 - DNA, 201 bp, Homo sapiens
caaacaatttaatgattatctgctttggggttcttgcaccagaataactgagtgttgagttgtcatgagcaggcaagaaaggctagagctgcatgtcgtgyaggcagagagtctgtcagaaggaaagggaattgccacctgtcctagaaatgaggcatagcatggtggggatgaaagaatgctggacagagaagcaagaaa

SEQ ID NO: 261074 - DNA, 201 bp, Homo sapiens
atgatactgctttcctgaaccagacctgaatttctgtggtctgcagaatttttattgggttgaaaaaaaaaaaatggcagcaacccaagtattgggttgayagaggtgtgctccgaataaagcaagttttgtcactatagaaatagaaatagtggcctaaaaatgttaaaaaaaaaaatcaaaattacttttcttgtaaga

SEQ ID NO: 261075 - DNA, 201 bp, Homo sapiens
tcttcccacctcaacctctctcagtagcagggactacaggcatgcaccaccatgcctgtctaattttttgtagagatggagtttcagcatgtttcctaggmtcgtcttgaacccctgagctcaaatgatccacccatcttggcctgccaaagtgctggaattataggtgtgagctaccatgttgggccaatgatttgattt

SEQ ID NO: 261076 - DNA, 201 bp, Homo sapiens
agctgaaaatcttagaatctacatttatttcagtacagggcactttaccttgtcacagaaactttcagctcatcttaacgaggactttattatttcttttrtaacctacatgtcaccacacccccaccccaccaattaaataaattttatatcattttatcagggtgaatgtgataacactttttcttgaatagagatgtg

SEQ ID NO: 261077 - DNA, 201 bp, Homo sapiens
aagtaaggcaaatgacttggggtaatgcctactttagtactttaaagaatgatttgatctctaagaaatagctatgttccatgaatctcactctgtcactyagggtctcactgtgtcactcaggctggattgcagtggcgcagtcatgggtcactgcagcttcgacctcccaggatcaggtgatcttcccacctcaacctc

SEQ ID NO: 261078 - DNA, 201 bp, Homo sapiens
agagttaatattttcccattgatgttaccagttatgtgtttaatgaaaaaaatctcattattgagcatctgctagcatgcaaggaatatgtgaggtacttktcatgcattatcttatttaatccatgtggcattatcatttgtcttatagcaacttgtctaaaattctacagctgctgactgtgcaagtgggattagaact

SEQ ID NO: 261079 - DNA, 201 bp, Homo sapiens
tccaggcacacacatatgagcaagactcactgtgctttttgcatggtgacaggaagttcctccatgacagctctgacactgacttggacctcataaacatrtagggagaggtaaataacactctttggagtttatgatgggttaagaatttcaaatgttttatcataatcttctgttcgcctcaatcttctaaaagatggc

SEQ ID NO: 261080 - DNA, 201 bp, Homo sapiens
aaccaattttgagggttttagttaggccaggcctagcctaggcagaaatgttaagaaattaagaaattaatattattacttattattaaattaatgcataygctttatttgggaaacactcatctgtaaggcgattttatagaattggacaaatcaggcagtacttacagtgcagtagaggagattcagtagatatcaata

SEQ ID NO: 261081 - DNA, 201 bp, Homo sapiens
acctatggaacgtgttcttatcccagaaccctgactctatcctgatctcgatctggtttgctgccaaaacacctgacaatcctttgctctaccaacctgaygtaatttttgggagaccagataagcagaactttggaacattgtaataatgtcttataagttgatgaatataaaagttaaatataaaataatataaaagtt

SEQ ID NO: 261082 - DNA, 201 bp, Homo sapiens
acttcacctgtctttgccaaattctctctatataataataatggtacctcccttatagggtggttgtattgggggtccccaagacttcctttaggctgatygttttactaatatatcagtctgttatcatactgctaataaagacatacctgagactgggtaatttataaaggaaagaggtttaattgactcagttctgca

SEQ ID NO: 261083 - DNA, 201 bp, Homo sapiens
ctgttagtttaaggggggattgaaggctgagggaaacctatggaacgtgttcttatcccagaaccctgactctatcctgatctcgatctggtttgctgccraaacacctgacaatcctttgctctaccaacctgatgtaatttttgggagaccagataagcagaactttggaacattgtaataatgtcttataagttgatg

SEQ ID NO: 261084 - DNA, 201 bp, Homo sapiens
cagttatcttaaaagcaactctgggtctactgggctcaaaaaatgagaaatctaaagaaaaactggaattttttttccccaaattaaatgagtcctggtayaatttaaagcctattctttgtagtttcacctgcttatattgtaaacaatacagaatgatgagagacatatgataatatgaatgagaaaattttatatctc

SEQ ID NO: 261085 - DNA, 201 bp, Homo sapiens
tttgacttcaccaccgtgccgaggcttacagaaggtgatgactagaagagtggtcctatgccagggagaacttgggaatgttaatcatgatggaaaagtgygaaagggcctgttagtttaaggggggattgaaggctgagggaaacctatggaacgtgttcttatcccagaaccctgactctatcctgatctcgatctggt

SEQ ID NO: 261086 - DNA, 201 bp, Homo sapiens
ttcatatcacatatcacataccttactaatggcagagcaaagcaaggactcaggcccagaaccagtttttcatggtttcttccacgtttgacttcaccacmgtgccgaggcttacagaaggtgatgactagaagagtggtcctatgccagggagaacttgggaatgttaatcatgatggaaaagtgtgaaagggcctgtta

SEQ ID NO: 261087 - DNA, 201 bp, Homo sapiens
tttatatatattggggaaaatgcctctgatgtataaagtggtttctattcgtatgtcacctttagttaaatgcgaatttactatgtttctgagtgtcctarcatctcaaatggacttgggttctctttaataatattgtctacatctttatattacatccactctgtttcactactgtgcatttggtagttcctgtctccc

SEQ ID NO: 261088 - DNA, 201 bp, Homo sapiens
atatattgcttattcaaattggcagcaaaggttattagaatcagcgtttctccctaataagggttcttaatttacagttgagtttttggctttgtcattcyctgcttaagcttgtcttaactttcactttttgttatttgaggccttgactaacagcctgtattgctctagcatcttgaattctaacattctagatagttt

SEQ ID NO: 261089 - DNA, 201 bp, Homo sapiens
caaattcttatgggtcatatagggagtagaaaacacagtcctagactctttgaagcctttgcagtcccagttccaacctggttgtagagtcatgaaattcyggtcaacagcctatagagattttggtgtattcagaattcaaagcgaggcttctgggctttgttaacctatgatttgtagtttgctgtaaacgtcaaaact

SEQ ID NO: 261090 - DNA, 201 bp, Homo sapiens
tactacaattggtctacgattgatatatcagtatgttctatcacaagttccctaggcatgtgacctaatctaaggcaatgaggcactccctctactaggatttttttttttttttttttgagatggagtctcactttgtccctcaggcctggagtgcagtggcaccgtgttggctcactggaacctccgtctcctgggttc

SEQ ID NO: 261091 - DNA, 201 bp, Homo sapiens
tattattcattgtagagtagaacactgatatgatgaatataacgttgatgaaaaattattttaacagccctgtatatgctaaaagaattagaggtaatatygaaaataggaaaaattagaattttatgtatttctagtatcattgaacatcattctagtgatttaggaagtgcatttccaaaattgctgtggattagagga

SEQ ID NO: 261092 - DNA, 201 bp, Homo sapiens
tctactaggttctggggattcagcaatgaaccagagagacacagatggtaccttcaggggaagaaaacaattaaaataacaggtaatatattattgattgktgctatatgctgtatagaaaaaaagatagggtaaaaggaataggtggtgcttaggcatggttgtttatactagatgttggttaaggaaagattcactgat

SEQ ID NO: 261093 - DNA, 201 bp, Homo sapiens
tatccctttatttcctccaaatataaaattgaaaatattataataagccttaacttatagagaatatttgtaggcaaataatcatcattcattcatcaaaratatcacctactaagttctaagcattctactaggttctggggattcagcaatgaaccagagagacacagatggtaccttcaggggaagaaaacaattaaa

SEQ ID NO: 261094 - DNA, 201 bp, Homo sapiens
agggaagattgctcagaggtcatttaccatattagattgtttcaaacttcaatatatacacacatagaaatagaagataaagcattaaaaccacatagtastagaaagaaaaaattacaagagaaatactaaaattgtcttttttcgaaactagcatagtagatgaatgttgcattatgtatccaaaacattttttctttt

SEQ ID NO: 261095 - DNA, 201 bp, Homo sapiens
cacagaataaaggcctgatgcatataaatatgtgtccaggattctttctttctttctgttccttttcactaaggcagagaaactatgtaaatattagcctraatttatttcttaggaatgcaattgcctgttttattgagaccattgaagcacatggggtagacttagaaactgctagtagtttcttttaggaaaatgaat

SEQ ID NO: 261096 - DNA, 201 bp, Homo sapiens
aagtgcagaaagtaagtgaaaagaagagaacatggttgagggcgtgatgcctggtacaatgacagtggcaccaattttgatctctaattagtctgtcaaaytgcctgaagtaccctctgttaatattgttcctataggaaaacatatttctaaatttatgacccatgtgatgaacctttaagaaagtcctctcattaggta

SEQ ID NO: 261097 - DNA, 201 bp, Homo sapiens
tatttttgaatgattcacttgcattataattagtaaatttgtgttctctgcacttctaggaatgtaaacatcataacatcctcttattacaaagtctttgyatccccagtaagcattgaatcactgttgagatagcatatgccatgagaccttatagcctttcactatagtctcagatatcgatttcagtaaaatttcttg

SEQ ID NO: 261098 - DNA, 201 bp, Homo sapiens
gaaacatgaaatagatatttcatttgtgactctcctaattgacaagaagtgtggatacctgtattctttgtatggtaaattttaacagaataaatagagartggcttctacattttacattctagttcagtgacagggtgaaccatacttttggatgtcttgtgtttagttctttagtttataacctggatttaccattct

SEQ ID NO: 261099 - DNA, 201 bp, Homo sapiens
tgtagagtgaggaagagaagctagaattgacctgagatttttgttgagtccatatcaatctgtgatgccctatgatgaaatcacaggagttattagagcawggggtttgagtgctaatagtatggaacagctgttagagaccaactctttgttttacagtaatagaaacaaatccagagaactgaagtgatatgcacttag

SEQ ID NO: 261100 - DNA, 201 bp, Homo sapiens
tttctgcagtactggctcatgcctcgtgcctttgctattttcccctcagcctcaaacgctcttggtagctgcaaagcattatctttgctggatgccctccmacacccaccaattcttatagaattgtccagtgcttcccttgcttcacaaatctttactgagttatgtcatagcctgcagtgtactttcctggatttaata

SEQ ID NO: 261101 - DNA, 201 bp, Homo sapiens
atgattataaattaaaaagcaaccttattgtccttaccttctttgattagccaccaagtcctggtctgattttataactcccttcaaggcattccatattyggcctccttccctttatctttaggctatctttgggctgtgtcctgttaaaattcctgtatatcagagaaccttctacctcacaatgtgatgtcttcagtc

SEQ ID NO: 261102 - DNA, 201 bp, Homo sapiens
gtattgtcattttcccattttatagatgaaaaaagcagacttaaaaaaggtaacttcttcacggagataaagttaaagaatagtaagatggaattttacayggagttttacctgctacacaaaccatagtcataaatgagatatacaacttttaaatacagctttttacatttaacattttggtataagccattttaaact

SEQ ID NO: 261103 - DNA, 201 bp, Homo sapiens
atatattttctttttcagtattaaagaggaacttttaacagtcatataatcaagagacagaatgtctgcttttcttccagagatagtacttactgggttcrgtatcactgacaatgacaacttggtcagggtatggggtaaaggtaattgaaatagcagatgggtaattggacacaatgacttttttttttttttcctaca

SEQ ID NO: 261104 - DNA, 201 bp, Homo sapiens
tagcaggtgtggcttgcctagctaagagaggtaggggcaggtggagtcacttatccagccatctggatgtttctccagacaacaggtggctgtgctctccrgctgagttcacatagaagtgggactgccgggctggaagctctagtaggcgttgactgcctggctaccagcagcaggagtcagtggggtagtctgccctac

SEQ ID NO: 261105 - DNA, 201 bp, Homo sapiens
ttatgaattgtgttaaacattcagacccaaacatcctttcattaggaatgcatccttccatcaggaaaggtacatgttaaagatctttatgataaatgccwtgtttgcagtttctgcagtgttactcttataatttggagctcaggttaaccatgcttcttgcatactctattcattctctagccatagcatttaaaacag

SEQ ID NO: 261106 - DNA, 201 bp, Homo sapiens
ttttcctttcatttcaacattgaagaatctgataattatgtcttggggatggtcttctggtgtagtttttcacagggattctctacatttcctggatttamatgtttgcctctctaataaggttgaggaaattttgtgaatgatatcctcaaatgttttgcaagttgcttactttgtgcttctctctttcagtgatgccaa

SEQ ID NO: 261107 - DNA, 201 bp, Homo sapiens
ataataaaaataaaaataaagtcatttgtttttttcttctttaagtttaaatagtaaaagtgaagacttaaagaggacaaatgacaatcaagtgtgttaartcaatagttcaggtattgtagaaatcaaggcctaacctgtgtactctgatggaagtgcccttacctccactagactttaaatttagaacattaaatattc

SEQ ID NO: 261108 - DNA, 201 bp, Homo sapiens
cacagagagttcgggggagctatcatggcaaagtggtaaagatcttagctaaataaactggttgccactattacttttttgagaatgttcagcacaatgtytgaacagaattacactcaacaaatggaggttgctgctgtgatgttagcaccatgattgtgtgctttgaatatctaactaacgccattgtgagacccttgg

SEQ ID NO: 261109 - DNA, 201 bp, Homo sapiens
cctggttctgctctgttatgtgcaagttacttaacccatctaaacctcagtatcctcatccgtaaaatgaaaacaattataccttcctctagagttctgcraagtttatttatttacttttattgttaatttgggaggttttttttttttttgagacagggtgtcactctgttgcccaggctgcagtgcagtggcatgatc

SEQ ID NO: 261110 - DNA, 201 bp, Homo sapiens
cataggcatcaaggcatttactgaggaaattcttagcaataaatatttttagaacaactggataaacctatgcaacaaaatgaacaccagcttttattctyactagataaattattttccaaattgcaagagctaaaatataaaactttaaaaaagaaaacaaaatagactatttttctaatgctgtacagcaaataattt

SEQ ID NO: 261111 - DNA, 201 bp, Homo sapiens
ttgtattacggagtgatagtgatagggttttgatcagattgcaaggtgggttaggaacaaagaagtaaaggtagggagtttatagattactctttgtagaygtaagaggttttaaataatttcttaacaatctgggaggtctgatattttctactggttaaagggaaggatacttggaggattattgaattagtaattggt

SEQ ID NO: 261112 - DNA, 201 bp, Homo sapiens
actctaccctgttaacctttcctaacaaacacaaacaccaagggaatgtcccactggcaaagcttgcagcttccttccacactgctttctaggttactggkggaatgaatttaggctgtgatcaccaggctgcagccatatgagttgtctgagtcaggctggctttttgaatgagtccttaatttttgttcctgctttcct

SEQ ID NO: 261113 - DNA, 201 bp, Homo sapiens
ggcatatttcttagaatatattctgtcatctagcaacgcatgactgttcttatagctctagccttggccaattccttgaactcctgactctaatatccaaygacctaatgataattgaacactaaataagtgtctcaaatttaaaatctgctaaactgagctcctcattcctgcctgctgcccaccatgtccccaaattct

SEQ ID NO: 261114 - DNA, 201 bp, Homo sapiens
tctatttctcttacatttctaaggctgggaccaggcaggggatttggcctcaggctgtcattagtgttttcagcgacggttgtattacggagtgatagtgwtagggttttgatcagattgcaaggtgggttaggaacaaagaagtaaaggtagggagtttatagattactctttgtagatgtaagaggttttaaataattt

SEQ ID NO: 261115 - DNA, 201 bp, Homo sapiens
ttaaattcttataaaaataattgcctccatgaaactgtcctagatatttcctgagataatgatcttatcacctttgttttttttttttttttcatttgttkgttttcaggcactgtcctttgatccgtatctgtgaaaactgagcctgaaacacagccagtgaaagtcaagccacataatatgtgaatgcctctttccttc

SEQ ID NO: 261116 - DNA, 201 bp, Homo sapiens
tttattaaattcttataaaaataattgcctccatgaaactgtcctagatatttcctgagataatgatcttatcacctttgttttttttttttttttcattkgtttgttttcaggcactgtcctttgatccgtatctgtgaaaactgagcctgaaacacagccagtgaaagtcaagccacataatatgtgaatgcctctttc

SEQ ID NO: 261117 - DNA, 201 bp, Homo sapiens
aggttcacacagaagtaggactgatgggctaaaagctctagttggtgttgcctgcctggataccagcagtgggagtgggtggggtcactcaccctgtggtyactcaccctgtggtcacctaccctgctctacaggattttctcaggacaacaggaggctgtgcctgccttctgagctcagacagcagaaggatcactgggc

SEQ ID NO: 261118 - DNA, 201 bp, Homo sapiens
tgttttttttttctcatctgtgtgagctgatattccttcagtccttgaagttgctgtcctttagatgtttttttgtttgttttgttttgtttttgttttgwtttttgggggttttttgtttgtttatttgcttttatattctgtgatgcccttgcaaatttgcttgtggtatgagttcagtcgactagttttgattctatt

SEQ ID NO: 261119 - DNA, 201 bp, Homo sapiens
aagggaacaggaacattttgacatttgttgaagagttatcatttaatggaattgaattgcttcactgaatatgtgtgtgtgtgcgtgcgcgtgtatgtgtrtgcgtgtgtgcacatatgcgtgtgtgtatgcatccctggttctgacaggcagtttactttgtaaaacagaaaaactgataagaaagtaaaagacccatct

SEQ ID NO: 261120 - DNA, 201 bp, Homo sapiens
aaaaaaaagtgtaaatagtggaatatttattatttagcactaaatttatttaaataattattaatccacaagtgtccttgtgactagttgagcattattawcctcatagatgaatgtaattatattaagaggaaatttatatactcactttaattctctgtcagtattaaactgctttctataaatatttggaaacaactc

SEQ ID NO: 261121 - DNA, 201 bp, Homo sapiens
caaaatcttctgttgattatttgacctcactcaaagtaaaaggcaaaggtcttacagtgttttctatagagctctacatcatctcactccccattgctgtrgtaatcagaatgctaagatgttccccaagattctcagcccctggtgcagctgctctacataacacccgccccttgattacaggttgcaccgtgaatatat

SEQ ID NO: 261122 - DNA, 201 bp, Homo sapiens
aggaaatggaaactttcagatctttatattattttaaaattaatgttgccctgtctgcccttgcatattttgcctagctaaactgagtttctttattgtcrtcataagtgttactcattctcaggtgatttttcaccatgcagaatccctgtattcctgggtcatctttcatctgcatggcggatcatccttctacctctc

SEQ ID NO: 261123 - DNA, 201 bp, Homo sapiens
taatgcctttaaattatttgagtccaaaaatgctagtcatggataggaaatgatgcagcacaatttcctttcagggctaagtgaagaaaaaaatgaaaatrtaatttttagtgaatattttttctttttttataccttataggtccattcctcaattagagctttatgaactttctacctaatgccttccctatagagaga

SEQ ID NO: 261124 - DNA, 201 bp, Homo sapiens
ttctggggaacaactctggatttttaaaaatcagtgttttaaaggaatttgatttgtatgtttttgaatttactgcaacttttaattttatttaacatcarttgcagtttattttacctttgaattactccaatcaccttccaggctattttctctggatttcttaaaaattcaccaaggtttcttcatcataaaaactca

SEQ ID NO: 261125 - DNA, 201 bp, Homo sapiens
aatttgatttgtatgtttttgaatttactgcaacttttaattttatttaacatcaattgcagtttattttacctttgaattactccaatcaccttccaggmtattttctctggatttcttaaaaattcaccaaggtttcttcatcataaaaactcaagggaaaaataaagttcgccaaggttatcatatcactctttattt

SEQ ID NO: 261126 - DNA, 201 bp, Homo sapiens
actctttatttagttttattttgtccttatctatattaagtattttctattgtattgtgcttatctctgtagcagtttcaaattatttacgatgagcaaargtatataaatgaaagtaaataaataaagctccatttggctcttattcagaaatcccctcacaagaagcagctctctgaaggtagagattttcgtttctct

SEQ ID NO: 261127 - DNA, 201 bp, Homo sapiens
tagcttgtgatagtcctagccattagtttgactcagaattggccaaatgtttagagcttgttgtggaggaaaagggagctcctggatttattttggtgtayttttagaatcctctctatttctcttacatttctaaggctgggaccaggcaggggatttggcctcaggctgtcattagtgttttcagcgacggttgtatta

SEQ ID NO: 261128 - DNA, 201 bp, Homo sapiens
agaaaattaaacacaaggtgtctgggtgatctgactctctaaggatctcttagtggttgcctgtatcattaagaccaaaacagtgattcttaaccctcacrgcccatcagaaatctagaaaactttttttttttgttgttaaaggcaaagtcccaccacatactagtttctaggggggaaccatgattgagaaccacttga

SEQ ID NO: 261129 - DNA, 201 bp, Homo sapiens
ccacctgatggagctactctatctgacagatgttcaggagacccagcagtcagccttcttaggaatatataggatttaagtgccaagtttatcctcaaaakcagtttattgggcttaagtgaagttcctcagaattttgccaagctcttccctctagagagaaaagttcattagcctccctagcttgtgatagtcctagcc

SEQ ID NO: 261130 - DNA, 201 bp, Homo sapiens
cttgactaaagtctactttatttaaaccaattttaatttaaatccgtaattgattttaatgacattatgacaagactataaacctggtatgtctatccttyccttgagttttgaaatgtatgtgtattgcaaaattctaccttgatcacctatggcacaagttgtaccacaaaggtggcttaataatttgcaggttttttt

SEQ ID NO: 261131 - DNA, 201 bp, Homo sapiens
tgctcacgggtggaggtggagggggacttcgtggggagcacaaaggcttctaaaagggattcctactccatttcatggtccggtattcttttttcttaggkaactttttctttgtgtttttaagctcatacagtattttctttgttttccaacttctggacttttaattgcacaggcccaggaatatatatattattttta

SEQ ID NO: 261132 - DNA, 201 bp, Homo sapiens
aatttgcaggtttttttttttaagaaagggagaatactttatcagaattcagttttcagttttggactctccatggaatgctaagagctgtcttgtcccartgcatttgcagaaagcatttttagtaggaactttcagacttcctattaatcaaacttatatttgattaatagactattaggattggaccttaaaaataca

SEQ ID NO: 261133 - DNA, 201 bp, Homo sapiens
gaaacttaagtcacattcaatttggaactgacaagtctatctgaagaaacaattagtttagaaaatttggaagtaaaaaatccattgtatttgatctttargtttattttagtttggtgatttaaaaacattctttgcctattgttttaaaaattaattgttgagtgaaaactaatgggatttcataattttacttctcat

SEQ ID NO: 261134 - DNA, 201 bp, Homo sapiens
tgtgtgattgtatttgtacatgtgggctttaattttgtagtttcctttttgtagagactactaaaaagctcagggccaattttgtgattcatctacttcaratgtatagcattctttaataggctttcactatgtatgtgtgtgtgtgtgtgtgtgtgtgttggcctcattcttaactccattttatgacattactcttgc

SEQ ID NO: 261135 - DNA, 201 bp, Homo sapiens
cctcaaatgttttgcaagttgcttactttgtgcttctctctttcagtgatgccaatgagtcatagatatgatctctttacataatctcatatttctcagargtttcattctttcttctctgttggttttgtttgtttgttttttgtctgagttaatttagagaaaccgtctttgaactctgagattctttcctcctcttgg

SEQ ID NO: 261136 - DNA, 201 bp, Homo sapiens
atcctcaaatgttttgcaagttgcttactttgtgcttctctctttcagtgatgccaatgagtcatagatatgatctctttacataatctcatatttctcaraggtttcattctttcttctctgttggttttgtttgtttgttttttgtctgagttaatttagagaaaccgtctttgaactctgagattctttcctcctctt

SEQ ID NO: 261137 - DNA, 201 bp, Homo sapiens
aataaaatcacataaactattcactatatcctatactcaagactcttcctaaatttactcttagcagccttcaatacaagctgaaaatactaaattttttmaaactgcaaaatatctgttttcttacatctgaatttgtgtgttttcaaaatgatgtctgttttctcaactatttgagaaaatcgtgccattatatttatt

SEQ ID NO: 261138 - DNA, 201 bp, Homo sapiens
aaaatactaaattttttcaaactgcaaaatatctgttttcttacatctgaatttgtgtgttttcaaaatgatgtctgttttctcaactatttgagaaaatygtgccattatatttattatatgctttagagttttcaaatcactttgactgttcttttgtttttgaaaatagaaatacaatagttgtcatcttttgttcag

SEQ ID NO: 261139 - DNA, 201 bp, Homo sapiens
ccagaaccagtttttcatggtttcttccacgtttgacttcaccaccgtgccgaggcttacagaaggtgatgactagaagagtggtcctatgccagggagarcttgggaatgttaatcatgatggaaaagtgtgaaagggcctgttagtttaaggggggattgaaggctgagggaaacctatggaacgtgttcttatcccag

SEQ ID NO: 261140 - DNA, 201 bp, Homo sapiens
aatgccatttgcttatttttgcttttgttcctgtgcttttggggtcatattacagaaatcttgcccagaacaatgtcatggagcatttttaaatgttttcytcctagtacttttatagttttagggcttatttttcagtctttaactcattttgagttgatttttgtgcatgagcatggcatgagataagggtccaatttt

SEQ ID NO: 261141 - DNA, 201 bp, Homo sapiens
agactttaaaaccagtgaactgaggggagaagctgtggtttgttaagagcagtgtgtgcttgactcctagagtcccaagtcttataaaatatatgagtggygactttgataacctcgtctttcagagtgatgagagtaacacatatgttggagaggaaatatgagatggcagagaagagaagaaaaaagaataatgtcaaa

SEQ ID NO: 261142 - DNA, 201 bp, Homo sapiens
ttttcacccttttcaggccttaaataaatgttgtgtctttaggggtaccggaaatattttcttctacctctccctttttctaaaggagaaagatcagcttytagtgttcattcccctactgttctctcactcatttgtagtaggttcagaagaggattaaacagtttaatctactttttttttttttttttttttttgaga

SEQ ID NO: 261143 - DNA, 201 bp, Homo sapiens
ggtgattttttctgttttcctttttcacccttttcaggccttaaataaatgttgtgtctttaggggtaccggaaatattttcttctacctctccctttttytaaaggagaaagatcagcttctagtgttcattcccctactgttctctcactcatttgtagtaggttcagaagaggattaaacagtttaatctactttttt

SEQ ID NO: 261144 - DNA, 201 bp, Homo sapiens
aggaccctatgttctacctggtgattttttctgttttcctttttcacccttttcaggccttaaataaatgttgtgtctttaggggtaccggaaatattttyttctacctctccctttttctaaaggagaaagatcagcttctagtgttcattcccctactgttctctcactcatttgtagtaggttcagaagaggattaaa

SEQ ID NO: 261145 - DNA, 201 bp, Homo sapiens
tatccaaagataaagctaaaataaataattaaataaataaacttctaaatgttccttccctcaatttctcactctgtgcagtctcattagagggattcctytcagaagcatggatagagttaggtgcttttagtggttgtaggggtttgtaatagtgtagttaggaccctatgttctacctggtgattttttctgttttcc

SEQ ID NO: 261146 - DNA, 201 bp, Homo sapiens
acaaaggagaaattatatccaaagataaagctaaaataaataattaaataaataaacttctaaatgttccttccctcaatttctcactctgtgcagtctcrttagagggattcctctcagaagcatggatagagttaggtgcttttagtggttgtaggggtttgtaatagtgtagttaggaccctatgttctacctggtga

SEQ ID NO: 261147 - DNA, 201 bp, Homo sapiens
cctccaaataattcttttgcagactccttattttggggggactatgcataaagaagaagccaaaaactaacttcatattataatctttgtccatactaaaraaatttttatgtcattaaatgaaatattgcattatgtattcatagataatcttatatatgacagtcattatttcaaactctggaaataaaattattttaa

SEQ ID NO: 261148 - DNA, 201 bp, Homo sapiens
tcaactagactgtttttcattataatttaaatggctctgcagttatatattctgtattttttttatgttcctaatccatttaaataaagctgtaggtatgrccatggaaaccagttagcactttcttagtttgcattatccaaaaggtgttggatttgtcggattgcaaattggtttagagttctccgtcactgaagggac

SEQ ID NO: 261149 - DNA, 201 bp, Homo sapiens
tgtaggacatctcagagccttcagtagcctttcaaggccctcgaagatgctcagaggacacgtgtcgcctgcagcttttcttaaattaatttgaatgcaaraagctttcatcatggaatacttatcaacagcttattagacactatgttccaagaaacatagtcatgttattcagaaaatgctgatttagaagaacaacaa

SEQ ID NO: 261150 - DNA, 201 bp, Homo sapiens
ccccacaccactcctctttcctcagtgaacatgaacatctgcacatctgctcagcccaggtatacaaggtgcttcatccacagcctggcgtaagtctgccyttttttttttttttttttttttttttgagacggagtctcgctctgtcgcccgggctggagtgcagtggcacgatctcaagtctgctttttcagtttcatc

SEQ ID NO: 261151 - DNA, 201 bp, Homo sapiens
tttagagttctccgtcactgaagggacaacacaaaccagagtacacttcaatagttcctcaatttgtatagaaaagcctgaaacctttccttttttaaaatgcaaatcacgtaaagttaatatctgtacacaaagacctacctgcttaagaagtttgagagctaatttagctttgaagataatttgcaggaatgattaggc

SEQ ID NO: 261152 - DNA, 201 bp, Homo sapiens
catgacaccagcgtttgctcagtctctagtgaggcctcaggaagctgttacttacggcaaaaggtgaagtaggaacagtggtctcacatggcgaaggtgaraacaatggaggtgggggaggtgccacacactttgaatcaaccagatcttgcaagaactcactcattatctctaggatggcactaagccatgaggaatttg

SEQ ID NO: 261153 - DNA, 201 bp, Homo sapiens
taaagaaatacttgaggctgggcaatttataaagaaaagaggtttaattggctcatggttttgcagactgtataggaagcatgacaccagcgtttgctcartctctagtgaggcctcaggaagctgttacttacggcaaaaggtgaagtaggaacagtggtctcacatggcgaaggtgagaacaatggaggtgggggaggt

SEQ ID NO: 261154 - DNA, 201 bp, Homo sapiens
acagggaaataagaagtgacagtgcttagcagtagatggtgagcctgggggccggaagaagtaatgtaattgtccagattttcatttttggacagaataaytgatttagagccacacttcagacctctgagctccaactctagtgaagctttcccttttttgtctttattttcccctgatagaaacagcaccaaaggatat

SEQ ID NO: 261155 - DNA, 201 bp, Homo sapiens
ttacttttggcttggtttgcttgcttaacttgttgaaattcctttttagaatgtgacagctaccttctctaaacttggtgtgttaggctgcatttgcattkctataaagaaatacttgaggctgggcaatttataaagaaaagaggtttaattggctcatggttttgcagactgtataggaagcatgacaccagcgtttgc

SEQ ID NO: 261156 - DNA, 201 bp, Homo sapiens
attgccttttgcattagagaaaaactataaatatcgtttccctttattcttgcatgaaacttactaagtccctcagccatcccttacttttggcttggttygcttgcttaacttgttgaaattcctttttagaatgtgacagctaccttctctaaacttggtgtgttaggctgcatttgcattgctataaagaaatacttg

SEQ ID NO: 261157 - DNA, 201 bp, Homo sapiens
gttccaagcattgccttttgcattagagaaaaactataaatatcgtttccctttattcttgcatgaaacttactaagtccctcagccatcccttacttttkgcttggtttgcttgcttaacttgttgaaattcctttttagaatgtgacagctaccttctctaaacttggtgtgttaggctgcatttgcattgctataaag

SEQ ID NO: 261158 - DNA, 201 bp, Homo sapiens
taaaaataataaatccattttatgttcacataaaatatatttttatgaaaatagctacatttttaaaagcattcttcatgagaagaatcatgattagatayatgcccctaagtatctttaatgtttgacttaatagaagatacctgaattatcttatctgcttctactacattcaaacagttgcaatttgttgtggttaaa

SEQ ID NO: 261159 - DNA, 201 bp, Homo sapiens
gtttgtttgtttgttttttgccttaggaaggcatgtgaggtagtagaaacaggactttcataccagacttgggtgcaagtccgagcttagtcaccacctgyattacccagacatgtctctttaacatctattaatggaagtagtaataaactcccttccagggtggttctgggcaattaataaatgtagtgaagttccaag

SEQ ID NO: 261160 - DNA, 201 bp, Homo sapiens
ttcagattctaaaactctcaaactaattcgaccgagcactgtgatttatgtagcttccgtgtcatatgtgctttgaactggagatcaagggcagaggatayattgcttttatttttttttcctgcagaaaacttaaaggaacaagacatgtgcatctaatttatagatttagactcaaacttaatgaaatatgatgttgtg

SEQ ID NO: 261161 - DNA, 201 bp, Homo sapiens
tcttcaaagcaatgtttagacatcctctgaaattattattacttagtacctggcttcttctgatgagaggatattcctattttctcggaattttataaaasaaaaacattgaactggaacaaaaggtataaaaagtgatagtgaaaaattaatacatttaaatatattcatgtagttttgtttttattttcaatattgaag

SEQ ID NO: 261162 - DNA, 201 bp, Homo sapiens
attttatagtcattaattttaaaacaataaaattctctgatttctgtaaaacaaattcacagaactaagagcattccatgaataaatttccttttcttcayggttaattttagcttccccaaatcttacagttgtgcttgtattcactgtttctttgggggcttcttatgtgataattcagattctaaaactctcaaacta

SEQ ID NO: 261163 - DNA, 201 bp, Homo sapiens
atcatgaagtgaaaggaatatggttttttcattagacagacagggataaaagccctgatctgctactcaatcaaattttgaaaccattttgagcttatacraaaactaataccaaccagtacgactgcttgcagtatatgaaaaaaaatatctaaaaagacgtcgtattgcatgataggacatgatacataggcgatctct

SEQ ID NO: 261164 - DNA, 201 bp, Homo sapiens
tatacaaaaactaataccaaccagtacgactgcttgcagtatatgaaaaaaaatatctaaaaagacgtcgtattgcatgataggacatgatacataggcgrtctctccctacttcacacacttgcgctcctttccaaggcagcctacgccttacactacatagcatttgattatttgaaatcaacaaccacttaatcataa

SEQ ID NO: 261165 - DNA, 201 bp, Homo sapiens
gacgtcgtattgcatgataggacatgatacataggcgatctctccctacttcacacacttgcgctcctttccaaggcagcctacgccttacactacatagmatttgattatttgaaatcaacaaccacttaatcataaattttcctcttctccagtgcaatggatttttcttattctcaatgtcttcagtctttcctgatc

SEQ ID NO: 261166 - DNA, 201 bp, Homo sapiens
agcagaaattttctcccattttgtaggttgcctgttcactctgatggtagtttcttttgctgtacagaagttctttagtttaattagatcccatttgtcarttttgtcttttgttgccattgcttttggtgttttagacatgaagtccttgcccatgcctatgtcctgaatggtattgcctaggttttcttctagggtttt

SEQ ID NO: 261167 - DNA, 201 bp, Homo sapiens
caaggcagcctacgccttacactacatagcatttgattatttgaaatcaacaaccacttaatcataaattttcctcttctccagtgcaatggatttttctyattctcaatgtcttcagtctttcctgatctgccaggtttcccaaaccccactatcattacctttgttaccatgctctggtatcctctagtttacaggaac

SEQ ID NO: 261168 - DNA, 201 bp, Homo sapiens
ctttttcattgcagattaattttgtctatatcgttaaacacgttacataaattgagaattttaaaataggttttattggcctgctttttacatgacatcayatattttatagattttgtttcacatgtatgcatgcatgcaatacagaaattataaagcaaaaggaaaagcatatgagaaacactaaagaactatctcata

SEQ ID NO: 261169 - DNA, 201 bp, Homo sapiens
atagctacatttttaaaagcattcttcatgagaagaatcatgattagatacatgcccctaagtatctttaatgtttgacttaatagaagatacctgaattrtcttatctgcttctactacattcaaacagttgcaatttgttgtggttaaagtataagtaaaagatctagcttcatatagttgaaaataaaaaagtatttt

SEQ ID NO: 261170 - DNA, 201 bp, Homo sapiens
agaaattttattccattcagagaataactgtcattttactaaagtgtggattatataataaatcatgttataataatgtcgaaagctacatcatcaacatrgactcagaaaagagaaattatttctcatagacgacacaaatgtccacaggcagctacatgtggcagcttttccaataccatttcaagtttttgatgctag

SEQ ID NO: 261171 - DNA, 201 bp, Homo sapiens
tattatggacatttttatttttgtatcactggggacaattacatacctccaaataattcttttgcagactccttattttggggggactatgcataaagaaraagccaaaaactaacttcatattataatctttgtccatactaaagaaatttttatgtcattaaatgaaatattgcattatgtattcatagataatcttat

SEQ ID NO: 261172 - DNA, 201 bp, Homo sapiens
tgaatttaggaaatatgcacacacatattattaattgatttaaatagtcattatcataacaataattataatgtgttgagcccctaccatgcaccaaacartttgtgtggattagaacatcccatcctcacaatcccttgaagtaagtgatattataagccatttattacatgtgagagattcgctatagctcaattagtg

SEQ ID NO: 261173 - DNA, 201 bp, Homo sapiens
tattattatggacatttttatttttgtatcactggggacaattacatacctccaaataattcttttgcagactccttattttggggggactatgcataaaraagaagccaaaaactaacttcatattataatctttgtccatactaaagaaatttttatgtcattaaatgaaatattgcattatgtattcatagataatct

SEQ ID NO: 261174 - DNA, 201 bp, Homo sapiens
gagtggaaaaaaaagagaatgatgattgaatttaggaaatatgcacacacatattattaattgatttaaatagtcattatcataacaataattataatgtrttgagcccctaccatgcaccaaacagtttgtgtggattagaacatcccatcctcacaatcccttgaagtaagtgatattataagccatttattacatgtg

SEQ ID NO: 261175 - DNA, 201 bp, Homo sapiens
tagcctgactccagtcattattactcattcctattattatggacatttttatttttgtatcactggggacaattacatacctccaaataattcttttgcaractccttattttggggggactatgcataaagaagaagccaaaaactaacttcatattataatctttgtccatactaaagaaatttttatgtcattaaatg

SEQ ID NO: 261176 - DNA, 201 bp, Homo sapiens
tattttcaactattctttgcaaccagaccacagcatgattgatttggtataattcaaattgctgtgacataattatgactattgtttacccaaatatagtytggggtggtacataaatactttcttctgcagagacataaacaattgctgctggtaagatcaagctgcatgtcctggccctctgctcctccacccacctcc

SEQ ID NO: 261177 - DNA, 201 bp, Homo sapiens
aggagtcgaaagctgtcttcttgtgccgagtcagttcctgggtgagaccagatgagccagcttattgacctgggtcatgccagctgatccattgagtgcaragtctccagaatatttcaagcactgatattaggtttcacaacagtgatggtatccccacgagcaatttagagaggttcagaatcttgcagcctccagctg

SEQ ID NO: 261178 - DNA, 201 bp, Homo sapiens
aaaaagcatagcctgactccagtcattattactcattcctattattatggacatttttatttttgtatcactggggacaattacatacctccaaataattyttttgcagactccttattttggggggactatgcataaagaagaagccaaaaactaacttcatattataatctttgtccatactaaagaaatttttatgtc

SEQ ID NO: 261179 - DNA, 201 bp, Homo sapiens
ggttgtcctgatcattcccctggtgattctgcccgtttagagtcaagttcattgataatcaaaggggcaggctaccagggaagtttcaagccttctgggtrctgagatggccccttcccatctttagtgtcattgcctagattccttaagttctgataggaactgtttggtgaagtgcaggaagagacaacttcagctcta

SEQ ID NO: 261180 - DNA, 201 bp, Homo sapiens
agattaagagcatagcttagagtcacatttgttcagttccttatttcttaacctgagcctttaattaaaccagtttgtgcaatggatcttacaaaacaggragctatttatgtattttctagttcttagagattaaacttttacttccgtaaagtagaagtcataatatttgcccatattcatactagttttgtcctgaag

SEQ ID NO: 261181 - DNA, 201 bp, Homo sapiens
ttaagagcttagtatcaggaacctatttaatatatgactaaaattgtttatgctgtaattaagctcatttcttcttgtgctcttctcctgcagaatacaawcaatcggtggttatagttggcatgttgaaatttattttattactgcccatatgtttttatgttcttattgataaatgtaaacctccctggtattgtagga

SEQ ID NO: 261182 - DNA, 201 bp, Homo sapiens
  misc_feature (1)...(201): n = A,T,C or G
gtaattaccagttctagtagtaaattcatgttaccttggacaagaaattttttaaatggtagattaagagcatagcttagagtcacatttgttcagttccntatttcttaacctgagcctttaattaaaccagtttgtgcaatggatcttacaaaacaggaagctatttatgtattttctagttcttagagattaaacttt

SEQ ID NO: 261183 - DNA, 201 bp, Homo sapiens
  misc_feature (1)...(201): n = A,T,C or G
cagatctcagtcacctaattgcacagaaggctgggaagcattgtttacatgtgtgtaaaggagcaaaggggaaaggatttggtgactggccaatcgtagcnttattcgtagtgctatttaataatgggtgtatgtgggaggtaatttgtataatgagaacactagtttatgcgtgtaattaccagttctagtagtaaattc

SEQ ID NO: 261184 - DNA, 201 bp, Homo sapiens
ttacttatgttcaaggacagtaagaaataagttgtaaatatattgtttacagattggttttattttggtttattatttgatgtaggaaatgatacagatgygatacatgttgagatttaaaaggatacaaatcttgtgatattttaagagtttattacagattatattttctattatttatcacatacctactataataac

SEQ ID NO: 261185 - DNA, 201 bp, Homo sapiens
gattcctaagaaaaatttaactattagaattatctcttcagatgcatgtttaaaacaggaagtaacataaagagagaaaattgtgtgttgggttgtttcakgttaagactgctaatatttgctgagcacaatgtgacagatactaagtacctaacattgtttaactcatgtaatctacaaatgcaataaccctttgctgct

SEQ ID NO: 261186 - DNA, 201 bp, Homo sapiens
aataaccgaaacaatggaaaagtcattacagctaatagtcaaataaataaaaatgaagcaactttgagatagtgtttactgcattcatgctctgcctttctttttttttttttttttttttttgagacagagtctcaccctgtcgcccaggctggagtgcagtgacgcgatcttggctcacagcaacctcctcctcctgga

SEQ ID NO: 261187 - DNA, 201 bp, Homo sapiens
ctcagttttcctggctcaactcaaacaccaattattctgtgaagtttccaaaatttctctccctttcccaagcacagaatggttttggtcttccttttttwaaatcaccttataccttttgcagtacgtaatagattgtatgaagacttactggcttgtttacacatgtgattcatatatcctcagatctttctagcctag

SEQ ID NO: 261188 - DNA, 201 bp, Homo sapiens
ataaccgaaacaatggaaaagtcattacagctaatagtcaaataaataaaaatgaagcaactttgagatagtgtttactgcattcatgctctgcctttctttttttttttttttttttttttgagacagagtctcaccctgtcgcccaggctggagtgcagtgacgcgatcttggctcacagcaacctcctcctcctggat

SEQ ID NO: 261189 - DNA, 201 bp, Homo sapiens
ctgcctcacattttaaataaatggtaaaaatgatgcagactagtttttccctaaaatcctccctttcataatttaatttacactaccattttttttttttwttaaaaacaggatctcactgtatcacccaggctggagtacagtggcgtgataatgtctcactgcagccttgaactccctagctcaagtgatcctcccgtc

SEQ ID NO: 261190 - DNA, 201 bp, Homo sapiens
tgcctcacattttaaataaatggtaaaaatgatgcagactagtttttccctaaaatcctccctttcataatttaatttacactaccatttttttttttttwtaaaaacaggatctcactgtatcacccaggctggagtacagtggcgtgataatgtctcactgcagccttgaactccctagctcaagtgatcctcccgtct

SEQ ID NO: 261191 - DNA, 201 bp, Homo sapiens
actgttttcagtttgaggtgtaaacggtcagctaaaaagaatggctatcaatgtcacagataacctagaaaatatcatcattctagcctgactattgaatstgacccatatgcccctggattcataacatgagatgtcaaacattgagttgccttaggactactagcagtccacatgttttctagatcagatgcatagcat

SEQ ID NO: 261192 - DNA, 201 bp, Homo sapiens
taatttaaactatgtaatacttcaagcagagaaataagttgtggattctaatgaggctgccatccgctctagcttcctttaggttatgtctcctaaacatmtggtgtcggtgttggtgttatattttgtatgggaaaacatataaaaatctttatagttttatgatattattacaatacagttttgctgctgttactgttt

SEQ ID NO: 261193 - DNA, 201 bp, Homo sapiens
ttgtagaaatactgttaaagttaataacaagtgatatttattgatggccagtgtgtttgaaagtcacaattcttgcagatgttagatgtcagttctcaaakagctaatgttctccactgcagcaagttatagtgaaacagcaattattcaaaattgcattgaagttcatgtttcaggttgtgaaatgttattagcccttat

SEQ ID NO: 261194 - DNA, 201 bp, Homo sapiens
aatcctaccccatgaggtagatatattattgataattttatctctgttactgaaatatttgtcaggctaatagatttaatattttattcttctaaagactmattttgtttgattgatgtgacagcaaaaatattaaagaacctcaagttaatgaaaccattctttctgttattttcagcgaagtttcttgggctatgccag

SEQ ID NO: 261195 - DNA, 201 bp, Homo sapiens
tacattttcaccctttaatcctaccccatgaggtagatatattattgataattttatctctgttactgaaatatttgtcaggctaatagatttaatatttyattcttctaaagactaattttgtttgattgatgtgacagcaaaaatattaaagaacctcaagttaatgaaaccattctttctgttattttcagcgaagtt

SEQ ID NO: 261196 - DNA, 201 bp, Homo sapiens
tttaggaccagctcatctaagttaaagattttaaaagagggagaaaaattccgacttgaagcttttctttcctctgcctagcagtctctgagtgtggatgyagcctttcatgtgtgaaataatttcctatttacctcgaaaaagatgccattaccctcaaattctttgtccagcctctcattctagtgtagctcagcagca

SEQ ID NO: 261197 - DNA, 201 bp, Homo sapiens
gggggttatcagcaaacaaaagaaagctctttgtagagcttcaattctcaattattttttggagaggtgcaaaataaatatataatatgtcaggtggtcayaagtgtcaatagagaaaaataaaacaggaatagagaatagaggagtgtgtatgtgggaggggagtgtgctttcgtatagggatgtcttagagagcatctc

SEQ ID NO: 261198 - DNA, 201 bp, Homo sapiens
tgtaccagatacctactgtgtgctatgcagtggggggttatcagcaaacaaaagaaagctctttgtagagcttcaattctcaattattttttggagaggtkcaaaataaatatataatatgtcaggtggtcataagtgtcaatagagaaaaataaaacaggaatagagaatagaggagtgtgtatgtgggaggggagtgtg

SEQ ID NO: 261199 - DNA, 201 bp, Homo sapiens
acctcctggtacatccacttttgaacaccagtgggctaggttagtggcttgcaacttggtttgattatacatctctaccagttaaaaaggttctaggtgartagtatctttatctagttaaaaagattctagagaaatacattttaaaaggtgccaacgtaggtgcacaaaatatctcggctcacagcatctgtcctatcc

SEQ ID NO: 261200 - DNA, 201 bp, Homo sapiens
aatttatgattgcttaaaagttttctttgagtgtgaataatgagtgggaatttaatttaaaagctatgattatcagtgaaggagaaagtaagatcgacatytctttaaaatacaaaatgctaaaataaaattcactacagcagtatacgatctgcatactataaaattgttttgattttccacatttcagtgaacagtagt

SEQ ID NO: 261201 - DNA, 201 bp, Homo sapiens
cctggtgctctgagcagaggacatcataaaacaaatatatggtttcctgaccatatatggtctggatacaagggaaggggtccggtgtgactcttgatgtstatgaaggtagactagcagggatagaggaagggtggcagtggtgagcctggctgtgcaggctgtgatcagtcaggctgtggggaactgagggctggaagg

SEQ ID NO: 261202 - DNA, 201 bp, Homo sapiens
cccagctacttgggaggctgaggcagaagaatcgcttgaacccgggaggcagaggttgcagtgagccgagccaagatcacaccactgcactccagcctggygacagagtaagactccgtctcgaaaaagaaaaaaagaacggttgtcctgatcattcccctggtgattctgcccgtttagagtcaagttcattgataatca

SEQ ID NO: 261203 - DNA, 201 bp, Homo sapiens
agttgggcattgtttatgggggttgcgtgagtaatagaattcctgatggagacaggagatgtggaaagagagaggtaagaggggatcgcgggggcagagcraagtatgaaatacaaagagccagggcccagcctctctgctatgccagcagtgacattcgggctgggtgattgtggcagggactgtcctatgcattgcagg

SEQ ID NO: 261204 - DNA, 201 bp, Homo sapiens
catggttcataattataagttgagggaagtcttatttcaataggacacatgttttgttaaaacaattttgggaaaaatatttttactttccttaaccttcrcatccatgcctgcaatatgaacatgtaaatacccactacttatattcaaaatagaatttcaaagtggtttcttcaccagggtgcaatttctgtacttctc

SEQ ID NO: 261205 - DNA, 201 bp, Homo sapiens
gatcaagtctaaacaatttttttcattgtcttgtacaaatatttgaggtttacttttatcttttttgaggtataattgataaaatttccagcctcaccatygtcactaattttatctctctctttctttttttaaatggattctctcttttttaccgcattggcaagaaaatgcatggttcataattataagttgagggaa

SEQ ID NO: 261206 - DNA, 201 bp, Homo sapiens
ttgctactcccaaggacctggtgatatttttctttaccatgcattaaacagaatctgtgagtcttttctggaaaaaaaaaaggcaggagggaacatactarttaaaaagtttctgggtacactaccaagatgtacctatttattgatatacaaatggcataagttattgaatgcttgctataggcattctctaagaacttt

SEQ ID NO: 261207 - DNA, 201 bp, Homo sapiens
ctcagacactcaggtatctggcagtatatatatatatatattttattatctcaaagaaaaaaatttgctacttagagggaaataaaatcctaaattgtttwtatatatatatataaaataacaattttgtaattatatataatcacaaaaaaaggcctgaaaagggccaggatcaagtctaaacaatttttttcattgtct

SEQ ID NO: 261208 - DNA, 201 bp, Homo sapiens
taaaaaatgttaaattgtgtttagtttgtttttcctaaaatctaaaaaacaaaaagtactatgcattaggtggattattttgctcttttgttcatggaaargtgtttcccactgttaactagctcaagaagaatttttaaattactgtctttggaataagacaaagaacagaatcctgaaagcttgaagttctgaacctcc

SEQ ID NO: 261209 - DNA, 201 bp, Homo sapiens
tttaactattagaattatctcttcagatgcatgtttaaaacaggaagtaacataaagagagaaaattgtgtgttgggttgtttcatgttaagactgctaakatttgctgagcacaatgtgacagatactaagtacctaacattgtttaactcatgtaatctacaaatgcaataaccctttgctgcttttgaagttagaaaa

SEQ ID NO: 261210 - DNA, 201 bp, Homo sapiens
attgatagtacttctaaaagtcatctaaagtacgctaattcattttatcataattacatagcccatctcttgctgtcagttcctgtttgtcccaaggaacyctttaatttaataatatattaaataaaataacaaaatatagaacagattcagaacaacaaaatatgtaacatcagagctggtgaatgatgtttattcggt

SEQ ID NO: 261211 - DNA, 201 bp, Homo sapiens
agcctgttctagtttgcagccttggagcaatgttgctttagattaatgtgtcaccaagctcttattgagaaagaagttcttttatttccttataggctggwtttgcacttgtcaattgtgtggatgaagaaaagaggttagagaaggggcctcccacatactgatgatttttagtgtctcttcaccatctatatctgggga

SEQ ID NO: 261212 - DNA, 201 bp, Homo sapiens
aagaatgatttggtgagagatgtgtagctgattgacaattttagtgtgaattcatattcatttaacccagcagcaatctacataagctatgctttttcccrcctgtatttatgtttcttagcttataaagtcccaatatattatatcttttgttgctttggcagttttaatttagagctctgcgttcacagagatgccacc

SEQ ID NO: 261213 - DNA, 201 bp, Homo sapiens
ctgagagttaccattttcagtatcaccctatgaagcctccacaggaaggtttcattgagcctgggtgaaaaaaaaaaaccccaaaaaacttcctccttttyatacaaatgtgaccatactatttggagattaaatagtttggcctcagtaaatgaaagaaaattttcctttttggtctggattttattattcaaggtctcc

SEQ ID NO: 261214 - DNA, 201 bp, Homo sapiens
aatagatgaataagcatcaaaactgcctttttttcttagggagagagaaaaaaatggtaagggagaaaaattctgaatgaagttcagagtcaagcattcaytgggtcacttgagacataattcacttttctgtacaaaataatgtctcctttcagatttaaaatgtggtagtgaaaatgaatgaacaagagggtgctaaac

SEQ ID NO: 261215 - DNA, 201 bp, Homo sapiens
ttcagatgtgatagctcctgagagttaccattttcagtatcaccctatgaagcctccacaggaaggtttcattgagcctgggtgaaaaaaaaaaaccccaraaaacttcctccttttcatacaaatgtgaccatactatttggagattaaatagtttggcctcagtaaatgaaagaaaattttcctttttggtctggattt

SEQ ID NO: 261216 - DNA, 201 bp, Homo sapiens
aagaataattgtgttctttattacttttcatatttccagggcccaacataatttttatacttcctgattatattctctgagctctatagaaaaagagtacytgtgcttctatgtgctttgtatatgagcctaggaaagcagcacttacaataatctaccttaatgctttgttttgcttctccttttgcacacaagcatggc

SEQ ID NO: 261217 - DNA, 201 bp, Homo sapiens
cttgcagacatttgctagtacctaacatcttcctctggaaagatgttaattttctacttattgccaattgcctggatttaaatctgacttacagctatgtraagatttctctacacctcagtttctttattcataaaagagtaataattgtggcacctacttactgtttttacttctttgaggattacatgagctagttaa

SEQ ID NO: 261218 - DNA, 201 bp, Homo sapiens
actgctctcctctctcccttttatctagaatgcctttctcccctggcaaaagttttaccccatctttaaaggtattctgccaatatcacctcctttgtacrttttctagattaactaatataatctttctcttttgaacttgtattgtaatttgtaccttctgtccagcactttatcattttatacattgtaaaccaattg

SEQ ID NO: 261219 - DNA, 201 bp, Homo sapiens
catttcaaacatttatataagatttagatttctcccttacttgacccctgtctctgagaaaagtaggccacacatctctgtacattctcattcttacacarttgaattaccctttcttattttcaaatcaacactcactgctctcctctctcccttttatctagaatgcctttctcccctggcaaaagttttaccccatct

SEQ ID NO: 261220 - DNA, 201 bp, Homo sapiens
cccttgagttctggatggaaagctatccaagctttcctcacatttccttctcatatcatttcaaacatttatataagatttagatttctcccttacttgayccctgtctctgagaaaagtaggccacacatctctgtacattctcattcttacacagttgaattaccctttcttattttcaaatcaacactcactgctctc

SEQ ID NO: 261221 - DNA, 201 bp, Homo sapiens
gcctcacattttaaataaatggtaaaaatgatgcagactagtttttccctaaaatcctccctttcataatttaatttacactaccattttttttttttttwaaaaacaggatctcactgtatcacccaggctggagtacagtggcgtgataatgtctcactgcagccttgaactccctagctcaagtgatcctcccgtctc

SEQ ID NO: 261222 - DNA, 201 bp, Homo sapiens
tcacatagataaaagatttattttctaactttgagggtgagagaatccttcttttatttatactgaggtgaagaaaacaagaaaccagctcgaaagtaaaygtataggcaatcccattgtttgttgttgcagcataaaacaattgtcctcacattttttgattttattaatgtagtttatacaacatgcagtcctgatata

SEQ ID NO: 261223 - DNA, 201 bp, Homo sapiens
agtgagtattcacatagataaaagatttattttctaactttgagggtgagagaatccttcttttatttatactgaggtgaagaaaacaagaaaccagctcraaagtaaatgtataggcaatcccattgtttgttgttgcagcataaaacaattgtcctcacattttttgattttattaatgtagtttatacaacatgcagt

SEQ ID NO: 261224 - DNA, 201 bp, Homo sapiens
tagcatcatgtgctatagagaagactcttctcattcattcttttacaatgtgttcagtgagtattcacatagataaaagatttattttctaactttgaggrtgagagaatccttcttttatttatactgaggtgaagaaaacaagaaaccagctcgaaagtaaatgtataggcaatcccattgtttgttgttgcagcataa

SEQ ID NO: 261225 - DNA, 201 bp, Homo sapiens
gggcagaaagtgagttagataggcaatcagtcatgtctccacactcctgctagatgtactccatgagagcaaagtctctatttctaatattcctggctttrtgcttggaagctagcaaatctatgaactatgtattgaataaatcaaaaagcacaccatgattttattttgccaaccattttatgtattattagaaccacc

SEQ ID NO: 261226 - DNA, 201 bp, Homo sapiens
tctggaaaacaataatttcctgggaaatttcattttgtatactgtcacttacatagtattggggagcgcctaagtccttagctagaagagaatctgggtayaattctcatttaaacaaaactgaggtgctattagtaatgaagaaagggcagaaagtgagttagataggcaatcagtcatgtctccacactcctgctagat

SEQ ID NO: 261227 - DNA, 201 bp, Homo sapiens
agggcaaaaagctcagctggcctatcccttcaattctggaaaacaataatttcctgggaaatttcattttgtatactgtcacttacatagtattggggagmgcctaagtccttagctagaagagaatctgggtacaattctcatttaaacaaaactgaggtgctattagtaatgaagaaagggcagaaagtgagttagata

SEQ ID NO: 261228 - DNA, 201 bp, Homo sapiens
cgtgcagtggggaggaagcctaatgtgagtcccacacatgtcctgccctttcttcttttgattcctcagttgtggcagcaaagaggaaggagtagggagasagaggtttattctgggcttgcccctggtgagggcaaggttttcttactgctagacttgatgcttctcaggcaatggttacctgttaagagtcctctatgt

SEQ ID NO: 261229 - DNA, 201 bp, Homo sapiens
tttttctctcactcatgttcttgggaatccatcttaattattttaaaccttgagtctcttttctgattttattttcttctacctcctcccaccatttcccmctacgggctagactttctgtgactctagcaacgtgcagtggggaggaagcctaatgtgagtcccacacatgtcctgccctttcttcttttgattcctcag

SEQ ID NO: 261230 - DNA, 201 bp, Homo sapiens
ctggaagtacaagttgcaatactgaaatcaccttcctttgtcttttgtctttttaaaatttgctttcccttggcttagatggacacagggaagataaaaamtaccctgcacaaatggaaatcactgaaatgctagaaccccaatatctattagggattctcttagatccctcttaattagcgtgttagacaaagggtaggt

SEQ ID NO: 261231 - DNA, 201 bp, Homo sapiens
ttcctttccaatgccgtggatcagacttggggtcccttgatccatggggaagttgtatgactttttgtctactcctcctattcttacctcacttgggagcmtagggtaggactggttggctgacctttaaatatgttctttctctccattttcttgtgtggcgaggtggggagaaagaaaagggaaaaggtacagttagtt

SEQ ID NO: 261232 - DNA, 201 bp, Homo sapiens
taggttatttattttatactttgggttataatctattattgctctatttatttagttgctcaagtttttgtaacattggccactgggagcaccttcaattrttccctttcttcttttgaataaacctatcattaattttttttttgaggggtatgtgagaacagggtcttgctctgttgctcaggctggagtgcggtggct

SEQ ID NO: 261233 - DNA, 201 bp, Homo sapiens
tagttgctcaagtttttgtaacattggccactgggagcaccttcaattgttccctttcttcttttgaataaacctatcattaattttttttttgaggggtrtgtgagaacagggtcttgctctgttgctcaggctggagtgcggtggctcgatcttagctcactgcaacctcgacttctcagcccaccccagcctttcaag

SEQ ID NO: 261234 - DNA, 201 bp, Homo sapiens
ggattatttaagtgtagaaaattaaactacactacaacttctgcaagttaatctgaaagactatttgtacaatctagaggcaaggagtagggaaagttttyttaagaagtccagaaaagacatatatggtaatttatgactgtatcgtaatctaaacattttatatgtatggcataaataagatgaaaattagatatgaaa

SEQ ID NO: 261235 - DNA, 201 bp, Homo sapiens
ccacttggagaggtccgatgggtggctgcttatggacattgtggagttcaggcgagagatttaaattagagatcttcagctctaatctttgtgaatccttragaatatgtctaacttactgaaaaattaaaaataagttggaagttggttctgcattatattccaagaccttccttcatctattgcactgttcttacaccc

SEQ ID NO: 261236 - DNA, 201 bp, Homo sapiens
ttttttgtttgtttgtttgttttttgccagtgttctttacagtcttttaaagaaagggaagaaagaattctgtggctagactctcaaaggttatttcctgkcacaatggacaatatgatatgtaccagcaaacagctactttctatacagctcctccacaggctgggatcatttcctgatgatttctgaactaatttttcc

SEQ ID NO: 261237 - DNA, 201 bp, Homo sapiens
gcaattacagtgaaaatttttcactgatgccagtttaatctcattttcaccagcggaatttacttttcaggatggctattccatggaagcaagatcaaccrcagtttgcccgggcatggtggctcacgcctgtaatcccagaactttgggagttcgagaccagcctggccaacatagcgaaaccccttctctactgaaaat

SEQ ID NO: 261238 - DNA, 201 bp, Homo sapiens
tcatagaaatgttaacagaatcctgatctcagggtctataatgggggccattttatggttaaaattacctaaatgttaaaattatgctatttcttttaatmtttctttaaaggccctcttatatatgaaatttaactcaaaaacatattgtaacattctagtataatttttaaagctttgaagttctttctacaatcaata

SEQ ID NO: 261239 - DNA, 201 bp, Homo sapiens
ctactttttccacctaacatgttataaatgataatcactatttttgtgaattgacataattaaatggcattccatcattgtagtcaccataaccatcatcktgactattatgtaaaagtatggttttctttcctgcagtgtatagctctctgacctggatcctgtgggatttgcagaattaatatagatattacactctcc

SEQ ID NO: 261240 - DNA, 201 bp, Homo sapiens
aattcaatgcataaatttaacataattttaaataaaatctcaaaagtattttttatggagaggaatgttgggaattagatacgtttttttctttaaaattrtgggtaaatatcaatatccaagaatagccaaggaattttaaaaataatagtaagacttacctgatcaggcattgaaacataacataaaactacaatcaaa

SEQ ID NO: 261241 - DNA, 201 bp, Homo sapiens
gttttctttaataatatatgtacaaagaaattgaaatcagtatattgaagaagtatctgtactcccatgctcattgtagcattatcacaatagattattcmcaatagctaagatatggtagcaacctaagagttcatcaatggatgaatgaataaagtaaatgtggtatatgtacacaatggaatactattcatctctaaa

SEQ ID NO: 261242 - DNA, 201 bp, Homo sapiens
tcaggccctatttagttttctttaataatatatgtacaaagaaattgaaatcagtatattgaagaagtatctgtactcccatgctcattgtagcattatcmcaatagattattcacaatagctaagatatggtagcaacctaagagttcatcaatggatgaatgaataaagtaaatgtggtatatgtacacaatggaatac

SEQ ID NO: 261243 - DNA, 201 bp, Homo sapiens
tttgacaatgatgaataaaacatctatgaacatatgttgacaaatattggtatgaaaatgtgcttttattcttctgggtaaatactgaggagtataatttytagagtataggacagattcatgtttaagtttcctagaaactgtcaaattattttccatattgattacatgactttttactcctactcctagtaatttgag

SEQ ID NO: 261244 - DNA, 201 bp, Homo sapiens
gctcattcattcagcctctgccttttgaaatgcttctgtcttcattgtgacatagtttgcaaagggagttacagatgtcttgtagagggagctgaggcttytaaaatgttgctaccctttataattaagttcactttccttgttgataagtaggatttatttacaaaggacataatttttaaattgagatataatttatat

SEQ ID NO: 261245 - DNA, 201 bp, Homo sapiens
ttatctgtatccttccaaagtctaacagcttattttttaattgctgaatatctcattttatatttcatagatgtaccagtgtttgtttttctgtttttctrtcaaaggtcattttggttgtcttccagtttgggctgattacaaataaatgtgcaataaaaatttgcatgtagtttctaggtaaacgtgctttcaaatcag

SEQ ID NO: 261246 - DNA, 201 bp, Homo sapiens
gaaaagaacatcaccataaaactttgtctctttttcccattcatcccatgcaacatggtgctgtggaagatattgatgagtaagcctcttccaacaccctytgaggacagccatcaaatctgcaaacatatattaggtcacaaaattatttttatttttgcccatggtagaaatttgaatttctactctattttgcagaag

SEQ ID NO: 261247 - DNA, 201 bp, Homo sapiens
ttctgtaaggtacttccaagggacttcctctgtaaaaccagcctgagccccaggagatttccttcagtgctgtagctaagttcactttcagcccggcgcaraagttttccctgagatatggtgttagtttcttttctttctgtctcctctgccgttgccagcatgcaaggatctcgtggctcctgtccgtgatcgtaaact

SEQ ID NO: 261248 - DNA, 201 bp, Homo sapiens
gtttgtttttctgtttttctatcaaaggtcattttggttgtcttccagtttgggctgattacaaataaatgtgcaataaaaatttgcatgtagtttctagrtaaacgtgctttcaaatcagttgggtaaatatttggaagcacaattgctgggtcatatggtaaggttatctttagctttttagaaattgccaaattgtct

SEQ ID NO: 261249 - DNA, 201 bp, Homo sapiens
agtcccaagtcttataaaatatatgagtggtgactttgataacctcgtctttcagagtgatgagagtaacacatatgttggagaggaaatatgagatggcmgagaagagaagaaaaaagaataatgtcaaaggaaaattataaaaagcaggcttgcccgattgaaaataagctaaaatgagaggaaggacaagatgagagc

SEQ ID NO: 261250 - DNA, 201 bp, Homo sapiens
gcacatgcacacaaacaatacaaaataacatgtatatagatatgtatatataaatatttgcccttggtgaaattcagctcttacaacaaaagtactgatamagattttgagtcactttggtaggtttctgtattcgtatgacaattagaatctactttttccacctaacatgttataaatgataatcactatttttgtgaa

SEQ ID NO: 261251 - DNA, 201 bp, Homo sapiens
ttttctgtttttctatcaaaggtcattttggttgtcttccagtttgggctgattacaaataaatgtgcaataaaaatttgcatgtagtttctaggtaaacrtgctttcaaatcagttgggtaaatatttggaagcacaattgctgggtcatatggtaaggttatctttagctttttagaaattgccaaattgtcttccaag

SEQ ID NO: 261252 - DNA, 201 bp, Homo sapiens
agggatcagacactaacaaaccaataaatacatgatataattacaaattttaatcaatgttatgaagaaacaggatttcatgagagaaattaacaataaasaacctaattttatataggataattagagaaagcctctttaagcaataatattcaagtggaaacttgaaagaaggcccttagcatatatattcacttacac

SEQ ID NO: 261253 - DNA, 201 bp, Homo sapiens
tctcctctaaacttctctaacatctgtgtcatacttatgacacctgtcatacattacggttgtttgtgttcatgttttacttttgcactagaatgtgtccytcttactggaactagccatgtcatatttactgttatatctcctacagtgtgaagagtgattgtttaagcaaaataaatgtgtggcaaatgtttgctgaca

SEQ ID NO: 261254 - DNA, 201 bp, Homo sapiens
gggagcatattagaatctggccaaataaataaactgcatacaattgcatagcagaggtagatctctaaccttattctagtgtcagaactatgaacctggcrcaattctcaaactttgagtctggcatcccttgtgtgactggggaagatgtattatggatgcatgaattgcggacaatagagcataatgttgagaacacaa

SEQ ID NO: 261255 - DNA, 201 bp, Homo sapiens
aatatttggaagcacaattgctgggtcatatggtaaggttatctttagctttttagaaattgccaaattgtcttccaaggtagtggtaacattttgtattstcaccaacagtgagtgtaaactactgttgatctgcatccttactaggaattggtattgtcagtcttcttggattttagttattctaataggcatgtagag

SEQ ID NO: 261256 - DNA, 201 bp, Homo sapiens
ttggctcactggaacctccgtctcctgggttcaagcaattcttctgcctcagcctcccaagtagctgggattacaggtacccaccaccacacctgttattyttttaaatatgtttttggtacagacggggtttcaccatgttggcccggccggtctcgaactcctaacctcaggtgatccacccaccttggcctcccaaag

SEQ ID NO: 261257 - DNA, 201 bp, Homo sapiens
tgatttccacttagctcattgctgatgataaccatacttggagatgtggctaagagcggccttttaaagttgaatttcttaaggagggaaagggactcackttttgaagtgtccacaggtgtctagagtaactgtgttagataacgcatcaagctcagagagtcagtggatctgaaaacacatgccaaaatgctctgatga

SEQ ID NO: 261258 - DNA, 201 bp, Homo sapiens
gagtgaggaaaaatattgaatcctgaagcagactgcaagattcatgataattaactatgattttgatggttttagttaataggtaaagaacgggttatttwagaaaaaaagtgcaggtaaaatgactatccttctagaagaaaataatattacagtttattatattctatgtgtaaaaatgaacttcatttggattattta

SEQ ID NO: 261259 - DNA, 201 bp, Homo sapiens
tcctcctcaataggtttttaatattggattaaaaattggcagtgacatttaaaatattacttctgaaaagtagaatttttagtttcctattttgtttttaraagtcttgaacccttcccatttctgagtatttcataagtgttaaatggtatatgagagtggtatatgaattctgcagtgccttaaacgtaatattgaact

SEQ ID NO: 261260 - DNA, 201 bp, Homo sapiens
atgtcatagcctgcagtgtactttcctggatttaataatagtttaaatatccatcccaccctactagactgtggaaattttgaattcgggtctttatatcrtaagaatttaggttcttcaggatataatgaactgttctaccatgaagccaagaaaaagaatttaagttatttctttttctcatgcacattctctgttccc

SEQ ID NO: 261261 - DNA, 201 bp, Homo sapiens
tatttctgttagagagtgctgatctggaatcttaatgatctccctgtcaggcttcatttgttaatgtatggagatgcaaaactagcatgaacctgggtcartgatgataaattcagctacctctgttatttctagacaacagatatcagtcctgccagtagaaagaaaggtgcacaaatcacaaaggggttaaaacactct

SEQ ID NO: 261262 - DNA, 201 bp, Homo sapiens
ctgtgccaacatagttgcaatgactggattttaaagtctcaaccctgtaatgtctagaactgcactgttcaatatagtagccttgtgtgacttttgggtamttgaaatgtgtctagtccaaatcaataagtactagatatgcataccagatttcaaaaactagttttaaaagatattttatattgataattaataatttca

SEQ ID NO: 261263 - DNA, 201 bp, Homo sapiens
ccctttgggtttatttcatctagtctattataccacaacataaaataaataagtgacagtagacatggtacgatagtgattgtgattctttttattattcyctgtcactctttcaaggtcttaactgattatttaccactcacattactcacaatgatgcttgcacttttatgatgaggagatcatatcatttcagttcct

SEQ ID NO: 261264 - DNA, 201 bp, Homo sapiens
tgttttttttgtcatctgattgtaatttataattaagaatcaactggttaaataagtgaagatggaagtgaataaagcaactatccttatgctaatgagamaatctgcaaagttttctcctttaaatactttttagagaaacaaatatttaattagaattgtcacttaatgtcttgcaagaaaacaaatgtggtcacttaa

SEQ ID NO: 261265 - DNA, 201 bp, Homo sapiens
taaaaagtatatataattatgcaaaatagagacactggaatattgttagtatcagaagtatgtaacactgttcctaggtttagaatgttgtgtgttccttwtatcctgggtttccacttccaatctagtgaaactggaaaccagacttgttttggtgttgttttttttgtcatctgattgtaatttataattaagaatcaa

SEQ ID NO: 261266 - DNA, 201 bp, Homo sapiens
tgggtggatcacttgagcccaggaattcaagatcagcctgggcaacatagtaaaaccccatctctgcaaaaactacaaaaattagttaggcgtggtgggcmtgcctgtggtcccagctacttgggaggctgaggtgggaggatcatttgaacccaggagatcaagactgcagtgagccaactgtgccacatacatgcgcaa

SEQ ID NO: 261267 - DNA, 201 bp, Homo sapiens
ttgacagcacttctgaaaagtgaagtttcattagagtgatttgatatatttccaagcacaaataaagctttcttgtttgcctgctggagaaagagggaatytgaagcagcagaagcaattagggtggcaattgttaggcaaatgtggtggccagccttcaagaaatggcatacttgaaccaaatacctgtcttctagtgca

SEQ ID NO: 261268 - DNA, 201 bp, Homo sapiens
cttcaagctttttctctgatctccgcttgtcttgctagtttttctctggaagcaattctcatctcagataaggaataaccaccaccatacacacaaaaatytaatggacaacatgaggacagtgcttaataatagtattttattcagcatttttgctaaatgagtagattatagctgctcttgccacaggggccaaaatag

SEQ ID NO: 261269 - DNA, 201 bp, Homo sapiens
attctctctagcctggccttcaagctttttctctgatctccgcttgtcttgctagtttttctctggaagcaattctcatctcagataaggaataaccaccmccatacacacaaaaatctaatggacaacatgaggacagtgcttaataatagtattttattcagcatttttgctaaatgagtagattatagctgctcttgc

SEQ ID NO: 261270 - DNA, 201 bp, Homo sapiens
ttctctaatcatatacttctatcttggcttaaccctcattattattttattttccttgaatattaacctctaaataggttgcttttcttatcaagctaccmcctttcagtacagtctttactttttgacactgtagtggattttctaaaattcacgtatgatcatgtcactctcttgcttaagtatatctaatgtggcttc

SEQ ID NO: 261271 - DNA, 201 bp, Homo sapiens
atttttttagtgacttcatgaattatttggttttaaccattagccaaatacacttaaccaaagatacttctctagacttaatatttctccagaaaatttaracccatgtgtgtttctaaggcacctcagaacaacatgagtaaaactaaattaactatccttgactaaaattccttttattctctcctgataggttagtgg

SEQ ID NO: 261272 - DNA, 201 bp, Homo sapiens
cttcctacctgctgctcctcccatcactgaccatgccttttccaactaacttcttttcttgtccccttaaatatttttgcaccttaagattaattcctcarccctctcttcttctcactatatgcatttttttagtgacttcatgaattatttggttttaaccattagccaaatacacttaaccaaagatacttctctaga

SEQ ID NO: 261273 - DNA, 201 bp, Homo sapiens
tttctggccatgttacttcagcatttaaatgtgcttatgtatcccaattattaaaaaaaaaaaaaagctatttcttaactcagtggccttatctgcttgaraaatatcagctaagtagagtgatgacactgttccctctgttcttcctacctgctgctcctcccatcactgaccatgccttttccaactaacttcttttct

SEQ ID NO: 261274 - DNA, 201 bp, Homo sapiens
ccttctcttcctcttctttctccctctcctttatcttcttctcttcttcctcccctctttattctactttaatattaaattgtgcttagagtgcggtttaratgcctggagactgctctccactctccactctctactttaagctttcttggaagtttctacctgagagaggttcattatttgtgcttgcatgccccctct

SEQ ID NO: 261275 - DNA, 201 bp, Homo sapiens
tgccccacttttccttctcttcctcttctttctccctctcctttatcttcttctcttcttcctcccctctttattctactttaatattaaattgtgcttaragtgcggtttagatgcctggagactgctctccactctccactctctactttaagctttcttggaagtttctacctgagagaggttcattatttgtgcttg

SEQ ID NO: 261276 - DNA, 201 bp, Homo sapiens
gaattttgacatgtccacataactctgttttgatgggtgtctgctcagaagatgttaggaagctcatgataaggaagtagaaatttaggcagttaggtttkacccacaacctcatagcctaggtggtaagcagttattctttcaagcaccttttatgggtattgtaatagaaatatttgaaacactggtacataagcagta

SEQ ID NO: 261277 - DNA, 201 bp, Homo sapiens
tgtagaggtatcttgttgttttaatttgaaatttcttgaggaaaatttatgttgatcagtttttcatatgctgtttgacatctgtattcctttttttgatragctatctgtgcagatcttttgcccatttttaaaaatttcttactcttgacttttaagagttgtctgtatattttggatataagtcagatatgtgttctg

SEQ ID NO: 261278 - DNA, 201 bp, Homo sapiens
cacacagtaccttagagagaggacaagaaccgaagggtcaagtttagggtattacccttgaaagagaaaagaaatacataaatttcatatttagatgaaarcaagacaaatttcttcacttttgattttaatacccctgattcctagtcatttgatcttgattatataaaacaaattcaacaacgaagaattgacttttct

SEQ ID NO: 261279 - DNA, 201 bp, Homo sapiens
acagttttcttgtgaaatagctggacatgcagagaggtcacatgaataataagctcacacctgtgttcccgccacccggatattattcaaagcacaaaacwtcataaataaagtcaaggtcctctatatcccccttctcaatctcctctcctttccctcctgcctgtgcaaccactgttgtgaatattaatgattatcctt

SEQ ID NO: 261280 - DNA, 201 bp, Homo sapiens
gttgttttaatttgaaatttcttgaggaaaatttatgttgatcagtttttcatatgctgtttgacatctgtattcctttttttgatgagctatctgtgcakatcttttgcccatttttaaaaatttcttactcttgacttttaagagttgtctgtatattttggatataagtcagatatgtgttctgcaaatattttattc

SEQ ID NO: 261281 - DNA, 201 bp, Homo sapiens
aattctgaaatggctaggttattatttttcccagttttgtgctttgccaaatttgtggttttctctccctatgaaccagacagattatagatttatcgtarcctcttgatttctggtagatggcttttttaaaaattctgatgtaatttattttctttccactgattctgtctcttaagtattgagttagaagagccttag

SEQ ID NO: 261282 - DNA, 201 bp, Homo sapiens
gacacaacagttttcttgtgaaatagctggacatgcagagaggtcacatgaataataagctcacacctgtgttcccgccacccggatattattcaaagcamaaaacatcataaataaagtcaaggtcctctatatcccccttctcaatctcctctcctttccctcctgcctgtgcaaccactgttgtgaatattaatgatt

SEQ ID NO: 261283 - DNA, 201 bp, Homo sapiens
atcacacttttcttcccaagatagctaactcatccagaatttgagtataagtggatcttgaggtcctcagagctgagacaacttgagacaacttgctcagwcacctgttcaaatgtctgcaggatggttggccaagtgcaagacatcacatgagcttcttgacagctgcacgatggtaacttaatgagacacaacagtttt

SEQ ID NO: 261284 - DNA, 201 bp, Homo sapiens
catgactgtaattcattggaatgtaatttagtgaagttgttactaactaattgagttaatacctgttttttctaaggtatttcttttgtcttaacccacaygtactggaattcttgaacatttttagaagctatgtcagattggaaacttactgatcacacttttcttcccaagatagctaactcatccagaatttgagta

SEQ ID NO: 261285 - DNA, 201 bp, Homo sapiens
agtcatgcgctgcataatgatgttttgatcaatgatggactgcatatgcaatggtgattccataagatcaatggtgatcctataagactctagtactgtargtgtactgtatcttttctgtgtttagatatgtttagatatacaaatacttaccattgtgttacaattgcctgcagtattcagtacagtcacatgctgtac

SEQ ID NO: 261286 - DNA, 201 bp, Homo sapiens
tgtatttacccaaagaaatataaattgttctatcataaggatgcatgcatgcatgtgttcattgcagcactattcacaatagcaaagacatggaatcaacytaaatgcccatcaaccatagactggataaagaaaatgaggtacatatgcatcatggaatattatgcagccatgcagccataaaaaagaatgagatcatgt

SEQ ID NO: 261287 - DNA, 201 bp, Homo sapiens
caaaagaaatagaatatatgctggtctgtcctccagtacttgttaccttttgcctttttggcaatagccatcctaatgtgaagtgatatcttactgtgttkttaacttgcattgccctagcaactagtgatggtgagcatttttttcatatacctgttgttcatttgtatgtcttcttttaaaaaatatatattcacactc

SEQ ID NO: 261288 - DNA, 201 bp, Homo sapiens
cctctcatgtgtgcattaagagtggcaagacaaatagagaaaaataatttagtcaactgagaaggaaaaaaaaaaaccctttttccagaaaaataagatcyaagaagagaagaacataggccttttaaatatacctatcacttggatagccacttctaattaagctgacttttaaccatagcactcctttaaaaatgctct

SEQ ID NO: 261289 - DNA, 201 bp, Homo sapiens
cctttttggcaatagccatcctaatgtgaagtgatatcttactgtgttgttaacttgcattgccctagcaactagtgatggtgagcatttttttcatatasctgttgttcatttgtatgtcttcttttaaaaaatatatattcacactcttggcccattttgtttttctttgacatgaagtctcactctgttgcccaggct

SEQ ID NO: 261290 - DNA, 201 bp, Homo sapiens
ggcctcatttttacattgtatcctggatccccaaaaggagaagatagtgcaattcttttactgtgcattttattgcatggcagcccaaagccaatcagccyattttttaattagcccatccctaaaagtatattttctacctatttattgtacactaaattaaagctctctcaaaatgcaaagcaatctctaataccttcc

SEQ ID NO: 261291 - DNA, 201 bp, Homo sapiens
cctgggttcaagcgattctcctgcctcagactcccaagtaactgggattacacatgccggccaccacacccggctatttttttgtgtgttttttagtagarttgggtttttgccatgttggccaagctggtcatgaactcctgacctcagatgatccacccgcctcggcttcccagagtgctgggattagaggcatgagcc

SEQ ID NO: 261292 - DNA, 201 bp, Homo sapiens
gggggatgattaagagagaaattagccacatctctgaaatcggacaccttcctaaatgctgatctctcctctcttctagccctagctttatattaactggrtatattgtggctacttatagaccagcgtctctatactggctcctcatcaaggcgtgttaatgagattgcttgcctcaaacactgaaggttctttgaacat

SEQ ID NO: 261293 - DNA, 201 bp, Homo sapiens
accacacaactaattaggtgtatagctataaacatagatatagggaacactctgtctaaatttttttaatttacaaatatgaaaagcatatgctgttaaartaaatgtcattttattctgagtcttatttatttatcctcttaatttttattaaatatacaatcttaacagtgttggttatattaaaattacaccatctaa

SEQ ID NO: 261294 - DNA, 201 bp, Homo sapiens
ttacttgatatgattttaattttttgaaaatttgttgaaacttgttttgtggcctaacatatagtctatcctggagaatgttccatgtgcttataagaatrtgtattcttcagttgttggatgaaatgttctgtaaatgtttgttagtcttatttgatctaaagtccggtttttcttgcttaagtgcaatgtttctttgtt

SEQ ID NO: 261295 - DNA, 201 bp, Homo sapiens
cctgcaggatgagggctggggctaaaagctccaaacttgtaaccatgccttggtcttcctggtgaccagccgccatccagcatcccaccaagagtcacctsattagaataaaagaccctctgatcacccaaaaagttccaaggaattagaagctctatgtcaggaactgaggccaaagaccaaataaaaggacaaaagatg

SEQ ID NO: 261296 - DNA, 201 bp, Homo sapiens
tagtggtattgaattacctcagcatttgctcatctgtgaaagagtatttctttttatgtgtgaaggataattttgcttgatatagtacccttgggtattaragtttttatcagccttttgaatatatcctcccattctctcctgtcctgtaaggtttatgctgagaaagagatccaagtgggcaacttgaagaaaaagtgc

SEQ ID NO: 261297 - DNA, 201 bp, Homo sapiens
agaaatccattcttagtctgtttttcagacttctgtgtggagaatgcactctcaaggagccatttattgctagggctatcattggggtaaaatgcagggaygagggagtttgactaggtgaaacaaaggaggccattaaactgccttcagtgccagcacctaggccacttgagtatgggcaaaagtagttgttcacccagt

SEQ ID NO: 261298 - DNA, 201 bp, Homo sapiens
tggatagtatgcttaaaatgggaccacattaatgagactttgtagacatcttacgtcagtcttctcctcccatcctcaaattatacaagtgcacatatacygataaacagaattagatatttatttcattaattattcaccgatagtgtgctgaggtgttattttgctaggattcatcatactgcctccttttcacatttg

SEQ ID NO: 261299 - DNA, 201 bp, Homo sapiens
ctggcctaagcctttatcaatatacttcaatccaagatatttatgggagcctccagtcttccatggtctggttcttattaactgctgagtttctttttttytttctttctttctttcttttttttttttttttttgccattccttaagacactacatttttctactataaattcctgtacctctctgcttatgccttgcta

SEQ ID NO: 261300 - DNA, 201 bp, Homo sapiens
gcagagattgcagtgagtcgtgatcatgccactgcactacagcctgggagacagagtgagactccatctcaaaaaaaaaaaaaaaaaaaaaacaacagcamcaaaaaagggaaactatgttcaaacaccaatagttttgaatctttattcttgatgtttttgttctggcttgtccacagaaagtatatttgcatcaagaac

SEQ ID NO: 261301 - DNA, 201 bp, Homo sapiens
atttggaatcgtttcttgactgggattgtgatctccaaaaggccatcctataatttaaagaagcaataaaagaaactattatctctttgttaagtaaccaraatgctggatctggagaactggatgtatccaatcattagaaactattttgaggctgggagcggtggctcacgcctgcaaccttagcattttgggaggctg

SEQ ID NO: 261302 - DNA, 201 bp, Homo sapiens
gaacagcagagtaaaaagctcacatcaaaacaaaaggcctctttaatccccgtgtggccactggtcagctggatacatgaaaaactcttcagatttgtctytgagccttggtgttcccatccttaaaggagatgactaccagtttctttatacctcttcaattctaccttctgttgaaacattttacccccgtattttaaa

SEQ ID NO: 261303 - DNA, 201 bp, Homo sapiens
ataaactatttaggaatttataagtcactataccaatatattcaatttggactcttttatcttttctatgatgaatcatggcatgcagaacttttaataayaatagctttaaggactcaagaaagataaggtggccatcctccttctccaggagtacatggttttttttgtttgtttgtttttgtttgttttgtttgtttt

SEQ ID NO: 261304 - DNA, 201 bp, Homo sapiens
cctgtctctactaaaaatacaaaaaatcagccgggcgtggtgacaggagcctgtagtcccagctacttgggagactgaggcaggagaatggcatgaactcrggaggcggagcttgcagtgaactgagattgtgccccagcactctaccctgggcgacagagcgagactccgtctcaaaacaaacaaacaaacaaaaaaaac

SEQ ID NO: 261305 - DNA, 201 bp, Homo sapiens
gtaatcccagcactttgggaggctgaggcgggcagatcacgaggtcaggagatcgagaccatcctggctaacacggtgaaaccctgtctctactaaaaatmcaaaaaatcagccgggcgtggtgacaggagcctgtagtcccagctacttgggagactgaggcaggagaatggcatgaactcaggaggcggagcttgcagt

SEQ ID NO: 261306 - DNA, 201 bp, Homo sapiens
cggtggctgtagcctgtaatcccagcactttgggaggctgaggcgggcagatcacgaggtcaggagatcgagaccatcctggctaacacggtgaaaccctstctctactaaaaatacaaaaaatcagccgggcgtggtgacaggagcctgtagtcccagctacttgggagactgaggcaggagaatggcatgaactcagga

SEQ ID NO: 261307 - DNA, 201 bp, Homo sapiens
cttaaaatcagatagtatgagtcctataactttgttcatctttttcagtattgcgttgactattctatttctttgactcttccataaaaaatttacaatcrggttgctgttgctgatatctacaaaattaattgctgagatttttggggttttgtttaatctatagacctatttgagaagaattaacatcttgataatatt

SEQ ID NO: 261308 - DNA, 201 bp, Homo sapiens
taaatatattaagatcataatattctaaaggcataagagatgagatggtgaatatttgtatgttttggaaggttaataaattgtgtgcatgtgttttaagrtagtttaaatatttggtcctagcaaaccattgatcatactagactgattcaggacgatcagatcttctatattggttgaatactaattagttgagtcaga

SEQ ID NO: 261309 - DNA, 201 bp, Homo sapiens
gcacagcatatgtacatggaaacaaaacagttgtggctatctggtacaattcttaagaaggcagattctgagccatattttctgattccgttccatatacyggctttgggagaggaaattcttggttcccttgtttcatcttttaaaatatttacctaatgggattgttgtaaggattaaattaattaatatacgtaaagt

SEQ ID NO: 261310 - DNA, 201 bp, Homo sapiens
ttttttgctaatggtattttaagactgcagcatttggaaaggaccttggagattacctagtgaccctgccaagtaaggcagggattctttttacaacatcrctgacagattgtcagctaacctttacttgcacatgtatggtagcagggagtttgctactttgggtatcaacccattccatttttggacagctatatgatt

SEQ ID NO: 261311 - DNA, 201 bp, Homo sapiens
aaatgcacagcatatgtacatggaaacaaaacagttgtggctatctggtacaattcttaagaaggcagattctgagccatattttctgattccgttccatwtactggctttgggagaggaaattcttggttcccttgtttcatcttttaaaatatttacctaatgggattgttgtaaggattaaattaattaatatacgta

SEQ ID NO: 261312 - DNA, 201 bp, Homo sapiens
tatatatgtacatatatgcatttatatatgacattttatattttctatattaatatatcatgctatatattgtatttagaacatacaatatataaaaattmtttaaatgctttttgcttaaatctaatttgatcatgtttataaacctcattttcattcaaatgacccaatcgttgtgactcctgagatatatgtgtattc

SEQ ID NO: 261313 - DNA, 201 bp, Homo sapiens
catttaatggaaaaaaatattctatattgaagggatttctatgcatcttagccccagaaaagttcatttctttaaaattgcagaacaaagactcaagtaartgcacagcatatgtacatggaaacaaaacagttgtggctatctggtacaattcttaagaaggcagattctgagccatattttctgattccgttccatata

SEQ ID NO: 261314 - DNA, 201 bp, Homo sapiens
gcttgagtcataaatagacctctttaaggaaaagtaattattacataacttctttcaggcataaattttctttattatgtttcttgtagatatacaaacayaaaaccagacataaacttcctatgtctttagttttcatgcaactataagccaaaacaaatgtacaaatttacatagaacaaaaccaacaaactttgaact

SEQ ID NO: 261315 - DNA, 201 bp, Homo sapiens
tgtattgcataccgtatagagagaaactgactacatttttcttgatgttgttactggcaccaaagcaaacagaaggtaattggaaacagtaggaagaaacrttaactgctctcttttcaagaaggccaggcaaaatcccagtggtcttttgtcctaaattcttcaatcttcctaactggtctgcatattcctccaattgca

SEQ ID NO: 261316 - DNA, 201 bp, Homo sapiens
accatattttaagtgtcaatacgcttacaaactgttactgtttggtcttgctagatccatgggtcttctctgtctgtttgctgtcagtgttgcttcctcgyggtaaagaggagaacatcactaactagttgcagtgttagtctgcagctggaatggttgccttcaggatattttgtcatactggagccctgacaactctca

SEQ ID NO: 261317 - DNA, 201 bp, Homo sapiens
acatttttcaaagaggatatttgcaccgtgttcatgattgtcttatgtttatcgtttgttgtttttttcccaaatatgtttgtctcgttgccaaattggcmattggttaggagcaaaagtttttggaacagatttttctttttcaggagagctgacttgatcttttggtttacattttgttgttgttgttttcagcagagt

SEQ ID NO: 261318 - DNA, 201 bp, Homo sapiens
agagggtactcaggaacctgggaaccattgtggtgtaggtgatggaagtagctgtggcaagatgatcaactgggtcccaagacatacttactggtattggyagtggctgtggtatggcgtcactactgacagccccagacacacaattatcaggctctctcactctctgtggcagcaatatcacaacactatacaaagtag

SEQ ID NO: 261319 - DNA, 201 bp, Homo sapiens
atgaaatctgcagatcttaaagactctttgaagaaatcagaaccttcttcatttgaacattaagacagaataataataaacaggaactcctacaagttccrggggtaagatagtccttgaattgcagtcctggtcctgacagttactatttgggaaaatctgggcaaggaatttattttctccaatgtcacttatatctct

SEQ ID NO: 261320 - DNA, 201 bp, Homo sapiens
tctgacacattgttgaaaagactatcttttccctactgaattgtctgtttctttggaaaaaaatcaactggctatatttgtgtgggtctagttctgggttwtctatttgtttcattcttccattttttttctactcttttgccattacaacacaatgttgataactgtagttttgtaataagtcttaaaatcagatagtat

SEQ ID NO: 261321 - DNA, 201 bp, Homo sapiens
gcagggcctcagtaattgtttgaattgaatgaacacttcaaaggtacaagggatgagagaaaaatccagtttcttgccagtaaagtaaaaaatatatatawatatatatatatgtgtgtgtgtgtgtgtgtgtatatattacatatataatgatgaaagtgagagatcaagagataggagagaaaaaacttgaaaagaatt

SEQ ID NO: 261322 - DNA, 201 bp, Homo sapiens
tactaagatctttatatacatacaatatttaaaacaatctcaaggccaggcatggtggctcatgcctgtaatcccagcactttgggaggctgaggcatgcrgatttcctgaggtcaggagtttaagaccagcctggccaacgtggtgaaatcccatctctactaaaaacacaaaaattagccaggcatggtggtgggtgcc

SEQ ID NO: 261323 - DNA, 201 bp, Homo sapiens
aatcattggatattaggactgtcattttcaaatattaaaagtatagtataatcatatatcataactttcacctctaatcctatttaaggtatctccccatstttctagctcggttctgacacaagaattcccctgacccacagtaagaaaggaggggccttgtcttttttcactcttcctccacttcgctcttgtgttcct

SEQ ID NO: 261324 - DNA, 201 bp, Homo sapiens
aataaaactaacagtctatgatgtcaaggataagtctcatgacaccgtaagtactggtacttctttctttctttgggaaaaagttatgcttttccacacgrttggattttttgtgtaactgacatttttcaaagaggatatttgcaccgtgttcatgattgtcttatgtttatcgtttgttgtttttttcccaaatatgtt

SEQ ID NO: 261325 - DNA, 201 bp, Homo sapiens
agaccctttgtctctctcttgcctctgggttgtacacaaggagacttagggattctattttgttgttgttgtcgttgttgttgttgtttttgttgttttgttttttttgagacagggtctagctctgtcgaccaggctggagtgcagtggtgagcgatcttggctcagtacaaactctgctccctgggctcaaacaatttc

SEQ ID NO: 261326 - DNA, 201 bp, Homo sapiens
tgtcgtgttaactcctgtcagaggaggcaaggagaattcaggtttgatttgggaatatttcttttgttttttttcttttcctttttggtaagaaatacacrtggatgatatgataggggacaatctcaaaaaactcctggaagtctcatgaatgttttaaattgtagtgagttgagtatggcagtactctcccacaaaata

SEQ ID NO: 261327 - DNA, 201 bp, Homo sapiens
cactgtttttgactggtgtcacattcccatctgagtatcccatctatgaggagaccaaaataaaactaacagtctatgatgtcaaggataagtctcatgayaccgtaagtactggtacttctttctttctttgggaaaaagttatgcttttccacacgattggattttttgtgtaactgacatttttcaaagaggatattt

SEQ ID NO: 261328 - DNA, 201 bp, Homo sapiens
cctcagcattaactttaaaacaggaggacttaaggccttggcagcatcccagaaccaaactattttccattgattggtatgaatcattttctctccttggygtctgtactttttccaccatacacaccacttaagtaccaacaaatctgcaattgaccttttcacagctctatgctgagatgcctaccaaggtgtttctaa

SEQ ID NO: 261329 - DNA, 201 bp, Homo sapiens
aagtctgtatgacccaggcttcctacagcagcttcacacagtggggttgatagtacaatatgaaggactgctaagtacatacagtgagtattgctttagtrcaagttaaaatcacatttctattcagaaggacatttaatccagaaatttttcaagaaaacataaaaataagtaaacctttattgtgccaagtattacaaa

SEQ ID NO: 261330 - DNA, 201 bp, Homo sapiens
tagtctgtagcaatgctgcattaccatcctctgtcattaagaagcacatacctgagattattaagcaatgcattggtaatttactagaacgaacaaatgamaaaataacttgtctttttttttcttttcatacaaagagtttatttttctcccaaagatagaaaaaaaagttcccactttaaattctcatatagagcatag

SEQ ID NO: 261331 - DNA, 201 bp, Homo sapiens
attacatatacttgacatatatgtaatcacatcaagtattagtgttaatcttcccagtgttttagcaaaacaagattacctagttttaaaaagcattttcrtcaccttacataaaaattgctagtgcatcattaaaaatctcttaggacagttcttatcaataggaaagagtgatacttggagttctgtttatcatttgcc

SEQ ID NO: 261332 - DNA, 201 bp, Homo sapiens
gtgtgacttaaagcccagggcttaatggctaattaaagtcactgaggtttctgagccatgtgtgcatagtcacgcattagagctgggatctcagaccagtmaagacttgcatgaactgcaaatgtggtcagtggaaatgaactctcaattcagctccacagcacgtgacttcctatttctgtaaggtacttccaagggact

SEQ ID NO: 261333 - DNA, 201 bp, Homo sapiens
gttaatcttcccagtgttttagcaaaacaagattacctagttttaaaaagcattttcgtcaccttacataaaaattgctagtgcatcattaaaaatctctyaggacagttcttatcaataggaaagagtgatacttggagttctgtttatcatttgccatctgatattaagggctgaacattcattatgctgtttgtgtaa

SEQ ID NO: 261334 - DNA, 201 bp, Homo sapiens
tcataagctctcttctgttactagaggcatgtggtttatataaggaaaaaaaagtatatgacaaaacgccatacagaagcagcaggatctgaaagtctggyaagaagttaagcagttaaataattttcccagtgttgcctagctatttgaactggactaaaaccaagcctgtttcattccgaagttcctgctttttctatc

SEQ ID NO: 261335 - DNA, 201 bp, Homo sapiens
aaagcattttcgtcaccttacataaaaattgctagtgcatcattaaaaatctcttaggacagttcttatcaataggaaagagtgatacttggagttctgtktatcatttgccatctgatattaagggctgaacattcattatgctgtttgtgtaacttatttttatctttgttgttgcagtaccggataccagtttattta

SEQ ID NO: 261336 - DNA, 201 bp, Homo sapiens
aagctgtaggtatgaccatggaaaccagttagcactttcttagtttgcattatccaaaaggtgttggatttgtcggattgcaaattggtttagagttctcmgtcactgaagggacaacacaaaccagagtacacttcaatagttcctcaatttgtatagaaaagcctgaaacctttccttttttaaaatgcaaatcacgta

SEQ ID NO: 261337 - DNA, 201 bp, Homo sapiens
ctccactctctactttaagctttcttggaagtttctacctgagagaggttcattatttgtgcttgcatgccccctctggtgggaggtagccttctgtcacytgtttcttggtgtctcagcctggtggcgggggcagaggcattctctatcgtcatctttcatgcttggttgtagacaggcccgatgttcttgggtcttggg

SEQ ID NO: 261338 - DNA, 201 bp, Homo sapiens
cattatttatcagccgtctggtgggactgattcagtatgtacagatccatgatgtgaataggtttcaccttatgaaatgcaatgactcatgtactaatttrgtatttatgaagaaatattggacctggtaacagcttttaaaaagctgagtatgactgagtcaataaaaacaattttacacaataataaaacaccagatat

SEQ ID NO: 261339 - DNA, 201 bp, Homo sapiens
cattctttcctttcatattcctaaggaattgatttcccttcacattaaagaagatttgtgcaggtaagagaaaataactattttctctcatattaattatkttataccatttaaaaatttttaattgacaaattatatataatctgtgcaacattttgaaatatgtatgcattgtgaaatagctaaaccgagccagttaac

SEQ ID NO: 261340 - DNA, 201 bp, Homo sapiens
aggaagttcaggaactgtaacagcacagcttcattgcactgccgcaggtgttgcacacaggtgaattcattaatgattaaccacagagtctgaattgacgygagatgaaggaaattgaaacccagcacctgtgcgaggcttctgcactagtttctactccaaagtcttacagaaaatgtttttctccacaggttcgaacca

SEQ ID NO: 261341 - DNA, 201 bp, Homo sapiens
ctgcactagtttctactccaaagtcttacagaaaatgtttttctccacaggttcgaaccagtgtcctaccagaacataaggatcccccgccagaagttggsgtaagtgtttctaacgtttccagaaggcacacacatcacttctaaattaatcatttggattttctctggcctcctgcttggtaactgacaaataaaattg

SEQ ID NO: 261342 - DNA, 201 bp, Homo sapiens
tattttataaaaagcagtattttggtatagacagtatctttgatttcacaaaaatcctgaagagtcccaccttttagctctggactctccagtgagaactrctggagcagaagaaaatctgtgccctcttcctaagaggctaggtagtagctgtaagcgtcaagactagaatttggcaatttctattcctcagaaaaactt

SEQ ID NO: 261343 - DNA, 201 bp, Homo sapiens
tgtcctcccagccaaccctccaggtccttgaagtcactgtccttttcacatgcagtccctgttggccgtgtcctttccccttctctgcctaataaactccsacatctctgtgaagtctctcccagacaatacctcttctgtggtggttcattgttcctttgtctatgcttgaatgtcactgtacagacattcatcatgaga

SEQ ID NO: 261344 - DNA, 201 bp, Homo sapiens
tttaggcttccagccaaaattggttggaatgatagaaatgatcatggactcaatagccttcacctgattttgaaataatggccacaggaaacagaaactgrtattttataaaaagcagtattttggtatagacagtatctttgatttcacaaaaatcctgaagagtcccaccttttagctctggactctccagtgagaact

SEQ ID NO: 261345 - DNA, 201 bp, Homo sapiens
ttctctctcctcattgccttctggaagccttgcctttgtgttagctttccaaattcgtatttcaaaatacatatctgatctgtgtaccagctgcttgagarcagttcagtggcctgtcacatggttctccatctccctctcctttcccttctccacaatttttgtcctcccagccaaccctccaggtccttgaagtcactg

SEQ ID NO: 261346 - DNA, 201 bp, Homo sapiens
actccagcaccgaaattgtggaggtgagatgctgtgtgcctacattaatctctctctctctctctctcttgctggctcgctcgctcttgctctctctctcyctcccccccacccccgccccatctctggatttgaatgaacagctgaaataagttagttcatagtctgtagcaatgctgcattaccatcctctgtcattaa

SEQ ID NO: 261347 - DNA, 201 bp, Homo sapiens
aattattaggataaatacagtataaaatattggctttattaggcactctcttaaagtattgtcagatttaacatggaaaaaaataaaatggcttgtatatrtaccttctgttttttttgtattcttattccagaatcataatcattagtctataatatcatatgttggaaagatttgttttttctaaaagaaatttattat

SEQ ID NO: 261348 - DNA, 201 bp, Homo sapiens
gatcttagctcactgcaacctcgacttctcagcccaccccagcctttcaagtagctgagactgcaggtgtgtgccaccacacctggccaaattttaaataytttgcaatgttgccaaggctggcttagaactcctgggctcaagtgatctgcccgcctcggcctctcaaagtgctgggattacaggtatgagccaccaggc

SEQ ID NO: 261349 - DNA, 201 bp, Homo sapiens
tccttacttctatataaagcccaatggaactcacagatgaaaagagagcttcacttattcttttgcttttttaaaaaatgagctggttataactttgcacrtaagtctaattgtgcacttagaaactgatagtaatagaggtttacagttcttttcaacctcctggagagtcccaatacacacagaacattatatgggcca

SEQ ID NO: 261350 - DNA, 201 bp, Homo sapiens
taaacacagataaatctttaatgatgaatagttcttcctagcaaaattcctcagtcaaatataccttgaagcatattctgcttcactaaggaacatttttsttgttgttatattgtcatgttgatatgcaaaataaatgccatctgactgtttttgactttctcagacactcaggtatctggcagtatatatatatatata

SEQ ID NO: 261351 - DNA, 201 bp, Homo sapiens
tccctactgaattgtctgtttctttggaaaaaaatcaactggctatatttgtgtgggtctagttctgggttatctatttgtttcattcttccatttttttyctactcttttgccattacaacacaatgttgataactgtagttttgtaataagtcttaaaatcagatagtatgagtcctataactttgttcatctttttca

SEQ ID NO: 261352 - DNA, 201 bp, Homo sapiens
ttaattatttataactttgatgcttttagcctgtgtttccccaataaagcatttgcttaaattttaggtgaggaaaagattaaacactatgaaacatcttktggatttatgaacctacttggaagtattggagatcataattgcctctgtataaatttgaggttttcattattaacagatgtagctttgattctgtattat

SEQ ID NO: 261353 - DNA, 201 bp, Homo sapiens
tgtcctgtgggcttgcatagctttgaaaatgcctcagacaagagatttgctgtcctggatgatcccacagagagagtttgtgtgggctgtcccaccagaarcaatatctaaaaggggaggtgtaggtgttaagccaagagaacatcaactgtgctaggaatgtgtggtagtagatttccaataggcacttctctgaataaa

SEQ ID NO: 261354 - DNA, 201 bp, Homo sapiens
acatcattcttgagtgaaaggaaccaagaacaactgaatttagctggagtctagggctaagacagtgaatgcacaaaataggccttaagcatctcctactyccagaaagtgagaaagtaataacactaccaatatcacacaacaacaacagcaatcccatcccttcattcctcccccaccaccacacacacagtgctaggg

SEQ ID NO: 261355 - DNA, 201 bp, Homo sapiens
gtatgcaattctatgaaggaaaaaaaacaaggaatagataaaataaattcaaactaaaataaataatgtttttaaaggcctgaatgtggacagtgtttacrtatctctcatagctcagaaatctattagcgttcaaacacccatcactttctccattccattgagattgatagaccttgtttaataagtcattattatcct

SEQ ID NO: 261356 - DNA, 201 bp, Homo sapiens
gaggtgagatgctgtgtgcctacattaatctctctctctctctctctcttgctggctcgctcgctcttgctctctctctccctcccccccacccccgcccyatctctggatttgaatgaacagctgaaataagttagttcatagtctgtagcaatgctgcattaccatcctctgtcattaagaagcacatacctgagatta

SEQ ID NO: 261357 - DNA, 201 bp, Homo sapiens
tgctggtttctatgtattagagtttcccagagaaacagaagcaataggatatctatctatctatctatctatctatctatctatctatctatctatctathtacctacctatctatctatctatctatccattcatccaatctatctaatttattataaggaattggctcatgtgatttggagtctggcaagtcccacgat

SEQ ID NO: 261358 - DNA, 201 bp, Homo sapiens
caggttctctctcctcattgccttctggaagccttgcctttgtgttagctttccaaattcgtatttcaaaatacatatctgatctgtgtaccagctgcttragaacagttcagtggcctgtcacatggttctccatctccctctcctttcccttctccacaatttttgtcctcccagccaaccctccaggtccttgaagtc

SEQ ID NO: 261359 - DNA, 201 bp, Homo sapiens
tgtatgatataaactgatttaatctagatgtaatcactggtatagaatgttaactgtgaaaccatataatggagtccaataatttattggactggaaacawaacctaaattggcttatcagttgattagtggaatctaattttctgaagtacaaagaggaaggacatatatgtgacagttttgagaaacctgaacaaacat

SEQ ID NO: 261360 - DNA, 201 bp, Homo sapiens
caaatattatgccctgccctgagaactgattatttataaccctgataaaccaagtttattcattctgccaaatactgtctttattcattctggtcacaatraagcatagtaatatatattgacatattcttgataattcaattttttaaaaatctgaatttgctcctattatttataggtatccagaagactccaaatgaa

SEQ ID NO: 261361 - DNA, 201 bp, Homo sapiens
ccactgcactccagcctgggcgacagagcaagactctgtctcaaacaaacaaacattaaaaaaataaacaaacaaacaaacaaaaaacaccctgacaggtytggagcaacaccactgagggaaaaaggaaaaaatctcatttactgctttttgaataggtcctcctgtttttattttttactggattctgtcatttacgtt

SEQ ID NO: 261362 - DNA, 201 bp, Homo sapiens
ggacaagatgagagctactctcaatgaattaaagactcaaagattttacagagaatacagaagaaagatgggaggatatatattcatggccataaatcaaytcagcatgatatagagacatattcttctaagaaataaccataaacagatagtagtgaagagagtatttccaactgcttgtgcaattctcattgtgtggat

SEQ ID NO: 261363 - DNA, 201 bp, Homo sapiens
cagtaattccattaagcattttttgtttgttttacttaatttctgatagtgactgtaataattacctgacttgaacaactgtatttagcttcttataatargtatttgggaagcaaataaatggtgttagattacacttaaatcctacccggctgatgcaggtaagaaccattcttttgaagtcaaaaaagagaatcctgc

SEQ ID NO: 261364 - DNA, 201 bp, Homo sapiens
taggcatgttgttctagatgtgagctaacacaaggaaagggtctaaggccaatacttcctggtacatattaagcatttagcaaattatgcttcctgccacrcctcaccttctttgcatgttttatgtattatctttaataataaaaaccctaaaatatggaaaatattagcattttatgattgcaagataggaatactagt

SEQ ID NO: 261365 - DNA, 201 bp, Homo sapiens
atctggattgaactactctgaagaagttatggtatttacctgaagctaataaaataatttatgttttcctcgtaaatgagatctgaagagcaaccaaagtrtcaatagcaaaatcaatttgaaaaggatctactatgaaattaggtttctcaaataaaatgtagtttaacaagaaagcattcactgtcttccttcttatgg

SEQ ID NO: 261366 - DNA, 201 bp, Homo sapiens
acaatggttgaactagtttacagtcccaccaacagtgtaaaagtgttcctatttctccacatcctctccagcacctgttgtttcctgactttttaatgatygccattctaactggtgtgagatggtatcattgtggttttgatttgcatttctctgatggccagtgttgatgagcattttttcatgtgtcttttctgcctg

SEQ ID NO: 261367 - DNA, 201 bp, Homo sapiens
ataacctatgtgcactgctgaatccactcatgggccatatgcttgtactggacagaaatcctattggctcccatatcagtggtagttgttcaaaaaaatgktgccacctcagctcctggagaaagggtggtaaaaggcttaattaaggtggttccttgcatttctttttccgcttacttcttcagcctaatcctaacacta

SEQ ID NO: 261368 - DNA, 201 bp, Homo sapiens
tgtgtaactcttgctctcacttttccacagagctttctacttccatattcaactggctaccagataacaccactcgcttgtttaggaggttatcttaaaawttttaagatggccagaacctgagtttttaaatctttacttttgtccccccaaatattgtattcccccatggtatctatctccataaagcacaccaccatc

SEQ ID NO: 261369 - DNA, 201 bp, Homo sapiens
tgattcttcagtgacacttaaattgagaattggtactgggtgtgaagtttattttagtatcaataatattcccagctaaagaagtgaattttatcttctcrtccattttttttttatttaaaagcccagcacatttctatttaacacacacacagacacataaaataatggtgacatgttttaatattgttgtgttatagg

SEQ ID NO: 261370 - DNA, 201 bp, Homo sapiens
ttctggtgaccaagatttagcatgttctgcagttggattgtagcctgtttttagtgacactggtttaaattcacatttggtgcaccccgcagatatgagawatgatacatcaattaataaatgagaagtatataagacctcaaacttttctctcccacttctccttgccaggactatatcatttaactgaactgttgttga

SEQ ID NO: 261371 - DNA, 201 bp, Homo sapiens
ctaagtagggaggcaatatagcttccaactaagaactaggagtatgatgccaacttgctagtgtttgaatcctatctttgctactctatagctataaggcrttagaaaaatagcccaatgtttctgaatctctatttcctatctggaaaatgggaaggatattactatttaccttataaagttcttgtgatgattaaatga

SEQ ID NO: 261372 - DNA, 201 bp, Homo sapiens
taccacctcagccttccaaagtgctgggagtacaggcatgagccaccacacctagccttcttgcttcttatagtgtaacacatcccttataaaacattgartttccctgaactaccattttctgggcgccttctaatgacaagtcattgttcaaagccctaggaggacacagcaacaactaccattttttcagcatctatt

SEQ ID NO: 261373 - DNA, 201 bp, Homo sapiens
tcggattttgttttattttggtttattaaacttggtttcctgatgagttaaacaaaaactattatttttatagttcgcttgacttctcagtgttagaatgsgggtaacagtctctagcaacttttaatattttaagcagaagcagaactattacatatcgatgttatttcttttagcattgatgctactatccatacattt

SEQ ID NO: 261374 - DNA, 201 bp, Homo sapiens
agtaagtttaattatgaatttcttaaaaaataaactttggtcatgaaactaaaaggaactagaagaaaatgtgggggaaaagttctgtcacattgatctgrgcaaagatattttggctgtgaccccaaaaaaataggcaacaaaaacaaaaataaacaaatgagattgcatcaaaggcttctacacataaaaggaagcaat

SEQ ID NO: 261375 - DNA, 201 bp, Homo sapiens
ggtgatgggtgcaccaaaatctcggaaatcaccaccaaagaaattatccatgtaaccaaacaccacatgttcttccaaaacctattaaaattaaaaagaayggaggatctaaattattctgtcaaaacaaatgtaaacatccaaattttagtgtcttagcacgatggaagtttatttcttgattattgtggtaggtggaat

SEQ ID NO: 261376 - DNA, 201 bp, Homo sapiens
ctaattgtgagacttgggaccagtcatttaaccaccaatagcctcagttttcttaactttacatgaaaatggttaaattaaattacttttaaaggtttatytagctcaaacaccccttttccttttttaagcaactttttttttaactatatatgcttttttttccccctttaataagtgtactcatttctcaaggacatt

SEQ ID NO: 261377 - DNA, 201 bp, Homo sapiens
agaaggttttaaacaagaaagcattgtctaggcacagatctgttatgatctaattgtgagacttgggaccagtcatttaaccaccaatagcctcagttttyttaactttacatgaaaatggttaaattaaattacttttaaaggtttatctagctcaaacaccccttttccttttttaagcaactttttttttaactatat

SEQ ID NO: 261378 - DNA, 201 bp, Homo sapiens
cttttttttttttttttttttttttcatttttcccaggaagtagcagacagagcattaagcagcctgctgagttataggctttattcttaggaggtcttaraaggccagaattctagctggctttcaggggagtgtttgccccagatgtagatgctccctaatagatttatcctttcactatttaaaagtagctcaccatc

SEQ ID NO: 261379 - DNA, 201 bp, Homo sapiens
tgtggatactcagacttttttttttttttttttttttttcatttttcccaggaagtagcagacagagcattaagcagcctgctgagttataggctttattyttaggaggtcttagaaggccagaattctagctggctttcaggggagtgtttgccccagatgtagatgctccctaatagatttatcctttcactatttaaa

SEQ ID NO: 261380 - DNA, 201 bp, Homo sapiens
gtcttaaagtatatcttttgataaaccattcactgttgtgatgaagttaagacgattatttactctaatgaactgaagcagagatgtgaataattgaaagyatgagtaatccaaagtcatttcacattatgtttcctatagctggagttaaaacacaaataaccaaatatataggaatacatttgctgcaagtatggcaga

SEQ ID NO: 261381 - DNA, 201 bp, Homo sapiens
gaactgacgttagagaagaaaagcatcctccaccccaagtaaatattaggaatcagttaactagatttttgttgttgttgttgttattgcaagttttaatytgagtcactattaataaagaaaatgggagaagtgaagaagctctcatggaaatggtgaaattcctttctttttataactcctccagctgctttgggaatt

SEQ ID NO: 261382 - DNA, 201 bp, Homo sapiens
taagacagtgaatgcacaaaataggccttaagcatctcctacttccagaaagtgagaaagtaataacactaccaatatcacacaacaacaacagcaatccyatcccttcattcctcccccaccaccacacacacagtgctaggggtgtgtcaaaggggtccaggagccaactgaaagaattttcagtggtcaaagctggaa

SEQ ID NO: 261383 - DNA, 201 bp, Homo sapiens
agaacattgtgaaaacaaccaagaaataaaagaaaaaaaggacacatgtttctctgacgttcaccaacaagaatgatagcagacttcttattaggctttakgcaagccagaagaaaataaagtcacatcctcaagctactgaaaaaaaaaaaatcctgctaactctcaaaaataaaggtgaaatggagacgagttcaggca

SEQ ID NO: 261384 - DNA, 201 bp, Homo sapiens
atacaataatataatagcagaattagatccacagaatttatacaattaaatccacagagtttgtaactatccttaagatcaatttattatcactatgtctrcaaggaagtgtgaagagcagaggaaagtgaccaatgccctttatggtctcagttctctaactcattttatgtttttttttttttttttttttttatactt

SEQ ID NO: 261385 - DNA, 201 bp, Homo sapiens
cattattaattaataaaccattaatagtattttatttaaccatcaaactttaatgtatcacactattgaaaagcgtgttcttggttgttttctccatgccratcagttccatagttagtattactttggaattataagtgcacaaagtaggtccacaaaaaaattattaaaatagtgacttaacatcaggaatcttgaagt

SEQ ID NO: 261386 - DNA, 201 bp, Homo sapiens
aaaaaaagataaaatcatgtgatcagttttctgtgctcggcatttaaaaatgtatagaaatgtgccccaactgacaatctgcacaagaaaatgtctcatcrctttacagacacagcatttacaacttgcaagggccttcattaacctgaatgtcaggtccattcatactttatgaattgctataaatcaggcattgtttta

SEQ ID NO: 261387 - DNA, 201 bp, Homo sapiens
tatccattcttcttttatgcatctatttcctctctaggactaagacatgagaatgaaaggattaaaaaataatagtcattacatttatagagcacacagtytattaaaaagaaaaaaaagtgccgggtgcggtgactcacgcctgtaatcccagcactttgggaggcccaggcgggtggatcatgagctcaggagatcgag

SEQ ID NO: 261388 - DNA, 201 bp, Homo sapiens
cgaagagggatcatttcttaaaaactaagaacatttctttatggaaacaattgtggaaaatgtataaaggagactaatcttgacaagtatataaaatacayttctatgaactactttaaggtttttctcctgttaattattcgcctccacttattatgtctagagtcaatagaatgcttatgagaatatgtcttcatattt

SEQ ID NO: 261389 - DNA, 201 bp, Homo sapiens
actgacatctgagaggaacaaagccatgttttcaggtcatcatgagatcttatcccaggatgctgataatatcaagatgaaaatagtcaggtgggaagaaraactatatatcttcatgctatttccactaattgaaagttcctagaaattatatttgctacactaggtttcagttgtgtcacaatttactaatttacttaa

SEQ ID NO: 261390 - DNA, 201 bp, Homo sapiens
tcaagaattaagagattagcagctgcaagaatttattcataataatgttctaccagtataaaaaacttcaatttctttttttatatatatttttaaaatayactaagaaacaacaacagataattttatcttgtcaaatggcaagaaatgcttgatgagcgaacacaagtttactaaaaaaatattatttcaagtcatcat

SEQ ID NO: 261391 - DNA, 201 bp, Homo sapiens
gccagccttcaagaaatggcatacttgaaccaaatacctgtcttctagtgcaattaagagaatctatcttgttcaaagacctaactatgctgtttgtttaraaagccaagtaaatttcagtaacaacaccatcatcacttatatttccagatttgaatcaagaattaagagattagcagctgcaagaatttattcataata

SEQ ID NO: 261392 - DNA, 201 bp, Homo sapiens
ttttaatcatctcatggttctattagatgatactgctccaatttgcaaatcacacatgtggcccaaggctaaatcctttaaatactaggattcaatgatgaaaatctttttacctagagcagagagctcaaaaggatttggtctctcttactcaggtttgagctctgggagaggacagagatgaaaatctctacctcagtt

SEQ ID NO: 261393 - DNA, 201 bp, Homo sapiens
taaatattaaagatttttaaatttttccaggtattcagaaacaggcagaaatgtgaaaaactcaagaaaattttatagtatcaaaaatgaggctattattwttttctccctctctctctagagagttttcagattgtatcagatataaaaagaatgtgttttaggaaatggagctgaagagcaaaagaaaggctaggcact

SEQ ID NO: 261394 - DNA, 201 bp, Homo sapiens
attttaatcatctcatggttctattagatgatactgctccaatttgcaaatcacacatgtggcccaaggctaaatcctttaaatactaggattcaatgatgaaaatctttttacctagagcagagagctcaaaaggatttggtctctcttactcaggtttgagctctgggagaggacagagatgaaaatctctacctcagt

SEQ ID NO: 261395 - DNA, 201 bp, Homo sapiens
tttgtataatactctttcatttattgccaaatagtttactttttcatacatgttagttttgcttctttggccacccttgagttgtaacaaatggcctcccrttcatacatccagtcatccactcttgtttaggaagctgctacactgtgtgtggattttaggcatctacccatatcacttcccacaatgtgatcactctac

SEQ ID NO: 261396 - DNA, 201 bp, Homo sapiens
cattttaatcatctcatggttctattagatgatactgctccaatttgcaaatcacacatgtggcccaaggctaaatcctttaaatactaggattcaatgatgaaaatctttttacctagagcagagagctcaaaaggatttggtctctcttactcaggtttgagctctgggagaggacagagatgaaaatctctacctcag

SEQ ID NO: 261397 - DNA, 201 bp, Homo sapiens
gttcactaaatgagaggtaaaggatttagcacatcttgtttcctcaaacttgttttgccattttttacactggactaaaaaatatcacgtctcggtctctrtagatgattgtgaggtaaagactattgtaaataagttgcattatttaatatttgcaaagtgattgccctcattacaattttttacatgtaatcactaaga

SEQ ID NO: 261398 - DNA, 201 bp, Homo sapiens
cttcatctaacaggtaaaaagaacataacgaagtcaaattagattttctctaatgactggcaaatacacacacacacacacacacacacacacacacacayattacatgtatacatacacactatttatagcccccacccctgctgaggttctgggattggctgctttcctctcctgccacagttcctgtctggtcctgca

SEQ ID NO: 261399 - DNA, 201 bp, Homo sapiens
agaggagcaccactccctgaaccctgacttggtctccctcacctgtctttgtctacctctgattccaacttcatggatttcaggagtgtcttcagctcatyatgtaaaaattttggaatttgaccatccaggtacatcaccatagttcactaaatgagaggtaaaggatttagcacatcttgtttcctcaaacttgttttg

SEQ ID NO: 261400 - DNA, 201 bp, Homo sapiens
gcagctgcaatgttggctcctgcccctcccccaaggagctcataaggtttagacagcaaacaacagcagcagtggtgatgccgcccctccccccagaaacytggctgacttaggcagattccagccaagtggctgttgagaatctgcatggctctgtggttgggaccctaggccccagtggcatgggttcatgagtgggaa

SEQ ID NO: 261401 - DNA, 201 bp, Homo sapiens
acacaacaacaacagcaatcccatcccttcattcctcccccaccaccacacacacagtgctaggggtgtgtcaaaggggtccaggagccaactgaaagaaytttcagtggtcaaagctggaagaattttagcaacaaaatgaagtaattggcttataactcaaagtttaaaataagtacccatgattctatacagttatga

SEQ ID NO: 261402 - DNA, 201 bp, Homo sapiens
tggctcctacaatgcacagttgtagcacatatatattttttaagtaggtttttttccacgctgtgattaattttcttccatgtaacacaattgaacaagaytgtgagcctctctcatgccagccattacctcttgtactttctaaatagcatctacagccccattccctgcccctgtgaattcaggatcagatggtatagg

SEQ ID NO: 261403 - DNA, 201 bp, Homo sapiens
  misc_feature (1)...(201): n = A,T,C or G
gaagactgttggaaaatatgggaattaaaccacttaacttgaatgaaatgaattgatgatctagctctgctcggatactacgctctctaattaatgtgctntaatccatgttttggtttcccaccaagtatgtgcttgtgtccatgtgtactattcccacttcaaaaaaccatgcacattgagtgatataactacacccat

SEQ ID NO: 261404 - DNA, 201 bp, Homo sapiens
tttgtggtgctttcttcaacttgattaggctttgctgccagggccttcgttgtactatacaggaattcctgtgattttcaggaacacaaagcggtctttaraaacacattcgctgggcagacaggagggaaaaacacactatttggccaaccagaggaagaaagctcatgtctggaaaattttactgaacaccccatcagg

SEQ ID NO: 261405 - DNA, 201 bp, Homo sapiens
gcgaaggcagaattttccattcacctttccccattatggcaaagcacataataacatctaaaataagctcaaaataaaggtcattccaatgaaagattggmccttgctaagtttcagttttctaactagtgaagtaaagctattggattaaatacaatttaggattctctttgttctacctcccataacaccagctcattt

SEQ ID NO: 261406 - DNA, 201 bp, Homo sapiens
gtgcatgtcaaggacttaggtttagtttaagtaaactaacatttagtacatttagttaatagggcacaatttatttatattaaggttttctgtgtcctttraacttatatttttagttagcattttccatttttagtatttcaatttatcttaaatcttatttgaaatatagagtcatggagcaaagatggcttaagtcaa

SEQ ID NO: 261407 - DNA, 201 bp, Homo sapiens
tatatgagctgcccaaatgttaagtaacctcctagctgttagtctaacatgctttcctttagggaatgttgaaaatacatcagtgccctaatgacagagtrtagcactattcctatatcaagtaatttcaaaataccaaatatcaaaataaacaggattcttgctgcatagatgattactaaaataataatcacttgcata

SEQ ID NO: 261408 - DNA, 201 bp, Homo sapiens
tagttcacgctaaatgagaaaagaaaaaggttttttagaacagtcagtaggcaactcagtgatatggtcacatcctttccatgacttcaactttcctagtrtcgtcccagttgcaagaacagcaatacaatagttcccccttatccacgaggatatgttccaagacgcccaggggatgcctgaaacccctgatagtaccaa

SEQ ID NO: 261409 - DNA, 201 bp, Homo sapiens
tgtaatgtgacccgtttcttctgcatatttgatatcataggttgtcatcaactcaactccataactggctcagagagagttttaaattttggctagaagcygatagggaataccaacattagagagtttctttcttacttgtatgctgcttcataggaggaaaaattgattaaactcttgactttgtgcattcttttgttc

SEQ ID NO: 261410 - DNA, 201 bp, Homo sapiens
cagaagaatggcctcataaaatgatacgaaaaaatagctaggaaacatgaataaacaaaggaaataaatatggtgagagaaattctagttgggccgaataygatgggagaaacgtgaaggtgtaccatggcagaggaacagggtgttattactgaatcgatacatataaattattcaagaattctccaaagtatatgcata

SEQ ID NO: 261411 - DNA, 201 bp, Homo sapiens
tgggtcactgaatctagccatacttgaagcctatagcttgctaatttttgtagaatatgtatgtgtatgttattaaacaggtttgactaaggtttcttttrtttgagaactaaacaattttaattaatgacaatggattagtttgcaaaaatggccacagcaatgtctccagtctcaaatgtttttccagaacctcgttgg

SEQ ID NO: 261412 - DNA, 201 bp, Homo sapiens
ttaataaatgtttgtttatacaataaatggatgaatagatttatctagtgcttattggaatcaatcttgttgctatggggaaataagagaatcaaatttaygttctgacagagttattttattaaaaagcagaggaaaaaatgtatatctataaagtagaaaataaacagtaataaattatgtgagataagttactagggg

SEQ ID NO: 261413 - DNA, 201 bp, Homo sapiens
gataatatccctttcatggcagttatcacattccactgtaactattcatttgatttcctcctactaagactgaattcttttaaaggccaatcctaagttakttatttctgtgtgctcagtgccttgcacatggtgacttcttaataaatgtttgtttatacaataaatggatgaatagatttatctagtgcttattggaat

SEQ ID NO: 261414 - DNA, 201 bp, Homo sapiens
tacatgtggacttttatttttatttgggagctaagagcagccctggagtcagactgccttctcagctaggtttcttgcttcacaagggaagccaggtgtcrtgatgaatttacctcctattctctgactagtgcttatcaagaatagaatcagaaggcttagacagtaattttacgtgttaatgtcctcttaactgggaat

SEQ ID NO: 261415 - DNA, 201 bp, Homo sapiens
ttttggggagatgatgaatcctctaatacttccaaggacaaaaacttcaaattgattcttttggaaggtctgacttaaaagagtgagtagaggttagtatytgagaatatacaacactggtaatggtggtgtttgatgttgagccagttcatagttagctccatccatttcagatgcagcaaaaaagaacagaagcaagat

SEQ ID NO: 261416 - DNA, 201 bp, Homo sapiens
ctttgaaaaaatatgtactctattgttaggcagagcattttataagtgtcagttaggtcaagttgttggtagtgttgtctaagtattttatatcctcactgattttctgtttactctgacaattagaggaatgtttgtgtcctcaagtattgtggatttgtctatttcacttctgtcagtttttgcttcatctgttatgaa

SEQ ID NO: 261417 - DNA, 201 bp, Homo sapiens
tgtcatgctcccaaggacatgactgaccagtttgctgggccatcttgaacagcgggcttatggggacctaggctcacattctatcctaaggtacccctctktatgatagaacaatacagaaagacacacaaagcacaccagattcactacagctcaacattagcctcatgaatcctttttcccattaatcaaaacttaaca

SEQ ID NO: 261418 - DNA, 201 bp, Homo sapiens
aaaaattagccaggcgtggtggtgtgtgcctgtaatccagctactcaggaggctgaggcaggagaattgcttgaatccaggaggcagagattgcagtgagycgtgatcatgccactgcactacagcctgggagacagagtgagactccatctcaaaaaaaaaaaaaaaaaaaaaacaacagcaacaaaaaagggaaactat

SEQ ID NO: 261419 - DNA, 201 bp, Homo sapiens
ccttcatctattgcactgttcttacacccccttcccccagaggactggtatgaacagttgtatcccctcatccttaccctgaaggactgcatgggagaagyggtgaaccgagccaagcagtccctgacatttgtgctccttcaggaacttgcgtacagcttgccccagtgtctgatgctgacgctaagaagagacatcgtc

SEQ ID NO: 261420 - DNA, 201 bp, Homo sapiens
tacatatattatgccccttttacatatgagaaaagctagcactgaaggctaaaataacatgtacgtttttataactggtaaatgataaggctgggactttktgctgactttcatatagcaaaatgtctttcacaatacaaccagtctcaatccacgactccatgaattattttcttctttctcttcccatttatatttccc

SEQ ID NO: 261421 - DNA, 201 bp, Homo sapiens
acatgccttcaaggatcaacttgtcaggagtgctcttttagcactctacactgcaaggccaggaggcattcttaagaagccaccctctcctaagagcagcmcagaggagagcagtccccaagaccaacccccagtgatgagagggcaggactccataccacatcattcagactatgatgaggaagagtgggtaagtctctt

SEQ ID NO: 261422 - DNA, 201 bp, Homo sapiens
aatatttactgagtgctttctatataccaggcactgctaaatactgaataacaatatagccttcaaaaataccaattggctaaaatatgggtctcaaaaawaaataaataacttgtgctctgtttacttttggaataatcttattcaaattgactctttgccattctttgccaaaaccctcaaaatatcattttatttaat

SEQ ID NO: 261423 - DNA, 201 bp, Homo sapiens
ttttttctttcactatcagtgctctgaacacagtagtttccataggatagaatgctgccttccatttcttcattcatcagctgcttgtaacctaatccctrttcctaaaattcgactgaaagtcacaggctacaaatcacaaaatcatggaatctggtgacctcgtttcctttgtagcctccttgctccaactgcagcatt

SEQ ID NO: 261424 - DNA, 201 bp, Homo sapiens
ggtacccctctgtatgatagaacaatacagaaagacacacaaagcacaccagattcactacagctcaacattagcctcatgaatcctttttcccattaatyaaaacttaacagaggatataaaccatgatttttaccattcatccaaccgatttgcacagagagaggctagaagtgtgactgataagaacttttacccttt

SEQ ID NO: 261425 - DNA, 201 bp, Homo sapiens
aatttttaaactatttttattgaaatttaatttttattttgatatttccaagttggaaattaaatgaaaataatagcatcttttctaattcagttcaggaycaacagattaacttcactgtgaattttttgacccctgaggcaagtgttcaaaccagtattgacttggcttcttccaaccttcattttatgtgtcagctgt

SEQ ID NO: 261426 - DNA, 201 bp, Homo sapiens
cgacaaaaagatgatgaaatattccatattattcttggatcttccctacttacccctttctctgtgcctccaagcatcctcatttcatatatcttaaaacrgttccatcaatcctattggctgggtgaggttctgtgtgtttttttttctttcactatcagtgctctgaacacagtagtttccataggatagaatgctgcc

SEQ ID NO: 261427 - DNA, 201 bp, Homo sapiens
taaattatatttctcttcttgtctgcctcctgccgtcttcaaaccctaaccataagtcaaggacttcaatatctgagagtattatttatcttgcaatagayaagtttaagtatagagatacggaaaccagtttgtgagctattacaataatcctagtggtagaaatgttggggtggttgcaataagtgtagaaataagtgg

SEQ ID NO: 261428 - DNA, 201 bp, Homo sapiens
cctgcccagctttgccctgcagaacccgcacaactcacattacctgggctagcccaaggcttccgtttttccttcaaggatttttttttttttttttttttggaggaaggataattgggaaagaaaaaaaaaattagtggcctcactattcctgcatccttttttgctttgaatcccagaaagtttaaagccaaatttgtt

SEQ ID NO: 261429 - DNA, 201 bp, Homo sapiens
aatgaaatgtattatatatttttatattaactagaattgattgggttttatttttgacaaattactgaatttctaaaaataaatgagtactgaaatacagrtagcatttaaatgtaatggatatcagcagaaagcttatttctgaactttgatttgcagttgagcaaaaataaattgttaaatttgaattacaaatgtgat

SEQ ID NO: 261430 - DNA, 201 bp, Homo sapiens
gatcttgagagagatatgagactcttccatttacagacttttcaaagactagtcagcattatattttcaaggcttctaagatggactaatttgcatcattyatgttattgtgattgttttagttgtcagtcattttatttaagaagtgtcctttccttccttctcatctctcttgcatactaagaatgcacttttttcaca

SEQ ID NO: 261431 - DNA, 201 bp, Homo sapiens
gccagctgaaactgtccagagggaggatgcttctccctcacctaccaatgagcagatgcacttgcatgaggtccaggtgctgccagcctagtgtgcagacycaggacagcatggccttttccttctctgggtctggatctccaacagactcctagcatttcaggcagccccattgcctgattttcagctactcacctgcaa

SEQ ID NO: 261432 - DNA, 201 bp, Homo sapiens
ttatctgaaaagccaagggaaggccttacgatgatcatcagattgataaagtgaacagtacatttttagatatataatagcttttcaaaacattgtgggtratggttaattttctgataccattttgaagtttatgttaatatataaataggatcttgagtacaggattgcagtctctttggaaataaatccaattggttt

SEQ ID NO: 261433 - DNA, 201 bp, Homo sapiens
aggcagccaccactgttcagtccaatgttggaaaatcctgctgaggttttcttgctgcactgaactattgcctctctagcattcagaatttagagaagaayaagaaggtactgggtgctttctgcttagacaaggctagagtaggcggtggcagctcctaaaagatatagcccacaggctgaatccctgcgatctgtgtgt

SEQ ID NO: 261434 - DNA, 201 bp, Homo sapiens
cttttttcaaaatatagtgttgtggttgttagaagcaatgttgtggttgtatttggtgtctttccaacttcccaccaactcttcagtatccttaagagacyactacaccagtgtcagtgtaacttctcacttcttactggagaagcattcaggaatgtagataccccacagctctctctgcaggtgcaccttgttctcagg

SEQ ID NO: 261435 - DNA, 201 bp, Homo sapiens
attttcttctacctcctcccaccatttccccctacgggctagactttctgtgactctagcaacgtgcagtggggaggaagcctaatgtgagtcccacacawgtcctgccctttcttcttttgattcctcagttgtggcagcaaagaggaaggagtagggagacagaggtttattctgggcttgcccctggtgagggcaagg

SEQ ID NO: 261436 - DNA, 201 bp, Homo sapiens
ttcaacagcagagcagtgtgacaagcaatcttcaaagacacaaacggctttggaaagagaagataaaagtaatgagacctactactgacaatccaagaaaygaatctttagcattggctgtctatggagcagcaatatgcaactgaagaatggaaaaaaatggcgaaatattcacaaacttattttagtaaccctggtaca

SEQ ID NO: 261437 - DNA, 201 bp, Homo sapiens
ggtgtttcccatctggctatctgtgggggtcatggagtcaccagccctgctgtctgggtacttccaaggacaacaggaggtggtggctgccagccaagttrtggcagaagtgggaccgctggactagaacctaacatgggaccttgtccagtgagctgggtggagcaatcttactgctctcaggcaccaaactgcgacctc

SEQ ID NO: 261438 - DNA, 201 bp, Homo sapiens
gtcttccatggtctggttcttattaactgctgagtttctttttttttttctttctttctttcttttttttttttttttttgccattccttaagacactacrtttttctactataaattcctgtacctctctgcttatgccttgctattttacttctttatacctttatcatttcctctgcctgacataactgtcccacctt

SEQ ID NO: 261439 - DNA, 201 bp, Homo sapiens
tctgttaatcttaaaaggaggagggaacactcaaagcattcactctcaccatcagaaagggcagtcaaaggcagggagaatggggccagttgttccctatrtggcaactgaatgtgttctatcctctgttttcttgatggatgggaaacattcctgaacttctccagtctatatcacccaagagaaatgtgctttgaatac

SEQ ID NO: 261440 - DNA, 201 bp, Homo sapiens
aagcattactgcctgagctccccatcttgttacatcagctgcagcattagattctcataggagcatgaaccctcttgtgagctgcacatgcaagggatctrggttacgtgctccttatgagaatctaatacctgatgatctgaggtagaatggtttcatttggaaaccattccacctcccccatctttagaaaaaattgtc

SEQ ID NO: 261441 - DNA, 201 bp, Homo sapiens
aaaaaaaaaaaaaagtactggggctatgaaaaggcctgcctgtgagttatgtgtaagagatgttgtgtatcagtcttatgatagaaacttcaacttttcaragaccttttaaaacttataccatagttcctatgtgttgttttatgatgataggtcaaaatattattgatatattcatttaacctctaaaccagcagtgtt

SEQ ID NO: 261442 - DNA, 201 bp, Homo sapiens
cttcaacttttcagagaccttttaaaacttataccatagttcctatgtgttgttttatgatgataggtcaaaatattattgatatattcatttaacctctwaaccagcagtgttcaatggatataatgtatgtcacaaaatgcatgccgcatatgtaattttaaattttcaagcagctgtgtttttaaaaagtaaaaagaa

SEQ ID NO: 261443 - DNA, 201 bp, Homo sapiens
gtcttttagagttccccttgcactttgagagttgcctccagaaaacatctgcctcagtctagaagcatggtggggggccgtggagtgggccaaagggatgmtctcattcccagtcttgcatttgtccctgtaggcagtgtgtatccccaagaggggtcttactcatccttttccattttggagaggttctgctgactctac

SEQ ID NO: 261444 - DNA, 201 bp, Homo sapiens
aaagaaaaaaaaaagggaaagtgaatttctttcctgtaggacatctcagagccttcagtagcctttcaaggccctcgaagatgctcagaggacacgtgtcrcctgcagcttttcttaaattaatttgaatgcaagaagctttcatcatggaatacttatcaacagcttattagacactatgttccaagaaacatagtcatg

SEQ ID NO: 261445 - DNA, 201 bp, Homo sapiens
ttctatctcttctcacttatttgagaacattattccagcacttatgtcatttttcttttgcatcataaattattttctctgctagatcatgtgtatcagcrttaaaaaatgccatcaaatctcctgtttatctttctaacttatgtcccatttctctggtcctctttatagcagaaccagagtaagaactatgtctacttt

SEQ ID NO: 261446 - DNA, 201 bp, Homo sapiens
gagtccgtatccacagtccagatacagaacttttccattaccacaaagaaaccccttcacacccacaccaacccctggccaccactgatctgttgtccatsaaaatagctattcctttttgagaatgaaattgaataaattgaattgtatagtatataatcttttgggataacttcattcattcagtccaatgtctttaca

SEQ ID NO: 261447 - DNA, 201 bp, Homo sapiens
ccctaagttttcatttctctagggtaaatatttagaattgggattgctggtttatgtaagtgtgtgtttaactttataaaaagcagctgagctgtttttcyttacagagatgtatgagagtttcagtcagtcttcatccttgccagccattgtaagggtgttaaagtggcgtctcatagtagttttaattttaattaaaac

SEQ ID NO: 261448 - DNA, 201 bp, Homo sapiens
gaagaaatggtaaactcactgctggttcaatgatatttaagattctgatctccttccccaatatgcatggtgctatttagttttggtcctcaaatggctgytccttgtgttccgtttaggttttatagctgcattcagtgtgcacaatgctgtagagtgtgcatactccatgttacctgcaactggaacccaatgggcaga

SEQ ID NO: 261449 - DNA, 201 bp, Homo sapiens
gcaagcctcacattacacaccagggagttctgtttccccaaaggactatgaataagctttgttagcgtgcttgcacatagttcctattcagtaaagttttrgcaaaatgggttaataactaactgacttgcgggaagtttctatatggattctatctactatcttttgttgtgtgagaaatcattactaaacttagggtct

SEQ ID NO: 261450 - DNA, 201 bp, Homo sapiens
tggctcatggagagatgggatttagcttctcgtaatgagaatttgatgtgactggaaattgaacagaagcatctttttattgaaggtactgaggcttatarcaatcattcagtggcagaagttattgtttttcacattacttttcaactagaaaacctttcaaagcttcatgagaaaatacctatctttgttcaagcaaga

SEQ ID NO: 261451 - DNA, 201 bp, Homo sapiens
aaaattagctttatttattaaagattattaaagacatgtgaactaaaaggcatttgagttaaagggttttttttttctttttttcttttttgttttttttytttgagacgagtctcgttctgtcacccaggctaaagtgcagtggtacaatctcggctcactgcaaccactgtttcctgggttcaagctattctcttgcct

SEQ ID NO: 261452 - DNA, 201 bp, Homo sapiens
cccattttgcctctcattttttaaatgaatttcaagtgagtctcaaatgaatctcaagtttcattttttaatgaatcttgattcattaaatacaaggtacrtattaagaattaaatttgaataattctcaagccacaaagataaacaaaagcataacagtgaaaaaaacttgcaacagcaccaccactctctgacatctta

SEQ ID NO: 261453 - DNA, 201 bp, Homo sapiens
agtactttgcagggcctcagtaattgtttgaattgaatgaacacttcaaaggtacaagggatgagagaaaaatccagtttcttgccagtaaagtaaaaaawatatatatatatatatatatgtgtgtgtgtgtgtgtgtgtatatattacatatataatgatgaaagtgagagatcaagagataggagagaaaaaacttga

SEQ ID NO: 261454 - DNA, 201 bp, Homo sapiens
attgtttgaattgaatgaacacttcaaaggtacaagggatgagagaaaaatccagtttcttgccagtaaagtaaaaaatatatatatatatatatatatgtgtgtgtgtgtgtgtgtgtatatattacatatataatgatgaaagtgagagatcaagagataggagagaaaaaacttgaaaagaatttctattctggataa

SEQ ID NO: 261455 - DNA, 201 bp, Homo sapiens
cttttagatagaatgacaagcagattatttgccttcctgttaggattactgtcaagggtaattctgtagcttctgtagctatgctgctctttataataatwtttttttagttcttcttagcattatgtcctgatctgtacctcactgaagttacacctaatgtcctccttttcaaaagtacattagggaggactggcacat

SEQ ID NO: 261456 - DNA, 201 bp, Homo sapiens
ctgctgctgagtgtcccctcaagcaaatatttgattattcataaattatgtattagtaacacagaagagactgctcaatttctcaccctaataaatattgkgtcatctcctgtgtcctctaaacattaatgactaaatttttttattctgcctaccatatatgtaaccctttatgacatgcttattggttttagccaatga

SEQ ID NO: 261457 - DNA, 201 bp, Homo sapiens
atttgtatttgtataattcctcatatttggagagtactgtttatagcagtaaacagtaatctacaagccagttagtctgaaaaactgatgatcaacatttytacgtcatgctcttgaagctttgtggcccaggctatataaatgatactactcatttccatatactgaagaatttttatatttaaacctaagaacttttct

SEQ ID NO: 261458 - DNA, 201 bp, Homo sapiens
tgcatgtactgttttaaaggagacttaggagttcatgggcactatgactaaagaagcaaaaaatgaataagacaagcttcagctgagctaaactttgcttwtctaggaaatcatctatctcaaatactaagagacacatctttttgagactgtccattcagcacatatatatgtgtatatgcatatacataatatataatt

SEQ ID NO: 261459 - DNA, 201 bp, Homo sapiens
ggctgagttgcctgctcataattacatagctgtttactgtatagagtcagcactataaccaagggctttgttactcaacattcactgtgctttccactaarccatacttcattatttaatggtatgtgatgaggtggatcagtgtgagccaaaaatactgagtgtccataaactttgacagatcctgatacaaagacttga

SEQ ID NO: 261460 - DNA, 201 bp, Homo sapiens
atttccataaggtaaaattcagtagaattttggtgatgaataatgattaagctattattactagcctttccaacttgataggtgataaattgaaagcatamtttagcatttaagaattttttttcctaaatctttaagtcatctttgaaaaaatctttggaaacatgaaatagatatttcatttgtgactctcctaattga

SEQ ID NO: 261461 - DNA, 201 bp, Homo sapiens
gtctttgcatgaaagtgacactgttttaggtataaaatgttattggtgaattagcaatgctattttcatgaaaaacacaatataataattattttatcagygatgtaatttaattacttttaaggatattattgtatttgcaatatattatagaaatatcccttctttttcagagtttttttgattgacacgaatgacagt

SEQ ID NO: 261462 - DNA, 201 bp, Homo sapiens
  misc_feature (1)...(201): n = A,T,C or G
attactactcttgccatttgctttctactagagatgtgtctcaaacgtggaatctaattagaaatcttaattgaaaatggattcttaaaaaaagaaaaganagaaaatagaccaacattgaaacttaaatgtaggaagaaaaacatcatattccagccggattgaataatcacccatctgaaaattagttggcatctgggg

SEQ ID NO: 261463 - DNA, 201 bp, Homo sapiens
aataatgattaagctattattactagcctttccaacttgataggtgataaattgaaagcataatttagcatttaagaattttttttcctaaatctttaagwcatctttgaaaaaatctttggaaacatgaaatagatatttcatttgtgactctcctaattgacaagaagtgtggatacctgtattctttgtatggtaaat

SEQ ID NO: 261464 - DNA, 201 bp, Homo sapiens
actgattttttgaagggtttttcatgtctctatctccttcagttctgctctgatgttagttattcttgtcttccactagcttttgaatttgtttgctcttkcttctctagttcttttaattgtgattttagggtgtcgattttagatctttcctgctttctcttgtgggcatttagtgctataaattttcctctaaacact

SEQ ID NO: 261465 - DNA, 201 bp, Homo sapiens
attttaaggaaatatctaacagaatttacatccagttggctgagggcttgagggagcctgggcaggattgaaggactcttaggtttctggtttctataacygggtaaatgccaagacagctgagaaaggggatacaggaaataagccattcatttccattgcttaattaataaggtcagttgtttatactccattaaagag

SEQ ID NO: 261466 - DNA, 201 bp, Homo sapiens
acaaggaaatacccaagggatcatcaggttgcaaacgtattattctctgtcccaacctccttgtggcaattaggactgaagacattacaagaagtgtgacttttttttttttttgtctcctggtttattggcatgaagagccaagagtgactagcaacactcataggctaatatataataggactttctctgaactttaaa

SEQ ID NO: 261467 - DNA, 201 bp, Homo sapiens
ccctataggctatggatactgcaattggtaggttttcagctgaagattgccgtgatcatagtatttggagtgacagtgtagagagaacagaagaatggcaracaattagactattataatagttgcatgagggaaaacaggtacctggggagttgaagattttaaggaaatatctaacagaatttacatccagttggctga

SEQ ID NO: 261468 - DNA, 201 bp, Homo sapiens
agtgactagcaacactcataggctaatatataataggactttctctgaactttaaaaattgcactatctctactttaaaaatgaaaatagattcaatgcartttcaatcaatatcaaagttattttaatagaaattggtaaattgattttaaaatctgaaaagtcaaaggaactaaaatagccacaataatattttctaaa

SEQ ID NO: 261469 - DNA, 201 bp, Homo sapiens
ctaggtgagcggattgcttgagctcacgagttcaagaccagccggggcgacatggcaaaaccccatctctactgaaaatacaaatattagctaggtgtggkggtgcatacttgtagttccagctactcaggaggctgaggtgggaggagtcccttctctttaattttttggaatagtttcactacaaatggtatcagctct

SEQ ID NO: 261470 - DNA, 201 bp, Homo sapiens
tcactctgttgcccaggctggagtgcaatggcgctgtcttggctcactacaagctccgcctgccaggttcacgccattctcctgcctcagcctcccgagtrgctgggactacaggtgcctgccaccacgcccggttaattttgtttgtacttttagtagagacagggtttcactgtgttagcaaggatggtctccatctcc

SEQ ID NO: 261471 - DNA, 201 bp, Homo sapiens
tctcctgtcaactatgagttgactagcaggcaacaattctctagccctttggcttgtcatgtggggtaatcacaaaatcataaagccaaggggatatgaargggcatagaaagcaatcttttctacaagctgctttgtggaaggtgaagatggagccagcatcttgaacttagttttagatttattgcacttgacctaact

SEQ ID NO: 261472 - DNA, 201 bp, Homo sapiens
ccatttaagctttccaaagagatgtctgcctctattgtacagaagttggagagattgtctactttcaaagctgttcatttgggcttctctccaagcttaaygttggccagagtcacagcctattttcccgcctcaagtgtaacctctattaataacaagccttagcttgtagctgtcttgaagaaaaatgttttagctttt

SEQ ID NO: 261473 - DNA, 201 bp, Homo sapiens
ctctattgtacagaagttggagagattgtctactttcaaagctgttcatttgggcttctctccaagcttaacgttggccagagtcacagcctattttcccrcctcaagtgtaacctctattaataacaagccttagcttgtagctgtcttgaagaaaaatgttttagcttttctcttaatctttaagagttcaagctctca

SEQ ID NO: 261474 - DNA, 201 bp, Homo sapiens
ttgcattatgtttaatgtgcttttaaggaagccttataaaatttaatacattttagaatgattttctgtcaaaatgttaaattaatatatatatatgtatmcacacacacacacacacacacacagacacatctgtatgcactatatttggtacttaaataggtaacccctctgttattctgaagacatgtcatctttaat

SEQ ID NO: 261475 - DNA, 201 bp, Homo sapiens
gcaaatattatttcccattattattcatacaggctaaaaatttacatagtatatttaagtaatttgttaatcttatctctgatttatctaaaacattttargtaaacatcacaatgtttagtttaaattctagtctcagcagttacatttgaaaaggttaagtcttatgacttgtcagtattaataatccatttgcaatta

SEQ ID NO: 261476 - DNA, 201 bp, Homo sapiens
gcctgtctttttacaagtatccatttcataattacagtttataatttaaatatctacatgttgagcatagtttttactttaagtattttgtcatattccayttttatactcattcttcttttgatagatgttttacttattctgtttttgaataatttacatatatatttgttattcatcaagtagttactgaggtcctat

SEQ ID NO: 261477 - DNA, 201 bp, Homo sapiens
gccagagtcacagcctattttcccgcctcaagtgtaacctctattaataacaagccttagcttgtagctgtcttgaagaaaaatgttttagcttttctctyaatctttaagagttcaagctctcaaataaaacatggtggcaataaattcataaacttgcattgtttttgcctgaatattccagggccaatgatttcttat

SEQ ID NO: 261478 - DNA, 201 bp, Homo sapiens
atacaaaacacttatttggggatatgctctatgaatttgtaggatgtaattgtctagctttttgcaaccttatttaccatcctcattgccatgggaaagtaaaaaaaaaaaaaagcactgggatcaggaagaggggaataaacaacatatgtattgctatacagtaggaaatgtgcagagaatcaaaagtacgatttcaaa

SEQ ID NO: 261479 - DNA, 201 bp, Homo sapiens
acacctagagatatatcagaaaaaaaaatcaacaagaagattagggtttaaaagtaaaaatgttaagtctaatatgaaaattacagaaaaaatacattttktctgtttatttttaaaactaaatatataaagataatatgatttgaggatttattttctgtaaattagaagttacgtttctcctttgctgcaaactgaaac

SEQ ID NO: 261480 - DNA, 201 bp, Homo sapiens
ttctagttaaagccttggtaaaataaccaattcttccaattgcatcctgctgcaaaagaaaaatggattcttattgcactgatgcaaacaactgtaatgcygtaagttaagaatgctcacagatagtttcaaaattctagaggaaccaggcagagacaaacaaacatgctccatatcttgatcacaggattataccttgct

SEQ ID NO: 261481 - DNA, 201 bp, Homo sapiens
ctagaaataaaacaattaacaactttgcatgtatgaattcaattctctccaaaattagatattaccattttcccaatttattataagggggaataaggaayggtatggctaagtaaattgcccaatgtcccagagtaaatgaaaaggcctaggctgtttggatccataattggtcccaaccactttgctgtacctctctca

SEQ ID NO: 261482 - DNA, 201 bp, Homo sapiens
tctcaattgagagacactctacaaaataattgaccagtcctaaaacttgtcgtagaaaactggaaaagtctgagaaagtcagagacaagaggatcccaagragatacaatgtctaattgaaagaaggtgtgtgggatggaatcgtaaaacagaaaaatgaactaagaaaatctgcataaagtctgaactttagataataat

SEQ ID NO: 261483 - DNA, 201 bp, Homo sapiens
ggcttcacaatattttgttaagtaggcaaaatccaatgtgtcaggtgaagtatttatagaagaaaaagtttccatgaagtttgtctttttgagaacatccygtgaaagtttctatcctttagatgacatgtgagaagcaaccaaaagtgtcacacactgaacagcagagtaaaaagctcacatcaaaacaaaaggcctctt

SEQ ID NO: 261484 - DNA, 201 bp, Homo sapiens
caggaatcctttcaattaagtgctttctctttttggcagctatataacatcttatcccccatgggtgcacagggagtgatcctctgtgtattggactggcktgggtatttgtgtcacttcatgctttggaacattattttgaagacaggatctgcaccttatttactattttaaccacctccttgctgaacacagttctca

SEQ ID NO: 261485 - DNA, 201 bp, Homo sapiens
aaggtgctcttgttctcctttgcagtcatccttcagtttaccctggccacaggatactactgatcaggtttctgttactatagaatcactaactgcatatwtgggtctctttctgattgtataacacaggtctctgtattttcattaaagtcccagcctatgaaaatgtgttagtttctctcttcctaaaaaggatctttc

SEQ ID NO: 261486 - DNA, 201 bp, Homo sapiens
aacatgtctgtccagtttaccacagtatccccaggacctaacttgaaaagagtttgatgaatggatatatatatgggggaatgaatgagtaacatcaaagkgttgcctgccataagaataaagggaagaaccaatgactatgcctgcagaagagatcagtgtgatagaattaggtagcagacacagagactttttgtggaa

SEQ ID NO: 261487 - DNA, 201 bp, Homo sapiens
tttttagtaattatagaatcagatcttaacatgtactttttctttctccatagaataaattaatacataaagctaagatgtttgagatgtttctctttgcytttttttttttttttttttgagatggagtcttgctctgtcactcaggctggagtgcagtggcctgatcttggctcactgcaagctcttccaccacccagg

SEQ ID NO: 261488 - DNA, 201 bp, Homo sapiens
cctttgttttcactttcttttgttgtcttaatactgccaattgtggaagaaagccatttgggaagtatttgtggtgctttcttcaacttgattaggctttsctgccagggccttcgttgtactatacaggaattcctgtgattttcaggaacacaaagcggtctttagaaacacattcgctgggcagacaggagggaaaaa

SEQ ID NO: 261489 - DNA, 201 bp, Homo sapiens
gtggcctgatcttggctcactgcaagctcttccaccacccaggttcaagtgattctccctgcctctgggattacagggacctgccactacactgtgccaatttttttttttttttttttttttttttaagtagagatggggttttgccatgttggccagactggtcttgaatttctgaccttaggtgatccgcccagccca

SEQ ID NO: 261490 - DNA, 201 bp, Homo sapiens
agcattccagttgatgaggaggaaaataaatcagaaggtaaataaaagtaatcataaaagggatgattttgagctattggtcattagtctgttagatcagstaggatttctgattatggaattcatgtaaaaagaaaaaacaggcaaaattgcaattctccattttggtaaaagaccaatttaaattagtttgatttatta

SEQ ID NO: 261491 - DNA, 201 bp, Homo sapiens
aaataatatatataatatatatataatgaataaaggatgcctacaaattaagatgagataaataactataggaaaaaaaaagaacagaacatttgaaccarcactttgccaaagagaaaaatcaaatggccagtaaacatttgggaatcgacctcattaataatcagataattattaattaataatacagtgatatataat

SEQ ID NO: 261492 - DNA, 201 bp, Homo sapiens
tttggtattcccatatttcaaattaacaatattactaaacaacatttaagcactggcactttcactatcaggcttgactcttagaatatctccgtgttgayatgtaatcataattctcctaacttattagtggcatatcaagacaaagaacctgggattctgacatctgttcttcatgatgctatctaaggctccaggttt

SEQ ID NO: 261493 - DNA, 201 bp, Homo sapiens
tggtattcccatatttcaaattaacaatattactaaacaacatttaagcactggcactttcactatcaggcttgactcttagaatatctccgtgttgataygtaatcataattctcctaacttattagtggcatatcaagacaaagaacctgggattctgacatctgttcttcatgatgctatctaaggctccaggtttct

SEQ ID NO: 261494 - DNA, 201 bp, Homo sapiens
taatgggtgtatgacaatgtgaatatacttaatgctactgaaatatatatatatgtatatataaccaaaaatactccaagaatttctcacacaacaggagrccattctttaaaaatgttggtgtgtgtttgctttcataataagtgttgataaagagaatagatgccttcaatttaaaatatcataatttgtgctcaatta

SEQ ID NO: 261495 - DNA, 201 bp, Homo sapiens
cacaatagtaacgcttctggttattctgcttcttagtcatggcatctcttatcctgtagactttacaggaagaagtcagatctcagtccactatgttcctacacacacacacacacacacacacacacacacacacacacacacacacacaccatgcagtatttgtgcattatacttcctgagtaggccccagagtctcta

SEQ ID NO: 261496 - DNA, 201 bp, Homo sapiens
acaatagtaacgcttctggttattctgcttcttagtcatggcatctcttatcctgtagactttacaggaagaagtcagatctcagtccactatgttcctacacacacacacacacacacacacacacacacacacacacacacacacacaccatgcagtatttgtgcattatacttcctgagtaggccccagagtctctaa

SEQ ID NO: 261497 - DNA, 201 bp, Homo sapiens
aagtaataccaccaaaaagttgtattaatatgcataatatgcctaatttctcattcagtcttgagtactgagtttggatattattcacgtgtgaagtagargtatggctgatgagatatatatatatatatatatacacacacacacatacacatatatatttataaatatatatctagcaggtagctccactttactcat

SEQ ID NO: 261498 - DNA, 201 bp, Homo sapiens
accttgaaaacgaaagaaacgacttgagaaaaagaacttccttggtaagatcagactgctctttctccctgtaatttataattctgtccagcagcaagtggaaaaaaaaaaagaataaaaaaagaaaggaaaaggggaaagaataatcaaagccaaactagaatcagagggaaagaatgcagaggggaaaggttcagcctt

SEQ ID NO: 261499 - DNA, 201 bp, Homo sapiens
cagctgcaggtctgttggagtaccggccgtgtgaggtgtcagtctgcccctgctggggggtgcctcccagttaggctgctcgggggtcaggggtcagggacccactagaggaggcagtctgcccgttctcagatctctagctgcgagctgggagaaccactgctctcttcaaagctgtcagacagggacatttaagtctga

SEQ ID NO: 261500 - DNA, 201 bp, Homo sapiens
atgcagtgatctcaacaggatcctgcccttgacatgtggggattattataattcaaggtgaaatttgggtggggacacatatcaccgaaaattatttttayttctggcatatagaaatgcagttatttttgtagattttgtagaaatctttcaaaacttattaatttttttagacttttattttaggttcaggggtacatg

SEQ ID NO: 261501 - DNA, 201 bp, Homo sapiens
aataattgagctaatttaaactcacactaacagtgtataagtgttcccttttctctgcaacctctccagcatctgttatttttttaactttttaataatarccattctgactagtgtgagatggtatctcatagtggttttgatttgcatttctctaatgatcagtaatattgagcttttttccatatgtttgttggccac

SEQ ID NO: 261502 - DNA, 201 bp, Homo sapiens
tgtctttttgagaacatcctgtgaaagtttctatcctttagatgacatgtgagaagcaaccaaaagtgtcacacactgaacagcagagtaaaaagctcacrtcaaaacaaaaggcctctttaatccccgtgtggccactggtcagctggatacatgaaaaactcttcagatttgtctctgagccttggtgttcccatcctt

SEQ ID NO: 261503 - DNA, 201 bp, Homo sapiens
ctttatgatgcattaactgtgtggaatggttctgaaagtatgagtggagtaggcaggaagaaagtttatttgaatgtagttgcagtctctacttacctttwctttttagctttatactgaactccaatatgactgaaattttaacttttgatgtttcctaggtacagaatttcagagtgggatatcagatctttagtgtga

SEQ ID NO: 261504 - DNA, 201 bp, Homo sapiens
aggcccgatgttttcatgaagaagtctgcctatgccatttctactattgttgagatctgtttatgacactaaaaaaaaaatcttctcctttaaggatgtaygtctttctttagtctttaactgtttaaaacatattaggctggtgcaaaagtaattgcggttttaataaaatacacatagactgattacattttcttttca

SEQ ID NO: 261505 - DNA, 201 bp, Homo sapiens
aggcctgaatgtggacagtgtttacgtatctctcatagctcagaaatctattagcgttcaaacacccatcactttctccattccattgagattgatagacsttgtttaataagtcattattatcctgctcatcaaaaagcactattgagcacttaattatgtgtggtatcgtacttgatgctatatgacaaatactacata

SEQ ID NO: 261506 - DNA, 201 bp, Homo sapiens
tctacagaaaaacattgagaccatgcataatgcagaggtacctgtgaaaattaatattcaaaagattttgttcagttatctgattggctagatgtgatttmaaaccattgtcctgatcttaataagaaggagataaataattctcattctttagaagtaacaaatttttatagactccttgatattaatctatgattaaac

SEQ ID NO: 261507 - DNA, 201 bp, Homo sapiens
ttcggaagctactccatagatttgaaacagaaagaagaaagtaagtaaagacaggaggaaagcacagattccattaataacatctcccctttggggaagtytatatacaaggtgattggtccatcacaatgtatagttcttgacatcttaacctatttagtaacatagagttgttaaatatctcaaaactaccagagaaga

SEQ ID NO: 261508 - DNA, 201 bp, Homo sapiens
gaatatggagaggtcaaaattggagaaacagtggttaattgttacaaggaattcctttcccagataaggccaggagtgaattttaaactgagtgtagttaytgggagatgaaggtcaggtatttttacataaggaaataggtgaagttaaagcaggaggaccaataggaagcaaagatcagggaatctcatctggtggatg

SEQ ID NO: 261509 - DNA, 201 bp, Homo sapiens
tcttgaaagaataaaggtttgcagtattacagaccttggccagtatagagcatattgctgtcaatcaaaatcaaggataaatggaagctcctttttaaagrtggaattggccttgttaattcactgactgtttctaatcaaagtcctcagaaattgataatgacaagtgagaaattattcatggaaatacagatacatcag

SEQ ID NO: 261510 - DNA, 201 bp, Homo sapiens
tcgcttgtggttaatagagtacttcctactcaaggttacagtgtgaggggaaagcttgatttacttaggaaagccagtaagttttggatgtgattttgccmaatagtaataatttcaacaagtgccttcttagaaaacacagcatttggctcccattgcagcttggtgaggtagttagagcaagaattatcattccaactg

SEQ ID NO: 261511 - DNA, 201 bp, Homo sapiens
ctcataacataaagccaagactagcaaatgtttcttaaatgaaaaataagagaatattagctatatacgatttgaatcaattgtttgatccagggaatatrgttttttggttgtttgtttgtttgttttttcctctttacaatgatggtgttatttctgagctgggattagtttagcattgtcctacactgcagaccaggc

SEQ ID NO: 261512 - DNA, 201 bp, Homo sapiens
gtagtacactcaaatacctttctaagcatctgctgtctgtatagcactacatgccttcagtttcataaactgctgactcaaagataaaatcagtgaatatyagaaccttagattttgacgtcatcttaaagattatgtaattaaacctcctaaaatatgttaagaagcttatctacaatatctctgccggttttcaactag

SEQ ID NO: 261513 - DNA, 201 bp, Homo sapiens
ttcaggacagggtgtgggccaatgtggggaagagcctgaactgcattattgctatggtggacaaactgattgaaagagatggtggcagtgaaggcagtggyggcaacaatgatggagaaaaggaaccttcattaacagatgccattccctctcacccaagaggtaagaaataattttttttcccaatcatttactgagtaa

SEQ ID NO: 261514 - DNA, 201 bp, Homo sapiens; identical to SEQ ID NO: 52004

SEQ ID NO: 261515 - DNA, 201 bp, Homo sapiens; identical to SEQ ID NO: 52006

SEQ ID NO: 261516 - DNA, 201 bp, Homo sapiens; identical to SEQ ID NO: 52008

SEQ ID NO: 261517 - DNA, 201 bp, Homo sapiens; identical to SEQ ID NO: 52037

SEQ ID NO: 261518 - DNA, 201 bp, Homo sapiens; identical to SEQ ID NO: 52010

SEQ ID NO: 261519 - DNA, 201 bp, Homo sapiens
gcctctgctgccctgtggccctggcgcaggatgtgactggggccttggaagatgcccttgccaaggtgagcacattctgttggttttctgctaccctggghcttctctggtaatgggtggccagatttttgtaataaacccgtctatttgacggtgtctgctgacatggagaggtctagtgtggttttggaggttctcctg

SEQ ID NO: 261520 - DNA, 201 bp, Homo sapiens
ttcaatgatctgcgcctctgctgccctgtggccctggcgcaggatgtgactggggccttggaagatgcccttgccaaggtgagcacattctgttggttttytgctaccctgggccttctctggtaatgggtggccagatttttgtaataaacccgtctatttgacggtgtctgctgacatggagaggtctagtgtggtttt

SEQ ID NO: 261521 - DNA, 201 bp, Homo sapiens
ggtcaagagatcgaggccatcctggctaacatgctgaaacccccatgtctactaaaaatacaattagctgggcgtggtggcacgcgcttgtagtcccagcyactcgggaggctgaggcaggagaattacttgaacctgagaagcggaggttgcagtgagccaagatgatgcgtgccactgcactccagcctggtgacagag

SEQ ID NO: 261522 - DNA, 201 bp, Homo sapiens
gaggctgccttcagcagcggggagcaagagctctttgtccagttctgcactgtcttcctggaagaccttgttccgtatttaaatcgctgtctccaagtcckttttccaccagctcagatagcacagactttaggtaagagaatgaaaattctgtaaactgccttactgatgtgtaattcacatactaaataattcatccat

SEQ ID NO: 261523 - DNA, 201 bp, Homo sapiens; identical to SEQ ID NO: 52015

SEQ ID NO: 261524 - DNA, 201 bp, Homo sapiens; identical to SEQ ID NO: 52016

SEQ ID NO: 261525 - DNA, 201 bp, Homo sapiens
tattctgtggtcaggactgaagctttaggtagaaactcttgcatgtttcacatcagtttctgccagccaggtatgcctgaacagaaaacattcatttattyaaaatacatattaatcatgtgccaagcactgctctatatgctggggatacagtgtgaataaagtggtcctggctctcatgcagcttacgtgctaatggga

SEQ ID NO: 261526 - DNA, 201 bp, Homo sapiens; identical to SEQ ID NO: 52017

SEQ ID NO: 261527 - DNA, 201 bp, Homo sapiens
ttctagctttctgaaacctcggggcttagtagaaagcttgtatagttttgcttcattttcctggatccagcacagttctggttggtcctccgtggaagttmagaaccatgtattgggccgggcgcagtggctcacgcctgtaatgccaacactttgggaggctgaggtaggaggatctcttgaagccaggggctccagacc

SEQ ID NO: 261528 - DNA, 201 bp, Homo sapiens
cataggcagctgacaacatggctgtttgcttcctcaaggccagcaggagagctactctcttgagtctcttcttttaggtacctccttttaaaaacttcatwtgattaagtcagatgattagggactttaattacatctacaaaaccctttacctttagcatattcttttatttttattgttaaaagtgttttattttacag

SEQ ID NO: 261529 - DNA, 201 bp, Homo sapiens; identical to SEQ ID NO: 52031

SEQ ID NO: 261530 - DNA, 201 bp, Homo sapiens; identical to SEQ ID NO: 52032

SEQ ID NO: 261531 - DNA, 201 bp, Homo sapiens; identical to SEQ ID NO: 52003

SEQ ID NO: 261532 - DNA, 201 bp, Homo sapiens; identical to SEQ ID NO: 52005

SEQ ID NO: 261533 - DNA, 201 bp, Homo sapiens; identical to SEQ ID NO: 52007

SEQ ID NO: 261534 - DNA, 201 bp, Homo sapiens
aaaaaaaaaaaaaaaaaccaaaaccatgtattctctctatagttttatgacactcctccactggaaccggaaactatacccgtaatgtaacaagttgggtytgaacttcacattaataaagtgacacaattgtggacaatgaccataattctgagtttaaatgagacagtaaaataatgtactgttaaattactttgttca

SEQ ID NO: 261535 - DNA, 201 bp, Homo sapiens; identical to SEQ ID NO: 52009

SEQ ID NO: 261536 - DNA, 201 bp, Homo sapiens; identical to SEQ ID NO: 52011

SEQ ID NO: 261537 - DNA, 201 bp, Homo sapiens; identical to SEQ ID NO: 52012

SEQ ID NO: 261538 - DNA, 201 bp, Homo sapiens; identical to SEQ ID NO: 52013

SEQ ID NO: 261539 - DNA, 201 bp, Homo sapiens; identical to SEQ ID NO: 52014

SEQ ID NO: 261540 - DNA, 201 bp, Homo sapiens
gagacgcaggccgaaccgcccagcgtggggccctagccggcgtcccctgcctccagaacgcggtgcgtgaggttcccggcgcggggtggccaggactgccycgccctggaaggtccggggcgggttcgggaggcgggaaggcgctcccgggaggagagcggaagggggcggtgctcactgccagtctaagcaggaaggcgg

SEQ ID NO: 261541 - DNA, 201 bp, Homo sapiens; identical to SEQ ID NO: 52018

SEQ ID NO: 261542 - DNA, 201 bp, Homo sapiens
agcgcagaagtggtcgcggttcatacgccggacctcccgcaggagcgaagtgggatgcgggagcggagaggcctcaggacggatagaagctcctgtggggyagagcccgctcagataggacgcaggggcgaggagaggtcccctagttccgctgttacctgacagcctggcgtctgctttctgctcccttgctctctgagg

SEQ ID NO: 261543 - DNA, 201 bp, Homo sapiens; identical to SEQ ID NO: 52019

SEQ ID NO: 261544 - DNA, 201 bp, Homo sapiens; identical to SEQ ID NO: 52020

SEQ ID NO: 261545 - DNA, 201 bp, Homo sapiens; identical to SEQ ID NO: 52021

SEQ ID NO: 261546 - DNA, 201 bp, Homo sapiens; identical to SEQ ID NO: 52022

SEQ ID NO: 261547 - DNA, 201 bp, Homo sapiens; identical to SEQ ID NO: 52023

SEQ ID NO: 261548 - DNA, 201 bp, Homo sapiens; identical to SEQ ID NO: 52024

SEQ ID NO: 261549 - DNA, 201 bp, Homo sapiens; identical to SEQ ID NO: 52025

SEQ ID NO: 261550 - DNA, 201 bp, Homo sapiens; identical to SEQ ID NO: 52027

SEQ ID NO: 261551 - DNA, 201 bp, Homo sapiens; identical to SEQ ID NO: 52026

SEQ ID NO: 261552 - DNA, 201 bp, Homo sapiens
cagctcatggacacctgtgtccggaacagttattatgaagaggccctggagcttgcagcctacgtacgccgactggagaggaaatactcttccatccctgycatccaggtagccaccttgcccagagaggactcaaagtaatgttcttgtaatcatttattctgtggtcaggactgaagctttaggtagaaactcttgcat

SEQ ID NO: 261553 - DNA, 201 bp, Homo sapiens; identical to SEQ ID NO: 52029

SEQ ID NO: 261554 - DNA, 201 bp, Homo sapiens; identical to SEQ ID NO: 52028

SEQ ID NO: 261555 - DNA, 201 bp, Homo sapiens; identical to SEQ ID NO: 52030

SEQ ID NO: 261556 - DNA, 201 bp, Homo sapiens
acatacgtatgattccatttatgtgaaatatctagagaaatggtttttacagtcttttttttttttgaggcggagtctcgctgtgttgccaggctggagtrcagtggcacagtcttggctcactgcaacctccacctcccgggttcaagcaattctcctgcctcagcctcccgagtagctgggactacagactcgcaccac

SEQ ID NO: 261557 - DNA, 201 bp, Homo sapiens
aggtaggaggatctcttgaagccaggggctccagaccagcctgggcaacaaagcaagaccctgtctctacaaaaaattttaaaacttagccagacgtgatrgtgcacgcctgtagtcccagctacttgggaggctaaggtgggagtatcccttgagcccaggagtttgaagctacagtgagctgattgtgccgctacactc

SEQ ID NO: 261558 - DNA, 201 bp, Homo sapiens
acaaccgggtcctctctgctcagggtcttacagggttgccatcaaggtgttggctggactatggcctcatctggaggttggggctccatttcagactcatkcaagttggcaggggtcagttctttgcaattgcagaactgaagcctcagctcctagaggctgtccactccataggcagctgacaacatggctgtttgcttc

SEQ ID NO: 261559 - DNA, 201 bp, Homo sapiens
tacgatggtagaaataactaacacataaagcgtttaccacgttccaggttctctgctgagcgctttattaatccatttaaacctcacaacagccttcgagrtaggtactgttattccttttttatcttttttgagacggagtctcgccctgtcgccaggctggagtgcagtggcgagatctcggctcgctgcaacctacct

SEQ ID NO: 261560 - DNA, 201 bp, Homo sapiens
catttgaatgcttattatataccagagatagagaactaaaatatcggtacagtctctagcctcaaaaaatagctataagaaacaatactttacaatgattrtatgatgaacaaagtccagaatttggccagttttaagattacccagtgaatgtcaaatttagcaaatggaaagaatgcttattatatatatttttgaata

SEQ ID NO: 261561 - DNA, 201 bp, Homo sapiens
cataagataaggatggacgtgatcattggatttgacaacatggagctcattggtgaccttgacaacagcaatgtcagtggagagatggggacagaaagccrtgaaattacttaaagagagattggtgtcagtgaaagagggaagaattgtaagggtgaagtcattgagttcagggaggtgagattcagatgacaagtggag

SEQ ID NO: 261562 - DNA, 201 bp, Homo sapiens
acagagtgagactctatctcaaaaaaaaaaaaaaaaggaggagaatattcttttttggtgtgcacaaaactagagcatcccatcacagcaacaacagagarcattcataggaggaggtctttttaggggcatatttgctgtgttggagacttgtattttcagtatttatgaaatagagagtctatgtagccaagaataaac

SEQ ID NO: 261563 - DNA, 201 bp, Homo sapiens
cgtgatcattggatttgacaacatggagctcattggtgaccttgacaacagcaatgtcagtggagagatggggacagaaagccgtgaaattacttaaagaragattggtgtcagtgaaagagggaagaattgtaagggtgaagtcattgagttcagggaggtgagattcagatgacaagtggagaatttggtgtctgaaac

SEQ ID NO: 261564 - DNA, 201 bp, Homo sapiens
gagaatttggtgtctgaaacaaagagagatgctttgtccacagtaggaggaggaaaggccgagagtatgagtaccaatgcagataagtaggtagatttgaygatggaaaaagaagggaattttgatctgattgcttctcagtgaggtataaggtaagttcattgaccaaggctatgggaggtaggccttggcagccaggtt

SEQ ID NO: 261565 - DNA, 201 bp, Homo sapiens
tagcagaaagggttaagaaagaaattttcagagtaaaaagatttggaggtgacaaaaaagaagtatatatagattattcttttgagaagtttcatggtcartggaaaaatatgttatcaaaatgtaatggcaggattaagattttgtttctcctttaaggaaaagggtgtcttgaacttaccatatggcccaaaattaggg

SEQ ID NO: 261566 - DNA, 201 bp, Homo sapiens
acacataattagaagtataaacaaacaatatcacactagtctacttttaaaaaataactcaatgttgagaggtagtataccatttctgaaaaaaaaaaagkagaatatttctggccagggctgattatgtgtgagcctgaagaaggctgccttggtttaagaatcatggctcactcttagaaccagcaaagcttaccagag

SEQ ID NO: 261567 - DNA, 201 bp, Homo sapiens
gaaaaccttagaatatcattctagttgatatataacatatttttcattttcataaccctgtatattacttaaacctaagacatgtgacatcatccttgacmattttgatacaaatctgttgtggaatgatgactcctcccattcacgtagcactttccaattggaaaggtgttttctctttaccagaaaagatattgtaat

SEQ ID NO: 261568 - DNA, 201 bp, Homo sapiens
aagtcttgtgttttaccaaaatgaggatttcccagccatcagactgataatacctacaaaataggtgacaacaagaataaaccagctttggggaagctttrtgtttctacattgaatttatcatatggttttcacagtagagacatgatatgagtagacccctggggtctcatttgtcctgggaaggcctcgaacttccca

SEQ ID NO: 261569 - DNA, 201 bp, Homo sapiens
agcctatgtgaacaatcgaatacgaacaacaaagtacacacttctgaattttgtgccaagaaatttatttgaacaatttcacaggtactgttttatttttkaagaaaaccttagaatatcattctagttgatatataacatatttttcattttcataaccctgtatattacttaaacctaagacatgtgacatcatccttg

SEQ ID NO: 261570 - DNA, 201 bp, Homo sapiens
tatcactggcgacggctgatcagaggtgcaaccagggatgatgattcagggccatacaactattcctcgttgctcgcctgtgggcgcaagtcctctcagayccctaaactgtcaggaaggcaccggattgttgttccccacatccagcccttcaaggatgagtatgagaagttctccggagcctatgtgaacaatcgaata

SEQ ID NO: 261571 - DNA, 201 bp, Homo sapiens
aagctttatgtttctacattgaatttatcatatggttttcacagtagagacatgatatgagtagacccctggggtctcatttgtcctgggaaggcctcgarcttcccaggatcctggctcttctcaaattgtcaacaaatgcataattacagcaactggagtgatcattttagtccagctcatttctgtggcactaatata

SEQ ID NO: 261572 - DNA, 201 bp, Homo sapiens
gacctaaagatcttgaggcaggagaccgagggaaaaaaagggaaagaagaggaaatgagaggagaaggaaggaagtgggagtgtcctatttgtgcgcacgtgtgtgtgtgtgtgtgtgtgtgtgtgtgtgtgttggatggtattttaggcacaaaattcagataaaagctcataatccaaaaaactgattttcattcatgt

SEQ ID NO: 261573 - DNA, 201 bp, Homo sapiens
gaaaatccagacacctcttggtgcatggatagtatagaataaactaatcaacagaattcccttttgacatttgatttaatttagttttacagaattcaaayggtgatgtaattcattcacaaaaaatactcccatctccttgatatcttatattttgtttattcaggtttgttacaccattcatccagtgcttagatgtgt

SEQ ID NO: 261574 - DNA, 201 bp, Homo sapiens
gcttttcaaatatacttcggaggcagacttttaaaaaattatattgaagagatagtaaatgttattttggccagtcaatcttcattgatttagttatctayaaataaatattttagaggccaaaatccaaaagaactgtttttttttcttgttcctattattagtataaaaccgatgaggctgacatgaatattttctctc

SEQ ID NO: 261575 - DNA, 201 bp, Homo sapiens
aaactattatattatatcttagccatatgtcaagtgattccaagacttaatatttctccaacttttgaaatggaagaagaatgtacacagttcattctgtrtactcattataagcccatatcggaaatatatttttcttctatttttctatcgatatattttcttctattttatctttttatctatccttgtattgaactt

SEQ ID NO: 261576 - DNA, 201 bp, Homo sapiens
acctaaagatcttgaggcaggagaccgagggaaaaaaagggaaagaagaggaaatgagaggagaaggaaggaagtgggagtgtcctatttgtgcgcacgtgtgtgtgtgtgtgtgtgtgtgtgtgtgtgtgttggatggtattttaggcacaaaattcagataaaagctcataatccaaaaaactgattttcattcatgta

SEQ ID NO: 261577 - DNA, 201 bp, Homo sapiens
cttggaactcagaactcatcatctctgcagtttcacaaaatctgtttagttgaaaatattataacaaatagttgttctgcttttttaaacataaatgagastcataatggtaagttcatgttattctataacagcgtcaacaaactgtggcaaacaggccaaatttggcctactgtctgattttgtaaataaagctttgtt

SEQ ID NO: 261578 - DNA, 201 bp, Homo sapiens
tacattaataactcaagctgccattgtgagcagccagttaaaagaaccaagccacttttgtatgcttggtgaagtaaaaaccagcttttcaaatatacttyggaggcagacttttaaaaaattatattgaagagatagtaaatgttattttggccagtcaatcttcattgatttagttatctataaataaatattttagag

SEQ ID NO: 261579 - DNA, 201 bp, Homo sapiens
cctaaagatcttgaggcaggagaccgagggaaaaaaagggaaagaagaggaaatgagaggagaaggaaggaagtgggagtgtcctatttgtgcgcacgtgtgtgtgtgtgtgtgtgtgtgtgtgtgtgtgttggatggtattttaggcacaaaattcagataaaagctcataatccaaaaaactgattttcattcatgtat

SEQ ID NO: 261580 - DNA, 201 bp, Homo sapiens
catgttattctataacagcgtcaacaaactgtggcaaacaggccaaatttggcctactgtctgattttgtaaataaagctttgttagaatatagccatackcacttatatatgatctatggctgcttatgcaatacaacagcagaactgaatagttccaacaaagtttgtctggctcccagtgcctaaaatattactatcc

SEQ ID NO: 261581 - DNA, 201 bp, Homo sapiens
aagtgagatttagattgttgtatgagattgtggacactagagggataaacattcttatgtcttagtaagaatttaatggcaagtgaatgcttccttttaargtttccagaaataaatcaaattgtgctgatttcaaccttttaaaaaaagtcacatttgtcataatggtaacctaatgtgcattatgtgaaactaatgaaa

SEQ ID NO: 261582 - DNA, 201 bp, Homo sapiens
tgagtgttatagctctattagaagccatgggtcacggaagagaaccatggaacccctgactagtgttcaactcaattaggatgaacccaggcacttagccrtgcaggaacaatggcaagtggcaatgggtgcctcactggatcaggagcacagcagacaccctgccagatccgcaggggtggaagtcagcggcgggtctgc

SEQ ID NO: 261583 - DNA, 201 bp, Homo sapiens
tcttggaccagaagccattagagtagcttatctttctgagaccatggttcttggatgttggacaacctttgaggtgccagtgaagactatggattcattcmcccagaatagcaccccaaaccacaaacaatacattttcagaaactggtcctgatccatgtccatagatgctagactaagaaaatctattctggccaggtg

SEQ ID NO: 261584 - DNA, 201 bp, Homo sapiens
atagacacacctagagcttctggtcttttttatgcagtggtttaaaattaaacacatgtgtatacacacacacacaaactagtggagaccagttctctctrgaaattaattctgaggcatattttcactgaagtgaaaactattttaacagtgtatctgtgttttaatggctagtcctttagggttttctgcaaaagtgtt

SEQ ID NO: 261585 - DNA, 201 bp, Homo sapiens; identical to SEQ ID NO: 52085

SEQ ID NO: 261586 - DNA, 201 bp, Homo sapiens
aaaagagatgagatgatgagagctcactggggtccctttttttttttttttttttttttttgagacggagtctcgctctgtcgcccaggctggagtgcagkggcgcgatctcggctcactgcaagctccgcctcccgggttcacgccattctcctgcctcagcctcccaagtagctgggactacaggcgcccgccactacg

SEQ ID NO: 261587 - DNA, 201 bp, Homo sapiens
gaactgtcttgcagcaacaatgtttcataaaatatacagtgagaagcactgctttatttttttgtatttataacacaaaattttgtgttcataacatttcraagagctaatactagccctcctccactctagtcactgaacatacatatccctgcccaagtgagtatttttcgtttatgcctcctcacacagaaaagatac

SEQ ID NO: 261588 - DNA, 201 bp, Homo sapiens
caataaggcagatcatgaagaggccagagcctgaagggccttgtgtattttgttaaaaagaaacatttatcctgaagttattggggttagtattagaaaartccttccatggaaattttagatggtcttcatgaaaagaagttaggcagctgcccctctctcatcagaaacattctcataagccatctcttaggatgagtc

SEQ ID NO: 261589 - DNA, 201 bp, Homo sapiens; identical to SEQ ID NO: 52090

SEQ ID NO: 261590 - DNA, 201 bp, Homo sapiens
gagaaatcacagattcagctttcaggaaagaaggggtccttataatcctctaatatcatccaatccattcagaccaaggaactacatgggttttcctaaaggagtccagtctgacttaaagttcaagccaggatgcaagaacatgtggttgatgtcagagaagtttgtcccacgccccaggcataattgaaattccaaatc

SEQ ID NO: 261591 - DNA, 201 bp, Homo sapiens
taaagatgagtctggaagtctgcagtcagaagcttcccttccacgaagcctcacccccatctctcatcacccacaatcttcttttttggctttggcttcaygtccagactttcccctttcaggttccagtggaccccgtgagttaatccctccagcctctcatttatcttaatcatgatccttctctctttacttttgtaa

SEQ ID NO: 261592 - DNA, 201 bp, Homo sapiens
aatattatgaagttggtgccaaaaaaaaaacgcaattatttttgcaccaacctcatacatttaaagtaggcatatacttttcttcctttttgaatttaaatctttttttatttctaaaatttttgtgggtacatagtaggtgtatatatttattatgtacatgagatgttttgatacagggttgcaatgtgaaataagcac

SEQ ID NO: 261593 - DNA, 201 bp, Homo sapiens
gcttcatttttaaatattatataacatttcaagatgtgtctattttgctgttactgaatacttaatttgcttataattttaaaattgttatggttaggatmcacacagataagatcatggaattcctgtatttcaagttatttctttagaaaaaaaattgctgaaggatgcccactgctagcaatattaacattttatgtc

SEQ ID NO: 261594 - DNA, 201 bp, Homo sapiens
gcctgccttatttcatttaacataatgacctctagttccatccatgttgttgtaagtgatagaatctcattctttttttgtggccaaatagtactccatcrtgtagatataccacagttttttatccattcatctgttgatgaacacttaggtggcttccaaaccttggctattgtaaacagtgctgcagcaagcatagga

SEQ ID NO: 261595 - DNA, 201 bp, Homo sapiens
aggtttttaaaatgtgatctgaataagaccaaagtttcttcttgcgttcttttcatgctggttctaagcagggagaaaaacaagtctgtatggacagagcraacctctaactcaaaatcaaccttgagagatgcatcaacaaggacaggggctcctcatccaccaatatttacttgtatcagcctttaaatcatgtaggtc

SEQ ID NO: 261596 - DNA, 201 bp, Homo sapiens
gagtgctgggattacaggcatgagccaccacacctggccaaaaaaagctagatttttaaagtctatttgtagcttagaattcatggaaaattcattttcartgcggaggaaaacttgtttaatgggctggtgattcaccatttgctgtgctagcctccttgtgtgtaactctctcaccttttactcacttaaaattcaatt

SEQ ID NO: 261597 - DNA, 201 bp, Homo sapiens
agccaccacacctggccaaaaaaagctagatttttaaagtctatttgtagcttagaattcatggaaaattcattttcaatgcggaggaaaacttgtttaaygggctggtgattcaccatttgctgtgctagcctccttgtgtgtaactctctcaccttttactcacttaaaattcaatttgcagcacaacccaattcaatt

SEQ ID NO: 261598 - DNA, 201 bp, Homo sapiens
tttcttctatttttctatcgatatattttcttctattttatctttttatctatccttgtattgaacttttcattttccatccacctgaaagtaagaacatrttggctcttgtttagacagaagcagcacagtttggtaataaggtggatctgtgccacaccttattggtttcttgatcaaacctcaccctattcgtggaac

SEQ ID NO: 261599 - DNA, 201 bp, Homo sapiens
tcagacacaccacaaattagcagaagttaacacctcctgtatttgtttcatgtttgtttagttagtcctgtttggactctcaagaaattgtatttcagaayttaaaaagggaagtgagatttagattgttgtatgagattgtggacactagagggataaacattcttatgtcttagtaagaatttaatggcaagtgaatgc

SEQ ID NO: 261600 - DNA, 201 bp, Homo sapiens
acatggcattggtcttatttctgcctctggcaatccaccattaactccctgagagaaggatttatccatcttgaatcaacatctagcacaaaggctggcaygtccattctcaataaagtatttttaaaggttgttgaaggaagctacttaccaggctgtcttttcatctgggccattttcttttcatttgccttatactcc

SEQ ID NO: 261601 - DNA, 201 bp, Homo sapiens
acttttgtttcaggggtgtgtgtgtgtgtgtgtgtgtgtgtgtgtgtgtaaattctactttgcatcatagaatgtatttcttactgggagagcagttaacrcatttcaaaagcctctgatctaggatgactaaatagatccttggtcattcctgcctagtataagagtttaaattttaaactagcaatttgaaaggatttt

SEQ ID NO: 261602 - DNA, 201 bp, Homo sapiens
gttgaaggaagctacttaccaggctgtcttttcatctgggccattttcttttcatttgccttatactccaatgtcattgctgattatgtggatgctcttgkgctgctgttactgttgtccttgttttgtttgtgttttgcaaaaccatacccctaatatatagaataactaggttatggtcttcctcaatgtataagatta

SEQ ID NO: 261603 - DNA, 201 bp, Homo sapiens
gctgaaattttgtattctgtaatagtctgttttctgcatttggggttgtggatctatttaggaacatggatctatccatttccatgtataatttcagcttygtgtgaagccacacactatcagtatctttttaccaacatgtacactaacattagtggatcttgaaactaattcaatgcatcctaactagtactaatatga

SEQ ID NO: 261604 - DNA, 201 bp, Homo sapiens
cattgctgattatgtggatgctcttgtgctgctgttactgttgtccttgttttgtttgtgttttgcaaaaccatacccctaatatatagaataactaggtyatggtcttcctcaatgtataagattatttctcaatcttggtctaaacaagttgattttatctttttgaagactaaagattattttgagaaaactacataa

SEQ ID NO: 261605 - DNA, 201 bp, Homo sapiens
ttgttttgtttgtgttttgcaaaaccatacccctaatatatagaataactaggttatggtcttcctcaatgtataagattatttctcaatcttggtctaarcaagttgattttatctttttgaagactaaagattattttgagaaaactacataatatttgatctgaaaaatgagcatctgcaaatatatcatataaaatt

SEQ ID NO: 261606 - DNA, 201 bp, Homo sapiens
ctatttctataggaaaagctttctgtgtataacattattgactgagggagaaagggttgtaaggggaaaattttgttttaaaaacttttgaattgacaaayacaaattgtatgtatttatggtgaagaatgtgatgttttgatatgtggatgtattgtggaatggctagctcaaggtaattaacatatgtattacctcaca

SEQ ID NO: 261607 - DNA, 201 bp, Homo sapiens
tgtttgtgttttgcaaaaccatacccctaatatatagaataactaggttatggtcttcctcaatgtataagattatttctcaatcttggtctaaacaagtygattttatctttttgaagactaaagattattttgagaaaactacataatatttgatctgaaaaatgagcatctgcaaatatatcatataaaattctaaaa

SEQ ID NO: 261608 - DNA, 201 bp, Homo sapiens
catccactgaaataaaataatttaaaagatctttataaatattttatctttagctctctgtagaacaaatacctatttctataggaaaagctttctgtgtrtaacattattgactgagggagaaagggttgtaaggggaaaattttgttttaaaaacttttgaattgacaaatacaaattgtatgtatttatggtgaagaa

SEQ ID NO: 261609 - DNA, 201 bp, Homo sapiens
ttcatacctaaaattgaaagcttgtagattttagaactttaattacaggttttataatctgtgagtaaatgaaatattggatgggaaaattaatatctagmatcatgcaggcctgctttacagaagcactagagtattccagagtattacataaaagtaatacattttccttccaaaactttaacttaattttttaagatt

SEQ ID NO: 261610 - DNA, 201 bp, Homo sapiens
ggttatggtcttcctcaatgtataagattatttctcaatcttggtctaaacaagttgattttatctttttgaagactaaagattattttgagaaaactacrtaatatttgatctgaaaaatgagcatctgcaaatatatcatataaaattctaaaagcccatctgtggagcccaggttaagaatgccagcttgagggcatt

SEQ ID NO: 261611 - DNA, 201 bp, Homo sapiens
cacctgaggtcaagagttcgagaactgcctggccaacatggtgaaaccccatctctactaaaaatacaggaaacaacaaaaaaattagctgggcatggcgrtgcatgcctatagtcccagctacttgtgaagctgtggtggaaggatcgcttgaaccagggaggcagagattgcagtgagctgagatcgagccaccccacc

SEQ ID NO: 261612 - DNA, 201 bp, Homo sapiens
tttgtaagccagtatgtttatgcatctttaatcttctggagtttttcattcaacaagcatactgtttattctacacgaaatgctcttctcttagatctttrtatagctgtctcctttctgtcattgagcctcagctcaaataccttctcagtgaagctttctctgtcacccagttccaagtacattccatctctcccttgt

SEQ ID NO: 261613 - DNA, 201 bp, Homo sapiens
cgacgtccattgctcttctgcccaggtatggtatttattttatcattgagagaataaatggaatcataggctaagaatccttcaagcaactacactactamgaatggttggcagcccaccctgtttagtagtgagaaagtcaatttgtgtcctagttaaaatattggtttttaactcttttatcagagaacaaaagtggct

SEQ ID NO: 261614 - DNA, 201 bp, Homo sapiens
tgtgccttttattgactatgatagagaactcttgtgtcttccatggtttacaacatataagaactttgacattttgtttgtgttttctcatcttggttgaraagaaggttataagtctatcaaggccaggattcattgttctttcttggtcaacttttggaaatgttggttgaaactaattctaactgtattaaatctgca

SEQ ID NO: 261615 - DNA, 201 bp, Homo sapiens
ctgtcacccagttccaagtacattccatctctcccttgtctctctctgtctcaatataaaggcatcttatttatttgctgttgggatagttttggatctaytgtctcccccaggtagaatgtgagttccctggaagccaggatcctgtctgttctatgcactcctcttaccttcaggggtgcctggcaccatagattagca

SEQ ID NO: 261616 - DNA, 201 bp, Homo sapiens
caatacaacagcagaactgaatagttccaacaaagtttgtctggctcccagtgcctaaaatattactatccagccctttacagaaaaggtttgcccgctcygatctgtagctgtatcatacggcacagtggacacaatcctttgttgctgatgaatgtctcttccagaaatgcattaaaaaacccatctgagttactcaat

SEQ ID NO: 261617 - DNA, 201 bp, Homo sapiens
gtttttgtttgtttgagacagctctgtcgcccaagctggagtgcagtggtgtgatctaggctcactggagcctccacctcctgggttcaagcgattctccygtctcagcctcccaagtagctgggattgcaagtgcgtgccaccatgcccagctgatttttgtattttagtagagacagggtttcaccatgttggccaggc

SEQ ID NO: 261618 - DNA, 201 bp, Homo sapiens; identical to SEQ ID NO: 52087

SEQ ID NO: 261619 - DNA, 201 bp, Homo sapiens
ccattctgctgcctcagcctcccaagtagctgggactacaggcgcccgccaccacgcctggctaatttttttgcatttttagtagagacggggtttcaccstgttagccaagatggtctcgatctaggtcaaggagactttcatatcataagtctattgtgaaacaattcctatcttattcttagaaatccatagatacga

SEQ ID NO: 261620 - DNA, 201 bp, Homo sapiens
gaaggatcaagaaaggctgcccggaagagctacaacttgagttaggattaaactaatgagtagagagaggttcacagattggaaaaggaaggaaaggcatktggagctgacagcacgtggtacgtgcagacgttcagaaccacagggccaagggagaacatggtgtgcaggaggaattgtcagcatgtggttattcacctt

SEQ ID NO: 261621 - DNA, 201 bp, Homo sapiens
ataaatccattgatccctgaggcttccttcccaaaatattacattgcatataattttggtctgggtcgtcaaacctcctttgactctcctgagcagctggscagtttatgtagtgtagggttgagttggctaacagatatgattcaactgtagactagctgagcttcagctggctttggtttcttacaagtcctattgcac

SEQ ID NO: 261622 - DNA, 201 bp, Homo sapiens; identical to SEQ ID NO: 52089

SEQ ID NO: 261623 - DNA, 201 bp, Homo sapiens
taggactctgaagttgatcctgagaagttttccagtaggatagaatgtgaaagcccaaacaatgacctcagcagattccgaggcttcctgtgagtaatacrtgatgaacatttgtgggtgtaagtggaattgtgtgttgcaatcgtacttaatttgataaagtgtttctgtgcttatacccttgttaaatcactaaaggtc

SEQ ID NO: 261624 - DNA, 201 bp, Homo sapiens
ttgacaaataccacttgaagaaatggagctttctctcagagaaacaaatgtaagtactggcttgtgttgtttcttttcttggacccttgttaatcttactmcctccccgttatctgcttcatttctaggcatacttaccccataccttctggatcaccttattggatgctttttatcaaagcctggtctgcttctttgtgc

SEQ ID NO: 261625 - DNA, 201 bp, Homo sapiens
agaaatggatagagttggagaagttttgaaacagtactttctgatcagtaggaaaggagaagttagtactaccggctgtatttcagctagatttaaaattyatcctgtaataaaggcaacatgagttgaataaatgttccttcaaggatttttttcatcatgtttacttgtgaacccatcacattcagttacccttatctt

SEQ ID NO: 261626 - DNA, 201 bp, Homo sapiens
tgttgttaatcttttactatgcctaatttataagttaacatttatcataggtatgtatgtatatgaataaacatagtatatttagggttcaatactatccrtggtttcagacatccactgggggtcttggaacatatcccctgtgaaaaaggggaaacttctgtatttttaaaatattttttaaatggtgttacatcatca

SEQ ID NO: 261627 - DNA, 201 bp, Homo sapiens
gaagatgaagattttatagacacagtcagtggttccctcagcaatatggcaaaaccgagagcccccagctgcaggacagttcataatgggcctttgggaartaagccctcaaatcatcttgctgggagctcttttactctaggaagtggagaaggagccagtgaagtgcctcattccagacaggctgctttcagtagcccc

SEQ ID NO: 261628 - DNA, 201 bp, Homo sapiens
ggttgcagtgaagtggtgcgatcttggctcactgcaacccctgccccttgggtttaagcagctctcctgcctcagcctccctagtagctgggattacaggygcccgccaccacacccagctaattttttgtatttttagtagagatggggtttcgccatgttggccaggctggtctcaaactcctgacctcaggtgatcca

SEQ ID NO: 261629 - DNA, 201 bp, Homo sapiens
gaaagaaacgagggaaagatttattctgagtggtcccttttacagatacccatttgggattcaaaaccagaaggcttttttatttgtttttttagtgtggmtaaaactactattgttttaaaaagtatttctgtaatttggcagactggtaggaactcaagcatcttgtccattatttcagatggagcaagtctggagaaa

SEQ ID NO: 261630 - DNA, 201 bp, Homo sapiens
gaggcaggagaatcgcttgagcccgggaggcggaggttgctgtgagtcgagatcgggccattgcactccagcctgggcaacaagagcaaaactccgtcccaaaaaaaaaaaaaaaaaaaatagaatctcatttattttgctattgtcagtaaaacgaagggaaatgctcaaatatgattataatttataatagaacagagg

SEQ ID NO: 261631 - DNA, 201 bp, Homo sapiens
aatggtagatattgttatgatcttaggtctattaaattaataatatttgttaatgttgaataaccaaatctcaaaaaatgctatcttgtcatttcaataaygtattattttagaagcatgtaggatcactaaggtcaaaacacagtattgctgccatcaatattttcatatatgtttatgcttttttcagctttaaaaaga

SEQ ID NO: 261632 - DNA, 201 bp, Homo sapiens
ttgccagagctatatgccttctgccagctcttattcaagtgttactgccctgtatcagagccctctgatagccaccaaggctctcattccatatgagatayctggattaagcttaagtaactacttactaagctgtgccacttgggtgagtttctcactctgtttcctcattactaagtggagataataatatgtacttta

SEQ ID NO: 261633 - DNA, 201 bp, Homo sapiens
gtagagagaggttcacagattggaaaaggaaggaaaggcatgtggagctgacagcacgtggtacgtgcagacgttcagaaccacagggccaagggagaacrtggtgtgcaggaggaattgtcagcatgtggttattcacctttgtctttttttttttttttttcaggactgtgttgtttaggaatcagtggggagggggtg

SEQ ID NO: 261634 - DNA, 201 bp, Homo sapiens
gagaggttcacagattggaaaaggaaggaaaggcatgtggagctgacagcacgtggtacgtgcagacgttcagaaccacagggccaagggagaacatggtrtgcaggaggaattgtcagcatgtggttattcacctttgtctttttttttttttttttcaggactgtgttgtttaggaatcagtggggagggggtggtggc

SEQ ID NO: 261635 - DNA, 201 bp, Homo sapiens
ctgggattaccggcatgcgccaccgcgcctggctaattttgtatttttagtagagatggggtttctccatgttggtcaggctggtcgcgaactcctgaccygaggtgatctgcccacctcggcctcctaaagtgttagaattacaggtgtgagccaccatgcccagcctaaacatcatttttaacagctgtcttatatttc

SEQ ID NO: 261636 - DNA, 201 bp, Homo sapiens
aactttaagcattttatgagtcattaacaattcttttaagcaactttttttttttttttttgaaatgcagtttcgctcttgttgctcaggctggagtgcartggtgcaatctcggctcactgcaacctccatctcccgttttcaagcaattcttctgcctcagcctccccagcagctgggattaccggcatgcgccaccgc

SEQ ID NO: 261637 - DNA, 201 bp, Homo sapiens
ttagatggctatccagccattcatagagacaattgatggtgaattggaatgaagggagtaatttagagaaagagaaatggatagagttggagaagttttgmaacagtactttctgatcagtaggaaaggagaagttagtactaccggctgtatttcagctagatttaaaatttatcctgtaataaaggcaacatgagttga

SEQ ID NO: 261638 - DNA, 201 bp, Homo sapiens
ctaaggactatgtatgtatcattgagaaatatgcagaatgttacttttttctccttaggtgtgaccaggacccttttgtggtggtgttggtgttgttgctmttgttttcaactaatatttcgtaaagtcctatggtgaatttaattcaagtgtcagaggaaaacaaaaacgtataagccattgtcaacccaggagccgaca

SEQ ID NO: 261639 - DNA, 201 bp, Homo sapiens
catctcggcctcccaaagttctgggattacaggcgtgagccaacttgcctggcccctttgagcatttaatagattaaaatttaccctaatacttaatatawactttaaattatacgctaaaaaattttttaaaaaaaacattgtatgtatttttcacttgatattctttttttttttaaacttttttttaattacaggaaa

SEQ ID NO: 261640 - DNA, 201 bp, Homo sapiens
accccctgaacacagccgctctgttcatcgttctcctccatctggtcattgaaagcaagagtttggtgagtggttttcttgcctctgaagtagcctaaaaycttttatgcttggggatatgtcttctattagcagtgaccctgaagataagtggtaatgagaagagtaatgaatctatgggagaagggtgatcacagctac

SEQ ID NO: 261641 - DNA, 201 bp, Homo sapiens
tcagatgcttagcccatgaggcagaagatgtatgctttatttggttaaaatggagttctaaagactacttttactttctcccttacatgttgaaccattgrgtcatatatttatttggtatagaaaaaatattaaaatttcactatctttgagacgtttcagaagctcatggaagtgtggtttttgtttgtttgccaggtc

SEQ ID NO: 261642 - DNA, 201 bp, Homo sapiens
cccatttgtatggactaaagattgttatttgtccttatccttgggagacgtgagatcattgtttcctgttgttgaatcctctcaccaatccttgtacacgytgttctagtgagctggccagttatataaaacatgatcacagcaggcagattttcccagcatgtagctattgataaaaggtaactgatttcattgacttta

SEQ ID NO: 261643 - DNA, 201 bp, Homo sapiens
tacttaatttgataaagtgtttctgtgcttatacccttgttaaatcactaaaggtcgtaactttagccacctactaaaatagtttggcttattttaattawttaataagtatttatacacacacacatacacatataatattcattctggaggtatcttgtggcatccatatcccctttgccagggcagctagaatttggg

SEQ ID NO: 261644 - DNA, 201 bp, Homo sapiens
agtcagacacaccacaaattagcagaagttaacacctcctgtatttgtttcatgtttgtttagttagtcctgtttggactctcaagaaattgtatttcagratttaaaaagggaagtgagatttagattgttgtatgagattgtggacactagagggataaacattcttatgtcttagtaagaatttaatggcaagtgaat

SEQ ID NO: 261645 - DNA, 201 bp, Homo sapiens
gactttcccctttcaggttccagtggaccccgtgagttaatccctccagcctctcatttatcttaatcatgatccttctctctttacttttgtaagtcctrttcctcatgtgactgtgggaaattgtatttctttccttttactctaggttctttgagcaacctctctctccccagatgcatgaagttatattttaactta

SEQ ID NO: 261646 - DNA, 201 bp, Homo sapiens
ctgaaaaagtattcgttgagggcatgttatatgccaggcattgtccagttattggttaaaacagtaaacaagatggccttgtaggagaaacaggtattaartcattttagctcattctcctttatcttcctaataatcttgtaaagattctgtttagaaccacaatccagtgtgtttatcatgttttacatacatacacaa

SEQ ID NO: 261647 - DNA, 201 bp, Homo sapiens; identical to SEQ ID NO: 52094

SEQ ID NO: 261648 - DNA, 201 bp, Homo sapiens
aatcatcttgctgggagctcttttactctaggaagtggagaaggagccagtgaagtgcctcattccagacaggctgctttcagtagccccattgtaagtakgaatgcatgactagagtcttgcacatccacaatgtatgatgagagaacagccttgtaattatgatagagtcaaactctgttgtcttttctaccttagaag

SEQ ID NO: 261649 - DNA, 201 bp, Homo sapiens
aacaaaatgggcctagaagctttcctaaaggagggattgtggatgctgtgtcctggtcattgagagtcacacacaagcacaaaccaccaaggagatgcaasaagttctagttgtgcatttaggctctggggaaagaagaaagtcctcttactagttttaattatatatcaggaaaggaaatgtagccttatgtttccatct

SEQ ID NO: 261650 - DNA, 201 bp, Homo sapiens
caacagtgggccacggtataagcgcagcaaattagaaagaagagcaaacacagatgtcctctggtgtgtcatgcttctggtcataatgtgcttaactggcrcagtaggtaggtaaaatttgattatttgctgacatcttttcagcaagatattaaagtattttatttcaaaattatatctgtgaatatttgactttggtaa

SEQ ID NO: 261651 - DNA, 201 bp, Homo sapiens
tctggtcataatgtgcttaactggcgcagtaggtaggtaaaatttgattatttgctgacatcttttcagcaagatattaaagtattttatttcaaaattayatctgtgaatatttgactttggtaaggtggattttgtcagtagtgttttacctcatatccttgtctctttcatcctttagcctgaaaaatattaatattg

SEQ ID NO: 261652 - DNA, 201 bp, Homo sapiens
taatttatgacattcataaataatgacatagtttaggaattaataaaagcctatctatatatgcatgaataagaaaatggtagtggagcaaacagcaggastattgtatgtgaattgccactaacttgctgtgtaatcttgggtaagtcattctttccaaacctctgttttcttctgtgtaaaatgaagtatttagttgga

SEQ ID NO: 261653 - DNA, 201 bp, Homo sapiens
taaataaattagtgtagtttatatatctatattgataaaactcagttacaaaagttttttaaaaatttaatgacttggaaatatacttgcaatgtattccrtaaaaaagtgaaatttaatatattatcttatgtgtaaaatataattttgaaataaatatataaaattcatttaatcaaaagtatttattaagctgttact

SEQ ID NO: 261654 - DNA, 201 bp, Homo sapiens
taatagattaaaatttaccctaatacttaatatatactttaaattatacgctaaaaaattttttaaaaaaaacattgtatgtatttttcacttgatattctttttttttttaaacttttttttaattacaggaaagagaaaaaatacattgaccgatgctggaaagacgttactgttggggactttattcgcctctcctgc

SEQ ID NO: 261655 - DNA, 201 bp, Homo sapiens
ctccttattcttttcctgctttgtggcctgttttcaaaaattaagcacaaattgagatgcttaagctacctgtctatatgacaccttctttgatcttcatrctctaaggtagaactgacatcctccctatttgtgactacactgtatgctgaatatcagattcgtatcatactatcatatttttactactcttacatgttt

SEQ ID NO: 261656 - DNA, 201 bp, Homo sapiens
cataatcataggccttggtaaaataccatgcaacaaatttcccaggcatctcttcattgaccaaataaaaaagtctctccaactttaccactttcttctaytgactttggcaaggaggtccttaaggccagggttgttccctgagtaactgagggtctagcacaagtgccagctcagagctactatatatgtgagactcat

SEQ ID NO: 261657 - DNA, 201 bp, Homo sapiens
tgaaatagagctcccatacaaagggagggaacccaaagagggtagccgttgccggctccaatgcctgggtttatatccctatccttgtccctcccgctgtsctctcaggcaacagatgattggctatttgtttacctcctgttttttgcctaattagcattttagtgagctctccttactatctgattggtcgggtgtgag

SEQ ID NO: 261658 - DNA, 201 bp, Homo sapiens
aacacacctgacaacaccattgtatattttaaaaccttctagcttcgaaatgtgttccatgtactggcagcatcagcaacacccgggcatgcttttaaatwgcagaaactcagacccctcttcagagcttcaattaaatgcattttaataatatccccaggtgattaatatgcatattaaaattttaacaagccactcctt

SEQ ID NO: 261659 - DNA, 201 bp, Homo sapiens
atgcttttaaatagcagaaactcagacccctcttcagagcttcaattaaatgcattttaataatatccccaggtgattaatatgcatattaaaattttaamaagccactcctttaaaagactttaaagagaatgactttcttaaaaataaacttttaaatttaggataattttagatttacagaaaagttacaaaaatatc

SEQ ID NO: 261660 - DNA, 201 bp, Homo sapiens
attgaaacaattatctgagctttctttcgcagactaccatttaaattctgttttcacaactaattttcagaaagaagagtctcccaaaactatattgacayttaagtatgctatttattgaaatttagccagacatttataaggtaacttttagtaattatcttttggtaaaaacaagaaacaaaaaccccaaaactgaat

SEQ ID NO: 261661 - DNA, 201 bp, Homo sapiens
ctctttaggtaggctaggtaatacaaatcataattttcttggttatgagaaggaaagcgaaaatcaattttgacctgtctcaaaatgttgtgaaatctttktctttgatttataggattcataactacttagcttgtgtttttaaactttcatttccccttaattagactataataatatagttagaaggttttagttaac

SEQ ID NO: 261662 - DNA, 201 bp, Homo sapiens
gggtactactacattcctcttagtaaaacttacaaggttttaactctttaggtaggctaggtaatacaaatcataattttcttggttatgagaaggaaagygaaaatcaattttgacctgtctcaaaatgttgtgaaatctttttctttgatttataggattcataactacttagcttgtgtttttaaactttcatttccc

SEQ ID NO: 261663 - DNA, 201 bp, Homo sapiens
aatatgaatcgcatatgaagatttataaatgtttattaccatcttatctgtaatacaaaaaatggaaacaaagccccaataacaaaatatttaaataaatkagtgtagtttatatatctatattgataaaactcagttacaaaagttttttaaaaatttaatgacttggaaatatacttgcaatgtattccgtaaaaaagt

SEQ ID NO: 261664 - DNA, 201 bp, Homo sapiens
tattgataaaaaggtgtttataagtataagctctcttctggggagtcctgtgtggatttcggtaaatgactcagtcattcccatcacctgcagatgtttawtaatgccctaggaccattctgatcccaaatatggatcacatgattatgcctctactttccttcctttgggaaattcatgatatgaacttcattgcaaaaa

SEQ ID NO: 261665 - DNA, 201 bp, Homo sapiens
gaggctgaggcaggaggatcacttgaacctgggaggcagagtttgcagtgagccgagaccggaccactgcactccagcctgggtgacagagtgagactccrtcttaaaaaataaataaataaaaataaaataaaataaaacatatcacttattgctgtggatattccttccctcagtctgagtgagaggctgcttctgtga

SEQ ID NO: 261666 - DNA, 201 bp, Homo sapiens
gctggagcgctatggcgcgatctcggctcactgcaagctccgcctcccgggttcacgccattctcctgcctcagcctcccgagtagctgggactacaggckcccgacaccacgcccggctaattttttgtgtatttttagtagagacggggtttcaccgtgttagccaggatggtctcgacctcctgacctcgtgatccgc

SEQ ID NO: 261667 - DNA, 201 bp, Homo sapiens
gggaggcagagtttgcagtgagccgagaccggaccactgcactccagcctgggtgacagagtgagactccatcttaaaaaataaataaataaaaataaaakaaaataaaacatatcacttattgctgtggatattccttccctcagtctgagtgagaggctgcttctgtgatgtagaacagcatcttctgtttccccaacg

SEQ ID NO: 261668 - DNA, 201 bp, Homo sapiens
tttagtagagacggggtttcaccgtgttagccaggatggtctcgacctcctgacctcgtgatccgcccgcctcggcctcccaaagtgctgggattacaggygtgagccaccgcgcccggcctggttagcatgtttttatggtcagacctcaaccagcactcagctaaatggtacattttgagaaaagggaaaaatagagtg

SEQ ID NO: 261669 - DNA, 201 bp, Homo sapiens
gcagaaaggaaattttgcctgataaacttaattattggtctctgtttttctaaatggatcacaaaagcagattgaactgacaaaatagatcatgtaactgygttttattaaattgtctgcaagagagatttttaaatatggtattcgcttcttggctttaatttgtacattttctatcatactgcacatccttcataggcc

SEQ ID NO: 261670 - DNA, 201 bp, Homo sapiens
ggtggaaggatcgcttgaaccagggaggcagagattgcagtgagctgagatcgagccaccccaccactacactccagcatgggcgacagagcaagactccrtctccaaaagaaaaagaaaaaaagaaaaaaaaaagaaacctagggggtgagattcaggagattctgatgcaaaacaaacatagggcatcttgaaatgatt

SEQ ID NO: 261671 - DNA, 201 bp, Homo sapiens
gaagataaattatctgttttataacctgagactccaaatgcttgtgatttctctaagtacagctgattactaaactttaaattttctgattcccattacartatattttctaattatatattacatattacatatatacagttgattctccttatttgtagagttatagtttatgtagttgccccgagctctgaattagca

SEQ ID NO: 261672 - DNA, 201 bp, Homo sapiens
tttgttaattctcaagacagggttcctatggttggcagagcatcaggtcaaaaaaacatgagaccagttggtttattagcagaaaactctgaaaaattatytctttgaggaatgagctaaatcttagaattatgaatgatgtttctaaaaatgctgcccatcatgttctttattagagcttttgtctactagattgctgga

SEQ ID NO: 261673 - DNA, 201 bp, Homo sapiens
tatgaatgatgtttctaaaaatgctgcccatcatgttctttattagagcttttgtctactagattgctggactttctcttagtaacagttgagaagagaakattgctatcctcagttagttagttgcctagaagcctcccccattaaatgaagagcagacttactaaagcagagtgtgaccaggtggtgcagtatgaggtg

SEQ ID NO: 261674 - DNA, 201 bp, Homo sapiens
agttagttagttgcctagaagcctcccccattaaatgaagagcagacttactaaagcagagtgtgaccaggtggtgcagtatgaggtgcagtttaagaaaktaaacatagatgaataattgatacagttgttagtatcaatactgtgcacacaaattctcagctaatatttatgaataaatattatagagagaacactttg

SEQ ID NO: 261675 - DNA, 201 bp, Homo sapiens
aaaagtgaaatagtagtgatttgaaaagctcggagattaaaagaccatacttgatggctttataaaggcaaagaaacagctatttggggactaatcacatytggtgaagtagggggaagctgcctaggatttgatgggaaagcaagtaagttttggggctacccagtatctgagttcaaatgtgaactccatcattaggtg

SEQ ID NO: 261676 - DNA, 201 bp, Homo sapiens
caccgtgcctaggacaaggtaaaataaatgtaccttagaaaataaactcctagaaggcagataattttgtccgttttgttccctggtttatttccagtatygataacaatgcctggcatatagtaggagtgccaaaaatattagttgaaagattgaaattactgagcaccttcagtgtgttaggcacagtgcattgtttaa

SEQ ID NO: 261677 - DNA, 201 bp, Homo sapiens; identical to SEQ ID NO: 52080

SEQ ID NO: 261678 - DNA, 201 bp, Homo sapiens
ggctataggaagattactgggtatttgaagaggggaatgggaagaaaagacagatcggggattaaataatgaagagaaataaagtagacaatttggtaccyatctcaatatctaccttcagacaaaggaaagaatagactttgtaagttttttcttatgaagcaaaaagtaagaattcctgccctgctttgaggcattcat

SEQ ID NO: 261679 - DNA, 201 bp, Homo sapiens; identical to SEQ ID NO: 52081

SEQ ID NO: 261680 - DNA, 201 bp, Homo sapiens
acaaaggaaagaatagactttgtaagttttttcttatgaagcaaaaagtaagaattcctgccctgctttgaggcattcatgtaactattttggagtctacyttaaggtaagtattaagaaatattaaagaaatactaagaaatattaaaagtcataacgatttggataagttttatcaatattataataaacctttgtttc

SEQ ID NO: 261681 - DNA, 201 bp, Homo sapiens
ccattttacagatttggaaactgatgctcagaaaggctaaaagcttgtggtaaagggacaactgtgaatctgtttgtcaaacttgtgttcattctgctaaytgctattagcaatttgttgcagttttgaaaatagctaattatattatcagtacttattcaaattaaatgtagtgtgatgtgtaggtaccattgagtaaat

SEQ ID NO: 261682 - DNA, 201 bp, Homo sapiens
taatggcaggattaagattttgtttctcctttaaggaaaagggtgtcttgaacttaccatatggcccaaaattagggacccatggagaagtatttgaatayataaagtagaagaatggaagaagttcctgaagaaggtggttctgaatagcataaaagaagaaatagaagagttagtcacaagagaaaagaaataggcttt

SEQ ID NO: 261683 - DNA, 201 bp, Homo sapiens
taagatttcttttagttcccaataacatagagaaacacatatacaactgcaacattttacctgccttttgctagcctaaaccagctttgagcctaattatkcataaacagtgaataattggacatgtgatcccttcaaaaagaaatctggactgggcgcggtggtttgtgcctgtaatcccaacactttgggaggccgagg

SEQ ID NO: 261684 - DNA, 201 bp, Homo sapiens
gctgcctcaaagatttgtagctctattaaatagaacaaatttctctataccttaaaaagctagaagtgtgagtgaaaggttccaggaggatcaattatgaytcagaataaagaggaattccagttgaaaaaaactgaagattagatgccctgtctgggagagagtcagtctcttacttgtggaaatgttcaagtttatttc

SEQ ID NO: 261685 - DNA, 201 bp, Homo sapiens
agcaagatcaccacacataattagaagtataaacaaacaatatcacactagtctacttttaaaaaataactcaatgttgagaggtagtataccatttctgaaaaaaaaaaaggagaatatttctggccagggctgattatgtgtgagcctgaagaaggctgccttggtttaagaatcatggctcactcttagaaccagcaa

SEQ ID NO: 261686 - DNA, 201 bp, Homo sapiens
agcctttcagtacctattttctaacaaatataaggaaaagaaatctctaaatagtgaaaatagatttcactaaataaatcttgctgaatttttatcttctrcttcctgaagaccactggggtcatttatttacatttcttaattattgtaaggtagttggaagtaaaacttaaatcttcataaagacagatttggacagct

SEQ ID NO: 261687 - DNA, 201 bp, Homo sapiens
tcaaccttgagagatgcatcaacaaggacaggggctcctcatccaccaatatttacttgtatcagcctttaaatcatgtaggtcacatttctgtgaagaayagcatcatcgaaaacccttgctgacttgtgaagagcaaaaatcattgcaacggagtagtttgttcagtgcccgcagcaagaacctcccactccgatccac

SEQ ID NO: 261688 - DNA, 201 bp, Homo sapiens
ttttcatgctggttctaagcagggagaaaaacaagtctgtatggacagagcgaacctctaactcaaaatcaaccttgagagatgcatcaacaaggacaggsgctcctcatccaccaatatttacttgtatcagcctttaaatcatgtaggtcacatttctgtgaagaatagcatcatcgaaaacccttgctgacttgtgaa

SEQ ID NO: 261689 - DNA, 201 bp, Homo sapiens
cctaactagtactaatatgagagagagaagaaagaagatccctgtatgcattgcaggtggtaagggtaagaaatatttcatagaacttttgtttcaggggkgtgtgtgtgtgtgtgtgtgtgtgtgtgtgtgtaaattctactttgcatcatagaatgtatttcttactgggagagcagttaacacatttcaaaagcctct

SEQ ID NO: 261690 - DNA, 201 bp, Homo sapiens
cagtatattttctaattatatattacatattacatatatacagttgattctccttatttgtagagttatagtttatgtagttgccccgagctctgaattarcaaacactgaccactgcttttagaggagatacaaagttagcttcctctgattacaacatactgtcaacaatcaatacatgaccttgtttcttctgaaatg

SEQ ID NO: 261691 - DNA, 201 bp, Homo sapiens
ttaaatgcattgccaacagactgtaacttatacccaaacaaagcttatctaacatgggtaagttccccccataggacacatcacagccttttttgcttggraacactgcagcccatgattgggagtcattttaaacagcaaaatcactgacaaaaagcagaaagatgcaaaaaatatggcaccaaatagcccatgaaaaga

SEQ ID NO: 261692 - DNA, 201 bp, Homo sapiens
ctgcagcccatgattgggagtcattttaaacagcaaaatcactgacaaaaagcagaaagatgcaaaaaatatggcaccaaatagcccatgaaaagaagactgctacagtttgagaactggcaaaagaaggcatcaaggtgttcagcttcagctgggaatgggcatatcacatgacttaaatgtcactctatgcatgtgaca

SEQ ID NO: 261693 - DNA, 201 bp, Homo sapiens
aaatcactgacaaaaagcagaaagatgcaaaaaatatggcaccaaatagcccatgaaaagaagactgctacagtttgagaactggcaaaagaaggcatcawggtgttcagcttcagctgggaatgggcatatcacatgacttaaatgtcactctatgcatgtgacactcaaatgtcactctatgacatgtaaccacaaaaa

SEQ ID NO: 261694 - DNA, 201 bp, Homo sapiens
acactactaagaatggttggcagcccaccctgtttagtagtgagaaagtcaatttgtgtcctagttaaaatattggtttttaactcttttatcagagaacraaagtggcttaagcaaaccgagagactgatttatctctcatgaaaaagtttatctggttgacagtttacagggatagggtagctttgcttcacagggtta

SEQ ID NO: 261695 - DNA, 201 bp, Homo sapiens
tgtgcacatgtccatatctacttcttccttgcttttcttattttgttgtaggttgagaaatgcttgataaaacagcatttaaaatcaaagcaaacaagctytgagtgagagctctttcacgaataaactatttcagacttagtgtataaactaaacttaaattcactgctctggatttggaatttgttcttagtgatcact

SEQ ID NO: 261696 - DNA, 201 bp, Homo sapiens
acttctgaattttgtgccaagaaatttatttgaacaatttcacaggtactgttttatttttgaagaaaaccttagaatatcattctagttgatatataacrtatttttcattttcataaccctgtatattacttaaacctaagacatgtgacatcatccttgacaattttgatacaaatctgttgtggaatgatgactcct

SEQ ID NO: 261697 - DNA, 201 bp, Homo sapiens
gtaatttctggataagcttattgttcatcttcttgagtagaattcattcagtgaatgtttactgagtacctgatgtgatcctcttttaagcctcatgaagrcttcaaaagtaaattaaaagtgataactgcctttaaagaacttcctaactagtgtggagtgaggatgtatgcaaaggagacgtgataagtaccacaaaga

SEQ ID NO: 261698 - DNA, 201 bp, Homo sapiens
ctacaaagccaagtaaatgttccaataaatatcttggttcaaatcaagataaatatcaagaatagagtttcttgtcaggcattggataaggtgcttaataygtgttatcttttttttgaattctcacaacaaatctctatcttatgtagaggaaatttggggcacagagcagttcaatgacttgttcaaggtcacatgcca

SEQ ID NO: 261699 - DNA, 201 bp, Homo sapiens
caaagccaagtaaatgttccaataaatatcttggttcaaatcaagataaatatcaagaatagagtttcttgtcaggcattggataaggtgcttaatatgtrttatcttttttttgaattctcacaacaaatctctatcttatgtagaggaaatttggggcacagagcagttcaatgacttgttcaaggtcacatgccagta

SEQ ID NO: 261700 - DNA, 201 bp, Homo sapiens
actgattatttaaacaataatatatacatcattggtatgggaaagattagctgcataaaaatcatatttaatggtaatgacttcatggggaaaatacacartccctgacttatgatggttcaacttatgatttttccagtttatgatgatgcaaaagagatacacatttagtagaaaccatacttcaattcccatacaacc

SEQ ID NO: 261701 - DNA, 201 bp, Homo sapiens
ggcattaatctcactcaggagggctctgccttatcacctcttaaaggtcctatctcttaatattgtaaaaacagccgctaaatttcaacatgagttttggrgggaataaacattccaaccatagcagccctcatctcatgacagaaggtgactactcagctgatcctcagccctgcttgcccctgtatacaggaatgggaa

SEQ ID NO: 261702 - DNA, 201 bp, Homo sapiens; identical to SEQ ID NO: 52099

SEQ ID NO: 261703 - DNA, 201 bp, Homo sapiens
gacggagtttcactcttgtggcccaggctggagtgcaatggcatgatctcagctcacagaaacctccgcctcccgggttcaagccattctcctgcctcagmctccggagtagctgggattacaggcatgggccaccacgcccggctaattttgtatttttagtagagatggtgtttctccatgttggtcaggctggtcttg

SEQ ID NO: 261704 - DNA, 201 bp, Homo sapiens
gaagctagtgtccaggtggtgtgaggatatggatctgacatggctgtgcccagagggaggaatatgtaaaacaagttgatggtttgatattttgccagagrtcagtcctggtattcccacaagatcatatggcttgcttcatacctctcttttaattcttcccgtaggtcatgagtgacactgaatatgcagagtggctga

SEQ ID NO: 261705 - DNA, 201 bp, Homo sapiens
ggtaggtgaattatgtttgtattgcctgaatggaggattttgaaaaacactggatatctttgaataagggttattttcttccattgttatctaataaacayatatggttctgcctaccctgtccagtctgatctctatccaacttccaatccattctattctgttgtccactgcagtgaactagacttcacttgtgatggg

SEQ ID NO: 261706 - DNA, 201 bp, Homo sapiens
ggtgtttctccatgttggtcaggctggtcttgaactcctgacctcaggtgatctgcctgcctcagcctcccaaagtgctgggattacaggcgtgagccacygcgcccggctgtgtagtgactttctaaggctgagttcagtatatttctactgagggccagagaggacatttttagagcatattatcctatgggtctagag

SEQ ID NO: 261707 - DNA, 201 bp, Homo sapiens
ttacgttgactacataaatagtgtcttagtccattcaggctgccagaacaaaataccataaactgggtagcttagaaacaacagaaatttatttttcacakatctggaggctggaaagtccaagttcaaggagccagcagatttggggtctggtgagggcctgcttcctggttcataaaaacagttccttctttactgtgt

SEQ ID NO: 261708 - DNA, 201 bp, Homo sapiens
ccacgcccggctaattttttgtgtatttttagtagagacggggtttcaccgtgttagccaggatggtctcgacctcctgacctcgtgatccgcccgcctcrgcctcccaaagtgctgggattacaggcgtgagccaccgcgcccggcctggttagcatgtttttatggtcagacctcaaccagcactcagctaaatggtac

SEQ ID NO: 261709 - DNA, 201 bp, Homo sapiens
ggaactgtctagtcacatccattaacaaatccattttactccagaaaaactagaggaccatgtagatgatggggaaaagagggaaaggtgctgtgtgaaaraaattagaaatttttgctgtatttaaaattacctgtataaaagttcaatttccttctttgccttttacattttattaagtcttgtgttttaccaaaatga

SEQ ID NO: 261710 - DNA, 201 bp, Homo sapiens
acaacaccaaaatcacaatccattaaagaaaaataaaagaactcatcaaaatttaaaattttgctcctccaatgatactgtttttacaatgaaaagacaartcacagacaggaagaaaatatttgcaatccatgtatttcctataggacttatattcataatatataaaggaatctcgaaacccagtaataaaacaaacaa

SEQ ID NO: 261711 - DNA, 201 bp, Homo sapiens
ttagtggcataaatccaagtgacatacataggagagtcacaagacttttgagaatgttataccagaagaaacactgccagcttagcctacaaagggacacrtttgtggtactttgttacaatagccataggaaactggtacaaatagcatttttaacacctactatgtgtcaacactctgcctgctttgtatgtattgtct

SEQ ID NO: 261712 - DNA, 201 bp, Homo sapiens
atttctccaacttttgaaatggaagaagaatgtacacagttcattctgtgtactcattataagcccatatcggaaatatatttttcttctatttttctatsgatatattttcttctattttatctttttatctatccttgtattgaacttttcattttccatccacctgaaagtaagaacatgttggctcttgtttagaca

SEQ ID NO: 261713 - DNA, 201 bp, Homo sapiens
aaacacacctgacaacaccattgtatattttaaaaccttctagcttcgaaatgtgttccatgtactggcagcatcagcaacacccgggcatgcttttaaawagcagaaactcagacccctcttcagagcttcaattaaatgcattttaataatatccccaggtgattaatatgcatattaaaattttaacaagccactcct

SEQ ID NO: 261714 - DNA, 201 bp, Homo sapiens
ccactgtcatcatatatggtgcctagaatttccagagatgctgagttaaagggtcatccatcatcagtgttgcactagtctgaccacagagtttgggaagctagtgtccaggtggtgtgaggatatggatctgacatggctgtgcccagagggaggaatatgtaaaacaagttgatggtttgatattttgccagaggtcag

SEQ ID NO: 261715 - DNA, 201 bp, Homo sapiens
tttctccaacttttgaaatggaagaagaatgtacacagttcattctgtgtactcattataagcccatatcggaaatatatttttcttctatttttctatcratatattttcttctattttatctttttatctatccttgtattgaacttttcattttccatccacctgaaagtaagaacatgttggctcttgtttagacag

SEQ ID NO: 261716 - DNA, 201 bp, Homo sapiens
ttaataatgccctaggaccattctgatcccaaatatggatcacatgattatgcctctactttccttcctttgggaaattcatgatatgaacttcattgcaraaaggcttagcattattttaagaattgatgaaagtgataaaacacttcaatattaagggtttaaccttgaattcttattttgtgattcaaaaaatatttt

SEQ ID NO: 261717 - DNA, 201 bp, Homo sapiens
tggagagtgacttaaagaaagagagagagagagagagaatgtatagccttttgaatttgaattttgtttccaaaaacaaacagttgatgtccaaccaaaaygaatactctcattccttctcctttaggaataaaattttttgtttgcatgccatatatttagcatccttttgatgtctgtgtattttttgaaaggtcatgg

SEQ ID NO: 261718 - DNA, 201 bp, Homo sapiens
ctttcccccctccacactggattaccagggatctgacaggacttagcccaaaatgagaaaatatatcaagtcctggtacaggaatctacctcccttttaagataagaaaaagtgatagtttttattgaaatcaggtgaataaattattaaatattttatggcaattctaaaaatagactcagggaaatcgtgccctcttgt

SEQ ID NO: 261719 - DNA, 201 bp, Homo sapiens; identical to SEQ ID NO: 52082

SEQ ID NO: 261720 - DNA, 201 bp, Homo sapiens
tcccacgccccaggcataattgaaattccaaatccacttcggaaaggagggttgagggagattttcagtcaaagtttttatagcctgtgttttaaaagccmatttgtatggactaaagattgttatttgtccttatccttgggagacgtgagatcattgtttcctgttgttgaatcctctcaccaatccttgtacacgctg

SEQ ID NO: 261721 - DNA, 201 bp, Homo sapiens
tctaactaatctgacttgaaatgcctttctggaatggagagtcatttagtgtccttacactacctagaacaaccaacagagaaatcacagattcagctttsaggaaagaaggggtccttataatcctctaatatcatccaatccattcagaccaaggaactacatgggttttcctaaaggagtccagtctgacttaaagtt

SEQ ID NO: 261722 - DNA, 201 bp, Homo sapiens
gtctattgattcattcatttattattcatttaataaatttttatttaaatgaaaaaacatggactcattgaaattaagcaggggatattggccatgtgttaaaattggccctgttaacatatataggtagattcagaaacagtaaagcatggggctgtggagtttaatagaactgattttaagactaatttgtaccatttt

SEQ ID NO: 261723 - DNA, 201 bp, Homo sapiens; identical to SEQ ID NO: 52088

SEQ ID NO: 261724 - DNA, 201 bp, Homo sapiens
tgaatctatagaagctcttcacaaagcgggcatcaagatctggatgctgacaggggacaagcaggagacagctgtcaacatagcttatgcatgcaaactaytggagccagatgacaagctttttatcctcaatacccaaagtaaagtgcgtatattgagattaaatctgttcttctgtattttcaaaggcattggaacatt

SEQ ID NO: 261725 - DNA, 201 bp, Homo sapiens; identical to SEQ ID NO: 52093

SEQ ID NO: 261726 - DNA, 201 bp, Homo sapiens
tttatcctgtaataaaggcaacatgagttgaataaatgttccttcaaggatttttttcatcatgtttacttgtgaacccatcacattcagttacccttatytttacctctgttgacaaataccacttgaagaaatggagctttctctcagagaaacaaatgtaagtactggcttgtgttgtttcttttcttggacccttgt

SEQ ID NO: 261727 - DNA, 201 bp, Homo sapiens
cttctgcccaggtatggtatttattttatcattgagagaataaatggaatcataggctaagaatccttcaagcaactacactactaagaatggttggcagsccaccctgtttagtagtgagaaagtcaatttgtgtcctagttaaaatattggtttttaactcttttatcagagaacaaaagtggcttaagcaaaccgaga

SEQ ID NO: 261728 - DNA, 201 bp, Homo sapiens
gagccatgtgtgtaacttgcaacccaccatccaacccttactggattatgcaggagcacatgctggatccagtattctacttagtttgtatcctcacgacrtccattgctcttctgcccaggtatggtatttattttatcattgagagaataaatggaatcataggctaagaatccttcaagcaactacactactaagaat

SEQ ID NO: 261729 - DNA, 201 bp, Homo sapiens; identical to SEQ ID NO: 52097

SEQ ID NO: 261730 - DNA, 201 bp, Homo sapiens
ctatcatactgcacatccttcataggccatgaaaccaaagcaatgctgaacaacagtgggccacggtataagcgcagcaaattagaaagaagagcaaacayagatgtcctctggtgtgtcatgcttctggtcataatgtgcttaactggcgcagtaggtaggtaaaatttgattatttgctgacatcttttcagcaagata

SEQ ID NO: 261731 - DNA, 201 bp, Homo sapiens
agtcagagaaagcctgtatcatcagatgcagagaatacatatatcatcatacacagaaagttgctagaaatatgaattttcaagtacactgatgaggactyggaagaaaatgaggaacatgcttgggaatttgagggaagtggatctttcaaatactggcagaaaaattagctaaattgtgttctacagtaatatggaaag

SEQ ID NO: 261732 - DNA, 201 bp, Homo sapiens
agttagtactaccggctgtatttcagctagatttaaaatttatcctgtaataaaggcaacatgagttgaataaatgttccttcaaggatttttttcatcawgtttacttgtgaacccatcacattcagttacccttatctttacctctgttgacaaataccacttgaagaaatggagctttctctcagagaaacaaatgta

SEQ ID NO: 261733 - DNA, 201 bp, Homo sapiens
atcttccgcattagcctatgctctctgcgagggtagggttcatgcctattttgttcaccactgtataccagtgttaaaggacaagactgacacacagcagrtgctcaaaaaatatttgaatggataaataaatgatgaaataaccagtttttgggttatgtttaccgtcctgataacatatgaattttaaataggaaatag

SEQ ID NO: 261734 - DNA, 201 bp, Homo sapiens
aaactggtacaaatagcatttttaacacctactatgtgtcaacactctgcctgctttgtatgtattgtctcatttaacctaacattaagcctatgtagcawctatttatatctctacttttatagatgctatttagttttgctttttaataaacacttatatggcaattactattttctaattgctttacaaatattaatt

SEQ ID NO: 261735 - DNA, 201 bp, Homo sapiens
ctttcatcaatgttagattgacttcagaatgcaagataatccttatgttctgaaccaattattagtcaaataattgctgagatcattgatacaatgaaatyactattagcttctatggtctctgactcagtcccaaatgtcttctataaaagaagtctctaaaaaatagaatttggaaagcctgcacatactagcctcttc

SEQ ID NO: 261736 - DNA, 201 bp, Homo sapiens
gatctggaggctggaaagtccaagttcaaggagccagcagatttggggtctggtgagggcctgcttcctggttcataaaaacagttccttctttactgtgwcttcatatggtggacaagctcccttggacctgttttataaggactttaatcccattcatgaagtcactgccctcttaacctaattatccccaaagagccc

SEQ ID NO: 261737 - DNA, 201 bp, Homo sapiens
tctgtttcacttacttccaggaaacttggagaacgggatgaactttgaaggatttatttgttcacttgagctgcccctattgatttgcaacatttacaccytttctttactcctcatatgtttctctcctttttttctgcctcatgaaggtgatggtgccaatgatgttagcatgatacaagtggcagacattgggatagg

SEQ ID NO: 261738 - DNA, 201 bp, Homo sapiens
acatttaaagtaggcatatacttttcttcctttttgaatttaaatctttttttatttctaaaatttttgtgggtacatagtaggtgtatatatttattatrtacatgagatgttttgatacagggttgcaatgtgaaataagcacatcatggagaatggggtatccatcccttcaagcatttatcctttgagttacaaaca

SEQ ID NO: 261739 - DNA, 201 bp, Homo sapiens
cagtcatgcagataagaattgcatgtggtgactctatatcttcaccttaattcagtgactaacttcttagtcactagaaattaacttattttagtgggacmaactaaagtagaagaatgagcatgcctgaagcttctttgtatgtagacctttccttaaatcttctgggctcttttatgtatgttgttttatagtgctttt

SEQ ID NO: 261740 - DNA, 201 bp, Homo sapiens
cgtggccacagcacagcctttcagtcatgcagccatcggattccctgaatggcatattacgttgactacataaatagtgtcttagtccattcaggctgccrgaacaaaataccataaactgggtagcttagaaacaacagaaatttatttttcacagatctggaggctggaaagtccaagttcaaggagccagcagatttg

SEQ ID NO: 261741 - DNA, 201 bp, Homo sapiens
atgttcatttgtgcactcatttaaaacaagttcttaaatacttaggatatcaaccctgatgttatattatccttttcttctatatgtgacaaatatttttstgtttcattatttatcacttattagttttctatcactgcataacaaatcaccacaaaccataatggcttaaaccaacacaaatatgctgtctcacagtat

SEQ ID NO: 261742 - DNA, 201 bp, Homo sapiens
ttccacatcttaaatgtaaaagcaatacattaagttctgtgtataggcttcatgattatatgaagtttcatcaaaatttaactttttgattaaaatgaagwtctgttttctaattccaaaataagtatatgtgttaatggtaaaaaaaacatggagagtataaaaacactgaaaaaattaaaatctgctattaatagacta

SEQ ID NO: 261743 - DNA, 201 bp, Homo sapiens
tacttgtatacaggtctaaatcatgctttaaaactttataaactttaagcattttatgagtcattaacaattcttttaagcaacttttttttttttttttkgaaatgcagtttcgctcttgttgctcaggctggagtgcaatggtgcaatctcggctcactgcaacctccatctcccgttttcaagcaattcttctgcctc

SEQ ID NO: 261744 - DNA, 201 bp, Homo sapiens
ggaatttgcagtaagtgcaattaatatagaagctgaactttgtctaatggtggtacctcaaagtgatttaatggtgaaaaataaggatttcaggggaaaawatcttaatactttctgaggaactttggaattgatgatttcatgtgttaaattctttcctataaggactctagggataagaaaaaaaaaatgccacattgc

SEQ ID NO: 261745 - DNA, 201 bp, Homo sapiens
tgagcagagatgtgaaggaaatcataaaggggccatgggagacatggagaagaacatttctggaagagaagacagtgaaaatgaaagccatgaggggaacygtgtttggtgtgtcggaggacaaagccgattaagcaaagggaggtgttttctgcgggttattaaaggccagagaagcagcagagggccagatcacatagg

SEQ ID NO: 261746 - DNA, 201 bp, Homo sapiens
agcctgatggacatatcatatcaccactgttggcaggattttatatgttttggaccatgatcattttgttacaggtaattttttatcaagcttatggtagmattttaacatctttgctgcttatccagctatgttcagtttcacatccttttttaacctacgttaacattttaaaacttgtttggatcttcttaggtcttg

SEQ ID NO: 261747 - DNA, 201 bp, Homo sapiens
aaaggcagcattctccatggtaaattctctgtggcagagtgaggctgtgtgtggctagctgaggagtgggagacaggaagtttacctatctattcattgatttttttttactaggtgagtattatggcattttcctgggtaattttagctgtattattcacttgttaaaaatagagcttatctaaaatcacaggaatatat

SEQ ID NO: 261748 - DNA, 201 bp, Homo sapiens
tgggactacaggtgtgagccaccacacctggcttcacacctaatttttataaaattctcactgagcctggaattatagctccagtagctttgttttctgartcacattgtaactttactggtctatttccttttttgagaaggagtctagtctcgccaggttgcagtgaagtggtgcgatcttggctcactgcaacccctg

SEQ ID NO: 261749 - DNA, 201 bp, Homo sapiens
tccaggatcatctaatgtcctctctttgtagacctaccagggctcagatactgacatctttgcatttggaaaccccctgaacacagccgctctgttcatcrttctcctccatctggtcattgaaagcaagagtttggtgagtggttttcttgcctctgaagtagcctaaaatcttttatgcttggggatatgtcttctatt

SEQ ID NO: 261750 - DNA, 201 bp, Homo sapiens
cttgctatcaggataaagagttgagggccaagtctgcaggcacaattaccatgcttacgtcagtatttcactatggaagcagtgtggtgggtagatgaaargacttagagatgatggcagagaaaacatttaggaagacattgtatatatcccagtgaattgtaatggagacctgaccttggaacaatgtgggaatgaaaa

SEQ ID NO: 261751 - DNA, 201 bp, Homo sapiens
ctcctgagtagctgggaccacaagcgtaggccactacacccagctaatttttgtatttttagtagagacggggttttaccgtgttgcccaggctagtctcraactcctgacctcaagtgatctgcccgcctcggcctcccaaagtgctaagattatagccgtgagccaccacacccagccctgatatctcacatttattaa

SEQ ID NO: 261752 - DNA, 201 bp, Homo sapiens
gtcctattaccagtgttcttgatattataaacagaatcaataaatagttgacggacttatccagaactctggggccagcctggatctctgctaatctggaktttccctttctgatatcctgtgtaatcattgcatgttaaaggtttttacaaggttaaaagccaatttgttctcctatggacgaaagggactcacctgata

SEQ ID NO: 261753 - DNA, 201 bp, Homo sapiens
  misc_feature (1)...(201): n = A,T,C or G
tgtattagagttcggttaccctccccctttatttcaggagccaagtggccaccagacccttttacttttttaattcgttagtatttgggggggggggttcngtaatgcatttgagatgaatttaattctaatgatgttccttgtcacctaggtttgtatacagagttcttcagggatccctgtttccatctccaattctga

SEQ ID NO: 261754 - DNA, 201 bp, Homo sapiens
agactctacctcttgattggcagagagttatgcttgcagagataggaagaatttgtgggcatttttgtaatccacatagaatgggtttttttgatgtcctrtgatttatcagactttatgctatgtgacttacctgttattcatttagtcctcaaaacaatttcctgacatgcctggcattatgcccattgcaaagatgat

SEQ ID NO: 261755 - DNA, 201 bp, Homo sapiens
aagtcactcagccaatacctattcagggaattggtcatgggtcttattccacatttgatgcaagattacatatcattccttagaagctgaattccatcttmtctctaggtagaactatctcccatcctttcacctctccaaagtttccaaactcctgccttctctggtcactaggggaaatacacattatccagagaaatg

SEQ ID NO: 261756 - DNA, 201 bp, Homo sapiens; identical to SEQ ID NO: 52096

SEQ ID NO: 261757 - DNA, 201 bp, Homo sapiens
tatgatttatcagactttatgctatgtgacttacctgttattcatttagtcctcaaaacaatttcctgacatgcctggcattatgcccattgcaaagatgrtaaaactgatgatcagagaagttaagagacttgcacaaattaagcccaaattgtttgcttcaagttatggaatggccttttaggtgctgtctcttgttaa

SEQ ID NO: 261758 - DNA, 201 bp, Homo sapiens
gccacagaccccagactgaaatgcctaatagaggtttgattaagcgcctgtagggccatgactttctttcccataaatcatgaggcccacgatgtctcctygtcccattgtaagattagtgttatcagccttatcctattattataaagttcccatcagcctttttaaccattgattttagcagccatcgcttatcattgc

SEQ ID NO: 261759 - DNA, 201 bp, Homo sapiens; identical to SEQ ID NO: 52098

SEQ ID NO: 261760 - DNA, 201 bp, Homo sapiens
cttatcctattattataaagttcccatcagcctttttaaccattgattttagcagccatcgcttatcattgcctagaatgattcttgatttcatccaagtygaaaatgataatttttaaattctatcaggatttcttccctcatcaattactaagttatcctaaatacagtttatactagaaaagcaggattcttgcttgg

SEQ ID NO: 261761 - DNA, 201 bp, Homo sapiens
ccagggcctaattgaaggtggatggtaagaggagcatgaggttcaaaaaaccacctcttaagcatgatgcttatcacctgggtaaagaaatctgtacaccraagccctgcaacacacaatttacctacatagtaaacctgcacgtgtaccccctgaacctaaaagtctaaaaaaaaaaaaaagaaacaaaaaacaaagcaa

SEQ ID NO: 261762 - DNA, 201 bp, Homo sapiens
cattttgttacaggtaattttttatcaagcttatggtagaattttaacatctttgctgcttatccagctatgttcagtttcacatccttttttaacctacrttaacattttaaaacttgtttggatcttcttaggtcttgattcctatttctctctatgtttccatcgaaattgtgaagcttggacaaatatatttcattc

SEQ ID NO: 261763 - DNA, 201 bp, Homo sapiens
atcttcttgattccacttttgcaattgtactgactgaacaagttttccctacagtaatagctgagctacctggaactatactaattatatagttgcatgaygactgatttccctaatgatggctaggagttacacgatcattaaatatagcctccatgtttatatgtgttttgaagtacagtattacccccttatctgtgg

SEQ ID NO: 261764 - DNA, 201 bp, Homo sapiens
ctctctacctatggatttcatttagatcctctgtgattgatatgcctcctagactactgtcattgtcacttctgtaagtagtctggtaccaaagacattgktaaaaatcctgcactacttaacgttctgttgtaccactacacacccactatgagtattaatcagcaattaatatttgcattaaaagtaatggcaaaaagc

SEQ ID NO: 261765 - DNA, 201 bp, Homo sapiens
tattacccccttatctgtggttttactttccacagtttcaattacctttggtatagtaaaataagatattttgagagagaaaaagagagatcacattcacrtaagttttactacagtatattgttataattattctattttattattagttattgttgttaatcttttactatgcctaatttataagttaacatttatcat

SEQ ID NO: 261766 - DNA, 201 bp, Homo sapiens
caggcgtgagccaacttgcctggcccctttgagcatttaatagattaaaatttaccctaatacttaatatatactttaaattatacgctaaaaaatttttwaaaaaaaacattgtatgtatttttcacttgatattctttttttttttaaacttttttttaattacaggaaagagaaaaaatacattgaccgatgctggaa

SEQ ID NO: 261767 - DNA, 201 bp, Homo sapiens
tctgtggttttactttccacagtttcaattacctttggtatagtaaaataagatattttgagagagaaaaagagagatcacattcacataagttttactamagtatattgttataattattctattttattattagttattgttgttaatcttttactatgcctaatttataagttaacatttatcataggtatgtatgta

SEQ ID NO: 261768 - DNA, 201 bp, Homo sapiens
ctttagttactctccatttcctatggaatgaaattcctactcctagatatggcatggaggaccgaactgtcaaaataatacccctgcctaccttttttatstttgctctgttacctgcctctatggaagaatgaactgatatgcacagacactagggaaaagtttggaaaagacaaaataaactgttgatttgcctttctc

SEQ ID NO: 261769 - DNA, 201 bp, Homo sapiens
ccttcattgagcattatgaataaagaaactctttgctacattctacattcagagtcaaaaaaatgctaactctgtcttaaattcttttttttaggttactrctgaagttgaaaatatttttttcctatatatttatagtatatggcttctgtgtttgttcaggctttttttccaactgtgctattcatgtgactattaaac

SEQ ID NO: 261770 - DNA, 201 bp, Homo sapiens
tgggggctgtcctgagcattgtaagatgtttagaagtatccttggcctccacccactgaatgccagcagcacacttcacccagttataacaagcaaaagtrtctacagccattgccaaacccccaggggacaaattcaccccatgtggagaaccactgagccaacttattatatacaaatcactgctgaggagctataata

SEQ ID NO: 261771 - DNA, 201 bp, Homo sapiens
ttaatatcggtatatgtttctagacctgagctagccagtgattgggaaaattagctagtgttttgttttgtttaaatcttggtacatgctacaaatggggraaaatgaagtgaatttgaatgtgaaagtgacttcatttgagttttcttctaatatagagaaagaaacttgttccttagagcaatgttacttcttatattt

SEQ ID NO: 261772 - DNA, 201 bp, Homo sapiens
gcagcacacttcacccagttataacaagcaaaagtatctacagccattgccaaacccccaggggacaaattcaccccatgtggagaaccactgagccaacytattatatacaaatcactgctgaggagctataatatagtgggtagtgtgctggctttggaggcagaagacctaaatcgaatttccagctccacccacagc

SEQ ID NO: 261773 - DNA, 201 bp, Homo sapiens
tagctgagtgtgttatttacaagcaggcaaaagttggaatgctggaaatgtttgcagatttagttcatagtgaaagggttgatggaggattgatgatacarttgaaggaagctcatctgaatgctgttcacctttgtttcgggccctttggagagcacattgaaagtatgataaactttttgttctgtagactcatgccca

SEQ ID NO: 261774 - DNA, 201 bp, Homo sapiens
tactgaacttataagaaacaaaatgggcctagaagctttcctaaaggagggattgtggatgctgtgtcctggtcattgagagtcacacacaagcacaaacyaccaaggagatgcaagaagttctagttgtgcatttaggctctggggaaagaagaaagtcctcttactagttttaattatatatcaggaaaggaaatgtag

SEQ ID NO: 261775 - DNA, 201 bp, Homo sapiens
cttattatatacaaatcactgctgaggagctataatatagtgggtagtgtgctggctttggaggcagaagacctaaatcgaatttccagctccacccacarctagctgtttaatcatggttgaactgcttaatctctctgggtcttaatctcctcagctgcagagtaggcagtgatagtttctacctgatggcattatttt

SEQ ID NO: 261776 - DNA, 201 bp, Homo sapiens
ctgaggcatattttcactgaagtgaaaactattttaacagtgtatctgtgttttaatggctagtcctttagggttttctgcaaaagtgttgcctaggagayaatttggtgaagaatattgctgcttggaaacaacctctcacacatggaattgcactaaacacacctgacaacaccattgtatattttaaaaccttctagc

SEQ ID NO: 261777 - DNA, 201 bp, Homo sapiens
aagcccaaattgtttgcttcaagttatggaatggccttttaggtgctgtctcttgttaagcaacatgatcagatgcttagcccatgaggcagaagatgtaygctttatttggttaaaatggagttctaaagactacttttactttctcccttacatgttgaaccattgggtcatatatttatttggtatagaaaaaatatt

SEQ ID NO: 261778 - DNA, 201 bp, Homo sapiens
gaagacctaaatcgaatttccagctccacccacagctagctgtttaatcatggttgaactgcttaatctctctgggtcttaatctcctcagctgcagagtrggcagtgatagtttctacctgatggcattattttgaagataaaaaggaaataggtatacatatatattatacacacacacacacatatatatatgcatga

SEQ ID NO: 261779 - DNA, 201 bp, Homo sapiens
atttgcttattataaataattcagtgttttattggaaacatactaaaaataccaaaaagaataattaattcataatcctaccctttctctctttaaagatmaagtgaagtaggcgtccacattccccacccttcattcttacttctcccttttgtcccttaccagctcccatcctagtggaatcactgttaatcgttcagt

SEQ ID NO: 261780 - DNA, 201 bp, Homo sapiens
taagatttcccttaaaataggggccacttataaggttttaaaatctgttttaacataatgaaactgtcttgaaaataagactattaatcattcaacaaatytgagtgcctgctatgtggtaagcactgagagacttagaggatttaaactaaaaatagatacaatgtctgccatcaaggaatgtacattattttctgacct

SEQ ID NO: 261781 - DNA, 201 bp, Homo sapiens
tgtttatttatagcatgtcccttgactattaatcgtgtttcattttatttgttagaagactgagtagctactaagtagtacagctaatatttgagcctggrcttacagagtagaagaaatgtgatttgtcaaaaagtggtgagcaaagtgctcattccttcatttaaaacgggtgaactgcaaaatgcagggttggagtca

SEQ ID NO: 261782 - DNA, 201 bp, Homo sapiens
acagctagctgtttaatcatggttgaactgcttaatctctctgggtcttaatctcctcagctgcagagtaggcagtgatagtttctacctgatggcattaytttgaagataaaaaggaaataggtatacatatatattatacacacacacacacatatatatatgcatgaaaaaaggaggatctcaaaaaatattaacttc

SEQ ID NO: 261783 - DNA, 201 bp, Homo sapiens
tagaaaacctgactttcttaagatttcccttaaaataggggccacttataaggttttaaaatctgttttaacataatgaaactgtcttgaaaataagactrttaatcattcaacaaatctgagtgcctgctatgtggtaagcactgagagacttagaggatttaaactaaaaatagatacaatgtctgccatcaaggaatg

SEQ ID NO: 261784 - DNA, 201 bp, Homo sapiens
acaaatttagggtgaaattatgggggctatttagcaagtttttggaagaagcatattaacatttctaagcagataatttggttcttttttgtagtaggtgrtgtttcacaaggcgcttaattttctatagaaaagtatcatttggaataacaaacactagtctagaaattaatcatttaaactctattatacccccaatta

SEQ ID NO: 261785 - DNA, 201 bp, Homo sapiens
aatcccaaatttaaaataatgcatttattttcatcggtctaactaatctgacttgaaatgcctttctggaatggagagtcatttagtgtccttacactacytagaacaaccaacagagaaatcacagattcagctttcaggaaagaaggggtccttataatcctctaatatcatccaatccattcagaccaaggaactaca

SEQ ID NO: 261786 - DNA, 201 bp, Homo sapiens
tttgaatgcttattatataccagagatagagaactaaaatatcggtacagtctctagcctcaaaaaatagctataagaaacaatactttacaatgattatrtgatgaacaaagtccagaatttggccagttttaagattacccagtgaatgtcaaatttagcaaatggaaagaatgcttattatatatatttttgaataca

SEQ ID NO: 261787 - DNA, 201 bp, Homo sapiens
aaaatgacaataaaaaatgtaactggttctgacaccaagggcgcctggaggctaaccacctttgcctcttgtttcaaggatgcctgtgggatgctgatgarcacaattttgaaagaacttcagaagaaaactcaagccctgccagagcaagtgtcattaagtgaagatttacttcagcctcctgtcccccgggactcaggg

SEQ ID NO: 261788 - DNA, 201 bp, Homo sapiens
aagaaggtgagactgcttagtgcgctccatcttttttgttttttcccttgtttagctatcactgactgaaaaccagcgtgtagcaaaccctaatccagatrctggggaaagtcccctggacactggctctctttttactttctctattccatatattggttggttgaagtttgttcaaagtattttgctacaaggatccct

SEQ ID NO: 261789 - DNA, 201 bp, Homo sapiens
ttcttcaacctcctcttcacatctgcccctcctgtcatttatggtgttttggagaaagatgtgtctgcagagaccctcatgcaactgcctgaactttacaraagtggtcagaaatcagaggtaggtgttaaagcaagagtgcttggatggatgcatatccattgtcaaagccagtgtgttttcttagttagcaaaatattg

SEQ ID NO: 261790 - DNA, 201 bp, Homo sapiens
ttttttcccttgtttagctatcactgactgaaaaccagcgtgtagcaaaccctaatccagatactggggaaagtcccctggacactggctctctttttacyttctctattccatatattggttggttgaagtttgttcaaagtattttgctacaaggatccctaaaacttatagtctctaagttcttgtatgtttcaatat

SEQ ID NO: 261791 - DNA, 201 bp, Homo sapiens
cagggtgctgatgaagatgtaccagcctttgggcattagaatgtcactgaggcccatgagtcctgggttcatagtacctattttagaaatagaaacctctrctttgtaagccagtatgtttatgcatctttaatcttctggagtttttcattcaacaagcatactgtttattctacacgaaatgctcttctcttagatctt

SEQ ID NO: 261792 - DNA, 201 bp, Homo sapiens; identical to SEQ ID NO: 52086

SEQ ID NO: 261793 - DNA, 201 bp, Homo sapiens
ttgaattccaaaacacatatggccccaattgtttcagaaaagggaactgtagacccatgaaagaacactgcaaatagacattgtatcttactggcaggagyattctttaaaagcctgccctttaaaggacatgaacagacatttttctaaagaagacaacaacaagtggccaacaaacatgaaaaaatgctcaacatcact

SEQ ID NO: 261794 - DNA, 201 bp, Homo sapiens
cctttgggcattagaatgtcactgaggcccatgagtcctgggttcatagtacctattttagaaatagaaacctctgctttgtaagccagtatgtttatgcrtctttaatcttctggagtttttcattcaacaagcatactgtttattctacacgaaatgctcttctcttagatctttgtatagctgtctcctttctgtcat

SEQ ID NO: 261795 - DNA, 201 bp, Homo sapiens
ctgccttctttgaaatcttgtggagcttttcttcaggatcacttcttgagctttgcctgctcaaggctgccatgattggttaacatgttttcgtttgtttrtttgtttgtttgtttgtttgttttgaggcagcccaggctggagcgctatggcgcgatctcggctcactgcaagctccgcctcccgggttcacgccattct

SEQ ID NO: 261796 - DNA, 201 bp, Homo sapiens
ctattttagaaatagaaacctctgctttgtaagccagtatgtttatgcatctttaatcttctggagtttttcattcaacaagcatactgtttattctacaygaaatgctcttctcttagatctttgtatagctgtctcctttctgtcattgagcctcagctcaaataccttctcagtgaagctttctctgtcacccagttc

SEQ ID NO: 261797 - DNA, 201 bp, Homo sapiens
ggacctaaagatcttgaggcaggagaccgagggaaaaaaagggaaagaagaggaaatgagaggagaaggaaggaagtgggagtgtcctatttgtgcgcacgtgtgtgtgtgtgtgtgtgtgtgtgtgtgtgtgttggatggtattttaggcacaaaattcagataaaagctcataatccaaaaaactgattttcattcatg

SEQ ID NO: 261798 - DNA, 201 bp, Homo sapiens
agctcccaagatggtggcgtgtggcttccaaaatggtggcgggccacttccaagatggtggcaagcctcgtgttctctgacctggggttcttggcctcacrgattccaaggaatggaatcttgggccatgccgtgagtgttatagctctattagaagccatgggtcacggaagagaaccatggaacccctgactagtgttc

SEQ ID NO: 261799 - DNA, 201 bp, Homo sapiens; identical to SEQ ID NO: 52138

SEQ ID NO: 261800 - DNA, 201 bp, Homo sapiens
cccaggtaagtttatacaaaagtgaaatagtagtgatttgaaaagctcggagattaaaagaccatacttgatggctttataaaggcaaagaaacagctatytggggactaatcacatttggtgaagtagggggaagctgcctaggatttgatgggaaagcaagtaagttttggggctacccagtatctgagttcaaatgtg

SEQ ID NO: 261801 - DNA, 201 bp, Homo sapiens
ctttgggaaattcatgatatgaacttcattgcaaaaaggcttagcattattttaagaattgatgaaagtgataaaacacttcaatattaagggtttaaccktgaattcttattttgtgattcaaaaaatatttttaggactctgaagttgatcctgagaagttttccagtaggatagaatgtgaaagcccaaacaatgacc

SEQ ID NO: 261802 - DNA, 201 bp, Homo sapiens
ttaatctttcttttaagcatgttattttcctttgctttttaaaaacttctgtagttacccaaacagaaaataattgccctatttcttgtatataagaaaaktagtttcactgattatttaaacaataatatatacatcattggtatgggaaagattagctgcataaaaatcatatttaatggtaatgacttcatggggaaa

SEQ ID NO: 261803 - DNA, 201 bp, Homo sapiens
gctggaagagtattttgtttttgtaaatgtattcaagacgccaatgcaagtaaagagattctccatattctttagtcattccacatacattcattctcatyattcattctatatatgttccatatgcatttattaaatagtggctatgtttaaaggacagatttgaatttgttgaattaatggctatgtagccctatgtgt

SEQ ID NO: 261804 - DNA, 201 bp, Homo sapiens
tctttctggctttaacattctgagttttttgtttaagctgttaagcatctttaaaatgcttttcctactttgaagaaatgttggcatcaaacaattcataygtattcttataaaagcaagaatagctaccatttgttaatctattatatgtcagatgtcttacgtacattcccattaactcctcacaacaaccctacagag

SEQ ID NO: 261805 - DNA, 201 bp, Homo sapiens; identical to SEQ ID NO: 52100

SEQ ID NO: 261806 - DNA, 201 bp, Homo sapiens
catactatatgcaatgtatgaagagcctttggccaagtgcctagcaaatggaaagtgcccaataaatgtcagctagcagcattatagttatgttactgttrttattgatgatttgggaacagtgtttgtatcaggttcttgtactttcctctgcccaaggggaaagaaacgagggaaagatttattctgagtggtcccttt

SEQ ID NO: 261807 - DNA, 201 bp, Homo sapiens
ctatccatggtttcagacatccactgggggtcttggaacatatcccctgtgaaaaaggggaaacttctgtatttttaaaatattttttaaatggtgttacrtcatcaataaattccttgagctactcaaggatttatcagtctcagcactatttgggctagattaatctttgttgttgggggctgtcctgagcattgtaag

SEQ ID NO: 261808 - DNA, 201 bp, Homo sapiens; identical to SEQ ID NO: 52139

SEQ ID NO: 261809 - DNA, 201 bp, Homo sapiens; identical to SEQ ID NO: 52140

SEQ ID NO: 261810 - DNA, 201 bp, Homo sapiens
ttcttttcttttttttttttttttttgagatggagtctccctctgttgcttaggctagagtgcagtggcgctctctcagctcactgcaacctccacctccygggtttaaatgattctcctgcctcagcctcccaagtagctgggattacaggtgcacaccaccacacccagctaattttttgtaattttagtagacagggt

SEQ ID NO: 261811 - DNA, 201 bp, Homo sapiens
acttcctcctcctcttggctgcctcggagatcctgttccggggcagaggtctccccgccccgcccctcgtctcctccaagatggcgagcggcggcagcggkggggtgtcagtacctgcgctgtggagtgaagtgaaccggtatggccagaacggcgacttcacgcgcgctctcaagaccgtcaataagagtaagtgtcggg

SEQ ID NO: 261812 - DNA, 201 bp, Homo sapiens
taatggaaatataatgtaaatttgtcttctataagccacattttaaaaagtaaaataataaaaaaaactggtgcaatgtgtttatatatatatatatatawatatatatatatataaaaggttttttttgttgttgttttttgtttgttttgctttgtttttgaaatggagtctcgctctgtgtggcccaggctggagtgc

SEQ ID NO: 261813 - DNA, 201 bp, Homo sapiens
aatggaaatataatgtaaatttgtcttctataagccacattttaaaaagtaaaataataaaaaaaactggtgcaatgtgtttatatatatatatatatatatatatatatatataaaaggttttttttgttgttgttttttgtttgttttgctttgtttttgaaatggagtctcgctctgtgtggcccaggctggagtgca

SEQ ID NO: 261814 - DNA, 201 bp, Homo sapiens
aaatttgtcttctataagccacattttaaaaagtaaaataataaaaaaaactggtgcaatgtgtttatatatatatatatatatatatatatatatataaraggttttttttgttgttgttttttgtttgttttgctttgtttttgaaatggagtctcgctctgtgtggcccaggctggagtgcagtggcaagatctcagc

SEQ ID NO: 261815 - DNA, 201 bp, Homo sapiens
tgtaaatttaaaggatcttccagagttcctaagtcacagaatctaagatttttatttcaaggtttcttgattggtagcttcccaatgactgaggtaatttytaaagagagcatcaaattaattttgggttccttttgcaataccgataagtgttccatctatttatttattttatttttttatttattttaagtcagaatc

SEQ ID NO: 261816 - DNA, 201 bp, Homo sapiens
aattccattaaaccttatgtaatttttacttgcttagtcaaataaatgccttatctagttggccatcagtggtctatttaaaactgttttctttacaaccwgggttgtgttccaaattaaggtagaaagtagagaggaaagagcattggaatgagaatcagaaaatcaggattctacttttctcattgtcactcaggaaca

SEQ ID NO: 261817 - DNA, 201 bp, Homo sapiens; identical to SEQ ID NO: 52143

SEQ ID NO: 261818 - DNA, 201 bp, Homo sapiens
agattgtataagaattaaagatgttggagttctagataggaaatagacaaataagagtttggagcagtaagccagggctgtatcttaaagggacttttaawccatgttaatgagtctagacattacattagggagggtagagattcatcctctaaattaggtgccctacagtggcaactgttaactaaattacaactactt

SEQ ID NO: 261819 - DNA, 201 bp, Homo sapiens
tcagaagattactttctgtgtacccttggtagtttcacatagctacaggattatattaagtaatggaagataaagcctgactttttatttgcttatttagwgtattttctgagtgtatttacactcatcccattatccatttccagaactttataacaagtaaattagagtgactcagttgtgttatgtttgtccaggact

SEQ ID NO: 261820 - DNA, 201 bp, Homo sapiens
agctccagctccaaccagactgaagttctgcaatccactttgaccaccttgtatttattcatcaacactacctacccctttctctcctttggctaaatttygatgattcttcagatttcaacctgtcactttcttgtagacttctttttctaatgtctagactagtcccatagtctgtatttattgcattctattattatg

SEQ ID NO: 261821 - DNA, 201 bp, Homo sapiens
actatcttaaatatcttgcatctttgcccactactctttccttagaccaagacatttctttttcttttcctttttttttattgagacagggtctcactctrtcacccaggcttgagtgaaatagtgcaaatcttggcccactgcggcctcgacctccccaagtagctgagactacaggcatgcaccaccatgctgggctaa

SEQ ID NO: 261822 - DNA, 201 bp, Homo sapiens
tggagactctggccatcaggagatcgaagccaacagaaagacaaacaggtagataatgcttcaggtttttttatcctttttgagatcaagctgagatagasgagaaaggagagatgaggggaaaaagcaaattattgttcctaatgatatgaacctgttttgtggattgctgtttatttttaaagataaatgtctctggta

SEQ ID NO: 261823 - DNA, 201 bp, Homo sapiens
agagaaaagtaacatttagttaatttttttaaaatttagttgaaatctttttatattctaatacaggaaaactatactaacaatgtctcttgtaagtgaaratatataaataaaggttgtaagaatcagtggttatgaattttgtaggctttactgcttttaaccatcttgatttatgctgttaagcatagatctgcttgg

SEQ ID NO: 261824 - DNA, 201 bp, Homo sapiens
tagataatgcttcaggtttttttatcctttttgagatcaagctgagatagaggagaaaggagagatgaggggaaaaagcaaattattgttcctaatgataygaacctgttttgtggattgctgtttatttttaaagataaatgtctctggtatcctaatagaagaataataggaataatactttacatttataaagcaaat

SEQ ID NO: 261825 - DNA, 201 bp, Homo sapiens
agtaaaggttatagttgagagatgctttcataaaatagtttttgaaaactttgttgacatgctgtttccagattgaatttggtgttgatgtaaccaccaamgaaattgttcttgctgatgttattgacaatgattcctggagactctggccatcaggagatcgaagccaacagaaagacaaacaggtagataatgcttcag

SEQ ID NO: 261826 - DNA, 201 bp, Homo sapiens; identical to SEQ ID NO: 52142

SEQ ID NO: 261827 - DNA, 201 bp, Homo sapiens; identical to SEQ ID NO: 52145

SEQ ID NO: 261828 - DNA, 201 bp, Homo sapiens
tgccttatctagttggccatcagtggtctatttaaaactgttttctttacaacctgggttgtgttccaaattaaggtagaaagtagagaggaaagagcatyggaatgagaatcagaaaatcaggattctacttttctcattgtcactcaggaacaaactgtaaaggactatataaataagaagtaatctttttccgtggaa

SEQ ID NO: 261829 - DNA, 201 bp, Homo sapiens; identical to SEQ ID NO: 52146

SEQ ID NO: 261830 - DNA, 201 bp, Homo sapiens
taccatgttggtcagcctggtcttgaactcctaacctcaagtgatccgcccgcctcggcctcccaaagtgctgggattacaggcatgagccactgttcccrgcccactgttctttacccttccctctcttttatcctccatgatgaattctcaaagctactatcttaaatatcttgcatctttgcccactactctttcctt

SEQ ID NO: 261831 - DNA, 201 bp, Homo sapiens
atttggttttattacttaaaaattaaaatctggccttcttagtgatgatgaaatcccaatttcctcacagaaactcactataattacattaagtgtaatamtagtatatgaagaacggtactacagttgctaaaccacagatgggcatctggaccaatctaaaagagggatggccacggggacatatgtattagctagaat

SEQ ID NO: 261832 - DNA, 201 bp, Homo sapiens
tggatcttattaatatttatttataacttgacatttcctaaaattattctacggatttgacttttactgctcaaaaatattaaaatagttcaaatgcagayagaaagattagctagaaaactgtcaaaacaacatagctcaagtttgtctaagaacaggtacttttgtactcttaccttgacccttattttgcttcagttg

SEQ ID NO: 261833 - DNA, 201 bp, Homo sapiens
ggttaagtgggcggctcctagagacagggtaggttggaaatcctgctatacctaatactagctgacattactactgtgtcttagtgtccttacctgttttkttgatcttaatagtatcttatcaaatgttatgaggattaaacaaaaaagatgtatttaaaatggttggaacaatatctgccataaaataggctcctgata

SEQ ID NO: 261834 - DNA, 201 bp, Homo sapiens
aaaggcctggcttggtggctcatgcctataatcccaacactttgggaggcagagattggtggattgcctgagctcagcctaggcaacctggcgaaaccccrtctctaccataaatacaaaaattagctaggcatggtggcacacgcctgtggtcccagctacttgggaagccaaggtgggatgatcactggagcctgggaa

SEQ ID NO: 261835 - DNA, 201 bp, Homo sapiens; identical to SEQ ID NO: 52148

SEQ ID NO: 261836 - DNA, 201 bp, Homo sapiens
tgataaatcaaattttaaaaagaaagcatctgaaaatcttacctttgaaccaagatgactaacaggaagaagagaaaagtaacatttagttaatttttttwaaatttagttgaaatctttttatattctaatacaggaaaactatactaacaatgtctcttgtaagtgaaaatatataaataaaggttgtaagaatcagtg

SEQ ID NO: 261837 - DNA, 201 bp, Homo sapiens
ctcacctaaatactttgaattttaaagtgctattgagagtaaacaaattaagagtaatagttttttctgcttgcaggagctaactaggaaaaaaaagaggagtaataattgctttgaattaaggagtatcgtaaacaaaaaatttctttagatgtctcattttgttgcccaggctgctcttgaactcctaggctcaagcga

SEQ ID NO: 261838 - DNA, 201 bp, Homo sapiens
aatggagtttcgctcctgttgcccaggctagaatgcaatggcgcaacctccgcctcccaggttcaagcgattctcctgcctcagcctcccaagtagctgaratcacaggcatgcaccaccatgccagctaattttgattaagttttcttggtctgctaacttagctaccactgtgtttgcctttcagttgccaaaatgtta

SEQ ID NO: 261839 - DNA, 201 bp, Homo sapiens
ctgtgctttcccagactcttaaatttcaattccatgaatcattttcagtcctcatcaatctttccagaattcatctacaaatttgtagcaaccattttggyacttgcagggtatgtcacgtatggttgtttcttatgttgtttctacccattaattcaaattccttccctctttaatgactaagtaatacagattcaacta

SEQ ID NO: 261840 - DNA, 201 bp, Homo sapiens
aggctggtttcgaactgctggccttaagtgatccacccgcattggcctcccaaagtgctgggattacaggcgtaagccaccacacccggcctgttccatcsatttttttttttcttcccaagttttaactctccccattcacttaaacattttttaaagtgcttaactctttaaaatgttagcagtcagaagattactttc

SEQ ID NO: 261841 - DNA, 201 bp, Homo sapiens
atttgctttcatatttagcagtattagaagccatcattatgtcatctaaactgagtctgttttagaaacttttagggattttttgtgcagagatgattacygtagcttcattatgtgcttttggttctccttgggattggcggggggatctctctaagacgaagttatctttatattaaaaacaataaaattggatactac

SEQ ID NO: 261842 - DNA, 201 bp, Homo sapiens
taaatgattctcctgcctcagcctcccaagtagctgggattacaggtgcacaccaccacacccagctaattttttgtaattttagtagacagggtttcackgttggccaggctggtctcgaactcctgatcttgtgatccgcccacctcagccccctaaagtgctgggattacaggcatgagccaccatgcccggctgtgg

SEQ ID NO: 261843 - DNA, 201 bp, Homo sapiens
gtatctggtgccactaatttagtcagtcaccctttgggggagttctgtaatgtcagtcatgttgcttctcatctttccctgctttcagtttagaattaagtttttttttttttttttttttaaatggagtttcgctcctgttgcccaggctagaatgcaatggcgcaacctccgcctcccaggttcaagcgattctcctgc

SEQ ID NO: 261844 - DNA, 201 bp, Homo sapiens
ctttgggaggccaaggcaggtggatgacaaggtcaggagttcaagaccaggccaagatagtgaaaccttgtctcaaaaaaaaaaaaaaaaaaaaattagcyaggcatggtggtgggcacctgtaatcccagcttctcggaaggctgaggcagagaattgtttgaacccgggaggtggaggttgcagtgagccgagattgtg

SEQ ID NO: 261845 - DNA, 201 bp, Homo sapiens
attggggataatcttttgaggagtagttttacagtaacctgtgtaaaatcctgaagaccgcccatatttctcatctctgatgtcatgctcactagataacttttttttttttttctgcaatttaagctattcttttaccagaaagggagtcctgggcaggaggcacaggttatttcaaatattagagtggagcactctacc

SEQ ID NO: 261846 - DNA, 201 bp, Homo sapiens; identical to SEQ ID NO: 52144

SEQ ID NO: 261847 - DNA, 201 bp, Homo sapiens
ttatctacctcttatatttcctaactgcatgaccctcaacccttttgatttctgctttactaatttctacaattatttatgtaattaaaattcttcacaaratcatgtgaatcaaatgtgatggtatgagaaatacattgtagagtatatggttttatacagatgatttaatttttattaatattacttaatcactgtata

SEQ ID NO: 261848 - DNA, 201 bp, Homo sapiens
ccctcgtctcctccaagatggcgagcggcggcagcgggggggtgtcagtacctgcgctgtggagtgaagtgaaccggtatggccagaacggcgacttcacscgcgctctcaagaccgtcaataagagtaagtgtcggggtgggcactggggcgggcccaggccggctggaggatgcggcctgtttccggcgcgcgagacca

SEQ ID NO: 261849 - DNA, 201 bp, Homo sapiens
atacccagagctccagctccaaccagactgaagttctgcaatccactttgaccaccttgtatttattcatcaacactacctacccctttctctcctttggstaaatttcgatgattcttcagatttcaacctgtcactttcttgtagacttctttttctaatgtctagactagtcccatagtctgtatttattgcattcta

SEQ ID NO: 261850 - DNA, 201 bp, Homo sapiens; identical to SEQ ID NO: 52141

SEQ ID NO: 261851 - DNA, 201 bp, Homo sapiens
ttttttaaaagaaaattgtgataaatacataaaatttaccagtttgaccatttttaagtgtccaattcagtggcattatgtgcattcacaatgttgtacaytcatcccattatccatttccagaactttttcatcatcccaaacaaactgtgtagcattaaacaataactattcctcccactcctcagcccttggtaactt

SEQ ID NO: 261852 - DNA, 201 bp, Homo sapiens; identical to SEQ ID NO: 52178

SEQ ID NO: 261853 - DNA, 201 bp, Homo sapiens; identical to SEQ ID NO: 52179

SEQ ID NO: 261854 - DNA, 201 bp, Homo sapiens; identical to SEQ ID NO: 52180

SEQ ID NO: 261855 - DNA, 201 bp, Homo sapiens; identical to SEQ ID NO: 52181

SEQ ID NO: 261856 - DNA, 201 bp, Homo sapiens; identical to SEQ ID NO: 52182

SEQ ID NO: 261857 - DNA, 201 bp, Homo sapiens
actccaagaattatagagcttgcccacccaaggatcaagttagagggtctgtgctatgaaagacaaagaagtgaactgcccatccgtcctgtaagccatcrctaccttggtatccttcagctcactttttggctgctcttaggatgctattttgcctctacagggcatagcccaaagtcactggaaaagagaatctgggaa

SEQ ID NO: 261858 - DNA, 201 bp, Homo sapiens; identical to SEQ ID NO: 52183

SEQ ID NO: 261859 - DNA, 201 bp, Homo sapiens
catctgtgggaaatcccaggacaaatgtttacattttgtataccctgaagaactctttttcctctaatatgcctaatctgtaatcacatttctgagtgttytcctctttttctgtgtgaggttttttttatctgcatttattagtattctaataaaagcattttgattggaaaacaaaacacaacaacaaaaaaaagaaaa

SEQ ID NO: 261860 - DNA, 201 bp, Homo sapiens; identical to SEQ ID NO: 52185

SEQ ID NO: 261861 - DNA, 201 bp, Homo sapiens; identical to SEQ ID NO: 52186

SEQ ID NO: 261862 - DNA, 201 bp, Homo sapiens; identical to SEQ ID NO: 52187

SEQ ID NO: 261863 - DNA, 201 bp, Homo sapiens; identical to SEQ ID NO: 52188

SEQ ID NO: 261864 - DNA, 201 bp, Homo sapiens; identical to SEQ ID NO: 52189

SEQ ID NO: 261865 - DNA, 201 bp, Homo sapiens
attatctgctgctcgaaactgatagataagggccagaataaaactaagaactttttcttttagtttagttttatatatatatatataaaatacgtgtgtgkatatatatatgtatatatatatcgtactctgagaagtggtggtctgttgcagaaagctctgttttcactttctcaccctcattcactcactggttagttt

SEQ ID NO: 261866 - DNA, 201 bp, Homo sapiens
ttatttagtgttagctgttccattgaaatagcctcttaaaatttctggaatccattaattgaattgatttgtgatttacagagaaaaaaacatcagaaacdgaaggatgggtggtgtcttcagaatcttgtagcttcttatctattggtgcaaggtaagttttaccttgtttgacatattttattttcccatgttgaaaag

SEQ ID NO: 261867 - DNA, 201 bp, Homo sapiens
ctgagcatgataacctagctacggtttccagtgctggctatgcttgagaaccgtctaaaaatacgggtgcctgaactgactccaacctgctagatcaaaaycttcagaagttccaaattgggaaccactctagatactcagaatccaaggggtctacagctgtagctggattttcatttgaagtaaagaaaagcttatggc

SEQ ID NO: 261868 - DNA, 201 bp, Homo sapiens
tttctgttttattgggtcccagaatagcatccaactcagtaaaaaatttcatactcttagtcatgcctagatcttgagctgttcttacgatcttgtattcrtgttttaggtttttgtattttgttctgcactgtttccagtctctgtctattccaaatttctgaagcttggctgcaatttgttgaaatatcctcttatttc

SEQ ID NO: 261869 - DNA, 201 bp, Homo sapiens
gaaaattatacacttgacctcatgtgatgggtatagtcaaaactttgtttcatgcacaaaattattaagaatattgcataaaattagctttaagctatatrtatgaaacacatatgaatttcatgtttggacttggctcccctttctaagatacctcactatgtatatgcaaatactctaaaatctgaaaaagtatctaaa

SEQ ID NO: 261870 - DNA, 201 bp, Homo sapiens
gatcactatttttcacttccttttgactcttggattttgttttttgttaggagtaaggattatgattttctagatctatatgaaggtcgattttttttttwaaaccacacagttgagttccccagtttgtgtattttcacattcatatttttgtatatattgcatttctttttatactcaatctgtagaattctagcacta

SEQ ID NO: 261871 - DNA, 201 bp, Homo sapiens
tgaatattgtggcggcaacacaacctagagaaaatatttgcctattctgtatattactcctcattatcctttcatttcttctctatcagtgtggacttccrtatgtggaggtgctgtgtaaaaaccggtatgtagggagaaccttcattcagccaaacatgaggttaagacaacttggtgttgcaaaaaaatttggagtat

SEQ ID NO: 261872 - DNA, 201 bp, Homo sapiens; identical to SEQ ID NO: 52196

SEQ ID NO: 261873 - DNA, 201 bp, Homo sapiens
tcttcaagaagctaatcaattggcagatttaacagctaatatctttttatattcacaggggtcaggagagtgctggtattgtgactagtgatgggagttcsgtgccaacattcaaatcacacaaggtaaatttgaactttaagaaatgttgatgacagaccaagtgcggtggttcatgcctgtaatcccaggactttggca

SEQ ID NO: 261874 - DNA, 201 bp, Homo sapiens
aatatgtatgaactgtacttcactatatttactttttttgccaaagttattcaagaaattttcatccccctttctccttccctttaaatgtgtgcctgaaraaaaagaggcttttttttttttttaacttacatgttagcactggttggagttttagtacccagtttaggaaaatacttggtattcatggttataggtttt

SEQ ID NO: 261875 - DNA, 201 bp, Homo sapiens
atgaagtgacctctgtttttacatgtaaatacccatcactttgttgttgttttaaagaaagactatttcatgtgaatttttttccctgaagataaataatycatatttttatacctcaatactacgttctattacattcttcctaagagcggagtggcaatttgtgaatcagtaggtatatattgcaggtgtacctaaaat

SEQ ID NO: 261876 - DNA, 201 bp, Homo sapiens
gggagttcaagaccagcctgaccaacatggagaaaccctgtctctactaaaaatacaaaattagccaggcgtggtggcgcatgcctgtaatcccagctacytgggaggctgaggtaagagaatcgtttgaacctgggaggcggaggttgtggtgagccgatattgcgccattgtactccagcctgggcaacaagagtgaaa

SEQ ID NO: 261877 - DNA, 201 bp, Homo sapiens; identical to SEQ ID NO: 52199

SEQ ID NO: 261878 - DNA, 201 bp, Homo sapiens
gtattcatggttataggttttttttttctttttttttttttttaatgaataccatttgattcctggttacatatatctgttttctatagttgcttttctgkgaaagaattgtaagattaaataataccagataagggcaataatgatgtgattatgtggttttgaggaacaaatgtattactgaaaaacaatttaacattt

SEQ ID NO: 261879 - DNA, 201 bp, Homo sapiens
aacactaaagtgatcatgttcattactatgagtaagtttagccatcagatttcttataatatttaaagagtaaagttcggaaattagagaaccaatatttytaggaaacttaaatttcgtaaggaaatcatttgctttagaaataatttttttcagtgtgggttggcaaaaagggaaacataaatcaattctgagtgtttc

SEQ ID NO: 261880 - DNA, 201 bp, Homo sapiens
aactcctgagctcaggccatctgcctgcctcagcctcccaaagtgcttgattacaggtgtgagccaccatacccggcctcactttatgtcttgaaaaaaawttttttttaatttttattttttaaattgacaaatgtatatatttattgtgtacatgtttttatatagatatattaagttattttaagatttcaaagctta

SEQ ID NO: 261881 - DNA, 201 bp, Homo sapiens
tccagccctgttcataggcattataatgaccttattgtgcttttctgtccccaaatgaaaaaatacatagttcatttaaaaattcagacaatcatgaaagyataaatatggagtaaaaatttcttaaaaattcaccacttagagataaccactaactcactgtttcctgacataatgacttacctagatgctaaactttat

SEQ ID NO: 261882 - DNA, 201 bp, Homo sapiens
cattcattaattaatgttgagtttcttcagtttattagctcccaataaccttgacttggtaacttcagaacctggtgatatttagtaatagatggttacaygcacaccccatcctataagcattctagagctgggcaattcacatatgatgaacagttacagaagcttaataataatgaactgctgggtcaaaaatatcta

SEQ ID NO: 261883 - DNA, 201 bp, Homo sapiens
aactggaagttgatataaattattacactaggataagaaaaacaaacctgggtttgatattcttactgaaagtattacagtttccataaggcaatacagtrgtaacaacttacactacagttaaggaacttggcaataacacgtaacagcaaaatgggtgcaacacgtataaacgcattccaaaagattagcttttcctcc

SEQ ID NO: 261884 - DNA, 201 bp, Homo sapiens
ttttcagaattttttttcttatttgggttacaaataagtttttctattatgtaagttagaagtaaggtttttgcttctagcttcaataagaaattagaagyggccgggtgcagtggctcacgcctgtaatcccagcaatttgggaggccgaggcgggtggatcaccagaggtcgagagttctagatcagcctggctaacat

SEQ ID NO: 261885 - DNA, 201 bp, Homo sapiens
ttagtagagatggggtttcaccatgttggccaggatggtcttgatctcttgacctcgtgttctgcctgccttggcctcccacagtgttgggattacaggcrttagccaccgtgcctggcagatacgggatttctttgtggggtgatcaaaatgttctaaaatgggatactggtgattattatataactgtggatatactaa

SEQ ID NO: 261886 - DNA, 201 bp, Homo sapiens; identical to SEQ ID NO: 52191

SEQ ID NO: 261887 - DNA, 201 bp, Homo sapiens
caccattatgatcactaacaaacccagcttgaaagttatcactgtagtgtactacttttataggaatatacccagttcatcaagagtgttgagggtagaaratgtcagacccacaaatcaaatttttgggaacccctacccactttcaggtctgcttgccttcagatttagtattcaaaagcttttctgtacatctcataa

SEQ ID NO: 261888 - DNA, 201 bp, Homo sapiens
acagtgttgggattacaggcattagccaccgtgcctggcagatacgggatttctttgtggggtgatcaaaatgttctaaaatgggatactggtgattattrtataactgtggatatactaaaaaccacagttatacgctttagttgggtgaatttgattgtatgtaaatcacatctcagaaaagttgctgaggtttgagaa

SEQ ID NO: 261889 - DNA, 201 bp, Homo sapiens
cctctgctgttttaaattatgttatcccctagattccaattaaaatttttaaaaataaaggaactgagttttattgattttttttccttttttttttttttaaagaaaggctaaaggagaaatttatcctagcttaaattattctgtttgtaactattctctgttgacgcgtttcttcctttctaaaggaattcttattac

SEQ ID NO: 261890 - DNA, 201 bp, Homo sapiens
tgccaataaaccagaatttgatcaccttgcagaatatctaggtaagtattaaaatttctataaactttgattattaacagagaaaatccaaagcttgacartctttacacctttagtaaaaaggagtattcagtgtttgttaaaagtagttatatatgttaaacagatattgaatactattctcaacagtgagagtagtgg

SEQ ID NO: 261891 - DNA, 201 bp, Homo sapiens
tcctctgctgttttaaattatgttatcccctagattccaattaaaatttttaaaaataaaggaactgagttttattgattttttttccttttttttttttttaaagaaaggctaaaggagaaatttatcctagcttaaattattctgtttgtaactattctctgttgacgcgtttcttcctttctaaaggaattcttatta

SEQ ID NO: 261892 - DNA, 201 bp, Homo sapiens
catcgatggatgaataaacaaaatggtgtatccatacaatggaatattaaaatgaaggaaattctgataaatgctacaacatggaggagccctaaagataytataagtgaaataagccaggcacaaatggacgaatattgtatgattccacttatatgaggtacctagaatagtcaaattcacaaagatggaaaggagaat

SEQ ID NO: 261893 - DNA, 201 bp, Homo sapiens
tggtggactcggagggggaggagcagggctgagctggccacgccacctagggacagcgcgcgccgccgcagtagctggggccaccctcgggaaggaagagyctgtcgcgagcgcgagcttctgagctcgacgggccgagctggcagctggttggtgcttacaccttggccgcagcggcaggtccttccacgtgctttcggc

SEQ ID NO: 261894 - DNA, 201 bp, Homo sapiens
tgagcagattatgggtttgaaagtagttatcgctatgggaacttgaggatgctagacttcagacccagggaaagatgactagttgatgttgagaatgactrctggtagtagatctcacataaattaaatggaaataagccaaccatagggaacagtgcatctggaaaagattcattggtagacgtcttgcctaatgaatga

SEQ ID NO: 261895 - DNA, 201 bp, Homo sapiens
taggatgcagtcaacttcttcataaaatctcatttttcttggagggttgccattttttctttgtaaaatgctatattcatattttacatttttatatttcrtatgacattgtttccggtctctgtctatcccaaactgcattaattaatcttctggcaatttcctcaaatattttcttgtttcttgtggccccttcaagca

SEQ ID NO: 261896 - DNA, 201 bp, Homo sapiens
ggggaggagcagggctgagctggccacgccacctagggacagcgcgcgccgccgcagtagctggggccaccctcgggaaggaagagcctgtcgcgagcgcsagcttctgagctcgacgggccgagctggcagctggttggtgcttacaccttggccgcagcggcaggtccttccacgtgctttcggcggcgacatggagct

SEQ ID NO: 261897 - DNA, 201 bp, Homo sapiens; identical to SEQ ID NO: 52217

SEQ ID NO: 261898 - DNA, 201 bp, Homo sapiens
gctgccaaattaaggcagggaatatcttacttaattttgattttcatatttgactgaaaatgatcaaatatgtaacattcctatagtgtttaacttttatrctcccataatctataacctttatctgagtcaagtaaattttggtttgagggagtgacttattttaagtgtccttgcaaattgttccagtctttgatttta

SEQ ID NO: 261899 - DNA, 201 bp, Homo sapiens
aaagagtttttctcttgctaaatgaaaatgcaaagaggaatgtctagaattttttttgttaatgtcaattccaaagttaccatgtctccatttggcagttmtgagagttggttttcttaggatgcagtcaacttcttcataaaatctcatttttcttggagggttgccattttttctttgtaaaatgctatattcatattt

SEQ ID NO: 261900 - DNA, 201 bp, Homo sapiens
ccctccgccctcgctcgttggtggactcggagggggaggagcagggctgagctggccacgccacctagggacagcgcgcgccgccgcagtagctggggccrccctcgggaaggaagagcctgtcgcgagcgcgagcttctgagctcgacgggccgagctggcagctggttggtgcttacaccttggccgcagcggcaggtc

SEQ ID NO: 261901 - DNA, 201 bp, Homo sapiens
agggtctcactctgtcacctaggctggagtggagtggtatgatctgggctcattgcaacctccgtttcccaagttcaagtgattctcgtacctgtctcccragtagctgggattacaggcgcccgccaccacactcaggtaatttttgtatttttagcagagacggggtttcaccatgttgaccaggctggtcttgaactc

SEQ ID NO: 261902 - DNA, 201 bp, Homo sapiens
tgctagtacaagtagcatttaatgtgttgtcacactaagttcatggatgcttgttgagaaagtatgcttgataaagttcttcaagaagctaatcaattggsagatttaacagctaatatctttttatattcacaggggtcaggagagtgctggtattgtgactagtgatgggagttcggtgccaacattcaaatcacacaa

SEQ ID NO: 261903 - DNA, 201 bp, Homo sapiens
ctgaaagtattacagtttccataaggcaatacagtggtaacaacttacactacagttaaggaacttggcaataacacgtaacagcaaaatgggtgcaacaygtataaacgcattccaaaagattagcttttcctccaccaaacttaaattagaagtattttttgctgttttcattgtcccaggtacttcaatttcagtttc

SEQ ID NO: 261904 - DNA, 201 bp, Homo sapiens
atctgctgctcgaaactgatagataagggccagaataaaactaagaactttttcttttagtttagttttatatatatatatataaaatacgtgtgtgtatrtatatatgtatatatatatcgtactctgagaagtggtggtctgttgcagaaagctctgttttcactttctcaccctcattcactcactggttagttttaa

SEQ ID NO: 261905 - DNA, 201 bp, Homo sapiens
caccatacccagctaattttgtatttttagtagagacagggtttctccatgttggtcaggctggtctcaaactcctgacctcaggtgatctgcccaccttrgcctcccaaagtgctgggattacaggcgtgagccaccacgcctggctggatgaatcccttttaatgtttttaatagagattcctattttttcctgtctta

SEQ ID NO: 261906 - DNA, 201 bp, Homo sapiens
tgggtagccaggtaagcagagaactggactaaacttagagctctagtaaggagagttttgccttgcatatgtttataactgaagttattcattcaattattaattaattccaggattaaaaacttgatgaaggaagcacccacagcatactccctgcttataatgcacagagatgttatttatgcagtacgagatccttat

SEQ ID NO: 261907 - DNA, 201 bp, Homo sapiens
tagagctttgtccagccctgttcataggcattataatgaccttattgtgcttttctgtccccaaatgaaaaaatacatagttcatttaaaaattcagacaatcatgaaagtataaatatggagtaaaaatttcttaaaaattcaccacttagagataaccactaactcactgtttcctgacataatgacttacctagatgc

SEQ ID NO: 261908 - DNA, 201 bp, Homo sapiens
ctagagctttgtccagccctgttcataggcattataatgaccttattgtgcttttctgtccccaaatgaaaaaatacatagttcatttaaaaattcagacaatcatgaaagtataaatatggagtaaaaatttcttaaaaattcaccacttagagataaccactaactcactgtttcctgacataatgacttacctagatg

SEQ ID NO: 261909 - DNA, 201 bp, Homo sapiens
cctagagctttgtccagccctgttcataggcattataatgaccttattgtgcttttctgtccccaaatgaaaaaatacatagttcatttaaaaattcagacaatcatgaaagtataaatatggagtaaaaatttcttaaaaattcaccacttagagataaccactaactcactgtttcctgacataatgacttacctagat

SEQ ID NO: 261910 - DNA, 201 bp, Homo sapiens
ttcctagagctttgtccagccctgttcataggcattataatgaccttattgtgcttttctgtccccaaatgaaaaaatacatagttcatttaaaaattcagacaatcatgaaagtataaatatggagtaaaaatttcttaaaaattcaccacttagagataaccactaactcactgtttcctgacataatgacttacctag

SEQ ID NO: 261911 - DNA, 201 bp, Homo sapiens
ttgcaatcaaaagtaatattctttggatcagccactttcaactttatatcctaacatttgtcaaattaggatgtatttcttccccagttatacttttttgyctaagaccaactcaaatagggggtcatttatttaaatgctttaagatgctttgatttttttaatgcaaattttagtttttatacttgacaaattttattg

SEQ ID NO: 261912 - DNA, 201 bp, Homo sapiens
tatgttcgaaggtaagtagatttcttttctttgaacattcatataaatgttttagctatctccttgaaacatggcaattcttgcctcaaaggcttacctgrctctttgaaggcatatagttatatgttgtggatataggactgagcccacaagtcataagatcactatttttcacttccttttgactcttggattttgttt

SEQ ID NO: 261913 - DNA, 201 bp, Homo sapiens
ctgggacgacaggcgcccgccaccacgcccggctcattttttgtatttttagtagagacggggtttcaccgtgttagccaggatggtctcgatctcctgasctcgtggtccacccgcctccacctagaagttaatctttaacaaagctcatcacttgagaaggcaggaggttattgtttctgatgtcttcttttttttttt

SEQ ID NO: 261914 - DNA, 201 bp, Homo sapiens
tctgtatcaccacttaatcaacactaatgcaggaaatgagacacagacatgggaaagggtgcctggtcagcagagggttttcagaaacaaaatttttttttctaatagcaaaagtgctatttattggagaacatttggaaaatgcagaaaggcataaaaaatggttaccaactatgcattttgcctctattatatttggag

SEQ ID NO: 261915 - DNA, 201 bp, Homo sapiens
tcctcctcagtccagtgctttcctgctccactctccatgttgaaagtgacctggaaatgattcactatttccagccaaggttttgtttcctaggaaaccasatggctggttgtcaataagctccgaagagctgaaaggatgtagtttaactggttcaagctgcctgagggagtaacttgagaaactgccaaataagcaggc

SEQ ID NO: 261916 - DNA, 201 bp, Homo sapiens
ttcaacagaaatgcatacatatgtccattgagagacatgcaatttttcaaaaaagccccaatctggaaacagctgaaatgtccaacagtgaaatagatttkaaaaagtaatgggatatacgtttatttattaagtaaatattgagatggggggtttcactatgttgcccagactggtcttgaactcctgagttcaagtgat

SEQ ID NO: 261917 - DNA, 201 bp, Homo sapiens
gggaagatagctgtggcacataatggcgaattggtaaatgctgctcgattaaggaaaaaggtacgtttgtttgtttgttttccctaggcctttttaaatgrttaggatgggttaatgaataaaagttaaggatctttgtaaagggcattttctaattgttgctacctgttacctaactgcaacaaacaattgcatcagaat

SEQ ID NO: 261918 - DNA, 201 bp, Homo sapiens
tcagacttattaaaatgttatattgattattgactacctttgaagaactgtggatttttttctttttacatctgataacaataattgcaacaatcactgtraagtacaatttaaaggaccatgataaccaaacagttacctaactccgggcaagttttcatttactttcagtgttactctcactcttttttctttcttctt

SEQ ID NO: 261919 - DNA, 201 bp, Homo sapiens
attaaatatgattagttagattccctacccttaagcatctttttgtcactatagatattgggtatgtatctgagtctctaactaagtcttctgacataactaatggaatcatctttagctgcatctccagcaatgactgtatgaagatatcatgccactgctgttgggctgctttatctgtagtcatctaactgggggaga

SEQ ID NO: 261920 - DNA, 201 bp, Homo sapiens
tgcggtggttcatgcctgtaatcccaggactttggcaggccaaggcaggaggatcacctgaggtcgggagttcaagaccagcctgaccaacatggagaaamcctgtctctactaaaaatacaaaattagccaggcgtggtggcgcatgcctgtaatcccagctacttgggaggctgaggtaagagaatcgtttgaacctgg

SEQ ID NO: 261921 - DNA, 201 bp, Homo sapiens
acagaagtcctgaacttttacagttcataaaactgtaaaacaaaagaaaaacaagagtacttttctttttttttttttttttttttttttttaccttcagkggtctctggggctgtacttgggctgagcgtttccaggtacctgccatttgcatcttcctctgtaaattgtgtggcaggttcatactgcaggattacatcc

SEQ ID NO: 261922 - DNA, 201 bp, Homo sapiens
aaattagccaggcgtggtggcgcatgcctgtaatcccagctacttgggaggctgaggtaagagaatcgtttgaacctgggaggcggaggttgtggtgagcygatattgcgccattgtactccagcctgggcaacaagagtgaaactccatctcaaaaaaaaaaaagaaagaaaaaagaaatgggatgacaaagataacaaa

SEQ ID NO: 261923 - DNA, 201 bp, Homo sapiens
ctgtacttgggctgagcgtttccaggtacctgccatttgcatcttcctctgtaaattgtgtggcaggttcatactgcaggattacatccaaatcatggaaraacttcatagttttagagctgtctccagagttatgggcatatttaactgttctatattcatatttgagatttttgtacttagcccagcactgtttccagt

SEQ ID NO: 261924 - DNA, 201 bp, Homo sapiens
aactggacatccacagaatgccttatttcttttcattatggttggctactgggtttggggtggggtggagcttcccctctgatgatttaaacttctctttwtttctatatagcttctgcgtcatggtattggtctgtctacaagttctgatagtgaaatgattacccagttactggcgtatacccctcctcaggaacaaga

SEQ ID NO: 261925 - DNA, 201 bp, Homo sapiens
cccggccaagttatattttaatatcactttatgcctttttttcttttttccttgatactgggactcactgtgtcacctggttggaatgcagtggttcgatytcagcttactgcaacctccacctcctgggctcaagagatcctcccacttcagcctcccaaatagctgggaccataggcacacaccaccatgcccggctga

SEQ ID NO: 261926 - DNA, 201 bp, Homo sapiens
catccccagactgtgaatctaatgtgtagtcagggttgagaactgaggctactcatgagctgagggcttggaagagtcacacagaacaatcagtgcttacrccttgcgaaaattacagaaagactaaagccattttaaatgaagtattttcttttaatggtagggaaatgtgtcagaaatttcataatgccttgttcctag

SEQ ID NO: 261927 - DNA, 201 bp, Homo sapiens
tcctttctaaaggaattcttattacatttttatttttccctctttctttaggagcaaacagtgttgtgtatctgtcagtagaaggactggtttcatctgtrcaagaagggataaagtttaaaaaacagaaagagaaaaagcacgatattatgatccaagaaaatggaaatggtctggaatgttttgaaaagagtggtcatt

SEQ ID NO: 261928 - DNA, 201 bp, Homo sapiens
aattcttattacatttttatttttccctctttctttaggagcaaacagtgttgtgtatctgtcagtagaaggactggtttcatctgtacaagaagggatamagtttaaaaaacagaaagagaaaaagcacgatattatgatccaagaaaatggaaatggtctggaatgttttgaaaagagtggtcattgtacagcttgtct

SEQ ID NO: 261929 - DNA, 201 bp, Homo sapiens
tttgagtcctggaagttgaggcagcaatgagccaagatcacaccactgcacttcagcttgggtgacaggagtgaaaccctctctctaaaaaaaaaaaaaaaggtgatgggagaatagagagtttgattttggaattgggagtttgaggtaactaaacgtgcatagttatgttgtaaggatagtccctctgtttatgagtga

SEQ ID NO: 261930 - DNA, 201 bp, Homo sapiens
ttaagtttttagaaatggttgtagttagttttcaagttaaattactttttttttttttgagacagagtcttactctgtcgcccaggctggagtgcagtggygtgatctcggctcactgcaacctccgcctcccgggttcaagcaattctcctgcctcagccttatgagtagctgggattacaggcatctgccaccacgccc

SEQ ID NO: 261931 - DNA, 201 bp, Homo sapiens
cttcaataagaaattagaagcggccgggtgcagtggctcacgcctgtaatcccagcaatttgggaggccgaggcgggtggatcaccagaggtcgagagttytagatcagcctggctaacatggtgaaaccctgtctctactaaatatacaaaattagctgggcgtgatggtgcgctcctgtaatcccagctagtcaggagg

SEQ ID NO: 261932 - DNA, 201 bp, Homo sapiens
aacacagttcaggccatagcagtgtcttataatagcattttatgtatatactttgtcacacacacacacacacacacacacacacgtacaaaaaaaaaaaaccagaatattattttatgtgtgtcaagaccttgttttttatctgtatctcctatgtcttctgacttattactgactgaatcatcttcagctacatctcca

SEQ ID NO: 261933 - DNA, 201 bp, Homo sapiens
ccacaatgctttctaacagtgagttcctctcatcttaaattctcctaggttttaattctgaataatttttcagccttatgaatttttttttttttttttttaagagacagggtctcactatgttgccgaggctggcgtggacctcctgagctcaagcgatcctcctgcctcagcctcccaagtagctggcactacaggtgc

SEQ ID NO: 261934 - DNA, 201 bp, Homo sapiens
tccacaatgctttctaacagtgagttcctctcatcttaaattctcctaggttttaattctgaataatttttcagccttatgaatttttttttttttttttttaagagacagggtctcactatgttgccgaggctggcgtggacctcctgagctcaagcgatcctcctgcctcagcctcccaagtagctggcactacaggtg

SEQ ID NO: 261935 - DNA, 201 bp, Homo sapiens; identical to SEQ ID NO: 52193

SEQ ID NO: 261936 - DNA, 201 bp, Homo sapiens
ctccacaatgctttctaacagtgagttcctctcatcttaaattctcctaggttttaattctgaataatttttcagccttatgaatttttttttttttttttttaagagacagggtctcactatgttgccgaggctggcgtggacctcctgagctcaagcgatcctcctgcctcagcctcccaagtagctggcactacaggt

SEQ ID NO: 261937 - DNA, 201 bp, Homo sapiens; identical to SEQ ID NO: 52194

SEQ ID NO: 261938 - DNA, 201 bp, Homo sapiens; identical to SEQ ID NO: 52195

SEQ ID NO: 261939 - DNA, 201 bp, Homo sapiens
tttttagtagaaacggggtttcactgtgttagccaggatggtctcgatctcctgacctcgtgatctgcccgccttggcctcccttttttttttttttttttgagacagggtctcactctgtcacctaggctggagtggagtggtatgatctgggctcattgcaacctccgtttcccaagttcaagtgattctcgtacctgt

SEQ ID NO: 261940 - DNA, 201 bp, Homo sapiens
tagttttaaaacaactgcaaaaaggtttgattgtgtttttttcctttttgatgaaggaatttatttcttatatattatcttcttgatttttttttttttttgagacagagtctcgctgtctcccaggctggggtggagttcagtggcgcagtctcccctcactgcaagctccgcctcccgggttcacgccattctcctgcc

SEQ ID NO: 261941 - DNA, 201 bp, Homo sapiens
agtatgcttgactccacccctctgacctaaaataggtttaactgtgactgtcctataccagaaagcagtggcttgcgggaatacatagataataaggcatwccagctcatataaatggcagctgatattggagcggaattaagtcaattttgtttctcctactcagaagagacaggtaggtgataagattgtcaaacacaa

SEQ ID NO: 261942 - DNA, 201 bp, Homo sapiens
aatacagatgaagcttggctcgcccaccactcacctcctgctgtgcaacccagttcgtaacaggccacggaccagtaagggtccaggtgttggggacccctggtctagagaagacacttggttacttcaagcttccacagagccttacaactttgatttcctgaatcctggtctagaactcattcagtttatttcatgcta

SEQ ID NO: 261943 - DNA, 201 bp, Homo sapiens
agtttgtgtattttcacattcatatttttgtatatattgcatttctttttatactcaatctgtagaattctagcactagttttttagaataacactgttawatcatgctaagtaaaaatactctctctccttttccaaacacaccagaccaaatggtttatacagtaagataccgttgtggccagcagctagcgattgaag

SEQ ID NO: 261944 - DNA, 201 bp, Homo sapiens
gcactgtttccagtctctgtctattccaaatttctgaagcttggctgcaatttgttgaaatatcctcttatttctcactgttccctctagttgtcgttgtmtgcttttatcagaccagatgtctattagagccctgacttctggcacagtccagtgctttcctccttcatttgctacagttgggataaaagttgtattatt

SEQ ID NO: 261945 - DNA, 201 bp, Homo sapiens
agacaaggtaaataattggatgcaacattattaaagaaagcagtttcctccataggagatggagtaacaaatcatagcttagcttttctcttaaacagtgrggaaacaaaatacagaacctaaatctgtccattattatgccggttactggctttaataaagttgtgtttttttagtcatattttgatcatctttcctgta

SEQ ID NO: 261946 - DNA, 201 bp, Homo sapiens
gtggctcaggcctgtaatcccagtactttggggtgccaaggcaggtggattgcctgagctcaggagttggagaccagcctcccaacagggcaaaacctgtrtctacaaaaaaatgcaaaaattagccaggcttggtggcatgtgcctgtggtctcaggtatttgggaggctgaggtgggaggattgcttgagtcggggagg

SEQ ID NO: 261947 - DNA, 201 bp, Homo sapiens
cctagatcccttgcctgcacagttcacaacagtcttcgtgctccagtgttctaatctaatgtgagaatctaatgttgccgttgatctgacaggagtcgcgsagctcaggtcataatgtgcatgatggggagtgtctgtaaatacagatgaagcttggctcgcccaccactcacctcctgctgtgcaacccagttcgtaaca

SEQ ID NO: 261948 - DNA, 201 bp, Homo sapiens
aataataaagctgtttatgttcatttagcatgatgttgtcagtgttacgctttattttcataaccaggtagatggtgtaactgtagtaatcctggggtatmacatccaatattcactaccttggatactttattaacttctaaaagaattaatatgcatacattttagaaaagattaccttgataaatgggttaattactt

SEQ ID NO: 261949 - DNA, 201 bp, Homo sapiens
gaaaaaggttcctttttaccaaataaatcaatgtattaacagctactaaagtctacaggcacatatggaagaggtttactttttgtttctatcctgatatrtattctttggaacaaaaattggtcaataaacatctactatttatagcacttgttcagaactattaaaaatggcaaagcagttggaacctttatgagagtt

SEQ ID NO: 261950 - DNA, 201 bp, Homo sapiens
tatactcctaatgattgcagccttttagcaatgtaaataaatattcctttatttcttagtgttccataaagttgttttcgtatatttttttctgcccagasacttagcaaagctttaacctcctcctcagtccagtgctttcctgctccactctccatgttgaaagtgacctggaaatgattcactatttccagccaaggt

SEQ ID NO: 261951 - DNA, 201 bp, Homo sapiens
gtcaatatcagtgatgaatctctaaacagaggttagattccttcaacactgggtagaaaaacaaggctctgatatcaagccagtgagatgaaacactgaamacgagtcacattaaatgtggttacaggtaactgcaatcacacacaacacctagaagccccaggtattacgtggaatagtagtacaaggactctcacgtta

SEQ ID NO: 261952 - DNA, 201 bp, Homo sapiens
tatcttgaaacatgcttattgaatatttattataggaaaacaaaaagaacttctttgtatttattttccagtcctaggggaaaagaatatggtagaattgytggcattttatgatatacactcatatactttatggtcagaatcagagataatctttatttcaggtgctattatatctcacagaatttttcagtatcttcc

SEQ ID NO: 261953 - DNA, 201 bp, Homo sapiens
agggaagccacaaaaagggagagaagcatgccttgggttgcagcaagaaagagtactccaagagcaggagagaaggaacaaaatgtgtaaagtgctaagaygagaacacctttggaagcttaaagaaaattagaaggccaatctagaagacaatgtgcaggggaaaagtgttagaaaagagcttgccagtgtcttaaaatg

SEQ ID NO: 261954 - DNA, 201 bp, Homo sapiens
atcctgacctgaaggtggatcctgtacagtataaaatatggtcccacaaggactcagcactaactaccagattaacaacccctcccagtggaggcagcagwaggaaatataggaaggagtcaaacagaaggaagccaggcaggggaacaggtttagatgtcccctccatagaacatagtaggaatgtattttcttctatat

SEQ ID NO: 261955 - DNA, 201 bp, Homo sapiens
ctgggtagaaaaacaaggctctgatatcaagccagtgagatgaaacactgaacacgagtcacattaaatgtggttacaggtaactgcaatcacacacaacmcctagaagccccaggtattacgtggaatagtagtacaaggactctcacgttaacgtaagattaaaaatcatattttaaaaaacgctctgccatacgtggt

SEQ ID NO: 261956 - DNA, 201 bp, Homo sapiens
aatgtagggttctgtagaccaaataacagagttgaattttatgattaaaagaatgagaagccaggcaaaaatcttaatcagaagagtgccataatctgacwttaatttcaaaaaatcattctggctacagggtgggaaacagtaggaaacaaaagagtaatgtaaaagcaaagtgacaagctatgaggtatgtcactcgcc

SEQ ID NO: 261957 - DNA, 201 bp, Homo sapiens
ctaaacagaggttagattccttcaacactgggtagaaaaacaaggctctgatatcaagccagtgagatgaaacactgaacacgagtcacattaaatgtggytacaggtaactgcaatcacacacaacacctagaagccccaggtattacgtggaatagtagtacaaggactctcacgttaacgtaagattaaaaatcatat

SEQ ID NO: 261958 - DNA, 201 bp, Homo sapiens
attgaatatttattataggaaaacaaaaagaacttctttgtatttattttccagtcctaggggaaaagaatatggtagaattgttggcattttatgatatwcactcatatactttatggtcagaatcagagataatctttatttcaggtgctattatatctcacagaatttttcagtatcttcctgggctgtctctccgtc

SEQ ID NO: 261959 - DNA, 201 bp, Homo sapiens
gtaactgtctcaacaaaaagagtgtaatgaaaataatgcagctaaactttcaaagcactgctggaaacacagcatattctccctctgtttctctttcgcastttctgtttcttcttttcatgtctttttgtttcgctcactattactaaataactcaacctgtagtccccataataaatgacaatttgtagagagacacaa

SEQ ID NO: 261960 - DNA, 201 bp, Homo sapiens
tacagtcttaaatatcttgtgtagcttccaccgacacaagtcatagttgtgcctcagacttagtggttacatgtggccctgggggtgttactacccttggyatgcatgagtggttcctattactaccagtgggaactcagtactccatatgtatccacaaaagggaacttgagacccatgattatttttaatttctgatat

SEQ ID NO: 261961 - DNA, 201 bp, Homo sapiens
ccaagatcccacaaaaggtaagataaagtgccttactggtgtggaaaactactgaaagaggctgttaaagtttgagatctacacagaaagaatattaaggstagactgaactctttacagccaaatacagtcttaaatatcttgtgtagcttccaccgacacaagtcatagttgtgcctcagacttagtggttacatgtgg

SEQ ID NO: 261962 - DNA, 201 bp, Homo sapiens
aaaaatactttatcccaaagaaaatagaaggataatgaatgatcaatatatgtttaaagaagatgggaaataattgaaaagcaacacaaaccagcttggamaaatagaaaagaaatataaaacaaagtggtagatttaaatgtgattatacaaatactttcactcaatctaaacagacttttaataaaagagcaaataatg

SEQ ID NO: 261963 - DNA, 201 bp, Homo sapiens
agttcattggccttttgattgtttccaattgtggctactaagaatattgctatacatgtctttgcataaacatgttttactttcttttgggttgatgctakaagtggaattgctgcctcatgtgagaactgtatgtttatgaagaactgctaaactgttttccaaagtaattgttccattcatcactaccatcagcagtac

SEQ ID NO: 261964 - DNA, 201 bp, Homo sapiens
tctctttgctgtcctcttttgtgcacatttaaaaaatctagaatgcacttttcattagtcccgctgaaaatcttgtattcagttttgcaccctgaagttaygcacaccacggagacttcagttacatctcctaaacaagtacgtgtttattcctctgaagtctgaaaagtaatggcaaattagtttaatgtgttatctaga

SEQ ID NO: 261965 - DNA, 201 bp, Homo sapiens
tcagttcattggccttttgattgtttccaattgtggctactaagaatattgctatacatgtctttgcataaacatgttttactttcttttgggttgatgctataagtggaattgctgcctcatgtgagaactgtatgtttatgaagaactgctaaactgttttccaaagtaattgttccattcatcactaccatcagcagt

SEQ ID NO: 261966 - DNA, 201 bp, Homo sapiens
tttactatgtttacagagtcatgaaactatcaccatcatataattttagaacatttttatcaacacaaaagaaactgcaatgacaccaaaatcacttctcrtaactgcttagtcctagtctaacaccaatttgttttctttctctataagttattctctctagatatttcatataaacggaatcgtacagtctcaggtgct

SEQ ID NO: 261967 - DNA, 201 bp, Homo sapiens; identical to SEQ ID NO: 52222

SEQ ID NO: 261968 - DNA, 201 bp, Homo sapiens
atgtgttatctagaaaacactgtcactttcagagcatttcattgtgtatcgcattttattcctatgaataattttgctaaaattcatccaatcctaggtcwtccaaaaaccagagcttttataactcatggtggagccaatggcatctatgaggcaatctaccatgggatccctatggtgggcattccattgttttgggat

SEQ ID NO: 261969 - DNA, 201 bp, Homo sapiens
gtgcacatttaaaaaatctagaatgcacttttcattagtcccgctgaaaatcttgtattcagttttgcaccctgaagttacgcacaccacggagacttcarttacatctcctaaacaagtacgtgtttattcctctgaagtctgaaaagtaatggcaaattagtttaatgtgttatctagaaaacactgtcactttcagag

SEQ ID NO: 261970 - DNA, 201 bp, Homo sapiens
tagtaagatgagagctgaacaatatgcaggaataggtaaaagaatggcggggagaggcagacaaaaagggaaagcagataaagtggtcaggacagttctcwagtcctcaggttttgtttttagggaatgattaagaatctagatcatactaagaggtaaattagagccagatacatattaggagtggaaatatttattaag

SEQ ID NO: 261971 - DNA, 201 bp, Homo sapiens
attttcactctatttgtagcataagatgctacatgtttcaggacaaacgtattgttgaataatgacttttactggaaaaacaaaatgacacagcatttttmtgtaaaacccatgaatgataacatataaaaatatgttacgtaatacacatcttacaatataaaatgaaaaaatatttgcccaaatttctccctcctagat

SEQ ID NO: 261972 - DNA, 201 bp, Homo sapiens
tatttaacctattaaaaataacttctagagtaagaaagcaggtatatttttcatcaaaaattgtatgcattataagtttgagcaaagaagactgatgtgtrtatatcttatctgtatgcttatacacagatgtaaatgtatgtgtatggacagtcatcccttgctatatgtgggggattggttccaggaactctgcctctg

SEQ ID NO: 261973 - DNA, 201 bp, Homo sapiens
taaataaatgagtgagtggtaatatccaaaactttaatggcattaatcctactttatataacacagaaatttggccccatgtgaaatattacttgctttargtagttttgggaaactcccaggggtttctcgtatcttagcacaaagaatcctctgagattttattcactgcccaagtattcattctccatcacagttgtc

SEQ ID NO: 261974 - DNA, 201 bp, Homo sapiens
tttcctaaaatgctccattcactcagctgtcattggcatccttgccccagggtctcacatgctctaaacttgattgtgtctaatctattttgagactgctyctccattaatatcctctatttcaggtttttgaggcctgcaactccattactcaataaacagtatgaaaatgcaaaattcaacttattttattaattttca

SEQ ID NO: 261975 - DNA, 201 bp, Homo sapiens
gagatgtttttctctaaaaatattggcagtacattaaaagtttattcattttccaaacacatatttataaatacccaagtatgagagactaaatttaaatytttatcctcaaagatttactttaaaaaacatggttccaggatgttatatatttgatattaatgttattattcccacctaaattacaaataaagaacaagc

SEQ ID NO: 261976 - DNA, 201 bp, Homo sapiens
  misc_feature (1)...(201): n = A,T,C or G
tagccacttatcctaaatcaggtgagttctgtggcctgacaaattcaagtccgacctcattttttgtttcctggaaatcaacttgtccataaaatcattancattctaaataaagttaatattcattttgtgcagccatctattttagtatattaaaattggcatttggtgcatagaaaggggaattaagtttgtaataga

SEQ ID NO: 261977 - DNA, 201 bp, Homo sapiens
atgtgtgttctaggaccttgcagatcttccagaagccacagtggtctattaatgcttcacagtgtcaagtggccagaaactgaaatctttttttcaaaacstctatagctcgatggttctaatctcaaaaatgcattgctgtattgaaaatcacttgaattgattctatattttagctgttaatagaagggcctccctggc

SEQ ID NO: 261978 - DNA, 201 bp, Homo sapiens
cctagatgtcaaggaaactcaatgaaatatagaaaaaggttgaaacccaatccaaggaatacagtaaaactgataaagagcagaaagaaaacatagacacrttgagaaagaacaaaactgaacttctggaaataaaaaatgcactaaaggaacttcataatacaatgggaaacattaataatagaatagaccaagctgaga

SEQ ID NO: 261979 - DNA, 201 bp, Homo sapiens
tatattactttctgcacttgaaaaactattgtgctatttccctttggccttcatggttttagatgagaaacttgtcatttgaattggtgatttttattatrcaatgtgctgtatatctggcttttttttctaagagttttattcatctttaaattttagaagtacttttatgatgtttcttgacatagttttttttttcct

SEQ ID NO: 261980 - DNA, 201 bp, Homo sapiens
tttgggggactgttggaagcacataattgtgttttgaaatgtgaggacatgagatatgggagggaccatggcagaatgatatggcttagctctgtgttccyacccaaatctcatcttcaattgtaataatccccatgtgtcatgggagggaacaggtggaggtaattggatcatgagggcagtttcccccatgatgttctc

SEQ ID NO: 261981 - DNA, 201 bp, Homo sapiens
tcaaccatttttttcccatttggaatgggtgtctatacccaatgcctgtactcccactgtatctagtaagtaataactgactttcaattttacatgctcayaggcagaagggacttgccttatttcagatgagactttggacttggacttttgggttaatgctggattaagttaagactttgggggactgttggaagcaca

SEQ ID NO: 261982 - DNA, 201 bp, Homo sapiens
tggatgtgagccatggagtcaaaggagatcattttggaactttaaggtttattgactgccccattggatttgtcttgaatggagcctctagccccttttgyttcaaccatttttttcccatttggaatgggtgtctatacccaatgcctgtactcccactgtatctagtaagtaataactgactttcaattttacatgctc

SEQ ID NO: 261983 - DNA, 201 bp, Homo sapiens
ctcaacaccagctgtgaaagcagccaggagaggggctgtaccttgcaaagtcataggggtggagctgaccaaggtcgtgggagtctacctcttacatcagyctaatctggatgtgagccatggagtcaaaggagatcattttggaactttaaggtttattgactgccccattggatttgtcttgaatggagcctctagccc

SEQ ID NO: 261984 - DNA, 201 bp, Homo sapiens
aaaggccgggcacgatggttcatgcctgtaatcccagcactttgggaggccgaggagggcggatcatgagctcaggagatcgagaccatcctggctaacayggtgaaaccccgtctctactaaaaatacaaaaaattagccaggcgtggtggcgggcgcctgtagtcacagctactccggaggctgaggcaggaggatggc

SEQ ID NO: 261985 - DNA, 201 bp, Homo sapiens
cactgaagtcaagaattgatgtttgggaacctctgcctagatttcaaagcatatgtggaaacacctggatctccaggcagaggtgtgcttcatgggcggasctctcatggagaacctctggtagggcagtgcagaagggaaatgtgggattggagcccccacacagagtccctactggggcatcacctagtggagctgtga

SEQ ID NO: 261986 - DNA, 201 bp, Homo sapiens
aattatatagagtttttgttttttgttgttgttttaaatacaaagactccacaggttgcttggtagaggtggaattgaggatgctagataagacatatttktgacttgttgatggactgtaaaagaaatatgaagaaaatgaaagaaaaatgacagttttatttttcatcaagcaagtggactatggaaccattcgcttgc

SEQ ID NO: 261987 - DNA, 201 bp, Homo sapiens
attcttttaaatttcttatggttcatcttgttctatcttgttaaatgttttctgagctcttgagcaggttgcatattcttctttgtaggtggatgtattcyctatatttttattacatcctcttgaccaataatgttgttcagttcttttatatcctttcttgttttatgtctagcagttctatcaattgcctgacagtgg

SEQ ID NO: 261988 - DNA, 201 bp, Homo sapiens
ggctggcatactccaaaaaaatctttggataaaaggcattaagggtgaatagagggagaatgcagaccctggagctaaaaggggaggaagctaggaatccygcataggtttgctgagcaccatgactcattcctggccccgcacagctcctagagaaggagtgagtgaaacagacatggaacagcccactcttaccatgga

SEQ ID NO: 261989 - DNA, 201 bp, Homo sapiens
atatagagtttttgttttttgttgttgttttaaatacaaagactccacaggttgcttggtagaggtggaattgaggatgctagataagacatatttgtgasttgttgatggactgtaaaagaaatatgaagaaaatgaaagaaaaatgacagttttatttttcatcaagcaagtggactatggaaccattcgcttgcaagg

SEQ ID NO: 261990 - DNA, 201 bp, Homo sapiens
accaatgggactgcacttcttcccctctgaggcccataaaacgtcctagactcagaccagaagagatgacgggaggaccagctacagagagaagctactcrctccagggtgccctctttgctgagggctaaacactcatccagaaaccctgactaccatgctcaataaagctcctcttcatcttgctcaccctctatttgt

SEQ ID NO: 261991 - DNA, 201 bp, Homo sapiens
ttgtcctgcttgtcacagagccagttactgctcttgcaatctactgcacctaatgcccacaaaatatgccctttgtacttagatctccatgtgcgcagaaygttaaaggccaattttactttgtgacaaattgcagtgtcttaagaccaacattagttactcagattctgatttttattctctatatttctccagaacaac

SEQ ID NO: 261992 - DNA, 201 bp, Homo sapiens
tgtaccatccctgctgatgccacataaaaggagtataaggtactttcctggacttcccgctcttgttagctgactttttgaaaattggagagaagccttcrggcctgggagaaacagggcttctctgatgtcatcactgtgaatgggtgggactgcttataaagccccgtttatatcgcaggagtttgaatggcccagtac

SEQ ID NO: 261993 - DNA, 201 bp, Homo sapiens
aagccttcgggcctgggagaaacagggcttctctgatgtcatcactgtgaatgggtgggactgcttataaagccccgtttatatcgcaggagtttgaatgkcccagtacttcattgccattactggcagtgagttagctcacctacagagacccgggtgtggagcagagtttggaattctccactatgtctctgttgggct

SEQ ID NO: 261994 - DNA, 201 bp, Homo sapiens
tgtttttcttgcttatttgatttctggggctgctggacatactgtaccatccctgctgatgccacataaaaggagtataaggtactttcctggacttcccrctcttgttagctgactttttgaaaattggagagaagccttcgggcctgggagaaacagggcttctctgatgtcatcactgtgaatgggtgggactgctta

SEQ ID NO: 261995 - DNA, 201 bp, Homo sapiens
gaagagggacctaattaaattaaatagtttctgcatagaaaatgcgagaaaatatttacaaactatacatctgacaaagatctaatatacagaattataargaacttaaatcaatgagcagaaaacaacccaattaaaaactggcaaaagacatgaacagcacttttcaaaataaggcaattaaaacagaattaccatgaa

SEQ ID NO: 261996 - DNA, 201 bp, Homo sapiens
gtatggccctatccctttacccactcacatagtttattttttaaaatattttttgtttctttaaccatatacttgcaacaatctatactatacccactcaygttgtacgtaaatcttcaaaagccattaagttttagtctgagtttatatactcaagttttccaaacttgagcagcaacagaatccaaacctcagcacaat

SEQ ID NO: 261997 - DNA, 201 bp, Homo sapiens
tggaatttctaaaagagatagagagaggcaattaacttggaaaacatatctgaggatattgtcaataaaaattttctcaaccttgatggagaagtcaacaygcaaattcagaaaattcagagaaccccaaaaagatattacataagacaacaattcccaaaatatagagtgaaagaggatcgccgaggtcaatgtgaaata

SEQ ID NO: 261998 - DNA, 201 bp, Homo sapiens
taaatgagcaacttaaaaggcacagactggcaagttggataaagaagcaagacccaactctgctgccttcaaacttcaagagactcatctcacatgcaacracacccatagtctcaaagtaaagggatggagaaatatatatcaagcaaatagagaacaacaacaacaacaaagcaggagttgctatttttttcagacaaa

SEQ ID NO: 261999 - DNA, 201 bp, Homo sapiens
ctaacattgcacctcaaggaaccaggaaaataagagcaaaccaatatcaaaagtagcagaagaaaagaaataacgaaaatcagagcagaactgaatgaaaytgagatgtgaaaatccagacaaaaaaatcaacaaaaacaaaagtttgttttttgaaagaataaataagatataccactagctagattcacaaagaaaaaa

SEQ ID NO: 262000 - DNA, 201 bp, Homo sapiens
cacatgcgcccactggacctaaaagttaaaaattataaataaataaagacattattggcattttaggacttatatttatcacgttatttgtttgttctttyatatctcgtttattttctttttcttcctttccttggttgtacctaaacattttggagttcatttttatttatttataatatttttgaatatatttttgta

SEQ ID NO: 262001 - DNA, 201 bp, Homo sapiens
gggaaattgagaaatctttcagggaagctgaatgcggaacaaggaacaacagatgtgagaaaaacttcttaaaagaaacagacataagttcatctaatggrcattaagtaataacgagttgtggaggattacaatttctcatttttatatgctgggtaaagtgactgtagctgctagatcagtagaggcatagtaaaatcc

SEQ ID NO: 262002 - DNA, 201 bp, Homo sapiens
agggcagtgcagaagggaaatgtgggattggagcccccacacagagtccctactggggcatcacctagtggagctgtgagaagagggccaccatcccccasaccctagaatagtggatccactgagagttgcactttgcacttggaaaagctgtacacactcaacaccagctgtgaaagcagccaggagaggggctgtacc

SEQ ID NO: 262003 - DNA, 201 bp, Homo sapiens
gttttcttctttatgagactaagtataactttttggaggtcagtgtatttttgtctgaaatgctttctttgtacttgacattaaaaaatatctgatgtttrtatatccataaatagctaattttactttttaagattgtcctcatattcttacttcctttggttactaaattcaaaatgttttcacaatttgatttactat

SEQ ID NO: 262004 - DNA, 201 bp, Homo sapiens
ggcatttcccttgctaaaactccctctgtcctgccaccctataaagaagatacctgcttctcctttgccttccaccatgattgtaagtttcctggggcctygcaagcaataggaaactgtgagtcaactaaacttctttcctttataaataatccattctcaggcagttctttatagcagtgtgagaatgaactaatacag

SEQ ID NO: 262005 - DNA, 201 bp, Homo sapiens
gtatgattgaccacatgctttactcagccataaagcaattctcaataaatacaagaaaaccaaaatcataccaaccatactctcgggccacagcataatakaaatataaattaatgccaaaaagccctatcaaaaccctacaattacacagaagttaaatgacctgcccctgaaacaatgtaaataatgaaattaaggcag

SEQ ID NO: 262006 - DNA, 201 bp, Homo sapiens; identical to SEQ ID NO: 52226

SEQ ID NO: 262007 - DNA, 201 bp, Homo sapiens
taagataatagttttcttctttatgagactaagtataactttttggaggtcagtgtatttttgtctgaaatgctttctttgtacttgacattaaaaaatayctgatgtttatatatccataaatagctaattttactttttaagattgtcctcatattcttacttcctttggttactaaattcaaaatgttttcacaattt

SEQ ID NO: 262008 - DNA, 201 bp, Homo sapiens
agctcctcttcatcttgctcaccctctatttgtttgtatacctcagtcttcctgaatgcaggacaagaacttgagacccgctgcatggcagaactgaaagrgctgtaacacaaacaggcctgaaacacacaccttgctcaccaccttgtgtgtgacaagaaagacagaagagagaaagagagaagacctgtggcccttcaa

SEQ ID NO: 262009 - DNA, 201 bp, Homo sapiens
gtgacatacagagaacagacttgagatatagaaacagctggtttagttaaagtttagtgtctgacttatttgaacacagtctgaagagctggccacctttsattggccaaaacttggtgattcgcacaagggtagaatgtaatatgtttacacatccagttaggttacaattcactatgtatagagaaacctttaagccaa

SEQ ID NO: 262010 - DNA, 201 bp, Homo sapiens
tgagccaaaatagcctcagagattccagaatagctacatggtttatggaaggaaggaatgtgacatacagagaacagacttgagatatagaaacagctggyttagttaaagtttagtgtctgacttatttgaacacagtctgaagagctggccacctttgattggccaaaacttggtgattcgcacaagggtagaatgtaa

SEQ ID NO: 262011 - DNA, 201 bp, Homo sapiens
agccctctgcaaatactgtctaaactattagtaacatagagtctaaatttaacttagaagaatatggcatttactgttgaaatacattacttccatttaartagtctgtttattgtggcttattacacataatatatgtcaaaaatgtgttaataataacaatacatttaaccaattactaacttaaataactttgagaag

SEQ ID NO: 262012 - DNA, 201 bp, Homo sapiens
tgaaactgtttcatcagatcattgggcattagttagattctcataaggagtgtgcaacttagatccctcacatactcaattcacaataaggttcatgctcytatgagaatctaatggcaccactgatctaacaggaggcagagctcaggcagtagtgcttgctcttccaccactcacatcttcctgtgtggcccagttcct

SEQ ID NO: 262013 - DNA, 201 bp, Homo sapiens
acaaaagagactttaaaccaacaatcaaaaggacaaagaataatattatacaatgataaaagattcaattcaacaagaaggtgtaactgttctaaatacayatgcatccaactttagagcatctaaattcataaaactggttcttatagacctacaaagatacttacataaccacataatattagtgaaagacttcaacac

SEQ ID NO: 262014 - DNA, 201 bp, Homo sapiens
gatcagaggaagattcagccagagccaggactctgctttaacttctactggtctatagactaacacagatgttcccagcatttttggcaccagggacgggrtttgtggaagacaatttttccatgaacagggtgcaagggggctgtatatggatggtttccagatgaaactgtttcatcagatcattgggcattagttaga

SEQ ID NO: 262015 - DNA, 201 bp, Homo sapiens
atccatatatttacaatttccttcaaacttgcaacatacattgcattaacagacaatatttttcttctaccatacaatcatttgtagataatattatagaraagtttaatgcaacaacaataatggaagaaaattatagaatatacatcaataataaaatttgaaaaaaagtccagtaatttacaacatgtttatgagtat

SEQ ID NO: 262016 - DNA, 201 bp, Homo sapiens
tcagatcatcaaggcaagacactcaggacttaaactcaacacttgactaaatgtacctaacagacatctacccaacaacaaaatatacattcttctcatckgcagatggcacatattgtatgattgaccacatgctttactcagccataaagcaattctcaataaatacaagaaaaccaaaatcataccaaccatactctc

SEQ ID NO: 262017 - DNA, 201 bp, Homo sapiens
acatgcgcccactggacctaaaagttaaaaattataaataaataaagacattattggcattttaggacttatatttatcacgttatttgtttgttctttcrtatctcgtttattttctttttcttcctttccttggttgtacctaaacattttggagttcatttttatttatttataatatttttgaatatatttttgtat

SEQ ID NO: 262018 - DNA, 201 bp, Homo sapiens
tgtttcatagaacattaagagaaaaatgtaataggctgaatgacttcttagcatatgcagtgaattactgtgaacatttaaaacaaagcattgttttcaaygagtgagtcagatgcaattttgtgtgggtttgcctttctattcagagatggcaagattatgtaagattatcaggtattctagagtttagactgtatataa

SEQ ID NO: 262019 - DNA, 201 bp, Homo sapiens; identical to SEQ ID NO: 52228

SEQ ID NO: 262020 - DNA, 201 bp, Homo sapiens
ggcgggtggatcacgaggtcaggagatcgagacagtcctggctaacacggtgaaaccccgtctctactaaaatatacaaaaaattagccgggcgtggtggygggcgccggtagtctcaactactcgggaggctgaggcaggagaatggcgtgaacccgggaggcagagcttgcagtgaactgagatcgcgccactgcactc

SEQ ID NO: 262021 - DNA, 201 bp, Homo sapiens
attgggaacacatcagcacctctggtagagcaggtgcttgacctcaaggggccagagaacaaagcaaaggttctcgctctagccccgtagagacagagcayatagccctggagtgctgaattaagccttggtcccctaaaagcatccaaaaaggaaaacaatctaataaacccaaatttacactacagtcaaaacctcaag

SEQ ID NO: 262022 - DNA, 201 bp, Homo sapiens
aaatgttctctatttgcctgtccatctatgtgttttcctagcacaactactatctttaattttgggcttctctctactatcatcatgtctgcttgtttacycattctaaccactgacacaccttaagttctgatcttattcttctgtcagagaggactgacacagaaaatataacagatattcttgatttttaatatttta

SEQ ID NO: 262023 - DNA, 201 bp, Homo sapiens
aaaagttgctgagattcaaaattattaaatgaaacaatgcatgtaaagctattactagaataccttgaatatatgataaatatttattcttctatttactrctgtgctaaatgagagtggttttggcaactctgatgtgagcaattccaaatttgtcattcttactcccttcaatctttgtctaagatggcatagataagc

SEQ ID NO: 262024 - DNA, 201 bp, Homo sapiens
gtagcctttctggagactctaatatttccctatacttaactaaatttctcaggtatagaacaattggagaagaatccatcaccccggattgtgaaaacacrtctaccgactgatcttcttcctaaatctttctgggaaaacaattgcaaggtatactccagactccatgtcagttttttagtatggccctatccctttacc

SEQ ID NO: 262025 - DNA, 201 bp, Homo sapiens
agaacacccaatactttttttgtactatgaagatatgaaagaggtaaaatggtagatatggattctggataatttccccactgcatcatgctgtaaaaggrttgatatttgctttccaacttagtctatcgagtccaaaatgatgattgctttgcctatccaccatgtgtttttacccaaatcttgctataattaatgagt

SEQ ID NO: 262026 - DNA, 201 bp, Homo sapiens; identical to SEQ ID NO: 52224

SEQ ID NO: 262027 - DNA, 201 bp, Homo sapiens
tggactactatcatcattaatattttaggattagccaaattattctccaaatatttttgaccccaaaaagaaaatgttctctatttgcctgtccatctatrtgttttcctagcacaactactatctttaattttgggcttctctctactatcatcatgtctgcttgtttactcattctaaccactgacacaccttaagttc

SEQ ID NO: 262028 - DNA, 201 bp, Homo sapiens; identical to SEQ ID NO: 52225

SEQ ID NO: 262029 - DNA, 201 bp, Homo sapiens
tctttctttaggccttctaatcttttcctttggtatatactgatttcttcttatggaaatattttattctttcctatgtttttttatttacctttagggayggctggtgactggaagaattacttcaccgtggcccaaaatgagaaatttgatgctatttatgagacagaaatgtccaaaactgcacttcaattccgcaca

SEQ ID NO: 262030 - DNA, 201 bp, Homo sapiens
aaaaagaaaatgttctctatttgcctgtccatctatgtgttttcctagcacaactactatctttaattttgggcttctctctactatcatcatgtctgctygtttactcattctaaccactgacacaccttaagttctgatcttattcttctgtcagagaggactgacacagaaaatataacagatattcttgatttttaa

SEQ ID NO: 262031 - DNA, 201 bp, Homo sapiens
ggaatttaaacaagaaaattagtctttctcagaatgcctcttcaaatgtcagactctatttaattataaaccacctttccagatgtaaaaaattattcaawttttaaaagcctgaaaaatttaaaggttaatacaatttaaagactgtttgaattcattcaaataaaaggaaggtctttctttaggccttctaatcttttc

SEQ ID NO: 262032 - DNA, 201 bp, Homo sapiens
ggtatagatatataagattagaaattgtatattgtatcacagggagcttacagcaatattgtgacgtcaaaaagtaaataacaatatgtcaatgttcatartcttacatagtcaaataatagggttctgtggaagcgaacaataggaaagcttactttaagtgggtaataaaggaaaaaaacttagacaaattaaatgagt

SEQ ID NO: 262033 - DNA, 201 bp, Homo sapiens
tgtttccaggtataaacaaagcagtgaaggaaaacaaggcttccaaatgtaggagtctgtaggctttacattactaaaagaatagtcatacaatatcaagrttataaaaattactttatttcaaatgtgaaaatataaaaaccacttacatataaaatttaagagtattgaaagatctaaaatttaattttcagctttagc

SEQ ID NO: 262034 - DNA, 201 bp, Homo sapiens
tctatgattgcaccactgcactcaagcctgggcaacagaatgataccctgtctcaaaaataaaacactgctgggtgtggtggctcacacctgtaatcccarcactttgagaggctgaggcgggtggatcacttgaggacaggagttcgaggacaggagttcgagaccagcttggccaatatggcgaaactccatctctaca

SEQ ID NO: 262035 - DNA, 201 bp, Homo sapiens
acctttccttctccttcccctcagccatctggtattaaatatagtcatatagtccatggaaaccagtacttgtggctatgcctttaagtaattctaaagtrtgttatatccttgttatatcctaatgatgtaactttaaaacctgcaacatttacaaatatatttatcttgttttttgtatcctgaatcatgagaatgtga

SEQ ID NO: 262036 - DNA, 201 bp, Homo sapiens
agggtacatgtgcacaatgtgcaggtttgttacatatgtatacatgtgccatgttggtgtgctgcacccagaaactgttgtattttcctttttttttttttaatgcaacttttagagctaaaggatgtttttacagttgggtggaatgcagtgcagggaagatccctaaaggaggctgagtgagaattagtgaaaattggt

SEQ ID NO: 262037 - DNA, 201 bp, Homo sapiens
gaagatccctaaaggaggctgagtgagaattagtgaaaattggttggggagtaaatagcacagttctggagatattgtgaaaaattatttaaagatctatycaaaggagttttggaatgaaaaatgagtacatgttttcataaaaagcatgaatataataactatcatccccctaaattttttgttaatttttaattgcca

SEQ ID NO: 262038 - DNA, 201 bp, Homo sapiens
gtaaataatttttaaaagatcatggaatggttaggtgcagtagctcacacctgtgatcccacctcttagggaggctgagacaggaggatcgtttgagcccwggagttcaagaccagcctgggcaacatagcaagaccccatctcaaaaaaaaaaagatcactgaatcctaatgcttggcaagtggttggcacttaataaat

SEQ ID NO: 262039 - DNA, 201 bp, Homo sapiens
ccaaacattatttctctctttgattggtttgaaggtatttttcttaaattttttatcttattactgttatctgagacaatagaggttaaaaagttatgcartaactttatatatgcaactgtgtagattttatactaattttttatttaataattttttcttttaatttttttctttttaattttgttttctcatcccctt

SEQ ID NO: 262040 - DNA, 201 bp, Homo sapiens
ttgtttttgtctttttcttggttgttggtctagcccttttatgaaatcatcttttaaaaattaattattaattttctttaaatgatgctttctttcctatrtgattaagaattagagtggtttgaaaatgtatgtatttcagacaatgaaaaaatatttttcctatttgtttttcttccatttttaatgaagataaatgtt

SEQ ID NO: 262041 - DNA, 201 bp, Homo sapiens
tgaacaggctagctgtataaatgtatattagggctgcatgtggtggctcatgcctgtaatcccagcactttgggaggccaaggtgggaggatcacttgagrtctggagtttgagaccagcctgggcaacacggtgaaaccccgtctcttctaaaagaatacagaaattagttggtcatggtggcgcacaccagtagtccca

SEQ ID NO: 262042 - DNA, 201 bp, Homo sapiens
cttatgagaggattgctccacaggaagggatttgattttttttcttagaaaacttttgagtttcaaagtttggaaggggaaaataatgcctttttttttttaattccacagaatggcaacatacttgtttaacattgaattctgtgcaagaaagaaaaaatttaatatattccttgccaacaagtggtggaaaaaccctcg

SEQ ID NO: 262043 - DNA, 201 bp, Homo sapiens
aaccagtacttgtggctatgcctttaagtaattctaaagtatgttatatccttgttatatcctaatgatgtaactttaaaacctgcaacatttacaaatayatttatcttgttttttgtatcctgaatcatgagaatgtgatatcaaaagaaatactggatttggttcacatgacagattttttgatgtttccatctattt

SEQ ID NO: 262044 - DNA, 201 bp, Homo sapiens
gggattacaggtgtgagctaccactcccaacctctattttattttttatacctactttttcttttttaagttcatctttttgccctcaattttaagaattrattagtttctaagctagctatgaaatcctttatgcacaaatgtggtcatcaggcaccacaggccaaagcaggtatacagaatcgaaatcatcaactacag

SEQ ID NO: 262045 - DNA, 201 bp, Homo sapiens
tttttatgtgtttataatataagccatttttgctgcatttagatttcttcttattgggtggcataataatcctttccatatttgtttccaagtcaattttytaaaacttttttcccatgaattgttttctaaatttaaaatttacttcattttccctttcttaaaccttcatattctgtatatgtatatggcaattaattc

SEQ ID NO: 262046 - DNA, 201 bp, Homo sapiens
atgagagagacaaaaataggtagagatcaactatttttaggtaacattttaggcaaaatattgtctgacgctgttttagtggaaacttgtattttttttttcagttctttttttaatttattttgttttttgttttttttttattatactttaagttctagggtacatgtgcacaatgtgcaggtttgttacatatgtata

SEQ ID NO: 262047 - DNA, 201 bp, Homo sapiens
ctactgtacaaataaaatctgctgtttattgaagacccgttatgttaagctagttatattatctagattttacgacagtaatcaggccctgaaaagttgaratagtacagttcttgctccaaatcctgttgtcttaatcactttactatattgctgcctccaggtttgtgtgtcttctgtgtagcagaccactccaagtca

SEQ ID NO: 262048 - DNA, 201 bp, Homo sapiens
agatttcttcttattgggtggcataataatcctttccatatttgtttccaagtcaattttctaaaacttttttcccatgaattgttttctaaatttaaaakttacttcattttccctttcttaaaccttcatattctgtatatgtatatggcaattaattctatcatatgtgctaatgaaaggagtaaataattcaaaaat

SEQ ID NO: 262049 - DNA, 201 bp, Homo sapiens
accctttgctagatgcaacccagtttgccattgccttctgctccctgtgggtaaagccattccacagcaatttgagattgtttccttcttgatctcaactrtggttctaagtctgaaattgcttggcttctttgaagcttcattgttttactattttcatatataaatcagaattagctttccatcattttttaatggtgc

SEQ ID NO: 262050 - DNA, 201 bp, Homo sapiens
aactttaaagaattcaggaaggaatacatttgagagacggtccacccccaccccacagcacccctgtggatgggatccggacttcattgccactggatgckgggaagtttgttgtggtgctacagccaaggctaataagcagaaactgcccacggagtgctgacaaaactgcaaggaagctgcctacaatgtactgttgaa

SEQ ID NO: 262051 - DNA, 201 bp, Homo sapiens
aggtaaacaataggttttttcttccctttggataagaaagctgactaactgactatagacttctgtatatatgaacataattgaaattgctttttttttttaagagatggggtttcactctgttgcccaggctggagtgcagtgatgtaatcacgatttactgcagcctcaacctcctaggctcaagtgatcctcccacct

SEQ ID NO: 262052 - DNA, 201 bp, Homo sapiens
tgcagtagcatgatcttggcttgctgcagccttaacctcccaggctcaagcaatcctcctacttcagcctcccaagtaactgcgaccacaggcgggcaccwctatgcctaactaaattacctttttaaatttatttttcaccatgctgcccaggctggtctccaactcctgagctcaagtgatccaccctcctcagcctcc

SEQ ID NO: 262053 - DNA, 201 bp, Homo sapiens
ccaggcgacagaacaagactccgtctaaaaaagaaaaaaaggcgggtgggggggagcggaatttattcttccacaaattggtgggcttttttaaacaagtratttgaggttcttgatattctctgtattatagtaatactaacacaagggttttgtgtagtttacttattattcttattgatctatatagcttattatttg

SEQ ID NO: 262054 - DNA, 201 bp, Homo sapiens
gtactacttttcattcatagggcttagcacttgggtggatgcttttaatctaagctttatgcctttcttctttgagtaattttttttctgttatttctttytcttcccattatctctgttccttgcttttataatttcacttaggcagggttgaggcctcttagattcagctttcgtatctcttttcttacacatttttca

SEQ ID NO: 262055 - DNA, 201 bp, Homo sapiens
tcaagcaatctgcccaccttggcctcccaaagtgctggggttacaagtgtgagccaccttgcctatcctagcttggctttcttacagtgtggatgctaggrtctgagggggaggattcacatgaccttggaatgatctcatttcaagaccccaaggcctttcttaaactgagacctgtcatgtggcatcatttcttctgca

SEQ ID NO: 262056 - DNA, 201 bp, Homo sapiens
tttctgtttttcttttccagaaacttttagacttttctctttaacctcccaattttgtcatggtgtataataatagttgtaattactacattcccctcccyttcatgtagtaacaactttacatgcattgacttgatacagcttcacaataactctgtgaggaaggtcatattttattacacacctattatagaaggggaa

SEQ ID NO: 262057 - DNA, 201 bp, Homo sapiens
ccttggaatgatctcatttcaagaccccaaggcctttcttaaactgagacctgtcatgtggcatcatttcttctgcattctattagttataagtgaatcayaaaggctagcacagattcaagaggagaattagatcccgtctctcaatgaaggtgtcaaagaatttccaatcatctttaatttgccacactaatcccatac

SEQ ID NO: 262058 - DNA, 201 bp, Homo sapiens
attttctttcatcttatgtagtatttaaacttacctgtaaatcatacttcttttttgcttaccactgcctcttatatcccacatctttcttctctgatttytttttttttaattttgccttccttgagtaatcctttttagaataccgctttagggggtaaaacattttgactctttgcatagttgaagatatctgtattt

SEQ ID NO: 262059 - DNA, 201 bp, Homo sapiens
tgtgaaaatgtagcagaaatgatatgcaaatttttaagcaagtatgttaatattttttaaatagcctgttttatttttattaggaattacagactatgtattaattttattgggcaaacactaattatgccttgcaaaacatcatattaagttgttttagtatactgaaggccttgaccttgaagaaagaaattttaactg

SEQ ID NO: 262060 - DNA, 201 bp, Homo sapiens
ctgtgaaaatgtagcagaaatgatatgcaaatttttaagcaagtatgttaatattttttaaatagcctgttttatttttattaggaattacagactatgtattaattttattgggcaaacactaattatgccttgcaaaacatcatattaagttgttttagtatactgaaggccttgaccttgaagaaagaaattttaact

SEQ ID NO: 262061 - DNA, 201 bp, Homo sapiens
aatatcttattgccgaattataccttttatcaatacaataaatacttgtttttctcatttaataattttgctttgaataccaggactcattttttttttttgccacgtatgtacctttttccattcttttattttcaatttctgtctctcattaagttttccatttttcagacaattgaagaaaaaaatgaaagttatata

SEQ ID NO: 262062 - DNA, 201 bp, Homo sapiens
atttattctaacagctactaaattgtgaggaagtacgtatttattaagttgtttggacctcactatttaattaacaaaactgtaaagtatttctttgggcmctggggctgtgaacaaagaaaatttggaaaactctcctgtaaatgtttattcatacaacaacaacaacaaaagaataatttatggaccatgtagttcaga

SEQ ID NO: 262063 - DNA, 201 bp, Homo sapiens
tagtaatttatagcacaattgaaaatttgagttttcttaaatgatagaaatagattgatataattcgtatctacatttatattcccataataaaaaagaamatacctgtaatgtgccttccataaatgcatccagtaaatggagaaacaaactgggacaaaagctgttttggagttttatgtggaggggaaaaaaaagtat

SEQ ID NO: 262064 - DNA, 201 bp, Homo sapiens
tcctcaacagcagcattcccaaaatgcttgaagaaagtaaacaaatgtaatttgtggttatttgaaaatagcttgtaatgtatatatatttttgtgtgcastactagtgtgtatgttttgtgcctcaatagtttttcagtgtctaaataggttttcagaaaatatttttttaattgccaaattttaatttgaaatttgatg

SEQ ID NO: 262065 - DNA, 201 bp, Homo sapiens
tagaatcgcttgaacccaggaggcggaggttgcagtaagctgagatcatgccactgcactccagcctgggtgacagaatgagactgtctcaaaaaaaaaaacaaaaacagaaacaaaaacgtatattagacagaggtagtatacatcttttaatcacaggaaattagctttctttttaatgtcatatttttaaatcattac

SEQ ID NO: 262066 - DNA, 201 bp, Homo sapiens
ttttcttacttacctctcccacccctttcccaaatcactcaggaagaattcagagcacaaaagacttgctaaaattactttatgatatattaaataacatrttttccttaacactttggcttttgtttgtttgtgttttagaaacgactcaaattatcggtatgagtgcaacattaaacaatgttgaagacctacaaaagt

SEQ ID NO: 262067 - DNA, 201 bp, Homo sapiens
ttaagtaatattaggtcagtgattcaaaaccttgggtgcatagtgaatcatcttggaggcttttaaaaattccaaagtccaggctacatcttagacaaatyagaatctctgggagtgacacccagatatcattttgtaaagctccccaggcaagtccaacatatagccaaggacaggaacaactggcttagtcagtcaaag

SEQ ID NO: 262068 - DNA, 201 bp, Homo sapiens
caaaagacttgctaaaattactttatgatatattaaataacatgttttccttaacactttggcttttgtttgtttgtgttttagaaacgactcaaattatyggtatgagtgcaacattaaacaatgttgaagacctacaaaagtttcttcaagcagaatattataccagtcaatttagaccagtatgtacctaaggtttgc

SEQ ID NO: 262069 - DNA, 201 bp, Homo sapiens
aggtgaatcacttgatgttaggagttcaagaccagcctggccaacaggtgaaaccctgtctctactaaaaatacaaaaattagccgggcgtggtggtgggygcctgtaatcccagccactcgggaggctgaggcaggagaatcgctgtaacccaggaggtggaggttgcagtgagctaggatcacgccattgcactccagc

SEQ ID NO: 262070 - DNA, 201 bp, Homo sapiens
gtgctaggcactattttaagtgctagggatacagcagtgaataaaatagtccctgctttcatcaagcctgtattttagggcatccctatttgaatattctytgaacagctaagcctaactaaggcttagtctgagccaaactcatttccttcaaagccgttcttcagcctgaattctcagccaccactctccagccagcca

SEQ ID NO: 262071 - DNA, 201 bp, Homo sapiens
atgaggtcatgaattgatttataatcaagagacttataaaatacttaattctatcactagctacagtatgtaacctaaagcaagatacttaagctttttgyctttgttttaaaatttctaatgaatagaattttgaaggtaaatgaaattggtatttgaagaagtcctctattattatccgccacttactagctatgtgtg

SEQ ID NO: 262072 - DNA, 201 bp, Homo sapiens
tatacatgtattatagttgttatattcaaaatacttaaaagttataagcaactctttacaaacaaatttcatatgaatatatgcatgttttatatgagcaytatatgaagatttacttctctgtcctttttaaaaaaaatctcgaagttgcacatgattggtgaaggaagccgtggagctacactggaaatgaccctagca

SEQ ID NO: 262073 - DNA, 201 bp, Homo sapiens
ataatgtgttaaaatgttacttggtttggggtttaaaaaaatctgcttcagtgtggctgttatacatttgaaacacaaattctactggtattccattttakttcctctccttccctcacagatatttttttagggggagtggggaggaactaggtctctgtcacccaggctagagtgcagtagcaccatcatagctcactg

SEQ ID NO: 262074 - DNA, 201 bp, Homo sapiens
actgtgaaaatgtagcagaaatgatatgcaaatttttaagcaagtatgttaatattttttaaatagcctgttttatttttattaggaattacagactatgtattaattttattgggcaaacactaattatgccttgcaaaacatcatattaagttgttttagtatactgaaggccttgaccttgaagaaagaaattttaac

SEQ ID NO: 262075 - DNA, 201 bp, Homo sapiens
aactgtgaaaatgtagcagaaatgatatgcaaatttttaagcaagtatgttaatattttttaaatagcctgttttatttttattaggaattacagactatgtattaattttattgggcaaacactaattatgccttgcaaaacatcatattaagttgttttagtatactgaaggccttgaccttgaagaaagaaattttaa

SEQ ID NO: 262076 - DNA, 201 bp, Homo sapiens
gttatacatttgaaacacaaattctactggtattccattttatttcctctccttccctcacagatatttttttagggggagtggggaggaactaggtctctgtcacccaggctagagtgcagtagcaccatcatagctcactgcagccttgaactcccaggctcaggtgatcccaccttagcctcctgagtggctgggact

SEQ ID NO: 262077 - DNA, 201 bp, Homo sapiens
atttcagattttgaaagacagtaccaagttgtgcacacatcccattagtgagctgttgtggttatttaagaatgaaataaaaatattttttcactcaactratgtgtattatttattctaacagctactaaattgtgaggaagtacgtatttattaagttgtttggacctcactatttaattaacaaaactgtaaagtatt

SEQ ID NO: 262078 - DNA, 201 bp, Homo sapiens
gcctcctgagtggctgggactataggtatgggccaccattcctggctaattttttgttgttgttgtagaggcttggtctcactgcattgcccaggctggtytctaacttctggcctcaagcaatcctcctgcctcaacctcccaaagtgctgggattataggtctgagccaccatgcccggcctatctcgtttttattctc

SEQ ID NO: 262079 - DNA, 201 bp, Homo sapiens
atgattgacaatcatgtagaaatgtgactggacagaaagggtatgatttattaataatactaacagattgagtggggaaacccagcaagacccgtctgttsagattcttctggcctctctgtgcagcattcctttcttcagagtatggggcaggacactctgggatgagggtctttttacttgtttttggagacagggtct

SEQ ID NO: 262080 - DNA, 201 bp, Homo sapiens
gggcatgagaattgcttgagtccaggagttcaagaccagcctgggcaacatggcgagacccctgtctctacaaaaaattaaaaaattagggcagccaggcrcggtggctcacacctgtaatcccagcactttgggaggccgaggtgggcagatcacgaggtcaagagatcgagaccatcctggccaacatggtgaaacccc

SEQ ID NO: 262081 - DNA, 201 bp, Homo sapiens
attttttttcttagaaaacttttgagtttcaaagtttggaaggggaaaataatgcctttttttttttaattccacagaatggcaacatacttgtttaacaytgaattctgtgcaagaaagaaaaaatttaatatattccttgccaacaagtggtggaaaaaccctcgtggctgagattttaatgctgcaagaactgctttg

SEQ ID NO: 262082 - DNA, 201 bp, Homo sapiens
gcagagatgggaggatcacttaagcccagaagttcgcgttcaaaaccagcctaggcaacagagacccagtctctacaaaaaaaaaaaaaaatttttttttyttaattagccgggtgtggtggcctgcacctgtagtcctagctacttgggaggctgaggcaggaggatcgcttgagcccaggatgtcaagactgcagtgag

SEQ ID NO: 262083 - DNA, 201 bp, Homo sapiens
aggacttggaacttgaaactgcaaacttttggcatccttcccagatgcaaagagttgaccagttttatcgccttcgtttacttctctcgtcttcgttaccrctgttaatcggcacttaggaggtattgattgccttgttatttacatttctatataaatatgaaatgtaaaccccgagacataaaagttgtgcacgcagca

SEQ ID NO: 262084 - DNA, 201 bp, Homo sapiens
ctttaagaattacaatctggccgtgtgcagtggctcatgcctataatcccagtgctttaggaggcagagatgggaggatcacttaagcccagaagttcgckttcaaaaccagcctaggcaacagagacccagtctctacaaaaaaaaaaaaaaatttttttttcttaattagccgggtgtggtggcctgcacctgtagtcc

SEQ ID NO: 262085 - DNA, 201 bp, Homo sapiens
tccatctcctgacctcgtgatccgcccccctcagcctctcaaagtgctgggattacaggcgtgagccaccacgccccgccaatagtctactcttatattgkggatataatactctttggaattttctgttaatgctaattaggatttttaaaagttctcttctgatccctatattatctggttttgtggtcacttattctg

SEQ ID NO: 262086 - DNA, 201 bp, Homo sapiens
agaatcgctgtaacccaggaggtggaggttgcagtgagctaggatcacgccattgcactccagcctgggggtcaagagccaaactccgtttaaaaaaaaaatttttttagtagtacttatgaatcccagatttataaggattttgtaccaaaagctcattaacctaaataccagtgaaataatatacatgtattatagttg

SEQ ID NO: 262087 - DNA, 201 bp, Homo sapiens
atattagggctgcatgtggtggctcatgcctgtaatcccagcactttgggaggccaaggtgggaggatcacttgaggtctggagtttgagaccagcctggscaacacggtgaaaccccgtctcttctaaaagaatacagaaattagttggtcatggtggcgcacaccagtagtcccagctactcaggaggctgaggcagta

SEQ ID NO: 262088 - DNA, 201 bp, Homo sapiens
tagttttctttttttaagaggtcaggtctcactgttgcccaagctgcagtgcagtgacacaatcatggctcactgcagccttgacttcctgggctcaagcratcctcccacctcagcctcctaagtagctgggactacaggcgtgcactaccatgcccaggtaatttttaatttttttgtagagatgaggtcttactatgt

SEQ ID NO: 262089 - DNA, 201 bp, Homo sapiens
gtgagccgagatcataccactgcactccagcctggctgacagagcgagattctgtctcaaaaaaaaaaaaaaaaatggctgggttcggtggctcacacctrtaatcccagcactttgggaggccaaggcaggtggatcacttgaagccaggaatttgagaccagcctggccaacatggtaaaaccctgtctctactaaaag

SEQ ID NO: 262090 - DNA, 201 bp, Homo sapiens
atataggtgaagacattctatgcttgataatcttaaatttggttttgtgtcaagtgtttcttgaagtgtgaacacgtatgtgtgtagtatacaattttatwggctgggcgtggtggctcatgcctgtaatcctagcactttgggaggccgaggcaggtgaatcacttgatgttaggagttcaagaccagcctggccaacag

SEQ ID NO: 262091 - DNA, 201 bp, Homo sapiens
gatccataggcaatttgtgtctaatatatgtattttaaagcaggcccttgattacctttccagttattaccaaaggtgtaggcctgtgtaattgacttctmccctttataatttatgatcatggggtattttgctaataaatgatcaatttttataaactttccatgagtgtttaaaaaaatatgtattttcagttgaata

SEQ ID NO: 262092 - DNA, 201 bp, Homo sapiens
tatgtctttgacactcacatgtcttgagtgaaagaagtcagttattagtaatactgttgattaaaccaaacatctttccccccacaccagcagccgcagcyacctctccccacgggtgcatccctgccaccacccagatgctctgccttgtgctgcctttcccaaagctagacatctttaaagacagctgcaattaagttt

SEQ ID NO: 262093 - DNA, 201 bp, Homo sapiens
cccaactcattttccaacaaatgagttttaaagccagtgtttgaacccaggaagtttgattttacaatcccaacagtactacttttcattcatagggcttrgcacttgggtggatgcttttaatctaagctttatgcctttcttctttgagtaattttttttctgttatttctttttcttcccattatctctgttccttgc

SEQ ID NO: 262094 - DNA, 201 bp, Homo sapiens
caattttgtcatggtgtataataatagttgtaattactacattcccctccctttcatgtagtaacaactttacatgcattgacttgatacagcttcacaayaactctgtgaggaaggtcatattttattacacacctattatagaaggggaaactgaggcactaaataattaaataattttcccaactttaaaaagttaca

SEQ ID NO: 262095 - DNA, 201 bp, Homo sapiens
aatatctgaaaataaatgatacaatatatgaagttgacagcaaagctgagaatggcatgactttttcacgtcttcttaattataaggtaacattgataacmtttaaattccaggttaccagactttgtgtctggggcacaacaagagtttccaatggattccgtagaatagtctagatttttcagagaaacagctgatgct

SEQ ID NO: 262096 - DNA, 201 bp, Homo sapiens
taaataacaactttttaaatctttttacctctaaatctggcttaataacatgaccagattaaagcataaatgcatgtgctactttttattaagctaaagcrgtggttctcaagtgtggttcctggactgcagcatcaacatcacctggaaatttgttgaagtgcatgttctcagacacttccctagacctactgcgtcaga

SEQ ID NO: 262097 - DNA, 201 bp, Homo sapiens
tgacagcagccgttaccaagtgtgtcaacttcttcctccctagaccaccgcaaacagcaaccacagcggccatggttccgcgtttcttccacttcctttcrttccaaatcgttccgaaaggccccttccgctgctcttcccctgtgggctcgagtaccccgttcaaaggttccgcaggagaacgctgaggacccgcgagag

SEQ ID NO: 262098 - DNA, 201 bp, Homo sapiens
tattttctagaggccaatgttgctcatttttgtctctgcatggattttctgtttttcttttccagaaacttttagacttttctctttaacctcccaatttygtcatggtgtataataatagttgtaattactacattcccctccctttcatgtagtaacaactttacatgcattgacttgatacagcttcacaataactct

SEQ ID NO: 262099 - DNA, 201 bp, Homo sapiens
gaccagattaaagcataaatgcatgtgctactttttattaagctaaagcggtggttctcaagtgtggttcctggactgcagcatcaacatcacctggaaayttgttgaagtgcatgttctcagacacttccctagacctactgcgtcagaacctctaggaatacgacctggcaatctgtgatcgtggctcactacagcgtc

SEQ ID NO: 262100 - DNA, 201 bp, Homo sapiens
catcttatgtagtatttaaacttacctgtaaatcatacttcttttttgcttaccactgcctcttatatcccacatctttcttctctgatttttttttttttaattttgccttccttgagtaatcctttttagaataccgctttagggggtaaaacattttgactctttgcatagttgaagatatctgtattttggcctcac

SEQ ID NO: 262101 - DNA, 201 bp, Homo sapiens
ttttctcatttaataattttgctttgaataccaggactcattttttttttttgccacgtatgtacctttttccattcttttattttcaatttctgtctctsattaagttttccatttttcagacaattgaagaaaaaaatgaaagttatatatcctgtttctattattccagtggttactcttaaaattttaagttgtaac

SEQ ID NO: 262102 - DNA, 201 bp, Homo sapiens
caagtgtaagccactgtacccggcctattatatgctttttatgaagtgattattcactttttttctctattaaaatatatttggaattggatatttttttytttcagtttttaaaaattataatctggcaacagcatttatggttcgtttaactttaatgttacttttctcttaaatataaacatatttgttattgaaaaa

SEQ ID NO: 262103 - DNA, 201 bp, Homo sapiens
ttttataaactttccatgagtgtttaaaaaaatatgtattttcagttgaatatgcagttttgtacatctcagcgagatcacagaggttcattgtgttatcrgcttctctattttcttactatatttgattccttggtctatcaatttcagagaagtgtgttagtctcccactttaattatgtagttatcagtttctccttt

SEQ ID NO: 262104 - DNA, 201 bp, Homo sapiens
catgactggaaatgcgaaggcccagacaccaatattttctagaagtaaacagctcaaagacactctcctatctgaggaaattaatgttgctaagaaaacarttgagtcatcatcaaatgaccttggtcctttttattcattacccagcaaagtgagagacctttatgcccaattcaagggaattgaaaaattatatggtaa

SEQ ID NO: 262105 - DNA, 201 bp, Homo sapiens
taggatatggagactttacccgtgtgagtcccgggatgtgtaaggctgacagcagccgttaccaagtgtgtcaacttcttcctccctagaccaccgcaaamagcaaccacagcggccatggttccgcgtttcttccacttcctttcgttccaaatcgttccgaaaggccccttccgctgctcttcccctgtgggctcgagt

SEQ ID NO: 262106 - DNA, 201 bp, Homo sapiens
tcccatacaggacttgctatatagtcttcctctttttcatatttgtacttcctttctccaataatgagaaacctcatccctgtgtttattaatatatttcygttttcctcaatcttagaatgcactgaaagtaactgcagaattgttaaattataccactccaaaaaaaacaaacattcagtatttatttacagcactttt

SEQ ID NO: 262107 - DNA, 201 bp, Homo sapiens
ttgttacatatgtatacatgtgccatgttggtgtgctgcacccagaaactgttgtattttcctttttttttttttaatgcaacttttagagctaaaggatrtttttacagttgggtggaatgcagtgcagggaagatccctaaaggaggctgagtgagaattagtgaaaattggttggggagtaaatagcacagttctgga

SEQ ID NO: 262108 - DNA, 201 bp, Homo sapiens
aaggagtaaataattcaaaaatacttggctttcaattgaatgataattattttaacaaatttagctttctaaatatcttttacttgtgctgatttttaaaygttggtttataccccctgagcacatgctagttaaacagaagacaaaaattatgggtaataagaagaagctagcctttaaaatgtattttcttaagtcttc

SEQ ID NO: 262109 - DNA, 201 bp, Homo sapiens
actgtatactacctggagttcaatgtatcagatggatttcaaatttatgtacattttttatgtatatggtacagaaaaaaatgtgatccataagaaatcaraaaatagcgcatatgctaatagctaatgttgtcctctaaaaaacttatttttgcatttttaagagggggatatactctgacactttaataagtgtaatta

SEQ ID NO: 262110 - DNA, 201 bp, Homo sapiens
ggaagtcagcagtttgttttattcatcccttcctttctcattttctcaaatgtgtcagttaatctcagtaaccccattgcaaccttcattacctgcccaarcggtctagaacttgccagtatagaatcctacgtgggtcaagctcctgactgtctccttcttcactctttttttgcaaagaacttgtaaattttaactata

SEQ ID NO: 262111 - DNA, 201 bp, Homo sapiens
gtacagaaaaaaatgtgatccataagaaatcagaaaatagcgcatatgctaatagctaatgttgtcctctaaaaaacttatttttgcatttttaagagggsgatatactctgacactttaataagtgtaattaattattgactggaatttggcatgaggcagggccatttcagatcccattaaaggaatgacacataccag

SEQ ID NO: 262112 - DNA, 201 bp, Homo sapiens
ttgagattttcagaatcacttaaccctattatgcttggcaacctggactcagcaaaactgggaagtcagcagtttgttttattcatcccttcctttctcaktttctcaaatgtgtcagttaatctcagtaaccccattgcaaccttcattacctgcccaaacggtctagaacttgccagtatagaatcctacgtgggtcaa

SEQ ID NO: 262113 - DNA, 201 bp, Homo sapiens
agaaaaaaatgtgatccataagaaatcagaaaatagcgcatatgctaatagctaatgttgtcctctaaaaaacttatttttgcatttttaagagggggatmtactctgacactttaataagtgtaattaattattgactggaatttggcatgaggcagggccatttcagatcccattaaaggaatgacacataccagagaa

SEQ ID NO: 262114 - DNA, 201 bp, Homo sapiens
taccctcattattaacttcaaattgtttaatagaccctcatatctcagttatacagttaaaatttttgttttgtttttctggagtatcttatttataactwtgagttttactttacttatttattttattttttgagacagacgcttgctctgtcactcaggctggagtgcggttgcgtgatcatggctcactatggcctc

SEQ ID NO: 262115 - DNA, 201 bp, Homo sapiens
gtgatttcctcctctaagtcctgcacagggaaatgttaagaaataggtccaccaggaaagaaggaagtaagaatgtttgactagattgtcttggaaaaaayagttatactttcttgcttgtcttcctaacagttctccaaagcttcgtaccttggccagaggcttgtctcctgcgtacctgaggtttggtggcaccaagac

SEQ ID NO: 262116 - DNA, 201 bp, Homo sapiens
gcctcagcctcccgagtagctgggactacaggcacccgccaccgcgcccggctaatttttttttttttttttttttttttttttttttgcatttttagtaragacggggtttcaccgtgttagccaggatggtcttgatctcctgacctcgtgatctgccctcctcggcctcccaaagtgctgggattacaggcgtgagcc

SEQ ID NO: 262117 - DNA, 201 bp, Homo sapiens
tgcttaaattagatacatatttctattaagttaacctctttgcttttagtccaaggtataaagaaggagatttaactctgtatgccataaacctccataaygtcaccaagtacttgcggttaccctatcctttttctaacaagcaagtggataaataccttctaagacctttgggacctcatggattactttccaagtaag

SEQ ID NO: 262118 - DNA, 201 bp, Homo sapiens
cagtgcctctgtaaatagcactgcctggttagagttgaatttcagataaataatttttttcatgttaattatttttcttttctttacttttttttttgtttgtttttttgttttttttttgagacagggtctcattctgttgcccaggctgctgtgcaatggcatgatcatggctcactgcagccttgacctccctgggct

SEQ ID NO: 262119 - DNA, 201 bp, Homo sapiens
aatacttaaactctgatcattcttgacagatatcccctacaggctatggccttttgaattgtgtcctccagtgataaaaagcagcaagcacgatactgctytcagattcatggtggtcacatgtgaggtgaaaaaaaaaaaaaagatgaatcctatttaaatgcccccaggataacagtgatactctttgtaggataacta

SEQ ID NO: 262120 - DNA, 201 bp, Homo sapiens
agtctggaaaggattgggaataagataatgaattgtaagttttaaattgttcttcgtattttggggaaggagtaggctaggtggtccttctgttttttttktgtttttttttttaaagtagatgtggccagacgtggtggctcacgcctgtaatcccagcactttgagaggctgaggcaggtggatcacttgatgtcagga

SEQ ID NO: 262121 - DNA, 201 bp, Homo sapiens
gcacatgttgtggtcccagaagctctgatggtaccaaattcaaagcgaaaaaaagtcaacggttcccacccatcctacctcccatgatggcaagaggaaawcaccacactgcagatacagtccatgtaaaacaaattgctatggattttgaaagtgaaccttaagagaactgcactatgttttcttcattagagttctctg

SEQ ID NO: 262122 - DNA, 201 bp, Homo sapiens
ttcaccatattgggcaggctggtctcgaactcttgacctcaggtgatccacctgcctcagcctcccaaagtgctgggattacaggcatgagccactgcacycagcttaaatagctaatatttaatattattctatagttattcaagtaattcaggccaaagacttagaaacaaaacaaaaagccacttttaaggagaaagg

SEQ ID NO: 262123 - DNA, 201 bp, Homo sapiens
gatacagtccatgtaaaacaaattgctatggattttgaaagtgaaccttaagagaactgcactatgttttcttcattagagttctctggtaatttccagcttttttttttttttttttttttagacagtgtctcgctttgtcgcccagtgtcacccaggctggagtgcagtgacgtgatctcggctcactgcaacctccgc

SEQ ID NO: 262124 - DNA, 201 bp, Homo sapiens
atacagtccatgtaaaacaaattgctatggattttgaaagtgaaccttaagagaactgcactatgttttcttcattagagttctctggtaatttccagcttttttttttttttttttttttagacagtgtctcgctttgtcgcccagtgtcacccaggctggagtgcagtgacgtgatctcggctcactgcaacctccgcc

SEQ ID NO: 262125 - DNA, 201 bp, Homo sapiens
tacagtccatgtaaaacaaattgctatggattttgaaagtgaaccttaagagaactgcactatgttttcttcattagagttctctggtaatttccagcttttttttttttttttttttttagacagtgtctcgctttgtcgcccagtgtcacccaggctggagtgcagtgacgtgatctcggctcactgcaacctccgcct

SEQ ID NO: 262126 - DNA, 201 bp, Homo sapiens
gccactgcacccggccagtaatttcaagcttctgaggagccctttgaattgttaaataacttgtagctatgtccaacatatccatgttcagtgtatgttcratatttcttaggaaacctgcccttggttgttttctttgtggtaattcatgagccggcaaatttgacatgtgttacagaatataccttttctctgctctcc

SEQ ID NO: 262127 - DNA, 201 bp, Homo sapiens
ggatcttggctcactgcagcctctgcctcccaggctcaaggcatcctcccacctcggtctcccgagtagctgggaccacaggcacacaccaccacgcccarctaagttttcgtatttttagtagaggcagggttttactatgttgtccaggctagtctcaaactcctgagctcaagctatccatctgccttggcctcccaa

SEQ ID NO: 262128 - DNA, 201 bp, Homo sapiens
caaggatctctccactctttatacagtaagagatgagagtctggaaaggattgggaataagataatgaattgtaagttttaaattgttcttcgtattttgrggaaggagtaggctaggtggtccttctgttttttttttgtttttttttttaaagtagatgtggccagacgtggtggctcacgcctgtaatcccagcactt

SEQ ID NO: 262129 - DNA, 201 bp, Homo sapiens
ctttaagttcttcctccctctctttcatctcttgtaatttattaatgtgaaaaaacaggtaatttgttctatagtatttcctacattatagagtttgctamatttattccctatgatatcatttagcatgttcctctgtcccctgtgtttcctgtaaactggtagttatacctagaagcttgagtttattcaggtttttaa

SEQ ID NO: 262130 - DNA, 201 bp, Homo sapiens
ggtcctgcatagtaagactttaataaatatttaaatgaacatctggtttttttaaaaaaaaaatagagacaaggtctcactatattgcccaagctggtctygaactcctggactcacgcaatcctgctgccttagccgcccaaagtgctgggattacaggcatgacccacctcatctgggctgagtgaacatatttttaac

SEQ ID NO: 262131 - DNA, 201 bp, Homo sapiens
ccacatagcctctgtagacattttttctttcttctttttttttttttttttttttctgagacagagtctcactctgttgtccaggctagagtgcagtggcrtgatctaggctcactgcaacctccgcctcctgggttcaagcaattctcccacctcagcctccctagtagctgggattagaggcatgcatcaccacgcctg

SEQ ID NO: 262132 - DNA, 201 bp, Homo sapiens
caaagtgctgggattacaggcatgaaaaactgcacccagccctaaaaattattagggtcctgcatagtaagactttaataaatatttaaatgaacatctgktttttttaaaaaaaaaatagagacaaggtctcactatattgcccaagctggtctcgaactcctggactcacgcaatcctgctgccttagccgcccaaagt

SEQ ID NO: 262133 - DNA, 201 bp, Homo sapiens
taggtgagtcttggggggtcgcattaaacattataccaatgtatcttacatttctaagaaagttttactactttacaggatctttctgttaccaaaatggwaggtttccaactccaggacttggctttcatagttcctacaccaggggaaatgccttcctttgctaactatgcaaccaggttagttagtgtaagtccagcc

SEQ ID NO: 262134 - DNA, 201 bp, Homo sapiens
atagacaatgttttgttcccctaaattctctttgatgagtatatattacttacactcttctgtctttaaaattttgcaaaatagtatcctagataagtttwtgagtgcacagtctgtacgcttactcatattaatgacctcggagagttaaacaacagtcacctttaaaaattattactatcattatcattatttttgagg

SEQ ID NO: 262135 - DNA, 201 bp, Homo sapiens
aaagtgctgggattacaggcatgaaaaactgcacccagccctaaaaattattagggtcctgcatagtaagactttaataaatatttaaatgaacatctggtttttttaaaaaaaaaatagagacaaggtctcactatattgcccaagctggtctcgaactcctggactcacgcaatcctgctgccttagccgcccaaagtg

SEQ ID NO: 262136 - DNA, 201 bp, Homo sapiens
ggctcgaaattttcagttttcatgggcacgtcatggaaacagaaatcttctgtgtttagtttgggcacctactcattgtagtgacaaatatttcagaagcyaataggggattccacaaattgttctgaacctgtggctgagactggtaatggctgagtgacatggggacataccacaaaagaagaggtagcaaaaggctgc

SEQ ID NO: 262137 - DNA, 201 bp, Homo sapiens
tgggattacaggcatgaaaaactgcacccagccctaaaaattattagggtcctgcatagtaagactttaataaatatttaaatgaacatctggtttttttwaaaaaaaaatagagacaaggtctcactatattgcccaagctggtctcgaactcctggactcacgcaatcctgctgccttagccgcccaaagtgctgggat

SEQ ID NO: 262138 - DNA, 201 bp, Homo sapiens
agaccaacctggccaacatagtgaaacctcatttctactaaaaatacaaaaattagccaggcatggtggcgggcgcctgtagtcccagctactcaggaggyaggcaggagaattacttgaatctgggaggcagaggttgtggtgagccgagattgcgccaccgcacgctagcctgggcgacaaagtgagactctgtctcaa

SEQ ID NO: 262139 - DNA, 201 bp, Homo sapiens
gaggaatctgaacaagaggaggaggcagtgggcaggtttccttatcatgatgtttgtcatgttcagtgtgaggcctcacaaaaaaaaaaaaaaaaaaaaaaggcgtcctggatataactgagagctcattgtacagtaaatattaataaaacagtgattgtagctgaaggatagaactgcttggagggagcaagtgggtag

SEQ ID NO: 262140 - DNA, 201 bp, Homo sapiens
tcttgtatggtgcgttccacttaagtagaagatgacaaaaacatttgtcatgagaatatagactcacattttaaacctgtttgagcaggaaaaggaagcartgttacagatgtaattctgggtgtgactgcagaaaggatgactcccttattaaagtagtcatcctgagtgagctaactctttgtacttcctcttctcctc

SEQ ID NO: 262141 - DNA, 201 bp, Homo sapiens
acttaagtagaagatgacaaaaacatttgtcatgagaatatagactcacattttaaacctgtttgagcaggaaaaggaagcaatgttacagatgtaattcygggtgtgactgcagaaaggatgactcccttattaaagtagtcatcctgagtgagctaactctttgtacttcctcttctcctcctgttcccctcatcaccc

SEQ ID NO: 262142 - DNA, 201 bp, Homo sapiens
aggatctctccactctttatacagtaagagatgagagtctggaaaggattgggaataagataatgaattgtaagttttaaattgttcttcgtattttgggkaaggagtaggctaggtggtccttctgttttttttttgtttttttttttaaagtagatgtggccagacgtggtggctcacgcctgtaatcccagcactttg

SEQ ID NO: 262143 - DNA, 201 bp, Homo sapiens
tgtacattttttatgtatatggtacagaaaaaaatgtgatccataagaaatcagaaaatagcgcatatgctaatagctaatgttgtcctctaaaaaacttwtttttgcatttttaagagggggatatactctgacactttaataagtgtaattaattattgactggaatttggcatgaggcagggccatttcagatcccat

SEQ ID NO: 262144 - DNA, 201 bp, Homo sapiens
ggttgtgtctggttttgatcttgacagctactgatgaccattgcctaatccattactttattggggtggggggaataaggttttaaaataaattttttttwaagatttttttaactgttattttgagacagtgtctcatttcgtttcccaggctggagtgcagtggcacaatcacggctcactgcagccttgacctcctgg

SEQ ID NO: 262145 - DNA, 201 bp, Homo sapiens
ctgtatctggtgctaaatcaggaaatgtttcttcccaaaaagcctcgtggaagatctgtatgtctaaatatatgtcagggataatacagatgtagccctgmgaagcatgaccttgatttttatagtctaaaatgtcatttgcagatatctattttctaagaataattcctaaaagaattatttgaatgttgtaggaaagct

SEQ ID NO: 262146 - DNA, 201 bp, Homo sapiens
gtgagtgaagcagcgctggccttaggggtcagagtgcagctcttctccatccttctattctgctgaaatagctccccagccaaaaagcagatcaaagaccrtttcagtggctgagccccaaaattcatgccagattttgcaagaaaatgatttactaaagcttgagggacatctttaacaagtgttccaaattaatcacta

SEQ ID NO: 262147 - DNA, 201 bp, Homo sapiens
ggaagatctgtatgtctaaatatatgtcagggataatacagatgtagccctgagaagcatgaccttgatttttatagtctaaaatgtcatttgcagatatmtattttctaagaataattcctaaaagaattatttgaatgttgtaggaaagctaagaaattttgcaaagagcgtacgtgaaaatataagctaggcttttgt

SEQ ID NO: 262148 - DNA, 201 bp, Homo sapiens
gttagttcatttaactgccaattgactgcagttcaaataagaaacaaatagtgtctcaagtagcactgtactccaattttaatattaataaaaaaaatttwaagttattttaaataatgtagtggtttctataaagatcactttatacagaagaacagtgccaattaacccatggaacatataagtagctaaaaccaattg

SEQ ID NO: 262149 - DNA, 201 bp, Homo sapiens
ttcctgtgctcaagccatccttccacctcagcctcccagagtgccaggattacaggcatgagccaccacacccagccaccacttttcttaaaaaaaaaaaagattctctctggtagacaatcctcaatagtccacatgttattaaacaatctgctgcctgaatacatgatttaccaaaaaaaggaaattttgacgggttca

SEQ ID NO: 262150 - DNA, 201 bp, Homo sapiens
cttttaaatactgctgtatgtttgcttttaaatacaacatttctcgatatatattttgagaattgctgtctttcagaacctaacagtttccttaagaaggstgatattttcatcaatgggtcgcagttaggagaagattttattcaattgcataaacttctaagaaagtccaccttcaaaaatgcaaaactctatggtcct

SEQ ID NO: 262151 - DNA, 201 bp, Homo sapiens
tagcattatacatatttaattaagcatgagcacatcttaaaactttaaattttagatcagatctttaattcctaggatattaagaggtactggcaatttgsccaggtgtggtggttcacgcctataatcccaacactttgggagggtgaagtgggcgaattgctagagcccaggaggtggaggctgcaatggcctgagatc

SEQ ID NO: 262152 - DNA, 201 bp, Homo sapiens
gctaaagctgaaaattaaattttagatctttcaatactcttaaattttatatgtaagtggtttttatattttcacatttgaaataaagtaatttttataaycttgatattgtatgactattcttttagtaatgtaaagcctacagactcctacatttggaagccttgttttccttcactgctttgtttatacctggaaaca

SEQ ID NO: 262153 - DNA, 201 bp, Homo sapiens
gtttcaaacgaattgtttctttctaggacatggtgagcatttggtagccattcaccggttttctgtttctttggatcatagttaacctctccttttccttstggcactacaattttctggtggggaagaatccttactttctgcccttccccttaaggataggaagctgatactaggcagcaactagttgggggataggaa

SEQ ID NO: 262154 - DNA, 201 bp, Homo sapiens
accctgaaagggatacctctagcatggtaatagtcttctaggatttgttatcatatggaaagatgtaaagggagggattctgctgctgctgctgctgctgbatgcagttgccatttcatttaaatgacttatttataattgatgacacttttctggcttcctgttaattcctccctcaaagatcaataaaccagaaccagg

SEQ ID NO: 262155 - DNA, 201 bp, Homo sapiens
atgctttcttcaatcctaccccactctctttaatctagataaggtttattctttttgaatgtctagcagtgaaaccatttcccctgaaaaaccttctctawccaaccccctaccctcagcccaaggtctagattaggagtccctctgaatgtttccatagcatttttaaagaattgcctatttacttgttcgtatctatca

SEQ ID NO: 262156 - DNA, 201 bp, Homo sapiens
caaacagctgacacttcctcagttcttgtcatttgcctggccctgttctaagcaccttctaggtattaatccatttagtcttggctacaacactgtgagtractagttttgtcacccccattttaaaaatgaagaaagtgaggctcagggaggttaagtaacttggccacagtttgaaactagactctgatcacatgagat

SEQ ID NO: 262157 - DNA, 201 bp, Homo sapiens
ttagagttgaatttcagataaataatttttttcatgttaattatttttcttttctttacttttttttttgtttgtttttttgttttttttttgagacaggrtctcattctgttgcccaggctgctgtgcaatggcatgatcatggctcactgcagccttgacctccctgggctcaggtgatcctcccacctcagcctccca

SEQ ID NO: 262158 - DNA, 201 bp, Homo sapiens
tgtagagatggagtttcgccatattggccaagctggtctcgaactcctgtcctcgaactcctgtcctcaagtgatccacccgcctcagcctctcaaagtgytgggattacaggtgtgagccaccacacccagcagtgttttatttttgagacagggtatcattctgttgcccaggcttgagtgcagtggtgcaatcataga

SEQ ID NO: 262159 - DNA, 201 bp, Homo sapiens
actgcctggttagagttgaatttcagataaataatttttttcatgttaattatttttcttttctttacttttttttttgtttgtttttttgttttttttttgagacagggtctcattctgttgcccaggctgctgtgcaatggcatgatcatggctcactgcagccttgacctccctgggctcaggtgatcctcccacctc

SEQ ID NO: 262160 - DNA, 201 bp, Homo sapiens
gatatcccctacaggctatggccttttgaattgtgtcctccagtgataaaaagcagcaagcacgatactgctctcagattcatggtggtcacatgtgaggkgaaaaaaaaaaaaaagatgaatcctatttaaatgcccccaggataacagtgatactctttgtaggataactatttgcttgccactggtttcattaaataa

SEQ ID NO: 262161 - DNA, 201 bp, Homo sapiens
ccagcgctaatttaatgggtagtgtactggttaagagatggacagaccatcctggcttgactctcagctctggcaaagatgagtgacttggtttttccatrtctcttggccacaccaaccttgatttcttcagctgtagaatggaatttctcaagcttgcctcaaggattattgcccgaggatttgatgatatggtaagag

SEQ ID NO: 262162 - DNA, 201 bp, Homo sapiens
tgagtagctgggactacaggagtatcaccgcactgggctaatttttgtatttttagtagagacggggttttgacatgttgcccaggctggtctgaaacccrtgagctcaagtgatctgcctacctcagccttccaaaatgctgggattacggacatgagctaccacgcccggccacaccctgtctcttaaaaaaaaaaaaa

SEQ ID NO: 262163 - DNA, 201 bp, Homo sapiens
gttttactttaaaaatttgtctttgtgtgtacatgtgtttgtgtatgtgtgtgtgtctaaaagtttggctttgagctttgctttgaattcttggatgaacrataaccaagaatacttaaactctgatcattcttgacagatatcccctacaggctatggccttttgaattgtgtcctccagtgataaaaagcagcaagcac

SEQ ID NO: 262164 - DNA, 201 bp, Homo sapiens
gacggggttttgacatgttgcccaggctggtctgaaacccatgagctcaagtgatctgcctacctcagccttccaaaatgctgggattacggacatgagcyaccacgcccggccacaccctgtctcttaaaaaaaaaaaaaaaatgcaagttagagcatattacagctttgtctctcaggaggatacttagtgtatgtagc

SEQ ID NO: 262165 - DNA, 201 bp, Homo sapiens
ccaggaggtggaggctgcaatggcctgagatcacgccatcgtactccagcctggatgatgagaatgaaatcctgtctcaaaaaaaaaaaaaaaaaaaaaaagaagaagaagaagtattggcaatcagtgctccaggaataatttcctgacttgaaataaacctacatgtagacaaactaattaggccattccaagagttgc

SEQ ID NO: 262166 - DNA, 201 bp, Homo sapiens
tcccaaagttctgggattacaggcgtgagccaccactcctggccacaatccttttttaactatgaaatatatttttatctgaagtttgatgtttatacccmactgagggatgatgttcccatatctcagttaaagaaataacctgctcagatacttcaagctcttcttttgacttttgaaaataaatgatcttgaagttac

SEQ ID NO: 262167 - DNA, 201 bp, Homo sapiens
tctttgtaagattttactgtatactacctggagttcaatgtatcagatggatttcaaatttatgtacattttttatgtatatggtacagaaaaaaatgtgwtccataagaaatcagaaaatagcgcatatgctaatagctaatgttgtcctctaaaaaacttatttttgcatttttaagagggggatatactctgacactt

SEQ ID NO: 262168 - DNA, 201 bp, Homo sapiens
aggctggagtgcagtggcatgaccatggctcacaaagcctcaacctcgggggctcaagcaatcctcccacttcagcctcccaagtagctgagaccacaggyatatgccattattctcagctaatttttgaatttttagtagagatgaggtctcactatgttgcctagactggtcctgagttcctgggctcaagcaattctc

SEQ ID NO: 262169 - DNA, 201 bp, Homo sapiens
ccacctcagcctcttgagtagctaggattacaggcattgacaaccctgcctggctaatttttgtatttcttgtagagacagggtttcgccatgttgcccakgctggtctcaaacccctgagctcaagcgatctgcctgccttggcttcccaaagtgctgggattatagatgtgtgccatcacgcctggccattgctttctg

SEQ ID NO: 262170 - DNA, 201 bp, Homo sapiens
attatagtcaaacttctgaaaactaaagaaaattttaaaatcttgaaagctgtgagaaatacgaaaagcacaacccataataggaaaaattgaatttgcacttcatcaacaaatttttatctgttaaggaccccgttaagaagattaaaagggctgggcaccgtggctcacgcttataatcctgccactttgggaagccaa

SEQ ID NO: 262171 - DNA, 201 bp, Homo sapiens
ttatagtcaaacttctgaaaactaaagaaaattttaaaatcttgaaagctgtgagaaatacgaaaagcacaacccataataggaaaaattgaatttgcacttcatcaacaaatttttatctgttaaggaccccgttaagaagattaaaagggctgggcaccgtggctcacgcttataatcctgccactttgggaagccaag

SEQ ID NO: 262172 - DNA, 201 bp, Homo sapiens
gccatcatgcccagctcatttttgtatttttttagtagagacggggcttcgccatgttggccagactgatcgcaaactcttggccttaagtgatccgcccrcctcagcctcccaaagtgctgggattacaggcatgagccaccacgcctggcctctctgtccagttttcgatacagtgtttaaagatggacgtagcctttt

SEQ ID NO: 262173 - DNA, 201 bp, Homo sapiens
tatagtcaaacttctgaaaactaaagaaaattttaaaatcttgaaagctgtgagaaatacgaaaagcacaacccataataggaaaaattgaatttgcacttcatcaacaaatttttatctgttaaggaccccgttaagaagattaaaagggctgggcaccgtggctcacgcttataatcctgccactttgggaagccaagg

SEQ ID NO: 262174 - DNA, 201 bp, Homo sapiens
aaaaggagtacgcttgttctagattactagcaacagatttaggtctctagctccccttccctaaatgtaggtccctgaacaggagagatttagaaatgtgrgagggcatttttggttataataaactaggaggggtgactatatggatgatggccagatacagtcaatatcttgtgctgcaccagattgccctgcattaga

SEQ ID NO: 262175 - DNA, 201 bp, Homo sapiens
gtcaaacttctgaaaactaaagaaaattttaaaatcttgaaagctgtgagaaatacgaaaagcacaacccataataggaaaaattgaatttgcacttcatyaacaaatttttatctgttaaggaccccgttaagaagattaaaagggctgggcaccgtggctcacgcttataatcctgccactttgggaagccaaggcagg

SEQ ID NO: 262176 - DNA, 201 bp, Homo sapiens
cgggcaagataattctcattccacaaacacttgtttaaatggtgactcaagcggaaggttccgttctcgtggccctccttcatttattagaatgtttgatyctccccgcaatcttgtaaggcccacaaagacaatccttaagacagttaagacgctgaggaaactaaggctcctcgtcagagccagaccagaagaactctg

SEQ ID NO: 262177 - DNA, 201 bp, Homo sapiens
gcaaagatttaattcatttgaacgcagcagggacagcgcttacggactgcctgtcagcttacaatcgcccccgacagaaagattttcctgaccttcctatyttaattaacacctaccaacctcactttctatcgctttatccgcaatttttcttaatagcactcaccactaactaaccttatgcgcttgttgattgattgg

SEQ ID NO: 262178 - DNA, 201 bp, Homo sapiens
ttttcttccactaaaccccctatgccctgctacatttgtagtatcatgaaaaggcagatctgtaatcagtcttacttccaaagtgaaacttgacttacagrttagaagagatgcctgtactttttgcggtaaggtctggaatgagtgcttaggataccagtactccaattagattaacaacttcaggaaaacaccacatac

SEQ ID NO: 262179 - DNA, 201 bp, Homo sapiens
ttttttcctctcctctctcccccactgctcccctcccctacactctcctctcccctcttctctgagacagggtcttgatctgttgctcaggctggagtgcrgtggcaccatctcagcttactgcagccttgacctcccaggctcaagtgatcctcccacctcagcctcttgagtagctaggattacaggcattgacaaccc

SEQ ID NO: 262180 - DNA, 201 bp, Homo sapiens
tccaaaccatatctttgtgaatacataaaactaaatgcttttaacagtacccaagttacctctggaatgctttgttgcttacaaatttcttctgccagatkccctaaatcatctctttcaagttcaaagtttcacaaatctctagggcagaggcaaaatgccaccagtctttttgctaaaatatagcaagagtcacctttg

SEQ ID NO: 262181 - DNA, 201 bp, Homo sapiens
aacatgattacagggactttagtcatttgaccatttttcttcaggatctgaactttctttagccccaaatcccttttctcttgtatccctctatagggaargaaagctcagaatttatctaataggcagcatatccaaacatcagttgaaagactttcttttagaagtagaatattaaagttcatatttgaagtcttttat

SEQ ID NO: 262182 - DNA, 201 bp, Homo sapiens
tattctcagtcatttacttgaagaatatgtctggatttcattctgttttcttccactaaaccccctatgccctgctacatttgtagtatcatgaaaaggcrgatctgtaatcagtcttacttccaaagtgaaacttgacttacagattagaagagatgcctgtactttttgcggtaaggtctggaatgagtgcttaggata

SEQ ID NO: 262183 - DNA, 201 bp, Homo sapiens
tttatttttctttctgatattaggacaaaagagatgatgttttgattggtcttaagtcaacggctctgcggttcggagaaaataccaagccgtggctcagyggcttcagtgttgcaatgctgggggcactgagcctagtgggtgtgaacagtggacagactgctccctactacgctgccctgggtgctgtaggagcccatc

SEQ ID NO: 262184 - DNA, 201 bp, Homo sapiens
aacagtgcctgtcataatatgtgctgaagaaatagccattattatcttagaagtggggaatggagaaaattgtacttacagattgtgtatgtttggaagawaccagcctgcatggtttggttctaaataaggtgatcattacaggatttttcagaaaactaaatagtactatgttagaattcgctcaacaaatgtattttg

SEQ ID NO: 262185 - DNA, 201 bp, Homo sapiens
attggctgggaatactgtcactcattcctttgcatagaaacttcgttcatttcactgcagaagaagaaattagagcttacatttaggaaggagttgtttgmtagcctgttctgatctgttactgctgagacaccatgcagaaagcaagaatgtggcagaaattttactacaactacttgaagagcaatagcaacggccagg

SEQ ID NO: 262186 - DNA, 201 bp, Homo sapiens
ggaaaaatatcttttaagattaatcttaatatgtaatagtcataggaaatgacaagtagaggtgagagatcagatttgcagtgactacatttgatactatyacctttggtattagggaaaagtgaatttaagattttgaaatgtttttaaaaacttgataggagatagtaacaattacttgtgaatgtttctcttataaga

SEQ ID NO: 262187 - DNA, 201 bp, Homo sapiens
gggtcaaagtaacaagtttgggattatgcattttttgaggtaagatatattttactttaacataatgagtttgatgtgtgacagtagaatataaaagtgamacatgtagcaactcaaatataaacatgaagaatcaggttctcttagtagttgactataagctcattaagtaaaagtttaaattagcaaacttgttttcct

SEQ ID NO: 262188 - DNA, 201 bp, Homo sapiens
gcaccactgcacaccagtctgggtgacagagtggaaccccgtctcaaaaaaagaaaaaacacacatattctgttctttggaaatttgcttttagatgttcytaggcatcacatgttgtgccataaaggacacaacagaaataacatgagtacatatagagaaattgcatattctagatatgtgtctaagagagctattcag

SEQ ID NO: 262189 - DNA, 201 bp, Homo sapiens
tgaaccgggtagcttataagcaatagaaatctactcttggcaattctggaggctgggaagtccaaaatcaaggtgctgcaagattaggtatctcagggccmtattcctagaccacaatcttttaaccccatgtggctgaatgagtgaggggtctcttgggcctcttttataagggcactaatcccattcatgagtgctctg

SEQ ID NO: 262190 - DNA, 201 bp, Homo sapiens
gaagtaaatgccagacatttatttattgaaagtcttaactttttaatagatgaggttatttatttgtaaatagtgcagtaattaaagccttaatagcgaayataggttgtgagtttttttgtgtttgaatgtttctaaaatgcataacctccccatttccattagaaatactcagaaatgtcaggaaccacctcacacaac

SEQ ID NO: 262191 - DNA, 201 bp, Homo sapiens
gggtagcttataagcaatagaaatctactcttggcaattctggaggctgggaagtccaaaatcaaggtgctgcaagattaggtatctcagggccctattcmtagaccacaatcttttaaccccatgtggctgaatgagtgaggggtctcttgggcctcttttataagggcactaatcccattcatgagtgctctgccccca

SEQ ID NO: 262192 - DNA, 201 bp, Homo sapiens
cataaatcagtatctgaaattgtgtaatttagtatatcacacactccagagcactctcttgaagtaatctctatttcaagtgatccccttcagttctagaratttaaaggtaatgtttataaattactcaacaaaaggttttaaatccatgtaaaagaattcaagaggttgtgaaatagttctaggcttgctaagaatatg

SEQ ID NO: 262193 - DNA, 201 bp, Homo sapiens
tttaaccccatgtggctgaatgagtgaggggtctcttgggcctcttttataagggcactaatcccattcatgagtgctctgcccccatcacctaatacccyttcctccctccagcaaatgtcacctcctaataccattaccataatggttaagatttcaacataccgttttggggagtggggcacaaacagaccatagcac

SEQ ID NO: 262194 - DNA, 201 bp, Homo sapiens
aatttaaaggtaatgtttataaattactcaacaaaaggttttaaatccatgtaaaagaattcaagaggttgtgaaatagttctaggcttgctaagaatatsctttggctattttgaaaatgaagaaggccaataggatatatcttagcatccaagattaggaaaaattagtgtggaagagagcactttgatttgaggctac

SEQ ID NO: 262195 - DNA, 201 bp, Homo sapiens
ttttttttttttttttttttttagcttattgtggatatttcatataaatggattcagatatgtgatattttgtgactggctgctttcacctagtggaaaarattcatcgctgttgcaggatgtactttgttccttttaatgctaactaatttaaagaaagataaaaataaacatgctattcaagccaaacaacacatgtct

SEQ ID NO: 262196 - DNA, 201 bp, Homo sapiens; identical to SEQ ID NO: 52272

SEQ ID NO: 262197 - DNA, 201 bp, Homo sapiens
tgtcacagcaaaactgactgtggtcagtagaagaggacatgatgacctttctttaaaactctctaaaacgattttcccactggggcttgccaaagacttcrtacaacatccttacctgcaacagattcttggagaatcattgcatctgctggtcacgaaacccaagtggcggagtaccttgtattgcactctggacctggt

SEQ ID NO: 262198 - DNA, 201 bp, Homo sapiens
tcctctcaaatatgcttatcagatttttgtgttcctagagcttgccttagttgttaccagagtaccagcagcaggagcagcatctcctaagaaattggcartttgaaatgcaaattcccaagccccattctatacctacttagtcaaaaactctggcgatggcacctaataatacttggtttaacaggctattgaagtgat

SEQ ID NO: 262199 - DNA, 201 bp, Homo sapiens
gttttgtccctctcccagtcccaggcaaccaccaatccttttttttttttttttttttttttttttagcttattgtggatatttcatataaatggattcaratatgtgatattttgtgactggctgctttcacctagtggaaaagattcatcgctgttgcaggatgtactttgttccttttaatgctaactaatttaaaga

SEQ ID NO: 262200 - DNA, 201 bp, Homo sapiens
atgatttacttaaggttatattcattggttattgtagctgtaatgatgataaaatctctcctgcattcagtgctatagttagtagtggatagtcatttttmtaaagatatcttacgtttgaagatattaactattaaatctaaaggaagtaaatgccagacatttatttattgaaagtcttaactttttaatagatgaggt

SEQ ID NO: 262201 - DNA, 201 bp, Homo sapiens
aaaatacatatggagcttcaagaagtacatggcagcccagaattcagatgtgaagtgccatctagaatgaatcaagtttctgcagaaaataactcagactstaatgagggagatttttatgttgtgtaataatactgttattgcaataatttaagtgaataattcctaaaaggatatgtttttattttgctcagaaatcag

SEQ ID NO: 262202 - DNA, 201 bp, Homo sapiens
aaggaactttttccacaaagaagtgacaatgatttacttaaggttatattcattggttattgtagctgtaatgatgataaaatctctcctgcattcagtgmtatagttagtagtggatagtcatttttctaaagatatcttacgtttgaagatattaactattaaatctaaaggaagtaaatgccagacatttatttattg

SEQ ID NO: 262203 - DNA, 201 bp, Homo sapiens
tagggcagaaataaaaatgaaaaataatactaataatactacttggtaataattgatgtaaatatcttgcacagaacttaatgctcttgtgttacattagktgatttatttaaagttctattttaactgtagttattatttctctctactggcttcttgtgtaggagtctgtcctttaaaaattcatgcggaattttattt

SEQ ID NO: 262204 - DNA, 201 bp, Homo sapiens
ttaatttggaggtactatattatgaccaaatatggaaatgcttgattcttactgccagaagaaatagaatagagaataaagtttgagaagatctgaaaaaycatttatgtcttgggttcattttttttaagtaggtgtacatagcatctaacagttaaaaggtaagattagacctaggcattttagtttttatgtgcattg

SEQ ID NO: 262205 - DNA, 201 bp, Homo sapiens
aattaaataaggtttttgacacttgaatgctactttctactcactgatgttcactgtcttttagcatttgctaaaacatcagtgaacatcagtgagtagamagtagcatgtaagtgtcaaaacaaataattttgctaaacatgtgctgtgtacatttgtacgtagtatgcacataatacacacataaatgcgtgcttcaga

SEQ ID NO: 262206 - DNA, 201 bp, Homo sapiens
acaaatgtgaagacatttcaaataaattgaccaaacaagttaccatgcttactggaaatggaggtggatggaacatagaacaaccttccattctaaaccaraggtaatctttgttgaatatatttattcgtattttatctcaattatacaaaatatctgaatttatttctgtatcgtgcctagaaagtgatatggcaacta

SEQ ID NO: 262207 - DNA, 201 bp, Homo sapiens
tttttttttcaattcagtcatatgtagaacaacaaacactgggcctgatatcaagagaactgtctagtattcattataatacatttttgcctttgttttayattaaattgattttttgctatttctgtgcaaagtttgagtgtgctgctctgctttaaaaggtggtgggcccaggaaaagaaaattatcttcttcttcaga

SEQ ID NO: 262208 - DNA, 201 bp, Homo sapiens
gcctcacttttatatgagttcttcgaatatggccccatggtggaagttgaaattagaatttagggcatccataggtcagaacggttgctattggaagagcratgtcagtgattcagtcctatgataaactttgaggctatttgggcagacattttcattcattccagtattccctcaaaatattgatcatctactgtgagc

SEQ ID NO: 262209 - DNA, 201 bp, Homo sapiens
gttttggggagtggggcacaaacagaccatagcaccccctttgttgtttgccatagaaaaattttagatttttatgtggtcaccttgttcatcctttcctmtaagtcttctgcattccgcattaccacactataaatatactcattcatattttcctctagtatgtctgttaattttaaaaattatgataaaatacacata

SEQ ID NO: 262210 - DNA, 201 bp, Homo sapiens
cgggtaaagggtactggataaacttgggatataagattgtcttcttttatgcataccactcataccactggtgggaaatttcatttggaattactccctakggccatggagtcttcctgcatatgctaataatgtaagttcccattacctttggtaataagaaaatatctttaaaacaagttagcttttcctattgttttt

SEQ ID NO: 262211 - DNA, 201 bp, Homo sapiens
agtggggcacaaacagaccatagcaccccctttgttgtttgccatagaaaaattttagatttttatgtggtcaccttgttcatcctttcctctaagtcttstgcattccgcattaccacactataaatatactcattcatattttcctctagtatgtctgttaattttaaaaattatgataaaatacacataagaaaattt

SEQ ID NO: 262212 - DNA, 201 bp, Homo sapiens
ctcatttgaaatatgggaagctataataggagaaaaataggggattttagtttcttctgaaatctaaaattactgagcagtataaaaacagtatattagawtgatgtcatgcaagcaatatatgcatatgttcttgaaaagattcagacaattcagaaatagagtaaaaattaagagcccctatcccatttatctcgagca

SEQ ID NO: 262213 - DNA, 201 bp, Homo sapiens
cactataatgaaataacattagtaatacattaaaaatgttttttgctcctctaaaaatatttttagttctgagccatctgaagatgaagagtcccaaggcyttcctaccatggcacgtagaaatgatgatatttcagaactggaagacctttcggaattggaagaccttaaagatgctaaacttcagactttgaaggaact

SEQ ID NO: 262214 - DNA, 201 bp, Homo sapiens
aatgtgaattttttttttttttttttttgtggaaacaaatgtagacatgagggctaaagtattttaaagcagtaataaggaaagagcttctaatagaatamacatggagtattaaaatattcaacataaagggccaaatctcagtttaaaaatactttcacttgattgccaatttttaatgtagttcagagtttttttctt

SEQ ID NO: 262215 - DNA, 201 bp, Homo sapiens
tgtaagacaaaggttgccgtgagccaagatggcaccactgcacaccagtctgggtgacagagtggaaccccgtctcaaaaaaagaaaaaacacacatattstgttctttggaaatttgcttttagatgttcctaggcatcacatgttgtgccataaaggacacaacagaaataacatgagtacatatagagaaattgcata

SEQ ID NO: 262216 - DNA, 201 bp, Homo sapiens
tttgatcaggtaataaactatcctttccattagactgaggattttttaaatgaaatacttaatagatgagaaaaatagttgttgttgttgtttttttaagwgcttgttggatcttatccaaagtacaacttctaaaacctatatggatagtctctttaaagtttatttaagtgcacttttaggggttagaatttgttgtct

SEQ ID NO: 262217 - DNA, 201 bp, Homo sapiens
ctcaagtgatccacctgccttggcctcccaaagtgttgggattaccgcacccagactcctttatgtttcaccctttcttttgacttaaatttgaaatgggkttttttccctcattttgtcttagaatgatgtattagaaactactctttaatcttatatttagtgtattgtttgtcttttctagggtatttattagagagt

SEQ ID NO: 262218 - DNA, 201 bp, Homo sapiens
tttttgaagtgctaagaatagattggatattttgtatatttccaagttattctaggataaatatggaaaatgtatattgctataaactgtattttatttarttatcttagtatatccaaaaagcacttaattactattgcttgagctttttgctgaacttagaaatactgtgatcacagtgattacttagagttgttaatg

SEQ ID NO: 262219 - DNA, 201 bp, Homo sapiens
tgtggcagaaaattgcctttgacttgattctttattttgaagaatttgatacttcagagaaattttaaaagtttaaaacaagctatattgatctaagaaamacagtttggactcggagcagtcaaaaatgaggatattgagaagtttctagggtcctgtcctgatgatctaaccacagaaaacattcagcaacttgctgct

SEQ ID NO: 262220 - DNA, 201 bp, Homo sapiens
ttgtaatttagacaaatctaacagaacagcaaacatatatacacattaatactttatatttttataacaaatatttcaatgtaataaaaccatttcatgtsctgatcaaaacaccttaccataatttgtcattttgaataaagcaattttatttaaattttaaaaatctgtgtagttttttaaatttcctcatcacttttt

SEQ ID NO: 262221 - DNA, 201 bp, Homo sapiens
tcagatttgcagtgactacatttgatactattacctttggtattagggaaaagtgaatttaagattttgaaatgtttttaaaaacttgataggagatagtmacaattacttgtgaatgtttctcttataagagaatagctgccagggtcaaagtaacaagtttgggattatgcattttttgaggtaagatatattttactt

SEQ ID NO: 262222 - DNA, 201 bp, Homo sapiens
acaggcacgtgccaccacaccggctaattttttgtatttttggtagagatggagttctgccatgttgcccaggcgggtcttgaaatcctaggctcaaacartgctcttgccttggcctcccaacatgctgggattattggtgtgagccaccacaaccggccagtttattgttttttggcagttaaaacttaacacttcact

SEQ ID NO: 262223 - DNA, 201 bp, Homo sapiens
taatctatcactacaggtcttttctttgcctctcattctgttttcttctgacagtgagaaccctgacttctaccagtatcagtatattttactaatctgtkcagtcatcaagtatgcataaaatagttttagaatagctacacccatactacttgaccattgagggtatacagtcaatgcacttggattattaattaatta

SEQ ID NO: 262224 - DNA, 201 bp, Homo sapiens
tttataaagattcagtgtgcttcagcttcactttgaatatatccacttagtataatctaacattggttttcttaataatggttgtgtgacttacatgttargaatcttcacagtacacattttactttttatctgtttctcagaaaatattgactgttatttatcactaaactcataatatgcttaggcactaaccttcaa

SEQ ID NO: 262225 - DNA, 201 bp, Homo sapiens
attagcatctgttgatgctacatgtctggatccataattcattagccattgcaaaattaatactttttattttatttttttttattttgagacagtctctygctctgtcactcaggctggagtgcagtttcgtgatcttggctcactgcaacctctgcctcctgggttcaagaaattcttgtgcctcagcctcctgaatag

SEQ ID NO: 262226 - DNA, 201 bp, Homo sapiens; identical to SEQ ID NO: 52262

SEQ ID NO: 262227 - DNA, 201 bp, Homo sapiens
agtcctattcgctagccagctttcactcagtagttgtagtatctattgatttttgtcggattaatttatgataatgatggtgggaaaatgtggtatactamccagtgttctagaacttaacacttgtatttggtagtctgtaatgttcctttttctccccatttgtgcttttatttatgtggtacaataaatatcaaaatg

SEQ ID NO: 262228 - DNA, 201 bp, Homo sapiens
tgggacattgcccttaaaccattcagtggatattaaacattcactgtgtctaagcaataaccaaaattatatcctttccatgcaatgcaaaaagtcttccrtattaatgtgtattgtatatgaactagcaatgaagatctatccactgctcagtaaagtaagttatagcatcatttggagattataatcaattctgtcatt

SEQ ID NO: 262229 - DNA, 201 bp, Homo sapiens
tccttactgatctttggttgaaagcaacccattttcttccttttctttacttttttttttgagatagacttttgctcttgtcgcccaggctggagtgcgayggcatgatctctgctcactgcaccctccgcctcccaggttcaagtgattgtcctgcctcagcatcctgagtagctgggattacaggcacctaccactacg

SEQ ID NO: 262230 - DNA, 201 bp, Homo sapiens
ccttactgatctttggttgaaagcaacccattttcttccttttctttacttttttttttgagatagacttttgctcttgtcgcccaggctggagtgcgatrgcatgatctctgctcactgcaccctccgcctcccaggttcaagtgattgtcctgcctcagcatcctgagtagctgggattacaggcacctaccactacgc

SEQ ID NO: 262231 - DNA, 201 bp, Homo sapiens
taaatgccatagtgtttgttcatttgttttatagtttgttagtttgaattaagatccaagtaaggtccacttattaagattgcttgataggtcttttaatstgtagattcctcatccctctctctctcccccttctgtttttccagtttttggtaaagaaactgggtcatttgttctataactctcctgtctaaacttttc

SEQ ID NO: 262232 - DNA, 201 bp, Homo sapiens
tttgttagtttgaattaagatccaagtaaggtccacttattaagattgcttgataggtcttttaatctgtagattcctcatccctctctctctcccccttstgtttttccagtttttggtaaagaaactgggtcatttgttctataactctcctgtctaaacttttctgattatacctccccagtgtagtttaacatgttc

SEQ ID NO: 262233 - DNA, 201 bp, Homo sapiens
acttttgattcatgtgatatctctccgtgtgatagtctgtttagaagtaaagtatcaagtgacaaataattagagttttgaaaacttgaggggctatactytgatgatagatgtggaaaaatatcttttaagattaatcttaatatgtaatagtcataggaaatgacaagtagaggtgagagatcagatttgcagtgacta

SEQ ID NO: 262234 - DNA, 201 bp, Homo sapiens
actttgaaggtcctctgttactatggtaagaatatgtcattctgcttttaactttggaaattaaaaataaagtacagcacaataaatagtcatgtgtttaktgtttttaaattctaggttctcaagaagaacgtaaacaaattagatttaacattcatagtagatatgaagattacaatgtaattgtgaccacgtaagtat

SEQ ID NO: 262235 - DNA, 201 bp, Homo sapiens
gcctccatgcccagctaattttttgtatttttagtagagacggggtttcaccgtattagccaggatggtcttgatctcctgacctcgtgagccaccgcgcstggcctctccttaccacttttcctagaagttttcctctatcttgttaaagctgtttatatgtgtttttcccagtgtgtattttatttgctagaataagga

SEQ ID NO: 262236 - DNA, 201 bp, Homo sapiens
ttgactataagctcattaagtaaaagtttaaattagcaaacttgttttcctcataaagaaatcaggattgcctttctctttcctagatctgaactattcarttatttttctttttatgctatagttcacaaagatgtccaaaactaatggcttatcagaagatttgatatggcactgtaaaacactgatccaagaaagaga

SEQ ID NO: 262237 - DNA, 201 bp, Homo sapiens
tgctgcgaagaacatgattttgttcttttttattagcctcttacatagcataatgctttcagatatactacaatgttcattcatgttgtggtgtgtatcartacttcattcttttttatgacttagtgatattccattttatgtgtttaccacaatttgtccatgacgcacatttgatatattaacaaatgaacaactgaa

SEQ ID NO: 262238 - DNA, 201 bp, Homo sapiens
cacaaacgtgagcatgcacacacaggcacggagtggcctggacatgttaagtaggaagttttgtgtaaaactttgtaattaaaatagcaaaaacctagaawatactgtatatatgtgattgtgttttaatttttcctttatagtaagaatgagtcaacctgatacattttaaaatatgcttaaaattcagaccttttacat

SEQ ID NO: 262239 - DNA, 201 bp, Homo sapiens
ttaaattagcaaacttgttttcctcataaagaaatcaggattgcctttctctttcctagatctgaactattcaattatttttctttttatgctatagttcrcaaagatgtccaaaactaatggcttatcagaagatttgatatggcactgtaaaacactgatccaagaaagagatgtagttataaggcttatgaacaaatg

SEQ ID NO: 262240 - DNA, 201 bp, Homo sapiens
caattacttgtgaatgtttctcttataagagaatagctgccagggtcaaagtaacaagtttgggattatgcattttttgaggtaagatatattttactttmacataatgagtttgatgtgtgacagtagaatataaaagtgaaacatgtagcaactcaaatataaacatgaagaatcaggttctcttagtagttgactata

SEQ ID NO: 262241 - DNA, 201 bp, Homo sapiens
caagtgccggggttacaggcgtgagccactgcatctggtcctttgctttgtttaactggtgatttctgtaaaatacctggcctaaattggccacttaaagsatggtaatacatatttcttccttctgaataaggtggcaccagtgaatttatttgtaagattactatatattcaggctttgttttaatttgtgtaagtttg

SEQ ID NO: 262242 - DNA, 201 bp, Homo sapiens
tattagtcaaaatttaaatattgtttttaaatttttcttcataattttttccattttacttacagtttttctgcataatagcagtaatgtaggtgcctatygtgagaaaacctcatcattaaatcaagtagggttcagaaatacagcaagccaaaaatgtcattagtttaaaaacttgtactgttattgtggtaaaaattg

SEQ ID NO: 262243 - DNA, 201 bp, Homo sapiens
tgattaatttttttctttaaaaagtggtgagaattttgatttttagattggaaacaatgaatgaaatttgagattttagcacatgattataactaacaacwgattcgttttccagttgctcaaaatatttttctcctttttattctcttgcagaagattctagtgttccagaaactccagataatgaaagaaaagcaagta

SEQ ID NO: 262244 - DNA, 201 bp, Homo sapiens
caattacaataactactgaacactttgcctgcagtattttctcatttatctcctaaaaacaaggtcattcattcatttgcatattaacagtaatatttcamacccagaaataccaattaacactagtacagtactattatctaatatacttttcatatttcaattttgccagttataccagtaatgtcctttagagcattg

SEQ ID NO: 262245 - DNA, 201 bp, Homo sapiens
gaatcaagtcattttaacatgtttattggaaacactctgagctaggcactgttttatgattagaaatacaacagtgaacaaaccatccccagctttctttytgccctcacacagcttatattctagtcaggtagaaaagtaataaaagatgtagtgtgtcaaaagataagtgttatgggcaaagggaagaggaatagggag

SEQ ID NO: 262246 - DNA, 201 bp, Homo sapiens
aagtgccggggttacaggcgtgagccactgcatctggtcctttgctttgtttaactggtgatttctgtaaaatacctggcctaaattggccacttaaagcmtggtaatacatatttcttccttctgaataaggtggcaccagtgaatttatttgtaagattactatatattcaggctttgttttaatttgtgtaagtttga

SEQ ID NO: 262247 - DNA, 201 bp, Homo sapiens
tggggtcccgcacagatgggacatgtcttaggaggaatcctgggctgcaggcattccttggcctagtggtcagatttctggcacttgtagcaagctcctgkgggaggaggttctggaggaacgcctgtccgctgcagttcaggcatttggaagttcttgtgtgctggagatgtggctggggtttgtctcacagtggaggcc

SEQ ID NO: 262248 - DNA, 201 bp, Homo sapiens
tctcatagtcttcctgaagtgtcagaaagtaggactttattgttaaagtgttcaattgacaggcattagctttagttctcatttttaatacagtaaagatytaaatttttagttttatgtatttttagatttgtgatacatcagcaaaactgtaaaatcagagtctaaagtacctctatacttactatataggagtttgga

SEQ ID NO: 262249 - DNA, 201 bp, Homo sapiens
ggtaatccacccacgtcggcctcccagagtgctgggattacaggtgtgagccactgcacccggctggtttttctttttcttcatgacattatttattttcyatcacttgtatttcctgtagtctggaagataaatccaagccatagtgatattcattgtcagcatcaatatttattacatcatgaggcacatgaatttgtt

SEQ ID NO: 262250 - DNA, 201 bp, Homo sapiens
tttttttttttttttttagcttattgtggatatttcatataaatggattcagatatgtgatattttgtgactggctgctttcacctagtggaaaagattcrtcgctgttgcaggatgtactttgttccttttaatgctaactaatttaaagaaagataaaaataaacatgctattcaagccaaacaacacatgtctgtgaa

SEQ ID NO: 262251 - DNA, 201 bp, Homo sapiens
gggaggccgaggcaggaggattgcttgagaccaggagttcaagaccagcttgggcaatgtagtgagaccctgtctctacaaaaaatgaaaaaattagtcasgtgtggtggtgtgcacctgtagtcctagccacttgggaggttgagacagaagaattgattgagcccaggagtttgaggttatggtaagctgtgatcacta

SEQ ID NO: 262252 - DNA, 201 bp, Homo sapiens
agattaatactaattttccttgataagtctgttacactaaaaggttctatgatttagatattttatcaggtataaacagttttattaaacttttctcatcrtattattaattatttttattttgaagtatactgtgttttgttttgttttaaggaacctacacattgtgaggctaaccctgacctgatctttgaagatatg

SEQ ID NO: 262253 - DNA, 201 bp, Homo sapiens
gcccggctaattttttgtatatttagcagagacggagtttcaccatgttggctaggctggtctcaaactcctgaccttgtgattcacctgcctcagccccscaaagtgctgggattacaggcgtgagccaccactcccagcttattgtacatttttaaatgactaaaataactggattgtttgaaacacaaaggataaatg

SEQ ID NO: 262254 - DNA, 201 bp, Homo sapiens
agaaagagatatgagaggtttcaaagtaatgaagggcagggtttagatccctgatgggaatgagataagatgaatggtaagatttttatgcgcggtggctraagcctgtaatcccagcactttgggatgcaaaggtgggcaaatcacctgagatcacaagaccagcctggccaacatagtgaaaccccgtctctactaaaa

SEQ ID NO: 262255 - DNA, 201 bp, Homo sapiens
tgagataagatgaatggtaagatttttatgcgcggtggctgaagcctgtaatcccagcactttgggatgcaaaggtgggcaaatcacctgagatcacaagmccagcctggccaacatagtgaaaccccgtctctactaaaaatacaaaaattagccaggcatggtggagcgtgcctgtaatccctgctgctcaggaggctg

SEQ ID NO: 262256 - DNA, 201 bp, Homo sapiens
ccagcactttgggatgcaaaggtgggcaaatcacctgagatcacaagaccagcctggccaacatagtgaaaccccgtctctactaaaaatacaaaaattasccaggcatggtggagcgtgcctgtaatccctgctgctcaggaggctgaggcacaagaattgcttgaacctgggaggcagaggttgcagtgagcctagatc

SEQ ID NO: 262257 - DNA, 201 bp, Homo sapiens
ggctgaggcacaagaattgcttgaacctgggaggcagaggttgcagtgagcctagatcacaccactgcactccagcctgggggacagagactgtatctcaaaaaaaaaaaaaaaaaaaaaaggtaaatgtctttaagaattcaaataagaatcgaaggtctggctgggcacagtggatcacccctgtaatcccagcacttt

SEQ ID NO: 262258 - DNA, 201 bp, Homo sapiens
aatatgtttcaggattattgaaaattgagcgttcttttgtttttttttttttttttgagacagtttcactctgtcacccaggctggagtgcagtggcgcartctcaactcactgcaatctctgctctcgggttcatgccattcttctgcttcagcctcctgagtagctgggactacaggtgcccgccaccacgccgggcta

SEQ ID NO: 262259 - DNA, 201 bp, Homo sapiens
aaaattttagatttttatgtggtcaccttgttcatcctttcctctaagtcttctgcattccgcattaccacactataaatatactcattcatattttcctmtagtatgtctgttaattttaaaaattatgataaaatacacataagaaaatttaccatctcaaccatttttaagtgtacagttcagtacattcagttcaat

SEQ ID NO: 262260 - DNA, 201 bp, Homo sapiens
gatctctctcactgcaacccccacctcctgggctcctgagtagctgggacctcctcctgactcagcctcctgagtagctggtaccacaggcatgcatcacsacgcccagctaatatttgtatttttggtggagacagggtttcaccatgttgcccaggctggtctcaaactcctgacctcaagtgatccacctgccttggc

SEQ ID NO: 262261 - DNA, 201 bp, Homo sapiens; identical to SEQ ID NO: 52268

SEQ ID NO: 262262 - DNA, 201 bp, Homo sapiens
aaatctaagtgttcagcactattctaattctgattattgactataccagtatgttgatatattataaacggcttttactgattttatttattattattatktttttgagatggaattttgctttgttgcccaggctggagtgcaatggcgtgatcttggctcgctgcaacctctgcctcccagattgaagcaattctccca

SEQ ID NO: 262263 - DNA, 201 bp, Homo sapiens
agcactattctaattctgattattgactataccagtatgttgatatattataaacggcttttactgattttatttattattattatttttttgagatggarttttgctttgttgcccaggctggagtgcaatggcgtgatcttggctcgctgcaacctctgcctcccagattgaagcaattctcccacctcagcctcccta

SEQ ID NO: 262264 - DNA, 201 bp, Homo sapiens
tttttttgccccacctgcctttcttggccacatcttggttattttctctaacttatagtcatggagaggtacaatgtgtgtgttttctggataacagtgatttttttttttttttttttgataacagtgattttgagagcagatacttaatttccttattatggaagtttaaaagaattgtttagtacctttgatcgtgta

SEQ ID NO: 262265 - DNA, 201 bp, Homo sapiens
attgtatcgtatattgttttcatggccttttttcctctctttatttttcccctgcagatagttcatttaaagcccccatccctgcaaggtggtgctttctrccaatatgaatcttttcaacctggaccgttttcgctttgagaaaaggaataagattgaggaagcgcccgaagcaacccctcaaccttcccagcctggccc

SEQ ID NO: 262266 - DNA, 201 bp, Homo sapiens
aattatagatgtgtacttattcagtggtttataatttagtactattattattcattttggtgcacaaatttctcagttttggcagctgagggcctcttcamacaggctgttgtgtttgtttgagggattcctatcattttcctttctggaacaaggtatcccagacttctacttctcctacctcaagcctgaaataaaaat

SEQ ID NO: 262267 - DNA, 201 bp, Homo sapiens
gtaaaaggaggaggctggcaacaccacagaaattttatttattctttatattttaagttagtacagcagacataacacaaggacagtgagctacaaccttstgtatctggtgttaaaaatttccattcattttcagataacctgttttttgccactttacaataactcgtaagctgtaactcttccaatgtccacaagcaa

SEQ ID NO: 262268 - DNA, 201 bp, Homo sapiens
caccacagaaattttatttattctttatattttaagttagtacagcagacataacacaaggacagtgagctacaaccttctgtatctggtgttaaaaattyccattcattttcagataacctgttttttgccactttacaataactcgtaagctgtaactcttccaatgtccacaagcaaacttcagctcatatttattgt

SEQ ID NO: 262269 - DNA, 201 bp, Homo sapiens
gtaaagtgtctgtgtaacctcctggaccacatgagtatattcagtcaccagggataagcagagctggcataagtgtgggacccaagagcaaacaacacatrataggcacaccatctactaaatatttgattccgaagagctgtttactgttttccagatattttatgtatttttttattgaggtgaaattcacatagcata

SEQ ID NO: 262270 - DNA, 201 bp, Homo sapiens
aactttggaaattaaaaataaagtacagcacaataaatagtcatgtgtttattgtttttaaattctaggttctcaagaagaacgtaaacaaattagatttmacattcatagtagatatgaagattacaatgtaattgtgaccacgtaagtattgagaaatttggggaggatggatatttatgcagcccccaaatttaaaaa

SEQ ID NO: 262271 - DNA, 201 bp, Homo sapiens
gcccgctgagacagatacagtcccaaattttatcagctagcttttgtaaagtgtctgtgtaacctcctggaccacatgagtatattcagtcaccagggatwagcagagctggcataagtgtgggacccaagagcaaacaacacatgataggcacaccatctactaaatatttgattccgaagagctgtttactgttttcca

SEQ ID NO: 262272 - DNA, 201 bp, Homo sapiens
tgagggccatatgctgaagaatatgggctccattcgctaccagcaccttatgacaattaatgtaagagaatgtttgtaaagttttccaaattactgtaaartttagattacgtaatttaatatatgtagtatttattagcagaatctgtattatgtagtttaatatatgtagtattctgtgttagcaagttttttctgtaa

SEQ ID NO: 262273 - DNA, 201 bp, Homo sapiens
aagattgttttaaatgatactgtgaattttggagaatcttgaaaactgagaagtttagattttacattgtaagtattagatatccattgaagaacttacasagtgaatggaaaatggtgaaagaaagttttaaaagtcagtttagcagtagtgactagtacacactgattgagggtagggattgaagggaaagaaaacatt

SEQ ID NO: 262274 - DNA, 201 bp, Homo sapiens
gattttacattgtaagtattagatatccattgaagaacttacagagtgaatggaaaatggtgaaagaaagttttaaaagtcagtttagcagtagtgactaktacacactgattgagggtagggattgaagggaaagaaaacatttaggcaactcctgtaattgagcttaatgatagcggtagaaatggagaagaaagagat

SEQ ID NO: 262275 - DNA, 201 bp, Homo sapiens
cggtagcacagggagcttctctttgtgggcgggcgcgaggcccgctagggggttatactggggaacgtgcctgcgcgtgcttgggtaagaggaggttgcaygagggtcagctcgtggtttcagtaaggaggggcgggcgggggaggcggacgaaggggagtgaaaagcaatggaaaattttaaaagatacccccgtccacc

SEQ ID NO: 262276 - DNA, 201 bp, Homo sapiens; identical to SEQ ID NO: 52263

SEQ ID NO: 262277 - DNA, 201 bp, Homo sapiens
ttccttttggggccattttccacaaagaaataaaggattttctaccccccacgctcctccttacccacacttagacacatttttcaatgagagttatctakgtaatcgatacatgactcatcagttgatgacttctgaacacccatctggtacagttcaaattgattacttcagtagagaacatgattacgtatcataaaa

SEQ ID NO: 262278 - DNA, 201 bp, Homo sapiens
gcactttgggaggctgaggcgggctgatcagctgaggttggaagttcaagaccagcctgaccaacatggagaaaccccgtttctactaaaaatataaaatyagctgggcatggtggtacatgcctgtaatcccagctactcgggaggctgaagcaggagaatcacttgaaccctggaggtggaggttgcagtgagccgaga

SEQ ID NO: 262279 - DNA, 201 bp, Homo sapiens
gaataaaattctacttcttaattctccagagtcaccagttctgactaagcactattccccatttttagaccaagtgatttgcatcagtctgcactagcttycttttggggccattttccacaaagaaataaaggattttctaccccccacgctcctccttacccacacttagacacatttttcaatgagagttatctaggt

SEQ ID NO: 262280 - DNA, 201 bp, Homo sapiens
tacaggtgcacaccaccacagccggctaatttttgtatttttagtagagacagggtttcaccatgttagccaggctagtctcaaactcctgacttcaggcwatctgcctgccttggcctcccaaagtgctgggattacagacatgagccaccacacctttattttaaaataggaccttaaaatagtccctttagccatcag

SEQ ID NO: 262281 - DNA, 201 bp, Homo sapiens
cttttttttttttttttttttttttttttagcttattgtggatatttcatataaatggattcagatatgtgatattttgtgactggctgctttcacctagkggaaaagattcatcgctgttgcaggatgtactttgttccttttaatgctaactaatttaaagaaagataaaaataaacatgctattcaagccaaacaaca

SEQ ID NO: 262282 - DNA, 201 bp, Homo sapiens
gtgcacaccaccacagccggctaatttttgtatttttagtagagacagggtttcaccatgttagccaggctagtctcaaactcctgacttcaggctatctrcctgccttggcctcccaaagtgctgggattacagacatgagccaccacacctttattttaaaataggaccttaaaatagtccctttagccatcaggtgtt

SEQ ID NO: 262283 - DNA, 201 bp, Homo sapiens
tggaagaccttaaagatgctaaacttcagactttgaaggaactttttccacaaagaagtgacaatgatttacttaaggttatattcattggttattgtagstgtaatgatgataaaatctctcctgcattcagtgctatagttagtagtggatagtcatttttctaaagatatcttacgtttgaagatattaactattaaa

SEQ ID NO: 262284 - DNA, 201 bp, Homo sapiens
catgaatggatgtacacagaagctttagaatctctaaaagtgtttgcagaagaccaaggtaattattctgggtcatagaaaatacatacttctcattatartctgtattttagtatataagaaaatggtatataagaaaagctattagctgttaatcagagggtgggattgcaaaagatgttgaaagtaatgatgtaaaaa

SEQ ID NO: 262285 - DNA, 201 bp, Homo sapiens
cctagaataaaattctacttcttaattctccagagtcaccagttctgactaagcactattccccatttttagaccaagtgatttgcatcagtctgcactakcttccttttggggccattttccacaaagaaataaaggattttctaccccccacgctcctccttacccacacttagacacatttttcaatgagagttatct

SEQ ID NO: 262286 - DNA, 201 bp, Homo sapiens
acattagtaatacattaaaaatgttttttgctcctctaaaaatatttttagttctgagccatctgaagatgaagagtcccaaggccttcctaccatggcaygtagaaatgatgatatttcagaactggaagacctttcggaattggaagaccttaaagatgctaaacttcagactttgaaggaactttttccacaaagaag

SEQ ID NO: 262287 - DNA, 201 bp, Homo sapiens
ttgttgtaacagaaagtacaataagtactcaaaagtaagtaggaatcttaagtgcattttaaatgtgcatgtatttggctgggcacagtggctcatgcctrtagagtcgcagcactttgggaggccgaggcaggaggattgcttgagaccaggagttcaagaccagcttgggcaatgtagtgagaccctgtctctacaaaa

SEQ ID NO: 262288 - DNA, 201 bp, Homo sapiens
caaacagaccatagcaccccctttgttgtttgccatagaaaaattttagatttttatgtggtcaccttgttcatcctttcctctaagtcttctgcattccscattaccacactataaatatactcattcatattttcctctagtatgtctgttaattttaaaaattatgataaaatacacataagaaaatttaccatctca

SEQ ID NO: 262289 - DNA, 201 bp, Homo sapiens
gggttccagtttctccacatcctctccaaccttgttatttcctgtgtttttgataatagccaacataatggacatgagtttgtatctcactttgggtttcrtgttgatttttaactttaaatctcctctgaattttatttcattatagggactaaagaaagggtgatatcgttttctcctttgttcattattcaccagtta

SEQ ID NO: 262290 - DNA, 201 bp, Homo sapiens
agaggatttgttgctggatttcatgtgggttgggagataaaggagtcaaggatcaccctaagatttttggcctgagcaaactggaaggatggagttactakgtactgagataaaggtgactgtttctgctgtgggtgggcaaacaccttttgaaggaaagtcagcaattcattcttgaacatgctatgattgagaacactc

SEQ ID NO: 262291 - DNA, 201 bp, Homo sapiens
atgtagtgaagatcctgcatggttaatcctgaggaaaattgtcatattttggaaaaattgtagaaaagttgcaaaaaaaaatgcattatcaactctcacartcttttcagaattacccttgttagcattttcccacaattgcattatcactcttcgtaaacagcaattacaataactactgaacactttgcctgcagtatt

SEQ ID NO: 262292 - DNA, 201 bp, Homo sapiens
aaaaaaaatgcattatcaactctcacagtcttttcagaattacccttgttagcattttcccacaattgcattatcactcttcgtaaacagcaattacaatwactactgaacactttgcctgcagtattttctcatttatctcctaaaaacaaggtcattcattcatttgcatattaacagtaatatttcaaacccagaaat

SEQ ID NO: 262293 - DNA, 201 bp, Homo sapiens
tgtaagtctaatagctttctgagtaagtaaaaatttctgaataaagtattgtattatagattggtgcatgttttctcactggtacataaaataatggtgtyaccttcattcacaggcatcttagaattctgtaaactgataatcagtgataaagtagtggggctttttgataatactgtatttgaataattttttttattt

SEQ ID NO: 262294 - DNA, 201 bp, Homo sapiens
aattacaataactactgaacactttgcctgcagtattttctcatttatctcctaaaaacaaggtcattcattcatttgcatattaacagtaatatttcaamcccagaaataccaattaacactagtacagtactattatctaatatacttttcatatttcaattttgccagttataccagtaatgtcctttagagcattgc

SEQ ID NO: 262295 - DNA, 201 bp, Homo sapiens
aactaaccagtttgtttagttcattgtcatactttcgtgtatttttttttttgtttcttacacaaaagatagcatactacatgtgtgtatattcatttgtkcttttatttacttagcatatatgtatatatctcctggaaatcatatcagttctagaaatttttattattttttgcaactccatagtactacattgtgtga

SEQ ID NO: 262296 - DNA, 201 bp, Homo sapiens
ttcaaaccttagaactaaccagtttgtttagttcattgtcatactttcgtgtatttttttttttgtttcttacacaaaagatagcatactacatgtgtgtrtattcatttgttcttttatttacttagcatatatgtatatatctcctggaaatcatatcagttctagaaatttttattattttttgcaactccatagtac

SEQ ID NO: 262297 - DNA, 201 bp, Homo sapiens
gagcctaggagttcaagacaagcctggcagaaactctggcagtagataaaatctcctgggaaacatggcaaaaccctgtctgtacaaaaaacacaaaaataaggtgtggtggcaagcacctgtggtctcagctactcaggaggctgaggtgggaggattgctagagcctgtaagacaaaggttgccgtgagccaagatggc

SEQ ID NO: 262298 - DNA, 201 bp, Homo sapiens
tatatccattagcagtcactctccagttttgtccctctcccagtcccaggcaaccaccaatccttttttttttttttttttttttttttttagcttattgkggatatttcatataaatggattcagatatgtgatattttgtgactggctgctttcacctagtggaaaagattcatcgctgttgcaggatgtactttgttc

SEQ ID NO: 262299 - DNA, 201 bp, Homo sapiens
acattaaatttcactagactccaagctcttaaaggtataaccttagagatgttttttcttttggtgacagatataactgtgcgatcagcagttctgatgaycgtagtctgtttcgacggctgaaacttaattacgcaatttttgatgagggccatatgctgaagaatatgggctccattcgctaccagcaccttatgacaa

SEQ ID NO: 262300 - DNA, 201 bp, Homo sapiens
ttataaagtattttcatactgtttatttatgttgtttatttaccttgtttactatagtatctatactgtatccctaagtcattaaaaaataaccgtaataraaattgtgaactcatttataacatgtaagtcatctagaaagtcatctgtaaccctgcccccatcaagtaactgcttagtttttttcatgttctcattctt

SEQ ID NO: 262301 - DNA, 201 bp, Homo sapiens
attgaagccagaagtctgggagtcaggcttaactcttcattcatctccccacacttaatgggttctacctcctgaagatcgtgaatcttatcagtttctcygtgtccaacacagaccactattgtctctcaactcaaagccttcttaatagttttttgctctcaagccttcttcacattactctcatagagttctttctaa

SEQ ID NO: 262302 - DNA, 201 bp, Homo sapiens
ctgttatgtctgtgttatattaggcactctgttctgtaaaaatcaatatactttaatctgtctacagcgagagagaagtgcgtatgatcaaataattactwgtctttcttgcgtagcatttatttcagggtgctgtggaagcttggggaggtgggcggtagagaaagtttgagtaagaagcaactgagatctttaagagta

SEQ ID NO: 262303 - DNA, 201 bp, Homo sapiens
aggatatattttctctctttttaaagtataatttctagttgcattgtggttttattataggtttacgaatcttagtaggaacataatgtcttagggaaagkcgtagctggtaatcaacattcctttagtaaatattttttcatgtttcaggggcttgggatacaaaaataaatgcatttgaatgagcttgcaatatagaag

SEQ ID NO: 262304 - DNA, 201 bp, Homo sapiens
ttctcctgcctcagcctcccaaatagctgggactataggtgcccgcctccatgcccagctaattttttgtatttttagtagagacggggtttcaccgtatkagccaggatggtcttgatctcctgacctcgtgagccaccgcgcctggcctctccttaccacttttcctagaagttttcctctatcttgttaaagctgttt

SEQ ID NO: 262305 - DNA, 201 bp, Homo sapiens
ggaaaatgtggtatactaaccagtgttctagaacttaacacttgtatttggtagtctgtaatgttcctttttctccccatttgtgcttttatttatgtggyacaataaatatcaaaatgaaattatagatgtgtacttattcagtggtttataatttagtactattattattcattttggtgcacaaatttctcagttttg

SEQ ID NO: 262306 - DNA, 201 bp, Homo sapiens
tcactgtgtctaagcaataaccaaaattatatcctttccatgcaatgcaaaaagtcttccatattaatgtgtattgtatatgaactagcaatgaagatctrtccactgctcagtaaagtaagttatagcatcatttggagattataatcaattctgtcatttgagaactaagaacatagtagaaattcctttagagttgca

SEQ ID NO: 262307 - DNA, 201 bp, Homo sapiens
atatagtatgggatttctgccagtgccaaatatgtctgttccaactatgattctggagatggaaaaataagcactgggtcgaatcatatcccttgggcccrctgagacagatacagtcccaaattttatcagctagcttttgtaaagtgtctgtgtaacctcctggaccacatgagtatattcagtcaccagggataagca

SEQ ID NO: 262308 - DNA, 201 bp, Homo sapiens
ttgatttttgtcggattaatttatgataatgatggtgggaaaatgtggtatactaaccagtgttctagaacttaacacttgtatttggtagtctgtaatgytcctttttctccccatttgtgcttttatttatgtggtacaataaatatcaaaatgaaattatagatgtgtacttattcagtggtttataatttagtacta

SEQ ID NO: 262309 - DNA, 201 bp, Homo sapiens
aagtccatgagtactgtattatttgagagagccaggaaagttactctaactctgaagactgaaggtatatcattaaacctgccaagataaaaacggattgyttctgtttgatctaattgggaaaggggaaaaagcaagtacttgattgataactgcatagccatattgatttgctccagcaaaaataccacatcctgtaaa

SEQ ID NO: 262310 - DNA, 201 bp, Homo sapiens
ccctcccacttaatgtacagtgttttaaatggcctagcagattttatgaaccattttctatcttcagttcataatatatggaggactccttcacatcctakaataaaattctacttcttaattctccagagtcaccagttctgactaagcactattccccatttttagaccaagtgatttgcatcagtctgcactagcttc

SEQ ID NO: 262311 - DNA, 201 bp, Homo sapiens
tcattggttaataatttaaaatcaaggtatggaaaaaaaaacaagatgattactggcctttaatagtaagctacaatcttttctgtgcccttctagggtgmtatgggatggtgtagggaaacgtgatgcagttcccacaaagaagctcttttctctgttgcatagaaagaactatatcagcaaatttcatctcctaaaagt

SEQ ID NO: 262312 - DNA, 201 bp, Homo sapiens
atttcttcttgctctgtctttttaaatgcttctaaatgttggtgttcttcaaggttttgctctcagtcttctaatctccaatttcatgtgcttttccttakgtaatctcatcagcatctttgactttgatggtcacctgtgtggcatctttttctccagcttacatctcttccctaagatacagatctttatttaactaac

SEQ ID NO: 262313 - DNA, 201 bp, Homo sapiens
ttgttctcatttttatgaacacgtgtacccaatgtttagctcccatttataagtgggaaatgtggtatttgatttttctgattccacattagcttgcttargaaatggtttccagctacatctgtgttgctgcgaagaacatgattttgttcttttttattagcctcttacatagcataatgctttcagatatactacaat

SEQ ID NO: 262314 - DNA, 201 bp, Homo sapiens
ttcctgtctaccatgatatgcaaattaagactacagattttatagtctattgttttggtaataactcttttgagacagagtctcactctgtcacccaggcwggagtgtggtggtgggatcatggctcactgcaacctctgtctcctgggttcaagcaattctcatgcctcagcctcccaagtagctgggattacagatgtg

SEQ ID NO: 262315 - DNA, 201 bp, Homo sapiens
tgcccaacctatcaggtcataaagaattttttataatgcctcaggtaatagttgaagaaggggcagcagtgatgcagaagcaggtaccatgagagtctgasacatctgcacatgcaatttatttgtgtctcttgaacctactcaagtccattctcaagtataccatttctacttgatgatgggttgctgctgccaatgctc

SEQ ID NO: 262316 - DNA, 201 bp, Homo sapiens
ttttcactattctttcctctgtttttgtagttttcctttttgcttcctgtctcttttatggtactacttaaaagtgcctatttgctttgaattaaaaagcrtcattgcagcaggaatatctttttagccattggctgttagctattttgctgttgcttacttctgaaaatagtccagataaacaaatctaagtgttcagca

SEQ ID NO: 262317 - DNA, 201 bp, Homo sapiens
taccccccaagaaagatcgaattgagttgtgtgcaatgtcggagaagcaggagcaactctatttgggtcttttcaacagattgaaaaaatctatcaataayttgggtataatctgatttttactcttttatgtgaaaaagaatcttgtactggggatgcattttgtttagtcatataatgggatttgtgcattttaaaaaa

SEQ ID NO: 262318 - DNA, 201 bp, Homo sapiens
gaagtttaaggatttcttccctctttatcaggtcataaagaattttctcttttctttcttttcgagacagagtctcatcctgtcgcccaggcatgatctcrgctcactgaaacctctgcctcccgggttcaagtgattctcctgtcagcctcccacgtagctgggattacaggcgtgtgccaccatgctcagttaattttt

SEQ ID NO: 262319 - DNA, 201 bp, Homo sapiens
gtacatcaggaatgagaagtctaggtataataatgcaaaggaaatgcatgtgattgtcctcaaatatttgaaggacaggcatagtgataaaggaagaggtktatttgcctcgttactttagagcggtttctcagagctgatctcaggaagtcaacctagaagcttttgaaatacgtacactggctaggcatggtggctcac

SEQ ID NO: 262320 - DNA, 201 bp, Homo sapiens
tgaaaattcaaagttgagtacatcaggaatgagaagtctaggtataataatgcaaaggaaatgcatgtgattgtcctcaaatatttgaaggacaggcataktgataaaggaagaggtgtatttgcctcgttactttagagcggtttctcagagctgatctcaggaagtcaacctagaagcttttgaaatacgtacactggc

SEQ ID NO: 262321 - DNA, 201 bp, Homo sapiens
tgcttacatgcagctgtaatctcagctacccggaggctaaggagggaggattacttgagcccagaaggttgaggcttcagtgagccataattatgccactrcactccagcctgggtgacacagtgagacctgtctcacaacatacaaatgaagtttaaggatttcttccctctttatcaggtcataaagaattttctcttt

SEQ ID NO: 262322 - DNA, 201 bp, Homo sapiens
cagatatgagaatccagccatcttgtattaaaccagagattttgacaaatataaaacagtgtcatctgactaaataaattacttgtggcttggatatatarttttcatgaagatgttgtaggggagccagagatcacttccaactcccgtttagctcttatatgggctcttttggctgaatctagaaaccagatcaacacc

SEQ ID NO: 262323 - DNA, 201 bp, Homo sapiens
tatctgggccattcttctgttaggtctcttttgttgttttcatagtgcatatgctctatgaagtaactttaagtaggtgataactctatatttggattggyttggaaaccagccaaaatataatgggaaagaaaatagcaatttccctaatcaatggccagaagtcttggttaatatcctaattttctgaaggatgacgat

SEQ ID NO: 262324 - DNA, 201 bp, Homo sapiens
aacattcctttagtaaatattttttcatgtttcaggggcttgggatacaaaaataaatgcatttgaatgagcttgcaatatagaagcgtgtccagtttttwaataaatgctgactcgattttttttaacttacacatactaaaaaaaaaaaaagtaaaaatcacctgaccctactactaaaaaagtatttaaatagtgaaa

SEQ ID NO: 262325 - DNA, 201 bp, Homo sapiens
gatgcttttttactttttagacaaagagcaataaatttgagaagaaatgataggacaaaggggatctggcaatgggcagcaaacttttaggggagtcactrggagacatatggggggtgtaaaactggtggaagataagtgttactttggtaagtatatttaatcaggtctgtgcaaccctcaattctcagtcactggtga

SEQ ID NO: 262326 - DNA, 201 bp, Homo sapiens
ttgctagttccttatgttgtcatggacagactacagttggagaactagcagtcagtccctggaccatattttcagtagtactttatggtaatttttttttyacagtggatttagtttgtcatatctctttaaactcatttaatctgaaactatttctcagtctttttctgtttctcaggatactgacctttgaagataata

SEQ ID NO: 262327 - DNA, 201 bp, Homo sapiens; identical to SEQ ID NO: 52266

SEQ ID NO: 262328 - DNA, 201 bp, Homo sapiens
acatgtttttcattacttcaatatattatgttaatatgtgaaatgtttggttttaagtaaataaatatttaaacattcacttttattttcaagtatggtargtatcagagatacaactgacataaggaaaaactctttgggacttaaagagtacgaaggggttctgaattggagaaatgttgtatcatagcttttcctcac

SEQ ID NO: 262329 - DNA, 201 bp, Homo sapiens
cagttataccagtaatgtcctttagagcattgctactcaaaatactgatttataaataaggaatatgtcttagaatgcaaatcagggtactgattccttcmccaagaatatcttgcagtgaaaaaaaaaaaacagctgaactaagcaatgtgctcagtaacgtagttgtttacgttctgttgctagttccttatgttgtca

SEQ ID NO: 262330 - DNA, 201 bp, Homo sapiens
aaaaagtatgatttgctttttgctgttgttcctaggactgcattgtaggaaatagagaaatgtttgtgttttggtgctctctagagcaaatagtagttgtrtagtacttggttgttgttacaggttgagtatcccttatctgaagttcttgggaccagaaatgtttctcattttagattttggaatatttgcatatacata

SEQ ID NO: 262331 - DNA, 201 bp, Homo sapiens
tgggatacaaaaataaatgcatttgaatgagcttgcaatatagaagcgtgtccagtttttaaataaatgctgactcgattttttttaacttacacatactaaaaaaaaaaaaagtaaaaatcacctgaccctactactaaaaaagtatttaaatagtgaaagcaaacccacacttcattaaccacccttaaattataacca

SEQ ID NO: 262332 - DNA, 201 bp, Homo sapiens
aaatatgtaagggtaaatggtggttttattggcaaaagggaaaataatgttggaatttaccccttggagagaagagatcttggtgtaatactttattgacytgtttttgaacagacagatgataccaatcatactagttttctagaactgccataacaaaatgctacaggttcggtgacttaagaaatttatttttcacaa

SEQ ID NO: 262333 - DNA, 201 bp, Homo sapiens
acaagtttgggattatgcattttttgaggtaagatatattttactttaacataatgagtttgatgtgtgacagtagaatataaaagtgaaacatgtagcarctcaaatataaacatgaagaatcaggttctcttagtagttgactataagctcattaagtaaaagtttaaattagcaaacttgttttcctcataaagaaat

SEQ ID NO: 262334 - DNA, 201 bp, Homo sapiens
tattaactttgtgattattagtatctgtatttacagaggaggaaattaaggcttagagaaattaataagatgaagaggtgggattggaatcttttgggctrtggtgttcatgctgtctcaagtaaaacctaagtgctacaaagtaaaagtacaagaggaaagtattagaatataaaacacaaacctatgttattttgcagt

SEQ ID NO: 262335 - DNA, 201 bp, Homo sapiens
gcctataatcccagcatcttgggaggctgaggcaggaggattgcttgagcccaggagttcaagaccagcctgagcaatatagtgggactcctgtctctgcaaaaaaaaaaaaaaaaatttttttaattagctgggcatgcttacatgcagctgtaatctcagctacccggaggctaaggagggaggattacttgagcccag

SEQ ID NO: 262336 - DNA, 201 bp, Homo sapiens
acagctgcctttaaaattgtaacttagatccctgtccttgtcagtaaacaaatccacatatatatcagcaacatcatttcagctattttatttttattagmggtctctccgggtctctgttctttctcaaatcacattgccttaaagctgagttcacaaagtttgttatagccagtagtccaggtgttgtcatatggaaac

SEQ ID NO: 262337 - DNA, 201 bp, Homo sapiens
tgacaagtccagagttcctcagactcatgttctccaaagagaataaaccttcagttttatacatttggagcaaatggctggctctcttgggcaagctttakacatcttacctgttcaagctgattataacttcatgtttcccatttacccccatttcctgagctttgaaggtagaagggtaaggattctgggtgtgaacta

SEQ ID NO: 262338 - DNA, 201 bp, Homo sapiens
tatctaatatacttttcatatttcaattttgccagttataccagtaatgtcctttagagcattgctactcaaaatactgatttataaataaggaatatgtyttagaatgcaaatcagggtactgattccttcaccaagaatatcttgcagtgaaaaaaaaaaaacagctgaactaagcaatgtgctcagtaacgtagttgt

SEQ ID NO: 262339 - DNA, 201 bp, Homo sapiens
aattttgcataatgcagtaatttttggaaatatatgtgtcacagcaaaactgactgtggtcagtagaagaggacatgatgacctttctttaaaactctctraaacgattttcccactggggcttgccaaagacttcatacaacatccttacctgcaacagattcttggagaatcattgcatctgctggtcacgaaacccaa

SEQ ID NO: 262340 - DNA, 201 bp, Homo sapiens
ccccttcagttctagaaatttaaaggtaatgtttataaattactcaacaaaaggttttaaatccatgtaaaagaattcaagaggttgtgaaatagttctargcttgctaagaatatgctttggctattttgaaaatgaagaaggccaataggatatatcttagcatccaagattaggaaaaattagtgtggaagagagcac

SEQ ID NO: 262341 - DNA, 201 bp, Homo sapiens
attgtcttttaaactttttagggcctaggaaaaactattcaagccattgcatttctggcatacctctatcaggagggtaataatggtcctcatttgatcgktgttccagcttcaactataggtttgtaatactggagacaactgtatttaactttatcatgttttatataggtagaagagagtgtgtgtaagggtgtgtgt

SEQ ID NO: 262342 - DNA, 201 bp, Homo sapiens
attttgcataatgcagtaatttttggaaatatatgtgtcacagcaaaactgactgtggtcagtagaagaggacatgatgacctttctttaaaactctctamaacgattttcccactggggcttgccaaagacttcatacaacatccttacctgcaacagattcttggagaatcattgcatctgctggtcacgaaacccaag

SEQ ID NO: 262343 - DNA, 201 bp, Homo sapiens
tcagatcccttactctctttctgtcccttctccattcaaaccttagaactaaccagtttgtttagttcattgtcatactttcgtgtatttttttttttgtktcttacacaaaagatagcatactacatgtgtgtatattcatttgttcttttatttacttagcatatatgtatatatctcctggaaatcatatcagttcta

SEQ ID NO: 262344 - DNA, 201 bp, Homo sapiens
tagaagaggacatgatgacctttctttaaaactctctaaaacgattttcccactggggcttgccaaagacttcatacaacatccttacctgcaacagattsttggagaatcattgcatctgctggtcacgaaacccaagtggcggagtaccttgtattgcactctggacctggtacagagccgtctcttaacctgggcccc

SEQ ID NO: 262345 - DNA, 201 bp, Homo sapiens
taaaagtttaaattagcaaacttgttttcctcataaagaaatcaggattgcctttctctttcctagatctgaactattcaattatttttctttttatgctrtagttcacaaagatgtccaaaactaatggcttatcagaagatttgatatggcactgtaaaacactgatccaagaaagagatgtagttataaggcttatga

SEQ ID NO: 262346 - DNA, 201 bp, Homo sapiens
ggctgctttcacctagtggaaaagattcatcgctgttgcaggatgtactttgttccttttaatgctaactaatttaaagaaagataaaaataaacatgctrttcaagccaaacaacacatgtctgtgaaccataggtggtcctgtgcctgccagtttaagtgtagattacattatttttaatctatgttatttttgacatg

SEQ ID NO: 262347 - DNA, 201 bp, Homo sapiens
aaaatcaaaactctacaaaggatatactcagatcccttactctctttctgtcccttctccattcaaaccttagaactaaccagtttgtttagttcattgtsatactttcgtgtatttttttttttgtttcttacacaaaagatagcatactacatgtgtgtatattcatttgttcttttatttacttagcatatatgtata

SEQ ID NO: 262348 - DNA, 201 bp, Homo sapiens
gtcatctgtaaccctgcccccatcaagtaactgcttagtttttttcatgttctcattcttgaaatttcttacaagaatttaaaaagtattccatttcagtrtcttaatattttataagctttctactacttcccagatagtgagaatgttttcagagtcattaaaaaaaaagactcatgccacgcatcctgttgctaaaag

SEQ ID NO: 262349 - DNA, 201 bp, Homo sapiens
aaatatttaaaatatgaacaagattccaaaaatcaaaactctacaaaggatatactcagatcccttactctctttctgtcccttctccattcaaaccttakaactaaccagtttgtttagttcattgtcatactttcgtgtatttttttttttgtttcttacacaaaagatagcatactacatgtgtgtatattcatttgt

SEQ ID NO: 262350 - DNA, 201 bp, Homo sapiens
ccaagtgccggggttacaggcgtgagccactgcatctggtcctttgctttgtttaactggtgatttctgtaaaatacctggcctaaattggccacttaaagcatggtaatacatatttcttccttctgaataaggtggcaccagtgaatttatttgtaagattactatatattcaggctttgttttaatttgtgtaagttt

SEQ ID NO: 262351 - DNA, 201 bp, Homo sapiens
ttccttggcttctctgataccacatcctacatttcttcttgctctgtctttttaaatgcttctaaatgttggtgttcttcaaggttttgctctcagtcttytaatctccaatttcatgtgcttttccttaggtaatctcatcagcatctttgactttgatggtcacctgtgtggcatctttttctccagcttacatctctt

SEQ ID NO: 262352 - DNA, 201 bp, Homo sapiens
ccatgaatcaagtcattttaacatgtttattggaaacactctgagctaggcactgttttatgattagaaatacaacagtgaacaaaccatccccagctttytttctgccctcacacagcttatattctagtcaggtagaaaagtaataaaagatgtagtgtgtcaaaagataagtgttatgggcaaagggaagaggaatag

SEQ ID NO: 262353 - DNA, 201 bp, Homo sapiens
tttcttccttctgaataaggtggcaccagtgaatttatttgtaagattactatatattcaggctttgttttaatttgtgtaagtttgataagtttgtattaaaaaaatctgcaagtacattttgagtactttgtaggctgctgccaggtatttataataatgaataagcttgggattctgtcctcagggctgtcttttggt

SEQ ID NO: 262354 - DNA, 201 bp, Homo sapiens
ttttttcctagttgttatttgtctcggtttttctctttattttcctatatacttgtcattaggtcaactctaaagtcttttccagttgcctaaatttcccrtcagattttttttttttcttttccttctttcagacagtcttgccctgtcacccaggctggagtgcagtgatgcgatctcagctcactgcaatctctgcct

SEQ ID NO: 262355 - DNA, 201 bp, Homo sapiens
tacttgcctttttcacgatattgatatttgcactcatggtgcaaaagcaatcataggtaaaattgctggtgccttagcaccacggatcaaggccaaggctmtagacggttctagtagtcaatgtattcttaaaattgtgtaaatgccagtatcacttaaagactcttgaagcagtaaaaattagtaattttattaaatctc

SEQ ID NO: 262356 - DNA, 201 bp, Homo sapiens
gagttgggtttatattatagcagttgttcacttggctggttctaaaattatgcaaatcctttgtaaagtcaagctggttcaggctgggtgcattagcttaygcctataatcccagcatcttgggaggctgaggcaggaggattgcttgagcccaggagttcaagaccagcctgagcaatatagtgggactcctgtctctgc

SEQ ID NO: 262357 - DNA, 201 bp, Homo sapiens
ggaatggtgctataatgggaactcgttggcctctgttccttgcaggttgagcactgaccgtaacaatagccagattaatcttggtgtagaaagtcttaccktgttgacttgcatgcacagactcaagcccagttgccatggccatttgtaaatgggcctattgagcaggcattcaagtggctgtggacttaactggtgttc

SEQ ID NO: 262358 - DNA, 201 bp, Homo sapiens
gtgttcatgctgtctcaagtaaaacctaagtgctacaaagtaaaagtacaagaggaaagtattagaatataaaacacaaacctatgttattttgcagtttscactaaagtcttgttagtaaacaacctgtgaaacagaaaatgtaacaccagccctggttgatgattaatttttttctttaaaaagtggtgagaattttga

SEQ ID NO: 262359 - DNA, 201 bp, Homo sapiens
ttatccagtatgaagcctgcttaagcacagactattttgtgtctgtggatatcagacctgaaaatttgtctaaatgaatcattctttcttttctttcacarctaagccagataatttgtgcttgcatataatttgtgactgtttttgctttcttttaaatttatccagtattaattgcttatctctgccctcttcattaca

SEQ ID NO: 262360 - DNA, 201 bp, Homo sapiens
gtttaaaagaattgtttagtacctttgatcgtgtataactgctttatgatttattctaaagtccatgaatcaagtcattttaacatgtttattggaaacastctgagctaggcactgttttatgattagaaatacaacagtgaacaaaccatccccagctttctttctgccctcacacagcttatattctagtcaggtaga

SEQ ID NO: 262361 - DNA, 201 bp, Homo sapiens
tcatctactgtgagctagacattgagcaaggtgcctaaagacaacctctgtacacaagggaagatcagatcacatcaagttcttgcatccacctgacttcstggatgtcctcagaatgcaaatgagtaattggtattcttcatggtgaatgaacatttttaacctcatcagcagattgtcagagacaaaagtatttgagga

SEQ ID NO: 262362 - DNA, 201 bp, Homo sapiens
tgtagtgtgtcaaaagataagtgttatgggcaaagggaagaggaatagggagttagggtcagggaatcgtttctttttttttttcttgttttttctagagrtggggtcttgctatgttgtccaggctgctctcagactcctggcctcaagcagtcctgccatctcagcctcccaaagtgctgggattacaggcgttagaca

SEQ ID NO: 262363 - DNA, 201 bp, Homo sapiens
atattttactaatctgttcagtcatcaagtatgcataaaatagttttagaatagctacacccatactacttgaccattgagggtatacagtcaatgcactyggattattaattaattaatttaaatgttttgttattcatttgaaataccattaattattttgtattccttttagggtttttcccttgttcttttctttta

SEQ ID NO: 262364 - DNA, 201 bp, Homo sapiens
agagcaagagatcggactgtctacttctgataagatgaggacttcatcttaaaatgaacttttcacatgaagctgtgataaacatgcctaattctgaaatktactccaagataaaatgtagtgaagatcctgcatggttaatcctgaggaaaattgtcatattttggaaaaattgtagaaaagttgcaaaaaaaaatgcat

SEQ ID NO: 262365 - DNA, 201 bp, Homo sapiens
tgagagctagcttttagccctgaagttaaggcagtttattcatatataggctgcaataagacatacgtcttcggtattactgatttgtattaaagaagcartttatcacagagaattttctgcaaatttatcaacatgatataagtaacacttctaactgtttaaacctgtcaaggctttgagtagtaaaacgattttttc

SEQ ID NO: 262366 - DNA, 201 bp, Homo sapiens
ctacaggtcttttctttgcctctcattctgttttcttctgacagtgagaaccctgacttctaccagtatcagtatattttactaatctgttcagtcatcargtatgcataaaatagttttagaatagctacacccatactacttgaccattgagggtatacagtcaatgcacttggattattaattaattaatttaaatgt

SEQ ID NO: 262367 - DNA, 201 bp, Homo sapiens
aggacaacacaggaaaacttagataagcagtgaaaagtttttattccattcagcagtttaaaagacattattgtccttagtgagaacagtttcactgagtkgttgtgcgaaagatgtaaaaacaataagtttgagaactccataagaaaggatgtagaaaatcagtctaataaaatctgtgaaatggaggagaatggggtt

SEQ ID NO: 262368 - DNA, 201 bp, Homo sapiens
aaaagagcaagtggtcaactctgttgttcttacaggtttttttcttctgtttttaaagtttcaagcacacaagaaaatgaaatagtatataaagaacaccygtataccttccacctagatttaacagttgttttccttatttgtttattgtgtcacctattattatttttagctgaagtattttaaattacggacatccca

SEQ ID NO: 262369 - DNA, 201 bp, Homo sapiens
aggaagaggtgtatttgcctcgttactttagagcggtttctcagagctgatctcaggaagtcaacctagaagcttttgaaatacgtacactggctaggcayggtggctcacacctgttatcccagcactttggaaggccaaggcgggcggatcgcttgagcctaggagttcaagacaagcctggcagaaactctggcagta

SEQ ID NO: 262370 - DNA, 201 bp, Homo sapiens
atattattagacctgaaaatccacctaaatgaattcctttctatcacaactaagggaatttacgtctacatttaatttgtgactgtttttgctttttaatktatccagtatgaagcctgcttaagcacagactattttgtgtctgtggatatcagacctgaaaatttgtctaaatgaatcattctttcttttctttcacag

SEQ ID NO: 262371 - DNA, 201 bp, Homo sapiens
taggtaaatgttttaagtttttatttgaagtctatctttatatttatgtatttctaatttagttactgtttttgtcttttatatacagatatgcaatatgyatcacaaagtgaggttccaaatggaaaagaagtttcttcaagaagtcaaaattaccctaaaaatgcaactaaaacaaaactaaaacagaaattttcaatg

SEQ ID NO: 262372 - DNA, 201 bp, Homo sapiens
aatttttgatgagggccatatgctgaagaatatgggctccattcgctaccagcaccttatgacaattaatgtaagagaatgtttgtaaagttttccaaatwactgtaaaatttagattacgtaatttaatatatgtagtatttattagcagaatctgtattatgtagtttaatatatgtagtattctgtgttagcaagttt

SEQ ID NO: 262373 - DNA, 201 bp, Homo sapiens
aattgccttaagaccattgttattgatatctcttaaattgttttcttttttttttctccccattagggagaggaatcaaatgagtctgcagaatctagcartaattgggaaaagcaggaaagtattgtactgaaattgcaaaaggaatttcccaattttgataaacaggtgagtagtcgtgtatgaaaatttaatcagtgt

SEQ ID NO: 262374 - DNA, 201 bp, Homo sapiens
tttcacgatattgatatttgcactcatggtgcaaaagcaatcataggtaaaattgctggtgccttagcaccacggatcaaggccaaggctctagacggttmtagtagtcaatgtattcttaaaattgtgtaaatgccagtatcacttaaagactcttgaagcagtaaaaattagtaattttattaaatctcaacttaggag

SEQ ID NO: 262375 - DNA, 201 bp, Homo sapiens
ctggttgttgtccatctgtgagctttaaaatactgttcttggaatttcagtgtgcctgggctgtaaaggtggcagtatgaattttgaagattttgaaatgktttctccagatgggtttcaccagtatgtcttattattcccctgctcaaaatcctgttgcttcttaaaaaagactaaccttaggctttattccatgttagc

SEQ ID NO: 262376 - DNA, 201 bp, Homo sapiens
tgcactccagcctgggcgacagagcaagactctgtctcaaaaaaaataaataaaataaaaattgttatgtcttcaccatgtattttgtactacagtctgtwtaagggagaaaaacaaagaaaaggtcaataaagagtcatgttcaggaagttctagttctcctaatcctcactaattaaatttttagacccccctacaggt

SEQ ID NO: 262377 - DNA, 201 bp, Homo sapiens
agtatttattagcagaatctgtattatgtagtttaatatatgtagtattctgtgttagcaagttttttctgtaaaagggaagatagtaaatatttcacacwttatggactagatggcctctgtcacgtattctttgattttgttttttaacaaccctttaaaaaattattaggtcataagccataatttacctgttctata

SEQ ID NO: 262378 - DNA, 201 bp, Homo sapiens
ttttttgtggaaacaaatgtagacatgagggctaaagtattttaaagcagtaataaggaaagagcttctaatagaataaacatggagtattaaaatattcmacataaagggccaaatctcagtttaaaaatactttcacttgattgccaatttttaatgtagttcagagtttttttcttgtaaaaatctttctaattttgt

SEQ ID NO: 262379 - DNA, 201 bp, Homo sapiens
ggaaaaataagcactgggtcgaatcatatcccttgggcccgctgagacagatacagtcccaaattttatcagctagcttttgtaaagtgtctgtgtaaccwcctggaccacatgagtatattcagtcaccagggataagcagagctggcataagtgtgggacccaagagcaaacaacacatgataggcacaccatctacta

SEQ ID NO: 262380 - DNA, 201 bp, Homo sapiens
tggaaaaataagcactgggtcgaatcatatcccttgggcccgctgagacagatacagtcccaaattttatcagctagcttttgtaaagtgtctgtgtaacmtcctggaccacatgagtatattcagtcaccagggataagcagagctggcataagtgtgggacccaagagcaaacaacacatgataggcacaccatctact

SEQ ID NO: 262381 - DNA, 201 bp, Homo sapiens
ccgtacaggcagctttagtgtaaaaggaggaggctggcaacaccacagaaattttatttattctttatattttaagttagtacagcagacataacacaagsacagtgagctacaaccttctgtatctggtgttaaaaatttccattcattttcagataacctgttttttgccactttacaataactcgtaagctgtaactc

SEQ ID NO: 262382 - DNA, 201 bp, Homo sapiens
aactttagtgatatcttgagtctacattttctctgacagcagtgttacttgtctgctaatgtgaattttttttttttttttttttgtggaaacaaatgtasacatgagggctaaagtattttaaagcagtaataaggaaagagcttctaatagaataaacatggagtattaaaatattcaacataaagggccaaatctcag

SEQ ID NO: 262383 - DNA, 201 bp, Homo sapiens
aaaaaccacctctctgataacagcccctttttaagtgtgtgacagcagtgtttatagcttactatttaaagtgaacattttagatattaattgctgttatmtaaggcagggttgcagaagtggttacagaatgttggaagaggtttaacattgcaatgtcattgttgaagcctggagtaatataccgagagtgtttgtgtt

SEQ ID NO: 262384 - DNA, 201 bp, Homo sapiens
acagaaagcatttgtaaagcagtgtaaaaacaagtgcaaaataatcagatgtgaattctctgttttcaggtgattaacttatttttaaaagagcatagacrttttctgcaagttgctaatttgagatttttaacaaaaagataaatgacttatttctaggaacttagagaagtactcaaggaacatgaatggatgtacaca

SEQ ID NO: 262385 - DNA, 201 bp, Homo sapiens
tactattagctaaatgaaactttagtgatatcttgagtctacattttctctgacagcagtgttacttgtctgctaatgtgaattttttttttttttttttktgtggaaacaaatgtagacatgagggctaaagtattttaaagcagtaataaggaaagagcttctaatagaataaacatggagtattaaaatattcaacat

SEQ ID NO: 262386 - DNA, 201 bp, Homo sapiens
aaagatgtatatatcccactatggtttataatagcaaaaaaactgtaaggagggtcaataactggctattggttaaactttgaaatatttttaaacaatcractagatttttttaaattcaagtgtcaggaaataaaagcctgcaggctaagcacagctgctgccttttttcttaaagcaaattttattggaaatagccat

SEQ ID NO: 262387 - DNA, 201 bp, Homo sapiens; identical to SEQ ID NO: 52324

SEQ ID NO: 262388 - DNA, 201 bp, Homo sapiens
gtgctcttgacttcaacacccaaacactgaaaatcatgtcaatgttacccaaagataagtttttatacagatacacaccttataagttctgatttattttyttactcattatgctgtgttctaaataaatcatgaatgagaagagtgctttattgtgaaattatttaaaactgtcctttaaaagaaaaagaggaaacgatg

SEQ ID NO: 262389 - DNA, 201 bp, Homo sapiens
aacagaaaaggagctgtcctgttcagctggactaaagacattcagacccatgatgcccattcagatacccatgaggcaatggtacagtggcagagcccttsccttttgaagacaggatcctccgtcatccactgggaagcctgcctcaggctgaggactcaggtcatgaagcacaggggctgatgttaggacaacgttctt

SEQ ID NO: 262390 - DNA, 201 bp, Homo sapiens
taaacaataatagcaaatagacataatactctgtcccaggcactattctagggccttgatgtaaattaactcatttgatccttacaaccaccctctgaggratgcagtattttttcccatttttcagatgagtaaacttaagcttagagaaagtgacttggccacagtgcagagccatcattttgagaagcaggtattcat

SEQ ID NO: 262391 - DNA, 201 bp, Homo sapiens
tatatgtgtgaaaagagaaattgtccagaatctggtaagtatgtggactccaccctgaagtacagtctttccctcaatttagctgtattttcatctagatmctttttgaattttcattagatagttattattaactgcctctacctaccaccttagattttcaacatgtccaaacacacggtcacatagccagaccataaa

SEQ ID NO: 262392 - DNA, 201 bp, Homo sapiens
acactatcccacttctaagtcacagagtggcacaggcaccctggggctagctgtctctacctgaaatgtctgaccaatgcttcaacttcactgaggcagartcaggcctgaactgccaactgaccagttatgcattagtggtgatggaaagtatgcagaggagggcacgttcgactctgtcccatgcttatcttctggttt

SEQ ID NO: 262393 - DNA, 201 bp, Homo sapiens; identical to SEQ ID NO: 52340

SEQ ID NO: 262394 - DNA, 201 bp, Homo sapiens
ggatcatgtatttatttgaggactcactatgctttctttgatcacatttttataggtacagcgtggtgttcaaacttttaatgtatggagaaaaatgaaamggctagaaaaatggcccagtacagacaattctatgctcaatccaacttgaacagaaactacaggatttggcctaaacaagactgaaagggaagcccttat

SEQ ID NO: 262395 - DNA, 201 bp, Homo sapiens; identical to SEQ ID NO: 52337

SEQ ID NO: 262396 - DNA, 201 bp, Homo sapiens
gttatgcattagtggtgatggaaagtatgcagaggagggcacgttcgactctgtcccatgcttatcttctggtttatttttccctttttacatagaaaagrttcatgaagaaattgaaagagtcattggcgccaaccgagctccttccctcacagacaaggcccagatgccctacacagaagccaccatcatggaagtgca

SEQ ID NO: 262397 - DNA, 201 bp, Homo sapiens
agaatatcagaagcataatactgtattaagttaggatagtaatggattatgtattactgtgtgtgtatatagatatatgtatataatgcacatttaatccrtatgtggcacccgtaatcaaacatagcattttacagttaacgcttggcatacattttttaatctaagttaggatagtaatggattatgtattactatgtg

SEQ ID NO: 262398 - DNA, 201 bp, Homo sapiens
ctcagattctagtttttgagcttgtccactagatctgaaaataaagcatcctttcctgagtccacttgaactaattgtgaatttgttacttaatttactgkcatcttgggaaacaagttttgctgtggcaggaaggctgttttgagagtgagcgttgagtctactctggtttgtggatgacattgcattagggttatttcc

SEQ ID NO: 262399 - DNA, 201 bp, Homo sapiens
agtcaagatatagaacatttctaccaccctagaaaaaattttcaatttccctttccaaacaatccaccctgttctaatgtctatcaccataggttcacttygtttgttccagacttcatataaatgcagctatttagtatgtattcttgtgcctggctttttcacttggcatgttttttgatatttatccacactgtagag

SEQ ID NO: 262400 - DNA, 201 bp, Homo sapiens
aggtgcgtgccaccacacccagctaatttttgtatttttagtagagagaagatttcgctatgttggccaggctggtcttactcctggcctcaagtgatccrcctgccttggcctcccaaagtgctgggataacaggtgtgagccaccatgcctgggcagcatagtgtttttaacaaacagttctgtgaaaattggaaatct

SEQ ID NO: 262401 - DNA, 201 bp, Homo sapiens
tgttttttttctttcattaaataaaggcttagctgtcatcactttgagtttgtcctcctcagttttccctgaagttaccctgaaacggggaggcaggggakgggggaggtcctttaaaatgcagtggattgtgcttaagttgagcagtgtatccagggagaggactaattacgaggtttgaaaacctcatcaggtggctgg

SEQ ID NO: 262402 - DNA, 201 bp, Homo sapiens
ctcctgggttcaggcaattctagtgcctcagcctcccaagtagctgggactacaggtgcgtgccaccacacccagctaatttttgtatttttagtagagakaagatttcgctatgttggccaggctggtcttactcctggcctcaagtgatccacctgccttggcctcccaaagtgctgggataacaggtgtgagccacca

SEQ ID NO: 262403 - DNA, 201 bp, Homo sapiens
aagtaataaggaatatatccaaaattagaaaatcagactttcaaatgccatacaggtttattttcttactgtgtgccatttgggaccaacagagcaacggstagttttaccaagagattatatttgaatgatacctgatttggtatttcatttaaagttctggaaatgggctgggcgcagtggcccatgcctataatccca

SEQ ID NO: 262404 - DNA, 201 bp, Homo sapiens
taataagaaacaattctgttctttcttactaaacagcttattcacgtgggtaaggcctagaatgtctagtgttaccagcttccccagtgaatgactattaygcccgctgccagggagcccctctgcctccctcctacctgagcagatcctgggcagttcatagtgactcagtttaggttatcagttttatccttctggtga

SEQ ID NO: 262405 - DNA, 201 bp, Homo sapiens
tttgggataggtcagttacacttttttaaactgcataatttttaaaagaagtagaactaaaataatattttattatttcatgttgttttaaaaatgtttcwttcttggcaagctaatataagagaagggatcaataatttagacaaggcatctcccctatgttcatttcagattttaataaagcagttggttttaaatctc

SEQ ID NO: 262406 - DNA, 201 bp, Homo sapiens
catctctgggaatcttattaactctgtaatttttctactgtccagattcgcctcgtcacttctggtggtatcatttaatctgctggctgctgagtgctgcygggatcatctgcattcttgtagcacacgaacactacactatcgatgtgatcattgcttattatatcacaacacgactgttttggtggtaccattcaatgg

SEQ ID NO: 262407 - DNA, 201 bp, Homo sapiens
aacggattctacgattgatttctggtggtggattgtccataactggatcacatatcttatgtggagacttcctcttcagcggtcacacggttacgctgacmctgacttatttgttcatcaaagaatgtaagtaatagcccattcccactgaactgatagctgtagtgggagggatccctgggccctgaaattgataggagc

SEQ ID NO: 262408 - DNA, 201 bp, Homo sapiens
gcttcaatcagtcctcccacctcagcttcccaaagctctgggattataggcatgagccactgtacctgtccacctgagaaattttctaagcctggattcastcttatgaaatataatactttgaaatgcacaataactttgaaaatgaaactcattgcttttcatttcaccaggagttactaactataataagctttagag

SEQ ID NO: 262409 - DNA, 201 bp, Homo sapiens
gtttgaggagcttctccttggattctttttgactttctaggttaaaaagaaaaaaaaaatcacaacctggtgtcctttctaagagtcacacaattagactraaacatgattttagccacttgtaaattcccttcttaatcttcttgtgtcattcagctcaatggagactctcaggcaaaagttcaacggattctacgattg

SEQ ID NO: 262410 - DNA, 201 bp, Homo sapiens
aatatgtcacattacctgaaactgcctgttttttcagaagtctttgatcactaccagtcttgaaagcttgagacctctgaaaatgagagacctagagtaatatgttttatgcagtaatgaagttacacctagcaagtctaggggctttatgtggagtcccactcatctcttaatccccagagcccagagctgacagaccta

SEQ ID NO: 262411 - DNA, 201 bp, Homo sapiens
attttttcccatttttcagatgagtaaacttaagcttagagaaagtgacttggccacagtgcagagccatcattttgagaagcaggtattcatgttgaagsaggctgaatccaggggttttgcttttaatttcttggctctgtttagaactttggaaattcaagctggctaactctatcgtattgccaaggaatagtctac

SEQ ID NO: 262412 - DNA, 201 bp, Homo sapiens; identical to SEQ ID NO: 52338

SEQ ID NO: 262413 - DNA, 201 bp, Homo sapiens
atggtagtgattaaatcactaaaatatgattttgatcaaaacactgaccataatacagagtttaaaaatgtaatgtatgctaacttggatacaatctgaasattccaagtcaaataggatttcagtattaatgccacaagatcattcttagagaattttggctgtattgttttttagttggtaacacttttcattacttga

SEQ ID NO: 262414 - DNA, 201 bp, Homo sapiens
catttgatccttacaaccaccctctgagggatgcagtattttttcccatttttcagatgagtaaacttaagcttagagaaagtgacttggccacagtgcasagccatcattttgagaagcaggtattcatgttgaaggaggctgaatccaggggttttgcttttaatttcttggctctgtttagaactttggaaattcaag

SEQ ID NO: 262415 - DNA, 201 bp, Homo sapiens
tggggggttggatggaaggatatatgttgctttggttctaactctaattttcccaaggaaagttccatgagtatgctatgtaagatcagtcattttctagygtagatgtacatttgagtttaggatcttctctataatctgaggatcataaaaaaattacagaagaagatggggatgagggtggaggtgggggaagaggtg

SEQ ID NO: 262416 - DNA, 201 bp, Homo sapiens
taataaaataaaaaattgtgcaccaattactacagatccttgaaacagtaagccttggattttagtcaagtaatccagtttttttttaatttaaaaaaaamcatcaccttttaaagaactttaaaaacacctgtgatgccaatgtggacattgccgctgccatgtctttacacgcatgtgtcgtatagctctgtcatcgag

SEQ ID NO: 262417 - DNA, 201 bp, Homo sapiens
tttttgaaagtactgaggatagtgaagttttttaaagtagtactctgtctcttactccaataaggaatcaataggcactttacaactgcagttaaagtggmattttcaatcacactaatcatgggcaagtttcctaagtaattaaaaccactttaaaacaaaaaagaatggtgatcattcatgcttggtttgagatctcta

SEQ ID NO: 262418 - DNA, 201 bp, Homo sapiens
gttgtgttgccagcatcccagtttcagggacagtcaccgccaagcccgaccctgcaaagggtcgtaaccggacttcggggcaaacttcaggtcccccgccygctagcccgccaaccccctccgccaggcagccggcgcgcctccaggttccgcccaggcgtcgctgagtggcggcggcggggagaatgcgcgcggcgcagc

SEQ ID NO: 262419 - DNA, 201 bp, Homo sapiens
ttcttttttgtttttgttttgcactgtaaaactgatgaaaactttaagccaatcttaatgcactagcctctgtagtgtaaggaagtgtgagaaggagtttyttaatgagtttacacgtttaaatcaagcatattataagttatatgccatgtgttgaaggcttttctatttatatatataaagatttttagtatttgtttt

SEQ ID NO: 262420 - DNA, 201 bp, Homo sapiens
ttccattctagcattccaaataattcggttaatgtgttcccctttttaaaacatttccaagtcccactttattctaatttcatcatcatctagcactttckgtgctttcataggagtcttcatggaccattttgccaataccgattattttcttctcaataagaaatgtggtggcaagaaataaaaatctctttctatatt

SEQ ID NO: 262421 - DNA, 201 bp, Homo sapiens
aggcttttctatttatatatataaagatttttagtatttgtttttagtgtccttgtgttgcaataatttaactcctttgactcagttgctgaaaatatttyttctattaagaagtgctcttgacttcaacacccaaacactgaaaatcatgtcaatgttacccaaagataagtttttatacagatacacaccttataagtt

SEQ ID NO: 262422 - DNA, 201 bp, Homo sapiens
cttttctatttatatatataaagatttttagtatttgtttttagtgtccttgtgttgcaataatttaactcctttgactcagttgctgaaaatatttcttytattaagaagtgctcttgacttcaacacccaaacactgaaaatcatgtcaatgttacccaaagataagtttttatacagatacacaccttataagttctg

SEQ ID NO: 262423 - DNA, 201 bp, Homo sapiens
attgcattcttttggaaatttactgtactgtttcaatgtgttaagtgccttgttgtaaagtaaaattttaagtctagattcattattttcctgacatatatttttcattatgatatctactgtatgctattgtgatagttttatgaaatgcttacattttaatcaaatatgtaaatttcagaagctcttttttcctaccca

SEQ ID NO: 262424 - DNA, 201 bp, Homo sapiens
aatattcatcttccctgatattttgaatctcctgctgagacacaggaagacaggaaactagactatgttcaccaaccatttgagtgattctgtgtgccatrcactagagctgctgatacataaaattcctgacatttaagtggaaatgtctgcactataagactcgcccataactcctaagtcacatcataagaatttcaa

SEQ ID NO: 262425 - DNA, 201 bp, Homo sapiens; identical to SEQ ID NO: 52322

SEQ ID NO: 262426 - DNA, 201 bp, Homo sapiens
ataaaaacacccccaggaaacttagattcagttttctaaaataactgaaaaccaactgatattaactgtattagtctgttttcacactgttgataaagacwtaaccaagactgggtaatttataaagaaaaagtggtttagtggactcacagttccacgtggctgaggaggcctcacaatcatggtggaaggcaaaaggca

SEQ ID NO: 262427 - DNA, 201 bp, Homo sapiens
ctcaactggagtttgctagacattgcaacagcaaggtgcggtaagtaggttttgaatctgctgatgacaaatgcccctcctccaagataaattttgtaaamgcaattcattggggtgaagtgaataggataagataataaggttcaaagagtaagttacaggagatagtccaggctttatccttagattatctagaaatga

SEQ ID NO: 262428 - DNA, 201 bp, Homo sapiens
tcttggcttactgcaacctccaccttccaagttcaagcgattcttgtgcctcagcctcccaaatagctgggattacaggtgcacgacaccacgcctggctratttttattttgtatttttagtagagacagggtttcaccatgttggccaggctggccttgaactcctgacctcaggtgatcctcccacctcggcctccca

SEQ ID NO: 262429 - DNA, 201 bp, Homo sapiens
aatgaagtaatactgaagataggcacgtttatttattcattatacaagacataaaggctaaatataggaaacaatatcctggcaagtctcacattctaatmttggaaaaagctggtaaatctgcaaggtgtgaataagaggcagcaatagtgacaacctattaagtttaaactattatcaagaacccagtgataactatta

SEQ ID NO: 262430 - DNA, 201 bp, Homo sapiens
ctcagcctcccaaatagctgggattacaggtgcacgacaccacgcctggctaatttttattttgtatttttagtagagacagggtttcaccatgttggccrggctggccttgaactcctgacctcaggtgatcctcccacctcggcctcccaaagtgccaggattataggcgtgaaccaccgtgcccagccgatagcagct

SEQ ID NO: 262431 - DNA, 201 bp, Homo sapiens
ccagtagactgagaacaaggatagtttggaatgcacataaaataagatcaggtccttatcactgcccccacccctgcagaaaatagtaggtagatgatctrgagagccttggctgggggatggggggtggggaagagatatggcctggcaaaatgaaaagttgcttctagacaaagacagaactcttgaagtgcttcaact

SEQ ID NO: 262432 - DNA, 201 bp, Homo sapiens
tttttagtagagacagggtttcaccatgttggccaggctggccttgaactcctgacctcaggtgatcctcccacctcggcctcccaaagtgccaggattayaggcgtgaaccaccgtgcccagccgatagcagctattgtttaaaatcacacaaaataaatagcttatgaatgactggatttggtatatcctctggtgata

SEQ ID NO: 262433 - DNA, 201 bp, Homo sapiens
agccttggctgggggatggggggtggggaagagatatggcctggcaaaatgaaaagttgcttctagacaaagacagaactcttgaagtgcttcaactgggygaaagtttgacagagaacactcaacaaccctggccaccgacaaaagaaaacaaggacatttgtctatcttggcctggaccttagcatagaaaatgttttc

SEQ ID NO: 262434 - DNA, 201 bp, Homo sapiens
gcttctagacaaagacagaactcttgaagtgcttcaactgggtgaaagtttgacagagaacactcaacaaccctggccaccgacaaaagaaaacaaggacrtttgtctatcttggcctggaccttagcatagaaaatgttttcctacccctactctaagtggcaactatatacttgacgctgccatttcttcttttttttc

SEQ ID NO: 262435 - DNA, 201 bp, Homo sapiens
agaagatttcattcactaatctatggcacccttgaccatgggattaagagtgatcctgttatcccagtcccaagtattaagttggtgcaaaagtaattgcrgtttttgccattgcttttaatttcaaaaaacacgattacttttgcaccaatctaataactccagctgatccagcacagtgacacaatatgtttagtacca

SEQ ID NO: 262436 - DNA, 201 bp, Homo sapiens
atagaatagagacccccgaagtaaactctcacatatatggtcagttgattttcaataaaggtactaagaccattagatggagaaaggattggggtggggcrggtgggattgctgtttttgttgttattgtttttgtttgtttgttttgagacacaatctcactctgtcacccaggctggagggcagtggcacaatctcagc

SEQ ID NO: 262437 - DNA, 201 bp, Homo sapiens
gagatttaggaaaacactacacgtgcagttacatcctgtacaatataaaagggtggctgttggagttgttaaattagtcacagcttcaactattttaaaaycatttatgaatttaaattgcttgtatgggatgatgtatatagtggctactgtttcagagagcaaagccctagaatcagatgacatccagaatgtcatgtt

SEQ ID NO: 262438 - DNA, 201 bp, Homo sapiens
gcccaaggacacaccaccaccaagacatattattagtaacatattgaataatttaaaacgtcaataaagcttgccaataaatgaataaaacccagtttgargagcttctccttggattctttttgactttctaggttaaaaagaaaaaaaaaatcacaacctggtgtcctttctaagagtcacacaattagactgaaacat

SEQ ID NO: 262439 - DNA, 201 bp, Homo sapiens
cccagtttgaggagcttctccttggattctttttgactttctaggttaaaaagaaaaaaaaaatcacaacctggtgtcctttctaagagtcacacaattavactgaaacatgattttagccacttgtaaattcccttcttaatcttcttgtgtcattcagctcaatggagactctcaggcaaaagttcaacggattctacg

SEQ ID NO: 262440 - DNA, 201 bp, Homo sapiens
ggcctgaactgccaactgaccagttatgcattagtggtgatggaaagtatgcagaggagggcacgttcgactctgtcccatgcttatcttctggtttattyttccctttttacatagaaaaggttcatgaagaaattgaaagagtcattggcgccaaccgagctccttccctcacagacaaggcccagatgccctacacag

SEQ ID NO: 262441 - DNA, 201 bp, Homo sapiens; identical to SEQ ID NO: 52336

SEQ ID NO: 262442 - DNA, 201 bp, Homo sapiens
attttcatccacagagcagccaaaagtatctcttacataaaccatgaatcaaatcttgtagctctctggctgaaaccaattgcctctgcactccttacttracctactatggcctgaaggatctggctgctgcctttctcttttttagctctgccttcacttgtacatttcaacctgaccttcctactctagacacactaa

SEQ ID NO: 262443 - DNA, 201 bp, Homo sapiens
cgccaagcccgaccctgcaaagggtcgtaaccggacttcggggcaaacttcaggtcccccgcctgctagcccgccaaccccctccgccaggcagccggcgmgcctccaggttccgcccaggcgtcgctgagtggcggcggcggggagaatgcgcgcggcgcagccaatccgggggcgttcctacaccccctgcccgccccc

SEQ ID NO: 262444 - DNA, 201 bp, Homo sapiens
caggtatctaaaagccgtccatcaggtgatcagctgtctatttaaaagaggccttccctgaacaacctaaatgaaataaaacactcccctacacacacatmcacacacacacacacacacagcaattcctaccatcctcttcgtgtgccttatttcctccatagtacttatcaccaactgacattatacatttgtccatcc

SEQ ID NO: 262445 - DNA, 201 bp, Homo sapiens
tagtttaccatgcagaatctcaaaacgggttagaaattggaggtaccagtgatcataggagacagaaatgagccagtagactgagaacaaggatagtttgraatgcacataaaataagatcaggtccttatcactgcccccacccctgcagaaaatagtaggtagatgatctagagagccttggctgggggatggggggtg

SEQ ID NO: 262446 - DNA, 201 bp, Homo sapiens; identical to SEQ ID NO: 52325

SEQ ID NO: 262447 - DNA, 201 bp, Homo sapiens
ccctgtgaagtaagcaaggcaagagaaggtgaccccattttatgacatgaaagggttcataaatgttagagctagaacttgagttttgtttttgtgggctrtagcttgctgcctccctgtcgtaattactatggtcaccatcacagttagggttttgttaggaaattagtttcagaagcaaactgtccttgggacaggttc

SEQ ID NO: 262448 - DNA, 201 bp, Homo sapiens
tgaggcaggagactcacttgaacatgggaggaggaggttgcagtgagccaagatcgcgccactgcactccagcctgggtgacagagtgagactctgtctcaaaaaaaaaaaataccattcaggacataggcatgggcaaagacttcatgactaaaacaccaaaagcaatggcaacaacagccaaaattgacaaatgggatc

SEQ ID NO: 262449 - DNA, 201 bp, Homo sapiens
caccgacaaaagaaaacaaggacatttgtctatcttggcctggaccttagcatagaaaatgttttcctacccctactctaagtggcaactatatacttgaygctgccatttcttcttttttttcctttttttttttttagacagagtctcactgtgtcacccaggctggagtccattggcgtgatatcagcttactgcagc

SEQ ID NO: 262450 - DNA, 201 bp, Homo sapiens
ttggccacatactagggtaaaaaagcaagcaaatgtcaaatgtcaaatatcagcataagataaaccaggtaaggtagcaaagaagactcaaaatagaaacttttttttttttttacttaaaaccaaataatgaaaatacatggaaacaagacttgtgaactgcagctagagtagtacccagacagaggcaaatgtagagct

SEQ ID NO: 262451 - DNA, 201 bp, Homo sapiens
tagtggactgcagcatccaactcctgggctcaagtgattctccgaccttagcctcttgagtacctggggcttacagatgcatgccaccacacccggctaattttttttttttttaaatagagatggggtcttgttctgttgcccaagctggtctggaactcctggcttcaatcagtcctcccacctcagcttcccaaagct

SEQ ID NO: 262452 - DNA, 201 bp, Homo sapiens
gccaatcattcttcttgactagtggtctttatatatacatatatatatatttatatgaggaattttccataagtgacttgaaaaatacagaatgcactccrtggtaggtctgttcagtgttatcaggaatactgtttctcatcttcctttcttggtgtccctttgcaggggttgtgtttgcacattatggtcccgtctgga

SEQ ID NO: 262453 - DNA, 201 bp, Homo sapiens
gggaggcagaggttgcggtgagccaagattgcaccactgcacttctgcacttcagcctgggtgacagagtgagacagcctgtctcaataataataataatmatcatcatcatcatcatcatagttagaagagcccatctttttctaaagtcacctgtttcagcctctcatctacagtgaactctgtctatttggtcatgtc

SEQ ID NO: 262454 - DNA, 201 bp, Homo sapiens
aatggctaacatggtaaatgttatacatatttttaccacaataaaaaaaccccaaaaaactcctgacatttcagcatatttttaattgaaagaaaccgaarataacttagatatttactaatagaggatttgagtaatacattgtgacatacttaaatcgatttcttaatgggctccttggtttgatctttgcccctttag

SEQ ID NO: 262455 - DNA, 201 bp, Homo sapiens; identical to SEQ ID NO: 52320

SEQ ID NO: 262456 - DNA, 201 bp, Homo sapiens
acacataatctttagaaattcgcctcccatgcgtcctttctcagaagctactagaggatgtgcttcagcaaaatgggggagtaaaacaaagaggaagaaayataattcaggaaatgggttctgacacagaagaaaattcccaaatgataactaatagaagtcatagcacctgaaccaaaggcctgcagagcaaccactgca

SEQ ID NO: 262457 - DNA, 201 bp, Homo sapiens
caaaaggacaaatatcatatgattcaccttaaataaggtacctagaataggcaaattcataaagacaaacggaatagagcttatgactaaaggaaagggasaatgacaagttgttgcttattaggtacagagtttctatttggaataatgaaacacttctggaaatagcagtgatagttacacaacactgtgaatgtactt

SEQ ID NO: 262458 - DNA, 201 bp, Homo sapiens; identical to SEQ ID NO: 52321

SEQ ID NO: 262459 - DNA, 201 bp, Homo sapiens; identical to SEQ ID NO: 52323

SEQ ID NO: 262460 - DNA, 201 bp, Homo sapiens
atcttgtagctctctggctgaaaccaattgcctctgcactccttacttgacctactatggcctgaaggatctggctgctgcctttctcttttttagctctsccttcacttgtacatttcaacctgaccttcctactctagacacactaagctgatttctgccatgcctgggcctgcctcaaggtacgatgtttgtcttctt

SEQ ID NO: 262461 - DNA, 201 bp, Homo sapiens
ctgaagaaaagaggccactgtgactacagtcaagatgctcagctcagcaagacttgaggacagctcaaaccatctttggctactgtgcccagtagcaaagsagtaaatgtgatactgtccagaaacaagatgtgtaggccataagagaaaagaaattatgttaggaattagaggccaataacattattgaatatttattat

SEQ ID NO: 262462 - DNA, 201 bp, Homo sapiens
actgtctagcacctgttccttggacaagaatacctgcttcttctgaggaattccttttttctgacctcagtcccttttacccttaactgtggttgaacggsagatgccatatctttacataaactcaccttcttggccacagtgataagtaagttgagggacatactgaccaaaagtagactgatcagaatttctaacctt

SEQ ID NO: 262463 - DNA, 201 bp, Homo sapiens
gctactcgaggctgaggcaggacaatcgcttgaacccaggaggcggaggttgcagtgagccgagatcgcgccactgcactccagcctgggtgacagagtgyggctccgtctcaaaaaaataaataaaaatagggagagagggtaggtgggattggtatcaaatcctgaagctggtgtggaagaccatatctatccaagaga

SEQ ID NO: 262464 - DNA, 201 bp, Homo sapiens
ggacttccctattagatataaaaattactataaagactatttatatcttattataaagtaacagtaattaagacaatgtgctttgagcacagtgataaacrcatagaccaatataaccaactagaaagcctgtaaactggcccacccctatataggaaatgtgtatcagagacagcattacagattggtggtgaagggtga

SEQ ID NO: 262465 - DNA, 201 bp, Homo sapiens
cacataccataccagaggaatgttgaacagaagaacacactctatccacattgaaatgaaatgacacatctacatttctgcaccacaacatctgaagacaragtggctatatgattggcaaatgacttaatagagtggaggatgactacacttaagcatctacagaggggaatgccagtggagtatgagaggacagaatga

SEQ ID NO: 262466 - DNA, 201 bp, Homo sapiens
acagattggtggtgaagggtgaggtagagtggggaccctttgacaaatcatgcttgaacaataggttgtctacatagggaaaaaatgtttggattcctacytcacaataggtagcaatacctaacacaaatataaattccaggtagattatagaaacttaaatgtgaaaacaaaatttaaaatttttacaagaaaatagag

SEQ ID NO: 262467 - DNA, 201 bp, Homo sapiens
agcatggagcacaattcaaaacagcactctgttggaacctgaggttggatcaaaggctaaattggttttcccttaaccaagggaagaaactcagcactgtwtattacctgctcctttttagtaccaggaaaggcagaactagaatagcaagcctttaaagaaattccttggggataaataaatactctcatctactagtct

SEQ ID NO: 262468 - DNA, 201 bp, Homo sapiens
gtaaggtagcaaagaagactcaaaatagaaacttttttttttttttacttaaaaccaaataatgaaaatacatggaaacaagacttgtgaactgcagctasagtagtacccagacagaggcaaatgtagagctttaaattatttattaagatagaggtctgaaaattaatgagtcagatggcaaacattatgtattataat

SEQ ID NO: 262469 - DNA, 201 bp, Homo sapiens
atgtgaaatctatgatcatgaaagacctttagagaagaacattctagagctgaagggaatcataatgctgatctgaacacatcttgtttttttgaaattgragaacagaggctcagagaagttgtgtgactttcacaaggtcacacagctagttctaccacctagtcccaatagatactgaaagtctgtggcagttcagag

SEQ ID NO: 262470 - DNA, 201 bp, Homo sapiens
agatggtgaaaccccatccctactaaaaatacagaaattagccaggcatggtggtgcacaactgtagtcccagctactcaggaggctgaggcaggagaatygcttggacctgggaggttgcagtgagctgagattgcaccactgcactctagcctgggtgatggagcaagcctctgtctcaaaaaaaaaaaaaaaaaaagg

SEQ ID NO: 262471 - DNA, 201 bp, Homo sapiens
atggctatttccaataaaatttgctttaagaaaaaaggcagcagctgtgcttagcctgcaggcttttatttcctgacacttgaatttaaaaaaatctagtygattgtttaaaaatatttcaaagtttaaccaatagccagttattgaccctccttacagtttttttgctattataaaccatagtgggatatatacatcttt

SEQ ID NO: 262472 - DNA, 201 bp, Homo sapiens
tggacattaacaaataatatacactgatttatcacctttaagcaacaaaaacatgacttgtaattattcaaataaggtaggatttttctcttaagtacacktcttaaaagtcattcacaagacaactgggcatccactaagaccaaggcactgtgagggaggcaaacagcacaacatcctcacctcaaggagctcagcctg

SEQ ID NO: 262473 - DNA, 201 bp, Homo sapiens
catcgtttcctctttttcttttaaaggacagttttaaataatttcacaataaagcactcttctcattcatgatttatttagaacacagcataatgagtaaraaaataaatcagaacttataaggtgtgtatctgtataaaaacttatctttgggtaacattgacatgattttcagtgtttgggtgttgaagtcaagagcac

SEQ ID NO: 262474 - DNA, 201 bp, Homo sapiens
gatggataaaaattgtacatatttaaggtatacaacttgatgttttgatgtatgtatacattgtgaaatggtcttcacaatcaaaccaattaacatatctrtcacctcaccaagttaccattttctttttcttcttttattattatctttttttgtggcaaaaacatttaagatctacttcttagaaaatttcaagtaagg

SEQ ID NO: 262475 - DNA, 201 bp, Homo sapiens
caggtgcctgacaccacgcccagctaattttttgtatttttagtaaagacagggtttcaccatgttagccaagctggtctcgaactcctgacatcaagcgwtccacctacctctgcctcccaaagtgctgggattacaggcatgagccacaatgcctggccaggaattaagcttcttacatcacagatttttcttttgttc

SEQ ID NO: 262476 - DNA, 201 bp, Homo sapiens
aaaccagaagataagcatgggacagagtcgaacgtgccctcctctgcatactttccatcaccactaatgcataactggtcagttggcagttcaggcctgaytctgcctcagtgaagttgaagcattggtcagacatttcaggtagagacagctagccccagggtgcctgtgccactctgtgacttagaagtgggatagtgt

SEQ ID NO: 262477 - DNA, 201 bp, Homo sapiens
  misc_feature (1)...(201): n = A,T,C or G
taaggagattttgggctgagactatggggttttctaaatatacaatcatataatctgcaaacagggatgatttgagttcctcttttcctaattgagtaccntttatttctttctcctgcctgattgccctggccagaacttccaacactatgttgaatagaagtggtgagagagggcatccctgtcttgtgccaagagaat

SEQ ID NO: 262478 - DNA, 201 bp, Homo sapiens
tattactggatatatacccaaaggaatataaatcattatattataaagacacatgcacacatgttcattgcagcactattcacaatagcaaaaacatggartcaatctaaatgcccatcaatgatagactgggtaaagaaaatgtggtacatatacaacatggaatactatgcagccataaaaaagaatgagatcatatcc

SEQ ID NO: 262479 - DNA, 201 bp, Homo sapiens
tcatctttctaatcgtttacacaaaatttggtccatttcttcatttaccagtcagttctcctaaaataaaaaacaaaactatacctttggttacagcgttractcttttggtgtaagagctgatgcctttgttttgctcctcaggtcgatttctcattgtcttcaccaatcttctgaacccgtgaatactttttgcatgat

SEQ ID NO: 262480 - DNA, 201 bp, Homo sapiens
ttaggaataattagaatcttggtacatattcttaaattttctccagatatgtggttccagtctgtattgccaacagcaatgtatgactgcttctctcttakcaatacttagtattttcctttttcaaaaatatctttaaaattcaatggttaaaaatggtgtctcactgtaatagttccatttcaatgaatttgaaaaatg

SEQ ID NO: 262481 - DNA, 201 bp, Homo sapiens
gaatcctacctgcgattgtttttggtaggtccttaagatttggcagcttactctcaatatatctctcttactctctctctctctctctcttttttttttttaatatggtgaaattagaccaggggtcagaacatagattttagtctcctttagttcatctactaggagactaaattagataatctctaaactcccttttag

SEQ ID NO: 262482 - DNA, 201 bp, Homo sapiens
ataagggcttccctttcagtcttgtttaggccaaatcctgtagtttctgttcaagttggattgagcatagaattgtctgtactgggccatttttctagccktttcatttttctccatacattaaaagtttgaacaccacgctgtacctataaaaatgtgatcaaagaaagcatagtgagtcctcaaataaatacatgatcc

SEQ ID NO: 262483 - DNA, 201 bp, Homo sapiens
gttttgctcctcaggtcgatttctcattgtcttcaccaatcttctgaacccgtgaatactttttgcatgatgatttgaagcagccaggaggccaagacagyggccaggagaagcagcaaggaattgagccttgtacatttttctcaaaaaaataaaagatggggaaccaccatgctcgagataagaaattagtctgtgaag

SEQ ID NO: 262484 - DNA, 201 bp, Homo sapiens
tgcacttccatgatggtggcttctgtgtagggcatctgggccttgtctgtgagggaaggagctcggttggcgccaatgactctttcaatttcttcatgaaycttttctatgtaaaaagggaaaaataaaccagaagataagcatgggacagagtcgaacgtgccctcctctgcatactttccatcaccactaatgcataac

SEQ ID NO: 262485 - DNA, 201 bp, Homo sapiens
cacatagtaatacataatccattactatcctaacttagattaaaaaatgtatgccaagcgttaactgtaaaatgctatgtttgattacgggtgccacatayggattaaatgtgcattatatacatatatctatatacacacacagtaatacataatccattactatcctaacttaatacagtattatgcttctgatattct

SEQ ID NO: 262486 - DNA, 201 bp, Homo sapiens
ggaaataaccctaatgcaatgtcatccacaaaccagagtagactcaacgctcactctcaaaacagccttcctgccacagcaaaacttgtttcccaagatgmcagtaaattaagtaacaaattcacaattagttcaagtggactcaggaaaggatgctttattttcagatctagtggacaagctcaaaaactagaatctgag

SEQ ID NO: 262487 - DNA, 201 bp, Homo sapiens
ctctacagtgtggataaatatcaaaaaacatgccaagtgaaaaagccaggcacaagaatacatactaaatagctgcatttatatgaagtctggaacaaacraagtgaacctatggtgatagacattagaacagggtggattgtttggaaagggaaattgaaaattttttctagggtggtagaaatgttctatatcttgact

SEQ ID NO: 262488 - DNA, 201 bp, Homo sapiens
agatttccaattttcacagaactgtttgttaaaaacactatgctgcccaggcatggtggctcacacctgttatcccagcactttgggaggccaaggcaggyggatcacttgaggccaggagtaagaccagcctggccaacatagcgaaatcttctctctactaaaaatacaaaaattagctgggtgtggtggcacgcacct

SEQ ID NO: 262489 - DNA, 201 bp, Homo sapiens
tggtggctcacacctgttatcccagcactttgggaggccaaggcaggtggatcacttgaggccaggagtaagaccagcctggccaacatagcgaaatcttmtctctactaaaaatacaaaaattagctgggtgtggtggcacgcacctgtagtcccagctacttgggaggctgaggcactagaattgcctgaacccaggag

SEQ ID NO: 262490 - DNA, 201 bp, Homo sapiens
gagatttaaaaccaactgctttattaaaatctgaaatgaacataggggagatgccttgtctaaattattgatcccttctcttatattagcttgccaagaawgaaacatttttaaaacaacatgaaataataaaatattattttagttctacttcttttaaaaattatgcagtttaaaaaagtgtaactgacctatcccaaa

SEQ ID NO: 262491 - DNA, 201 bp, Homo sapiens
ccattgaatggtaccaccaaaacagtcgtgttgtgatataataagcaatgatcacatcgatagtgtagtgttcgtgtgctacaagaatgcagatgatcccrgcagcactcagcagccagcagattaaatgataccaccagaagtgacgaggcgaatctggacagtagaaaaattacagagttaataagattcccagagatg

SEQ ID NO: 262492 - DNA, 201 bp, Homo sapiens
ctctaaagcttattatagttagtaactcctggtgaaatgaaaagcaatgagtttcattttcaaagttattgtgcatttcaaagtattatatttcataagastgaatccaggcttagaaaatttctcaggtggacaggtacagtggctcatgcctataatcccagagctttgggaagctgaggtgggaggactgattgaagc

SEQ ID NO: 262493 - DNA, 201 bp, Homo sapiens
cttgaatttccaaagttctaaacagagccaagaaattaaaagcaaaacccctggattcagcctccttcaacatgaatacctgcttctcaaaatgatggctstgcactgtggccaagtcactttctctaagcttaagtttactcatctgaaaaatgggaaaaaatactgcatccctcagagggtggttgtaaggatcaaatg

SEQ ID NO: 262494 - DNA, 201 bp, Homo sapiens
gggtgtgtcaaatactttcgtgtttacttggatcagctttcctttttaagataaaatgatcttttaaaaacaaaacaaaacaaaacaaaaaaaagtgataygtagcgcattgggtggcagcagcagtgtgcactcctggactcaacccgaactttccccgtgacagggtagaaacaaaattcacccaaagctgacgcacaa

SEQ ID NO: 262495 - DNA, 201 bp, Homo sapiens
ctcgatgacagagctatacgacacatgcgtgtaaagacatggcagcggcaatgtccacattggcatcacaggtgtttttaaagttctttaaaaggtgatgkttttttttaaattaaaaaaaaactggattacttgactaaaatccaaggcttactgtttcaaggatctgtagtaattggtgcacaattttttattttatta

SEQ ID NO: 262496 - DNA, 201 bp, Homo sapiens
tagagatctcaaaccaagcatgaatgatcaccattcttttttgttttaaagtggttttaattacttaggaaacttgcccatgattagtgtgattgaaaatkccactttaactgcagttgtaaagtgcctattgattccttattggagtaagagacagagtactactttaaaaaacttcactatcctcagtactttcaaaaa

SEQ ID NO: 262497 - DNA, 201 bp, Homo sapiens
aaaacaaatactaaaaatctttatatatataaatagaaaagccttcaacacatggcatataacttataatatgcttgatttaaacgtgtaaactcattaaraaactccttctcacacttccttacactacagaggctagtgcattaagattggcttaaagttttcatcagttttacagtgcaaaacaaaaacaaaaaagaa

SEQ ID NO: 262498 - DNA, 201 bp, Homo sapiens
gctgcgccgcgcgcattctccccgccgccgccactcagcgacgcctgggcggaacctggaggcgcgccggctgcctggcggagggggttggcgggctagcrggcgggggacctgaagtttgccccgaagtccggttacgaccctttgcagggtcgggcttggcggtgactgtccctgaaactgggatgctggcaacacaac

SEQ ID NO: 262499 - DNA, 201 bp, Homo sapiens
aacttataaggtgtgtatctgtataaaaacttatctttgggtaacattgacatgattttcagtgtttgggtgttgaagtcaagagcacttcttaatagaaraaatattttcagcaactgagtcaaaggagttaaattattgcaacacaaggacactaaaaacaaatactaaaaatctttatatatataaatagaaaagcct

SEQ ID NO: 262500 - DNA, 201 bp, Homo sapiens
cagaacttataaggtgtgtatctgtataaaaacttatctttgggtaacattgacatgattttcagtgtttgggtgttgaagtcaagagcacttcttaataraagaaatattttcagcaactgagtcaaaggagttaaattattgcaacacaaggacactaaaaacaaatactaaaaatctttatatatataaatagaaaag

SEQ ID NO: 262501 - DNA, 201 bp, Homo sapiens
tgggtaggaaaaaagagcttctgaaatttacatatttgattaaaatgtaagcatttcataaaactatcacaatagcatacagtagatatcataatgaaaaatatatgtcaggaaaataatgaatctagacttaaaattttactttacaacaaggcacttaacacattgaaacagtacagtaaatttccaaaagaatgcaat

SEQ ID NO: 262502 - DNA, 201 bp, Homo sapiens
ttgaaattcttatgatgtgacttaggagttatgggcgagtcttatagtgcagacatttccacttaaatgtcaggaattttatgtatcagcagctctagtgyatggcacacagaatcactcaaatggttggtgaacatagtctagtttcctgtcttcctgtgtctcagcaggagattcaaaatatcagggaagatgaatatt

SEQ ID NO: 262503 - DNA, 201 bp, Homo sapiens
catttccaaactccctctgaaggggttaccacccctgctgaaaactgcttttccagagggaccatctacatttagaaacaatttagttctcttaataaaamgagagtgaattctttgagagtatattcaaggatcagatgcattgggcctggtggcagggacgctaggacaggaatgttcagtatagtttgaaagcagaat

SEQ ID NO: 262504 - DNA, 201 bp, Homo sapiens
tcatttctagataatctaaggataaagcctggactatctcctgtaacttactctttgaaccttattatcttatcctattcacttcaccccaatgaattgcktttacaaaatttatcttggaggaggggcatttgtcatcagcagattcaaaacctacttaccgcaccttgctgttgcaatgtctagcaaactccagttgag

SEQ ID NO: 262505 - DNA, 201 bp, Homo sapiens
taatagttatcactgggttcttgataatagtttaaacttaataggttgtcactattgctgcctcttattcacaccttgcagatttaccagctttttccaakattagaatgtgagacttgccaggatattgtttcctatatttagcctttatgtcttgtataatgaataaataaacgtgcctatcttcagtattacttcatt

SEQ ID NO: 262506 - DNA, 201 bp, Homo sapiens
agttgaagcacttcaagagttctgtctttgtctagaagcaacttttcattttgccaggccatatctcttccccaccccccatcccccagccaaggctctcyagatcatctacctactattttctgcaggggtgggggcagtgataaggacctgatcttattttatgtgcattccaaactatccttgttctcagtctactgg

SEQ ID NO: 262507 - DNA, 201 bp, Homo sapiens
gaaaacattttctatgctaaggtccaggccaagatagacaaatgtccttgttttcttttgtcggtggccagggttgttgagtgttctctgtcaaactttcrcccagttgaagcacttcaagagttctgtctttgtctagaagcaacttttcattttgccaggccatatctcttccccaccccccatcccccagccaaggct

SEQ ID NO: 262508 - DNA, 201 bp, Homo sapiens
gaaaaaaaagaagaaatggcagcgtcaagtatatagttgccacttagagtaggggtaggaaaacattttctatgctaaggtccaggccaagatagacaaaygtccttgttttcttttgtcggtggccagggttgttgagtgttctctgtcaaactttcacccagttgaagcacttcaagagttctgtctttgtctagaagc

SEQ ID NO: 262509 - DNA, 201 bp, Homo sapiens
tggtactaaacatattgtgtcactgtgctggatcagctggagttattagattggtgcaaaagtaatcgtgttttttgaaattaaaagcaatggcaaaaacygcaattacttttgcaccaacttaatacttgggactgggataacaggatcactcttaatcccatggtcaagggtgccatagattagtgaatgaaatcttct

SEQ ID NO: 262510 - DNA, 201 bp, Homo sapiens
gctgagattgtgccactgccctccagcctgggtgacagagtgagattgtgtctcaaaacaaacaaacaaaaacaataacaacaaaaacagcaatcccaccygccccaccccaatcctttctccatctaatggtcttagtacctttattgaaaatcaactgaccatatatgtgagagtttacttcgggggtctctattctat

SEQ ID NO: 262511 - DNA, 201 bp, Homo sapiens
aacatgacattctggatgtcatctgattctagggctttgctctctgaaacagtagccactatatacatcatcccatacaagcaatttaaattcataaatgrttttaaaatagttgaagctgtgactaatttaacaactccaacagccacccttttatattgtacaggatgtaactgcacgtgtagtgttttcctaaatctc

SEQ ID NO: 262512 - DNA, 201 bp, Homo sapiens
ctgtgtagggcatctgggccttgtctgtgagggaaggagctcggttggcgccaatgactctttcaatttcttcatgaaccttttctatgtaaaaagggaaraataaaccagaagataagcatgggacagagtcgaacgtgccctcctctgcatactttccatcaccactaatgcataactggtcagttggcagttcaggcc

SEQ ID NO: 262513 - DNA, 201 bp, Homo sapiens
ttagtgtgtctagagtaggaaggtcaggttgaaatgtacaagtgaaggcagagctaaaaaagagaaaggcagcagccagatccttcaggccatagtaggtyaagtaaggagtgcagaggcaattggtttcagccagagagctacaagatttgattcatggtttatgtaagagatacttttggctgctctgtggatgaaaat

SEQ ID NO: 262514 - DNA, 201 bp, Homo sapiens
gggggcgggcagggggtgtaggaacgcccccggattggctgcgccgcgcgcattctccccgccgccgccactcagcgacgcctgggcggaacctggaggckcgccggctgcctggcggagggggttggcgggctagcaggcgggggacctgaagtttgccccgaagtccggttacgaccctttgcagggtcgggcttggcg

SEQ ID NO: 262515 - DNA, 201 bp, Homo sapiens
ctccttccgacctctgagcccagcttggatccactgagttgctggattcactgtcctttgcagtaggaagaatctgcttagaaggatatgtatttatatayctttttaccatctcttcttggagatgctcttcatctccttgaaatagttatattaaatggatgtggggctaaagttagaccaaatcttccagtcaggagg

SEQ ID NO: 262516 - DNA, 201 bp, Homo sapiens
caccccccatcccccagccaaggctctctagatcatctacctactattttctgcaggggtgggggcagtgataaggacctgatcttattttatgtgcattycaaactatccttgttctcagtctactggctcatttctgtctcctatgatcactggtacctccaatttctaacccgttttgagattctgcatggtaaacta

SEQ ID NO: 262517 - DNA, 201 bp, Homo sapiens
ggatggacaaatgtataatgtcagttggtgataagtactatggaggaaataaggcacacgaagaggatggtaggaattgctgtgtgtgtgtgtgtgtgtgkatgtgtgtgtaggggagtgttttatttcatttaggttgttcagggaaggcctcttttaaatagacagctgatcacctgatggacggcttttagatacctg

SEQ ID NO: 262518 - DNA, 201 bp, Homo sapiens
gaacctgtcccaaggacagtttgcttctgaaactaatttcctaacaaaaccctaactgtgatggtgaccatagtaattacgacagggaggcagcaagctayagcccacaaaaacaaaactcaagttctagctctaacatttatgaaccctttcatgtcataaaatggggtcaccttctcttgccttgcttacttcacaggg

SEQ ID NO: 262519 - DNA, 201 bp, Homo sapiens
gctgcagtaagctgatatcacgccaatggactccagcctgggtgacacagtgagactctgtctaaaaaaaaaaaaaggaaaaaaaagaagaaatggcagcrtcaagtatatagttgccacttagagtaggggtaggaaaacattttctatgctaaggtccaggccaagatagacaaatgtccttgttttcttttgtcggtg

SEQ ID NO: 262520 - DNA, 201 bp, Homo sapiens
gatcccatttgtcaattttggctgttgttgccattgcttttggtgttttagtcatgaagtctttgcccatgcctatgtcctgaatggtattttttttttttgagacagagtctcactctgtcacccaggctggagtgcagtggcgcgatcttggctcactgcaacctcctcctcccatgttcaagtgagtctcctgcctca

SEQ ID NO: 262521 - DNA, 201 bp, Homo sapiens
tgggctaaatgacataaatgcctaatttttaaaatttggggatgattttaagttacagaaaaattgcaaaaatggtccaaagttcttatatttccttcacycaacctctactaattttgacatcttacataaccatggttcatttgtcaaaactaagaaattaacattggtatgatactattaactaaactacagatgtta

SEQ ID NO: 262522 - DNA, 201 bp, Homo sapiens
agctctacatttgcctctgtctgggtactactctagctgcagttcacaagtcttgtttccatgtattttcattatttggttttaagtaaaaaaaaaaaaaagtttctattttgagtcttctttgctaccttacctggtttatcttatgctgatatttgacatttgacatttgcttgcttttttaccctagtatgtggccaa

SEQ ID NO: 262523 - DNA, 201 bp, Homo sapiens
tattcttctgttggatggaaagttctatatttgtctgttaggtccatctggtccatagtgttgttcaagtcacctgtttttattttaattgattttctgtscagatgttgtatccattattgaaagcagggtgttgaagtctcctactgttattgtattactgtccatttctctctttagatagatcaatatttgctttta

SEQ ID NO: 262524 - DNA, 201 bp, Homo sapiens
agctttgggaagctgaggtgggaggactgattgaagccaggagttccagaccagcttgggcaacagaacaagaccccatctctatttaaaaaaaaaaaaaattagccgggtgtggtggcatgcatctgtaagccccaggtactcaagaggctaaggtcggagaatcacttgagcccaggagttggatgctgcagtccacta

SEQ ID NO: 262525 - DNA, 201 bp, Homo sapiens
taagacttgttttgttactcaatgtatgatctatcctggagaatgttttgtgtacacatgagaagaatgtatattcttctgttggatggaaagttctatakttgtctgttaggtccatctggtccatagtgttgttcaagtcacctgtttttattttaattgattttctgtccagatgttgtatccattattgaaagcagg

SEQ ID NO: 262526 - DNA, 201 bp, Homo sapiens
tccagacgggaccataatgtgcaaacacaacccctgcaaagggacaccaagaaaggaagatgagaaacagtattcctgataacactgaacagacctaccayggagtgcattctgtatttttcaagtcacttatggaaaattcctcatataaatatatatatatgtatatataaagaccactagtcaagaagaatgattggc

SEQ ID NO: 262527 - DNA, 201 bp, Homo sapiens
ctaaaggggcaaagatcaaaccaaggagcccattaagaaatcgatttaagtatgtcacaatgtattactcaaatcctctattagtaaatatctaagttatyttcggtttctttcaattaaaaatatgctgaaatgtcaggagttttttggggtttttttattgtggtaaaaatatgtataacatttaccatgttagccatt

SEQ ID NO: 262528 - DNA, 201 bp, Homo sapiens
gacatgaccaaatagacagagttcactgtagatgagaggctgaaacaggtgactttagaaaaagatgggctcttctaactatgatgatgatgatgatgatkattattattattattgagacaggctgtctcactctgtcacccaggctgaagtgcagaagtgcagtggtgcaatcttggctcaccgcaacctctgcctccc

SEQ ID NO: 262529 - DNA, 201 bp, Homo sapiens
aagtacattcacagtgttgtgtaactatcactgctatttccagaagtgtttcattattccaaatagaaactctgtacctaataagcaacaacttgtcattstccctttcctttagtcataagctctattccgtttgtctttatgaatttgcctattctaggtaccttatttaaggtgaatcatatgatatttgtccttttg

SEQ ID NO: 262530 - DNA, 201 bp, Homo sapiens
tgcagtggttgctctgcaggcctttggttcaggtgctatgacttctattagttatcatttgggaattttcttctgtgtcagaacccatttcctgaattatrtttcttcctctttgttttactcccccattttgctgaagcacatcctctagtagcttctgagaaaggacgcatgggaggcgaatttctaaagattatgtgt

SEQ ID NO: 262531 - DNA, 201 bp, Homo sapiens
ccactcagttcctctgcagttaggctattagcttttctttttcaaaaagcaaaaattcctaagacacctaaagattagcctgtatttcatttatctatackgaaagtgcttagtaatatttctaaaaaggaaaagagcagtatggtagataaagaatgtagagtcaaaaatcaatcattttaaaatttttcttcttcctat

SEQ ID NO: 262532 - DNA, 201 bp, Homo sapiens
ctgatttatcacctttaagcaacaaaaacatgacttgtaattattcaaataaggtaggatttttctcttaagtacacttcttaaaagtcattcacaagacractgggcatccactaagaccaaggcactgtgagggaggcaaacagcacaacatcctcacctcaaggagctcagcctgggatgaagacagacacacacaac

SEQ ID NO: 262533 - DNA, 201 bp, Homo sapiens
ccccaacctttgtgtccttgaattcagtgtttaattatctttatagtgtgtatccattaacaattgtgtgtgtgtgtgtgtgtgtgtgtgtgtgtgtgtgkgtgtgtgttttagacaaagtcttgctctgtcaccaggctggagtgcagtggcgtgatctcagctcactgcaacctccaactcccttggtttaagcgattc

SEQ ID NO: 262534 - DNA, 201 bp, Homo sapiens
tggtctttgatgatttttttaaggaaactggttatatccttttcaatttgtcttaattccttaaatggtccaaagggaaggtaataaagccaagggcatakgttgaccaggaggacttgactgttcagacagatttctaggcctcgtgacataaaaccaagcattttcttgaactcactattagtgtaatcaaagcgctgg

SEQ ID NO: 262535 - DNA, 201 bp, Homo sapiens
tgattatgttttgggcttgcataaagcatcttatagttacaactgtctatttcaagctgatactaacttcaatctcatacaaaaacgccattctccccaamctttgtgtccttgaattcagtgtttaattatctttatagtgtgtatccattaacaattgtgtgtgtgtgtgtgtgtgtgtgtgtgtgtgtgtgtgtgtgt

SEQ ID NO: 262536 - DNA, 201 bp, Homo sapiens
ttagcttggagaagtttgttattaccaatcatctgaagccttcttctctcaattcatcaaagtcattctctgtccagctttgttccgttgctgacgaggarctgtgttcctttggaggagaagaggtgctctgatttttagaattttcagcttttcttctctggtttctccccatctttgtggttttatctacctttggtc

SEQ ID NO: 262537 - DNA, 201 bp, Homo sapiens
aagaagacaaacatcgtaccttgaggcaggcccaggcatggcagaaatcagcttagtgtgtctagagtaggaaggtcaggttgaaatgtacaagtgaaggsagagctaaaaaagagaaaggcagcagccagatccttcaggccatagtaggtcaagtaaggagtgcagaggcaattggtttcagccagagagctacaagat

SEQ ID NO: 262538 - DNA, 201 bp, Homo sapiens
ataataaatattcaataatgttattggcctctaattcctaacataatttcttttctcttatggcctacacatcttgtttctggacagtatcacatttactsctttgctactgggcacagtagccaaagatggtttgagctgtcctcaagtcttgctgagctgagcatcttgactgtagtcacagtggcctcttttcttcag

SEQ ID NO: 262539 - DNA, 201 bp, Homo sapiens
aaggttagaaattctgatcagtctacttttggtcagtatgtccctcaacttacttatcactgtggccaagaaggtgagtttatgtaaagatatggcatctsccgttcaaccacagttaagggtaaaagggactgaggtcagaaaaaaggaattcctcagaagaagcaggtattcttgtccaaggaacaggtgctagacagt

SEQ ID NO: 262540 - DNA, 201 bp, Homo sapiens
tcacccttcaccaccaatctgtaatgctgtctctgatacacatttcctatataggggtgggccagtttacaggctttctagttggttatattggtctatgygtttatcactgtgctcaaagcacattgtcttaattactgttactttataataagatataaatagtctttatagtaatttttatatctaatagggaagtcc

SEQ ID NO: 262541 - DNA, 201 bp, Homo sapiens
tctcttggatagatatggtcttccacaccagcttcaggatttgataccaatcccacctaccctctctccctatttttatttatttttttgagacggagccrcactctgtcacccaggctggagtgcagtggcgcgatctcggctcactgcaacctccgcctcctgggttcaagcgattgtcctgcctcagcctcgagtagc

SEQ ID NO: 262542 - DNA, 201 bp, Homo sapiens
ctctattttcttgtaaaaattttaaattttgttttcacatttaagtttctataatctacctggaatttatatttgtgttaggtattgctacctattgtgargtaggaatccaaacattttttccctatgtagacaacctattgttcaagcatgatttgtcaaagggtccccactctacctcacccttcaccaccaatctgt

SEQ ID NO: 262543 - DNA, 201 bp, Homo sapiens
tcattctgtcctctcatactccactggcattcccctctgtagatgcttaagtgtagtcatcctccactctattaagtcatttgccaatcatatagccactytgtcttcagatgttgtggtgcagaaatgtagatgtgtcatttcatttcaatgtggatagagtgtgttcttctgttcaacattcctctggtatggtatgtg

SEQ ID NO: 262544 - DNA, 201 bp, Homo sapiens
tcacgtaagcatctccacagggctgcttgtgtgtcctcatgtgacagcagctggcttcccttggagcaagtgacccaaaagagcaaggcaggaaccacaaygtttttttatgacctagcttcaaaagctgcacatcatttctgcaatagcctagtggttatacaagtcagtgttattcagtgtgggagggaaccatataaa

SEQ ID NO: 262545 - DNA, 201 bp, Homo sapiens
attataatacataatgtttgccatctgactcattaattttcagacctctatcttaataaataatttaaagctctacatttgcctctgtctgggtactactstagctgcagttcacaagtcttgtttccatgtattttcattatttggttttaagtaaaaaaaaaaaaaagtttctattttgagtcttctttgctaccttac

SEQ ID NO: 262546 - DNA, 201 bp, Homo sapiens
ctctgaactgccacagactttcagtatctattgggactaggtggtagaactagctgtgtgaccttgtgaaagtcacacaacttctctgagcctctgttctycaatttcaaaaaaacaagatgtgttcagatcagcattatgattcccttcagctctagaatgttcttctctaaaggtctttcatgatcatagatttcacat

SEQ ID NO: 262547 - DNA, 201 bp, Homo sapiens
cctttttttttttttttttttgagacagaggcttgctccatcacccaggctagagtgcagtggtgcaatctcagctcactgcaacctcccaggtccaagcrattctcctgcctcagcctcctgagtagctgggactacagttgtgcaccaccatgcctggctaatttctgtatttttagtagggatggggtttcaccatct

SEQ ID NO: 262548 - DNA, 201 bp, Homo sapiens
cactactgttatttcaccagaactcatactctggtggcacaagccacagtcactgaggcagcagacagaaaacaatgacaggtttgcctgtatcatcaccyctgtagcctaaagggtcaaataatcaccttccatcaaactcacttaattcttcatttgcccaacatatttactgatgcctgctctgcataaggcatccac

SEQ ID NO: 262549 - DNA, 201 bp, Homo sapiens
gattggcaaacagacttggctctgcctgtttctgtaaaaaaaagtttctcggcacatacccactcatttgcatgtcatttatggctgcttttgcactacarttacggagttgagtattgggatggagatcacgtatgtcctccaaagcataaaatatttaccatctggttctttatggaaaaaggatgctgacttatgttc

SEQ ID NO: 262550 - DNA, 201 bp, Homo sapiens
tttttttgagacggaatcttgctctgttgcctatgctggagtgcagtggtgcaatattggctcgctgcaacatccacctccccagttcaagcaattctccygcctcaacctcgtgagtagctgggattacaggtgcacgccaccatgcctggctaatttttgtatttttttagtagagatggggtttcaccatgttggcca

SEQ ID NO: 262551 - DNA, 201 bp, Homo sapiens
ggcaaacagacttggctctgcctgtttctgtaaaaaaaagtttctcggcacatacccactcatttgcatgtcatttatggctgcttttgcactacaattayggagttgagtattgggatggagatcacgtatgtcctccaaagcataaaatatttaccatctggttctttatggaaaaaggatgctgacttatgttctcaa

SEQ ID NO: 262552 - DNA, 201 bp, Homo sapiens
ttcttctcctctgtgccttccagtagatatttgctccatgaatgccttgcttcttattttggctccagtgcctggccatatcacagttttgatgtgatcaraagtcttctttgatatgattgtaatttgttcttttacagcacacatccaatactgtgttataaacatgaatttatgctttgaatcagacacaaaaattgc

SEQ ID NO: 262553 - DNA, 201 bp, Homo sapiens
atggggtttcaccatgttggccaggctggtcttgaactcctgaccttgtgatccacctgcctcggcctcccaaagtgctgggaatacaggtgtgagccacygtacctggccgagattctttttactaaaagaaaaaagcaaatttacctttgaattgatgtcagtttttctaactagtgtgctttcactgctgtctccttg

SEQ ID NO: 262554 - DNA, 201 bp, Homo sapiens
agagagcgcctgatagagaactggaaggatgtagaaagtatagatccctcctcttctgccaaacatcacttgcagccaggcaggagaagctaatgtcaggygtaaaagcttccgtttccttccttctcttcttaacacctagcatagcgctatgctatagccagcaagctgtcattaattcaatgattgcagcagagacta

SEQ ID NO: 262555 - DNA, 201 bp, Homo sapiens
ctgtaaaaaaaagtttctcggcacatacccactcatttgcatgtcatttatggctgcttttgcactacaattacggagttgagtattgggatggagatcaygtatgtcctccaaagcataaaatatttaccatctggttctttatggaaaaaggatgctgacttatgttctcaattgagagcatataggaagggattggtc

SEQ ID NO: 262556 - DNA, 201 bp, Homo sapiens
aaaaaagcaaatttacctttgaattgatgtcagtttttctaactagtgtgctttcactgctgtctccttgaaagctttagacattatgtattgaccctctrttatgatagaggtttctgtccaggagcaggacacatgggagtcaactagtaggagaaagtagaagaagctgttcttttcattttcttcttggatgcaccc

SEQ ID NO: 262557 - DNA, 201 bp, Homo sapiens
ctgctcaaaagaaaaactatgaataacatgtgtgggctgggcacggtggggttacaggcatgcaccaccacgcccagctaatgggatttttttttttttttaccgtttctttctgtttccatttcttcttaattccttatattttattttccctcttaattccttttttctgtttgttttggtctcttggtctctgtcttt

SEQ ID NO: 262558 - DNA, 201 bp, Homo sapiens
gagtgtctatcttctccttttgtactaatttaatccctgtttccaacccatgcctgctctctctgattgactattccttttttttttttttttttttttttgagctgggggcttgctatgttgcccaggctggagtgcagtggcgcgatcacagctcactgcagccaccacctcccaggctcaagcattcctctcgcctca

SEQ ID NO: 262559 - DNA, 201 bp, Homo sapiens
tgagtgtctatcttctccttttgtactaatttaatccctgtttccaacccatgcctgctctctctgattgactattccttttttttttttttttttttttttgagctgggggcttgctatgttgcccaggctggagtgcagtggcgcgatcacagctcactgcagccaccacctcccaggctcaagcattcctctcgcctc

SEQ ID NO: 262560 - DNA, 201 bp, Homo sapiens
atgagtgtctatcttctccttttgtactaatttaatccctgtttccaacccatgcctgctctctctgattgactattccttttttttttttttttttttttttgagctgggggcttgctatgttgcccaggctggagtgcagtggcgcgatcacagctcactgcagccaccacctcccaggctcaagcattcctctcgcct

SEQ ID NO: 262561 - DNA, 201 bp, Homo sapiens
gtgagtggagatcgtgccattgcactccagcctgggcgatagggcgagactccatcttaaaaaaaaaaaagtaagaggccgggcgcagtggctcatgtctstaatcccagcactttcggaggctgaggcgggcagatcatctcaggtcaggagttccagaccagcctgactaacatggtgaaaccccgtttgtcctaaaaa

SEQ ID NO: 262562 - DNA, 201 bp, Homo sapiens
ccagctggaactgtggctcccggagtctttcaccagatggcagcagcccactcctccctgtagcactcccattgttccaggcaggattcagccgcaggctyctccggaagaccaggggcagacggggcggtggcggggtcgtgcccagtgggaggggtcgggtctgcccaatgggttctcccgggcggggggcggggctct

SEQ ID NO: 262563 - DNA, 201 bp, Homo sapiens
catgagtgtctatcttctccttttgtactaatttaatccctgtttccaacccatgcctgctctctctgattgactattccttttttttttttttttttttttttgagctgggggcttgctatgttgcccaggctggagtgcagtggcgcgatcacagctcactgcagccaccacctcccaggctcaagcattcctctcgcc

SEQ ID NO: 262564 - DNA, 201 bp, Homo sapiens
tatttcatagttgtgattattgtacatccatatatacatggtgtgtataaaattttgtgacctgtgatgcttgcattccataccatcctaaagttattgctttttttttttttttttaagacagggtctggctctgtcacccaggctggagtgcagtggcccaatcttggctcactgtaacctctgccttctgggcctggg

SEQ ID NO: 262565 - DNA, 201 bp, Homo sapiens
ggtttcaccacgttggccaggctggttttgaattcctgaccgcaagccatccacccgccttggcctcccaaagtgctaggattacaggcatgagccactgygactggccaattctagaatttttcaaagggaacatttttctttaaggaaaatggaaacaaagtgaaacatatggaaaggtagtttatagaaattgatttc

SEQ ID NO: 262566 - DNA, 201 bp, Homo sapiens
gctggagtgcactggcatgatcttggctcactgcaacctctgcctcctagactcaagtgattctcctgcctcatcttcctgagtagccgggactacaggcwtgagccaccatgcccggctaatgttttttttttgtattttttagtagagaacagggtttcaccatgttggccaggttggtcttgaactcctgacctcaag

SEQ ID NO: 262567 - DNA, 201 bp, Homo sapiens
tgggcggatcacctgaggttgggagttcgagaccagcctgaccaacatggagaaaccccgtttctactaaaaatacaaaattagccaggcatggtggtgcrcgcctgtaaccccagctacttgggaggctgaggcaggagaatcacttgaacctgggaggccgaccttgcagtgagcggagattgagccattgcaccccag

SEQ ID NO: 262568 - DNA, 201 bp, Homo sapiens
ctgcctcatcttcctgagtagccgggactacaggcatgagccaccatgcccggctaatgttttttttttgtattttttagtagagaacagggtttcaccaygttggccaggttggtcttgaactcctgacctcaagtgatctgcccacctctgcctcccaaagtacaggcatgagccaccacacctggaatgaactggttt

SEQ ID NO: 262569 - DNA, 201 bp, Homo sapiens
tggggtttcaccgtgttagccaggatggtcttgatctcctgacctcatgatccacctgcctcagcttcccaaagtgctgggattacaggcatgagccaccrcgcccggctattattattatttttgagatggagtcttgctctgtcgccaggctggagtgcagtggtgcaatcttggctcacggcaacctccgactccctg

SEQ ID NO: 262570 - DNA, 201 bp, Homo sapiens
cccaaaattttttacttattatcaatgatctgaattataagagaaacagagtgagtaaacttgactctttggtttccttttgtacactgaaattatactgrtacacttcaggaaatgagtttaatgtcagtgaactttgacttgaacactataacatcttacagcttccaatgtctctccttttagaatgaagaagaggtc

SEQ ID NO: 262571 - DNA, 201 bp, Homo sapiens
agtttctgcttcctgggttcaagagattctcatgtctcagcctcccgagtagctgggattataggtgtgggccaccacgccgggctaattttttttttttwaaagacagagtcttgctctgtcgcccaggctggagggcagtggcacaatctcggctcactccaacctctgcctcccaggttcaagcgattgtcctgcctc

SEQ ID NO: 262572 - DNA, 201 bp, Homo sapiens
agtcttgctctgtcgcccaggctggagggcagtggcacaatctcggctcactccaacctctgcctcccaggttcaagcgattgtcctgcctcaacctcccragtagctgggattacaggtgcatgccaccatgcttggctaattttttcttttttttttttttgagactgagtcttgctctgtcaccaggctagagtgcag

SEQ ID NO: 262573 - DNA, 201 bp, Homo sapiens
catcctttctcatacttctggtgctttttagacctcccaacaaatagaatgggggtgctacgtgggaacaggttgctttcctgggtaatagtagagtcagytggggatcctacttgtttgattttgagttaagcaattgagttcaaggtttagggaagaggcagagtttttcctaattgtgctctggggctcctccctggg

SEQ ID NO: 262574 - DNA, 201 bp, Homo sapiens
tttggtcctctggaaactcaaaatgaatggaatcctttttcagagaaaccagaattattttagccatttttttatgactcaaaatcagatttaagtagtayttaaatgtatttctcattctaacaagagaaaaaactctgcttgtctgcaattctttagcctgcagggcactgatattttctgaccgacatggtttggtgg

SEQ ID NO: 262575 - DNA, 201 bp, Homo sapiens
tctcagctgactgaaaaagggaaccctgggaacacagcctctttttagtaaaattgtttttttcttttttaattgccatataattcacaattcgtgtaccrtaaaatcatgaaatgctctcttttaaagtgtacaatatagtggtttttaaaatattcagagtattgtatatctatcaccactatcttattccagaacatt

SEQ ID NO: 262576 - DNA, 201 bp, Homo sapiens
tgaaagctgaggttcttaccagcttagactttgattaggtgagtttttcaggagtcaagtcttacaacccatactggtgtggctaaagtgttagtttcctygccttccaacacttttaaatactattgtacttactgggcaatctcaaaaaggagcaataagttactctgtttttcattactctgtttttcatattaatga

SEQ ID NO: 262577 - DNA, 201 bp, Homo sapiens
ctaatgctgctgctgatctgacaggaggtggcactcaggcagtaatgctcgccaggttgcctgctgcctacctcctgctgtgcagcctggctcctaatagsccacagactggtactggtcagcatcctggggcttggggacccctgctttaggatatttccctacaggcttttaagtttgaattcttttattttttattta

SEQ ID NO: 262578 - DNA, 201 bp, Homo sapiens
gaatgagcactgggtgaggaaccaagagacaccatcccagtcccatttactgctgtcactagctccggaacctcaggcaggtgctcagccttggttccttrgagcctctgcgactctgttcctgccaggagtttcagaggcgctgttagctgtggtttgttttatttcaaatgtgtgcaggctttttgctggcttcccatt

SEQ ID NO: 262579 - DNA, 201 bp, Homo sapiens
tgctcgccaggttgcctgctgcctacctcctgctgtgcagcctggctcctaataggccacagactggtactggtcagcatcctggggcttggggacccctrctttaggatatttccctacaggcttttaagtttgaattcttttattttttatttattttatttttatctttttgagacagggtctcactctgtcacctag

SEQ ID NO: 262580 - DNA, 201 bp, Homo sapiens
tggtctgaacccgggaggtggagcttgcagtgagccgagatggcgccattgcactccagcctgggcggcagagcgagactccgtcacaaaaaaaaaaaaaagaaaaaaaaaaattcaagccaggcacagtggcttacgcctgtaatcccagcactttgggaggccgaggtgggtggatcacgaggtcaggagctcaagacc

SEQ ID NO: 262581 - DNA, 201 bp, Homo sapiens
taaaggaattacacagcagttaaaagtttgtaaaactggaatgctcagcaaggaaatgctaagatcatattgtccagtcactcactcagtataggaaagastttcttccctaacaacttcctctaggtgatttctattcaaatgctcacagcaggttagcctcttctgcctaatggttctacctgtgaaaaacttttttcc

SEQ ID NO: 262582 - DNA, 201 bp, Homo sapiens
tttctgtccaggagcaggacacatgggagtcaactagtaggagaaagtagaagaagctgttcttttcattttcttcttggatgcacccagtacccttgcakactgaagaagcagtagaaaacagaggcagggagggccctgcaggcctggctagcaagcggagggcagtggggtaccagctctcagaatagtgagcatggt

SEQ ID NO: 262583 - DNA, 201 bp, Homo sapiens
aagactttcttccctaacaacttcctctaggtgatttctattcaaatgctcacagcaggttagcctcttctgcctaatggttctacctgtgaaaaactttwttccttctcatgaagaccttcccttgctcccctgggacagactttcttgtagcttcaagggactgctttttcaagggcacttcagtgctgggtaccatta

SEQ ID NO: 262584 - DNA, 201 bp, Homo sapiens
aggatggtctttttaacaaatggtactgacacaagtagctatctatacacatgagtgtgaagtcaggcccctactacatctcctatgcaaagacaaactcmaaatgtatcaaagacctataaaactcttagaagaaaacataggaataagttttcatgaccttggattaggcgatggtttcttagaaatgacaactaaagc

SEQ ID NO: 262585 - DNA, 201 bp, Homo sapiens
tgtaaaaaaaagtttctcggcacatacccactcatttgcatgtcatttatggctgcttttgcactacaattacggagttgagtattgggatggagatcacrtatgtcctccaaagcataaaatatttaccatctggttctttatggaaaaaggatgctgacttatgttctcaattgagagcatataggaagggattggtct

SEQ ID NO: 262586 - DNA, 201 bp, Homo sapiens
aaagcgatccctttttgagagctgttgttaacaagtgtttctgatctgagttttggagtttctttccctttcctgagaggcgtgaaggcacatgaagcagrttattaggctttggtgtatcgtgtctgctcctaggtttcgaccctggctgcttgatgtgtgctagtgggtgagactgggagaggttgtttagatggaatg

SEQ ID NO: 262587 - DNA, 201 bp, Homo sapiens
gggtcttgccatgttgcccaggctctgttatttaattttttggggcaattgccatactgttttctacagtggctatcccattttactttatttttcttgartaatgtcagataagactgggcacgctcagggtggtttggtttggctgtagactttcctgttaatttcaaaccaaaattatatgaccaacataaggaattc

SEQ ID NO: 262588 - DNA, 201 bp, Homo sapiens
gaccccgtctcaaaaaataaatagataaaacaaagggtaggaatgttttaaatgttaatagattgcaaagtgaccatccagagaagctgtactaagagacrgtgatacacttggggagaagagagagcaaggaagaaccttgagctcacagccaagctctgtgaggcaagtgtgagcagtgctgtgattaggagcagtggg

SEQ ID NO: 262589 - DNA, 201 bp, Homo sapiens
cctctaggtgatttctattcaaatgctcacagcaggttagcctcttctgcctaatggttctacctgtgaaaaacttttttccttctcatgaagaccttccyttgctcccctgggacagactttcttgtagcttcaagggactgctttttcaagggcacttcagtgctgggtaccattagatgttgtaattgctgggtttct

SEQ ID NO: 262590 - DNA, 201 bp, Homo sapiens
ttgaaggaccccaggttgaccaactagaatcatcgttactagaataatgaactcacttataactaaggagttgagaatggtttttgaaatcattattattrtggactttgttgggttcttattttattaatgcctaactcctattggaggatgaataagaattgtctttttaattgcccagaggtactatttgttaaggtg

SEQ ID NO: 262591 - DNA, 201 bp, Homo sapiens
gtttgataataaaaggtatttatggtttccgtcaaataagtttttctttttctttttttgttttaaccttcttaaggaaaggagctccaaccacttccctyattagtgtggctgtcacaaagtaagtacatgtggctttctttttcctgggtatggaataatattgaaagggttattgataggccctgactttttaatctg

SEQ ID NO: 262592 - DNA, 201 bp, Homo sapiens
ccactataaggcatctggaatcttctccagtctgctgtacgtttgttcttattaacttgatgggcattaaattaacatgcttctgcatgttccatcctttktctgtcctcaggatctggccatgcactgattgagcagtggaatcccgtaggcctggttggaatcatcacggcattcaatttccctgtggcagtgtatggt

SEQ ID NO: 262593 - DNA, 201 bp, Homo sapiens
gctcaagcattcctctcgcctcagcctcatgaatagctgagattacaggcatgtgcctccacaccagctaattaaatttttttttttttttttttttttttagaaacaggccctcactatgttgcccaggctggtcttaaattcctgggctcaagccatccacctgccttggcttcccagagtgttgggattacaggcatg

SEQ ID NO: 262594 - DNA, 201 bp, Homo sapiens
gcctagaagattatttagaatagtggtttaggaattggaaagtggtgggctggaaaagagcaagggtaatatgttttctttttttttttttttttttttttgagacagtctttgttgcccaggctggattgcagtggggccatctcagcttactgtagtttctgcttcctgggttcaagagattctcatgtctcagcctcc

SEQ ID NO: 262595 - DNA, 201 bp, Homo sapiens
tttgggaggccaaggcaggtggatcacaaggtcaggagatccagaccatcctggctaacacggtgaaaccccatctctactaaaaatacaaaaaattagcsgggcgtggtggcgggctcctgtagtcccagctactcgggaggctgaggcaagagaatggtctgaacccgggaggtggagcttgcagtgagccgagatggc

SEQ ID NO: 262596 - DNA, 201 bp, Homo sapiens
tactgtgctttatggatgatttccaaggtttttgaggataatattggctatcaatttttggctgtcaggatgaattttagactttaaccccagcataagayaacatttgactaatctgtcaactgtttaactatgtaggcattgcttttaaaaaggaatttattaaaaaacagctaatgaaaaaggtcagcaaggttgcag

SEQ ID NO: 262597 - DNA, 201 bp, Homo sapiens
agccaccgcaccaggcctagaatagacatcttaaatggccgattagcacatgaaaagattctcaacatcattagtcccacgagcagatttcatcttctcasctttctccccttttccttactcaaggcggtagtttgttgttcttggctaagtagtaatagtagtagtagtagaattataatttttaaaatgtatctgcct

SEQ ID NO: 262598 - DNA, 201 bp, Homo sapiens
aattagctaggtgtggcggcatgcccagctacttgggaggctgaggcaagagaattgcttgaacccagaggcagaggttgcagtgagctgagattgcactrctgcattccagcctggcaacagagtgagactctgtctcaaaaataaataaacatatgtctaaaattgaggcaaacacatctctcagatctttatgctggg

SEQ ID NO: 262599 - DNA, 201 bp, Homo sapiens
gcatgcccagctacttgggaggctgaggcaagagaattgcttgaacccagaggcagaggttgcagtgagctgagattgcactgctgcattccagcctggcracagagtgagactctgtctcaaaaataaataaacatatgtctaaaattgaggcaaacacatctctcagatctttatgctgggaggagtaaggtaagaatg

SEQ ID NO: 262600 - DNA, 201 bp, Homo sapiens
acccgggaagtggaggttgcagtgagctgagatcatgccactgcactccagcctgggtgacagagtgagactctgtctcaaaaaaaaaaaaaaaaaaaaaagacatggcttatgattttattctattatctacctaaaaggaaaattttgacttcatatagttaatattaaaatgataaattatataattaaaaaaataaa

SEQ ID NO: 262601 - DNA, 201 bp, Homo sapiens
cccagaaattgaggctgcagtgagctatgatagcaccactatattccagcctgggtgactcttgaaaaaagaaagaaagaaaaaaaaatggtgggccggtygcgatggctcaagcctgtaatcccagcactttgggaggctgaggcgggcggatcacccgaggtcaggagttcaagaccagcctggccaatatggcaaaac

SEQ ID NO: 262602 - DNA, 201 bp, Homo sapiens
tgatctcagctcactgcaacctcgcctcccaggttcaagcgattctcctgtctcagcctcccgagtagctgggattacaggcacccattaccatgcccagmtaatttttgtatttttagtagagaaggggtttcaccatgttggccaggctggtctggaacttctgacttcgtgatccactgtccttggcctcccaaagtg

SEQ ID NO: 262603 - DNA, 201 bp, Homo sapiens
gtctgggaggcagaggttgcagtgagccaagattgtgccagtgcactcaagtctggggacagagtgagaccctgtcttcccccgcaaaaaaaaaaaaaaaagttttgggctgggcatggtggctcatgcctgtaattgcttaagcccaggagtttgagatgaacctgggcaacatggtaggaccctgtctctacaaaaatt

SEQ ID NO: 262604 - DNA, 201 bp, Homo sapiens
ccaccccaagataataggggttccactaccaattgactggagttggactaggagatgagactgatattcagtcctactcctagaacaatatggacgaagtycagtgtcatttagagaacaaaacaagataaaaataaaaagaattattaaactatagctaaaaatagagtcttgcacttttataaaaacattttaagtagt

SEQ ID NO: 262605 - DNA, 201 bp, Homo sapiens
ggcacccatcaccgtgcctggctaatttttgtatttttattagagatgggattttgccatgttggccaggctggtctcaaactcctgacctcaggtgatcwgcctgccttggcctcccaaagtgctgaaattacaggtgtgagccaccgcacccggcctctcacacttttcatatttgttttttcaggtgttttgcataaa

SEQ ID NO: 262606 - DNA, 201 bp, Homo sapiens
agtagatatatgaaggttcaggataaaatatgagataaacactttaaaactctatagcatgccaagctagctgccagggaaaccagattgggtagtggacyagtgttggagtttatgaagtgtgtggtcctcatttcctgtgtcatcttaatcctgggctgtgtaggccatagagtcaccttctcctgaaccgtggtactg

SEQ ID NO: 262607 - DNA, 201 bp, Homo sapiens
aaaaatgatccaaagtaaaataaaacagattgcttgttttttttaaatatagaagcaaaacaaacatgcattaatacttgtaaaagtttatatcattagtrgcattcttttacatttttagagcagatactacaattactatttgatgcacggactttgctgttttcagttcaccccttgcccctgcactccactgtgcag

SEQ ID NO: 262608 - DNA, 201 bp, Homo sapiens
tatcttgccttctgaaagtaagcaatgaaattagttaagctgagttttgtactctgatatacagagctccaaaaaaaataaaatactctggctattgactrtgcaaaagagaaatttcaagtggcataaatatgtgaaaatatcctcaatctttcaaagaaatgcaaattaaaacagatgaaaatgttagatcaagaacct

SEQ ID NO: 262609 - DNA, 201 bp, Homo sapiens
tatttttgtgttctagaagatcatcatcatttctctttatttccccctttctgtccccctaattcttaatttaggccagtgtggcagactatgaagaaacygtaaagaaagcaagagaagcatggaaaatctgggcagatgtaagtatggcctttgtttctagaattcagaaaagatcactttgcctattgtaaccaatga

SEQ ID NO: 262610 - DNA, 201 bp, Homo sapiens
gtaaaacagggactttcaagtagcatctttaccaaagatctgggcagaatctttcgctggcttgggtacaactttgtctattttgaaaatttatataagtstgatttatgtggtgagtggacttaaaaaaactgctgtagtctaaaatcagtttttcagtattgaaagcctttgagctttggtttagattttttatttatt

SEQ ID NO: 262611 - DNA, 201 bp, Homo sapiens
taaactagagattggcaaacagacttggctctgcctgtttctgtaaaaaaaagtttctcggcacatacccactcatttgcatgtcatttatggctgctttkgcactacaattacggagttgagtattgggatggagatcacgtatgtcctccaaagcataaaatatttaccatctggttctttatggaaaaaggatgctga

SEQ ID NO: 262612 - DNA, 201 bp, Homo sapiens
ctttaattctcttcatttcctgcatctgtgtgtcctgtcaattctactcccaaaacagaccgtgaatccacttgctgtttcccttgttaccactgcaatcttttttttttttttttttttgagatggagtgtcactttgttgcccaggctggagtgcaatggcgtgatctcagctcactgcaacctctgcctcctgggttc

SEQ ID NO: 262613 - DNA, 201 bp, Homo sapiens
  misc_feature (1)...(201): n = A,T,C or G
aggtcttggccacgatgcgtccattgcacacacagagacttttgctccgattctctatgtctttaaattcaaggtaaaaatgcattctgttcgctagcctnatgttgaaataaatgataagaggaaaatgatggtggattaaatttcactggatgaacctttaagagggttttagaaagtaatctgaatagtagatatatg

SEQ ID NO: 262614 - DNA, 201 bp, Homo sapiens
  misc_feature (1)...(201): n = A,T,C or G
gaaataattcacctataaatgatgctaatttttttctttataaatgtaggcaaagattgcatcctctgaccccaagtcctagaaaacaaaatgctttcatnctttttatttcatttctctgcattaggttatggatcgccctggaaattatgtagaaccgacaattgtgacaggtcttggccacgatgcgtccattgcaca

SEQ ID NO: 262615 - DNA, 201 bp, Homo sapiens
ccggagtctttcaccagatggcagcagcccactcctccctgtagcactcccattgttccaggcaggattcagccgcaggctcctccggaagaccaggggcmgacggggcggtggcggggtcgtgcccagtgggaggggtcgggtctgcccaatgggttctcccgggcggggggcggggctctatttcagcagctctcaggg

SEQ ID NO: 262616 - DNA, 201 bp, Homo sapiens
gaggcaggagaatcgcttgaacccgggaggcggaggtggcggtgagccgagatcgtgccattgcactgcagcctggacaacaagagcgaaactccatctcaaaaaaaaaaaaaaatgaggttaagagtgtaagcaatttgtgatgtttgcaatgtggatagagcaaaacaggtgactgtatgtctgcattggcaatggtgg

SEQ ID NO: 262617 - DNA, 201 bp, Homo sapiens
gggcgtgaaaaggaaagaaccatagaaaaggtgaagcgtagaaagattaggcagggggccatttaaggcagtgcttctgaagtacctgaggattttgttaraatgaagcttctgatttccgaagtctgggttggagctcaaggttctgcatttctaatatgccttacatgttcccagatgaagctgacagattttgctttg

SEQ ID NO: 262618 - DNA, 201 bp, Homo sapiens
cagtgtgctaggtaaagttcaccctacctggatagagaatactgtccaaaacagtgtccttcattgttttaaaaacttacttgtatttatttctgatcatraaagtaataaatattctttttttttagaaaagattgatgctgtaaataagataaacaaatttagtccccttaccccaacctctgcaatgcaaaatgttca

SEQ ID NO: 262619 - DNA, 201 bp, Homo sapiens
catggcaaaagcctgtctctactaaaaatacaaaaaattagccaggtgtggtggtgggtgcctgtaattccagctgctcgggaggctgaggtataagaatygcttgaacccgggaagtggaggttgcagtgagctgagatcatgccactgcactccagcctgggtgacagagtgagactctgtctcaaaaaaaaaaaaaaa

SEQ ID NO: 262620 - DNA, 201 bp, Homo sapiens
atctccttctgctttcaaagcgatccctttttgagagctgttgttaacaagtgtttctgatctgagttttggagtttctttccctttcctgagaggcgtgwaggcacatgaagcaggttattaggctttggtgtatcgtgtctgctcctaggtttcgaccctggctgcttgatgtgtgctagtgggtgagactgggagagg

SEQ ID NO: 262621 - DNA, 201 bp, Homo sapiens
ctcgaacacctgacctcaagcagtctgcctgcctgggcctcccaaagtgctaagattacaggtgtgagccattgcgccaggcctgcttttagattaaaacygagagtcctcttgatttcttcttttttgcaggctcccgatccttcctggtctgctctctgcctcctgccccgcttgccttctcaccagcctttctgtgtc

SEQ ID NO: 262622 - DNA, 201 bp, Homo sapiens
ggatggctctgctaacatgcctcctcctcatagaggcctacctacatcttccttcttctttgttgctgggtcactgtcagtgctctagtccccagcagccrtaacataggacagcatcattctcttcccccttgaattatacaccaactactgagactgtgatgtttccttagagaatggtcacactgtaatgagtaaact

SEQ ID NO: 262623 - DNA, 201 bp, Homo sapiens
tggaacttctgacttcgtgatccactgtccttggcctcccaaagtgctgggattacaggcgtgagccaccgtgcccagccagaaatacacgttttaaagartgacaacaatgcttgctttggcagcacatatactaaaattggaaagatacagagaagattagcatggcttatgcacaatgatgatatgcaaattcatatc

SEQ ID NO: 262624 - DNA, 201 bp, Homo sapiens; identical to SEQ ID NO: 52350

SEQ ID NO: 262625 - DNA, 201 bp, Homo sapiens
tggaaattatgtagaaccgacaattgtgacaggtcttggccacgatgcgtccattgcacacacagagacttttgctccgattctctatgtctttaaattcmaggtaaaaatgcattctgttcgctagcctaatgttgaaataaatgataagaggaaaatgatggtggattaaatttcactggatgaacctttaagagggtt

SEQ ID NO: 262626 - DNA, 201 bp, Homo sapiens; identical to SEQ ID NO: 52352

SEQ ID NO: 262627 - DNA, 201 bp, Homo sapiens; identical to SEQ ID NO: 52344

SEQ ID NO: 262628 - DNA, 201 bp, Homo sapiens
aaaacattttaaacattttagactgggcatggtggctcaagcatagaattctaacactttgggaggctgaggcaggagtattccttgagcccagtagttckagaccagcctgggcaacaaagtgattccctgtctttataaaaagttaaaaaaaattagcaaggcatgatggctcatgcttgtagtcccagctacttggga

SEQ ID NO: 262629 - DNA, 201 bp, Homo sapiens
  misc_feature (1)...(201): n = A,T,C or G
tctttcgctggcttgggtacaactttgtctattttgaaaatttatataagtctgatttatgtggtgagtggacttaaaaaaactgctgtagtctaaaatcngtttttcagtattgaaagcctttgagctttggtttagattttttatttatttttgtttgtttttaatttcctgttcattgctctcaccatgcctcccttt

SEQ ID NO: 262630 - DNA, 201 bp, Homo sapiens
atcctctgaccccaagtcctagaaaacaaaatgctttcattctttttatttcatttctctgcattaggttatggatcgccctggaaattatgtagaaccgrcaattgtgacaggtcttggccacgatgcgtccattgcacacacagagacttttgctccgattctctatgtctttaaattcaaggtaaaaatgcattctgt

SEQ ID NO: 262631 - DNA, 201 bp, Homo sapiens
ttgcttgagcccaggaggttgaggctgcagtaagccatgatcatgctagtacaccccagcctgggcaacagagtcagaccctgtctcaaaaaaaaaaaaaattaataaaaataaaaaaaggctgcatgatatttcactgtattgttataccacatttactaattcatcagatgatgcacatttgggttgctgccacctttt

SEQ ID NO: 262632 - DNA, 201 bp, Homo sapiens
ctgggcatggtggtgcatgcctgttgtcccagctacttgggaggctgagatgggggaattgcttgagcccaggaggttgaggctgcagtaagccatgatcatgctagtacaccccagcctgggcaacagagtcagaccctgtctcaaaaaaaaaaaaaattaataaaaataaaaaaaggctgcatgatatttcactgtatt

SEQ ID NO: 262633 - DNA, 201 bp, Homo sapiens
aatgctactttataaattagaaaataagttgaaaaataattgggatagggtgtaatcaggataggctatatgattgggataggctatataaaaaataattkgacaggctatataatttaataattgggattaggctgtgtagcagtgtgcagtaaatatggaagtaggcattaatttttatatataatttttttcttttaa

SEQ ID NO: 262634 - DNA, 201 bp, Homo sapiens
cgctctgttgcccaggctggagtgcagtggggagatcctggctcactgcaacctctgcctcccaggttcaagtgattcttctgcctcagcctcccaagtarctgggattacaggcatgcgccaccatgtccgactaatttttgtatttttagtagagacagggtttcaccatcttggccaggctggtctcaaactccagac

SEQ ID NO: 262635 - DNA, 201 bp, Homo sapiens
gtttgcaggggagatattgtgggctaaatgtaaagtaaataatcaggttgttctggtgtccttttggtatcttcttttcattgataccaactatgagcccrcatggaaactgctcagaagatatgatattattttttatttctctaggaggagaaaagcacactggtggtggcagggagtctggcagtgatgcctggaaac

SEQ ID NO: 262636 - DNA, 201 bp, Homo sapiens
tgtaaaataggacatatttgggaggactaataactgtatttcttactttaacaagagaaaaaactctgcttgtccacaattctttttttttttttttttttgtgacagagtcttgctctgtcgcccaggctggagtgcaggggcgcggtctcggctctctgcaagctccgcctcccaggttcacgccattctcctgcctca

SEQ ID NO: 262637 - DNA, 201 bp, Homo sapiens
ctctcttgtttttcttccccgtttggtctattcccttacttcaaaagggattacgttttctatacatgatcatcatccttttgttttaaggttattacgamctattgccctgctaacaacgagccaatagcaagagtccgacaggtaagagtgtgtgtgtgtgtgtgtgtgtgtgtgtgtgtgtgtttaattcaaattata

SEQ ID NO: 262638 - DNA, 201 bp, Homo sapiens
ctgtaaaataggacatatttgggaggactaataactgtatttcttactttaacaagagaaaaaactctgcttgtccacaattctttttttttttttttttttgtgacagagtcttgctctgtcgcccaggctggagtgcaggggcgcggtctcggctctctgcaagctccgcctcccaggttcacgccattctcctgcctc

SEQ ID NO: 262639 - DNA, 201 bp, Homo sapiens
tagatggcaaacagttacttgttttttacttttgtgttcagtggaagaaattaaataaggaaaatcaggacaattgtctttagctcattttgcttgcatcygttccactagttattaatttgttttaaatgtgtggtactcagttgaatgtattcaaaaactaactgtaaaataggacatatttgggaggactaataactg

SEQ ID NO: 262640 - DNA, 201 bp, Homo sapiens
aaaattccttttcaagtacagtaggagactttgtattcagagcaattataatctatttattggttattttaaaaagtcagttaaggcaaggaataaaaaaatacatatcataagcattaaaaaagaaattaacacatattgccaggtgcagtggctcacacctgcaatctcagcactttgggaggctgtggtgggaggatt

SEQ ID NO: 262641 - DNA, 201 bp, Homo sapiens
actcagctcactgcaacctccgcctcccaggttcaagcaattctcctgcctcagcctcccaagtggctgggattacaggcatgcgcaaccatgcccggctmattttttgtatttttagtagagatggggtttcacgatgttggccaggctggttttgaactcctgacctcaggtgatccacctgccttggcctcccaaaat

SEQ ID NO: 262642 - DNA, 201 bp, Homo sapiens
taatgaatatcattatgatttacaaggtagtgtggtaataaccacttttgttgtacattagttaatgtactgatatcccatggctgtgtagcaatttcccactataaggcatctggaatcttctccagtctgctgtacgtttgttcttattaacttgatgggcattaaattaacatgcttctgcatgttccatcctttttc

SEQ ID NO: 262643 - DNA, 201 bp, Homo sapiens
tcataaggggaaaaaatctaagccaattttggtagactattagcatgtactaaaaataatgtttgtgaaggttgtcttcccctaacccacacttttacggraggattttatttacttatttttaaattatactaatgttaattttttttgaagaaacgatagattcatatcagaaaataagaaagcaataaaaggttgaag

SEQ ID NO: 262644 - DNA, 201 bp, Homo sapiens
tatatcttggaaattgtttttttgttttctttttttgagacaggattttactgtcttgcccaggccagaatgtagtggcatgatcacagttcactgcagcmtcaacatccccgggatcaggtgatcctcctacctcagctaggactgtaggtgcatgccaccatacctggctatttttttttttttgtagaggtggggttt

SEQ ID NO: 262645 - DNA, 201 bp, Homo sapiens
gaggcaggagaatcgcttgaacccgggaggtggaggtcgtagtgagccgagatcgtgccattgcactccagcctgagcaacaagagcgaaattccgtctcaaaaaaaaaaaaaaaaaaaaaaattaaaaccttatggtcttgggatctatggtcttgtgagaaatgtggcacactgagcggtgcaactgatcttaatttag

SEQ ID NO: 262646 - DNA, 201 bp, Homo sapiens
tgcttcaaagccagaaaattttatatgaaatattctggtttttatttgcaaagtaggcatataaatgttaaacatactctttttcactagatggaatacaragttgtttcttttcactgggccctgctcctgtttcctcttaataagccatacattattaatgctgaaacttggtagtagtttttccttaaaaactctccc

SEQ ID NO: 262647 - DNA, 201 bp, Homo sapiens
ttctccaacctgggcaacagaagaaaactctgtctcaacaacaacagcaataacaacaatacagtcaataaacctccaatttggggatatgtacatgtgcragcaggtaactatttgatttatacctactatgatgcctgcctcacaattaacaattaaaatttttctcaattgcttgcacattttcgtttgtttatttga

SEQ ID NO: 262648 - DNA, 201 bp, Homo sapiens
gaggttaatgtagtgattcctgcgatcagtgcagcaagctgattcagaattgcttggtgccatttttatgttcatgaaagttttgttgttccttaggtctsaaagacacccagctgaaggacagatttctgtttcagttactagactcacttgttagttgtctaattggacagagctttttctcacacttttgcttctgtt

SEQ ID NO: 262649 - DNA, 201 bp, Homo sapiens
ctgggcatggtggtgcatgcctgttgtcccagctacttgggaggctgagatgggggaattgcttgagcccaggaggttgaggctgcagtaagccatgatcytgctagtacaccccagcctgggcaacagagtcagaccctgtctcaaaaaaaaaaaaaattaataaaaataaaaaaaggctgcatgatatttcactgtatt

SEQ ID NO: 262650 - DNA, 201 bp, Homo sapiens
gagtacaggtgcacaccaccacacccagctaattttttgtgtttttagtagagatggggtttcaccgtgttagccaggatggtcttgatctcctgacctcrtgatccacctgcctcagcttcccaaagtgctgggattacaggcatgagccaccacgcccggctattattattatttttgagatggagtcttgctctgtcg

SEQ ID NO: 262651 - DNA, 201 bp, Homo sapiens
gtgaacccctgaaatggtggcatttgttttctggggagaagtttccagacccaaaaaagattaagaatccctgcttcaaagccagaaaattttatatgaamtattctggtttttatttgcaaagtaggcatataaatgttaaacatactctttttcactagatggaatacaaagttgtttcttttcactgggccctgctcc

SEQ ID NO: 262652 - DNA, 201 bp, Homo sapiens
agaagcaaaacaaacatgcattaatacttgtaaaagtttatatcattagtagcattcttttacatttttagagcagatactacaattactatttgatgcayggactttgctgttttcagttcaccccttgcccctgcactccactgtgcagttgcctgaatgcatgagtgtctatcttctccttttgtactaatttaatcc

SEQ ID NO: 262653 - DNA, 201 bp, Homo sapiens
tctatcttctccttttgtactaatttaatccctgtttccaacccatgcctgctctctctgattgactattccttttttttttttttttttttttttgagcygggggcttgctatgttgcccaggctggagtgcagtggcgcgatcacagctcactgcagccaccacctcccaggctcaagcattcctctcgcctcagcctc

SEQ ID NO: 262654 - DNA, 201 bp, Homo sapiens
acccatgcctgctctctctgattgactattccttttttttttttttttttttttttgagctgggggcttgctatgttgcccaggctggagtgcagtggcgygatcacagctcactgcagccaccacctcccaggctcaagcattcctctcgcctcagcctcatgaatagctgagattacaggcatgtgcctccacaccagc

SEQ ID NO: 262655 - DNA, 201 bp, Homo sapiens
agttaaattgtcagatttcttctataatttttatgaaagaacacttttggacattatttatcctaacagaaactggggaatgttctgaagtagaggccatytattaccgttccacctgagataggcttaattgtcacttctttctgttttcaacttctccttttctatcaacagctctttggtattgtgtagtgagcctaa

SEQ ID NO: 262656 - DNA, 201 bp, Homo sapiens
actgcagcctcgacctcctcatctcaagggatcctcccacctcagcctcttgagatgtagaccactgtgcccaactaatttttaaaatattttgtagataygcagtctagttacatcgcccaggctggtcttgaactcctggcctcaagcaatcctcttgcctcagcgtcctaaagtggaactacaggcatgagccaccat

SEQ ID NO: 262657 - DNA, 201 bp, Homo sapiens
tttaaaattgcattaattttgtttcattatgaagtcacattaatagtcctgaaaaatatcttcttgctgttgttatgttaaaattaaaacagttttgctcwtttttcccattttctccttataggaatatatgtgtgtatttgtatatatatttatttgtgtttatgcttctattaccaggtttctttaaatcatgtcttg

SEQ ID NO: 262658 - DNA, 201 bp, Homo sapiens
tatgtaagttgtaaaactcctagatcttgaaacttaaaaaaaaaaattaaaaaaaaatttttttagagacaggttcttgttctattactcaggctggagtkcattggtgcaatcatggctcactgcagcctcgacctcctcatctcaagggatcctcccacctcagcctcttgagatgtagaccactgtgcccaactaatt

SEQ ID NO: 262659 - DNA, 201 bp, Homo sapiens
tgcttttgctgaatctctatgaaaaacaaaatccattatttttaggtagaaacagttccaggactccatgggaatctgttgccattttgtcacaaaagttsagagattttgcagattaactgtaatcttaaatctggaagtcaactccataaaccttaaagcaaagaattagaacaattcataccagatgattttagcata

SEQ ID NO: 262660 - DNA, 201 bp, Homo sapiens
ccgatttttaaaaaaataatctatcgttaactttattgattcagtaagttagttttcgtgtgtgtgtgtgtgtgtgtgtgtgtgtgtgtgtgtgtgtgtgkatctgtaggtgtctgatattatagtttcttagtacctatttgagaggccacctggtgtaaagtgcagaaagcctggattctatttccagtctctcattga

SEQ ID NO: 262661 - DNA, 201 bp, Homo sapiens
ctacactctcacttccattcccaccaattcatcacttcactgaaactgtacttgccaaggtcaactgtgtccttcatgttgtcaaagtcagtctgctgtcygggataaatgtgacctctattatttatcactattgtccatatcctcctttttgtactcctgcccttccccagttttcttccttactcctgccccaaattc

SEQ ID NO: 262662 - DNA, 201 bp, Homo sapiens
actcagtcagtctcttggtttggtctctaaaagtaaagggtaagctggtagcttttcttattttttttaaaaaagattatttgcccaaaaaagggagaaaygtttctgagtacatttaagtacttattactgttttaacttcacattcttaattgtatcatatgtagataaaagattcaggtctgtaccaaattcaactct

SEQ ID NO: 262663 - DNA, 201 bp, Homo sapiens
ttgaactactgggctcaagcaatcctccctcattggcctcccaaagtactaagattacagacatgagccactgggcccagccgatttttaaaaaaataatctatcgttaactttattgattcagtaagttagttttcgtgtgtgtgtgtgtgtgtgtgtgtgtgtgtgtgtgtgtgtgtgtatctgtaggtgtctgatatt

SEQ ID NO: 262664 - DNA, 201 bp, Homo sapiens
tcattacgcccgcgctcctcgcctggccgtgatatcaatggcgcaggcttcacttctgctgtggcggtgactgaggcctttctggtgacctcagcccaacrcaggccgtctccggagcttcccggtagtggccccggattcccacggtctttgtcattggctgtcagctagcaggcctggccgctcccgtgcggagagacc

SEQ ID NO: 262665 - DNA, 201 bp, Homo sapiens
aagcactgaattactgatatgtaagttgtaaaactcctagatcttgaaacttaaaaaaaaaaattaaaaaaaaatttttttagagacaggttcttgttctrttactcaggctggagtgcattggtgcaatcatggctcactgcagcctcgacctcctcatctcaagggatcctcccacctcagcctcttgagatgtagacc

SEQ ID NO: 262666 - DNA, 201 bp, Homo sapiens
attttcatgtttttatgtgaattttctccaagatgcaagttgagtatttaatttttttttattatttagtacagggaagaccatttgaagtaaaagaaatrtttctggaagatattttaagaacaactggatatacaaacaaagaaatgttaaaatataaaaaggaaaaacagcaaggtaaattttttaataaaagaaata

SEQ ID NO: 262667 - DNA, 201 bp, Homo sapiens
catgagaacacagttgcttggtcaacttagagcatcaggtaaagtttttccctcaaagagcctatttaagttactgagagtaccctgcccatatttcatastatttcttatgttaactgatgccatctattatttttatgacattatcatgttgtgtatcttatattcatgcatgatttgtagacttcgatatgtcttcaa

SEQ ID NO: 262668 - DNA, 201 bp, Homo sapiens
cacaggctactatggaaataatcataggcatgagaacacagttgcttggtcaacttagagcatcaggtaaagtttttccctcaaagagcctatttaagttmctgagagtaccctgcccatatttcatagtatttcttatgttaactgatgccatctattatttttatgacattatcatgttgtgtatcttatattcatgca

SEQ ID NO: 262669 - DNA, 201 bp, Homo sapiens
cctcaaagagcctatttaagttactgagagtaccctgcccatatttcatagtatttcttatgttaactgatgccatctattatttttatgacattatcatrttgtgtatcttatattcatgcatgatttgtagacttcgatatgtcttcaacttttgcttgttgatgaaaaaatgctattgcaggaggtgtatttgagaaa

SEQ ID NO: 262670 - DNA, 201 bp, Homo sapiens
tttagcagaaaaacccataggaaagcttcactagaaagtccttctccaccacagcaatgctcctgctcattcctttcatcaaacaagggcaattttatgamagtttttgtgggaaatcattaggcatccaccttatagtcctggcttggctccttctgaattattttattttctaatcttaaaatacctataaaggactcc

SEQ ID NO: 262671 - DNA, 201 bp, Homo sapiens; identical to SEQ ID NO: 52353

SEQ ID NO: 262672 - DNA, 201 bp, Homo sapiens
ctggcttggctccttctgaattattttattttctaatcttaaaatacctataaaggactcccatttttcttagggtaataatgtaaaactgcattgacatratgacattccctggaccctcagttctttagggaggactaaatggctggtgtcatcacttacaaaagtgtcttgaacttaatggttgagaaattttatttt

SEQ ID NO: 262673 - DNA, 201 bp, Homo sapiens
atgcccagcagttgtccatgttcctaacttttggtagataacattcgctgaaaaaatgaaagtggtaaagataattgatttttcaagggaagacatattaytcatgtgtggaaagcaaattatatctatttagtggataaaaatgatcgtttttaatgtgaaaaaagtaattgccttatgttttcaatgtaattttaagga

SEQ ID NO: 262674 - DNA, 201 bp, Homo sapiens
aaagtgctgggattacaggcgtgagccactgcacccggactccataccctatgtatcttatataagctggtggttagctctcagggtttgatttgatccartgttttaacaagaatattttataggtggtgttgtgaactttatattgcaatacatcaggaagtacttaatgtctgtcccagaaagacccatactttaaga

SEQ ID NO: 262675 - DNA, 201 bp, Homo sapiens
gtcttgagtagacaccactagagggtaattgacattgccgacctcctgagtagagagcaattatgtggtcctaagaccaattaaaggttggtcttaggacyacatgagtaaacaagctgtttagataaactcctctgtgtctacgagctcagcttttaagagaattcagctgccttcagccaaacactttatgcaaccccc

SEQ ID NO: 262676 - DNA, 201 bp, Homo sapiens
tagctgcggtcccatcagccagcgaagctcacatttattcagtatagattaaatgacaaaggtcttgagtagacaccactagagggtaattgacattgcckacctcctgagtagagagcaattatgtggtcctaagaccaattaaaggttggtcttaggaccacatgagtaaacaagctgtttagataaactcctctgtgt

SEQ ID NO: 262677 - DNA, 201 bp, Homo sapiens
attcttctccaaggtgcagtactaatttttctgcctggatatgacgaaattgttggactgagagatcgcatcctgtttgatgacaagcggtttgctgacartacacataggtaagggctaaagccttatatctgttgcttaaaataacggacaggtcttatagtatgttttctctttcaattgtctgcagataccaagtct

SEQ ID NO: 262678 - DNA, 201 bp, Homo sapiens
tttctgactataataatagttttcatttatttagagtctactctgcaacagatactgcactttgcatgtattatcttaatcatatgaataatcctttgagrtatatattactattgtgttgggctcagagccattaagtagtttacctgtagtgccacaactagtaagtggtagaagtgggattcaagctgaggtctgtgt

SEQ ID NO: 262679 - DNA, 201 bp, Homo sapiens
gaaagcttatcatcatagtttcgatgatgaaaaagtagacttggatttgatcatgcatcttctatacaatatctgccatagttgtgatgctggtaaatacrtgttgtctaaaagaactggagcaaaatatatactttaagaattaatattttaagtgtacaaatttttatataattgcactgatagtagtaagtgaataat

SEQ ID NO: 262680 - DNA, 201 bp, Homo sapiens
  misc_feature (1)...(201): n = A,T,C or G
ttttgggaaagcagcatagtttacttggtattttctgttcaaggatctggacatttccaggtgagccaccctgaatcagtaaaatggggttgttctggctntaggttaaatcatagagatttttagaaaaacaactggcttttcattgcatcagaatgcaagaatgccttttgcttgactgagaataagggatatattgca

SEQ ID NO: 262681 - DNA, 201 bp, Homo sapiens
tgtttatgaagatgttatttaatggagcctcttggttttgaaaggtcaggttacctttcaagaacttatgttttcttttatagggctcaaaatctccttcrccaagaccaaacatgcctgttcgatacttcataatgaagagtagcaatttgagaaaccttgaaatttctcaacagaagggtatctggtctacaactccta

SEQ ID NO: 262682 - DNA, 201 bp, Homo sapiens
tcatagttttattttacatgacatttttacttgaaattttaaactaaaaggaaatatgtcttaactaattttgtataattattttttatttttgtcctccwacatgtgtccagataaactaattttgtacttttaaacaattatcttaaatgatcatgtactttaaataatattgtcatgtatgaaacagtagatatagtt

SEQ ID NO: 262683 - DNA, 201 bp, Homo sapiens
tgcaatataataataagctttagagcatatgttcattgttttctttcctaccaagtcaaggatctgatgattagaaatgattttaaaaagtggtacaggargaaattgttttgttttgttgggaggatcacagagttacattgagggaaaagtcatttgagccatccaaattgaaaaactctaaaattctgtggcgctatt

SEQ ID NO: 262684 - DNA, 201 bp, Homo sapiens
agtcattcttctccaaggtgcagtactaatttttctgcctggatatgacgaaattgttggactgagagatcgcatcctgtttgatgacaagcggtttgctsacagtacacataggtaagggctaaagccttatatctgttgcttaaaataacggacaggtcttatagtatgttttctctttcaattgtctgcagataccaa

SEQ ID NO: 262685 - DNA, 201 bp, Homo sapiens
ttccctcaaagagcctatttaagttactgagagtaccctgcccatatttcatagtatttcttatgttaactgatgccatctattatttttatgacattatyatgttgtgtatcttatattcatgcatgatttgtagacttcgatatgtcttcaacttttgcttgttgatgaaaaaatgctattgcaggaggtgtatttgag

SEQ ID NO: 262686 - DNA, 201 bp, Homo sapiens
ggtgaaactaatttaggtagttcactatcaatgaaaaatgctccaaatacctgcctgctttaagaaattaattagttatatatatatatatatatatatawcattaaatattggaacaaaacttataaattttagagttggaaaaggtaacatgttaagtaatgagtacttttgtacgaactacatgagcgatgacttgtt

SEQ ID NO: 262687 - DNA, 201 bp, Homo sapiens
atgacaagcggtttgctgacagtacacataggtaagggctaaagccttatatctgttgcttaaaataacggacaggtcttatagtatgttttctctttcamttgtctgcagataccaagtctttatgcttcattcaaatatgcaaacatccgatcaaaagaaagtattaaaaaacccacctgcaggtgttcgaaaaatagt

SEQ ID NO: 262688 - DNA, 201 bp, Homo sapiens
gtccagtcaaagcaaaagcggactggaggtcatggcaacagttttttgggatgcgtaaggcattttgcttatcgagtttctggagggccaaagaacagtarcttctgcttattatgacagtgttttgagaagagttagctaaagctttagcagaaaaacccataggaaagcttcactagaaagtccttctccaccacagca

SEQ ID NO: 262689 - DNA, 201 bp, Homo sapiens
tactggtagaaaagtctctgtagtaagaatttgattttatagttaaactgaaaatagaaacaatggaaacataaaagatacgtaatgcttactgtttttcraggatcaggtggggtttttagtaccttttttgatcagatttttgcatatttgaatgaaatataaaggcttaatatcatttaagcctttaaagaggaataa

SEQ ID NO: 262690 - DNA, 201 bp, Homo sapiens
ctgtagccttgaactcttggcctcaagggatcctcctgcttctgcctcctaagtagctggaactataggtgcataccaccacacctggctcttcctataamtattttattctaatagttttatattgtttaaaaaattcatctgaaatttattttattgtattatatcaggtaggaattttactttttcttcatgttattt

SEQ ID NO: 262691 - DNA, 201 bp, Homo sapiens
attttattgtattatatcaggtaggaattttactttttcttcatgttatttccagctcaaatataacttttatttaaaaatctgtccttcccccgacctcycctacccaatttaagaggctatttttgaccaaatactgtctatagtaccagtgtctatttctaaaatttttcttatgtatctttaatctcattatctctt

SEQ ID NO: 262692 - DNA, 201 bp, Homo sapiens
  misc_feature (1)...(201): n = A,T,C or G
ttgtcacaaaagttgagagattttgcagattaactgtaatcttaaatctggaagtcaactccataaaccttaaagcaaagaattagaacaattcataccanatgattttagcatacgctggtaggaaaatgaaatttaaagtgattttcttacatttttatcagtgtaggttttggtcattaaaaattttcactccagttc

SEQ ID NO: 262693 - DNA, 201 bp, Homo sapiens
agtggctgagtcaaccaaaccacaaagatagcagccacccctccccctgggaactcggccccatctcagacagaccaacccactgctgttggctggctggsatcccaagccagtaggtcataattggtgaggtgccatggaagtggatcccacagaatgatgctgcttggcttcctggattcagcccccttcctagggata

SEQ ID NO: 262694 - DNA, 201 bp, Homo sapiens
ttttaactgaaaatgttagtggtaagtttattttaattttaaaaaattacccttacagttatttatggtggaagtatagtttaattcaaaacgtatgtacyaccaataattgcacaaccaaaaattttattttttaaaagtatttattttatttcaaatgtacaaatcaggatcttcttgctagcacagcatagtagaaat

SEQ ID NO: 262695 - DNA, 201 bp, Homo sapiens
tccctttcaatttgcacaccatttactcaatccatggaatgacaacaagaaagtgcagataagcagggatgggcaggtatacaatggcatttttttttttwtttacttttgtttctgtttgttttctgttatccagtgctttaattgaggagaaaatgtaagagtacaaattttatattccatatgcacatgggaaacagg

SEQ ID NO: 262696 - DNA, 201 bp, Homo sapiens
aaattttatattccatatgcacatgagaaacgggttcagatttgtaaagagctagtaaaaatctacttgtaaatgtgtctgattgctcattgcaatcagagtctcaagatgacaacagtatttaacttctcttcagccttaattatgtaaataacaacctttgtatattctttgtgtttcttataattttgttgggcagct

SEQ ID NO: 262697 - DNA, 201 bp, Homo sapiens
caaattttatattccatatgcacatgagaaacgggttcagatttgtaaagagctagtaaaaatctacttgtaaatgtgtctgattgctcattgcaatcagagtctcaagatgacaacagtatttaacttctcttcagccttaattatgtaaataacaacctttgtatattctttgtgtttcttataattttgttgggcagc

SEQ ID NO: 262698 - DNA, 201 bp, Homo sapiens
ttccttctaatgtgtttttaaaggcagtattttcatctctagaagttcaagtcttttaaaaattaaaaaaaaaaaaaatatatatatatatatatatatatgtatatatatcttctggcccggcgtggtttatgtctgtaatcccagtggtttaggaggccaggttgggatgatagcttgaggctaggagtttgagaacaa

SEQ ID NO: 262699 - DNA, 201 bp, Homo sapiens
ctttgataccttgtttattctgtatgcccttggacaaaaatctgaactcctttggattttccccttgaaaaatgtaatcagcaatgctgatttcattgggmagcactgaattactgatatgtaagttgtaaaactcctagatcttgaaacttaaaaaaaaaaattaaaaaaaaatttttttagagacaggttcttgttcta

SEQ ID NO: 262700 - DNA, 201 bp, Homo sapiens
tttccttctaatgtgtttttaaaggcagtattttcatctctagaagttcaagtcttttaaaaattaaaaaaaaaaaaaatatatatatatatatatatatatgtatatatatcttctggcccggcgtggtttatgtctgtaatcccagtggtttaggaggccaggttgggatgatagcttgaggctaggagtttgagaaca

SEQ ID NO: 262701 - DNA, 201 bp, Homo sapiens
ttagtgtctaatctgctgttctttccttctaatgtgtttttaaaggcagtattttcatctctagaagttcaagtcttttaaaaattaaaaaaaaaaaaaatatatatatatatatatatatatgtatatatatcttctggcccggcgtggtttatgtctgtaatcccagtggtttaggaggccaggttgggatgatagctt

SEQ ID NO: 262702 - DNA, 201 bp, Homo sapiens
tttagtgtctaatctgctgttctttccttctaatgtgtttttaaaggcagtattttcatctctagaagttcaagtcttttaaaaattaaaaaaaaaaaaaatatatatatatatatatatatatgtatatatatcttctggcccggcgtggtttatgtctgtaatcccagtggtttaggaggccaggttgggatgatagct

SEQ ID NO: 262703 - DNA, 201 bp, Homo sapiens
ttttagaagagatgtgtagaattggtattatttcttccttgaatatttgatagaattcacttatgaagccatttatttatttatttatttatttatttatwttatttttttttgagacagagtctcactctgccacccaggctggagtgcagtggcgcgatctcggctcactacaagctcagcctcctgggttcacgccat

SEQ ID NO: 262704 - DNA, 201 bp, Homo sapiens
  misc_feature (1)...(201): n = A,T,C or G
aggtgaagatcgcagtcaatatcgcgctggagcgcttccgatacggggaccagagaggtgaggttccggacagggaccatgctggcagtcaggataccccnctcaccccagcgccccccaaacggcggcccaccgagtgatgggggtgcctccgaagagggagggaagacccgggccaccgtccggggcgggcctcagcgg

SEQ ID NO: 262705 - DNA, 201 bp, Homo sapiens
attttagaagagatgtgtagaattggtattatttcttccttgaatatttgatagaattcacttatgaagccatttatttatttatttatttatttatttatattatttttttttgagacagagtctcactctgccacccaggctggagtgcagtggcgcgatctcggctcactacaagctcagcctcctgggttcacgcca

SEQ ID NO: 262706 - DNA, 201 bp, Homo sapiens
ctcctggcctcaagcaatcctcttgcctcagcgtcctaaagtggaactacaggcatgagccaccatgtccagctgaaacatttgaagatgaaaattatatwtaattgtatctcagaaaactagcgtggtggtagaacttcaacaaatggttttctacaaagtgctgtatgaatattggtcattgatttaaacaatagttat

SEQ ID NO: 262707 - DNA, 201 bp, Homo sapiens
acttttatttaaaaatctgtccttcccccgacctcccctacccaatttaagaggctatttttgaccaaatactgtctatagtaccagtgtctatttctaamatttttcttatgtatctttaatctcattatctcttcctgcactaggattctgctttttgttgtttacagtgtgagcataatattcttcttcattatattt

SEQ ID NO: 262708 - DNA, 201 bp, Homo sapiens
cctctatacattccctggggactttatctctatgtgtatattttgcaatcatttaggaactggtgactttcaagtttagagctctgtcttagacctttctrtgaatccagctgccttcaggacatgatcatttggatgttctacaggcactaaaataacactatgagctacatatatttttatttaccctgctgctacttt

SEQ ID NO: 262709 - DNA, 201 bp, Homo sapiens
cattcatgctttgttttttgctcacttttatatgtatgctatttcttttgatttttaccataaccctacaagatgtatcaggtaggtgtccttcatgaatstcactgtctgaaataattgagacccagactagtgaagtgctttccaaaatgattgataagaggataagaaacagaataggatttaaactcaggtatcctg

SEQ ID NO: 262710 - DNA, 201 bp, Homo sapiens
cagaagatctctttgattttctgtagtttgaaaatgatacacttatcttctcttttaaaatatttgttggtggtacttacgcatttatgcttctgtatgckgggttctgacccgcagatcctgacccagtgatggatgagagacatacactgacacagatattttgcctgtcagttaggctgaggggctgggccactcaca

SEQ ID NO: 262711 - DNA, 201 bp, Homo sapiens
cttacatttttatcagtgtaggttttggtcattaaaaattttcactccagttctttttatgtttattttgacttctgatttatctaggaactagaacctcwggttggtgaacagttgctccagttatgggaacgtcttcccttgggagaaaaaaacacaactgattgacactcaggttataccatcttgactttgagtatt

SEQ ID NO: 262712 - DNA, 201 bp, Homo sapiens
tatatcttaatcttaaaattttaaaaactcagccttctcagataaattaaatttagacatgctaatctcctcctcacctctattccttcctcccattttamctacagggattttctaggatgtcttctgagattggaagggaaaagagtcaggactggggctctgctggactaggaggagtatttaaggtggagtggatac

SEQ ID NO: 262713 - DNA, 201 bp, Homo sapiens
ttgattttctgtagtttgaaaatgatacacttatcttctcttttaaaatatttgttggtggtacttacgcatttatgcttctgtatgcggggttctgaccygcagatcctgacccagtgatggatgagagacatacactgacacagatattttgcctgtcagttaggctgaggggctgggccactcacagacactgaggaa

SEQ ID NO: 262714 - DNA, 201 bp, Homo sapiens
tggctgaagataacacgaaatattcccagccatgagtgagctctaggaattgtttggtctacttgttttcctttggatctttccctagccttgggttattyatcttttttctcactcatgttcaggtcagcacttagccaaaaacttgtgggaacccctctgtgtttcctttggagctctctttatgtgcagctcctttct

SEQ ID NO: 262715 - DNA, 201 bp, Homo sapiens
atttctcctctcattatgttcaagttttcctctaccttcttggacataatgaatgtatttataacagatgctttaacattcttgtctcctaattacatcarctctgtcatctctgagactgtttctgtttattacttttggcatttttttcttttacttttctttctgttttgtcttcttgttatccagtgctttgtctgt

SEQ ID NO: 262716 - DNA, 201 bp, Homo sapiens
ggatcacatgaacccaggaatttgattttatagtgagctgtgattgtgccactgcattccagcctgtatgacagagtgagaccctgtccccctaaaaaaarttaataatatcttccatttctcctctcattatgttcaagttttcctctaccttcttggacataatgaatgtatttataacagatgctttaacattcttgt

SEQ ID NO: 262717 - DNA, 201 bp, Homo sapiens
tgtattgtttttactttacatagtcagttacctttatgaagatttcaaagtcagaaaaatatatttttacatttattattactaatcttgtgctcattatwcttttatgttaatacgaatgtccattttgtattatttacttctgcctgaagaacctcctttctgggactctggatacacagatgtaagaccatctcatat

SEQ ID NO: 262718 - DNA, 201 bp, Homo sapiens
cttatcctctcttacaccattggttttagtttctcaagcacgtcttttttccttctgccttacagctttcacaggtatctactctctccttagattgtttscccttattccttatatagttactcctactcaatctttacatcttagtttaagtgtctttcttcaggaaaactatctgtaacttcccatggtctccctctc

SEQ ID NO: 262719 - DNA, 201 bp, Homo sapiens
ttcagtagagacagggtttcaccatgttggccaggctggtctcgaactcctgatctcaagtgatctgctcacctctgcctcccaaagtgctgggattgcaygcgtgagccaccatgcctggccaacagtgttcttttattttacactttactcctttatgttatattgttttcatacattttgtttttatataaatgctat

SEQ ID NO: 262720 - DNA, 201 bp, Homo sapiens
ggatgtccctgctattaatagtatattattgtgggtaaggctgggtgtagtggcttatgcttgtaatcccagcactttgggagcctgaggtggaaggatcrcttgagtctaagagtctgagactagcctgggcatcatagtgagaccttgtctctacaaaaaattaaaaaatcagctaggtgtggtggcacaggcctgtgg

SEQ ID NO: 262721 - DNA, 201 bp, Homo sapiens
  misc_feature (1)...(201): n = A,T,C or G
aaggacattcgcattgatgaggaggtgaagatcgcagtcaatatcgcgctggagcgcttccgatacggggaccagagaggtgaggttccggacagggaccntgctggcagtcaggatacccccctcaccccagcgccccccaaacggcggcccaccgagtgatgggggtgcctccgaagagggagggaagacccgggccac

SEQ ID NO: 262722 - DNA, 201 bp, Homo sapiens
gtgaaactaatttaggtagttcactatcaatgaaaaatgctccaaatacctgcctgctttaagaaattaattagttatatatatatatatatatatatathattaaatattggaacaaaacttataaattttagagttggaaaaggtaacatgttaagtaatgagtacttttgtacgaactacatgagcgatgacttgttt

SEQ ID NO: 262723 - DNA, 201 bp, Homo sapiens
gacagagagattctaaattcacattaaaaaaagagaaagcctcagcaatatataacaaatccctctgaaatagtgaaatacgaattctgtacagttttgaragcaaagacaatggagtttcatgttgagaattcataatatttgaacatatctcatcattgaagaaaataaacattttgttaactaaacaagtagggacca

SEQ ID NO: 262724 - DNA, 201 bp, Homo sapiens
ctttattcatcgactcagtcagtctcttggtttggtctctaaaagtaaagggtaagctggtagcttttcttattttttttaaaaaagattatttgcccaaraaagggagaaatgtttctgagtacatttaagtacttattactgttttaacttcacattcttaattgtatcatatgtagataaaagattcaggtctgtacc

SEQ ID NO: 262725 - DNA, 201 bp, Homo sapiens
actcaatggcttttttagcatttgagtataaattaatgataaatattatttgatcataaagtcttagattttatagaaaattagaataaggcaaattcacstcgaggaattcgtgtagtgatttgtagttacttgttgcctcactaagaagcgattagtaaatgtgtcttgttatgcaattattctctttttataggcctg

SEQ ID NO: 262726 - DNA, 201 bp, Homo sapiens
ctgataaaagacatattaacaagagaaaaacataagcttattaagacatgcatcatgcatacataggggagaactcgatagtaactcaaacatggggcttrtgtggcatcttaataaagaacaatgaatttatttaaaaaatgacaagacaaaggaaaaggactttgaacttgtaggtgcagtaaattgtgggaaggtata

SEQ ID NO: 262727 - DNA, 201 bp, Homo sapiens
ttttgggcctgtgcttggaaacacatgttataaatgtacagttctgtagctacatcatttctatggttacatgggtcttgcattctaaacagctaacttakaaaagcagtccattagagtagacttcctgtccttctcttcagtagcatagtcatgtaagagctgatctggaatgaatagatatcttgggaaggagaattc

SEQ ID NO: 262728 - DNA, 201 bp, Homo sapiens
atagcaataaagtggaaagagttttctacttgttcaacttaattcttctaagtattaaggtaatatgaattttaaactattgatatctgtgagttatttartaaggcaactctttgtcaggaaaaggtcaaaatatctaatttctagaattgggtctctcaaaaatatatagacattttaaaattatgtattttacttgat

SEQ ID NO: 262729 - DNA, 201 bp, Homo sapiens
gcttgtctttccatttccttaacagtgccttttgaagagcaaatgtttttaattttgatggagtccatttcatcagctttttctattatgattagtatttktttgtgtactaagaaattttgtgtaccaaacccaagatcataattttctcctatgtttttagaagttttatagttggcaatcttacattttagatatatg

SEQ ID NO: 262730 - DNA, 201 bp, Homo sapiens
aatgctttaaaactatagatcattcactactggcatgtaggtaggctgtttattatttctttcctatttctttcgaatcctttttttttttttttttttttgaggtggggtcccactcttttacccaggctggagtgctgtggtacaatcatatctactgcagccttgaactcctgggctcaagtgatcttcacacttcag

SEQ ID NO: 262731 - DNA, 201 bp, Homo sapiens
aagtgatcctcccaccttagcctcctgagtagctgggactataggcatgagtcaccacacctggcatagaaggttttgttttgttttgttttgtttttttttttgtgtatgtgttaaaaatttgttgaatttactaaatagcatttgagcatttgttcatataatcagaaattatttagcctattgatgtggtatatagat

SEQ ID NO: 262732 - DNA, 201 bp, Homo sapiens
caagtgatcctcccaccttagcctcctgagtagctgggactataggcatgagtcaccacacctggcatagaaggttttgttttgttttgttttgtttttttttttgtgtatgtgttaaaaatttgttgaatttactaaatagcatttgagcatttgttcatataatcagaaattatttagcctattgatgtggtatataga

SEQ ID NO: 262733 - DNA, 201 bp, Homo sapiens
tcaagtgatcctcccaccttagcctcctgagtagctgggactataggcatgagtcaccacacctggcatagaaggttttgttttgttttgttttgtttttttttttgtgtatgtgttaaaaatttgttgaatttactaaatagcatttgagcatttgttcatataatcagaaattatttagcctattgatgtggtatatag

SEQ ID NO: 262734 - DNA, 201 bp, Homo sapiens
ctcaagtgatcctcccaccttagcctcctgagtagctgggactataggcatgagtcaccacacctggcatagaaggttttgttttgttttgttttgtttttttttttgtgtatgtgttaaaaatttgttgaatttactaaatagcatttgagcatttgttcatataatcagaaattatttagcctattgatgtggtatata

SEQ ID NO: 262735 - DNA, 201 bp, Homo sapiens
gagttcaggtcctgaatatctttgttaattttctgtcttgatgatctgtctaatgttgtctgtggggtgttaaagtctcccactattattgtatgggagtstaaatctctttgtaggtctctaagaacttgtttaatgaatctgggtgctcctgtattagcttgcatatatatttaggatcatgagttctttttgttgaat

SEQ ID NO: 262736 - DNA, 201 bp, Homo sapiens
ttggtctattcagggattcagcttctttctggttcagtctcaggagtatgtatgtgtccaggaatctacctctttcttctagattttctagtttatttgcrtagaggtgtttatagtatcctttgatggtagtttgtattcccatggggtcagtggtgagatcccttgtatcatttttattgtgtctatttgattcttctc

SEQ ID NO: 262737 - DNA, 201 bp, Homo sapiens
ctcaatttccaaacttgttattggtctattcagggattcagcttctttctggttcagtctcaggagtatgtatgtgtccaggaatctacctctttcttctmgattttctagtttatttgcatagaggtgtttatagtatcctttgatggtagtttgtattcccatggggtcagtggtgagatcccttgtatcatttttatt

SEQ ID NO: 262738 - DNA, 201 bp, Homo sapiens
tgctgtcattatgtagttaaggagcaactctcaggctaattatcctgaaactcagttctgctatttcagattttttaaagaatgaaaatggtttgaagtastttggaaatttaagttttatttatcttttcctttttttagttgattacagacatagtgaaaccagtgcaacagctctgatggttgctgcaggacgtggct

SEQ ID NO: 262739 - DNA, 201 bp, Homo sapiens
tttgccgcccaggttggagtgcagcggtgtgatctcagctcactgcaacctccgccttctgggttcaagcaattctgctgcctcagcctccggagtagctrggattacagacgtctgccaccatactccactaattttttttgtatttttagtagatttggcatttcaccatgttggccaggcaggtctcaaactcctgac

SEQ ID NO: 262740 - DNA, 201 bp, Homo sapiens
tgagatgggtcttttgaagacagcatactcgtgggtcttggctctttatccagtttgccattctgtgcctttcacttgggacatttaccccatttaccttyaatattacttttatggttatgtattgttatgtgtgaatttgattctgtcatgatgctagctggttattttgcagacttgtttatgtggttgcttcatagt

SEQ ID NO: 262741 - DNA, 201 bp, Homo sapiens
tttacttccagttatgtgatcaattttagaataaatgccatgtggcgatgagaagaatgtatattctcttgtttttgggtagagagttctgtagatatctmtcaggtccacttgatccagagctgagttcaggtcctgaatatctttgttaattttctgtcttgatgatctgtctaatgttgtctgtggggtgttaaagtc

SEQ ID NO: 262742 - DNA, 201 bp, Homo sapiens
ttagtgctatgaatttccgtcttaacactactttagctgtgtcccagagattgtggtacattgtctctttgttctcattactttcaaataacttcttgatytctgccttaattttgttatttacccaagagtcattcaggagcaggttgttcagtttccatgtagttgtgtggttttgagtgaatgtcttagtcttgagtt

SEQ ID NO: 262743 - DNA, 201 bp, Homo sapiens
tgttttctctttgttctctaattttttaaattgagatgttaggtggttaacttgaaatctttctagctttctgatgtgttcatttagtgctatgaatttcygtcttaacactactttagctgtgtcccagagattgtggtacattgtctctttgttctcattactttcaaataacttcttgatttctgccttaattttgtt

SEQ ID NO: 262744 - DNA, 201 bp, Homo sapiens
aaatttgattgtctatgtatgtttttcatattttgtatctgtgtgttttacttgagagaaaattgcctatctacaaattttactactttgttttttttccrtgtagaaatggaatttccttcttctttgaccagtactgaaagagcctttattcatcgactcagtcagtctcttggtttggtctctaaaagtaaagggtaa

SEQ ID NO: 262745 - DNA, 201 bp, Homo sapiens; identical to SEQ ID NO: 52366

SEQ ID NO: 262746 - DNA, 201 bp, Homo sapiens
gcttgggtttgttttctctttgttctctaattttttaaattgagatgttaggtggttaacttgaaatctttctagctttctgatgtgttcatttagtgctrtgaatttccgtcttaacactactttagctgtgtcccagagattgtggtacattgtctctttgttctcattactttcaaataacttcttgatttctgcctt

SEQ ID NO: 262747 - DNA, 201 bp, Homo sapiens
gtaagaaaaaaatagtttaaaagttgaagttgattgcttgagaaaaatatttttattttttgatagaaatctcatttgaaaaatggatgtacaaaagatarttgcaattatttatggaacttacttcttttactgttactgcaatataataataagctttagagcatatgttcattgttttctttcctaccaagtcaagga

SEQ ID NO: 262748 - DNA, 201 bp, Homo sapiens
gttatttttatatattgctggatataattttgttaaatgagggatctttgttcatgaggggtattattctgtagttcttttttcttatgtatctttgtatkgttttgatgtcagagtaatgccggcctcataagattagttgggaagtgtttgtcccacttcagtattttagaagagatgtgtagaattggtattatttct

SEQ ID NO: 262749 - DNA, 201 bp, Homo sapiens
acagttttcaaggagaatgcttcctgcttttgcccattcagtatgatactggctgtgggtttgtcataaatagctcttattattttgagatatgttccttyactacctagtttattgagtttttaacacgaagacatgttgaattttattgaaggccttttctgcatctattgagataatcatttggtttttgtctttaga

SEQ ID NO: 262750 - DNA, 201 bp, Homo sapiens
aatatctagctctatatgtaaatgatgggtttgttggtatttaaaatgaatacaacttgaatgtaattaaagtgctgttttttggaagcgataaactttaratatacttattaaaatgaaattctattaagtttttcagatcttatttcttatactttataataagactaagttaacaatgatcaacaatatcccctgaga

SEQ ID NO: 262751 - DNA, 201 bp, Homo sapiens
gtccatttcatcagctttttctattatgattagtatttttttgtgtactaagaaattttgtgtaccaaacccaagatcataattttctcctatgtttttasaagttttatagttggcaatcttacattttagatatatgatttattttaagttaattttcgtttatagtatgggtgagtcaagaattactcgttggctttt

SEQ ID NO: 262752 - DNA, 201 bp, Homo sapiens
aattattatatgttttgcatattttttctaacagtatgtggcttgtctttccatttccttaacagtgccttttgaagagcaaatgtttttaattttgatgsagtccatttcatcagctttttctattatgattagtatttttttgtgtactaagaaattttgtgtaccaaacccaagatcataattttctcctatgttttt

SEQ ID NO: 262753 - DNA, 201 bp, Homo sapiens
ttgcattctaaacagctaacttagaaaagcagtccattagagtagacttcctgtccttctcttcagtagcatagtcatgtaagagctgatctggaatgaayagatatcttgggaaggagaattcaagaaggaagttatggagacaaaaatggggaatgcggaaacattgaagagccagagaaagaagaaaaaggaaagaga

SEQ ID NO: 262754 - DNA, 201 bp, Homo sapiens
aatgatgttgagcatcttttcatgtgcttattagccattgtgtatcatctttgtgaaatgtctgttcaaatcttagttcactttttgttgttggtttttgktgatttgtcatctttcactgagttgtaagagttttctgtatattctgggtacaaggcttaattattatatgttttgcatattttttctaacagtatgtgg

SEQ ID NO: 262755 - DNA, 201 bp, Homo sapiens
gaacttactctttttttatggctgcacaataaacataattttatttttacttcagtttttcctggagaatcaaagagagggacacctcctgttttttatgmaactagtataacttcgctacctaactcagataaagaagatattagaaatgaaaattatgggtttatcttacttatgatcatagatgtaatatgctaaata

SEQ ID NO: 262756 - DNA, 201 bp, Homo sapiens
accatgccttgaaagcaaaaagcaagactctgtctcaaaaaaaaaaaaaaaagaaaaacccagaaaaataaatttactataggcatagtgaccataccttraaagcagctgtgctcagtttggcgacaacatgaagtgaactggttggtttattagtttttaggtaatcataaaaaagtacaaattagtatgatgcaaact

SEQ ID NO: 262757 - DNA, 201 bp, Homo sapiens
  misc_feature (1)...(201): n = A,T,C or G
taaacatttttacagaattatatctgtttatccttaaaacttgatcctgtaaaactgaataattaaaaacatgatgaaatttttttctgaagactatacangatctttctttagcatgagtttgttttttatttttttgagaccaagtctctgtctgtcacccaggctggagtgcagtggtgctatctcggcttactgcaa

SEQ ID NO: 262758 - DNA, 201 bp, Homo sapiens
tgaattttctgatgagtgtactactgcagaaaggtaaatttatgacattttaccaaaatgggtcactttttattcaggaaaatgaattatttatcttagawtcatgtgcttttataatatttaaaaattacttttttataatctaagatccatgaaaagatagcaataaagtggaaagagttttctacttgttcaacttaa

SEQ ID NO: 262759 - DNA, 201 bp, Homo sapiens
cactagaggaaaaaacccaagcacacaaacagttgtctaatagttgtttgtaagtcaaagttatagttaaaggacaatattataagagtcacttgaactaygaaattgcttttggatattatactgagattcattaacttgggattttcatgtttttatgtgaattttctccaagatgcaagttgagtatttaattttttt

SEQ ID NO: 262760 - DNA, 201 bp, Homo sapiens
ttttacctcccgcctagctctagaatttgtctgcttcttttttggttttcactattattaatctcattcaggttaacctgaactattgcagtagctgctayttggcttgacgtagcattctgctgtctttaaatccattctccatattgcagtcagagtggtcttctttgaagtagaattctgatgatgtcaagcacttta

SEQ ID NO: 262761 - DNA, 201 bp, Homo sapiens
ttcttgtgttacctgtcttagttaatcatactactattgacctaatcacctgaatcacaaacctataagttcttaactccttgtaataatcttgggtgatsagggacatcagatctgtacatatgctaatcgaaagctcatttttcattttacatgcctaaaaccaaaccccatttcccaccagcaaacctgttcttttca

SEQ ID NO: 262762 - DNA, 201 bp, Homo sapiens
gaaatctccatctccagcattacacccacctcagaagtacaaagatagaggaattttacatcctaaacgaggtactgaggaccgatcagatcagtcttctstgaaatctacagacagcagtagttacccaagtccttgtgctagtccttctcctccatcctcaggaaaggtaagagtatctgaaagaaaatgtagtaagga

SEQ ID NO: 262763 - DNA, 201 bp, Homo sapiens
gatgtaagttgaagctagcaaacttgatacagtttgagtaaattttaaagtttttcctgcatgccaaatatttctagttattaccatcttggggtattttrgaatgctttaaaactatagatcattcactactggcatgtaggtaggctgtttattatttctttcctatttctttcgaatccttttttttttttttttttt

SEQ ID NO: 262764 - DNA, 201 bp, Homo sapiens
ctatttttaattttaacagcttttgccattttacttttcaaaaggctgaaatgatttacatttctgaagtgtataaggctatttatttgaatttttaccgktgtcgtttgacattaacctaattgccaatctgatattcaaattttaggcaaaaatcttacttaacttttctgtggtatgttttatggttggctctctctc

SEQ ID NO: 262765 - DNA, 201 bp, Homo sapiens
aaaaaagggcaatatagacagctctctgtatctgtgggttccatgactatggattcaaacaactgcaggttgaaaacatttaaagaaatattgtgtgtctrttgaacatgtacagacttttcttgttgttattccctaaagaatacagtgtaactatttacctagcattacactgtactaggtaatataggtagtctagag

SEQ ID NO: 262766 - DNA, 201 bp, Homo sapiens
aatttaggtagttcactatcaatgaaaaatgctccaaatacctgcctgctttaagaaattaattagttatatatatatatatatatatatatcattaaatwttggaacaaaacttataaattttagagttggaaaaggtaacatgttaagtaatgagtacttttgtacgaactacatgagcgatgacttgttttaattttt

SEQ ID NO: 262767 - DNA, 201 bp, Homo sapiens
taatttaggtagttcactatcaatgaaaaatgctccaaatacctgcctgctttaagaaattaattagttatatatatatatatatatatatatcattaaatattggaacaaaacttataaattttagagttggaaaaggtaacatgttaagtaatgagtacttttgtacgaactacatgagcgatgacttgttttaatttt

SEQ ID NO: 262768 - DNA, 201 bp, Homo sapiens
ctaatttaggtagttcactatcaatgaaaaatgctccaaatacctgcctgctttaagaaattaattagttatatatatatatatatatatatatcattaaatattggaacaaaacttataaattttagagttggaaaaggtaacatgttaagtaatgagtacttttgtacgaactacatgagcgatgacttgttttaattt

SEQ ID NO: 262769 - DNA, 201 bp, Homo sapiens
aggtgaaactaatttaggtagttcactatcaatgaaaaatgctccaaatacctgcctgctttaagaaattaattagttatatatatatatatatatatatatcattaaatattggaacaaaacttataaattttagagttggaaaaggtaacatgttaagtaatgagtacttttgtacgaactacatgagcgatgacttgt

SEQ ID NO: 262770 - DNA, 201 bp, Homo sapiens
atagaaattttaaaaaattgatatgaatgctgctcttcatatttttggaacacaaaaacagctagtaatacttgaagtcacctttttttttttttttttttgaagaggatgctagtattgctattaccttttagaattgcctttttgagtagcaaaaaaaaattgatgtggtagtcagaagaatagtaccagagcctggat

SEQ ID NO: 262771 - DNA, 201 bp, Homo sapiens
actctcgcaggcttccagttacactgtggataaaaatcaaagtcctttccatgattaggcctctggcttcctccttgatcttattttttgccacttgcctscttgttcactgtgcctagacacacttatctccttgatattcttcatgtatgccaacacattccctttgggactttgttttgttgtttcatatgcctagaa

SEQ ID NO: 262772 - DNA, 201 bp, Homo sapiens
aaaagaaagtattaaaaaacccacctgcaggtgttcgaaaaatagtaagcttcataaaatcttctttttaacactttcattagttattttttctgtttttwtattaactttaaagtaatatcttgttgcagattctttccaccaatattgctgaaaccagcatcacagtcaatgatgttgtctttgttattgattctggta

SEQ ID NO: 262773 - DNA, 201 bp, Homo sapiens
tatgcttcattcaaatatgcaaacatccgatcaaaagaaagtattaaaaaacccacctgcaggtgttcgaaaaatagtaagcttcataaaatcttctttttaacactttcattagttattttttctgtttttttattaactttaaagtaatatcttgttgcagattctttccaccaatattgctgaaaccagcatcacagt

SEQ ID NO: 262774 - DNA, 201 bp, Homo sapiens
ttatgcttcattcaaatatgcaaacatccgatcaaaagaaagtattaaaaaacccacctgcaggtgttcgaaaaatagtaagcttcataaaatcttctttttaacactttcattagttattttttctgtttttttattaactttaaagtaatatcttgttgcagattctttccaccaatattgctgaaaccagcatcacag

SEQ ID NO: 262775 - DNA, 201 bp, Homo sapiens
gtctttatgcttcattcaaatatgcaaacatccgatcaaaagaaagtattaaaaaacccacctgcaggtgttcgaaaaatagtaagcttcataaaatcttctttttaacactttcattagttattttttctgtttttttattaactttaaagtaatatcttgttgcagattctttccaccaatattgctgaaaccagcatc

SEQ ID NO: 262776 - DNA, 201 bp, Homo sapiens
aatatattaataaatattcagatggtcccaaagtgaaagcagctgatgtaggaatgtcttgcatatgactgcctactacagtgataaattactgagacacrggatttagtttaggtgaatgtgcgttttgaacatcactaaggccagtgctggaacagtggttagattcctgaatgtgcccatcttatagtccactaggta

SEQ ID NO: 262777 - DNA, 201 bp, Homo sapiens
tggaaatataaattaagggaatataaaattaagtacttattaggcatcaaatgaatgcctgttttttttgttttttgttttttttttttttggtggtggtkgttgtttgtttttaagagactcctggtgtctgtgagctttttaagcagtcatttgagatttgggctcttcagctgatcttttaaactgttcttagattta

SEQ ID NO: 262778 - DNA, 201 bp, Homo sapiens
gtatttttagtagatttggcatttcaccatgttggccaggcaggtctcaaactcctgacttcaagtgatctaccacctcggcctcccaatgtgctgggatyataggcatgagccactgcacccacccgacgtgaatactcttcatttttttctctggcctgatttccttggcctgaacttccaatcctatgttgaataaga

SEQ ID NO: 262779 - DNA, 201 bp, Homo sapiens
cagtattacactgctacattataggcatgtattatgaaatcattcaaaacacatctgggaaattcctggtatataacactatacctactactcttagagcygcagaagtcatgaaagatatgctcagtcctggaccagttgaggaaacaatatacctacagtaaataacttgaacagttacaaatcatcattaccttataa

SEQ ID NO: 262780 - DNA, 201 bp, Homo sapiens
tggtggttgaattaatttacactagtgtaatttaattacacagtagtgtaaaagtgttcctttttctctacaacctcaccagcatgttgttttttgacttwttaataatagcaattctgatctcattgtggttttgaattgcattccagtaatgatcagtgacgttgagctttttttcatatgtttgttggccacatgtac

SEQ ID NO: 262781 - DNA, 201 bp, Homo sapiens
gcaacctttgcaaggtaagaatttcccctatttcacaggtgaagaaactgaggcttagaggaattaaataattcattcgaggacaccaaaccagccaatamactgcagagcgggtatttgactccagggactagactttcctatattatgctgccataacacactaataagtgagattttgaactggggctttagctctgg

SEQ ID NO: 262782 - DNA, 201 bp, Homo sapiens
ctgaccttagtatttttaaataatattccataaatcataagatcattgggactttggattgaaatggcatctgctttgtattataaacttatacataactratctttgtatgacgaacttatatataactgatctttgcttcctccttcttgctcaagagtactgatgaaatctccatctccagcattacacccacctcag

SEQ ID NO: 262783 - DNA, 201 bp, Homo sapiens
tccagctgccttcaggacatgatcatttggatgttctacaggcactaaaataacactatgagctacatatatttttatttaccctgctgctacttttccartattaatcacactctgccacaactattgtttactgtctttcttattagactatttaatttgattttgtgtcttagtgcctaaaatattataaataaattt

SEQ ID NO: 262784 - DNA, 201 bp, Homo sapiens
tgctgccataacacactaataagtgagattttgaactggggctttagctctggtaagagattggacagagtcttcagtacattaagttgctcaaaagtagrtagataatgtatttgggttataaaataaagatgtaattttactatttggaaagatcacttccctattaagaaaactatttattgcctatagtgataaaat

SEQ ID NO: 262785 - DNA, 201 bp, Homo sapiens
ttctttgtcactagttactgtaacattaatctttcttaattctttctctgtagtcagtccttcttagttgtttcacagaccctgctgtgtgtgtttgtgcyttaaattttaagttctctagcactttgtgtcttactcttatcttcttactccctctatacattccctggggactttatctctatgtgtatattttgcaat

SEQ ID NO: 262786 - DNA, 201 bp, Homo sapiens
cttgctaatgatatctatatatgagaattatggatgcctgttttcaacagttatgtgtatcattttactagatatgaaaggatacttgtgaatttaattcrtaaatattatactctttgctttttaagaagaaactattaatttaatgagttcaaacctgagaaataattttgtcctatttaaagagttaattaaaatact

SEQ ID NO: 262787 - DNA, 201 bp, Homo sapiens
cttttcaaattacaaattttcatgacaaagcctccccttgattctatctctactgtccaagatcattctctatacatttttgggaggcgtcaagctgtcartagttaacactggctaggtttactattttagcatccattcattcatcacttcaacctactacactctcacttccattcccaccaattcatcacttcactg

SEQ ID NO: 262788 - DNA, 201 bp, Homo sapiens
cctgttttcaacagttatgtgtatcattttactagatatgaaaggatacttgtgaatttaattcgtaaatattatactctttgctttttaagaagaaactrttaatttaatgagttcaaacctgagaaataattttgtcctatttaaagagttaattaaaatactaatgtttttattctttgaaatataaaacagaatgta

SEQ ID NO: 262789 - DNA, 201 bp, Homo sapiens
tagggtttgtgtggtgtgtgcttgtacatattccggtatgtaggttttaggtgttaatcaggttttgggttaggtttagatttgtctcattacaggaatgktcattatttgattccatgcaaaattgagagacttggtattctggatttctttgttgatgttctttaaggatatctctgatttcttccttaaatatatttg

SEQ ID NO: 262790 - DNA, 201 bp, Homo sapiens
atttatggtggaagtatagtttaattcaaaacgtatgtactaccaataattgcacaaccaaaaattttattttttaaaagtatttattttatttcaaatgyacaaatcaggatcttcttgctagcacagcatagtagaaataaatattgtgttaaatcagattcttaagctaatgtctccattgcagtttgaagagctgtg

SEQ ID NO: 262791 - DNA, 201 bp, Homo sapiens
ccatggttaataaaggaaatggatgcttgcctttctgatatatggctacataaagatattgatgcctttgctcaggtctttcatctcattttaactgaaaatgttagtggtaagtttattttaattttaaaaaattacccttacagttatttatggtggaagtatagtttaattcaaaacgtatgtactaccaataattgc

SEQ ID NO: 262792 - DNA, 201 bp, Homo sapiens
ggtagacagacagtaaaaaataaataatctgcatgatactattaaggaaatacaaagaggatcgccttaggggtgacctacttgaaagaaagcctagacaygtttttctgagaagacttaaactgagacctacaatatgagaagagccagccacatgaaaagcagaaatgtgctgcaggtagagaaagagggaaagcacca

SEQ ID NO: 262793 - DNA, 201 bp, Homo sapiens
ttaccttccttagggaatattggaaatttgaaggacataaggattacttttgttaatggaaattgactttgtcttttttttttttttttttttcagtgctwcactggaatttggaaatctagatgaaagttctctggttcaaacaaatggaagtgacctcagtgctgaagacagagagctcctgaaagcttatcatcatag

SEQ ID NO: 262794 - DNA, 201 bp, Homo sapiens
gatttgtatgtatgcctagtatgtccgaatgtgagaacctggatatttcagttgaagatgctgaattcattgtgccttttcattcttctttgtgagtgccrcagactgcagctgtttctaataagccatcttgattgatcccctggcataacacatttaaaatgttccttcatagttagacatcttgatgatttcaaatta

SEQ ID NO: 262795 - DNA, 201 bp, Homo sapiens
atcgatttagtgattttttacttacaaagttaagagatttgttgcaaaagcacccaactttgaaactaattctttctagtgctgccttggatgtaaatctstttataagatattttggaagttgtccagtgatatatagtaagttaaattgtcagatttcttctataatttttatgaaagaacacttttggacattattta

SEQ ID NO: 262796 - DNA, 201 bp, Homo sapiens
tgcttcccttggctgggggtgagggttccttttgctctgtgctgctcctgtgtgggctgtcgccttcacctacttttcttcattctccatgggttgatttgtatgtatgcctagtatgtccgaatgtgagaacctggatatttcagttgaagatgctgaattcattgtgccttttcattcttctttgtgagtgccacagac

SEQ ID NO: 262797 - DNA, 201 bp, Homo sapiens
caataaagagcgtacagaacttctgcctaaaacagaaagaggaaatgtgtttgcagttgaagctggtatgtattttctggggagcttcctcatttaccctrttatttgatgactgttctttttccattttagatttattttcgaaaaccaagatgaaataagatttctcaattggaatagtttgttagaaatgattaagag

SEQ ID NO: 262798 - DNA, 201 bp, Homo sapiens
cacttaccttaccttccttagggaatattggaaatttgaaggacataaggattacttttgttaatggaaattgactttgtcttttttttttttttttttttcagtgctacactggaatttggaaatctagatgaaagttctctggttcaaacaaatggaagtgacctcagtgctgaagacagagagctcctgaaagcttat

SEQ ID NO: 262799 - DNA, 201 bp, Homo sapiens
ttcactgtgttagccagggtggtcttgatctcctgatctcgtgatccacccgcctcggcctcccaaagtgctgggattacaggagtgagccactgcacccrgccaagagattgtaattttttactgcataattgaatggtaattctcttggtttattttagaccacaaccaatttttcagagcaactttctactctttaaa

SEQ ID NO: 262800 - DNA, 201 bp, Homo sapiens
gtcagctggtatgacctccctggtttcccactcatattttgtgtgaaaattgtgtaggttaaagaacattttatgagcttataatttttttttttttttttgagatggagtctggctctgtggcccaggctggagtggagtggcgtgatctcggctcactgcaagctccgcgttccgggttcacgccattctcctgcctca

SEQ ID NO: 262801 - DNA, 201 bp, Homo sapiens; identical to SEQ ID NO: 52357

SEQ ID NO: 262802 - DNA, 201 bp, Homo sapiens
agtcagctggtatgacctccctggtttcccactcatattttgtgtgaaaattgtgtaggttaaagaacattttatgagcttataatttttttttttttttttgagatggagtctggctctgtggcccaggctggagtggagtggcgtgatctcggctcactgcaagctccgcgttccgggttcacgccattctcctgcctc

SEQ ID NO: 262803 - DNA, 201 bp, Homo sapiens
cttccttcaggagctcttgcaaggcaggcctggtggtgacatattccctcagcatttgcttgtctgaaaaggatcttatttctccttcacttataaagctyagtttggctggatatgaaattctgggttggaaattcttttctttaagagtgttgaatattggcccccaatctcttctggcttgtagggtttcctcttaga

SEQ ID NO: 262804 - DNA, 201 bp, Homo sapiens
gtctttttgtttcagcataacacatttttattgaatattcttaatatactttttaaaagtaactacagaataagaccaacttttaagagataccagattcmcataatttatttaaacaaaggaatacatttcaaaaaggaaatgatttgtctacatattctttctttgataattaatttagaagagaaacaacaaaccaca

SEQ ID NO: 262805 - DNA, 201 bp, Homo sapiens
gtggagacataaagcctaaccatatcaatgaagttttcaagcagtttcatgtgtctttttgtttcagcataacacatttttattgaatattcttaatataytttttaaaagtaactacagaataagaccaacttttaagagataccagattcccataatttatttaaacaaaggaatacatttcaaaaaggaaatgatttg

SEQ ID NO: 262806 - DNA, 201 bp, Homo sapiens
gttaaaaattttgatagctagattcactggttattgttccatcactctaaaaaagagttaacatctttctgtactgaaagtattgaaagttcttgtttctytaaagcttgggcaagaatggatataattatttaaacatttatcaagctgataagcttgataaatcatattttaacttgcattttgttgattcttagttat

SEQ ID NO: 262807 - DNA, 201 bp, Homo sapiens
tgaaaaatgtaatcagcaatgctgatttcattgggaagcactgaattactgatatgtaagttgtaaaactcctagatcttgaaacttaaaaaaaaaaattwaaaaaaaatttttttagagacaggttcttgttctattactcaggctggagtgcattggtgcaatcatggctcactgcagcctcgacctcctcatctcaag

SEQ ID NO: 262808 - DNA, 201 bp, Homo sapiens
tacaaaattatccgggcttggtggtgcatgcctgtaatcccagctactcgggaggctgaggcaggagaatcgtttgaacccggaaggcggaggttgtggtkagctgagatcgcaccatggcactccagcctgggcaacaagagcgaaaccgtctcaaaaaaaaaaaaaaattccgtttcctagtttcatgatcatagttat

SEQ ID NO: 262809 - DNA, 201 bp, Homo sapiens
tgataagtaggtagtaaacactagaggaaaaaacccaagcacacaaacagttgtctaatagttgtttgtaagtcaaagttatagttaaaggacaatattayaagagtcacttgaactatgaaattgcttttggatattatactgagattcattaacttgggattttcatgtttttatgtgaattttctccaagatgcaagt

SEQ ID NO: 262810 - DNA, 201 bp, Homo sapiens
ccctatgtatcttatataagctggtggttagctctcagggtttgatttgatccagtgttttaacaagaatattttataggtggtgttgtgaactttatatkgcaatacatcaggaagtacttaatgtctgtcccagaaagacccatactttaagaaagattatgaaattcctgactgcgatgtttgtggcatttattcata

SEQ ID NO: 262811 - DNA, 201 bp, Homo sapiens
aatacctgcctgctttaagaaattaattagttatatatatatatatatatatatatcattaaatattggaacaaaacttataaattttagagttggaaaargtaacatgttaagtaatgagtacttttgtacgaactacatgagcgatgacttgttttaatttttgcttacgtactaatatacatcatctatttcattgag

SEQ ID NO: 262812 - DNA, 201 bp, Homo sapiens
caccagtgaagtctgcaaaacagcaaagatggaagccagctccttcctctggaagttctgtcctgggggttattggcctgttgctggcccacatgcatctstaggaggtgactggaagcccctgttctgaggtctcacccagtcaggaggaatgagatcagggacctgtacaaagaagcagtctggctgctttttgataca

SEQ ID NO: 262813 - DNA, 201 bp, Homo sapiens
acttaccttaccttccttagggaatattggaaatttgaaggacataaggattacttttgttaatggaaattgactttgtcttttttttttttttttttttyagtgctacactggaatttggaaatctagatgaaagttctctggttcaaacaaatggaagtgacctcagtgctgaagacagagagctcctgaaagcttatc

SEQ ID NO: 262814 - DNA, 201 bp, Homo sapiens
cctttgaatgaggtttttgtggagtcttttctgttgatgttgttgttgttttctgtttgtttttcttttagagtcaggccagtcttccatagggctgctgyggtttgctggggctccccaccagacctcagttgcctcagtttttcctgtacctggaggtatcaccagtgaagtctgcaaaacagcaaagatggaagccag

SEQ ID NO: 262815 - DNA, 201 bp, Homo sapiens
ttgtggttttgatttgcatttccctgatagctaatgatgttgaacatcttttcatgtgcttataggccatttgtatatttactttggagaaatgccttcakattgtgcttttctaaaagcattcattgccaaattttactttgaataatgtgcttgaaatcaaaacatgaatcatattatagctaggacattaagtgtcac

SEQ ID NO: 262816 - DNA, 201 bp, Homo sapiens
caccatactccactaattttttttgtatttttagtagatttggcatttcaccatgttggccaggcaggtctcaaactcctgacttcaagtgatctaccacytcggcctcccaatgtgctgggattataggcatgagccactgcacccacccgacgtgaatactcttcatttttttctctggcctgatttccttggcctgaa

SEQ ID NO: 262817 - DNA, 201 bp, Homo sapiens
aatttgcttcctatgtactcctttattaggaaactgttggagaatgtgcttcacaaaaaagaagtaaaaagaaaaacaaaaattgggggagaaaaaaaaaacgggtaaaaccgggcaggtacagcacaggggataggtgaaaggaatgctcaggatgctggtacagaggattgttttgatgacacctgtgtctagtaggcc

SEQ ID NO: 262818 - DNA, 201 bp, Homo sapiens; identical to SEQ ID NO: 52355

SEQ ID NO: 262819 - DNA, 201 bp, Homo sapiens
agagacggagtttcaccatgttggccaggatggtctcaatctcttgaccttgtgatccgcctgcctcagcctcccaaagtgctagaattacaggcatgagycaccacacccagcccaaataatgatattacttttaagcatctttaccacatgataatctgttggaacatgtttagtgacaggaagttcactacctttctt

SEQ ID NO: 262820 - DNA, 201 bp, Homo sapiens
gagcctatttaagttactgagagtaccctgcccatatttcatagtatttcttatgttaactgatgccatctattatttttatgacattatcatgttgtgtwtcttatattcatgcatgatttgtagacttcgatatgtcttcaacttttgcttgttgatgaaaaaatgctattgcaggaggtgtatttgagaaatctaggg

SEQ ID NO: 262821 - DNA, 201 bp, Homo sapiens
tgattcttctggctcagcctcctgagtagctgggactacaggtgtgcgtcaccatgcccagctaatttttttgtatttttagtagagacggagtttcaccrtgttggccaggatggtctcaatctcttgaccttgtgatccgcctgcctcagcctcccaaagtgctagaattacaggcatgagtcaccacacccagcccaa

SEQ ID NO: 262822 - DNA, 201 bp, Homo sapiens
gttttactgcaggagctttcagtgaccatatggcacttctcagagcattccaggtactattactgtcattttatttctgaagacgttgctgggtaaacacrtttctggggcaaatgtaggaattttaaaaataatttataaattttaaaattgcattaattttgtttcattatgaagtcacattaatagtcctgaaaaata

SEQ ID NO: 262823 - DNA, 201 bp, Homo sapiens; identical to SEQ ID NO: 52358

SEQ ID NO: 262824 - DNA, 201 bp, Homo sapiens
tttctcatttaggggtttttaattatgtgttttgattaaacagtttgctcacatcaaagtctgttctgtctccttttacttagacaatagatgcaatggayacatgggaagatctgactgaacttgggtatcatttggctgacttgccagtagaaccacatcttggtaaaatggtcttgtgtgctgttgttttaaagtgtc

SEQ ID NO: 262825 - DNA, 201 bp, Homo sapiens
ttaaaatattttgtagatacgcagtctagttacatcgcccaggctggtcttgaactcctggcctcaagcaatcctcttgcctcagcgtcctaaagtggaaytacaggcatgagccaccatgtccagctgaaacatttgaagatgaaaattatatataattgtatctcagaaaactagcgtggtggtagaacttcaacaaat

SEQ ID NO: 262826 - DNA, 201 bp, Homo sapiens
attttgtaatttaagcaaattaatgctaagcaattatattgaattgcttgagaaatatattctaggaagaaacttcaatagaactttaattatttttctartgtaagggttttatgggaaataaactttctgtcagtgttaatcccattaagtgtcttatcaaatagccttgaatgggggattaaaagcaaagtaaaataa

SEQ ID NO: 262827 - DNA, 201 bp, Homo sapiens
attcatgcaataaaaagtgtgctatcaaaaaggaacagaacacaaatctttgttcagattttgtcttcatgaggcctacccaaatttgccgtatctgataytacaatctaccccccacgcaatgtccatcctctttaacctgttctacgtattctttttttctccagaagccctaccaccctctgatacactatgtaatat

SEQ ID NO: 262828 - DNA, 201 bp, Homo sapiens
aaaacctatacttttgtagagagtaaaattagcagatgcatctgagaaggcaaatatttttacattgttagtcatttaggctacttgacacttagttctcwttgcgattttataaactcaatggcttttttagcatttgagtataaattaatgataaatattatttgatcataaagtcttagattttatagaaaattagaa

SEQ ID NO: 262829 - DNA, 201 bp, Homo sapiens
gatacactatgtaatatacttgttcactgttctattgatttattgtctatctcttctccctaccagaatgtagtaagcttattgtctgcttgttcaagaayagcaactagatgtagtagatgtgcagtgagtgtttgttgaatgaatgaataaataaataattcttgtaaattaaaaatatgatagcagaaaaaaagaaga

SEQ ID NO: 262830 - DNA, 201 bp, Homo sapiens
agaaaggaggtataatcatagtatattattaggctaagcagtaaatgtttaccagtcatagtaaagtaaaggctgaatgaagatttaacaaaaattgtagkaactggtgtgggtggaaagtgtagggaagtggaagtggtaacctcatttttcattagttggaggttcgcagataatgactacgttgttaaaacaataaat

SEQ ID NO: 262831 - DNA, 201 bp, Homo sapiens
ggccgaggcgggtggatcacctgcggtcaggagttcgagaccagcctgaccaacatggagaaaccctgtctctactaaaaaaaaaaaatacaaaattatcygggcttggtggtgcatgcctgtaatcccagctactcgggaggctgaggcaggagaatcgtttgaacccggaaggcggaggttgtggtgagctgagatcgc

SEQ ID NO: 262832 - DNA, 201 bp, Homo sapiens
catggctaagaagtgatagagtaggaatctttctcttatattgtacttacttgtatcctaatatttctttgcttatttgtaggaatgtttcaataggataratttcctagaagtggaaatgccagatcaaggatatggcagttaaaaattttgatagctagattcactggttattgttccatcactctaaaaaagagttaa

SEQ ID NO: 262833 - DNA, 201 bp, Homo sapiens
ttaggctaagcagtaaatgtttaccagtcatagtaaagtaaaggctgaatgaagatttaacaaaaattgtaggaactggtgtgggtggaaagtgtagggargtggaagtggtaacctcatttttcattagttggaggttcgcagataatgactacgttgttaaaacaataaatagcagaaaatgaatgttgcttagaaata

SEQ ID NO: 262834 - DNA, 201 bp, Homo sapiens
taaatattcctggatatatttgattttagatattttagctttagtttctattgtgagcaagatcttttcaaattacattttttagctgattactagttacrtgaatgttgttgattttatgattatatttggacttgttatagaacttcaattctagtggtttttcagttgattcacttagattttttgtattatgtgatc

SEQ ID NO: 262835 - DNA, 201 bp, Homo sapiens
agtctcagacatttgaaattagttgtgacattgagtctcaaaattcttggtaggtttaaatgctatttctgatatggtaggtttagttgtcatttcaatartagcacccagaacttgcagtccttttattgttaacactttgaatgttccagacattcttatggtgttaagtaaagctcactagatactgcaggttaccag

SEQ ID NO: 262836 - DNA, 201 bp, Homo sapiens
gtttactgcagtgttgtttataatatcaagcaacaacatcaataacaaacctagaaaactggaaattacttaaatgtttaatcatttgttaaattatagcrtatccatgagatggaatatgcagctgttaaaatgggctaggtagatctggtatgttatgtgaaaactgcaaattacggacattaagtacagtcatcactt

SEQ ID NO: 262837 - DNA, 201 bp, Homo sapiens
tctggatttctttgttgatgttctttaaggatatctctgatttcttccttaaatatatttgtgttcttctagttcctctactttcagttttagtaattttygtgtagaaaataattaatttctttgaagatttcaaatttattatttatacatactgtatgttttagcctatatcaatttcatattttataatgcattctg

SEQ ID NO: 262838 - DNA, 201 bp, Homo sapiens
aagatatatacataatcagctacattgttgctattactattttgaaccaattgttatgtgttagatcaattaagactacaaaaaataaaagttaaaaaaawtttttttttttacctccatttattccttctttagtgttctttctttcattatgaagattcaagtttctggcctatgttatttttctttctctgtaaagaa

SEQ ID NO: 262839 - DNA, 201 bp, Homo sapiens
gacgttgctgggtaaacacgtttctggggcaaatgtaggaattttaaaaataatttataaattttaaaattgcattaattttgtttcattatgaagtcacrttaatagtcctgaaaaatatcttcttgctgttgttatgttaaaattaaaacagttttgctcttttttcccattttctccttataggaatatatgtgtgta

SEQ ID NO: 262840 - DNA, 201 bp, Homo sapiens
aagtagctggaactataggtgcataccaccacacctggctcttcctataaatattttattctaatagttttatattgtttaaaaaattcatctgaaatttmttttattgtattatatcaggtaggaattttactttttcttcatgttatttccagctcaaatataacttttatttaaaaatctgtccttcccccgacctcc

SEQ ID NO: 262841 - DNA, 201 bp, Homo sapiens
aatatgtcttaactaattttgtataattattttttatttttgtcctcctacatgtgtccagataaactaattttgtacttttaaacaattatcttaaatgrtcatgtactttaaataatattgtcatgtatgaaacagtagatatagttcttttatatagtataatagaaacgaaatatatttttatgagatgtagtagca

SEQ ID NO: 262842 - DNA, 201 bp, Homo sapiens
ttatatattatagatgcatgtctgttgactgttaaacatcttaaaaataatttctcccaattttttgtttactttttacctttgtttatggtatcttgttyagtagttttacatttttatttagtcagatctgtcaatatttttctagggctttggggcatgttaagagaggcatttcctaccctaagattaatggacatt

SEQ ID NO: 262843 - DNA, 201 bp, Homo sapiens
tttacttgaaggacttaaacatttttacagaattatatctgtttatccttaaaacttgatcctgtaaaactgaataattaaaaacatgatgaaatttttttctgaagactatacaagatctttctttagcatgagtttgttttttatttttttgagaccaagtctctgtctgtcacccaggctggagtgcagtggtgctat

SEQ ID NO: 262844 - DNA, 201 bp, Homo sapiens; identical to SEQ ID NO: 52361

SEQ ID NO: 262845 - DNA, 201 bp, Homo sapiens
aattaaggaaaataaagtagttttgattgtaggagaaactgggtctggaaagaccacacaggtttgtttcttttttgttgtttatagaaaaaaaaaaaaawatatatatatatatatatatatagtcccatattataattttatatcaaatttacactgcatatgtttaaaaaaacagaaaaagaaacttgtggttattat

SEQ ID NO: 262846 - DNA, 201 bp, Homo sapiens; identical to SEQ ID NO: 52364

SEQ ID NO: 262847 - DNA, 201 bp, Homo sapiens
gtctgcctaatggaaatataaattaagggaatataaaattaagtacttattaggcatcaaatgaatgcctgttttttttgttttttgttttttttttttttggtggtggttgttgtttgtttttaagagactcctggtgtctgtgagctttttaagcagtcatttgagatttgggctcttcagctgatcttttaaactgtt

SEQ ID NO: 262848 - DNA, 201 bp, Homo sapiens
gtgaagtaacattttacctagataccctgggccatactggctatggccatttaaaagaacaacctccttataagccttatctagatatcaatactgctgaytagcattcctatagaaaagtacttcactcagtgacacattgaatgccagttcttggtgtgagggatctagaagtgtacaaaacaggtaagatctcctcca

SEQ ID NO: 262849 - DNA, 201 bp, Homo sapiens
aaaaaaaagaaaaaaaacccagaaaaataaatttactgtaggcatagtgaccatgccttgaaagcaaaaagcaagactctgtctcaaaaaaaaaaaaaaaagaaaaacccagaaaaataaatttactataggcatagtgaccataccttgaaagcagctgtgctcagtttggcgacaacatgaagtgaactggttggttta

SEQ ID NO: 262850 - DNA, 201 bp, Homo sapiens
agattggagtatttgtaacagagaccctctcaaagcctaaaatatttactatttgaaagtccttttcaaaaacagccaacctttgttataaaaaaaaaaaagccatttatttccttttagtactggaatgcccagcagttgtccatgttcctaacttttggtagataacattcgctgaaaaaatgaaagtggtaaagataa

SEQ ID NO: 262851 - DNA, 201 bp, Homo sapiens
ccactttggttatgtaaggacaatgcactcattttaacagatgcatatttaaatatggaaggataaaatgacatgatgtgtgggatttacttttaaatatrtaagccaaaacagaaaggaagcaggaaagaaaaaacaaaataatgttagataaatcaactaggtgaaatgttcaaggaactaggtcagtggtactgtgag

SEQ ID NO: 262852 - DNA, 201 bp, Homo sapiens
tgatcatgcatcttctatacaatatctgccatagttgtgatgctggtaaatacgtgttgtctaaaagaactggagcaaaatatatactttaagaattaatrttttaagtgtacaaatttttatataattgcactgatagtagtaagtgaataatctcctgtcatcttatgatagtttaccagtacttgaaaacatgtgata

SEQ ID NO: 262853 - DNA, 201 bp, Homo sapiens
catagttttattttacatgacatttttacttgaaattttaaactaaaaggaaatatgtcttaactaattttgtataattattttttatttttgtcctcctrcatgtgtccagataaactaattttgtacttttaaacaattatcttaaatgatcatgtactttaaataatattgtcatgtatgaaacagtagatatagttc

SEQ ID NO: 262854 - DNA, 201 bp, Homo sapiens
tttgaccagtactgaaagagcctttattcatcgactcagtcagtctcttggtttggtctctaaaagtaaagggtaagctggtagcttttcttatttttttwaaaaaagattatttgcccaaaaaagggagaaatgtttctgagtacatttaagtacttattactgttttaacttcacattcttaattgtatcatatgtaga

SEQ ID NO: 262855 - DNA, 201 bp, Homo sapiens
accagctttaattgtaagaaatgctgtacaaatgcttaaggttggtgtcttcatagttttattttacatgacatttttacttgaaattttaaactaaaagraaatatgtcttaactaattttgtataattattttttatttttgtcctcctacatgtgtccagataaactaattttgtacttttaaacaattatcttaaat

SEQ ID NO: 262856 - DNA, 201 bp, Homo sapiens
gagggtatttattaaggttctggcatctagggcaaagtatgagctcatcttttacagaaagacattgttccttctactgttcattctaatcagagactctrctagtctgtgtttgggaactgtagttcccatgatttctttaaatgtgtaggttagtattctttttaattttaaaaaattatttactgttttggtttatag

SEQ ID NO: 262857 - DNA, 201 bp, Homo sapiens
aggctaattatcctgaaactcagttctgctatttcagattttttaaagaatgaaaatggtttgaagtagtttggaaatttaagttttatttatcttttccyttttttagttgattacagacatagtgaaaccagtgcaacagctctgatggttgctgcaggacgtggctttgcaagtcaagtagaacagttaatcagtatg

SEQ ID NO: 262858 - DNA, 201 bp, Homo sapiens
gagttaaggatgtcatccaggtttctgtcttaaaaaatcggacagtagtgccatagtcagatagggaaaattggaagagtgttttcactggagagaataaytaatttttggttattttgagtttgagttgcctgtagaaaatcgaagtggattgggaggctgaggcgggcagatcacaaggttaggagttcaagaccagcc

SEQ ID NO: 262859 - DNA, 201 bp, Homo sapiens
aatggataaagggcacaaataggcaatttaccaaaataaaaaatatgcatgtcctactaatacattaacctcacatatactacctaatatgtatctaaatraatgcaaattaatgaggtattattttttgaatctcagatgggcattgatgaaaatgtttaacagtatgtacaacatagaggaaaaacatgggccaatagt

SEQ ID NO: 262860 - DNA, 201 bp, Homo sapiens
atttatcatatattccatgttcaataaaatagtagttttcatgttaaaatttttatattatttttgcaaagcaagccattttgatacttccttaaaagttraatgtaggttatgttaaaattaaaaacttttgcctagttaaatgtacattcagatgtaagaagcttaaaaaacaaaaccaaaaattctaaacatatgcaa

SEQ ID NO: 262861 - DNA, 201 bp, Homo sapiens
taagtaactgaaatttaaaacatgggtagtgtcaaaagttatttaacatacaaaattgacaaatgtaatgtcatattaaaaaccaaataagctgttttctraaaattttataaactattatgcaaacatttttatttgctctatgcagttattttatgaaagggaaagtataagtaccgagtgactgaaatacatgttcta

SEQ ID NO: 262862 - DNA, 201 bp, Homo sapiens
ataatagtacattaatgagtattatcactaaaaatcttaatggtgagccaatgaaaattcagattttattgccctaaaattacctaaagtggataaagtgkgttttgaatattttagaaagttcctttaggtgttacttatttattaagtaactgaaatttaaaacatgggtagtgtcaaaagttatttaacatacaaaat

SEQ ID NO: 262863 - DNA, 201 bp, Homo sapiens
ctttcaatttgcacaccatttactcaatccatggaatgacaacaagaaagtgcagataagcagggatgggcaggtatacaatggcatttttttttttatttacttttgtttctgtttgttttctgttatccagtgctttaattgaggagaaaatgtaagagtacaaattttatattccatatgcacatgggaaacaggggt

SEQ ID NO: 262864 - DNA, 201 bp, Homo sapiens
gcatctgtgtacaaatgagattaatcagatcatatggcctaatttaacctgtttatcatttcagtgtttttagatttgatctataatatatatgtgttatyagatctttagttatttatatttaatctaaattcatatagaaatcttgctgacagtggtatataatttgaaaactgttggacctgatcatttttgagagac

SEQ ID NO: 262865 - DNA, 201 bp, Homo sapiens
atctgtgcaaaaataaagtgtactttaaataagcacatgcttttattttctaggatcaaatctaaatcgctgtggtttccgaggctcttcatacctgggtrttccgttcaatccatcaaaggttggttctatttggttcagaaggaagtagaagggatgtagggatattttaataaaagagaaaactaagaagttacacag

SEQ ID NO: 262866 - DNA, 201 bp, Homo sapiens; identical to SEQ ID NO: 52396

SEQ ID NO: 262867 - DNA, 201 bp, Homo sapiens
tagcaccatttgttgaaaagactgtccttttccatgaaatggttttggcacccttgtcaaaagtcagttgactatatatatgtgaggtttgtttctggacktcttattttattctgttgttttatatggctgcccttgtgccagtactatactgttttaattactgtagctttgtagtaagtttcaaagtcaagaagtttg

SEQ ID NO: 262868 - DNA, 201 bp, Homo sapiens
gtttaagattgttctcttcattgtaatgcagtatgctttctttactgggtggctttttttgtagctggggttgttctatgatttttctgataggaaaaagkttctcttttgtttctcaggtatctaaattttgcttttttgagctttcctttatcacctgattttcaaagggcttctccctccttttttaactttcttcac

SEQ ID NO: 262869 - DNA, 201 bp, Homo sapiens
catgtaatatccaattatctctccttttaatcaaagagctccacagttgaaaatatacatagcacattatactaacagtttaaacatttgtaagtatacakttcactagcattaattccatttacaatgttgtgtaatcgtcactaccatgcaaaactttttcattatacccaacataaatcctgtatacattaaacagta

SEQ ID NO: 262870 - DNA, 201 bp, Homo sapiens
aataaaaaagttggaactgactagttcatataaatcagggatctgtctgaaaatgatagcagtaaaggttttatgggaaggtattaatcttaaaagacaarccatgggtcatttcttcaaaaaccatgtaaggacttttttattatttatttgtttaaaccttctgaaactcatcaattgacatgccagcacattttttcc

SEQ ID NO: 262871 - DNA, 201 bp, Homo sapiens
atttaaattttatttcactattttctagaattatataaccactttttccccttgaacattttgtactattttcataagcatctaatttgaagtttaaaacrttgtgtggttttgattaacaggaggatcaactttttgtggcattgcctcactatgtctgatgggtaaactagaagaagttttttcagaaaaagaattgaa

SEQ ID NO: 262872 - DNA, 201 bp, Homo sapiens
catattgagacatacataaaatggagatttgtttttctcaataagatgtctatacaaatcagtataagccatatttaattttactatttactaaaaccttrtgtcagatttcttaatgaaataagttttcatttcacttcattaattagtactatattaattttgtatttaggctcctggaacagctcatccttatgatag

SEQ ID NO: 262873 - DNA, 201 bp, Homo sapiens
aggaacacctttacactgttggtgggactgtaaactacttccttaaaattcttaagctgactagttgtagtatctgtatatcagcttctaacttgtttatsttatttgtgaaaacttgtttgtagcttagggttgatggagcctcaattcataagcaatatactgtctttaagagagttaaaaatcagtctcaggtgattg

SEQ ID NO: 262874 - DNA, 201 bp, Homo sapiens
gcagggccggctcctttcgccaacagtgtctccagaggagaatctgtcccttgactcttcccagcttctagtggctgctggcattccttaccattggctayaacactcaaatctctggcaccatagttgcattgccaccccctctctgttagtctaatctccttctctcctcttataatggcacttgtgagtacaattagg

SEQ ID NO: 262875 - DNA, 201 bp, Homo sapiens
aaatactgacttttcatttcctgaggaaagtacctttgtgagtgtattagttttctatcgctgccataacattttagcacaaatataggggtgtaaagcarcacaaatttatcctctccatttccggccagagctgtacatctgtaactaagtctgaactgagacttacagggctaaaatcaagatgtcagcagggccggc

SEQ ID NO: 262876 - DNA, 201 bp, Homo sapiens
cttttgattcactcaagactaacatagatgtcccaactaattctgaagattaaatagttcttaactgacagtaacacttctaatatgataactaccttgasttttctagagggaatgctcacctttcctttgccagagaatacattcaagatttgtaacactgaaaggaaagttaaggcatgagatgtattaggaacaagg

SEQ ID NO: 262877 - DNA, 201 bp, Homo sapiens
tcatggcttggttatcatgaaagaaaaattggaactagtgagtcatttgaaaaggaaataagattactagttgcttaatagaaattattttaaaaggttgyaataatttttttagcttttcttttgattcactcaagactaacatagatgtcccaactaattctgaagattaaatagttcttaactgacagtaacacttct

SEQ ID NO: 262878 - DNA, 201 bp, Homo sapiens
ccagcatacacctggttttctttcacatccttcagatcttggttcaagctcgtgatttaaaattgcaaaccacccagatacacatgcagtatttataataraattgcaaaccaactgcacatacacatcccattctctaaccccctttctagatttatctttctccacatcacttactattttataaacgacctatgtttt

SEQ ID NO: 262879 - DNA, 201 bp, Homo sapiens
accaataggtatgaaaaagctttgagaaggctaatattagactggatatttagacacttattttcagattcaccattttggcaaaattactcttattttcytgtttcttttagcctgaccaataggaataatttttacttttctagtgacaatgactttatgaaaataaagagtgtattgtctgcggtttcatcagagatt

SEQ ID NO: 262880 - DNA, 201 bp, Homo sapiens
gaagaggtaggcatgcatcagatcatggaaagctttgtgtgcttgtctagaaacatgagttggatatcatgtaagtgacaggaatagtcatatatatagtmatatatcacatggtacaggaccagaaccagggagaccaatgaggacactcatgtggtagtccaggagagagatgctgaggcagtgaagtagggctagaaa

SEQ ID NO: 262881 - DNA, 201 bp, Homo sapiens
attctaaaatcaaaaaaaaatctgaaatctgaaacagttctggtcccaagcatttcagataagggatactcaacctgtagtactattctagataatagtaytctagatgcacaggagagaagtaaatttattacatacagtggatacctcaggacattaaggcttaactatttcttagaatcttcattgaaaagattacag

SEQ ID NO: 262882 - DNA, 201 bp, Homo sapiens
tttccagaccattggtcacttactcaccatgcttcctactttctgtcttttcttctatttccccccactattaaggattatttggtggctccgtaattgakcaattttttggtctgttctttaataagtgtttacttccccctaccattttattagtgaaatgagttttttataacgctattatatctatgttgttttaaa

SEQ ID NO: 262883 - DNA, 201 bp, Homo sapiens
gcaagtataaatgcagaactgacagatggtatcagagctgtcttccatcaaaagtagaaatgggatcacatttttatggaggactgttagcagattagtarcttgaaaggataccctttaaaaaagacaatcccaagaacaaaaagagaaaaaaaaagatttaaaaatgttttaatcatataggaaaatacgccttttgat

SEQ ID NO: 262884 - DNA, 201 bp, Homo sapiens
cctgttttgaactttaatagctcttaaggccataaatgtcggccaattcaaaaatagaaaaaaattttgactggtacaaaactgtctttttaatgttcctrtaactgcaaagctctgagctcttcagaagtctacataagactcctaggcaggaatggccatgtgatttcattggccactttaatagaagaggatcgctgc

SEQ ID NO: 262885 - DNA, 201 bp, Homo sapiens
ggtgagcctcccacctcagcctcccgagtagccggaactacaggcgcacgccaccatacctggtaatttttgtattttttgtagagatggagcttcaccgyattgcccaggctggtatcgaactcctgtggctcaaggaatatgcccttctcggcctcccaaagtgctgggattacaggtgtgagccaccacacccagcct

SEQ ID NO: 262886 - DNA, 201 bp, Homo sapiens
taaataatattttttaaaaggtatattgtgtaagcttaggataaatttagggtattagagagtataaatgaaagagtttattatcaagatgcatgggaatrgtgtgcattttttcccaaatattttacttagtaatgttttatttcatttgcagcaataatgtagatggtctgaatgggtcctttccaaagaagagaatta

SEQ ID NO: 262887 - DNA, 201 bp, Homo sapiens
ttgatgattcccaactatgagaaattaagatttagcctctcacttttccaacaaattgttacccgttatagttagttctgaatattttcctcatcttctaycttccaatgctatataaggttacctttatttttataatgttaagttaggacacattcatatatttgttcaatattaataatcacatctttcagcctttgc

SEQ ID NO: 262888 - DNA, 201 bp, Homo sapiens
ccgcccagttggcactgactggtttcaagtgggcttgaggttacccccactctcccgccgtacggtgggaaggtctggaaggctgtaggtcgagggctgtrgcatctccagtttccggctttttcacttcccttttcttctggcaactctgagctgcttttttacccgctcccatagcctgtcactttgcctcattacttc

SEQ ID NO: 262889 - DNA, 201 bp, Homo sapiens
attgtgtttggagaagcacattcctctggggaaaatggttacaaccaagagtctatagaaaaggcctgtagtgttatagactgtgattagatcctaaagtmgttgttactcttgtccctccaaatcatggcaaagaccaaggataatggcttccatttattgcgtgcttattgtgagtaggtaagcacaattactgtataa

SEQ ID NO: 262890 - DNA, 201 bp, Homo sapiens
gagatttgctattatctggagtttcatattatccataataattttgtttgttacataatcaacagaatggctaaaaattaaaaaggtggaaaataacaagkgttcacaaaaatgtagcaaactggaactctcattcactgctaaaggagttttatagctgctttggaaaactatttggttatatttactaaagctgaacat

SEQ ID NO: 262891 - DNA, 201 bp, Homo sapiens
ttttatttatctgtgattttgttgtaatgcagcattgccattctgttgaaatacagtacttaacaaatctgatcataatctcaagaaaacaatttagagtyatctggaatttaatagagattcacagttgtggcaccatactatgttgtatacttccactttgatgactacttgttgattatttatagtcagtatttatgt

SEQ ID NO: 262892 - DNA, 201 bp, Homo sapiens
aaaccctgtgcttgctcagtaatctcatcctgcctacaattaagtcccttagtttattcctctgtaatctgattccagtctagctttgtagacccacatckgagtgaccccttccatgcactctaggttgtaagaaaacatactctccaaacatttgtatgtggcttttcacctctggacgttgctaatattccttttcct

SEQ ID NO: 262893 - DNA, 201 bp, Homo sapiens
cctccccacttctttcttaaaacgtcacattccacttgtcctacttcctcatgaattagttctggttccttcaccatctttgtttcttcctgtcacttctytacctcagttcagctttcttttctctgaatagttcttcctaaatctcaaggcttttgtacatgctgttcattgtacatagaatcttcctccatcatcctc

SEQ ID NO: 262894 - DNA, 201 bp, Homo sapiens
attctagcttagccaagttgacacagtagaaaaccacaataattattgttatttcactcagagaagtcacttgcttagtaggcttacatatcaggttaagygtcataacccactttaaaaccctgtgcttgctcagtaatctcatcctgcctacaattaagtcccttagtttattcctctgtaatctgattccagtctagc

SEQ ID NO: 262895 - DNA, 201 bp, Homo sapiens
cgtcacattccacttgtcctacttcctcatgaattagttctggttccttcaccatctttgtttcttcctgtcacttctttacctcagttcagctttctttwctctgaatagttcttcctaaatctcaaggcttttgtacatgctgttcattgtacatagaatcttcctccatcatcctccacccccagcatacacctggtt

SEQ ID NO: 262896 - DNA, 201 bp, Homo sapiens
caggagaattgcttgaacccaggaggtggaggttgcagtgagccaagatctcaccattgcactccagcctgggcgacagagcgagactctgtctcaatcartcaatcagtagtaaaacatgtcttcttagagaaagtgtacattgctttcaaagtcgtaagccaaagtgtgtcttcagaagttaatttctcaagcaaaata

SEQ ID NO: 262897 - DNA, 201 bp, Homo sapiens
tcattcctcatcttatatttattgaagcatttgagctattaacctccccacttctttcttaaaacgtcacattccacttgtcctacttcctcatgaattasttctggttccttcaccatctttgtttcttcctgtcacttctttacctcagttcagctttcttttctctgaatagttcttcctaaatctcaaggcttttgt

SEQ ID NO: 262898 - DNA, 201 bp, Homo sapiens
gggaagtactaccctaaaggattttggtttagttttctttccccttctcatcaccatctatactagcaagtgaaacctctttctaaaaagtagtcctgcartttggcaacccatcaagtcattgtgttctctctttttcttttttattgttactgtctttggaaaagtgttccaaatgtactattcacctttcttcacaaa

SEQ ID NO: 262899 - DNA, 201 bp, Homo sapiens
aagaattcctagtttaagattgttctcttcattgtaatgcagtatgctttctttactgggtggctttttttgtagctggggttgttctatgatttttctgrtaggaaaaaggttctcttttgtttctcaggtatctaaattttgcttttttgagctttcctttatcacctgattttcaaagggcttctccctcctttttta

SEQ ID NO: 262900 - DNA, 201 bp, Homo sapiens
ggaattgcctgatcaaaaggtaaatgcatatgtaattttattagagattgcccattttctctccaaaaaggatagaccagtttgttttcctaccaatatargagagtgcctgttttcacatagcctcaccaataaaaagcgttatactttttttgtttttacctttttttctggtagtcgaaaagtgatatttcagtatat

SEQ ID NO: 262901 - DNA, 201 bp, Homo sapiens
taagaggaaaagagatttatgtttgataggagggtgggtgataagaatttttggtatgaatagtacagaagtaatactgtcttctcagtgcactgtatttrgaggtgcagcaagttgatttgccctgtgtctgctcacttggttaaggtggcatatgccagagttttctctgtaaagttagtgtttttccctttgtaatta

SEQ ID NO: 262902 - DNA, 201 bp, Homo sapiens
tataaaaggagaaataaaacttctgcattccaggtttattatttcccaaatatgaagtttttcattttatagattattttgaggctgttagaatattttargctgttaattcaacttttcataggcaatatttcaaaatgaaaatgcctgtgagttcctaagaagaatggagttgcatttaagtgagtgtgtaacagtgga

SEQ ID NO: 262903 - DNA, 201 bp, Homo sapiens
caagccagtatactgcagctgtccctggctaggatcaaataagcttatgctgagtaagcatccaggagggagtaacatggtagtgtgtaaaaataccaagwagtcaaaagtttgtagtagaatgatgatttagagaaagttttatattattcaagttagtagtcttattctttattgaataataaaagtagaatattgaat

SEQ ID NO: 262904 - DNA, 201 bp, Homo sapiens
aagtgagtctcctgcctcagcctccctagtagctgggattacaggtgcccaccaccacgcctagctgactttttgtatttttagtagagatggagtttcaycatgttggccaggctggtctcgagttcctgacctcagttgatccacccgctttgacctcccaaagtgctgggattgcaggagtgagccactgcgcccatc

SEQ ID NO: 262905 - DNA, 201 bp, Homo sapiens
cccatatcaactctctgagaatagacatttttgtcttagtcagaactcagagaggtaaaaccactatgagtattaaagaataaaggctgtaatagaaatakgattttatacacaagtgtggaagaagatggagaagaacctaaaaggggtagttggagggtcagggaaaatcactgacaagtctcctgaaacagtggcaca

SEQ ID NO: 262906 - DNA, 201 bp, Homo sapiens
accttcaatggctgtagagcactttttgagaaacactgatggatcctcccactattgtcacaatttcctttcacaaatcccatgctctctagcaaattttktgttgtccttaatgtgcaccccagaattatccttctctaatttgcgtttactttttcttctacctgtaatacctcctcttcatctatacctgcccaggct

SEQ ID NO: 262907 - DNA, 201 bp, Homo sapiens
atactttacatacagtctcattgaatccccatatcaactctctgagaatagacatttttgtcttagtcagaactcagagaggtaaaaccactatgagtatkaaagaataaaggctgtaatagaaatatgattttatacacaagtgtggaagaagatggagaagaacctaaaaggggtagttggagggtcagggaaaatcac

SEQ ID NO: 262908 - DNA, 201 bp, Homo sapiens; identical to SEQ ID NO: 52394

SEQ ID NO: 262909 - DNA, 201 bp, Homo sapiens
aatggctaccattattctcagtgaccccagactgcctcagaatagacttgtttcatgtttataatgttctatcagtatgaaatccttacattttcctccarctcacgtatacttgcaatggtaaaggagtaaggtttggagcttttattgagtagggattgaatatgtagataactttgaataatctattctcagaatgtg

SEQ ID NO: 262910 - DNA, 201 bp, Homo sapiens
atttttccagcgctgcctccaggttttgccggagcgctattcttcactcgagacaagcaggtaactcgtggcacagtcagccaggctggcacaaggcccgkgctccagcggaaaggcgcggcggagtcggaccgcaaactgggcgccggaagggggctgcgcggccgcccagttggcactgactggtttcaagtgggcttg

SEQ ID NO: 262911 - DNA, 201 bp, Homo sapiens; identical to SEQ ID NO: 52395

SEQ ID NO: 262912 - DNA, 201 bp, Homo sapiens
ttctggtagtcgaaaagtgatatttcagtatatttttaattttgctgccctcctctcatgatttttcattttattatttcttttattatgagtgtaattgwccattttcttaactcgagggccatacaaatccagactgcaggccagagttagcctttgggccattgctgacccctagttctagtccattattttgcattt

SEQ ID NO: 262913 - DNA, 201 bp, Homo sapiens
tataagaaagggattggttgacttaaaagaaaaataagtaaaatctgaaagtcgaatattgacagcctattctagcaggagttagtagagagtcctgacamgcaaactggaagattatgttatctttggtgagactatttctctcatctttttattggcattagtaaggaaagcttagtcttagccagaactatcctttgc

SEQ ID NO: 262914 - DNA, 201 bp, Homo sapiens
ggctgaggccggagaatcacttgagcccaggagttggagactgcagtgagctatgattgcaccactacagtccagcctgggtgacagataagaccctgttmctaaaaaaaaaaaaaaaaaaaaaaaaaaaaaaatccaaaaaaataagtaatacataatttgctttacctgaatatcataactacttccataatgcctgag

SEQ ID NO: 262915 - DNA, 201 bp, Homo sapiens
accagcacatgccaatataaaaacagtgagtcctaacagagggaggagctttatttcttcttcaaaggagcagacccagaagaaactttgtaggtgttccrtatgtacacaaaatacaagtatttttctacagtagaaagtggagaaaagcatcattttttctaaagcggcctcacaccatagaaactttttccctgatgg

SEQ ID NO: 262916 - DNA, 201 bp, Homo sapiens
taggatcaaatctaaatcgctgtggtttccgaggctcttcatacctgggtattccgttcaatccatcaaaggttggttctatttggttcagaaggaagtasaagggatgtagggatattttaataaaagagaaaactaagaagttacacagaaaaaaacaggcttccagatttcaatgtggctaaatgttgtctaataata

SEQ ID NO: 262917 - DNA, 201 bp, Homo sapiens
cagattagtaacttgaaaggataccctttaaaaaagacaatcccaagaacaaaaagagaaaaaaaaagatttaaaaatgttttaatcatataggaaaataygccttttgatactgcccctcatccaactagagaaggattaaaagaagtgatgataaaaggataggctgggtgcggtgggctcctgcctgtaatcccagta

SEQ ID NO: 262918 - DNA, 201 bp, Homo sapiens
tgttattctttttgggtgggagcaactctgaaggtaagagaaataataaaaaatgagaaacctatattctgtgttcatatagattgtgctaaaaaggtttratctttgtaatgtgtattaaatattgttaggtttaggctactggattttctcttttgctctgccaaagctagtctctgtatggtttttccatagaaatca

SEQ ID NO: 262919 - DNA, 201 bp, Homo sapiens
tgacaatggactggcacagggagctggacttgaatctcatggtaagacatcttaaataagtgaacatgtagtttcttttgttcccttagacaacatcttgrtgtcttcagtatggagaacctcagaagtttttctcaacccttggtgcagcataattttcttctttgtcactttcctgattctcttttgacaccattttgt

SEQ ID NO: 262920 - DNA, 201 bp, Homo sapiens
ctctttgtgctccatctactaatagctctgttttcccgtcagtgttttcaaaacactgctcttgatgagggaaaaataaatgtagacaagtagaataaatygacattaattggaaaccctatgaaactaaatatttacttcatccagtacatatatgacttatgtctcaatatttcagtgtagtctttgattattgcttcc

SEQ ID NO: 262921 - DNA, 201 bp, Homo sapiens
acataaaatacaaaaattagctggatgtggtggcaggtgcctgtagtctcggctacctgggaggctgaggcagggcaggaggattgcttgagccttggagrcggaggttgcagtgagcgagattgtgccactgcactccagcctgggtgacggagcaaagcctatctcaaaaaaaaaaatgtgtatctaaaggtgggtagg

SEQ ID NO: 262922 - DNA, 201 bp, Homo sapiens
atgcttgggaccttcaatggctgtagagcactttttgagaaacactgatggatcctcccactattgtcacaatttcctttcacaaatcccatgctctctakcaaattttgtgttgtccttaatgtgcaccccagaattatccttctctaatttgcgtttactttttcttctacctgtaatacctcctcttcatctatacct

SEQ ID NO: 262923 - DNA, 201 bp, Homo sapiens
agtatgaaaggactgtataggcagtgaggtgggctattaaaaaaaggtacatgatagaaataattatgttttttgtgactcatatggaaattaaatgaggraattcccataagcacctagaatggacctggcacatggtaagcattcagcattagccagtatgaaaatggagactaaaatagtctgtttctgaaagattgt

SEQ ID NO: 262924 - DNA, 201 bp, Homo sapiens
gggttttttttttttttttttgagaatcattgtgaacacatagattttaacattttttagtcatatattatatataatatatattagttatatatgacatwtatatatatatatacacacacacatataatgcttaaattgtcctatctttagtctataagaaccctttcaagttgtcccaagtcttttttatttgacgtc

SEQ ID NO: 262925 - DNA, 201 bp, Homo sapiens; identical to SEQ ID NO: 52397

SEQ ID NO: 262926 - DNA, 201 bp, Homo sapiens
aactttgaataatctattctcagaatgtgcctagtgtatgcatttagtgatttggcttggtgaataagaagagaaaatcaggtatttgaaaatgcctaatwctacttctccatggggaaaaacgcatattttggaagatgtaaaggagaaataaaatttaaagagacctaaaaaacttagttcattggcaacttatttatt

SEQ ID NO: 262927 - DNA, 201 bp, Homo sapiens
agttttaaatttcttttcaaagaatcaatatgtcagtatgttcaattttttgccttctacttttaaacttaacttcctcgtaaagcaacctttttcaatcrcctgccccaccctgactcattctgattacctgctccaccctgactcattccaattacctgctcctccctgactcattccgattacctgctccaccctgac

SEQ ID NO: 262928 - DNA, 201 bp, Homo sapiens
aatcataatcaccattagtatcttttttttttttcaagacagtttgactctgtcgcccaggctggagtgcagtggcacgattttggctcattgcaacctcyacctcccgggttcaagcaattctcttgcctcagcttccccagtagctgggattacaggcaggtgccactacacccatctaagttttgtattattagtata

SEQ ID NO: 262929 - DNA, 201 bp, Homo sapiens
cttgggttgggagctttatcaattaccaggtttcttttataagtagtttagggagtttagtgtggttatgagttattcttgccatttgtatttgggtaatrggaattagagtagtcctttttattaaggaacaaagtagtgacaattttctgttatttttacagtcacctcttctagaagaagggtttaggcagttagctt

SEQ ID NO: 262930 - DNA, 201 bp, Homo sapiens
ttattattttcagtttttgtgcagtacctgaaggcagtgaaaatgacatgcgatttgtgtactgtgcttcctgtatttgctatatgctcaacaactggtcrggcatggatatgaaaaaagccatcacctatattagaaggagtatggtgagttctgttgataaaattgactatttaggttgtttttgctggtacatgaggg

SEQ ID NO: 262931 - DNA, 201 bp, Homo sapiens
cttcattggcttgattttaggtgcgtgtgttcgcacaattacccctctatacacctgtgctgagtcaggttgcccagcagtttattcccaagtagaagtcrtctaggaaccataaaaccctacattatactatttctctgggaggcccacagcccaaaattcctttgtgttttttgtggcttgttttaattctctctcttt

SEQ ID NO: 262932 - DNA, 201 bp, Homo sapiens
gcctcagaatagacttgtttcatgtttataatgttctatcagtatgaaatccttacattttcctccagctcacgtatacttgcaatggtaaaggagtaagktttggagcttttattgagtagggattgaatatgtagataactttgaataatctattctcagaatgtgcctagtgtatgcatttagtgatttggcttggtg

SEQ ID NO: 262933 - DNA, 201 bp, Homo sapiens
cactttgggaggtcaaggcaggtggatcacttgaggtcaggagttcaagaccagcctggccaacgtgttgaaaccccgactctactaaaaatacaaaaatyagccaggtgtggtgatgcgtgcctgtagtcccagctatgcgggagtctgaggcaggagagtcacttaaacccaggaagcagaggttccagtgagccgaga

SEQ ID NO: 262934 - DNA, 201 bp, Homo sapiens
aggctgatgctggtgaatcacttgaagtcaggagttgaagaccagcctggtcaatatggcgagaccccgtctctaccaaaaatacaaaaatagccaggcayggtggtgcacacctgtagtcccagctactcaggaggctgaggcaggagaattgcttgaacccaggaggtggaggttgcagtgagccaagatctcaccatt

SEQ ID NO: 262935 - DNA, 201 bp, Homo sapiens
tataggtggtcttcaatttctttcagcaatgttttgtagttttcaacatacaaatctttcacctttttgttaagattaaattctcagtatttaatcatttyagatgctcttgtaaatgaaattgctttcttaatttccttttggattgttcattgctagtctatagtaactaccaactttttatggaatagttttaacagg

SEQ ID NO: 262936 - DNA, 201 bp, Homo sapiens; identical to SEQ ID NO: 52391

SEQ ID NO: 262937 - DNA, 201 bp, Homo sapiens; identical to SEQ ID NO: 52393

SEQ ID NO: 262938 - DNA, 201 bp, Homo sapiens
cagcttaataaattttcatgtacaaacgtgcaaataaatgaattattcttccttatagttgataactatagatacattatattttctaataacacacttcytgcatacttacacataaacacacacacatattacatccatgtacatactcccatttttgctgcctttctcatctacccagttttcatttttcttcagtaa

SEQ ID NO: 262939 - DNA, 201 bp, Homo sapiens
ttattgagtagggattgaatatgtagataactttgaataatctattctcagaatgtgcctagtgtatgcatttagtgatttggcttggtgaataagaagaraaaatcaggtatttgaaaatgcctaattctacttctccatggggaaaaacgcatattttggaagatgtaaaggagaaataaaatttaaagagacctaaaa

SEQ ID NO: 262940 - DNA, 201 bp, Homo sapiens
ctttttctgccattctcaagccagtatactgcagctgtccctggctaggatcaaataagcttatgctgagtaagcatccaggagggagtaacatggtagtrtgtaaaaataccaagaagtcaaaagtttgtagtagaatgatgatttagagaaagttttatattattcaagttagtagtcttattctttattgaataataa

SEQ ID NO: 262941 - DNA, 201 bp, Homo sapiens
attgtatcgttttttagtttcttatatggtgatcactactgtggtatttcatttagatttgtgctatataaaataagttttgttttagaaatctttttttytggaaggctatatgcttttctgactttataagacttaaattataagtgatagcgtgattaagtttgaggtttaaataatttagccaggcatggtggtttg

SEQ ID NO: 262942 - DNA, 201 bp, Homo sapiens
gccttggaggcggaggttgcagtgagcgagattgtgccactgcactccagcctgggtgacggagcaaagcctatctcaaaaaaaaaaatgtgtatctaaasgtgggtaggtggggtgggttcagattattataaaaagggtagtgaacaccattcaaattcattctgtgaggaaccatagaaggtaagtatgcaagaaaat

SEQ ID NO: 262943 - DNA, 201 bp, Homo sapiens
tttctagaccaggaagacttcagacttaagtggtatgatagttaagatggaattttacatttttttcttttaggttgacaattgcattttttgcactctcygggctggatatgttggattccttagatgtggtgaacaaagatgatataatagagtggatttattccctgcaggtccttcccacagaagacagtgagtgag

SEQ ID NO: 262944 - DNA, 201 bp, Homo sapiens
agggatatggtaggaatgtaatctgaagaggtaggcatgcatcagatcatggaaagctttgtgtgcttgtctagaaacatgagttggatatcatgtaagtracaggaatagtcatatatatagtcatatatcacatggtacaggaccagaaccagggagaccaatgaggacactcatgtggtagtccaggagagagatgct

SEQ ID NO: 262945 - DNA, 201 bp, Homo sapiens
attttcttaactcgagggccatacaaatccagactgcaggccagagttagcctttgggccattgctgacccctagttctagtccattattttgcatttgctttttttttttttccttcttttttttctttttaggaattccattttagtgtctgttcttatttttttgcctgaccttcttttcagccactttctctttgac

SEQ ID NO: 262946 - DNA, 201 bp, Homo sapiens
agtgaccccagactgcctcagaatagacttgtttcatgtttataatgttctatcagtatgaaatccttacattttcctccagctcacgtatacttgcaatrgtaaaggagtaaggtttggagcttttattgagtagggattgaatatgtagataactttgaataatctattctcagaatgtgcctagtgtatgcatttagt

SEQ ID NO: 262947 - DNA, 201 bp, Homo sapiens
gaatgtatttttgaagacagatcctttgcataggttacaggggtagagcagagactgtggtataggaggaaagcttaggtcatcgtgggtaagactgttgyacatgcatgagactcatttgcaaaaccaggctctaaaatgctttacaaattttagtaaaggaagtaggtgtggagtacagtggagctgaaatgtaaactt

SEQ ID NO: 262948 - DNA, 201 bp, Homo sapiens
tacacttgcagcacatttcatttcagactagctgcatttcaggtgctcagtagccacatgtggctggagacagcttagctctaaaatcacacatcatcatragaaaccctaagagagtacccagattattaggtgtgtaccaccacttcttcaccccactgaaccaaactccaacaccaaaggattttaattgcagtttac

SEQ ID NO: 262949 - DNA, 201 bp, Homo sapiens
gacagatggtactgatacaaagctgtattatgtgttacaatgtatggaagttaaattaaagcaataatttctgatcatctattttataaatagtcttccaycctcatgtaagaatacacccagaaacatgaaacaaatagttagcaaagttagtttctgagcatctattaaattttcagccatgtaggggatgtagaaata

SEQ ID NO: 262950 - DNA, 201 bp, Homo sapiens
agctgtattatgtgttacaatgtatggaagttaaattaaagcaataatttctgatcatctattttataaatagtcttccatcctcatgtaagaatacaccyagaaacatgaaacaaatagttagcaaagttagtttctgagcatctattaaattttcagccatgtaggggatgtagaaataatcatgtggttcctgctgtc

SEQ ID NO: 262951 - DNA, 201 bp, Homo sapiens
cgggtttgttttgttctgccttaacgtctctcttacaacaaactaacatctctcagtatgttagaacactagcagtatcactttgctgctctgagatgttsagacacttgttttccttgcaattttgatttcccttgagaattctaaatctgtgccacctgagggcactgttgctcttgaaataggaatcacataggcaaa

SEQ ID NO: 262952 - DNA, 201 bp, Homo sapiens
atatggtattagtgcctcttgtttaaagtgaccttgacaaaatcgaatcctggtcttggactctatcatcagaagtccttaggtgcagtctgcgccctgcycctaattggccatgtgccatagagatggcacttgtaccctctcagtacatatttcttttagctaaaaaatgaggatgataggttacacaatcacttccag

SEQ ID NO: 262953 - DNA, 201 bp, Homo sapiens
tgtacgattttatctacatctcagggttattgtgaggattagctgagatcatatgcataaatgtatttaaaatccataaagcatcatataaatgcaatgtractaaaatatatgtccttgagaatgctgggtgattcatccagagtccctacatagtgtcacgaagaatcatagtctgtgtttttaaaatcatagaaatgt

SEQ ID NO: 262954 - DNA, 201 bp, Homo sapiens; identical to SEQ ID NO: 52409

SEQ ID NO: 262955 - DNA, 201 bp, Homo sapiens; identical to SEQ ID NO: 52408

SEQ ID NO: 262956 - DNA, 201 bp, Homo sapiens
tataatggcagggtatggtttgacatttatgaaagcactagcatactcttagtaggaaaagtgttgaaacaaccaatttttctcttattatttggagtttrgtaactcaaactcagaaatgatatatagtctcattacagaagagcagtattttgagagtattgaaaacagctgtcatttttttaagaacgttattttgtt

SEQ ID NO: 262957 - DNA, 201 bp, Homo sapiens
attcccccaaaataaaccatatacatattatttataatatattataaattataaaatataatacacattatagataattatatattatatgtattatacatatattattatatattatacatatacatattaatacattgtatatattataaattatattactatatattatatgtattattcatatattattatatatta

SEQ ID NO: 262958 - DNA, 201 bp, Homo sapiens
cttctgatgaagtaagcactattcttcccaaggagttcattaccctcaatcacatttggccacaatttgctcatcaaaataatatcattttagagagtttrtggcatatatgtgctaagatgctacatttataagatagggataagttctcatttaatttgctcaaagaaagaccacttcgatctgagccactaattcttc

SEQ ID NO: 262959 - DNA, 201 bp, Homo sapiens
ccccaaaataaaccatatacatattatttataatatattataaattataaaatataatacacattatagataattatatattatatgtattatacatatattattatatattatacatatacatattaatacattgtatatattataaattatattactatatattatatgtattattcatatattattatatattatatg

SEQ ID NO: 262960 - DNA, 201 bp, Homo sapiens
tttttagatgttgtttttttctgcacgttgcctgtttcaaaattaatctgagcagttagatcagtgtaaagatgggtttttaaagagcctgaaactctgtsgtatgtatgttttataaagtagcccaagaaaaaaggattcttacggtatcctaagtgaagagttttcttcctggctcttgaaaacaatggcttcctgaat

SEQ ID NO: 262961 - DNA, 201 bp, Homo sapiens
aattctgaagaaggtgttcttaggaaacactgccctaaattggtgaggcccaccatccctgcagcaaccatctacaaggtcctgcccatcctgcctcagcsctctcctcctcagctacccatagacatttctgcagctccacctttatcactctttcctgaagcctgcatcagcttccactagtctctgggcaccacagta

SEQ ID NO: 262962 - DNA, 201 bp, Homo sapiens
aggggttgactgggtacagagccagctcaactcaaggttgtaaattgaacctagtgaaatgcagaagaacaacttttcccttccatcccagctggatttgwtgtcctgtccatgtctgggcaggagaagagctttgttaatggcacagcagggctgatattctactctgaatattcaacctaatgttaagaaggttccaga

SEQ ID NO: 262963 - DNA, 201 bp, Homo sapiens
tcaacctaatgttaagaaggttccagatgaacattaacaggaaaattagagaaactgacttagtaatgaagggactttgaaaaatctacttgtttagtgcytagaagggatttttgggtgggtccacagaatgttgaactagcaaatttttataacaaattgttttttttaatgtaagttgattttttagcctatttggag

SEQ ID NO: 262964 - DNA, 201 bp, Homo sapiens
atttcaagtcttccctttctttatgaatcttttatttctatattcccccaaaataaaccatatacatattatttataatatattataaattataaaatataatacacattatagataattatatattatatgtattatacatatattattatatattatacatatacatattaatacattgtatatattataaattatatt

SEQ ID NO: 262965 - DNA, 201 bp, Homo sapiens
aaacaaaatttcaagtcttccctttctttatgaatcttttatttctatattcccccaaaataaaccatatacatattatttataatatattataaattataaaatataatacacattatagataattatatattatatgtattatacatatattattatatattatacatatacatattaatacattgtatatattataaa

SEQ ID NO: 262966 - DNA, 201 bp, Homo sapiens
aggcaggcggatcacctgagttcaggagtttgagaccagcctgaccaacatggtgaaacctcgtctctactaaaaacagaaaatagctgagcgtggtggcrggcgcctgtagtcccagctactcgggaggctgaggcaggagaatcgcttgaaccagggaggcggaggttgcagtgagccgggattgcgccactgcactcc

SEQ ID NO: 262967 - DNA, 201 bp, Homo sapiens
accaaatgttaatttggatttccctgaattaagtgtttaagtgaggtttcctgttaggacaagggtaaattgtttagttatcctagtcacaggaaaatttsaaaatacagcctgtatcaaacctggttaattgttctgtctccttgtgtttatcactgcagtctgcttatgtaactggtaaccctgtcatcattgatggag

SEQ ID NO: 262968 - DNA, 201 bp, Homo sapiens
aaaatttcaagtcttccctttctttatgaatcttttatttctatattcccccaaaataaaccatatacatattatttataatatattataaattataaaatataatacacattatagataattatatattatatgtattatacatatattattatatattatacatatacatattaatacattgtatatattataaattat

SEQ ID NO: 262969 - DNA, 201 bp, Homo sapiens
tattaacaacaattgttaatagctggggaaattaatagacaaatgtttaatgaagaagcacatgagcctttgtgatttctctgaatccgtatcttcagaakagctcatttgatttgggtactgctgataagctaaattacccttagttagccagagcttaggttacaagatatttggaagtgttgtggcttgaaatgtgct

SEQ ID NO: 262970 - DNA, 201 bp, Homo sapiens
tgttaggacaagggtaaattgtttagttatcctagtcacaggaaaatttcaaaatacagcctgtatcaaacctggttaattgttctgtctccttgtgtttrtcactgcagtctgcttatgtaactggtaaccctgtcatcattgatggaggctggagcttgtgattttaggatctccatggtgggaaggaaggcaggccct

SEQ ID NO: 262971 - DNA, 201 bp, Homo sapiens
tattcccccaaaataaaccatatacatattatttataatatattataaattataaaatataatacacattatagataattatatattatatgtattatacatatattattatatattatacatatacatattaatacattgtatatattataaattatattactatatattatatgtattattcatatattattatatatt

SEQ ID NO: 262972 - DNA, 201 bp, Homo sapiens
tgagtatttttattatggcagctttttggtaagagatggggaagcaataaagttatttttataatttttgttcttttagtggtgttgattaaagatacttwgtgagaagttgttaaaattcaaattgtggtgagtaggcattatttgcctaatgagttaccttcatctcatcttataatagcaaaatttattttaatagac

SEQ ID NO: 262973 - DNA, 201 bp, Homo sapiens
tttgctttggactactacttaggtcccttaaagtggtgccagtgccacagaactgaagattcctgactgtagggaatataccatctaattttgagtttcartagagtaactttgattttagtgagttgttgggaaatcctttagatcattagttatgcagcaaaattgcttggctttaataatcatatgtactggcttatt

SEQ ID NO: 262974 - DNA, 201 bp, Homo sapiens
tgtatttttcaatcccaaaccacttggacatctcacactaacttgcggcctttttaccaagaatggtatgatatacctaaacttaatagagcttttgaatyctgaggtttccactctaggaaaattctgattttgctttcctgggttaatttttagacaaatcttcagtcatgttttatgtaaccatgataggttgtttct

SEQ ID NO: 262975 - DNA, 201 bp, Homo sapiens
taaagatcttacttgataactatcttgattctgagataagagaggaagaagttgatgatgagatcctggtttatggctttcagttatggcttgctattaawaaacaggaaaaaagggattgagacaagtttcagttttggacgcatgacatgagatatccaagtagagatatccaagtagaaatatcagtaggcatttgaa

SEQ ID NO: 262976 - DNA, 201 bp, Homo sapiens
catgttttatgtaaccatgataggttgtttctacctaatgacagtctaaaattatataatcttcgaaagatctgtagatcaattctggtctcttaataggyatctgttacgttatatgtaacaagttttccggtctccgcatgaatatcccaggtgaagttgtaataattaacactatttcaccattaattgttttttgat

SEQ ID NO: 262977 - DNA, 201 bp, Homo sapiens
aaaaaaaaaaaaaaaagaataccaacgttttattgccacagaagagctgaggcactgtgagggagcaactttgcactgatgagagcaaaagaagtagaagrtttctgaaaaaatctaacataaattctggacttgtacgatttgagtcgatttgctgatcacagtgttccttattctttggggattttgtttctttttggt

SEQ ID NO: 262978 - DNA, 201 bp, Homo sapiens
agtcaataaatatgtgacagtgttgtcttttttatactattgctttttttaaaaaaaaatcggtcagaaccatttcaagcatttatatcttaacattttawaacagcaccaccatatatggtgactggcacatagcaggcactcaaagtgaatgcgatctatgttccttaatgcttgacatcttatacatcagtatgttga

SEQ ID NO: 262979 - DNA, 201 bp, Homo sapiens
gtcaataaatatgtgacagtgttgtcttttttatactattgctttttttaaaaaaaaatcggtcagaaccatttcaagcatttatatcttaacattttatwacagcaccaccatatatggtgactggcacatagcaggcactcaaagtgaatgcgatctatgttccttaatgcttgacatcttatacatcagtatgttgaa

SEQ ID NO: 262980 - DNA, 201 bp, Homo sapiens
gaaccatttcaagcatttatatcttaacattttataacagcaccaccatatatggtgactggcacatagcaggcactcaaagtgaatgcgatctatgttcyttaatgcttgacatcttatacatcagtatgttgaactggttaaggtaaaaactagagctgatgactcacttagtactaaagagattttggcattgtattt

SEQ ID NO: 262981 - DNA, 201 bp, Homo sapiens
atcttaacattttataacagcaccaccatatatggtgactggcacatagcaggcactcaaagtgaatgcgatctatgttccttaatgcttgacatcttatrcatcagtatgttgaactggttaaggtaaaaactagagctgatgactcacttagtactaaagagattttggcattgtatttaactagtactcttgggaata

SEQ ID NO: 262982 - DNA, 201 bp, Homo sapiens
aacagcaccaccatatatggtgactggcacatagcaggcactcaaagtgaatgcgatctatgttccttaatgcttgacatcttatacatcagtatgttgarctggttaaggtaaaaactagagctgatgactcacttagtactaaagagattttggcattgtatttaactagtactcttgggaatatggtttcttgcttac

SEQ ID NO: 262983 - DNA, 201 bp, Homo sapiens
atatggtgactggcacatagcaggcactcaaagtgaatgcgatctatgttccttaatgcttgacatcttatacatcagtatgttgaactggttaaggtaaraactagagctgatgactcacttagtactaaagagattttggcattgtatttaactagtactcttgggaatatggtttcttgcttacaagttcaaggagac

SEQ ID NO: 262984 - DNA, 201 bp, Homo sapiens
gtatttaactagtactcttgggaatatggtttcttgcttacaagttcaaggagacatttagtggagcacttgagggtttttctcagaaattgccaagacarcggctaagaatggatttttcatcatgcctaatggctatgaatatggcatgagtgttacctgcatattcttgctaaagtcccccccccccagccacagagt

SEQ ID NO: 262985 - DNA, 201 bp, Homo sapiens
ggaggccaaggcaggtggatcacgaggtcaggagttcgagatcagcctggccaacatggtgaaaccctgtctctactaaatacaaaaaaattagccaggcrtggtggtgcatgcctgtaatcctagctactcaggaggctgaggcagaagaattgcttgaacccgggaggcagaggttgtaataagctgagatcgcagcac

SEQ ID NO: 262986 - DNA, 201 bp, Homo sapiens
agaaaactgcccaaatctggggaggaaaatgaacatccagatccacaattcccaaagaattccatgtaggttgaacataaagatgtcttcattgatctttytgtggttcataagcatgatgattgggttttcataccattgtgtaagatgtgcctttctcagaccttgccaaaacactggcacattacctgtctgatatga

SEQ ID NO: 262987 - DNA, 201 bp, Homo sapiens
ccaggagtggtggtgggtgcctgtagtcccagctactcaggaggctgaggcaggagaatggtgtgaacccgggaggcagagcttgcagtgagctgagatcrcgccactgcactccagcctgggtgacagagcgagactccatatcaaaaaaaaaaaacaaatcaaattctgaaactaaagaacacaataactgaactgaaa

SEQ ID NO: 262988 - DNA, 201 bp, Homo sapiens
ggccgaggcgtgtggatcatgaggttaggagatcgagaccatcctggctaacatggtgaaacgccgtctctactaaaattacaaaaaaaattagccaggartggtggtgggtgcctgtagtcccagctactcaggaggctgaggcaggagaatggtgtgaacccgggaggcagagcttgcagtgagctgagatcacgccac

SEQ ID NO: 262989 - DNA, 201 bp, Homo sapiens
aggggtggttccctcctgaatggtttggtatagtccttgtgataattagttcttactctgttcgctcctgtgagaggtagttgttaaaaagagcctggggscgggctcggtggctcacgcctgtaatcccggcactttgggaggccaaggtgggtggctcacctgacgtcaggagttcgagaccagactggccaacatagt

SEQ ID NO: 262990 - DNA, 201 bp, Homo sapiens
taggggtggttccctcctgaatggtttggtatagtccttgtgataattagttcttactctgttcgctcctgtgagaggtagttgttaaaaagagcctgggsccgggctcggtggctcacgcctgtaatcccggcactttgggaggccaaggtgggtggctcacctgacgtcaggagttcgagaccagactggccaacatag

SEQ ID NO: 262991 - DNA, 201 bp, Homo sapiens
tcaccatatttgccaggctggtcttgaactcctgacctcatgatccacctgcctctgcctcccaaagtgctgggattacaggcgtgagccaccgtgcctgrccgtgtatgtctgtttttatactgaaatttggtttgggtgtagtcaaatttattcatctttttctttacaatttgtgttctgggagtcttgtttaagaaa

SEQ ID NO: 262992 - DNA, 201 bp, Homo sapiens
ttttttttttttggttgagacagagtctctgttgcccaggctggagtgcaatggcgcgatctcagctcactacaacctctgcctcccaggttcaagtgatyctcctgcctcagccttccatgtagctgggactacaggcgcccgccaccactcccggctaatttttgtatttttagtagagacgaggtttcaccatatttg

SEQ ID NO: 262993 - DNA, 201 bp, Homo sapiens
ttatcttctcctagtgtatgtcttttttttttttttttttggttgagacagagtctctgttgcccaggctggagtgcaatggcgcgatctcagctcactayaacctctgcctcccaggttcaagtgatcctcctgcctcagccttccatgtagctgggactacaggcgcccgccaccactcccggctaatttttgtatttt

SEQ ID NO: 262994 - DNA, 201 bp, Homo sapiens
ctttattgctgtgttgtacttttgagaattgagatctagaatacttgcgtttctggataactttttaaaaaaacattttggtgacgtgtaaaatgactagrtaaattagggtttattactgtataagttttaagtttttttctattactatagactgaattttcatggaatagattatttattgcagtgtaaataggtgat

SEQ ID NO: 262995 - DNA, 201 bp, Homo sapiens
ctgttctcattgtctaataaagcttcattcttagatctacttatctgagtatttttattatggcagctttttggtaagagatggggaagcaataaagttayttttataatttttgttcttttagtggtgttgattaaagatactttgtgagaagttgttaaaattcaaattgtggtgagtaggcattatttgcctaatgag

SEQ ID NO: 262996 - DNA, 201 bp, Homo sapiens
gaatatggtttcttgcttacaagttcaaggagacatttagtggagcacttgagggtttttctcagaaattgccaagacaacggctaagaatggatttttcrtcatgcctaatggctatgaatatggcatgagtgttacctgcatattcttgctaaagtcccccccccccagccacagagtaccaagaaactcaagttctaa

SEQ ID NO: 262997 - DNA, 201 bp, Homo sapiens
ttaaacttatattcttcatattagggctttactcaacccagtacttactttttgtgcatgagaaagggatctactctcatttgttattattttacatacaracaactatgttctagcaccatttattgaagagttaaacttgtttttgtggtttgtaatgtcacttatctcaaatcaggtttccacacatcctgggttgct

SEQ ID NO: 262998 - DNA, 201 bp, Homo sapiens
aacaactaatatgctttaacaaattaaaaggatacttacagtggactataggttggggttaaaataatgattatcatatgagaaactaatcaatttttttwaaaaaagaattattattaaatctgtctattcaacattttaaagagataaactttttttattagaacattttgattttggtgtttggtgttcttacttccc

SEQ ID NO: 262999 - DNA, 201 bp, Homo sapiens
gtatcttttttttttttcaaactatcatggtgtttaaattttagcttgagactttgtaccaatcctatacagaatgtggtggtttagttcaaattttgccrggagatagtaatgtaagggaaaaacacttttaagcctaagcatctaaactaaatgttcattactgacaagcatgcattagcgtcagctgtactttgtggc

SEQ ID NO: 263000 - DNA, 201 bp, Homo sapiens
atggtagtgacagtgggcataaaggagaagctaattcaagaaattttaaagatcttacttgataactatcttgattctgagataagagaggaagaagttgrtgatgagatcctggtttatggctttcagttatggcttgctattaataaacaggaaaaaagggattgagacaagtttcagttttggacgcatgacatgaga

SEQ ID NO: 263001 - DNA, 201 bp, Homo sapiens
gacaacggctaagaatggatttttcatcatgcctaatggctatgaatatggcatgagtgttacctgcatattcttgctaaagtcccccccccccagccacwgagtaccaagaaactcaagttctaatatcatttatgcctatttaaaatatatatattaatatggcatcagttgcctatcttagaaactatttttatggct

SEQ ID NO: 263002 - DNA, 201 bp, Homo sapiens
ttaactaacaaaaggtaacaaatatggcagtcttctgaaaactgtacatttaactgcttggtctctgtttaacgtgaaagtaaatatctggtagccgttaytgcttgaaagtattgcatggcaaagcagttacaatagcactagtaagaaatgggaatttatgtagtatcttttttttttttcaaactatcatggtgttta

SEQ ID NO: 263003 - DNA, 201 bp, Homo sapiens
ggtaacaaatatggcagtcttctgaaaactgtacatttaactgcttggtctctgtttaacgtgaaagtaaatatctggtagccgttactgcttgaaagtaytgcatggcaaagcagttacaatagcactagtaagaaatgggaatttatgtagtatcttttttttttttcaaactatcatggtgtttaaattttagcttga

SEQ ID NO: 263004 - DNA, 201 bp, Homo sapiens
gaaagttgttggaccatatttggttcttggtttgaaataaagctagttaatatttaaacaatataaaaattctcctgtgcatatatatatatatatattcmtttcttaaggttatcactgttttttgttgttgtaagtagtctatggcatgagtataatccagggggaagctgatagtatttatcaatgttagtagtcttc

SEQ ID NO: 263005 - DNA, 201 bp, Homo sapiens
gcctgcttataatcatatataaacactaaagtcatacttgcagaaataaaaacccttatgaaaacttaacagagtgtgtatctgttttaggaacaaaagtrtaagaaaagttgaatcttgtgaaactgctcttctctgtagaaaagggggaaaaagaaagcttactggtttctgttaggaagcaattgataatggcagtgg

SEQ ID NO: 263006 - DNA, 201 bp, Homo sapiens
tcaaaaaaaaaaaacaaatcaaattctgaaactaaagaacacaataactgaactgaaaaattcaaaagtgagcttcagtggcagattgaatcaagcagaargaagaatcaatgaacttgaagacagatcatttgatattatccagtcaaaggaacaaagaggaaaaataataaagtaagcctacaggactctaaaccaata

SEQ ID NO: 263007 - DNA, 201 bp, Homo sapiens
aacgtctttcccttctgaagctagtcagtaaagactggaggaagtgactctttcttcagatgcaaagttagaagacaaggcttaaaagaacacacacacayacacatacacacacacacacacaccaggaaaacatgacaaccaaaggaataaattaaagttctagcagttgaacacacacacacacacaccaagaaaaca

SEQ ID NO: 263008 - DNA, 201 bp, Homo sapiens
gagttaaaagtattaaaaataactatagctacagtaatttgttaattgatgcacaatataaaaatgtaaattttgacatcgataacaatgtgggagaggayagatgagttaaagtgtcgagtttttgtatgagatctaagttgttattatcataaatgattagaatgtatccccaaactaattgtattatatacaatatat

SEQ ID NO: 263009 - DNA, 201 bp, Homo sapiens
taaatgaaactgaagagcagaagtaggcagcattctacatgctttggtacgacatatgcatgctagaaggtgcaagatgaaccttgaaaaacttccaggayttgccacaggtttctaggggtccaatggccagaaatatgttaggatatccataacatccatacttttttctcttccattaactggtcagagggaactcat

SEQ ID NO: 263010 - DNA, 201 bp, Homo sapiens
gagtgcagtggcgcaatctcagctcactgcagcctctgcctcccagttgcaagaaatttttggtgcctcagccttccgagtagctgggatcacaggcttgygccaccatgcctggctaatttttgtatttttagtagagacagagttttgccatgttagcgaggctggtcttgaactcctggccttaagtgatttgcctgc

SEQ ID NO: 263011 - DNA, 201 bp, Homo sapiens
catgaacaaaattatttacctatcttgttgactgatgaatccttagtacctgacacttggtaggtgttcagtaaaaaactgctgaatgaactgggcacaayggctcatgcttgtaatcacagcacttcaggaggccaaggcaggatgattgcttgaggccaggtgtttgaagcagcctgggaaacgttgcaagacctcgtc

SEQ ID NO: 263012 - DNA, 201 bp, Homo sapiens
ccatgctaaaactaataaaaagaaagctggagttgctatattgtcagacaaagcagatttcagaaaaaggaaaactgtcagggatagagagaagcattacrtaagtatagaggtaaattctccaaaaagataaaacaatctttaacatatatgcacctaacagcattaaaatgtgtaaggcaaaaactgatagaaccacga

SEQ ID NO: 263013 - DNA, 201 bp, Homo sapiens
tattcagaataaagaatttttaaaactcaacaagaagatgaccctatttaaaaacaggcaaaagatttaaacattttcccaaataagataaacagatggcyagtaagtaaatgaaaagatgttcaacatactagttattagagaaatgcaagtccaaaccacaatgatgtatcactttttaccccatagaatagctgtaaa

SEQ ID NO: 263014 - DNA, 201 bp, Homo sapiens
catgtgagaatgctttctaaccgaaagtgcctttcaaaagtgagtctcttgctgtctctacttcgtcccctctcgccccgcctcttcccctacagtttggktgctgtggccctagggttgcatactcgcccatgagtatcctccccctacccagaccccagtgcctaattttactccttcacccaaaggccaggcttaaaa

SEQ ID NO: 263015 - DNA, 201 bp, Homo sapiens
tctatcattataattgttcaaaattgttaaagtaaaacttacaatggaaattctacaaacacgtttagatacaggttcatgtttttgagctagggcagtayagaagatggtgtatacaaagtgatgtttaaaaggttgatgggatttcctttagagagagtttggaggtaaaccctggagcttttttatcctgaagatgat

SEQ ID NO: 263016 - DNA, 201 bp, Homo sapiens
agactttttaaagaatagctttaaatttacagaagaacagggcagaaaatacagattcccatatgtcaccctctaacccaacacacaccatttctcctatwaatatcctgcattagtgtggtacatttgtcacaactgatgaaccagtactgctacattattaactaaaatccatagttaacattaggggtcactctgtgc

SEQ ID NO: 263017 - DNA, 201 bp, Homo sapiens
tatttgtaaatgtatatatatacatgaacatatatatacgagggaatgtgaaaaacacatattacttgggattataggtttgcttgctctcaggtcaaaayagtaatgacataagatgtaaatttctttttctctcatagtccaaggataatcggttcaggactgatagagcagctctggatattaggtactcaagctact

SEQ ID NO: 263018 - DNA, 201 bp, Homo sapiens
gatgtaaatttctttttctctcatagtccaaggataatcggttcaggactgatagagcagctctggatattaggtactcaagctacttttagctttttaatctgatctactcaatatgtgaatatgtggcttctatttcatggcctaaggtggtagttccagctcctgccatgatacatttgagaacaggaaatagtaaaa

SEQ ID NO: 263019 - DNA, 201 bp, Homo sapiens
aagtggcaaaagcacattgcaaagatgcatgaacaaagtaggcatgatttattgagggcaaatattgtaacaatctcacaaattacacattttatgtattyttaaatttttatttcaatagtttgtggggaacaggtgggttttggttacatggataagttctttagtgatgatttctgagattctggtgcacctgtcacc

SEQ ID NO: 263020 - DNA, 201 bp, Homo sapiens
ctgaactggaagaaatatttgaattgatggagaggggcaaggtggtaaaccctaaatcataatcttttaaggaccacccttttaaaaaattgaaatatagcatatatgcaaaaatgagtgatttatcacagagtgtccctgtatccagcacccaggaaatagaaaccttcttatgagagctcccagtaactatcctgtcac

SEQ ID NO: 263021 - DNA, 201 bp, Homo sapiens
ttatttattgcagtgtaaataggtgatttgggttcattattagagaaatgcttggaaacaaatgttacggaatatttagcaataatattttaaatttgagktaagcatacttttctttttacagaatgacagcccatatcaaggcggtgtattctttttgacaattcattttcctacagactaccccttcaaaccacctaa

SEQ ID NO: 263022 - DNA, 201 bp, Homo sapiens
tttatatattctggatatgagttcttggtcaaatatatgtgtggccagtatcttttcttacattgtggttagtctttttgtaatggtgccttgataaacaraattattaatgtaatacattttaccagtatatttcctttttttttttttttttttttgagacaggggtctcactctgtcacccaagttgcagtgtagtgg

SEQ ID NO: 263023 - DNA, 201 bp, Homo sapiens
ggagtcactgtgcccagccagtttgcagttgtattaggattaccagtaacaacatgaaatcaagtgaagcaggtgaggagtgtatcaccatgataaccatrgtaattataaagattatagatccatctggcttttcttatggtccgaaacagaaagtacttaacccgtttatgccagaggttgcaattttttgaatttttg

SEQ ID NO: 263024 - DNA, 201 bp, Homo sapiens
tcaccatgtcattaaggaatgcaatgatgatgggagcaccactatttcctaggagctctgaagtggctgtctttgtttgcgagagatgatggtggtaaacmctgtagtggaactgagttagctgatcttagtgggaacattagaatcctaaggcagtagaggccacataatggcatataaatatcagagacaagacagaca

SEQ ID NO: 263025 - DNA, 201 bp, Homo sapiens
aattatcttaaaaactatcatagatttcaagcaggggagtaacatttttaaaagaccactttatcattaggatggagggataatcattagtaagctattgmcataatctaggctgaagataacatcatgaactaagatggtagtgacagtgggcataaaggagaagctaattcaagaaattttaaagatcttacttgataa

SEQ ID NO: 263026 - DNA, 201 bp, Homo sapiens
cttgtttttttcacagtggttggtctagatctacatgatcaatgtaattatgtaatgtgtcaatactaataacatggctattgagtatgtaagattgttaytaatataaaatgcttaaggaaccccatgcagatttctggagctctttctctagatgtggtttgtttgacccctccaagtctcatattgaaatttgatccc

SEQ ID NO: 263027 - DNA, 201 bp, Homo sapiens
ttatggataccatctaagaatttcagagaattagagcgcactaaaacatcctggggtaagactgtatcttacacaaatatttaacttttttttttttttttaacttgctaaggcgcttaaggatttgttttctaagttacatgtgtatcttcctgaaaactgtcttccctttttggtggttttataagcaacataaagagc

SEQ ID NO: 263028 - DNA, 201 bp, Homo sapiens
tttcccttctgaagctagtcagtaaagactggaggaagtgactctttcttcagatgcaaagttagaagacaaggcttaaaagaacacacacacacacacayacacacacacacacacaccaggaaaacatgacaaccaaaggaataaattaaagttctagcagttgaacacacacacacacacaccaagaaaacatgacaa

SEQ ID NO: 263029 - DNA, 201 bp, Homo sapiens
gggttttcataccattgtgtaagatgtgcctttctcagaccttgccaaaacactggcacattacctgtctgatatgaaaattttttcactgagacacattrtgatcaaattttcaaaagttaatgacaaagaatttgaaagcagcagaggaaagcaacttgtcatgtacaagggagctcctataagactttcagcaggttt

SEQ ID NO: 263030 - DNA, 201 bp, Homo sapiens
gcctttctcagaccttgccaaaacactggcacattacctgtctgatatgaaaattttttcactgagacacattatgatcaaattttcaaaagttaatgacraagaatttgaaagcagcagaggaaagcaacttgtcatgtacaagggagctcctataagactttcagcaggtttttcagcaaaccttgcaagccagaagag

SEQ ID NO: 263031 - DNA, 201 bp, Homo sapiens
tattcaaagtaattttatttgctaccatagtatagtcctttattattttatgtttgggccatagcaacagtctaccagatatgtgacctctagcctccaaytttaaaatattctatacaaagctttaagaatagtttttctaaatgaagttttttcaaagactttttaaagaatagctttaaatttacagaagaacagggc

SEQ ID NO: 263032 - DNA, 201 bp, Homo sapiens
tgacaactgcatagtgtcatgtgtccaccataatagtagcatacataatcattttattaccctataagtgccctatgctccacctatttacccctacctamcttatacccctgggtaaccaattatcttttgtctctgtagttttgccttctaaataaaattcttcctgatatttaaaacctcaatctctggagtagggcc

SEQ ID NO: 263033 - DNA, 201 bp, Homo sapiens
gtgacataaacaaagatagttaagttgtttctgataggtgagaactgcctgtatttaactagtatatggtcattaaagatctccatgtggtttctaagaatgcagagtcatcataagagagtcaatagctttaaaaaacagctagatttaaatagggaaggaaatgtaggcaataataatgtgaactgtattgttttttgc

SEQ ID NO: 263034 - DNA, 201 bp, Homo sapiens
cagactggagtgcagtggcatgatcacagctcactgcagccttgacttgttgggctcaagtgatcctcccacctcagtcttctgagtagctaggaccccakgcatgcaccaccatgcctagctaacattttcgaagagacgggggtctccctttgttgttcaggctggtctcagtcaaactcctgggctcaagcgatccct

SEQ ID NO: 263035 - DNA, 201 bp, Homo sapiens
cagggtatcctgagagagtggggattggagatggatggaaaaggggaaagaatctgtgtgggcaagttcaaaaattagctgggcctagtggcatatgcctrtagtcccagctactcaggaggctgaggtgggaggactccttgagccctggaggcagaggcttcagtgagccaagatggtgccactgcactccaacttggg

SEQ ID NO: 263036 - DNA, 201 bp, Homo sapiens
ttattgcagtgtaaataggtgatttgggttcattattagagaaatgcttggaaacaaatgttacggaatatttagcaataatattttaaatttgagttaarcatacttttctttttacagaatgacagcccatatcaaggcggtgtattctttttgacaattcattttcctacagactaccccttcaaaccacctaaggca

SEQ ID NO: 263037 - DNA, 201 bp, Homo sapiens
gcctttcaaaagtgagtctcttgctgtctctacttcgtcccctctcgccccgcctcttcccctacagtttggttgctgtggccctagggttgcatactcgyccatgagtatcctccccctacccagaccccagtgcctaattttactccttcacccaaaggccaggcttaaaaaaataaaaattaaaatattttaactaaa

SEQ ID NO: 263038 - DNA, 201 bp, Homo sapiens
aagacagtttctattccatttgaaatccttagtcagtttctcctagttttaaaaaaatttaattgtaacagccattcaaccttagctgtagatttatcttktatacttagaatttcccttccctccctctccctgcaagtttatttggttttctctggactgctatagtattttactgaatctgtctgggaacttaaattc

SEQ ID NO: 263039 - DNA, 201 bp, Homo sapiens
tacacagttttttttgagacagagtcttgctctgtcaccaggtaggagtgcagcagcaagaccatggctcacagcagcctcaacctcccaggtttcagcartcctcccacctcagcctcccaaatagctgagactacagctattttagaaaattttagaaaaatatgtatatattttttgagacagagtctcactctgcca

SEQ ID NO: 263040 - DNA, 201 bp, Homo sapiens
taaacacatatctaccatataatctagctattccactcctaagctacttactcaagagaaatgaaaacatatgtccatataaacactgtaaagaatgttcrtagtagccctatttgtaataagacaaaaattggaagaggctaggcggagtgcctcactcttataatcccagcactttgggaggctgagctgagtggatca

SEQ ID NO: 263041 - DNA, 201 bp, Homo sapiens
ttagtttacttttttttgagacaaggtctcactctattgcccagaatggagtgcagtggtgcgaccatagctcactgcagcctcaacctcctaggctcaarcaatcctcctgcctcagcctcctaaatagctgggactataggcgtgcactaccatacccagcctatttatttattttttattcatttatgagatggagtt

SEQ ID NO: 263042 - DNA, 201 bp, Homo sapiens
tataatctctatctacatcaaactaaattctttgaattctctacatgaacttttttccattttgtgattttagtaatctataattactgtaagcacagtcycagtcaccttgatacccacttatactaagtactgccatgtgattttagaacctctgttttatttaggtttatgatcttgttggcaacacataatagtatt

SEQ ID NO: 263043 - DNA, 201 bp, Homo sapiens
ttccattttgtgattttagtaatctataattactgtaagcacagtctcagtcaccttgatacccacttatactaagtactgccatgtgattttagaacctstgttttatttaggtttatgatcttgttggcaacacataatagtattttgtctgaggcagatggaacagaaatagataatgaattctttttcctggccact

SEQ ID NO: 263044 - DNA, 201 bp, Homo sapiens
ttagaacctctgttttatttaggtttatgatcttgttggcaacacataatagtattttgtctgaggcagatggaacagaaatagataatgaattctttttyctggccacttgaaagccaaatgatatcagtcaaagaatgaacaaaagtctcccaaaggttctagtaaagtggtaagagaactgagacatggatcacagca

SEQ ID NO: 263045 - DNA, 201 bp, Homo sapiens; identical to SEQ ID NO: 52411

SEQ ID NO: 263046 - DNA, 201 bp, Homo sapiens
acatgttttctggaaaatattaccttgttggttacattggttgcttatcttttcctgttgcttatcttctcctagtgtatgtcttttttttttttttttttggttgagacagagtctctgttgcccaggctggagtgcaatggcgcgatctcagctcactacaacctctgcctcccaggttcaagtgatcctcctgcctca

SEQ ID NO: 263047 - DNA, 201 bp, Homo sapiens
cataatattaactcttaattctgataacaaacttgtgtacttatttaaatgcttatattatttctattttatagatgaagcaactgaggaaaagaggttaytatttgcccaaagttactcatctaatggtagaggttgggatttaaatctagataatcagattccagaatcttacctctctatcattatgggagaaataaa

SEQ ID NO: 263048 - DNA, 201 bp, Homo sapiens; identical to SEQ ID NO: 52412

SEQ ID NO: 263049 - DNA, 201 bp, Homo sapiens
atgtagtggtatctcattttgacattaaccttttacttgatgaccattgaagttgagcaccattttatggtacttaacatttggagatgtttttgtttttsacaaaaatggccttcagagacattttggagatcttttctgtagtgcctgttaaagtcacttgcccatatttctgttgggttgtcattctttttcttactg

SEQ ID NO: 263050 - DNA, 201 bp, Homo sapiens; identical to SEQ ID NO: 52413

SEQ ID NO: 263051 - DNA, 201 bp, Homo sapiens; identical to SEQ ID NO: 52414

SEQ ID NO: 263052 - DNA, 201 bp, Homo sapiens
tgacagtggactgcaaactttaattaggtagggatgccaattatggttgctgttctaggtgtggtatcttcttcggaagaaattaatacccatgttgacaygatactgatctgatattgatctggaaatgtccccccacccccattctaaggagaatcagaaacagactacgtttaaataggagggataacagtaagtcct

SEQ ID NO: 263053 - DNA, 201 bp, Homo sapiens; identical to SEQ ID NO: 52425

SEQ ID NO: 263054 - DNA, 201 bp, Homo sapiens
cagactacgtttaaataggagggataacagtaagtccttactgtcttgtctcaggctacatcaactctcctgttctctatatggtatgaagggaccttgayggtcttttgttattccatagaacatcacactgatttatcagagtaatgaaattatattaaatgaaactgaagagcagaagtaggcagcattctacatgct

SEQ ID NO: 263055 - DNA, 201 bp, Homo sapiens; identical to SEQ ID NO: 52416

SEQ ID NO: 263056 - DNA, 201 bp, Homo sapiens; identical to SEQ ID NO: 52410

SEQ ID NO: 263057 - DNA, 201 bp, Homo sapiens
ggtatatgggctattttgttaccttgactggggtatccatcacctcgaatatttctcatttctaagtgctgggaacatttcaagtcttctctcctagctaytttaaaatacaaaaagcattcactgttactagctatagttaccctactctgctattaaacattcctttgttccatatctcactgtatgtttgtacccatt

SEQ ID NO: 263058 - DNA, 201 bp, Homo sapiens
ccaactgtggtggttcactcctgtagttccagctactcgggagggtgaggtgggagaatcacttgatcccaggaggcagagggttgcagtgagccaagatygtgccactgcactccagtctgggcgacagagcaagaccctgtctcaaaaaaaacaaaaacaactttagtgtttgggattacctttaaattgttaatttta

SEQ ID NO: 263059 - DNA, 201 bp, Homo sapiens
cgcctctgcttctctgttgtatcttttttatttaggcatcctttcttttgctttctagtacttggtcttttgtatatgagtacgttcagcttttctggggktttttttttgttgtttttgagacagtctcactcttttccccaggctggagtgcagtggcgcgatctgcagcctctccctcccaggttcaagtgattctcc

SEQ ID NO: 263060 - DNA, 201 bp, Homo sapiens
atttcaccttaaaatatcagtgacaaaagatagtaataaccaacatttatgtaatacttttaagtgtcaagcacttttctaaattcttcagacacgcacgygcgcgcgcacacacacacacacacacacagatattttatttattttttgagacggagtttcgctgctgttgcccaggctggagtgcaatggtatgatctc

SEQ ID NO: 263061 - DNA, 201 bp, Homo sapiens
ctacaatttttaaattgacccttgtaagctgttacaagccagttctatcacactactgcctatactcttaattgtggaagtgacttagggactagtcaatrtgagttgaggtggttctgctagctaataatttaaaaaatagacatagtgtgactgctcttttagaatctgtctagcaggtttcacccaaaaacccacaaa

SEQ ID NO: 263062 - DNA, 201 bp, Homo sapiens
tatgctaaataaagcctttgttttaaagtgctggctttttgagagagtatccttaggagatgacaatgaattggtagaaagaactttttaaaaagtttagyaaagttgttggaccatatttggttcttggtttgaaataaagctagttaatatttaaacaatataaaaattctcctgtgcatatatatatatatatattca

SEQ ID NO: 263063 - DNA, 201 bp, Homo sapiens
aacatttggttgacctgggctccaaattacttggtccaggcagaatatgtaaatgagcattctgaatataaaatctggaccgtagcatttacaatttaatwaaactaataaaatggtatacactgtactagagccagtgtctttggcaagttataatattctgtaacaaaattaaagatacatgaaaacatagatacaata

SEQ ID NO: 263064 - DNA, 201 bp, Homo sapiens
aatgaatgaccctttactctggctttcagaccttaaattcagcaattttactggtgaccacaatctcacattctggtacatttttactgccactaaacatyctttgatttagttttgaaaccctgtctttttctgctctgtcagcccattcctggatttatttatttttctcattcctgacaaaagttgttcaaatcttca

SEQ ID NO: 263065 - DNA, 201 bp, Homo sapiens
ttaactaattagtctcaacactttctggctcaagaactgaaacacagcaacagaagctaaagtttgagaatttaagcttgttcccacatctacaccttggsggacggcagcgactgattacggagaccagtgaaaaccctgcccctaactctctctgtcctagccccatccactcaattgagcttgactcagcctgctccc

SEQ ID NO: 263066 - DNA, 201 bp, Homo sapiens
agacgtgcactagacttcagcacgtgggagcgctgatgagcggccaacctgggtctatttaaaactactattcccatctcgaggggcgcctcctcccacascataaccagcccaggagggcaggcgagtaaatactgctcacctgctccaccggaaacctcaaaatcccggcccgagctagactaaaggtatctggtaatt

SEQ ID NO: 263067 - DNA, 201 bp, Homo sapiens
cccatctcgaggggcgcctcctcccacagcataaccagcccaggagggcaggcgagtaaatactgctcacctgctccaccggaaacctcaaaatcccggcycgagctagactaaaggtatctggtaattaatccttggcacctcccaccacacgctcctgattgggcgcgtgagacaaggctgtgtctgcgcgcgctctta

SEQ ID NO: 263068 - DNA, 201 bp, Homo sapiens; identical to SEQ ID NO: 52419

SEQ ID NO: 263069 - DNA, 201 bp, Homo sapiens; identical to SEQ ID NO: 52420

SEQ ID NO: 263070 - DNA, 201 bp, Homo sapiens
aagttctaatatcatttatgcctatttaaaatatatatattaatatggcatcagttgcctatcttagaaactatttttatggctagtctgcagtgaatttsatgccacaaaaccctgtttttagcacttcttacttaccaggagcttgtcttctgtgaaacaaaatctctgtaaaactgtgtctcattgagataaagatac

SEQ ID NO: 263071 - DNA, 201 bp, Homo sapiens
aaaggaaggcctctgattttttttctcttacaggtcatacccagctgctgtgacaccacttaaatgatttaaaagctttagagagacaatataacagtggytaagagtgtaaacattggagcagaaatgctccagttagaattctagctctgggcaagtttatgtgcctctataagaagggtatctgttgtaatatgaaca

SEQ ID NO: 263072 - DNA, 201 bp, Homo sapiens
aatggctttgaataatgttaagtgactttaccttcagtggtgatcgaaagaaaattagtaatattcaatccattcttagtaccttgtgtaatgaacacgcrtgcttgtttcacctataattacgactaaacaggaagttaataccttgtcagtgatgcagtgagatactgtgcagtgcctactgttaaaccttaagataaa

SEQ ID NO: 263073 - DNA, 201 bp, Homo sapiens
tttcaagtattatgatatatctgtattcctcgttaatattttactgaaatgattattggaatagttttaacctttagtccatttgatcgagcttttgaatktatactttgcttcagctgtgttcttggagtaagttttttgactgttagaccaatcaacttttttcctgtattctttatttgaacgagctgtaatatggtc

SEQ ID NO: 263074 - DNA, 201 bp, Homo sapiens
taattcttttggggtagtctcttcaagcactgaaaactaacatgtgccagttaactgcttaggatgtcttagagtgaacaaaatatatttattgtccccamctagtatataggctgggtaaactgtcttgcatgtgtttcatatatggtcctcaaagcttgttgatagccagctcactttctgtgtaggatagttgtgact

SEQ ID NO: 263075 - DNA, 201 bp, Homo sapiens
ctgcacccttctgagagagcttatactgaaagttctgcattttgtgtccttgattttgcacaggaaggcaaaagatcacagttgaggaaaaaaagtgcatgtacccactttgaaaatctgtttccatttttaaattcctgtagttatagggaataagttgttctagtagaccaaaagaagattaatgtttttagttataca

SEQ ID NO: 263076 - DNA, 201 bp, Homo sapiens
cctgcacccttctgagagagcttatactgaaagttctgcattttgtgtccttgattttgcacaggaaggcaaaagatcacagttgaggaaaaaaagtgcatgtacccactttgaaaatctgtttccatttttaaattcctgtagttatagggaataagttgttctagtagaccaaaagaagattaatgtttttagttatac

SEQ ID NO: 263077 - DNA, 201 bp, Homo sapiens
ccctgcacccttctgagagagcttatactgaaagttctgcattttgtgtccttgattttgcacaggaaggcaaaagatcacagttgaggaaaaaaagtgcatgtacccactttgaaaatctgtttccatttttaaattcctgtagttatagggaataagttgttctagtagaccaaaagaagattaatgtttttagttata

SEQ ID NO: 263078 - DNA, 201 bp, Homo sapiens
tccctgcacccttctgagagagcttatactgaaagttctgcattttgtgtccttgattttgcacaggaaggcaaaagatcacagttgaggaaaaaaagtgcatgtacccactttgaaaatctgtttccatttttaaattcctgtagttatagggaataagttgttctagtagaccaaaagaagattaatgtttttagttat

SEQ ID NO: 263079 - DNA, 201 bp, Homo sapiens
ttccctgcacccttctgagagagcttatactgaaagttctgcattttgtgtccttgattttgcacaggaaggcaaaagatcacagttgaggaaaaaaagtgcatgtacccactttgaaaatctgtttccatttttaaattcctgtagttatagggaataagttgttctagtagaccaaaagaagattaatgtttttagtta

SEQ ID NO: 263080 - DNA, 201 bp, Homo sapiens
ttcattgtttaattttacaattaaaaatgtacatttattgttcaacaaattgctgtacatagtgatgcgtacctgcaactccagctgcttaagaggctgasgcaagaggatcccttgagcccaggagttctgggctatagtgccttatgattgtgattccgcctgtgaatagccactgtagtccggcttgggcaacatagt

SEQ ID NO: 263081 - DNA, 201 bp, Homo sapiens
agagtcacttgaacctgggaggaggaggttgcagtgaaccaagatcacaccactgcactccagcctggatgacagagggagactccatctcaaaaaaaaaagtcattttcttaatagtggataatttaagttgcaaaaaaaaaaaagcttctgaaatactgatttggttcagttaatattttctgttacaattttttgaag

SEQ ID NO: 263082 - DNA, 201 bp, Homo sapiens
gaggccgaggcaggcggatcacttgaggtcaggatttcgagatcagcctggccatggtgaaaccccatctctagtaaaactacaaaaaaaaaaaaaaaaaagaatagccaggtgtggtggcatgtgcctgtaattccagctactcaggaggctgaggcaggagagtcacttgaacctgggaggaggaggttgcagtgaacc

SEQ ID NO: 263083 - DNA, 201 bp, Homo sapiens
gtgatcacctgaggtcaggagttcgagaccagtgtggccaacatggtgaaaccccgtctctactaaaaatacaaaaaattagccgggtgtggtggcgcacwtctctagttccagttactcggaaggctgaggcaggagaatcacttgaacccaggaggcagaggttgcagtgagccaagattgtgccattgtactccacca

SEQ ID NO: 263084 - DNA, 201 bp, Homo sapiens
aaatattttatcttaatatttattctggccaggcacggtggctcacgcctgtaatcccagcactttgggaggccaaggtgatcacctgaggtcaggagttygagaccagtgtggccaacatggtgaaaccccgtctctactaaaaatacaaaaaattagccgggtgtggtggcgcacatctctagttccagttactcggaa

SEQ ID NO: 263085 - DNA, 201 bp, Homo sapiens
ggaataggtgtaggaaccagagcaagctacaacctcaggaaccaaaattgcacatctgtatggaaagtcagctctttgttattgctgctgttgaatatggwctctttagcttttgactttaccatgtaagtccatgacacgtgcctgtcaacagctatgggtcacattcttatagctcttgattatagaaggaagaatgtc

SEQ ID NO: 263086 - DNA, 201 bp, Homo sapiens
tttttgacaattcattttcctacagactaccccttcaaaccacctaaggcaagtattttccctcaaaatctgttagtatagatttatgctttatttcaaargaatagagcattcttggaagatagggttctgtgtaggctgtatatatatgttgaattgcactcatgtatagatgctgactcttaacctttggtttaaaga

SEQ ID NO: 263087 - DNA, 201 bp, Homo sapiens
gggtcttagacttactaaatcattttccctggaaacacataattttgaaaattttctaggtgattctgaagctcctctctgattaagaaccacagatacargggagtaaaggtcctaatctgcattagacgtagtattctagtcccagggaataaatgaggaagatggtccttatctatggtaatctctgcgttcagtggt

SEQ ID NO: 263088 - DNA, 201 bp, Homo sapiens
aatgtttgtcaattgtgaatcatgatttcttgtacctttttcagtatgaaatacttacattaatcctaaccttgctgtaatttcatggctaatgtgtaatygaatgttttctactactgggcagctgtttggctgttaatctttgttttttttgtttgtttgtttgttttgtttgttttaatgtccataaaacacccttct

SEQ ID NO: 263089 - DNA, 201 bp, Homo sapiens
taatgaacacgcatgcttgtttcacctataattacgactaaacaggaagttaataccttgtcagtgatgcagtgagatactgtgcagtgcctactgttaawccttaagataaaaaaggatttctcagaagaaatttcaaattaaaatgtgttttaaagggactatttggagttttgtgaaattgttcatatctttttgcca

SEQ ID NO: 263090 - DNA, 201 bp, Homo sapiens
gtgatttcccattgcctttggaatagtctgactaaattcaagggctcttttaaaagatcaagtcataacctgcctttttagctaaatctgccactctcctrgtgtactctgtctggtataccaaactctgcagtatttgttctggcaaatttttatgccctgtgttctttgacactcctgactttgagtttctctacctag

SEQ ID NO: 263091 - DNA, 201 bp, Homo sapiens
cccgcccccaaatattttttaggcaagcttgacccagtaaataaactaagtttacttcctgtactctctcttattagtgcaactatttcagatctttctcmcatttcttcaggattatttcattaacatcctgtttttcttgcctctagtctccatcccaatacatactttgggcacatgcttcaacattgctatcacagt

SEQ ID NO: 263092 - DNA, 201 bp, Homo sapiens
ctggtataccaaactctgcagtatttgttctggcaaatttttatgccctgtgttctttgacactcctgactttgagtttctctacctagaatgcttctctyactccttgttcttggtaaatgcctgcttatttttccatcaagagccagctcaaatggcactcctctaaacccaggaaaagttagtggttggtttttcagg

SEQ ID NO: 263093 - DNA, 201 bp, Homo sapiens
gctccccccgccacctcaacctcgcaatactgcagccaaagtttttctagttttaaaaacttatcaagtcatctctgagactttgcatgctgtttcctctkcctaggagcctccctcacaatttttttccaactttgccttgctccctttttttcatttgttttaatacaactctcttcctcagagaaactttccctgacc

SEQ ID NO: 263094 - DNA, 201 bp, Homo sapiens
aactctgcagtatttgttctggcaaatttttatgccctgtgttctttgacactcctgactttgagtttctctacctagaatgcttctctcactccttgttsttggtaaatgcctgcttatttttccatcaagagccagctcaaatggcactcctctaaacccaggaaaagttagtggttggtttttcaggattctcagagc

SEQ ID NO: 263095 - DNA, 201 bp, Homo sapiens
taaaatttaacttaatcttagcctgctttatcctaaggcatcaaaatgcttctaggctatgtttcttttgattttaaccatggcaaaatataagcagaaaygtaagtccacttatgcaaatacaaacttgtaaacagaaagcccaatcaaccaatgaatttacttcactgcctaacaataatgagtttgtgattacacaat

SEQ ID NO: 263096 - DNA, 201 bp, Homo sapiens
cctggtttatggctttcagttatggcttgctattaataaacaggaaaaaagggattgagacaagtttcagttttggacgcatgacatgagatatccaagtrgagatatccaagtagaaatatcagtaggcatttgaatatatgccctggaatgaataactgaccagagatatattttgcaactcaaatttttatgggtcag

SEQ ID NO: 263097 - DNA, 201 bp, Homo sapiens
ccatcaagagccagctcaaatggcactcctctaaacccaggaaaagttagtggttggtttttcaggattctcagagcatttgagtccctttattttaagcrtgtaggttgttaaagtataatttttgttttgtcttgcacctgctttctgttagctgagtctgaggaggcatttctatcttaattatcttggtgtttttat

SEQ ID NO: 263098 - DNA, 201 bp, Homo sapiens
aatacaaacttgtaaacagaaagcccaatcaaccaatgaatttacttcactgcctaacaataatgagtttgtgattacacaatcacttgcctttataagcwtggataatctagaactccatatatattagttttgttttttgttcttgtttttttttgagacagggtctcactctgtcgcagtgatcttggcccaccgcaa

SEQ ID NO: 263099 - DNA, 201 bp, Homo sapiens
agctcaaaggtaagtgcttgtgcatggttttgttactattgggtactaagtggtactttaaatagtaatattagatactatttaaatggcaagaaagaaartggtgaaataagaacagcatttgtatctttaaaaaagacctttgttttgattgttaaaatacttaggtcatttttctatattgaatttaaagtaggtaag

SEQ ID NO: 263100 - DNA, 201 bp, Homo sapiens
actcacggggtggttcagacgagaaaaatctgtatcacctgggagctagttagaaatgtaggctctcaggctccaccactgccctaccaaatcaaagtcgyattttcaacaaaaccccaggtggttcctatggacactagtttgagaagcactgcttcactagtgacactacatggtcacttgaacagtatacattagact

SEQ ID NO: 263101 - DNA, 201 bp, Homo sapiens
tatattctgctgtatttggggtttgaaattaaatttgctgtagtcaataaatatgtgacagtgttgtcttttttatactattgctttttttaaaaaaaaaycggtcagaaccatttcaagcatttatatcttaacattttataacagcaccaccatatatggtgactggcacatagcaggcactcaaagtgaatgcgatct

SEQ ID NO: 263102 - DNA, 201 bp, Homo sapiens
gttagaaatgtaggctctcaggctccaccactgccctaccaaatcaaagtcgcattttcaacaaaaccccaggtggttcctatggacactagtttgagaarcactgcttcactagtgacactacatggtcacttgaacagtatacattagactacttatattcatcattgttgacgtgttaagtttttattaggtaaaact

SEQ ID NO: 263103 - DNA, 201 bp, Homo sapiens; identical to SEQ ID NO: 52418

SEQ ID NO: 263104 - DNA, 201 bp, Homo sapiens
gcgctggaaggcggagtgagtgtacggtggcgtcaggggtgacacagaatagctcgctgcgaggatagcaatacacatcaagtctcccttcctttatttcyttccttttcccggccgcacctttggacagaaaccgaaagcagcccggcgtccgtccggagtcttatgcttccccctccccccttgcctttctttgcccta

SEQ ID NO: 263105 - DNA, 201 bp, Homo sapiens
cgattaaatggattaatgtgcaaatttgaacaggctcttggcacatgacactcctagttattactgctattttaatatcacaatttataatttttaaaaaycgtttttgtttaagaactttgatttctagtttagtactcttagttaaccaggttgtctccttttgtaaatattttgaagatttatgtaatatagacacaa

SEQ ID NO: 263106 - DNA, 201 bp, Homo sapiens
tggcatattggaaaaaccagtgtttatgtgaacattattgattcaacttacagaaactttgacgtgtgcatgtggtttggtttttcagctgttaatgttaraatcacatgaggcaactttcaaacattccacatccaacaattttagtgagtggacagctctgaactggaatgctcttcggtttaggcacctcttctagaa

SEQ ID NO: 263107 - DNA, 201 bp, Homo sapiens
gggttctgtgtaggctgtatatatatgttgaattgcactcatgtatagatgctgactcttaacctttggtttaaagagctagacctcagtttgagctttgyaaataggaataaggtttgccttttctttaatgttgcaagattcagaccatgtggaagcttccgccctcatctgtattattgttacacagattctgatttt

SEQ ID NO: 263108 - DNA, 201 bp, Homo sapiens
atggggtatatacctcgagcatttatcctttgtgttacaatccagttatacttgtttacttatttttaaatgtcagattgtttagaatttaaaaaaaaaaatacagctgcatgggggtcttagacttactaaatcattttccctggaaacacataattttgaaaattttctaggtgattctgaagctcctctctgattaag

SEQ ID NO: 263109 - DNA, 201 bp, Homo sapiens
aatggggtatatacctcgagcatttatcctttgtgttacaatccagttatacttgtttacttatttttaaatgtcagattgtttagaatttaaaaaaaaaaatacagctgcatgggggtcttagacttactaaatcattttccctggaaacacataattttgaaaattttctaggtgattctgaagctcctctctgattaa

SEQ ID NO: 263110 - DNA, 201 bp, Homo sapiens
agcaggagaatctcttgaacctggggaggcggcgcttgcagtgagctgaggttgcaccattttactcgagcttgggcaacaaacagcaagatgatattctrcgtcttgtttgtcccccttcccgttcccattccccccgccctccacccctacaaaaaaaaagggggaagacttgggagatggagaaggactcactttaaa

SEQ ID NO: 263111 - DNA, 201 bp, Homo sapiens
gcagttagtacagacatggccaaatttaaaagaaatgaaattgtggcagttagtcctacatttgagtttcaagaggagatttgatttgcaaaaaaaaaaaacatgtagcacatgtttccaatgttatgtaaactttagtttcgtagttctttaagagctaaaaacataggaagttcatactattgtttcaagttattttat

SEQ ID NO: 263112 - DNA, 201 bp, Homo sapiens
actgggattcaaatcagataggcaccaaaagctcaagctcttttttgaaccatttcaattcctttttttgttgttgttggagacggagtctcactgtgttrcccaggctggagtgcagtggcgcgatctcagctcactgcaagctctgccttctgggttcacgccattctcctgcctcagcctcctgagtagctgggacta

SEQ ID NO: 263113 - DNA, 201 bp, Homo sapiens
gtgggggaagaacaagagaaaggatttataaaagagcataaggaaacttgtggtgaagttcattatcttgattttggtgagcttcatgggtatatatatawgttagcttatcaaactgtttatttaggtatgtataatttattgtatgtcaattatatttcaataaagctgttaaaaacataacaatgtagctgtggtcta

SEQ ID NO: 263114 - DNA, 201 bp, Homo sapiens
tcaagtcatctctgagactttgcatgctgtttcctcttcctaggagcctccctcacaatttttttccaactttgccttgctccctttttttcatttgttttaatacaactctcttcctcagagaaactttccctgaccaccgccagctgagttcagtacattaatagtgctctgtgcacacatttatgtcactgaacccac

SEQ ID NO: 263115 - DNA, 201 bp, Homo sapiens
ttctttaagagctaaaaacataggaagttcatactattgtttcaagttattttattagaatatcatattttgtttttctataaacatttttttttttttttgagagacagggtctcactctgtcacctaggctagagtgcactgctgcaacatggctcactgcaaccttgaccttctgggctcaagggatcctcccacctc

SEQ ID NO: 263116 - DNA, 201 bp, Homo sapiens
actttagtttcgtagttctttaagagctaaaaacataggaagttcatactattgtttcaagttattttattagaatatcatattttgtttttctataaacwtttttttttttttttgagagacagggtctcactctgtcacctaggctagagtgcactgctgcaacatggctcactgcaaccttgaccttctgggctcaag

SEQ ID NO: 263117 - DNA, 201 bp, Homo sapiens
gctgagacaggagaatcatttgaacccaggaggcagaggttacagtaagccaagattgcgccactgcactccagcctgggtgacagagtgagactcagtcwcaaaaaaaaaaaaaaaaaaaaaaatggaaacaaaccaaatgtccactgactggtgaatggataaattgtggcaaatacatacaatggaatattatttagc

SEQ ID NO: 263118 - DNA, 201 bp, Homo sapiens
gtctcactctgccacccaggcttgagtgcagtggcgcaatctcggctcactgcaagctccgcctcccgggttcacaccattcttctgcctcagcctctccsgagtagctgggactacaggtgcctgccaccacgcctggctaatttttttgtatttttagtagagatgggttttcaccatgttagccaggatggtctcgat

SEQ ID NO: 263119 - DNA, 201 bp, Homo sapiens
caatcctcccacctcagcctcccaaatagctgagactacagctattttagaaaattttagaaaaatatgtatatattttttgagacagagtctcactctgycacccaggcttgagtgcagtggcgcaatctcggctcactgcaagctccgcctcccgggttcacaccattcttctgcctcagcctctcccgagtagctggg

SEQ ID NO: 263120 - DNA, 201 bp, Homo sapiens
tgctacaactatataagtaagtgttaatatctagcaagataagcttccccacctgttttcttcaaattgcattgtgaatgcctggccttgttactactctrtgaatttcagagtcctcttgtcaagttgtatgaaaaacttaactttttactgaaaattaattagggcctcagttttcttctctttgatatggtgatacca

SEQ ID NO: 263121 - DNA, 201 bp, Homo sapiens
atggttttgttactattgggtactaagtggtactttaaatagtaatattagatactatttaaatggcaagaaagaaagtggtgaaataagaacagcatttktatctttaaaaaagacctttgttttgattgttaaaatacttaggtcatttttctatattgaatttaaagtaggtaagtgtattgggctgattttatctct

SEQ ID NO: 263122 - DNA, 201 bp, Homo sapiens
tgcagtgagccaagattgtgccattgtactccaccatgggcgacaagagtgaaactccatctccaaaaaaaagaaaattacgctaaatatttttgttcagmcattttaacatatattaaatgtaaaatctagtatgtttattgagttaattatgagtaaataaatgtaaaacttggattgtgttgtcagctttttaaactc

SEQ ID NO: 263123 - DNA, 201 bp, Homo sapiens
actttgtaatttacctttcaagaatattagatctagtaggggaggtatttaaaataaattttctatactgtattttttgtactagtattattacaatgtgrtttgtcttttattataatgacttaattccccttgccaaaaccagtattttgaaattaatgaaataaaactctccattcttggaaatgttgtggtcttgag

SEQ ID NO: 263124 - DNA, 201 bp, Homo sapiens
gctatctattcaatgattctaattttctaaaagacttggaagctgggttgttttttgttctggcccctcagtttgttgagagcctattttaaagatttccrgtggatttaacaaaatgaacaaaatttagaggactcatttatttcccccaaccaagtcagtgccatagtgggacccttacataaatttgtcactgtgttt

SEQ ID NO: 263125 - DNA, 201 bp, Homo sapiens
ggctctaaaaacattttgttaggtgactatcgtagacaaaattacttttaaaaatgctgagtatgggtgtcgttggaaattgatttccagtccagtaaatrgtcttgctgtgggatagaatcattttctcaggccatgtaacttgaaaaatagtactggattcacactacgtacgaataatgagatacagactaacggtgg

SEQ ID NO: 263126 - DNA, 201 bp, Homo sapiens
cctgcgctcaagctgtcctctcgcctctgcttctctgttgtatcttttttatttaggcatcctttcttttgctttctagtacttggtcttttgtatatgartacgttcagcttttctggggttttttttttgttgtttttgagacagtctcactcttttccccaggctggagtgcagtggcgcgatctgcagcctctccct

SEQ ID NO: 263127 - DNA, 201 bp, Homo sapiens
gagtgctctcaccaagttgaatggctataaacatcatttgtttattaatgatactttgtatttgttcccagcctgttctcaacttgtatatatacttttcraattgagtctttacttacattatcctattttacttactttatctctacatctgcccacaagcttcacctgtaagttgaccattttacttaatgccaatct

SEQ ID NO: 263128 - DNA, 201 bp, Homo sapiens
tagaagagacagaagatgaaactagatgggcacccagatcataaagcaccgtatgtacttaggagttggaattatcttaaaaactatcatagatttcaagmaggggagtaacatttttaaaagaccactttatcattaggatggagggataatcattagtaagctattgccataatctaggctgaagataacatcatgaac

SEQ ID NO: 263129 - DNA, 201 bp, Homo sapiens
gagtgcagtggcgcgatctgcagcctctccctcccaggttcaagtgattctcctgtatcatcctcccgagtagctgggattacaggcgtgtgccactatgygtggctaatttttgtgatgttagtagagatggggttttaccatgttagcagcactggtcttgaactcctgaccttaggtgatccacccttctcagcctcc

SEQ ID NO: 263130 - DNA, 201 bp, Homo sapiens
ttgcctcccagggtgttaggattacaggcatgagccacgtacctagtggtcttctgctgttcaaatggaatcccaaaccttacccttctgtgttatttccrtgtttatatgagaaaggggatatagaagatatagtagtccctagacttaatgggtgtactgacttatgccatagactaaacttaagagaaactgttagtt

SEQ ID NO: 263131 - DNA, 201 bp, Homo sapiens
tggggttttaccatgttagcagcactggtcttgaactcctgaccttaggtgatccacccttctcagcctcccaaagtgctgggattacgggcgtgagccamtgtgcccagtctagcttttttggtcttgtttttttgtttctgagacaggattttgtgttttttttctgtctcagacagctctgttgcccagactggagtg

SEQ ID NO: 263132 - DNA, 201 bp, Homo sapiens
tatatgttaagagcaaacgtctttctacttacagaagtacgctcttcagggtcagaatttcaatcacgaggtcaggagatcgagacccatcctggttaacrcagtgaaatcccgtctctactaaaaaatacaaaaaattagcctggcatggtggcgggcacctgaggcaggagaatggcgtgaacctgggaggtggagctt

SEQ ID NO: 263133 - DNA, 201 bp, Homo sapiens
aacatctctgtatctcagttcagtttttctacatagcactgtgtaaagcattgtcatggaacttcctgttatttatagagacaaagttactggctctgatmtgccatgcgttgtgttactcagagatcttattctgttactgcagctgccaataatctagcttaattgtattttgatatttgattctttatagaacttcag

SEQ ID NO: 263134 - DNA, 201 bp, Homo sapiens
ttattctttctgaaggtaagctacttcggaagcacaactattgactaaaaactaaaccttcgaaagaaatgacagcattgctagttttttgtgtgcgtggktttttttggggaggggggcgtggggtactgtattaaggttagtttccaacaagaattgatgtaattagaagaaattgacttccttacctattgcctctga

SEQ ID NO: 263135 - DNA, 201 bp, Homo sapiens
ggtttatggctttcagttatggcttgctattaataaacaggaaaaaagggattgagacaagtttcagttttggacgcatgacatgagatatccaagtagaratatccaagtagaaatatcagtaggcatttgaatatatgccctggaatgaataactgaccagagatatattttgcaactcaaatttttatgggtcagcag

SEQ ID NO: 263136 - DNA, 201 bp, Homo sapiens
ctcaaatttttatgggtcagcagttaagagtagaaaatcaacctataagaataccagcatttttagctgggtgtagtggcacatgcctgtaattccagctkctttggaggctgaggcccgagaatttacttgaacctgggaggtggaggttgcagtgagccgagatcacaccactgcactccagcctgggcgacagcacca

SEQ ID NO: 263137 - DNA, 201 bp, Homo sapiens
taaccatcattctactctctgcctccatgagatcaacatgtttagcttccacatgaatgagagaacatgtgatatttgtcattctgtgcctggcttatttmacttaacacaataatctccagtaccttccatgtttctgcagaggaaatgatttcattcttttttgtggccaatagtattcattgtgcataggtaacacat

SEQ ID NO: 263138 - DNA, 201 bp, Homo sapiens
tttagtagagacagggtttcaccatgttatccaggatggtctcgatctgctgacctcgtgatccacccacctcggcctcccaaagtgctgagattacaggygtgacccaccgcccggcccaggctggctagaattcttaaggcactgtctcttaacttgtactaatactagaaacccaaaactctaccctggacaactggt

SEQ ID NO: 263139 - DNA, 201 bp, Homo sapiens
atcactcccagctagtttctgtgtttttggtagagatggggtttcgtcatattggccaggctgggtagaattctttttttttttttttttttgagatggartcttgctctgtcgcccaggctggagtgcagtggcgcgatctcggctcactgcaagccccgcctcccaggttcacgccattctcctgcctcagcctcccaa

SEQ ID NO: 263140 - DNA, 201 bp, Homo sapiens
aggtgaggagtgtatcaccatgataaccatagtaattataaagattatagatccatctggcttttcttatggtccgaaacagaaagtacttaacccgtttrtgccagaggttgcaattttttgaatttttgcatgagtgaaaaatcagaccttggcgatgaccttgagcagtaggctataaataattcccacatgcttagc

SEQ ID NO: 263141 - DNA, 201 bp, Homo sapiens
ttacattgtggttagtctttttgtaatggtgccttgataaacagaattattaatgtaatacattttaccagtatatttcctttttttttttttttttttttgagacaggggtctcactctgtcacccaagttgcagtgtagtggcacaaccagggctcactgcagcctcaacctcctgggctcaggcgatcctcctacctt

SEQ ID NO: 263142 - DNA, 201 bp, Homo sapiens
aattgcttgaacccaggcagcagaggttgcagtgagctgagatcacaccattgcactccagcctgggagacagagcaagactccgtctcaaaaaaaaaaaacaaaaaacaaaacaaaacaaaaaaaaatgggggttctaatattaaaggaagaagaggagaaaggacattgggaaataattgtattctctgccacaacaga

SEQ ID NO: 263143 - DNA, 201 bp, Homo sapiens
gtaacccgcggggacaagggcatggggtggtaggagaaaaggaaggctcgggccaagaggaaagcgtgggggtgggaaggaagcataattctgaaaatacytcttggatcacttcttccatggggggatggagaacgcagatatacttcttgaagaaatgaagtttaaagctaggaaacggagaacacttgtggcaagtga

SEQ ID NO: 263144 - DNA, 201 bp, Homo sapiens
actcgggaggctgaggcaggagaatggcgtgaacccgggaggcggagcttgcaatgagccgagatcccgccactgcactccagcctgggcgacagagcgaractccgtctcaaaaaaaaaaaaaaaaaaaaaaaaaaaaaaagatgtgtgtgtttgtgtgtaattttgacagatattgccaaatttctctccataggtgct

SEQ ID NO: 263145 - DNA, 201 bp, Homo sapiens
ctaagttaaagatgtgtgtgtagtggcgggcgcctgtagtcccagctactcgggaggctgaggcaggagaatggcgtgaacccgggaggcggagcttgcartgagccgagatcccgccactgcactccagcctgggcgacagagcgagactccgtctcaaaaaaaaaaaaaaaaaaaaaaaaaaaaaaagatgtgtgtgtt

SEQ ID NO: 263146 - DNA, 201 bp, Homo sapiens
cttattttactagaccttatgatggacatggacattgttttcagtcttcagcttttaaaaacagtatcattgaataataatgtacataattttgtctcacatgttcaagatatctgctggataaattcacagaaaagagattgctaagttaaagatgtgtgtgtagtggcgggcgcctgtagtcccagctactcgggaggc

SEQ ID NO: 263147 - DNA, 201 bp, Homo sapiens
acttattttactagaccttatgatggacatggacattgttttcagtcttcagcttttaaaaacagtatcattgaataataatgtacataattttgtctcacatgttcaagatatctgctggataaattcacagaaaagagattgctaagttaaagatgtgtgtgtagtggcgggcgcctgtagtcccagctactcgggagg

SEQ ID NO: 263148 - DNA, 201 bp, Homo sapiens
aagtgctgggattacgggcgtgagccactgtgcccagtctagcttttttggtcttgtttttttgtttctgagacaggattttgtgttttttttctgtctcagacagctctgttgcccagactggagtgcagtggcatgatcacagctcactgcagccttgacttgttgggctcaagtgatcctcccacctcagtcttctga

SEQ ID NO: 263149 - DNA, 201 bp, Homo sapiens
agtcattgcagagctaccgcttcggttagccagccacgaagttctcgcgagagtcgtctcctcgataccaagtgaggaaactgggggacgctgtggggagrggcgtggggctggatcgcgcagcggctgcttcctttaccttcctcccatggtctccttccggttctcgatgcttctctgagcctaagggtttccgccact

SEQ ID NO: 263150 - DNA, 201 bp, Homo sapiens
gcaaacgtctttctacttacagaagtacgctcttcagggtcagaatttcaatcacgaggtcaggagatcgagacccatcctggttaacgcagtgaaatccygtctctactaaaaaatacaaaaaattagcctggcatggtggcgggcacctgaggcaggagaatggcgtgaacctgggaggtggagcttgcagtgacccca

SEQ ID NO: 263151 - DNA, 201 bp, Homo sapiens
ttatgggtgtggtatcccccatgctgttctggtgatagtgagtgagttctcatgatatctgatggttttataaggggctcttcctcctttgctcggcactwcttcctgccatgatgtgaagaaggtgccttgtttccccttcgccttccgccatgattgtacgtttcctaaggcctccccagccatgctgaactgtgagtg

SEQ ID NO: 263152 - DNA, 201 bp, Homo sapiens
agaggagacagatacctaaaacaagtgctgaagtgtgacaagatggaaaataagtgattggtgaatgaagtgctgagtaggataaattaatgggaaattgwagcagggaggattaatttagagtaattaaaatgttagtgccctaaaggtagaaaaactaaatcaaagtaagacatggcaggggtgcaaatattaagttta

SEQ ID NO: 263153 - DNA, 201 bp, Homo sapiens
taacgaaatgcacaatcctggctttgtagttattaaaagtacttacttttatctaatttggtagcaatattgtttaattttaatacacgcagttaaatgtygagttacccagtttggcccacacgatatttttgaaagttggcagtcttcaaataaaagccttctgagtaggcccacattccataagcagtaatggcttgg

SEQ ID NO: 263154 - DNA, 201 bp, Homo sapiens
gcagacagtcattaacagtacacaacaactttcaaacttaactaccttcttcaatggactaccgaaaatcagaaagccactataaaacccaatgaagtctkcatctgatgctctgaacaggcaaagtttagagtgagggttgacatgtcacatttagcatgttgtttaacaacttttcacaagctgaccctgactatcagg

SEQ ID NO: 263155 - DNA, 201 bp, Homo sapiens
atgattgtgtatttcacaaaattcatgaaggaaatttgtacaaatttattatggattttaggccagcggaactgtttaaacttcctactctatttgttccrttgagtagccttagagttgaaacagcagtttccatttttctcatgggtagatcaacccatatgcacatttatcattgatttctagcactggaaaagcata

SEQ ID NO: 263156 - DNA, 201 bp, Homo sapiens
aataaaatttcatcatacttaattctgaaaattgttttctgaaattattagctcactgctgaaatatcttcagatcaaacgttcagaacatcagctcccarggagcttcatatttagtttatggtggggtatgattgtgtatttcacaaaattcatgaaggaaatttgtacaaatttattatggattttaggccagcggaa

SEQ ID NO: 263157 - DNA, 201 bp, Homo sapiens
ctagccttcctttcagttacgggatttattgaaaactacctcatatacatatgcacatatacccatatatgcatatgtatatatacatgtgtgaatacatrtatggctatagatctgtgtgtatgtacacatatagacacgtgtgtatgtttttgtgtgtatatgtttttatgtgtatctgtatgttcctttctaaatagc

SEQ ID NO: 263158 - DNA, 201 bp, Homo sapiens
cacttggagaaattttgggccacccaccaaacctgtgatttcctgccccaatttatgaaccaagttatactgagatcgttaaatggtgtgatttctccttrtgactttcacattttactttataggttatattgacttttagatttcaggtagtaaaataaaaaatcttatgcagttcaagttagaaaaattggattagtc

SEQ ID NO: 263159 - DNA, 201 bp, Homo sapiens
ctcctgggttcaagtgattctcctgcctcagcctcctgagtagctgggattaaaggtgcatgccaccatgcctggctaatttttgtatttttagtagagayggggtttcaccatgttggccatgctggtctcgaactcctgacctcaggtgatccacccacctcagcctcccaaagtactgggattacagatttgagctac

SEQ ID NO: 263160 - DNA, 201 bp, Homo sapiens
taaaatgactgccaagctccagccgctctttattttattgctttaaacatagatttcctagatggtcatgatctggtttgtccaaatccaccttaactctkaaagcaataataaatataaattttaaattctaaatgaaagagaggaaggggtctcttcataagtgaaaacattccttaaacaaatgaaagcaaacagaat

SEQ ID NO: 263161 - DNA, 201 bp, Homo sapiens
ctgagatttaatttacatataataaaatgaatcattttaactgtgcagttcagtaagttttgaaaaatgtctatacagattcatgtaactgccaccaaaawtgagaaaggacacttccaccatctcaaaagattctgtgtgttcctttgtagtaagtctcttctaccccatccctagacaacagctgatgtgctgtcattg

SEQ ID NO: 263162 - DNA, 201 bp, Homo sapiens
tgtaaggtgatttatgattacctttcataaattaatgaattctaccaataagagcagggtgctacattgggtgctcctgttctcgcagagtttacagctayacattacatgaggactgctccaggtttgctgtgtttaaatgattgacaaggcagaaactttgtcttttcttcaactgattggcactatctacttataact

SEQ ID NO: 263163 - DNA, 201 bp, Homo sapiens
ttgctgtcaagtaggtgctgttgttatgccatattacaaatgaagcagatgagccatagaatatttcataatttgctcaaggtcacacagccagtgatttsagaagactggcttaaaacacatgcagttcgacaccagagatgacactcttaaccactgtgctatactaaaatgaagacaagatcctacccttaagaacct

SEQ ID NO: 263164 - DNA, 201 bp, Homo sapiens
actcacctgcctcaccagttgtgactcacttgtaccctgccactcagatttgccctcctgacatggacactaggagtgccaagccttctacccaacagtgrtagtcccaaagtatctgtgcatacccaatctggctgtggctcatgtacttcctagagagtagctttcttcttactcagtgactgttaaccagctctggca

SEQ ID NO: 263165 - DNA, 201 bp, Homo sapiens
cacctgcctcaccagttgtgactcacttgtaccctgccactcagatttgccctcctgacatggacactaggagtgccaagccttctacccaacagtgataktcccaaagtatctgtgcatacccaatctggctgtggctcatgtacttcctagagagtagctttcttcttactcagtgactgttaaccagctctggcatga

SEQ ID NO: 263166 - DNA, 201 bp, Homo sapiens
catttacgtacatttgttaaaatgtatgtaatgaatacatttacatacatttgtttaaaaaaaacttgaattttttatgaatgaaatttctgtattgtttscaaaaagagagagattcaaacatgacttgcttcacatgaagaaatttgatttcagaaatgtcctatatttaaataagcaaagccattgaaattgaagcac

SEQ ID NO: 263167 - DNA, 201 bp, Homo sapiens
gcaagtattcccttctcttcagtttttttttttttttttaagactttaatagaattagtattggttcttctttaaatgtttggtagaattcagcaatgaarctgttaagtcctgggcctttctttaataaagactttttactatggctttgatcttattactcattattggtttgctgagattttacattccttaatggtt

SEQ ID NO: 263168 - DNA, 201 bp, Homo sapiens
agaaatggaagatacaccaccaagttgggcaataacaacttccaaagtaaaataattgtaaggaaactgtaaagtaaacaattcccagagctcacacaggrctgggattgtttgactaatgttgcccagtcacagtgaagagacattatttaattcaaggacattcaatagagacttgagaagggtcaagccttagaaatg

SEQ ID NO: 263169 - DNA, 201 bp, Homo sapiens
ctaaaaataaaactgaaggtagaggattaggttagaccctggagcaaaatcaaaacagcttatttcagcctaagaacttttttaaagtaaatggcaagccmcaaatacctacatatctgtaattttctgagccaccataaaatctgcatactctgtaccaaagtaaaaaacttcacttactgacacaacctttactaaaaa

SEQ ID NO: 263170 - DNA, 201 bp, Homo sapiens
ttatactccattttgatattaatatttgatcttgcaatgaatgtctgcttgtcaaccttttatttactgtggaggtcgtggtatacggtattaaagaagayattcaactagagctcaatttttctgatgagctcccaggttcccatcgcaattttagacaacacatgctgttttactggaagagtatctaaaggatatagt

SEQ ID NO: 263171 - DNA, 201 bp, Homo sapiens; identical to SEQ ID NO: 52497

SEQ ID NO: 263172 - DNA, 201 bp, Homo sapiens
tacctctgtgactttgcagggtaaagcccctctcctggctgctttcacaggctggcgttgagtgtctgtggcttttccaggtgcatgatgcaagctttcaktggatctaccattctggagtctggaggacagtagccctcttctcacagctccactaggcattgccccagtggggactttgtgtgggaactccaaccgcac

SEQ ID NO: 263173 - DNA, 201 bp, Homo sapiens
tcatgctgatgcaagaggtgggcacccatggccttgggcagccctacctctgtgactttgcagggtaaagcccctctcctggctgctttcacaggctggcrttgagtgtctgtggcttttccaggtgcatgatgcaagctttcagtggatctaccattctggagtctggaggacagtagccctcttctcacagctccacta

SEQ ID NO: 263174 - DNA, 201 bp, Homo sapiens
ctgtacctggcttctgagtggttatctaagaagaagaaaagaatctacagtataatgagagttaaccatgttttgtccaaaatgattttgaatcaccgttsggacagatcttgaagactagtggaaacttcaaatggcagtatcgaacttctgttccttttggggttgttgagtatatgaagaatattatttttctgtgtc

SEQ ID NO: 263175 - DNA, 201 bp, Homo sapiens
gtgcctacaaggtaaagattttgtggtcatctgaattttgggagaagtaattttccaagaattaatacttaagctttttgaatcacagttttgtatacccmatttcattatttggttctgtgcgatatagaatgttcaaggctaactataatcatttttgtccaatttgttttaaagagggttcagcagctccaggaatgg

SEQ ID NO: 263176 - DNA, 201 bp, Homo sapiens
cagcgtggtgattccttgaagacctaacagcagaaataccattcaagccagcaatctcattgctgggtatatacccaaaggaatatattaataaaccattktattataaagacacatacgtatgttcattgcagcactattcacaacagcaaagacagggaatcaagctaaacgcctgtcactggataaagaaaatgtggt

SEQ ID NO: 263177 - DNA, 201 bp, Homo sapiens
ttaatgttagttatttgggtcttccttctttttttcttaattagtctagctaaggatttgtcaattttattgatctttttaaaaaactaactcaatttctwtgaatttttatattgttttttgatttttctatgtcatttatctctgttgtaatctatattattttcttcttcctgcttactttgaccttagggttttttt

SEQ ID NO: 263178 - DNA, 201 bp, Homo sapiens
agtttcaggacaatggatgttaattctttaaatgttttgtagaattgtccagtgaagccatctggtcctgggcatttctttgttgaggagtttttaactaytgattcaatctctgtattcattattgatctgttcatattttctatttattcatgatttagtcttagtaggttgtttctaggaatttatccatcttgtctt

SEQ ID NO: 263179 - DNA, 201 bp, Homo sapiens
catatacctacaactatctgatgttcaacaaacctgacaaaagcaagcaatggggaaaggattcctattaaataaatagtgttgggataattggctagccrtatgcagaaggttgaaactggaccgtttccttacaccataaacaaaaatggattaaagactgtaatgtaaagcacaaaagtataaaacccctggaagaca

SEQ ID NO: 263180 - DNA, 201 bp, Homo sapiens
aatacctaagaatacagctaactagggaagcaaaatatctctacaagaaaaactacaaaacactgcttaaagaaatcagaagtgacacaaatggaaaaacrtttcatgctcatgaacaagaagaatcaatgtcattaaaaatggccatacttcccaaagcaatttatagattcagtgctattcctattaaacctccattga

SEQ ID NO: 263181 - DNA, 201 bp, Homo sapiens
atttattttgattcatgtaatgcatgtgcactgtacatgtcaaaatactgtgcagaaaacgttaatgaagctggtgatattcaacatttattgaacacctrcataccctggatattggaatttccttatggctcagcctcaggctacctctgttttcatactactacttttttttggtcccatgtgatctgggaaaatacc

SEQ ID NO: 263182 - DNA, 201 bp, Homo sapiens
tacggatattggtctgtagttttcttgtagtgtctttgtctgactttggaaccaggataatactggcctcattagaataagcttggaagtatctcctcttkttcaagtttttggaagagtttcaggacaatggatgttaattctttaaatgttttgtagaattgtccagtgaagccatctggtcctgggcatttctttgtt

SEQ ID NO: 263183 - DNA, 201 bp, Homo sapiens
cttgagcactctccctcagccctgtggaacattataaagttctcttacatcttatagttactgttttcttatagcttaatctttttttttgagacaggttstcactctgttgcccaggctagagtgcagtggcgtgatcttggctcactgcagcttctgcctcccaggttcaagtgattctcctgcctcagcctcccaagt

SEQ ID NO: 263184 - DNA, 201 bp, Homo sapiens
aatacttacggatattggtctgtagttttcttgtagtgtctttgtctgactttggaaccaggataatactggcctcattagaataagcttggaagtatctyctcttgttcaagtttttggaagagtttcaggacaatggatgttaattctttaaatgttttgtagaattgtccagtgaagccatctggtcctgggcatttc

SEQ ID NO: 263185 - DNA, 201 bp, Homo sapiens
tggttttgaactcctgacctcaggtgatctgtctgccttggcctcccagaacgctgggattacaggtgtgagccaccgtgcatagccagcttaatcattcyttatattaagcttcccttatttaaatcactgtttggttcctgtctcctgattggaccccagttgatgcactcactaaatgttggtgtgaagtcacagaca

SEQ ID NO: 263186 - DNA, 201 bp, Homo sapiens
acacatgcacacgcacactctctcacagaggcagtcaactgttcatgaaatattaagattatattttacaatgatatttaaaacttgaaacatacatacaraacaatgaagtgtgatagctaacagcacagacttggatcagatagaatgacatttgacttccagctctgactttctgagccttggttttcttatgtgtca

SEQ ID NO: 263187 - DNA, 201 bp, Homo sapiens
cacagaggcagtcaactgttcatgaaatattaagattatattttacaatgatatttaaaacttgaaacatacatacaaaacaatgaagtgtgatagctaasagcacagacttggatcagatagaatgacatttgacttccagctctgactttctgagccttggttttcttatgtgtcaagtaatgataatacctgtttctt

SEQ ID NO: 263188 - DNA, 201 bp, Homo sapiens
tatttttataaaataatttttaaattctaaaagtaataaatgaccttagggaagatttggaaaatacaaacaagtatgaagaagaaaaaaaaaagtccccscaatcccactgtgcaaatcaaccactcttttttttttttccaagccaaactgtatccagctttattaaagatactttccagaaacagtcgtggtatttca

SEQ ID NO: 263189 - DNA, 201 bp, Homo sapiens
tattttgtaatgttttcatacacgtaatgagatatgttgggatgggacccaagtcttaacgtgaattcatttattttttatgtatatcataaacatatagsttgaaggtaatttaatgtaatattttgaataattttgtgcattaaacaaagtttgcatacattgaatcatcagaaagcaaaggtatccctgtctcagcca

SEQ ID NO: 263190 - DNA, 201 bp, Homo sapiens
tgtcctcccaaagcactggaatttacaggcatgagccaccgtgcttggcctctttctgcttttatgatacagccatttatcactgtgaacttccctcttargactgcttttgctggatctcacagattttggtattttgtatttccattttcatgtgttttaagaaacttttgattttcttcataatttctttattgatcc

SEQ ID NO: 263191 - DNA, 201 bp, Homo sapiens
aggaggggtaaagaataggagaagtttccccggctgaatcttaaaagtaaggtattttaagatgctactataccattaccacttaacaagtaaggaaaaaraaaattacaaaaaaaaaaaaaaaaaagaaaacagccatatgattacatgaaaattgaataccttctcctgaatgatttttaggtagacaatgaaattaag

SEQ ID NO: 263192 - DNA, 201 bp, Homo sapiens
gacatttgagtaaagatttgaaagatgtgagaggataaaccacgagaaatgttctggaagcagaacattccaggtaaagaaatcagcaaggacaaagtccytgagaagaaagtgagcttggtatcttcatgaacaaggagagagttttaatgaagcacagtaagcaagagggagattggaagaggagaggtgagaggggtg

SEQ ID NO: 263193 - DNA, 201 bp, Homo sapiens
atgaaggggactgtaatttcataaggtggtcaaggaaggcctcactgataaggtgacatttgagtaaagatttgaaagatgtgagaggataaaccacgagraatgttctggaagcagaacattccaggtaaagaaatcagcaaggacaaagtccctgagaagaaagtgagcttggtatcttcatgaacaaggagagagttt

SEQ ID NO: 263194 - DNA, 201 bp, Homo sapiens
taaaacaactaggttgtctaataaaatatttacatagaagctatgaaggggactgtaatttcataaggtggtcaaggaaggcctcactgataaggtgacayttgagtaaagatttgaaagatgtgagaggataaaccacgagaaatgttctggaagcagaacattccaggtaaagaaatcagcaaggacaaagtccctgag

SEQ ID NO: 263195 - DNA, 201 bp, Homo sapiens
cttaaatttccaaagaaaaaaacaaaacaacctcattaaaaactgggcaaaggatataaacagatacttttcaaaagaagatatacatatggtcaacagtmatatgaaaaaaagctcaacatcactgattattagagaaatgcaaatcagaaccacaatgagatacccatctcagtcagaaaggttattattaaaaagtca

SEQ ID NO: 263196 - DNA, 201 bp, Homo sapiens
cagaatttatctgaagatccacaatctagaaacggaaccactgctcttttgacaggtgccatctcagtggcatcccggaaaagtccagattgcctgacacrctggtaaccaatgactggaggtcaggtcccaacagatgtctgggcttaagggagttaagtctgtgctgatagatgggaagggagaagagagataaaaatg

SEQ ID NO: 263197 - DNA, 201 bp, Homo sapiens
ggagaaagttcttgtggaattcagtcacaaggagttgtttgatttctataacaaggtctgtatttttaaaataattttctaatatgtggagtttttttcayaatattttgtttcattttatgaattcttatttttaaatgtcatattatggaactaagttctttaaacttcccttataaaagaccttatgtttcacaggag

SEQ ID NO: 263198 - DNA, 201 bp, Homo sapiens
tttccatacatcccctgaaatctacgtagaggttcccaaaccttatttattgacttatatgtacccataggtctaaaaccatgtgtaagctgccgaggaayggtgcttgcaccctctgaagcaacagcctgagctgtacgttggccccttctagccgtggctacagctgaaacagctgggatacagggtaatgtttgaagg

SEQ ID NO: 263199 - DNA, 201 bp, Homo sapiens
cagggtttcaccatgttgtccaggctggtctcgaactcctgacctcaggtgatctgcctgccttggcttcccaaagtgctggtattacaggcttaagcctsaaaataagacctgttattttgaggcctggcctcaaaataacaactttttaaccaaatctgatcaatgtttcgtattagtcttactgcataatggcagtat

SEQ ID NO: 263200 - DNA, 201 bp, Homo sapiens
tattttcaaaagtgccatggcatgtcagtatcttgtaaattctaacttaaccaatattaaagaagtaaaccttcatgtactttaatggagatcacaaaagracttcactgtcttgttctatgcaagatttagtaaaaacagagtattaggtgttatagtaatggtcatgcaaagcagtagctcatctgtacaagaaaatta

SEQ ID NO: 263201 - DNA, 201 bp, Homo sapiens
ttgggtaatgtttattgttagtcatcctgtttaagaacaacttgcttaaggtgatatttttatttcatggtagcaaatggattgttttgacatattcagtrtggacccatttaaagtaggcatgttattttcaaaagtgccatggcatgtcagtatcttgtaaattctaacttaaccaatattaaagaagtaaaccttcat

SEQ ID NO: 263202 - DNA, 201 bp, Homo sapiens
cctgtggaaactaatgactttggagaaatttcttgggtaatgtttattgttagtcatcctgtttaagaacaacttgcttaaggtgatatttttatttcatkgtagcaaatggattgttttgacatattcagtatggacccatttaaagtaggcatgttattttcaaaagtgccatggcatgtcagtatcttgtaaattcta

SEQ ID NO: 263203 - DNA, 201 bp, Homo sapiens
gggatgcacaacctttacaaagggcctttatagagattttaaatatataacttgttgtctactgagtaaaagatgggctgcttctgtttttctcctaacartattttcagcttctgtactaaccagttccagatgttccacgataaagaaatatttaattttcatatgaaatttatgaaaggaaaatgcataggagggcat

SEQ ID NO: 263204 - DNA, 201 bp, Homo sapiens
atttctactggcaacaagatgaaaatctccagctcatactccttatatggggtaaacacccagggaatgattccagcaaagcacagaaccaggtttgtgarggagagactgggctttgacatagtaccactggataatacatacatcagtaattgtttctgtcacttacaaatatgtatctgtttaatgtcttcagttgtt

SEQ ID NO: 263205 - DNA, 201 bp, Homo sapiens
cagattgataatgaatacttaattctttttaggagtgtttttggtcctacaggattcagaattataaaagctgtaattccctttggctgcaaattgtaggmatgttgcttgcttgttacatttcgagttccaagttgaatcagttgctttcttgaacagttgaaaagctgtcatttaagcatttcaggtatttcattttcc

SEQ ID NO: 263206 - DNA, 201 bp, Homo sapiens
tgttgtaagagttttggcatccatctagtggacagtttgctgaacttatttctcaatcacaatcgtgtaagctgaaccaattgagatgtctgtggtgttgkctctggtttctgctcttaatttcggttctcttagggcatgaacaagattatttttttcctctcaaatggatgtggatggtctgtcactgtgggcttcatc

SEQ ID NO: 263207 - DNA, 201 bp, Homo sapiens
ttttaggtctaacatgttaagcctttaatccatcttgaattaatttttgtataaggtgtaaggaagggatccagtttcagctttctacatatggctagccwgttttcccagcaccatttattaaatagggaatcctttccccatttgttgtttttgtcaggtttgtcaaagatcagatagttgtagatatgcagcattatt

SEQ ID NO: 263208 - DNA, 201 bp, Homo sapiens
tactgtattagtctgttttcacactgctaataaagacatacctgagactgggtaatttataaaggaaggcagttcaattggctcacagttccacatggctrgggaggcctcataatcatggcggaaagtgaaggaggagcaaaatcatgtcttacgtggttgcagcgcaggcaaaaaaacgtgtgcgggaggacttcccct

SEQ ID NO: 263209 - DNA, 201 bp, Homo sapiens
aatgtgggaggatagcttgagtccaagaatttgaggccgcagtaagccataatctcaccactgtactccatcttgggtgacagagtgagtctctgtctctrttttcttttctttaaaaaggagtttataaaataaaaataataaccaactctttaacagtttacaaaaaccctttttccagtataaagacagagataggtt

SEQ ID NO: 263210 - DNA, 201 bp, Homo sapiens
aaaaagtaaaacaactaggttgtctaataaaatatttacatagaagctatgaaggggactgtaatttcataaggtggtcaaggaaggcctcactgataagrtgacatttgagtaaagatttgaaagatgtgagaggataaaccacgagaaatgttctggaagcagaacattccaggtaaagaaatcagcaaggacaaagtc

SEQ ID NO: 263211 - DNA, 201 bp, Homo sapiens
acagacaataaacaaaaaagtaaaacaactaggttgtctaataaaatatttacatagaagctatgaaggggactgtaatttcataaggtggtcaaggaagrcctcactgataaggtgacatttgagtaaagatttgaaagatgtgagaggataaaccacgagaaatgttctggaagcagaacattccaggtaaagaaatca

SEQ ID NO: 263212 - DNA, 201 bp, Homo sapiens
ttcctgtttgtttttttggggttttttttttttttttttttgcatatgtagaaatttctggttgaaaactagacattgggaaacatatggtgaaatgactmtgggttctgtcatattcttttgaggaccttggttttttgttctagtaggcaattaacttccttgggttgaaaccacaaactgtctcctgtgaggtattca

SEQ ID NO: 263213 - DNA, 201 bp, Homo sapiens
tcttttgccatttccaatttgttgctgtgaccatttggtgaatattttatttcacttattatactttttagatctagagttttctgtttttgttgtttctwtttttctcttgagatttattctgtgttcactcactgatagcatatttttcttcagttctttgaatatatttataatagcttttttgaattactttacttg

SEQ ID NO: 263214 - DNA, 201 bp, Homo sapiens
tttataaacaaaagaaatttatttttcacagttctggaggctggaaatccaacatcaggttgccagaatagtcatgttttggtgaggggcccttttccackttgcagatggccaacttcttgtatctacacagggaagtaagagagttaactagttctctggcctttctcataagggcactaatcccgttcatgaatgctc

SEQ ID NO: 263215 - DNA, 201 bp, Homo sapiens
ccacacatctagaaagctcagagaacgccaaagataaatgcaaaaatcaaacaagcaaagaaatgacacctaggtatatcatatttaaagtactgaaaatwaagaattcttggaagaagcaagaggataaaaacagctatagatggacaaagataagaattacatcttttgcctcggaagctatgcaaccaagagaagaga

SEQ ID NO: 263216 - DNA, 201 bp, Homo sapiens
gctaacagcacagacttggatcagatagaatgacatttgacttccagctctgactttctgagccttggttttcttatgtgtcaagtaatgataatacctgyttctttgtgttgattaaatgagaatatatgtaaactacttgccatggtgccctgtacacatcatacacagtaaactattaccatctgtattttaattctt

SEQ ID NO: 263217 - DNA, 201 bp, Homo sapiens
tgaaaatttcctcaaatgaatgtcagataccaaaccacacatctagaaagctcagagaacgccaaagataaatgcaaaaatcaaacaagcaaagaaatgayacctaggtatatcatatttaaagtactgaaaataaagaattcttggaagaagcaagaggataaaaacagctatagatggacaaagataagaattacatct

SEQ ID NO: 263218 - DNA, 201 bp, Homo sapiens
ccttctcctgcctaattgccctggccagaacttccaacactatgttgaataggagtggtgagagagggcatccctgtcttgtgctagtgttcaaagtgaawgcttccagtttttgcccattcagtatgatattggctgtggatttgtcatagatagctcttattattttgaaatatgtcccatcaatacctaatttattga

SEQ ID NO: 263219 - DNA, 201 bp, Homo sapiens
tgccatgctggtgtgctgcacccactaactcgtcatctagcattaggtatatctcccaatgctatccctcccccctccccccaccacacaacagtccccaragtgtgatgttccccttcttgtgtccatgtgatctcattgttcaattcccacctatgagtgagaatatgcggtgtttggtttttttgttcttgcgatagt

SEQ ID NO: 263220 - DNA, 201 bp, Homo sapiens
aagctgtaattccctttggctgcaaattgtaggaatgttgcttgcttgttacatttcgagttccaagttgaatcagttgctttcttgaacagttgaaaagstgtcatttaagcatttcaggtatttcattttcctgttacaatcctgggttagatttcctgttacttagctctcacctcttcatctattacagttttctcc

SEQ ID NO: 263221 - DNA, 201 bp, Homo sapiens
cttgctaaattcaatgtctgagcccagttagagtcatttgtattgagtgtattttttcttaagtaatttcctgaagactttcctgtttgtttttttggggwtttttttttttttttttttgcatatgtagaaatttctggttgaaaactagacattgggaaacatatggtgaaatgactatgggttctgtcatattctttt

SEQ ID NO: 263222 - DNA, 201 bp, Homo sapiens
tctatgtgtctgtttttatgccaataccatgctgttttggttacaaaatgtggtacattttgatatcaagtagtatgatgtctccttccagctttgttgtyctcttgctcaggattgttttggctattcgaggtctcttgtggctccataccaatttttggatttttattcttgattctgttcatgtgatatatcatgttt

SEQ ID NO: 263223 - DNA, 201 bp, Homo sapiens
tcttgtcaagttcacagcccaaaggctcactaagagactgagacctaatcatagaactatagaatgtttccccttttctcatgccttattgtcacataatwaaaggcctatttaccagaatttcttctacccagtatggcatgtttggctttcaacaaaaaattttgagacatactaaaaggcaaaaacagttcgaggaga

SEQ ID NO: 263224 - DNA, 201 bp, Homo sapiens
ttagttatttattccattttattctgttcagcttattttggtttttattggatatattggctagcaaatatttagtgctaagttgctgcctcttttttggstttaagtggtaccttaagcccaggttcatcttgcgttgatgaatgatcagagctctgcctgtcatgaacaggggcggccccaaagggattatcccagcag

SEQ ID NO: 263225 - DNA, 201 bp, Homo sapiens
aaataatattttaaggcaatatttttaaaaacaaaaattaacaaaaaaaaatgaagaaaataatgaaaattgtaaagaaagactgggtcaggaacagtgcygttctgagccatattggaacctgaggcaaatgaaaaactcagtaatattttgttcatcatggatacataatctctttacaatgtgcaaagagattctgct

SEQ ID NO: 263226 - DNA, 201 bp, Homo sapiens
aatagagttacttatttaaattgaattgtattaaaatttcagtgttttcatcttcaagacagcaggagacctggagtagggtaggcaagtaaggcacttamctcagacacaaaatttaaaggaagttcagcaatcaatataaataatattttaaggcaatatttttaaaaacaaaaattaacaaaaaaaaatgaagaaaat

SEQ ID NO: 263227 - DNA, 201 bp, Homo sapiens
aaaaattacagtttgaatacatccaaaaccttttctcttaccgaatttcaatactcttttctaacaatgtcttagaattttgtagtatatctattcctccsctagataagatctgtagcacacttactctcttcctccctgttactatcctagaatgcttttgtattttaattttagattatttccttttaaaattatgca

SEQ ID NO: 263228 - DNA, 201 bp, Homo sapiens
aatgtatttcttaaaaataactgtaggtaatttaagtctttgggatttgaaaagttgagggcaaaaacatgatgcaacatttctgcatctctttctatctycattaaacatagatatagtgacttctccttctgcttacaaaggattaactgctatagaagtgttcatggagtcccttgcaactttggttgattatcaatc

SEQ ID NO: 263229 - DNA, 201 bp, Homo sapiens
ttctcctgaatgatttttaggtagacaatgaaattaaggcagaaatcaagaagttacttgaaactactgagaacagagatacaaaataccggaatctatgkaatccgactaaggcagtattaagagggaaatgtatagcactgaatgcccatatcacaagttagaaagatctcaagttaacttacaacttaacatcacaac

SEQ ID NO: 263230 - DNA, 201 bp, Homo sapiens
gatctaaacacctcccattgtgccgcaccttccaacaccgtttttttgggggattaaacttcaacatgagttttggagggaacaaaaacattcaaaccacrttaaaatgcttaatacataaatattttcaaatgtatttcttaaaaataactgtaggtaatttaagtctttgggatttgaaaagttgagggcaaaaacatg

SEQ ID NO: 263231 - DNA, 201 bp, Homo sapiens
gctgaatcttaaaagtaaggtattttaagatgctactataccattaccacttaacaagtaaggaaaaaaaaaattacaaaaaaaaaaaaaaaaaagaaaasagccatatgattacatgaaaattgaataccttctcctgaatgatttttaggtagacaatgaaattaaggcagaaatcaagaagttacttgaaactactga

SEQ ID NO: 263232 - DNA, 201 bp, Homo sapiens
gctcaaaagagcaaacccactcctgggagcccattttatgatttcattaatttattcatgaaggcaaagaccttatgatctaaacacctcccattgtgccscaccttccaacaccgtttttttgggggattaaacttcaacatgagttttggagggaacaaaaacattcaaaccacgttaaaatgcttaatacataaatat

SEQ ID NO: 263233 - DNA, 201 bp, Homo sapiens
atctgtctaatattgacagtggggtgttaaagtctcccattattaatgtgtgggagtctaagtctctttgtaggtcactcaggacttgctttatgaatctkggtgctcctgtattgggtgcatatatatttaggatagttagctcttcttgttgaattgatccctttagcaggatgtaatggccttctttgtctcttttga

SEQ ID NO: 263234 - DNA, 201 bp, Homo sapiens
tatgagcaaagctcataaaatgcaataaatgcattttgtatttcttgcaagttagcagtggtgttaaatcttaaatctctgatctgtactaatatcatcarctcctactgagaattagaataacagtagaaactttgggaaagattttaaatgacaacaaagctaaagggtcagaatgtcgtcgttgcaaagcaattttct

SEQ ID NO: 263235 - DNA, 201 bp, Homo sapiens
ctttcctgctttctcttgtgggcatttagtgctataaatttccctctacacactgctttgaatgcgtcccagagattctggtatgttgtgtctttgttctygttggtttcaaagaacatctttatttctgccttcatttcgttatgtacccagtagtcattcaggagcaggtggttcagtttccatgtagttgagtggttt

SEQ ID NO: 263236 - DNA, 201 bp, Homo sapiens
gtctggtggtttttaaaaattacttgtctgattttctttctatagcatacatacattatttgtgcccacctgttatctttggttatctttgaacactcttytatatgttttatttgcggcattatgttacttagaaataagaacatcatatagtttgttagaaaaggatacatgttattgtaacagaagaagtagagcaga

SEQ ID NO: 263237 - DNA, 201 bp, Homo sapiens
gcttttggacagcattgaaagtttcagatacagatggatacagatggaactacaaggcagccctgtgagggataattagaaaaagtataatattaagagagttaggcatttgtaaagcaggtaacctgtttgacagaaaaagaattaaggttatttacaacaaagactccggaaaggtaaaggaagataggagagagtaaa

SEQ ID NO: 263238 - DNA, 201 bp, Homo sapiens
agcttttggacagcattgaaagtttcagatacagatggatacagatggaactacaaggcagccctgtgagggataattagaaaaagtataatattaagagagttaggcatttgtaaagcaggtaacctgtttgacagaaaaagaattaaggttatttacaacaaagactccggaaaggtaaaggaagataggagagagtaa

SEQ ID NO: 263239 - DNA, 201 bp, Homo sapiens
agctgcctgtttaaaaacaaaaaagtaatgaatagcaatgaaaagaaaaaaatttcaattttagaataattattagcacaaggtcacatggacaggaacarttacccattgtttacataaattctcatggtagcaataatgtaatgcatatggctttgaagatgggtaaaattattactttaatacagtaaaacaggtaaa

SEQ ID NO: 263240 - DNA, 201 bp, Homo sapiens
gtttccttacaccataaacaaaaatggattaaagactgtaatgtaaagcacaaaagtataaaacccctggaagacaacctaggcaataccatgcaggacartggcacgggcaaagatttcatgatgaagacaccgaaagcgattgcaacaaaagcaaaaattgataaatgcgatctgattaaagagcttcagtacagcaaa

SEQ ID NO: 263241 - DNA, 201 bp, Homo sapiens
ttatgaaagtccttgacccttgtgaagtctgtattctagtagaggtctacagacaataaacaaaaaagtaaaacaactaggttgtctaataaaatatttayatagaagctatgaaggggactgtaatttcataaggtggtcaaggaaggcctcactgataaggtgacatttgagtaaagatttgaaagatgtgagaggata

SEQ ID NO: 263242 - DNA, 201 bp, Homo sapiens
actatattacagggctacaataatcaaaacagcatggtattagtacaaaaaaagacacatagcctaatggaacagaatagagaacccagatataaggccayatacctacaactatctgatgttcaacaaacctgacaaaagcaagcaatggggaaaggattcctattaaataaatagtgttgggataattggctagccata

SEQ ID NO: 263243 - DNA, 201 bp, Homo sapiens
tgatggctacagcatcactaggccataggaaattttggttctattttaatcttatggggccaccattgtatgtgcagttcatcattgaccaaaacatcatyattcagtgcatgactatatatatatttgtcacttattagcacattaatatggatttgtataaataaatttctagtaacgctcaaataacatacatggatg

SEQ ID NO: 263244 - DNA, 201 bp, Homo sapiens
atcccaggaggcggaggttgcggtgtgccgagatcacactactgcactctagcctgggtgacaagagcaagactccgtctcaaaaaaaaaaaaaaaaaaaagaagtgatccgttgggccgtgaaaggacatggagaccccttaaatacacattactaactcaagccaatgtgaaaagactctatactgcatgattccaact

SEQ ID NO: 263245 - DNA, 201 bp, Homo sapiens
aaagccaacgtataaaattcaatagcggttagtagcaaggaatgagtgttatctgaagtcatagcgtgcttgttaaagtattttcaattaactttctccasgcgtctcttaaatatatgtttttgtatatatttacagtttttttggacagatctatttggcagtcttctttaagatattgtcagctactcattcacaaga

SEQ ID NO: 263246 - DNA, 201 bp, Homo sapiens
tgaaattcaaatgatgttttagacattaacttacacctcaactcttccaaatttgtaagttcatgtttacactttgtacttccctttttttttttttttttgagaacagcaaattatatttcagctgatggactttcctcagtttctgttaattacatgtgtgtctctatttagtagtgcatttagagtcactatttttca

SEQ ID NO: 263247 - DNA, 201 bp, Homo sapiens
gagcccagttagagtcatttgtattgagtgtattttttcttaagtaatttcctgaagactttcctgtttgtttttttggggttttttttttttttttttttgcatatgtagaaatttctggttgaaaactagacattgggaaacatatggtgaaatgactatgggttctgtcatattcttttgaggaccttggttttttgt

SEQ ID NO: 263248 - DNA, 201 bp, Homo sapiens
tgagcccagttagagtcatttgtattgagtgtattttttcttaagtaatttcctgaagactttcctgtttgtttttttggggttttttttttttttttttttgcatatgtagaaatttctggttgaaaactagacattgggaaacatatggtgaaatgactatgggttctgtcatattcttttgaggaccttggttttttg

SEQ ID NO: 263249 - DNA, 201 bp, Homo sapiens
actatgtaaaatgcaagagctttagagcctttaactaaaggagtggcccctaaatcaagtcaaactcttctgtttcccaactacctcttgctgtataggakccatctggctctgctttctcaggtgtacattcttagaggaattttagtgattaaagtacaggccttggtgctgggggaagaaagagggttttcttctgca

SEQ ID NO: 263250 - DNA, 201 bp, Homo sapiens
taatgttcataactgtatattgaacagaaaaactggatgcaatcagaaatcataggtgtagtcaaggagatgaaaattgtagatgtgaccgttgctatttscttttaaggtttcctaatcttgcctagcgtaatgactgagttttatgggtatttggaggattttcttgttccaggtggtggtcatcctccttattttatt

SEQ ID NO: 263251 - DNA, 201 bp, Homo sapiens
agttaagatctgaagaatcttgattaatggttcttggatttatgtttaaagaaatcaaggatgggcatttttctcatctccgtctttggcatttgaaacartatacaggttgagtattccttatccaaaatggttggaaccagaaatgtttcagattttggattttttcatattttgtaatgttttcatacacgtaatgag

SEQ ID NO: 263252 - DNA, 201 bp, Homo sapiens
cacacatcctggtcaatgaaacattaaatttctaattagaaattttagaagttctaagaaagcaaaaagctcatggtgcttttggaacatagtccagggakatttaacctaatccagagaagctcgggaaaaatttgtgccagactataaggtgagaccgtaaggttgagtcagagagggacagaaggggtttggagagaa

SEQ ID NO: 263253 - DNA, 201 bp, Homo sapiens
ggatttcaacatgttgaccaggcttgtctcaaactcctgacctcaggtgatccacccacctcgacctcccaaagtgctgagattataggcatgagccaccrtgcccagccttctttctgtttctgaggcctcaattattatgtctccattttagtttctgattttatttatttgtatcttctctcattttttcttagtctg

SEQ ID NO: 263254 - DNA, 201 bp, Homo sapiens
tgcttaatccccaacagtagagccttataagtcctaggtattctttcctatggggaacagtccccaggatactttctgctgcattcagatgagagctaatmgctaatctttaaaaccattaagctgcacttagctgagccttcacttacagattctgggagaccctttgctattacacagtggaatcaaactttgtgaggt

SEQ ID NO: 263255 - DNA, 201 bp, Homo sapiens
aatttatcttcagtggaaaagagatcaggactgggtatgctatcaggattcaactctgtgccatttattggaaaaaataaccacaaaaattgctgctgagytccctccgtcagtgtattctcttcccaatatcctgctatactcctgccagagctgttcaggtcagagaaaagtagggtgttaggttattgacataagaaa

SEQ ID NO: 263256 - DNA, 201 bp, Homo sapiens
ttgtttgcttaatccccaacagtagagccttataagtcctaggtattctttcctatggggaacagtccccaggatactttctgctgcattcagatgagagstaatagctaatctttaaaaccattaagctgcacttagctgagccttcacttacagattctgggagaccctttgctattacacagtggaatcaaactttgt

SEQ ID NO: 263257 - DNA, 201 bp, Homo sapiens
gtaaatggagagattactctctaacaattttcagacagtagtagttaaactgtgtatttgtatctaaataaaaggttaacactactggcatgcagaaattrtagaaatgtacattttatcatgataaacaatcccaattgtgtagctttaaaaatacaaaattctacttgcaattattttcagagacttaaaaattaagtt

SEQ ID NO: 263258 - DNA, 201 bp, Homo sapiens
gatcttatctatattaccaaaaactatactactgtatgcttgtggttatcctgctctgtgttttggagtggtacatcttatcactcacttgactgtggccrgagggtgggaagagtccttttatctcgtaactcccaaaatgatgcctggaaccacaatggtttgtggaatccatgatcaaatcacaaaaaagattttttt

SEQ ID NO: 263259 - DNA, 201 bp, Homo sapiens; identical to SEQ ID NO: 52493

SEQ ID NO: 263260 - DNA, 201 bp, Homo sapiens
cagcctgatccaatcaggcctgggtccttttttgttagggtaaatggagagattactctctaacaattttcagacagtagtagttaaactgtgtatttgtwtctaaataaaaggttaacactactggcatgcagaaattatagaaatgtacattttatcatgataaacaatcccaattgtgtagctttaaaaatacaaaat

SEQ ID NO: 263261 - DNA, 201 bp, Homo sapiens
tgtcttctatctcaataattttatctttagctacgtcctttaatttttttttttttttttttcctgagagtctcgctttctcacccaggctgggatgcagkgatgcagtcttggctcactgcaacctctgcttcctgggttcaagtgattctcccacctcagcctccagagtacctgggattacaggtgcacgccaccatg

SEQ ID NO: 263262 - DNA, 201 bp, Homo sapiens
tcctgagagtctcgctttctcacccaggctgggatgcagtgatgcagtcttggctcactgcaacctctgcttcctgggttcaagtgattctcccacctcarcctccagagtacctgggattacaggtgcacgccaccatgcctggccaatttttgtatttttagtacagacaggatctcaccatgttggccaggctggtct

SEQ ID NO: 263263 - DNA, 201 bp, Homo sapiens
ggtttttgaacaatgatgcttagtaaagattgtcaacaaataataatagagatattggaatatgtttacaatcatctataattatattgttatagagaatrtatctgtagacatatttaataaatggtgcctaatgagttttgttttataaactcattcagtaagacttgaaatattatttacattttatctctgcctttt

SEQ ID NO: 263264 - DNA, 201 bp, Homo sapiens
aacaatgatgcttagtaaagattgtcaacaaataataatagagatattggaatatgtttacaatcatctataattatattgttatagagaatatatctgtrgacatatttaataaatggtgcctaatgagttttgttttataaactcattcagtaagacttgaaatattatttacattttatctctgccttttatttctgt

SEQ ID NO: 263265 - DNA, 201 bp, Homo sapiens
ataagtgtatatgttccaaatagagatgtggtcataggaggaaaaagaatgttaatgccatctgggatgttaagaagttagggaaggacacagagcataaytgagatgaaattgtaacttcttactctcttcagtgatagtcaaatctaatttaagtctgttactctattctcatgaaaacattctcaagagttgaagaaa

SEQ ID NO: 263266 - DNA, 201 bp, Homo sapiens
tttaataaatggtgcctaatgagttttgttttataaactcattcagtaagacttgaaatattatttacattttatctctgccttttatttctgtaactaaraagaaaacttcctctttaagtacctaccaaagtatttttacattcaacttggacaagagtttagtactatttcttttactgaaatattctatctcctgat

SEQ ID NO: 263267 - DNA, 201 bp, Homo sapiens
agctttacatatttttataaaataatttttaaattctaaaagtaataaatgaccttagggaagatttggaaaatacaaacaagtatgaagaagaaaaaaaraagtccccgcaatcccactgtgcaaatcaaccactcttttttttttttccaagccaaactgtatccagctttattaaagatactttccagaaacagtcgt

SEQ ID NO: 263268 - DNA, 201 bp, Homo sapiens
atttcttttactgaaatattctatctcctgattttctagttgaaaagataattgcatcatttctaattctgatatccaatttaaggtttaaagctaagcartgtaaatttggtttaattcttacctagtttatatctgtattatttagaggatatttctgcttgggtaatttgtgaagaggttaatgcatttctgtcttga

SEQ ID NO: 263269 - DNA, 201 bp, Homo sapiens
aacacaacttgataaatattctttaggtttctgttcctcctttcaaaagttgatttaattcataatgtaacttagcgtaatataaataataccatagaaayaaccatctgtagcagtggtttgatgggaaaatacagtcacagctacaatttgataagccaggaactgtatttttccctcctgaagttataaaagtagaag

SEQ ID NO: 263270 - DNA, 201 bp, Homo sapiens
ttctagccttcctttcagttacgggatttattgaaaactacctcatatacatatgcacatatacccatatatgcatatgtatatatacatgtgtgaatacrtatatggctatagatctgtgtgtatgtacacatatagacacgtgtgtatgtttttgtgtgtatatgtttttatgtgtatctgtatgttcctttctaaata

SEQ ID NO: 263271 - DNA, 201 bp, Homo sapiens
tgagaatatgcggtgtttggtttttttgttcttgcgatagtttactgagaatgatgatttccaatttcatccatgtccctacaaaggacatgaactcatcvttttttatggctgcatagtattccatggtgtatatgtgccacattttcttaatccagtctatcattgatggacatttgggttggttccaagtctttgcta

SEQ ID NO: 263272 - DNA, 201 bp, Homo sapiens
ggtctgagagatagtttgttataatttctgatcttttacatttgctgaggagatctttacttccaagtatgtggtcagttttggaataggtgtggtgtggygctgacaaaaatgtatattctgttgatttggggtggagagttctgtagatgtctattaggtccgcttggtgcagagctgagttcaattcctgggtatcct

SEQ ID NO: 263273 - DNA, 201 bp, Homo sapiens
ctattccatactgtacacatggctggcaaagagaagatggagctgccgttttgaatgtgcctattcccaggtagcttctttctgttggcacaaccgctggyattcacctgtgcaagcttctagcttgttagtctatgtttgcagctcgattttacaggctactctttgttagaaaagaaagtgattgggggggctgctttt

SEQ ID NO: 263274 - DNA, 201 bp, Homo sapiens
tagggcccacagattggttccatcaggtgtgacgtttacatggtgcacaagggaggctggttgccccaccctaatcctatgcaaacggattttctacttgkccagggacatcttgcctattccatactgtacacatggctggcaaagagaagatggagctgccgttttgaatgtgcctattcccaggtagcttctttctgt

SEQ ID NO: 263275 - DNA, 201 bp, Homo sapiens
acacacacacatggagtgggttaaggaatggaaagtttaataggcaaaacaaagaagagaggagagcagctctctctctcttttgtgagagagaggcatcygaaagaggaaggctgcctgcagcggattgcaccagattttataggcaggcttgaggaggtggtgtctgatttgcctagggcccacagattggttccatca

SEQ ID NO: 263276 - DNA, 201 bp, Homo sapiens
ctttgtgtgggaactccaaccgcacatttcccgtccacactgtcctagcagagtttctccatgaggaccccacccctgcagcaaacttctgcttggacatwcaggcatttccatacatcccctgaaatctacgtagaggttcccaaaccttatttattgacttatatgtacccataggtctaaaaccatgtgtaagctgcc

SEQ ID NO: 263277 - DNA, 201 bp, Homo sapiens
tctcagagctttaagactgtgttgaaaatgggaaagaaaaccttttactgtgtttattatatcagcctgatccaatcaggcctgggtccttttttgttagkgtaaatggagagattactctctaacaattttcagacagtagtagttaaactgtgtatttgtatctaaataaaaggttaacactactggcatgcagaaatt

SEQ ID NO: 263278 - DNA, 201 bp, Homo sapiens
cagtgtattaatatattctcagagctttaagactgtgttgaaaatgggaaagaaaaccttttactgtgtttattatatcagcctgatccaatcaggcctgsgtccttttttgttagggtaaatggagagattactctctaacaattttcagacagtagtagttaaactgtgtatttgtatctaaataaaaggttaacacta

SEQ ID NO: 263279 - DNA, 201 bp, Homo sapiens
ttgtataaataaatttctagtaacgctcaaataacatacatggatgcattttcaattgcttctcaaatatatggagtattttaaataagtagattccaaaragcaaaacaagtttaataaatgtctatttgcagctacattacacactcatacacacacatgcacacgcacactctctcacagaggcagtcaactgttcat

SEQ ID NO: 263280 - DNA, 201 bp, Homo sapiens
tctgcccagtgtattaatatattctcagagctttaagactgtgttgaaaatgggaaagaaaaccttttactgtgtttattatatcagcctgatccaatcakgcctgggtccttttttgttagggtaaatggagagattactctctaacaattttcagacagtagtagttaaactgtgtatttgtatctaaataaaaggtta

SEQ ID NO: 263281 - DNA, 201 bp, Homo sapiens
ttgtgttgattaaatgagaatatatgtaaactacttgccatggtgccctgtacacatcatacacagtaaactattaccatctgtattttaattcttaattycttcccctgaacacaacttgataaatattctttaggtttctgttcctcctttcaaaagttgatttaattcataatgtaacttagcgtaatataaataata

SEQ ID NO: 263282 - DNA, 201 bp, Homo sapiens
atcaattctaaattacagtttagttaacattttttaacctgttcttcagttattacactgtatttttagtccaaaaaaagatgaaaggatttatcaggatrttttgaggggatagatttttaaataggtcattttgaagatacttttgagtagacatagtcattacatagtcattaaaaaaccagagctttacatattttt

SEQ ID NO: 263283 - DNA, 201 bp, Homo sapiens
gacattaacttacacctcaactcttccaaatttgtaagttcatgtttacactttgtacttccctttttttttttttttttgagaacagcaaattatatttmagctgatggactttcctcagtttctgttaattacatgtgtgtctctatttagtagtgcatttagagtcactatttttcactgctgcagatatctagacat

SEQ ID NO: 263284 - DNA, 201 bp, Homo sapiens
cagatgtctgggcttaagggagttaagtctgtgctgatagatgggaagggagaagagagataaaaatgattttgtttttccataccacaaggcttttgtgycaaggtggccatatgtgtcaaagtcgcggaatccctcctgggagccaagagtaagtctctcaaaactagaagggaaaagtgttttccccacatcaatcca

SEQ ID NO: 263285 - DNA, 201 bp, Homo sapiens
tctagatttttgaaatctagaaaaaaattgtttaattttaacaaacacatatattgtgccttttcataagttaaaattttattttggatcacatagtaggrtagaaaatcatttcggtacttaaacgtcagcaaaaggtcttaatcagatatttagtgaataggccaaagcagccacccattgaaaactgtattacctcca

SEQ ID NO: 263286 - DNA, 201 bp, Homo sapiens
ggttttaaattattaaatgcttttcaagcatctattaaaataatttgtcagagatgagttggctgtagatgaatggatatatatctgggctctctattctkttccattggtctatgtgtctgtttttatgccaataccatgctgttttggttacaaaatgtggtacattttgatatcaagtagtatgatgtctccttccag

SEQ ID NO: 263287 - DNA, 201 bp, Homo sapiens
tccgttttgattttatttttatgtatagtgagagatagggtccagtttgattcttctgcacctagttattcagttttctcagcatcatttactgaagagaygtccttttcctattttgttttccagctttgttctcttgctgaggattgttttggctatttgaggtctcttgtggctccataccaatttttggattctttt

SEQ ID NO: 263288 - DNA, 201 bp, Homo sapiens
agagctgaccaggcagaaagttgtaagcaagagaattgtgaaagttttgtgcttctcatcacctgaaactaaccccacaggctattatactctgcccagtrtattaatatattctcagagctttaagactgtgttgaaaatgggaaagaaaaccttttactgtgtttattatatcagcctgatccaatcaggcctgggtcc

SEQ ID NO: 263289 - DNA, 201 bp, Homo sapiens
aaatgtagcttcagaatttggcaaatgtgtttagggaaaaactggaagtatgttgagagccctttggtctccagctctgcaatacttccaaaaagttctgytggtttctctgcctctgtgcagtcaaagcttgattctcaggctcttggcctttggcccaaatcaacaaatgcctccagagaaaaagcagctacagggaat

SEQ ID NO: 263290 - DNA, 201 bp, Homo sapiens
taagaaaatgtttggttgcagtttttataagtctcaatctacctagtgtttgttcctgctcttagggtatagcccttcaaatttttccgttgagaacctgrtatggccatggtgacccccattttggtaaatcgtgaactctttctttgtttccttaacacagtgagacttccccagtgtcaattctgcttttataaggtg

SEQ ID NO: 263291 - DNA, 201 bp, Homo sapiens
taattacagactttgaaaacacatgaagcaaaaactgatagaatggaaaagaaaaaagacaaatctgcagatagagttgaagatttcaattagtagaaccwgtagaccaaaaaataattgtcagtatataggagattcaagcaacactgtcaaccaacttgatatatttgccttaaagaatgtgctgacaaaaattagaaa

SEQ ID NO: 263292 - DNA, 201 bp, Homo sapiens
atctctgagcttgcggttatatcagtagaaacttccaaaagtgaaaaagactaacaaatttgaaacagagtatcgaagaactttgggacaattacagaagktgtagcatatctataatggacataccagaaggaggaaagagaaagaacagaagaaacatttgaagcaataatggctgaaaatttcctcaaatgaatgtca

SEQ ID NO: 263293 - DNA, 201 bp, Homo sapiens
ctccgtgcaacttctttttgttcgtttttaaattgggcaacacctaattccataaaatagaatgagtgtttctgagacttctattttagtcaaaatcttgmcatcctctcttaataaccaatataggattctgttacagagagattcagaatagtagacttctggaccttggatgtcactgagtttaagagaaaggtagtc

SEQ ID NO: 263294 - DNA, 201 bp, Homo sapiens
ttcagtaatgttgatcaataatgttgactgggataagcagcactggctccaactgcaggtcaaacagcagaattggccccaactgggaggcggagtgaatsattgctgttagaggacaagcaaagggaacattcagaaggaaagaatgaaaacaacacagaaagacccagaaagaaccagggaaatacagagtactctaat

SEQ ID NO: 263295 - DNA, 201 bp, Homo sapiens
gaaataagttttttaaactgtagttctagtaagaaagacaaacctatttattttgtttaagtaagtgtgcttggtgccagggattcgaaataagatagggsctcatctctttggccttaattctaggctaaacattactcagcttgatggtaagtgtaaaactgaatacaactactacagcaatgacccactggaaatgtg

SEQ ID NO: 263296 - DNA, 201 bp, Homo sapiens
tagtcataattgagtagacacagcaataccttcacgagactatccatcaagaaataagttttttaaactgtagttctagtaagaaagacaaacctatttaktttgtttaagtaagtgtgcttggtgccagggattcgaaataagataggggctcatctctttggccttaattctaggctaaacattactcagcttgatggt

SEQ ID NO: 263297 - DNA, 201 bp, Homo sapiens
cacgtgtgtgtgtgtgaaaaggcattatatttaaagaacaatggtttttgatagccttataattactatattctaataggatgctgagcacggccttggcyggttaactctatttgcttagtcattcgttcatttacacatgtatttacccattaactaataggccagtcaaatgaggttacttctggagtgctgtagttc

SEQ ID NO: 263298 - DNA, 201 bp, Homo sapiens
ttaaaacccaggagtcactctatcctccagggaaacaacatgacctacacagtgtgaaagcctcatgcaactgtcaagcacatgtgtacccacccccgtcrtcataggcagccagaaggcagctttgccccactagagaggatcctgtgcagccgttggcccactccccacccaacaaccaacccagagttgaccctgccc

SEQ ID NO: 263299 - DNA, 201 bp, Homo sapiens
ttaaagggagctcttttggctgaagtgaaatggtttctgatggaaatttgaaaccacacacatactacacacacacacacacacacacacacacacacacwctctctctctctctctctctctctctctctctccctctccctctctccccctgccaaaataatgaaaagaactggaaatagcaaaacgtttgggtaaata

SEQ ID NO: 263300 - DNA, 201 bp, Homo sapiens
gtgattcttaatataaagcagcataatctccactcagcattttgttaatacctaacaaagttactgactacacacatcttttgcagtaacaaatctacttytagggatgcgaccttaatatttttgtatatatgtataataatacattttgcaatagcacaaatgtttgtcaatagaagattggtttgaaaaattgtagaa

SEQ ID NO: 263301 - DNA, 201 bp, Homo sapiens
tttatgtgtaaaaaataaaattataaaattacaagaagaaatcatgtgaaaataattatattttttaaattttagactagagaaaatctaactgtagtgcrtaagttaaggaacataataaaataatgtaaatataatcatatgaagttaaaaattccttcagggcaaaaatcataaagtcaaaagataagttaaaaaggg

SEQ ID NO: 263302 - DNA, 201 bp, Homo sapiens
atctacatacatcagcctaagtgattccaagccaagttttacaagtttttcctgttatagtgacagatagaatgaaaaatatgtccttggatagttggggkaaagtagctaaatttttctccaaagttcaattcaagaaacattcattgagcaagcacttaccctgggccaggcactgtgttatgtatttgggatatggaa

SEQ ID NO: 263303 - DNA, 201 bp, Homo sapiens
tataaattaccttgggcagtatggccattttcacagtattgattcttcctacccatgagcatggactgttcttccatttgtttgtatcctcttttatttcrttgagcagtggtttgtagttctccttgaagaggttcttcacatcagccaaaaaacacatgaaaaaatgctcatcatcactggccatcagagaaatacaaa

SEQ ID NO: 263304 - DNA, 201 bp, Homo sapiens
tgaatcattttaactgtgcagttcagtaagttttgaaaaatgtctatacagattcatgtaactgccaccaaaattgagaaaggacacttccaccatctcaraagattctgtgtgttcctttgtagtaagtctcttctaccccatccctagacaacagctgatgtgctgtcattgtacacatatattagctttgcctgtcct

SEQ ID NO: 263305 - DNA, 201 bp, Homo sapiens
agtcattggtagcttgatggggatggcattgaatctataaattaccttgggcagtatggccattttcacagtattgattcttcctacccatgagcatggamtgttcttccatttgtttgtatcctcttttatttcgttgagcagtggtttgtagttctccttgaagaggttcttcacatcagccaaaaaacacatgaaaaa

SEQ ID NO: 263306 - DNA, 201 bp, Homo sapiens
tgaaagactgagatttagtcaactttgctgagatttaatttacatataataaaatgaatcattttaactgtgcagttcagtaagttttgaaaaatgtctayacagattcatgtaactgccaccaaaattgagaaaggacacttccaccatctcaaaagattctgtgtgttcctttgtagtaagtctcttctaccccatccc

SEQ ID NO: 263307 - DNA, 201 bp, Homo sapiens
agtaccatgctgttttggttactgtaaccttgtagtatagtttgaagtcaggtagcgtgatgcctccagctttgttcttttggcttaggattgacttggcratgcaggctcttttttggttccatatgaactttaaagtagttttttccaattctatgaagaaagtcattggtagcttgatggggatggcattgaatctat

SEQ ID NO: 263308 - DNA, 201 bp, Homo sapiens
agtagagatggggtttcaccatgtttcccaggtgggtctcaaactcctgagcccaggcagttctgccgcggcctcccaaagtggtagaagtacaggtgtcrgccacctcacctggcccctattttttttttaattagctgtgcgtggtagttggttcctgtagtcttagctacttaggaggctgaggtgaaaggattgctt

SEQ ID NO: 263309 - DNA, 201 bp, Homo sapiens
ccaaaatctgtagcttaattatgctaatgatcttcatttatcatgttggtttacttatcaggacattttcctatttctggtcagatgtttttccagggatycaaggcatggaatccttcattaagtggggaagaaccaacagaatttgttccacatattcctctgacacatccccaaaagcatgacttctagcctgaatcc

SEQ ID NO: 263310 - DNA, 201 bp, Homo sapiens
ctacatttgttcaaatgatttttaaaatgtggacacaatgaggggagaaatcgaagaaataaagaagaattgaatggaacttcaagcaatgaaaaatgcartagctgaaatgaaaaatatactgaattcaagagcccattaaacactgaaaaaagaaagatcagtgaacatgaagttatacagatgtaaatgatcccaaat

SEQ ID NO: 263311 - DNA, 201 bp, Homo sapiens
gcactttgggaggctgaggcgggcagattacttgagcctaggagtttgaaaccagcctgggcaacatggtaaaaccctgtctctaccaaaaatagaaaaawtagccagtctcataacccagtctcagaataaatagatagattaaaaattttaaaaaaacctcaaaatggataaatttgtgtgaaagtaacataactacct

SEQ ID NO: 263312 - DNA, 201 bp, Homo sapiens
tctctgttcagagtgttaggagacaaggagagagaatgaacagtatagttttgttatcccacatttttttcaatgacatgaggtagtgggaattggctcarttcagttatagaggttaaattttaagccctattcacaagggacagagtgcacaatagatttttacctaaactttataaagctggaccatttattatactc

SEQ ID NO: 263313 - DNA, 201 bp, Homo sapiens
tcatgtatcattttcctgattgttttcaattgttggtgttctctctctttttttttttttttttttttttttttgtgagacagtctcactttaccacccargctggagtgcagtggcataatcttggctgactgcaacctctgcctcctgggttcaagtgattctcctgcctcagcctcctgagtagctgggattaaaggt

SEQ ID NO: 263314 - DNA, 201 bp, Homo sapiens
gtcttagatttatacctttatccgttttgattttatttttatgtatagtgagagatagggtccagtttgattcttctgcacctagttattcagttttctcrgcatcatttactgaagagatgtccttttcctattttgttttccagctttgttctcttgctgaggattgttttggctatttgaggtctcttgtggctccat

SEQ ID NO: 263315 - DNA, 201 bp, Homo sapiens
ctgtgaacttccctcttaggactgcttttgctggatctcacagattttggtattttgtatttccattttcatgtgttttaagaaacttttgattttcttcwtaatttctttattgatccattcgtaatttgggggcattttgtttaatttccatgtattcatgtattctccgaggttccttttgttattgatttctagttt

SEQ ID NO: 263316 - DNA, 201 bp, Homo sapiens
attcccaccaacagtgtgtaagagggtccccatttctccataggcttggcaacatctgttattgcctgtctttttgatacaaggcattttagcaggtgaartgatatctcattgtggctttgatttgcatttctctgatgttagtgattttcagcattttttcatatactggttggccatttctatttcttgagaaatgtc

SEQ ID NO: 263317 - DNA, 201 bp, Homo sapiens
ttagaatggcttagcttgctccattgcaatgcatcatcctggatgttaaaatccagctgtctctctgaaaactaaatatgaaagactgagatttagtcaastttgctgagatttaatttacatataataaaatgaatcattttaactgtgcagttcagtaagttttgaaaaatgtctatacagattcatgtaactgccacc

SEQ ID NO: 263318 - DNA, 201 bp, Homo sapiens
gatgtcacaaatgtttaagttttatagttttagcttttatatttaaatctaattggattttttaattcttttttatcctttttattgaggtaaaacatacmtataagatttaccatctttaccacattgaagtgtacagttcagtgctgataaatacattcatattcttttgatttccctttatcttcccagccctgctac

SEQ ID NO: 263319 - DNA, 201 bp, Homo sapiens
atactttggtttaattcaagatagttttggcttatggatgacaagatgtggatgtgttttcataactcacagctgtcgtttatgccataagggtaattctyttcttattcagtatgacataatatgctacattttattatccagactatctttctgactctgaggaaaaaaataggtccaaatagtcaaattccattatct

SEQ ID NO: 263320 - DNA, 201 bp, Homo sapiens
cataaaaagtgagaattgattatttaatctgatcaagagccgagctaagaaaatgtttggttgcagtttttataagtctcaatctacctagtgtttgttcstgctcttagggtatagcccttcaaatttttccgttgagaacctggtatggccatggtgacccccattttggtaaatcgtgaactctttctttgtttcctt

SEQ ID NO: 263321 - DNA, 201 bp, Homo sapiens
tttttctatttccagagcctttagataatttttctttttgttttgtattttttagagtttatagctgccatttgaaagaggattggttgtatgagaagctsatcccttctatactagaagcagagcctcccagatactgtattttacagttctaaaatgtcagtttaattaaagtatagattccctataacaaaatttcat

SEQ ID NO: 263322 - DNA, 201 bp, Homo sapiens
tcatactaagagttacattcaaattgcacactgtcatgtctgtgttgtgtggtgtcttggtactctaaagtttaactgcacgctgcttccggtttctcccmttcatgcatgttcattgactagccatagacatgagctctttccaccgctggccttctattttccagagttctcctttcattcttcagtggctgtggttgt

SEQ ID NO: 263323 - DNA, 201 bp, Homo sapiens
ttttggctgtttgctgcatttgtagaaggaaaagaacaatagaaaacattgcttctctctttgcagactaagcatttacagtggaacatagctaagtaggmaaccaagaaaaagagaggatgagatgttaactgacgaatcaagttactcttgtgtgctccagtaacagatgtccaagaggcttcaggcctacctttgtgc

SEQ ID NO: 263324 - DNA, 201 bp, Homo sapiens
aagacctgcttgacacttctaactctccattctaaatgagcaaaaatttcatctccctgaaagcagagggaagacattgctgggtcagtttcaaaggctcwttggttaccttcctgccacaatagaccattgagagtctctgctccccgttcctggcatggtggaaactgaccttacactcaccttcctctatgtacttct

SEQ ID NO: 263325 - DNA, 201 bp, Homo sapiens
gcttggaggactctgggggtggccacctttgctagatatgctattaacctccttcatatggttgggtcagtgatcttgtaaagttctgcttggcaggctcrtaggtgttgataggtgccctaaactgatggaccagtagagggtggccaccatctgtgaggttatttcttcaggccctcaataagcacttacccaaatgca

SEQ ID NO: 263326 - DNA, 201 bp, Homo sapiens
ccttgggctctctccatttatttgcacagtactatctaaattcttaaaataattgtaaacttaaagttgtacaaaagtagttttcaaactggtttagccarctatgctggtatttggtaattccattagggaatagccacatcccttctagggagtatctcctgaggtcactgatccttttattcatcatccaggagataa

SEQ ID NO: 263327 - DNA, 201 bp, Homo sapiens
actttgcagtccagcttcttactctctttcatgctgctgcaagtagttctacgaacattggggtgctttagaaatactgaatgaatgaattaatagagtaygtagtttttttctgccttgggctctctccatttatttgcacagtactatctaaattcttaaaataattgtaaacttaaagttgtacaaaagtagttttca

SEQ ID NO: 263328 - DNA, 201 bp, Homo sapiens
aaatggaaagttactgatttttatttcaaaagaagtagtctgcaaagacaggaaaggtgaagccagtccagtcaacaaatctgtaaggaagatggtgctasaggcttagagagactgtttcaatctccaaggcaggaaaaataatgaatatataataatcttcttttagtgaaaccagagttcagtcatttttagcatctt

SEQ ID NO: 263329 - DNA, 201 bp, Homo sapiens
tgtgagatgataactctgttgttttaaacctctaactttgtagtaatttgttacgctgcaatagataactaaaacaacagccatgctcaattgtttacatrtggtctgtagctgcttttgaacaacagcagggttgagtagttgcagcagagaccatatggcccacaaagcctaaaacctggccctttatagaaagaaagg

SEQ ID NO: 263330 - DNA, 201 bp, Homo sapiens
tgaaataaattctgcgaacaaccttgaattagcctggaaatgggttttcttgtcgtttttttgtttggctttgttttgtttttttccctgttaagcttctrgatgagagcacagtccaactgactcttattgcagccttgtgagattttaaacaaaggacccaactaaactatgcttgaactctacccatggtaattgtga

SEQ ID NO: 263331 - DNA, 201 bp, Homo sapiens
ggatcagcaaatgatggacatgacccaccacttgtctttgtaaataaagttttattggaacacagttgtcttgctaccaaactcactcttgagactttctsccttccttgctttgaagaaataataccatgttataagagaggctgcggatagggctacatgacaaggaactgagggtgacctctaggggctgagggagaa

SEQ ID NO: 263332 - DNA, 201 bp, Homo sapiens
ttttataatcacagattctaacacaatgccaattctgcttttattttttatttaaaaaatgaggtaatacatgtattatgggaccagaatgaaaaaaataytttcttctgagtacctttccacgtggctcttctggctctgagaaatctttttctctactcagtgaactttgatttcttcttaccgtaaataatgtcttct

SEQ ID NO: 263333 - DNA, 201 bp, Homo sapiens
ctcaaggtaatcagtgacctgttaaaccacagtatctcaagccttgtaggcaaagcaaaatgttacctgtcctacccctgctcaaagtatccatcatttckctaatgtagtctcacacccatatgtaaagcctctctagcactcctttccaaaatctgtagcttaattatgctaatgatcttcatttatcatgttggttta

SEQ ID NO: 263334 - DNA, 201 bp, Homo sapiens
gagtagagagcagattctataatcctcagtctaaactcttgacattacatattgcattgcttctccaagtggggcaggaaggggtggtaatgcaaactgcsatttcgggaagtggttaaaaaaaataccttaaaatgtggttatcctttacctagtagttctaaaggagtccatgtttgggatccaagaaattcccctgcc

SEQ ID NO: 263335 - DNA, 201 bp, Homo sapiens
ttttatagtttctgtgtttttcttgatgttctcgttttgttcatgtatcattttcctgattgttttcaattgttggtgttctctctctttttttttttttytttttttttttttgtgagacagtctcactttaccacccaggctggagtgcagtggcataatcttggctgactgcaacctctgcctcctgggttcaagtga

SEQ ID NO: 263336 - DNA, 201 bp, Homo sapiens
aagtattggttggccatgtttatcgatggccagatcaaccataaaaagaccatgcccatggatggtgctccttttgcatttcttgtttccactctatgggwtggaatagagagagtccagattttgaggagaagctgagatgtgtggggaagaggggcaggtagggagggagtgtctttcttaggccttaagaatgaacca

SEQ ID NO: 263337 - DNA, 201 bp, Homo sapiens
aatagtcctactcaatagaccagcttcatttaatgctaaaattaggaacacattaatttgaggtattttatagtaaagcttaatggcatttttaattttgragaattttaaggatttttaaccattgctcccatctcgccatatgcacactcctgaagtatttttgaagctcttttgcttttctctgaactataaggttgt

SEQ ID NO: 263338 - DNA, 201 bp, Homo sapiens
agaactagaaataccatttgacccagccatcccattactgggtatatacccaaaggaatataaatcatgctgctataaagacacacacatatgtttattgyggcactattcacaatagcaaagacttggaaccaacccaaatgcccatcagtgatagactggattaagaaaatgtgacacacatgcaccatggaatactgt

SEQ ID NO: 263339 - DNA, 201 bp, Homo sapiens
cagtgcaaaggttatatccttgttcttctactttgtgtgtgtgtgttgagcaagttaatttgtgaaagttcactttacttatctttgtaataggaataatmatctaactaacatgagtgttttgaagattaagtgaaattcatgttaaacatttagcataatccttgaatctcaatcatataataagcattagctgacatt

SEQ ID NO: 263340 - DNA, 201 bp, Homo sapiens
cgctagtaagcagtgttaaagggagctcttttggctgaagtgaaatggtttctgatggaaatttgaaaccacacacatactacacacacacacacacacasacacacacacacactctctctctctctctctctctctctctctctctccctctccctctctccccctgccaaaataatgaaaagaactggaaatagcaaa

SEQ ID NO: 263341 - DNA, 201 bp, Homo sapiens
ggaaacaacaggtgctggagaggatgtggagaaataggaacacttttacactattggtgagactgtaaactagttcaaccattgtggaagacagtgtggcrattcctcaaggatctagaactagaaataccatttgacccagccatcccattactgggtatatacccaaaggaatataaatcatgctgctataaagacaca

SEQ ID NO: 263342 - DNA, 201 bp, Homo sapiens
agtaagcagtgttaaagggagctcttttggctgaagtgaaatggtttctgatggaaatttgaaaccacacacatactacacacacacacacacacacacasacacacacactctctctctctctctctctctctctctctctctccctctccctctctccccctgccaaaataatgaaaagaactggaaatagcaaaacgt

SEQ ID NO: 263343 - DNA, 201 bp, Homo sapiens
accatctcataccagttagaatggcaatcattaaaaagtcaggaaacaacaggtgctggagaggatgtggagaaataggaacacttttacactattggtgrgactgtaaactagttcaaccattgtggaagacagtgtggcaattcctcaaggatctagaactagaaataccatttgacccagccatcccattactgggta

SEQ ID NO: 263344 - DNA, 201 bp, Homo sapiens
tttgaacgtagggaactcactgataaatataattatacataaaccctagaccacatctctcgtgatattattagtatagattcctagaagtagagttgctrtgtcaaaagtatgaagatttattttctattttcatctttaatcggattttcattataaaaaaacaaggccaggtgtggtggcttatgcctgtaatcccaa

SEQ ID NO: 263345 - DNA, 201 bp, Homo sapiens
tttttgtatctattacaaattatatttgtaattcttccctaattataaattatcatgattatttttatttgggaaataccaaaaaatcataaataactaayctaaacttacagaatcctatcatccaaaaatggccattaatgacagtttgatagatttattgcagtttttttgtatccatttatctttcttgttcatttt

SEQ ID NO: 263346 - DNA, 201 bp, Homo sapiens
tgtgtgtatccaaagtgtgttctttttcattgccaaataatgttctgctatatgaatatattacaaaatatttgtctgtttatctattggtggatttttgsattcgttccagtttggggctattatgaataaagcttctgtgaaaattcgtttctgtcttttggaagacacatgttttcatttctcttatagaaatgccta

SEQ ID NO: 263347 - DNA, 201 bp, Homo sapiens
gataccatctcataccagttagaatggcaatcattaaaaagtcaggaaacaacaggtgctggagaggatgtggagaaataggaacacttttacactattgstgagactgtaaactagttcaaccattgtggaagacagtgtggcaattcctcaaggatctagaactagaaataccatttgacccagccatcccattactgg

SEQ ID NO: 263348 - DNA, 201 bp, Homo sapiens
tagattaggtgcagaaagtccaagtttggtactaatgcatgagatcagcatagacaatataagtaatgcatttattaaggaagttcttagttgtaatcttrtatgtacaagcagaagagagaaagtcttccagtttctctatatttagttaacaatattagtgacttcaatgtgttttacaggaaaatggaaaatttaaaa

SEQ ID NO: 263349 - DNA, 201 bp, Homo sapiens
atgagataccatctcataccagttagaatggcaatcattaaaaagtcaggaaacaacaggtgctggagaggatgtggagaaataggaacacttttacactrttggtgagactgtaaactagttcaaccattgtggaagacagtgtggcaattcctcaaggatctagaactagaaataccatttgacccagccatcccatta

SEQ ID NO: 263350 - DNA, 201 bp, Homo sapiens
aatgaatacatttacatacatttgtttaaaaaaaacttgaattttttatgaatgaaatttctgtattgtttccaaaaagagagagattcaaacatgacttkcttcacatgaagaaatttgatttcagaaatgtcctatatttaaataagcaaagccattgaaattgaagcacatttcttatttgaagcatctgggaaatac

SEQ ID NO: 263351 - DNA, 201 bp, Homo sapiens
tctcctgattttctagttgaaaagataattgcatcatttctaattctgatatccaatttaaggtttaaagctaagcaatgtaaatttggtttaattcttayctagtttatatctgtattatttagaggatatttctgcttgggtaatttgtgaagaggttaatgcatttctgtcttgaaaaatgtatatgtgttcctaatt

SEQ ID NO: 263352 - DNA, 201 bp, Homo sapiens
cataactcacagctgtcgtttatgccataagggtaattctcttcttattcagtatgacataatatgctacattttattatccagactatctttctgactcygaggaaaaaaataggtccaaatagtcaaattccattatctaatgacagtggtaggcaggaagcacatggataattatatatacattgtcagattcagcct

SEQ ID NO: 263353 - DNA, 201 bp, Homo sapiens; identical to SEQ ID NO: 52491

SEQ ID NO: 263354 - DNA, 201 bp, Homo sapiens
ccatggtacattcatctttgtatcatgagcacttttctcgggcagcacatgttactcttaaatgtttactgaatgactgaatatagtggatgacaaaaatractaacagttgtaaatgtaagtagagtttcatggtttatttagcctatggtggagctgaaattatatctctaggtttttgaacaatgatgcttagtaaag

SEQ ID NO: 263355 - DNA, 201 bp, Homo sapiens; identical to SEQ ID NO: 52492

SEQ ID NO: 263356 - DNA, 201 bp, Homo sapiens; identical to SEQ ID NO: 52494

SEQ ID NO: 263357 - DNA, 201 bp, Homo sapiens
atgtgggtgtaaagtgaagagataggccagggtgatagatgtatagaacttctgattttaaaataagcatgtaagctgtatactatttaatgaaattactwttgacattttattgaagttaaataatgaattcatcacattttatgagaccaactttaagaaaactagctggatttttaatggtttgcttcaacttaatag

SEQ ID NO: 263358 - DNA, 201 bp, Homo sapiens
cttccagaactgaaagtctggaggctgttgttgaaaatctggaggctattgttggtggctgttgtttaagccacccagtctggcatttcgttaatggcagycctagcaaaccgatacatacagttttctccctttcccttccccttccccttcccattttagtagtagtgcagtaggcagaataacagctcctcacagata

SEQ ID NO: 263359 - DNA, 201 bp, Homo sapiens
aagaaaaaaaaaagtccccgcaatcccactgtgcaaatcaaccactcttttttttttttccaagccaaactgtatccagctttattaaagatactttccakaaacagtcgtggtatttcaggcagaacatgggcagacagtcattaacagtacacaacaactttcaaacttaactaccttcttcaatggactaccgaaaat

SEQ ID NO: 263360 - DNA, 201 bp, Homo sapiens
agatacttttgagtagacatagtcattacatagtcattaaaaaaccagagctttacatatttttataaaataatttttaaattctaaaagtaataaatgaycttagggaagatttggaaaatacaaacaagtatgaagaagaaaaaaaaaagtccccgcaatcccactgtgcaaatcaaccactcttttttttttttccaa

SEQ ID NO: 263361 - DNA, 201 bp, Homo sapiens
ggaaaatagttttaattaaagcaataggattgttgctttaatataaaacattaagtaatgaactttgtgattcctagccacactgacactttaaatatatrtaatgtcaaatactttaatttctgggcccaagggtaaagggaaacatgcctttagagatttatctgtgagtatatttcatgtctctttctgaagactgat

SEQ ID NO: 263362 - DNA, 201 bp, Homo sapiens
taatattttaaaaatcaaacagaaatcttgaaaatgagaaacacatttgctgaactgaagaattcattagaggctctcagcagtagaatggaccaggcagwggaaagaattggtaagctcgaagactgggtttttggtgggtttttctattggctatttgaaaatacacagatgagaaaacaaaaacaaaaacaaaaagga

SEQ ID NO: 263363 - DNA, 201 bp, Homo sapiens
ttattcttataccaaatgcacatactacttgataactgtagctgtacagtaagttataaaataaacataataatttttaactgaaataatattttaaaaawcaaacagaaatcttgaaaatgagaaacacatttgctgaactgaagaattcattagaggctctcagcagtagaatggaccaggcagaggaaagaattggta

SEQ ID NO: 263364 - DNA, 201 bp, Homo sapiens
agtaaagaaagggcaagtagaagatctaatgccaactaagaagataattatttctgaaatatttagttgaagataactttctttcttaagacattactgtkgttatgatgcacaagtcaaagaacatgtggcatttccaaagagtattaaatgcatgttacttttttataaaaataagataaatgagattaatggggcttg

SEQ ID NO: 263365 - DNA, 201 bp, Homo sapiens
agttgattgaaagtttttaaactcaaactttcattggtagaatatctggaaggcatgtttgcaatataatgtggcttgtaggatctctcctacttttttaygctctgttttgccagttctcaaaagtaaatacctgaagtcctagaggtactataaacattttggtaaacattctttgagactttttctcatgtacatgta

SEQ ID NO: 263366 - DNA, 201 bp, Homo sapiens
agcacatttcttatttgaagcatctgggaaatacaactgttaagtatctctcaaatattcagtatatggaatttatacccacatttgtttgtatatctatytgtaagctgttgcttagaagaattgagagtttggattatttcagaatacaactattacagttttccatagttgattgaaagtttttaaactcaaactttc

SEQ ID NO: 263367 - DNA, 201 bp, Homo sapiens
ttctgcctaaaactgttgttgaatacctctaataagtttttccattccgttactgtatttttcagctccaggatttctgtttggttcttttttatagtttytgtgtttttcttgatgttctcgttttgttcatgtatcattttcctgattgttttcaattgttggtgttctctctcttttttttttttttttttttttttt

SEQ ID NO: 263368 - DNA, 201 bp, Homo sapiens
ttatacagctttgtgtttttgcctgctgtcctttcatttcaacttaaagaacttcctttagcattttgtatagattagctctaggtgatgaactcccatgrcttttctttatctgggaaaatgttaatttcttcttcacttttgaagaactgttttgccagatgcagtattcctgattaatagtttttttgtttttgtttt

SEQ ID NO: 263369 - DNA, 201 bp, Homo sapiens
ttaggttgttaagttgagatatatatgtattttacattatacacttaacagctataaacttaaccctttaacactagtttcactccatcccaaaattttgrcatgttgtgttttcactttcatttgtcttaagatatttcccagttccagttccccttattacttatttggcccattgattgtatgagaatgtgtttaatt

SEQ ID NO: 263370 - DNA, 201 bp, Homo sapiens
ttactagatttcaaacagactgctgagaaagatgaaatataatctcatgtattatctctgtcttgaaaaaattagataataaagttgttctcttactggcrtatgttttattaaccttcgtagagtcaacttaaaggacagatgtctgtagaattgaaaccttttgctagagtgttattaagtgcatttttgagttctagg

SEQ ID NO: 263371 - DNA, 201 bp, Homo sapiens
tcatactttactacagcatcatacatacatatacaatattacctagcatctgtagcacccataaaggattctctaatgcatgtgaagtaaaaggaaagagwgtgtttaagtcctgactttgaaactgttgtgttaattgtgaacttttgctgagtctatacattgaagaaggtaacactcagcatgttgagatcacaactg

SEQ ID NO: 263372 - DNA, 201 bp, Homo sapiens
ttgaattgtttcctcagtatacagaatcaaccaaaagtaggttggattgagttgagttgggtttagtttaatatcatactttactacagcatcatacatayatatacaatattacctagcatctgtagcacccataaaggattctctaatgcatgtgaagtaaaaggaaagagagtgtttaagtcctgactttgaaactgt

SEQ ID NO: 263373 - DNA, 201 bp, Homo sapiens
tgttgccattgcttttggtgttttagacatgaagtccttgcccatgcctatgtcctgaatggtattgcctaggttttcttctagggtttttatggttttasgtctaacatgttaagcctttaatccatcttgaattaatttttgtataaggtgtaaggaagggatccagtttcagctttctacatatggctagccagtttt

SEQ ID NO: 263374 - DNA, 201 bp, Homo sapiens
agccacttctgctctcttttgttaccatttacacgggatatctttttccatcctttcactttcagcctatgtgtattgttagatctaaagtatgtctcttrtaaacagggtatagttggattctgttattttatccagttaaccagcctgtatcttttgattggggagtttaatctgtttacatttaaaataattaccgat

SEQ ID NO: 263375 - DNA, 201 bp, Homo sapiens; identical to SEQ ID NO: 52486

SEQ ID NO: 263376 - DNA, 201 bp, Homo sapiens
gtgggaagagtccttttatctcgtaactcccaaaatgatgcctggaaccacaatggtttgtggaatccatgatcaaatcacaaaaaagattttttttttttgtcctgagactgactcctgggtttctaaggaggtggttgagattgcagtttcatcttttctgttatctcaccagcattgacacataaaaaggttgttttt

SEQ ID NO: 263377 - DNA, 201 bp, Homo sapiens; identical to SEQ ID NO: 52487

SEQ ID NO: 263378 - DNA, 201 bp, Homo sapiens
gtggatgtgttttcataactcacagctgtcgtttatgccataagggtaattctcttcttattcagtatgacataatatgctacattttattatccagactrtctttctgactctgaggaaaaaaataggtccaaatagtcaaattccattatctaatgacagtggtaggcaggaagcacatggataattatatatacattg

SEQ ID NO: 263379 - DNA, 201 bp, Homo sapiens; identical to SEQ ID NO: 52488

SEQ ID NO: 263380 - DNA, 201 bp, Homo sapiens
ttgcactcagaataaaaatttgttttcacagagaattttagcccattatccctgatgaacatcgatgcaaaaatcctcaataaaacactggcaaactgaayccagcagcacatcaaaaagcttaaccaccatgatcaagtgggcttcatccctgggatgcaaggctggttcaacatacgcaaatcaatgaatgtaatccat

SEQ ID NO: 263381 - DNA, 201 bp, Homo sapiens
gtgaccgttgctatttccttttaaggtttcctaatcttgcctagcgtaatgactgagttttatgggtatttggaggattttcttgttccaggtggtggtcrtcctccttattttattttttggtaaggctaggagtaatgtagatgtgtattcttctcataacttagtaaaactcttttatcaaattggtcagtgcagcct

SEQ ID NO: 263382 - DNA, 201 bp, Homo sapiens
aagcaagcagcaggtggataggagggggagaggaaatcaggcgaggttttgcagaggaggtaacacttcagaagagtcttaaagtatcagtaagacattgscagaaagaaaaataaaaattaatttcaaataaaatatatataagcatgtgaagcatgattgagaaatatcttcttttttttcttcttttttgagatggac

SEQ ID NO: 263383 - DNA, 201 bp, Homo sapiens
ttagaggaagaccttctccttaagggggcaatgagaacaaaggcattgttttcaggaaaatgcagtgcccaaagttaatttgactatatgaaaaagaaaartatttatacctatgcagacctttgaatgtaatgcatgttttcatttaaaattagaaatttatataatttttgaggtattatggatccaaattgtagattt

SEQ ID NO: 263384 - DNA, 201 bp, Homo sapiens
ctgacagtcggtagctttgacatgattatagtgaagtataatttagatgttagttttaactataatagactgtaactccttgtattttgggtgctgtagarattacctttccctttgcatgtacgtgacagttaagatctgaagaatcttgattaatggttcttggatttatgtttaaagaaatcaaggatgggcattttt

SEQ ID NO: 263385 - DNA, 201 bp, Homo sapiens
ccttgccatggtacattcatctttgtatcatgagcacttttctcgggcagcacatgttactcttaaatgtttactgaatgactgaatatagtggatgacaraaataactaacagttgtaaatgtaagtagagtttcatggtttatttagcctatggtggagctgaaattatatctctaggtttttgaacaatgatgcttag

SEQ ID NO: 263386 - DNA, 201 bp, Homo sapiens
gctcaaatatggaagacattggtgctcagaaagagatgtatttcttttgggaggtggggaaggcctcctggaagaagtgttttagctgacccttaaaaaakcggcaggattttgtcaagtgaagttaattagaggaagaccttctccttaagggggcaatgagaacaaaggcattgttttcaggaaaatgcagtgcccaaa

SEQ ID NO: 263387 - DNA, 201 bp, Homo sapiens
aattatgtttttgagtattttgtccattgtttcttatttcctactttacatttttatttacagcaaggttttatccttttactaaagggaaggagatgggwtgaatggcagactttaactggatgctttatttaggcttttcgaaagcaaaaaaagtttatacattgttacagctgggtgttgggttacaggctgtttgtt

SEQ ID NO: 263388 - DNA, 201 bp, Homo sapiens
catgagaaatatggatgcttattaggtcacttttggtaaatagaactaataatttgagacatttgtctacaatagagtttggcaaactttcttctgtaaarcaccaaatagtaaattctttaaatttgcagactatacagctctgctgttacaacacaaaagtaggcttagacactatataaaagaatgagtgtggctgtg

SEQ ID NO: 263389 - DNA, 201 bp, Homo sapiens
ttataaaaggcaacctgcagacataaagaaggatctttctttggttaaacgtctattccttgccatggtacattcatctttgtatcatgagcacttttctygggcagcacatgttactcttaaatgtttactgaatgactgaatatagtggatgacaaaaataactaacagttgtaaatgtaagtagagtttcatggttta

SEQ ID NO: 263390 - DNA, 201 bp, Homo sapiens
agactaggattgcaacccctgcctttttttgttttccatttgcttggtagatcttcctccatccttttattttgagcctatgtgtgtctctgcccgtgagrtgggtttcctgaacacagcacactgatgggtcttgactctttatccaatttgccagtctgtgtcttttagttggagcatttagtccatttacatttaaag

SEQ ID NO: 263391 - DNA, 201 bp, Homo sapiens
aacctactttctacaggaactacttctattacactctttaatttaaatctctttccataacctgtcaatatttaaagtacaacaaaaggtagttgcactcmgaataaaaatttgttttcacagagaattttagcccattatccctgatgaacatcgatgcaaaaatcctcaataaaacactggcaaactgaatccagcagc

SEQ ID NO: 263392 - DNA, 201 bp, Homo sapiens
atccttcttagtgcctcaaactagatcctgttcagacatactgtaaaaagttagtatattttggtgcaaaagaattttgaaatccatgcatagttttttcrtaatatgcatttttcatgagctttttgaagaaccctccttgtaatgtatcttaattccctattccattaaatctatgattttgaaccagccatatgtgac

SEQ ID NO: 263393 - DNA, 201 bp, Homo sapiens
acattcctgtgaggttttggaaactgctggactgcataatattttaatgaagtctttggaatcacagggcttgaggtagcaacagagatcagctgaaattyaggtgaaaatgataattatgtagtatattcactggactaactttttttatttgtttcatattagaattttaacctgaatgaaacctagctttttaacttg

SEQ ID NO: 263394 - DNA, 201 bp, Homo sapiens
ttttctagtttatttgcatagaggtgtttgtagtattctctgatggtagtttgtatttctgtgggatcggtggtgatatcccctttatcattttttattgygtctatttgattcttctctctttttttctttatcattcttgctagcggtctatcaattttgttgatcctttcaaaaaaccagttcctggattcattaatt

SEQ ID NO: 263395 - DNA, 201 bp, Homo sapiens
tgtctatctcttaccagtgaacttcttcaaatgtaaaggtgtttgtaaaaggacataaaaatcaatcatttgtataatataatttcagatctgtgcctttyatatatatacttttaccacttattttttccatctgtgaaatgtgctgacacctactttaacaaactgatacaattgagaagagagagtgtgggctgctaa

SEQ ID NO: 263396 - DNA, 201 bp, Homo sapiens
gactcttcttggttggtaagctattgattattgccacaatttcagatcctgttattggtcttttcagagattgaacttcttcctggtttattcttgggagrgtatatgtgtcaaggactttatccatttcttctagattttctagtttatttgcatagaggtgtttgtagtattctctgatggtagtttgtatttctgtgg

SEQ ID NO: 263397 - DNA, 201 bp, Homo sapiens
ctcttttgccttctggtgttacagagtggtaagcaggaaagcagggtctgtatctatctgtgctataggttcactatccttgccataaattaagttgatcrcttaaaaagtatcactactttagcactagatttagctcgcttttaacagaaatttcatggtgatcttttctcatttcaaggcccttgaaataagggcctt

SEQ ID NO: 263398 - DNA, 201 bp, Homo sapiens
attcagtatgatattggctgtggatttgtcatagatagctcttattattttgaaatatgtcccatcaatacctaatttattgagagtttttagcatgaagsgttgttgaattttgtcaaaggccttttctgcatctattgagataatcatgtggtttttgtctttggctctgtttatatgctggattacatttattgattt

SEQ ID NO: 263399 - DNA, 201 bp, Homo sapiens
cagaaccctgggattttctactgtgagtttcatgctgcaaatacacaaatcaacagttattttgtatgtatactcaggtttcttcatttatttgaaaaggwggaggaaggaatggagaaaaatggacagaggtaggagtgtgtgggggtgtgtgtgtgtgcatgcatgcacgtgtgtgtgtgtgaaaaggcattatattta

SEQ ID NO: 263400 - DNA, 201 bp, Homo sapiens
tataatattaagagagttaggcatttgtaaagcaggtaacctgtttgacagaaaaagaattaaggttatttacaacaaagactccggaaaggtaaaggaakataggagagagtaaagcccttagtgctgatctatgccaggtgtgcgagaccctagttaggtatcaaaatagcctgtacagttctgtttttgttgtaattt

SEQ ID NO: 263401 - DNA, 201 bp, Homo sapiens
aatgtccaatgatatgtttcagagccattaagcttgtttgcctctttctgcttctccttcctgaccactgttgtgggggcagagagccagatgtcaggagsttcctttcccaaaccagttagcatgtcctcatattttgccctcttcagccacagcttgttctcggctctctccctgcatgaatcaacagcagtcccagga

SEQ ID NO: 263402 - DNA, 201 bp, Homo sapiens
taaaggcatataaattggatttcttttccattcatggacatctacttgtataaagaataaaaattacagtttgaatacatccaaaaccttttctcttaccraatttcaatactcttttctaacaatgtcttagaattttgtagtatatctattcctccgctagataagatctgtagcacacttactctcttcctccctgtt

SEQ ID NO: 263403 - DNA, 201 bp, Homo sapiens
gaaacttcaaatggcagtatcgaacttctgttccttttggggttgttgagtatatgaagaatattatttttctgtgtctgacagtcggtagctttgacatkattatagtgaagtataatttagatgttagttttaactataatagactgtaactccttgtattttgggtgctgtagaaattacctttccctttgcatgtac

SEQ ID NO: 263404 - DNA, 201 bp, Homo sapiens
agaaaagaatctacagtataatgagagttaaccatgttttgtccaaaatgattttgaatcaccgttcggacagatcttgaagactagtggaaacttcaaayggcagtatcgaacttctgttccttttggggttgttgagtatatgaagaatattatttttctgtgtctgacagtcggtagctttgacatgattatagtgaa

SEQ ID NO: 263405 - DNA, 201 bp, Homo sapiens
aatttgaatgttgagatcataatctttaaaactacacactagaaacaatagaatttcaatttattgtttaaaatttacccagaatccctcagccaagatartaacacatgtcttgagaagttaaataatgtacctattacaaatgatgtttcagtcatcagatatgtacttatccttagaataaattataaatacttagaa

SEQ ID NO: 263406 - DNA, 201 bp, Homo sapiens
tccaaaagcatttgaaaaatatcccacgggtgataagtctgtaatattttactttattaaaatgctgtacctggcttctgagtggttatctaagaagaagraaagaatctacagtataatgagagttaaccatgttttgtccaaaatgattttgaatcaccgttcggacagatcttgaagactagtggaaacttcaaatgg

SEQ ID NO: 263407 - DNA, 201 bp, Homo sapiens
tactttacatttttatttacagcaaggttttatccttttactaaagggaaggagatgggatgaatggcagactttaactggatgctttatttaggcttttsgaaagcaaaaaaagtttatacattgttacagctgggtgttgggttacaggctgtttgttatattcatgtattagttcctgttattttaacattttaaata

SEQ ID NO: 263408 - DNA, 201 bp, Homo sapiens
tctcatttccttaaatttcatggatatgcatattgagctattttcgtattcaatctcagctaaataaagtagcgcaaatatgcatgactgaaattaccttytataaaaagttccaaaagcatttgaaaaatatcccacgggtgataagtctgtaatattttactttattaaaatgctgtacctggcttctgagtggttatc

SEQ ID NO: 263409 - DNA, 201 bp, Homo sapiens
cgagatcatatcctttgcagggacatggatggagctggaggccattatccttagcaaattaatgcaggaacagaaagcaacaaccacatgttctcccttayaagtgggagctaaatgatgagaacacatggatacatacaggggaacaacacaaactctggggtctattggagggtgaaggtgggaggaaggaaaggatca

SEQ ID NO: 263410 - DNA, 201 bp, Homo sapiens
tatatgggcatgtagtgttcttttatcattgtgtccttgtctggttttcatagaatgagtttgcaagtattcccttctcttcagtttttttttttttttttaagactttaatagaattagtattggttcttctttaaatgtttggtagaattcagcaatgaagctgttaagtcctgggcctttctttaataaagacttttt

SEQ ID NO: 263411 - DNA, 201 bp, Homo sapiens
aagctaaacgcctgtcactggataaagaaaatgtggtacatacacaccatggaatactatgcagccataaaaaagaacgagatcatatcctttgcagggamatggatggagctggaggccattatccttagcaaattaatgcaggaacagaaagcaacaaccacatgttctcccttacaagtgggagctaaatgatgagaa

SEQ ID NO: 263412 - DNA, 201 bp, Homo sapiens
caggaaaaataatgaatatataataatcttcttttagtgaaaccagagttcagtcatttttagcatcttttaatgagaacctgattttttaatgatttttraagatttttccttcaaaaaatctaggtaaaggaaagcagttaatagtaaatttaatagttgcatttatttttttctgacttatgtttgtatttttttaat

SEQ ID NO: 263413 - DNA, 201 bp, Homo sapiens
aacataaattcatgtttccttaattcagtaggtatttattagaaatctatgaggtaccaacatctatgtgaagtcctggttataatgcaaagaagccagtytagtgaatagacaaatgaatttattaaattaaaatacaatgatatatgtcatgagatgttcaagagctatgggggtacagtagagaaatatctgaggagg

SEQ ID NO: 263414 - DNA, 201 bp, Homo sapiens
tttttcattaagttctgataatactgttgaaattgaccttgattattcatgtaaagggcctctcagacaacctataggtatgagaatagctttcagaattrtaatcatatttaggttatatttaagcagtgatgttacacacttcccaaaaagtaatttattgggacatttacataactctgtgtacttaaatttatctac

SEQ ID NO: 263415 - DNA, 201 bp, Homo sapiens
ggaactaagcaagttagattagagaagattctgtagaaccaagaatggaagactaagaaaaatgttatcctgctttattctcccttaagcaggtatcatttgcagtagcctccaaaacatcttacatataaatgcttttatctcaagaggaatcatgcaatactgcagatgactcagtaaaaatccatcacctctcctaca

SEQ ID NO: 263416 - DNA, 201 bp, Homo sapiens
aacaaaaaagaaaaaagatgaagaaaaatatgggaagagaaaggtaaggtgagatgaggagggcaaaagaaacagaatggagaagagagaaaagaatggargcaaaggaaagaagggagaatacagcaatctcctcctgaaatctgcctgtcccaagcataaagattaattgtaatattttaattacaaattagcttttcc

SEQ ID NO: 263417 - DNA, 201 bp, Homo sapiens
aggctaggagtaatgtagatgtgtattcttctcataacttagtaaaactcttttatcaaattggtcagtgcagcctgcagctggggacttctaaaaacatrttaccatgactagaaatttttatttcagtgcacttacttgacatctttctggttattattgaccaaaacacttgactcctgcctcttctttctttttatc

SEQ ID NO: 263418 - DNA, 201 bp, Homo sapiens
tatctcaataattttatctttagctacgtcctttaatttttttttttttttttttcctgagagtctcgctttctcacccaggctgggatgcagtgatgcartcttggctcactgcaacctctgcttcctgggttcaagtgattctcccacctcagcctccagagtacctgggattacaggtgcacgccaccatgcctggcc

SEQ ID NO: 263419 - DNA, 201 bp, Homo sapiens
ttctaagaaagcaaaaagctcatggtgcttttggaacatagtccagggagatttaacctaatccagagaagctcgggaaaaatttgtgccagactataagrtgagaccgtaaggttgagtcagagagggacagaaggggtttggagagaatgttattggagtgtaggaatagtatgttcaaaaactctgaagcgactataa

SEQ ID NO: 263420 - DNA, 201 bp, Homo sapiens
ttatttccttttaaaattatgcataaataattatttaaatttagcttcctactttttggacactactattggacaccaccacatctttttttctctggatkgatttttttttgttttactggagttgatcatttaataattcttagattgtatctgaaggtattaaactagcctgtttttgcatgactgaaaatgtatatt

SEQ ID NO: 263421 - DNA, 201 bp, Homo sapiens; identical to SEQ ID NO: 52485

SEQ ID NO: 263422 - DNA, 201 bp, Homo sapiens
caatttgccagtctgtgtcttttagttggagcatttagtccatttacatttaaagttaatagtgttatgtgtgaatttgatcctgtcattatgatgttagmtggttattttgctcgttagttgatgcagtttcttcctagtcttgatggtcgttacattttggcatgattttgcagcggctggtactggttgttcctttcc

SEQ ID NO: 263423 - DNA, 201 bp, Homo sapiens
gcaggatgtaatggccttctttgtctcttttgatctttgttggtttaaagtctgttttatccaagactaggattgcaacccctgcctttttttgttttccwtttgcttggtagatcttcctccatccttttattttgagcctatgtgtgtctctgcccgtgagatgggtttcctgaacacagcacactgatgggtcttgac

SEQ ID NO: 263424 - DNA, 201 bp, Homo sapiens
tatgtttttgtgtcatacatgatttttttattctaaattttaaaatctaaccttaattcagttatttaaattaagatacaagccttgctaaacagaatttktactgatacatgctacaacatggatacatctcgaaaatattatattaaatgaatgaaactggtcacaaaagaccacatatatgatcccatttaaaattga

SEQ ID NO: 263425 - DNA, 201 bp, Homo sapiens
caccagaacatatctgatggcttaatttgcactcaaagtaagtatataattagaaagttgaataaattaatgaaataaagatgtcatacttcacaaagttktatgtagaacatcagatcctaaatcataaggcataaactgctaatggccagatttgcttcaccatatgttaatgagcgtacaagtaatcactgtgcttat

SEQ ID NO: 263426 - DNA, 201 bp, Homo sapiens
ccaacaccctagcgtgttgctcgtaaatctatgttgaaaacaagtgaaattagtctcaatatccataaaatacaccatgttctgtataaatcaaagcaccrgaacatatctgatggcttaatttgcactcaaagtaagtatataattagaaagttgaataaattaatgaaataaagatgtcatacttcacaaagttgtatg

SEQ ID NO: 263427 - DNA, 201 bp, Homo sapiens
ggtgctccttttgcatttcttgtttccactctatgggatggaatagagagagtccagattttgaggagaagctgagatgtgtggggaagaggggcaggtasggagggagtgtctttcttaggccttaagaatgaaccatatgctcttacccaaccttaccaagctctgaaagataattgtcattttggttcccagttgcta

SEQ ID NO: 263428 - DNA, 201 bp, Homo sapiens
gtcattttgtaacctcagtttatttgtctctattggactcgtaagctcaaggaaaacaaagattgtacacattgtcttcatcattgctgtaaccccaacamcctagcgtgttgctcgtaaatctatgttgaaaacaagtgaaattagtctcaatatccataaaatacaccatgttctgtataaatcaaagcaccagaacat

SEQ ID NO: 263429 - DNA, 201 bp, Homo sapiens
tgccctatactttgcctgttagggcaaagtatgtcattttgtaacctcagtttatttgtctctattggactcgtaagctcaaggaaaacaaagattgtacmcattgtcttcatcattgctgtaaccccaacaccctagcgtgttgctcgtaaatctatgttgaaaacaagtgaaattagtctcaatatccataaaatacac

SEQ ID NO: 263430 - DNA, 201 bp, Homo sapiens
tattaaatttggggtcagtttaggctatacacagcacgtttgcctgtagcctaactaatatggtggcaacataattttattataattggccagtaatgtamaacatattttaaaatggagatttacattttatggcaaaatgcatataaatgttaaagaggaaatgggaaaccttaaaaaacagaacaaaacctttgtgct

SEQ ID NO: 263431 - DNA, 201 bp, Homo sapiens
gattgaaacccagatttggagctgagtcagctttgagcagacaagaatgctaatgcttaagaggtagggagcaacaagatggaaggaacctgggtccctgratatacttatagaacacagctgtctccatgcccttgacagaaataaaatatcttgtttgagttattaaatttggggtcagtttaggctatacacagcacg

SEQ ID NO: 263432 - DNA, 201 bp, Homo sapiens
aagactctatactgcatgattccaactatatgacattctagaagagacaaaactgtgaagagagtaaaaaagatcaggggttgggggtgggagatgagtakatggaacacagatgatttttagggctccagtaaataccatgtatgatactataatttattcaaactcacagaatttacaacaccaagagtgaaccctaat

SEQ ID NO: 263433 - DNA, 201 bp, Homo sapiens
gagttccaagttgaatcagttgctttcttgaacagttgaaaagctgtcatttaagcatttcaggtatttcattttcctgttacaatcctgggttagatttsctgttacttagctctcacctcttcatctattacagttttctccctcatttaattggagtatatcctcaaagatcttccacagaaaaggcatactggagat

SEQ ID NO: 263434 - DNA, 201 bp, Homo sapiens
cagatctgtgcctttcatatatatacttttaccacttattttttccatctgtgaaatgtgctgacacctactttaacaaactgatacaattgagaagagasagtgtgggctgctaataagaagctctcagtcaaaacatagtcaaaaacagagaacagattgataatgaatacttaattctttttaggagtgtttttggtc

SEQ ID NO: 263435 - DNA, 201 bp, Homo sapiens
ggtatgcataataggaaaaaacatagtatatataagggtcagtgctatcagcagtttcaggcatcctttggaggacttgaaatatatctcccacagataarggggaactatacataacagtttatgaaagtccttgacccttgtgaagtctgtattctagtagaggtctacagacaataaacaaaaaagtaaaacaactag

SEQ ID NO: 263436 - DNA, 201 bp, Homo sapiens
acccttaaaaggattcgtcaattccggctaaatggtgtgcctgaataaaatgtggcgcacggtagcatttataatatttattcattcaacaaatatttatygaacgcttacgattgggccaggcactatgctaggtatttatggttataatattcccccacttatttttggggttttacttttcatagttacctttggtta

SEQ ID NO: 263437 - DNA, 201 bp, Homo sapiens
aatgacatttaaatccaggcagtctgattgtaattctatgctcttacccttaaaaggattcgtcaattccggctaaatggtgtgcctgaataaaatgtggmgcacggtagcatttataatatttattcattcaacaaatatttatcgaacgcttacgattgggccaggcactatgctaggtatttatggttataatattcc

SEQ ID NO: 263438 - DNA, 201 bp, Homo sapiens
agttgcaggaagtatgaattactaaagactttacatatggtcagattgctgagtttcagtttcaaatattaaacactctttttcagacgttctcccatttsactctcatttcatatgagttcatattattttatgccccaggcccgaagtgtagataagtttactgctccattgtatactgtttatctgattcactctccc

SEQ ID NO: 263439 - DNA, 201 bp, Homo sapiens
tgttaagaagttagggaaggacacagagcataattgagatgaaattgtaacttcttactctcttcagtgatagtcaaatctaatttaagtctgttactctrttctcatgaaaacattctcaagagttgaagaaaataaatagtaaggcagtctgtatggaccttaacaaaacttagttttgactattggaattaaatttta

SEQ ID NO: 263440 - DNA, 201 bp, Homo sapiens
attatgtatgtatttatatatatatatacatatatatacacgcaagcacacatatacaggcatacttatgtgtttatatgtgtgtttatagatctttttcytaggaagataattatattttaaaagtcattgatggtagggatgatagcagaggaagttgtgaaatacaatctaagtaatattatagagcatacgttcagt

SEQ ID NO: 263441 - DNA, 201 bp, Homo sapiens
tattcaaattatattaaattgactcattgactcatctagttcagtgggaatatgattttagaagtagaataaagtctacttgtatttgtaaagttgacacwatgttttatgagggaatttaatgttcttttcaggaacatgaggctggacagaaagataatcttacaagaaattatctcagtttttcattttggccttttg

SEQ ID NO: 263442 - DNA, 201 bp, Homo sapiens
tctttttagtatgaattagaattattctggtcaacaattatagtttctgtacccattagggtatcaaagtcttatattcaaattatattaaattgactcaktgactcatctagttcagtgggaatatgattttagaagtagaataaagtctacttgtatttgtaaagttgacacaatgttttatgagggaatttaatgttc

SEQ ID NO: 263443 - DNA, 201 bp, Homo sapiens
aatctttttagtatgaattagaattattctggtcaacaattatagtttctgtacccattagggtatcaaagtcttatattcaaattatattaaattgactmattgactcatctagttcagtgggaatatgattttagaagtagaataaagtctacttgtatttgtaaagttgacacaatgttttatgagggaatttaatgt

SEQ ID NO: 263444 - DNA, 201 bp, Homo sapiens
agtctctactttttcttttttatactgtctttgtcaggtttgggtcataaggttatatgttaaattgttttggatacatagtcggagcccaggttattctwatcttgaaagtcagttatcaaagctgaagctttctatgatagacaattgggagataattttggttcttaagtagaagaaaccatattaaagtgtgttttt

SEQ ID NO: 263445 - DNA, 201 bp, Homo sapiens
gattagatatcagttctactaggaatcctttattgactccagaatgtaggtgtagtgtttgttctctgtgccctatactttgcctgttagggcaaagtatrtcattttgtaacctcagtttatttgtctctattggactcgtaagctcaaggaaaacaaagattgtacacattgtcttcatcattgctgtaaccccaacac

SEQ ID NO: 263446 - DNA, 201 bp, Homo sapiens
taaatggtgtgatttctccttgtgactttcacattttactttataggttatattgacttttagatttcaggtagtaaaataaaaaatcttatgcagttcamgttagaaaaattggattagtccaagtgatattttcacctggtattttttttcaggcatttcaatgttactttttattacatttataaaattatatgtttt

SEQ ID NO: 263447 - DNA, 201 bp, Homo sapiens
cattgacaagactccatcaactgaaacttttaggtcatactttagtcgttgaatttgcaaaagagcaagatcgagttcactccccatgtcccacttcaggytctgaaaaaaaaaaaaggtatgtagatcagtagatcatacatttttgttacatttttaaagtgtgtgttttttttaatcagttatacagttattgtattg

SEQ ID NO: 263448 - DNA, 201 bp, Homo sapiens
ctgaaattttattttacaggacattttctttaactttgcaaactggtcttcctgctggcacatactgtgatgtcatttctggagataaaattaatggcaaytgcacaggcattaaaatctacgtttctgacgatggcaaagctcatttttctattagtaactctgctgaggatccatttattgcaattcatgctgaatcta

SEQ ID NO: 263449 - DNA, 201 bp, Homo sapiens
agtagtcctttaataagtaataaaggcttgatagcctgagattaaaaataaattaggaaatagtcaaggaactgtttacagcattagcaaaaaaaaaaaaagtataaaaattggtctctaacgaatcatttttggtacaattgtgaaatgtttactcttgttcttttaactgaaggcattgacaagactccatcaactgaa

SEQ ID NO: 263450 - DNA, 201 bp, Homo sapiens
cgactggtaagggcgcgcccctccggagtctcccgggaaggcatttgggaagtgaccggggagggggagcgctgacaagagtaaaatggaaacgagtgggraagatggacttgtgtgatgagagctcccccatcctacctcttttttatcaaaatatctgctctgcgaagtggagttttaatcggctcgagtctggattag

SEQ ID NO: 263451 - DNA, 201 bp, Homo sapiens
acatgcaagggatctaggttgcgctctcaatgagaatctgactaatgccttatgatccgagatgaatcagtttcatctcgaaaccatcttctccccacccsccaccccagcctgtggaaaaattgtcttgcacaaaaccggtctctggttaaggcttgtactttcatgtgttcaaaaatattaagtacctactatgtgcta

SEQ ID NO: 263452 - DNA, 201 bp, Homo sapiens
cctagatcagctgtatcatctgtaaacttgatcaaaatacagaaccttgagctttaacccagtcttactgaatcagaaacttaactgagggatggaagggrtgggaaaatgttgtagaagtctatgagttttaataaactctccaagtgattatgacacacattaaagacatttgattaccactgttttataccatgtaaa

SEQ ID NO: 263453 - DNA, 201 bp, Homo sapiens
ttaaagtctttttgccatgaaacaatagaaatgacccaaattctcatcggtaaaaggaagggaagccttaaatcacattatatccatatactggactgcarctgtctgagaatgatgtcaaatggtatgtgttaatatggaatgatagcccagatagagtacatgaataaagttgtgaaacattatatatgatgtaacctc

SEQ ID NO: 263454 - DNA, 201 bp, Homo sapiens
atccagaggatgtttgcaaaggcataggatgaattcacttgtcatctgttaacttggaggggtcattgggctacttttatggaaatatttaaaaatattartgagagctgaggcaaggtgaagaatggaaagattcttcaaccatgtgaatagatatgtttgcccaaaggataataagctaggagagaagaatgggaagga

SEQ ID NO: 263455 - DNA, 201 bp, Homo sapiens
ataatcaaggcttcactgataataaagaggtctaaagttcatttagggtcttgaaaattattgaaacattttaaaattaactttgtatgatgatgtaaggyagggatcctcaaaccctgggacacagactggtacccagccacggcctggtacctaaccaccacctgttagaacctgggccgcacagcaggaggtgactgg

SEQ ID NO: 263456 - DNA, 201 bp, Homo sapiens
aaacagttgaattgtctctgtccaaagccaactgatactcatacttagctcattctagtataaattatatttcactgatgaaaaataaataaatacataartacataaatctagttgatctctttcctgccaaaaaagcccatgtctagttctttaatttctttcttttgtggatgaaaataccaaaataaatttttgtga

SEQ ID NO: 263457 - DNA, 201 bp, Homo sapiens
taatgattggcttcaggggatttgagttttagttccgaaacttctcattattggcctttcatctgtgattcttatatcctttactgaagtataaatgattrcctaacctatagctcagaagacctcgttgcaaacagttgaattgtctctgtccaaagccaactgatactcatacttagctcattctagtataaattatat

SEQ ID NO: 263458 - DNA, 201 bp, Homo sapiens
gacctgaggagttcaagacctatctgggcaagctagcaagacctcgtctttactgaaaattttttaaaaattagctggttgcggtggtgcacaccaacagycttagctacttaggaggctgagataggaggatcgcttgagcctgggagatcaaggctgcagtgagctatgattatgccactgtactccagcctgggtgac

SEQ ID NO: 263459 - DNA, 201 bp, Homo sapiens
agtccaggcgagaagatcagctgacctgaggagttcaagacctatctgggcaagctagcaagacctcgtctttactgaaaattttttaaaaattagctggktgcggtggtgcacaccaacagtcttagctacttaggaggctgagataggaggatcgcttgagcctgggagatcaaggctgcagtgagctatgattatgcc

SEQ ID NO: 263460 - DNA, 201 bp, Homo sapiens
cagagaaattatgtatgttgattaaattttcttagctactgttaatagagcctatgttttaatcctggtgtttctggtactaatgcccttcccatttcaaygacattgcatggcttacagtgatgttaagaagcccttgcaggccaggtgctgtggctcacacctgtaatcccagcacttggcgagtccaggcgagaagat

SEQ ID NO: 263461 - DNA, 201 bp, Homo sapiens
tttaatgatggtaatgatattctgatattctgtgataatataattatgtaactttcaggctgtataaaatggcagttggatttatgcttgctcatccttayggttttacacgagtaatgtcaagctaccgttggccaagacagtttcaaaatggaaacgtaagttttgaaattgttcaaactatccttttctcaagaaaca

SEQ ID NO: 263462 - DNA, 201 bp, Homo sapiens
gaaaaatgaggttttatgaatcaatcataacatttttacctcaacaggtcagagattgtcgtctggttggtcttcttgatcttgcactggagaaagattaygtgcgttccaagattgccgaatatatgaatcatctcattgacattggtgttgcagggttcagacttgatgcttccaagcacatgtggcctggagacataa

SEQ ID NO: 263463 - DNA, 201 bp, Homo sapiens
gacatgtagctaattgaacttcattttaaatacgaatttagatctcttagggacacaggttaacaggtttgactactttaagaaactcaaatccatatttraaaacttaaatatagatttaagatttttaatcaatacacatttgcccacttttaaaaagctcccaaccaattaaaaagctcgtcgactttatttcctaaa

SEQ ID NO: 263464 - DNA, 201 bp, Homo sapiens
aagaagcctttgcagttccttggaatgaaaaggagaggataacaatttgttacctttgtttgaaatatggcaaaagagaaccagaggatagagagatgatraagacccagtaaagggctataaaaattattgaaggcattggattctagataaagtcattgaatgcagagacacaagtaacaggataggttgggtttggtt

SEQ ID NO: 263465 - DNA, 201 bp, Homo sapiens
atctgaataaggggtgatatatgccttttcttgtagacatgtagctaattgaacttcattttaaatacgaatttagatctcttagggacacaggttaacargtttgactactttaagaaactcaaatccatatttaaaaacttaaatatagatttaagatttttaatcaatacacatttgcccacttttaaaaagctccca

SEQ ID NO: 263466 - DNA, 201 bp, Homo sapiens
ggattttaatgatggtaaatgtaaaactggaagtggagatatcgagaactacaatgatgctactcaggtaaatttttttatgagagtcatctgaataaggrgtgatatatgccttttcttgtagacatgtagctaattgaacttcattttaaatacgaatttagatctcttagggacacaggttaacaggtttgactactt

SEQ ID NO: 263467 - DNA, 201 bp, Homo sapiens
atttatgtggatgctgtaattaatcatatgtctggtaatgctgtgagtgcaggaacaagcagtacctgtggaagttacttcaaccctggaagtagggactytccagcagtcccatattctggatgggattttaatgatggtaaatgtaaaactggaagtggagatatcgagaactacaatgatgctactcaggtaaatttt

SEQ ID NO: 263468 - DNA, 201 bp, Homo sapiens
ttaatcacacttaaattacttccaaagatatttataaggcatctaggctaagaactacgaatgacattaatagataacttgtcttttttttttttttttttgtcaatgttaattcatttgcatgttaaaaaactataatatctggtataaatgtgaggctactttggatagggggaaagaacttgtaaataactgatagtt

SEQ ID NO: 263469 - DNA, 201 bp, Homo sapiens
gagaaggcacaagtcaaagagatggaggagtacaaaccagcgagctaggaagaaaactaagaatgtatgaagtcttgaagccaagtgaatgacatgtatcmaggaaggagtgattaactatgttaaatgcaaccaagtgaagactaggagttgatcattagcccaacaatgcaaaatttgttgtctatgataagcagtctc

SEQ ID NO: 263470 - DNA, 201 bp, Homo sapiens
gtcatactttagtcgttgaatttgcaaaagagcaagatcgagttcactccccatgtcccacttcaggttctgaaaaaaaaaaaaggtatgtagatcagtaratcatacatttttgttacatttttaaagtgtgtgttttttttaatcagttatacagttattgtattgttttcagactagcaagtaattggaagaggaatg

SEQ ID NO: 263471 - DNA, 201 bp, Homo sapiens
gcgcgcacacacacacacacacacacatacatacatacatacatacacacaaaacattgaataagcatcaggaaatatataccctgtacccaacatgcacraggtctaagcaatgaagaaaaagccaggatatcaagtaagactggaacatctgtgactaatatataaagacttgaggtggttgtatctatttaaaaggtt

SEQ ID NO: 263472 - DNA, 201 bp, Homo sapiens
taatagtactaagtatagtatactaagtatagtataatagtactaagtatatagtacttagtgattataagttttaggatgtgaggatgggagtagcatakaggcaaggtgatggaaggagatgaattcaagaaattgggaacctaggagattgaaagcattatctaaatgaattttgaaatctcaacaagaactgtgctg

SEQ ID NO: 263473 - DNA, 201 bp, Homo sapiens
ggtgttgtagcaacctctgatgtacattgaaaataaggaacgggtataaagtaatatgatgataatagtagaactgagaactgttaagtgagtaaaagccrgaatatgaaagaaatgcttttgtcaataaaggctatcatttcatccagtgttgttaagttttttgagccaaaacattgtgccatcctataaggtagttat

SEQ ID NO: 263474 - DNA, 201 bp, Homo sapiens
gttatacttcctatttttaatgggcttttatgatgttttaggtttttttgaatcccgtgtccttcaagtgctttctaactttgagaggaagaaattgaccmcctggactatggaactgtgcgtaacagctttgaaagtgtatttaaaaattaaatctatatgcctttaaatcagtgaattggaaacatattacatgtattt

SEQ ID NO: 263475 - DNA, 201 bp, Homo sapiens
gggtaaaggaagaagagacaaattttgtcatcagctagtgatctgccatacaaggtgttcccttaatatgtgtagaatgtgttaaaaaaaaaaaaagaccwtgtgatagaaatgagaatgaagtattcagatggagtttgttctataaatattttggactgccatagtatttttgttttattcttttaattagtatgaaga

SEQ ID NO: 263476 - DNA, 201 bp, Homo sapiens
cctatagctcagaagacctcgttgcaaacagttgaattgtctctgtccaaagccaactgatactcatacttagctcattctagtataaattatatttcackgatgaaaaataaataaatacataaatacataaatctagttgatctctttcctgccaaaaaagcccatgtctagttctttaatttctttcttttgtggatg

SEQ ID NO: 263477 - DNA, 201 bp, Homo sapiens
aagtcacactgaagtagaaactttgctttctaggttcgtatttatgtggatgctgtaattaatcatatgtctggtaatgctgtgagtgcaggaacaagcastacctgtggaagttacttcaaccctggaagtagggactttccagcagtcccatattctggatgggattttaatgatggtaaatgtaaaactggaagtgga

SEQ ID NO: 263478 - DNA, 201 bp, Homo sapiens
ttagaatatgaataaaaatgatttaagaacattaatattatatcgattttattattgtatcttgttcagccgtttggcatgaagtccagccattttatttyggcaactgcttatgatgaaacatacattttaaaaattgataatatgtaattaagtctatttttaattttttctaagtaagatgaaagctaagcaaggcaa

SEQ ID NO: 263479 - DNA, 201 bp, Homo sapiens
caagtatccttttcatagtctgttcagcactaccttttttcacatttttgagtttttttgttgtgactcttgtgtttaaaatggcccttgagcatggtgtygaagtgctctttagtgttcctgagctcaagaacgctatgtcaagcctgatggagaaaatacatggctttccttcaggccagagttacgatagtattgact

SEQ ID NO: 263480 - DNA, 201 bp, Homo sapiens
tcagaatatgaaagcactgatgatgaggaccgacagaggtttgtaacatgaaaaatttgtttagtttccaagaaacatagaatgtaagaaagagactcttsctctccctagattttgtgtgtataatacttaatagtttggggtgattagaatttgtcctcagccccccagcacctcaggcatatatagcagctataaatt

SEQ ID NO: 263481 - DNA, 201 bp, Homo sapiens
tgccttctgacagagcacttgtctttgtggataaccatgacaatcaacgaggacatggggctggaggagcctctattcttaccttctgggatgctaggtaraaaaccaagttctctattttttttaacacatcttttaatgatggtaatgatattctgatattctgtgataatataattatgtaactttcaggctgtataa

SEQ ID NO: 263482 - DNA, 201 bp, Homo sapiens
ctggtaatgctgtgagtgcaggaacaagcagtacctgtggaagttacttcaaccctggaagtagggactttccagcagtcccatattctggatgggatttyaatgatggtaaatgtaaaactggaagtggagatatcgagaactacaatgatgctactcaggtaaatttttttatgagagtcatctgaataaggggtgata

SEQ ID NO: 263483 - DNA, 201 bp, Homo sapiens
acacggtgctatctggtggcaacatgtacccaggcatcaccgacaggatgcagaaggagatcaccacccgggcacctagcaccatgaagatcaagatgatygcatccccagagcacaagtactccgtgtggatcagcggctccatcctggcctcactgtcagccttccagcagatgtggattagcaagcaatagtacaatg

SEQ ID NO: 263484 - DNA, 201 bp, Homo sapiens
gccctgtatcactatctagtcagtcttctatttaaattctgatactcacccgtatccagttagtttgttgtactccctgcaaattttccttccctatttgyttttaaaaatcatctcgggtaataaaactccctttgctactttgaaggcacctctttattatctccttcctactccctgtaccccatcatttataaagct

SEQ ID NO: 263485 - DNA, 201 bp, Homo sapiens
ataaagtcattgaatgcagagacacaagtaacaggataggttgggtttggtttaaaggagaaggaagaggtaaatatatgtatgttaaaatttggcttttyaccccctaattaaggatgttaatgattgggttgggccaccaaataataatggagtaattaaagaagttactattaatccagacactacttgtggcaatga

SEQ ID NO: 263486 - DNA, 201 bp, Homo sapiens
taaagtcattgaatgcagagacacaagtaacaggataggttgggtttggtttaaaggagaaggaagaggtaaatatatgtatgttaaaatttggcttttcmccccctaattaaggatgttaatgattgggttgggccaccaaataataatggagtaattaaagaagttactattaatccagacactacttgtggcaatgac

SEQ ID NO: 263487 - DNA, 201 bp, Homo sapiens
gggcaagctagcaagacctcgtctttactgaaaattttttaaaaattagctggttgcggtggtgcacaccaacagtcttagctacttaggaggctgagatrggaggatcgcttgagcctgggagatcaaggctgcagtgagctatgattatgccactgtactccagcctgggtgacagagcaaagaagcctttgcagttcc

SEQ ID NO: 263488 - DNA, 201 bp, Homo sapiens
agtatcctgaccctgaagtacccccattaagcatggtatcatgaccaactgggatgacatagagaagatctggcatcacaccttctacaagggactgcacrtggccttggaggagcacctggtgctgctgaccgaggaccccctgaacctcaaggccaacagagagaagatgactcagatcatgtttgataccttcaacac

SEQ ID NO: 263489 - DNA, 201 bp, Homo sapiens
aactatcacacttccctaattttcattcttactgctgtaatcctaattcagatttctgtcactgctctgcttactaatgttcctatctctttgttttctgrtccatctgatataattaaaagtttttattattactttcctgtttaaaacaaccaaaaaaccttctgaggtaagtacttttttcttctccctgattttgag

SEQ ID NO: 263490 - DNA, 201 bp, Homo sapiens
tctgatatcagcactggattgtagaacttgttcctgattttgacattgtattcaagttaactgttccccttggtatctgtacatatctttgatttcagtcyttagtacatgtggcttggtcacttcatggctaaaaacgtacttgtggaagacaagtctggcttggtgagtctgcatggccagcagtctctgatctgtgca

SEQ ID NO: 263491 - DNA, 201 bp, Homo sapiens
tatatatataaatacagtccttatgtgtttaaatatatatttactgtccttatttatgtgggtttgtgtgtgtgtgtgtgtgtgtgtgtgtgtgtgtgtgkacactgccagaggtttaaaaaggttaagattttatcagtaagaaaaaaccagtcacctctgccagcccatgcaccatgttgtcctgccgctccactgtcc

SEQ ID NO: 263492 - DNA, 201 bp, Homo sapiens
tacagaaaggattcagtgaaggttacttttagttaattttagttcccttcccatttattggtgtttgcttgagaaatacttgaaagtttttttttttttttaatgaagctgtttttataatgacatgtttgaaaaggtaatttatcttttctgtgtgcagtttttcaccctttggaaagataagattaactttgattctgt

SEQ ID NO: 263493 - DNA, 201 bp, Homo sapiens
cagctctcctgatacccttcgtcaaagctggtacttcctcattttgtctcatgttaaaaaatggtatcatccccaaatacctatatctttaatatttttcctcatccttcagctctaatctattcataaatctactgcctgtttacctctgaaatataccttgtctatgccctagtccaagccactcacctctttcctgga

SEQ ID NO: 263494 - DNA, 201 bp, Homo sapiens
ggaaacaaaaccactaggaaattcatgaaggtatgatatttcatataaaatatgaggaacttctagttttgcaatgaacagagttcacaggattggctggsggaaggaccaaagggcagcatcaggatcgacagtggaatagttaagatccacagctctcctgatacccttcgtcaaagctggtacttcctcattttgtct

SEQ ID NO: 263495 - DNA, 201 bp, Homo sapiens
atgtcatttctggagataaaattaatggcaattgcacaggcattaaaatctacgtttctgacgatggcaaagctcatttttctattagtaactctgctgargatccatttattgcaattcatgctgaatctaaattataaaatttaaaattaaatgcatatcctcaaaacaatagccaagtgtgtttcttttcttacatat

SEQ ID NO: 263496 - DNA, 201 bp, Homo sapiens; identical to SEQ ID NO: 52502

SEQ ID NO: 263497 - DNA, 201 bp, Homo sapiens
aaccattttactgtggtattaattttgccttagatctttgtccaatactaataaagcctcactgtctttcctttggttagaatttacatcatttatttggytctagctttacctttaccttttttctatctgtttttaaaaaatctgtctaaaaatgcatttagcagaaacatttaatcaatttacattgaatttttttta

SEQ ID NO: 263498 - DNA, 201 bp, Homo sapiens
ttcactccccatgtcccacttcaggttctgaaaaaaaaaaaaggtatgtagatcagtagatcatacatttttgttacatttttaaagtgtgtgtttttttwaatcagttatacagttattgtattgttttcagactagcaagtaattggaagaggaatgacagatttttccattaaacctagtacagtaaaacagtatgtt

SEQ ID NO: 263499 - DNA, 201 bp, Homo sapiens; identical to SEQ ID NO: 52503

SEQ ID NO: 263500 - DNA, 201 bp, Homo sapiens
agtattctgatcttatccgtgaagcttaggcaacattttacttcacaggtaagtattctaagtaagagttttctgaggaaaaaacaatgtagtattcttgrcaactttatattttgtttctgagataatctttcttcaacaagagccctccaatgtgctgttaatattttcaagagatagctgcatataccaagattcaag

SEQ ID NO: 263501 - DNA, 201 bp, Homo sapiens
ttagttatttttaaactaatgacctgtgttatacttcctatttttaatgggcttttatgatgttttaggtttttttgaatcccgtgtccttcaagtgcttkctaactttgagaggaagaaattgaccacctggactatggaactgtgcgtaacagctttgaaagtgtatttaaaaattaaatctatatgcctttaaatcag

SEQ ID NO: 263502 - DNA, 201 bp, Homo sapiens; identical to SEQ ID NO: 52505

SEQ ID NO: 263503 - DNA, 201 bp, Homo sapiens
aatgatggtaatgatattctgatattctgtgataatataattatgtaactttcaggctgtataaaatggcagttggatttatgcttgctcatccttatggwtttacacgagtaatgtcaagctaccgttggccaagacagtttcaaaatggaaacgtaagttttgaaattgttcaaactatccttttctcaagaaacagaa

SEQ ID NO: 263504 - DNA, 201 bp, Homo sapiens
acaactatcaaggagtcaattgttaatgataagtattctagtgccctaaactctaatcaatcatcttttgtatttagagtgtctatcacaagtgagtatgyctaggaacgctaaacatatcctaggagtttccgtctaagtacgagatgaatatactggatttgactgatgtttgcatataatcttttaaagccaggttat

SEQ ID NO: 263505 - DNA, 201 bp, Homo sapiens
aaatgctttaaagtccttatgcaaaatgttactttttcctaattttctactaggtaattgatctgggtggtgagccaattaaaagcagtgactactttggwaatggccgggtgacagaattcaagtatggtgcaaaactcggcacagttattcgcaagtggaatggagagaagatgtcttacctaaagtaaataaatacaa

SEQ ID NO: 263506 - DNA, 201 bp, Homo sapiens
aaatcatgtagtcagtggagcaagaagacaatagacatcaaaattgggcagaagtaaaaagatgatggctgttactccttcattctcctgttttattaagkgctttctgttgtaagcagagtcctttctgtgcacccttgcaatatcttatgcatatattgaatgcacatacatatgctcacctacacatgccacaaaata

SEQ ID NO: 263507 - DNA, 201 bp, Homo sapiens
ctcttagttatttttaaactaatgacctgtgttatacttcctatttttaatgggcttttatgatgttttaggtttttttgaatcccgtgtccttcaagtgytttctaactttgagaggaagaaattgaccacctggactatggaactgtgcgtaacagctttgaaagtgtatttaaaaattaaatctatatgcctttaaat

SEQ ID NO: 263508 - DNA, 201 bp, Homo sapiens
gtcggtcacccttgttggcacctgaaaatttgcgagattaatgaggtttcaggtaatgatgaggcatcttatccagagaccacagcttgaaaactcctggrataaacacttacagatacattttctaactcttaaaattaacctaaagtaaatgttaaaataaaagttaaaaaaaaaaagtcaaactgtcattaaaaataa

SEQ ID NO: 263509 - DNA, 201 bp, Homo sapiens
tcatatctgaaaaatcatgtagtcagtggagcaagaagacaatagacatcaaaattgggcagaagtaaaaagatgatggctgttactccttcattctcctkttttattaagggctttctgttgtaagcagagtcctttctgtgcacccttgcaatatcttatgcatatattgaatgcacatacatatgctcacctacacat

SEQ ID NO: 263510 - DNA, 201 bp, Homo sapiens
acaagtaacaggataggttgggtttggtttaaaggagaaggaagaggtaaatatatgtatgttaaaatttggcttttcaccccctaattaaggatgttaaygattgggttgggccaccaaataataatggagtaattaaagaagttactattaatccagacactacttgtggcaatgactgggtctgtgaacatcgatggc

SEQ ID NO: 263511 - DNA, 201 bp, Homo sapiens
ttactcgcaaactattgtgaaatgatacatcaacatatatcttatttttcaaaaataggaactggggagaaggttggggtttcatgccttctgacagagcrcttgtctttgtggataaccatgacaatcaacgaggacatggggctggaggagcctctattcttaccttctgggatgctaggtagaaaaccaagttctcta

SEQ ID NO: 263512 - DNA, 201 bp, Homo sapiens
cagacactacttgtggcaatgactgggtctgtgaacatcgatggcgccaaataaggtgagaatatgtatttagacatgtcctctaatagtaaactttccaytgcattttatttaaaacagttgaagtttaagaatatcaacgttttatatggtattgtgtttttaggaacatggttaatttccgcaatgtagtggatggcc

SEQ ID NO: 263513 - DNA, 201 bp, Homo sapiens
tatcatatctgaaaaatcatgtagtcagtggagcaagaagacaatagacatcaaaattgggcagaagtaaaaagatgatggctgttactccttcattctcytgttttattaagggctttctgttgtaagcagagtcctttctgtgcacccttgcaatatcttatgcatatattgaatgcacatacatatgctcacctacac

SEQ ID NO: 263514 - DNA, 201 bp, Homo sapiens
ggagcaaccaagtggcttttgggagaggaaacagaggattcattgttttcaacaatgatgactggtaagtacatatcaattaaaaataatattttgtaccwgtatgctcttggtttattcctttttttctgttcattgacatttatcatatctgaaaaatcatgtagtcagtggagcaagaagacaatagacatcaaaatt

SEQ ID NO: 263515 - DNA, 201 bp, Homo sapiens
gtcctctaatagtaaactttccattgcattttatttaaaacagttgaagtttaagaatatcaacgttttatatggtattgtgtttttaggaacatggttawtttccgcaatgtagtggatggccagccttttacaaactggtatgataatgggagcaaccaagtggcttttgggagaggaaacagaggattcattgttttc

SEQ ID NO: 263516 - DNA, 201 bp, Homo sapiens
atctgcccacagtaagaacaatataaatgttcgttaaatatttttaaaaagttatatggaatacaaaaaaatgattcagttgagctgagttaaatagggaraagtatctaataagaggaaggaaattatatgtactaaagaatggaaatttagagagtattccaagaaaggtaagaatgagaaaaatatttgggagtatgg

SEQ ID NO: 263517 - DNA, 201 bp, Homo sapiens
actacttgtggcaatgactgggtctgtgaacatcgatggcgccaaataaggtgagaatatgtatttagacatgtcctctaatagtaaactttccattgcaytttatttaaaacagttgaagtttaagaatatcaacgttttatatggtattgtgtttttaggaacatggttaatttccgcaatgtagtggatggccagcct

SEQ ID NO: 263518 - DNA, 201 bp, Homo sapiens
taaatttttcttatctcatggctagtcaccctttaacaaaattttttttttttactatttggacctttatagaaaatgtttgtgtatgcctcttttagtayattgagaaacaccaaagaattttagtgccagaagatatattattgaatataaaataggaggtggggacccaaaaactatttttaaaggagagattcttaa

SEQ ID NO: 263519 - DNA, 201 bp, Homo sapiens
atctaataagaggaaggaaattatatgtactaaagaatggaaatttagagagtattccaagaaaggtaagaatgagaaaaatatttgggagtatggtaaasacatttatctgatgagtagtttcaaaaaggaacagagaaataagagtgtacagatatttggaaagctagtagaaggttttctttaaactaaagggttcag

SEQ ID NO: 263520 - DNA, 201 bp, Homo sapiens
taaactaaagggttcagaaacagcatcagagacttcagatctaaagcagaaattcctccttcctctgagtcacacagatatctagctagctttttttagaytcctttcagtttgagaagtctgttactttgtatagcaactgattctattgttaaacagctttaatatttaggtgtacttttatattgagccaacttatca

SEQ ID NO: 263521 - DNA, 201 bp, Homo sapiens
agaaggaagaggtaaatatatgtatgttaaaatttggcttttcaccccctaattaaggatgttaatgattgggttgggccaccaaataataatggagtaaytaaagaagttactattaatccagacactacttgtggcaatgactgggtctgtgaacatcgatggcgccaaataaggtgagaatatgtatttagacatgtc

SEQ ID NO: 263522 - DNA, 201 bp, Homo sapiens
tgtaaggaacttaaaaaattgagataaatagtaatttaagaagtttgcagccagtgcggtggtccacgcctgtaatcccagcactttgggaggccgaggcrggcagatcacgaggtcacgaggtcaggagatcgagaccatcctgactaacacggtgaaaccccatctctactaaaaatacaaaaaattagccaggcgtgg

SEQ ID NO: 263523 - DNA, 201 bp, Homo sapiens
atacaatcttcaattatattttgtttttatctattacaaatttaccactattttaatcccatcattttccttttagagataaaaattatatgaaaaagttsgtctattctgttgcacaattaatcttttagatgtctagaataggagttggcaaactttttctgtaaatgggcagatagtaaaaatttaatatttttattt

SEQ ID NO: 263524 - DNA, 201 bp, Homo sapiens
taagaatgagaaaaatatttgggagtatggtaaagacatttatctgatgagtagtttcaaaaaggaacagagaaataagagtgtacagatatttggaaagmtagtagaaggttttctttaaactaaagggttcagaaacagcatcagagacttcagatctaaagcagaaattcctccttcctctgagtcacacagatatct

SEQ ID NO: 263525 - DNA, 201 bp, Homo sapiens
ataaaaattattgaaggcattggattctagataaagtcattgaatgcagagacacaagtaacaggataggttgggtttggtttaaaggagaaggaagaggyaaatatatgtatgttaaaatttggcttttcaccccctaattaaggatgttaatgattgggttgggccaccaaataataatggagtaattaaagaagttac

SEQ ID NO: 263526 - DNA, 201 bp, Homo sapiens
tttggaaagctagtagaaggttttctttaaactaaagggttcagaaacagcatcagagacttcagatctaaagcagaaattcctccttcctctgagtcacrcagatatctagctagctttttttagattcctttcagtttgagaagtctgttactttgtatagcaactgattctattgttaaacagctttaatatttaggt

SEQ ID NO: 263527 - DNA, 201 bp, Homo sapiens
tcaagacctatctgggcaagctagcaagacctcgtctttactgaaaattttttaaaaattagctggttgcggtggtgcacaccaacagtcttagctacttrggaggctgagataggaggatcgcttgagcctgggagatcaaggctgcagtgagctatgattatgccactgtactccagcctgggtgacagagcaaagaag

SEQ ID NO: 263528 - DNA, 201 bp, Homo sapiens
taaagcagaaattcctccttcctctgagtcacacagatatctagctagctttttttagattcctttcagtttgagaagtctgttactttgtatagcaactkattctattgttaaacagctttaatatttaggtgtacttttatattgagccaacttatcatgatttctactaattggtcttatttctgatgttaagggtca

SEQ ID NO: 263529 - DNA, 201 bp, Homo sapiens
tgtcacgttcaaggcattttcacatatattacttaatttttatagcaaaaaaacaatattcccattttacaaatgaggaaactgagacacagagaaattawgtatgttgattaaattttcttagctactgttaatagagcctatgttttaatcctggtgtttctggtactaatgcccttcccatttcaatgacattgcatg

SEQ ID NO: 263530 - DNA, 201 bp, Homo sapiens
acatactgcatattttaggttaaatgatacaacgtttggcattagcattaaaatatttaatcaaaaaagtacaggagataaatgaaacactctttggaaartgataattgccaaaccaagagattggtatgtaaaaatattttatgctctctacttatgcatgcttgaacattttcatattaaatttcttaaaaatgaaat

SEQ ID NO: 263531 - DNA, 201 bp, Homo sapiens
ctaaagggagctgggggaaaggaagacacaaagtgttggttttctcatctttgaactgagccttagagatgcccacatgccaggaagaaaccaacaaaacwcagaaaagcaaaaaccaggagaaatctctaggaagatagaatctgggacccaggagtggtaggaaatggcagccaagagcacaagaaagtcaggcactat

SEQ ID NO: 263532 - DNA, 201 bp, Homo sapiens
aaaacaacctgaaaggtttttttctaattattcatttaacaactgataaaacatctctctagtagaaagaatatgcacctagtggaatttctccttatctrcaattaaagtcaccctccattgctaaacaatgtaaccaagattctgcaatactaagtagactcttcagattcaaaggacccatttgaaaaattaaattct

SEQ ID NO: 263533 - DNA, 201 bp, Homo sapiens
aaacacaaaaccagtatgatggtttgctaaccaacagcagtacagttaaaagcagtttgcttcctctgggcagattttgaccaacattatcacaatgaccktagcctataacggaaagtgatcagcttcccccaaagcagccgcccaactacctgctcaggctattaatctcttttcattacctacatttttaatctactt

SEQ ID NO: 263534 - DNA, 201 bp, Homo sapiens
tcttatagatagatcaaaggaagaagctattctacaaagtcacaatattgaaaataaaagaaaactgagaaagaatatgatggtgcctttaagtgtttcaytttccagttaagtatgacattctttaggggatcatgtaattatcaagccaggcagtgtctccaggctattgtgaatctttttgcactcaggcctgaactg

SEQ ID NO: 263535 - DNA, 201 bp, Homo sapiens
agataacactccacattggacatttagatgtttttctggtagaagagtaattcaagttaattcatttaactatagtaaattagccagggttggtagctttycaaaattagaatcaatttcagattatattacaagtaaaattcttgattccttcttggagcattgttgggagatatttggaggtggctattctaaggaaaa

SEQ ID NO: 263536 - DNA, 201 bp, Homo sapiens
cccaagtccccaaagtccattgtatcattttatgcctttgagtcctcatagcttagatcccactaataagtgaaaattacaatatttggttttccattccycagttacttcacttagaataatgggctccaattccatccaggttgctgcaaatgccattatttcattcctttttatggctgagtagtattccatggtgtg

SEQ ID NO: 263537 - DNA, 201 bp, Homo sapiens
atacatatataacagttgcagggtagaaagaactagcacagtgcttcctgtgttttgccgccgcttacatagtgaatctcttctctttagtatgctaagcycaatgatgcactttcctaatatatacagtgacaatagtgaatttacagaaaataaaattattattcactctgcttgctgcctccactgttgaaagatagt

SEQ ID NO: 263538 - DNA, 201 bp, Homo sapiens
ctttataccctgcggggctgtgggagtccccactaccgaagagcagcctgagtactgagtgtgggttgtgaacactatggggtgataaagagtccctttcytatgttcctgctcagccactgggtgacgtgaccttgtgcaaatccaccccactctaaatctgttctctttacctgtaacagaaggattatgtacagatca

SEQ ID NO: 263539 - DNA, 201 bp, Homo sapiens
aacaagtgaaactccgtctcaaaaataaataattaattaattaatttaaaaaattaaaaagttaaaaaaatcaactgagcctcctgttttacattcccctygagtcctgttttatattttcctagcaaggggttatttgtacagtatctggctccccttccaaactataagctccctgaaggcaaggataattctgttttc

SEQ ID NO: 263540 - DNA, 201 bp, Homo sapiens
cctcctaatatcctttttcataaagggaagacagcaacaaagagtataacaaacaaaattatgcaaagaagctcatggtaatcagtggctcttagaatcarggaatcttgtgccaatgatcttgcctacttcatattgtttttgcttctgaagccaactgttacaaattctgactcagtcacctggcagtagtgatgatgt

SEQ ID NO: 263541 - DNA, 201 bp, Homo sapiens
gtttttcaccgcccccctcctccccagccaaagactgtttcttccacttatcccattgagggttggtccctaaatctttcctcccagcctctatcaaatckgagatttgagctgtggtctcattcaagccctagtagctttcatgactctcttttttctgatacagatgatttctagatacaaagtaattagcaaatgaac

SEQ ID NO: 263542 - DNA, 201 bp, Homo sapiens
ttccacttagttaaatggtgatcagcccaaggtagacagtcataaccttaatggccagagcagggggtgggaaacaggtccaatccacagggggaaaaaawaacataattataataaatagtgaataaaaataaagtcccaggtttataaaaggttgtgacgtagttctgctcatttgggaaaatttattcataagtttct

SEQ ID NO: 263543 - DNA, 201 bp, Homo sapiens
tctcccactggagaaatcgagggccaaggggaaggagtgatgtggataaagtgaagctgttcttcttatcctcttcaatcatctatctattctcagatttkttgctccagtcatgtgctggaacttctctactggactcccagattcccccagtggtactcccctctgtgggtagctgtcaaaatagatgtttctgtggag

SEQ ID NO: 263544 - DNA, 201 bp, Homo sapiens
cacacacacacacacacacacacacaatgtatatataacattttgtccattctttggtcaacagacacatgggttgtttctgtatggatgtccccactccwcatctcttgttccctcttaggaggagcaaggggcattttaaagatcatatgccttccctcaaacccacaaagccaggccaggtcctgagagcctcccatt

SEQ ID NO: 263545 - DNA, 201 bp, Homo sapiens
ttgtctttctatgcctggtttatttcaaccttaagcagaacatccttcaggttcgtctatgttgtcacaaatggcaagattttcatcttttttaagactargtaatattcatacacacaaacacacacacacacacacacacacacacacaatgtatatataacattttgtccattctttggtcaacagacacatgggttg

SEQ ID NO: 263546 - DNA, 201 bp, Homo sapiens
agactcacttttcaagacaggtattatttgccatcgcattacagatgagaaagccaagactcaaagaagtccataacttgcccaaggtcacacagctgatmagtggcagaaccaaaattcaaattcaggcctgtttagctccaaagccctcttcctataggccagcccagtgaaactggacagcaagcatccaaatcccaa

SEQ ID NO: 263547 - DNA, 201 bp, Homo sapiens
gcattgataggtaaataatgattcttttgactgatgaccatcaaaaaccagaataacagatatgtgaccacgagtttcaatttctttctgtggaaacctaytccagattcaggattcataggtcagtttcataaattttagttccacacatgttttttcaggttatttctttgcccacgctttatttgaattgcctaatga

SEQ ID NO: 263548 - DNA, 201 bp, Homo sapiens
gcctccaagagtgccaactactgccatacatctcagggaggcccaacaggcttaatcctgttgggagaagttgcccttggaaaatgtatgaactgaagcaygcttcacatatcagcaagttacccaagggcaagcacagtgtcaaaggtttgggcaaaactacccctgacccttcagctagtattactctggatggtgcag

SEQ ID NO: 263549 - DNA, 201 bp, Homo sapiens
cagggagcttagcgtagcatacaacccaggacttgactgttggtagaacaatttgtgcatcaatgtgtatggtaacacttttcccccttaaaacgaatggyaacgccaggaaaatactctgacgtgccctctagatttgggggccagagcttttactcaacatttgcctcaacattcattaaagttttactgtgaacattt

SEQ ID NO: 263550 - DNA, 201 bp, Homo sapiens
aaatcacactgtaaaacaacctgaaaggtttttttctaattattcatttaacaactgataaaacatctctctagtagaaagaatatgcacctagtggaatytctccttatctacaattaaagtcaccctccattgctaaacaatgtaaccaagattctgcaatactaagtagactcttcagattcaaaggacccatttgaa

SEQ ID NO: 263551 - DNA, 201 bp, Homo sapiens
tctctagctctattattttgataatgaccatcctatagaatttagtgcacacttgacactttgttcttttctcaaatcacactgtaaaacaacctgaaagktttttttctaattattcatttaacaactgataaaacatctctctagtagaaagaatatgcacctagtggaatttctccttatctacaattaaagtcaccc

SEQ ID NO: 263552 - DNA, 201 bp, Homo sapiens
taatctagagcaataattcctaaatgctggcagctgcaatagaatcttgtcaccagtgtcaaaaatagagattgttaaattctaatgcagatgctctgaaytgactccctcagaggtgaatgtaaaaatacagacatagaggtaagtctcatgctcagccaagtctggcacactttgatccagtgccttgctactcaaagt

SEQ ID NO: 263553 - DNA, 201 bp, Homo sapiens
tttataaatgaaaatgctaagattaataaaacactcattttttctataacaattggtgctataatactatagttttgttttcctgaggttgtagattgggrgagagtttttaaaaggttttaaatatctattaggcaatctgtatcttaaaagaaaaatatttaattaacatgtttttaaaaggaaaaatacaaataaaat

SEQ ID NO: 263554 - DNA, 201 bp, Homo sapiens
tataagagtatatatatatactcttatatatatatgagaagatggatagatagaccttctaagtagtcgtttttatcttaagtcatgttccctaaaaatartcttggattcaagtagattataatgtattgagggagtgctcttcaggaaatcatttaagggagtgaggactatagttaagaaagaggaaagggtcaagca

SEQ ID NO: 263555 - DNA, 201 bp, Homo sapiens
ttaatctactttgtgtgtgctccttgttttttgggcaggaaatgagatgcagcagtaaagccgtgtccaccaaagaagaaaagaaagtgccgatggtgtgyggggtgggggcggagggttgaaacgaggacctaccttgcttcctgtgagagctagagttgtataaagaaaatctcttagataaaattctctcttgtcctt

SEQ ID NO: 263556 - DNA, 201 bp, Homo sapiens
actcctgagacagcaaaaccaacccctcctcctcatcctccttctcagcctactcaatgtgaaggtgacaaagatgaagaccttatgataatcacttctayttagtgaataacaaatatgttttctcttccttatgattttcttaatattttcttttctctggcttactttattataagaatacagtatataatacctata

SEQ ID NO: 263557 - DNA, 201 bp, Homo sapiens
tagttctagtagagaaagaactaccagattccagggttgaggaagaaacgggatcccagtgcgctgtagtggactcttacctgaaatctgaccttggaacyacatgggacacaccttacacaggctgtacaaacccttgtctgctcttcccacaggaggactacaaccagctgaggccactctcctaccccaacacggatg

SEQ ID NO: 263558 - DNA, 201 bp, Homo sapiens
atcaactgtctgaatcgaactcaatgataaaggagacacctgcagaaggaactgagacaggagctgctcttctaggtggatcttcaggagtgaaaggaagraggaacacactgagcaactcctgaggttttctagacaccaccctcgtgctcaagcatgcctgaggtgggcgggctgaaagcagtgaaagcagaaagatcc

SEQ ID NO: 263559 - DNA, 201 bp, Homo sapiens
tattcagaatgctctaggactgtaatggtggtatgtcaagtaattttatccttagtaggagggttaaagaatgaaactattcataacaactacagctaaawtgaattggaaagggatacatactacaaaatgataatatacatttacataaaaatataaattcagacatcaaaaatataaaataggaaaaagtcaaagcat

SEQ ID NO: 263560 - DNA, 201 bp, Homo sapiens
tccatttgcttatgcagatgggactcatagcacagatattacccattctgatcatttggggccaatttattgtctgcctaaatgacgaccaaaagcacatyctcaatattttaaaaattacaaaaatctaaattgttacatcattcaaggcattgataggtaaataatgattcttttgactgatgaccatcaaaaaccaga

SEQ ID NO: 263561 - DNA, 201 bp, Homo sapiens
tgtgcaaatcaataaacatgtacatcacgttaacagagtaaggaacaaaagtcatatgatcacctaattagatgcagaaaaagcattgacaaattcaacaycctttcatgattaaaaaaattcaatacattagatataaaagaaatgtacttcaacatgataaagcccatatataataagcccatacctaacattatactc

SEQ ID NO: 263562 - DNA, 201 bp, Homo sapiens
ctaacattatactcaacagtgaaaaattggaaccctttcctacaagatccaaaagaaggcaaggatgcccattcttgacacttctattcaacacagtattrgaagttcttgccagaacaataaggcaagaaaaagaaacgaaagacatccaaataggagaggaagaaatgaaactgtcactatatgctgacaacatgatct

SEQ ID NO: 263563 - DNA, 201 bp, Homo sapiens
gaccagttatgccttgaagctgggaagttcgcttttcttaagcagtgaaaggaaaacaaggaaaccaaatcagaactttgccaacaatgaaaagtcgaaargtagggagaaatgagaaatgcaattgacaagaaaaagactattagacaaccaagagtgtcagccacaaaagaacatcattgtcatcatcatcatcatcat

SEQ ID NO: 263564 - DNA, 201 bp, Homo sapiens
aggccccattgtggatgttcccctccctgtgtccatgtgttctcattgttcaactcccacttatgagtgagaacatgcggtgtttggttttctgttcttgygttagtttgctgagaatgatggtttccagcatcatccatttccctgcagaacatgaactcatcctttttcatggctgcatagtattccatggtgtatatg

SEQ ID NO: 263565 - DNA, 201 bp, Homo sapiens
tgcctccagctttgttcttttcacttaggattgtcttgcctatgtgggctcttttttggttccatatgaaatttatagtagttttttccaattctgtgaaraaagtcattggtagcttgatggggatggcattgaatctataaattactttaggcagcatggtcattttcacaatattgatttttcctatccatgagcatg

SEQ ID NO: 263566 - DNA, 201 bp, Homo sapiens
tggtcattttcacaatattgatttttcctatccatgagcatggaatgtttttccatttgtttgtgtcctctcttatttccttgagcagtggtttgtagttytccttgaagaggtccttcacatcccttgtaagttgtactcctaggtatcttattctttttgcagcaattgtgaatgggagatttcactcatgatttggct

SEQ ID NO: 263567 - DNA, 201 bp, Homo sapiens
tcacctttatcatttttattgcatctatttgattcttctctcttttcttatttattagtctggctagtggtctatctatttttgttgatcttttccaaaayaacagctcctggattcattgattttttgaagggttttttgtgtctctatctccttcagttctgctctgatcttagttatttcttgtcttctgctggcttt

SEQ ID NO: 263568 - DNA, 201 bp, Homo sapiens
acaaaaacaaaaataaaattactacacatcaaaactgatcagtaatataacattcatataatagagtattattttagtcaattactccattaaggacagatttttttttttttttttttaattatactctaagttttagggtacatgtgcacattgtgcaggttagttacatatgtatacatgtgccatgctggtgcgctg

SEQ ID NO: 263569 - DNA, 201 bp, Homo sapiens
caaaaacaaaaataaaattactacacatcaaaactgatcagtaatataacattcatataatagagtattattttagtcaattactccattaaggacagatttttttttttttttttttaattatactctaagttttagggtacatgtgcacattgtgcaggttagttacatatgtatacatgtgccatgctggtgcgctgc

SEQ ID NO: 263570 - DNA, 201 bp, Homo sapiens
cctattctgccaaacgctatggaagtgtgtctcagacatgtcaatcctatgaacagaagttcttaaggtgtgcgtgatgatttagcccatagtggaaaagwtaatagagctatttaatatggagcagaaagttttgatatggccttcaaaaattaatctctatgattttttttaaataacaaagtaatttttaaaatagac

SEQ ID NO: 263571 - DNA, 201 bp, Homo sapiens
ctactgccatacatctcagggaggcccaacaggcttaatcctgttgggagaagttgcccttggaaaatgtatgaactgaagcacgcttcacatatcagcargttacccaagggcaagcacagtgtcaaaggtttgggcaaaactacccctgacccttcagctagtattactctggatggtgcagaggttcctcttgggact

SEQ ID NO: 263572 - DNA, 201 bp, Homo sapiens
cctctagcaatatagcaaatgtgcagacatacttcgtaccttccacaatgacactaattattacccaataatattggcaacattaagcagaccatcactgyaggagtttgaaatatgcaaaaatatctgttaatttattcaaacttgttcaggtgtcatgaaagataaaaatatgcttccactttctatctccttcacgat

SEQ ID NO: 263573 - DNA, 201 bp, Homo sapiens
gtgtgaagctcgcaaaagcggtacagtcagatttgaatttcattttaaatgtatgctgagagaagagtgtgttgtatgctttggaaatgggtgtgcaacaytgggttttgctttaaagtgcaatgtgtttagaatcttctctaagctttctattctccccctctgttctagtcgggctggaaggagccatttggttagcct

SEQ ID NO: 263574 - DNA, 201 bp, Homo sapiens
ctctgctcgctctaaccattccccctgcttctgtggcaggcagtaatccccgctttccatcctctagtcagcttcttcccagccagccacaagcgaacagsctcgcaagcagcggatgaaacaggaagtctgacagcttgagtctgcagtgggacccctagtgttttcccactccatgtcctggcatcgttccccagaagt

SEQ ID NO: 263575 - DNA, 201 bp, Homo sapiens
atttccaggcagctggtgagcagggcttagaacttgcaccaggctacaagcctcccagctgagaaagcaattagactcacagttccttggctgtcccaccragtctgcagcagccatccacctccctcaaagggactgtgaattctctctgctttcctggtatgttcctgtggtagttcttggagcaacaattcgaaacgt

SEQ ID NO: 263576 - DNA, 201 bp, Homo sapiens
aaatttagcaacttcaaagatgttaacagggaaaaagactctatgatgtcacagtttaaaatatctggcaaggcctgagaaaacaaataagttttcacgtrtgttttcttgccagattgatctccgtgatgacccaaaaaccttggcccgtttgctgtatatgaaagagaaacctctcacttacgagcatggtgtgaagct

SEQ ID NO: 263577 - DNA, 201 bp, Homo sapiens
ataatcccaaacttcttggaggctttgttcattttttttttttttaattcttttttctttgtgtttgttggattggattaatctgaaagcctgaagttctytcttttacttgttttattctattcctgacaccttccagtgcattttgcaattctctaggtgtgtccttcatttccagaagttttgattgttttttattta

SEQ ID NO: 263578 - DNA, 201 bp, Homo sapiens
aataacagatatgtgaccacgagtttcaatttctttctgtggaaacctattccagattcaggattcataggtcagtttcataaattttagttccacacatkttttttcaggttatttctttgcccacgctttatttgaattgcctaatgaactgtgaaaaggcccaaaaagagattggtgggggtgaggggaggagagagg

SEQ ID NO: 263579 - DNA, 201 bp, Homo sapiens
catttcaatctcactgcttgtattgggtctgttcagagtttctatttcttcctggtttaatctaggagggttgtatatttccataaatttagtttatgcaygtaaaagtattcatagtagccttgaatgatcttttatatttctgtggtatcggttgtaatatctcccatttcatttctaattgagtttatttggatcttc

SEQ ID NO: 263580 - DNA, 201 bp, Homo sapiens
tttaattctgtttatgtggtgtatcacatttattgatttgtgtatgttaagccatcccagcatccctagtatgaaacccacttaatcatggtagattatcyttttgatatgctgttggatttcgttagctagtattttgtagaggatttttgcatcctatgttcatcagggatattggtctttactttcctttttttatta

SEQ ID NO: 263581 - DNA, 201 bp, Homo sapiens
atccctttttatgatcaaaaaactgagtttcaagtaacttgcccaaggtcccatattaactggcagaactgagattgaaccccgggtatctgtcttcacaktttatactcctaaccaccaaagtaaactggatgatggatggatggatggatggatggatggatggatggatggatgaatgggtgggtggacaatgggcca

SEQ ID NO: 263582 - DNA, 201 bp, Homo sapiens
ctatatgctgacaacatgatcttatatatagaaaaccataaagagtccaccaacacactgttaaaaatgataaacaaattcagtaaagatgcaggattttwaaaaaatcaacattcaaaaatcagtagtgttgcactacactaacaacaaactttccaaaaaagaaatcaagagaataatcccatttatgattgatattaa

SEQ ID NO: 263583 - DNA, 201 bp, Homo sapiens
aagacttaatattgttaaaatgtccatactacccaaagaaatatacagtcagtgcaatccctatcaaaattccaatgtaatttttataaatacattaaaartactcctaaaatttatatggaaccacaaaaatattgaatagtcaagtcaataacaagcaaaaagaacaaagctagaagcatcacgctacctatttcaaat

SEQ ID NO: 263584 - DNA, 201 bp, Homo sapiens
taatcctcactctaaccccataaactaggtactattattacttgtattttatagataaggaaactaggtacaagtaagttaagtcaccgagctagtaagtrtcagagccaggactctaatacaggcctctagaaacttataaatatgcacatgccctccacagaaaaacaggagaaacattgtttttgtcactgtgttcat

SEQ ID NO: 263585 - DNA, 201 bp, Homo sapiens
gcagccgcactaaaaccaagctgatctatgcactgcggcttggggttcagaaattatctggtgtggggatgggtgcggtggctcaagcctgtaatcccagmactttgggaggccgaggcggggggatcacaaggtgaggagtttgagaccagcctgaccaacatagtgaaaccccatctctactaaaaatacaaaaattag

SEQ ID NO: 263586 - DNA, 201 bp, Homo sapiens
atcaactatagaaagtgcattcaaatatttaaacaactaaatgataataataactactggcatgatataatgcttatttatgtgccaggcaccgttctccrtacttacatgtactgcctaacttaatcctcactctaaccccataaactaggtactattattacttgtattttatagataaggaaactaggtacaagtaag

SEQ ID NO: 263587 - DNA, 201 bp, Homo sapiens
agcacaggaaaatctattaaattcaattcaatgtgatacgctttttgagcacctatagtgtagacacagattatccaaaaatcatgcaaaactaataattraaaattctttaatcctcctcatctgtttctcttcttgaaaagtgggttttatggtatgaaaatttcatattatggaattggccgcaagctttaactctat

SEQ ID NO: 263588 - DNA, 201 bp, Homo sapiens
tgtgcattacttgatcagcaagcattcctaactgctttttctccactagaatgcaaggcatgtcatctcaacaaaggaagctatgcaagccaacctaattrttaatacacccactggcttttccaaacatatgcttaaacgtcgtcttcattctgtgatttgatagcctagtattggaaaacaagaaacctcacttgtttc

SEQ ID NO: 263589 - DNA, 201 bp, Homo sapiens
cacttttacaaaagaccttaaaaatagacgtttaactatttctccaaatagttatacacttattattttctcatcccttatttaaacagttaggcatgtcyaaatatgtgagttatttgctgaaaaatattttcctactttccaattgatcagtgccggcagagaggaaaaataagaacagacataattgtttcacagact

SEQ ID NO: 263590 - DNA, 201 bp, Homo sapiens
tcaattcatgaattattacatatcctgtgcagagggccactatatagcctttaaaatgatatcatggtacatattaagtgacatgaaatagagtagcgacmtcaattttcagaacaatacaacatggttgattaatatatattacacccagttatattactaagattatacccagttataaacaaccacagggagttttat

SEQ ID NO: 263591 - DNA, 201 bp, Homo sapiens
tgccaaagattggcaggattttagcatgttaaatacaatgcatgtgcagtaatgggttaactcaacaggcctgggttattcaaaccctacacattacaaaraaaaggctgacccttggctagttccttggagaaaagctctaagccattggaatgtcccacttgatcagattgtcttggtatgtctggggccttgggccat

SEQ ID NO: 263592 - DNA, 201 bp, Homo sapiens
gctgaagcaggagaatcacttgaacctgggaggcagaggttgcagtgagccaagatggcccactgcactccagccaaggtaacagtgcaagactccatctaaaaaaaaaaaaaagaaaaaaagtaactccttctcttttttgctttttttcttttttttttgagacggagtctctctctgtcacgcaggatggagtgcagt

SEQ ID NO: 263593 - DNA, 201 bp, Homo sapiens
gaaacagctgttgaaatgaatcttatattaggtaggaaataaaggagggagagaaggaaggaaggaaggaaggaaagaaggaaagaaggaaggaaggaaaggagggagggagggagggaggaaggaaggagagaaggaaaggaggggggaaggagaagggaaggagaagagacttcagaatgtcacaccattgtctggatt

SEQ ID NO: 263594 - DNA, 201 bp, Homo sapiens
aaacagctgttgaaatgaatcttatattaggtaggaaataaaggagggagagaaggaaggaaggaaggaaggaaagaaggaaagaaggaaggaaggaaaggagggagggagggagggaggaaggaaggagagaaggaaaggaggggggaaggagaagggaaggagaagagacttcagaatgtcacaccattgtctggattt

SEQ ID NO: 263595 - DNA, 201 bp, Homo sapiens
aacagctgttgaaatgaatcttatattaggtaggaaataaaggagggagagaaggaaggaaggaaggaaggaaagaaggaaagaaggaaggaaggaaaggagggagggagggagggaggaaggaaggagagaaggaaaggaggggggaaggagaagggaaggagaagagacttcagaatgtcacaccattgtctggatttt

SEQ ID NO: 263596 - DNA, 201 bp, Homo sapiens
acagctgttgaaatgaatcttatattaggtaggaaataaaggagggagagaaggaaggaaggaaggaaggaaagaaggaaagaaggaaggaaggaaaggagggagggagggagggaggaaggaaggagagaaggaaaggaggggggaaggagaagggaaggagaagagacttcagaatgtcacaccattgtctggatttta

SEQ ID NO: 263597 - DNA, 201 bp, Homo sapiens
agagaatcgcttgaacccaggagggggaggttgcagcgggctgagatcaggccactgcactgcagcctgggtgatggagtgagactccaactcaaaaaaawaaaaaaaataaaaaaaattcatttacaatagcttcaagaaggataaattacatttaacaaaagaagtgcaaaacgtatactctgaaaactacaaaacacg

SEQ ID NO: 263598 - DNA, 201 bp, Homo sapiens
aggataaattacatttaacaaaagaagtgcaaaacgtatactctgaaaactacaaaacacgttaaaagaagttttaaatgatttaaataaatggaaaaacatatgtgtctatggataggaaaactagatattgttaaatggcaataattcccaaactaatctatagattcacacaatcccttatgaattcccaaatgtcgt

SEQ ID NO: 263599 - DNA, 201 bp, Homo sapiens
ggataaattacatttaacaaaagaagtgcaaaacgtatactctgaaaactacaaaacacgttaaaagaagttttaaatgatttaaataaatggaaaaacatatgtgtctatggataggaaaactagatattgttaaatggcaataattcccaaactaatctatagattcacacaatcccttatgaattcccaaatgtcgtt

SEQ ID NO: 263600 - DNA, 201 bp, Homo sapiens
tgtctgattgctctggctaggacttccagtactacgttgaataaaagtggtgaaagtgggcattcttgtcatgttccagttctcagggggaatgtgttcamcttttcagtataatgttggctgtgggtttctcatagatgctttttattaccttaagccatgtcccttctatgccaattttgctaaaggttttaatcatga

SEQ ID NO: 263601 - DNA, 201 bp, Homo sapiens
ccccctccccccaccccacaacaggccctggtgtgtgatgttctgcttcccatgtccaagtgctttcattgttcaattcccacctatgagtgagaacatgyggtgtttggttttttatccttgcaatagtttgctgagaatgatggtttccagcttcatccatgtccctacaaaggacatgaactcatccttttttatggc

SEQ ID NO: 263602 - DNA, 201 bp, Homo sapiens
cctcaagcatttatcttttgagttacaaacaatccaattatactctttaagttaatggaaaacaattttgacaaatgaatttttaaaaacttatcctattrgtttagggtgtgtgtgtgtgtgtgtgtgtgtgtgtgtgtgtgtgtgtgtgtgtttagagacagagtcttgctatgttgcccggacgcaaactcctgggct

SEQ ID NO: 263603 - DNA, 201 bp, Homo sapiens
ctgagaatgatggtttccagcttcatccatgtccctacaaaggacatgaactcatccttttttatggctgcatagtattccatggtgtatatgtgccacaytttcttaatccactctatcatttatggacatttgggttggttccaagtttttgctattgtgaatagtgccacagtaaacatacgtgtgcatgtgccttta

SEQ ID NO: 263604 - DNA, 201 bp, Homo sapiens
gggtgtccatcccctcaagcatttatcttttgagttacaaacaatccaattatactctttaagttaatggaaaacaattttgacaaatgaatttttaaaamcttatcctattagtttagggtgtgtgtgtgtgtgtgtgtgtgtgtgtgtgtgtgtgtgtgtgtgtttagagacagagtcttgctatgttgcccggacgca

SEQ ID NO: 263605 - DNA, 201 bp, Homo sapiens
gtgactaataaatgtcacttgtgcatattttaaaattaagacaatgtagttttggaaagtaattatatgagaaaaccttagctcaagaaataagtcaaaamtaatgttcaatatttttggaatatgaatttcctgcagtagtctccagttaaccctttaacaacatggtgggttttttcttttgagctttcatttgcttag

SEQ ID NO: 263606 - DNA, 201 bp, Homo sapiens
ataaagcggaatgatactgagaatcaaaaaatgattaaggagagatgaaagaaatatcaaagaagaagccacaacactgaggagaaagagagagtgagaaraaagagaaggggaaggagaaagggagggtgagggggaagaaggaaggcaaaaaggaaggagagaaaaagaaagagtggggaaggaaggagaagagacaga

SEQ ID NO: 263607 - DNA, 201 bp, Homo sapiens
gttaaatctcagctttcctgctcaataactatgtgatttcccagcactttgggaggctgaggtgggtggatcacaaggtcaggagttcaagaccaccctcrccaagatggtgaaactccctctctactaaaaatagaaaaaaaaaaaattagccagtcatggtggtgggtgcctgtaatcccagctactcagaatgctgag

SEQ ID NO: 263608 - DNA, 201 bp, Homo sapiens
cattggacatttagatgtttttctggtagaagagtaattcaagttaattcatttaactatagtaaattagccagggttggtagcttttcaaaattagaatmaatttcagattatattacaagtaaaattcttgattccttcttggagcattgttgggagatatttggaggtggctattctaaggaaaatcatcatctacat

SEQ ID NO: 263609 - DNA, 201 bp, Homo sapiens; identical to SEQ ID NO: 52633

SEQ ID NO: 263610 - DNA, 201 bp, Homo sapiens
ctcttttagattaaaacgctgtctcttcaagaagcaaataagcacctgttttccattctgaatttcagcattagaaagggcctcaaataccaactaaaccrcttatccacttctcgtagccgcttgacatcatctccacctgttaccatctaacccagggccaaagcatgctcccttgtgaaaaaatattaagttaccagc

SEQ ID NO: 263611 - DNA, 201 bp, Homo sapiens
ataccaactaaaccacttatccacttctcgtagccgcttgacatcatctccacctgttaccatctaacccagggccaaagcatgctcccttgtgaaaaaayattaagttaccagctggcacaaattcaactccccccaacccccagtcccaaggggacactttcttttattaatcctgacccctttaccatattttatagc

SEQ ID NO: 263612 - DNA, 201 bp, Homo sapiens
gctcccttgtgaaaaaatattaagttaccagctggcacaaattcaactccccccaacccccagtcccaaggggacactttcttttattaatcctgaccccyttaccatattttatagctgtagcccagggttagctcccaatagcccaggtgtgagccttctttaaaagtatttttgctctgttgtcctggttaaattact

SEQ ID NO: 263613 - DNA, 201 bp, Homo sapiens
gtggggagaccatggaagaggaggtttgtttttcagagctagttgtgtaaagaggagagggtagtgccaagaatttagctatccctttctccactgcctcrccagctacacaaacacacacacacacacacacacacacacacacacagacataggcacaacttggctgagatgcaacccagtagacctggcacaacttcc

SEQ ID NO: 263614 - DNA, 201 bp, Homo sapiens
tggctcacgggccttacagctgctctttaagggaacactccagagagaaaagagagaagtggggagaccatggaagaggaggtttgtttttcagagctagktgtgtaaagaggagagggtagtgccaagaatttagctatccctttctccactgcctcaccagctacacaaacacacacacacacacacacacacacacac

SEQ ID NO: 263615 - DNA, 201 bp, Homo sapiens
atagagtagcgacctcaattttcagaacaatacaacatggttgattaatatatattacacccagttatattactaagattatacccagttataaacaaccwcagggagttttatttcttcttcttttggctatggttttctaattaccccactgtcatttacattactaagccataaaaaagcaaagtaggatttactgat

SEQ ID NO: 263616 - DNA, 201 bp, Homo sapiens
acttcatagggaactacagaatgtctcagtaagttaggcagggcttgttataggattggggtctgttatagggttcaaggacctgtggttttgctgttaaycaggtgatgtcagaaagtggcaacaattctataaccaggtatcttagtgatatttatctacaaatcaggaagaccaagaacagctgaagctatcattggt

SEQ ID NO: 263617 - DNA, 201 bp, Homo sapiens
aacattatcacaatgaccgtagcctataacggaaagtgatcagcttcccccaaagcagccgcccaactacctgctcaggctattaatctcttttcattacytacatttttaatctactttgtgtgtgctccttgttttttgggcaggaaatgagatgcagcagtaaagccgtgtccaccaaagaagaaaagaaagtgccga

SEQ ID NO: 263618 - DNA, 201 bp, Homo sapiens
atggagaaacaagatgtaagagacattgtttctttatgactacatggagtagagctgcccaacagtgtaggctccccagactaccagaagcttctctactytttaagccacagtatttttctgtttctttgttacagtacctttccttttatcctaatatactccctatgctttactttaaaataatgcttgaggtcaatt

SEQ ID NO: 263619 - DNA, 201 bp, Homo sapiens
acacggatgtgtttttgatctgcttctctgtcgtaaaccctgcctcttaccacaatgtccaggaggaatgggtccccgagctcaaggactgcatgcctcaygtgccttatgtcctcatagggacccaggttaaaatgtgggcgatggcagggtggagcgggctgcaaaaatgggaagaccctttaggtacctcgtgaacat

SEQ ID NO: 263620 - DNA, 201 bp, Homo sapiens
agcacatcatcatgtgctaggaaaacaaaactcgtagcaacagagcccttttcattgtagggcagtctttgcaaaatgatatgctgtcattttaccttcamcattaaaaatcaccatacaccaactttcaaacaatcaatcaggttgtttgagattctgagatgactaagatataccacttgagcaaaccacttaaaaatg

SEQ ID NO: 263621 - DNA, 201 bp, Homo sapiens
aacatttctgtaaaagatcttcagtccagaataatttaggattaagtattgtattgatcccagtggtgtaaaaaatactaagaataagtgcatgagacagrtgttaactgaagaaaaaagttttagaaatggttataattactctcctaagtattcatcaagtggactagggcctgtaactgtatctcttatgtcctcata

SEQ ID NO: 263622 - DNA, 201 bp, Homo sapiens
tattttatcatataaaattaaagtgaaaagaagttacctttccacttccagagtagaaaaaagagatacacatttcatgaaatcagttataatttttcaamttttctgaaaagtgaggaaagatacaaaataatctccatatataatatggtcaaaaccaatagaagcaaattaaaagtcactatttaaccttgttgaagt

SEQ ID NO: 263623 - DNA, 201 bp, Homo sapiens
ccacttccagagtagaaaaaagagatacacatttcatgaaatcagttataatttttcaaattttctgaaaagtgaggaaagatacaaaataatctccatayataatatggtcaaaaccaatagaagcaaattaaaagtcactatttaaccttgttgaagtgccacagtgctttttgtaaatcagtacagtcatgaagtgga

SEQ ID NO: 263624 - DNA, 201 bp, Homo sapiens
tacacatttcatgaaatcagttataatttttcaaattttctgaaaagtgaggaaagatacaaaataatctccatatataatatggtcaaaaccaatagaarcaaattaaaagtcactatttaaccttgttgaagtgccacagtgctttttgtaaatcagtacagtcatgaagtggaaaacaataaaaggagatttcataaa

SEQ ID NO: 263625 - DNA, 201 bp, Homo sapiens
acaatggtagaactagtttacagtccctccaacagtgtaaaagtgttcctatttctccacatcctctccagcacctgttgtttcctgactttttaatgatygccattctaactggtgtagatggtatatcactgtggttttgatttggatttctctgatggccagtgatgatgagcattttttcatgtgtctgttggctgc

SEQ ID NO: 263626 - DNA, 201 bp, Homo sapiens
tgttttagacatgaagtccttgcccatgcctatgtcctgaatggtattgcctaggttttcttctagggtttttatggttttaggtctaacatttaagtctbtaatccatcttgaattaatttttgtataaggtgtaaggaagggatccagtttcagctttctacatatggctagccagttttcccagcaccatttattaaa

SEQ ID NO: 263627 - DNA, 201 bp, Homo sapiens
aggaagggatccagtttcagctttctacatatggctagccagttttcccagcaccatttattaaatagggaatcctttccccattgcttgtttttgtcagrtctgtcaaagatctgatggttgtagatgtgtggtattatttctgagggctctgttctgttccgttggtctatatctctgttttggtaccagtaccatgct

SEQ ID NO: 263628 - DNA, 201 bp, Homo sapiens
aatagggaatcctttccccattgcttgtttttgtcaggtctgtcaaagatctgatggttgtagatgtgtggtattatttctgagggctctgttctgttccrttggtctatatctctgttttggtaccagtaccatgctgttttggttactgtagccttgtagtatagtttgaagtcaggtagtgggatgcctccagctttg

SEQ ID NO: 263629 - DNA, 201 bp, Homo sapiens
ttgaagaaattgtgaatgggagttcactcatgatttggctctctatttgtctgttattggtgtataagaaagcttgtgatttttgcacattgattttgtaycctgagactttgctgaagttgcttatcagcttaaggagattttggtctgagacaatagggttttctaaatatacaatcatgtcatctgcaaacagggaca

SEQ ID NO: 263630 - DNA, 201 bp, Homo sapiens
caatcatgtcatctgcaaacagggacaatttgacttcctcttttcctaattgaataccctttatttctttctcctgcctgattgccctggccagaacttcyaacactatgttgaataggagtggtgagagagggcatccctgtcttgtgccagttttcaaagggaatgcttccagtttttgcccattcagtatgatattgg

SEQ ID NO: 263631 - DNA, 201 bp, Homo sapiens
attcagtatgatattggctgtgggtttgtcataaatagctcttattattttgagaaatgtcccatcaatacctaatttattgagagtttttagcatgaagbgttgttgaattttgtcaaaggccttttctgcatctattgagataatcatgtggtttttgtctttggttctgtttatatgctggattacgtttattgattt

SEQ ID NO: 263632 - DNA, 201 bp, Homo sapiens
ttagcatgaagcgttgttgaattttgtcaaaggccttttctgcatctattgagataatcatgtggtttttgtctttggttctgtttatatgctggattacrtttattgatttgcatatgttgaaccaaccttgcatcccagggatgaaacccacttgatcatggtggataagctttttgatgtgctgctggattcagtttg

SEQ ID NO: 263633 - DNA, 201 bp, Homo sapiens
gaaaaggagcacttagaatgaaatttctagggaatgatttcatatttattaacataatagagcttagtaatctatcagtaactcttcacataaccttgtcrtatgtgtaacaaggtgaatcaggaggctgcagtgagttatgatggtaccactgcactctggcctggttgaaagagcaagaccctgtctctaaaataaata

SEQ ID NO: 263634 - DNA, 201 bp, Homo sapiens
agaaaaatgggaaacaaaaacacaaattgtattttcagtaaaactaggacacagactctaacgtattttgaaaaggatgccaaaaaaacaacagaattcasagaagagacaacagtgggaagtagaaagaaagaccagtgttgtcaggtctcagaaatgtcccataaaaatatacttttttttgaaggcaagggacaggcc

SEQ ID NO: 263635 - DNA, 201 bp, Homo sapiens
caggctttggtatcaggatgatgctggcctcataaaatgagttagggaggattccctcttttcctattgattgcaatagttcagaaggaatggtaccagcwcctccttgtacctctggtagaattcggctgtgaatccatctggtcctggactttttttggttggtaagctattaattattgcctcaatttcagagcctgt

SEQ ID NO: 263636 - DNA, 201 bp, Homo sapiens
tttctttgtaaaatcagagatattcaaaagtaacttacaattaattaaaaaagcatataaataaagacaattactgtcatcttgtaaaatgattaggtgcwatatgacaatttcatttttatgatttacattcaagataggaaaaaattgagcaaagtgcagtgacgaaatgaatttttttcattcaggtaactaggcaat

SEQ ID NO: 263637 - DNA, 201 bp, Homo sapiens
aagaaaaatgggaaacaaaaacacaaattgtattttcagtaaaactaggacacagactctaacgtattttgaaaaggatgccaaaaaaacaacagaattcmcagaagagacaacagtgggaagtagaaagaaagaccagtgttgtcaggtctcagaaatgtcccataaaaatatacttttttttgaaggcaagggacaggc

SEQ ID NO: 263638 - DNA, 201 bp, Homo sapiens
tgtacctctggtagaattcggctgtgaatccatctggtcctggactttttttggttggtaagctattaattattgcctcaatttcagagcctgttatttgyctattcagggattcaacttctccctgatttagtcttgggagggtgtatgtgtcaggaatttatccatttcttcgagattttctagtttatttgcgtagag

SEQ ID NO: 263639 - DNA, 201 bp, Homo sapiens
ctgcttagatgatgaggaagcatagatgaatccaatcttagtcctaggcctctataaactcacaaggaaataacctggctttaaacacagttatagaagaytgtattcgtttgctgagctgccatagcaaaataccacagactgggtggcttaaacaacaaaaatgtattccctcatagctggaagctggaagtccaagat

SEQ ID NO: 263640 - DNA, 201 bp, Homo sapiens
aggaagagtagaagagggttgggatatagataaatagatatatcgcttcaatgtcacaaggagctagtaaacttaccatagttttcctttgtgatatcctwactgcctcagctttcctatctttcaccatctcttgagcaaattagaagcctgttccctgtgaaatgaggaagagaattatattttattggcagacactta

SEQ ID NO: 263641 - DNA, 201 bp, Homo sapiens
cacacatttctatgcatgtatgcttttacctctgcttttataatcagaatgagccaaaaaaaaaagaaaaaagccattttcacttaggaagaactagacamacaacagtctagaaactttaggtggtagccggaaagagccaggctggcagccagctgctctgccactgccgtgatcaaaacacagtttgtgtttattcag

SEQ ID NO: 263642 - DNA, 201 bp, Homo sapiens
tatattatgcagggggaaaaatcatattataaaaacaacatatgctgtataaatcatgccttttttcattagagagaaattgataaccatattgatatggyccccaaatatgcttcccttaggtatatttttccctgagcaaaatgtatacaccaaaatttgaatcattgttgctttgggtggggaacttctgggtgagtt

SEQ ID NO: 263643 - DNA, 201 bp, Homo sapiens
aaaagaaatgtgccctacattctcataaagatactacagagaaaattttaaaaatgaaaaagaacaatatagccttcttaaagacaatgaaaacaccagawaaatcattgacagaaggcagataaaaagtgcaacctaatattccaactgagaattttaaacctttatgcatcaattgaaactataaggataaatatcaaa

SEQ ID NO: 263644 - DNA, 201 bp, Homo sapiens
attttattttctattatgaaaagatatccacaatatattatgcagggggaaaaatcatattataaaaacaacatatgctgtataaatcatgccttttttcrttagagagaaattgataaccatattgatatggtccccaaatatgcttcccttaggtatatttttccctgagcaaaatgtatacaccaaaatttgaatcat

SEQ ID NO: 263645 - DNA, 201 bp, Homo sapiens
gttaccatcctataggcaaggaacaaaacagacagtggaaacagatagaagatggcaggtcagagatacattttgaagataaaatcagcatggactcaccratggaatgggtgtagaaagtgaggatatgggaggaggcagggatagctcttcccttcttgcctgcagcaactggaagaacagtggtgctgttgactgaga

SEQ ID NO: 263646 - DNA, 201 bp, Homo sapiens
attaaacataaagagtaaattttattattagcaatgcattaacttttcatttttgtagcttcaagtgccaagaaaccttgttcacataaataacaagataygaatgaaagaaattttgttataacagtatcagtccatctttgtatgacatgatcacctctgcagctgtgtggcagaagtccagaggaaagagtgggagaa

SEQ ID NO: 263647 - DNA, 201 bp, Homo sapiens
atttatcaaaatttacacacgcaaacacttacaggccttacatggtgccattcacagtcaagagaaatgtaaacaaatgtaaagatgcaatattaaatcayaactgcataaaattaactgtagtacatactgatgactgtaatcatttcttagccacctcctgttgctatttaaaatgccatgtgacgctaatcatctcca

SEQ ID NO: 263648 - DNA, 201 bp, Homo sapiens
taaacagtcgttgcaaataagattcttatcacaaagggccattctgttgcattctatttgtagtataaagcactgttacatacagctttaaaattggtcaraaaagtcctctattgtaagaacatcctctgcatgtgaatttaatgaatgctgttcaccctctataccatctttggagaaatcaggtcagcatcttctctg

SEQ ID NO: 263649 - DNA, 201 bp, Homo sapiens
gaggacataggaggaatggggagacaatagtcaaagggtacaaagcctgagttagataaaaggaatacgttcgatttttttggacctaatgcacagcacgrggaatataactaataattgagtaccatacatttcaatatcactaagagaataaattttaaatgttctcatcacaaaaaatattaaatgtttgaggtgatg

SEQ ID NO: 263650 - DNA, 201 bp, Homo sapiens
aagcgttcatgttttcaggagattccagaaaaacctaaattgcttgtgatatcttgggctcatattcatactttgggttccacttcagaaattctaaccgytatggaagagtaatatcaattctacagatcttctgtgatgaatcccagagcagccacttctcacctagttggttttgccaaatacttgtaaatagttata

SEQ ID NO: 263651 - DNA, 201 bp, Homo sapiens
agaaagagctaaggaattaaggtctcttggaaaaagcagaaaatatcacccaaaaagatttcaccacattctggtaagtttgtgtaaacttggtgcttgargtaaaccaaataattaatggctacacaaccaccactcaatcattttcatggcccaagatccaaaagcacaggcatctggtaaagaatattttagcaaatg

SEQ ID NO: 263652 - DNA, 201 bp, Homo sapiens
ctcgtgttctgcctgcctcagcctcctaacgtgctgggattacaggcgtgagccaccgcgcccaaccagaagtggtcatttctataagcagagggatcttstccaccacaaagacttgagttccttttaccaccactctcctggtatatgacctggttgaacataaatccttaggcagtcacgtgagaatctacaatcaat

SEQ ID NO: 263653 - DNA, 201 bp, Homo sapiens
aattctccacatagctggcagagggactgtcccaaaccccaacttctccaatcacttcccttaacactcagacccaaccctatattatgttgtatatgatrcactccatgactcagtccctgttatctctccaatctcatctcttaacactctcctcatcagtgtttttgctttagccacactcaccatcttgttattcct

SEQ ID NO: 263654 - DNA, 201 bp, Homo sapiens
actcaccatcttgttattcctcaagcacacccaactccttcccttgaagagtttgtacttgctttttccccagtctcatactattccgctagatcccccctagcttcaattgaccacattatttaatgcatgtgtgcttgcacacacacacactctctttctctctttaacctatcttgccacatctttcattataatagt

SEQ ID NO: 263655 - DNA, 201 bp, Homo sapiens
tttgaatttagattgtatgttgagttagattgtgtacatggtttatatgtcggggtacataggtgtgtaaaataagctcattccagctgaaacctctttaygatgttcaccatttccaccatcctctgtattattttgtctgtgaatctttcttctatcacccaccctcctagagcttctttgttgaaagccatcaaattt

SEQ ID NO: 263656 - DNA, 201 bp, Homo sapiens
ggtgtgtaaaataagctcattccagctgaaacctctttacgatgttcaccatttccaccatcctctgtattattttgtctgtgaatctttcttctatcacycaccctcctagagcttctttgttgaaagccatcaaatttggaaaaccacatgaagccactatttgcaaacccaggctgcctatgcaggaaattaacacaa

SEQ ID NO: 263657 - DNA, 201 bp, Homo sapiens
gtttttacagaaagctgaaagtcagttctaactttttccacttagttaaatggtgatcagcccaaggtagacagtcataaccttaatggccagagcagggrgtgggaaacaggtccaatccacagggggaaaaaaaaacataattataataaatagtgaataaaaataaagtcccaggtttataaaaggttgtgacgtagt

SEQ ID NO: 263658 - DNA, 201 bp, Homo sapiens
agggggtgggaaacaggtccaatccacagggggaaaaaaaaacataattataataaatagtgaataaaaataaagtcccaggtttataaaaggttgtgacrtagttctgctcatttgggaaaatttattcataagtttctcttttgctctttctgaagacacccgagagtctctcatatctgtaatcccagtgctttggga

SEQ ID NO: 263659 - DNA, 201 bp, Homo sapiens
aaggtgctatcattttctcaactttcctgatgaacaattcccggcacaaagatactactctatttccctcaaggctaaactgcttgtaatggggtaagtgraggccatggaatagtaaacaatatgagcagtgtatagctaataacaataaaagagccactgttagttaggacctgctattaacaagtaaaccaaacatgt

SEQ ID NO: 263660 - DNA, 201 bp, Homo sapiens
gtattctctgatggtagtctgtatttctgtgggattgatggtgatatcccctttatcattttttattgcatctatttgattcttctctcttttcttctttattagtcttgctggtggtctatcaattttgttgatcttttcaaaaaaccagctcctggattcattgattttttgaagggttttttgtgtctctatctcgtt

SEQ ID NO: 263661 - DNA, 201 bp, Homo sapiens
tagatctttcctgctttctcttgtgggcatttagtgctataaatttccgtctactcactcgtttaaatgtgttccagagattctagtatgttgtgtctttkttctcattggtttcaaagaacatctttatttctgccttcattttgttatgtacacagtattcattcaggagcaggttgttcagtttccacgtagttgagc

SEQ ID NO: 263662 - DNA, 201 bp, Homo sapiens
gttctcattggtttcaaagaacatctttatttctgccttcattttgttatgtacacagtattcattcaggagcaggttgttcagtttccacgtagttgagyggttttgagtgagtttcttaatcctaagttctagtttgattgcactgtggtctgagagacagtttgttataatttctgtttttttacatttgctgaggag

SEQ ID NO: 263663 - DNA, 201 bp, Homo sapiens
cctgacctttctctttggctgcccttaatattttttccttcatttcaactttggtgaatctgacaattatgtgtcttggagttgctcttctcgaggagtayctttttggtgttctctgtatttcctgaatttgaatgttggcctgccttgctagattggggaagttctcctggataatatcctgccgagtgttttccaact

SEQ ID NO: 263664 - DNA, 201 bp, Homo sapiens
tgacctttctctttggctgcccttaatattttttccttcatttcaactttggtgaatctgacaattatgtgtcttggagttgctcttctcgaggagtatcwttttggtgttctctgtatttcctgaatttgaatgttggcctgccttgctagattggggaagttctcctggataatatcctgccgagtgttttccaacttg

SEQ ID NO: 263665 - DNA, 201 bp, Homo sapiens
gacctttctctttggctgcccttaatattttttccttcatttcaactttggtgaatctgacaattatgtgtcttggagttgctcttctcgaggagtatctwtttggtgttctctgtatttcctgaatttgaatgttggcctgccttgctagattggggaagttctcctggataatatcctgccgagtgttttccaacttgg

SEQ ID NO: 263666 - DNA, 201 bp, Homo sapiens
ccttttatcataccaaagaagatacatttcacttgtacatgatttacacattctgcctacaaatgagaggatatgaaaaacaagatcatgcacccctgttyttcacaaaacatatttaaattatatcattggttttgaattgtctcctaattttttagatctttgcattttttatgttcttaggaataaatggctatgggt

SEQ ID NO: 263667 - DNA, 201 bp, Homo sapiens
gctgaacagcaaatgttgctgcctgatcattcctctggaagcttcatctcagaggggtacccggccgtgtgaggtgtcagtctgcccctactgggaggtgmctcccagttaggctactcgggggtcagggacccacttgaggaggcagtctgtccattctcagatcacaaactccttgctgggagaaccactactctcttc

SEQ ID NO: 263668 - DNA, 201 bp, Homo sapiens
tgtacctgaccgtcacgtaaatgacctccaactgtgtatctttccttgggtgaaatgggtttatgcctgtaggtgcttctaccttctcctcaaacattcakcctcaaatgctctcattaagatacctaaatatgtagctccataaataattgtaggtggctcctttctacacatttttcacagccaggatgtccccattgg

SEQ ID NO: 263669 - DNA, 201 bp, Homo sapiens
aacatgttcaaagaagcaaactctaagaataaatccccaaatgtcaacgctgtctaggaggaatgaagaaacatatgggatcccaggcattcttcaaattrtgcatgccaaagtgttggaggggctgggctccaacagcagttttatgccttccagaaaagttgtgtggtcatgtagttctaattgtaaccttgaaaacaa

SEQ ID NO: 263670 - DNA, 201 bp, Homo sapiens
gtcagtctgcccctactgggaggtgcctcccagttaggctactcgggggtcagggacccacttgaggaggcagtctgtccattctcagatcacaaactccwtgctgggagaaccactactctcttcaaagctgtcagacagggacatttaagtctgcagaggtttctgctgccctttgtttggctatgccctgcccccaga

SEQ ID NO: 263671 - DNA, 201 bp, Homo sapiens
aaatatcagtccagaggaagcccttgatttgccctaccaggatcacatgtctacatgctagtatctgcaccaagaatgggtgcggaggggctgtattactrtaactgaccaagcctggcatatgctctatcctggctgctgagcaatgcagcatttggtagtctcactaactatggagatagacacagttctctagaagga

SEQ ID NO: 263672 - DNA, 201 bp, Homo sapiens
acccacttgaggaggcagtctgtccattctcagatcacaaactccttgctgggagaaccactactctcttcaaagctgtcagacagggacatttaagtctkcagaggtttctgctgccctttgtttggctatgccctgcccccagaggtggagtctacagaggcaggcaggcttccttgagctgcggtgggctccacccag

SEQ ID NO: 263673 - DNA, 201 bp, Homo sapiens
ttgatgagatatttgtgggctggatttcagcctctattttttcccttaatgggtgtgcttggtgggaagaaggagggagctttctagctgacagaactagmaaaaaggaaaatcataatgataagaaagcttgtgatatgtgactaacagtagacaaaatgaacctttaaatggaagatagaattggaggcagttaggggc

SEQ ID NO: 263674 - DNA, 201 bp, Homo sapiens
gcttccttgagctgcggtgggctccacccaggtcgagattctgggccactttgtttacctactcaagcctcagcaatggcgggcgcccctcccccagcctygctgctgccttgcagttcgatctcagactgctgtgctagcaataaacgaggctccgtgggcgtgggaccctccaagccaggcatgggatataatctcctg

SEQ ID NO: 263675 - DNA, 201 bp, Homo sapiens
caaggatcccttgagcctagaagttcaaagttataatgagccatgatcatgccactgcactccaacctgggcaacagagcaagacttcatctctaaaaaaraattatggatacattaatggttgttcttatttacttatagagtatatgtgatgttttgatataggcatataatgggtaatgattaaatctgggtaaatgg

SEQ ID NO: 263676 - DNA, 201 bp, Homo sapiens
agcctgcccaaactctctccccctccagtgtttcttatctcaggagctacctctatccacccagttatccaagttagtaacatcaacacttctctaccccygactccacatccagtcctattcattcaacctcccagatatctctttaaactatccacctctcactctctctgttggctctgctccaggtcaggccccgtc

SEQ ID NO: 263677 - DNA, 201 bp, Homo sapiens
atgcagcataagcccctctcaaattcaaacaggaacacatggaatttatctgtaaacattcttatagatagatcaaaggaagaagctattctacaaagtcmcaatattgaaaataaaagaaaactgagaaagaatatgatggtgcctttaagtgtttcattttccagttaagtatgacattctttaggggatcatgtaatt

SEQ ID NO: 263678 - DNA, 201 bp, Homo sapiens
gtcttgctgcacagatattcatgtgtttgaaaacagagattgctgcccctaaccccagtgagacagatacaaatacatagaaatccacaaatatctgaatyccaaaacacagatctttttcctgcaactgtagatacccatacccatggactgactggcaattccacgggaatctctaacatattcaaaacaaatgaatca

SEQ ID NO: 263679 - DNA, 201 bp, Homo sapiens
tttggtttttgtttgtttgtgtgtgtgtgtgtttccctatctagttttggtataagggtgtcctcctaagccgagtttagaagttttccctcctcttccaytttttgaaatagtttgagtagaactgatatcagttcttttagtaagcggtagaattcaacagtgaagacatcagatcctgggtttttctttgataagtga

SEQ ID NO: 263680 - DNA, 201 bp, Homo sapiens
ttctatcaatgtatgtatataagcttaagtaatctattaaaaggaaaagatcttctgataagatcacaaaacagaattcaatgctatactttatacaaaasacatgtctaaactacgtaattttaaaagcttaaatacatttttaaaaaaagaaaaacacaaagtaaaataataggagttgtgatcataatattaaacaag

SEQ ID NO: 263681 - DNA, 201 bp, Homo sapiens
tacttgacagtagctgtaattatatgtaaattttcaaaaatgcattacaaataggtacagttggacttactctttgatcccttttgtgcaaatgatccaascactactttctcgggaaatttttatcctgtttcctgctttctgtttctgagcaaacctcagtacagctccaagttacaacctgtatgtagatgctaaatg

SEQ ID NO: 263682 - DNA, 201 bp, Homo sapiens
gaaggctcctgattgaagcttgtgtttatggactctcctcttcttttcttttctcttctcccctagttactgtgactgtgggaggcaagcaacacttgctyggactgtatgacaccgcgggacaggtacatttttattatcttgattcattggagggcggtggtgtaggggagaaaaagatccatttgcttatgcagatgg

SEQ ID NO: 263683 - DNA, 201 bp, Homo sapiens
ttagtggtgttgaacagtttttttatatatcttttggccatttgtatgccttcttttgagaaatgtctatttgggtctatagcccattttaaaaatcaaawcatttggttttttggtgttgggttgtttgagttccttatattttctgattattaatcttccatgggatggagagtttgcaaatattttctcccattctgt

SEQ ID NO: 263684 - DNA, 201 bp, Homo sapiens
cataacacaaaatgacagaactaagaccaaacatacatttctatcaatgtatgtatataagcttaagtaatctattaaaaggaaaagatcttctgataagatcacaaaacagaattcaatgctatactttatacaaaagacatgtctaaactacgtaattttaaaagcttaaatacatttttaaaaaaagaaaaacacaaa

SEQ ID NO: 263685 - DNA, 201 bp, Homo sapiens
  misc_feature (1)...(201): n = A,T,C or G
caccaatttgtccacagtaattggcttcccattttgcaagcactgaactctttcttaggttcaacctcaactactctccccggcacaaagcacctttcccngtgaccacgagggccaaaagcctttccagagatttaaatcttgttaagtagccactttcgcagccattcccaacttgagggaaacctttccactgagatt

SEQ ID NO: 263686 - DNA, 201 bp, Homo sapiens
atagcgtatgagtttccttttttccacatcctcacaggcattttttattttttgtaatttgataatagccattctacctggggtaagattatatctcaatrtggttctgattgggatttccctgatgattagtggtgttgaacagtttttttatatatcttttggccatttgtatgccttcttttgagaaatgtctatttg

SEQ ID NO: 263687 - DNA, 201 bp, Homo sapiens
cacagaaaacataacacaaaatgacagaactaagaccaaacatacatttctatcaatgtatgtatataagcttaagtaatctattaaaaggaaaagatctyctgataagatcacaaaacagaattcaatgctatactttatacaaaagacatgtctaaactacgtaattttaaaagcttaaatacatttttaaaaaaagaa

SEQ ID NO: 263688 - DNA, 201 bp, Homo sapiens
tgctaagaattattataattccttttgtctagaaatgatcttatcttttatctttaaactaaaaagaattccttgcttcttttgagatttggctataaagkgtgtgtgtatccatcctactcaatggccctcattattttattttatagactttgaatcaccagtaacaacttgcaatgctcgcttataacagactgagtc

SEQ ID NO: 263689 - DNA, 201 bp, Homo sapiens
gaaatgactgcaattgaaaaagtcagaaaaaaaaagttttgtatagtatacattttttaaacttgtatatagaaacacagaaaacataacacaaaatgacwgaactaagaccaaacatacatttctatcaatgtatgtatataagcttaagtaatctattaaaaggaaaagatcttctgataagatcacaaaacagaattc

SEQ ID NO: 263690 - DNA, 201 bp, Homo sapiens
taaaatgtgctgcccaaagacaaaatcaggttgaaggtctttgaaatattttttgtcttttgaatctaaattttaacctaaaagtcctaaaaacagttacyttcttccagatacttaacctctacccacaagtttattgctccctagagcccaatttagattaatagtttgcataaataattgaaatttaaataaaggaag

SEQ ID NO: 263691 - DNA, 201 bp, Homo sapiens
gacatgacagtagataacaggagggcatgaaacaagaactgacggaacgtatgaaagaaacagaagaaaaatacaaagccaggtccaaaatgacgactaawctataggaaatactaagaataatagataccatagaaaaccacagtaaggatacagaaaacagaaataaaatccaacaaaatgcaaaataaaatagaaata

SEQ ID NO: 263692 - DNA, 201 bp, Homo sapiens
aaaagtactacatttatattgattctaattttgatgaataaacaactctgaagagttctgattcaactagaaacacagcagcattttatttctgaatcttytcatcacaaagagcagcaaagaaagtaaaaaataaacctacaaagtaagagaaagaaatcataaaacttcacattgcaaataattggtaccaaagatgca

SEQ ID NO: 263693 - DNA, 201 bp, Homo sapiens
tttatctgatataagtatagcaattatctgctcttttttattttcatttgcacggagtatctttttccatcccttcattttctgtctgtgtgtgtccttayatgtgaaatctgtttcttgtaggcagaatatagttgggtcttgctttttaatctgttcagccattctacatcttttagttatagggtgtgatctatttac

SEQ ID NO: 263694 - DNA, 201 bp, Homo sapiens
aaacgaggctccgtgggcgtgggaccctccaagccaggcatgggatataatctcctggtgtgccatttgctaagacttttggaaaagtgcagtattaggaygggagtgacacgattttccaggtgccatctgtcaccccttctcttggctaggaaagggaattccctgaccctttgcacttcctgggtgaagcgatgcttt

SEQ ID NO: 263695 - DNA, 201 bp, Homo sapiens
ttacgttaaatagaaaaaaaacaacaaccaaccaaccaaacaaaattcaggtctcagaaacaagaagattccatgtaatctagggaggaagacaagccgargaactacccagtgcccagaaatcctggctgggcagctccatctcattggccaggagatgtgcttttgaaagaaagatctgcctggaatcctgttctgtta

SEQ ID NO: 263696 - DNA, 201 bp, Homo sapiens
cgcgcccagccgagctaagtattcttatattcagcaaataatacttcaagtaatggctacaaataaactgttttgaatatgcaaggactctaggaatattrgtctcatgaggctttcttggggaaataaactaatatatttttaaatgtttcttaaggacaccaaaacaatgtgaacaaatggtaatacatacgaatataa

SEQ ID NO: 263697 - DNA, 201 bp, Homo sapiens
agaatgagtccctgcccttctgatcaagataaccctcagaatttgaattaatgagtcttattgttctgtctctcagccttgagcctctgcacagccccagrgaacacagcactagctacatgtgtgaaatagaaagaattattctcctccatcccctctccagccatggtgccaccctgagataccacctttgcccttaaa

SEQ ID NO: 263698 - DNA, 201 bp, Homo sapiens
atctaaagtgagcctctagaggctgggtgcggtggctcacacctgtaattccagcactttgggagaccaaggtaggcagatcacttgaggtcaggagttcmagatcagcctcgccaatatggagaaaccccatctctaccaaaaatacaaaaaattagctgggcgtgatggcaggtgcctgtaatcccagctacttaggag

SEQ ID NO: 263699 - DNA, 201 bp, Homo sapiens
tgcttcatacaaggtgtacaaaatgctcgtcaagaaaaagtcaataggaaataagttgtttcctttcagaagtaaaatgctcaacactgtttgcttagatrgtatatctacaaagtgagtccaaataatttgggtccaaataactgctttaaagcaaaaaaaagaaggaggaatgttagtttgaatttaactatgttagta

SEQ ID NO: 263700 - DNA, 201 bp, Homo sapiens
gtggcataattgaacagttatggcaattttctagatctattataattctgttttaatagacactaaagagacattttaaagaagcaaacaaaatcagtaaraagaaaacctggatttaggcaataagaagaaagaaaaagtaaactccaaggtttatttatatagcccagagattagcaggatggtgatatcaatagcaga

SEQ ID NO: 263701 - DNA, 201 bp, Homo sapiens
tattgtattagtctgttttcatgctgctaataaagacatacccaagactgggtaatttaaaaagaaaaagaggtttaatggactcaccgttccactaaccrgggaggcctcacaatcatggcagaaggcaaagggcatgttttacatggcagcaggcaagacagagaataagagccaagtgaaaagggaaacgccttataa

SEQ ID NO: 263702 - DNA, 201 bp, Homo sapiens
accacaatgtcatcagaacctagtagctgctcagtgaatatctgttacagaaatcaatagatctatggtaaatgactctggccattttcccaaacctgtaycatagattttaaaatcgtataaaaattgattagtaacaatggtttttattgaagatcaagtgtgatatggtcttaaagattcagacttagacttgaattc

SEQ ID NO: 263703 - DNA, 201 bp, Homo sapiens
acactccagccatattgacctttctttttgtttgtttgttttgttttgtttgagacagggcctcactctgtcatccaggctggagtacagtggcccgaacrtggctcactgcagccttaaccacccaggctcaagtgatcctcccacctcctgagcagctggaactacaggtacatgccaccacgccctgctaatctttgt

SEQ ID NO: 263704 - DNA, 201 bp, Homo sapiens
taggatttcagttatctgcatccacacagctgaatgagaaacagcatggagaaacttgaatggaaagttttatgggccaggcctggaagtgacaaacatcrttttcaatcacactgcataggagtttatttagtcacaaggccatgcctcactgtaaaggaggctggagggaaagcccccctctgtgcccaaaagagggaa

SEQ ID NO: 263705 - DNA, 201 bp, Homo sapiens
attccacctacaatagttatgtcaaataattagaggtctgtggataagccaaggtatatatttatgatgtgattaaaaccatatccaagaactgtctactrattcagtatccggtatcatccattcagaccagttcatgaattcaaacagttcagcccaaagacatgatataaaatacttttcatcctgaaaaagtagccc

SEQ ID NO: 263706 - DNA, 201 bp, Homo sapiens
catctgttaagtgatgcatgattctgttcatttgatctaaacgtgattccttgtgatccaataaaagacaaattatctacccatatacacaatttgccccrtgcggtggtgggacaggaatgggataatcaaaacattcaaactccctttcagaaagggaagaatgggagacacattgcaataatagaattctgatgacaa

SEQ ID NO: 263707 - DNA, 201 bp, Homo sapiens
ggaggggagggagaggcgtaagcttcacaagatagggatgccagagcgacagcaaaggtagtcagtatgctactgcagctcaccccaatcatactcacacrtggctcttctgtaacatcctttgtctcttggccagtcccttcttggagggcagggctcagtaatgtaccagtccccccaggaaagaataggctggaccga

SEQ ID NO: 263708 - DNA, 201 bp, Homo sapiens
tctttccaacctgctctgttttgtcaccatctgccacctaacagctaagccaacagcacatgtatttttaggtttttgtaatgatggcaccatactactakgtaagctaagatgctgtaacagataggctaaaatatataagggttcaaactattagaatcctattttcttacataattgcaacatgtattttagatttag

SEQ ID NO: 263709 - DNA, 201 bp, Homo sapiens
gagaaaaacataatgaaacaattacctctatgaagaaagaacacaaggcaaaaatgcaagaaatcaaggagagatggcaagacacctggagaaaggggaaygtgggctagcaaaactcaggaaagaattagaaggaaatataaagccatcagagaaatgtaggtaaaattggaaacatcacagaaacagaccctgtagaaa

SEQ ID NO: 263710 - DNA, 201 bp, Homo sapiens
caggtcgagattctgggccactttgtttacctactcaagcctcagcaatggcgggcgcccctcccccagcctcgctgctgccttgcagttcgatctcagastgctgtgctagcaataaacgaggctccgtgggcgtgggaccctccaagccaggcatgggatataatctcctggtgtgccatttgctaagacttttggaaa

SEQ ID NO: 263711 - DNA, 201 bp, Homo sapiens
catgagcctccacacctgatagaagcacctcttaagaataggaacatgaagatgagatcatttctaacagacaaattacaaaattctctgtaactatttargttggcatttggctggatttttagacaatttttctagctttccttctagccctgaatctgtatagaaattgtttatatcacttgcctattctttcttttc

SEQ ID NO: 263712 - DNA, 201 bp, Homo sapiens
tcaagcctcagcaatggcgggcgcccctcccccagcctcgctgctgccttgcagttcgatctcagactgctgtgctagcaataaacgaggctccgtgggcrtgggaccctccaagccaggcatgggatataatctcctggtgtgccatttgctaagacttttggaaaagtgcagtattaggatgggagtgacacgattttc

SEQ ID NO: 263713 - DNA, 201 bp, Homo sapiens
acattttagtcttcaatctattgggagttgtttttttatatagtgagagaaggatctagtttcactcttttgcatatagatatccagttttcccagcaccrcttattaaagagactgacctttcctcaatgtatgttcttggaaactttattgaaaaggagctggctggaagtgtgtggatttatttctgggtcctctatt

SEQ ID NO: 263714 - DNA, 201 bp, Homo sapiens
catggtgtatatgtacatttactttatccagtgtattgttgatgggcatttgggttgattccatgtctctgctattgtgaataatgttacaatgaacatayatgtgcatgtatcttcataatagaatgatttatattcctttgggtatatacccagtaatggtattgctgggtcaaatgatatttctgtttctagatcttt

SEQ ID NO: 263715 - DNA, 201 bp, Homo sapiens
gttttccaatttattggtgtacagttgtacataggagtctctactgatcctttttacttctgcagtgtccattgtaatgttccctttttcatctctcattytatttgtttgaatcttctcttttttcttagtctagctaaaggtttgtcaattatctttttcaaaaaccaacttttcattgtttatcttttatgttgtttt

SEQ ID NO: 263716 - DNA, 201 bp, Homo sapiens
tctcattttatttgtttgaatcttctcttttttcttagtctagctaaaggtttgtcaattatctttttcaaaaaccaacttttcattgtttatcttttatrttgtttttactgtctatttatttctgctctgatcttatttcttttccttctactaattttgggtttgatttctgtttttctagttccctaaggtgcatca

SEQ ID NO: 263717 - DNA, 201 bp, Homo sapiens
atttatcacacacacctgcatatatactcactacaactatctaacacacttcaaacagttcagggtctttgagtagtggtattcaaagttagccataggcrattagaggtggcatttaagtgccaaaacagataaattttcattttcacttggtattgtccaggaaagaaacatttaaccaatgaaacgattatgaacatg

SEQ ID NO: 263718 - DNA, 201 bp, Homo sapiens
cttttccttctactaattttgggtttgatttctgtttttctagttccctaaggtgcatcataaggttgaagtctttctattttttgatggaggaatttatrtctataaatttccctcttagtactgcttttgttgtattccacatgattctcatatgttgtgtttccattttcatttgtctcaggatagttttttaatttt

SEQ ID NO: 263719 - DNA, 201 bp, Homo sapiens
gatattttcttccaagagcaccaactaactacattgactccctcccagtcaaatttggggggtggcaagcaaggtgggggaagggggaggtgggagaacaraaaaagagaaaaatattaactacttggttcacctgtgacagaacccagagtgacctcttgtggtaaatactaactacagtactttggtgaacagcacaac

SEQ ID NO: 263720 - DNA, 201 bp, Homo sapiens
aagaaggtaatctataagaataaaaattgcctaccattatgaatttatataactaaaaaatatacaggtatttaaaagaatattaggccagaccctattcrctattttttccgacccaaatacaacactactgctttagacttttattgtttcaggcattggccaaaacgaagaaataaagtttaaaacctcaaattaaaa

SEQ ID NO: 263721 - DNA, 201 bp, Homo sapiens
gttacatgatttttctcccatagtatgtttgaatccattgctttttattcttgttatatctatcataggtttttgctttgcacttaccttgaggcttaccaaaaaaaatcctgtagttacaacaagttatttaaaactgatataaacttaaatttgatcacaataaaaggaaaagaacaaacaaacaaacaaaaatcatgt

SEQ ID NO: 263722 - DNA, 201 bp, Homo sapiens
ttgaaatatgcaaaaatatctgttaatttattcaaacttgttcaggtgtcatgaaagataaaaatatgcttccactttctatctccttcacgatcaaaggkacattttttaagtgtctgtgtttctttgatggcattaacttcattttttcatccagctacagtggttcaaaatgcatgagatactttaacatatatttct

SEQ ID NO: 263723 - DNA, 201 bp, Homo sapiens
aggatcagcgttgtatttcggagtctttattctgagactctttaacccccattgaggaactcctctattttttcaatgcttgtaaatgtataaaaataaamtcattgtgctttaattttcccccaaatttaaaaaataaaaataaatgccagcagaccaaaaagggcttacagaaaagatcaggacaaaggttaacttttc

SEQ ID NO: 263724 - DNA, 201 bp, Homo sapiens
gggtcattttttccctctctgaaattttcagagaccaggcagctgagcaaacccagaaggttgacacgaggcaattttattccgctaaaaatctttatgcaaaaaaaaaaaaaaaaaaatcaagagactcggtggaataacactaggctattctagctttccacaggaagtgctgctggccatggagcttatccccttaca

SEQ ID NO: 263725 - DNA, 201 bp, Homo sapiens
taaggatacagaaaacagaaataaaatccaacaaaatgcaaaataaaatagaaataggaaggaaaaggcccatacatatatataatttaaaaattatacaggaaaaaaaggactgaaaggaatatatgtatattccttctatatatgtatatgtattcttatactttttcttaaccttatatatatatatacatacataca

SEQ ID NO: 263726 - DNA, 201 bp, Homo sapiens
ggtcattttttccctctctgaaattttcagagaccaggcagctgagcaaacccagaaggttgacacgaggcaattttattccgctaaaaatctttatgcaaaaaaaaaaaaaaaaaaatcaagagactcggtggaataacactaggctattctagctttccacaggaagtgctgctggccatggagcttatccccttacag

SEQ ID NO: 263727 - DNA, 201 bp, Homo sapiens
aaagaaatcaggttagttgaggtttattgacaacaacactcaacaaaggccacagaaaacatgacagcaacacctacaagatactcatgagaaaagggtawaagacaaggattttatatccagctcaactcctcttaaagtttaaaggctacagacaactacagtcagttattatttgtgatagttatattctacaaagtc

SEQ ID NO: 263728 - DNA, 201 bp, Homo sapiens
aagtcaaagatgaccctaacacttctagagtaaaaaacaaaaatactaaagacactttgaatagaaacgggagatacaaaaaaaaaaaagtcaatctgagrccaaaagcaaataaattctattctgcctacactgagttttagatgacttttgagtagtacaagaagagaaatcctgtatacctttggaaatacagacctg

SEQ ID NO: 263729 - DNA, 201 bp, Homo sapiens
  misc_feature (1)...(201): n = A,T,C or G
tgccctcatagagttccagaaagattaccagttaccttgatgatgtttgctctagtacagacagaagctgttttaggaacgagcaaggggaatatgtcacncatgtcattcctccctcttggagacctttagtttctgaggtcagttaatgaggcagctctttccttctgacctgtagttctttctttggtccatcacagt

SEQ ID NO: 263730 - DNA, 201 bp, Homo sapiens
actggccctaaggaatatgctggccagttgcaacaaggtgctaatacagcattttaaaagtgtgttacagactccgtatgtggggaacaaacctcaagatktaacagatgagagagataggaattagaaagcttcaatgtcacacaaagacaaagcttcgttttgttatattgtcaaaagtccattttaaaacagaatcat

SEQ ID NO: 263731 - DNA, 201 bp, Homo sapiens
gccacagcccagaccaagtaaatcaaaattccaaaggatgagacacaggcattactatttttttttaaagttccccaggtgatttctttttttcttcttctttttttttttttaaatggagtcttgttctgtcaccaggctggagtgcagtggtgcaatctcggctcactgcaacttccgcctcttgggttcaagcaattc

SEQ ID NO: 263732 - DNA, 201 bp, Homo sapiens
tctcagactgctgtgctagcaataaacgaggctccgtgggcgtgggaccctccaagccaggcatgggatataatctcctggtgtgccatttgctaagactwttggaaaagtgcagtattaggatgggagtgacacgattttccaggtgccatctgtcaccccttctcttggctaggaaagggaattccctgaccctttgca

SEQ ID NO: 263733 - DNA, 201 bp, Homo sapiens
caatagcgtatgagtttccttttttccacatcctcacaggcattttttattttttgtaatttgataatagccattctacctggggtaagattatatctcartgtggttctgattgggatttccctgatgattagtggtgttgaacagtttttttatatatcttttggccatttgtatgccttcttttgagaaatgtctatt

SEQ ID NO: 263734 - DNA, 201 bp, Homo sapiens
atcccaggactgccggtgtggttctctctgctcgctctaaccattccccctgcttctgtggcaggcagtaatccccgctttccatcctctagtcagcttcytcccagccagccacaagcgaacaggctcgcaagcagcggatgaaacaggaagtctgacagcttgagtctgcagtgggacccctagtgttttcccactcca

SEQ ID NO: 263735 - DNA, 201 bp, Homo sapiens
ggtacatgtgcacaacgtgcaggtttgttacatatgtattcatgtgccatgttggtgtgctgcacccattaattcatcatttatattaggtatatctcctmatgctttccctccccctgcccccctccccccaccccacaacaggccctggtgtgtgatgttctgcttcccatgtccaagtgctttcattgttcaattccc

SEQ ID NO: 263736 - DNA, 201 bp, Homo sapiens
tttatgaggtaccatgtgattttttttatactttaagttctggggtacatgtgcacaacgtgcaggtttgttacatatgtattcatgtgccatgttggtgwgctgcacccattaattcatcatttatattaggtatatctcctcatgctttccctccccctgcccccctccccccaccccacaacaggccctggtgtgtga

SEQ ID NO: 263737 - DNA, 201 bp, Homo sapiens
agccagatgtaacataaatagtttaaaagaattagagagaaaattatatataaaacaatatataaataaaataaaatatgaatataatacataaataaaaytatatatacaagaataaacaagggaaactcagcatatgtataactggagttcccaaaggatgaaagaataaaagcatagtaatgtcatagaccagatttg

SEQ ID NO: 263738 - DNA, 201 bp, Homo sapiens
gcaggtcattacagtggaaccagccatagtactaagacaaggtcttgcctccttctcttgatgtggcctcacctagaaggatgatgtgggcaaagccctaytcagattgtggcctcttgggcaagactctaggatgggcatatctcagacacaacacctgtgaaaatggcagctagcagcactgccagggaggaatgaccg

SEQ ID NO: 263739 - DNA, 201 bp, Homo sapiens
cacttgctcggactgtatgacaccgcgggacaggtacatttttattatcttgattcattggagggcggtggtgtaggggagaaaaagatccatttgcttakgcagatgggactcatagcacagatattacccattctgatcatttggggccaatttattgtctgcctaaatgacgaccaaaagcacattctcaatatttta

SEQ ID NO: 263740 - DNA, 201 bp, Homo sapiens
taagttcaacagcagaacatcatgggctagctgtaagagtcatgccaggtaccaattgacacctattgggggctgctcctttttctcaatatttatacacaaaaaaaaaacagagtagcaattttcatgaaccagaacttacagaaaaaggatatgttgagatactaataacaggagatatagacttacctctcttggtct

SEQ ID NO: 263741 - DNA, 201 bp, Homo sapiens
gtcaaaagtaacccacctacttatgcagagtctctggaggcatgctgccttagggtccagagatgacagatagatagacagatagatagataggatagacdagatagatagatagatagatagatagatagatagatagatagatagacagacagacagacagacaggtttctccaccccctgcactgaacttcttcctct

SEQ ID NO: 263742 - DNA, 201 bp, Homo sapiens
catgctgccttagggtccagagatgacagatagatagacagatagatagataggatagactagatagatagatagatagatagatagatagatagatagayagatagacagacagacagacagacaggtttctccaccccctgcactgaacttcttcctctaactaatgccctcttttccactttcaccagcatctatctt

SEQ ID NO: 263743 - DNA, 201 bp, Homo sapiens
atttaattcaattcaacaaatatttattatgcatctatacaccaggcaccatagtaggtatttacattatcctcattgaaccaaaaagaaactgagaaacagagaagttcagtaactggcacaaggtcacaaaggtagtatgtgatggagtcaggattatgtcctcaggtactctgtcttcaaagcccaaatgcttagcca

SEQ ID NO: 263744 - DNA, 201 bp, Homo sapiens
gccttagggtccagagatgacagatagatagacagatagatagataggatagactagatagatagatagatagatagatagatagatagatagatagataracagacagacagacagacaggtttctccaccccctgcactgaacttcttcctctaactaatgccctcttttccactttcaccagcatctatcttagctgt

SEQ ID NO: 263745 - DNA, 201 bp, Homo sapiens
cccaattattgactagaaatgtggtaaattagccacaatagtgggggttttttttgttttgggtttattttttaggattttacttttcagcatcattgccmtcttgctttgcattttgcattaggtacctaaaacctgtgcttaagttttaatagtagtagcagtagtggccacatatactgagtcccgtgttctgcatac

SEQ ID NO: 263746 - DNA, 201 bp, Homo sapiens
tttaattcaattcaacaaatatttattatgcatctatacaccaggcaccatagtaggtatttacattatcctcattgaaccaaaaagaaactgagaaacagagaagttcagtaactggcacaaggtcacaaaggtagtatgtgatggagtcaggattatgtcctcaggtactctgtcttcaaagcccaaatgcttagccat

SEQ ID NO: 263747 - DNA, 201 bp, Homo sapiens
tttcccagcactttgggaggctgaggtgggtggatcacaaggtcaggagttcaagaccaccctcaccaagatggtgaaactccctctctactaaaaatagaaaaaaaaaaaattagccagtcatggtggtgggtgcctgtaatcccagctactcagaatgctgaggcagggaattgcttgaacctgggagacgcaggttgc

SEQ ID NO: 263748 - DNA, 201 bp, Homo sapiens
taattttaaaaaacttttcaaaatgaacgctaagcccttctcatttaactatttgccttgctttataggctataaaagtatgtattaataggtgtgataayattctttgtttttagggttttataaatatttcaaagacaaatacaagcagagagatttctaatagacaagctacttacacaattctgtgccctgaaaggt

SEQ ID NO: 263749 - DNA, 201 bp, Homo sapiens
aattcaattcaacaaatatttattatgcatctatacaccaggcaccatagtaggtatttacattatcctcattgaaccaaaaagaaactgagaaacagagaagttcagtaactggcacaaggtcacaaaggtagtatgtgatggagtcaggattatgtcctcaggtactctgtcttcaaagcccaaatgcttagccatcta

SEQ ID NO: 263750 - DNA, 201 bp, Homo sapiens
ctgaggcagggaattgcttgaacctgggagacgcaggttgcagtaagccaagatcatgccactgcactctagcctgggtgatagagcgagactccatctcaaaaaaaaaaaaaccacacaaaaaaaaaaacaaaaaaaaactctgatttaaagggagcttgtcaaatcctttaattcctcatttgtaaaataagaaaaaga

SEQ ID NO: 263751 - DNA, 201 bp, Homo sapiens
agctccatttgaacctcatgttagtagaaatattccttctcaatcttgttttccaccttgaatgctggatttatttctaagcttatatgttatacctcatyaatctaatgctctaagtcagtggttctcatcctcggccacttggggagctttaagaaatatgaatacctaggtctcaaccccaaaacatcaatgcctgga

SEQ ID NO: 263752 - DNA, 201 bp, Homo sapiens
agttttatgccttccagaaaagttgtgtggtcatgtagttctaattgtaaccttgaaaacaaataaatagggcatttaaacagtcgttgcaaataagattyttatcacaaagggccattctgttgcattctatttgtagtataaagcactgttacatacagctttaaaattggtcaaaaaagtcctctattgtaagaacat

SEQ ID NO: 263753 - DNA, 201 bp, Homo sapiens
tcagttttttgagaaacctccatattgttctccataatggctgtactaatttacattcccaccaatagcgtatgagtttccttttttccacatcctcacargcattttttattttttgtaatttgataatagccattctacctggggtaagattatatctcaatgtggttctgattgggatttccctgatgattagtggtg

SEQ ID NO: 263754 - DNA, 201 bp, Homo sapiens
gaacctgggagacgcaggttgcagtaagccaagatcatgccactgcactctagcctgggtgatagagcgagactccatctcaaaaaaaaaaaaaccacacaaaaaaaaaaacaaaaaaaaactctgatttaaagggagcttgtcaaatcctttaattcctcatttgtaaaataagaaaaagaataagaatatttgcatggt

SEQ ID NO: 263755 - DNA, 201 bp, Homo sapiens
aataataataagcatccagaggttttcttcggaatctctataaaaaccacatcgtaggtaaagcctggactttgaaaccagacaaactggtgttctattcycagctccaactcttaccactactgtgttcttggaaaaattacaaaacctgagactctttttttcctgtactattaaagtaagaaattaatgagataattc

SEQ ID NO: 263756 - DNA, 201 bp, Homo sapiens
agcagacatgaaaaaacaaaaaaacctcctcacacaccctctgcattctcttttgtctaagattctacttgaaaaactagaagagagctagcagagctgtcacacacacacacacacacacacacacacacacacacacacacacaaaatagcagagcatccaaaaaaaaaaaaaaatagtggccaggcgcggtggctcag

SEQ ID NO: 263757 - DNA, 201 bp, Homo sapiens
agcatggagttgtatgcaatcaaagtttcattgttatcagcttcaaatagactgttatgagtgtaagatgttctacataagcctcatggtaaccaaaaagcacacacacacacacacacacacacacacacacacaaagatacaaaaaatactactacagaaaaccatcgaaccacaaagcaagacaacaacagaggaaaa

SEQ ID NO: 263758 - DNA, 201 bp, Homo sapiens
cccaaagtgctgaaattacaggcatgagccaccgcacccagcctccatcactcaataaagacatattttcatgagtattcttaattcttcaaagttgaggwgagtagccaaaggataggtgaggcaatattaattgaggagaatgtgaggatcatgggaagtggtatgtaaaaagaaatggaaaagttgcttgggaatgaa

SEQ ID NO: 263759 - DNA, 201 bp, Homo sapiens
gtagcagctactcatcctccacccatagctccatgtcaagaagctgtatttgtgttcctgaagcaaccttcacacagtattcaggatcaaacgagtggggraagagggaagcaaacaccggggaagggaaagaatctgatttccacaattaccacattattagattcaaaggtccagttttcaacaaaataccacaaatca

SEQ ID NO: 263760 - DNA, 201 bp, Homo sapiens
gcagacatgaaaaaacaaaaaaacctcctcacacaccctctgcattctcttttgtctaagattctacttgaaaaactagaagagagctagcagagctgtcacacacacacacacacacacacacacacacacacacacacacacaaaatagcagagcatccaaaaaaaaaaaaaaatagtggccaggcgcggtggctcagg

SEQ ID NO: 263761 - DNA, 201 bp, Homo sapiens
gcatggagttgtatgcaatcaaagtttcattgttatcagcttcaaatagactgttatgagtgtaagatgttctacataagcctcatggtaaccaaaaagcacacacacacacacacacacacacacacacacacaaagatacaaaaaatactactacagaaaaccatcgaaccacaaagcaagacaacaacagaggaaaaa

SEQ ID NO: 263762 - DNA, 201 bp, Homo sapiens
ttaaaaattacaaaaatctaaattgttacatcattcaaggcattgataggtaaataatgattcttttgactgatgaccatcaaaaaccagaataacagatwtgtgaccacgagtttcaatttctttctgtggaaacctattccagattcaggattcataggtcagtttcataaattttagttccacacatgttttttcagg

SEQ ID NO: 263763 - DNA, 201 bp, Homo sapiens
cagagctgtcacacacacacacacacacacacacacacacacacacacacacacaaaatagcagagcatccaaaaaaaaaaaaaaatagtggccaggcgcrgtggctcaggcttgtaatcccagcactttgggaggccgaggtgggtggatcacaaggtcaggagttcaagaccagcctggccaagatggtgaaaccctgt

SEQ ID NO: 263764 - DNA, 201 bp, Homo sapiens
catggagttgtatgcaatcaaagtttcattgttatcagcttcaaatagactgttatgagtgtaagatgttctacataagcctcatggtaaccaaaaagcacacacacacacacacacacacacacacacacacaaagatacaaaaaatactactacagaaaaccatcgaaccacaaagcaagacaacaacagaggaaaaaa

SEQ ID NO: 263765 - DNA, 201 bp, Homo sapiens
ccatgtcccttctatgccaattttgctaaaggttttaatcatgaagtgatgctggattttgtcaaatgcttttactgcatctattgagataactatgtgatttttttttaattctgtttatgtggtgtatcacatttattgatttgtgtatgttaagccatcccagcatccctagtatgaaacccacttaatcatggtaga

SEQ ID NO: 263766 - DNA, 201 bp, Homo sapiens
ccttaggtctagtagtgattgttttataaatttgggagctccagtgttaggtgtatatatatttaggattgtgacatttttctgatggacaagtcctttctttttttttttttttttttttttttgagacagagtcttgctctgtcgcccaggctggagtgtagtcgcacgatctcggctcactgcaagctccgcctcccg

SEQ ID NO: 263767 - DNA, 201 bp, Homo sapiens
tcctttctttttttttttttttttttttttttgagacagagtcttgctctgtcgcccaggctggagtgtagtcgcacgatctcggctcactgcaagctccrcctcccgggttcacaccattctcctgcctcagcgtcccgagtagctgggactacaggcacctgccaccatgcccagctaattttttgtatttttagtgag

SEQ ID NO: 263768 - DNA, 201 bp, Homo sapiens
gtaaattgcagatctcagtgaaaagtgatctcatggttctcacatatctttcatcatatttgattcaataccataaaccttgataacaagaaaacccacayaaagtgccactagtggtgctggaagtgctcccaataagcagagaaaagtcatgatattacaagaaaaagtcaaattgcttgatatatactgtagattgag

SEQ ID NO: 263769 - DNA, 201 bp, Homo sapiens
tatcaagaaagtggaaacacaactcacagaactgaagaaaatattttgaaatagtgtatctgctaatgtaccagtatccaaaatatataacccaactaagmaataccaaatctgaaaaaacatttcctcgaagaagaaacacaaatggccagtaaacacacgaaaaggggttcaacatcattagttactacagaaatgcaa

SEQ ID NO: 263770 - DNA, 201 bp, Homo sapiens
cttgataacaagaaaacccacacaaagtgccactagtggtgctggaagtgctcccaataagcagagaaaagtcatgatattacaagaaaaagtcaaattgyttgatatatactgtagattgaggtctgcagctgcgataacccaccatttcagatagccattcctcttgtaaacagatggcttaaacttatgtcattgata

SEQ ID NO: 263771 - DNA, 201 bp, Homo sapiens
ttaaatgatttaaataaatggaaaaacatatgtgtctatggataggaaaactagatattgttaaatggcaataattcccaaactaatctatagattcacasaatcccttatgaattcccaaatgtcgttttttgcaaacaatggcaagcggatgctgaaattcacatggaaatgcaagagatccaaaataaccaaaataac

SEQ ID NO: 263772 - DNA, 201 bp, Homo sapiens
tacaaaagttaactgggcattgtggcacatacctgtagttccagctacttggaaggctgaggcaagagaatcgcttgaacccaggagggggaggttgcagygggctgagatcaggccactgcactgcagcctgggtgatggagtgagactccaactcaaaaaaaaaaaaaaaataaaaaaaattcatttacaatagcttca

SEQ ID NO: 263773 - DNA, 201 bp, Homo sapiens
tcgagaccagcctggccaacatggcaaaacgccatctctactaaaaaatacaaaagttaactgggcattgtggcacatacctgtagttccagctacttggraggctgaggcaagagaatcgcttgaacccaggagggggaggttgcagcgggctgagatcaggccactgcactgcagcctgggtgatggagtgagactcca

SEQ ID NO: 263774 - DNA, 201 bp, Homo sapiens
tcaatagtgtttctgtatacttgaaatgaacaatccaaaaataaaattaaaaaacaattccaggctgggcacaatggctcatgcctgtaatcccagcactktcgaaggccaaggcaggtggatcacctgaggtcaggagttcgagaccagcctggccaacatggcaaaacgccatctctactaaaaaatacaaaagttaac

SEQ ID NO: 263775 - DNA, 201 bp, Homo sapiens
gacatacatttttaggaaaatcctaaggactcaatttaaaaactattagaacaaataagttccacaaggttgcagggcacaagatcaatatacaaaactcratagtgtttctgtatacttgaaatgaacaatccaaaaataaaattaaaaaacaattccaggctgggcacaatggctcatgcctgtaatcccagcactgtc

SEQ ID NO: 263776 - DNA, 201 bp, Homo sapiens
gtgacatttttctgatggacaagtcctttctttttttttttttttttttttttttgagacagagtcttgctctgtcgcccaggctggagtgtagtcgcacsatctcggctcactgcaagctccgcctcccgggttcacaccattctcctgcctcagcgtcccgagtagctgggactacaggcacctgccaccatgcccagc

SEQ ID NO: 263777 - DNA, 201 bp, Homo sapiens
tcttgaatggtcaattttcaagcaacatgtggatgattcgctttataaattcacagtagaaaagatccaattccaggaaaactttgttatcctttctcatmccatgatctgatttgctgtatttgattatttttataaaattgagcacatattttgtaaatcttgggaatggaactactttatctagaagaaaaataagtt

SEQ ID NO: 263778 - DNA, 201 bp, Homo sapiens
agccttgagcttgggcataatctgcaaagctacatatgggtgaatcactccgcaaatgaaaaaaataatcaacatgactctaagaccttcagaggggtcastgagggaaattagagagcacctgccctcatgggaagaaacaaaggaatcttaaaaaaacaggaaagagcctgggatctttggggtggttttgatgcagtt

SEQ ID NO: 263779 - DNA, 201 bp, Homo sapiens
tcctatctcttctcttgaatggtcaattttcaagcaacatgtggatgattcgctttataaattcacagtagaaaagatccaattccaggaaaactttgttrtcctttctcatcccatgatctgatttgctgtatttgattatttttataaaattgagcacatattttgtaaatcttgggaatggaactactttatctagaa

SEQ ID NO: 263780 - DNA, 201 bp, Homo sapiens
tcatttatacttttttttttttttttttgagatggggtctcgccttgtggcccaggccggagtgcagtggcacgatctcagctcactgcaagctccgcctyccggttcacgccattctcctgcctcagcctcccgagtagctgggactacaggcgcccgccactacacccgtctaattttttgtatttttagtagagactg

SEQ ID NO: 263781 - DNA, 201 bp, Homo sapiens
catttttcgacttctttgaaaatggggaccagcaacctttaaacaaagtatctgataatggtgacttcagaggatttaatgcacttttttttttcatttcwtggttgttaaaatcaagaatctactaatcaagaaaaattgttttttcttatttagtctttttgccttctacttcttttttaaaggcttctaaactttctt

SEQ ID NO: 263782 - DNA, 201 bp, Homo sapiens
gcattgaattttcttgacctaagtggccagtgtcacatctactgaatagcttaactatataatgtgtaaatatcacttgggattccttcatctacattatrttcaaaagctgacatacattttgggtgcctcactcaaactcctctagttctaatatacagagcatatttcagagtaaccctaagttcggctgacggctag

SEQ ID NO: 263783 - DNA, 201 bp, Homo sapiens
atggagttgtatgcaatcaaagtttcattgttatcagcttcaaatagactgttatgagtgtaagatgttctacataagcctcatggtaaccaaaaagcacacacacacacacacacacacacacacacacacaaagatacaaaaaatactactacagaaaaccatcgaaccacaaagcaagacaacaacagaggaaaaaag

SEQ ID NO: 263784 - DNA, 201 bp, Homo sapiens
ataagtaaaatagagactagaaaagcaatgaaggtcaatgaaacaaaaggtcaatgaaactgagagttggtttgtgaaaaaataagcaaaagcaacaaatraggtagaataaccaagaaaaagcactcaagtaaagtcagaaatgaaagaagagacattacaaccaacaaaatagaaaaacaaaggatcatcagagactaa

SEQ ID NO: 263785 - DNA, 201 bp, Homo sapiens
tcaacataataataccaaatcaaactcaacaacacattaaaaggatcatccaccatgatgaaattgaatttatgcctgggatgcaaagaggtttcaacatrtgcaaatcaataaacatgtacatcacgttaacagagtaaggaacaaaagtcatatgatcacctaattagatgcagaaaaagcattgacaaattcaacatc

SEQ ID NO: 263786 - DNA, 201 bp, Homo sapiens
atcgcttcaatgtcacaaggagctagtaaacttaccatagttttcctttgtgatatccttactgcctcagctttcctatctttcaccatctcttgagcaawttagaagcctgttccctgtgaaatgaggaagagaattatattttattggcagacacttagctccaattttacagccagtatctagttattcccataaacc

SEQ ID NO: 263787 - DNA, 201 bp, Homo sapiens
aattatactacacagcaatagtactaaaacaccatggtgctggcataaaaatagacacatggatcaatggaacagaagagagagcccagaaatgaacccawacatctgcaatcaattgattttggacacatatacaatgggaaaaggacatcctcttcaatagtgttgagaaaactggatatccatatgcaaaagaatgaa

SEQ ID NO: 263788 - DNA, 201 bp, Homo sapiens
attttccaaacttttagatttctcttcctcctcaggaacaccaattattcttaggtttggtcatttaacataatcccaaacttcttggaggctttgttcattttttttttttttaattcttttttctttgtgtttgttggattggattaatctgaaagcctgaagttctttcttttacttgttttattctattcctgacac

SEQ ID NO: 263789 - DNA, 201 bp, Homo sapiens
acccgggaggcggaggttgcagtgagctgacatcatgccactgcactccagcctgggcgacaagagggagactctgtctcaaaaaaaaaaacaaaaaaaawgaaaagaaaagaaaaaaagaaattatctggtgtgatgcatgaaatgctaagcacagggtatgaaaaatagcatctgcttgaaaattctaattagtagtag

SEQ ID NO: 263790 - DNA, 201 bp, Homo sapiens
ataaaatatgtaatggaaaataattagtctaaaggttatatgacaactaaataaaacaaatatttggagtctaagttttcttaattattgtgcttcataawaatattaaaataattcacatatatcctagttatagaaaaaatatatttacatcctaaaattcatatggaatctcaagagatcacaaatagcttcactgga

SEQ ID NO: 263791 - DNA, 201 bp, Homo sapiens
aagtaacttgcccaaggtcccatattaactggcagaactgagattgaaccccgggtatctgtcttcacagtttatactcctaaccaccaaagtaaactggrtgatggatggatggatggatggatggatggatggatggatggatgaatgggtgggtggacaatgggccactttgctgtactttagcctagctaaactgac

SEQ ID NO: 263792 - DNA, 201 bp, Homo sapiens
gacagatcatgaggtcaggagatcgagaccatcctggctaacacggtgaaaccccgtctctactaaaaaaaaatacaaaaaaattagccgggcgtagtggygggcgcctgtagtcccagctactcaggaggctgaggcaggagaatggcgtgaacccgggaggcggagcttgcagtgagccgagatcatggcactgctctc

SEQ ID NO: 263793 - DNA, 201 bp, Homo sapiens
ttagaagagtaaggtaggatggagtgtatgtattttcttcataaaatagttaccatgtttactgataattaacaatatgtttatatgaggtaatagtaatrggatattaaattgggaggggaaatatcagttttgcatgagtaaaaactacgcaaaattattttgaatgagtttatttttgcaggaaaaatcaacgaccag

SEQ ID NO: 263794 - DNA, 201 bp, Homo sapiens
gtaacttgcccaaggtcccatattaactggcagaactgagattgaaccccgggtatctgtcttcacagtttatactcctaaccaccaaagtaaactggatgatggatggatggatggatggatggatggatggatggatggatgaatgggtgggtggacaatgggccactttgctgtactttagcctagctaaactgacaa

SEQ ID NO: 263795 - DNA, 201 bp, Homo sapiens
cgggcgtagtggcgggcgcctgtagtcccagctactcaggaggctgaggcaggagaatggcgtgaacccgggaggcggagcttgcagtgagccgagatcayggcactgctctccagcctgggtgacagagtgagactccgtctcaaaaaaaagaaaactattaagtactgctgttattaaagaagacctaaataaatggac

SEQ ID NO: 263796 - DNA, 201 bp, Homo sapiens
tatatttcaaaataattggaagagatttgaaatattccaacataaagaaataaaatgtgtgaggtgatggatatcctaaataccctgatttgattattacrcattgtatgcatgtatcaaaatatcacatgtaccccataaatatgtacaaaaattatgtattaataaacaaaaacaagaaatataaaaaaaattatcatt

SEQ ID NO: 263797 - DNA, 201 bp, Homo sapiens
caatgtacaagaaaatttcttataattcagtatataccacaatatagtcaaggctttaaaaagtttctctcattttgactttaatagaaaagtattctaaragcagtactcaaagtattcaacccactattgggctaagattagttgttcatgttagcaatgtatatttttgaagtatccaatctcaatgcttgaccaaat

SEQ ID NO: 263798 - DNA, 201 bp, Homo sapiens
taaaactgtctgtagctacactattggcttcatctcatgctgattacatgtactttagggcccatagtgattaaaagtcaaaccaacaggacaactttggyactgaatttcctaaacagagttttctacattccagtttgctttctgtagcaatgatacctttgcactagatgtctgtggagggaaacatccaaatgtgac

SEQ ID NO: 263799 - DNA, 201 bp, Homo sapiens; identical to SEQ ID NO: 52637

SEQ ID NO: 263800 - DNA, 201 bp, Homo sapiens
aacccatggtcttccaacttttccataatgtaaatagaaatcctttgatagccactgggttaaaaaatcagacaagcatactcctttccgactattaacawcagttatttgttcctacccaatctagttgtgacatttctcctgatgatgttttgctttggtttttggctttgaagttttaaatatacagtgttgctgcca

SEQ ID NO: 263801 - DNA, 201 bp, Homo sapiens
ggaagcacaaggaattaaacttgaccaggacaacacagcccagcagacctttgatgttttctagcctcacaaaaatatctgaatgacatagattttatttwtatatatatatataaaacaatttcatttaataatatagcatagaaataaaatcacaaatatacacacaaaagtgtaatagaagtagaacactctcatcag

SEQ ID NO: 263802 - DNA, 201 bp, Homo sapiens
agggagaaacatgggggtcacctttgcatcctccatcttcctcttattcacattcaatgagttcaagtcctactgatcctatcctctctaaatatagcaattttttttttttttgagatggagtctcactctgttgcccaggctggagtgcagtggcacaatctcggcacactgtaacctctgcctcctgagttcaagcaa

SEQ ID NO: 263803 - DNA, 201 bp, Homo sapiens
tctcacctgccccacctacagtcaacccagcaacccatggtcttccaacttttccataatgtaaatagaaatcctttgatagccactgggttaaaaaatcwgacaagcatactcctttccgactattaacaacagttatttgttcctacccaatctagttgtgacatttctcctgatgatgttttgctttggtttttggct

SEQ ID NO: 263804 - DNA, 201 bp, Homo sapiens
taatcccagcactttgggaggccgaggcgggcagatcacaaggtcagaagatccagaccatcctggctaacacgtgaaactccgtctctactaaaaatacaaaaaaaaaaaaaaaaaaaaatagcgtgacgtggtggtgggtgcctgtagacccagacactcgggaggctgacgcaggagaatggcgtgaacccaggaggc

SEQ ID NO: 263805 - DNA, 201 bp, Homo sapiens
aatcccagcactttgggaggccgaggcgggcagatcacaaggtcagaagatccagaccatcctggctaacacgtgaaactccgtctctactaaaaatacaaaaaaaaaaaaaaaaaaaaatagcgtgacgtggtggtgggtgcctgtagacccagacactcgggaggctgacgcaggagaatggcgtgaacccaggaggcg

SEQ ID NO: 263806 - DNA, 201 bp, Homo sapiens
tgacgcaggagaatggcgtgaacccaggaggcggagcttgcagtgagctgagatcgcgccactgcactccagcctgggggacagagcgagactacgtctcaaaaaaaaaaaaaaattcagtcttcatctctttctgattccaccacaccctctcctgacaatttcagtcctttccccttcttttgcacagaaaacaaactc

SEQ ID NO: 263807 - DNA, 201 bp, Homo sapiens; identical to SEQ ID NO: 52646

SEQ ID NO: 263808 - DNA, 201 bp, Homo sapiens
ctcagctgagaatgtacacattaagcaggttgggaaactcaaattttttaccactctgcgcacatccttaaggtgatcccaaaagtacagatttacggaawacaaatgaattttagcaagtcagaaaattctaacatttatgttggaatccacgaacaatggagattgactatagttttgaaaattcaagagtttgggaaa

SEQ ID NO: 263809 - DNA, 201 bp, Homo sapiens
ttatagatgttctaatagttacatttttaaaaggtaaaagaaactggtaaaattcattttaataatatattttatttaatccagaatattcaacatcttaycattctaacatggaatcaatttttaaatgttaatgagatatcttacattctttttataccaagttttcaaaattaaatgtatatttttagactaacagaa

SEQ ID NO: 263810 - DNA, 201 bp, Homo sapiens
atacttgatatgttttacaaatatctatgatactgatactacagtacatcagtatgtactgatactatataattgaacactttcacagccatgaaaggaaytctttttgattgtcactataaaagacttctgagataactttaaacttaaatataaacttcctagacaaaatcacaggctctaattttataaatctctttt

SEQ ID NO: 263811 - DNA, 201 bp, Homo sapiens
tgcaggatacaaaatcaacatacaaaaaccccagtagtatttctatatactgacaatgaactacacataaaaaattaagaaaatccaatgtccaataacawcaaaaagaataaaatatttaagaatacatttaaataagaaattaaaaatctatacactgaaaattgatgaaattgaagaaggcacaaataaatggaaaga

SEQ ID NO: 263812 - DNA, 201 bp, Homo sapiens
ttcaagaccagcctggccaatacggtgaaaccccatctctactaaaaatacaaaattagccgagcatggtggcgcgcacctgtaatcccagctacttgggrggctgaggcaggagaatcccttgaacctgggaggcggaggtagcagtaagctgagatcgcaccattgcactccagcctaggcaacaagagcaaaactcca

SEQ ID NO: 263813 - DNA, 201 bp, Homo sapiens
ataaacctacaaagtaagagaaagaaatcataaaacttcacattgcaaataattggtaccaaagatgcagtggaatgggaagtgaggaacagggagaacaragaaggcctaatgggaaatgacctcagaaacagccagcaaatatagtacattttttaaaagctggggtagctttggaaggttaggattctatctcttgtt

SEQ ID NO: 263814 - DNA, 201 bp, Homo sapiens
taaattgtattcaatttataaatgtatacatactgtttcaattacaaacccctgaagataagggtcatgagaaaatgttggcaaaatctgctctgtagcastgaatagcaattagtatcaacaatgcttatggtgtttttgaagcagcttttgtgtttcaaattgtttactgaaggagttaattttatgttgaacaccaat

SEQ ID NO: 263815 - DNA, 201 bp, Homo sapiens
aatgtatcatcacagaaagttagctacactttcctttgcctggacacagcttcttcccctctgtatagctatgacttccaaccaaatactcttgtcgttcycaccaaaataaggaaagggtaggttcctttgaaaagaaacagaatgattctgttgggaaaggatcataacctatcacacaactcctcatctaacatgaaa

SEQ ID NO: 263816 - DNA, 201 bp, Homo sapiens
tggagcactgctataacaaagtaccatagacaggtgtcttcaacaacagaaatattattgtcccacagttctggaagccaaaaatccagaaccacggtgtyggcagggttcattctttccttgagctataaggaaagatctgttcccggcctctctccttggcttgtggagggctgtcttgccccgtgtgtcttcatatca

SEQ ID NO: 263817 - DNA, 201 bp, Homo sapiens
gccaagagagaagcccctttgaaaccataggaactgtgtggaacagcatcactcactgccagatttctaccatcagggagagtaagatgtaaaaaactacrccttggccaccttcttataggtctgattttctaagaaggcatcactttgggaaaatgtgctctaataaaattgttgcttccctgttcccaccccatatag

SEQ ID NO: 263818 - DNA, 201 bp, Homo sapiens
gagagaatttccaaaagatgggcagagattcacccaaaggaaattagaagagaaggtaagcctcagaatacaggaataaggttgggaaatgttacagggawtgatgatggcccacaaagtggctatctgacaatgatttaacctcttgggtacatttctgttgagccatgggaaagataatgctttgaagaaagtgttaaa

SEQ ID NO: 263819 - DNA, 201 bp, Homo sapiens
cacctgaaagtttttgtgcacttgcttccttcttctcgtttgactattcatttgacacctttgttcttcatgaatggtatacctgtaaactccaaaccaamctttgttcaaaattatactaatggagtctaaattaatgaaattttactttattcatctgaaaacaccaccagcttagtagccaacaatgtcacaagctga

SEQ ID NO: 263820 - DNA, 201 bp, Homo sapiens
ataaagaaatacctgagactgggtaatctgtaaaggaaagaggttgaattgactcacagttccacatggctggggaagcctcacaatcatggctgatggcraatgagtagcaaagtcatgtcttacattgtggcaggcaagaaagcttgtgcaggggaactcacattcatgaaaccctcagatttcgtgagacttatttac

SEQ ID NO: 263821 - DNA, 201 bp, Homo sapiens
ttcaccaatatttggtcctctcctttctgatacatggtaggattatacttctgacccccctgttgaacccagcatgtcatttgctttgaccaacaaatatragcacaagtgtcacttccaggaggaagccttaagagtcaataggatgtctcaaaattttttctccataaatattcaatttggcacgggggtagtacctct

SEQ ID NO: 263822 - DNA, 201 bp, Homo sapiens
aagcaaaatataagttttcacatagtaattttgttatcacatattctaggtgttcaaggtaggctaaatgagaataaaattatataaatcacatgaagtcrtaggtgtcttcaaatgcttcagaatggcactaaacataaacaattcaacttccatattgcaaataaaacctcagctaaatgatctgtggttgccacacag

SEQ ID NO: 263823 - DNA, 201 bp, Homo sapiens
gcaggagaatcacttgaacccaggaggcagaggttgcagtgagcaaagattgtgccactgcactccagcctgggtgacagagtgagtgagactccatctcaaaaaaaaaaaaaaaaaaggaaaatatgtttaaattatttcctcattgcaaaaacttgtatttattatgtttatggtttatttcttatctcctcccctgga

SEQ ID NO: 263824 - DNA, 201 bp, Homo sapiens
agaacatacttaataataaaggtaacagtgaaagatggtcttgcatatacttattgcagaaaggatccaaccgctgttttatcgcaaattatcatatatayaatcctccccaatcataattaaccatcaaatgtgaatcagcagacatgaatatttcttgacatatattaagaaataaaaaataaggttacgttattttta

SEQ ID NO: 263825 - DNA, 201 bp, Homo sapiens
taagagatttggggaaaaaaacagaagtcttccaagtaagaaaaagaaagccatttctggaattataaaaagatcatgtccaagaaaatgtaactgatgtkatatgatgtgatgtgatgtgatatgatgtgtgatatatggcatgatatgacatggacaatagccagaggctgggtgcaggtggcctcacagaagaaaaat

SEQ ID NO: 263826 - DNA, 201 bp, Homo sapiens
gtagacttcttaccttatacaaattctgagaacatacttaataataaaggtaacagtgaaagatggtcttgcatatacttattgcagaaaggatccaaccrctgttttatcgcaaattatcatatatacaatcctccccaatcataattaaccatcaaatgtgaatcagcagacatgaatatttcttgacatatattaaga

SEQ ID NO: 263827 - DNA, 201 bp, Homo sapiens
agactgaagtcaaaacaatatcctccatagaggctaatccagaatcagagtatctgatctcattgcattacttccctatgtaacttctagcttcaagcacaaaaaaaaaaaaaaaaaaaaaagaggggagtgaagacttggctctcttactaaggtcataataaaactgaaagaaataagaacagtcagaattttacacaa

SEQ ID NO: 263828 - DNA, 201 bp, Homo sapiens
caagcctcttttctagaagcaaaatataagttttcacatagtaattttgttatcacatattctaggtgttcaaggtaggctaaatgagaataaaattatayaaatcacatgaagtcgtaggtgtcttcaaatgcttcagaatggcactaaacataaacaattcaacttccatattgcaaataaaacctcagctaaatgatc

SEQ ID NO: 263829 - DNA, 201 bp, Homo sapiens
acctcactctgaatctgctggcatcatgttcttggatttcccagcatccaggtgagcaataaatttctattgtttgtaaatcgctccatctaaggcatttygttatagcagcccaaatgtactacatcaatctcttttagcttaagctagttggggtcccattttgttccttaaatctattatgtattcataactatgttt

SEQ ID NO: 263830 - DNA, 201 bp, Homo sapiens
gactgaagtcaaaacaatatcctccatagaggctaatccagaatcagagtatctgatctcattgcattacttccctatgtaacttctagcttcaagcacaaaaaaaaaaaaaaaaaaaaaagaggggagtgaagacttggctctcttactaaggtcataataaaactgaaagaaataagaacagtcagaattttacacaaa

SEQ ID NO: 263831 - DNA, 201 bp, Homo sapiens
tattcactgcaagtcaatcacaaatgacttgcatttcaaatctacagcaagcacacagtcactcttgcactttttggtgggaatagatatcttgtcgacaygattacttgcaggcctaacaggatgtaaactctaaatattcttttagattacctctttttcttttttcccctttttcttttttcccctgggtatgcaagt

SEQ ID NO: 263832 - DNA, 201 bp, Homo sapiens
caaaaaaaaaagaaaaaattagccaggcatggtggcacatgcctgtagtcccagctactaagggggctgaggcaggagaattgtttaaaaccaggagctgraggttgcagtgagacgaaatcgcaccactgtactccagcctgggtgacacagtgagactgtctccaaaaaaaaaaaaaaaaaaaaaagagtctctttacc

SEQ ID NO: 263833 - DNA, 201 bp, Homo sapiens
caacttacaggggaccttttgttttgcgagtgttctaaagtttgtaggtgtacttgtctgggtgatagcattatctaaattcttccattttgattctttctttttctgttaatttccaaaacaaattttattaagtttatcaaaagcaagttaatgaaattcttcaagcttatggtagcctacattttataacttttttat

SEQ ID NO: 263834 - DNA, 201 bp, Homo sapiens
cgagagtctctcatatctgtaatcccagtgctttgggaagccaacgcacaaggatcccttgagcctagaagttcaaagttataatgagccatgatcatgcsactgcactccaacctgggcaacagagcaagacttcatctctaaaaaagaattatggatacattaatggttgttcttatttacttatagagtatatgtgat

SEQ ID NO: 263835 - DNA, 201 bp, Homo sapiens
tgtgaaaaaataagcaaaagcaacaaataaggtagaataaccaagaaaaagcactcaagtaaagtcagaaatgaaagaagagacattacaaccaacaaaayagaaaaacaaaggatcatcagagactaatgtgaacaactatatgccaaaaaattggataacctagaagaaatggataaattcctaaacacacacaactta

SEQ ID NO: 263836 - DNA, 201 bp, Homo sapiens
cagcagatcgtatcaaacagaaaaggcctttagtgcctcttggaaacggctagcaaactcctaagtgaggaaacagagtgttctcaaaaaagatctgtacytgcggtgggggcatagagagctcctggaagaaggagaatacagaaggctaagaacagaaagaattgggagagggctggtgcagggtgggaggagaagcct

SEQ ID NO: 263837 - DNA, 201 bp, Homo sapiens
acagaacacaaccccagatccctcccagggagggagacaaatctcaacagtacctttctactgagtatagcagttggtccattcatcctgatatacttaayctcaggaaccctcctgcaaccctgtccaactgctgaactgaaatagtagtaccttctggccacagaatacaccctgtggcccagcttgatcagaggcaat

SEQ ID NO: 263838 - DNA, 201 bp, Homo sapiens
aaactaaaatgaatttcaaatgacatttgcaataattcaagctggtaaataagagccttaagagttttccatagtaaacacacttttaaccaaacttttcmaaagagacaaagagttgatgctacatcttcagtgtcaatattaggcataaactttgctgtaaagatcctactctattcatttcattcatttagcctctta

SEQ ID NO: 263839 - DNA, 201 bp, Homo sapiens
tcgtcagctgcccacatctcgcctatgggtattgatttaaaatctcaggttctcagcatttcccatctagtatatatattcttgttcctaatcattcctcygtgggtgtattaactcacatttcccaaagaggaaattcttttggactccattaagacacaatcacaaaattactggtagaactttcttattcccatctgc

SEQ ID NO: 263840 - DNA, 201 bp, Homo sapiens
cctgttctccaaaaacatatggaaacaaaacaaattttttaaaaaagaacaatagtcaaggtgggaatgttgaatagcactgtactggcataaaaacagtraaaaaaaaaaactcttttgcatagtcactttgtaagagtttggcagttattcaaaaaattaaacagttaccatatgacccagcaatttcactactagtaa

SEQ ID NO: 263841 - DNA, 201 bp, Homo sapiens
aaaaacatttcctcgaagaagaaacacaaatggccagtaaacacacgaaaaggggttcaacatcattagttactacagaaatgcaaatcaaaaaaagaacrtgtgtgcaagcatctttttcgtataatgacttcttttcctctgaatagatacccagtagtgaaattgctggatcaaatggtagttctatttttttgtttg

SEQ ID NO: 263842 - DNA, 201 bp, Homo sapiens
gcaaggaattaaaactttcccttgaagtcaaagtaaaaggggaaccactgagatattttaaggtagcctataggcatgatcattaatggggggcctcatcrtcttctttattagtaagcaattgatccaaacaattacattacaaatgggtattattattaaacataaagagtaaattttattattagcaatgcattaact

SEQ ID NO: 263843 - DNA, 201 bp, Homo sapiens
ggtcagaagatccagaccatcctggctaacacgtgaaactccgtctctactaaaaatacaaaaaaaaaaaaaaaaaaaaatagcgtgacgtggtggtgggygcctgtagacccagacactcgggaggctgacgcaggagaatggcgtgaacccaggaggcggagcttgcagtgagctgagatcgcgccactgcactccagc

SEQ ID NO: 263844 - DNA, 201 bp, Homo sapiens
cacagctcacctcttcctggcttttgaatttcaagtctaagcattagaacagaaatacaatgagaaaagtgttataataaaggctctatacattcttaccyggtgttagtcactgttctaaatactttacacgaatggtctcatttaatctcatttaattttaatagagcaaaattgaatttaattcaattcaacaaatat

SEQ ID NO: 263845 - DNA, 201 bp, Homo sapiens
acaaggtcagaagatccagaccatcctggctaacacgtgaaactccgtctctactaaaaatacaaaaaaaaaaaaaaaaaaaaatagcgtgacgtggtggygggtgcctgtagacccagacactcgggaggctgacgcaggagaatggcgtgaacccaggaggcggagcttgcagtgagctgagatcgcgccactgcactc

SEQ ID NO: 263846 - DNA, 201 bp, Homo sapiens
ccttgtgcttactatgctgtctctttcttcctccaccaatgtcctgcatcactagccactagccaccttacttcagacactatatgagatgtcattgcctycaagaggccttctttgactctccatgacctggtaaacagcccttccttcctgtaagttcttctaataccactctatgcttcctctgttgcaacattgtac

SEQ ID NO: 263847 - DNA, 201 bp, Homo sapiens
ttaaaaaaagacttttactactaataataccttaattacttatactttaatcaccgataacctactaatagggtaattacacagaaaacatcagtctcttygaatggaggtagcaagagatgctcttactaattaattctctggggtgctagcaagccagtatagtgcttaggttataatgttttggaggaaaagtatcat

SEQ ID NO: 263848 - DNA, 201 bp, Homo sapiens
gtagctgtccagaagagcaggagagagccccactttcttctttgtccttttttctcccccattagaggtttatttctctcacctatataaattgttctacrtactttaaaagtctaatgttgttcattatagtttgttttatttttttaaaaaaagacttttactactaataataccttaattacttatactttaatcacc

SEQ ID NO: 263849 - DNA, 201 bp, Homo sapiens
gtagtgaaattgctggatcaaatggtagttctatttttttgtttgtttgtttgagatgcagtttcactcttcttgccaaagctggagtgaaacgacatggwctcagctcactgcagcctccgcctcccaggttcaagcaattctcctgcctcagcctcccgagtagctgggattacaggtgtgcgccaccaagccaggctg

SEQ ID NO: 263850 - DNA, 201 bp, Homo sapiens
caatattcaaacccaggtcagggtggctccaaagattatcctccaaatatgatcttcactaccttttctagaattccctttgggaatgctaacaagcaggyatgacagccaagtgtaactcagatgcactttgagattaggaagtcaccttcttgatcaccatctcccactcagtgttaccttgcccatactccccaggga

SEQ ID NO: 263851 - DNA, 201 bp, Homo sapiens
agtgaaacgacatggtctcagctcactgcagcctccgcctcccaggttcaagcaattctcctgcctcagcctcccgagtagctgggattacaggtgtgcgycaccaagccaggctgattttttgtatttttagtagaaacgaggtttcaccatattagccaggctggtcttgaactcctgacctcaagtaatccacccacc

SEQ ID NO: 263852 - DNA, 201 bp, Homo sapiens
catgtaggcaaaatcataattaatggtgaaattctgaatgtttttatctcttcctctaagattttaagtaagtaatgaatatctgctctcaccacttctaytcaacattgcactagaggacctaacaagtgaaataagttttaaaataaatacagattagaaaggaaaatttaaaactgtcttttaattacagaaaacatg

SEQ ID NO: 263853 - DNA, 201 bp, Homo sapiens
cataaacctgagaaaaacaagcaatggggaaaggattccctatttaataaatggtgctgggaaaactggctagccatatgtagaaagctgaaactggatcycttccttacaccttatacaaaaatcaattcaagatggattaaagacttaaacgttagacctaaaaccataaaaaccctagaagaaaacctaggcattacc

SEQ ID NO: 263854 - DNA, 201 bp, Homo sapiens
taaactcttaaagatgaaggcctctatcattctcaaggtcatgcaaggggtcattcaatagatacatgtctgttatcggtcctgagcctaaggctgtcatytgcacatgccaactcctagttcctccatctgctaaaagtacacttccctgaatgctttgaaagcatataggctttagataattttttttagaggcagggt

SEQ ID NO: 263855 - DNA, 201 bp, Homo sapiens
gcaaaactacccctgacccttcagctagtattactctggatggtgcagaggttcctcttgggactgggatttcatctggtgtgaatgacacttgtctactrtataatgagtacattgtctatgatattgctcaggtaaatctgaagtatctgctgaaactgaaattcaattttaagacttccttgtggtaattgggagagg

SEQ ID NO: 263856 - DNA, 201 bp, Homo sapiens
tctatgatattgctcaggtaaatctgaagtatctgctgaaactgaaattcaattttaagacttccttgtggtaattgggagaggtggccaagtcactcccratggctctggtataaattcagccgaagcccttctgcaccaactcacctggccggctaagttgctgatgggtagtacctgtactaaacctcctaagaaagg

SEQ ID NO: 263857 - DNA, 201 bp, Homo sapiens
aacctctcaacaaagaaaagcccaggatctgatggcttcattggtaaatcctaccaaatattttaagaagaattaataccaattcttctcaaactctcccwaaatattgaagataagggaacattccaaactcattctacaagaccaacattaccctgacaccaaaccagacaatacaagaacacaaaattataggccaat

SEQ ID NO: 263858 - DNA, 201 bp, Homo sapiens
tatagtcaaggctttaaaaagtttctctcattttgactttaatagaaaagtattctaagagcagtactcaaagtattcaacccactattgggctaagattwgttgttcatgttagcaatgtatatttttgaagtatccaatctcaatgcttgaccaaatgagatgaagtccttgttttaatttggtttttcacaacttcta

SEQ ID NO: 263859 - DNA, 201 bp, Homo sapiens
taattgaatacaataagatagtctaccaatgtacaagaaaatttcttataattcagtatataccacaatatagtcaaggctttaaaaagtttctctcattytgactttaatagaaaagtattctaagagcagtactcaaagtattcaacccactattgggctaagattagttgttcatgttagcaatgtatatttttgaag

SEQ ID NO: 263860 - DNA, 201 bp, Homo sapiens
gagggggatcggcacagcccacatcccttagctgcagtaccagaagaatcgttcctaatcaagcatgtaaatccatttgtatgaccttagaaagactcccmataagaacatttggatattaaaacactctattctaaaagacatcattgtaattgtactgttcactgttgatactatacctaaaacaatgtattgtctagt

SEQ ID NO: 263861 - DNA, 201 bp, Homo sapiens
tagcaaaactcaggaaagaattagaaggaaatataaagccatcagagaaatgtaggtaaaattggaaacatcacagaaacagaccctgtagaaaacacatyaagggttatgagaatagagatatgaaaagtaagccagatgtaacataaatagtttaaaagaattagagagaaaattatatataaaacaatatataaataa

SEQ ID NO: 263862 - DNA, 201 bp, Homo sapiens
cccaaagagaaaggggaaggtgctgagcaatgcatacccagttactgctcccagatttaccaatcagatgattctctcactccactgggggcattcaagcyaagtgtgttgaccctaagtgatttccgtcacatggaaatattacgtcaagggaaaggaggtcctctctcccaaacatcattgacttaataacatttattt

SEQ ID NO: 263863 - DNA, 201 bp, Homo sapiens
aggcctgaaaaatcacattagacaccccagagcccccttcttgctgctccagtccagcagtcctgaccacatctgataggatgaagaatgtgcacctctarcctcaggagcattattccacacgctggttagatgttttggtgtgatctggagcaaaaaggtgagttgatccaagttgtctctcttggaaatttaaattag

SEQ ID NO: 263864 - DNA, 201 bp, Homo sapiens
ctgaggcaggagaattgtttaaaaccaggagctggaggttgcagtgagacgaaatcgcaccactgtactccagcctgggtgacacagtgagactgtctccaaaaaaaaaaaaaaaaaaaaaagagtctctttaccagctcaccccgacccagtccccagcatccctgacccctatccactcaagagccaagcccagctcag

SEQ ID NO: 263865 - DNA, 201 bp, Homo sapiens
caatgtaaggagttttacatctccaacaaattggctatatgttaggcttccctctatcggactactattttttgtttacctatgagtatcttctcccaatycattcattcatttcaatctttatcatacctatttgttcattattagttattatgtggctgctcaagaggttgtgatgatcaaagcagacagtccctaccc

SEQ ID NO: 263866 - DNA, 201 bp, Homo sapiens
gtcatactttacgcagctgagcatctacaggttccaagagaaagatatgaggttagtataataagagagtttagcaaataaccccttgaactgtttaaaatatatatatatatatagtattataaatgttctatgttgggactacaagaaaaagtattaaattataaaagtttatcatcattccccttctattttcccctc

SEQ ID NO: 263867 - DNA, 201 bp, Homo sapiens
ttgatccttggttggttgaatccatggatgcagaacccaaagatatggagggctaacctactgtgcagaactttaattcaaaggaacttgaatagacaaamgaagatgtttcatgatacacagcttgcctagagaaataagagaaaatatgagcaagagaataaaaaacaaagttttcttatttttttaagaaggagcttg

SEQ ID NO: 263868 - DNA, 201 bp, Homo sapiens
cattttggcaaattcccacattctcaaatgcacaatattttcttggtacctttggaaagcaagtataggtagagcattagtggttcatcatagttttctgaaaaagatgagttgctctgcaatacacagtttataaacctccactgcagcagacctatttatcacacgttctactcgtaaaattataagcttggtcctaca

SEQ ID NO: 263869 - DNA, 201 bp, Homo sapiens
gattccacatgaaatttagaatagtatttcctaattctgtaaaaatgacattggtagtatcaatgataaaaagtcaaactttgtaaaatatttgaagagayttattctgagccaaatataaaaaccatgacccatgacacagccccaggaggtcctgagaacatgtccccaagatggttggttacagcttgattttatgca

SEQ ID NO: 263870 - DNA, 201 bp, Homo sapiens
acacagcagaagaaatggctttgtgtcatcataaaagtttttatatgtagttcctcaagtaatttccaagactctaactgatgtccgagtgctgcacttayggtaggagaggaagagtagaagagggttgggatatagataaatagatatatcgcttcaatgtcacaaggagctagtaaacttaccatagttttcctttgt

SEQ ID NO: 263871 - DNA, 201 bp, Homo sapiens
atgtcacaaggagctagtaaacttaccatagttttcctttgtgatatccttactgcctcagctttcctatctttcaccatctcttgagcaaattagaagcytgttccctgtgaaatgaggaagagaattatattttattggcagacacttagctccaattttacagccagtatctagttattcccataaaccctgcaatta

SEQ ID NO: 263872 - DNA, 201 bp, Homo sapiens
ggaggcctcacaatcatggcagaaggcaaagggcatgttttacatggcagcaggcaagacagagaataagagccaagtgaaaagggaaacgccttataaamccatcagatctcatgagacttattcactaccatgaaaacagtatgggggaaactgcccccataaatcaattatcacccactgggtccctctcacaacatg

SEQ ID NO: 263873 - DNA, 201 bp, Homo sapiens
gagtagaagagggttgggatatagataaatagatatatcgcttcaatgtcacaaggagctagtaaacttaccatagttttcctttgtgatatccttactgmctcagctttcctatctttcaccatctcttgagcaaattagaagcctgttccctgtgaaatgaggaagagaattatattttattggcagacacttagctcc

SEQ ID NO: 263874 - DNA, 201 bp, Homo sapiens
gaaaaatgggaaacaaaaacacaaattgtattttcagtaaaactaggacacagactctaacgtattttgaaaaggatgccaaaaaaacaacagaattcacmgaagagacaacagtgggaagtagaaagaaagaccagtgttgtcaggtctcagaaatgtcccataaaaatatacttttttttgaaggcaagggacaggcct

SEQ ID NO: 263875 - DNA, 201 bp, Homo sapiens
tatgagaatcaaacactgccactgatggcatggaggcagagctcaggtggtaatgctgctggctcgccactcacctcctgccgtgcagcctggctcctaayaggccacagactggtactggtccatggcccggggattagggacccctgctttatagaatggtcacagataaggacaaatatgctacctggaggaccatct

SEQ ID NO: 263876 - DNA, 201 bp, Homo sapiens
atatctgttttggtaccagtaccatgctattttggttactatagccttgtagtatagtttgaagtcaggtagcgtgatgcctccagctttgttcttttcayttaggattgtcttgcctatgtgggctcttttttggttccatatgaaatttatagtagttttttccaattctgtgaagaaagtcattggtagcttgatggg

SEQ ID NO: 263877 - DNA, 201 bp, Homo sapiens
agtatgctagggttatccttaatggctgaaaatcactataggacaatgtaaggagttttacatctccaacaaattggctatatgttaggcttccctctatyggactactattttttgtttacctatgagtatcttctcccaattcattcattcatttcaatctttatcatacctatttgttcattattagttattatgtgg

SEQ ID NO: 263878 - DNA, 201 bp, Homo sapiens
aaatatttagcagatataattcattacaatattgtctgtaataacaagaactacatttcattgaatcaaaatttgtaaggtacatgttttattcatctagwaggatgtcagtagtcattaaagacatggtagaagaccatttagaaaaaatggaaataaatttcagaaatattgtgagatgaacagactataaaagtatga

SEQ ID NO: 263879 - DNA, 201 bp, Homo sapiens
actctcactatagctttgaattaactaaaatgtagagaatgccaagcaagcataattattcctatagtctttctcttacaaggataaagaagaaaatctctgtgtttcatggtggcctttccaggaagctcaaagaaattttaaacataaacgtcatcccaacagttttattattataaattttggacctgatttgggaaa

SEQ ID NO: 263880 - DNA, 201 bp, Homo sapiens
aaagatttagtcactgattatgctggcagaaagattatcttatgaaaagtaacaaaattgacaaacctctaggcccttaatttatttcataaattgtattrtgattgtttctgattgacaagagcatttaaacctagaactaaacctttctgaagatattatgatagtttattttaatatgaaggatacacagtcattgaa

SEQ ID NO: 263881 - DNA, 201 bp, Homo sapiens
atggaagaggaggtttgtttttcagagctagttgtgtaaagaggagagggtagtgccaagaatttagctatccctttctccactgcctcaccagctacacaaacacacacacacacacacacacacacacacacacagacataggcacaacttggctgagatgcaacccagtagacctggcacaacttcccagtatgacca

SEQ ID NO: 263882 - DNA, 201 bp, Homo sapiens
gctggacgtggtggcgggcacctgtaataccagctacttgggaggctgaggcaggagaatcgcttgaacctgggaggcagaggtttcagtgagccgagacygcgccattgcactccagcctgggcaacaagagcaaagctctatctcaaaaaaaaaaaagaaagaaagaaagaatgtgaaatttaatgtagggactcaaaa

SEQ ID NO: 263883 - DNA, 201 bp, Homo sapiens
acctggcacaacttcccagtatgaccagtgattattcagctgtgcacccaactcccaattattgactagaaatgtggtaaattagccacaatagtgggggttttttttgttttgggtttattttttaggattttacttttcagcatcattgccctcttgctttgcattttgcattaggtacctaaaacctgtgcttaagtt

SEQ ID NO: 263884 - DNA, 201 bp, Homo sapiens
acatggtgaaaccccgtctctactaaaaatacaaaaattagctggacgtggtggcgggcacctgtaataccagctacttgggaggctgaggcaggagaatygcttgaacctgggaggcagaggtttcagtgagccgagaccgcgccattgcactccagcctgggcaacaagagcaaagctctatctcaaaaaaaaaaaaga

SEQ ID NO: 263885 - DNA, 201 bp, Homo sapiens
gatattggcctgttgttttctttttttgtttgtttttggtttttgtttgtttgtgtgtgtgtgtgtttccctatctagttttggtataagggtgtcctccyaagccgagtttagaagttttccctcctcttccattttttgaaatagtttgagtagaactgatatcagttcttttagtaagcggtagaattcaacagtgaa

SEQ ID NO: 263886 - DNA, 201 bp, Homo sapiens
gcctggcagtaaccagggagcttagcgtagcatacaacccaggacttgactgttggtagaacaatttgtgcatcaatgtgtatggtaacacttttcccccktaaaacgaatggtaacgccaggaaaatactctgacgtgccctctagatttgggggccagagcttttactcaacatttgcctcaacattcattaaagtttt

SEQ ID NO: 263887 - DNA, 201 bp, Homo sapiens
cccttccaccatgattgtaagtatcctgaggcctccccagccaggctgaactgtgagtcaattaaatctctttcctctataaatgatccagtttcaggtaygtatttattaacagcatgagaagggaccaatacaccaagtaaataatatggattctatagccagagggcctgtgtgaatcctggctctgccacttcctag

SEQ ID NO: 263888 - DNA, 201 bp, Homo sapiens
tccttcatgccgtcagcttcctagcctcacttctcattggggaagttgttttttttctgtctgaaaagaagtcgtttcaaagcctcccatctcgtttcatrcttatttttggaacaatggctgagttcaccatttatattgccttttgctagtttctcctagcaactgctctcagatacagacggaatcatgtttagctta

SEQ ID NO: 263889 - DNA, 201 bp, Homo sapiens
aatttagtaacgaagaggctagtctatgttttagccacactggatgagtggcagttccagaacttcaattctagagccaccacaggtagtaggagggcccygggttgtgaggccagctcagaggtgtggctggaaactgcccagaccctcacttgcaagttacaaagaaaaccagggaaggaaaatgagctcctttgaagc

SEQ ID NO: 263890 - DNA, 201 bp, Homo sapiens
ttcacttctttggttaaatttatttctaggtatttttacagctgttgtaaatgagattgttttcttgatttattttgcaaattgatcactgttagcatatygaaatgctactgatttttgtatcctacaaatttactggatttatttattcattctaaggatttttttatggattctttaggtttttctaaatataagatc

SEQ ID NO: 263891 - DNA, 201 bp, Homo sapiens
gtagttcagacacttcaacaatattaattcttccaatcaatgaccatgaaatatctttccattattttgtatgtgtcctcttcaatttcttttattagtgyctcatagtttttcttgcagatatttttcacttctttggttaaatttatttctaggtatttttacagctgttgtaaatgagattgttttcttgatttattt

SEQ ID NO: 263892 - DNA, 201 bp, Homo sapiens
agtgctataaaacattagaatgtattcctcctaattagaattttgtatccattaaccaaggtctttctatccctcaatcctcatgtccttcccagcatctrgtaaccactattctactctctgcttctatgagatcaatgtttttagctaccacatgagtgagaacatgtgctatttgtcattttatgtctggcttacttc

SEQ ID NO: 263893 - DNA, 201 bp, Homo sapiens
agaacaaactgagtctcattataaaatgttcacatttttgtactgcaattcatccactcacaagaaggccaaaggcaaaagattaatggatcacaaacgasggctgctctgcatggcagaatgatcatccccctccaccctggcataacacaacatgacctagcacccagctcttctacaacaaattgcaacacccatact

SEQ ID NO: 263894 - DNA, 201 bp, Homo sapiens
gagggtgaataattcacacccgagagagggggagtgaggagggcagtgttagcgatggaaaaacggtaaaggctgtgggggcgaagatgcgccagggtggrgcagggcacgaatcacctctaacaaaccccccaatttccaggcgttgagaacggacagcagcggcaccgttacaaacagtccaaaagcctgaatgtgtca

SEQ ID NO: 263895 - DNA, 201 bp, Homo sapiens
ctgacataactcaaccagacctacatttttctatcttctgttgaatttctagtcacttaatacacaaaacattcatttctttctaacaaaaccaaagcaawgtcaccacccatgggtgcaagaatggtataaaccccttcacatccagcccatcaatagccccaatttgtataaatgaagccagtaagtccctcccagact

SEQ ID NO: 263896 - DNA, 201 bp, Homo sapiens
tacctatgtgactgtgtattatctgggtatctctctatatctatgtctatgtttggctgactctcactgtaagatctgaccttttcataagaagaaaatgrtattgtatcagaaagagcttttcttggggttcaggtaaaaagacaaggccagcctctgtttcttcaattgttaaatagattgggagtgctgggtgctatt

SEQ ID NO: 263897 - DNA, 201 bp, Homo sapiens
aggcctgtttagctccaaagccctcttcctataggccagcccagtgaaactggacagcaagcatccaaatcccaacatccaaagagatagtggtgaacttsactataatgtcggctgtcactcatacccggaggtggagcatggcaaaaagcttagaaggtggcaatattttcagccaggtgggtggaacaggtagggaag

SEQ ID NO: 263898 - DNA, 201 bp, Homo sapiens
ccaacaatgtcacaagctgacaagaaaaagtgattctgcaaaactcttttactgagctggtagaccatgtccaattttctggactcagtgctctaaagaaytctgctgcctctcttattttcaaagtagctagctataaatgtcagtaaatgccagcctcccagtaagtaatgggaaaaaggagaagttaggagatactga

SEQ ID NO: 263899 - DNA, 201 bp, Homo sapiens
tttgtttcataaatgtccattttctagaatactttctagaacactactttctttgacctcaatttccacaacaataattgccactggttttggattgtgakttgttatccatgtttatctgattcacaacacgtctcttgtatttataaaagtactttaagacatgtttcaatttttcccattaaaaccaaaattgtgtgg

SEQ ID NO: 263900 - DNA, 201 bp, Homo sapiens
aactgagtgtccttgttacactgatggagaacagcagaagctctatgatttctaccaccagaaataaacagattagtggtctgtacagcttggatttctcwgacagtctggtcttcctacatgaggggctagcagagccattagctcaagcttcaaacatagacttttcaccttaaactccaaatgatattaaacatttag

SEQ ID NO: 263901 - DNA, 201 bp, Homo sapiens
agagcataaagacctactttctatttcgtggtctattcctttaccttgatggtcaatcatgaagacaacatgattgagtgaaataaatttctccttactgyttttaaagcaatggtgctcatttgagtattggacaactagaaacataggaaaaagtagacaaattttatgggaagggattaagcacaaataccttattta

SEQ ID NO: 263902 - DNA, 201 bp, Homo sapiens
acaggaggcactcaatacatttttgttatataattatcagtacaggttaactctgaagaaactttatctgttgcattatagaacactgattataaaagggwttttaaaaatattttgtaacattcaattccttatcatgtacttttttcttttttaattgaattatgacttacattaaatgcacagatcttaaatgtatag

SEQ ID NO: 263903 - DNA, 201 bp, Homo sapiens
cttcctgatgtacagaggagttcagcctcaactgagtgtccttgttacactgatggagaacagcagaagctctatgatttctaccaccagaaataaacagmttagtggtctgtacagcttggatttctctgacagtctggtcttcctacatgaggggctagcagagccattagctcaagcttcaaacatagacttttcacc

SEQ ID NO: 263904 - DNA, 201 bp, Homo sapiens
cacttaaaaagatttagctacaaagctgctaaaagaaaaaaaatgggagaatatctttgagatatgaagataggcaaaagtttcttaggatatagaaagcyaaatcatgaaataaaaataatgttaaattagactttatcaaaattaaaacttcttctcatcaaatgacactatcaagaaaataaataggggccgggtaca

SEQ ID NO: 263905 - DNA, 201 bp, Homo sapiens
caatcacaaaattactggtagaactttcttattcccatctgcagattcaattaaatgacatttatcctttcttctttgtttctaataactccatagcattrtaacgtttggattattttaatgatcataaaaaatgtagctgtgtagtgtcaaaaggttacacacttttcttaatcttctagtttaaattttcattttata

SEQ ID NO: 263906 - DNA, 201 bp, Homo sapiens
ccacaaccaccagctttgctgggatcctgtcccagggtctttggatagccccgcctgaagtgcccatgacgggctacatgtttggtaaagggatctatttygctgacatggcctccaagagtgccaactactgccatacatctcagggaggcccaacaggcttaatcctgttgggagaagttgcccttggaaaatgtatga

SEQ ID NO: 263907 - DNA, 201 bp, Homo sapiens
gaggctgaggcaggagaatcgcttgaacccgggaggcggaggttgcagtgagctgacatcatgccactgcactccagcctgggcgacaagagggagactcygtctcaaaaaaaaaaacaaaaaaaaagaaaagaaaagaaaaaaagaaattatctggtgtgatgcatgaaatgctaagcacagggtatgaaaaatagcatc

SEQ ID NO: 263908 - DNA, 201 bp, Homo sapiens
cacaaccaccagctttgctgggatcctgtcccagggtctttggatagccccgcctgaagtgcccatgacgggctacatgtttggtaaagggatctatttcrctgacatggcctccaagagtgccaactactgccatacatctcagggaggcccaacaggcttaatcctgttgggagaagttgcccttggaaaatgtatgaa

SEQ ID NO: 263909 - DNA, 201 bp, Homo sapiens
tctaaccattccccctgcttctgtggcaggcagtaatccccgctttccatcctctagtcagcttcttcccagccagccacaagcgaacaggctcgcaagcmgcggatgaaacaggaagtctgacagcttgagtctgcagtgggacccctagtgttttcccactccatgtcctggcatcgttccccagaagtacaaacacac

SEQ ID NO: 263910 - DNA, 201 bp, Homo sapiens
caatcatggctgatggcgaatgagtagcaaagtcatgtcttacattgtggcaggcaagaaagcttgtgcaggggaactcacattcatgaaaccctcagatytcgtgagacttatttactatcacaagaacagtatagcggaaaccactcatatgattcaattatctccacccggccccacccttgatacgtggggattatt

SEQ ID NO: 263911 - DNA, 201 bp, Homo sapiens
agaccagttatgccttgaagctgggaagttcgcttttcttaagcagtgaaaggaaaacaaggaaaccaaatcagaactttgccaacaatgaaaagtcgaamggtagggagaaatgagaaatgcaattgacaagaaaaagactattagacaaccaagagtgtcagccacaaaagaacatcattgtcatcatcatcatcatca

SEQ ID NO: 263912 - DNA, 201 bp, Homo sapiens
aggggagaaaaagatccatttgcttatgcagatgggactcatagcacagatattacccattctgatcatttggggccaatttattgtctgcctaaatgacraccaaaagcacattctcaatattttaaaaattacaaaaatctaaattgttacatcattcaaggcattgataggtaaataatgattcttttgactgatgac

SEQ ID NO: 263913 - DNA, 201 bp, Homo sapiens
ctgtttagctccaaagccctcttcctataggccagcccagtgaaactggacagcaagcatccaaatcccaacatccaaagagatagtggtgaacttgactrtaatgtcggctgtcactcatacccggaggtggagcatggcaaaaagcttagaaggtggcaatattttcagccaggtgggtggaacaggtagggaagggtg

SEQ ID NO: 263914 - DNA, 201 bp, Homo sapiens
aggttcctttgaaaagaaacagaatgattctgttgggaaaggatcataacctatcacacaactcctcatctaacatgaaaatacagaaatatgttacataytgttacatctttaaaataaagctgcccacttcattttagttgtattacagaattctaattctgacactgcaatttatgtcttttgatgtctatcaagaag

SEQ ID NO: 263915 - DNA, 201 bp, Homo sapiens
gtaaagaaaagaagtatgttttattgtaccacttccttaaactgaaggacattgtaagaaatggcttctgaagtatatagccatagttactcaagatcacrtttagaaccttgttcactacattattgtaagtcttctctttacaaaaacccatagaaaagaatttttcacagtctcaattctagaaatagtgtttttcct

SEQ ID NO: 263916 - DNA, 201 bp, Homo sapiens
gtaagcactcctgtgggctgggactgtgctgggtcagacctgaagccagcacagcactgggccttcccaaggcctttcacttcgggatggtgagttccccsaggtcctgggtgtgtccagagatactgtctgagagactgtctgagagccagggattggaagagtctctgcctgtggccacgaccttcactggtcctcagg

SEQ ID NO: 263917 - DNA, 201 bp, Homo sapiens
tgaatgatacatgagtacatgagaaacctaataaaaattaatgctgtcatttgaaaattttttctcataccaagagggaaatttggttacagtaattaggyaactatgtgatgccctctcttccacttttttgatgaatattttgttttgatctcaattacaaggtggagttagcagtcccagccattcctaattcattac

SEQ ID NO: 263918 - DNA, 201 bp, Homo sapiens
ttttttgttttcaataacagtagggtattaatactgattttcatagagattctgtagacaaaagattgtgcctgattattttgtctatagggaccttgtgyagtgtgtgctatgagactgcagggagtaccatttacaaaggattttcctgtttggtacctgtgaccttgtgaccctattctttcttagatagctagaatt

SEQ ID NO: 263919 - DNA, 201 bp, Homo sapiens
tagggtattaatactgattttcatagagattctgtagacaaaagattgtgcctgattattttgtctatagggaccttgtgcagtgtgtgctatgagactgyagggagtaccatttacaaaggattttcctgtttggtacctgtgaccttgtgaccctattctttcttagatagctagaattctaaaaagagagttactatc

SEQ ID NO: 263920 - DNA, 201 bp, Homo sapiens
ctaccttttgtatctggaaatttgaaatcagtggggtggcagagggctgactaggaagtcatgggagctggggtgaagtggggattggctggtgaaagtamggggagagattcctgatggaaaggctcaccttcttacagaagtcctggcaaccaaataccacatccatcccacaaaggcaagagttctcaattggaaagg

SEQ ID NO: 263921 - DNA, 201 bp, Homo sapiens
tgttcacttaaagcccaagggctcttctgtcagcttatagtgaatgctgccaggcctgggactatgcatccttcagggcagtaggctccccctctggcccvgggcaggtccagaaatgctgtcttaagagcctaggcctggactcagagaccccaagagcctccttgttgctctacccagccatggccaagctggtacctg

SEQ ID NO: 263922 - DNA, 201 bp, Homo sapiens
aagacatacatgggcttgatgccgttctccatcacgcgaatagtgcggtagaacatgcctatcaggtggctggtggtctcaccctcctcgttctgcagcasatccccaccctggcgaacagcaatcaggaactgataagtgctcatagaggcatcaatggccaccttacggccaaagtagctcttgatgtcattctcccgg

SEQ ID NO: 263923 - DNA, 201 bp, Homo sapiens
ctccccctctggcccagggcaggtccagaaatgctgtcttaagagcctaggcctggactcagagaccccaagagcctccttgttgctctacccagccatgrccaagctggtacctgatttttgattcttgtgacagtacttttctgtgtgcagaaaagcaattagagtgcttttgtgtgtgcagattgttgttaaaatttg

SEQ ID NO: 263924 - DNA, 201 bp, Homo sapiens
ccttcttacagaagtcctggcaaccaaataccacatccatcccacaaaggcaagagttctcaattggaaaggtggttccatacaacatttagaaaatttgraattcggctaagtgattactagtaaatttcattatacttgaaaaagccaatctttctggctttctagagtattgtcaatatgggcatccattgcattctg

SEQ ID NO: 263925 - DNA, 201 bp, Homo sapiens
tgccaaaaatggggagtttgtacagagactagtaattgaaagagtaaattaaggttacactgtaacttgtgacttttagcagtttgcagtcacaaatgcartgatactgttttctgctatactgagtgcttggctttctgagtatgtaggtcttagtgttatgtaatttaaggtgaaatgatctttttcaatgtggctcaa

SEQ ID NO: 263926 - DNA, 201 bp, Homo sapiens
tgttatgtaatttaaggtgaaatgatctttttcaatgtggctcaataaaaccaattagccaaagaatttctttttcctccatagctagaggaggccattcyttctttgggattcttcctgacatctcattaaattttatcttccaaatacctttacgtctataagacagtcttctcattgttgtttacaactcatcaggca

SEQ ID NO: 263927 - DNA, 201 bp, Homo sapiens
ttacgtctataagacagtcttctcattgttgtttacaactcatcaggcagatttgtagcttgtaccacagaagttaatgtttattttcttagctgtacttmtatattcaaatatttatttctataaattcatatatccttagagatcatagtaaacttaagagatcatatagcccaatcctctcattttacaaacgatgta

SEQ ID NO: 263928 - DNA, 201 bp, Homo sapiens
cagatttgtagcttgtaccacagaagttaatgtttattttcttagctgtacttctatattcaaatatttatttctataaattcatatatccttagagatcrtagtaaacttaagagatcatatagcccaatcctctcattttacaaacgatgtaagtgatgcccagataagttatgacttcgccaaggttatgttgctatc

SEQ ID NO: 263929 - DNA, 201 bp, Homo sapiens
ctcctgacctcaaaggtgatccacctgcctcggcctcccaaagtgctgggattacaggcgtgagccagcgtgcctggctctgcccttttaatttaaggctrtttttaaattcttcctagctttaattcctaggtcttccctcttcagcactagctctgttttctttaactggtatttttcagtgaactgacagggtatgat

SEQ ID NO: 263930 - DNA, 201 bp, Homo sapiens
acaattacagtgttataatattctgtgtttttctgtgtgcttactataaccagtgagttttgtactttcaaatgattttcttcttgcttattaacatcctyttctttcagattgaagagcttccttgaacatttcttagaggacacgtctggtgttgatgaaatccctcagcttttgtttgtctaggaagctctttatttc

SEQ ID NO: 263931 - DNA, 201 bp, Homo sapiens
tagctttaattcctaggtcttccctcttcagcactagctctgttttctttaactggtatttttcagtgaactgacagggtatgatgtggagccaccatacraagccctggacttcccaactctggattccccttttacacacaagaataaactgtttgtgtgtaaactgatatggtctggtcatgaacgtaattctaaccg

SEQ ID NO: 263932 - DNA, 201 bp, Homo sapiens
ccacatcagcaattagtttggccaggccttgaatacccatggcaacacagaggagggatgactggcctttgggacacgaggcctcggcggctaaagcttgrttcagggttgccctgggcaggcggtcctaagcccactttcccccctcagcttagctgcgggtcgcctgacactcagcccttctttttcttcttagtctgg

SEQ ID NO: 263933 - DNA, 201 bp, Homo sapiens
cctggttctagctcctgcagaatccagctcaggtggaattcctggattggcagctttttggcttcactggcagtcaggtgttgcattagcacagggctgcygaaggtgaagcagtccatgtcctcggtagccacaggatagactttgccagccttcaccagggcagcacagctggcctctgcctcgatgggtgcatcaagg

SEQ ID NO: 263934 - DNA, 201 bp, Homo sapiens
attggtgatgacctagataaaagaactgattgtagaaaaaatgggaataataacaggttatgctaaaatatcaacaatggggcaactttgcagctgcagcrgtgaatagaaccataggcatgtcattggtatatggcgactgcattggtcctttctccctttactcaggacatgaatatgaaacaatattcataaaagaaa

SEQ ID NO: 263935 - DNA, 201 bp, Homo sapiens
taactctgcccctgttagttgaggtggtagagctgccacctcacctgaggctgtggcacttctgtttttactgaggacaagctcaggggtaagatcatagracatcactgcttgccttatctggtgcagagaaacagagagccctgccatggttctgtacctactagcttaaatccctgtccttcctcctatccctgtttt

SEQ ID NO: 263936 - DNA, 201 bp, Homo sapiens
tgctgcttagtgaccttcaccagccacttagtgaatttttccaccacctgctcggccccagcagcctgagcctgctgtagctgcttctctgcctcagcccygcagttcactgcatttggccagctcgcctgacttgtgctgtggtggcgtgccctcaaagacatacatgggcttgatgccgttctccatcacgcgaatagt

SEQ ID NO: 263937 - DNA, 201 bp, Homo sapiens
gtagaaaaaatgggaataataacaggttatgctaaaatatcaacaatggggcaactttgcagctgcagcagtgaatagaaccataggcatgtcattggtawatggcgactgcattggtcctttctccctttactcaggacatgaatatgaaacaatattcataaaagaaaatatttactctcaaatttaagccgttcattt

SEQ ID NO: 263938 - DNA, 201 bp, Homo sapiens
agtaataataagtacagtaattttagttagaaccatcagtgatttgcatatcaatgcctgattaggtaagtttatgggcaaaacaggtagcaaagaacccrggatatactaggcacataggcactagtgtcttttttccccttgaacaactaacacctcaaatttagtagcccagcagctgctggttttgaataaccagct

SEQ ID NO: 263939 - DNA, 201 bp, Homo sapiens
tcatatccctgttactttgctgaacttcaaatctgttcttctccaagtagatgttaatcctcttagttttaggattttatccttcaagtttctggtttctkccctttttattatttttatttatttatttattttgagacagagtgtcacactgtggcccaggctcaagtgcaagggcatgatctccgctcactgcaacct

SEQ ID NO: 263940 - DNA, 201 bp, Homo sapiens
gattgaggagtcacataaacaacaattgatgaaaaatagaaggtttgtatttttgtgtaaacattattcttaactaaggagaaatcaagagtcgaaaacayccactattaacattaactcatctgatcttgagtttagcaagtgtgtaagaaaattaaaacaagtgttagttccattttagatatgtgggaaaccaaagca

SEQ ID NO: 263941 - DNA, 201 bp, Homo sapiens
ctagtaaatttcattatacttgaaaaagccaatctttctggctttctagagtattgtcaatatgggcatccattgcattctgtcccttccagattgttgawactaacctgttttcacacacactcattacagctgaacagaaaaaagcaaatattgcccagaaaaaaaaaatcatataaaagtgagagaatctaaacaaaa

SEQ ID NO: 263942 - DNA, 201 bp, Homo sapiens
aattttttttttttactaatttagttgttaaatatttaaatatatgttttatttaaagtgcattatttttaagttgttgtttgattaattttccacaggtrtaacattgtcaaatgcaatcgtaaatgctggtttgacttcctttaaaaaaatagaagagacagatgcaagggaacttgaattggtagttatattcactta

SEQ ID NO: 263943 - DNA, 201 bp, Homo sapiens
gtcatctggtggaagtaggctctagaatccaaatttcctaatatctaaaacattctatgactaaattatcctcaattgagataatgatttgcaaactataraacagtagaatagcagtagtagtagtattaggagtaggagtaacaaaaacagtgtttattgaggacttatttattactatgtgataggcactgggctaga

SEQ ID NO: 263944 - DNA, 201 bp, Homo sapiens
tttctctggtggcatgctttaatttcttgctttttattttttgtgtatctgttgtatgtctttcaatttgaggttaccatggggtttgcaaatactgtctygtaacccattatttcacactgatgataacctaacactgattgcctaaacaagcaaacaaaaatgtaaaaagaaaactaataaacactctacactttaact

SEQ ID NO: 263945 - DNA, 201 bp, Homo sapiens
tgatccgcccgccttggcctcctaaagtgctgggattacaggtgtgagccactgggcccaaccgaatttgatgtatttaaggaatagaatgaaagcaagtrtgactggagagtagtcagcaagaggagagttagaggaaattagatttgagacaaaggctgtagtcagattatataggtaaggaaatttggccccagtaag

SEQ ID NO: 263946 - DNA, 201 bp, Homo sapiens
ggtttgcaaatactgtcttgtaacccattatttcacactgatgataacctaacactgattgcctaaacaagcaaacaaaaatgtaaaaagaaaactaataracactctacactttaacttcatccccatgctttttacctttttcttgtttccctttacatcttattattctgtgtcttgaaaagctgttgtagctattat

SEQ ID NO: 263947 - DNA, 201 bp, Homo sapiens
aagcaagtatgactggagagtagtcagcaagaggagagttagaggaaattagatttgagacaaaggctgtagtcagattatataggtaaggaaatttggcyccagtaaggaaattgccacttcattctaaatacaatggaaaagcattggaagttttaggcagtagattaaaatagtctggtttagatacagaaacataga

SEQ ID NO: 263948 - DNA, 201 bp, Homo sapiens
aaagggttttttttttctttagcactttaaatatgtcctgccactctctcatggcctgtaaggtttccactgaaaagtctgctgccagacacattggagckccattctatgctgtttgttttttgctgctcttaggatcctttctttatccttgacctttgggagtttgattattaaataccgtgaggtagccttctttgg

SEQ ID NO: 263949 - DNA, 201 bp, Homo sapiens
taaggaaatttggccccagtaaggaaattgccacttcattctaaatacaatggaaaagcattggaagttttaggcagtagattaaaatagtctggtttagwtacagaaacatagaactgtatttctaagacagaaatggtcagagagccatagcttcataaagcagtattccctcgcttcattcaagcatgatccttgaat

SEQ ID NO: 263950 - DNA, 201 bp, Homo sapiens
gatgtctatttgattactttttctagctaacccttctttctagaaaagctatttttaaaggaagtaactactatttgaacaacatttcagaatccatttttatgctttggtttttattgtctcagtttaacatttctgtgaggtagacagtgttatccctaagtgacagctaaagaaccttatgagtacttcctgctaagt

SEQ ID NO: 263951 - DNA, 201 bp, Homo sapiens
cgcctcccaggttcatgccattctcctgcctcggcctcccgagtagctgggactacaggcgtctgccaccacacccggctaatttttcgtatttttagtasagacggggtttcaccattttagcaaggatggtctcgatctcttaacctcatgatctgcccgcctcagcctcccaaagtgctagaattataagcgtgagcc

SEQ ID NO: 263952 - DNA, 201 bp, Homo sapiens
actaaggccaaaagctacagcagttctgtattcagggaatagtcttttttaagttcttatgcttttctcaatttttatttattaattttttttttttttttgagatagagtctcactgtgtcacccaggctggagtgcagtggcgtgatctccacttgctgcaacctccgcatcctgggttcaagcgattctcttgcctca

SEQ ID NO: 263953 - DNA, 201 bp, Homo sapiens
ctcccaccttcctcccagacccgggcccgcgtctcctccctccgcgtcctcagacacgccccctagggctggcttgtcccagccccaggtctccctgctgmcactgagagtaaattggacctcgggattcagttccctgggatccttctatggccttccacattttctcatcttttttcactgtggcaaatagagcagagg

SEQ ID NO: 263954 - DNA, 201 bp, Homo sapiens
tggcctcctccgccgcctcctcggagcatttcgagaagctgcacgagatcttccgcggcctccatgaagacctacaaggggtgcccgagcggctgctgggracggcggggaccggtgaggcgggggtgggccacgccgtggggagcgcagccctgcgcgctttggaaggaagattctcccaccttcctcccagacccgggc

SEQ ID NO: 263955 - DNA, 201 bp, Homo sapiens
aaaaaatgtctaaggattatccagtaaggtaagctggatcattgtggaaagaaaacaaatatttaaatcaaatgatgactatatcagggatctctagtctrctgtcactctgagagcctcagaaaaataactcatttattttttcctttccataaatgagttaacctacataggaattttttagttttttagagacagggt

SEQ ID NO: 263956 - DNA, 201 bp, Homo sapiens
aatgtacataatacagtccttgcatgtagcttatgctctgtaattgaattcagtcatttttcaataaacactgagaattattatgtatcagccactgtctrggctctgaggacttccagagttcttaccttaaaaagaaacaaacggccgggcacggtggctcatgctggtagtcccatcactttgggaggcctaggcggg

SEQ ID NO: 263957 - DNA, 201 bp, Homo sapiens; identical to SEQ ID NO: 52684

SEQ ID NO: 263958 - DNA, 201 bp, Homo sapiens; identical to SEQ ID NO: 52685

SEQ ID NO: 263959 - DNA, 201 bp, Homo sapiens
tggggacggcggggaccggtgaggcgggggtgggccacgccgtggggagcgcagccctgcgcgctttggaaggaagattctcccaccttcctcccagaccygggcccgcgtctcctccctccgcgtcctcagacacgccccctagggctggcttgtcccagccccaggtctccctgctgccactgagagtaaattggacct

SEQ ID NO: 263960 - DNA, 201 bp, Homo sapiens; identical to SEQ ID NO: 52686

SEQ ID NO: 263961 - DNA, 201 bp, Homo sapiens
tcagattcattacaaacacagggaaagtgctccagtatttttaatccatctttccttgcctcgcgtaagtgtaaaaggcagtggagtgggggtattgtgawcctattgattggatttcaggtcctgctttagtctgtgaccttgaaaagaatcattagcttctttggttctgtcttaaaaggaatgaaaattattgctcac

SEQ ID NO: 263962 - DNA, 201 bp, Homo sapiens
atactagagacaatgtgtcctgttttaggaagtttttgtgtaactgtccattaccacttacaataattattaatccatttaatatttcattaaatacctayggccataatttctactcttggttttacaacctctgaagaggtctctccaattacctcagagtactataatgtgctataatttcttaatctaatcaatgtt

SEQ ID NO: 263963 - DNA, 201 bp, Homo sapiens
ttaccacttacaataattattaatccatttaatatttcattaaatacctatggccataatttctactcttggttttacaacctctgaagaggtctctccarttacctcagagtactataatgtgctataatttcttaatctaatcaatgttaaatgcctgtggtcatgatttctagttttggttttgtcatacctgaagac

SEQ ID NO: 263964 - DNA, 201 bp, Homo sapiens
ttttttgtttgtttgttttttgttttttgagatggagtgttgctctttcacccaggctggagtgcagtggcgcgatctcggctcactgcaacttctgcctyccgggttcacgccattcttctgcctcagcctcccgagtagctgggactacaggcgcccaccaccacgccgggctaagtttttgtatttttagtagagaca

SEQ ID NO: 263965 - DNA, 201 bp, Homo sapiens
ttctgactactccccactttgcttctctttgtagagtgacaaccaacaagctgctgctttccattatcatcttactggagctcgccatcctgggaggcctrgtttactacaaattctttcgcagccattgaacttctatagggaagggtttgtggaccagaactttgaccttgtgaatgcatgatgttagggatgtggata

SEQ ID NO: 263966 - DNA, 201 bp, Homo sapiens
aaggaagtaactactatttgaacaacatttcagaatccatttttatgctttggtttttattgtctcagtttaacatttctgtgaggtagacagtgttatcmctaagtgacagctaaagaaccttatgagtacttcctgctaagtggctgtgtgatcaaacatacagcctcagagtatccagccgtggtcccaggtctaacc

SEQ ID NO: 263967 - DNA, 201 bp, Homo sapiens
tgggagccaatcttttggctccttgatggtcctactgccagtggtcacttgctctgtactaggcctctgtgagctgggtcccttttgattttgtgtgtgtrtgtgtgtgtgtgtgtgtgcacgcgcgcgcgtgctttgaacagctaagaacttggagctgcctccgtttctgtcagtggttgttaattctggcctgacaag

SEQ ID NO: 263968 - DNA, 201 bp, Homo sapiens
tgaaaggacatttaatcacagctgatgttctttagagaaggcaacacatgggaataacagcttcctattccttgaaatatatttatataatctcagccccrtgcggtggctcatgcctgtaatcccagcaccttgggaggctgaagcgggcagatcacaaggtcaggagttcaagaccagtctggctcaaatggtgaaacc

SEQ ID NO: 263969 - DNA, 201 bp, Homo sapiens
aggcgcatgctaccacacctagccaatttttgtatttttagtagacacggggtttcaccatgttggccaggctggtctcaaactcctgacctcaagtgatytgcccgccacggcctcccaaagtgctaggattacaggtgtgagccactgcgcccaaccacaaaatactctaagttgctggtaacagacatagttgtttaa

SEQ ID NO: 263970 - DNA, 201 bp, Homo sapiens
aggggtgcccgagcggctgctggggacggcggggaccggtgaggcgggggtgggccacgccgtggggagcgcagccctgcgcgctttggaaggaagattcycccaccttcctcccagacccgggcccgcgtctcctccctccgcgtcctcagacacgccccctagggctggcttgtcccagccccaggtctccctgctgcc

SEQ ID NO: 263971 - DNA, 201 bp, Homo sapiens
tggataattaaataactcaggataaaatcatttgttaaaagtatatactgctttgacttggagcagtgaaaaatttctccactgaaaggacatttaatcayagctgatgttctttagagaaggcaacacatgggaataacagcttcctattccttgaaatatatttatataatctcagccccgtgcggtggctcatgcctg

SEQ ID NO: 263972 - DNA, 201 bp, Homo sapiens
agcctgggaggtcaagcatgtggttagccacagttgcaccactgcactccagtctgggtgacagagtgagacctgcctcaaaaaaaaaaaaaaaaaaaaaaggttactgttctttgttaaacctactgtcacagaaaatgtagtttagaggtaattctaaccatgtccctttctgtcttaagagacaacataggagctgga

SEQ ID NO: 263973 - DNA, 201 bp, Homo sapiens
cattgtgggatctgatttatgtgattgaaaagtagactgcaggcagggtacggtggctcacacctgtaattccagcacttggggaagccgaggcgggcggrtcacttgaggtcaggagttcaagaccagcctggccaatatggtgaaaccccatctctactaaaaatacaaaaattagccgggcatggtgtcagttgcctg

SEQ ID NO: 263974 - DNA, 201 bp, Homo sapiens
gcttgaacctgggaggtggaggttgcagtgaaccgagaccgagccactgcactccagcctgggagacagagcaagactctgtctcaagaaaaaaaaaaaaattgctctttagttggtggaagtgctgctggcttgtgtttaggagtcacattgaaaaatacatagctttaaaaggccatatccccatacgtgcaacagcat

SEQ ID NO: 263975 - DNA, 201 bp, Homo sapiens
tgccagacatggtccctgcctcatggagcatatggttatttacttggtgtagtccaaataaataagtagtttgattagtccaaactaggcatatttccaartgagtgagggaagaaccaggctatctgctcactactttctgccttcccagctggcagagatggaggaggagctacgttatgcacccctgtctttccgaaa

SEQ ID NO: 263976 - DNA, 201 bp, Homo sapiens
cttgagtctagcagtttgaagttttagtgagctgtcatcacatcattgcactccaacctgggtgacagagcaagactccgtctcaaaaaaaaaaaaaaaaattatgaagaagtatgtgaattgagaggccatatagtataatatttaacagcaagaattcaagagccagattgcctgagtttaaattcaccttctagtagc

SEQ ID NO: 263977 - DNA, 201 bp, Homo sapiens
ggtgagctacagttcccggcccaagagttggttttgaggcagaaattaaccagcctcaatggatatgaggagtgagggagaaaggttccagggtgtctgcrttttttcacttggtcaactgggtgaatgatgaacttaagtaagaaacataagaggagaagcagagtttgggttgtggatgagaatatcaaaggtacctgt

SEQ ID NO: 263978 - DNA, 201 bp, Homo sapiens
atcacttgggccctggagctggaggttgcagtgagccaagatcgcaccactgcactctagcctggaccacagagcaagactctcccaaaaaaaaaaaaaaatgtagactgcattttcaacctggcactgaattaatttttgcaatgcccatttctataagtctaaataatgcaaaagaacattgctttgaaaaatagaaaa

SEQ ID NO: 263979 - DNA, 201 bp, Homo sapiens
tgggttgtggatgagaatatcaaaggtacctgtagaacagagatcatgacataatatagccttacaaaatgtttcttcttctgccattaaaaataacataygggggccaggtgtggtggctcgtgcctgtaatcccaacattttgggaggctgaggcaggaggattgcatgaggccaagagttggagaccagccttggcaa

SEQ ID NO: 263980 - DNA, 201 bp, Homo sapiens; identical to SEQ ID NO: 52682

SEQ ID NO: 263981 - DNA, 201 bp, Homo sapiens; identical to SEQ ID NO: 52683

SEQ ID NO: 263982 - DNA, 201 bp, Homo sapiens
atatatgattgtgatttatttctattctgttgtccacattttcattactttaaaaatgggtatattccacctattaaaacaacaaaaactgtatttctccraagtacagtctccattcactttctgcctttgaatgatactagagacaatgtgtcctgttttaggaagtttttgtgtaactgtccattaccacttacaata

SEQ ID NO: 263983 - DNA, 201 bp, Homo sapiens
ggcgggggtgggccacgccgtggggagcgcagccctgcgcgctttggaaggaagattctcccaccttcctcccagacccgggcccgcgtctcctccctccrcgtcctcagacacgccccctagggctggcttgtcccagccccaggtctccctgctgccactgagagtaaattggacctcgggattcagttccctgggatc

SEQ ID NO: 263984 - DNA, 201 bp, Homo sapiens
aagggaatgacctacttcctcattttgtagtcaatgaaggagaatgtgaggtcccaaagaaatgaaggaaattatctaagtttacatgctgaggcaggccygaacctggcaccagaacctcaccccgctgactaaccagaaaaggtgcttgtatgcctttcccccatacaaatgtttaccaggtgacagcattctggtacc

SEQ ID NO: 263985 - DNA, 201 bp, Homo sapiens
cagagggaatggcctttacaaatgtgtggaaacagtaataagcatttgaaacttatctatcttttctagaagaaaagaagaaattgatcagggattttgakgaaaagcaacaggaagcaaatgaaacggtgagaacaaggaacaaattttgtttcttctacctggtgttggtcttttccagaagtaatgctatgagctgat

SEQ ID NO: 263986 - DNA, 201 bp, Homo sapiens
ataagcatttgaaacttatctatcttttctagaagaaaagaagaaattgatcagggattttgatgaaaagcaacaggaagcaaatgaaacggtgagaacarggaacaaattttgtttcttctacctggtgttggtcttttccagaagtaatgctatgagctgatcacaaattaactgttcctgtccattgatcttgatttt

SEQ ID NO: 263987 - DNA, 201 bp, Homo sapiens
cctcctgagtagctgggattacaggcatgcgccaccatgcctagctaatgtttgtatttttagtagagatggggtttcgccatgttggccaggctggtctygaactcctaacttcaggtgatccacctgctccggcctcccaaagtgctaggattataggcgtgagccactgtgcccggccgctttgctcaatttttagtt

SEQ ID NO: 263988 - DNA, 201 bp, Homo sapiens
gtgagggaagaaccaggctatctgctcactactttctgccttcccagctggcagagatggaggaggagctacgttatgcacccctgtctttccgaaacccyatgatgtctaagcttcgaaactaccggaaggaccttgctaaactccatcgggaggtgagaagcacacctttgacagccacacctggaggccgaggagaca

SEQ ID NO: 263989 - DNA, 201 bp, Homo sapiens
gaccttgaaaagaatcattagcttctttggttctgtcttaaaaggaatgaaaattattgctcactatatcccttctaacatggggaaggtgatgaggaatrtgctggcaatgaatttataatggaaaaagtctaacatttctcttccatacttctttcagaatcggctacagtctcaaagggcaatgcttctgcagggcac

SEQ ID NO: 263990 - DNA, 201 bp, Homo sapiens; identical to SEQ ID NO: 52689

SEQ ID NO: 263991 - DNA, 201 bp, Homo sapiens
atgcatcctgattatagtttaagagatattcaggatgatattggcttgacattgctgatgccaaaactagatcccttgagaatgaagtacttaaaattttmaaatggatgcgcgagggattatcacagattagaagctgacagaagatcacttgtaaagggagactggaaacaggcaggcaggtggagctggttaaagtgg

SEQ ID NO: 263992 - DNA, 201 bp, Homo sapiens; identical to SEQ ID NO: 52691

SEQ ID NO: 263993 - DNA, 201 bp, Homo sapiens
atcgggccgaagcccgctgtcgccgcgcgggctgaacctggcacccggagcaacgcgcgaccccgggacgagacgctctcgtccgagccaaactacatccyccggcgtgcactgcagcgcccgcccctcgccggccggcggggcccgggaggaaggcggccgcgctgccagtcccgcaggtcccctaggcccctttcgctg

SEQ ID NO: 263994 - DNA, 201 bp, Homo sapiens; identical to SEQ ID NO: 52731

SEQ ID NO: 263995 - DNA, 201 bp, Homo sapiens; identical to SEQ ID NO: 52694

SEQ ID NO: 263996 - DNA, 201 bp, Homo sapiens; identical to SEQ ID NO: 52692

SEQ ID NO: 263997 - DNA, 201 bp, Homo sapiens
attcattcagttcatatactcgaatgcctgctctgtgcttgctgggcactatgcaaggcattcagaatgaggggaacatgccagacatggtccctgcctcmtggagcatatggttatttacttggtgtagtccaaataaataagtagtttgattagtccaaactaggcatatttccaaatgagtgagggaagaaccaggct

SEQ ID NO: 263998 - DNA, 201 bp, Homo sapiens; identical to SEQ ID NO: 52695

SEQ ID NO: 263999 - DNA, 201 bp, Homo sapiens; identical to SEQ ID NO: 52735

SEQ ID NO: 264000 - DNA, 201 bp, Homo sapiens; identical to SEQ ID NO: 52696

SEQ ID NO: 264001 - DNA, 201 bp, Homo sapiens; identical to SEQ ID NO: 52697

SEQ ID NO: 264002 - DNA, 201 bp, Homo sapiens
ggacagcaactgaatacccacatgccatttctccataagcccggctcatctgttctcttttgcagcggaaaggctgaggtggatggatcacttgaggtcargagtttgagaccagactggccaacatggcaaaaccctgtctttattaaaaatgtaaaaaaattagccgggcatggtggtgggtgcctgtaaccccagctg

SEQ ID NO: 264003 - DNA, 201 bp, Homo sapiens; identical to SEQ ID NO: 52698

SEQ ID NO: 264004 - DNA, 201 bp, Homo sapiens
caaaatgtttagaaggaaggttatccaaacttctgactactccccactttgcttctctttgtagagtgacaaccaacaagctgctgctttccattatcatyttactggagctcgccatcctgggaggcctggtttactacaaattctttcgcagccattgaacttctatagggaagggtttgtggaccagaactttgacct

SEQ ID NO: 264005 - DNA, 201 bp, Homo sapiens
tcatacagcaattccctgacacttaaaactgagtttttgttcccataatcttcaaagacttaaatgtactgaacctttgctgtttctcctatgagccagakgacatgtcctatcaactgagttaagtgtcaacagtcagctagctagaaacatgttcagatatgtgtagggagagaagaatatgtagatacatatgctgta

SEQ ID NO: 264006 - DNA, 201 bp, Homo sapiens
gttcccataatcttcaaagacttaaatgtactgaacctttgctgtttctcctatgagccagaggacatgtcctatcaactgagttaagtgtcaacagtcarctagctagaaacatgttcagatatgtgtagggagagaagaatatgtagatacatatgctgtacgagtggattcttatgaaagaaaggttttctttatatt

SEQ ID NO: 264007 - DNA, 201 bp, Homo sapiens
cccataatcttcaaagacttaaatgtactgaacctttgctgtttctcctatgagccagaggacatgtcctatcaactgagttaagtgtcaacagtcagctwgctagaaacatgttcagatatgtgtagggagagaagaatatgtagatacatatgctgtacgagtggattcttatgaaagaaaggttttctttatatttaa

SEQ ID NO: 264008 - DNA, 201 bp, Homo sapiens
aactgagcccacctgggcaaatcattgaggtaggcccccgggtgttccccttttagggcaatccaacactaataataatgataccatatggtttaggatcygagtacagacttagcctgattcaccttgaagtttcttggaaaaggtgctgccacctctcacatagaactttcccacttctcagcttttggtactatcctg

SEQ ID NO: 264009 - DNA, 201 bp, Homo sapiens
ttcaccttgaagtttcttggaaaaggtgctgccacctctcacatagaactttcccacttctcagcttttggtactatcctgatgtttctcttttcatgttrttttatgcagtaattatttctttccataccataccattcagggtccttgaatgagctcatgtccactaaaaccagcttaaattttgagaaagttcctgca

SEQ ID NO: 264010 - DNA, 201 bp, Homo sapiens
cagttattcctaccctgcaatagaacaccagaacttattcttcctgtctaattgtaattttgtgactgttgaccaatctcccctccccagtgtctgataamcactgttctactctctgcttctgtgatagcaaccttttttttttttcagattccacatgtgagtgagatcacacagtatttgtttttctgtgtctggctt

SEQ ID NO: 264011 - DNA, 201 bp, Homo sapiens
acttccccttaacaactgactgtgaatctgtcacttaaatattgttctaaatgtgtctttagcttgtgttttcagtaactgtggcccacagtttcttaatragagtctgataataaacaagttaaacaatgaaaaagggttctctccttagggcccttgcctgagcttgtttctatttcctctgggaggaaaaaagaaaga

SEQ ID NO: 264012 - DNA, 201 bp, Homo sapiens
ctcgactcactgcaacctccgcctactgggttcaagtgattctcctgtctcagcctcccgagtagctgggataacaggcgcgtgccaccacacccagctawtttttgtatttttagtagtcacagggttttgccatgttggccagcctggtctcgaactcttgacctcaggtgatccacccaccttggcctcccaaagtgc

SEQ ID NO: 264013 - DNA, 201 bp, Homo sapiens
atgagccagaggacatgtcctatcaactgagttaagtgtcaacagtcagctagctagaaacatgttcagatatgtgtagggagagaagaatatgtagatayatatgctgtacgagtggattcttatgaaagaaaggttttctttatatttaagggcaagtttattagaattaagctgcatccacactctactccaagttat

SEQ ID NO: 264014 - DNA, 201 bp, Homo sapiens
atccattttctggcttattaagtactgggatgatttcttcagtgacagaagaaactatgcatcactgatttcctatttttgaagccctggcatttttcttsttgggacactgcgtgcttcatttctaattaggcttttcttcttactcatatttggctttgctttatcaatacattacgcaaccagtaactggaaacagga

SEQ ID NO: 264015 - DNA, 201 bp, Homo sapiens
ttcaagggtatggagtgtgtgtgtgtgtgtgtgtgaatatcattctttcagttgtacaatacaataattagaaaacttagaagttaagtgatgtggtaaaratcatacagcaattccctgacacttaaaactgagtttttgttcccataatcttcaaagacttaaatgtactgaacctttgctgtttctcctatgagccag

SEQ ID NO: 264016 - DNA, 201 bp, Homo sapiens
aagttcagcctttgtgttcatagagttaactttcctaatatccttaatgttaatgccaaagacaaccaacaatagcagctttactcctgaacccagttccyataaatgacatgcttgttatttaaataactaggcaactagtttcacccacacttcccacatgaggagtaaaattattatagctgatactttttgggcatt

SEQ ID NO: 264017 - DNA, 201 bp, Homo sapiens
gttaatgccaaagacaaccaacaatagcagctttactcctgaacccagttcctataaatgacatgcttgttatttaaataactaggcaactagtttcaccsacacttcccacatgaggagtaaaattattatagctgatactttttgggcatttgctttatgccaggctctgttctgtgctctttcacacactcactcact

SEQ ID NO: 264018 - DNA, 201 bp, Homo sapiens
ttaaagaccctatctccaaatacaatcacattctgagatactgggggttaggactctaatatatgaatttggggtcggggagacacaatttagcccataayactaagttcggttcttctctttaaatttttcatgcatgttacagtgaaaaaaagctaatttctttactttccaagcataggttttgaatccaaaagtgtc

SEQ ID NO: 264019 - DNA, 201 bp, Homo sapiens
ttactcctgaacccagttcctataaatgacatgcttgttatttaaataactaggcaactagtttcacccacacttcccacatgaggagtaaaattattatrgctgatactttttgggcatttgctttatgccaggctctgttctgtgctctttcacacactcactcacttaattcttgctgcaatctattttaaagatgag

SEQ ID NO: 264020 - DNA, 201 bp, Homo sapiens
ttgtctgtgtcgatctattaaataactgtatctggccctggagaggtaacttaacactttcagcagggaaggagctgaggctgactcacagctctccatcrgcatttcccatttttctttcaaagcagttcataaataccttctttatgctttacatttttactgtggagccagcgaatgtataaggaagaagttgattag

SEQ ID NO: 264021 - DNA, 201 bp, Homo sapiens
attgtaggtgccccaggtagagaaggggaggagggctgcaggagctgttacttggttgtgagcacagaaaacagtcacctagagactcagacttacttctrtttgtaaatatctgctctgctgcatcagtaggcgtccccttgcctcatctacttccactttccgtttcatactctgatctcttccaggtattccctcagc

SEQ ID NO: 264022 - DNA, 201 bp, Homo sapiens
ctgcaggagctgttacttggttgtgagcacagaaaacagtcacctagagactcagacttacttctgtttgtaaatatctgctctgctgcatcagtaggcgyccccttgcctcatctacttccactttccgtttcatactctgatctcttccaggtattccctcagctttgaattttccactttcctaccctccttcaactg

SEQ ID NO: 264023 - DNA, 201 bp, Homo sapiens
agctgttacttggttgtgagcacagaaaacagtcacctagagactcagacttacttctgtttgtaaatatctgctctgctgcatcagtaggcgtccccttscctcatctacttccactttccgtttcatactctgatctcttccaggtattccctcagctttgaattttccactttcctaccctccttcaactgcgtgagc

SEQ ID NO: 264024 - DNA, 201 bp, Homo sapiens
ccaccacacccagctaatttttgtatttttagtagtcacagggttttgccatgttggccagcctggtctcgaactcttgacctcaggtgatccacccaccktggcctcccaaagtgctgggattacaggcgtgagccacctcacccagccaatattttggccttaaacatccaattatctttagaaagatatacaaaatga

SEQ ID NO: 264025 - DNA, 201 bp, Homo sapiens
tgagcccacctgggcaaatcattgaggtaggcccccgggtgttccccttttagggcaatccaacactaataataatgataccatatggtttaggatctgartacagacttagcctgattcaccttgaagtttcttggaaaaggtgctgccacctctcacatagaactttcccacttctcagcttttggtactatcctgatg

SEQ ID NO: 264026 - DNA, 201 bp, Homo sapiens
tcgcttttcaaggggtagatgaggacagcaggatcctcagtaaagaagaatcacctagtgaggcagagtttccagcagcacagtgaagctacacataggtygtatatcttggtatgatgtgtatttgctttggaaagagacatttaaacaaagttctccttagcaaagtcttgcctccactgccaccaatccaggagtctc

SEQ ID NO: 264027 - DNA, 201 bp, Homo sapiens
caaggaggaagccctcttttttttctcatctagcctcaaaagtcctgctacattctgttggtttcaagcagtcataaggccatcccagatgcaagaggagrgaagttaggctccatttcttgatgcgaggctacctatagaagagcttaggaaattttgttgaggtcatctttggaaaatataatctactttggccttcaa

SEQ ID NO: 264028 - DNA, 201 bp, Homo sapiens
tcctctaaactctcttttttgccaacccatagccattccctgagcatgccatgctctatctcactgccacatgtttgcatatgatcatctctctaccttcytagccatcagttaacacccaactgaaatgtcacctctgtgaagcacgatgcataggctactgccttctgatctcccaagatgttctctcttctgtcataa

SEQ ID NO: 264029 - DNA, 201 bp, Homo sapiens
actgacgtgagacgctacatgagacatggaaaggctattctgaattgtggcagataacttccgtcttatggatagattaggggagattacggagcctgtaraatgcaaagaattgagcttttctaagagtaagtttttcttcctgtgactcctttcattgattcattcactgattgattgattgactgattcattcactca

SEQ ID NO: 264030 - DNA, 201 bp, Homo sapiens
ctctagaatcttatttccagttgacagattttgaagcttccccaaggatgcccatttggtagatgtcatatactttctaatgaagggttgcaaaaagcaartgatcactttgttaaaacctgggggctcattttggctttgctctgtgaaccccagagttagcatctaaagtggcagaagacacttaaaagagggattctc

SEQ ID NO: 264031 - DNA, 201 bp, Homo sapiens
aaataatttacattaacctttacaaatgtgttatattgatttggtcacattataaggcacttagagagaatcaagagtgcagatggacaggtcttgacacrtagcctctgcaaccaggagacaggcagaaaacagactatggggtctctaagacagcaggtagaataaaaaggcatgaactctggattgggagctggaggt

SEQ ID NO: 264032 - DNA, 201 bp, Homo sapiens
aaacagcaagaaagagtagaaatggacctctgtcaagggcctctatgtctcagatggggttaaatgtgtagtatgtttaggcctaagaagtcaggattgaraggggtagaggcacttggatcatggggcagaagtaggtcctggtagtcccaaactgttaactgtgagagtaggcattatcttcaaataaggtttcactag

SEQ ID NO: 264033 - DNA, 201 bp, Homo sapiens
tcattatgtaaattaaacactagactttgaattactagaaatacacagttagccaataaacctttcttataaaatgacagtattttaatttattagatgcrttggcatgtattcatgcctaagatttcatcaatcaattttccattttaaaaagctgtctctggaagcaatagtggagagatgctgagttccaaaagcaat

SEQ ID NO: 264034 - DNA, 201 bp, Homo sapiens
taggcattcactggcaggcattcttcccagctcaagaaattcctggggatgggaatagacattgtgctctgggagtttttatttagctgttctttaaaatrtagagttaaatgcaattcaattcatgtatctagtgcctttaactattccccaaaacatctgaaagaatttggaaaccctggaaaggcttcctgtctgtca

SEQ ID NO: 264035 - DNA, 201 bp, Homo sapiens
agagttgccatggcctaatcacctcttaaaggtcccacttcttaatacttctgcaatggcaattaagtttccaacgcatgtttttttttttttggagacacattcaaatcatagcaaatagtagtcataaacttgtactcagcatttactttgttttagatattattcaaggtgtgttatgttcaatcttcacaaccaccg

SEQ ID NO: 264036 - DNA, 201 bp, Homo sapiens
gctagtgtgaaagggctcccactagccaaagtttggacagtttgaatatggctatattgattgcaaaacattgaatacataaaaattcattagtccatagyaatacccaaaaaagtgaaagaaaaggaaaaaaaaactaatttgccatcattggaagtgatcattcaataaatccttactctgacattgatagtaaaaggg

SEQ ID NO: 264037 - DNA, 201 bp, Homo sapiens
aaggaaaaaaaaactaatttgccatcattggaagtgatcattcaataaatccttactctgacattgatagtaaaagggaaagaactaaacatttaccttgyctttttttttttttttaatgctttaagttctagggtacatgtgcacaatgtgcaggtttgatacataggtatacatgtgccatgttggtttgctgcaccc

SEQ ID NO: 264038 - DNA, 201 bp, Homo sapiens
tatttggctaacacaagaagattaattatttgggctaggagaaaattaggaggaggggaaggaaattaagaaagggaacattttggatatatatttgcctytcatatacacctctttccaaatgcagagctgtttcctgaacagttttcctagtgaaagaggtcattcacagctagagaaagcaggccccactgctgccag

SEQ ID NO: 264039 - DNA, 201 bp, Homo sapiens
ggaaaaaaaaactaatttgccatcattggaagtgatcattcaataaatccttactctgacattgatagtaaaagggaaagaactaaacatttaccttgcctttttttttttttttaatgctttaagttctagggtacatgtgcacaatgtgcaggtttgatacataggtatacatgtgccatgttggtttgctgcacccat

SEQ ID NO: 264040 - DNA, 201 bp, Homo sapiens
agtgtgttatttaggatatttggatattttccaggtatgattctgttatttatttctagcttcattttattgtggtcagaaaataaactgtgtttaacttsaattcttttatacttcttgagactggttttatgacccagaatatagtccatcttgaaaagaatgtctagtctgctattgtgggtggagtgatccatacat

SEQ ID NO: 264041 - DNA, 201 bp, Homo sapiens
gcctaagaagtcaggattgaaaggggtagaggcacttggatcatggggcagaagtaggtcctggtagtcccaaactgttaactgtgagagtaggcattatsttcaaataaggtttcactagtcaaataaatttagaatgccctggattaaatatcattaaatgactttctttattgtatatacactcagattctttgatac

SEQ ID NO: 264042 - DNA, 201 bp, Homo sapiens
atacctatacagacagatagacagtaaaaaaaaaaaaaaaattggacagaaagacatctgttgctctaagtaatccagaaaatttgccttaacacgttcagaagacatatttggctataatatacaactcctctcctttcccccgcctgccctctgctggaactgctaatgagcagtaagatggcaaaagcaggacattgt

SEQ ID NO: 264043 - DNA, 201 bp, Homo sapiens
ccacaatgggaatctttgaagtccttcatgatgtgcctttgtatgactagcaatctcctcacaagactctatggttcactgtgcacaaagatatgattctrcctgcctgcctgagatagaccaagtgaccttgtgtgttctcttcctcctctgtgcttgtttcatctgcagaaccatctgatggatggcagacagctgaac

SEQ ID NO: 264044 - DNA, 201 bp, Homo sapiens
gacatcataggacattcaaaagaacacagactcagacaagcctgagtatgaatctgaattctgccagtcaagctgtattattttggtcacttcatttaacytcatttgcatctcagcttcctcatccataaaatgaggatcattatgcatgtctcataaagttgccataagaattaggataatgtatgttaagtgttagac

SEQ ID NO: 264045 - DNA, 201 bp, Homo sapiens
tctaggtaaagcacatggcagagtgcctggtccataataaacatgcaataaatgttagattttattcatcgcaaacgtggtgaaactgaaggtgacttgtsttgaactcaattcttttagaaaaccttcatagaatttgatactcacattgtaattcatagctttgtaatactagagacttctaggttttttagttactga

SEQ ID NO: 264046 - DNA, 201 bp, Homo sapiens
acttctaggttttttagttactgaaagcacaaaagattgtttttctttatagggatgttagaggaaaaattcactttatattctgaaataatttacattarcctttacaaatgtgttatattgatttggtcacattataaggcacttagagagaatcaagagtgcagatggacaggtcttgacacgtagcctctgcaacca

SEQ ID NO: 264047 - DNA, 201 bp, Homo sapiens
acttccctggctcattgtgaggaatgtaatacacatgagagatattcgaaatgttaagacacagtgcagtgtgaaaagcacatggtaaatgtataataaayggtaggtcttgttattccccaaattatcccactattattcactaaaatacatgaacactgggctgatagcagtgtgaaatatgcacaaactgaatactgt

SEQ ID NO: 264048 - DNA, 201 bp, Homo sapiens
agcatgtttagtgcaaaaacactgaataaggaatcaggactaaggttctaatttacatttccagactttgaaacaaactcactgtgtgaccctgggatagwctcaacttctctagatcttagttttcatatctgtaaaatggatgattgaattaggttctgcctggtgccaacctctggtagaaaacctttatctacaatg

SEQ ID NO: 264049 - DNA, 201 bp, Homo sapiens
tgggggaggatatttgtctgtgtcgatctattaaataactgtatctggccctggagaggtaacttaacactttcagcagggaaggagctgaggctgactcwcagctctccatcagcatttcccatttttctttcaaagcagttcataaataccttctttatgctttacatttttactgtggagccagcgaatgtataagga

SEQ ID NO: 264050 - DNA, 201 bp, Homo sapiens
acatttcaacctgtaacattttgaactgtatgaaattgctgatatttgaacatttttgacctactaaatgacaatttcatgtggttcaaactaatacttargacagtgacggcaagtgccatttgcatccacctggttcaggtactccttccaaatacctgaaggaggatgattagtatatggggactggattctcccagt

SEQ ID NO: 264051 - DNA, 201 bp, Homo sapiens
attttcacagatgtaatcaccacaaagtttctttaaataattaccctttttttggtaattaatatccgaccctatcttaaatgttaaatttacacatccawtttaaggaaccatcaagtgtccagagcctgaatctgcattcatcctcctgctgcatatggccttcttagaatagtctcaagtgagcttgttctaaaacca

SEQ ID NO: 264052 - DNA, 201 bp, Homo sapiens
gggagacataggaatagttggaagcatctatggggcctgggctttgcctcccattggctaaatggttagtatacacaatctcatcagatctttataaacarctctgtaggatgaatattttatttccattaaaaagatgagaaaattgaagctttgctagatgtcagtaattggtgcaagggggcagggttgttaaggtag

SEQ ID NO: 264053 - DNA, 201 bp, Homo sapiens
cctaatatccttaatgttaatgccaaagacaaccaacaatagcagctttactcctgaacccagttcctataaatgacatgcttgttatttaaataactagrcaactagtttcacccacacttcccacatgaggagtaaaattattatagctgatactttttgggcatttgctttatgccaggctctgttctgtgctctttc

SEQ ID NO: 264054 - DNA, 201 bp, Homo sapiens
gcaggagctgttacttggttgtgagcacagaaaacagtcacctagagactcagacttacttctgtttgtaaatatctgctctgctgcatcagtaggcgtcmccttgcctcatctacttccactttccgtttcatactctgatctcttccaggtattccctcagctttgaattttccactttcctaccctccttcaactgcg

SEQ ID NO: 264055 - DNA, 201 bp, Homo sapiens
gaaatataataattgtaagtcattatcaaatggcttggctccagattgagagaatcagcaattaacctctgcctttcgtgttttatttctggagatacctktctcttaaccaaccactaacatcacacgtagcacatccagaatttagaaaggatttgctctgggcacagtagatgagcacacagattctacagagagatt

SEQ ID NO: 264056 - DNA, 201 bp, Homo sapiens
cttactatgtgaaagaagacataagacatatttactgctcagcctgatgcctggcacatagtaagtgcttaattacaattattcctactgccaagcaccaycattatctttactttcactgcaattaacatagaatgagctagtcttattctctagagaatactttctattctttagaactctagttataaaatcaataaa

SEQ ID NO: 264057 - DNA, 201 bp, Homo sapiens
catccactcccacgccacctccttttcttctttttctttggtacactgtgtttttggtcacgtgtatacacaacaaagttcaaataagtagtcacaggaayctttactgggaggctttggcaaatcaaatatatgctatataatatataataattatacatggagaaaagaggcagagggcccagaagctcttggcagctg

SEQ ID NO: 264058 - DNA, 201 bp, Homo sapiens
ggttgcccaaggttatagcaataaagaaaaaacatagtgccaggtgcttctctgaaatcatttaccccttcttttgtagttaggttttggctttcaaaagmcaaaaaaaaaaaaaaaaaaaaaaaaagcttataaacagttcattctaaaaggacaaaggcaatatgtattgtatgcttaaaatttccaaggctctggaaa

SEQ ID NO: 264059 - DNA, 201 bp, Homo sapiens
acatttatgcaagaggaacatattgttattgaacgtgtttgtgattttactcatgattcagaattggaaagaagctgaaagtaatttctgaaggtacatarctgaattgaaggaacatagaataatgatacctctcctagtggcagaaaaataactaatatcttggcttctcatttcaacttcctcactcaacacactctc

SEQ ID NO: 264060 - DNA, 201 bp, Homo sapiens
gaaattaatataaattttatacaaatgaggtaatagaatggaatagaaataccagaatgcatcacacttggtaagggtagattttgttttgtgaaattttkttttatatacatttacacacatatacatgcatatacacatatatattcacacatatttatatgtgtatacaaataacatataaacatatacatgtgagtg

SEQ ID NO: 264061 - DNA, 201 bp, Homo sapiens
ctgcttttggtattttctccttatcactggttttcaatgatttgtcttggtgtcattcattttttatcctgcatgggatttaattagattcttggatctgygggtttattctttttatcaaattgggaaattttctcaccataatttatactcgttctgtcctcctacttctctccatgtggacaagtttgcatgtgttag

SEQ ID NO: 264062 - DNA, 201 bp, Homo sapiens
aaaggtaaaatgtaaataaccatattacacaataaatatgattttaaacactaaataacatttgttaaaacaatgccttcagctttaacaaatttacaaayttgtttaataaagaaaagaggcatggaggcaaaatgtactcccatatgtgtatacgtacatgcatacagacatctacccataaatagaatttttaaaaac

SEQ ID NO: 264063 - DNA, 201 bp, Homo sapiens
acagtcaaagcatgtttgatctctctgactttccctcattgaaagcattgattcttgttatacgtggttggtagatttagggagatgtaaactctgaaagraacttgaaagtaataaatcctatatctcctttatgattatgtctcctttttttctaccccttaaacaacacacacacacacacctttagctgtgctggac

SEQ ID NO: 264064 - DNA, 201 bp, Homo sapiens
tcttagatatgctgttcaatccctcccctgcaaatatagctttgacaataatgaggcgagtagatgaggacatgttaaaatcacaggcctcttgaaggaayttttggcagatgattgtgtgtatgtgtttgtgttcatgtatgcacacaatatagtaattccatacagtagggaattaaaaaatctgggatgaatcccgta

SEQ ID NO: 264065 - DNA, 201 bp, Homo sapiens
agtcctgctacattctgttggtttcaagcagtcataaggccatcccagatgcaagaggagggaagttaggctccatttcttgatgcgaggctacctatagragagcttaggaaattttgttgaggtcatctttggaaaatataatctactttggccttcaaccttgttttacttacttactgttcaactgactctgaatac

SEQ ID NO: 264066 - DNA, 201 bp, Homo sapiens
aaataaccatattacacaataaatatgattttaaacactaaataacatttgttaaaacaatgccttcagctttaacaaatttacaaatttgtttaataaasaaaagaggcatggaggcaaaatgtactcccatatgtgtatacgtacatgcatacagacatctacccataaatagaatttttaaaaacttcaaatatattt

SEQ ID NO: 264067 - DNA, 201 bp, Homo sapiens
attcctttacacaacgttcctgaaaaggttggtttcttaggatcctgcagcaacactgcctgcatggttcacagagaccagaccgctgcacaagcctttcrctggcagacagccaatggtgctgcctctcctctcctctgaaagacttgctttactcacccagagtccatcaaactcgcttttcaaggggtagatgaggac

SEQ ID NO: 264068 - DNA, 201 bp, Homo sapiens
tcccattttagcatcatgtgtatttcatgtttatttttgtggattagactgagccccttgaaggagcagaaagctccttatcatctttgtatcactaatgkctctcataggccctagcacggagtaggtgatcagtaaatgttacaagaaggagtgaaagttgaaacttcacttaactcatattggtctgtgtttctgatc

SEQ ID NO: 264069 - DNA, 201 bp, Homo sapiens
ttgtttgccttctgttcttgcatgatctgccttgaatctgacagtttagagatggaggagccaacaataatgtcttagttcattttgtgctgctgtaacamcaccacaagctggggaatttataatgaacagaaatttactagctcacagttctgaaggctgagaatttcaatatcaataccgaagtcacatctggccagt

SEQ ID NO: 264070 - DNA, 201 bp, Homo sapiens
gcggctcctcaagtcctgcccaaagaccgtccagaaaccccagcctcccgtcgccttctcgccgcctccgctgggagccgcagatcagtccaagttgacgkacaggaggcgaaatgtgcaaatgtttatgggtaagtgttgcttcgggtgctaattctgtatggctcttttgctagtttctccttcaccctccccatacgg

SEQ ID NO: 264071 - DNA, 201 bp, Homo sapiens
ctcagcctccaaaagtgctgagattacaggcatgagcctcattatcttttctttaaaaaaaattggatggggtataggaagcttaaaggaaggaagtagcytaatttttaagtttgaaaagttgcaaaaaatgttctttaaaaagcaaagaagggattgcatgtctgtcttcctctttaaaaagttaatattcttcagaat

SEQ ID NO: 264072 - DNA, 201 bp, Homo sapiens
gtgtatacgtacatgcatacagacatctacccataaatagaatttttaaaaacttcaaatatatttaaaacctttaaaatgtaattcaaaatagaacttcygattccatgaatagcatttgttaataatataaagtaaaagatgcaattatgctgatattttcacagtgttcattcattcatctactctaagctaaagacc

SEQ ID NO: 264073 - DNA, 201 bp, Homo sapiens
ttggctaacacaagaagattaattatttgggctaggagaaaattaggaggaggggaaggaaattaagaaagggaacattttggatatatatttgcctctcwtatacacctctttccaaatgcagagctgtttcctgaacagttttcctagtgaaagaggtcattcacagctagagaaagcaggccccactgctgccaggat

SEQ ID NO: 264074 - DNA, 201 bp, Homo sapiens
tagcttattgccatttctatcatgttttaatagttgaaagaataagaattgatccttatctttaaaaaagcgagaagggcttcaggaaattactcccttcrtcttatcacctctgctgtgccttattgtcatgatacaatcatgtgtctgatattttcttttcctctgctaatagcagggctttaaattattaaaggagaa

SEQ ID NO: 264075 - DNA, 201 bp, Homo sapiens
cttattcttcctgtctaattgtaattttgtgactgttgaccaatctcccctccccagtgtctgataaacactgttctactctctgcttctgtgatagcaaycttttttttttttcagattccacatgtgagtgagatcacacagtatttgtttttctgtgtctggcttatttcacttaatatgatgtgcttcaggttcatt

SEQ ID NO: 264076 - DNA, 201 bp, Homo sapiens
aatgacagtgttgtttgcatgtccataccactctgaaagtattacataaaccaacttcagggactgtgcacctccacatttagatgcccaagatttggcakgaaggacacagccaagaataactgattagagatgttgtttctctgtccctatataacagagagaaaatatcccactgttatccaatataagaccataaaa

SEQ ID NO: 264077 - DNA, 201 bp, Homo sapiens
catgtttctttaatgctagttataccttccaaaaaaacttccttttaagttgagccagatctgccaaaccagcgtatcatcttggagcaattaaaggtttyagggtttcccctctagaatcttatttccagttgacagattttgaagcttccccaaggatgcccatttggtagatgtcatatactttctaatgaagggttg

SEQ ID NO: 264078 - DNA, 201 bp, Homo sapiens
cagtgaagctacacataggttgtatatcttggtatgatgtgtatttgctttggaaagagacatttaaacaaagttctccttagcaaagtcttgcctccacygccaccaatccaggagtctcaaaattacttttaatgaattcaagaaatagaagttctaccctggaacacttattagctgcctttcttatataagtaatta

SEQ ID NO: 264079 - DNA, 201 bp, Homo sapiens
ttggagcaattaaaggttttagggtttcccctctagaatcttatttccagttgacagattttgaagcttccccaaggatgcccatttggtagatgtcatayactttctaatgaagggttgcaaaaagcaaatgatcactttgttaaaacctgggggctcattttggctttgctctgtgaaccccagagttagcatctaaag

SEQ ID NO: 264080 - DNA, 201 bp, Homo sapiens
ggtttggtgattcccaaattgcattctccaaaattgttagctgtggtaataggcatgccctacaaataatgattacctagtcaaataggcttggaaagtcytggtttaaacatggttaactgccttaatttattgtagaaccactcactattcagtagtagtctaaattccagccctgcctttttctagctgtgtgtgact

SEQ ID NO: 264081 - DNA, 201 bp, Homo sapiens
ttcccaaattgcattctccaaaattgttagctgtggtaataggcatgccctacaaataatgattacctagtcaaataggcttggaaagtcttggtttaaayatggttaactgccttaatttattgtagaaccactcactattcagtagtagtctaaattccagccctgcctttttctagctgtgtgtgactttaagcagat

SEQ ID NO: 264082 - DNA, 201 bp, Homo sapiens
gcatgtgactgactgccaaagaaatgaaactcagaacccaggggtacatcacagaatgaggagatgattcagaagctgagggatcattgtcactgcaaacrtatagtattagagagagaaggaaagctattagcttcaggaataagcctttttctctcctcgtctctctttccatgagctggggctcactgaaagtgttgc

SEQ ID NO: 264083 - DNA, 201 bp, Homo sapiens
taaggtttcactagtcaaataaatttagaatgccctggattaaatatcattaaatgactttctttattgtatatacactcagattctttgatacgctaatrtatacttcaatttcaattcactttttttttttttttttttttttttttgagacagagtctcactctatcacccaggctggactgcaaaggcacgatctcg

SEQ ID NO: 264084 - DNA, 201 bp, Homo sapiens
aaagtaaaagatgcaattatgctgatattttcacagtgttcattcattcatctactctaagctaaagaccaatatgaaaaaaaaattgcagggagttgctyttttattttaaagtttataacctacttatatagtacctaccctctcattagcctgggatgagagtagacagtctgtgtgatgcacagaatccagaaggaa

SEQ ID NO: 264085 - DNA, 201 bp, Homo sapiens
aataagtttagttttaaaaaacaaaaatttctcaaatcaggattctttctgaccctttaatctcagataatgataatagagtattatttcaaggattcccyttctagcacaatcttgctcaagatcaggccaagaatatagacaggttcagtaaaccacaagtgctctaaacctgcttgaacctatgtaagaactgagcag

SEQ ID NO: 264086 - DNA, 201 bp, Homo sapiens
tctgtgatagcaaccttttttttttttcagattccacatgtgagtgagatcacacagtatttgtttttctgtgtctggcttatttcacttaatatgatgtscttcaggttcattcatgttgttgcatgttacaggatttttttttattattattattatttttgagacaggtcctcactctgtcacctaggctggagtgca

SEQ ID NO: 264087 - DNA, 201 bp, Homo sapiens
ttctgttgtacaaccagggttaagcaaaatgctccagaagtagtgttttttttaaggtcctattcaaacgcctccacttccatgaagtttttccagatcascccagctgagagcatctctccatcctctcaactcccacagcaccctgggataatccaagtaaggcacttagcatggagcctgtgtaaagaagtgttcatt

SEQ ID NO: 264088 - DNA, 201 bp, Homo sapiens
agaaagagatggaactaaacatgtaatattagagtcattttcatttagatggtaattgaagccttggctgcagataagatttttaaaggaagggaatagtkggggaaaagacaagaggttgaagaatggaaactctagaggaaaacaacatgctgtagataactcattgaaaagaagtagggggaccagaaaaagaaggat

SEQ ID NO: 264089 - DNA, 201 bp, Homo sapiens
cgatctgaggaagccccttagggtaatccagcactgatgcttgagaatgtcagagaaagaaatgaaactgagcccacctgggcaaatcattgaggtaggcmcccgggtgttccccttttagggcaatccaacactaataataatgataccatatggtttaggatctgagtacagacttagcctgattcaccttgaagtttc

SEQ ID NO: 264090 - DNA, 201 bp, Homo sapiens
tgaaagaaagccaaagtgttttattttatgccccacgtatattttgaagaattttaacatcgattttctcatttcaaatgttgtaaaccaaggatttgaaktacgtaatggtatcactaatttttaaaatatcctttcaccttaagtgaattttgctttacaaagcagtgtatattcgtttgccttaagactttcatctca

SEQ ID NO: 264091 - DNA, 201 bp, Homo sapiens
tgaacatttttgacctactaaatgacaatttcatgtggttcaaactaatacttaggacagtgacggcaagtgccatttgcatccacctggttcaggtactycttccaaatacctgaaggaggatgattagtatatggggactggattctcccagtttgtacctccactgagcaaatatttatggaacgcttactatatact

SEQ ID NO: 264092 - DNA, 201 bp, Homo sapiens
tgtggttcaaactaatacttaggacagtgacggcaagtgccatttgcatccacctggttcaggtactccttccaaatacctgaaggaggatgattagtatrtggggactggattctcccagtttgtacctccactgagcaaatatttatggaacgcttactatatactttggaccatgctgtccatagcaatttacctgta

SEQ ID NO: 264093 - DNA, 201 bp, Homo sapiens
ggttcaggtactccttccaaatacctgaaggaggatgattagtatatggggactggattctcccagtttgtacctccactgagcaaatatttatggaacgyttactatatactttggaccatgctgtccatagcaatttacctgtaaaatattacctccctccctcacattttatcagtgaaatacttgttgcaaaaggtt

SEQ ID NO: 264094 - DNA, 201 bp, Homo sapiens
cattcatgagggcagagttgccatggcctaatcacctcttaaaggtcccacttcttaatacttctgcaatggcaattaagtttccaacgcatgtttttttwtttttggagacacattcaaatcatagcaaatagtagtcataaacttgtactcagcatttactttgttttagatattattcaaggtgtgttatgttcaatc

SEQ ID NO: 264095 - DNA, 201 bp, Homo sapiens
ggtggatctgaatattggtgccatcactttctccctgtttgtgggtagctttttataaaccaatacataggttaagggtctgaatagacagaaggctcttyccttaaaaagactggaaaaccttccaagtagctcttgaaccctcacattttatcaccatttatggtgttgggaaatttttagaaattgagatatgaggtg

SEQ ID NO: 264096 - DNA, 201 bp, Homo sapiens
cttgaaccctcacattttatcaccatttatggtgttgggaaatttttagaaattgagatatgaggtgatacaaacctcgttttcttgtgacagaaattccyagccagatatctggaaataggagaagttggagaagaggtttgaggggctagagaatactgatttccttagaatctgatcagtaacaggctgaggaaacat

SEQ ID NO: 264097 - DNA, 201 bp, Homo sapiens
agagttgaattaagtttgacaggcaatggagaactattgaaggatttcaaaaagaagaaaggcaaatcaaactgggtcattaaaatcacctgccagtaatrtaaagaattgatcgagggatggaacctatctgggacactactacaatagtctggaaaagagttaatgaggggtaattgagggggagaacttatgaaagtg

SEQ ID NO: 264098 - DNA, 201 bp, Homo sapiens
tggatatgtttgatctgggaaacactgaatccaactccagatggagattatccaggaggcatttagaaatctgtaactttggcaaggcgcggtggctcccrcctgtaatccactttgggaggccgagaaaggcggatcacctgagctcaggagtttgaggccagcctggccaacatggtgagaccccatctctactaaaaa

SEQ ID NO: 264099 - DNA, 201 bp, Homo sapiens
atcaaataagccaaaagagaattgaataacacctttaaggtgctaaaagaaataaaacctgtcaacctggaatgagaaacctagtgaaagataaagatccyttaaaaaaatgaaagtaagaaaagaagagaaaatgggaagggaagaagggagagagacaggaaaaaaggaaggaaggaaagaaggaaggaaggaaaaaag

SEQ ID NO: 264100 - DNA, 201 bp, Homo sapiens
tctgaggaagccccttagggtaatccagcactgatgcttgagaatgtcagagaaagaaatgaaactgagcccacctgggcaaatcattgaggtaggccccygggtgttccccttttagggcaatccaacactaataataatgataccatatggtttaggatctgagtacagacttagcctgattcaccttgaagtttcttg

SEQ ID NO: 264101 - DNA, 201 bp, Homo sapiens
tctagagatctttaaaaatacgatagattttcatgtctggtttaaatctggtgctgcccaaaggtgaaagaaagccaaagtgttttattttatgccccacrtatattttgaagaattttaacatcgattttctcatttcaaatgttgtaaaccaaggatttgaattacgtaatggtatcactaatttttaaaatatccttt

SEQ ID NO: 264102 - DNA, 201 bp, Homo sapiens
ttacaggcatgagccactgcactcggctattcttgcttgtgactgaatagtattccactgtgtatatatatatacatacacactgtgtgtatgtatatacrtatatatatatatatatatatatatatatatatatatgccacattttctttatctattcatctgttgtttgacataggttgatttcataacttgactatt

SEQ ID NO: 264103 - DNA, 201 bp, Homo sapiens
aaggaaggaagaaaggaaggaagaaaagatgaaggaaggaaggaaaaaagagaaagaaagaaagaaaagaaagaaagaaagaaagaaagaaagaaagaaargaaaagaaagaggaaggagggaaggaaggaaggaaaggaaagaaaagaaaagaaaagagagagaaagaaaggggaaggggaagaagaaaaacactgccaa

SEQ ID NO: 264104 - DNA, 201 bp, Homo sapiens
gagtaagtttttcttcctgtgactcctttcattgattcattcactgattgattgattgactgattcattcactcattcaatatttactaagcacctacaakgtgtcagttctagtattaatgcctcagcagacctatcattgcccacgttttgttttaacttacctttgtttaatttaccttctccaccgccatccaaata

SEQ ID NO: 264105 - DNA, 201 bp, Homo sapiens
tcaagggcctctatgtctcagatggggttaaatgtgtagtatgtttaggcctaagaagtcaggattgaaaggggtagaggcacttggatcatggggcagamgtaggtcctggtagtcccaaactgttaactgtgagagtaggcattatcttcaaataaggtttcactagtcaaataaatttagaatgccctggattaaata

SEQ ID NO: 264106 - DNA, 201 bp, Homo sapiens
aagaaagccaaagtgttttattttatgccccacgtatattttgaagaattttaacatcgattttctcatttcaaatgttgtaaaccaaggatttgaattaygtaatggtatcactaatttttaaaatatcctttcaccttaagtgaattttgctttacaaagcagtgtatattcgtttgccttaagactttcatctcattt

SEQ ID NO: 264107 - DNA, 201 bp, Homo sapiens
tctcatttccacgggaaaaaaaaaaagaattgctaagcacatccactcccacgccacctccttttcttctttttctttggtacactgtgtttttggtcacrtgtatacacaacaaagttcaaataagtagtcacaggaacctttactgggaggctttggcaaatcaaatatatgctatataatatataataattatacatg

SEQ ID NO: 264108 - DNA, 201 bp, Homo sapiens
actagttaaagtggtgattaatttaacattcatttacttatctattccttccctcaacacattgttatggagtgaccagaaaatgtgcccagtaactgtgytagggtagggacgcaacatcgaacaggatagcaccctgcctggcctctgccacccacaatctaccacaggaggcagaagtcagcaggcacttacaactga

SEQ ID NO: 264109 - DNA, 201 bp, Homo sapiens
cgaacaggatagcaccctgcctggcctctgccacccacaatctaccacaggaggcagaagtcagcaggcacttacaactgagtatggtgggcaattcaggygaggcaatatgaagaaagccaggtgggaatgggggtggaacggcatattgagaatcgtgtactcagaattccctgctcttggttggggagaagtttgtgc

SEQ ID NO: 264110 - DNA, 201 bp, Homo sapiens
ccacctccacctcccaaagtgctgggattacaggtgtgagccaccgcacccagcaggctttttaatttttattatttttttatttttatttgagacagagwttcactttgtcacccagtctgaagtacagtgatgcaatctccgttcactgcaacctctgcctcctgggttcaagcaattctcatccctcagccttccaag

SEQ ID NO: 264111 - DNA, 201 bp, Homo sapiens
ctaccccacctgccactgaggaaggggccagtccaaaaaggagattctcaaagggtcattcttattagaacagtctgttttgctgtccagggaatctataytgtcatgtgtggagttttgaaatatatatttctcagtctcaatttgtaaactctgcaggcagcatcaagaaaaggtatggataggcccctattttaatcc

SEQ ID NO: 264112 - DNA, 201 bp, Homo sapiens
aggtttcgccatgttgcccaggctggtctcaaactcctgagctcaggtgatccgcccaacttagcctcccaaagtgatgggattacaagcacaagccaccrcacccggcctcgtggttttgatttggacttccctgatgattactgatgctgagcatttcttcattcacctgttgtccgtttgtatgtcttctttcgagaa

SEQ ID NO: 264113 - DNA, 201 bp, Homo sapiens
ccaccacacccggcctcgtggttttgatttggacttccctgatgattactgatgctgagcatttcttcattcacctgttgtccgtttgtatgtcttctttygagaaatgtttattaatgccttttgcccatcttaaaaattgggttatttggacttttttgctgttgagctaagttcttacgtatctgaatattaacatct

SEQ ID NO: 264114 - DNA, 201 bp, Homo sapiens
ttcactttttttttttttttttttttttttttgagacagagtctcactctatcacccaggctggactgcaaaggcacgatctcggctcactgcaacctccrcctcccaggttcaagtgattctcctggctcagcctcccaagtagctgggattacagacatgtgccaccatgcccagctaattttttgtttctttttttag

SEQ ID NO: 264115 - DNA, 201 bp, Homo sapiens
gtgtgccaccatgcccagctaatttttgtatttttagtagagacggggtttcaccgtattggtcaggctagtctcaaactcctgaccttgtgatccgcccrtctcagcctccaaaagtgctgagattacaggcatgagcctcattatcttttctttaaaaaaaattggatggggtataggaagcttaaaggaaggaagtag

SEQ ID NO: 264116 - DNA, 201 bp, Homo sapiens
atgcccagctaatttttgtatttttagtagagacggggtttcaccgtattggtcaggctagtctcaaactcctgaccttgtgatccgcccatctcagcctycaaaagtgctgagattacaggcatgagcctcattatcttttctttaaaaaaaattggatggggtataggaagcttaaaggaaggaagtagcttaattttt

SEQ ID NO: 264117 - DNA, 201 bp, Homo sapiens
taacatttgttaaaacaatgccttcagctttaacaaatttacaaatttgtttaataaagaaaagaggcatggaggcaaaatgtactcccatatgtgtataygtacatgcatacagacatctacccataaatagaatttttaaaaacttcaaatatatttaaaacctttaaaatgtaattcaaaatagaacttctgattcca

SEQ ID NO: 264118 - DNA, 201 bp, Homo sapiens
atttgtttaataaagaaaagaggcatggaggcaaaatgtactcccatatgtgtatacgtacatgcatacagacatctacccataaatagaatttttaaaamcttcaaatatatttaaaacctttaaaatgtaattcaaaatagaacttctgattccatgaatagcatttgttaataatataaagtaaaagatgcaattatg

SEQ ID NO: 264119 - DNA, 201 bp, Homo sapiens
gattttcatgtctggtttaaatctggtgctgcccaaaggtgaaagaaagccaaagtgttttattttatgccccacgtatattttgaagaattttaacatcrattttctcatttcaaatgttgtaaaccaaggatttgaattacgtaatggtatcactaatttttaaaatatcctttcaccttaagtgaattttgctttaca

SEQ ID NO: 264120 - DNA, 201 bp, Homo sapiens
cttattaagtactgggatgatttcttcagtgacagaagaaactatgcatcactgatttcctatttttgaagccctggcatttttcttgttgggacactgcrtgcttcatttctaattaggcttttcttcttactcatatttggctttgctttatcaatacattacgcaaccagtaactggaaacaggatcccagagagtgc

SEQ ID NO: 264121 - DNA, 201 bp, Homo sapiens
acattcagttctgagatgttattcctgagtcaacaggattttaattatgtatgtggcctagaagagacatttatgcaagaggaacatattgttattgaacrtgtttgtgattttactcatgattcagaattggaaagaagctgaaagtaatttctgaaggtacatagctgaattgaaggaacatagaataatgatacctct

SEQ ID NO: 264122 - DNA, 201 bp, Homo sapiens
tctactccacgtgagcggtagtactaatttactaattcatccattaacatctgctgtgtgcctaaaatgtgccacaaactgctatttactggagatgtaaraagagctaagacttggcctctgtccttaaggagcttacaaagaaatgggagacgtttgtataaacaattgcaatgaaacaagacaattcttaaatggaag

SEQ ID NO: 264123 - DNA, 201 bp, Homo sapiens
tgcaagaggaacatattgttattgaacgtgtttgtgattttactcatgattcagaattggaaagaagctgaaagtaatttctgaaggtacatagctgaatkgaaggaacatagaataatgatacctctcctagtggcagaaaaataactaatatcttggcttctcatttcaacttcctcactcaacacactctcttttctt

SEQ ID NO: 264124 - DNA, 201 bp, Homo sapiens
atatactttggaccatgctgtccatagcaatttacctgtaaaatattacctccctccctcacattttatcagtgaaatacttgttgcaaaaggtttggagraagataagccaaaaactgacatctgaatatttttttcagaccctgggtaccaccagctctgctatttctgggttttccaaatgcgtgggtcagcagtttc

SEQ ID NO: 264125 - DNA, 201 bp, Homo sapiens
ttcaacctgtaacattttgaactgtatgaaattgctgatatttgaacatttttgacctactaaatgacaatttcatgtggttcaaactaatacttaggacrgtgacggcaagtgccatttgcatccacctggttcaggtactccttccaaatacctgaaggaggatgattagtatatggggactggattctcccagtttgt

SEQ ID NO: 264126 - DNA, 201 bp, Homo sapiens
acattttgaactgtatgaaattgctgatatttgaacatttttgacctactaaatgacaatttcatgtggttcaaactaatacttaggacagtgacggcaartgccatttgcatccacctggttcaggtactccttccaaatacctgaaggaggatgattagtatatggggactggattctcccagtttgtacctccactga

SEQ ID NO: 264127 - DNA, 201 bp, Homo sapiens
aaaaactgacatctgaatatttttttcagaccctgggtaccaccagctctgctatttctgggttttccaaatgcgtgggtcagcagtttccaacccctccragatgcccagggtccttcccacagagctgtagctgtcatcagacactggtgggagggcccgggaagtaagctccctgaagagtacttggcacctgcttca

SEQ ID NO: 264128 - DNA, 201 bp, Homo sapiens
tcacccagagtccatcaaactcgcttttcaaggggtagatgaggacagcaggatcctcagtaaagaagaatcacctagtgaggcagagtttccagcagcayagtgaagctacacataggttgtatatcttggtatgatgtgtatttgctttggaaagagacatttaaacaaagttctccttagcaaagtcttgcctccact

SEQ ID NO: 264129 - DNA, 201 bp, Homo sapiens
tagtgaggcagagtttccagcagcacagtgaagctacacataggttgtatatcttggtatgatgtgtatttgctttggaaagagacatttaaacaaagttmtccttagcaaagtcttgcctccactgccaccaatccaggagtctcaaaattacttttaatgaattcaagaaatagaagttctaccctggaacacttatta

SEQ ID NO: 264130 - DNA, 201 bp, Homo sapiens
ggatgtaatggcacaagctcgtttctccgagggcgctattctgtctttgtttctcctgggggcttgggctgcctttgggagccttagtgtcttgggactcyagaaggtgggtgatgtgtagatatttatttgtgatgctgtgatgcctttcagcactgtctacttggccttcaaaacctttgctttagcttctgctttgga

SEQ ID NO: 264131 - DNA, 201 bp, Homo sapiens
acccaaaatagaacataggttgagtcttgcactcaaactaacttgaaggcagaatgatgaatagccggacattaaagtactgtgatgacatgaagtgggayattttcaaaatagaggatcctttctgggggaggatatttgtctgtgtcgatctattaaataactgtatctggccctggagaggtaacttaacactttcag

SEQ ID NO: 264132 - DNA, 201 bp, Homo sapiens
ttattcaaagtctgttcatgcttcttttaaaatgtctaataaaaacactcgtaattttttttttttaagagacaaggtttcaccatgttggccaggctggkcttgaagtcctgacctcaagttatctgcccgccttggccccccaaagtgctgggattacaggtgtgagccaccgtgcccagccaacacttgtaattttaa

SEQ ID NO: 264133 - DNA, 201 bp, Homo sapiens
gaaggcagaatgatgaatagccggacattaaagtactgtgatgacatgaagtgggatattttcaaaatagaggatcctttctgggggaggatatttgtctstgtcgatctattaaataactgtatctggccctggagaggtaacttaacactttcagcagggaaggagctgaggctgactcacagctctccatcagcattt

SEQ ID NO: 264134 - DNA, 201 bp, Homo sapiens
acgtgtatacacaacaaagttcaaataagtagtcacaggaacctttactgggaggctttggcaaatcaaatatatgctatataatatataataattatacrtggagaaaagaggcagagggcccagaagctcttggcagctgtgctgtctggttagaaaaggaagcaagttacagagtttggacattcagttctgagatgt

SEQ ID NO: 264135 - DNA, 201 bp, Homo sapiens
ccgtgttcaatgagatccaccaccagggggacatcaatccactgactggtagctatggatagtgagaaaatctggctgaaggagaagcagatctgactccmggagacaaaggcaggcagaggccccgagtgttctggtagtgtgactcctccagggcttccccatggctctgcagacagaggtggtaggaggcaggagagg

SEQ ID NO: 264136 - DNA, 201 bp, Homo sapiens
agtttggacattcagttctgagatgttattcctgagtcaacaggattttaattatgtatgtggcctagaagagacatttatgcaagaggaacatattgttrttgaacgtgtttgtgattttactcatgattcagaattggaaagaagctgaaagtaatttctgaaggtacatagctgaattgaaggaacatagaataatga

SEQ ID NO: 264137 - DNA, 201 bp, Homo sapiens
aagtaatttctgaaggtacatagctgaattgaaggaacatagaataatgatacctctcctagtggcagaaaaataactaatatcttggcttctcatttcarcttcctcactcaacacactctcttttcttttatagttatatttttcaaaaaagtatgtgtgtgtatatatatatatacattttttttcacacaacactca

SEQ ID NO: 264138 - DNA, 201 bp, Homo sapiens
aatatatatttctcagtctcaatttgtaaactctgcaggcagcatcaagaaaaggtatggataggcccctattttaatccagctcaatatgcaaaaatttwtacttataaaccatacgtgttaagttggaatacatgggatctactgggttctgaccagtccatcagttttaattagtgagtgaaggacctctgaattaga

SEQ ID NO: 264139 - DNA, 201 bp, Homo sapiens
atccagctcaatatgcaaaaatttatacttataaaccatacgtgttaagttggaatacatgggatctactgggttctgaccagtccatcagttttaattartgagtgaaggacctctgaattagagtcaggattcacattacagaatgattcttcattttcacagatgtaatcaccacaaagtttctttaaataattaccc

SEQ ID NO: 264140 - DNA, 201 bp, Homo sapiens
tgactcagcgacgggggaaggcatctagatacaggagtgagtctatggagtctttggggttttattattagtagcaaatggcctgtgacccacctcacaastcacagaaacacatcagtgaggcaatccgtggtaaggctctcttacgaaggttttcagcatagcagggatctttcagattggccattaaagacagcatga

SEQ ID NO: 264141 - DNA, 201 bp, Homo sapiens
ccgtcttagaaatccatgaacttcttcatattctggctcaaaattaaacttctctgagacatttagtcactattccaattgctgctttgttttttgacatwtctgaactgtattaactttgcatataagtgtctacttaagtcttcttaaacatttcatgtacatattttgggcattttcaaacagtatcatccttaacct

SEQ ID NO: 264142 - DNA, 201 bp, Homo sapiens
tatcatccttaacctagtgcaactgttcaatagatgacaaccttaaccaatggacaagtagtagaaatacatttccctgtctgccctagttccatgtctayctttaaaagtttagaactttttctagaacccaaaatatacgtgccattaggtcagcatctctatttctgacttctaagtacagttctttgaacaaatatt

SEQ ID NO: 264143 - DNA, 201 bp, Homo sapiens
gtaaagaagaatcacctagtgaggcagagtttccagcagcacagtgaagctacacataggttgtatatcttggtatgatgtgtatttgctttggaaagagrcatttaaacaaagttctccttagcaaagtcttgcctccactgccaccaatccaggagtctcaaaattacttttaatgaattcaagaaatagaagttctac

SEQ ID NO: 264144 - DNA, 201 bp, Homo sapiens
gtcagcatctctatttctgacttctaagtacagttctttgaacaaatattcaaaatattttatatgcacagaaaagtacaggatgtaacacagcagaattwaaaaaggtaaatatcttgtaccatgtttcagatattttatttttatgaaaaagattaggagctaagctatgaggatgcaaaggcataagaatgatacagt

SEQ ID NO: 264145 - DNA, 201 bp, Homo sapiens
aacaaatattcaaaatattttatatgcacagaaaagtacaggatgtaacacagcagaattaaaaaaggtaaatatcttgtaccatgtttcagatattttayttttatgaaaaagattaggagctaagctatgaggatgcaaaggcataagaatgatacagtggactttggggattcagggggaagtgtgggaggggagtga

SEQ ID NO: 264146 - DNA, 201 bp, Homo sapiens
aagaatgatacagtggactttggggattcagggggaagtgtgggaggggagtgaaggatataagactacacattgggtactgcttgggtgatgggtgcacsaaaacttccaaaatcaccactaaagaacttataataaataagtccaataaataaataaataaataaataaaggggaaaaaaaagaatgaaacattacaaa

SEQ ID NO: 264147 - DNA, 201 bp, Homo sapiens
aaaatgacagtattttaatttattagatgcgttggcatgtattcatgcctaagatttcatcaatcaattttccattttaaaaagctgtctctggaagcaayagtggagagatgctgagttccaaaagcaatgttgtgaaaggcagcaggtctagcgttccaggcacatgcttaactaaattctagtcaataaccatgtggc

SEQ ID NO: 264148 - DNA, 201 bp, Homo sapiens
gtactgcttgggtgatgggtgcaccaaaacttccaaaatcaccactaaagaacttataataaataagtccaataaataaataaataaataaataaaggggraaaaaaagaatgaaacattacaaatatagttgatatcctttttgtagtcttcccccatgccgtttacctccttttattcctagaggcaaccacaagcctg

SEQ ID NO: 264149 - DNA, 201 bp, Homo sapiens
tcccccatgccgtttacctccttttattcctagaggcaaccacaagcctgaaattgatgcatttatttcctttctctgttcctataattttactaaatatrtatctttctgtgatcaatatattaattaatgtttgtgttttaaaattttacccaagtaatatctttacacatatggattttgttattttctccaacttca

SEQ ID NO: 264150 - DNA, 201 bp, Homo sapiens
tttaaaattttacccaagtaatatctttacacatatggattttgttattttctccaacttcagaatctctgtattttgataagcagatgtgatcttttatrtttattgtgattattgataagtttaagattgtttttagcatttttcttagaattttttatttattgaaatttttcatgcttttcttcttcttttttgtcc

SEQ ID NO: 264151 - DNA, 201 bp, Homo sapiens
taatcattttaaaattcctttttgtttccacactggtttggaaaataaacattctatttgtctttttagtggggctgccactttaaatatgaaaataaaayttacgcatcatttttaaaactccaagtctgtatttatcttctcagtcttaatctgttgatattcatccgttttttccctaagccaatgcaatgatccttg

SEQ ID NO: 264152 - DNA, 201 bp, Homo sapiens
acacaacactcagacatttcaaatcacactatttaggcagaaataagggatgtgttaaatattacttcatctttaaacatctttttctcctatcctcatgktgaggtcacttcaagttagagttcttgtttataagttcatggtgtctttgtgtatattttagggtagtttttgcaagaagttacaaatttactgcactga

SEQ ID NO: 264153 - DNA, 201 bp, Homo sapiens
taaaattcctttttgtttccacactggtttggaaaataaacattctatttgtctttttagtggggctgccactttaaatatgaaaataaaatttacgcatyatttttaaaactccaagtctgtatttatcttctcagtcttaatctgttgatattcatccgttttttccctaagccaatgcaatgatccttggccaggcac

SEQ ID NO: 264154 - DNA, 201 bp, Homo sapiens
taaatatctgctctgctgcatcagtaggcgtccccttgcctcatctacttccactttccgtttcatactctgatctcttccaggtattccctcagctttgmattttccactttcctaccctccttcaactgcgtgagccctacaggccattcaagaagcaacttaaatggcctctgaccatctcagacaggtgttggtatc

SEQ ID NO: 264155 - DNA, 201 bp, Homo sapiens
tttacctccttgaaaatccatctgtacttgtatttctaagaaaacagtaaactaattgaagctccagttactttagattttacaatactttcttggctggstgtggtggctcatgcttgtaatcacactttaggaggccagggtgggaggatagtttgaggccaccctggacaatatagtgagaccccatctcaattgaaa

SEQ ID NO: 264156 - DNA, 201 bp, Homo sapiens
tctgctctgctgcatcagtaggcgtccccttgcctcatctacttccactttccgtttcatactctgatctcttccaggtattccctcagctttgaattttmcactttcctaccctccttcaactgcgtgagccctacaggccattcaagaagcaacttaaatggcctctgaccatctcagacaggtgttggtatccctgca

SEQ ID NO: 264157 - DNA, 201 bp, Homo sapiens
ttttgtttctgtttttataatgattttaataacttttaaagtgcacttattaactaaatagaattaatacttgtaaatgagaacaattaaaatatgccagrgtcctaaagattataatttactgagtctgggtcaaaacttgggcatcttatttttaagaagcttccctaattctctaatgtactttaaagtttaatgatt

SEQ ID NO: 264158 - DNA, 201 bp, Homo sapiens
agccttttaatataaccaaatcaatgtagcaatttgtaaaggttaatgtaaaataaattattttagtatataaagagattttccctctaatgtctacacgstgaaaattaatacttggtgtcttgagtaacttaaaaatatttaagaccctatgaggttctttggtgaagggacaaaaagtgcagaatgtacctaagtgag

SEQ ID NO: 264159 - DNA, 201 bp, Homo sapiens
aggatagggaccctctcttattcatgggtatcctgagagcccagcacaattctgggcacatagaaagtgtctcataatgtttgctgaatgaataaatgacrgtgttgtttgcatgtccataccactctgaaagtattacataaaccaacttcagggactgtgcacctccacatttagatgcccaagatttggcaggaagga

SEQ ID NO: 264160 - DNA, 201 bp, Homo sapiens
aaacttgtaggaacagatcaggtatggtttttattttcctgctgatgaggattgtgatgtctacattcagtacaccctgaatgcctgactgttaatgtgtsggttttaagtgtaaaagcagaattggctttaccaaggacaaagagaacacttatctgcttagtgggtttttttgttttttggttttttgtttctgttttt

SEQ ID NO: 264161 - DNA, 201 bp, Homo sapiens
  misc_feature (1)...(201): n = A,T,C or G
agggtccttgaatgagctcatgtccactaaaaccagcttaaattttgagaaagttcctgcataacttatgttgaatgcattatatacttgcagacagtggnagtcttgtatttgtcgtaatcacattttcatgtgataatgtattatacatcaatagcctgttggcagtgcatttagttctagtgtgggaaacttgtagga

SEQ ID NO: 264162 - DNA, 201 bp, Homo sapiens
attctgataaattttagagtgttatgatgaataataacacctcctatttattgaacacttactatgtacctaacactattaatttttcagaatgctttcamttatttaagtcctcagggctgttctgtggtaggtgctctgttatcccgatttcactgttgaggaatatgaagttttaagaaattagacaacctgctcaag

SEQ ID NO: 264163 - DNA, 201 bp, Homo sapiens
aagtattacataaaccaacttcagggactgtgcacctccacatttagatgcccaagatttggcaggaaggacacagccaagaataactgattagagatgtygtttctctgtccctatataacagagagaaaatatcccactgttatccaatataagaccataaaaatgaatagtctttgatgaggaaaaaaaaagtaagcc

SEQ ID NO: 264164 - DNA, 201 bp, Homo sapiens
aaagaacatctatatagtctaatatatttcaacttttttaaagcaaggaactcttatcaaacaaaatgtttgtttttaaattattaatttggttgttgggktttttttttaacttatttcttgacaattaataggattccatacacataaaaagttcttagcaaacacttaacaatttactgagtccgtgttcaatgagat

SEQ ID NO: 264165 - DNA, 201 bp, Homo sapiens
atatcccactgttatccaatataagaccataaaaatgaatagtctttgatgaggaaaaaaaaagtaagcctgaaaaatgtgtggctggaaaaaaaatgttkcaaacagcattttatttttcctctgtggacttgtataaattatgtgtaaggcaaatatgtgatagagagatgcagtggtaattacttgttctcaaatgtt

SEQ ID NO: 264166 - DNA, 201 bp, Homo sapiens
cagggggacatcaatccactgactggtagctatggatagtgagaaaatctggctgaaggagaagcagatctgactccaggagacaaaggcaggcagaggcmccgagtgttctggtagtgtgactcctccagggcttccccatggctctgcagacagaggtggtaggaggcaggagaggcagggctatctctggagaaccca

SEQ ID NO: 264167 - DNA, 201 bp, Homo sapiens
ctttaatgcaggccaggcttcagtgagaaactgcctggcctggagcagccctgtaccagtggctgcagcactgcagaaacaatggcagtggtggtggcggyggggataggtggaagcagcagtggtggtgatgccacaagaaaaacttcttagggaggtactaagatgggaagcagcctcttaccaggctgaagccagagg

SEQ ID NO: 264168 - DNA, 201 bp, Homo sapiens
tttgaattaatgaagcagaaacacaaactgtgaacattgtctgtaaatagcctttgttcctttatgcagaatgtcctcaatgttaaggcctgcaagaagayagtacgtgttatattagttttatagtattagtgttcgtgctgaatgatggcaggaaaaccagctaggttttatttcttactggttattattggttgatga

SEQ ID NO: 264169 - DNA, 201 bp, Homo sapiens
ttggtcaccttgtcttttttcctggcggcacagcaaaatggagcccaagttgataatggttgctttactgttctgaggaggcagagatcacagttcagggyggttgaggtggttggaatttgtaggtcaggctaatgaagagaaagctgcacagagaaacaggtccagaaatctgcatatgggtactataaagtctttgga

SEQ ID NO: 264170 - DNA, 201 bp, Homo sapiens
ttgtctgtaaatagcctttgttcctttatgcagaatgtcctcaatgttaaggcctgcaagaagatagtacgtgttatattagttttatagtattagtgttygtgctgaatgatggcaggaaaaccagctaggttttatttcttactggttattattggttgatgaattcctgtgaaggtttatgatattaggttaaattat

SEQ ID NO: 264171 - DNA, 201 bp, Homo sapiens
gcttcatttctaattaggcttttcttcttactcatatttggctttgctttatcaatacattacgcaaccagtaactggaaacaggatcccagagagtgccrcaagcaagcttcccagtgacctaggggaaagaaggagtattaaagggtgagatggaattggagttgcaggcaagatgattatcaggcttgatgatgtaat

SEQ ID NO: 264172 - DNA, 201 bp, Homo sapiens
acttcaagttagagttcttgtttataagttcatggtgtctttgtgtatattttagggtagtttttgcaagaagttacaaatttactgcactgacgtgagaygctacatgagacatggaaaggctattctgaattgtggcagataacttccgtcttatggatagattaggggagattacggagcctgtagaatgcaaagaat

SEQ ID NO: 264173 - DNA, 201 bp, Homo sapiens
ttttagggtagtttttgcaagaagttacaaatttactgcactgacgtgagacgctacatgagacatggaaaggctattctgaattgtggcagataacttcygtcttatggatagattaggggagattacggagcctgtagaatgcaaagaattgagcttttctaagagtaagtttttcttcctgtgactcctttcattgat

SEQ ID NO: 264174 - DNA, 201 bp, Homo sapiens
tgctttatcaatacattacgcaaccagtaactggaaacaggatcccagagagtgccacaagcaagcttcccagtgacctaggggaaagaaggagtattaargggtgagatggaattggagttgcaggcaagatgattatcaggcttgatgatgtaatgggaagttgttaattttaaagcaacagctggattctttctcagg

SEQ ID NO: 264175 - DNA, 201 bp, Homo sapiens
ccttctgttttcatctcttttacctccttgaaaatccatctgtacttgtatttctaagaaaacagtaaactaattgaagctccagttactttagattttayaatactttcttggctgggtgtggtggctcatgcttgtaatcacactttaggaggccagggtgggaggatagtttgaggccaccctggacaatatagtgag

SEQ ID NO: 264176 - DNA, 201 bp, Homo sapiens
atcccagagagtgccacaagcaagcttcccagtgacctaggggaaagaaggagtattaaagggtgagatggaattggagttgcaggcaagatgattatcargcttgatgatgtaatgggaagttgttaattttaaagcaacagctggattctttctcaggttgatagtagttctgttttgtagccagatgagtcttcagta

SEQ ID NO: 264177 - DNA, 201 bp, Homo sapiens
ggcttgatgatgtaatgggaagttgttaattttaaagcaacagctggattctttctcaggttgatagtagttctgttttgtagccagatgagtcttcagtrgaaacaatcccattttatcagatacagtatttcctttaagataggcttataccaaacatctttagagaaagccattgggcctattctgttgtacaaccag

SEQ ID NO: 264178 - DNA, 201 bp, Homo sapiens
ggagtctttggggttttattattagtagcaaatggcctgtgacccacctcacaactcacagaaacacatcagtgaggcaatccgtggtaaggctctcttaygaaggttttcagcatagcagggatctttcagattggccattaaagacagcatgagttcactctggcggctgtatggtggagacagcatctagaagctgcc

SEQ ID NO: 264179 - DNA, 201 bp, Homo sapiens
cagcatagcagggatctttcagattggccattaaagacagcatgagttcactctggcggctgtatggtggagacagcatctagaagctgccacagtgttgsggcaaaatgggatgagcccagatctgaaacaacactggtaagaatcagggtgtggagggcaataatgaggccaaagcagtgggacccggtgatgaaccag

SEQ ID NO: 264180 - DNA, 201 bp, Homo sapiens
aggccagggtgggaggatagtttgaggccaccctggacaatatagtgagaccccatctcaattgaaaaaagaaaagaagagaaaaaaaatactttcttaaygcaattttgattttctcttaaagccttttaatataaccaaatcaatgtagcaatttgtaaaggttaatgtaaaataaattattttagtatataaagagat

SEQ ID NO: 264181 - DNA, 201 bp, Homo sapiens
tggaacctgtgagtttatcttacatggcaaaagggactttgcagatgtgattaatagtaagaacctaaaaatggagagatcatgctggactatctaggtgsacccaatctaatcacttgagtccttaaaggtagagccttttccagctgggttagggagagatgtgatggtagaagcagggtgagagagatagcagcctga

SEQ ID NO: 264182 - DNA, 201 bp, Homo sapiens
cagattccacatgtgagtgagatcacacagtatttgtttttctgtgtctggcttatttcacttaatatgatgtgcttcaggttcattcatgttgttgcatrttacaggatttttttttattattattattatttttgagacaggtcctcactctgtcacctaggctggagtgcagtggtgcaatctcagctcactgcaacc

SEQ ID NO: 264183 - DNA, 201 bp, Homo sapiens
gggactttgcagatgtgattaatagtaagaacctaaaaatggagagatcatgctggactatctaggtgcacccaatctaatcacttgagtccttaaaggtrgagccttttccagctgggttagggagagatgtgatggtagaagcagggtgagagagatagcagcctgagaaggattcaccaccctgtcgctgtttttgag

SEQ ID NO: 264184 - DNA, 201 bp, Homo sapiens
tgaccatgttggccaggctggcctcgaactcctgacctcaggtgatctgcccacctcggcctcccaaagtgttgggattacaggcgtgagccaccatgccyggccaaaaattcatttttattgttgtccccttcttccttttctgtgaaagtcctcatcctaagaaatttttatattttatattagttaaatcatttccta

SEQ ID NO: 264185 - DNA, 201 bp, Homo sapiens
tatctaggtgcacccaatctaatcacttgagtccttaaaggtagagccttttccagctgggttagggagagatgtgatggtagaagcagggtgagagagayagcagcctgagaaggattcaccaccctgtcgctgtttttgagaggtcgacatttatgtgcagggacaagcaagaggcctctaggagctaagggcagccct

SEQ ID NO: 264186 - DNA, 201 bp, Homo sapiens
acagaagatgcatctttcacaggctgtagcactgagtccccacttttctcatacaggtccgcgatccgtggtctgcaattcagaaatccaaagggctctgraaagcaaaagttttagtaacaaaatttggtggccaaaattgatgtgaagctttatagtccccattcatctcacttaatggaaatattagtacatttgatt

SEQ ID NO: 264187 - DNA, 201 bp, Homo sapiens
ataaaattgtggtgatttgttaaggcagcaatggaaatgaatacaagcagccacaactaataagttgtagtgaaatgggagctcaggtagtctgattccarggtgcatatatatagctaaatcagagtttatttagccagtccattactggtgggcattaggtggctttcaaaattaatagtttttaagtatcacttgtgc

SEQ ID NO: 264188 - DNA, 201 bp, Homo sapiens
ctcatcagcaggaaaactgtcaaggctgatttcaaatgaatcatccttggcagcatttttccccctaaaaccgcttatctgtcactttatggaaattgctrcttgccctcagtggtatgcgatatgagctcagacattacacataattcattataccacaaagttgaaaaaatatataatacatataaatatattatatat

SEQ ID NO: 264189 - DNA, 201 bp, Homo sapiens
gtggtgatttgttaaggcagcaatggaaatgaatacaagcagccacaactaataagttgtagtgaaatgggagctcaggtagtctgattccagggtgcatrtatatagctaaatcagagtttatttagccagtccattactggtgggcattaggtggctttcaaaattaatagtttttaagtatcacttgtgccacacatc

SEQ ID NO: 264190 - DNA, 201 bp, Homo sapiens
cacatgagagatattcgaaatgttaagacacagtgcagtgtgaaaagcacatggtaaatgtataataaatggtaggtcttgttattccccaaattatcccrctattattcactaaaatacatgaacactgggctgatagcagtgtgaaatatgcacaaactgaatactgtatctatagaatgcaacctgtgtattgattga

SEQ ID NO: 264191 - DNA, 201 bp, Homo sapiens
aggtttcaccatgttggccaggctgggcttgaagtcctgacctcaagttatctgcccgccttggccccccaaagtgctgggattacaggtgtgagccaccrtgcccagccaacacttgtaattttaaactatattaaatttgaattggcaatatcaatatggactcatgaattaaaaacatatatgtgtgtgtgtgtgtgt

SEQ ID NO: 264192 - DNA, 201 bp, Homo sapiens
cacatggtaaatgtataataaatggtaggtcttgttattccccaaattatcccactattattcactaaaatacatgaacactgggctgatagcagtgtgaratatgcacaaactgaatactgtatctatagaatgcaacctgtgtattgattgacacgtggagtagcctgagattctaccctttttacattatgaggaaac

SEQ ID NO: 264193 - DNA, 201 bp, Homo sapiens
cccagatcttggtttctactcatctttgtttattgaaacacagtaaacaatgttcctgtttacaggagaaatagctgattctaggtgttgagcatggaaaytacaaggtaagtttaggacattttgatataccaaggaagtgctcagcgatttatggaggcatgatacaaggacacaggggctagtgtgaaagggctccca

SEQ ID NO: 264194 - DNA, 201 bp, Homo sapiens
catcaaagtcattctctgtccagctttgttccactgctggcaaggagctgcagtcctttggaggagaataggtactctgatttttagaattttctgttctrgtttttccccatctttgtggttttatctacctttggtgtttgatgttggtgacctacagatggggttttcatgtagatgacctttttgttgatgttgatg

SEQ ID NO: 264195 - DNA, 201 bp, Homo sapiens
acctactaaatgacaatttcatgtggttcaaactaatacttaggacagtgacggcaagtgccatttgcatccacctggttcaggtactccttccaaatacytgaaggaggatgattagtatatggggactggattctcccagtttgtacctccactgagcaaatatttatggaacgcttactatatactttggaccatgct

SEQ ID NO: 264196 - DNA, 201 bp, Homo sapiens
gtttacaggagaaatagctgattctaggtgttgagcatggaaactacaaggtaagtttaggacattttgatataccaaggaagtgctcagcgatttatggrggcatgatacaaggacacaggggctagtgtgaaagggctcccactagccaaagtttggacagtttgaatatggctatattgattgcaaaacattgaatac

SEQ ID NO: 264197 - DNA, 201 bp, Homo sapiens
tttcagttgtacaatacaataattagaaaacttagaagttaagtgatgtggtaaaaatcatacagcaattccctgacacttaaaactgagtttttgttccyataatcttcaaagacttaaatgtactgaacctttgctgtttctcctatgagccagaggacatgtcctatcaactgagttaagtgtcaacagtcagctagc

SEQ ID NO: 264198 - DNA, 201 bp, Homo sapiens
tgtaaggcaaatatgtgatagagagatgcagtggtaattacttgttctcaaatgtttggttaactatgcctcttaatcccacatacagtagcttagcacaraattaaattctgccccttaggcagaattagcatttggaatttcttatttctgtagtttaaatgtttttatcccaatatttgtacttttccatttagaata

SEQ ID NO: 264199 - DNA, 201 bp, Homo sapiens
gtctcatccgtgtccctgcaaaggacatgaacccatccttttttatggctgcatagtattccatggtgtatgtgtgccacattttcttaatccatggtgtrtatgtgccacatattcttaatccagtctattactgatggacatttgagttggttccaagtctttgctattgtgaatagtgccacgataaacatacgtgtg

SEQ ID NO: 264200 - DNA, 201 bp, Homo sapiens
gtgctgggattacaggcgtgagtcactgcacctggccaaatgataaatatttttaaagagccggttacatgcaagaagttgctgggctttatggtggggayaggaggaaagcattggaggtagttgtacaaagatgtgtgaattatagtctaggtcttgaagaagcatactctaatggagagaaagcgtatacgtaaccct

SEQ ID NO: 264201 - DNA, 201 bp, Homo sapiens
taactggcatgagatggtatcttattgtggttttgatttgcatttttctgatgaccagtgatgatgagcattttttcatgtgtctgttggctgcataaatstcttcttttgagaagtgtctgttcatatcctttgcccactttttgatagggttgtttgttttttttcttgtaaatttgtttgagttcatcacagattctg

SEQ ID NO: 264202 - DNA, 201 bp, Homo sapiens
ctgcctcttaccagtctaggtgaagcctaccacccggctggatcccagcattctccgtgcatgttgtacagcagttgttgttctcttcaaaacaacaaaaygtttgaaattttaaaaatttcaatgtgttgaacatgtatatagatagttgtgactgagaatttaactaacagtaattcttgagatgagagaggaaataga

SEQ ID NO: 264203 - DNA, 201 bp, Homo sapiens
tgccattgtccagttttatcatgaccaatttaagtgcttgtgtttctcctttctttaagtgttctcctttctttaacctgtctaaaccattgcggaaattrccagatatcaaaattgcatgctgctgtggaaatgtttccttgaagtgatcaacttttgtcattggtccagagccacaggaattgatggaaaacagggttg

SEQ ID NO: 264204 - DNA, 201 bp, Homo sapiens
attgcaatgaaacaagacaattcttaaatggaagtctatacaaagcacagcaagcctgtaggagaaggacgtgagccggatggggtaggagtgggcactgmggattatggattcacagagagagcatctgagccgagacctgctggaggagaaggaatttgccaggcagcacagctggtgactcagcgacgggggaaggca

SEQ ID NO: 264205 - DNA, 201 bp, Homo sapiens
tgtattttcagtagaaatggggtttcaccatgttggccaggctggtctcaaactactgacctcgtgatccgcctgccttggcctcccaaagtgctggaatyacaggcgtgagccactgcgcctggccacgatgtatcttttctttggctgcttttaagaatttctcctttttttttttttgacatagtcttgctctgttgc

SEQ ID NO: 264206 - DNA, 201 bp, Homo sapiens
agcacagcaagcctgtaggagaaggacgtgagccggatggggtaggagtgggcactgcggattatggattcacagagagagcatctgagccgagacctgckggaggagaaggaatttgccaggcagcacagctggtgactcagcgacgggggaaggcatctagatacaggagtgagtctatggagtctttggggttttatt

SEQ ID NO: 264207 - DNA, 201 bp, Homo sapiens
agtagtcacagggttttgccatgttggccagcctggtctcgaactcttgacctcaggtgatccacccaccttggcctcccaaagtgctgggattacaggcrtgagccacctcacccagccaatattttggccttaaacatccaattatctttagaaagatatacaaaatgagacaaaagtcttttatatttaccatttctg

SEQ ID NO: 264208 - DNA, 201 bp, Homo sapiens
aaacacatcagtgaggcaatccgtggtaaggctctcttacgaaggttttcagcatagcagggatctttcagattggccattaaagacagcatgagttcacwctggcggctgtatggtggagacagcatctagaagctgccacagtgttggggcaaaatgggatgagcccagatctgaaacaacactggtaagaatcagggt

SEQ ID NO: 264209 - DNA, 201 bp, Homo sapiens
ttcttgttatcaccactgatccagactccctccacctttctttcctctgggcttcctgcactttcattgctctgctattttgaatagaggagaagtccttsagtcccagttcaggagaagcaactagaaagggccagcgtgcatagctgggccatcctgcaaatgctttttccaagagctgcagccctgaaagctggggcc

SEQ ID NO: 264210 - DNA, 201 bp, Homo sapiens
ggcctgtctgactccaagttccgtcctctttctacatttctgctacacagtcctaattccttgagttttcactccctgtatgagtgtttgccatttttctmtctttttttttttgttaccaccacttcgcctttatagagccagccctttacacattccttagcactttcaggtgcactgatttgaagtctttgagccact

SEQ ID NO: 264211 - DNA, 201 bp, Homo sapiens
aagggctcactgtctggcggcaaccgagaataataacggtaaatctggcgactccagtttcctagccctaggaaggctctcagactagcgtgcatccgagwcgcctggagggctagttaatgaatggttctctgggttcccaccccagagtttctgattagttacatttctaacaagtccccaggtgatgttgatgctgct

SEQ ID NO: 264212 - DNA, 201 bp, Homo sapiens
atgtagtctagctgaagttttaaagacagaacattgtagtaccctataataaaatcctacccaaggcttaggaaaagtgccttgcaggaggattctaactytgcattttaagagtataattcagcctcagattgacttgtaagagctgaattctgtcagaacaattctccctgagccttttgattttttggaaggctttca

SEQ ID NO: 264213 - DNA, 201 bp, Homo sapiens
acaatgctgtacaaatgttccttaaatcctgtggttgtcagagaaccagtctatatgttcaagtcgaatccactatctcctattcaaggaggtttctttckttttgttcattccaaaactatttactgtgccactccagtgtgcaaggcactatgccaggcaccaagaagcatttaaagatgaatcatacccagatcctgc

SEQ ID NO: 264214 - DNA, 201 bp, Homo sapiens
cttaaacacagagcacagtttcctagaagtaaagaatttaacctttgttctagtccttccatcagcctcatcagcaggaaaactgtcaaggctgatttcaratgaatcatccttggcagcatttttccccctaaaaccgcttatctgtcactttatggaaattgctacttgccctcagtggtatgcgatatgagctcagac

SEQ ID NO: 264215 - DNA, 201 bp, Homo sapiens
ttcttttaaagtgtgaaatttccagaaaaatctaacagtttctagccaaaatagttcacttcccaagctaaaggggttgattttggtgggcttcagttgtrtcaataggccactagtgaggcagacttcagagataagcccatcttttgttaattcacttcactctgaacaaaacagacaaaataaatgcttgaaccccac

SEQ ID NO: 264216 - DNA, 201 bp, Homo sapiens
taaaaaaagaagagaaaatatacttgtactggcttgcatatatgttttttaaatcttgggaagtgtaaatgagaaactgataatattggttacctgttttktggagataggcagatagagaataagggaggaaaggagacattgctgtatatctttttatactttttgatgcttgaactatgtgaatgtgctaccagttca

SEQ ID NO: 264217 - DNA, 201 bp, Homo sapiens
gatgatgatatttggagatgaggcctttgggatgtaactggggttagatgaggttatgagggtgggactctcatgatgtgattagtgcctttataagattmgatgccagaaagcttgctggttctctatctgcatgttaggacatagtgagaagaaagccatctgaaaaccaggaagagagccctcaccagaatctgacca

SEQ ID NO: 264218 - DNA, 201 bp, Homo sapiens
ctctttagtttaattagatcccatttgtcaattttggcttttgttgccattgcttttggtgttttagtcatgaagtctttgcccatgcctgtgtcctgaawggtattgcctaggttttcttctagggtttttatggttttaggtctaacatttaagtctttaatccatcttgagttaatttttgtataaggtataaggaag

SEQ ID NO: 264219 - DNA, 201 bp, Homo sapiens
aagggatccagtttcagttttctacatatggctagccagtttccccagcaccatttattaaatagggaatcctttccccatttcttctttttgtcaggttygtcaaatatcagatggttgtagacgtgtggtgttatttctgaggcctctgttctgttccattggtctatatatctgttttggtaccagtatcatgctgtt

SEQ ID NO: 264220 - DNA, 201 bp, Homo sapiens
tcttttctgtctcaaaattagaggtattcctagtcttttccagcactaaattcttccctagtctacctccttagaaaactaacttcattcattccttcatyttctatttgcattttcaactatctctcttcattgcatctttctccacttatccaccacaagcctacctcttgaaacagtatcaaatgagatcatatttgg

SEQ ID NO: 264221 - DNA, 201 bp, Homo sapiens
tttgcccattcagtatgatattggttatgggtttgtcatagatagctcttattattttgagatacattccatcaatgcctagtttattgagagtttttagyatgaagggctgttgaattttgtcaaaggccttttctgcatctattgagataatcatgtggtttttgtctttggttctgtttatgtgatggattatgttta

SEQ ID NO: 264222 - DNA, 201 bp, Homo sapiens
cttttgaaaaattttttaagctgaaagtcactccaaaatagaagctttaagaatcactaccaccaacttaactttaagtcatttattcatttcattcagtyaacaaaaatatatttaacacataggatttgactgacttatccctaagcaaggtaggcatagcacctggggcccacaatacttttagaggcctataaaaac

SEQ ID NO: 264223 - DNA, 201 bp, Homo sapiens
aaccagccttgcatcccagggatgaagctgacttgatcgtgatggataagctttttgatgtactgctggattcggtttgccagtattttattgaggatttycgcatcgatgttcatcagagatattggtctaaaattctctttttttgttgtgtctctgccaggctttggtatcaggatgatgctggcctcgtaaaatgag

SEQ ID NO: 264224 - DNA, 201 bp, Homo sapiens
ctaagatttcatcaatcaattttccattttaaaaagctgtctctggaagcaatagtggagagatgctgagttccaaaagcaatgttgtgaaaggcagcagstctagcgttccaggcacatgcttaactaaattctagtcaataaccatgtggctccaagtataagcccacattttttaaagtatctaccttctgaactgac

SEQ ID NO: 264225 - DNA, 201 bp, Homo sapiens
cattttcacagatgtaatcaccacaaagtttctttaaataattaccctttttttggtaattaatatccgaccctatcttaaatgttaaatttacacatccmttttaaggaaccatcaagtgtccagagcctgaatctgcattcatcctcctgctgcatatggccttcttagaatagtctcaagtgagcttgttctaaaacc

SEQ ID NO: 264226 - DNA, 201 bp, Homo sapiens
tgatcgtgatggataagctttttgatgtactgctggattcggtttgccagtattttattgaggattttcgcatcgatgttcatcagagatattggtctaawattctctttttttgttgtgtctctgccaggctttggtatcaggatgatgctggcctcgtaaaatgagttagggaggattccctctttttctattgattgg

SEQ ID NO: 264227 - DNA, 201 bp, Homo sapiens
ttagcacccttttatttccttgaatcatttaaaatcatacccatattattgccctataatattttatttactttaatacaattatgaaattttgcaaaggrcttggtaaagcagtattttccaaactccgggtcatgacccattggtgagtctggaaattaatataaattttatacaaatgaggtaatagaatggaataga

SEQ ID NO: 264228 - DNA, 201 bp, Homo sapiens
tcaatttcagaacctgttattggtctattcagagattcaacttcttcctggtttagtcttgggagagtgtatgtgtccaggaatttatccatttcttctasattttctagtttatttgcatagaggtgtttatagtattttctgatggtagtttgtatttctgtgggatcagtggtgatatcccctttatcattttttatt

SEQ ID NO: 264229 - DNA, 201 bp, Homo sapiens
taaaatcatacccatattattgccctataatattttatttactttaatacaattatgaaattttgcaaagggcttggtaaagcagtattttccaaactccrggtcatgacccattggtgagtctggaaattaatataaattttatacaaatgaggtaatagaatggaatagaaataccagaatgcatcacacttggtaagg

SEQ ID NO: 264230 - DNA, 201 bp, Homo sapiens
gaggtgtttatagtattttctgatggtagtttgtatttctgtgggatcagtggtgatatcccctttatcattttttattgcatctattgattcttctctcktttcttctttattagtcttgctagtggtctatcaattttgttgatcttttcaaaaaaccagctcctggattcattgattttttgaagggttttttgtgtc

SEQ ID NO: 264231 - DNA, 201 bp, Homo sapiens
tctactctgatcttagttatttcttgcctttgctagcttttgaatgtgtttgctcttgcttctctagttcttttaattgtgatgttatgatgtcgattttrgatctttcttgctttctctagtggacgtttagtgctataaatttccctctacacactgctttaaatgtgtcccagagactctggtacattgtgtctttgt

SEQ ID NO: 264232 - DNA, 201 bp, Homo sapiens
gttatgatgtcgattttagatctttcttgctttctctagtggacgtttagtgctataaatttccctctacacactgctttaaatgtgtcccagagactctsgtacattgtgtctttgttctcattggtttcaaagaacatctttatttctgccttcatttcattatttacccagtagtcattcagaagcaagttgttcagt

SEQ ID NO: 264233 - DNA, 201 bp, Homo sapiens
tgttcagtttccaggtagttgtgcagttttgagtgagtttcttaatcctgaggtctaatttgattgcagtgtggtccgagagacagtttgttgtgatttctggtctttcatatttgctgaggagcactttacttccaactatgtgctcaattttggagtaaatgcgatatggtgctgagaagaatgtatattctgttgatt

SEQ ID NO: 264234 - DNA, 201 bp, Homo sapiens
acagaatccagaaggaaattctgaaactgcatctaatagttgcaaagagacaatcctatccttcattttaatgatttcttcctccatctctctctggtctsaaccagtcttgcctaacattatagtactgcttttcccattcttcatcatgaaccataaaggcttcttgcaaactctcaaggctaaacacattccagacat

SEQ ID NO: 264235 - DNA, 201 bp, Homo sapiens
caggtcacaggtgccttgggctgtaagccacgagatctggacggactcaagtttccaatcagtggttgtggctgtctgcatcacccaaaatagaacatagrttgagtcttgcactcaaactaacttgaaggcagaatgatgaatagccggacattaaagtactgtgatgacatgaagtgggatattttcaaaatagaggat

SEQ ID NO: 264236 - DNA, 201 bp, Homo sapiens
acattaaagtactgtgatgacatgaagtgggatattttcaaaatagaggatcctttctgggggaggatatttgtctgtgtcgatctattaaataactgtayctggccctggagaggtaacttaacactttcagcagggaaggagctgaggctgactcacagctctccatcagcatttcccatttttctttcaaagcagttc

SEQ ID NO: 264237 - DNA, 201 bp, Homo sapiens
gtggaggttgcagtgagccaagactgtgccgttgcactccagcctgggtgacaagagcaaaactctgtttcaaaaaaaaaaagaaaagaaaagaaagaaamagaaatctgtaacttcattctgagaaagagatggaactaaacatgtaatattagagtcattttcatttagatggtaattgaagccttggctgcagataag

SEQ ID NO: 264238 - DNA, 201 bp, Homo sapiens
actgtgccgttgcactccagcctgggtgacaagagcaaaactctgtttcaaaaaaaaaaagaaaagaaaagaaagaaaaagaaatctgtaacttcattctragaaagagatggaactaaacatgtaatattagagtcattttcatttagatggtaattgaagccttggctgcagataagatttttaaaggaagggaatagt

SEQ ID NO: 264239 - DNA, 201 bp, Homo sapiens
gtagatactaaataagtagctgctattattatttgccatattttataaattaggaaactgaaacacagacatattcctcatgccagtatagggggttaggkcacctagttattacaggcaaactgcagactttgttttgaacaagccttattgagaatgatggtatagagtacaaagtacacaagcaaaagatacagaaaa

SEQ ID NO: 264240 - DNA, 201 bp, Homo sapiens
tgtagataactcattgaaaagaagtagggggaccagaaaaagaaggatttgaacgtttggaacgtttctccaaagagaaaagaaaagctggccaacagtgyagagtataattgatcccgcaggcacacatttgtgagcataaacacaaattggtaggaacagaaacctctttctttacacacctgagttgcccttgaatct

SEQ ID NO: 264241 - DNA, 201 bp, Homo sapiens
acaggatcacaaaggaaattccacgtgctgatatcaatggtccaatgaggaaaatgagaagtgagatctagttctccctagcttagcaatgcttatctatrtcctttcgagttttactgagatttcagaaatggaacagaatcttggctgcactttccctcttcataaaatttcacatttatatgagattctgcatttatt

SEQ ID NO: 264242 - DNA, 201 bp, Homo sapiens
tcagcaatttcagagccttttcattttgacctgcatttctgcggttgctttagtagctttgagttgttcttttttttttccctctcttgcctgtgaacttktgggaaaatgcacagcacaggcgatctgaggaagccccttagggtaatccagcactgatgcttgagaatgtcagagaaagaaatgaaactgagcccacct

SEQ ID NO: 264243 - DNA, 201 bp, Homo sapiens
tatacaaaaattaggtttatatatatcttaatgctacatagacagtgtaagtatatatgtttgttcattttaaacattactgatattgccattcagatctrtaaatcagaatgttcattattttataaatgctgtccatcaacaggatcacaaaggaaattccacgtgctgatatcaatggtccaatgaggaaaatgagaa

SEQ ID NO: 264244 - DNA, 201 bp, Homo sapiens
ggctaaaagaaatgataccaggtagaaactcagatcaacataaaaaaatgactagtgctagaagtggtaaatatgtgggtaaatagaaattacttttttcyttgcctattattgaatgagtaaaacttaattataaagctgagtttttggtagacattgcaatagtctgggaatcaggaaatctgggatctggtccacttc

SEQ ID NO: 264245 - DNA, 201 bp, Homo sapiens
ctggttgcatcccaaaacatacttttgaacatcagtttcaccttactactgaccaagtaattgatttctgcatttcattatgtaaattaaacactagactytgaattactagaaatacacagttagccaataaacctttcttataaaatgacagtattttaatttattagatgcgttggcatgtattcatgcctaagattt

SEQ ID NO: 264246 - DNA, 201 bp, Homo sapiens
ctgtttcaaagggcagcaggatgtgacagctgctgaggcagccctttgcccttggagaggagaagcaggagtgtgatcactagatgacctctccctcctgytgtctcctgggtggtagggacagtctctctcccaacactactcttggtcaggtggctacatattatgaaaaagaggaggaaaaacatgtttttgctttta

SEQ ID NO: 264247 - DNA, 201 bp, Homo sapiens
tatcacctgccttgattgttcctctgtattatattctccatttatctgtgtttcttttttgttaggtgtggcctactctggtgtaagacatataataagamtaattatgatattaagaaaaagataatacggttatcataatatttggctttgggaggccaaggcaggtagatcacctgaggtcaggagaccagcctgacc

SEQ ID NO: 264248 - DNA, 201 bp, Homo sapiens
ggtctttacaaattggcatgtttttgcagcagctggttccggttctttctttccatgtttagtgcttccttcaggagctcttgtaaggcaagcctggttgygacaaattctctcagcatttgcttgtctgtaaaggattttatttctccttcacttatgaagcttagtttgactggatgtgaaattctgggttgaaaattc

SEQ ID NO: 264249 - DNA, 201 bp, Homo sapiens
taaagatttgtatactaatactgccctattttaaatgctaatggtcatttatttttttaaaaaaactgctgcagaatgaaaaaattgtgactgcagagtaygattctgtgataacccatgggacttaatgctcactctttcacactgacctctttgtcattcttccttctctctccatggtgggaagactttctgcatcct

SEQ ID NO: 264250 - DNA, 201 bp, Homo sapiens
aactgcatctaatagttgcaaagagacaatcctatccttcattttaatgatttcttcctccatctctctctggtctgaaccagtcttgcctaacattatartactgcttttcccattcttcatcatgaaccataaaggcttcttgcaaactctcaaggctaaacacattccagacattcctttacacaacgttcctgaaaa

SEQ ID NO: 264251 - DNA, 201 bp, Homo sapiens
tgggcttccctttgtgggtaacttgacctttctcttcggctgcccttaacactttttccttcatttcaaccttggtaaatctgacaattatgtgtcttggrgttgtcgagaaagatacttctcgaggagtatctttgtggtgttttctctatttcctgaatttgaatgttggcctgccttgctaggttggggaagttctcc

SEQ ID NO: 264252 - DNA, 201 bp, Homo sapiens
tccaagccatctatccgaggcaccttcctaaaaatcagttgtcaccatttctctaccttgcttcactttatcagtagtcattcccttcctcatcacccacrtggtaaagtctgaataagcttagcaagcaaggccatccacacttttgcttcaagctacactgacatcacatccttgttcaaggtgttctcctactgcctc

SEQ ID NO: 264253 - DNA, 201 bp, Homo sapiens
gcttttcccattcttcatcatgaaccataaaggcttcttgcaaactctcaaggctaaacacattccagacattcctttacacaacgttcctgaaaaggttrgtttcttaggatcctgcagcaacactgcctgcatggttcacagagaccagaccgctgcacaagcctttcgctggcagacagccaatggtgctgcctctcc

SEQ ID NO: 264254 - DNA, 201 bp, Homo sapiens
tcaaacgcctggctgggagcaccactgctctcttcagagctgtcagacagggatgtttaagtctgcagaagttgtctgctgccttttgttcagctatgccstgccggcagaggtggagtctagaggcagtaggccttgttgagctgcagtgggctccacccagttcgagcttcttggccgctttgtttacctactcaagcc

SEQ ID NO: 264255 - DNA, 201 bp, Homo sapiens
agtgggctccacccagttcgagcttcttggccgctttgtttacctactcaagcctcagcaatggtggacacccctccatcagccaggctgccgcctcacarattgatctcagactgctgccctagcagtgagcaaggatccatgggtgtgggacctgcggagccaggcacaggagagaatcacgttgtctgccggttgcta

SEQ ID NO: 264256 - DNA, 201 bp, Homo sapiens
tgatattaaggagctaatattaattttattagaaatgataatgacattgcaattatgtataagaaaattcttatttttaggagatgctgtttgtttgtttrtttatttatttatttatttattgtgatgcagggtctcactttttcacctaggctggagtacagtggcacaaacatggctcactccagcctcaacctcctg

SEQ ID NO: 264257 - DNA, 201 bp, Homo sapiens
aaagaaaaccagctagaaattctagaactgaaaaatgtaacacctaaaatgaaaaaaaaatccctaaatgagcttaacagcaaaatagattccatagaagaaaaaaaaatagtgacattgaagacagggcaatataaacgatctcagctgaagcacatagagaaaaaagcactgaaaaaaatgaacagagcctctctgact

SEQ ID NO: 264258 - DNA, 201 bp, Homo sapiens
aggaagaaaagatgaaggaaggaaggaaaaaagagaaagaaagaaagaaaagaaagaaagaaagaaagaaagaaagaaagaaaagaaaagaaagaggaagkagggaaggaaggaaggaaaggaaagaaaagaaaagaaaagagagagaaagaaaggggaaggggaagaagaaaaacactgccaagcaaaaaccaaatgtat

SEQ ID NO: 264259 - DNA, 201 bp, Homo sapiens
tgtagccagagctgggctggagttgcagacaagttatggtttgatggcaccatttctccatgtttcatacaaaatgctaaaataagcaaataccagaattrgtccagccaagatgctaatgcatagagactttaatgtctgtctcaaatatacttgagctctcaactgttctctgtattgtaggtgccccaggtagagaag

SEQ ID NO: 264260 - DNA, 201 bp, Homo sapiens
gaaggaaaaaagagaaagaaagaaagaaaagaaagaaagaaagaaagaaagaaagaaagaaaagaaaagaaagaggaaggagggaaggaaggaaggaaagraaagaaaagaaaagaaaagagagagaaagaaaggggaaggggaagaagaaaaacactgccaagcaaaaaccaaatgtatcaatggtacacataaactgta

SEQ ID NO: 264261 - DNA, 201 bp, Homo sapiens
taggttgagtcttgcactcaaactaacttgaaggcagaatgatgaatagccggacattaaagtactgtgatgacatgaagtgggatattttcaaaatagakgatcctttctgggggaggatatttgtctgtgtcgatctattaaataactgtatctggccctggagaggtaacttaacactttcagcagggaaggagctga

SEQ ID NO: 264262 - DNA, 201 bp, Homo sapiens
aggttttctttatatttaagggcaagtttattagaattaagctgcatccacactctactccaagttattattttggttgcttcactcaaatagtcaattcrataaagaaaaaaaagtcagcatctccagcatttctacatcagcccatagcctgtgatgttctctcttggtggccgattttgcatttgttttcatacctac

SEQ ID NO: 264263 - DNA, 201 bp, Homo sapiens
tggtgcgatcttggctcactgcaacctccgcctcctggcttcaagcaattctcctgcctcagcctcccaagtaggtgggattacaggcatgtgccaccacrcccagctaatttttttgtatttttagtagagatggagtttcaacatattggccaggctggtctcgaactcctgaccttgtgagccacccaccttggcctc

SEQ ID NO: 264264 - DNA, 201 bp, Homo sapiens
cccatattattgccctataatattttatttactttaatacaattatgaaattttgcaaagggcttggtaaagcagtattttccaaactccgggtcatgacscattggtgagtctggaaattaatataaattttatacaaatgaggtaatagaatggaatagaaataccagaatgcatcacacttggtaagggtagattttg

SEQ ID NO: 264265 - DNA, 201 bp, Homo sapiens
tgccaccacacccagctaatttttttgtatttttagtagagatggagtttcaacatattggccaggctggtctcgaactcctgaccttgtgagccacccamcttggcctcccaaagtgctgggattacaggcgtcagccaccgcacccggcctcaagaagtttctttttatcattgctaaatacctcaaaagggctatcta

SEQ ID NO: 264266 - DNA, 201 bp, Homo sapiens
ctgtcttcctctttaaaaagttaatattcttcagaatatgataatataacaacagttatcataactaatgtaagtaaaatatagagtccttttattagcamccttttatttccttgaatcatttaaaatcatacccatattattgccctataatattttatttactttaatacaattatgaaattttgcaaagggcttggt

SEQ ID NO: 264267 - DNA, 201 bp, Homo sapiens
gctgtccatagcaatttacctgtaaaatattacctccctccctcacattttatcagtgaaatacttgttgcaaaaggtttggaggaagataagccaaaaamtgacatctgaatatttttttcagaccctgggtaccaccagctctgctatttctgggttttccaaatgcgtgggtcagcagtttccaacccctccgagatg

SEQ ID NO: 264268 - DNA, 201 bp, Homo sapiens
ttcaggcaggaaaatcattgttcctccattttggcttgaaagtagaagtcctgccattggaattttgctggagtatctgtattaattcctgagggctgccrtaccaaagtactgtaaactgggtggcttaaaacaacagaaatttattctttcacagttctggaggctgagagtctgaaatcaaggtgttagcagggccat

SEQ ID NO: 264269 - DNA, 201 bp, Homo sapiens
agatgttctctcttctgtcataacatctgtcccattttagcatcatgtgtatttcatgtttatttttgtggattagactgagccccttgaaggagcagaamgctccttatcatctttgtatcactaatgtctctcataggccctagcacggagtaggtgatcagtaaatgttacaagaaggagtgaaagttgaaacttcac

SEQ ID NO: 264270 - DNA, 201 bp, Homo sapiens
acaggcatgagccactgcgtctgtcctatagaagatgtatatttaggtgttaatgtttaggtgtgaggtgtaatgatttcaacaactttcaaaatatatayacacacacacatatatatatatttgtgtgtgtatggaaagataaagcaaatatggcaaaatagtaacaattgttgcatctacattgaagagattgtagag

SEQ ID NO: 264271 - DNA, 201 bp, Homo sapiens
aatgttgtaaaccaaggatttgaattacgtaatggtatcactaatttttaaaatatcctttcaccttaagtgaattttgctttacaaagcagtgtatattygtttgccttaagactttcatctcatttccacgggaaaaaaaaaaagaattgctaagcacatccactcccacgccacctccttttcttctttttctttggt

SEQ ID NO: 264272 - DNA, 201 bp, Homo sapiens
ttttactctgtgtcattgctctcttgctttcaaggaaaataccgactctatgtacagaacatctcctgacatttgccattctgtaggtcttgaggggtaarcaagtaagaacacaaatattacttactcagttgtgagttaaagtcatctttctattattctaacaataacaaacttgcagctcttccttagtgaattttc

SEQ ID NO: 264273 - DNA, 201 bp, Homo sapiens
agtaacttaaaaatatttaagaccctatgaggttctttggtgaagggacaaaaagtgcagaatgtacctaagtgagttttctccagtttagtaaaagattwtaaaaccaagtcttcagcaaacctagaaatgacaactatgattttataagtatgagaacaagaatcatgtttctttaatgctagttataccttccaaaaa

SEQ ID NO: 264274 - DNA, 201 bp, Homo sapiens
ttctaccccacctgccactgaggaaggggccagtccaaaaaggagattctcaaagggtcattcttattagaacagtctgttttgctgtccagggaatctayactgtcatgtgtggagttttgaaatatatatttctcagtctcaatttgtaaactctgcaggcagcatcaagaaaaggtatggataggcccctattttaat

SEQ ID NO: 264275 - DNA, 201 bp, Homo sapiens
ccaggtactgcagttggaaatgcggaaatcacccgtcttcagcgtcaatcacactggaagctgcagaccagagctgttcctatttggccatcttggcctakcttaccttgcctttttaaaaggaattttatatcatctacttgatgagggaaaatttatctttagagaagaatgccaatgaaggagtgataatatttgaaa

SEQ ID NO: 264276 - DNA, 201 bp, Homo sapiens
aacttgatttcctcttctttagtttttcctgtactaaggtagatgaaacccaccattcccatatcatttatgacaactaaggctggtatcagatgaggccrttggcatagggctacttgtccagaaaaaagagggaaaatgcaatgattaaatgccacccaccctgggcagaaagcaaactaagcgtaatgactcaaatcc

SEQ ID NO: 264277 - DNA, 201 bp, Homo sapiens
tagacaacctgctcaaggctatatagtagtagaatgataaagctgagatgcaaacacaggcttgtttggccagtctgcactcttaaccactgtactataaygttccttggcatttcaagttatttgtaagcaatgcttccaggaacattttttaaccagaaaaaactaaacacagaactacttagttgtgtagaagcagaa

SEQ ID NO: 264278 - DNA, 201 bp, Homo sapiens
ctgcccacctcagcctctcaaagtgctgggattataggcatgagccaccacacagggctcgaaaatgttttaatatttcattttatttcctctattggctkgaaaactatatgttgttgttttattttgggctatctagggactgaaatgtgcatccttagcttagcagaatctactatgatttcacatcactacatgtgt

SEQ ID NO: 264279 - DNA, 201 bp, Homo sapiens
cctgacatcagtagatactcaataagtgtgaggataatgaatgttcaatgaatggatataggcaaaaaattcgattgctaactcttttgaaaggctgccaragttcagcctttgtgttcatagagttaactttcctaatatccttaatgttaatgccaaagacaaccaacaatagcagctttactcctgaacccagttcct

SEQ ID NO: 264280 - DNA, 201 bp, Homo sapiens
atttcatgtgtcttcattttgctttcccaagccagattgtaaattccttgaaagaggagaccctgaaaactagaaatacctatacagacagatagacagtaaaaaaaaaaaaaaaattggacagaaagacatctgttgctctaagtaatccagaaaatttgccttaacacgttcagaagacatatttggctataatataca

SEQ ID NO: 264281 - DNA, 201 bp, Homo sapiens
acctatacagacagatagacagtaaaaaaaaaaaaaaaattggacagaaagacatctgttgctctaagtaatccagaaaatttgccttaacacgttcagaagacatatttggctataatatacaactcctctcctttcccccgcctgccctctgctggaactgctaatgagcagtaagatggcaaaagcaggacattgtat

SEQ ID NO: 264282 - DNA, 201 bp, Homo sapiens
attcacattttgaaactctaggaaaaagatgtggtttgcagcatttcccaaatgagtccttttcttttttcctcataaaatggcttagaatgcactttacraagaactgaccaagggcaattgtgtatccttcatgtttgctttggtcctttgttctcccaaaaggctgctaatgtcctgctttacgatttggacttttta

SEQ ID NO: 264283 - DNA, 201 bp, Homo sapiens
cctatacagacagatagacagtaaaaaaaaaaaaaaaattggacagaaagacatctgttgctctaagtaatccagaaaatttgccttaacacgttcagaagacatatttggctataatatacaactcctctcctttcccccgcctgccctctgctggaactgctaatgagcagtaagatggcaaaagcaggacattgtatg

SEQ ID NO: 264284 - DNA, 201 bp, Homo sapiens
ggtaggtcttattagcaagctcatttaaataggaaggagccaagtagggcagaataggtatcttgcactaggtcacatatctaattagtgagcccatgctrtgggactctaaggctttgttcttgtacagcctcccaggattatttattctgttttttttaagcttgtctttaggtgcaaattctcaagttcacctctttg

SEQ ID NO: 264285 - DNA, 201 bp, Homo sapiens
ctatacagacagatagacagtaaaaaaaaaaaaaaaattggacagaaagacatctgttgctctaagtaatccagaaaatttgccttaacacgttcagaagacatatttggctataatatacaactcctctcctttcccccgcctgccctctgctggaactgctaatgagcagtaagatggcaaaagcaggacattgtatgg

SEQ ID NO: 264286 - DNA, 201 bp, Homo sapiens
caaggtgtcagttctagtattaatgcctcagcagacctatcattgcccacgttttgttttaacttacctttgtttaatttaccttctccaccgccatccaratatgcagccataatgacattttctgcttttaatagctaacagttattgaacacttaccagacattgtcctaagggctttttgcacattgtcttatttaa

SEQ ID NO: 264287 - DNA, 201 bp, Homo sapiens
tatacagacagatagacagtaaaaaaaaaaaaaaaattggacagaaagacatctgttgctctaagtaatccagaaaatttgccttaacacgttcagaagacatatttggctataatatacaactcctctcctttcccccgcctgccctctgctggaactgctaatgagcagtaagatggcaaaagcaggacattgtatggg

SEQ ID NO: 264288 - DNA, 201 bp, Homo sapiens; identical to SEQ ID NO: 52740

SEQ ID NO: 264289 - DNA, 201 bp, Homo sapiens
attcaagaaatagaagttctaccctggaacacttattagctgcctttcttatataagtaattacaggacacaccattttcttcctttttcctattaacatwtccgattctgcctctcttttctccctccctccttctcttctcactttgtgtcacatacacttcatttgaaattctctaattctctttttagaccagggaa

SEQ ID NO: 264290 - DNA, 201 bp, Homo sapiens
gggccaagacatatttagggttccagcaactccttctcttccaggcagtagcaagaacaaaatgacaaaacaatttccattttagcacacaggacatttcytccatttgttgtttcgaaggattttatattttttaaagcaaggtgtgcttagcctaagtgcttacagagaaccttcaaataagttttggttctaaagaaa

SEQ ID NO: 264291 - DNA, 201 bp, Homo sapiens
gcatccacactctactccaagttattattttggttgcttcactcaaatagtcaattcgataaagaaaaaaaagtcagcatctccagcatttctacatcagyccatagcctgtgatgttctctcttggtggccgattttgcatttgttttcatacctactatattttctatatttcatacctactatattttctatagcatt

SEQ ID NO: 264292 - DNA, 201 bp, Homo sapiens
ttgataaatacagccaaacccagcatctttctcagaatcacaaaaccctagtgcaaggtctcacaattctcactccatgaaatatgagttcctggtcaagwgttaaaggctgtgatcacacacctagatccgggcgctctgaccagtggagtttgtcataaggccctattctttctcagtgatccatgagacactgaacaa

SEQ ID NO: 264293 - DNA, 201 bp, Homo sapiens
gaatcacaaaaccctagtgcaaggtctcacaattctcactccatgaaatatgagttcctggtcaagtgttaaaggctgtgatcacacacctagatccgggygctctgaccagtggagtttgtcataaggccctattctttctcagtgatccatgagacactgaacaaattagaggtgctctatattcagcatgtgactgac

SEQ ID NO: 264294 - DNA, 201 bp, Homo sapiens
accagtggagtttgtcataaggccctattctttctcagtgatccatgagacactgaacaaattagaggtgctctatattcagcatgtgactgactgccaawgaaatgaaactcagaacccaggggtacatcacagaatgaggagatgattcagaagctgagggatcattgtcactgcaaacatatagtattagagagagaa

SEQ ID NO: 264295 - DNA, 201 bp, Homo sapiens
tgtaagtaaaatatagagtccttttattagcacccttttatttccttgaatcatttaaaatcatacccatattattgccctataatattttatttactttmatacaattatgaaattttgcaaagggcttggtaaagcagtattttccaaactccgggtcatgacccattggtgagtctggaaattaatataaattttata

SEQ ID NO: 264296 - DNA, 201 bp, Homo sapiens
ctaaacacattccagacattcctttacacaacgttcctgaaaaggttggtttcttaggatcctgcagcaacactgcctgcatggttcacagagaccagacygctgcacaagcctttcgctggcagacagccaatggtgctgcctctcctctcctctgaaagacttgctttactcacccagagtccatcaaactcgcttttc

SEQ ID NO: 264297 - DNA, 201 bp, Homo sapiens
aaagagacatttaaacaaagttctccttagcaaagtcttgcctccactgccaccaatccaggagtctcaaaattacttttaatgaattcaagaaatagaarttctaccctggaacacttattagctgcctttcttatataagtaattacaggacacaccattttcttcctttttcctattaacatttccgattctgcctct

SEQ ID NO: 264298 - DNA, 201 bp, Homo sapiens
cctagttcacattggtgaatggaagatggggtataaatagcaacttgttacgccatcactcagaagctatgtgtcctgctagtctccagttttgtttcttscagatgtaagagcctcctgatcagtctattgtctctcagtgttcaagggtatggagtgtgtgtgtgtgtgtgtgtgaatatcattctttcagttgtacaa

SEQ ID NO: 264299 - DNA, 201 bp, Homo sapiens
aagacacaaacagatattctttaatgtgtgccagtcagtcattttggttctaaataattctgtttctccataggtgcccattctttgccgctgacaacttycccccatctgcttaatccattttctggcttattaagtactgggatgatttcttcagtgacagaagaaactatgcatcactgatttcctatttttgaagcc

SEQ ID NO: 264300 - DNA, 201 bp, Homo sapiens
tacctactatattttctatagcattcatttcaagacacaaacagatattctttaatgtgtgccagtcagtcattttggttctaaataattctgtttctccrtaggtgcccattctttgccgctgacaactttcccccatctgcttaatccattttctggcttattaagtactgggatgatttcttcagtgacagaagaaac

SEQ ID NO: 264301 - DNA, 201 bp, Homo sapiens
cctactatattttctatatttcatacctactatattttctatagcattcatttcaagacacaaacagatattctttaatgtgtgccagtcagtcattttgrttctaaataattctgtttctccataggtgcccattctttgccgctgacaactttcccccatctgcttaatccattttctggcttattaagtactgggatg

SEQ ID NO: 264302 - DNA, 201 bp, Homo sapiens
aagctgcatccacactctactccaagttattattttggttgcttcactcaaatagtcaattcgataaagaaaaaaaagtcagcatctccagcatttctacrtcagcccatagcctgtgatgttctctcttggtggccgattttgcatttgttttcatacctactatattttctatatttcatacctactatattttctata

SEQ ID NO: 264303 - DNA, 201 bp, Homo sapiens
agtgaccttgtgtgttctcttcctcctctgtgcttgtttcatctgcagaaccatctgatggatggcagacagctgaaccaggtactgccccttcccaaacrcaaatgccctccccattcaccattccctagagcgttcacttccttcatctatgaaaggcaattactagggtctagcaagactgccaatttggtaatgcaa

SEQ ID NO: 264304 - DNA, 201 bp, Homo sapiens
gacaagcctgagtatgaatctgaattctgccagtcaagctgtattattttggtcacttcatttaacctcatttgcatctcagcttcctcatccataaaatraggatcattatgcatgtctcataaagttgccataagaattaggataatgtatgttaagtgttagaccagcacctgaaatttagtagatactaaataagta

SEQ ID NO: 264305 - DNA, 201 bp, Homo sapiens
cccaggggtacatcacagaatgaggagatgattcagaagctgagggatcattgtcactgcaaacatatagtattagagagagaaggaaagctattagcttyaggaataagcctttttctctcctcgtctctctttccatgagctggggctcactgaaagtgttgctgaaatgagggaaagatgggcagcactttttcctgt

SEQ ID NO: 264306 - DNA, 201 bp, Homo sapiens
attcctcatgccagtatagggggttagggcacctagttattacaggcaaactgcagactttgttttgaacaagccttattgagaatgatggtatagagtasaaagtacacaagcaaaagatacagaaaaaacactgacatcaaaccaaccagataaccaatatatgtttattgggcaccttgtaagtataagacattctat

SEQ ID NO: 264307 - DNA, 201 bp, Homo sapiens
tgtttcttgcagatgtaagagcctcctgatcagtctattgtctctcagtgttcaagggtatggagtgtgtgtgtgtgtgtgtgtgaatatcattctttcarttgtacaatacaataattagaaaacttagaagttaagtgatgtggtaaaaatcatacagcaattccctgacacttaaaactgagtttttgttcccataat

SEQ ID NO: 264308 - DNA, 201 bp, Homo sapiens
tcctcgtctctctttccatgagctggggctcactgaaagtgttgctgaaatgagggaaagatgggcagcactttttcctgtagcacatacaggacacttayatttccatgtcctttgtcaccatatctgttagtaatttttctggatccatttaaccagacagccttctgacttcaaaatctgtggcagaattttcacatg

SEQ ID NO: 264309 - DNA, 201 bp, Homo sapiens
agcctgggaggcagaagttgcagtgagtggagatcacaccactgcactccagcctaggcaacagagcaagactgtctcaaaaaaaaaaaaaaaaaaaagartacatgttactgttgtcattagaagagagggaagtgtattgggcaagcaaaaatcataaccttcaccttcaatgagttataatagagaaattaatatttt

SEQ ID NO: 264310 - DNA, 201 bp, Homo sapiens
ttaaccagacagccttctgacttcaaaatctgtggcagaattttcacatggccattctgaaacagaggagctcacctaaacaaatcctgtaagacacagtyacctaaaaataaccctagcaaattattgggagtaggaaatgaagcagagatagcaagttcccactgactttttaaagaatcactatgaagtgtttacaag

SEQ ID NO: 264311 - DNA, 201 bp, Homo sapiens
cagaggagctcacctaaacaaatcctgtaagacacagttacctaaaaataaccctagcaaattattgggagtaggaaatgaagcagagatagcaagttccyactgactttttaaagaatcactatgaagtgtttacaaggataccgcagaggactaaaattagtttattctgcacagcattatccactgctgactcaagat

SEQ ID NO: 264312 - DNA, 201 bp, Homo sapiens
ctatgaagtgtttacaaggataccgcagaggactaaaattagtttattctgcacagcattatccactgctgactcaagatggtgatacaagcagtgttaasctgtgagctcacccggaagctcattctctaaaattactctcttgcagggatagacccctagttcacattggtgaatggaagatggggtataaatagcaac

SEQ ID NO: 264313 - DNA, 201 bp, Homo sapiens
caaggataccgcagaggactaaaattagtttattctgcacagcattatccactgctgactcaagatggtgatacaagcagtgttaagctgtgagctcaccyggaagctcattctctaaaattactctcttgcagggatagacccctagttcacattggtgaatggaagatggggtataaatagcaacttgttacgccatca

SEQ ID NO: 264314 - DNA, 201 bp, Homo sapiens
tcctctgtcttagatatattttgagattttatggcagcaaaccaagtaccaaatggtgatagttagatagtaagtgctgtagatgtgtttcatggagggcrggtctgtacaaacctaccccaaagtctgaggaaactgagaggctgaagaaaaaggctgacagtttcttaaaaagaaacattcaatagaggctttcaaaca

SEQ ID NO: 264315 - DNA, 201 bp, Homo sapiens
ttgaccactttctatggggaaaacaaattgtgtttgccctagaaatcttctttggaactcagttcttgaataaaaatgttctcctaaataaataaacaaayaaataaataaataaaaaataaaataaaaaaatgcctgttggccatttatgtttatctttgttttgttttctgtgatttgtctgtacactgtttatgcttg

SEQ ID NO: 264316 - DNA, 201 bp, Homo sapiens
ccaagcaaaagagaatgtgtgtattaaagttgcagatgtgaatttcctcttgtagatagtggaggatcattaggccctgacctacacctttcaaaggggcygaagaacattcctgtgagtggtctctgatttataaacgagttctattccaaaactctatttgtacaatggcttcaatttttaaatcatatttattttgaa

SEQ ID NO: 264317 - DNA, 201 bp, Homo sapiens
ctatttctcggagcgcttcctcccctcctcatttctcagccacatatttctccgggatttttctcacacttccttcctctgctgcatcattccagagtttytcaagcttggaagcctccctcctgttctcatttcttctacattcaccatttgttcttagtaaaacttacgtaattgagaaaaaggctctttgactaaaca

SEQ ID NO: 264318 - DNA, 201 bp, Homo sapiens
tccagggaaccgtagatcttggtgcctatttgagccccaaaggatcagttagttttacaaaggacaatcgtattctctgtcacatcctttttggccatgcctcaaaagcagtcccacaatgtaagctactgctcataggctcaatgcagtccaccttcaaagcaagagaaataatttcatgagtaactccaactgccgcct

SEQ ID NO: 264319 - DNA, 201 bp, Homo sapiens
caatattttgtgacaccaaggtgggaagactgcttgaagttaggagtctgagactagcctgggcaacatagggagaccctgtctttacaaaaaaaaaaaaagagagagatagccaggcatggtgttgcatgcttgtattcctgcctacttgggggactgaggcaggaggatcacttgagctcagaagttcaaggttaccgt

SEQ ID NO: 264320 - DNA, 201 bp, Homo sapiens
cccagctcaaattctcacagtgaacaatttaagtctaaagttcaaaagtttcaatggcatttggtggaaaaaatatcactttactgtgtacttcagacttmttgtactagtattttactatagtcagaagaaacatcattttttcaagtatcactttctttccctcttgtcttcaggaactgcattgggcaggagtttgcc

SEQ ID NO: 264321 - DNA, 201 bp, Homo sapiens
ttccctttctggattgggccctttcaggcatttttctgtatctatgacccagactatgcaaagacacttctgagcagaacaggtaagaagagggggaaagytctgggacctattcctcctagaagtgaaatgcataaaacccataggcaagattccaaagcaaagattggtttggggcctttaagagacacagcagcaagt

SEQ ID NO: 264322 - DNA, 201 bp, Homo sapiens
ttttttttttctgagaccgagtttcactcttgttgcccaggctggagtgcagtggcgcaatctctcagcttaccgcaacctctgcctcccaggttcaagcrattcttctgcctcagccttcctgagtagctgggattacaggcatgcaccaccatgctcggctaattttgcatttttagtagagacggggtttctccatgt

SEQ ID NO: 264323 - DNA, 201 bp, Homo sapiens
tgagttacttcatttagaatattggtctccaattccatccagattgctgcgaatgcctttattttgttccttttcatggctgagtagtattccatagtatrtacatcccacaatttctttatccattcttgattgatgggcatttggactggttccatgtctttacaattgcgaattgtgctgctacaaacatgcaggtgc

SEQ ID NO: 264324 - DNA, 201 bp, Homo sapiens
caaagtcccctttccatagtagagcatgccaaagaaactgaaatctgaattcaaaagcacaaagagtgcaaggtagagctatactgaacgttatctagggraaagattgaaggggagctctaaggtcaacacaccaccacttcccagaaagcttcttcatccgtttctctcccacaaagtcttattctcaaggcagcagat

SEQ ID NO: 264325 - DNA, 201 bp, Homo sapiens
catgttatatatatatgtatgtgtgtatatatatatgatgtacaacatgatattttgatatatgtatacactgtggaatgactaaatctatcaatggacaygttcattaactcatacttatcatttttttgtggtaaggacatttaaaatctaccctcttagcaattttcaagtatacaaattgttagtaactccaatcac

SEQ ID NO: 264326 - DNA, 201 bp, Homo sapiens
gaatattaggtcttctgatccatgaacacagaaagcctttccgtttagttaggtcatctttaattttttttgttgtttttttttgttttttgagacagagkcctgctctgtcgcccaggctggagtgcagtgacgcaatctcggctcactgcaacctccgcctctcggattcaagcgattctcctgcctcagcctcccaag

SEQ ID NO: 264327 - DNA, 201 bp, Homo sapiens
tggttctcctttatgctttgggcagaatatggtttataccacatatttgttgaactgaattaaaatttaaacccctatttaaagctctgatttttcccctmaaatcattattgtggttgtatctccaaacatttataaactggcattttatttaaaatatttgtattgtactttctaggatgaaagtggtagcagcttctc

SEQ ID NO: 264328 - DNA, 201 bp, Homo sapiens
agtcccaaagaaagcatgttatgtcacttccagaaaagtctcaggctcctctgcttgtgtgaccttatcaggtcctgaactcagcttgtgtctataagagrggacaggtccagcttggctggctaattacttttacttttttcactgcagtttattcaggatgataacatggagaagcttgaggaaattattgaaaaatac

SEQ ID NO: 264329 - DNA, 201 bp, Homo sapiens
ctggggtaaaccccttgtaattatgggtcttgtgtcaatgattgctttaatggaactctggtctgtttgaaagcagagttatggtaataattgaaaagccrcagatctttaactcagccatttaccatatatgcagttttctccatgctccttctcactccgctgggtgtatttttcccttcctcgtgccctgtgtaagca

SEQ ID NO: 264330 - DNA, 201 bp, Homo sapiens
gctagaggagggttagtaaagactaaacgaacgatttgacaagatttgaggattgtcatatggatacatggattttagggcatcatgaaaaaatggtcacrtggataaacgtaaaaattatgatgataaggtcctgggaaatctgggagtttgaagagaatttctagggcctgttgatcgagggccctttgtgcaaggcct

SEQ ID NO: 264331 - DNA, 201 bp, Homo sapiens
gagtcccttccctccctcatcctcacagggaccagctgggtgagatgtcgtacaccacaatgtgcatcaaggagacgtgccgattgattcctgcagtcccstccatttccagagatctcagcaagccacttaccttcccagatggatgcacattgcctgcaggtctttacattcttttcctaagcagttcttagaggctat

SEQ ID NO: 264332 - DNA, 201 bp, Homo sapiens
agaggacgctccaggagcgcaaaagcagttgggccgaacgaagcgtgcgcgctttggtaaccggctagaaatcccgcacgcgcgcctgcctcctctccccrggcctgagctgcccctcccactgcctttccttcttcccgcgagtcagaagcttcgcgagggcccagagaggcggtggggtgggcgaccctacgccagctc

SEQ ID NO: 264333 - DNA, 201 bp, Homo sapiens
ggcatcatgaaaaaatggtcacatggataaacgtaaaaattatgatgataaggtcctgggaaatctgggagtttgaagagaatttctagggcctgttgatygagggccctttgtgcaaggcctgcttttcttatctaaccttggttctcctttatgctttgggcagaatatggtttataccacatatttgttgaactgaat

SEQ ID NO: 264334 - DNA, 201 bp, Homo sapiens; identical to SEQ ID NO: 52750

SEQ ID NO: 264335 - DNA, 201 bp, Homo sapiens
tcaccacttactagcagttactagtaagttacttactgctttgtttcagtgtcatctataaaatggagattaaaaaagaacctatctcatacatttgttgytacgatgagtgggttaatatatataaagcatttaggacagtgcctggcactgaatagatgttaaatgtaaagtatagttatgtcaaatgtctttgcttcc

SEQ ID NO: 264336 - DNA, 201 bp, Homo sapiens
aggctcattttagacatctcccagccgcttgtcaccaattttattcctcaggattgattttagacttcagacataatattcgatgatatatactatagttaagtttagcaaatatggactgaggacattttaaatactgagactttttttatgactacaatttattgtgggccctgtcttcggtgagctaatggtctaata

SEQ ID NO: 264337 - DNA, 201 bp, Homo sapiens
cccagcttggtacttctttggtcctagaagccagcagtggtttatcatcgacttattcttactgactagctccccaatacccagtagctgctgtttctggsccctccaggaatggttttaggaggaaaggggataaggagtaaagggctggtactattgtgatcatgccaaagggcttggtggatattccatgcttccctt

SEQ ID NO: 264338 - DNA, 201 bp, Homo sapiens
cccattgatgctatcctgtgttatgtatctctactgtctcatgaatactatgtcgtctgttgttttaattgaattgttttggcatccttgtcaaaaatcarttgaccataaatgtcaaggtctatttctgagtcttcaattctaatccattgatctatatgtctatcctaactcatggacacagagagtagaaggatggtt

SEQ ID NO: 264339 - DNA, 201 bp, Homo sapiens
tttggcatccttgtcaaaaatcaattgaccataaatgtcaaggtctatttctgagtcttcaattctaatccattgatctatatgtctatcctaactcatgracacagagagtagaaggatggttaccaaaggctgggaaggatagaggggagctgggggaggaggtagggaaggttaatgggtacaaaaaaaatagaaaga

SEQ ID NO: 264340 - DNA, 201 bp, Homo sapiens
ttcaccacttactagcagttactagtaagttacttactgctttgtttcagtgtcatctataaaatggagattaaaaaagaacctatctcatacatttgttrttacgatgagtgggttaatatatataaagcatttaggacagtgcctggcactgaatagatgttaaatgtaaagtatagttatgtcaaatgtctttgcttc

SEQ ID NO: 264341 - DNA, 201 bp, Homo sapiens
attgatctatatgtctatcctaactcatggacacagagagtagaaggatggttaccaaaggctgggaaggatagaggggagctgggggaggaggtagggamggttaatgggtacaaaaaaaatagaaagaatgaataacacctactatttgatagcatagcagggtggctatagtcaataataactgtacacttttaaata

SEQ ID NO: 264342 - DNA, 201 bp, Homo sapiens
ttgaaaagagcctgccacctcctcccctctctcttcctgtctctcaccatgtggtctctgcacacaactgctcctgttcacttccactatgagtggaagcmgtctgagatcctccgcagatgcagatgccaatgccatgcttcttgtacagcctgcagaattgtaacccaaataatcctctttgtgaatgacccagcctca

SEQ ID NO: 264343 - DNA, 201 bp, Homo sapiens
ctaacacaagtctttccccaggctgccaaaggcagcaggaagtaagccctgggctctctttttctcactttttgtggttggtgcagaaatgcagaaaaccrtcaccaacttgaactgataatgaatgctccctctaatgatgtcttttgtttcctctgcttgactctgcagatcccaagtcccagtacctgcagaaattct

SEQ ID NO: 264344 - DNA, 201 bp, Homo sapiens
gaagtaagccctgggctctctttttctcactttttgtggttggtgcagaaatgcagaaaaccgtcaccaacttgaactgataatgaatgctccctctaatkatgtcttttgtttcctctgcttgactctgcagatcccaagtcccagtacctgcagaaattctcacctccacttcttggtatgtatgtgcaaatgagaggt

SEQ ID NO: 264345 - DNA, 201 bp, Homo sapiens
tttctgtacttgtctgcctcatagggcttgctgttctctgaaactgagccaagactaacacaagtctttccccaggctgccaaaggcagcaggaagtaagmcctgggctctctttttctcactttttgtggttggtgcagaaatgcagaaaaccgtcaccaacttgaactgataatgaatgctccctctaatgatgtcttt

SEQ ID NO: 264346 - DNA, 201 bp, Homo sapiens
ctatcaatggacatgttcattaactcatacttatcatttttttgtggtaaggacatttaaaatctaccctcttagcaattttcaagtatacaaattgttaktaactccaatcacatattgtacaatgcatctcctaaacttatgcctcctgtctgactgaaattttgtatcctttgactaacatccctgtaatcccccatt

SEQ ID NO: 264347 - DNA, 201 bp, Homo sapiens
taatgccagctagtcatgttcacctgttaaggacaagaacagtagaacacctccactttggggttcacaaaaacaccaagaggcattgacacctcaatacrtggtgtctactgacctctgctctgatcgttaattttccttctgtaaaggatatatgttgtcccaactacggttatggaaactttgcaaccctcaggcaaa

SEQ ID NO: 264348 - DNA, 201 bp, Homo sapiens
atcttccccgttcagtgttcagtgccctcgtatcggcagcttgaactagctcatggtacacgctgggaatcagggtgggaatcagttgtaaaccatttacyggaacaccactaggcaggccacaggataaaggaataatgatggtacacctccccctacctctaccacctgggaattttggtagaatgccagaatggaaaa

SEQ ID NO: 264349 - DNA, 201 bp, Homo sapiens
atttactgctaagtcatgagaaataatcactggtgcataattagagagaggaacaggaagaagaaatggtgagctggatgtagggtcatgccccatttagwaactgttagtttcccacataggaaatacttctttttagcttccagatcccactccaatctgagtgtgtgatgttggcaagtgaggcagagagtgtgactc

SEQ ID NO: 264350 - DNA, 201 bp, Homo sapiens
tacactgtggaatgactaaatctatcaatggacatgttcattaactcatacttatcatttttttgtggtaaggacatttaaaatctaccctcttagcaatkttcaagtatacaaattgttagtaactccaatcacatattgtacaatgcatctcctaaacttatgcctcctgtctgactgaaattttgtatcctttgacta

SEQ ID NO: 264351 - DNA, 201 bp, Homo sapiens
cttagcataatgtcatccaaattcatctctgttgtcataaatgacaagatatttgtcttttctatggctaattgttagtccattgtttatatatataccaygttttctttatccatttatccagtgatggacacttaagttgatttctatatctgggctattgtgaataatgctgcaatgaacatgggaatgtagatgtct

SEQ ID NO: 264352 - DNA, 201 bp, Homo sapiens
tcattttagacatctcccagccgcttgtcaccaattttattcctcaggattgattttagacttcagacataatattcgatgatatatactatagttaagtttagcaaatatggactgaggacattttaaatactgagactttttttatgactacaatttattgtgggccctgtcttcggtgagctaatggtctaatacagg

SEQ ID NO: 264353 - DNA, 201 bp, Homo sapiens
ctcattttagacatctcccagccgcttgtcaccaattttattcctcaggattgattttagacttcagacataatattcgatgatatatactatagttaagtttagcaaatatggactgaggacattttaaatactgagactttttttatgactacaatttattgtgggccctgtcttcggtgagctaatggtctaatacag

SEQ ID NO: 264354 - DNA, 201 bp, Homo sapiens
gctcattttagacatctcccagccgcttgtcaccaattttattcctcaggattgattttagacttcagacataatattcgatgatatatactatagttaagtttagcaaatatggactgaggacattttaaatactgagactttttttatgactacaatttattgtgggccctgtcttcggtgagctaatggtctaataca

SEQ ID NO: 264355 - DNA, 201 bp, Homo sapiens
ggctcattttagacatctcccagccgcttgtcaccaattttattcctcaggattgattttagacttcagacataatattcgatgatatatactatagttaagtttagcaaatatggactgaggacattttaaatactgagactttttttatgactacaatttattgtgggccctgtcttcggtgagctaatggtctaatac

SEQ ID NO: 264356 - DNA, 201 bp, Homo sapiens
ttaatatttaaagctttatatatttaggtgttcctattttgggtacatatttatttacaactatcatatcctcctgatggattgacccctttctcattatrtaatggtcttcttgtctctttttacagtttttgtcttaaagcctaatttgtctgataaaagttcagctacctttgctctcttttggtttctatttgcatg

SEQ ID NO: 264357 - DNA, 201 bp, Homo sapiens
ctcaggatatgtgtaggtgaaacagaagaagtaggctacttttctgttctttctaaagagagctccaaattattctcttgtctttcaggaaaaaaaaaaaagtttatttatccataaattgtctgtcattggttttctaatcaatggtgtgtgaaatgtcttatttctttatttcaccttggctctgatgcattggaaatg

SEQ ID NO: 264358 - DNA, 201 bp, Homo sapiens
cacacttacacatacatatatgcatacatgcacatagatattataaagaggacactcagagaagcaggttataaacaatttaaggcataaatgggcattayaaatagcagcagttcccaagtctttctgcatcattgcacacacagaaaatgttaatgtttttgtgcttcattggagtaaacaggaatggatttgggggaa

SEQ ID NO: 264359 - DNA, 201 bp, Homo sapiens
tttttgtataaggtgagagatgaggatccagtttcatgcttctacatgtggcttgccaattatcccagtacaatttgttgaatagggttaatatttaaagytttatatatttaggtgttcctattttgggtacatatttatttacaactatcatatcctcctgatggattgacccctttctcattatataatggtcttctt

SEQ ID NO: 264360 - DNA, 201 bp, Homo sapiens
tagatttaagtccttgatccatcttgagttgatttttgtataaggtgagagatgaggatccagtttcatgcttctacatgtggcttgccaattatcccagyacaatttgttgaatagggttaatatttaaagctttatatatttaggtgttcctattttgggtacatatttatttacaactatcatatcctcctgatggat

SEQ ID NO: 264361 - DNA, 201 bp, Homo sapiens
tttatatagacactgctccaaagaaatttgacttgagtcctttataagactttgcttcaaccatagcagtattatcagaatttttatatatatatatatayataactatttttattatggacaattattattaatacaaatataagtaggcacttaagagttccagacatacatggaatatggctttttgcacagcgattg

SEQ ID NO: 264362 - DNA, 201 bp, Homo sapiens
gtttttctgatgttctagaatttttatggttcaggtcttagatttaagtccttgatccatcttgagttgatttttgtataaggtgagagatgaggatccaktttcatgcttctacatgtggcttgccaattatcccagtacaatttgttgaatagggttaatatttaaagctttatatatttaggtgttcctattttgggt

SEQ ID NO: 264363 - DNA, 201 bp, Homo sapiens
aattttttttaacgatgtttttgtatttttcaaagtatacatcttgcatttcttttgttaaatttatttgttttgttctttttaatttcatttcagactayttattgcattcatagtgttttagagtccacattccctcttgactgtcactaagtttttttttttctgtttttgagaggtttctatcagaattttgcagat

SEQ ID NO: 264364 - DNA, 201 bp, Homo sapiens
actggaacttattccttctatctaaagacagtaacattttaagtatagtcataaggttacagaaggataaagtgtgtatagggaaaattccctacaagatragaatttcattccttactcttagtaatacaggtcttcaaacatgccaaggatattcctcccttggagctttgaacatgcacgtctgtggttatattgctc

SEQ ID NO: 264365 - DNA, 201 bp, Homo sapiens
ctaaaatagcacctctagtactctctatctccaaccctattattattatcttggcccttatcactctctgacactatactgtatactcttttgcttgttcrtttattatccaccactaactacaatataaaatctgtgagaggtaggatctttgtttgccactataaacctagtgcatggtacagttcctggtgcataata

SEQ ID NO: 264366 - DNA, 201 bp, Homo sapiens
tcaggtagtatgatgcctccagctttgctctttttgctcaaaattgctttggctatttgagtttttttattccatacgaattttagggcttttttttttttcaattactgtgaataatgccattggaattttgatggagattgcattgaatctttgggtagtatggatattttaacagtattaatgcttccaattaatgaa

SEQ ID NO: 264367 - DNA, 201 bp, Homo sapiens
gccctttcaccactgtatgttactggaacctttgtagatcagttgacaataaatgtgtgggtgtatttctggactctttatcctgttttattagtttataygtctctttttttagaagctctatgctgttttggtgactagagctctgtagtcaatttcagatcaggtagtatgatgcctccagctttgctctttttgctc

SEQ ID NO: 264368 - DNA, 201 bp, Homo sapiens
actgatggaaactatgttttttatttgtgttgtttatctttggagctttaatcaaaagtccctttgatgagaaaataaaccatctgtgaaaattagatctrtttaaacgtctggaaatcaggcaagatttgaagctattcactaaccatggcttgctttataatttatttgactttgccatcactttggtaattggaaact

SEQ ID NO: 264369 - DNA, 201 bp, Homo sapiens
tttaaatctttaatccatttttagttgatttttgtatatggagtgagataaaggtccacttttattcttctactagtgcatatccagttttctcaacaccrtttattgaagatactgccctttcaccactgtatgttactggaacctttgtagatcagttgacaataaatgtgtgggtgtatttctggactctttatcctg

SEQ ID NO: 264370 - DNA, 201 bp, Homo sapiens
atcataatatcacccttataaatatacaacatttaatagttaatatagagccttcagacccattatctcatttttccccttggaatccaatgttaacagaygcttatacaatgatttacagttcactgaacacttttaagtactttcaatgtggcccaaaatccagaggcagccccaatgtgtagatgacattaactgatg

SEQ ID NO: 264371 - DNA, 201 bp, Homo sapiens
gtctcaagctcctgatctcgagaccagccctcctcagcctcccaaagcgctgggactacagccatgagccactgcacccagccagttctgtgcttttatamctaaattgtctccaggagtgcttaatagtccattaataggtatttaggccaggcacagtggctgacgcatataatcccaatattttgtgacaccaaggtg

SEQ ID NO: 264372 - DNA, 201 bp, Homo sapiens
agccactgcacccagccagttctgtgcttttatacctaaattgtctccaggagtgcttaatagtccattaataggtatttaggccaggcacagtggctgaygcatataatcccaatattttgtgacaccaaggtgggaagactgcttgaagttaggagtctgagactagcctgggcaacatagggagaccctgtctttaca

SEQ ID NO: 264373 - DNA, 201 bp, Homo sapiens
actaaagatttaatctatatagcacaaaatacaatgttgagtaatcatttttaatttattttttaactgacaaaaattgtgcatatacatgttatatatayatgtatgtgtgtatatatatatgatgtacaacatgatattttgatatatgtatacactgtggaatgactaaatctatcaatggacatgttcattaactca

SEQ ID NO: 264374 - DNA, 201 bp, Homo sapiens
caaaaacaaaaaacaaatatttaagtaatttccaaacatagcagaaaatataagcatggtttatcactttgatatgacaccaacagctacttaagatagartcatgaattcagtaaattgttgtgtggaaagctaaggtgccaacccaagccgcatcttcttaggtgctcctcactggtgtcatcagctacagcaggcaga

SEQ ID NO: 264375 - DNA, 201 bp, Homo sapiens
ggaaagaaagaaatccctccaggctggggtaaagcaggataacactccgaagaggaagtaccaggattttctggatattgtcctttctgccaaggtaaatcttctaaatttctaagcctgctcaagtgaccagttaattatgtaagtaggtgggtaagtgggaatgggatggggagacaagaataaaaccgattgactaaa

SEQ ID NO: 264376 - DNA, 201 bp, Homo sapiens
caagtggagctcctcttctgagagagctgaatgattagctgcattatttaaggctcattttagacatctcccagccgcttgtcaccaattttattcctcargattgattttagacttcagacataatattcgatgatatatactatagttaagtttagcaaatatggactgaggacattttaaatactgagacttttttta

SEQ ID NO: 264377 - DNA, 201 bp, Homo sapiens
aggtagtatgatgcctccagctttgctctttttgctcaaaattgctttggctatttgagtttttttattccatacgaattttagggcttttttttttttcrattactgtgaataatgccattggaattttgatggagattgcattgaatctttgggtagtatggatattttaacagtattaatgcttccaattaatgaaca

SEQ ID NO: 264378 - DNA, 201 bp, Homo sapiens
gcttagaagtcccaaagaaagcatgttatgtcacttccagaaaagtctcaggctcctctgcttgtgtgaccttatcaggtcctgaactcagcttgtgtctrtaagaggggacaggtccagcttggctggctaattacttttacttttttcactgcagtttattcaggatgataacatggagaagcttgaggaaattattga

SEQ ID NO: 264379 - DNA, 201 bp, Homo sapiens; identical to SEQ ID NO: 52752

SEQ ID NO: 264380 - DNA, 201 bp, Homo sapiens
ggacaatgaaaacttttgtgaaactgtttcagagtggaaaagccctgaaagcttgtgaagctgatgtgactagagcaagcgctgggactactgtaacagtstataacctattttaccagcttcctgtaaggaggaaatgcatggaccctagactggagtttgagaaggttaggcagagaatagaagctctctcactcatgc

SEQ ID NO: 264381 - DNA, 201 bp, Homo sapiens
tttgcaacaacattatggggagtacatagtgctcagacagagaaagagaaaaaaaaagaatctagcaattgtggaagaagaaatgtttttagttatgggcragttaaattatgttccactggctttataactcatgtagtacaaaatgaaaaaactaaatcaactgaaacagaacattcatttaaaaattatgttagacct

SEQ ID NO: 264382 - DNA, 201 bp, Homo sapiens
cctacagcaacttatacaatgttttctgcttttcaggaaggtagcaaaaaatcacaaacagattgcatattatctgatacatccccctctttcccctggtrtagacacgtttccaatgatagtaggaaaacagataaattaattggtttctccaaaccaatcgtccgtaagaagctaagcttgagttcacagctaggatct

SEQ ID NO: 264383 - DNA, 201 bp, Homo sapiens
cctcaggtgatccgcccgcctcagcctcccaaagtgctgggattacaggtgtgagccaccgtgcccggtgagaactggttgttaaaaagagcctggtaccycacctcttcccacccctgcctcacagtggaaacagcctaaggccctcacctgatgccagtgacagtctcatgcttatacaatctacagaatcatgagcca

SEQ ID NO: 264384 - DNA, 201 bp, Homo sapiens; identical to SEQ ID NO: 52753

SEQ ID NO: 264385 - DNA, 201 bp, Homo sapiens
cccgcccttctgcgtacctgaggccctcgggcaccgctcctgctcagggaaaaccccagggcctagtttcccagacctgacctccccatcaaccgacagcygcgcaggcgctctcagctggcttctgttattcccggtgcctggaaaccgaggcactggcgcgccaagctccgcccctcgccgcgaactcctcggggagac

SEQ ID NO: 264386 - DNA, 201 bp, Homo sapiens
gcctggcattctcaccatctttctacctaccatgatcaagtgcttgtcagttgaagtacaagccaaattgcgttctggtttggccataagctccttgggcsaatgtgttgaggaacttgccctcaacagtattgatgctgaagcaaaatgtgtggctgtcagggtgaatatggaaaccttccaagttcaagtgatagacaa

SEQ ID NO: 264387 - DNA, 201 bp, Homo sapiens
tcagaatcaaagatgttagaacaagagacaattgtagcatcagaagctggagaaaatgagaaacataaaaaatctttcctggaacatagctctttagaaartccgtgtggaaccagtttagaaatgtttttaagcccttttcagacaccatgtcactttgaggagagtgggcaggatctagaaatatggaaagaaagtact

SEQ ID NO: 264388 - DNA, 201 bp, Homo sapiens
cctggctgtgcctccgcgtgcttccgccgcaggatgccggcgtccgcccgcctggcgggagcggggctgctgctggcctttctccgcgcgctcggctgcgytgggcgggccccaggtatggctgcacgcgcgcgctccttgcttgtcctcgccaaggctttggaacttgctgccaacgtttttgctacgcagtatctttcc

SEQ ID NO: 264389 - DNA, 201 bp, Homo sapiens
aagctttgattatgtgcgtgtgtggtttttttctccaataggcaattatttccagtcagagaaggaaaccagtgcctggcattctcaccatctttctacckaccatgatcaagtgcttgtcagttgaagtacaagccaaattgcgttctggtttggccataagctccttgggccaatgtgttgaggaacttgccctcaaca

SEQ ID NO: 264390 - DNA, 201 bp, Homo sapiens
atgcaagctcaatttaccctctgccttctgtaggtattggctattgccttcccagtgtgtcgctaatcccacagataatgagttaggactgcaaaacttctttttttttttttttttttttgtatttttagtagagacagggtttcaccatcttggccaggctggtcttgaactcctggcctcgtgatccatccgcctcag

SEQ ID NO: 264391 - DNA, 201 bp, Homo sapiens
catttgctgcccacatatcctcatctccccgtcattgtccagttcattgtggcctggcttctactttctccactttatttaactacaaagctaccagtgaytttccaaagacaaaagcttcattttttcagcctactcatgtgacattactgattatccacccacttagaatgctcttctcagttctcctgtgccctcttg

SEQ ID NO: 264392 - DNA, 201 bp, Homo sapiens
agtccttttcagtaccctccgggaattgactccatcactttacccctgcatttttgttttgttttgttttctgttttgttggtttttggggttttttaaakttgtttgttttttgttttttgagacggaatctcgccctgttttgttgcccaggctgaagtgcagtggcgcactcttagctcactgccacctctgcctcct

SEQ ID NO: 264393 - DNA, 201 bp, Homo sapiens
ttgcatattatctgatacatccccctctttcccctggtatagacacgtttccaatgatagtaggaaaacagataaattaattggtttctccaaaccaatcktccgtaagaagctaagcttgagttcacagctaggatctttagagaagtttaagaggcaatatgggaaggttgaaaatcctctggatacagaagtagagga

SEQ ID NO: 264394 - DNA, 201 bp, Homo sapiens
ggttcttcagctccctaaaaccaaagacgtatgttcccgattttgtcaaatttatggattgggaaagtcccaaaagctaagagaaataagttttaaatatmaagagtttgagcttagtggctatatcagctctgaagcacattacaacaagaatatgcagtttttgtttgtgaacaaaagactagttttaaggacaaagct

SEQ ID NO: 264395 - DNA, 201 bp, Homo sapiens
tagaactattgtgtgttaatgttagcattagtcaataagttattttaatgtcagatttttgaatgttattatatattacctgtatgatggaaggattaccmctgtacacaaatctaatcaataaaaacgttagaaccttctgcttagagtacttttaaaaaatcttcagtgaacttccttttgggcgaaatgagaggtctt

SEQ ID NO: 264396 - DNA, 201 bp, Homo sapiens
acaaaatgaaaaaactaaatcaactgaaacagaacattcatttaaaaattatgttagacctggtcccacacgtgcccaagaaacatttggaaatagaacaygtcattcagttgaaactccagacatcaaagatttagccagcactttaagtaaagaatctggtcaattgcccaacaaaaaaaattgcagaacgaatataag

SEQ ID NO: 264397 - DNA, 201 bp, Homo sapiens
ctaggttgtgggcataggaacaagggacgtgttcttgacaaatgtgaactagaagccgctggctatttggtagctgcatggcaaagaggtagtttgtagascaatgagtatgaaaatgctgtgcaatcggtaaaacatggtgtaaatggaagatcaccctgctgttattattagtcagtggtgcctgagcatctagataca

SEQ ID NO: 264398 - DNA, 201 bp, Homo sapiens
ggcctgcaggctttggggtggtaacctaggttgtgggcataggaacaagggacgtgttcttgacaaatgtgaactagaagccgctggctatttggtagctrcatggcaaagaggtagtttgtagagcaatgagtatgaaaatgctgtgcaatcggtaaaacatggtgtaaatggaagatcaccctgctgttattattagtc

SEQ ID NO: 264399 - DNA, 201 bp, Homo sapiens
tcaactctaattttaaccatcttcatccacatcccccttgacaattccctgttcccaaaataaattcgtgtagtttggccatttggcttagattgactgaytcaactgtaattctggagccatgagttattttgcttgtgctcttgctttatttgtgtagttagctggttatttgttcaagcattatttgacattttctta

SEQ ID NO: 264400 - DNA, 201 bp, Homo sapiens
caggtttgagcatggcagaaggaaacaccctgatatcagtggattatgaaatttttgggaaggtgcaaggggtgtttttccgtaagcatactcaggtatgkggcctgcaggctttggggtggtaacctaggttgtgggcataggaacaagggacgtgttcttgacaaatgtgaactagaagccgctggctatttggtagct

SEQ ID NO: 264401 - DNA, 201 bp, Homo sapiens
atgtgcgtgtgtggtttttttctccaataggcaattatttccagtcagagaaggaaaccagtgcctggcattctcaccatctttctacctaccatgatcargtgcttgtcagttgaagtacaagccaaattgcgttctggtttggccataagctccttgggccaatgtgttgaggaacttgccctcaacagtattgatgct

SEQ ID NO: 264402 - DNA, 201 bp, Homo sapiens
ccacttaatttctttctattcttttttggttttgaaagaacatttaccttttccagctgacgtttttcttattaaaaactctttatccattccagaatagrtgatgggaacactgaatgtggagcctggtattcttcctagagcaataaaggattatttgaggggatggacaaactgttggcagcctctacctctgcttta

SEQ ID NO: 264403 - DNA, 201 bp, Homo sapiens
aagtagctgggaccacaggtgcatgccgccacacccagctttttttttttttttctcttttaacagagagctatgttgcccaggctggtctcaaactcccrggctcaagtgatccttctgcctcggcctcccaccaatgtgctgggattacaggcatgagtgaccatacccagccaatacctctttttcttttcttttctt

SEQ ID NO: 264404 - DNA, 201 bp, Homo sapiens
agctttttttttttttttctcttttaacagagagctatgttgcccaggctggtctcaaactcccgggctcaagtgatccttctgcctcggcctcccaccartgtgctgggattacaggcatgagtgaccatacccagccaatacctctttttcttttcttttcttttttttttttttttttttgagacagagtttcattct

SEQ ID NO: 264405 - DNA, 201 bp, Homo sapiens
ctacagtaagaacaacgggatgagttgcccaggaaattgtgaaatactttctaatgatctttaaagatataatgaacactaattcatctggatttgtttasgtgtggtcctggttaaaggcaaagggaaggatcagataacttcatgttttttccatttaacatacccaatagattcttgattaggggaagggaaaatgag

SEQ ID NO: 264406 - DNA, 201 bp, Homo sapiens
gagatgatcatatagcttttgttttattaatatggtgtattaaattgattacttcttgtatattgaaccaaccttgaaagaaatcctagtttgtcatggtrtacaattctttttctgtgttgcctgatttggtttgctagtattttgctgatgatttttgcatctctgttcataagagatattggtctatggttttttggt

SEQ ID NO: 264407 - DNA, 201 bp, Homo sapiens
ccccacctcttcccacccctgcctcacagtggaaacagcctaaggccctcacctgatgccagtgacagtctcatgcttatacaatctacagaatcatgagycaaataaacctcttttctttataaattacccagcctcagcaggtagtttttttttttttttttttttttttttgagacagagtcttgctctgttgcctag

SEQ ID NO: 264408 - DNA, 201 bp, Homo sapiens
tttcaccgtgttggccaggctggtctcaaactcctgacctcaggtgatccgcccgcctcagcctcccaaagtgctgggattacaggtgtgagccaccgtgyccggtgagaactggttgttaaaaagagcctggtaccccacctcttcccacccctgcctcacagtggaaacagcctaaggccctcacctgatgccagtgac

SEQ ID NO: 264409 - DNA, 201 bp, Homo sapiens
tcggctcactgcaacgtctgcctcctgggttcaagtgattcttctccctcagcatcccaggtagccgggattacaggcatgcaccaccatgcccagttaayttttgtatttttagtagagatggggtttcaccatgttggccaggctgggtcttgaactcctcacctcaggtgatccacctacctcagcctcccaaagtgc

SEQ ID NO: 264410 - DNA, 201 bp, Homo sapiens
ttttgttgttgttgttgttgttgttgagacagagtctcaactctgcctcattctgtcacccaggctggagtgcagtggcgtgatctcggctcactgcaacstctgcctcctgggttcaagtgattcttctccctcagcatcccaggtagccgggattacaggcatgcaccaccatgcccagttaacttttgtatttttagt

SEQ ID NO: 264411 - DNA, 201 bp, Homo sapiens
agaaacccctacctaggttagcactcactcctcatcccctgagcccctggcaaccactaacctactttctgtctctatggatttgcctattctagatttttgttgttgttgttgttgttgttgagacagagtctcaactctgcctcattctgtcacccaggctggagtgcagtggcgtgatctcggctcactgcaacgtct

SEQ ID NO: 264412 - DNA, 201 bp, Homo sapiens
tgcaagctcaatttaccctctgccttctgtaggtattggctattgccttcccagtgtgtcgctaatcccacagataatgagttaggactgcaaaacttctttttttttttttttttttttgtatttttagtagagacagggtttcaccatcttggccaggctggtcttgaactcctggcctcgtgatccatccgcctcagc

SEQ ID NO: 264413 - DNA, 201 bp, Homo sapiens
ttagtagagatggggtttcaccatgttggccaggctgggtcttgaactcctcacctcaggtgatccacctacctcagcctcccaaagtgctgggattacaygcatgagccaccgtgttcagcctattcttgatatttaatataaatggaatcatacaaatgtggcctttttttgtgactggctcctttcacttaacatatt

SEQ ID NO: 264414 - DNA, 201 bp, Homo sapiens
tggaagaagaaatgtttttagttatgggcgagttaaattatgttccactggctttataactcatgtagtacaaaatgaaaaaactaaatcaactgaaacasaacattcatttaaaaattatgttagacctggtcccacacgtgcccaagaaacatttggaaatagaacacgtcattcagttgaaactccagacatcaaaga

SEQ ID NO: 264415 - DNA, 201 bp, Homo sapiens
aacttatacaatgttttctgcttttcaggaaggtagcaaaaaatcacaaacagattgcatattatctgatacatccccctctttcccctggtatagacacrtttccaatgatagtaggaaaacagataaattaattggtttctccaaaccaatcgtccgtaagaagctaagcttgagttcacagctaggatctttagagaa

SEQ ID NO: 264416 - DNA, 201 bp, Homo sapiens
gtggctcatgcctgtaatcccagcaatttgggaggcagagacgggtggatcacctgaggtcaggagttcaagacctgcctgaccaacatggcaaaaccctrtcaactaaaaatacaaaaatcagctgggtgtggtggtgtgcacctatggtcccagatactcgggaggctgagacaggagaatcgcttgaacctgggagga

SEQ ID NO: 264417 - DNA, 201 bp, Homo sapiens
gcttttggtagtgtttttaaaattttagccattctgataagtgtgtagtgatatctcattgtccttttactttgtgtttgcctgatggttaatgaattaarcatcttttagtgggcttatttgcaatctgtatatcatcctcagtaaaatgttccctcatgtcttttacccatttttgaattggattgtgtattttattac

SEQ ID NO: 264418 - DNA, 201 bp, Homo sapiens
aatatcatcttttcagtggaaccttcaatgacaaccctctttggccacctgctttaaaactgattaatcccctgcccctggtactcccttgtctttattcytcactttatttttctccatagcatttaacactatctgacagattttacttgtttcttttctcttctctgctcccatactagaatgtaagttccaggagag

SEQ ID NO: 264419 - DNA, 201 bp, Homo sapiens
caattcctcctacttcattcctctttttcaaaattgtttcagctatgctcattcctttggtttttcatacaaatttagaaaaaatataatctatgtctccygaaatcttgttggtattttgataggaattgtgttaaagctgtataccactttggggagaatcgccatatttaccatgctgaatttcccagtgtgtgcctc

SEQ ID NO: 264420 - DNA, 201 bp, Homo sapiens
caagtttagacaatgtcaagctggaaaaagactcttggtattcagagaagccttttccacagctgccagaaatgaaataatttatttggggggattgataytccttaattagagaaagcattactaggtttagctgtatccgtggtgagctgtgaatgagattgagaccattgttgctatttacaatgctggaaattctac

SEQ ID NO: 264421 - DNA, 201 bp, Homo sapiens
ttgttctaggttcttgaagtggaaagttagattattgatttgagatgttccatttttttctaatggttacatttccctctttgaatatgttacctgtatcycacaaatgttgattttttattttcattagttcagtgtattttttgatttcccgtgagacctttctctttgattcatgggaaaatacagaagtttgttgtt

SEQ ID NO: 264422 - DNA, 201 bp, Homo sapiens
ctggaatcaatcctactgaaactattcaaaaaattgaggaggaagtgttcctgtttaactcattctacaaagccaccatcaccctgataccaaaatctggmaaagacacaagaaaagaaaactgcaagtcagtattcctgacgaacatcaacataaaaatcctcaagaaaatactagcaaaccaaatccagtagcacatca

SEQ ID NO: 264423 - DNA, 201 bp, Homo sapiens
ggtttgctatttcttggtggattcatctcttttatcattttataatgtccctgtctgtctctggtgattttctcttctctgagatttactttacttgataytcatatagccactcctgctttcttttgattcacatttctatgatacattattttccattctttattttcaaccactgatactgttatatttgaagtgagt

SEQ ID NO: 264424 - DNA, 201 bp, Homo sapiens
gttttgccaaggcaccccttaagcttcctactataagtttggttacttttagagtgtggcaatggaacagagaaagcttatacaaatacatggatgccctrctattgataaccttataattagtgttaaaagaaaaagactcctccctcaaaacaaggtggcactcaagcctccccacaaagttaattgtctacttttttc

SEQ ID NO: 264425 - DNA, 201 bp, Homo sapiens
tctgtggaggagaacacttactggtaagtattgaactcttattgtattatgtttcagaaaaatatgtttagaaaatcagttgatttttagcagtgatgaamtctcttagtctgtgctggtttcttaacagtggacagtcccagatgttgaagtcagcacaacaagagaaaaacccaaatcctgataagacttgaggatttt

SEQ ID NO: 264426 - DNA, 201 bp, Homo sapiens
gggtcactgggaggttggggggcaagactgaaccaatatttgtggtgcataaatgtgtattttacccttgacagacaccggaagaaatagaaagattgacrgtcgatgaagacctcagtgatattgaaagggctgtttatctgctcaggtatttcctagtctttctgtgaaattgctcttcttttttccctgtgcagcaga

SEQ ID NO: 264427 - DNA, 201 bp, Homo sapiens
ttgattttcaggtttatttttgagcactttaccttttcctctgcattgaatattatataaatgtataatatataacatgttatatatatattttctctctrcttttatgtgtcaggtttgtttctttagttcttttattttgtgtattgaaactattttggagtattatgttaaattagaattcaaagtcagatgtgtaag

SEQ ID NO: 264428 - DNA, 201 bp, Homo sapiens
atgtaattttagtaataaatgaaatgataaaatgggcttaagctgtagcatggtatgagatgtgtgtaaaagagaataagaaaagtttcctttgcttactrtttatctatttatgttaatggtgttagaattcttttagttattcaggctcaaatcctcaatcatcttagctttttaattcataatcactctttatattct

SEQ ID NO: 264429 - DNA, 201 bp, Homo sapiens
gtttcacaatttcattttaaactttaaacagtttcagaaaaagttttatgagaaagatttgttggatcaagagaaagaaagagaagaactacttcttttgsaaatggtatgttgttttcacatgcacacacatatactcttttctgattaataactgtgtttttttattaaacttaatcatttctttccatttcaccattt

SEQ ID NO: 264430 - DNA, 201 bp, Homo sapiens
gcatgtttataattcatgtgctacttcttgcctgcttattaaataccaaatgaaaagaatggaatgttttataattatgatacaagagtaaagctgaagartattttggttgatggttgctagactcagatattctactgctacagccttttatcttagctatagacatttcaactgccaatccaaaattaaccattattt

SEQ ID NO: 264431 - DNA, 201 bp, Homo sapiens
ctgctttctgtatctatggatttgcctattctggagattcctaaacacggaatcatacagtatatggccttttgtgactgacttctttcacttagcataakgtgttcaaggttcacccatgttgtagcagctatcagtagtttattcctttttattgcagtgtagtattctactgtatggatatagcgcttttgtttagcc

SEQ ID NO: 264432 - DNA, 201 bp, Homo sapiens
tattgctttataaatttcttcagaattagtttttctgctatgaacaaaaatgtttgatctattacattctttcttctgactaatatttattgattattaawataaaattaaataatttcaactattaaatatttagtaattatttatttgtacttatgtgcaaagtgcttttctttataagaacttgaatgaataaaacag

SEQ ID NO: 264433 - DNA, 201 bp, Homo sapiens
cttaattattcttaaaaaaaagtatttagtattctgttgacttaaatctatattaatagtatttgtataacattgataatataattgagctgatattcctrataattgaccctatgatgacttctgaagaatcatcagataaagattgaattatagccatcacaattttagatgtgtatgtaatttattgctttataaatt

SEQ ID NO: 264434 - DNA, 201 bp, Homo sapiens
gctgtgcaatgtgatgtcccaccagtccctcacttttaaaaatggctttactgagatataattcatagtccttgtagttcacccatttaaactgtacagttaagtgagttttagtatattcacagaattgtgcaaccatcactgcaatcaattttagaacattttcatcacccccaaaagaaaccttgtactattagcagt

SEQ ID NO: 264435 - DNA, 201 bp, Homo sapiens
ctgtgcaatgtgatgtcccaccagtccctcacttttaaaaatggctttactgagatataattcatagtccttgtagttcacccatttaaactgtacagttaagtgagttttagtatattcacagaattgtgcaaccatcactgcaatcaattttagaacattttcatcacccccaaaagaaaccttgtactattagcagtt

SEQ ID NO: 264436 - DNA, 201 bp, Homo sapiens
tgtgcaatgtgatgtcccaccagtccctcacttttaaaaatggctttactgagatataattcatagtccttgtagttcacccatttaaactgtacagttaagtgagttttagtatattcacagaattgtgcaaccatcactgcaatcaattttagaacattttcatcacccccaaaagaaaccttgtactattagcagttg

SEQ ID NO: 264437 - DNA, 201 bp, Homo sapiens
gtgcaatgtgatgtcccaccagtccctcacttttaaaaatggctttactgagatataattcatagtccttgtagttcacccatttaaactgtacagttaagtgagttttagtatattcacagaattgtgcaaccatcactgcaatcaattttagaacattttcatcacccccaaaagaaaccttgtactattagcagttgc

SEQ ID NO: 264438 - DNA, 201 bp, Homo sapiens
tgttgttgttctttcttgttcttcgctgtgatataaatatatgcctcttaatggaataaagagtatttaagatgaccatactgccagatgaattaaggaaytgatatttttgattttaggtattatgagtcatatcttgttccacaatttattatctatgtgacagtggtgaagttagttatggttttcgagccctgcttt

SEQ ID NO: 264439 - DNA, 201 bp, Homo sapiens
tgaaatcttagatgtttgttagacttcaatatttgctttgaacttctcattatctagaagtgaaagaatttgattgtcaagataaatatccaaaatattawaccatggtcttttataaaattcagaataatagcgatataattacaccacataacgaaggtgattccattacaatccaatgcaaaaaacactctctactta

SEQ ID NO: 264440 - DNA, 201 bp, Homo sapiens
ttacataaaactgtaaggaggccgggcgctgtggctcacgcctgcaatcccagcaccttgggaggctgaggtgggcagatcatgaggtcaggagatccggwtaatcctggctaacacagtgaaacactgtctctactaaaaataaaaaaaaaaaaatttagtcgggcgtggcgtcaggcgcctgtagttccagctactcag

SEQ ID NO: 264441 - DNA, 201 bp, Homo sapiens
acaggcagagatgtgtatagaataacattccattcacagtaccggtcataaacaaaagatgattgttggtgttttcagggagcagcagctgactagtttgrctggagtgtggagtgagtataatggagtagtgttacataaaactgtaaggaggccgggcgctgtggctcacgcctgcaatcccagcaccttgggaggctg

SEQ ID NO: 264442 - DNA, 201 bp, Homo sapiens
aaaatatttactatgtaatacatctataaagagaaaatggaagcagaacatcttttaacaaatttgtcagatgtttgcatagagaagagatcttatttgtyggactcaaaacaggcttcaagatgattatgtcatttgagatgaaccttaaggtatgctaggattttgacaggcagagatgtgtatagaataacattccat

SEQ ID NO: 264443 - DNA, 201 bp, Homo sapiens
gtatttttctgtgcaactttgatttctctttttttgatcctctctccatttggcatgggttctctatttcacaccctttgctattccttctgaattttgtytattaaaggattctcctagagagtgatgagaacagtggaatgattatgatgtcctgtatttcatagcttaccgtatagcaacagaaaaagcctttcttca

SEQ ID NO: 264444 - DNA, 201 bp, Homo sapiens
tttgcttaataaaatttcagttttggttttaattttatatctaaatgatgtatttctggcttaaaacttagaagtctgagtgcttaacattcaaagcagtyatttttccaattagtccatactttttataactgtgcagaggaattcagcttataattataaattttaaatttgtgttttctttgtaagtgctggtcaaga

SEQ ID NO: 264445 - DNA, 201 bp, Homo sapiens
tcaaagcagtcatttttccaattagtccatactttttataactgtgcagaggaattcagcttataattataaattttaaatttgtgttttctttgtaagtkctggtcaagatgtccaaggaacaagtgtgattgcaaatctcccatttttgatgcgacagaatcccactgagacgcttcggagagtgttgccaaaagtcag

SEQ ID NO: 264446 - DNA, 201 bp, Homo sapiens
cttaattatatacttgtttattgtttttttgtgtatggccatgatattatataaatactgttagcctgatgaggataactgagtaaggccatgctgcctakgagttgagcagtggaatgacttaaaatagctatggctgtcttataaaacccacaaaatttaatatccttgaaagctgaagatccattaattcatcttatg

SEQ ID NO: 264447 - DNA, 201 bp, Homo sapiens
agtcagataaagagctttgcttttttttttttttttttcttttttcttttttaaagacagggtctcactgtgtttcccaggctggagtgcagtggctattmacaggcacggtcacagtgctctaactcctgggctaaaatgatcctcccacctcagctttctgaatagctgggactacagaaggcacacaccacctccaca

SEQ ID NO: 264448 - DNA, 201 bp, Homo sapiens
cacaatccaaacaggaaaacagaaattaaaacctctctaaagtttctactctgttgcttaaaggtttatgtactgtttataatttttattcaataaagcgrtggcaagttactttatcttataaaatcctaagacacttaaattttatgtagtgtaatgagttaaatgatcaggagcagattaatatagttctctgaaata

SEQ ID NO: 264449 - DNA, 201 bp, Homo sapiens
ttgtatgattttgctgtagttgattttattgctgtccctgttgctatgactattaatgttttaccgtaataaaatgttaccatttatatatttttataaastatggcaaactggcaggtcacaggaaaaaatgaggtagaattaaaaaatatgtatttaataatagtctcgaaacttttagacttaagacatataaaacaa

SEQ ID NO: 264450 - DNA, 201 bp, Homo sapiens
accatgtgagaactctggcgtacttcttcttgggttcaagactaggatagggtagcaatgagacagtaaggaagaactccagtgattaaagctttgctacycacctagcttttggttgtttttcttttaaaatacctatcttatttgctatcccaaagtggaaagttgtgtgaaaaactcctttgaatgccctccttttta

SEQ ID NO: 264451 - DNA, 201 bp, Homo sapiens
agagagtagcctattagcgacgagctttcagcttgcagttgcaagggagtagagagtattgcttaatcaggtcttttaacatcttgtcacatctcaaacayctttgtttgagagagatacataccatctcctttccaagtgtgctctgtgatgatcttgcttcattcttgatattcctctcctgtctctctgttgtatttg

SEQ ID NO: 264452 - DNA, 201 bp, Homo sapiens
agaatcccactgagacgcttcggagagtgttgccaaaagtcagagtaagttggtatgaaataagattggagtttcccattttttcccagtagcatgttgtyattgttgaaaggattttggagctttgatggctgatcttttgcacctaaaaattgagtggaggaagtgttattatatacattttgaattataatgaaaata

SEQ ID NO: 264453 - DNA, 201 bp, Homo sapiens
aatgatttaaatcttcatgaagatgttgctataattcacattttatagattaggaaataatgcagaaggattaatattcctaagatcactgatatgaaactattttatgactaagttccaggttgttctactgactttattatattataaaataggcatataagggaaattttcattattgccataattgagcaagtaata

SEQ ID NO: 264454 - DNA, 201 bp, Homo sapiens
aagtctccaactgtaattgcaggtttgtctagtcctcctttaaaatatataattttttactagtagtttagtattttgaaactgtgtggtgaaatgcacawaaaattaggattattatgttttcttgaattgacccctttatcattatgtaatgtttattctttgaaatatactttgttaggccgggcgtggtggctcaca

SEQ ID NO: 264455 - DNA, 201 bp, Homo sapiens
agttggtatgaaataagattggagtttcccattttttcccagtagcatgttgtcattgttgaaaggattttggagctttgatggctgatcttttgcacctwaaaattgagtggaggaagtgttattatatacattttgaattataatgaaaatatttagggaaattagctgatggaaatggagaaatccagatcttaagtt

SEQ ID NO: 264456 - DNA, 201 bp, Homo sapiens
atatagaagtccctattatttaatttcaaaataatcaatgctatctctaaaaatacacagatattttgtaattttagagttcctttaccttttactagcaytattcatgataaatatatttttcagttttattcaataagattcttttcagaatttgtgaaacttaaacacttgctcttttggagtaagccaatgatttat

SEQ ID NO: 264457 - DNA, 201 bp, Homo sapiens
ttaaaggattctcctagagagtgatgagaacagtggaatgattatgatgtcctgtatttcatagcttaccgtatagcaacagaaaaagcctttcttcatgrcagggcagcttcatttagaatcagaatatgtttctttctaatagaacttactctaaagcaaaaataatattattttaaaaactatgtaaaacatgtatta

SEQ ID NO: 264458 - DNA, 201 bp, Homo sapiens
aataagattggagtttcccattttttcccagtagcatgttgtcattgttgaaaggattttggagctttgatggctgatcttttgcacctaaaaattgagtkgaggaagtgttattatatacattttgaattataatgaaaatatttagggaaattagctgatggaaatggagaaatccagatcttaagttgtaaaatttct

SEQ ID NO: 264459 - DNA, 201 bp, Homo sapiens
atgtatgaagagaagtaattagatgaagggcaagataaggggagataggaaagcaaacattcccagcattgagaaggaaagagaagcatgcagattgaatktagattcaaagaactgagagaaaatcagtgtgcctagagcataaagcaaaaggagttgccgagacagtgaaaaagcccaaattatgcagatccttaggtg

SEQ ID NO: 264460 - DNA, 201 bp, Homo sapiens
aactcacagttccacgtggctggggaggcctcacaatcgtgacagaaggcaaggaggagcaagtcacatcttacatggatggcggcaggcaaagagagagyttgtgcagggaaactcccccttacaataccatcagatctcgagagactcattcactatcatgagaagagcataggaaagacccacccccataattcagtc

SEQ ID NO: 264461 - DNA, 201 bp, Homo sapiens
tgatctttgttacttcttttcttctgctgggtttgggtttggtttgttgtttctctagttccttgaggtgcgacctcagctagtctatttgtgctctttcrgactttttgatgtagacatttaatgctatgaactctcctcttagcaccgcttttgctctatcccagtgattttggtaagttgtgtcactattattcagtt

SEQ ID NO: 264462 - DNA, 201 bp, Homo sapiens
caattggaaactgaagtttttcttaaactatcaaaatagcattaaaataagtgatacttagagataaatctggtaaatgttacataagatctataaactgmaaactatagaacatttctgagaggaaataatgagagaactaagtgaactgaaatatagatcatattcgtggatcagaagactcaatattgtgaagatgtc

SEQ ID NO: 264463 - DNA, 201 bp, Homo sapiens
ttgttatgttaatgtaaattagattacttttaaaattataatttatatttcttttctattatatggagaatataatatataaaagtagagatacttttatrtattgaccttgtattctgcatactgctagactcacttattctagccattttgtagattatttaggatattcaccatagacaactatgttgtttgtgaata

SEQ ID NO: 264464 - DNA, 201 bp, Homo sapiens
cggaggccgaggcaggtggatcatgaagtcaggagttcgaggccagcctggccaacatggtgaaaccccatccctactaaaaatacaaaaattagccaggygtggtggcaggcatctgtaatcccagctactcaggaagctgaggcaggagaattgcttgaacctgggaggcagagttgcagtgagccgagattgtgccac

SEQ ID NO: 264465 - DNA, 201 bp, Homo sapiens
tatcttccaccagtgtcccctaatgctaacatgttattaatacataatcatggtacatctttcaaaaattcagaaattaacattgatacatcactccaaaytaaacttcagactttatttggatttcactagttttttcacttttttttttttctgtttcaagatcaactccaggaaactgcattgtatttagttgtcatg

SEQ ID NO: 264466 - DNA, 201 bp, Homo sapiens
ttgggaaatggcagaatttggacgtgaaggcaggagttcctgtcctcacctaggtccgtgggcacaggcccaggggtggtaccctagtcagggaacagccyttcccttcccggcacttccctgcaccccctcccatatcaatattgttatgttaatgtaaattagattacttttaaaattataatttatatttcttttcta

SEQ ID NO: 264467 - DNA, 201 bp, Homo sapiens
acattgacttggcagagcataggaggaagaggtgcccaccacataaagtagttagcagtatcagctaagattttaacacatttttaaagggtgaatgtgcrctcgcacagtttatgtgtttaggataacttgtagcttagacacagaggagctttgcatccatttgcaagctcttttccatacgtttccactgtttgatct

SEQ ID NO: 264468 - DNA, 201 bp, Homo sapiens
tgtgctcttatgcggatgcgctcctcttgacggcctcttaacatctagctgcgtgtgttttcttccgctggagtgttcctttccacgtccagccacttgcrtctctgcctgctagggtcttggggtttttataggcacaggatgagggtgtggtgggccagggtggtcttgggaaatggcagaatttggacgtgaaggcag

SEQ ID NO: 264469 - DNA, 201 bp, Homo sapiens
gatacaaactgttctatggtttacagcttaaaaaataaaggtacatttaatgctatgcattttgagaataatgtcttttatgctttttctttttacatatrtatctatttgtatttaaggacaaaatagattgacattactaattacttcactattaataattaaagttctgtgaaacatttactgagtatatagtttttc

SEQ ID NO: 264470 - DNA, 201 bp, Homo sapiens
tagtttaagacagacccagatttattcttggaggctgaggcttgctcatttacttactgagagaccttgggtaagttgcttatcttctgtgagcccaagtyccctaatgtaaaatgggaataaataggctgggcatagtggctttcacacttgtaatcccagcagtttgagaggtcaaggcaggaagatcagttgagccca

SEQ ID NO: 264471 - DNA, 201 bp, Homo sapiens
agatgtatttatttgccatttttatattttctttggtgaggtgttcaaatcttttgtctgctttttattggatgttcttactcttgtagttaagaattctstatatattctagatacaagttgtttgctaaatatttattttgcaaatattttatgccagtctatggcttacattttcatttttgtaacagtgcctttgaa

SEQ ID NO: 264472 - DNA, 201 bp, Homo sapiens
catttttggaaaataactttattgaagtataatttaaataaactaagtttatagtttgatgagttttgacaaatgggtacacctgtgtaactagcacaaamtatagaacattttcatcacccccacaaaagccactggtatctctttgcagttaatgccacaccctaaccctaagcaaccattaatctgctttttgtcact

SEQ ID NO: 264473 - DNA, 201 bp, Homo sapiens
caaatttaataacatgtaaaataccttgtaaactattattttttttctattaaagtacatttgttattattaaggtgagttaagattttaatgataattgyttgggaatattattctgaaacactcattcatttgcatgtttcttttctccccaccttcagcattaagcgagaaatacttcctctggtaaaatcactctgt

SEQ ID NO: 264474 - DNA, 201 bp, Homo sapiens
aaaaaaagaaaaaaaatatgttgttctgaaatctactttaatattcacatattcattccaactttcttttggctagcatttacaaagtatatctttttctstccttttaattaattttttaaatttcagaataattttaaattttcacaaacattgcaaagttagtatagaaagttcctatatatcttccaccagtgtccc

SEQ ID NO: 264475 - DNA, 201 bp, Homo sapiens
actttacctatttaggttagttaattgggtctcttctccttcctgtaatacttgtcaccccttcttcctgtaggtgccagggatttggcttgcttttatctttttttttttttttgagatagggtcttgctatattgcccagctggtctcaaactcctggcctcaagcaatcttcctgacttagcctctctagtagctggg

SEQ ID NO: 264476 - DNA, 201 bp, Homo sapiens
tacctttcaatattcctgctatagctcatatatttaggacagactttgataatattcccttttactctatgcaaaatactgtagagcagtgatttccaacttttttttttttttttactatgaccttatcatgtaaggaatacatttcaaactgtgaccctacatatacagacacgtttgtgtgcatgtgtattaatatag

SEQ ID NO: 264477 - DNA, 201 bp, Homo sapiens
aatattttgccaaaacccttgtgatatatgtccttaatttacacttctagttcttaagcttccttattttgttggtatgacattacatgtatgaagagaartaattagatgaagggcaagataaggggagataggaaagcaaacattcccagcattgagaaggaaagagaagcatgcagattgaatgtagattcaaagaac

SEQ ID NO: 264478 - DNA, 201 bp, Homo sapiens
tgcctggcctcaaatcttttttatttaaaaatttttcttcttttcaccttttatttctcttgaagtattattgtgtttattcatctttttcttctttctartttagtcttttttgaaatattttcttctaattctttcctgagttctatcacttcatttctgagttttcataattacgattcatgtgttttttcatatctt

SEQ ID NO: 264479 - DNA, 201 bp, Homo sapiens
agctgccattcacacgtggcatgcatttttggtttgtgtgggaaatcttatcacgtagttatggtgtagatgttatgcatggtttattttatttattttgkttaattttattatttttgtcctagttgctctgtttttaatgagggattcaggaaattttaaaaaatgatgtgttcactgctgccatcttcataggggtac

SEQ ID NO: 264480 - DNA, 201 bp, Homo sapiens
ctttgaacttctcattatctagaagtgaaagaatttgattgtcaagataaatatccaaaatattataccatggtcttttataaaattcagaataatagcgwtataattacaccacataacgaaggtgattccattacaatccaatgcaaaaaacactctctacttatcgaggtattaaatttatttagttgtttttacact

SEQ ID NO: 264481 - DNA, 201 bp, Homo sapiens
  misc_feature (1)...(201): n = A,T,C or G
agtaagaaataacttctttttatatctttttgtaatttttcttccttgtatacaaattgctgggaaagtcactctattagatgagatacagtaggataatntatctcattctaaagcacttttcaccttctatcattaggtgttttggtagtttttaattggtagtaagggtaagagatacttcagtgagctcaaattaag

SEQ ID NO: 264482 - DNA, 201 bp, Homo sapiens
tctcgtttagttagttgtaaaattttaggaaaattgaccaacaaatttgatgcccacacgtgagtatttgtatgtaattttcggtctactttattacattsgtttaaaatgtataatgactgtgtaacaatatatttgtgttatttcatactgcatacaaatttagttatcttaactattttaactttatggaattctcat

SEQ ID NO: 264483 - DNA, 201 bp, Homo sapiens
ggagtttcccattttttcccagtagcatgttgtcattgttgaaaggattttggagctttgatggctgatcttttgcacctaaaaattgagtggaggaagtkttattatatacattttgaattataatgaaaatatttagggaaattagctgatggaaatggagaaatccagatcttaagttgtaaaatttctttagtcatt

SEQ ID NO: 264484 - DNA, 201 bp, Homo sapiens
aaggaaaatattggaaattgtatttatttttatctactatagtgaacatatgcaaaatcttttccttagccaattaaaaacttaagtcaagaatttacacrtgctttgaaattcttagtattcataattgatgggcatcagtaagacttggaagcatactctttcaacactgtctcagatcttttgtctttactgggttga

SEQ ID NO: 264485 - DNA, 201 bp, Homo sapiens
ctgtcggctactattctgttttctgagtttgtcttactggctgggttggcagtatgttatcttagctagcccttttcccctgctatgtcttaacatatctrtatatttttaaaaagtattttaggctgggatggtggctcacgcctgtaatcctggcactctgggaggcagaggtgggtggatcacttgaggtcaggagtt

SEQ ID NO: 264486 - DNA, 201 bp, Homo sapiens
aaacaacacagattgagcattcctaatcctcaaatccaaaatcaaaatgctccaaaatttgaagctttttgagcataaatatgatgctacaagtagaaaaytccccatctgacctcatgcgatgaggtgcagttaaagtcaaaatgcagtcaaaacttagtttcatgcacaaaattatttaaaatattgtataaaattaca

SEQ ID NO: 264487 - DNA, 201 bp, Homo sapiens
ttgtgtcattgcacttaagcctgggcgatgcagggagactctgtctcaaaaacataaataaataaataaataaaatagaaagtattttaaaggaatttttwctgctatttgttaatgaggaaatagaaaggctggttaaaaaaattaacaggagggagcttacaatgttcccagaactcttccaagtttatgtagttattc

SEQ ID NO: 264488 - DNA, 201 bp, Homo sapiens
atgcccatagtctcagctgctcaggaggctggggcccaggagtttgaggctgcagtgaatagttactgactgcactccagctagggcggcatagcaagacyttgcctctaaaaaacaaaaaaaaaacagaaaaaaaaagaaagaaataataggaaaaaataataatttctcctaatatgattatttattatagaattttat

SEQ ID NO: 264489 - DNA, 201 bp, Homo sapiens
taggaacagaatttgtttggaaatttgacacgtacatgtagaatggtatataacgctgatttatgttcgagagagactttttgggggtttggagaggattygggaaatatataataaagaaaggataaaagggacataatcaatgtgaaatgtgatttccttttatttcggtgcatgcccatagtctcagctgctcaggag

SEQ ID NO: 264490 - DNA, 201 bp, Homo sapiens
accctcgttggtataaagagggaggggaaaaataagctcatctgtttttttcaggcaaattttgagcctttatttattttttcgtttaagttgacatgtartaattgtatgtatttatgggatacagagcatatttcaatacatgtatgcagtgtgtaatgatcaaatcagagtagttagcattcatcaccttgaacattt

SEQ ID NO: 264491 - DNA, 201 bp, Homo sapiens
gaagagccactcaaaaggcagtgttctctatatcattgatgataaaggtttaagctaaagaggagtttatctcttcgcaaggaacatgaaactttcgtatrctgttttgacatggcattgataataaaggatacatagtggactttattagtaaaataccttattgtaacataaatattaaatcatgaacataactcttac

SEQ ID NO: 264492 - DNA, 201 bp, Homo sapiens
ctgttgttttaagccactcagtttgtggtaatttgttacagcagccacaggaaactaatgaaagtaacttcccatttcagatataatacaaccccctaccrtgtccttaaatcacccccatctacctttgtgacctcatcatctgccagtcttttccctttctttcataagggcagaatatttgtcagtctagtttctcac

SEQ ID NO: 264493 - DNA, 201 bp, Homo sapiens
tattcattaaaacaaactgtttaataatttaatttgagtaaggaaataattaactatcaactatgtaaagtttagtttttattgtgaactcaaagcaaggytttgtggcatctgctttattgttataaattcaagcacagtatcagcagcttatgagttatattttggattttaagtgagagctgctaggagtaggatcac

SEQ ID NO: 264494 - DNA, 201 bp, Homo sapiens
catggtcttttataaaattcagaataatagcgatataattacaccacataacgaaggtgattccattacaatccaatgcaaaaaacactctctacttatcraggtattaaatttatttagttgtttttacacttacattttggcaaccataaatttgtcataaaattatataaaagaaatcgagcaattccaggcacagat

SEQ ID NO: 264495 - DNA, 201 bp, Homo sapiens
aggaccaagtagttcaggtggagagaacggtaattagccctaaggtgaaagagctgggtgggactgagagagacaggtgtgttttggacccagtggatggkgtggggtgtgattgagaagaggttagagaaatggttgatgaaagagcatgcaaatgttggttttcattcttaggacagtgaaaagtcgttgaagtcttta

SEQ ID NO: 264496 - DNA, 201 bp, Homo sapiens
gatagcatctgctcatctcctctctcttgtctaagtggtttaggattaaacaaattatgagggtgtccaggctaggaaaagaggactttgtgctatgtagycaaaatttttagtgtgtgaatctatcttccttattagattttaagttcttagaggtaggagcaaggtacaagaatagatgaagataatattgttagtacc

SEQ ID NO: 264497 - DNA, 201 bp, Homo sapiens
atggcaaggaatgcctttctgaggagcagaaaactgaagggatggaaagaagcagccatttgagagtcaggaccaagtagttcaggtggagagaacggtarttagccctaaggtgaaagagctgggtgggactgagagagacaggtgtgttttggacccagtggatggggtggggtgtgattgagaagaggttagagaaat

SEQ ID NO: 264498 - DNA, 201 bp, Homo sapiens
agtaacttgcttattttgcttggatgcccaaaggatttttctttttctttaagattcaacagtaaatctcagtattggttatattggattgattttctcargtttgtggtatgtgcttttgaatctttttttttttttttgacttaaaaaaaattccttcccttgctttggttttggttttcttcttcaggaactcctatt

SEQ ID NO: 264499 - DNA, 201 bp, Homo sapiens
tcatatagccactcctgctttcttttgattcacatttctatgatacattattttccattctttattttcaaccactgatactgttatatttgaagtgagtktcttgtagacagtatatagtcgaatcatttttaaaatccactctgccaattccggtcttaaattgatatatttagaccacttatatttaatgtaattgtt

SEQ ID NO: 264500 - DNA, 201 bp, Homo sapiens
ttatttggatcttctctcttcttggttaatctcgctagtggtctatcaatgttgtttatcttttcaaagaaccagctttttgtttcacttatcttttgtattttttttttgtttccctttcatttagtcctgttctgatctttgttacttcttttcttctgctgggtttgggtttggtttgttgtttctctagttccttga

SEQ ID NO: 264501 - DNA, 201 bp, Homo sapiens
tatttggatcttctctcttcttggttaatctcgctagtggtctatcaatgttgtttatcttttcaaagaaccagctttttgtttcacttatcttttgtattttttttttgtttccctttcatttagtcctgttctgatctttgttacttcttttcttctgctgggtttgggtttggtttgttgtttctctagttccttgag

SEQ ID NO: 264502 - DNA, 201 bp, Homo sapiens
tcttttcttctgctgggtttgggtttggtttgttgtttctctagttccttgaggtgcgacctcagctagtctatttgtgctctttcggactttttgatgtrgacatttaatgctatgaactctcctcttagcaccgcttttgctctatcccagtgattttggtaagttgtgtcactattattcagttgaaagaatttttta

SEQ ID NO: 264503 - DNA, 201 bp, Homo sapiens
agtgtgttcttcagttgttgggtagcatgttctgtagatcatctgttaagttcatttgttctagggtatagtttaagtccattgttgccttgttgactttmtgtcttgatgacctttctagtactgtcagtgaggtattgaagtcccccactattattgtgctgctgtcttaggtctagtagtaattgttttataaatttg

SEQ ID NO: 264504 - DNA, 201 bp, Homo sapiens
ctgaggcaggagaatagcttgaaccagggagtcagaggttgcagtgagccgagattgcaccactgcactccagcctggtgacagagccagactccatctcaaaaaaaaaaaaaaatctttttattttgagaaaactatagattcacatacagttgtaagaaataatacagaaatacccatgttctctttatccagttttcc

SEQ ID NO: 264505 - DNA, 201 bp, Homo sapiens
ttaaattggtgtcagttaagaacaggtggaatttccctctgaggtgatgccatgtttattagcatctttttgatatatatatctatatctatctatctatmtatatatatgtatatttcaagtactttcagaacttaggccactttggttatatttgaaaacagttttttgctgtttgtggaaatggtttttttgggaaga

SEQ ID NO: 264506 - DNA, 201 bp, Homo sapiens
aataggccgggcgtggtggctcacgcctgtaatcccagcactttgggaggctgaggtgggcggatcacctgaggtcaggagtttgagaccagtctgaccarcatggagaaaccccatctctagtaaaaatacaaaattagccaggcgtggtggcacatccccgtaatcccagctactcaggaggctgaggcaggagaatcg

SEQ ID NO: 264507 - DNA, 201 bp, Homo sapiens
tttcaggtctcctagatattgttttatctaaccaatatctatttagatttacccacatagctatcattttttattacctgtagtatttccatttggaatcttttttttttttctgcctgaagaacaccttttagtattcagtacaagtctgctggtaacaaattatctttgtttttgtctgtttgaaaatgtcttccacat

SEQ ID NO: 264508 - DNA, 201 bp, Homo sapiens
ttgaaaaaaagagtcatcagccaatgaaatgtcctctactgacttcattaagtgtctttgtcctttctttgtcttcatacagtttatggtcctgtcacaaygcttaaatactggcttgaaaatgggaagattttctagttataaggatgtttgcatacttgatgccaaacatctagatgattatgcatatttaagtgctga

SEQ ID NO: 264509 - DNA, 201 bp, Homo sapiens
tgaggcaagagaatggcgtgaacccgggaggtggagcttgcagtgagccgagatcgcgccactgcactccagcctgggcgacagagcgagactccgtctcaaaaaaaaaaaaagagaaatagcgagattatttggacaaactagagaactgggactagaatcagagtctgatcttcatagtgttttatggtctgtcaggct

SEQ ID NO: 264510 - DNA, 201 bp, Homo sapiens
gacattgttctaggtaggatgacaaactgtcacaatccaaacaggaaaacagaaattaaaacctctctaaagtttctactctgttgcttaaaggtttatgyactgtttataatttttattcaataaagcgatggcaagttactttatcttataaaatcctaagacacttaaattttatgtagtgtaatgagttaaatgatc

SEQ ID NO: 264511 - DNA, 201 bp, Homo sapiens
gaactctatgcatttttctgcgttataatcgtaaacaagaacagagacatgaggtcattcaaaaattaattgaacgtaagtaatcattgtctactattttraaaaaggaaagtaaacaaactagttggctttagttatgtctaacttatgtatcattttgctgtgaataattaggttactattgggttttataagatgatt

SEQ ID NO: 264512 - DNA, 201 bp, Homo sapiens
catttttcagaataataacactttggaaatatttttgacaagtcaaaaacaaccctgttagagcaaagaattttaaaacactttctttatccagggaccattttttttttcaaataaaactttattcaagcccagtgtgttttagaaagaataaggtgaaatagaaactggtaaattcaccattgtgggctccgagtttat

SEQ ID NO: 264513 - DNA, 201 bp, Homo sapiens
attaatgttattctggcctcataaaacaagatggatggtattcccaccttctctattttctgaccaagtttgtataacttggttttatttttgccttaagwgttttatagaattcactagtgaagttatctaagcctggaattttcattttggaaagtattttgataattgattctatttccttagtagacattagataat

SEQ ID NO: 264514 - DNA, 201 bp, Homo sapiens
caatatatttgtgttatttcatactgcatacaaatttagttatcttaactattttaactttatggaattctcatgacgaatttacttattcagatgccttycttttcaatctcataacttttcagaattggtaaggttaacttttttcctacttcctatcttaatcttccctatctcataccaaatatagttttgaggata

SEQ ID NO: 264515 - DNA, 201 bp, Homo sapiens
ttttgaaggttggccaaggcagttgatcatgtttctaagacttttcagcaagaagatggcagagtaagaaaatacaaatcctcaaaatgttatttgggggaaaaaaaaaaaccactactactatatagaaattgacatgtagaattaatctagcaaaaacatagtaatcactataacagtaatcaatatctctgttaaaag

SEQ ID NO: 264516 - DNA, 201 bp, Homo sapiens
ttactttctttcatttttgaaaagtcgtttttgaaaattggccacttaatgtggtacagatgttaagagtacatgaatgaaaggcaggaaccagggtggaygttcagatgcttcaaaagaaaagcttcaagtctgataacagctgtaagattgtgaaattgatcactgaataacaaagattgaaatatgtaaatattacca

SEQ ID NO: 264517 - DNA, 201 bp, Homo sapiens
tctcagatcttttgtctttactgggttgagagcagttagtcaaagccagattggtaagcttcttcggccatttggatatacacattgaaatgattagaagrttgagtagatgttattaatttatctaccattaaaactaaagaaaagacggtcagtagccttatcacttcaaagttgtttggtgagcatccgttagtttct

SEQ ID NO: 264518 - DNA, 201 bp, Homo sapiens
cacaatcgtgacagaaggcaaggaggagcaagtcacatcttacatggatggcggcaggcaaagagagagcttgtgcagggaaactcccccttacaataccwtcagatctcgagagactcattcactatcatgagaagagcataggaaagacccacccccataattcagtcatctcccacccggtccctcccacaacatgtg

SEQ ID NO: 264519 - DNA, 201 bp, Homo sapiens
atttcacattactcttttttcttcttaaatgatagtccagttttttgaaatctgttcttttatgaactagatagaaaactatatttgagagccttttaaaraaactactttgctgaagtataattgacaactacatatatttaaagtgtactatttaatgaattttgacatatcgatgaaaccatcaccacaatgaaaata

SEQ ID NO: 264520 - DNA, 201 bp, Homo sapiens
ttgtatcttataaactttctaaatttgtttattctaaaaattgttttttagattttctaaaactaaaattttatacgtaagtgatcatatcttctttaaawacagcaatattacttctttctattcaatatttatgccttttgtttctttcttttgtcttattgcaagatccaggacctccagtaaaattaaggtggtaca

SEQ ID NO: 264521 - DNA, 201 bp, Homo sapiens
ataatttgtgtactttctttatacatatttatgtatgtatatttgagatggagtctcactctgtcacccaggctggagtgcagtggcatggtccaggctcrctgcaacctccacctcccgggttgaagtgattctcctgcctcagcctcctgagtagctgggattacaggcgtgcatcaccatgcctggctaatttttttt

SEQ ID NO: 264522 - DNA, 201 bp, Homo sapiens
ctagacaccgcacgcgcgcacacacacacccccctcacctctagacactgcgcgcgcgcacacacacacactcacccctagacactgcacgcgcgcgcgcrcacacaccctcacccctagacaccgcacgtgcgcgcgcgcacacacacacacacaccctcacccctagatacctcataaactgctgaaaataaaaaggat

SEQ ID NO: 264523 - DNA, 201 bp, Homo sapiens
ttcttatatgtatggtgtgctttcccaataagactgaaagcttctggagagcaggaacagtatctttatgatttttcatattttctgcagcaactagcccmgtcactggtttttagtaagttcctgctacacatttattgatttgatttattttcttctattgcttattgtgcaggacagaacttacaaaaagtgtggtgc

SEQ ID NO: 264524 - DNA, 201 bp, Homo sapiens
ctcattcactatcatgagaagagcataggaaagacccacccccataattcagtcatctcccacccggtccctcccacaacatgtgggaattaggggagctrcaagatgaaatttggatggggacacagagtcaaaccatatcatttatattgaaaggaatattttaaacttggcagaaactcatcactaatgtttcacaat

SEQ ID NO: 264525 - DNA, 201 bp, Homo sapiens
ttcaaagataaatcaatggtgatagaataatattttaaaaaatggtgctggatggaccaattcctggaaagacacaattcatccaggtgcagtggctcatgcctgtaatcccagcaatttgggaggcagagacgggtggatcacctgaggtcaggagttcaagacctgcctgaccaacatggcaaaaccctgtcaactaaa

SEQ ID NO: 264526 - DNA, 201 bp, Homo sapiens
aggcagaggtgggtggatcacttgaggtcaggagtttgagaccagcctggccaatatagtgaaaccctgtctttactaaaaaattagccaggtgtggtggygtgtgcctgtagccccagctactcaggaggctgaggcaggagaattgcttgaccccgggaggcagaggttgcagtgagccaagattgtgtcattgcactt

SEQ ID NO: 264527 - DNA, 201 bp, Homo sapiens
gagttgatagtatatttgaatattaatttgatgagcctagttggtttataatgtcttaagaaactaagtcagtttacaaatgcaaatttattttaatttgktaagagctaaaatcaaggcaaaaacatttggtttatagtattgattctagaaatagttgcacacacctatatatacttagtgagtttgttaattattgta

SEQ ID NO: 264528 - DNA, 201 bp, Homo sapiens
aataatacagaaatacccatgttctctttatccagttttcccctatagtaacatcttgacaggatgttgacattgataaaatcaggatacataagatttcyatcaccatgggatctctcacattacacttgtgtagtcacacctatttccctcctgctcctgtatctctccttagcccctggaattcactaacctgttctc

SEQ ID NO: 264529 - DNA, 201 bp, Homo sapiens; identical to SEQ ID NO: 52764

SEQ ID NO: 264530 - DNA, 201 bp, Homo sapiens
cttgcattatgtctagcatacatagtatgtgcagagtaaatatttgtgaaatttatatctctacgtataaatcagaataatagacacatatttggatcttycaaatatgatttttagttaaattacaattcagagaacatgatttcaatttaagtgaaacgattataatattaggtattgatgcatgtttttctttccttc

SEQ ID NO: 264531 - DNA, 201 bp, Homo sapiens
attgaaggaacatacctcaaaataataatagctgtctatgacaaacccactgccaacatcaaactgattgggcaaaagctggaagccatccccttgagaaytggaacaagacaaggatgcccactcataccactcctattaaacatagtactagaagtcctaggcagagcaatcaggcaaaagaaagaaattgaaggcatc

SEQ ID NO: 264532 - DNA, 201 bp, Homo sapiens
cggatcatgaggtcaggagattgagaccgtcctggctaacacggtgaaaccccgtctctactaaaaatacaaaaaattagctgggcgtggtggcaggcgcstgtagtcccagctactcgggaggctgaggcaagagaatggcgtgaacccgggaggtggagcttgcagtgagccgagatcgcgccactgcactccagcctg

SEQ ID NO: 264533 - DNA, 201 bp, Homo sapiens
aaaaaactctgtgctactcagtgtgaataatttctcttgatgtatcttcagtgttaccaacccttccctgtcatctccattcagctgctgagcctatccarttaatttttttatttccaatattatatttttcagttctaaaatttccatttggttcttttagtgttttctatttctatgccaagaatttgtgtgactaaa

SEQ ID NO: 264534 - DNA, 201 bp, Homo sapiens
tggtggctcacgcctgtaatcccagcactttgggaggctgaggtgggcggatcacctgaggtcaggagtttgagaccagtctgaccaacatggagaaaccycatctctagtaaaaatacaaaattagccaggcgtggtggcacatccccgtaatcccagctactcaggaggctgaggcaggagaatcgcttgaacccggga

SEQ ID NO: 264535 - DNA, 201 bp, Homo sapiens
tataaatatctacctgaaagaccaagggaacattggcctgatccactgatggcattcttggatgagaagtaggaacagaatttgtttggaaatttgacacktacatgtagaatggtatataacgctgatttatgttcgagagagactttttgggggtttggagaggattcgggaaatatataataaagaaaggataaaagg

SEQ ID NO: 264536 - DNA, 201 bp, Homo sapiens
tttaggtctttgcttaaatatcatcttttcagtggaaccttcaatgacaaccctctttggccacctgctttaaaactgattaatcccctgcccctggtackcccttgtctttattcttcactttatttttctccatagcatttaacactatctgacagattttacttgtttcttttctcttctctgctcccatactagaat

SEQ ID NO: 264537 - DNA, 201 bp, Homo sapiens
aaacagccatggaaaaagagtagacttttagcttagcaaaggagagtatttcctctgaaatgcctcctcctggaaaggcttttttttaggctctgggattwactcttaacttcctggcattcttcaacctccttgtttcttcctttccaacccagtctagactgtggtagtgccttagaccaccttagactaggtcctttt

SEQ ID NO: 264538 - DNA, 201 bp, Homo sapiens
aatcgcttgaacctgggaggacgaggttgcagtgagccaagatcatgccagtgcacttcagcctgggagacagagtgagactccatctcaaaaaaaaaaamaacaacaacaacaacaaaaaaagactcaattcaaaactcacagaagaagaaatagacaatctgaataggctcatatctattaaagaaattgaattggtaa

SEQ ID NO: 264539 - DNA, 201 bp, Homo sapiens
aaaaatgaaatactcaggcataattctaacaaaatatgtacaagatctatataaggaaaactacaaaattctgataggagaaatcaaagaactaataaagraggagatgtctcatgttcattgctagaaatactcaatattgtcaagacgtcagttcttcccaacttgatctataaactaaatgcagtctcagtcaaaatc

SEQ ID NO: 264540 - DNA, 201 bp, Homo sapiens
cacaaaaatgtattcaaaaatgaatcgctgttctaaatgtaaaatgcaaaactataaaattcctagaagttaacataggagaaaatctagatgaccctgcttatggtaatgacattttagataccatgtcaaaggcgcaatctatgaaataaagaataagctgaaattcattaaaattaaaactactatttgaaaaatact

SEQ ID NO: 264541 - DNA, 201 bp, Homo sapiens; identical to SEQ ID NO: 52761

SEQ ID NO: 264542 - DNA, 201 bp, Homo sapiens
ccccctagtgatatgaaagagtgagatttctgcagtcaaatcagtggaaataaacaagtgttgtaccatgtgagaactctggcgtacttcttcttgggttmaagactaggatagggtagcaatgagacagtaaggaagaactccagtgattaaagctttgctactcacctagcttttggttgtttttcttttaaaatacct

SEQ ID NO: 264543 - DNA, 201 bp, Homo sapiens
atctatgtctcccgaaatcttgttggtattttgataggaattgtgttaaagctgtataccactttggggagaatcgccatatttaccatgctgaatttccyagtgtgtgcctctctgattgcttagatatcctttgatttctttcagcattgtgtattttcagcctacaacttctgtacatattttgttagttttttggag

SEQ ID NO: 264544 - DNA, 201 bp, Homo sapiens
gcagtatataatggattccagctgtataccttccattattgctaaggccaaattactgaagtctttggcaaaccttgaattccctgttttggaaaagtackaggtctgtgaatataaagggtttggagattgtttcccatctctgtttccttgtcttttgttatgagaacaaccatgggaggcatctgtgtcttttttcct

SEQ ID NO: 264545 - DNA, 201 bp, Homo sapiens
cttatttggatcttctctcttcttggttaatctcgctagtggtctatcaatgttgtttatcttttcaaagaaccagctttttgtttcacttatcttttgtwttttttttttgtttccctttcatttagtcctgttctgatctttgttacttcttttcttctgctgggtttgggtttggtttgttgtttctctagttccttg

SEQ ID NO: 264546 - DNA, 201 bp, Homo sapiens
atagtccttgtagttcacccatttaaactgtacagttaagtgagttttagtatattcacagaattgtgcaaccatcactgcaatcaattttagaacatttycatcacccccaaaagaaaccttgtactattagcagttgctcctcagtaccaaccctctcagcctttgggaaccactattctgctttctgtatctatggat

SEQ ID NO: 264547 - DNA, 201 bp, Homo sapiens
gtggtgaaatgcacaaaaaattaggattattatgttttcttgaattgacccctttatcattatgtaatgtttattctttgaaatatactttgttaggccgrgcgtggtggctcacacctgcaatcccagcactttgggagtccgaggtgggcagatcacaaggcaggagtttgagaccagcctggccaacatggtgaaacc

SEQ ID NO: 264548 - DNA, 201 bp, Homo sapiens
agcttatttggatcttctctcttcttggttaatctcgctagtggtctatcaatgttgtttatcttttcaaagaaccagctttttgtttcacttatcttttktattttttttttgtttccctttcatttagtcctgttctgatctttgttacttcttttcttctgctgggtttgggtttggtttgttgtttctctagttcct

SEQ ID NO: 264549 - DNA, 201 bp, Homo sapiens
aactgagataatatacataaattatctgaaaggtgtggtccctaatctcaagaatttgatcatctcatgggcccaggagtctcatagagatgaatcattaygatggcttgggtagcttctgctgaatatctgttttctagacatgccttgggttataaagaatggagtgtgcatagattgttaagtgtttttgtttttcct

SEQ ID NO: 264550 - DNA, 201 bp, Homo sapiens
catgactatgccaaattaactttgtaatataattattggttgatttgcctgagtgattaacattaaattatgaagatacttccagaaggatgtaagttcartgagttgagaggcagtgaacactttagttttgtcaataacttaaaattgatttggtggggtcaaattatctagactagaattagcctagtgtaactgtct

SEQ ID NO: 264551 - DNA, 201 bp, Homo sapiens
aatttcaaggatccccactataatatttgggatctttagtaattcaacattatatttgtatgtaaatcaagataatgaacatgaatttatactggacacartacgtctggttgagagatttttctctaatatatggtttgaacccaaacccaggaaagataaatggccatatttatttagaattaaggttctgcctagtgg

SEQ ID NO: 264552 - DNA, 201 bp, Homo sapiens
acaaatatggtagttcattttgctgttcaggatatcctgtttgtattacttttgccgtgcaagctttatgattttgtctgaggggttttagaaatttggtygagcctactgtcatttcaatttcaaaccatctcacaggctctacagaattgcttaaggcaaatggttattgcaaatatttacaagatttttctgaactat

SEQ ID NO: 264553 - DNA, 201 bp, Homo sapiens
atatgaggtacaaaatatacatgttttcatatgactgttatatatgtatttgaaattctatcagtatatataaaatgaaagaaaagaataatatgcttttrtttagttcaccatttatcaaaaattcattttccttaagtctaatcatgtttctgcttatgtatattttttaaattttcttttctaaatcataggaaatac

SEQ ID NO: 264554 - DNA, 201 bp, Homo sapiens
agtcatcttcctcccggcggctccaacctttagcgccagcaaacctagtttacggaccggacccctttcccctggccattgcttaattagctgccttagckcctctcactcccacctgccgcaatatctcaaatctctggtttttttccagccccggagtttatttccttccctcccccactccagatcttgtccttttca

SEQ ID NO: 264555 - DNA, 201 bp, Homo sapiens
aagcctctgtgtaacctaagaaaagggtaggatttaggaggtcaaagcttattgacagtaataatatgtaatacattttactgtagttggaagagttgctrtgataatctgacaggaagaagaatgagttgtagtttttatttcaaaatttggttcccaggaatcatactttttacttaatgatttcttttaaaagtgttt

SEQ ID NO: 264556 - DNA, 201 bp, Homo sapiens
tggggccaagccttgacaggcattttgatggagacaaaccatattaaaaccagtaccctatggcatacagtgttgctacatattccatctctcttttctcycatcaaaacttaactgacttgtgtgtgtatagggctaagaatttgactttaactttttcacctaattgacattaagacagatcctgagacattgtctaca

SEQ ID NO: 264557 - DNA, 201 bp, Homo sapiens
acgcctgtaatcccagcactttgggaggctgaggtgggcggatcacctgaggtcaggagtttgagaccagtctgaccaacatggagaaaccccatctctastaaaaatacaaaattagccaggcgtggtggcacatccccgtaatcccagctactcaggaggctgaggcaggagaatcgcttgaacccgggaggcggaggt

SEQ ID NO: 264558 - DNA, 201 bp, Homo sapiens
tagccatttaccaatctgaaattgaaacgaccaaagtaatggatattttgctaatgtgatttaggaaataccgtctagaaaatgaagggtaattattacartgataccaaactcattgttttagcttgacaaaccctcaagggcataattctgtagatatgaaaagagcacaaatctgaaagaaccctgaattctttagac

SEQ ID NO: 264559 - DNA, 201 bp, Homo sapiens
ttttcggtctactttattacattggtttaaaatgtataatgactgtgtaacaatatatttgtgttatttcatactgcatacaaatttagttatcttaactrttttaactttatggaattctcatgacgaatttacttattcagatgcctttcttttcaatctcataacttttcagaattggtaaggttaacttttttccta

SEQ ID NO: 264560 - DNA, 201 bp, Homo sapiens
gattaacattaaattatgaagatacttccagaaggatgtaagttcagtgagttgagaggcagtgaacactttagttttgtcaataacttaaaattgatttkgtggggtcaaattatctagactagaattagcctagtgtaactgtctgtcttacttacttcttcaagaatgttttacctgtccaaaaggcggcttcacgaa

SEQ ID NO: 264561 - DNA, 201 bp, Homo sapiens
taggtaaagaaatcaagaaatccaaactgattcgaagccagtcttttaataatcaagcttttcatgcaaaatatggcaacttagagaaatgtgctaggtaygatctgtaagcccttcaatttttaacataatttttatctttattcacatcttcatatatatgagtttacattttataaaaatcagaattaattttgaggt

SEQ ID NO: 264562 - DNA, 201 bp, Homo sapiens
ctgggctcaagtgttcctcctgcctcaacctcctgagtagctgagactacaggcactagccaccatgcctagctaattaagttttttttgtagagttaggrgtcttgctctattgcccagtcttgtcttgaactcctggcctcaagtgatccacctgcctcaaccccgcaaggtgctgggattataggtatgagtcaccag

SEQ ID NO: 264563 - DNA, 201 bp, Homo sapiens
agactgtgtgatatacataatttacaagtagctaataacatccaaatttaataacatgtaaaataccttgtaaactattattttttttctattaaagtacrtttgttattattaaggtgagttaagattttaatgataattgtttgggaatattattctgaaacactcattcatttgcatgtttcttttctccccaccttc

SEQ ID NO: 264564 - DNA, 201 bp, Homo sapiens
gaagcattccagaggtttcttcatagatcatgaaatgaaatggccggtccactttgatgacaggaggcatggaataagcagtaatttctgacaagattccygccactgcctcagtgcccctttcatcaacttcaatcactgttctttgtaaaacctggaaaaaggaaataatgtgaaaaaccatttgtgtggcagtgcaaa

SEQ ID NO: 264565 - DNA, 201 bp, Homo sapiens
gcatccctttaaacacctagcttaaggatatggtatttaatcacccagtgtgcagaaagattggtaaagctgatgtcacttaagaaataagtggcagcatkgaacccagaattgtgagtccaataaactgaagagatttacagactgtacttgtgtcttgaagctgaggttataaagggcctcctttctccttttccccca

SEQ ID NO: 264566 - DNA, 201 bp, Homo sapiens
gcagcaagcaagagggtgtatgtaggggaactgcccttttataaaaccaccagatctcgtgagacttattcactatcacgagaacagcatgggaaaaattygcccccatgattcagttacctcccaccgggtccctcccacaacacatgggggttattacagttcaaggtgagatttgggtagcgacacagagccaaacta

SEQ ID NO: 264567 - DNA, 201 bp, Homo sapiens
agggcattgggtaggtatactttgaattccttatgccatttccatgaaaacatgccattgaaaggctgtatttgatctttaaaaatgatcataacaagtamctcctctatgtctggattaaaagagataaagaggaatgtgcttagcatggtggtaggcgtttgattaatgttaatttctttttttctcaccttagttgct

SEQ ID NO: 264568 - DNA, 201 bp, Homo sapiens
taaggaaaaaaggctaaagccatctgtgttttactgaaaatgatggtagttggggagggaatgggggttggagcagccgaggatgaactgaatacattttycttttttctgcttattgctctaggtaaagaaatcaagaaatccaaactgattcgaagccagtcttttaataatcaagcttttcatgcaaaatatggcaac

SEQ ID NO: 264569 - DNA, 201 bp, Homo sapiens
tcatgttggcctggctggtctcaaactcctgatctcagatgactcacccatcttggcctcccaaagtgctgggattactggtgtgagccactgtgcccagsctctctatgtatattatacttaaataaagcatttaaaaatatccaagaccattttcttttctctcaatctttttaaagaaagatattatttagccattta

SEQ ID NO: 264570 - DNA, 201 bp, Homo sapiens
ggttgttctactgactttattatattataaaataggcatataagggaaattttcattattgccataattgagcaagtaatacttcttgttgcctttacatyacacacacaaacacacacactttctctctctatctctctctctcatagagaagtacagtaatatctttgaggcttacgtagaaagatagtttttttgacc

SEQ ID NO: 264571 - DNA, 201 bp, Homo sapiens
ggctggagtgcagtggcatggtccaggctcactgcaacctccacctcccgggttgaagtgattctcctgcctcagcctcctgagtagctgggattacaggygtgcatcaccatgcctggctaattttttttatgtttttagtagagatggggtttcatcatgttggcctggctggtctcaaactcctgatctcagatgact

SEQ ID NO: 264572 - DNA, 201 bp, Homo sapiens
gaaccatgtatgtatcatatagcactagtatctggagctccttttggcatgtttatattttgtattgtttctgcttattatcttatctccttatatatgtkgatattattgattatgtgcttggtcttgtatttgacaaattatttgtagaaatagtttgaggcctaggatgatatctttctcatggaaggaatatatttt

SEQ ID NO: 264573 - DNA, 201 bp, Homo sapiens
ttgagatggagtctcactctgtcacccaggctggagtgcagtggcatggtccaggctcactgcaacctccacctcccgggttgaagtgattctcctgcctyagcctcctgagtagctgggattacaggcgtgcatcaccatgcctggctaattttttttatgtttttagtagagatggggtttcatcatgttggcctggct

SEQ ID NO: 264574 - DNA, 201 bp, Homo sapiens
tggagctggttatacaagtgcgtctattttgggaaaattcattgagctatgaatttgtatacctataatttgtgtactttctttatacatatttatgtatstatatttgagatggagtctcactctgtcacccaggctggagtgcagtggcatggtccaggctcactgcaacctccacctcccgggttgaagtgattctcc

SEQ ID NO: 264575 - DNA, 201 bp, Homo sapiens
gcatttgaaaagaatatttattctccacttgttgactctagtattctagcatgtcagttataccaagtttgttcagaacttgctgtgtttgttgattttcwtgcctattctgttagcataagggcctcctgtgttttggtaacgttttgtttcatgatattggagctggttatacaagtgcgtctattttgggaaaattca

SEQ ID NO: 264576 - DNA, 201 bp, Homo sapiens
ccagcctctctatgtatattatacttaaataaagcatttaaaaatatccaagaccattttcttttctctcaatctttttaaagaaagatattatttagccrtttaccaatctgaaattgaaacgaccaaagtaatggatattttgctaatgtgatttaggaaataccgtctagaaaatgaagggtaattattacaatgata

SEQ ID NO: 264577 - DNA, 201 bp, Homo sapiens
atgcaaaagataaaatagatcatagacctaaatgttaaagactgaaattattaaaacttctagaggaaaccataagagaaaatttttgtgaccttgggttrggtaaaagtttcttacatatgactctagaagcatgatccttagaagaaaaatttgataaattagatctgttcttcagaagacactattaagtgaatgaaa

SEQ ID NO: 264578 - DNA, 201 bp, Homo sapiens
tcaaaactttttaataggaagagttggtgagataataagctaactgagattaatagtcttggtgttgagatatatatgaagatgaattgtcaaaagatacygaaaagttcaacttaagacttttatgagcattttttaatgggaacaaatctagaagtttttcttttgtattttaaatgtgagaaaatacagaaagcacaa

SEQ ID NO: 264579 - DNA, 201 bp, Homo sapiens
aaatttgtcataaaattatataaaagaaatcgagcaattccaggcacagataaaaataatgtagccaatatttattgaggtcttactatgtgtcaggcacygtattctgtcagatattctacacattttaatctgaatactcatagcagttctataatgatcacttgacagtggaagaaacaacttagttaagtaacttgc

SEQ ID NO: 264580 - DNA, 201 bp, Homo sapiens
tcaaataattgattaattttttaaagaagagccatctaagaagtaaaagtgatgaaattcaatacatagaacatattataagctaatgtaattttagtaawaaatgaaatgataaaatgggcttaagctgtagcatggtatgagatgtgtgtaaaagagaataagaaaagtttcctttgcttactatttatctatttatgt

SEQ ID NO: 264581 - DNA, 201 bp, Homo sapiens
gcaatctaagttcttcaaaaagttgctaaatttaacaaaatattattttccttaaatgacctatttctttagtactagatgtagtgttttcttaaatctawatctttatcaggtccctaagaaattaaacttttgtctagcaattgagaaaatatttgactaaactattttgtcttcactgtgtcaagactcaagagttta

SEQ ID NO: 264582 - DNA, 201 bp, Homo sapiens; identical to SEQ ID NO: 52758

SEQ ID NO: 264583 - DNA, 201 bp, Homo sapiens
gtagatccatcaagagtacctggccagtagagtgatctcaagatagaaaaaagagattataactaaagataagttttgtttccaagaaaattttacccatyttagctgccttgcttgaacctcaaaagaaaaactgtaattctgatgaagcaaaagtttaaggaaatgctttcaagttatagacgaagtaagtgttgtgag

SEQ ID NO: 264584 - DNA, 201 bp, Homo sapiens
tgtaggaaatgacaaactaattctaagattcgtatgagaatgtaaaggacctagaatagccaaaacaactttgaaaaataggaacaaaattggaggacttrcattacctgatttcaagacataatatatagccacagcagttaatactgtatgattggtgtaaagacagataaagtaatcaatgagacatagagaaagttt

SEQ ID NO: 264585 - DNA, 201 bp, Homo sapiens
tttcttctgattcagtgccccatttacagtgataatcagtcaaatgaacagacaggagccactgtatattatttgggactctctttctgggtcagattatrcactctggatttcagtcatcatttccatggcatgatttccaaatgtggctgtagccttggcctttccttctcaactttggatcatttctgtttgctgggc

SEQ ID NO: 264586 - DNA, 201 bp, Homo sapiens
acttgaatgcctgggcctgagctggagtgatcttcctctcttagtctcttgactagctgggactataggcgcagtaccccacaccgggcaatacttggttyatttatactgattatgactaaagtcagcagaacaaaacaacatgttcacagccccaagaaattcccaggcatgcaagttaagaactcccattttaatgca

SEQ ID NO: 264587 - DNA, 201 bp, Homo sapiens
atccttgccaacatttggcacgttgagtccttataattttagttattttagtgaatgtgtagtgatatctcattgtggttgtaatgtaattttacctaacrattaaaattttgttgagcattttaagatgtatttatttgccatttttatattttctttggtgaggtgttcaaatcttttgtctgctttttattggatgtt

SEQ ID NO: 264588 - DNA, 201 bp, Homo sapiens
tgattctatttccttagtagacattagataatgtagatcttctgtttcttctgttgtcaattttggtaagttgcttcccttccaccccagtttacatgttrtttaaactgacaaatctgttggcatgaagttatttataatattctattatccttttaattatggcattaatctatgatgataaccattttattcttgtgt

SEQ ID NO: 264589 - DNA, 201 bp, Homo sapiens
gtctttgcttactggccatctttatctcttatttgataaagtttgttttcagaattttaagtgggttgtttattattgttgagaggtaagagcttttaatycattctgaatacaatttctttcacagatatacatattatgaattttttcttggagtctgaggcttatctgttcatttattaatggtgtcttttgaacaac

SEQ ID NO: 264590 - DNA, 201 bp, Homo sapiens
gaatagaatggctgatttgtatggcatgcttaacttaaaaataaaataaaactaaatttaaaaaaatggccgggtgtggtagctcatgcctgtaatcctarcacttttgggaggccgaggcagacggatcacgaggtcaggagatcaagaccatcccggctaacatggtgaaaccccatctctactaaaaaatacaaaaaa

SEQ ID NO: 264591 - DNA, 201 bp, Homo sapiens
aataggaaaagttccccagaccgctcgcagggcgtgcagtgggggagtggcgtgcttctttggtgccccactgctcaaacctctagggggagcatgcagaygggcaggttgtggggctctgaccccatggcagtgtctagaggtagatgtttagagctcccgaagtcccagtgggcatgtgttacagggtgctctttcagt

SEQ ID NO: 264592 - DNA, 201 bp, Homo sapiens
atgcctgtagacttggtcttcttaaggttaaaaactttcaaaagttaaaattgaccctggcatgattgtataaagattgattgtaagtacaatgtagaatkgggcagaactttagttttctgacttagtcttccccctagtgcagaagtcttctatttgaacctccatttgcaaaataagttgctgagaaatgattggttg

SEQ ID NO: 264593 - DNA, 201 bp, Homo sapiens
ttatatgcatttggtatttgaaatatgcctgtagacttggtcttcttaaggttaaaaactttcaaaagttaaaattgaccctggcatgattgtataaagaytgattgtaagtacaatgtagaattgggcagaactttagttttctgacttagtcttccccctagtgcagaagtcttctatttgaacctccatttgcaaaat

SEQ ID NO: 264594 - DNA, 201 bp, Homo sapiens
agacagccaaacatttaatcactcccatttcaaatgataaaatctgtgtttctgtgcatattattttaaattcattgtattcagattttgttatgacttaytggtactcctggttagcacctttgtcaattccacctcacttctgtgagtgtctactttccagtgatgaaatgctgacagcatctcgggtaactgctttat

SEQ ID NO: 264595 - DNA, 201 bp, Homo sapiens
aagacaaatagtaaattgagagaatattttcagagcagatataaaatttctacagaagggaactaaggattattaggccccatgatggcttgtctcattcrtatatagctaaaagactttttaaaacttcaaaagctacattatgtttctgaaaattcagaaaagattggcactgggagttactagaaattagttagatta

SEQ ID NO: 264596 - DNA, 201 bp, Homo sapiens
aatagagtattgtgtgcttgtgacttgatgtaaaaatgctgaagaataaggcaaatgagaagggctttatgggggtaactccagtaataatgacttttatygatagtctaatatataatgtagacagccaaacatttaatcactcccatttcaaatgataaaatctgtgtttctgtgcatattattttaaattcattgtat

SEQ ID NO: 264597 - DNA, 201 bp, Homo sapiens
atatatcttgcatgaataaatgaactctcaggctatctaaaacttgatttttgttttatgtttctgttattcttagttattaacttcactcaagagtaaayactattttattgtagaatgaaactttgctacctgttgcccaaagtgaaatctactctgaagattcctgctgataagcatctacttcagcagttagaaatg

SEQ ID NO: 264598 - DNA, 201 bp, Homo sapiens
tttctgcttattatcttatctccttatatatgttgatattattgattatgtgcttggtcttgtatttgacaaattatttgtagaaatagtttgaggcctargatgatatctttctcatggaaggaatatattttcttctggcagacacctaactgcactagcaatagagtcttacttaacctgatttcaggtactggatga

SEQ ID NO: 264599 - DNA, 201 bp, Homo sapiens
taatagacactccatgaatatatcttgcatgaataaatgaactctcaggctatctaaaacttgatttttgttttatgtttctgttattcttagttattaamttcactcaagagtaaatactattttattgtagaatgaaactttgctacctgttgcccaaagtgaaatctactctgaagattcctgctgataagcatctac

SEQ ID NO: 264600 - DNA, 201 bp, Homo sapiens
atgaatgtttgacacataatagacactccatgaatatatcttgcatgaataaatgaactctcaggctatctaaaacttgatttttgttttatgtttctgtyattcttagttattaacttcactcaagagtaaatactattttattgtagaatgaaactttgctacctgttgcccaaagtgaaatctactctgaagattcct

SEQ ID NO: 264601 - DNA, 201 bp, Homo sapiens
acttaagtactttccaaagaatagaaaatgtctgtgatgagaaaatgttataaattaaagggtattattgtcacatgtgactctgttatgttagtttatayagaataacttatatatggcaaaggcattataaccttagggaatcaacaggaaacatttaaatggctcccactaatgtctgaaatctattttttttctatg

SEQ ID NO: 264602 - DNA, 201 bp, Homo sapiens
gtccactttgatgacaggaggcatggaataagcagtaatttctgacaagattcctgccactgcctcagtgcccctttcatcaacttcaatcactgttcttygtaaaacctggaaaaaggaaataatgtgaaaaaccatttgtgtggcagtgcaaaggaggaattaaatgagccccttgaaattcttcacagtggtcctacc

SEQ ID NO: 264603 - DNA, 201 bp, Homo sapiens
gattacgggtgtgagccaccgcacccaggctctttttttttttttttttgagaaggagtcttgctttgtcacccagtctggaatgcagtggagtgatctcrgctcactgcaacctcccatctcccaggttcaagcgattctcctgcctcggcctcctgagtagctgggattagaggagcctgccaccatgcccagctaatt

SEQ ID NO: 264604 - DNA, 201 bp, Homo sapiens
gtgatccgcccgcctcgtcctcccaaagtgctagtattacaggtgtgaaccactgcgcgcagcctaattttcgtatttttagtagagacagcgtttcaccrtgttagccaggatggtcttgatctcctgacctcatgaaccacccaccttggcctcccaaattactgggattacgggtgtgagccaccgcacctggcctaa

SEQ ID NO: 264605 - DNA, 201 bp, Homo sapiens
gcatgccaccacgtctggctgattttcttttttttgagacagagtcttcgctctgtcacccaggctggagtgcagtggcacaatctcggctcactgcaagmtctgcctccagggttcaagccattctcctgcctcagcctcccaaatagctgggactacaggctcctgccaccatgcccggctaatttttttgtatttttt

SEQ ID NO: 264606 - DNA, 201 bp, Homo sapiens; identical to SEQ ID NO: 52772

SEQ ID NO: 264607 - DNA, 201 bp, Homo sapiens
attttggagtattcttttttaataaaacgatagcccaatgtacatacttatatgtggcttttttcttcccatttgttaatgtaagtattcttttatggtattttttttttgtttttacataactgcacagttagtctagcccttaaagtgccaagggcttatcacattcctagaactcactaacatatgttttcagatttt

SEQ ID NO: 264608 - DNA, 201 bp, Homo sapiens
tacctctgtggaagaggactgagaaccagaggtaggaaagtggatgtggagggtggcagtatagaaaggtccacatgtacatatgtgtgaaaatatttagmattcaaatacaggtgaaatattcttaaatatgtacatatttatatatcatggtacctaccatatataagggggagtgttttgttaatgcttatacaataa

SEQ ID NO: 264609 - DNA, 201 bp, Homo sapiens
ttttaaaggcagggtctcactacgttgcccaggctggtcttgaactcctggcctcaagtgatcctcctgcctcagcctctcaaagtggtggaattacaggygtgagccactgcaccaatccaggttaaacatttttgatacgcatactttcagaaatattttgtaccgtttactatcctgagatgaaattcataggtgata

SEQ ID NO: 264610 - DNA, 201 bp, Homo sapiens
gcctcccgggttcaagtgattctcctgcctcagcctaccgagaagctgggattacaggcatgtgccaccacactgggctaattttgtatttttagtagagmtggggtttctccatgttggtcaggctggtcttgaactcctgacctcaggtcatccacccacctcagcctcccaaaatgttgggattacaggcgtgagcca

SEQ ID NO: 264611 - DNA, 201 bp, Homo sapiens
gtttttaggagatcaatgatctgttggttaaggaaaagattatgcaacttgtccagcagagatcacaaatccaaacccttcagaagaaggtagtaaacttrgagactgctctgagttacatgaccaaagagtttgagagtgaagttttaaaactgcagcaacacgcaatgatagagaaccaagcaggtcaggtagaaattg

SEQ ID NO: 264612 - DNA, 201 bp, Homo sapiens
atgcctccctttgggaggccaggttggaagtcacagaactctctaggattaagtatcgtgatacttcacggatactggcaaaaagtaatgaggacttaaakaaaaagcaatgtaaaatggagaaagacataatgtcagtattaagttacctgaagaagcaggatcaggagaaagataatatggtaggtaggtagaaagcct

SEQ ID NO: 264613 - DNA, 201 bp, Homo sapiens
agaaatttcaaatgaagccacattagaacaaaaagaaaatactgactttttagccgcgatcacatgaatataactgatgagtttttttcatctaagaaatragaaactctgagcagcaaatagttggccagatgagttgtttctaattagagcatcacagttctgattagtgtgtttttttagaagtgatttcccttaaat

SEQ ID NO: 264614 - DNA, 201 bp, Homo sapiens
tatcatacttaattcatgaataacccccatagtgtaggttagttagcactatcaaagtgactggtaaggacgcaggaaaataaaaagaggattcaattggrttggtactgcaaaaagaatccattctgttcagcacatgaatttctgttctgaccttaagtttagatatatcaaagaaacaaaaagcatagaggcggctgg

SEQ ID NO: 264615 - DNA, 201 bp, Homo sapiens
atataaggacaatgagaccattttcatctgtctggatgatgcactttttttatctgaaaaggttaaatactcaatcttataatgcttataagaagcattaractcaacttataaagaatatatcagaaacataaatatgacccttatcctctactaccttagaatattcatttttctttgcttagagttggtccctgagtc

SEQ ID NO: 264616 - DNA, 201 bp, Homo sapiens
tctattttggcgatatctaaaagttagacctgtgttttgagatcttatatctatttcaggcaattgaacgatgctggaagaaatgtttttaaagagaatgwttatcttcagaaagctctggcatatcacctgaaggaaactgacgctctacaaaaaaactcccagaagttgcaagagagtcatactttacttttacatcaa

SEQ ID NO: 264617 - DNA, 201 bp, Homo sapiens
ctgaggtggaggatcgtttgggcctgggaggttgaggctgcagtgagctgtgatggtgctactgcactacagcctggatgacagagcaagatcttgtttcaaaaaaaaaaaaaaagtccggtgaactgtggcaccagctgataaactatttaacgtatttgccctagtgacttgactttttgtccaagacctagcccaaaa

SEQ ID NO: 264618 - DNA, 201 bp, Homo sapiens
caggcatgtgccaccacgcctggctaatttcatagttttagtagagaaggggtttctccatgttggtcaggctggtattaatgttgcttttatttttaaccacacacacacacacacacaaaagttgaccaggtacttctgatgatagccaggttttagaaactggcaatagcaggttgaaggtatgggaaatttcctgtc

SEQ ID NO: 264619 - DNA, 201 bp, Homo sapiens
aggcatgtgccaccacgcctggctaatttcatagttttagtagagaaggggtttctccatgttggtcaggctggtattaatgttgcttttatttttaaccacacacacacacacacacaaaagttgaccaggtacttctgatgatagccaggttttagaaactggcaatagcaggttgaaggtatgggaaatttcctgtcc

SEQ ID NO: 264620 - DNA, 201 bp, Homo sapiens
ccccattttctattgatcatttttgtttgtttgttattttaattttagctgaaagagaatttaagaaacacagagcggatacatcaggagactcttagaaractggaaagcagattttttgaagaaaaggtacagattattagggttaatttaaaatgttttgtttactagaacataagtgtatttatatgcattctgaaa

SEQ ID NO: 264621 - DNA, 201 bp, Homo sapiens
tttgtgttttatcctctctttaaaaaaaaaggttgcttaaaaaattgtttccttatcagaaaagctaaaaaaaagtcataaacatatatatatatatatakagagagagagagattatatataaggagattttatatatataggttatatataaaatctttcttagataaaaggtagcatgcaatatacataaacctgcac

SEQ ID NO: 264622 - DNA, 201 bp, Homo sapiens
atagatattgtgctgttctgtaataccactagccatgcatgagattgcctgtttcctcacagctttaccaacagagtctattctcaaagttgatttttttwtttttttttttttttttgagacagagtctcgctcttgtctcccaggctggagtgcagtggcacgatctcggctgactgcaacttccgcctcccgggttca

SEQ ID NO: 264623 - DNA, 201 bp, Homo sapiens
ggcgtgagccaccgcgcccggacaatgctcatagtaatttttagactgaccaagcacttctaatttttattttctacaccaagtaaaaaagagatcaagawtagggtggagtagagggagaggctactgagaacagcctagtcctgagggctaccattcctgaatgaataaatgaatgactctcatttcagtgcatttagc

SEQ ID NO: 264624 - DNA, 201 bp, Homo sapiens
aaacagtctggtaattattaatgctcatagtattattttttatttatttattttcttgagatggagtttcactcttgttgcccatctggagtgcaatggcrcgatcttggcttaccacaaactctgcctcccgggttcaagtgattctcctgcctcagcctaccgagaagctgggattacaggcatgtgccaccacactgg

SEQ ID NO: 264625 - DNA, 201 bp, Homo sapiens
acttccctgggctcaagtgatcctcttatttcaggctcctgagtagctaggactacaggcacgcaccatcacacctggctaattttttttttttttttgaratggggtttcactgttgcccaggctggtctcgaactcctgggctcaagcagtctgcctgcctgggcctcacaaagtgctaggcttacaggcatgagccac

SEQ ID NO: 264626 - DNA, 201 bp, Homo sapiens
ggccaggttggaagtcacagaactctctaggattaagtatcgtgatacttcacggatactggcaaaaagtaatgaggacttaaagaaaaagcaatgtaaamtggagaaagacataatgtcagtattaagttacctgaagaagcaggatcaggagaaagataatatggtaggtaggtagaaagcctccttggcctcattaac

SEQ ID NO: 264627 - DNA, 201 bp, Homo sapiens; identical to SEQ ID NO: 52774

SEQ ID NO: 264628 - DNA, 201 bp, Homo sapiens
tcggcttactgcaacttctgcctcctgggttcaagcaattctcctgcctcagcgtcccaagtagctgggattacaggcatgtggcatcacgcctggctaattttttttttttttgtatttagtagagacgggggtttcaccatgttggtcaggctggtctggaactcctggatctcaggtcatccacccgcctcggcctcc

SEQ ID NO: 264629 - DNA, 201 bp, Homo sapiens
agatgaaaaatccatctccacatacaatgggatagtaggatagtacatatttctataaacttgtatgttgatactaatttttaaagtcttgttaatgttgwctctctctcttccaaaacatatatatatatattttttgagactagtctcgctctgttgcccaggctggagcaatgtgggctcactgcagtctctgcctct

SEQ ID NO: 264630 - DNA, 201 bp, Homo sapiens
  misc_feature (1)...(201): n = A,T,C or G
aagccttcacaaacatttactcctgtgagacggcaaagaactctctttgacattttagaaattatttgagagaaaaaggagaagacagactggatgccaanggtcttgactttagacttctctttttctaagcattgatttccttgggaactcaccaaatctcagacaacacatcctcctatgtttatcagcaggtaaccc

SEQ ID NO: 264631 - DNA, 201 bp, Homo sapiens
gagacgggagaattgcttgaacccaggaggcagtggttgcagtgagccaagactgctccactgccctccatcctgggtgataaagtgagactctgtctcaaacaacaacaacaacaacaacaaaactgaaatggggtctcattatgttgctggtctcgaactcctgggctccagcaatccttctgccttgacctcccaaag

SEQ ID NO: 264632 - DNA, 201 bp, Homo sapiens
agtcccagctactcaggaggctgaggcagaagaattgcttgaactcaggaggcagaggttgcagtgaggcgatattgcaccactgcactccatcctgggtrgtagagcaagactccttctcaaataaaaaaaagttccttagcacaacacagcttccaactccaacttaatttctgtgtttctgaagttaactctccaaat

SEQ ID NO: 264633 - DNA, 201 bp, Homo sapiens
aagggagattactcaggatggagtcagtcttaaacaaacttgtttctaacggcccatggtaggcatgacaacagcaggtgaggaaagagtagcatcttctyctttccactgagaagtaatggtctttaactgagtgtagaattggatgccctaaggaaaacagaaaaaaagttagcatatatttctggggtttcatgattc

SEQ ID NO: 264634 - DNA, 201 bp, Homo sapiens
ggtcaggctggtctggaactcctggatctcaggtcatccacccgcctcggcctcccaaagtactgggattacaggcatgagccactgtacccaacctctayctttagtttttaggataacttcttagtagaatttatgggttaatgaacatgaacttttaaaggtttgtggtgtgtgctgcctacttaccttttgaaagct

SEQ ID NO: 264635 - DNA, 201 bp, Homo sapiens
atcagactcttctggtgaagtggtgctacccactattccaaaagaacctcaggagtctgacacagtaaggagtctgtatctaatcaaacaatgtatattgytgtcacccttccccatgtcgcttcttgctaaatcacggttattttctctactagttgagagacttcagggatcagtggaatgagtaataaatagcattag

SEQ ID NO: 264636 - DNA, 201 bp, Homo sapiens; identical to SEQ ID NO: 52770

SEQ ID NO: 264637 - DNA, 201 bp, Homo sapiens
ctgtgtctctaaataaataatgttacattacagttttttttgttgtttttttttttgagtcggagtctcgctctgttgccaaggctggagtgcagtggcaygatctcagctcactgcaacctccacctcccaggttcaagtgattctcctgcctcagcctcctgagtagctgggattacaggtgcccaccaccatgcccag

SEQ ID NO: 264638 - DNA, 201 bp, Homo sapiens
tgtgttcacactgtcctctttgtcagcttctccaccagtgcttggagttctttcaggtcatggggacaggagttttttatttgacattctaaaataaataycttttgatgagtaaaatttgttgttaggggcataattatttaagcagcccattttcttttttagcaccgactagaacaagaggctgaaaagaagataata

SEQ ID NO: 264639 - DNA, 201 bp, Homo sapiens
atgaaagtaagcttcaagataaaatcttcatcacccagcaaattgcaatatcagactcttctggtgaagtggtgctacccactattccaaaagaacctcargagtctgacacagtaaggagtctgtatctaatcaaacaatgtatattgttgtcacccttccccatgtcgcttcttgctaaatcacggttattttctctac

SEQ ID NO: 264640 - DNA, 201 bp, Homo sapiens
agacgggagaattgcttgaacccaggaggcagtggttgcagtgagccaagactgctccactgccctccatcctgggtgataaagtgagactctgtctcaaacaacaacaacaacaacaacaaaactgaaatggggtctcattatgttgctggtctcgaactcctgggctccagcaatccttctgccttgacctcccaaagt

SEQ ID NO: 264641 - DNA, 201 bp, Homo sapiens
gacgggagaattgcttgaacccaggaggcagtggttgcagtgagccaagactgctccactgccctccatcctgggtgataaagtgagactctgtctcaaacaacaacaacaacaacaacaaaactgaaatggggtctcattatgttgctggtctcgaactcctgggctccagcaatccttctgccttgacctcccaaagtg

SEQ ID NO: 264642 - DNA, 201 bp, Homo sapiens
ccatttatttcactgatagcatttatcacagtctattaattctttttatttgtttacttgttaggggactgtatagcatcagattgcctgcatataaatcsctgctctgccacttactagctttgtgactttgggcaagtcaccaacctcttctcttttttttttttttttaaacagagtcacccaggctggagtgcagtg

SEQ ID NO: 264643 - DNA, 201 bp, Homo sapiens
acttgttaggggactgtatagcatcagattgcctgcatataaatccctgctctgccacttactagctttgtgactttgggcaagtcaccaacctcttctcttttttttttttttttaaacagagtcacccaggctggagtgcagtggcacaaccatggctcactgcagcctctacctcccagtctcatacaatcctcctgg

SEQ ID NO: 264644 - DNA, 201 bp, Homo sapiens; identical to SEQ ID NO: 52773

SEQ ID NO: 264645 - DNA, 201 bp, Homo sapiens
taatagtagtatctatataatagggttgctgtgacaaataaatgatacatgtaacattcttagaactgttcctggcacatagtaaatgctcaaaacatgayaattattgcttattgtttagatttcaccctagaatataagcttcatgagatcagggaccttgtctgttttgttcactacagaatttcagtatctaaaaca

SEQ ID NO: 264646 - DNA, 201 bp, Homo sapiens
catgagcttggctcactgcaacctctgcctcccgagttcaggcgattctcatgtctcagcctcctgagtagctgggattacaggcacccaccaccacaccyggctaattgttgtatttttagtagagacagggtttcgccatgttggccgggctgatctcgaactcctgacctcaagttatccacccacctcaaccttcca

SEQ ID NO: 264647 - DNA, 201 bp, Homo sapiens
tgcttgagtgttcttataacttggtggatgacttcacccagagtgagtaatctgagcgggatgtagacagaagctatctttttcatgacctagccttcaawgtcacatagcattacttccaccatattttattattaatagttaaaagtgaatccttaagtctggcccacattcctagcagtggggaattagataccatca

SEQ ID NO: 264648 - DNA, 201 bp, Homo sapiens
  misc_feature (1)...(201): n = A,T,C or G
gatgaatctgtggtggacagagccaaggccaatgcctccctttgggaggccaggttggaagtcacagaactctctaggattaagtatcgtgatacttcacngatactggcaaaaagtaatgaggacttaaagaaaaagcaatgtaaaatggagaaagacataatgtcagtattaagttacctgaagaagcaggatcaggag

SEQ ID NO: 264649 - DNA, 201 bp, Homo sapiens
ggcgtgagccaccatgctcagcccatatgggcccttttataagctgcttgagtgttcttataacttggtggatgacttcacccagagtgagtaatctgagygggatgtagacagaagctatctttttcatgacctagccttcaaagtcacatagcattacttccaccatattttattattaatagttaaaagtgaatcctt

SEQ ID NO: 264650 - DNA, 201 bp, Homo sapiens
caaagtgcttggattataggcgtgagccaccatgctcagcccatatgggcccttttataagctgcttgagtgttcttataacttggtggatgacttcaccmagagtgagtaatctgagcgggatgtagacagaagctatctttttcatgacctagccttcaaagtcacatagcattacttccaccatattttattattaat

SEQ ID NO: 264651 - DNA, 201 bp, Homo sapiens
tttaaaaaattttttttcccttttctttttttactttttcaatttttttaaataatagatacggggtttcgccacgttcttcaactcctgggctcaagcartctgcccactgtggcctcccaaaatgatggaattacaggcgtgagccaccgcgcctggctggaacattttctttacatacactggcttttctccccttca

SEQ ID NO: 264652 - DNA, 201 bp, Homo sapiens
agcaacttgggaggctgaggtgggaggatcacttgagcccaagagattgaggctgcagtatgctgtgattgcacgactgcactccagcctgggtgacagtragaccatgtctcaaaaaaaaagtaaaataaaataagagttactatttcatagaattgttataggattaaatgagttaatatttgtaaagtgcataaaata

SEQ ID NO: 264653 - DNA, 201 bp, Homo sapiens
aaaaaattttttttcccttttctttttttactttttcaatttttttaaataatagatacggggtttcgccacgttcttcaactcctgggctcaagcaatcygcccactgtggcctcccaaaatgatggaattacaggcgtgagccaccgcgcctggctggaacattttctttacatacactggcttttctccccttcaaat

SEQ ID NO: 264654 - DNA, 201 bp, Homo sapiens
ctggaggctagaaggtcagggtgctagcatggttgagttcttggtggaggccattcttctggttcacagatggccacttcctgctggatccttacttttgrcagagagagaaagctctggtttttccatctctttcttcaccaatcccatcatggaggctccaccctcatgatctcatctaaacctaactacctcccaaag

SEQ ID NO: 264655 - DNA, 201 bp, Homo sapiens
caacaaacatgtatctctcatcattctggaggctagaaggtcagggtgctagcatggttgagttcttggtggaggccattcttctggttcacagatggccrcttcctgctggatccttacttttggcagagagagaaagctctggtttttccatctctttcttcaccaatcccatcatggaggctccaccctcatgatctc

SEQ ID NO: 264656 - DNA, 201 bp, Homo sapiens
acaactttcccagaagctgttagcacatttcatcttacatctcactgaccagaaccatgttataaagaatgctgggcggcacacactgttctcccacctamtctggagactgaggctcaaggattgcttgagcccaggaattcggggctgcagtgagccatgattgtgtcactgtattccagcctggatgacagagtaaga

SEQ ID NO: 264657 - DNA, 201 bp, Homo sapiens
gttagcacatttcatcttacatctcactgaccagaaccatgttataaagaatgctgggcggcacacactgttctcccacctactctggagactgaggctcraggattgcttgagcccaggaattcggggctgcagtgagccatgattgtgtcactgtattccagcctggatgacagagtaagaccctgtccttctctctct

SEQ ID NO: 264658 - DNA, 201 bp, Homo sapiens
ctcttatacacacacacacacagacacacacacacacacacacacacacacacactactgggaaagtgaatgtttgttttcctcgccattagtggaagctrgggaggaaaaagaaggatgggaatgaatgttggtttggacatcacagcagggtctgcctctccatgttaggtacaaacttcatggatatttctcctgtgc

SEQ ID NO: 264659 - DNA, 201 bp, Homo sapiens
aaaaattagtcgggcatggtggcatgtgcctgtagtcccagctactccagaggctgaggcaggaggatctcttgaacctgggaggcggaggtaacagtgarccaagatcatgccactgtactccagcctgggtgacagagcgagactctgtctcaaaaaaaaaaaaaaaaaagctgtctttagtgttcctccactgtaaac

SEQ ID NO: 264660 - DNA, 201 bp, Homo sapiens
gaccatcctgtccaacatggcaaaaccctgtctctactaaaaaatccaaaaattagtcgggcatggtggcatgtgcctgtagtcccagctactccagaggmtgaggcaggaggatctcttgaacctgggaggcggaggtaacagtgaaccaagatcatgccactgtactccagcctgggtgacagagcgagactctgtctc

SEQ ID NO: 264661 - DNA, 201 bp, Homo sapiens
taatttattaatgaaggtttcaaaatggctctagtcctatgactagaaagaacttcccctagcctatttgttcaacaaatgtttgggcagcctgctctgtkccaggtactgcagataagtagataacaactacagtctgatgagggcttctttaaatggcttaaagagccctacatgactcaacccctgcctgcctctcta

SEQ ID NO: 264662 - DNA, 201 bp, Homo sapiens
ctttttcaatttttttaaataatagatacggggtttcgccacgttcttcaactcctgggctcaagcaatctgcccactgtggcctcccaaaatgatggaaytacaggcgtgagccaccgcgcctggctggaacattttctttacatacactggcttttctccccttcaaatcatcagaaaatgggataatttttagaaatc

SEQ ID NO: 264663 - DNA, 201 bp, Homo sapiens
tttttcaatttttttaaataatagatacggggtttcgccacgttcttcaactcctgggctcaagcaatctgcccactgtggcctcccaaaatgatggaatyacaggcgtgagccaccgcgcctggctggaacattttctttacatacactggcttttctccccttcaaatcatcagaaaatgggataatttttagaaatca

SEQ ID NO: 264664 - DNA, 201 bp, Homo sapiens
cacactgtcataatgctatgcaatcccattgttaattttttaataacccaaacataaataaaataaaaaagccccacatccctcgccctgtggcagcacayagctggcacagaaaaaaaaaatcaacctataaaaggggagacttgtataacaaaacatgtaatttattaatgaaggtttcaaaatggctctagtcctatg

SEQ ID NO: 264665 - DNA, 201 bp, Homo sapiens
atgacaagtctgttattctaaaccaggtttcatgtgtgtagagttgttgacggttctgttattttgtcattattgcagggatgaaagtaagcttcaagatraaatcttcatcacccagcaaattgcaatatcagactcttctggtgaagtggtgctacccactattccaaaagaacctcaggagtctgacacagtaaggag

SEQ ID NO: 264666 - DNA, 201 bp, Homo sapiens
gtaatatcagcactttgggaggctgaggtaggcggatcacttgaggccatgagctcaagaccagcctggcccaacatggcgaaacctcgtctctactgggraaaaaaaaaaaaaaaaaaaaaaaaaaaagctgggcgtggtggagcctgaggcagaattgcttgaacctgggaggtggaggttgcaagtgagccgagaatg

SEQ ID NO: 264667 - DNA, 201 bp, Homo sapiens
taatatcagcactttgggaggctgaggtaggcggatcacttgaggccatgagctcaagaccagcctggcccaacatggcgaaacctcgtctctactgggaaaaaaaaaaaaaaaaaaaaaaaaaaaaagctgggcgtggtggagcctgaggcagaattgcttgaacctgggaggtggaggttgcaagtgagccgagaatgc

SEQ ID NO: 264668 - DNA, 201 bp, Homo sapiens
agttcttcttgcaattattggaacatcttctttaaaaaattttttttcccttttctttttttactttttcaatttttttaaataatagatacggggtttcrccacgttcttcaactcctgggctcaagcaatctgcccactgtggcctcccaaaatgatggaattacaggcgtgagccaccgcgcctggctggaacatttt

SEQ ID NO: 264669 - DNA, 201 bp, Homo sapiens
atgctatgcaatcccattgttaattttttaataacccaaacataaataaaataaaaaagccccacatccctcgccctgtggcagcacatagctggcacagaaaaaaaaaatcaacctataaaaggggagacttgtataacaaaacatgtaatttattaatgaaggtttcaaaatggctctagtcctatgactagaaagaac

SEQ ID NO: 264670 - DNA, 201 bp, Homo sapiens
cattagtagattacataaatttttaaagcaatatccgtacaaatgcatattatactaatgcaaatgcaaatgtgtgcctctttttgtgtagaaacctatasgttgccttttgaagtaaacagcctagccaaaatgtgtactatcttttacgtaagagtaaacatagtgaccttgtgactcttagctttccatcacaggtgg

SEQ ID NO: 264671 - DNA, 201 bp, Homo sapiens
aaccccaatatatcaatctcagaatgctaatattaccaccaaaaataaattgctgaaaacagtttaagattttggggggcatttttctcccttaggatatrtaccagtaaggatctatgataaaattgcaaggcttaagaaccatttgaaattcttttctatgaggttatgccaccaactcaacaacacattttgcttttg

SEQ ID NO: 264672 - DNA, 201 bp, Homo sapiens
tagtgcttattaagaagttacaatattgctcagctgaatgagtggcaactgaagagaaacataacaatattaagattttattggtttgcaaagataagtawttttttttttttttgagatggggtctcactctgtcacccaggccagagtgcagtggcacaatcacagctcactataacctccacttcccaggtgcaagtg

SEQ ID NO: 264673 - DNA, 201 bp, Homo sapiens
ttattttattttttgtatttttagtagggacggggttttggcatgttgttggccaggctgatctggaactcctggccttgagtgatccgcccacctcaccytcccaaagtgttgggattacatgcatgagccacaaaacctggccaatttttatttttaaaattactcttttaatagtaggtattattaaattgccctcta

SEQ ID NO: 264674 - DNA, 201 bp, Homo sapiens
atagtgggaccccatctctattaaaaaaaaaataaatatgggagaatcaaataagtaaatgaaaaggtataaaaactgcccaagcgcagtggctcacacckgtaatctcagcactttcggaggctgaggtaggaggatcacttgagcccaggagttcaagaccagcctgggcaacatggcaaaaactcatttctacaaaaa

SEQ ID NO: 264675 - DNA, 201 bp, Homo sapiens
gcccggtgggtggggcatcgtggctcatgcccagcactttgggaggctgagcaggggaagatcacttgagcccaggagttcaagaccagcctgaacaacayaggaagaccctgtctctacaaaaatttttattaaaaattagttgggcatgctaactcatgcctgtagtcacagttacttaggaggctgaggtggaggatc

SEQ ID NO: 264676 - DNA, 201 bp, Homo sapiens
ctttcagataagcatttcatagttacaacagttacctcaaaatagaagtatgaagagcaagtgagaaatctggtttcattgttacactaggcagttccctrtagaaactttgcaggggttaatagtcctgaggaagattttagttacaatgtattccaatcccatcgatctgatctgagcaaagctgacaaatgaagctgg

SEQ ID NO: 264677 - DNA, 201 bp, Homo sapiens
ttttagggaaccttctgagaagcactgattatgacctcacagatgctgctggcagtcccttccttgcagaatccttgctcctgaatatctttaagaaaatktcttaaaggaaaagacaaaaaatttaactcaaaagttacctgtttgccatagaaattggtgtctcccctgaaggaggatcgagagccggtgaatgagaac

SEQ ID NO: 264678 - DNA, 201 bp, Homo sapiens; identical to SEQ ID NO: 52776

SEQ ID NO: 264679 - DNA, 201 bp, Homo sapiens; identical to SEQ ID NO: 52790

SEQ ID NO: 264680 - DNA, 201 bp, Homo sapiens; identical to SEQ ID NO: 52791

SEQ ID NO: 264681 - DNA, 201 bp, Homo sapiens
ctcactgcagattctgccctgtggcattgccacggttgtatcacatgaccccctttatggaaagagagcaaggcatggggccggagcaagggtcctggcarcccacgttgctgccacagcctttggctggctggctgtttgccggtgcttgtggctattgtaacatagttggatgcattggtagtttagtggtcattcagg

SEQ ID NO: 264682 - DNA, 201 bp, Homo sapiens
tctctctctctctctctctctctctctctctgtcttcctctcccagaaaactaaaaataagaaactgctgttgttgccaagggggatggaaggaggaaatkctgggaggtcagcttcagtatccacctccaaatagacacagtggctgcctgcagcctgacatttcaagattgattaagggtgggggaaaggagagtaata

SEQ ID NO: 264683 - DNA, 201 bp, Homo sapiens
gaaagaatgtgtaacccatgaaaaattttccagccagagacaaaaatcagttgtaccaataatgtttataaatcttttttgatttcaaaactatttttgtrtcttattttgcagaagacaacttatatgtaggacagcttcttccaaaacagcctcacttaaactgagttgccgtaatcctatgagtagactatacttcgt

SEQ ID NO: 264684 - DNA, 201 bp, Homo sapiens
actacatacatacacccacactcatacacacacagccatatacacactcctgcttcacaaactagatccagaaataaatttaccattttaccaatgaaaamgttatttttttgcttaagtgaaccctaaaacttgcgaattttaattttaatccagttagttttacacaaatcccagtctctaggcaaatttttctgcaag

SEQ ID NO: 264685 - DNA, 201 bp, Homo sapiens
ttcttacacacattatcaaatgcaagcttttgattgtgtcctaagaatttgaggccgggcgcagtggctcacgcctgtaatcccagcactttgggaggctraggcgggcggatcacgaggtcaggagatcgagaccatccaggctaacatggtgaaaccccgtctctactaaaaacacaaaaaattagccgagcatggtgg

SEQ ID NO: 264686 - DNA, 201 bp, Homo sapiens
cctcatcagccctcttcacactttctttcaattccattcagttgcagggttctttgctttgagccatttgtgactcgtttctgctgttcttccctttagcrttgattggtttctgttcttgcacattacatgctccagccaggagagcccatttctcttgagtcccaatcagcttttcctatcagttagactgttggacct

SEQ ID NO: 264687 - DNA, 201 bp, Homo sapiens
gagcaggacagggaaagggagtctggccctgtgggttaaggattcagtacttcatcctgcagacaatggaggccaggcaagggcttccaggggaagtgacrtgatcagatcttttggaaaaagtaatctagtgtgagggcgaggaggacaggtggaaagggggttcactgaagtcacagagaccactgtgacggcgagtgt

SEQ ID NO: 264688 - DNA, 201 bp, Homo sapiens
ctcgtgtgcataccacttgcccacacgtggagctgctgtggggccgctggtggggtgagcaggagctgccttctattcatttttgtatcctcagcaacgaygcctgcattcagcacactcatcgttgtatcaatcatgaatgatgcagtgagaaaggaaaaggtttggaatcaagaatggggagcttcattaagcgcactg

SEQ ID NO: 264689 - DNA, 201 bp, Homo sapiens
ttatggctgaatagtactccattgtacatgtgtaccacgttttccttatgcattattcatctgttgatggatgcttaggttgcttccaaatcttaactatkatatacagagctttagcaaacataggagtgcagatatatcttgtatacactgatttcctttcttgtggatatatacccagcagtggtattgcaggatcaa

SEQ ID NO: 264690 - DNA, 201 bp, Homo sapiens
gttttccttatgcattattcatctgttgatggatgcttaggttgcttccaaatcttaactatgatatacagagctttagcaaacataggagtgcagatatrtcttgtatacactgatttcctttcttgtggatatatacccagcagtggtattgcaggatcaaatagtagcttaatttttagtttttgaggaacctcaaaa

SEQ ID NO: 264691 - DNA, 201 bp, Homo sapiens
gtcgtgtctttcaaaactgacatgcatttcctagcctgatccagataccatttttatggatgatcaatctgtagataaatgccctaacctgagtgaatccytaactttgcacccaacagtctggttagtttgggtcagggaatttgggttttccaaattttaagcctcctaattagctgactccaagcatccctcattgct

SEQ ID NO: 264692 - DNA, 201 bp, Homo sapiens
gatggatgcttaggttgcttccaaatcttaactatgatatacagagctttagcaaacataggagtgcagatatatcttgtatacactgatttcctttcttktggatatatacccagcagtggtattgcaggatcaaatagtagcttaatttttagtttttgaggaacctcaaaactaaaaaataatcttctccatagtggt

SEQ ID NO: 264693 - DNA, 201 bp, Homo sapiens
agaaattgaaaccagaaactagaaagactgatttaaaagaatgatgactggacactccaagaagtagatctatgctttaaaaaataaaacaggctttgatyttccattaaaagattgctatataagtgtatgtttaaatgtttttaaaaataataaaacatgcatcaattttctgattaacccaccacatttacatcatag

SEQ ID NO: 264694 - DNA, 201 bp, Homo sapiens
taggaattctgctgtgctattgaaaactagaacatattccttctatctatactcacttccattaaccaacctcttttcctcctccccccttatgcttttcrtagaagatggaatactgtgtacatttggttgtgtttttcaaactgtgtcattcgcatggcatgtaagaagtggaggcgcctagactcagcaaagacacgg

SEQ ID NO: 264695 - DNA, 201 bp, Homo sapiens
tagttggtctcctcgaggagtggaggacacacaggactccgtgccgctctttgttgccggcaggttgaatgttggcggtgtggcagatggggggatgcccragctggggggcctggcagggcttcacctcaccaccacgcttcctccacacgggagtgccctggcccaggactgctgtggccagtggcggaggctggcagt

SEQ ID NO: 264696 - DNA, 201 bp, Homo sapiens
tgggaatttgatgccaagtgattttttcccaattcctctcaaggtattagtgctaaactggcagggctgtaatttggaggaagtctgtgttcactcttccygtggccgcctccccatgtagacaaacccagtccacttgcagaatgtgacatatgcctaaagaattcttacacacattatcaaatgcaagcttttgattgt

SEQ ID NO: 264697 - DNA, 201 bp, Homo sapiens
gaggctctgttgccaagaaaggcaaacccacacccagaaaaggagtcacttcctgtcaagatggagtgtcttcatcttccctggtgtcactgtgatccacmtgacacccactggccagttagttggtctcctcgaggagtggaggacacacaggactccgtgccgctctttgttgccggcaggttgaatgttggcggtgtg

SEQ ID NO: 264698 - DNA, 201 bp, Homo sapiens
cagaaataatattgttcctgacacacatcacatttttcttcacaaagctgtgttggttattgaccagagttcagggacagtctgggaatttgatgccaagygattttttcccaattcctctcaaggtattagtgctaaactggcagggctgtaatttggaggaagtctgtgttcactcttcctgtggccgcctccccatgt

SEQ ID NO: 264699 - DNA, 201 bp, Homo sapiens
cagggtgccggcagcctgcagatgctagtgctggctgaggctctgttgccaagaaaggcaaacccacacccagaaaaggagtcacttcctgtcaagatggrgtgtcttcatcttccctggtgtcactgtgatccacctgacacccactggccagttagttggtctcctcgaggagtggaggacacacaggactccgtgccg

SEQ ID NO: 264700 - DNA, 201 bp, Homo sapiens
aggcgaccgccaccatgcccggctaattttttgtatttttagtagagacagggtttcaccgtgttagccaggatggtcttgatctcctgaccttgtgatcygcctgctttggcctcccaaagtgctgggattacaggtgtgagccaccacgcccagcctagcacctcaactcttgatttcatcttataactgtgtggctgg

SEQ ID NO: 264701 - DNA, 201 bp, Homo sapiens
aagaatgcctgtttctttatccaatcaaagttgcctgttactctccttcagacagaaataatattgttcctgacacacatcacatttttcttcacaaagcygtgttggttattgaccagagttcagggacagtctgggaatttgatgccaagtgattttttcccaattcctctcaaggtattagtgctaaactggcagggc

SEQ ID NO: 264702 - DNA, 201 bp, Homo sapiens
tttaccttcaaaaatttatcttgtaaacaaatgaaaaaaagcagaaagggctctttcaaaaaaaaaaaaaaaatgtgctgtaatcccagcactctgggagrctgaggcgggcagatcacgaggtcaggagatcgagaccatcctggctaacatggtgaaatcccgtctctactaaaaataaaaaaaattagccaagcgtgg

SEQ ID NO: 264703 - DNA, 201 bp, Homo sapiens
acagcatttgttattgcctgtcttttgggatacaagccattttacctggggtgagatgatagctcattgtagttttgattcgcctttctctgatgatgagkgatgttgaccaccttttcatatgcctgtttgccatttgtatgtcttcttttgagaaatgtctgttcaaatcttttgcctatttaaaatgatcagattatt

SEQ ID NO: 264704 - DNA, 201 bp, Homo sapiens
gtttgcaacctataagcaaaggaaataatgtgacactggaaaacaacactattcatttaacataatgaattgccatgtaataactcagatcttcccagggkgtaaattacacaaatttgaaagatgcatttattatttaatgcctcattcccagacagttgcttactcagtagcaaaatctgtcttagcataccaagtgta

SEQ ID NO: 264705 - DNA, 201 bp, Homo sapiens
tgctagcatccttggggtcttgttcatgaccagctctttgggaatgacccacatggttttccttagaatgtcgttcagtgcttcctagacattttttcctygttccacgtgaagacagtgatgatatttgtagggcacactgtggtggagagatactgctgcttctggacagacgccaccagcctagaggctactggccag

SEQ ID NO: 264706 - DNA, 201 bp, Homo sapiens
ggaagagaagaaaaagtattttcatatgaatgaggaaagtgaggcttttgcataattttaatggaaaaaggattaagtggttggaaataaacaaaaagtgygaaagaagaataaaatacatacagtgctggttagcctaagcacaagaccactgcagtccccaggagacgttaaaagagctctggttcttgaaggactcaa

SEQ ID NO: 264707 - DNA, 201 bp, Homo sapiens
ctctggccccttatagtattctctgcttgtctggaatgcttattcccccagggatccatgtgacttgcatttctaatctccttcagacatttgcttaaagrcacctgctttgtaaggcattctgtaatcacctctttaaaattgaaatctccaccttctttggactctccctcttccctgttgattattttcttcctcact

SEQ ID NO: 264708 - DNA, 201 bp, Homo sapiens
tagtttagagcattcctgtcaacagaaaattctcttagatagcactagttcaggggattctccctggggcagtcaggtgcacctgtttggatttttagaamtagtaagtgtatttttctaaaactaggaagaaagagctggaaaaaagttacttggctattgcataaatggggtgtatggtagggatcgaggggcggcata

SEQ ID NO: 264709 - DNA, 201 bp, Homo sapiens
tgctgtgggcaagggttatgtatgaagcctctaagaaatctatgcagtaatcactcacaggcaatctctcagttacataaactgtctcatcattcattacytgatgaaatatcttcattgtatcctctggtaattgcacagcttatgacactgtccagagaaccttaccccataaattcagagattctagtttgtttgcca

SEQ ID NO: 264710 - DNA, 201 bp, Homo sapiens
ggaaaagagagggggtagggagagaggaaagaaggaaggaaagaagctgaattaaatgaagcctatagaccaattatcaatttataggaaaaaaattatcmaggtgcattataaactgcaacattggatacaatcagcaaaatgaagactgggaaactctgtaggtcacatgtcctgctttcttcaacagataaattgcaa

SEQ ID NO: 264711 - DNA, 201 bp, Homo sapiens
tttgttgaggatttttgcatcaatattcatcagaaatattggcctgtagttttctttttttgatgtgtctctggttttggtatcagagtaatactggcctygtagaacaagtttggaagtattccctcctcctctgtcttttggaatagtttgagtagggttggtattagttcttctttaaatgtttggtagaattcagca

SEQ ID NO: 264712 - DNA, 201 bp, Homo sapiens
cagtcatctaatctcaattccctcctatagaagataattagaataggaatcaactttgcagttgtctagtctcaattccctccgatataagatacttagamtaggaatcaactttgcagttgtctaatctcaattccctcctatagaagataattagaataggaatcaactttgcagttgtctaatctcaattccctccta

SEQ ID NO: 264713 - DNA, 201 bp, Homo sapiens
ttactggaagattttttattatggctttaatcttgttacttgttattggtctgtttgggttttggatttttttgcctggttcaataatggtaggttgtatktatctaggaatttgtccacttcttctagactttccaatatattgacatatagttgctcatagtagccactaatgatcctttgaacttttgcagtatcagt

SEQ ID NO: 264714 - DNA, 201 bp, Homo sapiens
tatggctttaatcttgttacttgttattggtctgtttgggttttggatttttttgcctggttcaataatggtaggttgtatttatctaggaatttgtccayttcttctagactttccaatatattgacatatagttgctcatagtagccactaatgatcctttgaacttttgcagtatcagttgcaatgtttcgtttttca

SEQ ID NO: 264715 - DNA, 201 bp, Homo sapiens
ggaactgaaggttctgatgttgcaggacttttccttagttcagccatggacggggttctgtgtcccacgaccacaaaaattcaggcttgcaagacaatttraagggtgggtaagacagggttttattaggtgaaaaggaagaaaagggggaaacagggactctcgctaggccagagtccctgctagacggcttccggcgct

SEQ ID NO: 264716 - DNA, 201 bp, Homo sapiens
aaacaccatctatgaagtagtattacagagagacagaaagaaggaagaggagaaaggaggacagagagatagagggagggaccaaaaaaggaggaagggawgagaatgaaggaggaaggaaaaaaggaggaaaagagagggggtagggagagaggaaagaaggaaggaaagaagctgaattaaatgaagcctatagaccaa

SEQ ID NO: 264717 - DNA, 201 bp, Homo sapiens
ccccagtgagtgccttccagaccacataaaactaaaatgctccataaagttttggaattttcactttatctatgtatgttttagaagctaatgaaaagcargtttttaagacgtataatagcttctttcattatgtgaaacaagtcttgctgattttaggagtaaaactacaaccagaaaactgggggtggaagagaagaa

SEQ ID NO: 264718 - DNA, 201 bp, Homo sapiens
caggtgcccatatgtgctccaagactaccccagtgagtgccttccagaccacataaaactaaaatgctccataaagttttggaattttcactttatctatrtatgttttagaagctaatgaaaagcaggtttttaagacgtataatagcttctttcattatgtgaaacaagtcttgctgattttaggagtaaaactacaac

SEQ ID NO: 264719 - DNA, 201 bp, Homo sapiens
cccaggtgcccatatgtgctccaagactaccccagtgagtgccttccagaccacataaaactaaaatgctccataaagttttggaattttcactttatctrtgtatgttttagaagctaatgaaaagcaggtttttaagacgtataatagcttctttcattatgtgaaacaagtcttgctgattttaggagtaaaactaca

SEQ ID NO: 264720 - DNA, 201 bp, Homo sapiens
acatcagcgcaataagccataagcgttccaggggaagttattgcagtatatcatttcaatgatctgtagatagcaggctgctgggagacttgttttgaacrgtgcctttcaatccatctctgagcttgagggtgcaccgaggcatgccagagttggaaacacttcagtgcccctcaaagtattctttcagctccttagccc

SEQ ID NO: 264721 - DNA, 201 bp, Homo sapiens
tactgtaatggagaaaatatctgaattaattagatacaaaagcccatactgttgagcctctgatgagaaaaactatatttgtcgtgaagaatgatcgcatkaaatgttaaaccatggtttttcaaacattcttgaaatatttagttatagttacaatggttaaaattttcagtgttacattgaatgtggtgattttctatc

SEQ ID NO: 264722 - DNA, 201 bp, Homo sapiens
aaatatctgaattaattagatacaaaagcccatactgttgagcctctgatgagaaaaactatatttgtcgtgaagaatgatcgcatgaaatgttaaaccayggtttttcaaacattcttgaaatatttagttatagttacaatggttaaaattttcagtgttacattgaatgtggtgattttctatcatttagtcagaatt

SEQ ID NO: 264723 - DNA, 201 bp, Homo sapiens
cttcatcttggcagttttgaactgttcttttccattttagagtctcagaatgaatacttatcttgtcagtttatgctctattgtacaaaggttctgtttcrtgtaaatgaacttcagtcaatttacaacaaattgatttccatctctaagaatatcctaccctgcgagtagatactttccatgaatatgtcatttacattt

SEQ ID NO: 264724 - DNA, 201 bp, Homo sapiens
ccagagtagctgggattacaggtgcctgccaccatgcccagctaatttttgtatttttagtagagatggggttttgctatgttggccatgctcgtttcacrctcctgacttcaagtgatctacctgcctcagcttcccaaagtgctgggattacaggcatgagccaccatgcccagccgcgagaggacttttatttcactg

SEQ ID NO: 264725 - DNA, 201 bp, Homo sapiens
tcctggggttcattaaccaccagactttgttcaagttcctgctgcagcttctatctggtggtaaatgattgtgtaacaacactgaacatgatgcatttcgrtacactgttctcttctcagccttggcttgagtacttagtgaggcctgaggaataattacctctttctccattttcttttgtagctgctaccaattgacca

SEQ ID NO: 264726 - DNA, 201 bp, Homo sapiens
aagcagctgcccaggtgcccatatgtgctccaagactaccccagtgagtgccttccagaccacataaaactaaaatgctccataaagttttggaattttcrctttatctatgtatgttttagaagctaatgaaaagcaggtttttaagacgtataatagcttctttcattatgtgaaacaagtcttgctgattttaggagt

SEQ ID NO: 264727 - DNA, 201 bp, Homo sapiens
agacagtgatcttggcctattcctttcttttgttcttgtatccttatctggttttggtatcaatgtaatgctggccacgtagaatgcattaggaagaatcycttcctcttcacctttttgaaatagtttaagaattgcttttagcttttctatataaatttgatagaattctgcagttaatccgtcttgtcctggaccttt

SEQ ID NO: 264728 - DNA, 201 bp, Homo sapiens
attttctatctcatagatctatccagtgctgaaataggggcattgaagcccccaactgttgtatcagggtctatctctccctttcaatctataattttttwaaaaatatatctgggtgctctgctattgggtacacatatatttagaattgttacatccttttgctgaattgatacatgtttcattatatgatgatcttct

SEQ ID NO: 264729 - DNA, 201 bp, Homo sapiens
ttccttctttcccttttgttgtttatcattgtggtttggtggttttctgtaatagtagcatttgagtccttcatttctcctttgtgtgtctgctctaccaytgagttttgcacttttgtgtgttttcgtgatggtacatattgtccttttccttccagatgtagaatttccttgagcatttctcataagacttgtctagtg

SEQ ID NO: 264730 - DNA, 201 bp, Homo sapiens
atatgacatgacacttttctcttactgtttttagaattctgtttgtctttaacttttaacagtctgactctaatgttccttgaaaaagacatttttgagtygaatttatttgggattcttggagctttttgtatctggatgtctaagtctcttgcaagacttgagaagttttcagatattattttgttaaataggctttcc

SEQ ID NO: 264731 - DNA, 201 bp, Homo sapiens
gaggtcagggagggctgcttcatctggccagcagggtcctcctgctcactctcagggaggctgtgcagcgtggaactttgacaactgtcccatagttctaragcgtttggagtcagggacccttcatgaaatgctaacagcaagatcatatgcacaagtaaagaaatagcaacaaacatagtggaagcatttgctctgaaa

SEQ ID NO: 264732 - DNA, 201 bp, Homo sapiens
tatgcacaagtaaagaaatagcaacaaacatagtggaagcatttgctctgaaaaattccccagtgatagattatctaggggacaacgcctaaggtcaaagstttctccaagataataaagataataaaggaaaatccttgttttgcagtctgacagataatatggaaatcagtcttggaagtgcctatgggcactgctaaa

SEQ ID NO: 264733 - DNA, 201 bp, Homo sapiens
ggcattgttaatttaacaaagtgtacatttattatatagtcctccagtttgcatagttactttgtatcagaactgataaattcagttactgggtttatgtratacccagtaagtcgaacacttcagtatgaaggctaagacacaataaagaagtcacaagataaacaggctttgccatggctattttaaaggcttttttta

SEQ ID NO: 264734 - DNA, 201 bp, Homo sapiens
tgtgtatttttgtttttagtggaggctgattagaatgtgtcaccactaacaaagggtgacacttggagaattttgatctcacacagggtccacctcgtggyggtgcagcagtcatctgctggtggctttcagacccaagccaccttttccccctctctgctctgtaagttggggctgtttctggagatgggagggccaaga

SEQ ID NO: 264735 - DNA, 201 bp, Homo sapiens
cttggctaattcaaataatgaactcatacgacccacgtgggctgaaatgctctctctggcattgttgtgggcaggcgctgtgccggttacttctttgtcaggtgtgcactttggcaattagtatgtaattttgccaaatatagatcaaattaaaatgcatttggtctctgagatttcagtcatttatttcttgtttataag

SEQ ID NO: 264736 - DNA, 201 bp, Homo sapiens
tggctaattcaaataatgaactcatacgacccacgtgggctgaaatgctctctctggcattgttgtgggcaggcgctgtgccggttacttctttgtcaggygtgcactttggcaattagtatgtaattttgccaaatatagatcaaattaaaatgcatttggtctctgagatttcagtcatttatttcttgtttataagcc

SEQ ID NO: 264737 - DNA, 201 bp, Homo sapiens
atcctatcttttgagcaatcacttgatgctggagatggctgattatttacagtccagcagtctacagagagcaaatctctcagcagttctaaccttgacayttctctctcacattaaaatattccttgagggacaactcaatgttaacattttgtaaggaaatatagcatgactaacaggccctatgcaacaaacagaagt

SEQ ID NO: 264738 - DNA, 201 bp, Homo sapiens
cagagagcaaatctctcagcagttctaaccttgacatttctctctcacattaaaatattccttgagggacaactcaatgttaacattttgtaaggaaatakagcatgactaacaggccctatgcaacaaacagaagtaagtccaaatgaatgagcacttttatactctcagtaaattatagcagagatgctaaggctactg

SEQ ID NO: 264739 - DNA, 201 bp, Homo sapiens
ttagtttctttccctgattctccccatgtttctctttgtggttgctgttgttattttgtatctcagatgtaccatgttggattctatggttcttgtacaamactgtatcaatatttgtccaagcctgaccctctttatgcatttatttctctttttctttcttcattttctgattaccttcccttgtcccgttaaattcaa

SEQ ID NO: 264740 - DNA, 201 bp, Homo sapiens
gatctcaaagctatgcaggatacaaggtagcctggagacacacacctgtccacctctggagcccacgttcttgataccaaaccattcctgcaccagaattytttctggatattaagtttgcatcagtatacctcctgaaatcatgagagcctttgaaaagaaatgcaaaatgagtaaatacagatatttaggcaggtatca

SEQ ID NO: 264741 - DNA, 201 bp, Homo sapiens
ccatccaatctttgaggctcattcactttcaagagaatatcatgggaaagacctacccccatgattcaacaacccccaaccaggttcctcccacaacactkggaaattgtaggagttacaattcaagatgagatttgggtggggacacagccaaaccagatcaaagacctgtaccctcttcaattctatgaaggctgagag

SEQ ID NO: 264742 - DNA, 201 bp, Homo sapiens
cagactggactcctgagcaggccaagaaagaaagcgcgtttgaaacagagaggctggccccagcaagatggcaggcttgttagcagaggctgtgttgggawggatgagtagttgacgggatggagtacagggagcatggagtgggaggtgatgatagattagggtgtcaggaccagctcagtgcagttttccatgccatac

SEQ ID NO: 264743 - DNA, 201 bp, Homo sapiens
tatggtaggacaatttatattcctttgggatatataataataccatatcttcttaaccagttctctgtggttgcatagctgggatgttttcactgctgcartccaacacagcactactatatgcacttgtatggctgaaattcttccaaatttaggattgtttttgaaaatctctggtagattcagataaataaaatttac

SEQ ID NO: 264744 - DNA, 201 bp, Homo sapiens
tataaacataaaatttaggatgttcaataaaagctattggaaggatcatgggtaactaagtcaggtcttactgctaatgattttttcagatttgaccataktaggactgtgataagcagggctttcaagccagttgtcatctacctttatagtaatttgaaatctatcaaattgtatttgggtttggctaattcgcttctg

SEQ ID NO: 264745 - DNA, 201 bp, Homo sapiens
tgatttgtatgggtctgatgtgatttggagggtcaggcttcgacagtgaggaggagagggcaagtgagttatgatgaaagagaagaatggaaggaagggaycacagccttgtccagagaaatggtaaaagcatgagtagcctttctaagaacttgaggaatacaactttgttgggttttccatttaatactaatgaagtgg

SEQ ID NO: 264746 - DNA, 201 bp, Homo sapiens
ccaggcttattttgtatttttagtagagacgggggtttcttcatgttggtcaggctggtctcgaactcctgacctcaggtgatccgcccgccttagccccrccaagtgctgggattacaggcgtgagctgccgcacccagcccagaaagaactttttaatgaaatgccaaaatgaattaatgaataaagtcaaagaatcta

SEQ ID NO: 264747 - DNA, 201 bp, Homo sapiens
atcccagcactttgggaggctgaggtgtgcagatcacttgaggccaggagtttgagagcagccatggccaacatggggaaatcccatctctactaataatmcaaaaaaaaaaaaaaaaaaaaaattagccaggcatggtggcgcgcgcctgtaatcccagctactcgggaggctgaggcaggataatcgcttgaacctggg

SEQ ID NO: 264748 - DNA, 201 bp, Homo sapiens
tccttggtcagtgtttgtcaggttcaactccagccatggtttcccagtggaggtcgattctgacaccagcatcttccagctcaaggaggtggttgctaagygacagggggttccggctgaccagttgcgtgtgattttcgcagggaaggagctgaggaatgactggactgtgcaggtgagtctcccttggcggccgttctt

SEQ ID NO: 264749 - DNA, 201 bp, Homo sapiens
aatacagagctgcctccaagtctgctgctctgcaaaattgcaggctgcttgcagggcaagacccaaattgactgacatgccagtgtgactggtcctccctrccgtggccagcacaagactttgcatcaaagaggtttaaataaatgctgacttaaaggaaaatctgtttcatgcagtgcaacaaacagaaagcaaactatt

SEQ ID NO: 264750 - DNA, 201 bp, Homo sapiens
tctcccgtggtgaacctgtgggcttcagatgtgagcagctgcgtcagcagagcttcctagagatgtcacaggtgcttgtgcatgaaattcttatgccttascttttcatttaactgtcaccgcaggtgcgcagcaacccccgctgggaagagcagggcaatattgcaaatcctggaccaattttgtatccgttagggtcaa

SEQ ID NO: 264751 - DNA, 201 bp, Homo sapiens
taaggtaaaaggagattagtctgttcattcaacagatatttactgagttcatccgtggctcaagaaactattccaggtgcttcaagctgagataaaacctygcgtttctgatcaagcctgatgcatttctgtcgatggcagggaaagccgtcgacggggacactctctagcaggtgaaggtgtgacggaaccgggctagtt

SEQ ID NO: 264752 - DNA, 201 bp, Homo sapiens
tttcaaatcactaatagctacagtaattatattatatataactctattacagaatttatatagaacagtatcctaggaaaatgctaaaatgcacgaaatargatgactccatcacacacattggtttttacataggtgtcactgttcaactctaatctggttttctggaattatatatataattgcatatatatgtatatg

SEQ ID NO: 264753 - DNA, 201 bp, Homo sapiens
ctgattcccacttagtgattcctacttatgattcttagtttctttccctgattctccccatgtttctctttgtggttgctgttgttattttgtatctcagrtgtaccatgttggattctatggttcttgtacaaaactgtatcaatatttgtccaagcctgaccctctttatgcatttatttctctttttctttcttcatt

SEQ ID NO: 264754 - DNA, 201 bp, Homo sapiens
cactgagactggcagaaggcacagacttttctctcctcccccagtttctcaccatatctgattttcttgttttccagtcttcatttccatttgtttctgarcatagattgatttgcccttgaatggctcagtggtgctcaaggacacccgctgagttagcctttggtgaacattttccatggaacaggctggaatcaagag

SEQ ID NO: 264755 - DNA, 201 bp, Homo sapiens
aagggggatattgtaggtaagtctttacttgaaccaacaggtcttgacttatctgtactttgttctccaaacttaccacagccatggttctatgaagcatratgaaagagtatataatctttactgtgactggcacgcatgctttcacatcccagatatcatctgtccaaggaaattttatttatttatttttattttttg

SEQ ID NO: 264756 - DNA, 201 bp, Homo sapiens
cttcattttctgattaccttcccttgtcccgttaaattcaaaaagcatttaatacctactatgtgtggaaatccatgatctgaagtagaagctgtaagtgrttccagagccaatatgaccatcatccttattcagctcatgtgcagatgttggtaacaccaagcatccacttgtattctttggtttcagtaccagaaatag

SEQ ID NO: 264757 - DNA, 201 bp, Homo sapiens
gtgatcattcatctttcatgacaaattaagttaattttgtcatgttctgaaaaggacaagcagaacagagggtggcaccctcaatgccccagctcctttcygagggttcaggtaggcattgcctttctgagattaaattgaacgccattttcaatatggcatcaattttaacttagcacaatcaaattttcaacattcttg

SEQ ID NO: 264758 - DNA, 201 bp, Homo sapiens
cacatttcttgtaacaaaatcttaacttggtggtgttttcataattagtaaatgtagttactgatttcctacccaccagataggaaaatgtccaccatccygacatgatggtgacatctgtccgacatcggcctctgaaggaaagagatacagttagcaaggatttcactgtagttcatggtaaaacagtaaataaaaaat

SEQ ID NO: 264759 - DNA, 201 bp, Homo sapiens
aattttcaacattcttgtcaactgaaggatattgttttaatgttttttaaaaatcctgggattatgggcttgtgtttgtgtttggaagccattggagaggkgccaacatttacatttccttcttcctttctttttttttttttaagatggagtcttgctctgttgcccaggctggcagtggctcgatcttggctcactgta

SEQ ID NO: 264760 - DNA, 201 bp, Homo sapiens
tatctaacttcagagtaagcatgttccaaacatggagcgagaaggagtgtctggggtaggagagaccgtttctacagggaaggaccgggagaggcaggccygggaaaggctccagagatggagtccctgagactgacgcgtgcttcgaaggaagagacacacactgactgcaactggggtgtgagtggaggtttgggggac

SEQ ID NO: 264761 - DNA, 201 bp, Homo sapiens
gtcttgccatactgtttcgtattttaattatcaagaaatcttaaatttccttcaagctaaattctgcctacagcaacttaaagtaatagtaacgtaaaaaycctactcatgaattcttatgaacaaatattgaaattgccccaaaactttttttagactgattacttaacacccgtacctttcctctttgacatgtaaaaa

SEQ ID NO: 264762 - DNA, 201 bp, Homo sapiens
acttcatcttttccagctatttcaggcttccaaagtacgctatttattctaaaaaactgtcctttattgaaatactaagcatattctgctgtctctgagayagacaaaattcctacttgtagttttaggaaaaaattttctactcattctacggtttctactcatttagttaaaaaatatttattaagcatttactaaata

SEQ ID NO: 264763 - DNA, 201 bp, Homo sapiens
attgaataactactctgtgcaaaaaataaagccatataaacttcaaggagtgtgcggtctaatgaagaaaatgaaacttgtaatcaagtgattacattgcmaagcaccgtgccaagttgtaaaagaactaccgtaaagaggcacagcatgctttcgatgttcaaagaagggaaaaagaaaagtaacttctcagtggaatca

SEQ ID NO: 264764 - DNA, 201 bp, Homo sapiens
ttcccaactggggctttaggaagattaatccacttggtgtcattcaaagagacagatatatggaaggaagaaaaccggatagaagaccactgtactcattyaaagaaaacattctgataccacattcattaaatctaggaagcatctttgcttactaaagccatgtgatttacaaatgagcgggccgtattacctggcttt

SEQ ID NO: 264765 - DNA, 201 bp, Homo sapiens
cttactaaagccatgtgatttacaaatgagcgggccgtattacctggctttgatggtaacccaattttttttctcaccttgccaggacaaacaaaagattratgtctgcatgtgagcaatagggggcccattatttctgatgcttattttgaaaaacttccaatccggcctcccataactaaggctttctctccatttcag

SEQ ID NO: 264766 - DNA, 201 bp, Homo sapiens
catattttacatgtattaaaagttttcgttaaaatggagatttacgtcattgtattgtagttgtcttcattacagtctttaaatataaatgtcagaaatgwactctctgtactactttttaaatccaatagcttaattttcacttttatgtagtgtggagtccaatactaaagtaagttttttttgttgccactctattaa

SEQ ID NO: 264767 - DNA, 201 bp, Homo sapiens
taaggaagcattgttaatatttatagatatgttaattatattgtagtatgcttaaaaataactttacttttttggagatacatgctgatgtatttatggakgagtaatgtaacctcagggatttgttaacaatttgttttttaaaagttcttcctggctaagtgcggtagctcatacctctagtcccaacaccttgggagg

SEQ ID NO: 264768 - DNA, 201 bp, Homo sapiens
cacaatgtgagccagcagcccagaagcctccgtgtgatctcctccatagccgcttcctctgcctgtctagatataactactatctgatcttaataattatsattccctgcttttctttgtagcactaccacctatatatacaaccctaaataatgcaagtttttgcctgcttttaactttcaaactagtagtgcttgaaag

SEQ ID NO: 264769 - DNA, 201 bp, Homo sapiens
atgtgatttacaaatgagcgggccgtattacctggctttgatggtaacccaattttttttctcaccttgccaggacaaacaaaagattgatgtctgcatgygagcaatagggggcccattatttctgatgcttattttgaaaaacttccaatccggcctcccataactaaggctttctctccatttcagcgtctcatccag

SEQ ID NO: 264770 - DNA, 201 bp, Homo sapiens
aacatgtttctctcctctcctacagataaaaatgcaaatagctagtttcctttgaagtttgtaaatacagcatgtattctgtgttcttgtatagcattaartaggccactgtgatacagtaaaagttaactcttcaaagtctctgcctggctgagaaaaagggctgttttcttctaacatagatttcatgactatgataaa

SEQ ID NO: 264771 - DNA, 201 bp, Homo sapiens
gagtgcgtcttatatttgtttgatgaattgtaaaaagcagagttcattgcctgtgttaaatatcctccatcatctgtcagtgttgtatccaacgtcctcarctgcttcagatttggtgttttgggtggttccacctcagcgagccccacggcctatatcagaacatgtcgatcgctgagaatcacctaaacgaagctgact

SEQ ID NO: 264772 - DNA, 201 bp, Homo sapiens
tctgtcagtgttgtatccaacgtcctcagctgcttcagatttggtgttttgggtggttccacctcagcgagccccacggcctatatcagaacatgtcgatygctgagaatcacctaaacgaagctgacttacagcagccagagagccgctcggcaatatgcaacattagagacacattgagcaacacagtctgtgatctct

SEQ ID NO: 264773 - DNA, 201 bp, Homo sapiens
gctgaccctaaggctttaacccatgactctgacctcactggcctgttcttcctcataatcttcatttttaaagtttcatgggtcagaggcaaaatagagasggcacccagggagcagaactctcacaccacagtttttccttccttggtattgatactgaagtaaagtattcgcccttttgagaaggggttattatcaaca

SEQ ID NO: 264774 - DNA, 201 bp, Homo sapiens
aagcttccagaaagaggcagctttaaacagaccagccaattttatgaattccagcttgggattgacaagtcatctaaatctgtaaatgtcttgcttgtcaytggccccaaatcaaggaattttaagatgtcctttgtcatccacattccagagcttgacaaacactgcctatgcccctgttcaaatgtgtgttcttcatgc

SEQ ID NO: 264775 - DNA, 201 bp, Homo sapiens
ggcagaggttgcagtgagccaagatcgcaccactgcattctagcctgggtgacggagagagactccatctcaaaaaacaaacgagtaaaaaaccacattgwtaaaagaatgaaaagacaagtcaggacttggagaaacatatttgcaaattacatatctgataaaaggagttatatttagactatttaaagaactctcaaa

SEQ ID NO: 264776 - DNA, 201 bp, Homo sapiens
ccgcgtccagccattcttagataatcttttacaatatgtgtactgtgtgttaggcactgtggagagaaaaataaaaacatatctcagcctcacattctgtygtcagtaactttttaccttagttgaagctcaaaatatttagctaaatctctttctttcttttctctccctctgtttaccacaggtcatgcctccacagta

SEQ ID NO: 264777 - DNA, 201 bp, Homo sapiens
tagccacttcttctgctttttcttctccagcaggtagatcaatctacaacagcttttatgtgtattgcaaaggcccctgtcaaagagtgcagccgggaaawctcagggtacagtgcagcacctgcaggcaggcaacgctcaccttgacccaggtaaggaaatgcagtgtcagcatgagactgccaggaaaatgaatgtgta

SEQ ID NO: 264778 - DNA, 201 bp, Homo sapiens
ccacacctttgttttctgcccccaacaggaggctgcatgcacatgaagtgtccgcagccccagtgcaggctcgagtggtgctggaactgtggctgcgagtrgaaccgcgtctgcatgggggaccactggttcgacgtgtagccagggcggccgggcgccccatcgccacatcctgggggagcatacccagtgtctaccttc

SEQ ID NO: 264779 - DNA, 201 bp, Homo sapiens
ttcaatttcattcatttcttaatgaatatcatcactttagagctgccctattgtgctttatgaagtttttcccctcagttaagtttctctctgcccttgtrttgcttgtgattattcgctcagaaagtgatgtctaggctagcgtgctggtttgggaatgcgtgttttccaggtacttgctgcgaacccaccacacctttg

SEQ ID NO: 264780 - DNA, 201 bp, Homo sapiens
cactttccacctatcaagacaagaagaaagacaggaggagcattttatcccctttcaaagaggatattttgtccaaggggcagtctgcaggggttccaagkcaagttacattttgtgtatggaaagtgagtgatggaaaaaatgctcagtaattttctaatcggcctgtattttcaagagtctattattaatttgaattaa

SEQ ID NO: 264781 - DNA, 201 bp, Homo sapiens
tcatgattcttttgcattgagctttaattatgcggaactgaaggttctgatgttgcaggacttttccttagttcagccatggacggggttctgtgtcccaygaccacaaaaattcaggcttgcaagacaatttgaagggtgggtaagacagggttttattaggtgaaaaggaagaaaagggggaaacagggactctcgcta

SEQ ID NO: 264782 - DNA, 201 bp, Homo sapiens
aagaactttaaaaactcaacaatacaaaaacagacaacctgattaaaaatgggcaaaagacctgaacagatacttctcaaggaagatataaacatggcaartaagcatataagaagatgctcaacgtcttaccatgttagggaaattaaaatttaaaaaaacaaacaaacaatgagataccagtacacatctattacaatg

SEQ ID NO: 264783 - DNA, 201 bp, Homo sapiens
tcccatgggggcttccagggagctgagcccagtgcgtgcagagcgctggtcctttcttcctcttttggtatctgccgtctttaccctgtcctctctcttcycctcacagccactcgtccctgactctctctttcctctcaggagtccaggagacttggggaactgcggctttcacagaacccaggaggcggtccctggtct

SEQ ID NO: 264784 - DNA, 201 bp, Homo sapiens
aaaaaacaaacaaacaatgagataccagtacacatctattacaatggccaaaatccaggacactgacaccaccaaatgctggggagtatgggaatcaagaraaactcttattcattactgatgggaacgcaatatggtctcatcactttggaagacagtctggcagtttcttacaaaactaaacatagtcttaccatacga

SEQ ID NO: 264785 - DNA, 201 bp, Homo sapiens
cgttgtgattccctggggcttagtcttagaccccttctccccctttgtttcttttttcccagtctgtattccctccgtaggtagtcttatccttgcatcaytgacttaaatactcaccatatgctgataattccaaaatgtatagctttagctccaactttacccttgatccccaaaattaaacctctagctgccaccctg

SEQ ID NO: 264786 - DNA, 201 bp, Homo sapiens
caccaaatgctggggagtatgggaatcaagagaaactcttattcattactgatgggaacgcaatatggtctcatcactttggaagacagtctggcagtttyttacaaaactaaacatagtcttaccatacgatccagcaatttaactgcttgctgtttacccaaatgaattaaaagtttatgtccacacaaaagactgcac

SEQ ID NO: 264787 - DNA, 201 bp, Homo sapiens
acctgcagtataaataagttttaaggtgatatgagaaagtactttgcattgaaaagggaacagaggctgtttttctattataaataggccctggagggctsagagctggatgtcttcaccctgctccccagagagcagtccctgcttcctcggtgcagctggccaaggaggccactaaacaagggctgcatgccaagaaaa

SEQ ID NO: 264788 - DNA, 201 bp, Homo sapiens
acaggaaataggctattttcagtagccttatctctgctttggtttctgatcacttgatattcagagtctcttatctacagatcacaagatcatcatctccyatcgaaacctgttcaaagaatctagcaaatctttgaatcttgtaatatggccttccaagtaaattgttttatgtttgcccttaaagttttctttgaacat

SEQ ID NO: 264789 - DNA, 201 bp, Homo sapiens
gtttctctctatcttttagtgtaggttgtagttgttttaagtcctgcatactggttattttagatatcatactttttagtgatagagtaagtgtcattacwttggtttccttctgacttcaaatgctgtccccttgaaattttccctggtgttgtaaatttgcctgtcatctattacacagatgacctctcaatccacgtt

SEQ ID NO: 264790 - DNA, 201 bp, Homo sapiens
cggtgaaatcccatctttactaaaaatacaaaaaaattagcctggcatggtggagggcgcctgtagtcctagctactggggaggctgagacaggagaatcrcttgaacctgggaggcagaggttgcagtgagccgagattgcaccactgcactccagcctggtgacagagcgagactccgtgtcaaaaaacaaacaaacaa

SEQ ID NO: 264791 - DNA, 201 bp, Homo sapiens
attttccatcttcctctgtatggtttggatgttttggttttttctcttactttgatttacatttaaaaaaaatctaggctgggcgtgttggctcacgcctrtaatcccagcactttaggaggccgaggtgggtggatcgcttgaactcaggagttggagatcagcctgggcaacatggtgaaactctgtctctacaaaaaa

SEQ ID NO: 264792 - DNA, 201 bp, Homo sapiens
ctccgtgtcaaaaaacaaacaaacaacaacaaaaaaattgtctataaatgaatttcttatgtaagtgtgcaggatgaagggctggatttaactgtctggarttgcttataccagggccatggtgcagtcacctgagccgcataccaaggctcaaggtctcgtgttttagaggcacctggttgaacacttgtgatgctgcac

SEQ ID NO: 264793 - DNA, 201 bp, Homo sapiens
aacatggtgaaactctgtctctacaaaaaatacaaaaattagctaggcatgatggtgtgcgcctgtagttccaactacttgggaggctgaagtgggagcayggtgtgagcccaggaagtggaggttgcagtgagccaagatcctgccattgcaagccagaccctgttttaaaaaagaaaactacattttatcatactttgt

SEQ ID NO: 264794 - DNA, 201 bp, Homo sapiens
aaatggagaccagggtgataagaaattctcaatgaaaatttctatatagaaaaatggggtagtaatcgcaggagggtgtgaggacaggttggttggtttgytaaagttagggaatactagatttagtgatagttctcaaaggtgcagaagaaacttcccaggcaagggacatttggaaacatgtggagttacttttgtgtt

SEQ ID NO: 264795 - DNA, 201 bp, Homo sapiens
tggaacaaggggagtgccaggcacagattggcttgcatcatccctgaaccaatcatttgaccaatgacaaggaggatggggctgtgctgatgaatgacatygctcttctcagtgcaggaggcggaatggctgcttgaggagcagccagaatcatttaagaatcattaattattgatattgactactatatttatgaagttt

SEQ ID NO: 264796 - DNA, 201 bp, Homo sapiens
gtacagttttctagtcttctctgtgcagctctctctgctcagttctgttaactccagctgccccgtcttccccctacacacagacctgtgggttcaattcygcaagtctgctgagctcccgctggggtctccctccctgaaccagggcctggccactctctgaaggcagcaggctggagtgattgcaggactcagcacgct

SEQ ID NO: 264797 - DNA, 201 bp, Homo sapiens
tgcagctctctctgctcagttctgttaactccagctgccccgtcttccccctacacacagacctgtgggttcaattccgcaagtctgctgagctcccgctrgggtctccctccctgaaccagggcctggccactctctgaaggcagcaggctggagtgattgcaggactcagcacgcttgcttcctgtctctcacggacct

SEQ ID NO: 264798 - DNA, 201 bp, Homo sapiens
tggttatcttctgaggggcatttgtatcttttgcctttattatcccactgggccttgtccatatctccatggtcaagcttaatccccacatccaagatccrgctggcagaggggaatgaaattataaactaggcatgcatctttcatataatcccagcccagaaatagcacacacccctaagatccttaagctaggcctta

SEQ ID NO: 264799 - DNA, 201 bp, Homo sapiens
cctgtcaagcgctatgggtgcaggtgatgtcagagctgctggagccacctggagctctgagctgaggggagaggaaagggattgagagaaagaggcaatgktcttcccctttgttcgtcttctgttaaaggagtcccagagatgcctagctcttgccacttgttttacaattagaatggaaattgcttctcagacttttgg

SEQ ID NO: 264800 - DNA, 201 bp, Homo sapiens
gaatctgttgtacatttcctctgaggttgtaggccacaagtctttccaaatactggggagttgggtttcaatttaaataaaatggttattgagcaccagcyatatttatgcattgtgctcagttctggggattaaaaggtaatagagacacggcttctattcttcagggatgtatgactccaggggaaaagaatgcctgga

SEQ ID NO: 264801 - DNA, 201 bp, Homo sapiens
cattagaagcccaacccccacaattacgcatgtaatatccatgaaacaaacaagcacgtgtacctcctgaatctaaaatttaaatttttaaaaaattatarttctaagatgctgtcaattgtatgatacattgtgatttcagggatgttaaaatgtgggaaaaatgtgcattttaaaataaaggaaacataatcattattg

SEQ ID NO: 264802 - DNA, 201 bp, Homo sapiens
atacattgtgatttcagggatgttaaaatgtgggaaaaatgtgcattttaaaataaaggaaacataatcattattggagtaaatccttgaacagccaccarctgtggttaacctaatagagactataggagcagtaatgataatgcagatgagtgtggtaatttaaaatttacagagcaatttatttaaatttatttattt

SEQ ID NO: 264803 - DNA, 201 bp, Homo sapiens
gatgttatgatccttgtctgctggcccctaaaccaagtcttactatttactgaatccatgaaattggtcagactcagcatgaaaaaatacaatcaaatcartacgtggagacagtgcctcctaatggctctgcaagacacactagcatctcagcctctctgcagtacctttagattgatgtttatcaaactgtgttctgtg

SEQ ID NO: 264804 - DNA, 201 bp, Homo sapiens
ttcttgagtggctgtttgtcactgtgttggtctgaccgtggatggttctgctgcacccccatacacagccacttatggtgctccctcccctctccttcaastgctggcccagcacctctgtcctcatcgtctcatctcttaccctgtcagtttttccccgtctctggcattctcttctagccatagcccaggtcctctgtc

SEQ ID NO: 264805 - DNA, 201 bp, Homo sapiens
gagataagtactaatattaaccccatcttatagatgaagaaactgaggctctaagaagttaaataatttgcctatttttactcagctctaagtggtgaatygagattccaatccagatattcaagctccagtatccatgttctttactatgccctgtgtatgctatatttttctgttagaaaagtgagaaagagggaactc

SEQ ID NO: 264806 - DNA, 201 bp, Homo sapiens
taagagtagagaagaggttggaatgggatttaaggacgaagggtgtcctggtgccctcctgggtggaggaggcagattctagccattgtatttggggtcakgggtgttggtgagtgctgggcaccactgttcgagggacattgatggtgagggcaacagaagagcttgagaaagcagcagggaagggcatcattcatcgct

SEQ ID NO: 264807 - DNA, 201 bp, Homo sapiens
tgttgtttgtctaccgtgtgtagtgtgtaactgctgtgggcaaaggagcacctaagttggtcagttacatgtcacttttgcttcccttctaccacggaggrcaagttaaactctatctcgcatttcatgtttgacatttcctttttttttttttttttttttaccttgctcccaaacagaattgtgacctggatcagcaga

SEQ ID NO: 264808 - DNA, 201 bp, Homo sapiens
ccagtttctctttcaattaccatttcgatagatatgctcctctcttggactccacggcaaataatttttcttgtttctgtgaagaaagaaaaagtactctyttaacatagttaatttaccaggttactgtagacaacagcgtcctggccaccagaatagcacacgcaggtggtaggctgcccgctggaaggcaggctccag

SEQ ID NO: 264809 - DNA, 201 bp, Homo sapiens
ggactccacggcaaataatttttcttgtttctgtgaagaaagaaaaagtactctcttaacatagttaatttaccaggttactgtagacaacagcgtcctgrccaccagaatagcacacgcaggtggtaggctgcccgctggaaggcaggctccaggaagcaggggcatttcctctcactctgggctgttgcagtacctaac

SEQ ID NO: 264810 - DNA, 201 bp, Homo sapiens
tagcatgtggtttttgataggctcaaataatgtgaaatacaaaaccacttactttatgtgaagtacctaaagtcctctctgccttcaaaaagagtgccagygagtaggtacttgttgaacaaagaaagcagtttttgtttctgcctgtatgtgtataaatggttattcattgaaattgttttataaatactaagataaaaa

SEQ ID NO: 264811 - DNA, 201 bp, Homo sapiens
cagtagattatctagaaggatgttcaacactgtttatattagtaaaaaatggaaaactatcaagaggtacaaccataggttctgaatgtttggcagttctmtaaaatgaaacactatggatccattgaagatgatgttgagaatattatttaatggcatggaaagacaccacatgacaaaattcaattccaaattactgag

SEQ ID NO: 264812 - DNA, 201 bp, Homo sapiens
aatactttttccttgaaagcacaatttagttttcaaaagacaatttttgagtatttcaaaaagcactttttttttcttccttagcatttcatgtagtggcycatacagctaaacaactatgccagcaaaaaatttataggatcaaagaaataattaaggaatccctgactttgttttttccatgctatgaaagagaaaact

SEQ ID NO: 264813 - DNA, 201 bp, Homo sapiens
ttctgttgctttgggtgttgtaaaaccttgtaggagaaggggtgaatgtacagatttttgtctagtagagatacagataatttctatctggtggaaaagaygatttaaaaattatagtttattgccctgttggacattatcccattttattaatatatctaaccaggtgatcttaccataaaattactttgtaaaattgcc

SEQ ID NO: 264814 - DNA, 201 bp, Homo sapiens
aggtacaaccataggttctgaatgtttggcagttctataaaatgaaacactatggatccattgaagatgatgttgagaatattatttaatggcatggaaasacaccacatgacaaaattcaattccaaattactgagtagtttgtgatcttactctataaaaaataactaaccatatatatccccgtttatgcatgtgcat

SEQ ID NO: 264815 - DNA, 201 bp, Homo sapiens
ataagaggagatttttccctaaaaatctagaacacttgaagtactcagagtttgctttattttctgtgaattttgccggtattccatttgtatatgtcatwatttatttttcttcaacaaccaaaatctattttttgtggttctggaggccaaatgtccaagatcaaggtgttgtaggtttgctttctttctaggcatgtc

SEQ ID NO: 264816 - DNA, 201 bp, Homo sapiens
gggcaacaagagcaaaactctgccaaaaaaaaaaaaaaaaaaagggatagttagcagtcatagagatcctagaataccaaacggaagtacttgtactttgytctgagagttttggggcgcagtgaaagttttttatggaagaatgacagtcctaaggtttccaaaagattcaactggaatgcgtgttttagatgacttggc

SEQ ID NO: 264817 - DNA, 201 bp, Homo sapiens
gtctgctccactggacagaaattctttgtatttccactggaaaaaagtgaaccactgctcctaccgagttgtaaaatagcccatataataaacctacatcrcattgaaagagtaccagtaatctctttggtttaattctaagtttcaaattttttttgattattaagagaatgaaactaaaatagtcctatttaatatgta

SEQ ID NO: 264818 - DNA, 201 bp, Homo sapiens
acctacaccatctctccctgaagctcattttgttgcctctgaaataagtcaatggagactctttctgaagggttgctggtagacaggacaaacaagtactrtgaactttcagatcaggattgcaatgggtgcagcgataacctttcaggaggtgcatttttgatgtgttgtaaggcaacgctgtgagtagagaacctcaat

SEQ ID NO: 264819 - DNA, 201 bp, Homo sapiens
acattttgacccaaaagatacttagttgtaatcttgacttccccctgaagacacctctccagtgggtgatgaggcacctttatcatgtctgactggggagyagccaagggggactagtccttgatctggtgcatcagaaatgaaaatctgtggattctgatctcaaaagacaaggacaactgagacatttgagaccagcgt

SEQ ID NO: 264820 - DNA, 201 bp, Homo sapiens
tgtacacaggcacccccttaaccacttgggaggccatcactcatctttgttaattcccctgaacatccagtgtgggaacactccactgtcactcctgctcrgtgttggaactgaggctgggtattagtctctaaaaggaggacaggacagaccactgcacttttcaggaatcctgtgggcccaacatgagctattaaaaaa

SEQ ID NO: 264821 - DNA, 201 bp, Homo sapiens
tcgatttcattttgaattttattttgacatttgtagaaataatgacagtgtcagcatgtttttgtctcttcatctttttccttcattccttttgctacatyggacttctggtatcaggcctgcctataccccaaagcctaggtccagaccagcacaggaaataggctattttcagtagccttatctctgctttggtttctg

SEQ ID NO: 264822 - DNA, 201 bp, Homo sapiens
acagggaggttccctgctatgttgcatttgagagcgctttaatttcaaagggtaccatctggccctcagtgcttgaactacttgtggctttaaatgcaggkttttgctcattaaagcaggtcactcatattttgaatcagaaaatgacatttaagttactccttttctactttacatatgtctcccttcagcttctggtca

SEQ ID NO: 264823 - DNA, 201 bp, Homo sapiens
tttttatttagtagctgctaacatttactgagtgcttactgtatactatgcattaatctaagaattttacatgtagtcagacatttcatacttataacaaytctgtaagatacatgtgaacagtattttacttttgaaggtattaaagcaagaaagttgagaagcagacatttaaactgaggtagtctggcttgagagcct

SEQ ID NO: 264824 - DNA, 201 bp, Homo sapiens
agtagatactctattaataagccacggaaagaaaagttgaatacactgaaatggtattcaataatattaatagcaattgctcaataaactatgactattaytatattctaagagctatgctaagttctctatatgcatcttattaatcatgaaaataacttgactgttttttctaagccttacttagataagcttttggta

SEQ ID NO: 264825 - DNA, 201 bp, Homo sapiens
tttccactggaaaaaagtgaaccactgctcctaccgagttgtaaaatagcccatataataaacctacatcgcattgaaagagtaccagtaatctctttggwttaattctaagtttcaaattttttttgattattaagagaatgaaactaaaatagtcctatttaatatgtaaaatgttttggtaaatatactttgctccct

SEQ ID NO: 264826 - DNA, 201 bp, Homo sapiens
aattgaaaatttagtgtacttcagaagacaaaaagcttcagcaaaacactggataaaaacctttcagaaatgataaaaatacattgtatattaatgaaagycactatattcataggctaaaaataaacatgaaattaatattttctataaattcacatagtgattgctttttattagaggtgagtgataaacttatgaaca

SEQ ID NO: 264827 - DNA, 201 bp, Homo sapiens
tataacagtgattatgttttatagaatgttagcttaaacataatttcaaggcccagagtaacttcaaaatttggattaaaattaaattgagctaattaatmagtattattttagatccctgaataatttctaagatagaacattataagaactaacattaagcaaatgttaattttttaatatttttggttcttattttat

SEQ ID NO: 264828 - DNA, 201 bp, Homo sapiens
gatgttctgttgggtttatctaactgtgtatatatggagatttttcttattcaaaaaccttattcaaaaacatctatatttttctggatcccagcattgtsattttttcctcagggttattgatatggtttggctatatccccacccaaatctcagcttgaattgtgtctcccaaaattcccatgtgttgctggagggacc

SEQ ID NO: 264829 - DNA, 201 bp, Homo sapiens
taatgcatatacagagtgatatacaacatacagacaaatgggctaataataatagtgcatgctattctgcaacttgctgattttatttaaaaaatagaccrccttcttttccgtgtacttctagagttataacaaatgtttaccaattgtatgtatgaatggcagccagcccaatattgatgactgtttagattgttgcca

SEQ ID NO: 264830 - DNA, 201 bp, Homo sapiens
aaatttctaacattgaaaggaaatttaaaaagtcaactccaaatctgctttagagtaaaatggctaaagtgcctaggagagatggaggcagggcagttctrtagtcttcaccacagtgattctttcaccttcttcaaaacatcattctagatgttttatgcttcacctttttatcagtgtatatgagtgaaaactcatcat

SEQ ID NO: 264831 - DNA, 201 bp, Homo sapiens
ctctgagaatggggaggggcacagggcctggggatgagacggagccccagggtgtaagagtagagaagaggttggaatgggatttaaggacgaagggtgtyctggtgccctcctgggtggaggaggcagattctagccattgtatttggggtcaggggtgttggtgagtgctgggcaccactgttcgagggacattgatgg

SEQ ID NO: 264832 - DNA, 201 bp, Homo sapiens
atttgacagctcattccatagctcttctgtagtggggaggtgattaagaaatacaaaacccttgaaacaaacctaaggctttccagctcctctctccaggragcctgtgggagattttaaagccagttttaagtataaagtatattgttgaatttttatggtctatatttttaaattttagatctgatcatggggctgggg

SEQ ID NO: 264833 - DNA, 201 bp, Homo sapiens
tttccgtctttttctttctttcctccctcctttcctccctccctctctctctctttctttctttctttctttgagacagagtcttgctctgtcacccaggytagagtgcaatggtgcaatctcggctccctgcaacctccacctcccggcttcaagcagttctcctgcctcagccttccgagtagctgggattacaggcac

SEQ ID NO: 264834 - DNA, 201 bp, Homo sapiens
ttatattttattcacctaacactggtaaaaatgtcactgccataagagaatctctgaatactattcccaaagcactaaactgcacttggaactggaagggrcattaatatcacttaccacccactgccagttgtttttccagatgaaaaaactggaggcacattgtgccgatgtgctgaagtccacatagcctgtttgtca

SEQ ID NO: 264835 - DNA, 201 bp, Homo sapiens
ttttccagatgaaaaaactggaggcacattgtgccgatgtgctgaagtccacatagcctgtttgtcatgctgtcatttctcccacaggacagctcttcaartgataacacagacggtgtctgtcaccacagtctgccctctattcttggttctgcatctgcagattcaaccaatccataaaaaatacttggtggaaaagca

SEQ ID NO: 264836 - DNA, 201 bp, Homo sapiens
attgtgccgatgtgctgaagtccacatagcctgtttgtcatgctgtcatttctcccacaggacagctcttcaagtgataacacagacggtgtctgtcaccrcagtctgccctctattcttggttctgcatctgcagattcaaccaatccataaaaaatacttggtggaaaagcagtaaaaaataacaataaatataaaaca

SEQ ID NO: 264837 - DNA, 201 bp, Homo sapiens
tggagccgaacatcccacggagcttaggaaaccctctcatgaggaagaattgcctgccttcagtgcactgagtccatttttgtgctcatgttaatggtctrtcttgggctgtgattttctttgggtctctcagcaaaactgtctgaggcatcacatgatgttatttgccatctaaaaggacttcaccgaacctttgacagt

SEQ ID NO: 264838 - DNA, 201 bp, Homo sapiens
ggaggttaatagattgacccctagcatcctaagccaattaaaggagtctgtggggatttttcataggtcttcctaatgcttcaggatgttcttttaacccrtgtgctatcctgcttccatgaggaatgtggtgaatattaaaagacatatatagtaaatgccactggtgccctgaataaggaagatcaggcttttgcagta

SEQ ID NO: 264839 - DNA, 201 bp, Homo sapiens
atcgaaggactgtgtccccaggaggagcatttctgagaggtgtgcagatttgaaaagctaacagctggatcctggcccccataattccttcattaaaaacrgggctggcaggggggacaaaatattgtcactccacagaaaagcatgttgaccatgtgtgaggaaaacggttcacctgctctacacttgttccttgcaagc

SEQ ID NO: 264840 - DNA, 201 bp, Homo sapiens
agttttggggcgcagtgaaagttttttatggaagaatgacagtcctaaggtttccaaaagattcaactggaatgcgtgttttagatgacttggccagaggraaactgaagatagagaagctaacatgaagaccattgctttagacttgggaaaaacaatagatgcatggatgggaggcggaagggtataaaatgttagagt

SEQ ID NO: 264841 - DNA, 201 bp, Homo sapiens
attcaaccaatccataaaaaatacttggtggaaaagcagtaaaaaataacaataaatataaaacataatgcaaattttaaaataaatatgaaaagtattarcacagctcttaccttgtcataggtattacaagtcatctagagatgatttaaagtatacagtaggatgtgtgtaggctatatgcaaatactctgtcatttt

SEQ ID NO: 264842 - DNA, 201 bp, Homo sapiens
gcttcataaagttgaaggggtagtaataaacatagggataatattattgtcttacagttcagtgtggagaaaaagaaataatatggaactccttacatagrggaattacattatcattagaacaaattgcatgctgaaaaggaacttcacatttcagcatttcttttatttttttaaaaaatgaaactatgaaagaaacta

SEQ ID NO: 264843 - DNA, 201 bp, Homo sapiens
cagactgaccttcacacttgacatccactgagagggaaaaacagggaaggcaaattatggcaggggagggtctgctggccaaaaatactcagctctgtttsagaaatgttgagtttgattcttggaagttgtccatatatctggatctcaggaaagaacatagctagaaatatagattttggtagtggtgagcatacgaaa

SEQ ID NO: 264844 - DNA, 201 bp, Homo sapiens
tccatgggcatcctggaaccaaccctcctcagatcctcagggacaactctatattatgttatataactaaattaaaacatatgacttgtgtcatttcttcyctggtaaatcttttcaatgaaccaactgaatcaaaccttttagtatataaactgaactgaaataaatcaaaattcagaatcctaaagccagctcactggg

SEQ ID NO: 264845 - DNA, 201 bp, Homo sapiens
gaaataatatggaactccttacatagaggaattacattatcattagaacaaattgcatgctgaaaaggaacttcacatttcagcatttcttttattttttwaaaaaatgaaactatgaaagaaactatataaaggaatctgagaatgtcatctgccttcgttatattgtaggattgacagttgagggcttttagagatgct

SEQ ID NO: 264846 - DNA, 201 bp, Homo sapiens
tcatttcttccctggtaaatcttttcaatgaaccaactgaatcaaaccttttagtatataaactgaactgaaataaatcaaaattcagaatcctaaagccmgctcactggggcctggctccacttttcctcagttctgtctccccacctctgccccaactcagtgtggcccagccttgacatgatgccaggggcattctcc

SEQ ID NO: 264847 - DNA, 201 bp, Homo sapiens
ccatagtatcctaacaacacattctctgcttttttcccccatcctatgttaggttcaatactatgattctgagctgcatctttttcttttcctcatagaaygtgtcaaaatcacatatttatttttgtcatcaactcttcagtatatgtcttagtccattttctgttgctataatagaataccacagtctggataatctgt

SEQ ID NO: 264848 - DNA, 201 bp, Homo sapiens
tatttatctgaggtttccagtgaggagcgaatttcctcttaatttctgagaaagctgataagctatctatggaatgccttcagcacctccagcatttgtcstacaggaaccatcagtccaatgaatttacatcacattggggagacaggtgtctgaacccacgatgttactttgaaatattttttatgagatagaaagaag

SEQ ID NO: 264849 - DNA, 201 bp, Homo sapiens
ctaggcattaggtagagtcaattttcatgttttcgcctcattaaagtgaagatttttaataagctttgaatagctgtttgaagatatttataacttcaatmagctcacatatttatcagacattaatttcaaaccatttaacgatctttcagcaaagtgagatgagtgatcaatggactaagaactttttcccctaaattt

SEQ ID NO: 264850 - DNA, 201 bp, Homo sapiens
cgtgtggttgaccaactgtaacatcggggacccacttatgctttgcatctaaaatgtagtgctccagatttctattttccacaaaatatactctaagaagycaattccacagcccttatgatgaatttctcttttgaattttgaatttagtgattttgtggtttgtgcatttcagttgaaacacgtctctctaaagcatac

SEQ ID NO: 264851 - DNA, 201 bp, Homo sapiens
ctcagagttatgggagaaggtacatttatacactttaattcagagacctttaattcagagattaaatcaatagcgtgtggtcttggaggcattagatgactttttttttttttttttgaaacggcgtctggctctgttgccaggctggagtgcagtgacgccatctctgctcactgcaacctccgcctcccaggttcaagt

SEQ ID NO: 264852 - DNA, 201 bp, Homo sapiens
caagacaacaggcctgtctctcccaagaacaccaggagtttcgggtaccactaacccagggcatctcagatgagtatggttttttataaaatttgatcagmaaatggctttgcactgtgtaaaactcttatagcagctcagagcaagatggcttgggccctggggattgcagcaacaaccttaattttttgccatgatttt

SEQ ID NO: 264853 - DNA, 201 bp, Homo sapiens
ttcaggatgaaacttcctgtttagccagattttgtaaacatgatcaaaccatcgagtggccctttctgttattcttatgggtaggtgatgagttgctttgsttggttttaaggaatcccatatcattctgaggattcaacgttctgcccatacctgaggctgctgccatcaagccccttggcgtgccgttgtcatgagcac

SEQ ID NO: 264854 - DNA, 201 bp, Homo sapiens
acggccttatgtgattccactgaacattctggcaatctaaaaatatccagcaagcacaccactttcctttgaactgagaggtgctgtcagtaggaaagctrcttgtctatgtcctgagaaaggggcactctggaaagactgggtccttccgcattttatgtattagtgtcagcacactgcgtttttgtgtgccatttggta

SEQ ID NO: 264855 - DNA, 201 bp, Homo sapiens
tggtcggctttgacccctctcacatcctattagtgatgattccgcattcagaatcccatctatgtggataattttggtcactgctgacctaagccaaccamaaactagagaatgtcattatcaaaaatacaaatcagcatattttctagctcaagtgtagatttttcccatatgtcaacttgtaacaatagttgaacacaa

SEQ ID NO: 264856 - DNA, 201 bp, Homo sapiens
ttagtggagtagccttgtattgcttacagtgtagccttgtattccccggagcccttggctagacaccccattaaatcccaacactctgatgatttctcttaaaaaaaataacaaaataggccgggcgcagtggctcacacctgtaatccaagcactttgggagacggaggcgggcagatcacctgaggtcaggagttcaaa

SEQ ID NO: 264857 - DNA, 201 bp, Homo sapiens
gcgacagggggttccggctgaccagttgcgtgtgattttcgcagggaaggagctgaggaatgactggactgtgcaggtgagtctcccttggcggccgttcytgggatgccgccagctccattgctcatgccgcctgcgctgccaatctgacattcatgcctgagatctaatagaataaatagtgcctggggattccttgaa

SEQ ID NO: 264858 - DNA, 201 bp, Homo sapiens
atcaacaaagtaaatttaggaataagtaatttgaaatagtgacttttaaagaagttctgaaactaaatggtaaaaagcaagtttctcattcatctaatgayccaaatttacaaggatttggtaaaattattgttttaattaagatataattttaatttaattgtattttatgatagtcagagttaatagggaaaagagaat

SEQ ID NO: 264859 - DNA, 201 bp, Homo sapiens
ctatttttagccaaacatttggtgctatttatttcatgttgggcttaaagcaaaaatttatgtcactaagattttttttttttctactgacttgttgcaaragaaaaaacaaatgtattgtccaataataagattaagagtatatgaaaattagagcaatttaacattaacttttttgtgggcaaattatattactatgta

SEQ ID NO: 264860 - DNA, 201 bp, Homo sapiens
aggtacaggtgaagagagccagcaaaacccagggcccttgataaaacttaaattgctggagttgaagactttgtgaaaatttaatgcattaaaatctgtascaggaatcacttctgcatagaaattgatcctgcaaattactttccttcctccataaaagcactaaaatgatgtataacttaacagatacagatgatgcat

SEQ ID NO: 264861 - DNA, 201 bp, Homo sapiens
tctgcatagaaattgatcctgcaaattactttccttcctccataaaagcactaaaatgatgtataacttaacagatacagatgatgcataattatagattwatatgtaaggtatacgattatacacatacatgtgtatgtgcgtacatatgcacatatatgcatgcatgtatatatatgtactcagcactttgctcgttgc

SEQ ID NO: 264862 - DNA, 201 bp, Homo sapiens
aggcgaagctgcgcccctctaggtcccagtagacattgctaactggggtagacccggagggggttagcaacacaagaagcttaggcgtacctgcttgcccrcctcccggccctgaatccttactatagagagtcatctgttcaccaagtacaaggaccccctccccttggttttgccaaccttccatctctcccagccctt

SEQ ID NO: 264863 - DNA, 201 bp, Homo sapiens
taatttatttattaatttttattttttatgtaggtagagacagggtttctccatgttgcccgggctggtctcaaactcctgggctcaagtgatccaccttwcttggcctctcaaagtgctgggatcacaggtgtgagccaccatgccgaggtgtgtaactaaacaggcatatggttggcaactgagaaacagaaaagaagt

SEQ ID NO: 264864 - DNA, 201 bp, Homo sapiens
ctcccggccctgaatccttactatagagagtcatctgttcaccaagtacaaggaccccctccccttggttttgccaaccttccatctctcccagcccttcraaatgtttcccagctgccccctggcggcgggttggtttgttttgtttcgctttgtctggtcttttcatgcgttgtggaatacacatgacaggcaagggaa

SEQ ID NO: 264865 - DNA, 201 bp, Homo sapiens
tttgactaacaggtaactgtagcaaagcagctatcccctcttgctctgcttaaatgtttgaaaggagactttcaattctcaacagctaaagcataagggarattctcttagaggtttggaaccccaaagaagcagtggggtatggctctccatacactccccgcgtcttcccaagtgccccttctcactgttgtctcacta

SEQ ID NO: 264866 - DNA, 201 bp, Homo sapiens
aggtagagacagggtttctccatgttgcccgggctggtctcaaactcctgggctcaagtgatccacctttcttggcctctcaaagtgctgggatcacaggygtgagccaccatgccgaggtgtgtaactaaacaggcatatggttggcaactgagaaacagaaaagaagtaagaagatggatgttctttaattcgctgcca

SEQ ID NO: 264867 - DNA, 201 bp, Homo sapiens
atgccgaggtgtgtaactaaacaggcatatggttggcaactgagaaacagaaaagaagtaagaagatggatgttctttaattcgctgccacggaggaacaygagtggaggcccatgtgcattatctaccaccccatttgtggcaccaggtcctcacatagggagcttcactgttaggttcccagcactgtctcaatgtcac

SEQ ID NO: 264868 - DNA, 201 bp, Homo sapiens
aatctccaaagagaggaaggaggcattgatgacaatttctccttggcatggtttttaaaactccattccaagcaataggttatattataggacaggggccwtgttttttaaattttcagtcttcaaagaccagcacataatacatgctcaataaatgcccgttgactcaacaagcatttgtattctgccagtgctttacag

SEQ ID NO: 264869 - DNA, 201 bp, Homo sapiens
gcattatctaccaccccatttgtggcaccaggtcctcacatagggagcttcactgttaggttcccagcactgtctcaatgtcaccccacaaagtagggtgytttctactcctggaatgcttattttgtgtccactgaactgataccttagtctcatgaatcttttaatgaatggtttccatattttgctatgcatgcaatt

SEQ ID NO: 264870 - DNA, 201 bp, Homo sapiens
atggggtttcaccatgttggccaagctagtcttgaactcctgacctcatgatccacccaccttgccctcccaaagtgctggtatcacaggtgtgagccacygcccggcctgcccctcatttttatttcagttttgctcctgtattcagtgatgcccatcaaaagcttcatcctcaactccaaagccaattagatagaataa

SEQ ID NO: 264871 - DNA, 201 bp, Homo sapiens
aattataattatatttgtggataagatctttgctagggtagtcacatgacagcttcagtattatacatacatacatagatatatagatatagatatatacrtagatatatagatacatacatatagatatatacatatatagacatatacatagatatatatgtctgtgcatatctagattctagatatagacatatatat

SEQ ID NO: 264872 - DNA, 201 bp, Homo sapiens
ttctgggttgatttttctccgttcttgttgacttgtctttttttgtatgtgtctgtttgagcattaggcttggggataacagctggggggattctggactyagacccagccaattagcccctacttataaaataagagtttgcctctttagcccagggtctccatctgcggatagtcccccacagctgggtctctgggaag

SEQ ID NO: 264873 - DNA, 201 bp, Homo sapiens
caaaataatctgttcttagcttcatcatattacagtcctaattgaatacacaccaggctgcaacaatcatgctttgtgtctaattgactggaaaatactgrtcacttgttcttccagtcgggctgttagagacatcagacatttgctcagctttgatcccacctggaatcctccccttgccgtctgccttcccagggtctc

SEQ ID NO: 264874 - DNA, 201 bp, Homo sapiens
ttagaagtacattcactggatggatggttatgtaattggaagctgtttacaatatagcataaccttggttactccacaggagttaagtttatggctcgttmaaagcatggaacaggcagtttgattcagttgggtgtaataacctattggacaaggtttggagtgaagagtgttcatgtaataactgtcttcctttagaat

SEQ ID NO: 264875 - DNA, 201 bp, Homo sapiens
gaatagttctacttgttggtaaacttagaatttcactttttctccttaacattcagttacaccaagtcctatataaacatttttttattttagttcttatrtaagtaatttttctaatgtttaattttactgatttcaaatatgatatcccaacaatttaaagggtgtctggttggtaggaaagatgttctagatattgaa

SEQ ID NO: 264876 - DNA, 201 bp, Homo sapiens
gaggcagcagaatcatttgaacccaggaggtggaggttgcagtgagcggagatttcaccattgcactccagcctgggcaacaggagcgaaacaacgtctcaaaaaaaaaaataacaaaatacatttaaatatatacatatatacatattctccaaaaagagatagtcataagacaatgtgagaacaacaaaacatgttttg

SEQ ID NO: 264877 - DNA, 201 bp, Homo sapiens
acaggtgtcacaaatgagtttctcttaaagcaggaaagataacacatatgcagttccttaagttattctagcttcaatgtatatcaatgtgtctcctaggygctaattcggcttttttttttttttttttttgacacagagtcttgctctgtcgcccaggctggagtgcagtggcgcgatctcggctcactgcaagctctg

SEQ ID NO: 264878 - DNA, 201 bp, Homo sapiens
tgtttttaaaggagatttaaggccaatccaggccttcagtggtcttttccatgtgtacaaactcccacagggtcatattcccatctctttagagatgatcrtgatgattacaataacaaagtaataatggtggtgatcatagaaaacacacggttagcattcagggtgcacctggctctgtgctaagccgtttgtgtgttg

SEQ ID NO: 264879 - DNA, 201 bp, Homo sapiens
aagcttagggaagaatttatagttggtagttaaaagggcctttcagataccaattattttatatactcagtaatctttttggcttttatacactattactrtatgactaaggtggtaaatcaatgtgtgcaccgtaagagtaagaacttgtttgattcgaaaagtatggatcttttatttcagcaaacacctttagcacct

SEQ ID NO: 264880 - DNA, 201 bp, Homo sapiens
gtttgcaactgcttgtttggccctcatctccctatctaccaagccttgattgctcctgtatttaaaagcacattaaacacaccatggcccgggggcagtgsctcatggctgtaatctcagcactttgggaggctgaggcgggtggatcacttgaggtcaggagttcaacaccagcctggccaacatggtgaaaccccatct

SEQ ID NO: 264881 - DNA, 201 bp, Homo sapiens
ccagcccgcacagcaggaggcacacatctcccatagcaagcattcagtgaggggtcatgcttattacagaaatggactctgttgcttctctgtgccatgtrcaacatggcctctggcttttattgtttttgaaagcgaagtgattcatcgtgtggcttaatctaaggtgcttattttggacccactgttcacatctgtgct

SEQ ID NO: 264882 - DNA, 201 bp, Homo sapiens
gacagagtgggattccatctcaaaaacaaaccaaaagaaaaaaaaaaaaaaccacaagcaaacaaacaaacaaaaagctttggtcttttacactctacaarataagtagcctttgtcaaagaagaaagaaagatctgggcagcatgttttcaatattcaggagcactgttctgggagacagaggctcagcgtgtaacattt

SEQ ID NO: 264883 - DNA, 201 bp, Homo sapiens
tgaagagagtggtccactcacatagtgagacggaaagatgggcagacacggggccatgcgctgagtgggatgttaggacggtcaagtgaatcggttggctkcatgacctttccagagagtgctgactgtggctccctagagggagatttctagtgagataatgaagcctccgtgtttgacctgcccagtttagcaactttt

SEQ ID NO: 264884 - DNA, 201 bp, Homo sapiens
tatacaatatagaatgatactgttggctatactcattaacatatgcatgtacttcccctcaaaagttccctttgttgtaagttatcagagtgaggccttcytcggggctcacggtgtgcccggcagtgttctagggagagctcactcccggccttgcagggacttacgcaagtgggggcggaggacaaagggatggacgtg

SEQ ID NO: 264885 - DNA, 201 bp, Homo sapiens
aagttatcagagtgaggccttcctcggggctcacggtgtgcccggcagtgttctagggagagctcactcccggccttgcagggacttacgcaagtgggggyggaggacaaagggatggacgtgaattatatgttgggttggagggtggtgatcattgtgagataagatagaaaccaagtccaggcgcagtggctcgtgcct

SEQ ID NO: 264886 - DNA, 201 bp, Homo sapiens
gggatctcagctcacttcagcgtccgtctcctgggttcaagcgattctcctgcctcagcctcccgagcagctgggactacaggggtccggccaccaagccrgctaattttttgtatttttaatagagaaggggtttcatcgtgttagccaggatggtctggatctcctgaccttgtgatccgcctgcctcggcctcccaaa

SEQ ID NO: 264887 - DNA, 201 bp, Homo sapiens
gagagctcactcccggccttgcagggacttacgcaagtgggggcggaggacaaagggatggacgtgaattatatgttgggttggagggtggtgatcattgygagataagatagaaaccaagtccaggcgcagtggctcgtgcctgtaatcccagcactttgggaggccgaggcaggcggatcacaaggtcaggagatcgag

SEQ ID NO: 264888 - DNA, 201 bp, Homo sapiens
gtttcaaaatgttcctgaagactgagttttaaaatttgcctctaacaagcttttaaagagtttcttgtctcaatttagatgcagcattattagccacttcytctgctttttcttctccagcaggtagatcaatctacaacagcttttatgtgtattgcaaaggcccctgtcaaagagtgcagccgggaaaactcagggtac

SEQ ID NO: 264889 - DNA, 201 bp, Homo sapiens
ggcaagaggtgagagggaaactcagtatggctgtattgttttctttttaatcaaaagaaatcatcaatctggaattttacatgggatttctcatttaatartatgctttgtgtgggaaaaaaatagaaaaacagaaagaaaaccaacctgtagcattggcctaaacataacaagccaaaatagagtgttgtggggactaaa

SEQ ID NO: 264890 - DNA, 201 bp, Homo sapiens
acacagacactatccccagggagactttgccacaagatactttgatcctcggattccccgtccggtacaaggcagccaccttcggccttggtgtcaactcygttcagtttccttgccctgcctctgagatttgtctcatcgagtgtcttgttactcttatgcttctgttcccacacttcaattttgagggctttgaatcag

SEQ ID NO: 264891 - DNA, 201 bp, Homo sapiens
tgaggctctgtgatgatgtcatgccaccctgctccccaggcccagcatcctgggagggatgttcaatccctgtgttttgtagtctcggctccacctctatytccaaagcccagtcatgtgaccacctgggatttttctcagttcccagagatgctccacctttgatatttaaattcatgctgtttcttccccaagcactgt

SEQ ID NO: 264892 - DNA, 201 bp, Homo sapiens
ctgaatcagctgcaaagcttgggctcactgcctgttccacacctgtctatggcaaagctgcctgcccaagtgtcagccgttcattacagttgtaaaacccraacttgattcaactaccacatccggtttctaaatgtgttcatcaatattgcaaacggcccattcagaattatcactggaggacgtgggaccgagggaggc

SEQ ID NO: 264893 - DNA, 201 bp, Homo sapiens
tataggtgagcagcatgtggtttatgtgaacttcagcaagatttttatacctaaggaggaaaactggaacctggttagccacctgggttatttttgaaagyataattgtattttttctcatttggaaaaatcagtttgcaacgagatccactcatatcatgagtctaaatggtaatcttctaaagtttttattggtgattt

SEQ ID NO: 264894 - DNA, 201 bp, Homo sapiens
tatggcaaagctgcctgcccaagtgtcagccgttcattacagttgtaaaacccgaacttgattcaactaccacatccggtttctaaatgtgttcatcaatrttgcaaacggcccattcagaattatcactggaggacgtgggaccgagggaggccacctacatgggagcagtgctggcccagaggcatatctgtctggatc

SEQ ID NO: 264895 - DNA, 201 bp, Homo sapiens
aatggggtccaggcctcaggaaatgcaggggtgaacctttgtgtacgtagttgatatagacgaggacaataacatccttaggttcaaagggacaaagtgcrtatgcatagctcccattcgaggatccataaaattaatcatgggcatccaggtgctatttttaatatttcaaaagcacttaaaggaaagtatatcttttcc

SEQ ID NO: 264896 - DNA, 201 bp, Homo sapiens
aaatggatagttaattttgtcctgatgttaggcatggggaactgatgtctgaagttttcacctgacctcataggtaagttgagaaccaacccggactcaarttttcttcatctccatatcagaatatcctctttcttgcatggtgaccttgatcagagtttggactagactataatcctttagaaatatgaatgcttactg

SEQ ID NO: 264897 - DNA, 201 bp, Homo sapiens
aacttaaaattttgatgatttattttttatacatgtattattcttgatagtttacatttagaatttgcatactgtatacaatatatatgtaaaggggtctmcttaaagacggttgatcgaaaccatttcagggcatcagtatcagccagtagaaggaatttaaaattgtaagtaaatgctgctactgccattttcttgaga

SEQ ID NO: 264898 - DNA, 201 bp, Homo sapiens
tactgctgaaacgggagagttccctgacccaccccggttgcaggacatgcaacaggcatatggctcatcagttcagccaccaccactgctcaaactccttrtgggagggggagcatgcagatgagcaggtgcaggagccaggacgagcacttctgggctctggccccacagtagtgtctagggatgggtgcctgtgactcc

SEQ ID NO: 264899 - DNA, 201 bp, Homo sapiens
tagacttttgttaagctgagttatagagtgaatatttatagttggcttttaaaaaacatattcatacatataaaaatccatgagctctactcttctatgakctctgaagcagaaaccacatatacccaagtggatgaatcaggtgctgccctagctgtccctctcagaggcccccgaagtcacgagaaaaaccccagggct

SEQ ID NO: 264900 - DNA, 201 bp, Homo sapiens
tgtgggagctggtggcacggggagcctgtggtgcctgtgctttgattactcagggacacattttaccctttgctatgttaccttaaagacaataatgtcaygttacttcctttccttcaatattaggtccatttcagtgacttttcacgtttataaaagctaagcctctcaccactaagatagaggacatgaaatgtgaat

SEQ ID NO: 264901 - DNA, 201 bp, Homo sapiens
tagaatcctggccccctgttcttgcttcatcagtatcatttcctgaagaccctctttccgtctcttgactgccttcgcccttccacgttagtgacactgayggctgcagtccctcaccatggcactagacagttgcgcattcctagcccaaggatcgggttatttctgcatttctggcccctgatagtgaaactaccagac

SEQ ID NO: 264902 - DNA, 201 bp, Homo sapiens
tctgaaagaatgcaacatatcagagggcaacacatcagactgcaacatatcagaaagaatgcaacacatcagaatgcaacacagaaagaatgcaacacatyagaatgcaacacatcagaaagaatgcaacacatcagaaagaatccaacacatcagaatgcaacacatcagaaagaatgcaacacatcagagtgcaacata

SEQ ID NO: 264903 - DNA, 201 bp, Homo sapiens
tattctgtatttgattattctcaaaatggtcaataatttcttagcagattttaatgaatgatcaatttgttgaaagttatgaaatacaggtgaattcatcktcttaagaacgttttcttctttaatatacttgtacgtctattgttataaatataacctaaacttcaaaattccatatgggaactcttggcttataccgat

SEQ ID NO: 264904 - DNA, 201 bp, Homo sapiens
atattttaaaacatgttacttattgcattacttccaaagtacatggttttgttgtatgtatactataaggagtgactactattatagtgagaacctgcttytacaaaaaatagaaaaaaaaaaattagctgggcgtggtagcatgtgcctgtaggcccaacaacttgggagaccgaggcaggtggatccattgagcctgga

SEQ ID NO: 264905 - DNA, 201 bp, Homo sapiens
ggtggcgtggctgacgggccatccacgcagccccagcacgggggggacccagagcccaccaaagagggccctgaacaggtgcgtccataaaatccatttaygttttctggtgtgatgggactgcataaacaactggccttagaagcctttttaaattttattttttattactttttattattttatcaagaagtaaataat

SEQ ID NO: 264906 - DNA, 201 bp, Homo sapiens
atgaaggacgcagataacaccggaacctcttgacctaaactcttgtccttcctgttgttttgtttccttcgacaacatgaaaaacatttaataatgacttygattactttatgtttaatttggagcagggtattcagccgtaagtttttgtttcctttatttggaaacctatgattttgaagaaggggtggcaggagagtg

SEQ ID NO: 264907 - DNA, 201 bp, Homo sapiens
gcagcacttcaggcttgtgattattcttatactttagccttaattatttttttcgactttccagtggaatccaatggttttctctgttggtttgttgtgcygtaatcctagtaagaccaggaagcagaaccacggaaaactggagcatagtgcaaacggggaggcaaaactggagttacacgagaaagactgcagagccac

SEQ ID NO: 264908 - DNA, 201 bp, Homo sapiens
cagcacttcaggcttgtgattattcttatactttagccttaattatttttttcgactttccagtggaatccaatggttttctctgttggtttgttgtgccrtaatcctagtaagaccaggaagcagaaccacggaaaactggagcatagtgcaaacggggaggcaaaactggagttacacgagaaagactgcagagccacg

SEQ ID NO: 264909 - DNA, 201 bp, Homo sapiens
tgccacttttgtctttattagatgaggctttctttgttaagattagtcagaacagaagaccaaggcagtcaggagcacccccccacccttattttaagatkacagttttgtgtataagagttttgaaataaatgcttcatttaggagacagaaactcgtattgttaaaaagtggagaaaattggtttactttaagtttctc

SEQ ID NO: 264910 - DNA, 201 bp, Homo sapiens
tcctagtaagaccaggaagcagaaccacggaaaactggagcatagtgcaaacggggaggcaaaactggagttacacgagaaagactgcagagccacggacycagtgaagtgggttagaacagcgggctgggtgcagtggcctatgcctataatcccagcactttgggaggccaaggctggaggatcgcttgaggccaggag

SEQ ID NO: 264911 - DNA, 201 bp, Homo sapiens
ggggattatgggaactaataattgggtggggacacagccaaaccatatcagcggggcaagcccaaatttgtaaatgttggaagtaatcaagagaaagagakgacagtggatgttttttacttcactagactctgcccttttgtgaagcctcctattatgcaatcagtaatttttgcttattgaatattggatttgattgat

SEQ ID NO: 264912 - DNA, 201 bp, Homo sapiens
tgaggctggagatggtgtacattctataaatgtatgtgtagactaaatttactttggctgatttaattactccctgaagttttaaaatatattcagtcagygtatattgaataactactctgtgcaaaaaataaagccatataaacttcaaggagtgtgcggtctaatgaagaaaatgaaacttgtaatcaagtgattaca

SEQ ID NO: 264913 - DNA, 201 bp, Homo sapiens
tcagcaggctaaggcaggaggatggcttgaacgcaggagttggattagcaagggtcatcaggcagtattacatgagcttctcttatcatgataggagaacraaagacttatataagagggacaccctatgaaagatacaggctaaatagtattatattcaattcattttattcctgatttttaaatgtgcacacagagatg

SEQ ID NO: 264914 - DNA, 201 bp, Homo sapiens
aatttgtaaatgttggaagtaatcaagagaaagagatgacagtggatgttttttacttcactagactctgcccttttgtgaagcctcctattatgcaatcrgtaatttttgcttattgaatattggatttgattgattaaaaggacaaataaagtacaagatcctggatatgtacattaattagcaaaagttgatacagag

SEQ ID NO: 264915 - DNA, 201 bp, Homo sapiens
tcgtagacagaccagcccttggtgcgatgtcagaacacagatgtgtcttgaagcaggacccccaccctttgactctctcatggtgttctagtgtcttcacrgcacttattatggtgtaaagttatcctgtgctatggtttgaatgtgctcctcaaagttcaagtgtggaaatgcaccagtgttgggaggtgggtgggacct

SEQ ID NO: 264916 - DNA, 201 bp, Homo sapiens
tggcaagatccttaacctttcagaacctcttttcttattctcaacttctctcctacccctaaatctgagtgtgtctgtgcacttttctcttgggcagggakagttggaagctgacaagcaatgatggaataaataatcaaatgcacataaagcaatttgcttaggacctgattcccacttagtgattcctacttatgattc

SEQ ID NO: 264917 - DNA, 201 bp, Homo sapiens
acacgttcaggctctatctgtttgctgcttggtagtgtttacaatgttcaaaacctgagtggaggaggaagcctttccccttggcacatacataagctcawgaattgagccagtggcaactctagggaactaagtaggtggtgactgactttggcaggtgattcttttcttggttgttgttgacatatagtaaggggcata

SEQ ID NO: 264918 - DNA, 201 bp, Homo sapiens
atgttggccaggctgatctcgaactcctgacctcaggtgatccgcccgcctcggcctcccaaagtgttgggattacaggtgtgtgctcggcatatatctcyttttataagatagaaaatacatgctcagacaaagtattttgggcaagatcactgagttggtaaagtgtaaaacccgcatttgaagccagcctgttttcac

SEQ ID NO: 264919 - DNA, 201 bp, Homo sapiens
attgccttctaaccaaatctataagggaatagactttagagagccaatgaaataagtatgtattattttatgattgtttaaagacatttaaaatttctcgaaaaaaaaaaacaactctacggaaatggatcacatttgttagatccaccacaagagaagacaatcctgaaaatgtatacggtataaacaggactccatgtt

SEQ ID NO: 264920 - DNA, 201 bp, Homo sapiens
aggtgtgtgctcggcatatatctctttttataagatagaaaatacatgctcagacaaagtattttgggcaagatcactgagttggtaaagtgtaaaacccrcatttgaagccagcctgttttcactcatcccctttgtaatgcaccacattgcctctattgaagatggattttttgtctttttttgagacggagtctcact

SEQ ID NO: 264921 - DNA, 201 bp, Homo sapiens
aactgtctcccacgaaaccagtccctgatgccaaaaaggttgggggctgctgctttccactgtaattttctaaaattttcccaaatcaggagggaggatartaagtaatcatttcatgttgtgcaaaatattccctggtccagcaactttctaaaatggttctctctctctctttctctttctctgtccctgtccctgtcc

SEQ ID NO: 264922 - DNA, 201 bp, Homo sapiens
acattattgcatcttttctgctttattaaaggcgacttagaatgatgacttccagttcctgcttctggcaacagtattgagtgctggctactgagtttacwgtatccccccagggagagaaacagactttttcagtgacgtctacagtaggagaggtgtagctatttcctttgttccttgtacaaaacaccatactcagtt

SEQ ID NO: 264923 - DNA, 201 bp, Homo sapiens
atatgagaatatttcaaataccaaaaagcatttttcaaaaagtaaaatccccctaacctcacctcccatagatgctccatcatatatttcacttgggagcrttgtgggcactgtggagttccagggctaggactgggctgcagaaccaacttcctgggttccagcttgtgaccctgcacctgctggctcaaccttagtgtg

SEQ ID NO: 264924 - DNA, 201 bp, Homo sapiens
ttttttttttaccttgctcccaaacagaattgtgacctggatcagcagagcattgttcacattgtgcagagaccgtggagaaaaggtcaagaaatgaatgmaactggaggcgacgaccccagaaacgcggcgggaggctgtgagcgggagccccagagcttgactcgggtggacctcagcagctcagtcctcccaggagac

SEQ ID NO: 264925 - DNA, 201 bp, Homo sapiens
agaatgatgacttccagttcctgcttctggcaacagtattgagtgctggctactgagtttacagtatccccccagggagagaaacagactttttcagtgamgtctacagtaggagaggtgtagctatttcctttgttccttgtacaaaacaccatactcagttttgcttccgatacagataagaaatctttgttcaatcta

SEQ ID NO: 264926 - DNA, 201 bp, Homo sapiens
caacagtattgagtgctggctactgagtttacagtatccccccagggagagaaacagactttttcagtgacgtctacagtaggagaggtgtagctatttcytttgttccttgtacaaaacaccatactcagttttgcttccgatacagataagaaatctttgttcaatctagtctgtgttcagaatccagatttacactga

SEQ ID NO: 264927 - DNA, 201 bp, Homo sapiens
cctagcctcaaccaacttaaattctacataattttcttggctcttcagggatgtttattctttattagattattcatctaattccacccctctccaaatcwtaataggcccctctgctgatacttttataggactttaaggcttagtcatgtgccccaagctccccctgcttagcaggtaagagttgaatatttaattgag

SEQ ID NO: 264928 - DNA, 201 bp, Homo sapiens
tctgtcagtgaaggctacatggtggagagcactcacagcctggcttctcaaatagcctttatatggagaattcatggagatggggcagcacagatatttaytgagactggatgtcagacaacagcccttagactgcaggacatttgcattgcatcatcagaggagcaccagtcacttccttaggataaacagaagcagggg

SEQ ID NO: 264929 - DNA, 201 bp, Homo sapiens
ggttgcatacttatatcctatagctattcaggacatcttcataaagtacctgctatgtaccggaccagtgttgtaggtggtgctgggaatataatagatayaaaaggcaataaacaaaaatcaccttctcccctggctcacttttcttttctgttcccttttgtttctcaaactatgttttaaaaagttacgtgattcaag

SEQ ID NO: 264930 - DNA, 201 bp, Homo sapiens
gccaatgtcctgttttgatcttggaaagaaaggaacagcagaatggcaggtgccaggcattgagaaatggggaggtattcacctctgccccccagtttctycttccccatccccaagccattcaattccccagggtgtcttcaggggccaggaccccttatctcacccctaggctgtttctgtgggttcagcccctcaggg

SEQ ID NO: 264931 - DNA, 201 bp, Homo sapiens
gaatcggctctgtctaggcagcgagcaaggtgaaccccttgacggttacacaagagattctcctgcctcagcctcccgagtagctgggattacaggcatgyaccaccacccccagctaatttttgtatgtttagtagagatggggtttggccaggctgctctgaaactactgacctcaggtgatccacccacctcggtttc

SEQ ID NO: 264932 - DNA, 201 bp, Homo sapiens
gtccccaaatacaggcaagtccgtatcctcctagggctcatatatgaggaaaataaatgcaaaataagcaagtatacacataggcaaatgcaccatgtaakgtagcaatagccaagttataaattgtgattatgaagaagataatgggctggggtagagtcatgggccaggggcagttaggctgctggggtcaggtgcagc

SEQ ID NO: 264933 - DNA, 201 bp, Homo sapiens
ggcaggaaggagaagaatgagagctgagcgaagggggaagcccattgtaaaaccgtcagatctcgtgagaactcactcactatcacaagaatagcatgggrgaaatcatccccatgattcaattacctcccaccaggtctttcccatgacacatggggattatgggaactacaattcaagatgagatttgggtggggacac

SEQ ID NO: 264934 - DNA, 201 bp, Homo sapiens
ggcatgtaccaccacccccagctaatttttgtatgtttagtagagatggggtttggccaggctgctctgaaactactgacctcaggtgatccacccacctyggtttcccaaagtgctgggattacaggcgtgaaccaccacgcctggcctgtacattttttttttttttttttttttttggagatggagtcttgctctgtt

SEQ ID NO: 264935 - DNA, 201 bp, Homo sapiens
ttataaattgtgattatgaagaagataatgggctggggtagagtcatgggccaggggcagttaggctgctggggtcaggtgcagctgggacttgtaggatragaggtctgtgtttcacatcccctgtgtcaggcgtgtgcagccctacgaaagaaactaaaagaccctgattttttactgaacaccacagacctttctcag

SEQ ID NO: 264936 - DNA, 201 bp, Homo sapiens
aaaaatgctgctcaagtgaacttcctgctttttaattagtgcctgtgggaagaagcttttccggagcaatcccatttgtacacgggatcttaaaacattgrtgtgtgaattgctctcacattttccacaatcttctttcccagagcagatataaataaataactaatgaaagagttaggcaacagaccctcatccctcaga

SEQ ID NO: 264937 - DNA, 201 bp, Homo sapiens
tccttttattctacacatagaaagaaaggggagaaaagaactccagatagatggtctttctttatctcttaccttacatttgtaaacctagcttgatttcrtgatgttaaagtattgcctttgaccatgctgtgtgaatcccgacgagaaagggaatggattgtaccaaagggagtgaacgatgcccacactctgctggga

SEQ ID NO: 264938 - DNA, 201 bp, Homo sapiens
atttgacaatgcgaaaatggaattctacattttaaatttcctagaacatcactgtagatccactcatcagcttggctcctcatttctgacacagttggacrtatgcatgctattccctatattatcatctttgttgggttcctgtaaaagcagaaccaaagactctgttttaggtgcaggtggttcatttgggagtaatct

SEQ ID NO: 264939 - DNA, 201 bp, Homo sapiens
cgagcgtggtgtcactggcctcttggccagtcctctgaagtgactggtcttccttaatgccagcccagtcctctctgtctgtatggaatttgtatgcacaytctgtgttccttacacattcacatagcctagtcagcctaccagtctgcagatttggatttgaatattagttcaaccaagttactcggagcagaaatacac

SEQ ID NO: 264940 - DNA, 201 bp, Homo sapiens
tctaggatgggtaaagtaatcaggagtaacaaaattcccttattcacacaagggtgcggtctgtgttctttggaggcaaatcctgttgtcactgcctcctycagtgggtgtctggagctccagtgggcatgaagttggggcaaatgagggagacagaatctagtctcccaactaagaaaacactatgatatctgctaagta

SEQ ID NO: 264941 - DNA, 201 bp, Homo sapiens
taacttacttttctttaaattttaggatgcgagtctctgtcatttgaattgagaacatatattccattaaacatgctgctaatagcgatccctcatgcatkacttggacttcataagacgctttccagtgcttttctcactgcattctcacagcaaccctaagtggtagatgtatttctgctcccagggaggcagactgtg

SEQ ID NO: 264942 - DNA, 201 bp, Homo sapiens
tcataagacgctttccagtgcttttctcactgcattctcacagcaaccctaagtggtagatgtatttctgctcccagggaggcagactgtgttcttcattstgcagacgaggaaactgagactggagatttaaatattcacccaaggaaatggctggtaatggtgggtctcggactttaacccggaacttctcacttcaga

SEQ ID NO: 264943 - DNA, 201 bp, Homo sapiens
acctaaaacttaatgtattttttgattaatgcaataattctttaaagcaaactcaaaaattggctttaaattggttttaaaatattgaacaagctttacgwtgaaactgctgggagtttgggaaagcagtgacagaagatcaatccatcacagactaacgagagtccagtcccgtttgctttccttgtttttccctgcttg

SEQ ID NO: 264944 - DNA, 201 bp, Homo sapiens
aggagtaaacaggactgactgtgacctcactgctaatgacatgtaccttccttttactttctcaaaaccgaagattcccttattggcatgaggactgtttsaaaagtacttacatttcccacctgcattgtgattgatgtgttgaatgccctgacccaggcagctacagaaacataatttaattgaagtcggttaaaaatt

SEQ ID NO: 264945 - DNA, 201 bp, Homo sapiens
gcacttcatcctttttcattgctgagtaatattccaatgtatggatacaacaaacacatgcatatatcattggttaattgatgagcatttgggtggtttcyaccttttggctattaataataatgctgatagggacattcatgtgcaagtttttatttggacatatttttcatttctatcaagtatatagcctaggagtag

SEQ ID NO: 264946 - DNA, 201 bp, Homo sapiens
attttgaaccctaattgtaggatttttgataatgggatataacactatgatatttcttaacactttttattccctgaatctggcatactttttctgccttycctcccttgtagcaaaagagacctaattttttttttttttttttttttgaggtggagtctcactctgttgcccaggctggagtgcggtggcgcgatcttg

SEQ ID NO: 264947 - DNA, 201 bp, Homo sapiens
aaatatcttcaaatcattgattgactagatttttggttttggttttgaattatcacatagagtttctaaaggaaaagatgctagaagctatacagttttgrtacatatggatctctgaaaggcctgttttatatcttttgtatttgaaaaagatgctcagaatactgatgaaaaagcaaagcttttagtcatttagaagga

SEQ ID NO: 264948 - DNA, 201 bp, Homo sapiens
aattctacattttaaatttcctagaacatcactgtagatccactcatcagcttggctcctcatttctgacacagttggacatatgcatgctattccctatrttatcatctttgttgggttcctgtaaaagcagaaccaaagactctgttttaggtgcaggtggttcatttgggagtaatcttgggaagtacattgaggagt

SEQ ID NO: 264949 - DNA, 201 bp, Homo sapiens
ttgggaagtacattgaggagttgggaaagtcagatggaaaataaagcaaagctgacaaagagtgggtagttgagtttatagtgcaggggacaattagggcrcagtctcattgggcatctgaggagctatggagaatgtctcatagaattgtgcttccagagaatgggaagctagagcatctgtctactaatctcttcatgc

SEQ ID NO: 264950 - DNA, 201 bp, Homo sapiens
gaacgttgtagaaaatagttacactagtgccagcaagtccagataaagtgttaatagaggacttctcatgaccttcattgtacttcttagataaaacagartacttgaaatcactagttacggagaacaagcgtttataaactcactccataaaacaaaggaaagaagtccagataatgtttaatagaggacagtcttcga

SEQ ID NO: 264951 - DNA, 201 bp, Homo sapiens
agtttcttcctcttagatatctgcatgactcatatacctaggcacatattaagaccatctatgggccgggcgcggtggctcacgcctgtaatcccagcacyttgggaggccgaggcgggtggatcatgaggtcaggagatcgagaccatcctggctaacaaggtgaaaccccgtctctactaaaaatacaaaaaattagcc

SEQ ID NO: 264952 - DNA, 201 bp, Homo sapiens
tctactaaaaatacaaaaaattagccgggcgcggtggcgggcgcctgtagtcccagctactcgggaggctgaggcaggagaatggcgtgaacccgggaagyggagcttgcagtgagccgagattgcgccactgcagtccgcagtccggcctgggcgacagagcgagactccgtctcaaaaaaaaaaaaaaaaaaagaccat

SEQ ID NO: 264953 - DNA, 201 bp, Homo sapiens
ctaattttttttttttttttttttttgaggtggagtctcactctgttgcccaggctggagtgcggtggcgcgatcttggctcattgcaagctccacctccygggttcacgccattctcctgcctcagcctcccgagtagctgggactacaggcgcccgccagcacgcgtggctaattttttgtatttttaatagagacggg

SEQ ID NO: 264954 - DNA, 201 bp, Homo sapiens
ggcgcccgccagcacgcgtggctaattttttgtatttttaatagagacggggtttcactgtgttagccaggatggtcttgatcttctgacctcgtgatccrcccgcctcggtctcccaaagtgctgggattacaggcgtgagcctggccaaagggacctaattttataaataccagtttcttgccattcttccacctcctt

SEQ ID NO: 264955 - DNA, 201 bp, Homo sapiens
cgtcttgcttgtcggtcttgctctgagctgtggatactcagttatgttttatcccggtttcagatcagaaacagtgctcatccttgctagaaactgccctytgaagcaaagttcaagttctcagggagagagccaatcaccctggctcctcctaccttcgattaagcagagaacaagccttagtatatgcaaatgtgagct

SEQ ID NO: 264956 - DNA, 201 bp, Homo sapiens
tagccaggcgtggtggcttgcacctgtagtcccagctactcaggaggctgaggcgtgagaatcacttgaacccgggagttggaggttgcagtgaactgagmtcgtgccactgcactgcagcctgggtgacagccagactgtgtctcggaaaaaaaaaaaaaaaatagtgatgctgtttctctaatgtgacaatgaaataga

SEQ ID NO: 264957 - DNA, 201 bp, Homo sapiens
tacattacgtagtcaatttattgaatagcgtaatcctgctaagtagtagtgaccaagggtagaagatatttaattacagaaatctacatttaagggagatrataaaggtcacgttggtggttttggccttgtctctgaatgtggcaggtgtaaagtgcccacagtgccctcacacagaatgtctgagatagccctgtatac

SEQ ID NO: 264958 - DNA, 201 bp, Homo sapiens
acccttggtttaatagaagatacagggaaacattttattcataaatgaaactattccctatatgctttcatgagcttctgttggtttcattttgtcggggkgtgtgtgtgtgtgtgtgtgtgtatgtatgtatgtgagtgtgtgtgtgtgtgtatgtatgtgaatgtgtgtgtgtgttcctattggaaatgagtttttgaa

SEQ ID NO: 264959 - DNA, 201 bp, Homo sapiens
gggaggccaaggcgggtggatcacgaggtcaggagatcgagaccatcctggctaacatggtgaaaccccgtctccactaaaaatacaaaaattagccgggygtggtggtgagcacctgtagtcccagctactcgggaggctgaggcaggagaatggcgtgaacccaggaggcagagcttgcagtgagctgagatcgtgcct

SEQ ID NO: 264960 - DNA, 201 bp, Homo sapiens
ggccattttcacaatattgattgttcctatccatgagggtagaatatttttccatttgtttgtgtcctatcttatttctctgagcagtgatttgtagttcyccttgaagaggtccttcacatcccttgttggctgtattcctaggtattttattctctttgtagccattgtgaatgggagttcattcatgatttgtctctc

SEQ ID NO: 264961 - DNA, 201 bp, Homo sapiens
gggtagaatatttttccatttgtttgtgtcctatcttatttctctgagcagtgatttgtagttctccttgaagaggtccttcacatcccttgttggctgtrttcctaggtattttattctctttgtagccattgtgaatgggagttcattcatgatttgtctctctgcttgcctgttgtcagtataaaggaattcttgtga

SEQ ID NO: 264962 - DNA, 201 bp, Homo sapiens
ccacccgccttggcctcccgaagtgctgggattacaggcatgagccactgcgcccggcctaaaaagtctgggctttgttagtggagggtttgtgcctgtcrcatcctgtatcctgcagtgcctggcacagagtaggtgctcattaagtgtttgttgaatgaatgacaaatccctccttcatccacacacctccctccctac

SEQ ID NO: 264963 - DNA, 201 bp, Homo sapiens
gttgttggcttgtcaaacacaataccagggatggccaactcaaatgccaacagcaacacaacccttaaatgagtgaggcagagttgaagcctgcttcatgracctgtcaatattttgataaggatgcaaagataaatttcattttcttctgcttttcctattaaaacaaacagaacaacaaaaacacatcaacacaaaagc

SEQ ID NO: 264964 - DNA, 201 bp, Homo sapiens
attgtatgtagctaagacaatgcatcagttgtttttgactttgtaaagaattcacataaaaatgaaagttgctcaagagaagagaattatggatgaatacrccctaaagtaaattgctcttctccaaaccaaggtccatgcattatattttatagaattcacagactgttgttaccatgacaggtcactcttagtccttga

SEQ ID NO: 264965 - DNA, 201 bp, Homo sapiens
ttattggatgtggtcatcctgaagcaggacgccttaggtatattgtagcataaaatatgttgattaaaaatatccagggttacaatagctcctacacagaraatcaaattttagggctaaaagatttttaaattcactaataatgtgattttagtacttcataagcatatttgtttttcatttaatcctcaaaagaaccat

SEQ ID NO: 264966 - DNA, 201 bp, Homo sapiens
ttttagtacttcataagcatatttgtttttcatttaatcctcaaaagaaccataggatatagggttgttaaccccatttctttttttttaaacatctgagktataacgggggcacagaaaggttaagtaacttctccaaggtcaccagcaaagcccgtattctggatttgctttgaaatctagccgttgtgcttattcaca

SEQ ID NO: 264967 - DNA, 201 bp, Homo sapiens
acctggaaatcccctacttatttttctctatcattcctatattttcccttatctctgaaatattttgaactactccagcttttagccactcttcttcattstctctttttttttttttagacgaagtctcagcctgtcgcccaggctgcagtgcagtggcgtgatcttggctcactgcaacctccacctcccaagttcaag

SEQ ID NO: 264968 - DNA, 201 bp, Homo sapiens
ctgctcactactgtaaatacctccatcctataatactgacaacctcatggctaatgaaaatacactgttgttgtctaaaagagtaattcctaaactgtgtytttaacctgtagcaataaaaaacaaatctctacctggaaatcccctacttatttttctctatcattcctatattttcccttatctctgaaatattttgaa

SEQ ID NO: 264969 - DNA, 201 bp, Homo sapiens
tagtagagttcagtgtgcctttcttccatgggccaggaagaatgggaacttggactcataacagttgagttcctttcttcctcatcataccaaacagttgkgtgtgtgtgtgtgtgtgtgtgtgtgtgtgtgtgtgtgtgtttgtagggggtgccaggggctttctgtcccctggggatagggagatcttaaacccagccc

SEQ ID NO: 264970 - DNA, 201 bp, Homo sapiens
tgaggcgtgagaatcacttgaacccgggagttggaggttgcagtgaactgagatcgtgccactgcactgcagcctgggtgacagccagactgtgtctcggaaaaaaaaaaaaaaaatagtgatgctgtttctctaatgtgacaatgaaatagaatatttgtgaaatttttaaaatcaatacaaagataaccaggcaactat

SEQ ID NO: 264971 - DNA, 201 bp, Homo sapiens
aatcagcagccccgccactgttgagatgacgccagaccatgtaccaggtggactgggacccaagatagccactggaacaagatgcacaggcatcgtcctcmgcacagttctggcatgcctttcgtatcaagttctccctttttaaactctttccttccccaccaaaatttgaagtagttgctttggatgggaatccaacca

SEQ ID NO: 264972 - DNA, 201 bp, Homo sapiens
tcccaattttcctttgagaaatgtttttctccagaaatatacaaatgttattttgcaattgtattcctatacattcattctcgttaattaaaaaaaaaatstttacatggagaaacactcaatataaatacattttacagctctagccaaagccacagtcttaaggtattgttcattgtgttaatatgtcccctggtttct

SEQ ID NO: 264973 - DNA, 201 bp, Homo sapiens
taataaagaggaagtgtcagtcagctgttgcccaggctggttttgaactcctgagctcaagcagtctttccacctcagcctcccaaagtgctgggattatmggcatgagccaccacacctggctggtctcaattctaatagaagagtggcatgggtagaaaccataaataataagcaatctaaaatatatttgttttgacc

SEQ ID NO: 264974 - DNA, 201 bp, Homo sapiens
tcttctgcacccccatccatatcaccatggtggaggctttctgttgtgtaaagaatgccatcctcctggaggcagcttcatgactcctactttgaaaaccygctctagctgaaaggctcaaagttatgtcttaaactaaatggtctggattgtctctgtgttttgaaggtgctttttttaatttacaagaacttgtttagt

SEQ ID NO: 264975 - DNA, 201 bp, Homo sapiens
ccgtctctactaaaaatacaaacattagccaggtgtggtggcacatgcttgtaatcccagctactcgggaggctgaggcaggagaatcacttgaacccggygggcggaggttgcagtgagtcaagatggcaccactgcactccagcttgggaaacagagcaagactccatcttaaaaaaataaaaaaagaaagaacaccaa

SEQ ID NO: 264976 - DNA, 201 bp, Homo sapiens
tagtgaaaccccgtctctactaaaaatataaaaaattagctgggtgtggtggcaggtgcctgtaatcccaactatttgggaggccgaggcaggagaatcgsttgaacccgggaggcagaggttgcagtgagccgagatcatgccattgcactccagcatgggcaacaagagcaaaactctgccaaaaaaaaaaaaaaaaaa

SEQ ID NO: 264977 - DNA, 201 bp, Homo sapiens
ctcaaaagaaccataggatatagggttgttaaccccatttctttttttttaaacatctgaggtataacgggggcacagaaaggttaagtaacttctccaargtcaccagcaaagcccgtattctggatttgctttgaaatctagccgttgtgcttattcacactcacactatccttactcttccttttctttatccttata

SEQ ID NO: 264978 - DNA, 201 bp, Homo sapiens
agattaaaaggaacataaatgtttaatattacaggtgagaaaactggagtctaagaatgtttaattaaataaagatatgtctcccagcactttgggaggcyggggccgatggatcatgaggtcaagagatcgagaccatgctggccaacatggtgaaaccccgtctctactaaaaatagaaaaattagctggccatggtgg

SEQ ID NO: 264979 - DNA, 201 bp, Homo sapiens
cgtattctggatttgctttgaaatctagccgttgtgcttattcacactcacactatccttactcttccttttctttatccttatagttttgatcctcatarttttttgttttttaaacataatttctttttagagatggggtggtgctatgttgcccaggctggtcttgaactcctagcctgaagcaatcctcccacctca

SEQ ID NO: 264980 - DNA, 201 bp, Homo sapiens
aggctggaatgcagtggtgtgatctcagctcactgcaacctccgcctcctggattcaactgattctcctgcctcagcctcccaaataactgggcttacagkcacctaccaccatgcctggctaattttttgtatttttagtagagatggggtttcaccacgtcggccaggctggtctcgaactccttacctcaagttatcc

SEQ ID NO: 264981 - DNA, 201 bp, Homo sapiens
ggtggtgctatgttgcccaggctggtcttgaactcctagcctgaagcaatcctcccacctcagcctcccgaagtgctgggattatacgcatgagccactaygcccagccaaacttcatagattttttgaccccataaacaaatctgttgtaataaccaatggattttttcttttttctttttgagacagtcttactctgtc

SEQ ID NO: 264982 - DNA, 201 bp, Homo sapiens
gcctcagcctcccaaataactgggcttacaggcacctaccaccatgcctggctaattttttgtatttttagtagagatggggtttcaccacgtcggccagrctggtctcgaactccttacctcaagttatccacccacctcggcctcccaaagtgctgggattaaggcatgagccaccgcacccggcctacattttttttt

SEQ ID NO: 264983 - DNA, 201 bp, Homo sapiens
ccatgactccaaggtttcgatgctggtaatagaatcaacagaaaatagaagaggaaggaaaatttgaggagcaagagttgattggggttatttgctggaayggtcagggttgaaggtaaatcatttacatttttcaaggctctatggtccaactgaaatgccttctttttgttgttgtttagtctgaagttataactctgt

SEQ ID NO: 264984 - DNA, 201 bp, Homo sapiens
ttagtagagatggggtttcaccacgtcggccaggctggtctcgaactccttacctcaagttatccacccacctcggcctcccaaagtgctgggattaaggyatgagccaccgcacccggcctacatttttttttttaaaggtttagcctggtgattttatagctcatctaggttgtaaggaatagcaatgaatcctaaaag

SEQ ID NO: 264985 - DNA, 201 bp, Homo sapiens
cagtcagcagagattgccccactacactctagcctgggtgatagagccagagcttgtctcaaaaaaacaaaataaaataaaattgtaattgatcatacaartattaatattctagcactaaataattcttactcaaagaaaactatcaggttgaggataataagcattaactggggacatcgaataaaaagtgagttacat
